United States Patent Application Publication US 2004/0241651 A1 - sequence listing, part 5

SEQ ID NO: 117756 - DNA, 13 bp, Artificial Sequence
  Oligonucleotide for detection of SNP TSC0029443
ccaaatcaaacaa

SEQ ID NO: 117757 - DNA, 13 bp, Artificial Sequence
  Oligonucleotide for detection of SNP TSC0029443
ttgttttatttgg

SEQ ID NO: 117758 - DNA, 13 bp, Artificial Sequence
  Oligonucleotide for detection of SNP TSC0029443
ccaaataaaacaa

SEQ ID NO: 117759 - DNA, 13 bp, Artificial Sequence
  Oligonucleotide for detection of SNP TSC0029443
ttgttcgatttgg

SEQ ID NO: 117760 - DNA, 13 bp, Artificial Sequence
  Oligonucleotide for detection of SNP TSC0029443
ccaaatcgaacaa

SEQ ID NO: 117761 - DNA, 13 bp, Artificial Sequence
  Oligonucleotide for detection of SNP TSC0029444
tatgaatgtaaag

SEQ ID NO: 117762 - DNA, 13 bp, Artificial Sequence
  Oligonucleotide for detection of SNP TSC0029444
ctttacattcata

SEQ ID NO: 117763 - DNA, 13 bp, Artificial Sequence
  Oligonucleotide for detection of SNP TSC0029444
tatgaacgtaaag

SEQ ID NO: 117764 - DNA, 13 bp, Artificial Sequence
  Oligonucleotide for detection of SNP TSC0029444
ctttacgttcata

SEQ ID NO: 117765 - DNA, 13 bp, Artificial Sequence
  Oligonucleotide for detection of SNP TSC0029445
tgaaatgtatagt

SEQ ID NO: 117766 - DNA, 13 bp, Artificial Sequence
  Oligonucleotide for detection of SNP TSC0029445
actatacatttca

SEQ ID NO: 117767 - DNA, 13 bp, Artificial Sequence
  Oligonucleotide for detection of SNP TSC0029445
tgaaatatatagt

SEQ ID NO: 117768 - DNA, 13 bp, Artificial Sequence
  Oligonucleotide for detection of SNP TSC0029445
actatatatttca

SEQ ID NO: 117769 - DNA, 13 bp, Artificial Sequence
  Oligonucleotide for detection of SNP TSC0029446
taatgagaaataa

SEQ ID NO: 117770 - DNA, 13 bp, Artificial Sequence
  Oligonucleotide for detection of SNP TSC0029446
ttatttctcatta

SEQ ID NO: 117771 - DNA, 13 bp, Artificial Sequence
  Oligonucleotide for detection of SNP TSC0029446
taatgaaaaataa

SEQ ID NO: 117772 - DNA, 13 bp, Artificial Sequence
  Oligonucleotide for detection of SNP TSC0029446
ttatttttcatta

SEQ ID NO: 117773 - DNA, 13 bp, Artificial Sequence
  Oligonucleotide for detection of SNP TSC0029447
atattttggtaty

SEQ ID NO: 117774 - DNA, 13 bp, Artificial Sequence
  Oligonucleotide for detection of SNP TSC0029447
rataccaaaatat

SEQ ID NO: 117775 - DNA, 13 bp, Artificial Sequence
  Oligonucleotide for detection of SNP TSC0029447
atatttcggtaty

SEQ ID NO: 117776 - DNA, 13 bp, Artificial Sequence
  Oligonucleotide for detection of SNP TSC0029447
rataccgaaatat

SEQ ID NO: 117777 - DNA, 13 bp, Artificial Sequence
  Oligonucleotide for detection of SNP TSC0029447
ggtgttgaaatgt

SEQ ID NO: 117778 - DNA, 13 bp, Artificial Sequence
  Oligonucleotide for detection of SNP TSC0029447
acatttcaacacc

SEQ ID NO: 117779 - DNA, 13 bp, Artificial Sequence
  Oligonucleotide for detection of SNP TSC0029447
ggtgttaaaatgt

SEQ ID NO: 117780 - DNA, 13 bp, Artificial Sequence
  Oligonucleotide for detection of SNP TSC0029447
acattttaacacc

SEQ ID NO: 117781 - DNA, 13 bp, Artificial Sequence
  Oligonucleotide for detection of SNP TSC0029447
ggtgtcgaaatgt

SEQ ID NO: 117782 - DNA, 13 bp, Artificial Sequence
  Oligonucleotide for detection of SNP TSC0029447
acatttcgacacc

SEQ ID NO: 117783 - DNA, 13 bp, Artificial Sequence
  Oligonucleotide for detection of SNP TSC0029448
tttttattaagag

SEQ ID NO: 117784 - DNA, 13 bp, Artificial Sequence
  Oligonucleotide for detection of SNP TSC0029448
ctcttaataaaaa

SEQ ID NO: 117785 - DNA, 13 bp, Artificial Sequence
  Oligonucleotide for detection of SNP TSC0029448
tttttagtaagag

SEQ ID NO: 117786 - DNA, 13 bp, Artificial Sequence
  Oligonucleotide for detection of SNP TSC0029448
ctcttactaaaaa

SEQ ID NO: 117787 - DNA, 13 bp, Artificial Sequence
  Oligonucleotide for detection of SNP TSC0029449
ggagtttgagggy

SEQ ID NO: 117788 - DNA, 13 bp, Artificial Sequence
  Oligonucleotide for detection of SNP TSC0029449
rccctcaaactcc

SEQ ID NO: 117789 - DNA, 13 bp, Artificial Sequence
  Oligonucleotide for detection of SNP TSC0029449
ggagttcgagggy

SEQ ID NO: 117790 - DNA, 13 bp, Artificial Sequence
  Oligonucleotide for detection of SNP TSC0029449
rccctcgaactcc

SEQ ID NO: 117791 - DNA, 13 bp, Artificial Sequence
  Oligonucleotide for detection of SNP TSC0029449
gtttttaggttty

SEQ ID NO: 117792 - DNA, 13 bp, Artificial Sequence
  Oligonucleotide for detection of SNP TSC0029449
raaacctaaaaac

SEQ ID NO: 117793 - DNA, 13 bp, Artificial Sequence
  Oligonucleotide for detection of SNP TSC0029449
gttttcgggttty

SEQ ID NO: 117794 - DNA, 13 bp, Artificial Sequence
  Oligonucleotide for detection of SNP TSC0029449
raaacccgaaaac

SEQ ID NO: 117795 - DNA, 13 bp, Artificial Sequence
  Oligonucleotide for detection of SNP TSC0029450
gattttaagatag

SEQ ID NO: 117796 - DNA, 13 bp, Artificial Sequence
  Oligonucleotide for detection of SNP TSC0029450
ctatcttaaaatc

SEQ ID NO: 117797 - DNA, 13 bp, Artificial Sequence
  Oligonucleotide for detection of SNP TSC0029450
gattttgagatag

SEQ ID NO: 117798 - DNA, 13 bp, Artificial Sequence
  Oligonucleotide for detection of SNP TSC0029450
ctatctcaaaatc

SEQ ID NO: 117799 - DNA, 13 bp, Artificial Sequence
  Oligonucleotide for detection of SNP TSC0029450
gatttcgagatag

SEQ ID NO: 117800 - DNA, 13 bp, Artificial Sequence
  Oligonucleotide for detection of SNP TSC0029450
ctatctcgaaatc

SEQ ID NO: 117801 - DNA, 13 bp, Artificial Sequence
  Oligonucleotide for detection of SNP TSC0029450
ttgttttggagty

SEQ ID NO: 117802 - DNA, 13 bp, Artificial Sequence
  Oligonucleotide for detection of SNP TSC0029450
ractccaaaacaa

SEQ ID NO: 117803 - DNA, 13 bp, Artificial Sequence
  Oligonucleotide for detection of SNP TSC0029450
ttgtttcggagty

SEQ ID NO: 117804 - DNA, 13 bp, Artificial Sequence
  Oligonucleotide for detection of SNP TSC0029450
ractccgaaacaa

SEQ ID NO: 117805 - DNA, 13 bp, Artificial Sequence
  Oligonucleotide for detection of SNP TSC0029451
ttaaatatgttgg

SEQ ID NO: 117806 - DNA, 13 bp, Artificial Sequence
  Oligonucleotide for detection of SNP TSC0029451
ccaacatatttaa

SEQ ID NO: 117807 - DNA, 13 bp, Artificial Sequence
  Oligonucleotide for detection of SNP TSC0029451
ttaaatgtgttgg

SEQ ID NO: 117808 - DNA, 13 bp, Artificial Sequence
  Oligonucleotide for detection of SNP TSC0029451
ccaacacatttaa

SEQ ID NO: 117809 - DNA, 13 bp, Artificial Sequence
  Oligonucleotide for detection of SNP TSC0029451
ttaaacgtgttgg

SEQ ID NO: 117810 - DNA, 13 bp, Artificial Sequence
  Oligonucleotide for detection of SNP TSC0029451
ccaacacgtttaa

SEQ ID NO: 117811 - DNA, 13 bp, Artificial Sequence
  Oligonucleotide for detection of SNP TSC0029451
ttagtatgtttga

SEQ ID NO: 117812 - DNA, 13 bp, Artificial Sequence
  Oligonucleotide for detection of SNP TSC0029451
tcaaacatactaa

SEQ ID NO: 117813 - DNA, 13 bp, Artificial Sequence
  Oligonucleotide for detection of SNP TSC0029451
ttagtacgtttga

SEQ ID NO: 117814 - DNA, 13 bp, Artificial Sequence
  Oligonucleotide for detection of SNP TSC0029451
tcaaacgtactaa

SEQ ID NO: 117815 - DNA, 13 bp, Artificial Sequence
  Oligonucleotide for detection of SNP TSC0029452
ataagtataagty

SEQ ID NO: 117816 - DNA, 13 bp, Artificial Sequence
  Oligonucleotide for detection of SNP TSC0029452
racttatacttat

SEQ ID NO: 117817 - DNA, 13 bp, Artificial Sequence
  Oligonucleotide for detection of SNP TSC0029452
ataagtgtaagty

SEQ ID NO: 117818 - DNA, 13 bp, Artificial Sequence
  Oligonucleotide for detection of SNP TSC0029452
racttacacttat

SEQ ID NO: 117819 - DNA, 13 bp, Artificial Sequence
  Oligonucleotide for detection of SNP TSC0029452
ataagcgtaagty

SEQ ID NO: 117820 - DNA, 13 bp, Artificial Sequence
  Oligonucleotide for detection of SNP TSC0029452
racttacgcttat

SEQ ID NO: 117821 - DNA, 13 bp, Artificial Sequence
  Oligonucleotide for detection of SNP TSC0029452
ggtttgtgtttgt

SEQ ID NO: 117822 - DNA, 13 bp, Artificial Sequence
  Oligonucleotide for detection of SNP TSC0029452
acaaacacaaacc

SEQ ID NO: 117823 - DNA, 13 bp, Artificial Sequence
  Oligonucleotide for detection of SNP TSC0029452
ggtttgcgtttgt

SEQ ID NO: 117824 - DNA, 13 bp, Artificial Sequence
  Oligonucleotide for detection of SNP TSC0029452
acaaacgcaaacc

SEQ ID NO: 117825 - DNA, 13 bp, Artificial Sequence
  Oligonucleotide for detection of SNP TSC0029453
gaatttagttgty

SEQ ID NO: 117826 - DNA, 13 bp, Artificial Sequence
  Oligonucleotide for detection of SNP TSC0029453
racaactaaattc

SEQ ID NO: 117827 - DNA, 13 bp, Artificial Sequence
  Oligonucleotide for detection of SNP TSC0029453
gaattttgttgty

SEQ ID NO: 117828 - DNA, 13 bp, Artificial Sequence
  Oligonucleotide for detection of SNP TSC0029453
racaacaaaattc

SEQ ID NO: 117829 - DNA, 13 bp, Artificial Sequence
  Oligonucleotide for detection of SNP TSC0029453
gaatttcgttgty

SEQ ID NO: 117830 - DNA, 13 bp, Artificial Sequence
  Oligonucleotide for detection of SNP TSC0029453
racaacgaaattc

SEQ ID NO: 117831 - DNA, 13 bp, Artificial Sequence
  Oligonucleotide for detection of SNP TSC0029453
ggtaattgagtty

SEQ ID NO: 117832 - DNA, 13 bp, Artificial Sequence
  Oligonucleotide for detection of SNP TSC0029453
raactcaattacc

SEQ ID NO: 117833 - DNA, 13 bp, Artificial Sequence
  Oligonucleotide for detection of SNP TSC0029453
ggtaatggagtty

SEQ ID NO: 117834 - DNA, 13 bp, Artificial Sequence
  Oligonucleotide for detection of SNP TSC0029453
raactccattacc

SEQ ID NO: 117835 - DNA, 13 bp, Artificial Sequence
  Oligonucleotide for detection of SNP TSC0029453
ggtaacggagtty

SEQ ID NO: 117836 - DNA, 13 bp, Artificial Sequence
  Oligonucleotide for detection of SNP TSC0029453
raactccgttacc

SEQ ID NO: 117837 - DNA, 13 bp, Artificial Sequence
  Oligonucleotide for detection of SNP TSC0029454
tttttttagtaaa

SEQ ID NO: 117838 - DNA, 13 bp, Artificial Sequence
  Oligonucleotide for detection of SNP TSC0029454
tttactaaaaaaa

SEQ ID NO: 117839 - DNA, 13 bp, Artificial Sequence
  Oligonucleotide for detection of SNP TSC0029454
ttttttgagtaaa

SEQ ID NO: 117840 - DNA, 13 bp, Artificial Sequence
  Oligonucleotide for detection of SNP TSC0029454
tttactcaaaaaa

SEQ ID NO: 117841 - DNA, 13 bp, Artificial Sequence
  Oligonucleotide for detection of SNP TSC0029454
tttttcgagtaaa

SEQ ID NO: 117842 - DNA, 13 bp, Artificial Sequence
  Oligonucleotide for detection of SNP TSC0029454
tttactcgaaaaa

SEQ ID NO: 117843 - DNA, 13 bp, Artificial Sequence
  Oligonucleotide for detection of SNP TSC0029454
tttattgggggag

SEQ ID NO: 117844 - DNA, 13 bp, Artificial Sequence
  Oligonucleotide for detection of SNP TSC0029454
ctcccccaataaa

SEQ ID NO: 117845 - DNA, 13 bp, Artificial Sequence
  Oligonucleotide for detection of SNP TSC0029454
tttatttggggag

SEQ ID NO: 117846 - DNA, 13 bp, Artificial Sequence
  Oligonucleotide for detection of SNP TSC0029454
ctccccaaataaa

SEQ ID NO: 117847 - DNA, 13 bp, Artificial Sequence
  Oligonucleotide for detection of SNP TSC0029454
tttattcggggag

SEQ ID NO: 117848 - DNA, 13 bp, Artificial Sequence
  Oligonucleotide for detection of SNP TSC0029454
ctccccgaataaa

SEQ ID NO: 117849 - DNA, 13 bp, Artificial Sequence
  Oligonucleotide for detection of SNP TSC0029455
attaggagtatty

SEQ ID NO: 117850 - DNA, 13 bp, Artificial Sequence
  Oligonucleotide for detection of SNP TSC0029455
raatactcctaat

SEQ ID NO: 117851 - DNA, 13 bp, Artificial Sequence
  Oligonucleotide for detection of SNP TSC0029455
attaggggtatty

SEQ ID NO: 117852 - DNA, 13 bp, Artificial Sequence
  Oligonucleotide for detection of SNP TSC0029455
raatacccctaat

SEQ ID NO: 117853 - DNA, 13 bp, Artificial Sequence
  Oligonucleotide for detection of SNP TSC0029459
ggtgtggggggtg

SEQ ID NO: 117854 - DNA, 13 bp, Artificial Sequence
  Oligonucleotide for detection of SNP TSC0029459
caccccccacacc

SEQ ID NO: 117855 - DNA, 13 bp, Artificial Sequence
  Oligonucleotide for detection of SNP TSC0029459
ggtgtgtggggtg

SEQ ID NO: 117856 - DNA, 13 bp, Artificial Sequence
  Oligonucleotide for detection of SNP TSC0029459
caccccacacacc

SEQ ID NO: 117857 - DNA, 13 bp, Artificial Sequence
  Oligonucleotide for detection of SNP TSC0029459
ggtgcggggggtg

SEQ ID NO: 117858 - DNA, 13 bp, Artificial Sequence
  Oligonucleotide for detection of SNP TSC0029459
caccccccgcacc

SEQ ID NO: 117859 - DNA, 13 bp, Artificial Sequence
  Oligonucleotide for detection of SNP TSC0029459
ggtgcgtggggtg

SEQ ID NO: 117860 - DNA, 13 bp, Artificial Sequence
  Oligonucleotide for detection of SNP TSC0029459
caccccacgcacc

SEQ ID NO: 117861 - DNA, 13 bp, Artificial Sequence
  Oligonucleotide for detection of SNP TSC0029459
tattttttgtaty

SEQ ID NO: 117862 - DNA, 13 bp, Artificial Sequence
  Oligonucleotide for detection of SNP TSC0029459
ratacaaaaaata

SEQ ID NO: 117863 - DNA, 13 bp, Artificial Sequence
  Oligonucleotide for detection of SNP TSC0029459
tatttttcgtaty

SEQ ID NO: 117864 - DNA, 13 bp, Artificial Sequence
  Oligonucleotide for detection of SNP TSC0029459
ratacgaaaaata

SEQ ID NO: 117865 - DNA, 13 bp, Artificial Sequence
  Oligonucleotide for detection of SNP TSC0029459
tattttacgtaty

SEQ ID NO: 117866 - DNA, 13 bp, Artificial Sequence
  Oligonucleotide for detection of SNP TSC0029459
ratacgtaaaata

SEQ ID NO: 117867 - DNA, 13 bp, Artificial Sequence
  Oligonucleotide for detection of SNP TSC0029460
taagggtaaaaaa

SEQ ID NO: 117868 - DNA, 13 bp, Artificial Sequence
  Oligonucleotide for detection of SNP TSC0029460
ttttttaccctta

SEQ ID NO: 117869 - DNA, 13 bp, Artificial Sequence
  Oligonucleotide for detection of SNP TSC0029460
taagggaaaaaaa

SEQ ID NO: 117870 - DNA, 13 bp, Artificial Sequence
  Oligonucleotide for detection of SNP TSC0029460
tttttttccctta

SEQ ID NO: 117871 - DNA, 13 bp, Artificial Sequence
  Oligonucleotide for detection of SNP TSC0029461
taaggggaagtgy

SEQ ID NO: 117872 - DNA, 13 bp, Artificial Sequence
  Oligonucleotide for detection of SNP TSC0029461
rcacttcccctta

SEQ ID NO: 117873 - DNA, 13 bp, Artificial Sequence
  Oligonucleotide for detection of SNP TSC0029461
taagggaaagtgy

SEQ ID NO: 117874 - DNA, 13 bp, Artificial Sequence
  Oligonucleotide for detection of SNP TSC0029461
rcactttccctta

SEQ ID NO: 117875 - DNA, 13 bp, Artificial Sequence
  Oligonucleotide for detection of SNP TSC0029462
gtagttgtatata

SEQ ID NO: 117876 - DNA, 13 bp, Artificial Sequence
  Oligonucleotide for detection of SNP TSC0029462
tatatacaactac

SEQ ID NO: 117877 - DNA, 13 bp, Artificial Sequence
  Oligonucleotide for detection of SNP TSC0029462
gtagttatatata

SEQ ID NO: 117878 - DNA, 13 bp, Artificial Sequence
  Oligonucleotide for detection of SNP TSC0029462
tatatataactac

SEQ ID NO: 117879 - DNA, 13 bp, Artificial Sequence
  Oligonucleotide for detection of SNP TSC0029463
gtttaggttgtty

SEQ ID NO: 117880 - DNA, 13 bp, Artificial Sequence
  Oligonucleotide for detection of SNP TSC0029463
raacaacctaaac

SEQ ID NO: 117881 - DNA, 13 bp, Artificial Sequence
  Oligonucleotide for detection of SNP TSC0029463
gtttagattgtty

SEQ ID NO: 117882 - DNA, 13 bp, Artificial Sequence
  Oligonucleotide for detection of SNP TSC0029463
raacaatctaaac

SEQ ID NO: 117883 - DNA, 13 bp, Artificial Sequence
  Oligonucleotide for detection of SNP TSC0029466
gttgttgttatty

SEQ ID NO: 117884 - DNA, 13 bp, Artificial Sequence
  Oligonucleotide for detection of SNP TSC0029466
raataacaacaac

SEQ ID NO: 117885 - DNA, 13 bp, Artificial Sequence
  Oligonucleotide for detection of SNP TSC0029466
gttgttattatty

SEQ ID NO: 117886 - DNA, 13 bp, Artificial Sequence
  Oligonucleotide for detection of SNP TSC0029466
raataataacaac

SEQ ID NO: 117887 - DNA, 13 bp, Artificial Sequence
  Oligonucleotide for detection of SNP TSC0029471
tatatattataaa

SEQ ID NO: 117888 - DNA, 13 bp, Artificial Sequence
  Oligonucleotide for detection of SNP TSC0029471
tttataatatata

SEQ ID NO: 117889 - DNA, 13 bp, Artificial Sequence
  Oligonucleotide for detection of SNP TSC0029471
tttatgttatatg

SEQ ID NO: 117890 - DNA, 13 bp, Artificial Sequence
  Oligonucleotide for detection of SNP TSC0029471
catataacataaa

SEQ ID NO: 117891 - DNA, 13 bp, Artificial Sequence
  Oligonucleotide for detection of SNP TSC0029471
tttatgatatatg

SEQ ID NO: 117892 - DNA, 13 bp, Artificial Sequence
  Oligonucleotide for detection of SNP TSC0029471
catatatcataaa

SEQ ID NO: 117893 - DNA, 13 bp, Artificial Sequence
  Oligonucleotide for detection of SNP TSC0029472
tgttttaaaaata

SEQ ID NO: 117894 - DNA, 13 bp, Artificial Sequence
  Oligonucleotide for detection of SNP TSC0029472
tatttttaaaaca

SEQ ID NO: 117895 - DNA, 13 bp, Artificial Sequence
  Oligonucleotide for detection of SNP TSC0029472
tgttttgaaaata

SEQ ID NO: 117896 - DNA, 13 bp, Artificial Sequence
  Oligonucleotide for detection of SNP TSC0029472
tattttcaaaaca

SEQ ID NO: 117897 - DNA, 13 bp, Artificial Sequence
  Oligonucleotide for detection of SNP TSC0029474
atgtatgtatggg

SEQ ID NO: 117898 - DNA, 13 bp, Artificial Sequence
  Oligonucleotide for detection of SNP TSC0029474
cccatacatacat

SEQ ID NO: 117899 - DNA, 13 bp, Artificial Sequence
  Oligonucleotide for detection of SNP TSC0029474
atgtatatatggg

SEQ ID NO: 117900 - DNA, 13 bp, Artificial Sequence
  Oligonucleotide for detection of SNP TSC0029474
cccatatatacat

SEQ ID NO: 117901 - DNA, 13 bp, Artificial Sequence
  Oligonucleotide for detection of SNP TSC0029474
acgtatgtatggg

SEQ ID NO: 117902 - DNA, 13 bp, Artificial Sequence
  Oligonucleotide for detection of SNP TSC0029474
cccatacatacgt

SEQ ID NO: 117903 - DNA, 13 bp, Artificial Sequence
  Oligonucleotide for detection of SNP TSC0029474
acgtatatatggg

SEQ ID NO: 117904 - DNA, 13 bp, Artificial Sequence
  Oligonucleotide for detection of SNP TSC0029474
cccatatatacgt

SEQ ID NO: 117905 - DNA, 13 bp, Artificial Sequence
  Oligonucleotide for detection of SNP TSC0029476
aataattgtttga

SEQ ID NO: 117906 - DNA, 13 bp, Artificial Sequence
  Oligonucleotide for detection of SNP TSC0029476
tcaaacaattatt

SEQ ID NO: 117907 - DNA, 13 bp, Artificial Sequence
  Oligonucleotide for detection of SNP TSC0029476
aataatcgtttga

SEQ ID NO: 117908 - DNA, 13 bp, Artificial Sequence
  Oligonucleotide for detection of SNP TSC0029476
tcaaacgattatt

SEQ ID NO: 117909 - DNA, 13 bp, Artificial Sequence
  Oligonucleotide for detection of SNP TSC0029476
ttagatggttgtt

SEQ ID NO: 117910 - DNA, 13 bp, Artificial Sequence
  Oligonucleotide for detection of SNP TSC0029476
aacaaccatctaa

SEQ ID NO: 117911 - DNA, 13 bp, Artificial Sequence
  Oligonucleotide for detection of SNP TSC0029476
ttagatagttgtt

SEQ ID NO: 117912 - DNA, 13 bp, Artificial Sequence
  Oligonucleotide for detection of SNP TSC0029476
aacaactatctaa

SEQ ID NO: 117913 - DNA, 13 bp, Artificial Sequence
  Oligonucleotide for detection of SNP TSC0029476
ttagacggttgtt

SEQ ID NO: 117914 - DNA, 13 bp, Artificial Sequence
  Oligonucleotide for detection of SNP TSC0029476
aacaaccgtctaa

SEQ ID NO: 117915 - DNA, 13 bp, Artificial Sequence
  Oligonucleotide for detection of SNP TSC0029477
tttgtaaggtagg

SEQ ID NO: 117916 - DNA, 13 bp, Artificial Sequence
  Oligonucleotide for detection of SNP TSC0029477
cctaccttacaaa

SEQ ID NO: 117917 - DNA, 13 bp, Artificial Sequence
  Oligonucleotide for detection of SNP TSC0029477
tttgtatggtagg

SEQ ID NO: 117918 - DNA, 13 bp, Artificial Sequence
  Oligonucleotide for detection of SNP TSC0029477
cctaccatacaaa

SEQ ID NO: 117919 - DNA, 13 bp, Artificial Sequence
  Oligonucleotide for detection of SNP TSC0029477
tttattttgtaga

SEQ ID NO: 117920 - DNA, 13 bp, Artificial Sequence
  Oligonucleotide for detection of SNP TSC0029477
tctacaaaataaa

SEQ ID NO: 117921 - DNA, 13 bp, Artificial Sequence
  Oligonucleotide for detection of SNP TSC0029477
tttattatgtaga

SEQ ID NO: 117922 - DNA, 13 bp, Artificial Sequence
  Oligonucleotide for detection of SNP TSC0029477
tctacataataaa

SEQ ID NO: 117923 - DNA, 13 bp, Artificial Sequence
  Oligonucleotide for detection of SNP TSC0029478
tttttaatagaty

SEQ ID NO: 117924 - DNA, 13 bp, Artificial Sequence
  Oligonucleotide for detection of SNP TSC0029478
ratctattaaaaa

SEQ ID NO: 117925 - DNA, 13 bp, Artificial Sequence
  Oligonucleotide for detection of SNP TSC0029478
tttttagtagaty

SEQ ID NO: 117926 - DNA, 13 bp, Artificial Sequence
  Oligonucleotide for detection of SNP TSC0029478
ratctactaaaaa

SEQ ID NO: 117927 - DNA, 13 bp, Artificial Sequence
  Oligonucleotide for detection of SNP TSC0029479
gttataggttaga

SEQ ID NO: 117928 - DNA, 13 bp, Artificial Sequence
  Oligonucleotide for detection of SNP TSC0029479
tctaacctataac

SEQ ID NO: 117929 - DNA, 13 bp, Artificial Sequence
  Oligonucleotide for detection of SNP TSC0029479
gttataagttaga

SEQ ID NO: 117930 - DNA, 13 bp, Artificial Sequence
  Oligonucleotide for detection of SNP TSC0029479
tctaacttataac

SEQ ID NO: 117931 - DNA, 13 bp, Artificial Sequence
  Oligonucleotide for detection of SNP TSC0029480
agaaatgtatgtg

SEQ ID NO: 117932 - DNA, 13 bp, Artificial Sequence
  Oligonucleotide for detection of SNP TSC0029480
cacatacatttct

SEQ ID NO: 117933 - DNA, 13 bp, Artificial Sequence
  Oligonucleotide for detection of SNP TSC0029480
agaaatatatgtg

SEQ ID NO: 117934 - DNA, 13 bp, Artificial Sequence
  Oligonucleotide for detection of SNP TSC0029480
cacatatatttct

SEQ ID NO: 117935 - DNA, 13 bp, Artificial Sequence
  Oligonucleotide for detection of SNP TSC0029481
ggaggtagtattt

SEQ ID NO: 117936 - DNA, 13 bp, Artificial Sequence
  Oligonucleotide for detection of SNP TSC0029481
aaatactacctcc

SEQ ID NO: 117937 - DNA, 13 bp, Artificial Sequence
  Oligonucleotide for detection of SNP TSC0029481
ggaggtggtattt

SEQ ID NO: 117938 - DNA, 13 bp, Artificial Sequence
  Oligonucleotide for detection of SNP TSC0029481
aaataccacctcc

SEQ ID NO: 117939 - DNA, 13 bp, Artificial Sequence
  Oligonucleotide for detection of SNP TSC0029481
ggaggcggtattt

SEQ ID NO: 117940 - DNA, 13 bp, Artificial Sequence
  Oligonucleotide for detection of SNP TSC0029481
aaataccgcctcc

SEQ ID NO: 117941 - DNA, 13 bp, Artificial Sequence
  Oligonucleotide for detection of SNP TSC0029481
aggtgttgtttty

SEQ ID NO: 117942 - DNA, 13 bp, Artificial Sequence
  Oligonucleotide for detection of SNP TSC0029481
raaaacaacacct

SEQ ID NO: 117943 - DNA, 13 bp, Artificial Sequence
  Oligonucleotide for detection of SNP TSC0029481
aggtgtcgtttty

SEQ ID NO: 117944 - DNA, 13 bp, Artificial Sequence
  Oligonucleotide for detection of SNP TSC0029481
raaaacgacacct

SEQ ID NO: 117945 - DNA, 13 bp, Artificial Sequence
  Oligonucleotide for detection of SNP TSC0029482
gattagtttggty

SEQ ID NO: 117946 - DNA, 13 bp, Artificial Sequence
  Oligonucleotide for detection of SNP TSC0029482
raccaaactaatc

SEQ ID NO: 117947 - DNA, 13 bp, Artificial Sequence
  Oligonucleotide for detection of SNP TSC0029482
ggttaggttagty

SEQ ID NO: 117948 - DNA, 13 bp, Artificial Sequence
  Oligonucleotide for detection of SNP TSC0029482
ractaacctaacc

SEQ ID NO: 117949 - DNA, 13 bp, Artificial Sequence
  Oligonucleotide for detection of SNP TSC0029482
ggttagtttagty

SEQ ID NO: 117950 - DNA, 13 bp, Artificial Sequence
  Oligonucleotide for detection of SNP TSC0029482
ractaaactaacc

SEQ ID NO: 117951 - DNA, 13 bp, Artificial Sequence
  Oligonucleotide for detection of SNP TSC0029483
gtttgtttttatt

SEQ ID NO: 117952 - DNA, 13 bp, Artificial Sequence
  Oligonucleotide for detection of SNP TSC0029483
aataaaaacaaac

SEQ ID NO: 117953 - DNA, 13 bp, Artificial Sequence
  Oligonucleotide for detection of SNP TSC0029483
gtttgtgtttatt

SEQ ID NO: 117954 - DNA, 13 bp, Artificial Sequence
  Oligonucleotide for detection of SNP TSC0029483
aataaacacaaac

SEQ ID NO: 117955 - DNA, 13 bp, Artificial Sequence
  Oligonucleotide for detection of SNP TSC0029483
agtagagataggy

SEQ ID NO: 117956 - DNA, 13 bp, Artificial Sequence
  Oligonucleotide for detection of SNP TSC0029483
rcctatctctact

SEQ ID NO: 117957 - DNA, 13 bp, Artificial Sequence
  Oligonucleotide for detection of SNP TSC0029483
agtagatataggy

SEQ ID NO: 117958 - DNA, 13 bp, Artificial Sequence
  Oligonucleotide for detection of SNP TSC0029483
rcctatatctact

SEQ ID NO: 117959 - DNA, 13 bp, Artificial Sequence
  Oligonucleotide for detection of SNP TSC0029484
tgggtaaagtggy

SEQ ID NO: 117960 - DNA, 13 bp, Artificial Sequence
  Oligonucleotide for detection of SNP TSC0029484
rccactttaccca

SEQ ID NO: 117961 - DNA, 13 bp, Artificial Sequence
  Oligonucleotide for detection of SNP TSC0029484
tgggtatagtggy

SEQ ID NO: 117962 - DNA, 13 bp, Artificial Sequence
  Oligonucleotide for detection of SNP TSC0029484
rccactataccca

SEQ ID NO: 117963 - DNA, 13 bp, Artificial Sequence
  Oligonucleotide for detection of SNP TSC0029484
gttattttgttta

SEQ ID NO: 117964 - DNA, 13 bp, Artificial Sequence
  Oligonucleotide for detection of SNP TSC0029484
taaacaaaataac

SEQ ID NO: 117965 - DNA, 13 bp, Artificial Sequence
  Oligonucleotide for detection of SNP TSC0029485
ttataggaggtat

SEQ ID NO: 117966 - DNA, 13 bp, Artificial Sequence
  Oligonucleotide for detection of SNP TSC0029485
atacctcctataa

SEQ ID NO: 117967 - DNA, 13 bp, Artificial Sequence
  Oligonucleotide for detection of SNP TSC0029485
ttatagaaggtat

SEQ ID NO: 117968 - DNA, 13 bp, Artificial Sequence
  Oligonucleotide for detection of SNP TSC0029485
ataccttctataa

SEQ ID NO: 117969 - DNA, 13 bp, Artificial Sequence
  Oligonucleotide for detection of SNP TSC0029488
attataatttagy

SEQ ID NO: 117970 - DNA, 13 bp, Artificial Sequence
  Oligonucleotide for detection of SNP TSC0029488
rctaaattataat

SEQ ID NO: 117971 - DNA, 13 bp, Artificial Sequence
  Oligonucleotide for detection of SNP TSC0029488
attatagtttagy

SEQ ID NO: 117972 - DNA, 13 bp, Artificial Sequence
  Oligonucleotide for detection of SNP TSC0029488
rctaaactataat

SEQ ID NO: 117973 - DNA, 13 bp, Artificial Sequence
  Oligonucleotide for detection of SNP TSC0029489
gaataggtatatg

SEQ ID NO: 117974 - DNA, 13 bp, Artificial Sequence
  Oligonucleotide for detection of SNP TSC0029489
catatacctattc

SEQ ID NO: 117975 - DNA, 13 bp, Artificial Sequence
  Oligonucleotide for detection of SNP TSC0029489
gaatagatatatg

SEQ ID NO: 117976 - DNA, 13 bp, Artificial Sequence
  Oligonucleotide for detection of SNP TSC0029489
catatatctattc

SEQ ID NO: 117977 - DNA, 13 bp, Artificial Sequence
  Oligonucleotide for detection of SNP TSC0029493
tttttggtattaa

SEQ ID NO: 117978 - DNA, 13 bp, Artificial Sequence
  Oligonucleotide for detection of SNP TSC0029493
ttaataccaaaaa

SEQ ID NO: 117979 - DNA, 13 bp, Artificial Sequence
  Oligonucleotide for detection of SNP TSC0029493
tttttgatattaa

SEQ ID NO: 117980 - DNA, 13 bp, Artificial Sequence
  Oligonucleotide for detection of SNP TSC0029493
ttaatatcaaaaa

SEQ ID NO: 117981 - DNA, 13 bp, Artificial Sequence
  Oligonucleotide for detection of SNP TSC0029495
agagtttgaagtg

SEQ ID NO: 117982 - DNA, 13 bp, Artificial Sequence
  Oligonucleotide for detection of SNP TSC0029495
cacttcaaactct

SEQ ID NO: 117983 - DNA, 13 bp, Artificial Sequence
  Oligonucleotide for detection of SNP TSC0029495
agagttcgaagtg

SEQ ID NO: 117984 - DNA, 13 bp, Artificial Sequence
  Oligonucleotide for detection of SNP TSC0029495
cacttcgaactct

SEQ ID NO: 117985 - DNA, 13 bp, Artificial Sequence
  Oligonucleotide for detection of SNP TSC0029495
tattttgggtttt

SEQ ID NO: 117986 - DNA, 13 bp, Artificial Sequence
  Oligonucleotide for detection of SNP TSC0029495
aaaacccaaaata

SEQ ID NO: 117987 - DNA, 13 bp, Artificial Sequence
  Oligonucleotide for detection of SNP TSC0029495
tattttaggtttt

SEQ ID NO: 117988 - DNA, 13 bp, Artificial Sequence
  Oligonucleotide for detection of SNP TSC0029495
aaaacctaaaata

SEQ ID NO: 117989 - DNA, 13 bp, Artificial Sequence
  Oligonucleotide for detection of SNP TSC0029495
tatttcgggtttt

SEQ ID NO: 117990 - DNA, 13 bp, Artificial Sequence
  Oligonucleotide for detection of SNP TSC0029495
aaaacccgaaata

SEQ ID NO: 117991 - DNA, 13 bp, Artificial Sequence
  Oligonucleotide for detection of SNP TSC0029497
ttatatagtaatt

SEQ ID NO: 117992 - DNA, 13 bp, Artificial Sequence
  Oligonucleotide for detection of SNP TSC0029497
aattactatataa

SEQ ID NO: 117993 - DNA, 13 bp, Artificial Sequence
  Oligonucleotide for detection of SNP TSC0029497
ttatattgtaatt

SEQ ID NO: 117994 - DNA, 13 bp, Artificial Sequence
  Oligonucleotide for detection of SNP TSC0029497
aattacaatataa

SEQ ID NO: 117995 - DNA, 13 bp, Artificial Sequence
  Oligonucleotide for detection of SNP TSC0029497
agttattatgtaa

SEQ ID NO: 117996 - DNA, 13 bp, Artificial Sequence
  Oligonucleotide for detection of SNP TSC0029497
ttacataataact

SEQ ID NO: 117997 - DNA, 13 bp, Artificial Sequence
  Oligonucleotide for detection of SNP TSC0029497
agttataatgtaa

SEQ ID NO: 117998 - DNA, 13 bp, Artificial Sequence
  Oligonucleotide for detection of SNP TSC0029497
ttacattataact

SEQ ID NO: 117999 - DNA, 13 bp, Artificial Sequence
  Oligonucleotide for detection of SNP TSC0029498
atagtaattgtta

SEQ ID NO: 118000 - DNA, 13 bp, Artificial Sequence
  Oligonucleotide for detection of SNP TSC0029498
taacaattactat

SEQ ID NO: 118001 - DNA, 13 bp, Artificial Sequence
  Oligonucleotide for detection of SNP TSC0029498
atagtatttgtta

SEQ ID NO: 118002 - DNA, 13 bp, Artificial Sequence
  Oligonucleotide for detection of SNP TSC0029498
taacaaatactat

SEQ ID NO: 118003 - DNA, 13 bp, Artificial Sequence
  Oligonucleotide for detection of SNP TSC0029498
tagtagttattat

SEQ ID NO: 118004 - DNA, 13 bp, Artificial Sequence
  Oligonucleotide for detection of SNP TSC0029498
ataataactacta

SEQ ID NO: 118005 - DNA, 13 bp, Artificial Sequence
  Oligonucleotide for detection of SNP TSC0029498
tagtaggtattat

SEQ ID NO: 118006 - DNA, 13 bp, Artificial Sequence
  Oligonucleotide for detection of SNP TSC0029498
ataatacctacta

SEQ ID NO: 118007 - DNA, 13 bp, Artificial Sequence
  Oligonucleotide for detection of SNP TSC0029500
aaagtatgttaat

SEQ ID NO: 118008 - DNA, 13 bp, Artificial Sequence
  Oligonucleotide for detection of SNP TSC0029500
attaacatacttt

SEQ ID NO: 118009 - DNA, 13 bp, Artificial Sequence
  Oligonucleotide for detection of SNP TSC0029500
aaagtacgttaat

SEQ ID NO: 118010 - DNA, 13 bp, Artificial Sequence
  Oligonucleotide for detection of SNP TSC0029500
attaacgtacttt

SEQ ID NO: 118011 - DNA, 13 bp, Artificial Sequence
  Oligonucleotide for detection of SNP TSC0029500
attggtgtgtttt

SEQ ID NO: 118012 - DNA, 13 bp, Artificial Sequence
  Oligonucleotide for detection of SNP TSC0029500
aaaacacaccaat

SEQ ID NO: 118013 - DNA, 13 bp, Artificial Sequence
  Oligonucleotide for detection of SNP TSC0029500
attggtatgtttt

SEQ ID NO: 118014 - DNA, 13 bp, Artificial Sequence
  Oligonucleotide for detection of SNP TSC0029500
aaaacataccaat

SEQ ID NO: 118015 - DNA, 13 bp, Artificial Sequence
  Oligonucleotide for detection of SNP TSC0029500
attggcgtgtttt

SEQ ID NO: 118016 - DNA, 13 bp, Artificial Sequence
  Oligonucleotide for detection of SNP TSC0029500
aaaacacgccaat

SEQ ID NO: 118017 - DNA, 13 bp, Artificial Sequence
  Oligonucleotide for detection of SNP TSC0029501
tgtttagtaagtg

SEQ ID NO: 118018 - DNA, 13 bp, Artificial Sequence
  Oligonucleotide for detection of SNP TSC0029501
cacttactaaaca

SEQ ID NO: 118019 - DNA, 13 bp, Artificial Sequence
  Oligonucleotide for detection of SNP TSC0029501
tgtttaataagtg

SEQ ID NO: 118020 - DNA, 13 bp, Artificial Sequence
  Oligonucleotide for detection of SNP TSC0029501
cacttattaaaca

SEQ ID NO: 118021 - DNA, 13 bp, Artificial Sequence
  Oligonucleotide for detection of SNP TSC0029502
gtagaagtgttgy

SEQ ID NO: 118022 - DNA, 13 bp, Artificial Sequence
  Oligonucleotide for detection of SNP TSC0029502
rcaacacttctac

SEQ ID NO: 118023 - DNA, 13 bp, Artificial Sequence
  Oligonucleotide for detection of SNP TSC0029502
gtagaaatgttgy

SEQ ID NO: 118024 - DNA, 13 bp, Artificial Sequence
  Oligonucleotide for detection of SNP TSC0029502
rcaacatttctac

SEQ ID NO: 118025 - DNA, 13 bp, Artificial Sequence
  Oligonucleotide for detection of SNP TSC0029509
tgtagaagtaggg

SEQ ID NO: 118026 - DNA, 13 bp, Artificial Sequence
  Oligonucleotide for detection of SNP TSC0029509
ccctacttctaca

SEQ ID NO: 118027 - DNA, 13 bp, Artificial Sequence
  Oligonucleotide for detection of SNP TSC0029509
tgtagaggtaggg

SEQ ID NO: 118028 - DNA, 13 bp, Artificial Sequence
  Oligonucleotide for detection of SNP TSC0029509
ccctacctctaca

SEQ ID NO: 118029 - DNA, 13 bp, Artificial Sequence
  Oligonucleotide for detection of SNP TSC0029511
gttatagttgggt

SEQ ID NO: 118030 - DNA, 13 bp, Artificial Sequence
  Oligonucleotide for detection of SNP TSC0029511
acccaactataac

SEQ ID NO: 118031 - DNA, 13 bp, Artificial Sequence
  Oligonucleotide for detection of SNP TSC0029511
gttataattgggt

SEQ ID NO: 118032 - DNA, 13 bp, Artificial Sequence
  Oligonucleotide for detection of SNP TSC0029511
acccaattataac

SEQ ID NO: 118033 - DNA, 13 bp, Artificial Sequence
  Oligonucleotide for detection of SNP TSC0029515
tagattatagtat

SEQ ID NO: 118034 - DNA, 13 bp, Artificial Sequence
  Oligonucleotide for detection of SNP TSC0029515
atactataatcta

SEQ ID NO: 118035 - DNA, 13 bp, Artificial Sequence
  Oligonucleotide for detection of SNP TSC0029515
tagattgtagtat

SEQ ID NO: 118036 - DNA, 13 bp, Artificial Sequence
  Oligonucleotide for detection of SNP TSC0029515
atactacaatcta

SEQ ID NO: 118037 - DNA, 13 bp, Artificial Sequence
  Oligonucleotide for detection of SNP TSC0029516
ataaggtaaatta

SEQ ID NO: 118038 - DNA, 13 bp, Artificial Sequence
  Oligonucleotide for detection of SNP TSC0029516
taatttaccttat

SEQ ID NO: 118039 - DNA, 13 bp, Artificial Sequence
  Oligonucleotide for detection of SNP TSC0029516
ataaggaaaatta

SEQ ID NO: 118040 - DNA, 13 bp, Artificial Sequence
  Oligonucleotide for detection of SNP TSC0029516
taattttccttat

SEQ ID NO: 118041 - DNA, 13 bp, Artificial Sequence
  Oligonucleotide for detection of SNP TSC0029517
attaggagtaggg

SEQ ID NO: 118042 - DNA, 13 bp, Artificial Sequence
  Oligonucleotide for detection of SNP TSC0029517
ccctactcctaat

SEQ ID NO: 118043 - DNA, 13 bp, Artificial Sequence
  Oligonucleotide for detection of SNP TSC0029517
attaggggtaggg

SEQ ID NO: 118044 - DNA, 13 bp, Artificial Sequence
  Oligonucleotide for detection of SNP TSC0029517
ccctacccctaat

SEQ ID NO: 118045 - DNA, 13 bp, Artificial Sequence
  Oligonucleotide for detection of SNP TSC0029521
agtttttttgggt

SEQ ID NO: 118046 - DNA, 13 bp, Artificial Sequence
  Oligonucleotide for detection of SNP TSC0029521
acccaaaaaaact

SEQ ID NO: 118047 - DNA, 13 bp, Artificial Sequence
  Oligonucleotide for detection of SNP TSC0029521
agttttgttgggt

SEQ ID NO: 118048 - DNA, 13 bp, Artificial Sequence
  Oligonucleotide for detection of SNP TSC0029521
acccaacaaaact

SEQ ID NO: 118049 - DNA, 13 bp, Artificial Sequence
  Oligonucleotide for detection of SNP TSC0029521
atttaggaggatt

SEQ ID NO: 118050 - DNA, 13 bp, Artificial Sequence
  Oligonucleotide for detection of SNP TSC0029521
aatcctcctaaat

SEQ ID NO: 118051 - DNA, 13 bp, Artificial Sequence
  Oligonucleotide for detection of SNP TSC0029521
atttagtaggatt

SEQ ID NO: 118052 - DNA, 13 bp, Artificial Sequence
  Oligonucleotide for detection of SNP TSC0029521
aatcctactaaat

SEQ ID NO: 118053 - DNA, 13 bp, Artificial Sequence
  Oligonucleotide for detection of SNP TSC0029522
gtgaggatttaty

SEQ ID NO: 118054 - DNA, 13 bp, Artificial Sequence
  Oligonucleotide for detection of SNP TSC0029522
rataaatcctcac

SEQ ID NO: 118055 - DNA, 13 bp, Artificial Sequence
  Oligonucleotide for detection of SNP TSC0029522
gtgagggtttaty

SEQ ID NO: 118056 - DNA, 13 bp, Artificial Sequence
  Oligonucleotide for detection of SNP TSC0029522
rataaaccctcac

SEQ ID NO: 118057 - DNA, 13 bp, Artificial Sequence
  Oligonucleotide for detection of SNP TSC0029523
tttatgtggtttt

SEQ ID NO: 118058 - DNA, 13 bp, Artificial Sequence
  Oligonucleotide for detection of SNP TSC0029523
aaaaccacataaa

SEQ ID NO: 118059 - DNA, 13 bp, Artificial Sequence
  Oligonucleotide for detection of SNP TSC0029523
tttatggggtttt

SEQ ID NO: 118060 - DNA, 13 bp, Artificial Sequence
  Oligonucleotide for detection of SNP TSC0029523
aaaaccccataaa

SEQ ID NO: 118061 - DNA, 13 bp, Artificial Sequence
  Oligonucleotide for detection of SNP TSC0029523
tttatgcggtttt

SEQ ID NO: 118062 - DNA, 13 bp, Artificial Sequence
  Oligonucleotide for detection of SNP TSC0029523
aaaaccgcataaa

SEQ ID NO: 118063 - DNA, 13 bp, Artificial Sequence
  Oligonucleotide for detection of SNP TSC0029523
aaggttgtatggg

SEQ ID NO: 118064 - DNA, 13 bp, Artificial Sequence
  Oligonucleotide for detection of SNP TSC0029523
cccatacaacctt

SEQ ID NO: 118065 - DNA, 13 bp, Artificial Sequence
  Oligonucleotide for detection of SNP TSC0029523
aaggttttatggg

SEQ ID NO: 118066 - DNA, 13 bp, Artificial Sequence
  Oligonucleotide for detection of SNP TSC0029523
cccataaaacctt

SEQ ID NO: 118067 - DNA, 13 bp, Artificial Sequence
  Oligonucleotide for detection of SNP TSC0029523
aaggtcgtatggg

SEQ ID NO: 118068 - DNA, 13 bp, Artificial Sequence
  Oligonucleotide for detection of SNP TSC0029523
cccatacgacctt

SEQ ID NO: 118069 - DNA, 13 bp, Artificial Sequence
  Oligonucleotide for detection of SNP TSC0029524
ttgttttgagtat

SEQ ID NO: 118070 - DNA, 13 bp, Artificial Sequence
  Oligonucleotide for detection of SNP TSC0029524
atactcaaaacaa

SEQ ID NO: 118071 - DNA, 13 bp, Artificial Sequence
  Oligonucleotide for detection of SNP TSC0029524
ttgtttcgagtat

SEQ ID NO: 118072 - DNA, 13 bp, Artificial Sequence
  Oligonucleotide for detection of SNP TSC0029524
atactcgaaacaa

SEQ ID NO: 118073 - DNA, 13 bp, Artificial Sequence
  Oligonucleotide for detection of SNP TSC0029524
atatttggaatag

SEQ ID NO: 118074 - DNA, 13 bp, Artificial Sequence
  Oligonucleotide for detection of SNP TSC0029524
ctattccaaatat

SEQ ID NO: 118075 - DNA, 13 bp, Artificial Sequence
  Oligonucleotide for detection of SNP TSC0029524
atatttagaatag

SEQ ID NO: 118076 - DNA, 13 bp, Artificial Sequence
  Oligonucleotide for detection of SNP TSC0029524
ctattctaaatat

SEQ ID NO: 118077 - DNA, 13 bp, Artificial Sequence
  Oligonucleotide for detection of SNP TSC0029524
atattcggaatag

SEQ ID NO: 118078 - DNA, 13 bp, Artificial Sequence
  Oligonucleotide for detection of SNP TSC0029524
ctattccgaatat

SEQ ID NO: 118079 - DNA, 13 bp, Artificial Sequence
  Oligonucleotide for detection of SNP TSC0029529
attaatattgatg

SEQ ID NO: 118080 - DNA, 13 bp, Artificial Sequence
  Oligonucleotide for detection of SNP TSC0029529
catcaatattaat

SEQ ID NO: 118081 - DNA, 13 bp, Artificial Sequence
  Oligonucleotide for detection of SNP TSC0029530
gtttaggtgaatg

SEQ ID NO: 118082 - DNA, 13 bp, Artificial Sequence
  Oligonucleotide for detection of SNP TSC0029530
cattcacctaaac

SEQ ID NO: 118083 - DNA, 13 bp, Artificial Sequence
  Oligonucleotide for detection of SNP TSC0029530
gtttagatgaatg

SEQ ID NO: 118084 - DNA, 13 bp, Artificial Sequence
  Oligonucleotide for detection of SNP TSC0029530
cattcatctaaac

SEQ ID NO: 118085 - DNA, 13 bp, Artificial Sequence
  Oligonucleotide for detection of SNP TSC0029530
gtttaggtgaacg

SEQ ID NO: 118086 - DNA, 13 bp, Artificial Sequence
  Oligonucleotide for detection of SNP TSC0029530
cgttcacctaaac

SEQ ID NO: 118087 - DNA, 13 bp, Artificial Sequence
  Oligonucleotide for detection of SNP TSC0029530
gtttagatgaacg

SEQ ID NO: 118088 - DNA, 13 bp, Artificial Sequence
  Oligonucleotide for detection of SNP TSC0029530
cgttcatctaaac

SEQ ID NO: 118089 - DNA, 13 bp, Artificial Sequence
  Oligonucleotide for detection of SNP TSC0029531
tttaggaagatty

SEQ ID NO: 118090 - DNA, 13 bp, Artificial Sequence
  Oligonucleotide for detection of SNP TSC0029531
raatcttcctaaa

SEQ ID NO: 118091 - DNA, 13 bp, Artificial Sequence
  Oligonucleotide for detection of SNP TSC0029531
tttaggtagatty

SEQ ID NO: 118092 - DNA, 13 bp, Artificial Sequence
  Oligonucleotide for detection of SNP TSC0029531
raatctacctaaa

SEQ ID NO: 118093 - DNA, 13 bp, Artificial Sequence
  Oligonucleotide for detection of SNP TSC0029531
gggtttttttgga

SEQ ID NO: 118094 - DNA, 13 bp, Artificial Sequence
  Oligonucleotide for detection of SNP TSC0029531
tccaaaaaaaccc

SEQ ID NO: 118095 - DNA, 13 bp, Artificial Sequence
  Oligonucleotide for detection of SNP TSC0029531
gggtttatttgga

SEQ ID NO: 118096 - DNA, 13 bp, Artificial Sequence
  Oligonucleotide for detection of SNP TSC0029531
tccaaataaaccc

SEQ ID NO: 118097 - DNA, 13 bp, Artificial Sequence
  Oligonucleotide for detection of SNP TSC0029532
ggagaaaatttaa

SEQ ID NO: 118098 - DNA, 13 bp, Artificial Sequence
  Oligonucleotide for detection of SNP TSC0029532
ttaaattttctcc

SEQ ID NO: 118099 - DNA, 13 bp, Artificial Sequence
  Oligonucleotide for detection of SNP TSC0029532
ggagaagatttaa

SEQ ID NO: 118100 - DNA, 13 bp, Artificial Sequence
  Oligonucleotide for detection of SNP TSC0029532
ttaaatcttctcc

SEQ ID NO: 118101 - DNA, 13 bp, Artificial Sequence
  Oligonucleotide for detection of SNP TSC0029535
gttaagtgaaata

SEQ ID NO: 118102 - DNA, 13 bp, Artificial Sequence
  Oligonucleotide for detection of SNP TSC0029535
tatttcacttaac

SEQ ID NO: 118103 - DNA, 13 bp, Artificial Sequence
  Oligonucleotide for detection of SNP TSC0029535
gttaagcgaaata

SEQ ID NO: 118104 - DNA, 13 bp, Artificial Sequence
  Oligonucleotide for detection of SNP TSC0029535
tatttcgcttaac

SEQ ID NO: 118105 - DNA, 13 bp, Artificial Sequence
  Oligonucleotide for detection of SNP TSC0029535
tattttgtttggy

SEQ ID NO: 118106 - DNA, 13 bp, Artificial Sequence
  Oligonucleotide for detection of SNP TSC0029535
rccaaacaaaata

SEQ ID NO: 118107 - DNA, 13 bp, Artificial Sequence
  Oligonucleotide for detection of SNP TSC0029535
tattttatttggy

SEQ ID NO: 118108 - DNA, 13 bp, Artificial Sequence
  Oligonucleotide for detection of SNP TSC0029535
rccaaataaaata

SEQ ID NO: 118109 - DNA, 13 bp, Artificial Sequence
  Oligonucleotide for detection of SNP TSC0029535
tatttcgtttggy

SEQ ID NO: 118110 - DNA, 13 bp, Artificial Sequence
  Oligonucleotide for detection of SNP TSC0029535
rccaaacgaaata

SEQ ID NO: 118111 - DNA, 13 bp, Artificial Sequence
  Oligonucleotide for detection of SNP TSC0029536
gtgagggttaatg

SEQ ID NO: 118112 - DNA, 13 bp, Artificial Sequence
  Oligonucleotide for detection of SNP TSC0029536
cattaaccctcac

SEQ ID NO: 118113 - DNA, 13 bp, Artificial Sequence
  Oligonucleotide for detection of SNP TSC0029536
gtgaggattaatg

SEQ ID NO: 118114 - DNA, 13 bp, Artificial Sequence
  Oligonucleotide for detection of SNP TSC0029536
cattaatcctcac

SEQ ID NO: 118115 - DNA, 13 bp, Artificial Sequence
  Oligonucleotide for detection of SNP TSC0029540
tagtaaatttgtg

SEQ ID NO: 118116 - DNA, 13 bp, Artificial Sequence
  Oligonucleotide for detection of SNP TSC0029540
cacaaatttacta

SEQ ID NO: 118117 - DNA, 13 bp, Artificial Sequence
  Oligonucleotide for detection of SNP TSC0029540
tagtaagtttgtg

SEQ ID NO: 118118 - DNA, 13 bp, Artificial Sequence
  Oligonucleotide for detection of SNP TSC0029540
cacaaacttacta

SEQ ID NO: 118119 - DNA, 13 bp, Artificial Sequence
  Oligonucleotide for detection of SNP TSC0029540
tagtaaatttgcg

SEQ ID NO: 118120 - DNA, 13 bp, Artificial Sequence
  Oligonucleotide for detection of SNP TSC0029540
cgcaaatttacta

SEQ ID NO: 118121 - DNA, 13 bp, Artificial Sequence
  Oligonucleotide for detection of SNP TSC0029540
tagtaagtttgcg

SEQ ID NO: 118122 - DNA, 13 bp, Artificial Sequence
  Oligonucleotide for detection of SNP TSC0029540
cgcaaacttacta

SEQ ID NO: 118123 - DNA, 13 bp, Artificial Sequence
  Oligonucleotide for detection of SNP TSC0029543
ttttgaaagatty

SEQ ID NO: 118124 - DNA, 13 bp, Artificial Sequence
  Oligonucleotide for detection of SNP TSC0029543
raatctttcaaaa

SEQ ID NO: 118125 - DNA, 13 bp, Artificial Sequence
  Oligonucleotide for detection of SNP TSC0029543
ttttgatagatty

SEQ ID NO: 118126 - DNA, 13 bp, Artificial Sequence
  Oligonucleotide for detection of SNP TSC0029543
raatctatcaaaa

SEQ ID NO: 118127 - DNA, 13 bp, Artificial Sequence
  Oligonucleotide for detection of SNP TSC0029543
gggttttttaggg

SEQ ID NO: 118128 - DNA, 13 bp, Artificial Sequence
  Oligonucleotide for detection of SNP TSC0029543
ccctaaaaaaccc

SEQ ID NO: 118129 - DNA, 13 bp, Artificial Sequence
  Oligonucleotide for detection of SNP TSC0029543
gggtttgttaggg

SEQ ID NO: 118130 - DNA, 13 bp, Artificial Sequence
  Oligonucleotide for detection of SNP TSC0029543
ccctaacaaaccc

SEQ ID NO: 118131 - DNA, 13 bp, Artificial Sequence
  Oligonucleotide for detection of SNP TSC0029544
attaggggttttt

SEQ ID NO: 118132 - DNA, 13 bp, Artificial Sequence
  Oligonucleotide for detection of SNP TSC0029544
aaaaacccctaat

SEQ ID NO: 118133 - DNA, 13 bp, Artificial Sequence
  Oligonucleotide for detection of SNP TSC0029544
attaggagttttt

SEQ ID NO: 118134 - DNA, 13 bp, Artificial Sequence
  Oligonucleotide for detection of SNP TSC0029544
aaaaactcctaat

SEQ ID NO: 118135 - DNA, 13 bp, Artificial Sequence
  Oligonucleotide for detection of SNP TSC0029545
ttgggggagttag

SEQ ID NO: 118136 - DNA, 13 bp, Artificial Sequence
  Oligonucleotide for detection of SNP TSC0029545
ctaactcccccaa

SEQ ID NO: 118137 - DNA, 13 bp, Artificial Sequence
  Oligonucleotide for detection of SNP TSC0029545
ttggggaagttag

SEQ ID NO: 118138 - DNA, 13 bp, Artificial Sequence
  Oligonucleotide for detection of SNP TSC0029545
ctaacttccccaa

SEQ ID NO: 118139 - DNA, 13 bp, Artificial Sequence
  Oligonucleotide for detection of SNP TSC0029545
tcgggggagttag

SEQ ID NO: 118140 - DNA, 13 bp, Artificial Sequence
  Oligonucleotide for detection of SNP TSC0029545
ctaactcccccga

SEQ ID NO: 118141 - DNA, 13 bp, Artificial Sequence
  Oligonucleotide for detection of SNP TSC0029545
tcggggaagttag

SEQ ID NO: 118142 - DNA, 13 bp, Artificial Sequence
  Oligonucleotide for detection of SNP TSC0029545
ctaacttccccga

SEQ ID NO: 118143 - DNA, 13 bp, Artificial Sequence
  Oligonucleotide for detection of SNP TSC0029547
ttagtaagatggy

SEQ ID NO: 118144 - DNA, 13 bp, Artificial Sequence
  Oligonucleotide for detection of SNP TSC0029547
rccatcttactaa

SEQ ID NO: 118145 - DNA, 13 bp, Artificial Sequence
  Oligonucleotide for detection of SNP TSC0029547
ttagtatgatggy

SEQ ID NO: 118146 - DNA, 13 bp, Artificial Sequence
  Oligonucleotide for detection of SNP TSC0029547
rccatcatactaa

SEQ ID NO: 118147 - DNA, 13 bp, Artificial Sequence
  Oligonucleotide for detection of SNP TSC0029547
gttattttgttgg

SEQ ID NO: 118148 - DNA, 13 bp, Artificial Sequence
  Oligonucleotide for detection of SNP TSC0029547
ccaacaaaataac

SEQ ID NO: 118149 - DNA, 13 bp, Artificial Sequence
  Oligonucleotide for detection of SNP TSC0029547
gttattatgttgg

SEQ ID NO: 118150 - DNA, 13 bp, Artificial Sequence
  Oligonucleotide for detection of SNP TSC0029547
ccaacataataac

SEQ ID NO: 118151 - DNA, 13 bp, Artificial Sequence
  Oligonucleotide for detection of SNP TSC0029550
gggagtagggaga

SEQ ID NO: 118152 - DNA, 13 bp, Artificial Sequence
  Oligonucleotide for detection of SNP TSC0029550
tctccctactccc

SEQ ID NO: 118153 - DNA, 13 bp, Artificial Sequence
  Oligonucleotide for detection of SNP TSC0029550
gggagtggggaga

SEQ ID NO: 118154 - DNA, 13 bp, Artificial Sequence
  Oligonucleotide for detection of SNP TSC0029550
tctccccactccc

SEQ ID NO: 118155 - DNA, 13 bp, Artificial Sequence
  Oligonucleotide for detection of SNP TSC0029550
gggagcggggaga

SEQ ID NO: 118156 - DNA, 13 bp, Artificial Sequence
  Oligonucleotide for detection of SNP TSC0029550
tctccccgctccc

SEQ ID NO: 118157 - DNA, 13 bp, Artificial Sequence
  Oligonucleotide for detection of SNP TSC0029551
ggaatatggaggg

SEQ ID NO: 118158 - DNA, 13 bp, Artificial Sequence
  Oligonucleotide for detection of SNP TSC0029551
ccctccatattcc

SEQ ID NO: 118159 - DNA, 13 bp, Artificial Sequence
  Oligonucleotide for detection of SNP TSC0029551
ggaatacggaggg

SEQ ID NO: 118160 - DNA, 13 bp, Artificial Sequence
  Oligonucleotide for detection of SNP TSC0029551
ccctccgtattcc

SEQ ID NO: 118161 - DNA, 13 bp, Artificial Sequence
  Oligonucleotide for detection of SNP TSC0029552
ttgagtagggttt

SEQ ID NO: 118162 - DNA, 13 bp, Artificial Sequence
  Oligonucleotide for detection of SNP TSC0029552
aaaccctactcaa

SEQ ID NO: 118163 - DNA, 13 bp, Artificial Sequence
  Oligonucleotide for detection of SNP TSC0029552
ttgagtggggttt

SEQ ID NO: 118164 - DNA, 13 bp, Artificial Sequence
  Oligonucleotide for detection of SNP TSC0029552
aaaccccactcaa

SEQ ID NO: 118165 - DNA, 13 bp, Artificial Sequence
  Oligonucleotide for detection of SNP TSC0029553
ttttttggtgtgy

SEQ ID NO: 118166 - DNA, 13 bp, Artificial Sequence
  Oligonucleotide for detection of SNP TSC0029553
rcacaccaaaaaa

SEQ ID NO: 118167 - DNA, 13 bp, Artificial Sequence
  Oligonucleotide for detection of SNP TSC0029553
tttttttgtgtgy

SEQ ID NO: 118168 - DNA, 13 bp, Artificial Sequence
  Oligonucleotide for detection of SNP TSC0029553
rcacacaaaaaaa

SEQ ID NO: 118169 - DNA, 13 bp, Artificial Sequence
  Oligonucleotide for detection of SNP TSC0029553
gtatattagagag

SEQ ID NO: 118170 - DNA, 13 bp, Artificial Sequence
  Oligonucleotide for detection of SNP TSC0029553
ctctctaatatac

SEQ ID NO: 118171 - DNA, 13 bp, Artificial Sequence
  Oligonucleotide for detection of SNP TSC0029553
gtatataagagag

SEQ ID NO: 118172 - DNA, 13 bp, Artificial Sequence
  Oligonucleotide for detection of SNP TSC0029553
ctctcttatatac

SEQ ID NO: 118173 - DNA, 13 bp, Artificial Sequence
  Oligonucleotide for detection of SNP TSC0029554
gggttgagttttt

SEQ ID NO: 118174 - DNA, 13 bp, Artificial Sequence
  Oligonucleotide for detection of SNP TSC0029554
aaaaactcaaccc

SEQ ID NO: 118175 - DNA, 13 bp, Artificial Sequence
  Oligonucleotide for detection of SNP TSC0029554
gggttgggttttt

SEQ ID NO: 118176 - DNA, 13 bp, Artificial Sequence
  Oligonucleotide for detection of SNP TSC0029554
aaaaacccaaccc

SEQ ID NO: 118177 - DNA, 13 bp, Artificial Sequence
  Oligonucleotide for detection of SNP TSC0029555
gttttgtgggtay

SEQ ID NO: 118178 - DNA, 13 bp, Artificial Sequence
  Oligonucleotide for detection of SNP TSC0029555
rtacccacaaaac

SEQ ID NO: 118179 - DNA, 13 bp, Artificial Sequence
  Oligonucleotide for detection of SNP TSC0029555
gttttgcgggtay

SEQ ID NO: 118180 - DNA, 13 bp, Artificial Sequence
  Oligonucleotide for detection of SNP TSC0029555
rtacccgcaaaac

SEQ ID NO: 118181 - DNA, 13 bp, Artificial Sequence
  Oligonucleotide for detection of SNP TSC0029555
gtgtttgtagggy

SEQ ID NO: 118182 - DNA, 13 bp, Artificial Sequence
  Oligonucleotide for detection of SNP TSC0029555
rccctacaaacac

SEQ ID NO: 118183 - DNA, 13 bp, Artificial Sequence
  Oligonucleotide for detection of SNP TSC0029555
gtgtttatagggy

SEQ ID NO: 118184 - DNA, 13 bp, Artificial Sequence
  Oligonucleotide for detection of SNP TSC0029555
rccctataaacac

SEQ ID NO: 118185 - DNA, 13 bp, Artificial Sequence
  Oligonucleotide for detection of SNP TSC0029555
gtgttcgtagggy

SEQ ID NO: 118186 - DNA, 13 bp, Artificial Sequence
  Oligonucleotide for detection of SNP TSC0029555
rccctacgaacac

SEQ ID NO: 118187 - DNA, 13 bp, Artificial Sequence
  Oligonucleotide for detection of SNP TSC0029556
tgttttcgtgggy

SEQ ID NO: 118188 - DNA, 13 bp, Artificial Sequence
  Oligonucleotide for detection of SNP TSC0029556
rcccacgaaaaca

SEQ ID NO: 118189 - DNA, 13 bp, Artificial Sequence
  Oligonucleotide for detection of SNP TSC0029556
gtttatgaggata

SEQ ID NO: 118190 - DNA, 13 bp, Artificial Sequence
  Oligonucleotide for detection of SNP TSC0029556
tatcctcataaac

SEQ ID NO: 118191 - DNA, 13 bp, Artificial Sequence
  Oligonucleotide for detection of SNP TSC0029556
gtttataaggata

SEQ ID NO: 118192 - DNA, 13 bp, Artificial Sequence
  Oligonucleotide for detection of SNP TSC0029556
tatccttataaac

SEQ ID NO: 118193 - DNA, 13 bp, Artificial Sequence
  Oligonucleotide for detection of SNP TSC0029556
gtttacgaggata

SEQ ID NO: 118194 - DNA, 13 bp, Artificial Sequence
  Oligonucleotide for detection of SNP TSC0029556
tatcctcgtaaac

SEQ ID NO: 118195 - DNA, 13 bp, Artificial Sequence
  Oligonucleotide for detection of SNP TSC0029557
ggtgttatttaty

SEQ ID NO: 118196 - DNA, 13 bp, Artificial Sequence
  Oligonucleotide for detection of SNP TSC0029557
rataaataacacc

SEQ ID NO: 118197 - DNA, 13 bp, Artificial Sequence
  Oligonucleotide for detection of SNP TSC0029557
ggtgttgtttaty

SEQ ID NO: 118198 - DNA, 13 bp, Artificial Sequence
  Oligonucleotide for detection of SNP TSC0029557
rataaacaacacc

SEQ ID NO: 118199 - DNA, 13 bp, Artificial Sequence
  Oligonucleotide for detection of SNP TSC0029557
ggtgtcgtttaty

SEQ ID NO: 118200 - DNA, 13 bp, Artificial Sequence
  Oligonucleotide for detection of SNP TSC0029557
rataaacgacacc

SEQ ID NO: 118201 - DNA, 13 bp, Artificial Sequence
  Oligonucleotide for detection of SNP TSC0029557
gatggatggtaty

SEQ ID NO: 118202 - DNA, 13 bp, Artificial Sequence
  Oligonucleotide for detection of SNP TSC0029557
rataccatccatc

SEQ ID NO: 118203 - DNA, 13 bp, Artificial Sequence
  Oligonucleotide for detection of SNP TSC0029557
gatggacggtaty

SEQ ID NO: 118204 - DNA, 13 bp, Artificial Sequence
  Oligonucleotide for detection of SNP TSC0029557
rataccgtccatc

SEQ ID NO: 118205 - DNA, 13 bp, Artificial Sequence
  Oligonucleotide for detection of SNP TSC0029558
gataagtgtttta

SEQ ID NO: 118206 - DNA, 13 bp, Artificial Sequence
  Oligonucleotide for detection of SNP TSC0029558
taaaacacttatc

SEQ ID NO: 118207 - DNA, 13 bp, Artificial Sequence
  Oligonucleotide for detection of SNP TSC0029558
gataagcgtttta

SEQ ID NO: 118208 - DNA, 13 bp, Artificial Sequence
  Oligonucleotide for detection of SNP TSC0029558
taaaacgcttatc

SEQ ID NO: 118209 - DNA, 13 bp, Artificial Sequence
  Oligonucleotide for detection of SNP TSC0029558
tgaggtgtttgty

SEQ ID NO: 118210 - DNA, 13 bp, Artificial Sequence
  Oligonucleotide for detection of SNP TSC0029558
racaaacacctca

SEQ ID NO: 118211 - DNA, 13 bp, Artificial Sequence
  Oligonucleotide for detection of SNP TSC0029558
tgaggtatttgty

SEQ ID NO: 118212 - DNA, 13 bp, Artificial Sequence
  Oligonucleotide for detection of SNP TSC0029558
racaaatacctca

SEQ ID NO: 118213 - DNA, 13 bp, Artificial Sequence
  Oligonucleotide for detection of SNP TSC0029558
tgaggcgtttgty

SEQ ID NO: 118214 - DNA, 13 bp, Artificial Sequence
  Oligonucleotide for detection of SNP TSC0029558
racaaacgcctca

SEQ ID NO: 118215 - DNA, 13 bp, Artificial Sequence
  Oligonucleotide for detection of SNP TSC0029560
tatggttgagggy

SEQ ID NO: 118216 - DNA, 13 bp, Artificial Sequence
  Oligonucleotide for detection of SNP TSC0029560
rccctcaaccata

SEQ ID NO: 118217 - DNA, 13 bp, Artificial Sequence
  Oligonucleotide for detection of SNP TSC0029560
tacggttgagggy

SEQ ID NO: 118218 - DNA, 13 bp, Artificial Sequence
  Oligonucleotide for detection of SNP TSC0029560
rccctcaaccgta

SEQ ID NO: 118219 - DNA, 13 bp, Artificial Sequence
  Oligonucleotide for detection of SNP TSC0029560
tatggtcgagggy

SEQ ID NO: 118220 - DNA, 13 bp, Artificial Sequence
  Oligonucleotide for detection of SNP TSC0029560
rccctcgaccata

SEQ ID NO: 118221 - DNA, 13 bp, Artificial Sequence
  Oligonucleotide for detection of SNP TSC0029560
tacggtcgagggy

SEQ ID NO: 118222 - DNA, 13 bp, Artificial Sequence
  Oligonucleotide for detection of SNP TSC0029560
rccctcgaccgta

SEQ ID NO: 118223 - DNA, 13 bp, Artificial Sequence
  Oligonucleotide for detection of SNP TSC0029560
gtttttggttgtg

SEQ ID NO: 118224 - DNA, 13 bp, Artificial Sequence
  Oligonucleotide for detection of SNP TSC0029560
cacaaccaaaaac

SEQ ID NO: 118225 - DNA, 13 bp, Artificial Sequence
  Oligonucleotide for detection of SNP TSC0029560
gtttttagttgtg

SEQ ID NO: 118226 - DNA, 13 bp, Artificial Sequence
  Oligonucleotide for detection of SNP TSC0029560
cacaactaaaaac

SEQ ID NO: 118227 - DNA, 13 bp, Artificial Sequence
  Oligonucleotide for detection of SNP TSC0029560
gttttcggttgtg

SEQ ID NO: 118228 - DNA, 13 bp, Artificial Sequence
  Oligonucleotide for detection of SNP TSC0029560
cacaaccgaaaac

SEQ ID NO: 118229 - DNA, 13 bp, Artificial Sequence
  Oligonucleotide for detection of SNP TSC0029560
gtttttagtcgtg

SEQ ID NO: 118230 - DNA, 13 bp, Artificial Sequence
  Oligonucleotide for detection of SNP TSC0029560
cacgactaaaaac

SEQ ID NO: 118231 - DNA, 13 bp, Artificial Sequence
  Oligonucleotide for detection of SNP TSC0029560
gtttttggtcgtg

SEQ ID NO: 118232 - DNA, 13 bp, Artificial Sequence
  Oligonucleotide for detection of SNP TSC0029560
cacgaccaaaaac

SEQ ID NO: 118233 - DNA, 13 bp, Artificial Sequence
  Oligonucleotide for detection of SNP TSC0029560
gttttcggtcgtg

SEQ ID NO: 118234 - DNA, 13 bp, Artificial Sequence
  Oligonucleotide for detection of SNP TSC0029560
cacgaccgaaaac

SEQ ID NO: 118235 - DNA, 13 bp, Artificial Sequence
  Oligonucleotide for detection of SNP TSC0029561
ttttatagggtga

SEQ ID NO: 118236 - DNA, 13 bp, Artificial Sequence
  Oligonucleotide for detection of SNP TSC0029561
tcaccctataaaa

SEQ ID NO: 118237 - DNA, 13 bp, Artificial Sequence
  Oligonucleotide for detection of SNP TSC0029561
ttttatggggtga

SEQ ID NO: 118238 - DNA, 13 bp, Artificial Sequence
  Oligonucleotide for detection of SNP TSC0029561
tcaccccataaaa

SEQ ID NO: 118239 - DNA, 13 bp, Artificial Sequence
  Oligonucleotide for detection of SNP TSC0029561
ttttacggggtga

SEQ ID NO: 118240 - DNA, 13 bp, Artificial Sequence
  Oligonucleotide for detection of SNP TSC0029561
tcaccccgtaaaa

SEQ ID NO: 118241 - DNA, 13 bp, Artificial Sequence
  Oligonucleotide for detection of SNP TSC0029561
ttatttcgtaaaa

SEQ ID NO: 118242 - DNA, 13 bp, Artificial Sequence
  Oligonucleotide for detection of SNP TSC0029561
ttttacgaaataa

SEQ ID NO: 118243 - DNA, 13 bp, Artificial Sequence
  Oligonucleotide for detection of SNP TSC0029562
ataatttttattt

SEQ ID NO: 118244 - DNA, 13 bp, Artificial Sequence
  Oligonucleotide for detection of SNP TSC0029562
aaataaaaattat

SEQ ID NO: 118245 - DNA, 13 bp, Artificial Sequence
  Oligonucleotide for detection of SNP TSC0029562
ataattgttattt

SEQ ID NO: 118246 - DNA, 13 bp, Artificial Sequence
  Oligonucleotide for detection of SNP TSC0029562
aaataacaattat

SEQ ID NO: 118247 - DNA, 13 bp, Artificial Sequence
  Oligonucleotide for detection of SNP TSC0029562
ataatcgttattt

SEQ ID NO: 118248 - DNA, 13 bp, Artificial Sequence
  Oligonucleotide for detection of SNP TSC0029562
aaataacgattat

SEQ ID NO: 118249 - DNA, 13 bp, Artificial Sequence
  Oligonucleotide for detection of SNP TSC0029562
aggtgaggattgt

SEQ ID NO: 118250 - DNA, 13 bp, Artificial Sequence
  Oligonucleotide for detection of SNP TSC0029562
acaatcctcacct

SEQ ID NO: 118251 - DNA, 13 bp, Artificial Sequence
  Oligonucleotide for detection of SNP TSC0029562
aggtgatgattgt

SEQ ID NO: 118252 - DNA, 13 bp, Artificial Sequence
  Oligonucleotide for detection of SNP TSC0029562
acaatcatcacct

SEQ ID NO: 118253 - DNA, 13 bp, Artificial Sequence
  Oligonucleotide for detection of SNP TSC0029562
aggtgacgattgt

SEQ ID NO: 118254 - DNA, 13 bp, Artificial Sequence
  Oligonucleotide for detection of SNP TSC0029562
acaatcgtcacct

SEQ ID NO: 118255 - DNA, 13 bp, Artificial Sequence
  Oligonucleotide for detection of SNP TSC0029563
tttaagattagga

SEQ ID NO: 118256 - DNA, 13 bp, Artificial Sequence
  Oligonucleotide for detection of SNP TSC0029563
tcctaatcttaaa

SEQ ID NO: 118257 - DNA, 13 bp, Artificial Sequence
  Oligonucleotide for detection of SNP TSC0029563
tttaaggttagga

SEQ ID NO: 118258 - DNA, 13 bp, Artificial Sequence
  Oligonucleotide for detection of SNP TSC0029563
tcctaaccttaaa

SEQ ID NO: 118259 - DNA, 13 bp, Artificial Sequence
  Oligonucleotide for detection of SNP TSC0029564
gagtttattttgg

SEQ ID NO: 118260 - DNA, 13 bp, Artificial Sequence
  Oligonucleotide for detection of SNP TSC0029564
ccaaaataaactc

SEQ ID NO: 118261 - DNA, 13 bp, Artificial Sequence
  Oligonucleotide for detection of SNP TSC0029564
gagtttgttttgg

SEQ ID NO: 118262 - DNA, 13 bp, Artificial Sequence
  Oligonucleotide for detection of SNP TSC0029564
ccaaaacaaactc

SEQ ID NO: 118263 - DNA, 13 bp, Artificial Sequence
  Oligonucleotide for detection of SNP TSC0029564
gagtttatttcgg

SEQ ID NO: 118264 - DNA, 13 bp, Artificial Sequence
  Oligonucleotide for detection of SNP TSC0029564
ccgaaataaactc

SEQ ID NO: 118265 - DNA, 13 bp, Artificial Sequence
  Oligonucleotide for detection of SNP TSC0029564
gagttcgttttgg

SEQ ID NO: 118266 - DNA, 13 bp, Artificial Sequence
  Oligonucleotide for detection of SNP TSC0029564
ccaaaacgaactc

SEQ ID NO: 118267 - DNA, 13 bp, Artificial Sequence
  Oligonucleotide for detection of SNP TSC0029564
gagtttgtttcgg

SEQ ID NO: 118268 - DNA, 13 bp, Artificial Sequence
  Oligonucleotide for detection of SNP TSC0029564
ccgaaacaaactc

SEQ ID NO: 118269 - DNA, 13 bp, Artificial Sequence
  Oligonucleotide for detection of SNP TSC0029564
gagttcgtttcgg

SEQ ID NO: 118270 - DNA, 13 bp, Artificial Sequence
  Oligonucleotide for detection of SNP TSC0029564
ccgaaacgaactc

SEQ ID NO: 118271 - DNA, 13 bp, Artificial Sequence
  Oligonucleotide for detection of SNP TSC0029564
ttggagtgggtty

SEQ ID NO: 118272 - DNA, 13 bp, Artificial Sequence
  Oligonucleotide for detection of SNP TSC0029564
raacccactccaa

SEQ ID NO: 118273 - DNA, 13 bp, Artificial Sequence
  Oligonucleotide for detection of SNP TSC0029564
tcggagtgggtty

SEQ ID NO: 118274 - DNA, 13 bp, Artificial Sequence
  Oligonucleotide for detection of SNP TSC0029564
raacccactccga

SEQ ID NO: 118275 - DNA, 13 bp, Artificial Sequence
  Oligonucleotide for detection of SNP TSC0029564
ttggagcgggtty

SEQ ID NO: 118276 - DNA, 13 bp, Artificial Sequence
  Oligonucleotide for detection of SNP TSC0029564
raacccgctccaa

SEQ ID NO: 118277 - DNA, 13 bp, Artificial Sequence
  Oligonucleotide for detection of SNP TSC0029564
tcggagcgggtty

SEQ ID NO: 118278 - DNA, 13 bp, Artificial Sequence
  Oligonucleotide for detection of SNP TSC0029564
raacccgctccga

SEQ ID NO: 118279 - DNA, 13 bp, Artificial Sequence
  Oligonucleotide for detection of SNP TSC0029565
tatttattgtgty

SEQ ID NO: 118280 - DNA, 13 bp, Artificial Sequence
  Oligonucleotide for detection of SNP TSC0029565
racacaataaata

SEQ ID NO: 118281 - DNA, 13 bp, Artificial Sequence
  Oligonucleotide for detection of SNP TSC0029565
ggtatagtaggtg

SEQ ID NO: 118282 - DNA, 13 bp, Artificial Sequence
  Oligonucleotide for detection of SNP TSC0029565
cacctactatacc

SEQ ID NO: 118283 - DNA, 13 bp, Artificial Sequence
  Oligonucleotide for detection of SNP TSC0029565
ggtatattaggtg

SEQ ID NO: 118284 - DNA, 13 bp, Artificial Sequence
  Oligonucleotide for detection of SNP TSC0029565
cacctaatatacc

SEQ ID NO: 118285 - DNA, 13 bp, Artificial Sequence
  Oligonucleotide for detection of SNP TSC0029566
gttgttgtgaagg

SEQ ID NO: 118286 - DNA, 13 bp, Artificial Sequence
  Oligonucleotide for detection of SNP TSC0029566
ccttcacaacaac

SEQ ID NO: 118287 - DNA, 13 bp, Artificial Sequence
  Oligonucleotide for detection of SNP TSC0029566
gttgttatgaagg

SEQ ID NO: 118288 - DNA, 13 bp, Artificial Sequence
  Oligonucleotide for detection of SNP TSC0029566
ccttcataacaac

SEQ ID NO: 118289 - DNA, 13 bp, Artificial Sequence
  Oligonucleotide for detection of SNP TSC0029566
gttgtcgtgaagg

SEQ ID NO: 118290 - DNA, 13 bp, Artificial Sequence
  Oligonucleotide for detection of SNP TSC0029566
ccttcacgacaac

SEQ ID NO: 118291 - DNA, 13 bp, Artificial Sequence
  Oligonucleotide for detection of SNP TSC0029567
ttgagagtgtttt

SEQ ID NO: 118292 - DNA, 13 bp, Artificial Sequence
  Oligonucleotide for detection of SNP TSC0029567
aaaacactctcaa

SEQ ID NO: 118293 - DNA, 13 bp, Artificial Sequence
  Oligonucleotide for detection of SNP TSC0029567
ttgagaatgtttt

SEQ ID NO: 118294 - DNA, 13 bp, Artificial Sequence
  Oligonucleotide for detection of SNP TSC0029567
aaaacattctcaa

SEQ ID NO: 118295 - DNA, 13 bp, Artificial Sequence
  Oligonucleotide for detection of SNP TSC0029568
aggcgtggtggtt

SEQ ID NO: 118296 - DNA, 13 bp, Artificial Sequence
  Oligonucleotide for detection of SNP TSC0029568
aaccaccacgcct

SEQ ID NO: 118297 - DNA, 13 bp, Artificial Sequence
  Oligonucleotide for detection of SNP TSC0029568
aggcgtagtggtt

SEQ ID NO: 118298 - DNA, 13 bp, Artificial Sequence
  Oligonucleotide for detection of SNP TSC0029568
aaccactacgcct

SEQ ID NO: 118299 - DNA, 13 bp, Artificial Sequence
  Oligonucleotide for detection of SNP TSC0029568
aggcgcggtggtt

SEQ ID NO: 118300 - DNA, 13 bp, Artificial Sequence
  Oligonucleotide for detection of SNP TSC0029568
aaccaccgcgcct

SEQ ID NO: 118301 - DNA, 13 bp, Artificial Sequence
  Oligonucleotide for detection of SNP TSC0029572
agagatatggagg

SEQ ID NO: 118302 - DNA, 13 bp, Artificial Sequence
  Oligonucleotide for detection of SNP TSC0029572
cctccatatctct

SEQ ID NO: 118303 - DNA, 13 bp, Artificial Sequence
  Oligonucleotide for detection of SNP TSC0029572
agagatgtggagg

SEQ ID NO: 118304 - DNA, 13 bp, Artificial Sequence
  Oligonucleotide for detection of SNP TSC0029572
cctccacatctct

SEQ ID NO: 118305 - DNA, 13 bp, Artificial Sequence
  Oligonucleotide for detection of SNP TSC0029572
agagacgtggagg

SEQ ID NO: 118306 - DNA, 13 bp, Artificial Sequence
  Oligonucleotide for detection of SNP TSC0029572
cctccacgtctct

SEQ ID NO: 118307 - DNA, 13 bp, Artificial Sequence
  Oligonucleotide for detection of SNP TSC0029572
tttttacgttttt

SEQ ID NO: 118308 - DNA, 13 bp, Artificial Sequence
  Oligonucleotide for detection of SNP TSC0029572
aaaaacgtaaaaa

SEQ ID NO: 118309 - DNA, 13 bp, Artificial Sequence
  Oligonucleotide for detection of SNP TSC0029573
gaaagagagaaag

SEQ ID NO: 118310 - DNA, 13 bp, Artificial Sequence
  Oligonucleotide for detection of SNP TSC0029573
ctttctctctttc

SEQ ID NO: 118311 - DNA, 13 bp, Artificial Sequence
  Oligonucleotide for detection of SNP TSC0029573
gaaagaaagaaag

SEQ ID NO: 118312 - DNA, 13 bp, Artificial Sequence
  Oligonucleotide for detection of SNP TSC0029573
ctttctttctttc

SEQ ID NO: 118313 - DNA, 13 bp, Artificial Sequence
  Oligonucleotide for detection of SNP TSC0029574
agaaagaaggtta

SEQ ID NO: 118314 - DNA, 13 bp, Artificial Sequence
  Oligonucleotide for detection of SNP TSC0029574
taaccttctttct

SEQ ID NO: 118315 - DNA, 13 bp, Artificial Sequence
  Oligonucleotide for detection of SNP TSC0029574
agaaagtaggtta

SEQ ID NO: 118316 - DNA, 13 bp, Artificial Sequence
  Oligonucleotide for detection of SNP TSC0029574
taacctactttct

SEQ ID NO: 118317 - DNA, 13 bp, Artificial Sequence
  Oligonucleotide for detection of SNP TSC0029575
gttagtattatag

SEQ ID NO: 118318 - DNA, 13 bp, Artificial Sequence
  Oligonucleotide for detection of SNP TSC0029575
ctataatactaac

SEQ ID NO: 118319 - DNA, 13 bp, Artificial Sequence
  Oligonucleotide for detection of SNP TSC0029575
gttagtgttatag

SEQ ID NO: 118320 - DNA, 13 bp, Artificial Sequence
  Oligonucleotide for detection of SNP TSC0029575
ctataacactaac

SEQ ID NO: 118321 - DNA, 13 bp, Artificial Sequence
  Oligonucleotide for detection of SNP TSC0029575
gttagcgttatag

SEQ ID NO: 118322 - DNA, 13 bp, Artificial Sequence
  Oligonucleotide for detection of SNP TSC0029575
ctataacgctaac

SEQ ID NO: 118323 - DNA, 13 bp, Artificial Sequence
  Oligonucleotide for detection of SNP TSC0029575
ttgtggtgttggy

SEQ ID NO: 118324 - DNA, 13 bp, Artificial Sequence
  Oligonucleotide for detection of SNP TSC0029575
rccaacaccacaa

SEQ ID NO: 118325 - DNA, 13 bp, Artificial Sequence
  Oligonucleotide for detection of SNP TSC0029575
ttgtggcgttggy

SEQ ID NO: 118326 - DNA, 13 bp, Artificial Sequence
  Oligonucleotide for detection of SNP TSC0029575
rccaacgccacaa

SEQ ID NO: 118327 - DNA, 13 bp, Artificial Sequence
  Oligonucleotide for detection of SNP TSC0029576
gagaagggtggaa

SEQ ID NO: 118328 - DNA, 13 bp, Artificial Sequence
  Oligonucleotide for detection of SNP TSC0029576
ttccacccttctc

SEQ ID NO: 118329 - DNA, 13 bp, Artificial Sequence
  Oligonucleotide for detection of SNP TSC0029576
gagaagagtggaa

SEQ ID NO: 118330 - DNA, 13 bp, Artificial Sequence
  Oligonucleotide for detection of SNP TSC0029576
ttccactcttctc

SEQ ID NO: 118331 - DNA, 13 bp, Artificial Sequence
  Oligonucleotide for detection of SNP TSC0029576
gagaagggcggaa

SEQ ID NO: 118332 - DNA, 13 bp, Artificial Sequence
  Oligonucleotide for detection of SNP TSC0029576
ttccgcccttctc

SEQ ID NO: 118333 - DNA, 13 bp, Artificial Sequence
  Oligonucleotide for detection of SNP TSC0029576
gagaagagcggaa

SEQ ID NO: 118334 - DNA, 13 bp, Artificial Sequence
  Oligonucleotide for detection of SNP TSC0029576
ttccgctcttctc

SEQ ID NO: 118335 - DNA, 13 bp, Artificial Sequence
  Oligonucleotide for detection of SNP TSC0029577
tttatgatgaata

SEQ ID NO: 118336 - DNA, 13 bp, Artificial Sequence
  Oligonucleotide for detection of SNP TSC0029577
tattcatcataaa

SEQ ID NO: 118337 - DNA, 13 bp, Artificial Sequence
  Oligonucleotide for detection of SNP TSC0029577
tttatggtgaata

SEQ ID NO: 118338 - DNA, 13 bp, Artificial Sequence
  Oligonucleotide for detection of SNP TSC0029577
tattcaccataaa

SEQ ID NO: 118339 - DNA, 13 bp, Artificial Sequence
  Oligonucleotide for detection of SNP TSC0029578
tttgggaaataaa

SEQ ID NO: 118340 - DNA, 13 bp, Artificial Sequence
  Oligonucleotide for detection of SNP TSC0029578
tttatttcccaaa

SEQ ID NO: 118341 - DNA, 13 bp, Artificial Sequence
  Oligonucleotide for detection of SNP TSC0029578
tttgggtaataaa

SEQ ID NO: 118342 - DNA, 13 bp, Artificial Sequence
  Oligonucleotide for detection of SNP TSC0029578
tttattacccaaa

SEQ ID NO: 118343 - DNA, 13 bp, Artificial Sequence
  Oligonucleotide for detection of SNP TSC0029579
gggtgtgtgtagg

SEQ ID NO: 118344 - DNA, 13 bp, Artificial Sequence
  Oligonucleotide for detection of SNP TSC0029579
cctacacacaccc

SEQ ID NO: 118345 - DNA, 13 bp, Artificial Sequence
  Oligonucleotide for detection of SNP TSC0029579
gggtgtatgtagg

SEQ ID NO: 118346 - DNA, 13 bp, Artificial Sequence
  Oligonucleotide for detection of SNP TSC0029579
cctacatacaccc

SEQ ID NO: 118347 - DNA, 13 bp, Artificial Sequence
  Oligonucleotide for detection of SNP TSC0029580
gggtagaggtgtg

SEQ ID NO: 118348 - DNA, 13 bp, Artificial Sequence
  Oligonucleotide for detection of SNP TSC0029580
cacacctctaccc

SEQ ID NO: 118349 - DNA, 13 bp, Artificial Sequence
  Oligonucleotide for detection of SNP TSC0029581
gtaaagttgtaty

SEQ ID NO: 118350 - DNA, 13 bp, Artificial Sequence
  Oligonucleotide for detection of SNP TSC0029581
ratacaactttac

SEQ ID NO: 118351 - DNA, 13 bp, Artificial Sequence
  Oligonucleotide for detection of SNP TSC0029581
gtaaaggtgtaty

SEQ ID NO: 118352 - DNA, 13 bp, Artificial Sequence
  Oligonucleotide for detection of SNP TSC0029581
ratacacctttac

SEQ ID NO: 118353 - DNA, 13 bp, Artificial Sequence
  Oligonucleotide for detection of SNP TSC0029581
ggtgtagttttgy

SEQ ID NO: 118354 - DNA, 13 bp, Artificial Sequence
  Oligonucleotide for detection of SNP TSC0029581
rcaaaactacacc

SEQ ID NO: 118355 - DNA, 13 bp, Artificial Sequence
  Oligonucleotide for detection of SNP TSC0029581
ggtgtatttttgy

SEQ ID NO: 118356 - DNA, 13 bp, Artificial Sequence
  Oligonucleotide for detection of SNP TSC0029581
rcaaaaatacacc

SEQ ID NO: 118357 - DNA, 13 bp, Artificial Sequence
  Oligonucleotide for detection of SNP TSC0029582
tataaagtaaatt

SEQ ID NO: 118358 - DNA, 13 bp, Artificial Sequence
  Oligonucleotide for detection of SNP TSC0029582
aatttactttata

SEQ ID NO: 118359 - DNA, 13 bp, Artificial Sequence
  Oligonucleotide for detection of SNP TSC0029583
aagatagtgaaga

SEQ ID NO: 118360 - DNA, 13 bp, Artificial Sequence
  Oligonucleotide for detection of SNP TSC0029583
tcttcactatctt

SEQ ID NO: 118361 - DNA, 13 bp, Artificial Sequence
  Oligonucleotide for detection of SNP TSC0029583
aagataatgaaga

SEQ ID NO: 118362 - DNA, 13 bp, Artificial Sequence
  Oligonucleotide for detection of SNP TSC0029583
tcttcattatctt

SEQ ID NO: 118363 - DNA, 13 bp, Artificial Sequence
  Oligonucleotide for detection of SNP TSC0029584
agaaggggtattt

SEQ ID NO: 118364 - DNA, 13 bp, Artificial Sequence
  Oligonucleotide for detection of SNP TSC0029584
aaataccccttct

SEQ ID NO: 118365 - DNA, 13 bp, Artificial Sequence
  Oligonucleotide for detection of SNP TSC0029584
agaaggagtattt

SEQ ID NO: 118366 - DNA, 13 bp, Artificial Sequence
  Oligonucleotide for detection of SNP TSC0029584
aaatactccttct

SEQ ID NO: 118367 - DNA, 13 bp, Artificial Sequence
  Oligonucleotide for detection of SNP TSC0029585
ttattgtttttga

SEQ ID NO: 118368 - DNA, 13 bp, Artificial Sequence
  Oligonucleotide for detection of SNP TSC0029585
tcaaaaacaataa

SEQ ID NO: 118369 - DNA, 13 bp, Artificial Sequence
  Oligonucleotide for detection of SNP TSC0029585
ttattggttttga

SEQ ID NO: 118370 - DNA, 13 bp, Artificial Sequence
  Oligonucleotide for detection of SNP TSC0029585
tcaaaaccaataa

SEQ ID NO: 118371 - DNA, 13 bp, Artificial Sequence
  Oligonucleotide for detection of SNP TSC0029585
ttaaaggtagtgg

SEQ ID NO: 118372 - DNA, 13 bp, Artificial Sequence
  Oligonucleotide for detection of SNP TSC0029585
ccactacctttaa

SEQ ID NO: 118373 - DNA, 13 bp, Artificial Sequence
  Oligonucleotide for detection of SNP TSC0029585
ttaaagttagtgg

SEQ ID NO: 118374 - DNA, 13 bp, Artificial Sequence
  Oligonucleotide for detection of SNP TSC0029585
ccactaactttaa

SEQ ID NO: 118375 - DNA, 13 bp, Artificial Sequence
  Oligonucleotide for detection of SNP TSC0029587
tatttatgtgtag

SEQ ID NO: 118376 - DNA, 13 bp, Artificial Sequence
  Oligonucleotide for detection of SNP TSC0029587
ctacacataaata

SEQ ID NO: 118377 - DNA, 13 bp, Artificial Sequence
  Oligonucleotide for detection of SNP TSC0029587
tatttacgtgtag

SEQ ID NO: 118378 - DNA, 13 bp, Artificial Sequence
  Oligonucleotide for detection of SNP TSC0029587
ctacacgtaaata

SEQ ID NO: 118379 - DNA, 13 bp, Artificial Sequence
  Oligonucleotide for detection of SNP TSC0029587
tatttatgcgtag

SEQ ID NO: 118380 - DNA, 13 bp, Artificial Sequence
  Oligonucleotide for detection of SNP TSC0029587
ctacgcataaata

SEQ ID NO: 118381 - DNA, 13 bp, Artificial Sequence
  Oligonucleotide for detection of SNP TSC0029587
tatttacgcgtag

SEQ ID NO: 118382 - DNA, 13 bp, Artificial Sequence
  Oligonucleotide for detection of SNP TSC0029587
ctacgcgtaaata

SEQ ID NO: 118383 - DNA, 13 bp, Artificial Sequence
  Oligonucleotide for detection of SNP TSC0029587
ttgtgtgtgaatg

SEQ ID NO: 118384 - DNA, 13 bp, Artificial Sequence
  Oligonucleotide for detection of SNP TSC0029587
cattcacacacaa

SEQ ID NO: 118385 - DNA, 13 bp, Artificial Sequence
  Oligonucleotide for detection of SNP TSC0029587
ttgtgtatgaatg

SEQ ID NO: 118386 - DNA, 13 bp, Artificial Sequence
  Oligonucleotide for detection of SNP TSC0029587
cattcatacacaa

SEQ ID NO: 118387 - DNA, 13 bp, Artificial Sequence
  Oligonucleotide for detection of SNP TSC0029587
ttgcgtgtgaatg

SEQ ID NO: 118388 - DNA, 13 bp, Artificial Sequence
  Oligonucleotide for detection of SNP TSC0029587
cattcacacgcaa

SEQ ID NO: 118389 - DNA, 13 bp, Artificial Sequence
  Oligonucleotide for detection of SNP TSC0029587
ttgcgtatgaatg

SEQ ID NO: 118390 - DNA, 13 bp, Artificial Sequence
  Oligonucleotide for detection of SNP TSC0029587
cattcatacgcaa

SEQ ID NO: 118391 - DNA, 13 bp, Artificial Sequence
  Oligonucleotide for detection of SNP TSC0029587
ttgtgcgtgaatg

SEQ ID NO: 118392 - DNA, 13 bp, Artificial Sequence
  Oligonucleotide for detection of SNP TSC0029587
cattcacgcacaa

SEQ ID NO: 118393 - DNA, 13 bp, Artificial Sequence
  Oligonucleotide for detection of SNP TSC0029587
ttgcgcgtgaatg

SEQ ID NO: 118394 - DNA, 13 bp, Artificial Sequence
  Oligonucleotide for detection of SNP TSC0029587
cattcacgcgcaa

SEQ ID NO: 118395 - DNA, 13 bp, Artificial Sequence
  Oligonucleotide for detection of SNP TSC0029588
tgattgatgttta

SEQ ID NO: 118396 - DNA, 13 bp, Artificial Sequence
  Oligonucleotide for detection of SNP TSC0029588
taaacatcaatca

SEQ ID NO: 118397 - DNA, 13 bp, Artificial Sequence
  Oligonucleotide for detection of SNP TSC0029588
tgattggtgttta

SEQ ID NO: 118398 - DNA, 13 bp, Artificial Sequence
  Oligonucleotide for detection of SNP TSC0029588
taaacaccaatca

SEQ ID NO: 118399 - DNA, 13 bp, Artificial Sequence
  Oligonucleotide for detection of SNP TSC0029588
tgatcgatgttta

SEQ ID NO: 118400 - DNA, 13 bp, Artificial Sequence
  Oligonucleotide for detection of SNP TSC0029588
taaacatcgatca

SEQ ID NO: 118401 - DNA, 13 bp, Artificial Sequence
  Oligonucleotide for detection of SNP TSC0029588
tgatcggtgttta

SEQ ID NO: 118402 - DNA, 13 bp, Artificial Sequence
  Oligonucleotide for detection of SNP TSC0029588
taaacaccgatca

SEQ ID NO: 118403 - DNA, 13 bp, Artificial Sequence
  Oligonucleotide for detection of SNP TSC0029589
gataaatgataaa

SEQ ID NO: 118404 - DNA, 13 bp, Artificial Sequence
  Oligonucleotide for detection of SNP TSC0029589
tttatcatttatc

SEQ ID NO: 118405 - DNA, 13 bp, Artificial Sequence
  Oligonucleotide for detection of SNP TSC0029589
gataaacgataaa

SEQ ID NO: 118406 - DNA, 13 bp, Artificial Sequence
  Oligonucleotide for detection of SNP TSC0029589
tttatcgtttatc

SEQ ID NO: 118407 - DNA, 13 bp, Artificial Sequence
  Oligonucleotide for detection of SNP TSC0029590
gttagaagtagag

SEQ ID NO: 118408 - DNA, 13 bp, Artificial Sequence
  Oligonucleotide for detection of SNP TSC0029590
ctctacttctaac

SEQ ID NO: 118409 - DNA, 13 bp, Artificial Sequence
  Oligonucleotide for detection of SNP TSC0029590
gttagaggtagag

SEQ ID NO: 118410 - DNA, 13 bp, Artificial Sequence
  Oligonucleotide for detection of SNP TSC0029590
ctctacctctaac

SEQ ID NO: 118411 - DNA, 13 bp, Artificial Sequence
  Oligonucleotide for detection of SNP TSC0029591
ttgttgatgaatt

SEQ ID NO: 118412 - DNA, 13 bp, Artificial Sequence
  Oligonucleotide for detection of SNP TSC0029591
aattcatcaacaa

SEQ ID NO: 118413 - DNA, 13 bp, Artificial Sequence
  Oligonucleotide for detection of SNP TSC0029591
ttgttggtgaatt

SEQ ID NO: 118414 - DNA, 13 bp, Artificial Sequence
  Oligonucleotide for detection of SNP TSC0029591
aattcaccaacaa

SEQ ID NO: 118415 - DNA, 13 bp, Artificial Sequence
  Oligonucleotide for detection of SNP TSC0029592
aagattagttttg

SEQ ID NO: 118416 - DNA, 13 bp, Artificial Sequence
  Oligonucleotide for detection of SNP TSC0029592
caaaactaatctt

SEQ ID NO: 118417 - DNA, 13 bp, Artificial Sequence
  Oligonucleotide for detection of SNP TSC0029592
aagattggttttg

SEQ ID NO: 118418 - DNA, 13 bp, Artificial Sequence
  Oligonucleotide for detection of SNP TSC0029592
caaaaccaatctt

SEQ ID NO: 118419 - DNA, 13 bp, Artificial Sequence
  Oligonucleotide for detection of SNP TSC0029592
aagatcggttttg

SEQ ID NO: 118420 - DNA, 13 bp, Artificial Sequence
  Oligonucleotide for detection of SNP TSC0029592
caaaaccgatctt

SEQ ID NO: 118421 - DNA, 13 bp, Artificial Sequence
  Oligonucleotide for detection of SNP TSC0029592
tagagttgatttt

SEQ ID NO: 118422 - DNA, 13 bp, Artificial Sequence
  Oligonucleotide for detection of SNP TSC0029592
aaaatcaactcta

SEQ ID NO: 118423 - DNA, 13 bp, Artificial Sequence
  Oligonucleotide for detection of SNP TSC0029592
tagagtcgatttt

SEQ ID NO: 118424 - DNA, 13 bp, Artificial Sequence
  Oligonucleotide for detection of SNP TSC0029592
aaaatcgactcta

SEQ ID NO: 118425 - DNA, 13 bp, Artificial Sequence
  Oligonucleotide for detection of SNP TSC0029595
agtgatgtggaga

SEQ ID NO: 118426 - DNA, 13 bp, Artificial Sequence
  Oligonucleotide for detection of SNP TSC0029595
tctccacatcact

SEQ ID NO: 118427 - DNA, 13 bp, Artificial Sequence
  Oligonucleotide for detection of SNP TSC0029595
agtgatatggaga

SEQ ID NO: 118428 - DNA, 13 bp, Artificial Sequence
  Oligonucleotide for detection of SNP TSC0029595
tctccatatcact

SEQ ID NO: 118429 - DNA, 13 bp, Artificial Sequence
  Oligonucleotide for detection of SNP TSC0029595
agcgatgtggaga

SEQ ID NO: 118430 - DNA, 13 bp, Artificial Sequence
  Oligonucleotide for detection of SNP TSC0029595
tctccacatcgct

SEQ ID NO: 118431 - DNA, 13 bp, Artificial Sequence
  Oligonucleotide for detection of SNP TSC0029595
agcgatatggaga

SEQ ID NO: 118432 - DNA, 13 bp, Artificial Sequence
  Oligonucleotide for detection of SNP TSC0029595
tctccatatcgct

SEQ ID NO: 118433 - DNA, 13 bp, Artificial Sequence
  Oligonucleotide for detection of SNP TSC0029595
agtgacgtggaga

SEQ ID NO: 118434 - DNA, 13 bp, Artificial Sequence
  Oligonucleotide for detection of SNP TSC0029595
tctccacgtcact

SEQ ID NO: 118435 - DNA, 13 bp, Artificial Sequence
  Oligonucleotide for detection of SNP TSC0029595
agcgacgtggaga

SEQ ID NO: 118436 - DNA, 13 bp, Artificial Sequence
  Oligonucleotide for detection of SNP TSC0029595
tctccacgtcgct

SEQ ID NO: 118437 - DNA, 13 bp, Artificial Sequence
  Oligonucleotide for detection of SNP TSC0029596
tgtatatgaagat

SEQ ID NO: 118438 - DNA, 13 bp, Artificial Sequence
  Oligonucleotide for detection of SNP TSC0029596
atcttcatataca

SEQ ID NO: 118439 - DNA, 13 bp, Artificial Sequence
  Oligonucleotide for detection of SNP TSC0029596
tgtatacgaagat

SEQ ID NO: 118440 - DNA, 13 bp, Artificial Sequence
  Oligonucleotide for detection of SNP TSC0029596
atcttcgtataca

SEQ ID NO: 118441 - DNA, 13 bp, Artificial Sequence
  Oligonucleotide for detection of SNP TSC0029597
atatttgttttag

SEQ ID NO: 118442 - DNA, 13 bp, Artificial Sequence
  Oligonucleotide for detection of SNP TSC0029597
ctaaaacaaatat

SEQ ID NO: 118443 - DNA, 13 bp, Artificial Sequence
  Oligonucleotide for detection of SNP TSC0029597
atattttttttag

SEQ ID NO: 118444 - DNA, 13 bp, Artificial Sequence
  Oligonucleotide for detection of SNP TSC0029597
ctaaaaaaaatat

SEQ ID NO: 118445 - DNA, 13 bp, Artificial Sequence
  Oligonucleotide for detection of SNP TSC0029597
atattcgttttag

SEQ ID NO: 118446 - DNA, 13 bp, Artificial Sequence
  Oligonucleotide for detection of SNP TSC0029597
ctaaaacgaatat

SEQ ID NO: 118447 - DNA, 13 bp, Artificial Sequence
  Oligonucleotide for detection of SNP TSC0029597
ttaaagtgaatgt

SEQ ID NO: 118448 - DNA, 13 bp, Artificial Sequence
  Oligonucleotide for detection of SNP TSC0029597
acattcactttaa

SEQ ID NO: 118449 - DNA, 13 bp, Artificial Sequence
  Oligonucleotide for detection of SNP TSC0029597
ttaaagagaatgt

SEQ ID NO: 118450 - DNA, 13 bp, Artificial Sequence
  Oligonucleotide for detection of SNP TSC0029597
acattctctttaa

SEQ ID NO: 118451 - DNA, 13 bp, Artificial Sequence
  Oligonucleotide for detection of SNP TSC0029597
ttaaagcgaatgt

SEQ ID NO: 118452 - DNA, 13 bp, Artificial Sequence
  Oligonucleotide for detection of SNP TSC0029597
acattcgctttaa

SEQ ID NO: 118453 - DNA, 13 bp, Artificial Sequence
  Oligonucleotide for detection of SNP TSC0029598
taggttgttagta

SEQ ID NO: 118454 - DNA, 13 bp, Artificial Sequence
  Oligonucleotide for detection of SNP TSC0029598
tactaacaaccta

SEQ ID NO: 118455 - DNA, 13 bp, Artificial Sequence
  Oligonucleotide for detection of SNP TSC0029598
taggttattagta

SEQ ID NO: 118456 - DNA, 13 bp, Artificial Sequence
  Oligonucleotide for detection of SNP TSC0029598
tactaataaccta

SEQ ID NO: 118457 - DNA, 13 bp, Artificial Sequence
  Oligonucleotide for detection of SNP TSC0029599
gtttagattgtta

SEQ ID NO: 118458 - DNA, 13 bp, Artificial Sequence
  Oligonucleotide for detection of SNP TSC0029599
taacaatctaaac

SEQ ID NO: 118459 - DNA, 13 bp, Artificial Sequence
  Oligonucleotide for detection of SNP TSC0029600
gtattggttttgg

SEQ ID NO: 118460 - DNA, 13 bp, Artificial Sequence
  Oligonucleotide for detection of SNP TSC0029600
ccaaaaccaatac

SEQ ID NO: 118461 - DNA, 13 bp, Artificial Sequence
  Oligonucleotide for detection of SNP TSC0029600
gtattgtttttgg

SEQ ID NO: 118462 - DNA, 13 bp, Artificial Sequence
  Oligonucleotide for detection of SNP TSC0029600
ccaaaaacaatac

SEQ ID NO: 118463 - DNA, 13 bp, Artificial Sequence
  Oligonucleotide for detection of SNP TSC0029600
ttaaagttagtay

SEQ ID NO: 118464 - DNA, 13 bp, Artificial Sequence
  Oligonucleotide for detection of SNP TSC0029600
rtactaactttaa

SEQ ID NO: 118465 - DNA, 13 bp, Artificial Sequence
  Oligonucleotide for detection of SNP TSC0029600
ttaaagatagtay

SEQ ID NO: 118466 - DNA, 13 bp, Artificial Sequence
  Oligonucleotide for detection of SNP TSC0029600
rtactatctttaa

SEQ ID NO: 118467 - DNA, 13 bp, Artificial Sequence
  Oligonucleotide for detection of SNP TSC0029601
agatttgtggtta

SEQ ID NO: 118468 - DNA, 13 bp, Artificial Sequence
  Oligonucleotide for detection of SNP TSC0029601
taaccacaaatct

SEQ ID NO: 118469 - DNA, 13 bp, Artificial Sequence
  Oligonucleotide for detection of SNP TSC0029601
agatttttggtta

SEQ ID NO: 118470 - DNA, 13 bp, Artificial Sequence
  Oligonucleotide for detection of SNP TSC0029601
taaccaaaaatct

SEQ ID NO: 118471 - DNA, 13 bp, Artificial Sequence
  Oligonucleotide for detection of SNP TSC0029601
agattcgtggtta

SEQ ID NO: 118472 - DNA, 13 bp, Artificial Sequence
  Oligonucleotide for detection of SNP TSC0029601
taaccacgaatct

SEQ ID NO: 118473 - DNA, 13 bp, Artificial Sequence
  Oligonucleotide for detection of SNP TSC0029601
taattaagagttt

SEQ ID NO: 118474 - DNA, 13 bp, Artificial Sequence
  Oligonucleotide for detection of SNP TSC0029601
aaactcttaatta

SEQ ID NO: 118475 - DNA, 13 bp, Artificial Sequence
  Oligonucleotide for detection of SNP TSC0029603
ttggatatgggtg

SEQ ID NO: 118476 - DNA, 13 bp, Artificial Sequence
  Oligonucleotide for detection of SNP TSC0029603
cacccatatccaa

SEQ ID NO: 118477 - DNA, 13 bp, Artificial Sequence
  Oligonucleotide for detection of SNP TSC0029603
ttggatgtgggtg

SEQ ID NO: 118478 - DNA, 13 bp, Artificial Sequence
  Oligonucleotide for detection of SNP TSC0029603
cacccacatccaa

SEQ ID NO: 118479 - DNA, 13 bp, Artificial Sequence
  Oligonucleotide for detection of SNP TSC0029603
ttggatatgggcg

SEQ ID NO: 118480 - DNA, 13 bp, Artificial Sequence
  Oligonucleotide for detection of SNP TSC0029603
cgcccatatccaa

SEQ ID NO: 118481 - DNA, 13 bp, Artificial Sequence
  Oligonucleotide for detection of SNP TSC0029603
ttggacgtgggtg

SEQ ID NO: 118482 - DNA, 13 bp, Artificial Sequence
  Oligonucleotide for detection of SNP TSC0029603
cacccacgtccaa

SEQ ID NO: 118483 - DNA, 13 bp, Artificial Sequence
  Oligonucleotide for detection of SNP TSC0029603
ttggatgtgggcg

SEQ ID NO: 118484 - DNA, 13 bp, Artificial Sequence
  Oligonucleotide for detection of SNP TSC0029603
cgcccacatccaa

SEQ ID NO: 118485 - DNA, 13 bp, Artificial Sequence
  Oligonucleotide for detection of SNP TSC0029603
ttggacgtgggcg

SEQ ID NO: 118486 - DNA, 13 bp, Artificial Sequence
  Oligonucleotide for detection of SNP TSC0029603
cgcccacgtccaa

SEQ ID NO: 118487 - DNA, 13 bp, Artificial Sequence
  Oligonucleotide for detection of SNP TSC0029603
cgtttatgtttag

SEQ ID NO: 118488 - DNA, 13 bp, Artificial Sequence
  Oligonucleotide for detection of SNP TSC0029603
ctaaacataaacg

SEQ ID NO: 118489 - DNA, 13 bp, Artificial Sequence
  Oligonucleotide for detection of SNP TSC0029603
cgtttacgtttag

SEQ ID NO: 118490 - DNA, 13 bp, Artificial Sequence
  Oligonucleotide for detection of SNP TSC0029603
ctaaacgtaaacg

SEQ ID NO: 118491 - DNA, 13 bp, Artificial Sequence
  Oligonucleotide for detection of SNP TSC0029604
ggtgttggaaagt

SEQ ID NO: 118492 - DNA, 13 bp, Artificial Sequence
  Oligonucleotide for detection of SNP TSC0029604
actttccaacacc

SEQ ID NO: 118493 - DNA, 13 bp, Artificial Sequence
  Oligonucleotide for detection of SNP TSC0029604
ggtgtttgaaagt

SEQ ID NO: 118494 - DNA, 13 bp, Artificial Sequence
  Oligonucleotide for detection of SNP TSC0029604
actttcaaacacc

SEQ ID NO: 118495 - DNA, 13 bp, Artificial Sequence
  Oligonucleotide for detection of SNP TSC0029604
attttttagtaty

SEQ ID NO: 118496 - DNA, 13 bp, Artificial Sequence
  Oligonucleotide for detection of SNP TSC0029604
ratactaaaaaat

SEQ ID NO: 118497 - DNA, 13 bp, Artificial Sequence
  Oligonucleotide for detection of SNP TSC0029604
atttttaagtaty

SEQ ID NO: 118498 - DNA, 13 bp, Artificial Sequence
  Oligonucleotide for detection of SNP TSC0029604
ratacttaaaaat

SEQ ID NO: 118499 - DNA, 13 bp, Artificial Sequence
  Oligonucleotide for detection of SNP TSC0029605
ttgggttgtattt

SEQ ID NO: 118500 - DNA, 13 bp, Artificial Sequence
  Oligonucleotide for detection of SNP TSC0029605
aaatacaacccaa

SEQ ID NO: 118501 - DNA, 13 bp, Artificial Sequence
  Oligonucleotide for detection of SNP TSC0029605
tcgggttgtattt

SEQ ID NO: 118502 - DNA, 13 bp, Artificial Sequence
  Oligonucleotide for detection of SNP TSC0029605
aaatacaacccga

SEQ ID NO: 118503 - DNA, 13 bp, Artificial Sequence
  Oligonucleotide for detection of SNP TSC0029605
ttgggtcgtattt

SEQ ID NO: 118504 - DNA, 13 bp, Artificial Sequence
  Oligonucleotide for detection of SNP TSC0029605
aaatacgacccaa

SEQ ID NO: 118505 - DNA, 13 bp, Artificial Sequence
  Oligonucleotide for detection of SNP TSC0029605
tcgggtcgtattt

SEQ ID NO: 118506 - DNA, 13 bp, Artificial Sequence
  Oligonucleotide for detection of SNP TSC0029605
aaatacgacccga

SEQ ID NO: 118507 - DNA, 13 bp, Artificial Sequence
  Oligonucleotide for detection of SNP TSC0029605
agatgtggtttga

SEQ ID NO: 118508 - DNA, 13 bp, Artificial Sequence
  Oligonucleotide for detection of SNP TSC0029605
tcaaaccacatct

SEQ ID NO: 118509 - DNA, 13 bp, Artificial Sequence
  Oligonucleotide for detection of SNP TSC0029605
agatgtagtttga

SEQ ID NO: 118510 - DNA, 13 bp, Artificial Sequence
  Oligonucleotide for detection of SNP TSC0029605
tcaaactacatct

SEQ ID NO: 118511 - DNA, 13 bp, Artificial Sequence
  Oligonucleotide for detection of SNP TSC0029605
agatgcggtttga

SEQ ID NO: 118512 - DNA, 13 bp, Artificial Sequence
  Oligonucleotide for detection of SNP TSC0029605
tcaaaccgcatct

SEQ ID NO: 118513 - DNA, 13 bp, Artificial Sequence
  Oligonucleotide for detection of SNP TSC0029605
agatgtagttcga

SEQ ID NO: 118514 - DNA, 13 bp, Artificial Sequence
  Oligonucleotide for detection of SNP TSC0029605
tcgaactacatct

SEQ ID NO: 118515 - DNA, 13 bp, Artificial Sequence
  Oligonucleotide for detection of SNP TSC0029605
agatgtggttcga

SEQ ID NO: 118516 - DNA, 13 bp, Artificial Sequence
  Oligonucleotide for detection of SNP TSC0029605
tcgaaccacatct

SEQ ID NO: 118517 - DNA, 13 bp, Artificial Sequence
  Oligonucleotide for detection of SNP TSC0029605
agatgcggttcga

SEQ ID NO: 118518 - DNA, 13 bp, Artificial Sequence
  Oligonucleotide for detection of SNP TSC0029605
tcgaaccgcatct

SEQ ID NO: 118519 - DNA, 13 bp, Artificial Sequence
  Oligonucleotide for detection of SNP TSC0029606
tatgagaatataa

SEQ ID NO: 118520 - DNA, 13 bp, Artificial Sequence
  Oligonucleotide for detection of SNP TSC0029606
ttatattctcata

SEQ ID NO: 118521 - DNA, 13 bp, Artificial Sequence
  Oligonucleotide for detection of SNP TSC0029606
tatgagtatataa

SEQ ID NO: 118522 - DNA, 13 bp, Artificial Sequence
  Oligonucleotide for detection of SNP TSC0029606
ttatatactcata

SEQ ID NO: 118523 - DNA, 13 bp, Artificial Sequence
  Oligonucleotide for detection of SNP TSC0029606
ttgtatttttatg

SEQ ID NO: 118524 - DNA, 13 bp, Artificial Sequence
  Oligonucleotide for detection of SNP TSC0029606
cataaaaatacaa

SEQ ID NO: 118525 - DNA, 13 bp, Artificial Sequence
  Oligonucleotide for detection of SNP TSC0029606
ttgtatatttatg

SEQ ID NO: 118526 - DNA, 13 bp, Artificial Sequence
  Oligonucleotide for detection of SNP TSC0029606
cataaatatacaa

SEQ ID NO: 118527 - DNA, 13 bp, Artificial Sequence
  Oligonucleotide for detection of SNP TSC0029607
ttagtaagttttg

SEQ ID NO: 118528 - DNA, 13 bp, Artificial Sequence
  Oligonucleotide for detection of SNP TSC0029607
caaaacttactaa

SEQ ID NO: 118529 - DNA, 13 bp, Artificial Sequence
  Oligonucleotide for detection of SNP TSC0029607
ttagtaggttttg

SEQ ID NO: 118530 - DNA, 13 bp, Artificial Sequence
  Oligonucleotide for detection of SNP TSC0029607
caaaacctactaa

SEQ ID NO: 118531 - DNA, 13 bp, Artificial Sequence
  Oligonucleotide for detection of SNP TSC0029610
gggtgtagggatg

SEQ ID NO: 118532 - DNA, 13 bp, Artificial Sequence
  Oligonucleotide for detection of SNP TSC0029610
catccctacaccc

SEQ ID NO: 118533 - DNA, 13 bp, Artificial Sequence
  Oligonucleotide for detection of SNP TSC0029610
gggtgtggggatg

SEQ ID NO: 118534 - DNA, 13 bp, Artificial Sequence
  Oligonucleotide for detection of SNP TSC0029610
catccccacaccc

SEQ ID NO: 118535 - DNA, 13 bp, Artificial Sequence
  Oligonucleotide for detection of SNP TSC0029610
gggtgcggggatg

SEQ ID NO: 118536 - DNA, 13 bp, Artificial Sequence
  Oligonucleotide for detection of SNP TSC0029610
catccccgcaccc

SEQ ID NO: 118537 - DNA, 13 bp, Artificial Sequence
  Oligonucleotide for detection of SNP TSC0029610
tatttttgtatty

SEQ ID NO: 118538 - DNA, 13 bp, Artificial Sequence
  Oligonucleotide for detection of SNP TSC0029610
raatacaaaaata

SEQ ID NO: 118539 - DNA, 13 bp, Artificial Sequence
  Oligonucleotide for detection of SNP TSC0029610
tattttcgtatty

SEQ ID NO: 118540 - DNA, 13 bp, Artificial Sequence
  Oligonucleotide for detection of SNP TSC0029610
raatacgaaaata

SEQ ID NO: 118541 - DNA, 13 bp, Artificial Sequence
  Oligonucleotide for detection of SNP TSC0029611
ttgtttatattag

SEQ ID NO: 118542 - DNA, 13 bp, Artificial Sequence
  Oligonucleotide for detection of SNP TSC0029611
ctaatataaacaa

SEQ ID NO: 118543 - DNA, 13 bp, Artificial Sequence
  Oligonucleotide for detection of SNP TSC0029612
atgaaaaaaaatt

SEQ ID NO: 118544 - DNA, 13 bp, Artificial Sequence
  Oligonucleotide for detection of SNP TSC0029612
aattttttttcat

SEQ ID NO: 118545 - DNA, 13 bp, Artificial Sequence
  Oligonucleotide for detection of SNP TSC0029612
atgaaagaaaatt

SEQ ID NO: 118546 - DNA, 13 bp, Artificial Sequence
  Oligonucleotide for detection of SNP TSC0029612
aattttctttcat

SEQ ID NO: 118547 - DNA, 13 bp, Artificial Sequence
  Oligonucleotide for detection of SNP TSC0029613
ggaataattttat

SEQ ID NO: 118548 - DNA, 13 bp, Artificial Sequence
  Oligonucleotide for detection of SNP TSC0029613
ataaaattattcc

SEQ ID NO: 118549 - DNA, 13 bp, Artificial Sequence
  Oligonucleotide for detection of SNP TSC0029613
ggaatagttttat

SEQ ID NO: 118550 - DNA, 13 bp, Artificial Sequence
  Oligonucleotide for detection of SNP TSC0029613
ataaaactattcc

SEQ ID NO: 118551 - DNA, 13 bp, Artificial Sequence
  Oligonucleotide for detection of SNP TSC0029616
gttgttaggtatt

SEQ ID NO: 118552 - DNA, 13 bp, Artificial Sequence
  Oligonucleotide for detection of SNP TSC0029616
aatacctaacaac

SEQ ID NO: 118553 - DNA, 13 bp, Artificial Sequence
  Oligonucleotide for detection of SNP TSC0029616
gttgttgggtatt

SEQ ID NO: 118554 - DNA, 13 bp, Artificial Sequence
  Oligonucleotide for detection of SNP TSC0029616
aatacccaacaac

SEQ ID NO: 118555 - DNA, 13 bp, Artificial Sequence
  Oligonucleotide for detection of SNP TSC0029616
gttgtcgggtatt

SEQ ID NO: 118556 - DNA, 13 bp, Artificial Sequence
  Oligonucleotide for detection of SNP TSC0029616
aatacccgacaac

SEQ ID NO: 118557 - DNA, 13 bp, Artificial Sequence
  Oligonucleotide for detection of SNP TSC0029616
agtgttcggtagy

SEQ ID NO: 118558 - DNA, 13 bp, Artificial Sequence
  Oligonucleotide for detection of SNP TSC0029616
rctaccgaacact

SEQ ID NO: 118559 - DNA, 13 bp, Artificial Sequence
  Oligonucleotide for detection of SNP TSC0029617
gtttagggttttt

SEQ ID NO: 118560 - DNA, 13 bp, Artificial Sequence
  Oligonucleotide for detection of SNP TSC0029617
aaaaaccctaaac

SEQ ID NO: 118561 - DNA, 13 bp, Artificial Sequence
  Oligonucleotide for detection of SNP TSC0029617
gtttagagttttt

SEQ ID NO: 118562 - DNA, 13 bp, Artificial Sequence
  Oligonucleotide for detection of SNP TSC0029617
aaaaactctaaac

SEQ ID NO: 118563 - DNA, 13 bp, Artificial Sequence
  Oligonucleotide for detection of SNP TSC0029618
gtggttatggtty

SEQ ID NO: 118564 - DNA, 13 bp, Artificial Sequence
  Oligonucleotide for detection of SNP TSC0029618
raaccataaccac

SEQ ID NO: 118565 - DNA, 13 bp, Artificial Sequence
  Oligonucleotide for detection of SNP TSC0029618
gtggttgtggtty

SEQ ID NO: 118566 - DNA, 13 bp, Artificial Sequence
  Oligonucleotide for detection of SNP TSC0029618
raaccacaaccac

SEQ ID NO: 118567 - DNA, 13 bp, Artificial Sequence
  Oligonucleotide for detection of SNP TSC0029618
gcggttatggtty

SEQ ID NO: 118568 - DNA, 13 bp, Artificial Sequence
  Oligonucleotide for detection of SNP TSC0029618
raaccataaccgc

SEQ ID NO: 118569 - DNA, 13 bp, Artificial Sequence
  Oligonucleotide for detection of SNP TSC0029618
gcggttgtggtty

SEQ ID NO: 118570 - DNA, 13 bp, Artificial Sequence
  Oligonucleotide for detection of SNP TSC0029618
raaccacaaccgc

SEQ ID NO: 118571 - DNA, 13 bp, Artificial Sequence
  Oligonucleotide for detection of SNP TSC0029618
gtggttacggtty

SEQ ID NO: 118572 - DNA, 13 bp, Artificial Sequence
  Oligonucleotide for detection of SNP TSC0029618
raaccgtaaccac

SEQ ID NO: 118573 - DNA, 13 bp, Artificial Sequence
  Oligonucleotide for detection of SNP TSC0029618
gtggttgcggtty

SEQ ID NO: 118574 - DNA, 13 bp, Artificial Sequence
  Oligonucleotide for detection of SNP TSC0029618
raaccgcaaccac

SEQ ID NO: 118575 - DNA, 13 bp, Artificial Sequence
  Oligonucleotide for detection of SNP TSC0029618
gcggttacggtty

SEQ ID NO: 118576 - DNA, 13 bp, Artificial Sequence
  Oligonucleotide for detection of SNP TSC0029618
raaccgtaaccgc

SEQ ID NO: 118577 - DNA, 13 bp, Artificial Sequence
  Oligonucleotide for detection of SNP TSC0029618
gcggttgcggtty

SEQ ID NO: 118578 - DNA, 13 bp, Artificial Sequence
  Oligonucleotide for detection of SNP TSC0029618
raaccgcaaccgc

SEQ ID NO: 118579 - DNA, 13 bp, Artificial Sequence
  Oligonucleotide for detection of SNP TSC0029619
tttaatatatttt

SEQ ID NO: 118580 - DNA, 13 bp, Artificial Sequence
  Oligonucleotide for detection of SNP TSC0029619
aaaatatattaaa

SEQ ID NO: 118581 - DNA, 13 bp, Artificial Sequence
  Oligonucleotide for detection of SNP TSC0029619
tttaatgtatttt

SEQ ID NO: 118582 - DNA, 13 bp, Artificial Sequence
  Oligonucleotide for detection of SNP TSC0029619
aaaatacattaaa

SEQ ID NO: 118583 - DNA, 13 bp, Artificial Sequence
  Oligonucleotide for detection of SNP TSC0029619
tttaacgtatttt

SEQ ID NO: 118584 - DNA, 13 bp, Artificial Sequence
  Oligonucleotide for detection of SNP TSC0029619
aaaatacgttaaa

SEQ ID NO: 118585 - DNA, 13 bp, Artificial Sequence
  Oligonucleotide for detection of SNP TSC0029619
agaatatgttgga

SEQ ID NO: 118586 - DNA, 13 bp, Artificial Sequence
  Oligonucleotide for detection of SNP TSC0029619
tccaacatattct

SEQ ID NO: 118587 - DNA, 13 bp, Artificial Sequence
  Oligonucleotide for detection of SNP TSC0029619
agaatacgttgga

SEQ ID NO: 118588 - DNA, 13 bp, Artificial Sequence
  Oligonucleotide for detection of SNP TSC0029619
tccaacgtattct

SEQ ID NO: 118589 - DNA, 13 bp, Artificial Sequence
  Oligonucleotide for detection of SNP TSC0029620
agtagaaatgagg

SEQ ID NO: 118590 - DNA, 13 bp, Artificial Sequence
  Oligonucleotide for detection of SNP TSC0029620
cctcatttctact

SEQ ID NO: 118591 - DNA, 13 bp, Artificial Sequence
  Oligonucleotide for detection of SNP TSC0029620
agtagatatgagg

SEQ ID NO: 118592 - DNA, 13 bp, Artificial Sequence
  Oligonucleotide for detection of SNP TSC0029620
cctcatatctact

SEQ ID NO: 118593 - DNA, 13 bp, Artificial Sequence
  Oligonucleotide for detection of SNP TSC0029620
agtagaaacgagg

SEQ ID NO: 118594 - DNA, 13 bp, Artificial Sequence
  Oligonucleotide for detection of SNP TSC0029620
cctcgtttctact

SEQ ID NO: 118595 - DNA, 13 bp, Artificial Sequence
  Oligonucleotide for detection of SNP TSC0029620
agtagatacgagg

SEQ ID NO: 118596 - DNA, 13 bp, Artificial Sequence
  Oligonucleotide for detection of SNP TSC0029620
cctcgtatctact

SEQ ID NO: 118597 - DNA, 13 bp, Artificial Sequence
  Oligonucleotide for detection of SNP TSC0029620
ttttgtttttatt

SEQ ID NO: 118598 - DNA, 13 bp, Artificial Sequence
  Oligonucleotide for detection of SNP TSC0029620
aataaaaacaaaa

SEQ ID NO: 118599 - DNA, 13 bp, Artificial Sequence
  Oligonucleotide for detection of SNP TSC0029620
ttttgtgtttatt

SEQ ID NO: 118600 - DNA, 13 bp, Artificial Sequence
  Oligonucleotide for detection of SNP TSC0029620
aataaacacaaaa

SEQ ID NO: 118601 - DNA, 13 bp, Artificial Sequence
  Oligonucleotide for detection of SNP TSC0029620
tttcgtttttatt

SEQ ID NO: 118602 - DNA, 13 bp, Artificial Sequence
  Oligonucleotide for detection of SNP TSC0029620
aataaaaacgaaa

SEQ ID NO: 118603 - DNA, 13 bp, Artificial Sequence
  Oligonucleotide for detection of SNP TSC0029620
tttcgtgtttatt

SEQ ID NO: 118604 - DNA, 13 bp, Artificial Sequence
  Oligonucleotide for detection of SNP TSC0029620
aataaacacgaaa

SEQ ID NO: 118605 - DNA, 13 bp, Artificial Sequence
  Oligonucleotide for detection of SNP TSC0029621
gtagaaatgaggg

SEQ ID NO: 118606 - DNA, 13 bp, Artificial Sequence
  Oligonucleotide for detection of SNP TSC0029621
ccctcatttctac

SEQ ID NO: 118607 - DNA, 13 bp, Artificial Sequence
  Oligonucleotide for detection of SNP TSC0029621
gtagaagtgaggg

SEQ ID NO: 118608 - DNA, 13 bp, Artificial Sequence
  Oligonucleotide for detection of SNP TSC0029621
ccctcacttctac

SEQ ID NO: 118609 - DNA, 13 bp, Artificial Sequence
  Oligonucleotide for detection of SNP TSC0029621
gtagaaacgaggg

SEQ ID NO: 118610 - DNA, 13 bp, Artificial Sequence
  Oligonucleotide for detection of SNP TSC0029621
ccctcgtttctac

SEQ ID NO: 118611 - DNA, 13 bp, Artificial Sequence
  Oligonucleotide for detection of SNP TSC0029621
gtagaagcgaggg

SEQ ID NO: 118612 - DNA, 13 bp, Artificial Sequence
  Oligonucleotide for detection of SNP TSC0029621
ccctcgcttctac

SEQ ID NO: 118613 - DNA, 13 bp, Artificial Sequence
  Oligonucleotide for detection of SNP TSC0029622
tagtataaagtay

SEQ ID NO: 118614 - DNA, 13 bp, Artificial Sequence
  Oligonucleotide for detection of SNP TSC0029622
rtactttatacta

SEQ ID NO: 118615 - DNA, 13 bp, Artificial Sequence
  Oligonucleotide for detection of SNP TSC0029622
tagtatgaagtay

SEQ ID NO: 118616 - DNA, 13 bp, Artificial Sequence
  Oligonucleotide for detection of SNP TSC0029622
rtacttcatacta

SEQ ID NO: 118617 - DNA, 13 bp, Artificial Sequence
  Oligonucleotide for detection of SNP TSC0029622
tagtacgaagtay

SEQ ID NO: 118618 - DNA, 13 bp, Artificial Sequence
  Oligonucleotide for detection of SNP TSC0029622
rtacttcgtacta

SEQ ID NO: 118619 - DNA, 13 bp, Artificial Sequence
  Oligonucleotide for detection of SNP TSC0029622
gtattttgtatta

SEQ ID NO: 118620 - DNA, 13 bp, Artificial Sequence
  Oligonucleotide for detection of SNP TSC0029622
taatacaaaatac

SEQ ID NO: 118621 - DNA, 13 bp, Artificial Sequence
  Oligonucleotide for detection of SNP TSC0029622
gtatttcgtatta

SEQ ID NO: 118622 - DNA, 13 bp, Artificial Sequence
  Oligonucleotide for detection of SNP TSC0029622
taatacgaaatac

SEQ ID NO: 118623 - DNA, 13 bp, Artificial Sequence
  Oligonucleotide for detection of SNP TSC0029623
ataaatatatagt

SEQ ID NO: 118624 - DNA, 13 bp, Artificial Sequence
  Oligonucleotide for detection of SNP TSC0029623
actatatatttat

SEQ ID NO: 118625 - DNA, 13 bp, Artificial Sequence
  Oligonucleotide for detection of SNP TSC0029623
ataaatgtatagt

SEQ ID NO: 118626 - DNA, 13 bp, Artificial Sequence
  Oligonucleotide for detection of SNP TSC0029623
actatacatttat

SEQ ID NO: 118627 - DNA, 13 bp, Artificial Sequence
  Oligonucleotide for detection of SNP TSC0029623
ataaacgtatagt

SEQ ID NO: 118628 - DNA, 13 bp, Artificial Sequence
  Oligonucleotide for detection of SNP TSC0029623
actatacgtttat

SEQ ID NO: 118629 - DNA, 13 bp, Artificial Sequence
  Oligonucleotide for detection of SNP TSC0029623
attatgtgtttgt

SEQ ID NO: 118630 - DNA, 13 bp, Artificial Sequence
  Oligonucleotide for detection of SNP TSC0029623
acaaacacataat

SEQ ID NO: 118631 - DNA, 13 bp, Artificial Sequence
  Oligonucleotide for detection of SNP TSC0029623
attatgcgtttgt

SEQ ID NO: 118632 - DNA, 13 bp, Artificial Sequence
  Oligonucleotide for detection of SNP TSC0029623
acaaacgcataat

SEQ ID NO: 118633 - DNA, 13 bp, Artificial Sequence
  Oligonucleotide for detection of SNP TSC0029624
ttttaaatgttga

SEQ ID NO: 118634 - DNA, 13 bp, Artificial Sequence
  Oligonucleotide for detection of SNP TSC0029624
tcaacatttaaaa

SEQ ID NO: 118635 - DNA, 13 bp, Artificial Sequence
  Oligonucleotide for detection of SNP TSC0029624
ttttaagtgttga

SEQ ID NO: 118636 - DNA, 13 bp, Artificial Sequence
  Oligonucleotide for detection of SNP TSC0029624
tcaacacttaaaa

SEQ ID NO: 118637 - DNA, 13 bp, Artificial Sequence
  Oligonucleotide for detection of SNP TSC0029625
tggttaaagaaaa

SEQ ID NO: 118638 - DNA, 13 bp, Artificial Sequence
  Oligonucleotide for detection of SNP TSC0029625
ttttctttaacca

SEQ ID NO: 118639 - DNA, 13 bp, Artificial Sequence
  Oligonucleotide for detection of SNP TSC0029625
tggttagagaaaa

SEQ ID NO: 118640 - DNA, 13 bp, Artificial Sequence
  Oligonucleotide for detection of SNP TSC0029625
ttttctctaacca

SEQ ID NO: 118641 - DNA, 13 bp, Artificial Sequence
  Oligonucleotide for detection of SNP TSC0029626
agttttgtggaaa

SEQ ID NO: 118642 - DNA, 13 bp, Artificial Sequence
  Oligonucleotide for detection of SNP TSC0029626
tttccacaaaact

SEQ ID NO: 118643 - DNA, 13 bp, Artificial Sequence
  Oligonucleotide for detection of SNP TSC0029626
agttttatggaaa

SEQ ID NO: 118644 - DNA, 13 bp, Artificial Sequence
  Oligonucleotide for detection of SNP TSC0029626
tttccataaaact

SEQ ID NO: 118645 - DNA, 13 bp, Artificial Sequence
  Oligonucleotide for detection of SNP TSC0029627
ggtattaatttay

SEQ ID NO: 118646 - DNA, 13 bp, Artificial Sequence
  Oligonucleotide for detection of SNP TSC0029627
rtaaattaatacc

SEQ ID NO: 118647 - DNA, 13 bp, Artificial Sequence
  Oligonucleotide for detection of SNP TSC0029627
ggtattgatttay

SEQ ID NO: 118648 - DNA, 13 bp, Artificial Sequence
  Oligonucleotide for detection of SNP TSC0029627
rtaaatcaatacc

SEQ ID NO: 118649 - DNA, 13 bp, Artificial Sequence
  Oligonucleotide for detection of SNP TSC0029628
gtggatgtaatty

SEQ ID NO: 118650 - DNA, 13 bp, Artificial Sequence
  Oligonucleotide for detection of SNP TSC0029628
raattacatccac

SEQ ID NO: 118651 - DNA, 13 bp, Artificial Sequence
  Oligonucleotide for detection of SNP TSC0029628
gtggatttaatty

SEQ ID NO: 118652 - DNA, 13 bp, Artificial Sequence
  Oligonucleotide for detection of SNP TSC0029628
raattaaatccac

SEQ ID NO: 118653 - DNA, 13 bp, Artificial Sequence
  Oligonucleotide for detection of SNP TSC0029628
gcggatgtaatty

SEQ ID NO: 118654 - DNA, 13 bp, Artificial Sequence
  Oligonucleotide for detection of SNP TSC0029628
raattacatccgc

SEQ ID NO: 118655 - DNA, 13 bp, Artificial Sequence
  Oligonucleotide for detection of SNP TSC0029628
gcggatttaatty

SEQ ID NO: 118656 - DNA, 13 bp, Artificial Sequence
  Oligonucleotide for detection of SNP TSC0029628
raattaaatccgc

SEQ ID NO: 118657 - DNA, 13 bp, Artificial Sequence
  Oligonucleotide for detection of SNP TSC0029628
gagttatatttgy

SEQ ID NO: 118658 - DNA, 13 bp, Artificial Sequence
  Oligonucleotide for detection of SNP TSC0029628
rcaaatataactc

SEQ ID NO: 118659 - DNA, 13 bp, Artificial Sequence
  Oligonucleotide for detection of SNP TSC0029628
gagttaaatttgy

SEQ ID NO: 118660 - DNA, 13 bp, Artificial Sequence
  Oligonucleotide for detection of SNP TSC0029628
rcaaatttaactc

SEQ ID NO: 118661 - DNA, 13 bp, Artificial Sequence
  Oligonucleotide for detection of SNP TSC0029628
gagttatattcgy

SEQ ID NO: 118662 - DNA, 13 bp, Artificial Sequence
  Oligonucleotide for detection of SNP TSC0029628
rcgaatataactc

SEQ ID NO: 118663 - DNA, 13 bp, Artificial Sequence
  Oligonucleotide for detection of SNP TSC0029628
gagttaaattcgy

SEQ ID NO: 118664 - DNA, 13 bp, Artificial Sequence
  Oligonucleotide for detection of SNP TSC0029628
rcgaatttaactc

SEQ ID NO: 118665 - DNA, 13 bp, Artificial Sequence
  Oligonucleotide for detection of SNP TSC0029629
tattggataggta

SEQ ID NO: 118666 - DNA, 13 bp, Artificial Sequence
  Oligonucleotide for detection of SNP TSC0029629
tacctatccaata

SEQ ID NO: 118667 - DNA, 13 bp, Artificial Sequence
  Oligonucleotide for detection of SNP TSC0029629
tattgggtaggta

SEQ ID NO: 118668 - DNA, 13 bp, Artificial Sequence
  Oligonucleotide for detection of SNP TSC0029629
tacctacccaata

SEQ ID NO: 118669 - DNA, 13 bp, Artificial Sequence
  Oligonucleotide for detection of SNP TSC0029630
ttaataatattta

SEQ ID NO: 118670 - DNA, 13 bp, Artificial Sequence
  Oligonucleotide for detection of SNP TSC0029630
taaatattattaa

SEQ ID NO: 118671 - DNA, 13 bp, Artificial Sequence
  Oligonucleotide for detection of SNP TSC0029630
ttaatagtattta

SEQ ID NO: 118672 - DNA, 13 bp, Artificial Sequence
  Oligonucleotide for detection of SNP TSC0029630
taaatactattaa

SEQ ID NO: 118673 - DNA, 13 bp, Artificial Sequence
  Oligonucleotide for detection of SNP TSC0029631
gaaaggttattty

SEQ ID NO: 118674 - DNA, 13 bp, Artificial Sequence
  Oligonucleotide for detection of SNP TSC0029631
raaataacctttc

SEQ ID NO: 118675 - DNA, 13 bp, Artificial Sequence
  Oligonucleotide for detection of SNP TSC0029631
gaaagggtattty

SEQ ID NO: 118676 - DNA, 13 bp, Artificial Sequence
  Oligonucleotide for detection of SNP TSC0029631
raaataccctttc

SEQ ID NO: 118677 - DNA, 13 bp, Artificial Sequence
  Oligonucleotide for detection of SNP TSC0029631
gaagtatttttty

SEQ ID NO: 118678 - DNA, 13 bp, Artificial Sequence
  Oligonucleotide for detection of SNP TSC0029631
raaaaaatacttc

SEQ ID NO: 118679 - DNA, 13 bp, Artificial Sequence
  Oligonucleotide for detection of SNP TSC0029633
gtttattgtttgy

SEQ ID NO: 118680 - DNA, 13 bp, Artificial Sequence
  Oligonucleotide for detection of SNP TSC0029633
rcaaacaataaac

SEQ ID NO: 118681 - DNA, 13 bp, Artificial Sequence
  Oligonucleotide for detection of SNP TSC0029633
gtttatcgtttgy

SEQ ID NO: 118682 - DNA, 13 bp, Artificial Sequence
  Oligonucleotide for detection of SNP TSC0029633
rcaaacgataaac

SEQ ID NO: 118683 - DNA, 13 bp, Artificial Sequence
  Oligonucleotide for detection of SNP TSC0029633
gtttattgttcgy

SEQ ID NO: 118684 - DNA, 13 bp, Artificial Sequence
  Oligonucleotide for detection of SNP TSC0029633
rcgaacaataaac

SEQ ID NO: 118685 - DNA, 13 bp, Artificial Sequence
  Oligonucleotide for detection of SNP TSC0029633
gtttatcgttcgy

SEQ ID NO: 118686 - DNA, 13 bp, Artificial Sequence
  Oligonucleotide for detection of SNP TSC0029633
rcgaacgataaac

SEQ ID NO: 118687 - DNA, 13 bp, Artificial Sequence
  Oligonucleotide for detection of SNP TSC0029633
gtgggtggtgagy

SEQ ID NO: 118688 - DNA, 13 bp, Artificial Sequence
  Oligonucleotide for detection of SNP TSC0029633
rctcaccacccac

SEQ ID NO: 118689 - DNA, 13 bp, Artificial Sequence
  Oligonucleotide for detection of SNP TSC0029633
gtgggtagtgagy

SEQ ID NO: 118690 - DNA, 13 bp, Artificial Sequence
  Oligonucleotide for detection of SNP TSC0029633
rctcactacccac

SEQ ID NO: 118691 - DNA, 13 bp, Artificial Sequence
  Oligonucleotide for detection of SNP TSC0029633
gcgggtggtgagy

SEQ ID NO: 118692 - DNA, 13 bp, Artificial Sequence
  Oligonucleotide for detection of SNP TSC0029633
rctcaccacccgc

SEQ ID NO: 118693 - DNA, 13 bp, Artificial Sequence
  Oligonucleotide for detection of SNP TSC0029633
gcgggtagtgagy

SEQ ID NO: 118694 - DNA, 13 bp, Artificial Sequence
  Oligonucleotide for detection of SNP TSC0029633
rctcactacccgc

SEQ ID NO: 118695 - DNA, 13 bp, Artificial Sequence
  Oligonucleotide for detection of SNP TSC0029633
gtgggcggtgagy

SEQ ID NO: 118696 - DNA, 13 bp, Artificial Sequence
  Oligonucleotide for detection of SNP TSC0029633
rctcaccgcccac

SEQ ID NO: 118697 - DNA, 13 bp, Artificial Sequence
  Oligonucleotide for detection of SNP TSC0029633
gcgggcggtgagy

SEQ ID NO: 118698 - DNA, 13 bp, Artificial Sequence
  Oligonucleotide for detection of SNP TSC0029633
rctcaccgcccgc

SEQ ID NO: 118699 - DNA, 13 bp, Artificial Sequence
  Oligonucleotide for detection of SNP TSC0029634
gggaaatgggtta

SEQ ID NO: 118700 - DNA, 13 bp, Artificial Sequence
  Oligonucleotide for detection of SNP TSC0029634
taacccatttccc

SEQ ID NO: 118701 - DNA, 13 bp, Artificial Sequence
  Oligonucleotide for detection of SNP TSC0029634
gggaaacgggtta

SEQ ID NO: 118702 - DNA, 13 bp, Artificial Sequence
  Oligonucleotide for detection of SNP TSC0029634
taacccgtttccc

SEQ ID NO: 118703 - DNA, 13 bp, Artificial Sequence
  Oligonucleotide for detection of SNP TSC0029637
tggttttggattt

SEQ ID NO: 118704 - DNA, 13 bp, Artificial Sequence
  Oligonucleotide for detection of SNP TSC0029637
aaatccaaaacca

SEQ ID NO: 118705 - DNA, 13 bp, Artificial Sequence
  Oligonucleotide for detection of SNP TSC0029637
tggtttcggattt

SEQ ID NO: 118706 - DNA, 13 bp, Artificial Sequence
  Oligonucleotide for detection of SNP TSC0029637
aaatccgaaacca

SEQ ID NO: 118707 - DNA, 13 bp, Artificial Sequence
  Oligonucleotide for detection of SNP TSC0029637
aagtttgaggtta

SEQ ID NO: 118708 - DNA, 13 bp, Artificial Sequence
  Oligonucleotide for detection of SNP TSC0029637
taacctcaaactt

SEQ ID NO: 118709 - DNA, 13 bp, Artificial Sequence
  Oligonucleotide for detection of SNP TSC0029637
aagtttaaggtta

SEQ ID NO: 118710 - DNA, 13 bp, Artificial Sequence
  Oligonucleotide for detection of SNP TSC0029637
taaccttaaactt

SEQ ID NO: 118711 - DNA, 13 bp, Artificial Sequence
  Oligonucleotide for detection of SNP TSC0029637
aagttcgaggtta

SEQ ID NO: 118712 - DNA, 13 bp, Artificial Sequence
  Oligonucleotide for detection of SNP TSC0029637
taacctcgaactt

SEQ ID NO: 118713 - DNA, 13 bp, Artificial Sequence
  Oligonucleotide for detection of SNP TSC0029639
gtttaagtgatay

SEQ ID NO: 118714 - DNA, 13 bp, Artificial Sequence
  Oligonucleotide for detection of SNP TSC0029639
rtatcacttaaac

SEQ ID NO: 118715 - DNA, 13 bp, Artificial Sequence
  Oligonucleotide for detection of SNP TSC0029639
gtttaaatgatay

SEQ ID NO: 118716 - DNA, 13 bp, Artificial Sequence
  Oligonucleotide for detection of SNP TSC0029639
rtatcatttaaac

SEQ ID NO: 118717 - DNA, 13 bp, Artificial Sequence
  Oligonucleotide for detection of SNP TSC0029640
aattgtgtttaty

SEQ ID NO: 118718 - DNA, 13 bp, Artificial Sequence
  Oligonucleotide for detection of SNP TSC0029640
rataaacacaatt

SEQ ID NO: 118719 - DNA, 13 bp, Artificial Sequence
  Oligonucleotide for detection of SNP TSC0029640
aattgtatttaty

SEQ ID NO: 118720 - DNA, 13 bp, Artificial Sequence
  Oligonucleotide for detection of SNP TSC0029640
rataaatacaatt

SEQ ID NO: 118721 - DNA, 13 bp, Artificial Sequence
  Oligonucleotide for detection of SNP TSC0029641
ggtttttgttttg

SEQ ID NO: 118722 - DNA, 13 bp, Artificial Sequence
  Oligonucleotide for detection of SNP TSC0029641
caaaacaaaaacc

SEQ ID NO: 118723 - DNA, 13 bp, Artificial Sequence
  Oligonucleotide for detection of SNP TSC0029641
taaaattgaggty

SEQ ID NO: 118724 - DNA, 13 bp, Artificial Sequence
  Oligonucleotide for detection of SNP TSC0029641
racctcaatttta

SEQ ID NO: 118725 - DNA, 13 bp, Artificial Sequence
  Oligonucleotide for detection of SNP TSC0029641
taaaatagaggty

SEQ ID NO: 118726 - DNA, 13 bp, Artificial Sequence
  Oligonucleotide for detection of SNP TSC0029641
racctctatttta

SEQ ID NO: 118727 - DNA, 13 bp, Artificial Sequence
  Oligonucleotide for detection of SNP TSC0029643
attattgatttgg

SEQ ID NO: 118728 - DNA, 13 bp, Artificial Sequence
  Oligonucleotide for detection of SNP TSC0029643
ccaaatcaataat

SEQ ID NO: 118729 - DNA, 13 bp, Artificial Sequence
  Oligonucleotide for detection of SNP TSC0029643
attatcgatttgg

SEQ ID NO: 118730 - DNA, 13 bp, Artificial Sequence
  Oligonucleotide for detection of SNP TSC0029643
ccaaatcgataat

SEQ ID NO: 118731 - DNA, 13 bp, Artificial Sequence
  Oligonucleotide for detection of SNP TSC0029643
ttaggttggtggt

SEQ ID NO: 118732 - DNA, 13 bp, Artificial Sequence
  Oligonucleotide for detection of SNP TSC0029643
accaccaacctaa

SEQ ID NO: 118733 - DNA, 13 bp, Artificial Sequence
  Oligonucleotide for detection of SNP TSC0029643
ttaggtcggtggt

SEQ ID NO: 118734 - DNA, 13 bp, Artificial Sequence
  Oligonucleotide for detection of SNP TSC0029643
accaccgacctaa

SEQ ID NO: 118735 - DNA, 13 bp, Artificial Sequence
  Oligonucleotide for detection of SNP TSC0029644
tatttagttagag

SEQ ID NO: 118736 - DNA, 13 bp, Artificial Sequence
  Oligonucleotide for detection of SNP TSC0029644
ctctaactaaata

SEQ ID NO: 118737 - DNA, 13 bp, Artificial Sequence
  Oligonucleotide for detection of SNP TSC0029644
tatttatttagag

SEQ ID NO: 118738 - DNA, 13 bp, Artificial Sequence
  Oligonucleotide for detection of SNP TSC0029644
ctctaaataaata

SEQ ID NO: 118739 - DNA, 13 bp, Artificial Sequence
  Oligonucleotide for detection of SNP TSC0029644
ttttgattaagtg

SEQ ID NO: 118740 - DNA, 13 bp, Artificial Sequence
  Oligonucleotide for detection of SNP TSC0029644
cacttaatcaaaa

SEQ ID NO: 118741 - DNA, 13 bp, Artificial Sequence
  Oligonucleotide for detection of SNP TSC0029644
ttttgaataagtg

SEQ ID NO: 118742 - DNA, 13 bp, Artificial Sequence
  Oligonucleotide for detection of SNP TSC0029644
cacttattcaaaa

SEQ ID NO: 118743 - DNA, 13 bp, Artificial Sequence
  Oligonucleotide for detection of SNP TSC0029646
atttttgatttta

SEQ ID NO: 118744 - DNA, 13 bp, Artificial Sequence
  Oligonucleotide for detection of SNP TSC0029646
taaaatcaaaaat

SEQ ID NO: 118745 - DNA, 13 bp, Artificial Sequence
  Oligonucleotide for detection of SNP TSC0029646
attttttatttta

SEQ ID NO: 118746 - DNA, 13 bp, Artificial Sequence
  Oligonucleotide for detection of SNP TSC0029646
taaaataaaaaat

SEQ ID NO: 118747 - DNA, 13 bp, Artificial Sequence
  Oligonucleotide for detection of SNP TSC0029646
tgaggttaggagt

SEQ ID NO: 118748 - DNA, 13 bp, Artificial Sequence
  Oligonucleotide for detection of SNP TSC0029646
actcctaacctca

SEQ ID NO: 118749 - DNA, 13 bp, Artificial Sequence
  Oligonucleotide for detection of SNP TSC0029646
tgaggtaaggagt

SEQ ID NO: 118750 - DNA, 13 bp, Artificial Sequence
  Oligonucleotide for detection of SNP TSC0029646
actccttacctca

SEQ ID NO: 118751 - DNA, 13 bp, Artificial Sequence
  Oligonucleotide for detection of SNP TSC0029649
ttgggggatttay

SEQ ID NO: 118752 - DNA, 13 bp, Artificial Sequence
  Oligonucleotide for detection of SNP TSC0029649
rtaaatcccccaa

SEQ ID NO: 118753 - DNA, 13 bp, Artificial Sequence
  Oligonucleotide for detection of SNP TSC0029649
ttggggaatttay

SEQ ID NO: 118754 - DNA, 13 bp, Artificial Sequence
  Oligonucleotide for detection of SNP TSC0029649
rtaaattccccaa

SEQ ID NO: 118755 - DNA, 13 bp, Artificial Sequence
  Oligonucleotide for detection of SNP TSC0029651
ggtgagaggtgay

SEQ ID NO: 118756 - DNA, 13 bp, Artificial Sequence
  Oligonucleotide for detection of SNP TSC0029651
rtcacctctcacc

SEQ ID NO: 118757 - DNA, 13 bp, Artificial Sequence
  Oligonucleotide for detection of SNP TSC0029651
ggtgaggggtgay

SEQ ID NO: 118758 - DNA, 13 bp, Artificial Sequence
  Oligonucleotide for detection of SNP TSC0029651
rtcacccctcacc

SEQ ID NO: 118759 - DNA, 13 bp, Artificial Sequence
  Oligonucleotide for detection of SNP TSC0029652
gtattgataggtt

SEQ ID NO: 118760 - DNA, 13 bp, Artificial Sequence
  Oligonucleotide for detection of SNP TSC0029652
aacctatcaatac

SEQ ID NO: 118761 - DNA, 13 bp, Artificial Sequence
  Oligonucleotide for detection of SNP TSC0029652
gtattggtaggtt

SEQ ID NO: 118762 - DNA, 13 bp, Artificial Sequence
  Oligonucleotide for detection of SNP TSC0029652
aacctaccaatac

SEQ ID NO: 118763 - DNA, 13 bp, Artificial Sequence
  Oligonucleotide for detection of SNP TSC0029653
agtttagtggggy

SEQ ID NO: 118764 - DNA, 13 bp, Artificial Sequence
  Oligonucleotide for detection of SNP TSC0029653
rccccactaaact

SEQ ID NO: 118765 - DNA, 13 bp, Artificial Sequence
  Oligonucleotide for detection of SNP TSC0029653
agtttaatggggy

SEQ ID NO: 118766 - DNA, 13 bp, Artificial Sequence
  Oligonucleotide for detection of SNP TSC0029653
rccccattaaact

SEQ ID NO: 118767 - DNA, 13 bp, Artificial Sequence
  Oligonucleotide for detection of SNP TSC0029657
ttaatgtgatgtt

SEQ ID NO: 118768 - DNA, 13 bp, Artificial Sequence
  Oligonucleotide for detection of SNP TSC0029657
aacatcacattaa

SEQ ID NO: 118769 - DNA, 13 bp, Artificial Sequence
  Oligonucleotide for detection of SNP TSC0029657
ttaacgtgatgtt

SEQ ID NO: 118770 - DNA, 13 bp, Artificial Sequence
  Oligonucleotide for detection of SNP TSC0029657
aacatcacgttaa

SEQ ID NO: 118771 - DNA, 13 bp, Artificial Sequence
  Oligonucleotide for detection of SNP TSC0029657
ttaatgcgatgtt

SEQ ID NO: 118772 - DNA, 13 bp, Artificial Sequence
  Oligonucleotide for detection of SNP TSC0029657
aacatcgcattaa

SEQ ID NO: 118773 - DNA, 13 bp, Artificial Sequence
  Oligonucleotide for detection of SNP TSC0029657
ttaacgcgatgtt

SEQ ID NO: 118774 - DNA, 13 bp, Artificial Sequence
  Oligonucleotide for detection of SNP TSC0029657
aacatcgcgttaa

SEQ ID NO: 118775 - DNA, 13 bp, Artificial Sequence
  Oligonucleotide for detection of SNP TSC0029657
agtattgtgttaa

SEQ ID NO: 118776 - DNA, 13 bp, Artificial Sequence
  Oligonucleotide for detection of SNP TSC0029657
ttaacacaatact

SEQ ID NO: 118777 - DNA, 13 bp, Artificial Sequence
  Oligonucleotide for detection of SNP TSC0029657
agtattatgttaa

SEQ ID NO: 118778 - DNA, 13 bp, Artificial Sequence
  Oligonucleotide for detection of SNP TSC0029657
ttaacataatact

SEQ ID NO: 118779 - DNA, 13 bp, Artificial Sequence
  Oligonucleotide for detection of SNP TSC0029657
agtatcgtgttaa

SEQ ID NO: 118780 - DNA, 13 bp, Artificial Sequence
  Oligonucleotide for detection of SNP TSC0029657
ttaacacgatact

SEQ ID NO: 118781 - DNA, 13 bp, Artificial Sequence
  Oligonucleotide for detection of SNP TSC0029657
agtattacgttaa

SEQ ID NO: 118782 - DNA, 13 bp, Artificial Sequence
  Oligonucleotide for detection of SNP TSC0029657
ttaacgtaatact

SEQ ID NO: 118783 - DNA, 13 bp, Artificial Sequence
  Oligonucleotide for detection of SNP TSC0029657
agtattgcgttaa

SEQ ID NO: 118784 - DNA, 13 bp, Artificial Sequence
  Oligonucleotide for detection of SNP TSC0029657
ttaacgcaatact

SEQ ID NO: 118785 - DNA, 13 bp, Artificial Sequence
  Oligonucleotide for detection of SNP TSC0029657
agtatcgcgttaa

SEQ ID NO: 118786 - DNA, 13 bp, Artificial Sequence
  Oligonucleotide for detection of SNP TSC0029657
ttaacgcgatact

SEQ ID NO: 118787 - DNA, 13 bp, Artificial Sequence
  Oligonucleotide for detection of SNP TSC0029658
agtaaatgataag

SEQ ID NO: 118788 - DNA, 13 bp, Artificial Sequence
  Oligonucleotide for detection of SNP TSC0029658
cttatcatttact

SEQ ID NO: 118789 - DNA, 13 bp, Artificial Sequence
  Oligonucleotide for detection of SNP TSC0029658
agtaaacgataag

SEQ ID NO: 118790 - DNA, 13 bp, Artificial Sequence
  Oligonucleotide for detection of SNP TSC0029658
cttatcgtttact

SEQ ID NO: 118791 - DNA, 13 bp, Artificial Sequence
  Oligonucleotide for detection of SNP TSC0029658
tttattgtttgtt

SEQ ID NO: 118792 - DNA, 13 bp, Artificial Sequence
  Oligonucleotide for detection of SNP TSC0029658
aacaaacaataaa

SEQ ID NO: 118793 - DNA, 13 bp, Artificial Sequence
  Oligonucleotide for detection of SNP TSC0029658
tttattatttgtt

SEQ ID NO: 118794 - DNA, 13 bp, Artificial Sequence
  Oligonucleotide for detection of SNP TSC0029658
aacaaataataaa

SEQ ID NO: 118795 - DNA, 13 bp, Artificial Sequence
  Oligonucleotide for detection of SNP TSC0029658
tttatcgtttgtt

SEQ ID NO: 118796 - DNA, 13 bp, Artificial Sequence
  Oligonucleotide for detection of SNP TSC0029658
aacaaacgataaa

SEQ ID NO: 118797 - DNA, 13 bp, Artificial Sequence
  Oligonucleotide for detection of SNP TSC0029663
taattatgtagtg

SEQ ID NO: 118798 - DNA, 13 bp, Artificial Sequence
  Oligonucleotide for detection of SNP TSC0029663
cactacataatta

SEQ ID NO: 118799 - DNA, 13 bp, Artificial Sequence
  Oligonucleotide for detection of SNP TSC0029663
taattacgtagtg

SEQ ID NO: 118800 - DNA, 13 bp, Artificial Sequence
  Oligonucleotide for detection of SNP TSC0029663
cactacgtaatta

SEQ ID NO: 118801 - DNA, 13 bp, Artificial Sequence
  Oligonucleotide for detection of SNP TSC0029663
tattgtgtaatta

SEQ ID NO: 118802 - DNA, 13 bp, Artificial Sequence
  Oligonucleotide for detection of SNP TSC0029663
taattacacaata

SEQ ID NO: 118803 - DNA, 13 bp, Artificial Sequence
  Oligonucleotide for detection of SNP TSC0029663
tattgtataatta

SEQ ID NO: 118804 - DNA, 13 bp, Artificial Sequence
  Oligonucleotide for detection of SNP TSC0029663
taattatacaata

SEQ ID NO: 118805 - DNA, 13 bp, Artificial Sequence
  Oligonucleotide for detection of SNP TSC0029663
tattgcgtaatta

SEQ ID NO: 118806 - DNA, 13 bp, Artificial Sequence
  Oligonucleotide for detection of SNP TSC0029663
taattacgcaata

SEQ ID NO: 118807 - DNA, 13 bp, Artificial Sequence
  Oligonucleotide for detection of SNP TSC0029664
attgtgtgtttag

SEQ ID NO: 118808 - DNA, 13 bp, Artificial Sequence
  Oligonucleotide for detection of SNP TSC0029664
ctaaacacacaat

SEQ ID NO: 118809 - DNA, 13 bp, Artificial Sequence
  Oligonucleotide for detection of SNP TSC0029664
attgcgtgtttag

SEQ ID NO: 118810 - DNA, 13 bp, Artificial Sequence
  Oligonucleotide for detection of SNP TSC0029664
ctaaacacgcaat

SEQ ID NO: 118811 - DNA, 13 bp, Artificial Sequence
  Oligonucleotide for detection of SNP TSC0029664
attgtgcgtttag

SEQ ID NO: 118812 - DNA, 13 bp, Artificial Sequence
  Oligonucleotide for detection of SNP TSC0029664
ctaaacgcacaat

SEQ ID NO: 118813 - DNA, 13 bp, Artificial Sequence
  Oligonucleotide for detection of SNP TSC0029664
attgcgcgtttag

SEQ ID NO: 118814 - DNA, 13 bp, Artificial Sequence
  Oligonucleotide for detection of SNP TSC0029664
ctaaacgcgcaat

SEQ ID NO: 118815 - DNA, 13 bp, Artificial Sequence
  Oligonucleotide for detection of SNP TSC0029664
ttaaatgtgtagt

SEQ ID NO: 118816 - DNA, 13 bp, Artificial Sequence
  Oligonucleotide for detection of SNP TSC0029664
actacacatttaa

SEQ ID NO: 118817 - DNA, 13 bp, Artificial Sequence
  Oligonucleotide for detection of SNP TSC0029664
ttaaatatgtagt

SEQ ID NO: 118818 - DNA, 13 bp, Artificial Sequence
  Oligonucleotide for detection of SNP TSC0029664
actacatatttaa

SEQ ID NO: 118819 - DNA, 13 bp, Artificial Sequence
  Oligonucleotide for detection of SNP TSC0029664
ttaaacgtgtagt

SEQ ID NO: 118820 - DNA, 13 bp, Artificial Sequence
  Oligonucleotide for detection of SNP TSC0029664
actacacgtttaa

SEQ ID NO: 118821 - DNA, 13 bp, Artificial Sequence
  Oligonucleotide for detection of SNP TSC0029664
ttaaatacgtagt

SEQ ID NO: 118822 - DNA, 13 bp, Artificial Sequence
  Oligonucleotide for detection of SNP TSC0029664
actacgtatttaa

SEQ ID NO: 118823 - DNA, 13 bp, Artificial Sequence
  Oligonucleotide for detection of SNP TSC0029664
ttaaatgcgtagt

SEQ ID NO: 118824 - DNA, 13 bp, Artificial Sequence
  Oligonucleotide for detection of SNP TSC0029664
actacgcatttaa

SEQ ID NO: 118825 - DNA, 13 bp, Artificial Sequence
  Oligonucleotide for detection of SNP TSC0029664
ttaaacgcgtagt

SEQ ID NO: 118826 - DNA, 13 bp, Artificial Sequence
  Oligonucleotide for detection of SNP TSC0029664
actacgcgtttaa

SEQ ID NO: 118827 - DNA, 13 bp, Artificial Sequence
  Oligonucleotide for detection of SNP TSC0029668
tgtttggagatta

SEQ ID NO: 118828 - DNA, 13 bp, Artificial Sequence
  Oligonucleotide for detection of SNP TSC0029668
taatctccaaaca

SEQ ID NO: 118829 - DNA, 13 bp, Artificial Sequence
  Oligonucleotide for detection of SNP TSC0029668
tgtttgaagatta

SEQ ID NO: 118830 - DNA, 13 bp, Artificial Sequence
  Oligonucleotide for detection of SNP TSC0029668
taatcttcaaaca

SEQ ID NO: 118831 - DNA, 13 bp, Artificial Sequence
  Oligonucleotide for detection of SNP TSC0029671
tatttaggtatta

SEQ ID NO: 118832 - DNA, 13 bp, Artificial Sequence
  Oligonucleotide for detection of SNP TSC0029671
taatacctaaata

SEQ ID NO: 118833 - DNA, 13 bp, Artificial Sequence
  Oligonucleotide for detection of SNP TSC0029671
tatttaagtatta

SEQ ID NO: 118834 - DNA, 13 bp, Artificial Sequence
  Oligonucleotide for detection of SNP TSC0029671
taatacttaaata

SEQ ID NO: 118835 - DNA, 13 bp, Artificial Sequence
  Oligonucleotide for detection of SNP TSC0029672
ggtggggtattty

SEQ ID NO: 118836 - DNA, 13 bp, Artificial Sequence
  Oligonucleotide for detection of SNP TSC0029672
raaataccccacc

SEQ ID NO: 118837 - DNA, 13 bp, Artificial Sequence
  Oligonucleotide for detection of SNP TSC0029672
ggtgggatattty

SEQ ID NO: 118838 - DNA, 13 bp, Artificial Sequence
  Oligonucleotide for detection of SNP TSC0029672
raaatatcccacc

SEQ ID NO: 118839 - DNA, 13 bp, Artificial Sequence
  Oligonucleotide for detection of SNP TSC0029674
aagggaatttgty

SEQ ID NO: 118840 - DNA, 13 bp, Artificial Sequence
  Oligonucleotide for detection of SNP TSC0029674
racaaattccctt

SEQ ID NO: 118841 - DNA, 13 bp, Artificial Sequence
  Oligonucleotide for detection of SNP TSC0029674
aagggattttgty

SEQ ID NO: 118842 - DNA, 13 bp, Artificial Sequence
  Oligonucleotide for detection of SNP TSC0029674
racaaaatccctt

SEQ ID NO: 118843 - DNA, 13 bp, Artificial Sequence
  Oligonucleotide for detection of SNP TSC0029674
ggtagattttttt

SEQ ID NO: 118844 - DNA, 13 bp, Artificial Sequence
  Oligonucleotide for detection of SNP TSC0029674
aaaaaaatctacc

SEQ ID NO: 118845 - DNA, 13 bp, Artificial Sequence
  Oligonucleotide for detection of SNP TSC0029674
ggtagagtttttt

SEQ ID NO: 118846 - DNA, 13 bp, Artificial Sequence
  Oligonucleotide for detection of SNP TSC0029674
aaaaaactctacc

SEQ ID NO: 118847 - DNA, 13 bp, Artificial Sequence
  Oligonucleotide for detection of SNP TSC0029675
gattgtttagttt

SEQ ID NO: 118848 - DNA, 13 bp, Artificial Sequence
  Oligonucleotide for detection of SNP TSC0029675
aaactaaacaatc

SEQ ID NO: 118849 - DNA, 13 bp, Artificial Sequence
  Oligonucleotide for detection of SNP TSC0029675
gattgtgtagttt

SEQ ID NO: 118850 - DNA, 13 bp, Artificial Sequence
  Oligonucleotide for detection of SNP TSC0029675
aaactacacaatc

SEQ ID NO: 118851 - DNA, 13 bp, Artificial Sequence
  Oligonucleotide for detection of SNP TSC0029675
gatcgtttagttt

SEQ ID NO: 118852 - DNA, 13 bp, Artificial Sequence
  Oligonucleotide for detection of SNP TSC0029675
aaactaaacgatc

SEQ ID NO: 118853 - DNA, 13 bp, Artificial Sequence
  Oligonucleotide for detection of SNP TSC0029675
gatcgtgtagttt

SEQ ID NO: 118854 - DNA, 13 bp, Artificial Sequence
  Oligonucleotide for detection of SNP TSC0029675
aaactacacgatc

SEQ ID NO: 118855 - DNA, 13 bp, Artificial Sequence
  Oligonucleotide for detection of SNP TSC0029675
gattgcgtagttt

SEQ ID NO: 118856 - DNA, 13 bp, Artificial Sequence
  Oligonucleotide for detection of SNP TSC0029675
aaactacgcaatc

SEQ ID NO: 118857 - DNA, 13 bp, Artificial Sequence
  Oligonucleotide for detection of SNP TSC0029675
gatcgcgtagttt

SEQ ID NO: 118858 - DNA, 13 bp, Artificial Sequence
  Oligonucleotide for detection of SNP TSC0029675
aaactacgcgatc

SEQ ID NO: 118859 - DNA, 13 bp, Artificial Sequence
  Oligonucleotide for detection of SNP TSC0029675
aggttaggtggty

SEQ ID NO: 118860 - DNA, 13 bp, Artificial Sequence
  Oligonucleotide for detection of SNP TSC0029675
raccacctaacct

SEQ ID NO: 118861 - DNA, 13 bp, Artificial Sequence
  Oligonucleotide for detection of SNP TSC0029675
aggttatgtggty

SEQ ID NO: 118862 - DNA, 13 bp, Artificial Sequence
  Oligonucleotide for detection of SNP TSC0029675
raccacataacct

SEQ ID NO: 118863 - DNA, 13 bp, Artificial Sequence
  Oligonucleotide for detection of SNP TSC0029675
aggttaggcggty

SEQ ID NO: 118864 - DNA, 13 bp, Artificial Sequence
  Oligonucleotide for detection of SNP TSC0029675
raccgcctaacct

SEQ ID NO: 118865 - DNA, 13 bp, Artificial Sequence
  Oligonucleotide for detection of SNP TSC0029675
aggttacgtggty

SEQ ID NO: 118866 - DNA, 13 bp, Artificial Sequence
  Oligonucleotide for detection of SNP TSC0029675
raccacgtaacct

SEQ ID NO: 118867 - DNA, 13 bp, Artificial Sequence
  Oligonucleotide for detection of SNP TSC0029675
aggttatgcggty

SEQ ID NO: 118868 - DNA, 13 bp, Artificial Sequence
  Oligonucleotide for detection of SNP TSC0029675
raccgcataacct

SEQ ID NO: 118869 - DNA, 13 bp, Artificial Sequence
  Oligonucleotide for detection of SNP TSC0029675
aggttacgcggty

SEQ ID NO: 118870 - DNA, 13 bp, Artificial Sequence
  Oligonucleotide for detection of SNP TSC0029675
raccgcgtaacct

SEQ ID NO: 118871 - DNA, 13 bp, Artificial Sequence
  Oligonucleotide for detection of SNP TSC0029676
gggttttgaggtg

SEQ ID NO: 118872 - DNA, 13 bp, Artificial Sequence
  Oligonucleotide for detection of SNP TSC0029676
cacctcaaaaccc

SEQ ID NO: 118873 - DNA, 13 bp, Artificial Sequence
  Oligonucleotide for detection of SNP TSC0029676
gggtttcgaggtg

SEQ ID NO: 118874 - DNA, 13 bp, Artificial Sequence
  Oligonucleotide for detection of SNP TSC0029676
cacctcgaaaccc

SEQ ID NO: 118875 - DNA, 13 bp, Artificial Sequence
  Oligonucleotide for detection of SNP TSC0029676
tattttggggtty

SEQ ID NO: 118876 - DNA, 13 bp, Artificial Sequence
  Oligonucleotide for detection of SNP TSC0029676
raaccccaaaata

SEQ ID NO: 118877 - DNA, 13 bp, Artificial Sequence
  Oligonucleotide for detection of SNP TSC0029676
tattttagggtty

SEQ ID NO: 118878 - DNA, 13 bp, Artificial Sequence
  Oligonucleotide for detection of SNP TSC0029676
raaccctaaaata

SEQ ID NO: 118879 - DNA, 13 bp, Artificial Sequence
  Oligonucleotide for detection of SNP TSC0029676
tatttcggggtty

SEQ ID NO: 118880 - DNA, 13 bp, Artificial Sequence
  Oligonucleotide for detection of SNP TSC0029676
raaccccgaaata

SEQ ID NO: 118881 - DNA, 13 bp, Artificial Sequence
  Oligonucleotide for detection of SNP TSC0029677
cgtggggtttttt

SEQ ID NO: 118882 - DNA, 13 bp, Artificial Sequence
  Oligonucleotide for detection of SNP TSC0029677
aaaaaaccccacg

SEQ ID NO: 118883 - DNA, 13 bp, Artificial Sequence
  Oligonucleotide for detection of SNP TSC0029677
cgtgggttttttt

SEQ ID NO: 118884 - DNA, 13 bp, Artificial Sequence
  Oligonucleotide for detection of SNP TSC0029677
aaaaaaacccacg

SEQ ID NO: 118885 - DNA, 13 bp, Artificial Sequence
  Oligonucleotide for detection of SNP TSC0029677
aaaaaattttatg

SEQ ID NO: 118886 - DNA, 13 bp, Artificial Sequence
  Oligonucleotide for detection of SNP TSC0029677
cataaaatttttt

SEQ ID NO: 118887 - DNA, 13 bp, Artificial Sequence
  Oligonucleotide for detection of SNP TSC0029677
aaaaaaatttatg

SEQ ID NO: 118888 - DNA, 13 bp, Artificial Sequence
  Oligonucleotide for detection of SNP TSC0029677
cataaattttttt

SEQ ID NO: 118889 - DNA, 13 bp, Artificial Sequence
  Oligonucleotide for detection of SNP TSC0029677
aaaaaattttacg

SEQ ID NO: 118890 - DNA, 13 bp, Artificial Sequence
  Oligonucleotide for detection of SNP TSC0029677
cgtaaaatttttt

SEQ ID NO: 118891 - DNA, 13 bp, Artificial Sequence
  Oligonucleotide for detection of SNP TSC0029677
aaaaaaatttacg

SEQ ID NO: 118892 - DNA, 13 bp, Artificial Sequence
  Oligonucleotide for detection of SNP TSC0029677
cgtaaattttttt

SEQ ID NO: 118893 - DNA, 13 bp, Artificial Sequence
  Oligonucleotide for detection of SNP TSC0029678
tggaggtgtaaag

SEQ ID NO: 118894 - DNA, 13 bp, Artificial Sequence
  Oligonucleotide for detection of SNP TSC0029678
ctttacacctcca

SEQ ID NO: 118895 - DNA, 13 bp, Artificial Sequence
  Oligonucleotide for detection of SNP TSC0029678
tggaggcgtaaag

SEQ ID NO: 118896 - DNA, 13 bp, Artificial Sequence
  Oligonucleotide for detection of SNP TSC0029678
ctttacgcctcca

SEQ ID NO: 118897 - DNA, 13 bp, Artificial Sequence
  Oligonucleotide for detection of SNP TSC0029682
tttttaatttggy

SEQ ID NO: 118898 - DNA, 13 bp, Artificial Sequence
  Oligonucleotide for detection of SNP TSC0029682
rccaaattaaaaa

SEQ ID NO: 118899 - DNA, 13 bp, Artificial Sequence
  Oligonucleotide for detection of SNP TSC0029682
tttttagtttggy

SEQ ID NO: 118900 - DNA, 13 bp, Artificial Sequence
  Oligonucleotide for detection of SNP TSC0029682
rccaaactaaaaa

SEQ ID NO: 118901 - DNA, 13 bp, Artificial Sequence
  Oligonucleotide for detection of SNP TSC0029684
agatgtggaggga

SEQ ID NO: 118902 - DNA, 13 bp, Artificial Sequence
  Oligonucleotide for detection of SNP TSC0029684
tccctccacatct

SEQ ID NO: 118903 - DNA, 13 bp, Artificial Sequence
  Oligonucleotide for detection of SNP TSC0029684
agatgtagaggga

SEQ ID NO: 118904 - DNA, 13 bp, Artificial Sequence
  Oligonucleotide for detection of SNP TSC0029684
tccctctacatct

SEQ ID NO: 118905 - DNA, 13 bp, Artificial Sequence
  Oligonucleotide for detection of SNP TSC0029685
ggagatgtggagg

SEQ ID NO: 118906 - DNA, 13 bp, Artificial Sequence
  Oligonucleotide for detection of SNP TSC0029685
cctccacatctcc

SEQ ID NO: 118907 - DNA, 13 bp, Artificial Sequence
  Oligonucleotide for detection of SNP TSC0029685
ggagatatggagg

SEQ ID NO: 118908 - DNA, 13 bp, Artificial Sequence
  Oligonucleotide for detection of SNP TSC0029685
cctccatatctcc

SEQ ID NO: 118909 - DNA, 13 bp, Artificial Sequence
  Oligonucleotide for detection of SNP TSC0029686
gaggatagggggy

SEQ ID NO: 118910 - DNA, 13 bp, Artificial Sequence
  Oligonucleotide for detection of SNP TSC0029686
rccccctatcctc

SEQ ID NO: 118911 - DNA, 13 bp, Artificial Sequence
  Oligonucleotide for detection of SNP TSC0029686
gaggatggggggy

SEQ ID NO: 118912 - DNA, 13 bp, Artificial Sequence
  Oligonucleotide for detection of SNP TSC0029686
rccccccatcctc

SEQ ID NO: 118913 - DNA, 13 bp, Artificial Sequence
  Oligonucleotide for detection of SNP TSC0029686
gaggacggggggy

SEQ ID NO: 118914 - DNA, 13 bp, Artificial Sequence
  Oligonucleotide for detection of SNP TSC0029686
rccccccgtcctc

SEQ ID NO: 118915 - DNA, 13 bp, Artificial Sequence
  Oligonucleotide for detection of SNP TSC0029687
ttataaatgtttg

SEQ ID NO: 118916 - DNA, 13 bp, Artificial Sequence
  Oligonucleotide for detection of SNP TSC0029687
caaacatttataa

SEQ ID NO: 118917 - DNA, 13 bp, Artificial Sequence
  Oligonucleotide for detection of SNP TSC0029687
ttataagtgtttg

SEQ ID NO: 118918 - DNA, 13 bp, Artificial Sequence
  Oligonucleotide for detection of SNP TSC0029687
caaacacttataa

SEQ ID NO: 118919 - DNA, 13 bp, Artificial Sequence
  Oligonucleotide for detection of SNP TSC0029690
agaatgaaagtga

SEQ ID NO: 118920 - DNA, 13 bp, Artificial Sequence
  Oligonucleotide for detection of SNP TSC0029690
tcactttcattct

SEQ ID NO: 118921 - DNA, 13 bp, Artificial Sequence
  Oligonucleotide for detection of SNP TSC0029690
agaatgtaagtga

SEQ ID NO: 118922 - DNA, 13 bp, Artificial Sequence
  Oligonucleotide for detection of SNP TSC0029690
tcacttacattct

SEQ ID NO: 118923 - DNA, 13 bp, Artificial Sequence
  Oligonucleotide for detection of SNP TSC0029693
taattaattattt

SEQ ID NO: 118924 - DNA, 13 bp, Artificial Sequence
  Oligonucleotide for detection of SNP TSC0029693
aaataattaatta

SEQ ID NO: 118925 - DNA, 13 bp, Artificial Sequence
  Oligonucleotide for detection of SNP TSC0029693
taattagttattt

SEQ ID NO: 118926 - DNA, 13 bp, Artificial Sequence
  Oligonucleotide for detection of SNP TSC0029693
aaataactaatta

SEQ ID NO: 118927 - DNA, 13 bp, Artificial Sequence
  Oligonucleotide for detection of SNP TSC0029694
tgatgaattatta

SEQ ID NO: 118928 - DNA, 13 bp, Artificial Sequence
  Oligonucleotide for detection of SNP TSC0029694
taataattcatca

SEQ ID NO: 118929 - DNA, 13 bp, Artificial Sequence
  Oligonucleotide for detection of SNP TSC0029694
tgatgagttatta

SEQ ID NO: 118930 - DNA, 13 bp, Artificial Sequence
  Oligonucleotide for detection of SNP TSC0029694
taataactcatca

SEQ ID NO: 118931 - DNA, 13 bp, Artificial Sequence
  Oligonucleotide for detection of SNP TSC0029694
tgacgaattatta

SEQ ID NO: 118932 - DNA, 13 bp, Artificial Sequence
  Oligonucleotide for detection of SNP TSC0029694
taataattcgtca

SEQ ID NO: 118933 - DNA, 13 bp, Artificial Sequence
  Oligonucleotide for detection of SNP TSC0029694
tgacgagttatta

SEQ ID NO: 118934 - DNA, 13 bp, Artificial Sequence
  Oligonucleotide for detection of SNP TSC0029694
taataactcgtca

SEQ ID NO: 118935 - DNA, 13 bp, Artificial Sequence
  Oligonucleotide for detection of SNP TSC0029695
tgaattattaaga

SEQ ID NO: 118936 - DNA, 13 bp, Artificial Sequence
  Oligonucleotide for detection of SNP TSC0029695
tcttaataattca

SEQ ID NO: 118937 - DNA, 13 bp, Artificial Sequence
  Oligonucleotide for detection of SNP TSC0029695
tgaatttttaaga

SEQ ID NO: 118938 - DNA, 13 bp, Artificial Sequence
  Oligonucleotide for detection of SNP TSC0029695
tcttaaaaattca

SEQ ID NO: 118939 - DNA, 13 bp, Artificial Sequence
  Oligonucleotide for detection of SNP TSC0029695
cgaattattaaga

SEQ ID NO: 118940 - DNA, 13 bp, Artificial Sequence
  Oligonucleotide for detection of SNP TSC0029695
tcttaataattcg

SEQ ID NO: 118941 - DNA, 13 bp, Artificial Sequence
  Oligonucleotide for detection of SNP TSC0029695
cgaatttttaaga

SEQ ID NO: 118942 - DNA, 13 bp, Artificial Sequence
  Oligonucleotide for detection of SNP TSC0029695
tcttaaaaattcg

SEQ ID NO: 118943 - DNA, 13 bp, Artificial Sequence
  Oligonucleotide for detection of SNP TSC0029695
ttttggtggtttg

SEQ ID NO: 118944 - DNA, 13 bp, Artificial Sequence
  Oligonucleotide for detection of SNP TSC0029695
caaaccaccaaaa

SEQ ID NO: 118945 - DNA, 13 bp, Artificial Sequence
  Oligonucleotide for detection of SNP TSC0029695
ttttggaggtttg

SEQ ID NO: 118946 - DNA, 13 bp, Artificial Sequence
  Oligonucleotide for detection of SNP TSC0029695
caaacctccaaaa

SEQ ID NO: 118947 - DNA, 13 bp, Artificial Sequence
  Oligonucleotide for detection of SNP TSC0029695
ttttggtggttcg

SEQ ID NO: 118948 - DNA, 13 bp, Artificial Sequence
  Oligonucleotide for detection of SNP TSC0029695
cgaaccaccaaaa

SEQ ID NO: 118949 - DNA, 13 bp, Artificial Sequence
  Oligonucleotide for detection of SNP TSC0029695
ttttggaggttcg

SEQ ID NO: 118950 - DNA, 13 bp, Artificial Sequence
  Oligonucleotide for detection of SNP TSC0029695
cgaacctccaaaa

SEQ ID NO: 118951 - DNA, 13 bp, Artificial Sequence
  Oligonucleotide for detection of SNP TSC0029696
tagaagttttttt

SEQ ID NO: 118952 - DNA, 13 bp, Artificial Sequence
  Oligonucleotide for detection of SNP TSC0029696
aaaaaaacttcta

SEQ ID NO: 118953 - DNA, 13 bp, Artificial Sequence
  Oligonucleotide for detection of SNP TSC0029696
tagaaggtttttt

SEQ ID NO: 118954 - DNA, 13 bp, Artificial Sequence
  Oligonucleotide for detection of SNP TSC0029696
aaaaaaccttcta

SEQ ID NO: 118955 - DNA, 13 bp, Artificial Sequence
  Oligonucleotide for detection of SNP TSC0029696
aggggagtttttg

SEQ ID NO: 118956 - DNA, 13 bp, Artificial Sequence
  Oligonucleotide for detection of SNP TSC0029696
caaaaactcccct

SEQ ID NO: 118957 - DNA, 13 bp, Artificial Sequence
  Oligonucleotide for detection of SNP TSC0029696
aggggattttttg

SEQ ID NO: 118958 - DNA, 13 bp, Artificial Sequence
  Oligonucleotide for detection of SNP TSC0029696
caaaaaatcccct

SEQ ID NO: 118959 - DNA, 13 bp, Artificial Sequence
  Oligonucleotide for detection of SNP TSC0029697
tatagtaaaggay

SEQ ID NO: 118960 - DNA, 13 bp, Artificial Sequence
  Oligonucleotide for detection of SNP TSC0029697
rtcctttactata

SEQ ID NO: 118961 - DNA, 13 bp, Artificial Sequence
  Oligonucleotide for detection of SNP TSC0029697
tatagtgaaggay

SEQ ID NO: 118962 - DNA, 13 bp, Artificial Sequence
  Oligonucleotide for detection of SNP TSC0029697
rtccttcactata

SEQ ID NO: 118963 - DNA, 13 bp, Artificial Sequence
  Oligonucleotide for detection of SNP TSC0029698
ggtttttgattty

SEQ ID NO: 118964 - DNA, 13 bp, Artificial Sequence
  Oligonucleotide for detection of SNP TSC0029698
raaatcaaaaacc

SEQ ID NO: 118965 - DNA, 13 bp, Artificial Sequence
  Oligonucleotide for detection of SNP TSC0029698
ggttttcgattty

SEQ ID NO: 118966 - DNA, 13 bp, Artificial Sequence
  Oligonucleotide for detection of SNP TSC0029698
raaatcgaaaacc

SEQ ID NO: 118967 - DNA, 13 bp, Artificial Sequence
  Oligonucleotide for detection of SNP TSC0029698
gaggttgggagty

SEQ ID NO: 118968 - DNA, 13 bp, Artificial Sequence
  Oligonucleotide for detection of SNP TSC0029698
ractcccaacctc

SEQ ID NO: 118969 - DNA, 13 bp, Artificial Sequence
  Oligonucleotide for detection of SNP TSC0029698
gaggttaggagty

SEQ ID NO: 118970 - DNA, 13 bp, Artificial Sequence
  Oligonucleotide for detection of SNP TSC0029698
ractcctaacctc

SEQ ID NO: 118971 - DNA, 13 bp, Artificial Sequence
  Oligonucleotide for detection of SNP TSC0029698
gaggtcgggagty

SEQ ID NO: 118972 - DNA, 13 bp, Artificial Sequence
  Oligonucleotide for detection of SNP TSC0029698
ractcccgacctc

SEQ ID NO: 118973 - DNA, 13 bp, Artificial Sequence
  Oligonucleotide for detection of SNP TSC0029699
tttgggggtgtgt

SEQ ID NO: 118974 - DNA, 13 bp, Artificial Sequence
  Oligonucleotide for detection of SNP TSC0029699
acacacccccaaa

SEQ ID NO: 118975 - DNA, 13 bp, Artificial Sequence
  Oligonucleotide for detection of SNP TSC0029699
tttgggtgtgtgt

SEQ ID NO: 118976 - DNA, 13 bp, Artificial Sequence
  Oligonucleotide for detection of SNP TSC0029699
acacacacccaaa

SEQ ID NO: 118977 - DNA, 13 bp, Artificial Sequence
  Oligonucleotide for detection of SNP TSC0029702
atagtagaggtgg

SEQ ID NO: 118978 - DNA, 13 bp, Artificial Sequence
  Oligonucleotide for detection of SNP TSC0029702
ccacctctactat

SEQ ID NO: 118979 - DNA, 13 bp, Artificial Sequence
  Oligonucleotide for detection of SNP TSC0029702
atagtataggtgg

SEQ ID NO: 118980 - DNA, 13 bp, Artificial Sequence
  Oligonucleotide for detection of SNP TSC0029702
ccacctatactat

SEQ ID NO: 118981 - DNA, 13 bp, Artificial Sequence
  Oligonucleotide for detection of SNP TSC0029706
taaaaaagaaata

SEQ ID NO: 118982 - DNA, 13 bp, Artificial Sequence
  Oligonucleotide for detection of SNP TSC0029706
tatttctttttta

SEQ ID NO: 118983 - DNA, 13 bp, Artificial Sequence
  Oligonucleotide for detection of SNP TSC0029716
gggggtaggatat

SEQ ID NO: 118984 - DNA, 13 bp, Artificial Sequence
  Oligonucleotide for detection of SNP TSC0029716
atatcctaccccc

SEQ ID NO: 118985 - DNA, 13 bp, Artificial Sequence
  Oligonucleotide for detection of SNP TSC0029716
gggggtgggatat

SEQ ID NO: 118986 - DNA, 13 bp, Artificial Sequence
  Oligonucleotide for detection of SNP TSC0029716
atatcccaccccc

SEQ ID NO: 118987 - DNA, 13 bp, Artificial Sequence
  Oligonucleotide for detection of SNP TSC0029716
gggggcgggatat

SEQ ID NO: 118988 - DNA, 13 bp, Artificial Sequence
  Oligonucleotide for detection of SNP TSC0029716
atatcccgccccc

SEQ ID NO: 118989 - DNA, 13 bp, Artificial Sequence
  Oligonucleotide for detection of SNP TSC0029716
atgttttgtttty

SEQ ID NO: 118990 - DNA, 13 bp, Artificial Sequence
  Oligonucleotide for detection of SNP TSC0029716
raaaacaaaacat

SEQ ID NO: 118991 - DNA, 13 bp, Artificial Sequence
  Oligonucleotide for detection of SNP TSC0029716
atgtttcgtttty

SEQ ID NO: 118992 - DNA, 13 bp, Artificial Sequence
  Oligonucleotide for detection of SNP TSC0029716
raaaacgaaacat

SEQ ID NO: 118993 - DNA, 13 bp, Artificial Sequence
  Oligonucleotide for detection of SNP TSC0029717
taatagtgagttt

SEQ ID NO: 118994 - DNA, 13 bp, Artificial Sequence
  Oligonucleotide for detection of SNP TSC0029717
aaactcactatta

SEQ ID NO: 118995 - DNA, 13 bp, Artificial Sequence
  Oligonucleotide for detection of SNP TSC0029717
taatagcgagttt

SEQ ID NO: 118996 - DNA, 13 bp, Artificial Sequence
  Oligonucleotide for detection of SNP TSC0029717
aaactcgctatta

SEQ ID NO: 118997 - DNA, 13 bp, Artificial Sequence
  Oligonucleotide for detection of SNP TSC0029717
aggtttgttgttg

SEQ ID NO: 118998 - DNA, 13 bp, Artificial Sequence
  Oligonucleotide for detection of SNP TSC0029717
caacaacaaacct

SEQ ID NO: 118999 - DNA, 13 bp, Artificial Sequence
  Oligonucleotide for detection of SNP TSC0029717
aggtttattgttg

SEQ ID NO: 119000 - DNA, 13 bp, Artificial Sequence
  Oligonucleotide for detection of SNP TSC0029717
caacaataaacct

SEQ ID NO: 119001 - DNA, 13 bp, Artificial Sequence
  Oligonucleotide for detection of SNP TSC0029717
aggttcgttgttg

SEQ ID NO: 119002 - DNA, 13 bp, Artificial Sequence
  Oligonucleotide for detection of SNP TSC0029717
caacaacgaacct

SEQ ID NO: 119003 - DNA, 13 bp, Artificial Sequence
  Oligonucleotide for detection of SNP TSC0029720
gtttgtagtgttg

SEQ ID NO: 119004 - DNA, 13 bp, Artificial Sequence
  Oligonucleotide for detection of SNP TSC0029720
caacactacaaac

SEQ ID NO: 119005 - DNA, 13 bp, Artificial Sequence
  Oligonucleotide for detection of SNP TSC0029720
gtttgtggtgttg

SEQ ID NO: 119006 - DNA, 13 bp, Artificial Sequence
  Oligonucleotide for detection of SNP TSC0029720
caacaccacaaac

SEQ ID NO: 119007 - DNA, 13 bp, Artificial Sequence
  Oligonucleotide for detection of SNP TSC0029720
gttcgtagtgttg

SEQ ID NO: 119008 - DNA, 13 bp, Artificial Sequence
  Oligonucleotide for detection of SNP TSC0029720
caacactacgaac

SEQ ID NO: 119009 - DNA, 13 bp, Artificial Sequence
  Oligonucleotide for detection of SNP TSC0029720
gttcgtggtgttg

SEQ ID NO: 119010 - DNA, 13 bp, Artificial Sequence
  Oligonucleotide for detection of SNP TSC0029720
caacaccacgaac

SEQ ID NO: 119011 - DNA, 13 bp, Artificial Sequence
  Oligonucleotide for detection of SNP TSC0029720
gtttgtagcgttg

SEQ ID NO: 119012 - DNA, 13 bp, Artificial Sequence
  Oligonucleotide for detection of SNP TSC0029720
caacgctacaaac

SEQ ID NO: 119013 - DNA, 13 bp, Artificial Sequence
  Oligonucleotide for detection of SNP TSC0029720
gtttgcggtgttg

SEQ ID NO: 119014 - DNA, 13 bp, Artificial Sequence
  Oligonucleotide for detection of SNP TSC0029720
caacaccgcaaac

SEQ ID NO: 119015 - DNA, 13 bp, Artificial Sequence
  Oligonucleotide for detection of SNP TSC0029720
gttcgtagcgttg

SEQ ID NO: 119016 - DNA, 13 bp, Artificial Sequence
  Oligonucleotide for detection of SNP TSC0029720
caacgctacgaac

SEQ ID NO: 119017 - DNA, 13 bp, Artificial Sequence
  Oligonucleotide for detection of SNP TSC0029720
gtttgtggcgttg

SEQ ID NO: 119018 - DNA, 13 bp, Artificial Sequence
  Oligonucleotide for detection of SNP TSC0029720
caacgccacaaac

SEQ ID NO: 119019 - DNA, 13 bp, Artificial Sequence
  Oligonucleotide for detection of SNP TSC0029720
gttcgcggtgttg

SEQ ID NO: 119020 - DNA, 13 bp, Artificial Sequence
  Oligonucleotide for detection of SNP TSC0029720
caacaccgcgaac

SEQ ID NO: 119021 - DNA, 13 bp, Artificial Sequence
  Oligonucleotide for detection of SNP TSC0029720
gttcgtggcgttg

SEQ ID NO: 119022 - DNA, 13 bp, Artificial Sequence
  Oligonucleotide for detection of SNP TSC0029720
caacgccacgaac

SEQ ID NO: 119023 - DNA, 13 bp, Artificial Sequence
  Oligonucleotide for detection of SNP TSC0029720
gtttgcggcgttg

SEQ ID NO: 119024 - DNA, 13 bp, Artificial Sequence
  Oligonucleotide for detection of SNP TSC0029720
caacgccgcaaac

SEQ ID NO: 119025 - DNA, 13 bp, Artificial Sequence
  Oligonucleotide for detection of SNP TSC0029720
gttcgcggcgttg

SEQ ID NO: 119026 - DNA, 13 bp, Artificial Sequence
  Oligonucleotide for detection of SNP TSC0029720
caacgccgcgaac

SEQ ID NO: 119027 - DNA, 13 bp, Artificial Sequence
  Oligonucleotide for detection of SNP TSC0029720
tagtgttgtgggy

SEQ ID NO: 119028 - DNA, 13 bp, Artificial Sequence
  Oligonucleotide for detection of SNP TSC0029720
rcccacaacacta

SEQ ID NO: 119029 - DNA, 13 bp, Artificial Sequence
  Oligonucleotide for detection of SNP TSC0029720
tagcgttgtgggy

SEQ ID NO: 119030 - DNA, 13 bp, Artificial Sequence
  Oligonucleotide for detection of SNP TSC0029720
rcccacaacgcta

SEQ ID NO: 119031 - DNA, 13 bp, Artificial Sequence
  Oligonucleotide for detection of SNP TSC0029720
tagtgttgcgggy

SEQ ID NO: 119032 - DNA, 13 bp, Artificial Sequence
  Oligonucleotide for detection of SNP TSC0029720
rcccgcaacacta

SEQ ID NO: 119033 - DNA, 13 bp, Artificial Sequence
  Oligonucleotide for detection of SNP TSC0029720
tagtgtcgtgggy

SEQ ID NO: 119034 - DNA, 13 bp, Artificial Sequence
  Oligonucleotide for detection of SNP TSC0029720
rcccacgacacta

SEQ ID NO: 119035 - DNA, 13 bp, Artificial Sequence
  Oligonucleotide for detection of SNP TSC0029720
tagcgttgcgggy

SEQ ID NO: 119036 - DNA, 13 bp, Artificial Sequence
  Oligonucleotide for detection of SNP TSC0029720
rcccgcaacgcta

SEQ ID NO: 119037 - DNA, 13 bp, Artificial Sequence
  Oligonucleotide for detection of SNP TSC0029720
tagcgtcgtgggy

SEQ ID NO: 119038 - DNA, 13 bp, Artificial Sequence
  Oligonucleotide for detection of SNP TSC0029720
rcccacgacgcta

SEQ ID NO: 119039 - DNA, 13 bp, Artificial Sequence
  Oligonucleotide for detection of SNP TSC0029720
tagtgtcgcgggy

SEQ ID NO: 119040 - DNA, 13 bp, Artificial Sequence
  Oligonucleotide for detection of SNP TSC0029720
rcccgcgacacta

SEQ ID NO: 119041 - DNA, 13 bp, Artificial Sequence
  Oligonucleotide for detection of SNP TSC0029720
tagcgtcgcgggy

SEQ ID NO: 119042 - DNA, 13 bp, Artificial Sequence
  Oligonucleotide for detection of SNP TSC0029720
rcccgcgacgcta

SEQ ID NO: 119043 - DNA, 13 bp, Artificial Sequence
  Oligonucleotide for detection of SNP TSC0029722
ttagatgtattaa

SEQ ID NO: 119044 - DNA, 13 bp, Artificial Sequence
  Oligonucleotide for detection of SNP TSC0029722
ttaatacatctaa

SEQ ID NO: 119045 - DNA, 13 bp, Artificial Sequence
  Oligonucleotide for detection of SNP TSC0029722
ttagatttattaa

SEQ ID NO: 119046 - DNA, 13 bp, Artificial Sequence
  Oligonucleotide for detection of SNP TSC0029722
ttaataaatctaa

SEQ ID NO: 119047 - DNA, 13 bp, Artificial Sequence
  Oligonucleotide for detection of SNP TSC0029722
ttaatgtatttgg

SEQ ID NO: 119048 - DNA, 13 bp, Artificial Sequence
  Oligonucleotide for detection of SNP TSC0029722
ccaaatacattaa

SEQ ID NO: 119049 - DNA, 13 bp, Artificial Sequence
  Oligonucleotide for detection of SNP TSC0029722
ttaatgaatttgg

SEQ ID NO: 119050 - DNA, 13 bp, Artificial Sequence
  Oligonucleotide for detection of SNP TSC0029722
ccaaattcattaa

SEQ ID NO: 119051 - DNA, 13 bp, Artificial Sequence
  Oligonucleotide for detection of SNP TSC0029725
ttgttttttgttt

SEQ ID NO: 119052 - DNA, 13 bp, Artificial Sequence
  Oligonucleotide for detection of SNP TSC0029725
aaacaaaaaacaa

SEQ ID NO: 119053 - DNA, 13 bp, Artificial Sequence
  Oligonucleotide for detection of SNP TSC0029725
ttgtttgttgttt

SEQ ID NO: 119054 - DNA, 13 bp, Artificial Sequence
  Oligonucleotide for detection of SNP TSC0029725
aaacaacaaacaa

SEQ ID NO: 119055 - DNA, 13 bp, Artificial Sequence
  Oligonucleotide for detection of SNP TSC0029725
agataagagatag

SEQ ID NO: 119056 - DNA, 13 bp, Artificial Sequence
  Oligonucleotide for detection of SNP TSC0029725
ctatctcttatct

SEQ ID NO: 119057 - DNA, 13 bp, Artificial Sequence
  Oligonucleotide for detection of SNP TSC0029725
agataatagatag

SEQ ID NO: 119058 - DNA, 13 bp, Artificial Sequence
  Oligonucleotide for detection of SNP TSC0029725
ctatctattatct

SEQ ID NO: 119059 - DNA, 13 bp, Artificial Sequence
  Oligonucleotide for detection of SNP TSC0029728
gattaagaatggy

SEQ ID NO: 119060 - DNA, 13 bp, Artificial Sequence
  Oligonucleotide for detection of SNP TSC0029728
rccattcttaatc

SEQ ID NO: 119061 - DNA, 13 bp, Artificial Sequence
  Oligonucleotide for detection of SNP TSC0029728
gattaataatggy

SEQ ID NO: 119062 - DNA, 13 bp, Artificial Sequence
  Oligonucleotide for detection of SNP TSC0029728
rccattattaatc

SEQ ID NO: 119063 - DNA, 13 bp, Artificial Sequence
  Oligonucleotide for detection of SNP TSC0029728
gttatttttgaty

SEQ ID NO: 119064 - DNA, 13 bp, Artificial Sequence
  Oligonucleotide for detection of SNP TSC0029728
ratcaaaaataac

SEQ ID NO: 119065 - DNA, 13 bp, Artificial Sequence
  Oligonucleotide for detection of SNP TSC0029728
gttattattgaty

SEQ ID NO: 119066 - DNA, 13 bp, Artificial Sequence
  Oligonucleotide for detection of SNP TSC0029728
ratcaataataac

SEQ ID NO: 119067 - DNA, 13 bp, Artificial Sequence
  Oligonucleotide for detection of SNP TSC0029732
tttgtaaatgata

SEQ ID NO: 119068 - DNA, 13 bp, Artificial Sequence
  Oligonucleotide for detection of SNP TSC0029732
tatcatttacaaa

SEQ ID NO: 119069 - DNA, 13 bp, Artificial Sequence
  Oligonucleotide for detection of SNP TSC0029732
tttgtagatgata

SEQ ID NO: 119070 - DNA, 13 bp, Artificial Sequence
  Oligonucleotide for detection of SNP TSC0029732
tatcatctacaaa

SEQ ID NO: 119071 - DNA, 13 bp, Artificial Sequence
  Oligonucleotide for detection of SNP TSC0029734
attatgtgattta

SEQ ID NO: 119072 - DNA, 13 bp, Artificial Sequence
  Oligonucleotide for detection of SNP TSC0029734
taaatcacataat

SEQ ID NO: 119073 - DNA, 13 bp, Artificial Sequence
  Oligonucleotide for detection of SNP TSC0029734
attatgcgattta

SEQ ID NO: 119074 - DNA, 13 bp, Artificial Sequence
  Oligonucleotide for detection of SNP TSC0029734
taaatcgcataat

SEQ ID NO: 119075 - DNA, 13 bp, Artificial Sequence
  Oligonucleotide for detection of SNP TSC0029734
taagttgtatgat

SEQ ID NO: 119076 - DNA, 13 bp, Artificial Sequence
  Oligonucleotide for detection of SNP TSC0029734
atcatacaactta

SEQ ID NO: 119077 - DNA, 13 bp, Artificial Sequence
  Oligonucleotide for detection of SNP TSC0029734
taagttatatgat

SEQ ID NO: 119078 - DNA, 13 bp, Artificial Sequence
  Oligonucleotide for detection of SNP TSC0029734
atcatataactta

SEQ ID NO: 119079 - DNA, 13 bp, Artificial Sequence
  Oligonucleotide for detection of SNP TSC0029734
taagtcgtatgat

SEQ ID NO: 119080 - DNA, 13 bp, Artificial Sequence
  Oligonucleotide for detection of SNP TSC0029734
atcatacgactta

SEQ ID NO: 119081 - DNA, 13 bp, Artificial Sequence
  Oligonucleotide for detection of SNP TSC0029735
tttataatttttg

SEQ ID NO: 119082 - DNA, 13 bp, Artificial Sequence
  Oligonucleotide for detection of SNP TSC0029735
caaaaattataaa

SEQ ID NO: 119083 - DNA, 13 bp, Artificial Sequence
  Oligonucleotide for detection of SNP TSC0029735
tttatattttttg

SEQ ID NO: 119084 - DNA, 13 bp, Artificial Sequence
  Oligonucleotide for detection of SNP TSC0029735
caaaaaatataaa

SEQ ID NO: 119085 - DNA, 13 bp, Artificial Sequence
  Oligonucleotide for detection of SNP TSC0029735
taaggattgtgag

SEQ ID NO: 119086 - DNA, 13 bp, Artificial Sequence
  Oligonucleotide for detection of SNP TSC0029735
ctcacaatcctta

SEQ ID NO: 119087 - DNA, 13 bp, Artificial Sequence
  Oligonucleotide for detection of SNP TSC0029737
agtattatggtgy

SEQ ID NO: 119088 - DNA, 13 bp, Artificial Sequence
  Oligonucleotide for detection of SNP TSC0029737
rcaccataatact

SEQ ID NO: 119089 - DNA, 13 bp, Artificial Sequence
  Oligonucleotide for detection of SNP TSC0029737
agtattgtggtgy

SEQ ID NO: 119090 - DNA, 13 bp, Artificial Sequence
  Oligonucleotide for detection of SNP TSC0029737
rcaccacaatact

SEQ ID NO: 119091 - DNA, 13 bp, Artificial Sequence
  Oligonucleotide for detection of SNP TSC0029737
agtatcgtggtgy

SEQ ID NO: 119092 - DNA, 13 bp, Artificial Sequence
  Oligonucleotide for detection of SNP TSC0029737
rcaccacgatact

SEQ ID NO: 119093 - DNA, 13 bp, Artificial Sequence
  Oligonucleotide for detection of SNP TSC0029737
gtattatggtgtt

SEQ ID NO: 119094 - DNA, 13 bp, Artificial Sequence
  Oligonucleotide for detection of SNP TSC0029737
aacaccataatac

SEQ ID NO: 119095 - DNA, 13 bp, Artificial Sequence
  Oligonucleotide for detection of SNP TSC0029737
gtattacggtgtt

SEQ ID NO: 119096 - DNA, 13 bp, Artificial Sequence
  Oligonucleotide for detection of SNP TSC0029737
aacaccgtaatac

SEQ ID NO: 119097 - DNA, 13 bp, Artificial Sequence
  Oligonucleotide for detection of SNP TSC0029738
tatagaatgttga

SEQ ID NO: 119098 - DNA, 13 bp, Artificial Sequence
  Oligonucleotide for detection of SNP TSC0029738
tcaacattctata

SEQ ID NO: 119099 - DNA, 13 bp, Artificial Sequence
  Oligonucleotide for detection of SNP TSC0029738
tatagagtgttga

SEQ ID NO: 119100 - DNA, 13 bp, Artificial Sequence
  Oligonucleotide for detection of SNP TSC0029738
tcaacactctata

SEQ ID NO: 119101 - DNA, 13 bp, Artificial Sequence
  Oligonucleotide for detection of SNP TSC0029739
taggaaataagty

SEQ ID NO: 119102 - DNA, 13 bp, Artificial Sequence
  Oligonucleotide for detection of SNP TSC0029739
racttatttccta

SEQ ID NO: 119103 - DNA, 13 bp, Artificial Sequence
  Oligonucleotide for detection of SNP TSC0029739
taggaagtaagty

SEQ ID NO: 119104 - DNA, 13 bp, Artificial Sequence
  Oligonucleotide for detection of SNP TSC0029739
racttacttccta

SEQ ID NO: 119105 - DNA, 13 bp, Artificial Sequence
  Oligonucleotide for detection of SNP TSC0029741
ggtgttggtgtat

SEQ ID NO: 119106 - DNA, 13 bp, Artificial Sequence
  Oligonucleotide for detection of SNP TSC0029741
atacaccaacacc

SEQ ID NO: 119107 - DNA, 13 bp, Artificial Sequence
  Oligonucleotide for detection of SNP TSC0029741
ggtgtttgtgtat

SEQ ID NO: 119108 - DNA, 13 bp, Artificial Sequence
  Oligonucleotide for detection of SNP TSC0029741
atacacaaacacc

SEQ ID NO: 119109 - DNA, 13 bp, Artificial Sequence
  Oligonucleotide for detection of SNP TSC0029742
gagttttggttty

SEQ ID NO: 119110 - DNA, 13 bp, Artificial Sequence
  Oligonucleotide for detection of SNP TSC0029742
raaaccaaaactc

SEQ ID NO: 119111 - DNA, 13 bp, Artificial Sequence
  Oligonucleotide for detection of SNP TSC0029742
gagtttgggttty

SEQ ID NO: 119112 - DNA, 13 bp, Artificial Sequence
  Oligonucleotide for detection of SNP TSC0029742
raaacccaaactc

SEQ ID NO: 119113 - DNA, 13 bp, Artificial Sequence
  Oligonucleotide for detection of SNP TSC0029742
gagtttcggttty

SEQ ID NO: 119114 - DNA, 13 bp, Artificial Sequence
  Oligonucleotide for detection of SNP TSC0029742
raaaccgaaactc

SEQ ID NO: 119115 - DNA, 13 bp, Artificial Sequence
  Oligonucleotide for detection of SNP TSC0029742
ggagttgaggtty

SEQ ID NO: 119116 - DNA, 13 bp, Artificial Sequence
  Oligonucleotide for detection of SNP TSC0029742
raacctcaactcc

SEQ ID NO: 119117 - DNA, 13 bp, Artificial Sequence
  Oligonucleotide for detection of SNP TSC0029742
ggagtttaggtty

SEQ ID NO: 119118 - DNA, 13 bp, Artificial Sequence
  Oligonucleotide for detection of SNP TSC0029742
raacctaaactcc

SEQ ID NO: 119119 - DNA, 13 bp, Artificial Sequence
  Oligonucleotide for detection of SNP TSC0029742
ggagtcgaggtty

SEQ ID NO: 119120 - DNA, 13 bp, Artificial Sequence
  Oligonucleotide for detection of SNP TSC0029742
raacctcgactcc

SEQ ID NO: 119121 - DNA, 13 bp, Artificial Sequence
  Oligonucleotide for detection of SNP TSC0029745
aggaatttatttg

SEQ ID NO: 119122 - DNA, 13 bp, Artificial Sequence
  Oligonucleotide for detection of SNP TSC0029745
caaataaattcct

SEQ ID NO: 119123 - DNA, 13 bp, Artificial Sequence
  Oligonucleotide for detection of SNP TSC0029745
aggaatatatttg

SEQ ID NO: 119124 - DNA, 13 bp, Artificial Sequence
  Oligonucleotide for detection of SNP TSC0029745
caaatatattcct

SEQ ID NO: 119125 - DNA, 13 bp, Artificial Sequence
  Oligonucleotide for detection of SNP TSC0029746
atatatgtatatg

SEQ ID NO: 119126 - DNA, 13 bp, Artificial Sequence
  Oligonucleotide for detection of SNP TSC0029746
catatacatatat

SEQ ID NO: 119127 - DNA, 13 bp, Artificial Sequence
  Oligonucleotide for detection of SNP TSC0029746
atatatatatatg

SEQ ID NO: 119128 - DNA, 13 bp, Artificial Sequence
  Oligonucleotide for detection of SNP TSC0029746
catatatatatat

SEQ ID NO: 119129 - DNA, 13 bp, Artificial Sequence
  Oligonucleotide for detection of SNP TSC0029746
atatacgtatatg

SEQ ID NO: 119130 - DNA, 13 bp, Artificial Sequence
  Oligonucleotide for detection of SNP TSC0029746
catatacgtatat

SEQ ID NO: 119131 - DNA, 13 bp, Artificial Sequence
  Oligonucleotide for detection of SNP TSC0029748
gtaaaggggttty

SEQ ID NO: 119132 - DNA, 13 bp, Artificial Sequence
  Oligonucleotide for detection of SNP TSC0029748
raaacccctttac

SEQ ID NO: 119133 - DNA, 13 bp, Artificial Sequence
  Oligonucleotide for detection of SNP TSC0029748
gtaaagaggttty

SEQ ID NO: 119134 - DNA, 13 bp, Artificial Sequence
  Oligonucleotide for detection of SNP TSC0029748
raaacctctttac

SEQ ID NO: 119135 - DNA, 13 bp, Artificial Sequence
  Oligonucleotide for detection of SNP TSC0029749
ttggggggtagaa

SEQ ID NO: 119136 - DNA, 13 bp, Artificial Sequence
  Oligonucleotide for detection of SNP TSC0029749
ttctaccccccaa

SEQ ID NO: 119137 - DNA, 13 bp, Artificial Sequence
  Oligonucleotide for detection of SNP TSC0029749
ttggggagtagaa

SEQ ID NO: 119138 - DNA, 13 bp, Artificial Sequence
  Oligonucleotide for detection of SNP TSC0029749
ttctactccccaa

SEQ ID NO: 119139 - DNA, 13 bp, Artificial Sequence
  Oligonucleotide for detection of SNP TSC0029750
tatgtatgtagat

SEQ ID NO: 119140 - DNA, 13 bp, Artificial Sequence
  Oligonucleotide for detection of SNP TSC0029750
atctacatacata

SEQ ID NO: 119141 - DNA, 13 bp, Artificial Sequence
  Oligonucleotide for detection of SNP TSC0029750
tatgtacgtagat

SEQ ID NO: 119142 - DNA, 13 bp, Artificial Sequence
  Oligonucleotide for detection of SNP TSC0029750
atctacgtacata

SEQ ID NO: 119143 - DNA, 13 bp, Artificial Sequence
  Oligonucleotide for detection of SNP TSC0029750
atttgtgtgtata

SEQ ID NO: 119144 - DNA, 13 bp, Artificial Sequence
  Oligonucleotide for detection of SNP TSC0029750
tatacacacaaat

SEQ ID NO: 119145 - DNA, 13 bp, Artificial Sequence
  Oligonucleotide for detection of SNP TSC0029750
atttgtatgtata

SEQ ID NO: 119146 - DNA, 13 bp, Artificial Sequence
  Oligonucleotide for detection of SNP TSC0029750
tatacatacaaat

SEQ ID NO: 119147 - DNA, 13 bp, Artificial Sequence
  Oligonucleotide for detection of SNP TSC0029750
atttgcgtgtata

SEQ ID NO: 119148 - DNA, 13 bp, Artificial Sequence
  Oligonucleotide for detection of SNP TSC0029750
tatacacgcaaat

SEQ ID NO: 119149 - DNA, 13 bp, Artificial Sequence
  Oligonucleotide for detection of SNP TSC0029751
gataaatggtggy

SEQ ID NO: 119150 - DNA, 13 bp, Artificial Sequence
  Oligonucleotide for detection of SNP TSC0029751
rccaccatttatc

SEQ ID NO: 119151 - DNA, 13 bp, Artificial Sequence
  Oligonucleotide for detection of SNP TSC0029751
gataaacggtggy

SEQ ID NO: 119152 - DNA, 13 bp, Artificial Sequence
  Oligonucleotide for detection of SNP TSC0029751
rccaccgtttatc

SEQ ID NO: 119153 - DNA, 13 bp, Artificial Sequence
  Oligonucleotide for detection of SNP TSC0029758
aaaaatatgaaay

SEQ ID NO: 119154 - DNA, 13 bp, Artificial Sequence
  Oligonucleotide for detection of SNP TSC0029758
rtttcatattttt

SEQ ID NO: 119155 - DNA, 13 bp, Artificial Sequence
  Oligonucleotide for detection of SNP TSC0029758
aaaaatttgaaay

SEQ ID NO: 119156 - DNA, 13 bp, Artificial Sequence
  Oligonucleotide for detection of SNP TSC0029758
rtttcaaattttt

SEQ ID NO: 119157 - DNA, 13 bp, Artificial Sequence
  Oligonucleotide for detection of SNP TSC0029759
ggttttatagagg

SEQ ID NO: 119158 - DNA, 13 bp, Artificial Sequence
  Oligonucleotide for detection of SNP TSC0029759
cctctataaaacc

SEQ ID NO: 119159 - DNA, 13 bp, Artificial Sequence
  Oligonucleotide for detection of SNP TSC0029759
ggttttgtagagg

SEQ ID NO: 119160 - DNA, 13 bp, Artificial Sequence
  Oligonucleotide for detection of SNP TSC0029759
cctctacaaaacc

SEQ ID NO: 119161 - DNA, 13 bp, Artificial Sequence
  Oligonucleotide for detection of SNP TSC0029759
ggtttcgtagagg

SEQ ID NO: 119162 - DNA, 13 bp, Artificial Sequence
  Oligonucleotide for detection of SNP TSC0029759
cctctacgaaacc

SEQ ID NO: 119163 - DNA, 13 bp, Artificial Sequence
  Oligonucleotide for detection of SNP TSC0029759
tttttgtgaagty

SEQ ID NO: 119164 - DNA, 13 bp, Artificial Sequence
  Oligonucleotide for detection of SNP TSC0029759
racttcacaaaaa

SEQ ID NO: 119165 - DNA, 13 bp, Artificial Sequence
  Oligonucleotide for detection of SNP TSC0029759
tttttgcgaagty

SEQ ID NO: 119166 - DNA, 13 bp, Artificial Sequence
  Oligonucleotide for detection of SNP TSC0029759
racttcgcaaaaa

SEQ ID NO: 119167 - DNA, 13 bp, Artificial Sequence
  Oligonucleotide for detection of SNP TSC0029760
agggaggagtagg

SEQ ID NO: 119168 - DNA, 13 bp, Artificial Sequence
  Oligonucleotide for detection of SNP TSC0029760
cctactcctccct

SEQ ID NO: 119169 - DNA, 13 bp, Artificial Sequence
  Oligonucleotide for detection of SNP TSC0029760
agggagaagtagg

SEQ ID NO: 119170 - DNA, 13 bp, Artificial Sequence
  Oligonucleotide for detection of SNP TSC0029760
cctacttctccct

SEQ ID NO: 119171 - DNA, 13 bp, Artificial Sequence
  Oligonucleotide for detection of SNP TSC0029761
atgtttgtttagy

SEQ ID NO: 119172 - DNA, 13 bp, Artificial Sequence
  Oligonucleotide for detection of SNP TSC0029761
rctaaacaaacat

SEQ ID NO: 119173 - DNA, 13 bp, Artificial Sequence
  Oligonucleotide for detection of SNP TSC0029761
atgtttatttagy

SEQ ID NO: 119174 - DNA, 13 bp, Artificial Sequence
  Oligonucleotide for detection of SNP TSC0029761
rctaaataaacat

SEQ ID NO: 119175 - DNA, 13 bp, Artificial Sequence
  Oligonucleotide for detection of SNP TSC0029762
ttaggatgtaatg

SEQ ID NO: 119176 - DNA, 13 bp, Artificial Sequence
  Oligonucleotide for detection of SNP TSC0029762
cattacatcctaa

SEQ ID NO: 119177 - DNA, 13 bp, Artificial Sequence
  Oligonucleotide for detection of SNP TSC0029762
ttaggacgtaatg

SEQ ID NO: 119178 - DNA, 13 bp, Artificial Sequence
  Oligonucleotide for detection of SNP TSC0029762
cattacgtcctaa

SEQ ID NO: 119179 - DNA, 13 bp, Artificial Sequence
  Oligonucleotide for detection of SNP TSC0029763
tgaggtaataagy

SEQ ID NO: 119180 - DNA, 13 bp, Artificial Sequence
  Oligonucleotide for detection of SNP TSC0029763
rcttattacctca

SEQ ID NO: 119181 - DNA, 13 bp, Artificial Sequence
  Oligonucleotide for detection of SNP TSC0029763
tgaggtgataagy

SEQ ID NO: 119182 - DNA, 13 bp, Artificial Sequence
  Oligonucleotide for detection of SNP TSC0029763
rcttatcacctca

SEQ ID NO: 119183 - DNA, 13 bp, Artificial Sequence
  Oligonucleotide for detection of SNP TSC0029765
aggagtagatgaa

SEQ ID NO: 119184 - DNA, 13 bp, Artificial Sequence
  Oligonucleotide for detection of SNP TSC0029765
ttcatctactcct

SEQ ID NO: 119185 - DNA, 13 bp, Artificial Sequence
  Oligonucleotide for detection of SNP TSC0029765
aggagtggatgaa

SEQ ID NO: 119186 - DNA, 13 bp, Artificial Sequence
  Oligonucleotide for detection of SNP TSC0029765
ttcatccactcct

SEQ ID NO: 119187 - DNA, 13 bp, Artificial Sequence
  Oligonucleotide for detection of SNP TSC0029766
aattgaatgatat

SEQ ID NO: 119188 - DNA, 13 bp, Artificial Sequence
  Oligonucleotide for detection of SNP TSC0029766
atatcattcaatt

SEQ ID NO: 119189 - DNA, 13 bp, Artificial Sequence
  Oligonucleotide for detection of SNP TSC0029766
aattgattgatat

SEQ ID NO: 119190 - DNA, 13 bp, Artificial Sequence
  Oligonucleotide for detection of SNP TSC0029766
atatcaatcaatt

SEQ ID NO: 119191 - DNA, 13 bp, Artificial Sequence
  Oligonucleotide for detection of SNP TSC0029766
aattgaacgatat

SEQ ID NO: 119192 - DNA, 13 bp, Artificial Sequence
  Oligonucleotide for detection of SNP TSC0029766
atatcgttcaatt

SEQ ID NO: 119193 - DNA, 13 bp, Artificial Sequence
  Oligonucleotide for detection of SNP TSC0029766
aattgatcgatat

SEQ ID NO: 119194 - DNA, 13 bp, Artificial Sequence
  Oligonucleotide for detection of SNP TSC0029766
atatcgatcaatt

SEQ ID NO: 119195 - DNA, 13 bp, Artificial Sequence
  Oligonucleotide for detection of SNP TSC0029766
atattgtttagtt

SEQ ID NO: 119196 - DNA, 13 bp, Artificial Sequence
  Oligonucleotide for detection of SNP TSC0029766
aactaaacaatat

SEQ ID NO: 119197 - DNA, 13 bp, Artificial Sequence
  Oligonucleotide for detection of SNP TSC0029766
atattggttagtt

SEQ ID NO: 119198 - DNA, 13 bp, Artificial Sequence
  Oligonucleotide for detection of SNP TSC0029766
aactaaccaatat

SEQ ID NO: 119199 - DNA, 13 bp, Artificial Sequence
  Oligonucleotide for detection of SNP TSC0029766
atatcgtttagtt

SEQ ID NO: 119200 - DNA, 13 bp, Artificial Sequence
  Oligonucleotide for detection of SNP TSC0029766
aactaaacgatat

SEQ ID NO: 119201 - DNA, 13 bp, Artificial Sequence
  Oligonucleotide for detection of SNP TSC0029766
atatcggttagtt

SEQ ID NO: 119202 - DNA, 13 bp, Artificial Sequence
  Oligonucleotide for detection of SNP TSC0029766
aactaaccgatat

SEQ ID NO: 119203 - DNA, 13 bp, Artificial Sequence
  Oligonucleotide for detection of SNP TSC0029767
tggtaaatatgtt

SEQ ID NO: 119204 - DNA, 13 bp, Artificial Sequence
  Oligonucleotide for detection of SNP TSC0029767
aacatatttacca

SEQ ID NO: 119205 - DNA, 13 bp, Artificial Sequence
  Oligonucleotide for detection of SNP TSC0029767
tggtaagtatgtt

SEQ ID NO: 119206 - DNA, 13 bp, Artificial Sequence
  Oligonucleotide for detection of SNP TSC0029767
aacatacttacca

SEQ ID NO: 119207 - DNA, 13 bp, Artificial Sequence
  Oligonucleotide for detection of SNP TSC0029768
atatagtagtaat

SEQ ID NO: 119208 - DNA, 13 bp, Artificial Sequence
  Oligonucleotide for detection of SNP TSC0029768
attactactatat

SEQ ID NO: 119209 - DNA, 13 bp, Artificial Sequence
  Oligonucleotide for detection of SNP TSC0029768
atataggagtaat

SEQ ID NO: 119210 - DNA, 13 bp, Artificial Sequence
  Oligonucleotide for detection of SNP TSC0029768
attactcctatat

SEQ ID NO: 119211 - DNA, 13 bp, Artificial Sequence
  Oligonucleotide for detection of SNP TSC0029768
attatttttgtgt

SEQ ID NO: 119212 - DNA, 13 bp, Artificial Sequence
  Oligonucleotide for detection of SNP TSC0029768
acacaaaaataat

SEQ ID NO: 119213 - DNA, 13 bp, Artificial Sequence
  Oligonucleotide for detection of SNP TSC0029769
tgtaaaagttgag

SEQ ID NO: 119214 - DNA, 13 bp, Artificial Sequence
  Oligonucleotide for detection of SNP TSC0029769
ctcaacttttaca

SEQ ID NO: 119215 - DNA, 13 bp, Artificial Sequence
  Oligonucleotide for detection of SNP TSC0029769
tgtaaatgttgag

SEQ ID NO: 119216 - DNA, 13 bp, Artificial Sequence
  Oligonucleotide for detection of SNP TSC0029769
ctcaacatttaca

SEQ ID NO: 119217 - DNA, 13 bp, Artificial Sequence
  Oligonucleotide for detection of SNP TSC0029769
tttaatttttata

SEQ ID NO: 119218 - DNA, 13 bp, Artificial Sequence
  Oligonucleotide for detection of SNP TSC0029769
tataaaaattaaa

SEQ ID NO: 119219 - DNA, 13 bp, Artificial Sequence
  Oligonucleotide for detection of SNP TSC0029769
tttaatatttata

SEQ ID NO: 119220 - DNA, 13 bp, Artificial Sequence
  Oligonucleotide for detection of SNP TSC0029769
tataaatattaaa

SEQ ID NO: 119221 - DNA, 13 bp, Artificial Sequence
  Oligonucleotide for detection of SNP TSC0029774
tgggaaatagtgy

SEQ ID NO: 119222 - DNA, 13 bp, Artificial Sequence
  Oligonucleotide for detection of SNP TSC0029774
rcactatttccca

SEQ ID NO: 119223 - DNA, 13 bp, Artificial Sequence
  Oligonucleotide for detection of SNP TSC0029774
tgggaagtagtgy

SEQ ID NO: 119224 - DNA, 13 bp, Artificial Sequence
  Oligonucleotide for detection of SNP TSC0029774
rcactacttccca

SEQ ID NO: 119225 - DNA, 13 bp, Artificial Sequence
  Oligonucleotide for detection of SNP TSC0029774
tgggaaatagcgy

SEQ ID NO: 119226 - DNA, 13 bp, Artificial Sequence
  Oligonucleotide for detection of SNP TSC0029774
rcgctatttccca

SEQ ID NO: 119227 - DNA, 13 bp, Artificial Sequence
  Oligonucleotide for detection of SNP TSC0029774
tgggaagtagcgy

SEQ ID NO: 119228 - DNA, 13 bp, Artificial Sequence
  Oligonucleotide for detection of SNP TSC0029774
rcgctacttccca

SEQ ID NO: 119229 - DNA, 13 bp, Artificial Sequence
  Oligonucleotide for detection of SNP TSC0029775
ttagattgtaaga

SEQ ID NO: 119230 - DNA, 13 bp, Artificial Sequence
  Oligonucleotide for detection of SNP TSC0029775
tcttacaatctaa

SEQ ID NO: 119231 - DNA, 13 bp, Artificial Sequence
  Oligonucleotide for detection of SNP TSC0029775
ttagatcgtaaga

SEQ ID NO: 119232 - DNA, 13 bp, Artificial Sequence
  Oligonucleotide for detection of SNP TSC0029775
tcttacgatctaa

SEQ ID NO: 119233 - DNA, 13 bp, Artificial Sequence
  Oligonucleotide for detection of SNP TSC0029775
ttttatggtttaa

SEQ ID NO: 119234 - DNA, 13 bp, Artificial Sequence
  Oligonucleotide for detection of SNP TSC0029775
ttaaaccataaaa

SEQ ID NO: 119235 - DNA, 13 bp, Artificial Sequence
  Oligonucleotide for detection of SNP TSC0029775
ttttatagtttaa

SEQ ID NO: 119236 - DNA, 13 bp, Artificial Sequence
  Oligonucleotide for detection of SNP TSC0029775
ttaaactataaaa

SEQ ID NO: 119237 - DNA, 13 bp, Artificial Sequence
  Oligonucleotide for detection of SNP TSC0029775
ttttacggtttaa

SEQ ID NO: 119238 - DNA, 13 bp, Artificial Sequence
  Oligonucleotide for detection of SNP TSC0029775
ttaaaccgtaaaa

SEQ ID NO: 119239 - DNA, 13 bp, Artificial Sequence
  Oligonucleotide for detection of SNP TSC0029781
tattaagttgtgt

SEQ ID NO: 119240 - DNA, 13 bp, Artificial Sequence
  Oligonucleotide for detection of SNP TSC0029781
acacaacttaata

SEQ ID NO: 119241 - DNA, 13 bp, Artificial Sequence
  Oligonucleotide for detection of SNP TSC0029781
tattaaattgtgt

SEQ ID NO: 119242 - DNA, 13 bp, Artificial Sequence
  Oligonucleotide for detection of SNP TSC0029781
acacaatttaata

SEQ ID NO: 119243 - DNA, 13 bp, Artificial Sequence
  Oligonucleotide for detection of SNP TSC0029781
tattaagttgcgt

SEQ ID NO: 119244 - DNA, 13 bp, Artificial Sequence
  Oligonucleotide for detection of SNP TSC0029781
acgcaacttaata

SEQ ID NO: 119245 - DNA, 13 bp, Artificial Sequence
  Oligonucleotide for detection of SNP TSC0029781
tattaaattgcgt

SEQ ID NO: 119246 - DNA, 13 bp, Artificial Sequence
  Oligonucleotide for detection of SNP TSC0029781
acgcaatttaata

SEQ ID NO: 119247 - DNA, 13 bp, Artificial Sequence
  Oligonucleotide for detection of SNP TSC0029782
taggggtgtttag

SEQ ID NO: 119248 - DNA, 13 bp, Artificial Sequence
  Oligonucleotide for detection of SNP TSC0029782
ctaaacaccccta

SEQ ID NO: 119249 - DNA, 13 bp, Artificial Sequence
  Oligonucleotide for detection of SNP TSC0029782
taggggcgtttag

SEQ ID NO: 119250 - DNA, 13 bp, Artificial Sequence
  Oligonucleotide for detection of SNP TSC0029782
ctaaacgccccta

SEQ ID NO: 119251 - DNA, 13 bp, Artificial Sequence
  Oligonucleotide for detection of SNP TSC0029783
gagtgggggagtt

SEQ ID NO: 119252 - DNA, 13 bp, Artificial Sequence
  Oligonucleotide for detection of SNP TSC0029783
aactcccccactc

SEQ ID NO: 119253 - DNA, 13 bp, Artificial Sequence
  Oligonucleotide for detection of SNP TSC0029783
gagtggtggagtt

SEQ ID NO: 119254 - DNA, 13 bp, Artificial Sequence
  Oligonucleotide for detection of SNP TSC0029783
aactccaccactc

SEQ ID NO: 119255 - DNA, 13 bp, Artificial Sequence
  Oligonucleotide for detection of SNP TSC0029783
agttttattatty

SEQ ID NO: 119256 - DNA, 13 bp, Artificial Sequence
  Oligonucleotide for detection of SNP TSC0029783
raataataaaact

SEQ ID NO: 119257 - DNA, 13 bp, Artificial Sequence
  Oligonucleotide for detection of SNP TSC0029784
tattttatggtay

SEQ ID NO: 119258 - DNA, 13 bp, Artificial Sequence
  Oligonucleotide for detection of SNP TSC0029784
rtaccataaaata

SEQ ID NO: 119259 - DNA, 13 bp, Artificial Sequence
  Oligonucleotide for detection of SNP TSC0029784
tattttgtggtay

SEQ ID NO: 119260 - DNA, 13 bp, Artificial Sequence
  Oligonucleotide for detection of SNP TSC0029784
rtaccacaaaata

SEQ ID NO: 119261 - DNA, 13 bp, Artificial Sequence
  Oligonucleotide for detection of SNP TSC0029784
tatttcgtggtay

SEQ ID NO: 119262 - DNA, 13 bp, Artificial Sequence
  Oligonucleotide for detection of SNP TSC0029784
rtaccacgaaata

SEQ ID NO: 119263 - DNA, 13 bp, Artificial Sequence
  Oligonucleotide for detection of SNP TSC0029784
gtgttatgaggta

SEQ ID NO: 119264 - DNA, 13 bp, Artificial Sequence
  Oligonucleotide for detection of SNP TSC0029784
tacctcataacac

SEQ ID NO: 119265 - DNA, 13 bp, Artificial Sequence
  Oligonucleotide for detection of SNP TSC0029784
gtgttacgaggta

SEQ ID NO: 119266 - DNA, 13 bp, Artificial Sequence
  Oligonucleotide for detection of SNP TSC0029784
tacctcgtaacac

SEQ ID NO: 119267 - DNA, 13 bp, Artificial Sequence
  Oligonucleotide for detection of SNP TSC0029785
tttaatagaaaga

SEQ ID NO: 119268 - DNA, 13 bp, Artificial Sequence
  Oligonucleotide for detection of SNP TSC0029785
tctttctattaaa

SEQ ID NO: 119269 - DNA, 13 bp, Artificial Sequence
  Oligonucleotide for detection of SNP TSC0029785
tttaatggaaaga

SEQ ID NO: 119270 - DNA, 13 bp, Artificial Sequence
  Oligonucleotide for detection of SNP TSC0029785
tctttccattaaa

SEQ ID NO: 119271 - DNA, 13 bp, Artificial Sequence
  Oligonucleotide for detection of SNP TSC0029787
ggttgtatttgta

SEQ ID NO: 119272 - DNA, 13 bp, Artificial Sequence
  Oligonucleotide for detection of SNP TSC0029787
tacaaatacaacc

SEQ ID NO: 119273 - DNA, 13 bp, Artificial Sequence
  Oligonucleotide for detection of SNP TSC0029787
ggttgtgtttgta

SEQ ID NO: 119274 - DNA, 13 bp, Artificial Sequence
  Oligonucleotide for detection of SNP TSC0029787
tacaaacacaacc

SEQ ID NO: 119275 - DNA, 13 bp, Artificial Sequence
  Oligonucleotide for detection of SNP TSC0029787
ggttgcgtttgta

SEQ ID NO: 119276 - DNA, 13 bp, Artificial Sequence
  Oligonucleotide for detection of SNP TSC0029787
tacaaacgcaacc

SEQ ID NO: 119277 - DNA, 13 bp, Artificial Sequence
  Oligonucleotide for detection of SNP TSC0029787
tgtaaatgtagty

SEQ ID NO: 119278 - DNA, 13 bp, Artificial Sequence
  Oligonucleotide for detection of SNP TSC0029787
ractacatttaca

SEQ ID NO: 119279 - DNA, 13 bp, Artificial Sequence
  Oligonucleotide for detection of SNP TSC0029787
tgtaaacgtagty

SEQ ID NO: 119280 - DNA, 13 bp, Artificial Sequence
  Oligonucleotide for detection of SNP TSC0029787
ractacgtttaca

SEQ ID NO: 119281 - DNA, 13 bp, Artificial Sequence
  Oligonucleotide for detection of SNP TSC0029788
taagaatgggatg

SEQ ID NO: 119282 - DNA, 13 bp, Artificial Sequence
  Oligonucleotide for detection of SNP TSC0029788
catcccattctta

SEQ ID NO: 119283 - DNA, 13 bp, Artificial Sequence
  Oligonucleotide for detection of SNP TSC0029788
taagaacgggatg

SEQ ID NO: 119284 - DNA, 13 bp, Artificial Sequence
  Oligonucleotide for detection of SNP TSC0029788
catcccgttctta

SEQ ID NO: 119285 - DNA, 13 bp, Artificial Sequence
  Oligonucleotide for detection of SNP TSC0029789
ttgtttgtaagag

SEQ ID NO: 119286 - DNA, 13 bp, Artificial Sequence
  Oligonucleotide for detection of SNP TSC0029789
ctcttacaaacaa

SEQ ID NO: 119287 - DNA, 13 bp, Artificial Sequence
  Oligonucleotide for detection of SNP TSC0029789
ttgtttataagag

SEQ ID NO: 119288 - DNA, 13 bp, Artificial Sequence
  Oligonucleotide for detection of SNP TSC0029789
ctcttataaacaa

SEQ ID NO: 119289 - DNA, 13 bp, Artificial Sequence
  Oligonucleotide for detection of SNP TSC0029790
ttaggataaggga

SEQ ID NO: 119290 - DNA, 13 bp, Artificial Sequence
  Oligonucleotide for detection of SNP TSC0029790
tcccttatcctaa

SEQ ID NO: 119291 - DNA, 13 bp, Artificial Sequence
  Oligonucleotide for detection of SNP TSC0029790
ttaggaaaaggga

SEQ ID NO: 119292 - DNA, 13 bp, Artificial Sequence
  Oligonucleotide for detection of SNP TSC0029790
tcccttttcctaa

SEQ ID NO: 119293 - DNA, 13 bp, Artificial Sequence
  Oligonucleotide for detection of SNP TSC0029791
gtgggatgtagtg

SEQ ID NO: 119294 - DNA, 13 bp, Artificial Sequence
  Oligonucleotide for detection of SNP TSC0029791
cactacatcccac

SEQ ID NO: 119295 - DNA, 13 bp, Artificial Sequence
  Oligonucleotide for detection of SNP TSC0029791
gtgggacgtagtg

SEQ ID NO: 119296 - DNA, 13 bp, Artificial Sequence
  Oligonucleotide for detection of SNP TSC0029791
cactacgtcccac

SEQ ID NO: 119297 - DNA, 13 bp, Artificial Sequence
  Oligonucleotide for detection of SNP TSC0029791
tattatattttay

SEQ ID NO: 119298 - DNA, 13 bp, Artificial Sequence
  Oligonucleotide for detection of SNP TSC0029791
rtaaaatataata

SEQ ID NO: 119299 - DNA, 13 bp, Artificial Sequence
  Oligonucleotide for detection of SNP TSC0029791
tattacgttttay

SEQ ID NO: 119300 - DNA, 13 bp, Artificial Sequence
  Oligonucleotide for detection of SNP TSC0029791
rtaaaacgtaata

SEQ ID NO: 119301 - DNA, 13 bp, Artificial Sequence
  Oligonucleotide for detection of SNP TSC0029792
atttaattgttay

SEQ ID NO: 119302 - DNA, 13 bp, Artificial Sequence
  Oligonucleotide for detection of SNP TSC0029792
rtaacaattaaat

SEQ ID NO: 119303 - DNA, 13 bp, Artificial Sequence
  Oligonucleotide for detection of SNP TSC0029792
gtggtagttgggt

SEQ ID NO: 119304 - DNA, 13 bp, Artificial Sequence
  Oligonucleotide for detection of SNP TSC0029792
acccaactaccac

SEQ ID NO: 119305 - DNA, 13 bp, Artificial Sequence
  Oligonucleotide for detection of SNP TSC0029792
gtggtatttgggt

SEQ ID NO: 119306 - DNA, 13 bp, Artificial Sequence
  Oligonucleotide for detection of SNP TSC0029792
acccaaataccac

SEQ ID NO: 119307 - DNA, 13 bp, Artificial Sequence
  Oligonucleotide for detection of SNP TSC0029795
atgtttataattt

SEQ ID NO: 119308 - DNA, 13 bp, Artificial Sequence
  Oligonucleotide for detection of SNP TSC0029795
aaattataaacat

SEQ ID NO: 119309 - DNA, 13 bp, Artificial Sequence
  Oligonucleotide for detection of SNP TSC0029795
atgtttgtaattt

SEQ ID NO: 119310 - DNA, 13 bp, Artificial Sequence
  Oligonucleotide for detection of SNP TSC0029795
aaattacaaacat

SEQ ID NO: 119311 - DNA, 13 bp, Artificial Sequence
  Oligonucleotide for detection of SNP TSC0029795
acgtttataattt

SEQ ID NO: 119312 - DNA, 13 bp, Artificial Sequence
  Oligonucleotide for detection of SNP TSC0029795
aaattataaacgt

SEQ ID NO: 119313 - DNA, 13 bp, Artificial Sequence
  Oligonucleotide for detection of SNP TSC0029795
acgtttgtaattt

SEQ ID NO: 119314 - DNA, 13 bp, Artificial Sequence
  Oligonucleotide for detection of SNP TSC0029795
aaattacaaacgt

SEQ ID NO: 119315 - DNA, 13 bp, Artificial Sequence
  Oligonucleotide for detection of SNP TSC0029796
tattaggtttata

SEQ ID NO: 119316 - DNA, 13 bp, Artificial Sequence
  Oligonucleotide for detection of SNP TSC0029796
tataaacctaata

SEQ ID NO: 119317 - DNA, 13 bp, Artificial Sequence
  Oligonucleotide for detection of SNP TSC0029796
tattagatttata

SEQ ID NO: 119318 - DNA, 13 bp, Artificial Sequence
  Oligonucleotide for detection of SNP TSC0029796
tataaatctaata

SEQ ID NO: 119319 - DNA, 13 bp, Artificial Sequence
  Oligonucleotide for detection of SNP TSC0029799
gtgttttgtggaa

SEQ ID NO: 119320 - DNA, 13 bp, Artificial Sequence
  Oligonucleotide for detection of SNP TSC0029799
ttccacaaaacac

SEQ ID NO: 119321 - DNA, 13 bp, Artificial Sequence
  Oligonucleotide for detection of SNP TSC0029799
gtgtttagtggaa

SEQ ID NO: 119322 - DNA, 13 bp, Artificial Sequence
  Oligonucleotide for detection of SNP TSC0029799
ttccactaaacac

SEQ ID NO: 119323 - DNA, 13 bp, Artificial Sequence
  Oligonucleotide for detection of SNP TSC0029799
gtgtttcgtggaa

SEQ ID NO: 119324 - DNA, 13 bp, Artificial Sequence
  Oligonucleotide for detection of SNP TSC0029799
ttccacgaaacac

SEQ ID NO: 119325 - DNA, 13 bp, Artificial Sequence
  Oligonucleotide for detection of SNP TSC0029800
tgtataggggtgg

SEQ ID NO: 119326 - DNA, 13 bp, Artificial Sequence
  Oligonucleotide for detection of SNP TSC0029800
ccacccctataca

SEQ ID NO: 119327 - DNA, 13 bp, Artificial Sequence
  Oligonucleotide for detection of SNP TSC0029800
tgtataagggtgg

SEQ ID NO: 119328 - DNA, 13 bp, Artificial Sequence
  Oligonucleotide for detection of SNP TSC0029800
ccacccttataca

SEQ ID NO: 119329 - DNA, 13 bp, Artificial Sequence
  Oligonucleotide for detection of SNP TSC0029800
tgtataggggcgg

SEQ ID NO: 119330 - DNA, 13 bp, Artificial Sequence
  Oligonucleotide for detection of SNP TSC0029800
ccgcccctataca

SEQ ID NO: 119331 - DNA, 13 bp, Artificial Sequence
  Oligonucleotide for detection of SNP TSC0029800
tgtataagggcgg

SEQ ID NO: 119332 - DNA, 13 bp, Artificial Sequence
  Oligonucleotide for detection of SNP TSC0029800
ccgcccttataca

SEQ ID NO: 119333 - DNA, 13 bp, Artificial Sequence
  Oligonucleotide for detection of SNP TSC0029801
aaatatgaaaaat

SEQ ID NO: 119334 - DNA, 13 bp, Artificial Sequence
  Oligonucleotide for detection of SNP TSC0029801
atttttcatattt

SEQ ID NO: 119335 - DNA, 13 bp, Artificial Sequence
  Oligonucleotide for detection of SNP TSC0029801
aaatacgaaaaat

SEQ ID NO: 119336 - DNA, 13 bp, Artificial Sequence
  Oligonucleotide for detection of SNP TSC0029801
atttttcgtattt

SEQ ID NO: 119337 - DNA, 13 bp, Artificial Sequence
  Oligonucleotide for detection of SNP TSC0029801
attttttgtattt

SEQ ID NO: 119338 - DNA, 13 bp, Artificial Sequence
  Oligonucleotide for detection of SNP TSC0029801
aaatacaaaaaat

SEQ ID NO: 119339 - DNA, 13 bp, Artificial Sequence
  Oligonucleotide for detection of SNP TSC0029804
tatgtcgtttagg

SEQ ID NO: 119340 - DNA, 13 bp, Artificial Sequence
  Oligonucleotide for detection of SNP TSC0029804
cctaaacgacata

SEQ ID NO: 119341 - DNA, 13 bp, Artificial Sequence
  Oligonucleotide for detection of SNP TSC0029804
tttgagggatata

SEQ ID NO: 119342 - DNA, 13 bp, Artificial Sequence
  Oligonucleotide for detection of SNP TSC0029804
tatatccctcaaa

SEQ ID NO: 119343 - DNA, 13 bp, Artificial Sequence
  Oligonucleotide for detection of SNP TSC0029804
tttgagtgatata

SEQ ID NO: 119344 - DNA, 13 bp, Artificial Sequence
  Oligonucleotide for detection of SNP TSC0029804
tatatcactcaaa

SEQ ID NO: 119345 - DNA, 13 bp, Artificial Sequence
  Oligonucleotide for detection of SNP TSC0029804
tttgagcgatata

SEQ ID NO: 119346 - DNA, 13 bp, Artificial Sequence
  Oligonucleotide for detection of SNP TSC0029804
tatatcgctcaaa

SEQ ID NO: 119347 - DNA, 13 bp, Artificial Sequence
  Oligonucleotide for detection of SNP TSC0029805
attatttgtaagt

SEQ ID NO: 119348 - DNA, 13 bp, Artificial Sequence
  Oligonucleotide for detection of SNP TSC0029805
acttacaaataat

SEQ ID NO: 119349 - DNA, 13 bp, Artificial Sequence
  Oligonucleotide for detection of SNP TSC0029805
attattcgtaagt

SEQ ID NO: 119350 - DNA, 13 bp, Artificial Sequence
  Oligonucleotide for detection of SNP TSC0029805
acttacgaataat

SEQ ID NO: 119351 - DNA, 13 bp, Artificial Sequence
  Oligonucleotide for detection of SNP TSC0029805
atttgtgaatagt

SEQ ID NO: 119352 - DNA, 13 bp, Artificial Sequence
  Oligonucleotide for detection of SNP TSC0029805
actattcacaaat

SEQ ID NO: 119353 - DNA, 13 bp, Artificial Sequence
  Oligonucleotide for detection of SNP TSC0029805
atttgtaaatagt

SEQ ID NO: 119354 - DNA, 13 bp, Artificial Sequence
  Oligonucleotide for detection of SNP TSC0029805
actatttacaaat

SEQ ID NO: 119355 - DNA, 13 bp, Artificial Sequence
  Oligonucleotide for detection of SNP TSC0029805
atttgcgaatagt

SEQ ID NO: 119356 - DNA, 13 bp, Artificial Sequence
  Oligonucleotide for detection of SNP TSC0029805
actattcgcaaat

SEQ ID NO: 119357 - DNA, 13 bp, Artificial Sequence
  Oligonucleotide for detection of SNP TSC0029806
tgaaatataagtt

SEQ ID NO: 119358 - DNA, 13 bp, Artificial Sequence
  Oligonucleotide for detection of SNP TSC0029806
aacttatatttca

SEQ ID NO: 119359 - DNA, 13 bp, Artificial Sequence
  Oligonucleotide for detection of SNP TSC0029806
tgaaatttaagtt

SEQ ID NO: 119360 - DNA, 13 bp, Artificial Sequence
  Oligonucleotide for detection of SNP TSC0029806
aacttaaatttca

SEQ ID NO: 119361 - DNA, 13 bp, Artificial Sequence
  Oligonucleotide for detection of SNP TSC0029808
ttaataagtatty

SEQ ID NO: 119362 - DNA, 13 bp, Artificial Sequence
  Oligonucleotide for detection of SNP TSC0029808
raatacttattaa

SEQ ID NO: 119363 - DNA, 13 bp, Artificial Sequence
  Oligonucleotide for detection of SNP TSC0029808
ttaataggtatty

SEQ ID NO: 119364 - DNA, 13 bp, Artificial Sequence
  Oligonucleotide for detection of SNP TSC0029808
raatacctattaa

SEQ ID NO: 119365 - DNA, 13 bp, Artificial Sequence
  Oligonucleotide for detection of SNP TSC0029809
ggtagtatttttg

SEQ ID NO: 119366 - DNA, 13 bp, Artificial Sequence
  Oligonucleotide for detection of SNP TSC0029809
caaaaatactacc

SEQ ID NO: 119367 - DNA, 13 bp, Artificial Sequence
  Oligonucleotide for detection of SNP TSC0029809
ggtagtgtttttg

SEQ ID NO: 119368 - DNA, 13 bp, Artificial Sequence
  Oligonucleotide for detection of SNP TSC0029809
caaaaacactacc

SEQ ID NO: 119369 - DNA, 13 bp, Artificial Sequence
  Oligonucleotide for detection of SNP TSC0029809
ggtagtattttcg

SEQ ID NO: 119370 - DNA, 13 bp, Artificial Sequence
  Oligonucleotide for detection of SNP TSC0029809
cgaaaatactacc

SEQ ID NO: 119371 - DNA, 13 bp, Artificial Sequence
  Oligonucleotide for detection of SNP TSC0029809
ggtagcgtttttg

SEQ ID NO: 119372 - DNA, 13 bp, Artificial Sequence
  Oligonucleotide for detection of SNP TSC0029809
caaaaacgctacc

SEQ ID NO: 119373 - DNA, 13 bp, Artificial Sequence
  Oligonucleotide for detection of SNP TSC0029809
ggtagtgttttcg

SEQ ID NO: 119374 - DNA, 13 bp, Artificial Sequence
  Oligonucleotide for detection of SNP TSC0029809
cgaaaacactacc

SEQ ID NO: 119375 - DNA, 13 bp, Artificial Sequence
  Oligonucleotide for detection of SNP TSC0029809
ggtagcgttttcg

SEQ ID NO: 119376 - DNA, 13 bp, Artificial Sequence
  Oligonucleotide for detection of SNP TSC0029809
cgaaaacgctacc

SEQ ID NO: 119377 - DNA, 13 bp, Artificial Sequence
  Oligonucleotide for detection of SNP TSC0029809
tggagatgttgty

SEQ ID NO: 119378 - DNA, 13 bp, Artificial Sequence
  Oligonucleotide for detection of SNP TSC0029809
racaacatctcca

SEQ ID NO: 119379 - DNA, 13 bp, Artificial Sequence
  Oligonucleotide for detection of SNP TSC0029809
cggagatgttgty

SEQ ID NO: 119380 - DNA, 13 bp, Artificial Sequence
  Oligonucleotide for detection of SNP TSC0029809
racaacatctccg

SEQ ID NO: 119381 - DNA, 13 bp, Artificial Sequence
  Oligonucleotide for detection of SNP TSC0029809
tggagacgttgty

SEQ ID NO: 119382 - DNA, 13 bp, Artificial Sequence
  Oligonucleotide for detection of SNP TSC0029809
racaacgtctcca

SEQ ID NO: 119383 - DNA, 13 bp, Artificial Sequence
  Oligonucleotide for detection of SNP TSC0029809
cggagacgttgty

SEQ ID NO: 119384 - DNA, 13 bp, Artificial Sequence
  Oligonucleotide for detection of SNP TSC0029809
racaacgtctccg

SEQ ID NO: 119385 - DNA, 13 bp, Artificial Sequence
  Oligonucleotide for detection of SNP TSC0029810
tgaaatattaggg

SEQ ID NO: 119386 - DNA, 13 bp, Artificial Sequence
  Oligonucleotide for detection of SNP TSC0029810
ccctaatatttca

SEQ ID NO: 119387 - DNA, 13 bp, Artificial Sequence
  Oligonucleotide for detection of SNP TSC0029810
tgaaatgttaggg

SEQ ID NO: 119388 - DNA, 13 bp, Artificial Sequence
  Oligonucleotide for detection of SNP TSC0029810
ccctaacatttca

SEQ ID NO: 119389 - DNA, 13 bp, Artificial Sequence
  Oligonucleotide for detection of SNP TSC0029810
cgaaatattaggg

SEQ ID NO: 119390 - DNA, 13 bp, Artificial Sequence
  Oligonucleotide for detection of SNP TSC0029810
ccctaatatttcg

SEQ ID NO: 119391 - DNA, 13 bp, Artificial Sequence
  Oligonucleotide for detection of SNP TSC0029810
cgaaatgttaggg

SEQ ID NO: 119392 - DNA, 13 bp, Artificial Sequence
  Oligonucleotide for detection of SNP TSC0029810
ccctaacatttcg

SEQ ID NO: 119393 - DNA, 13 bp, Artificial Sequence
  Oligonucleotide for detection of SNP TSC0029810
tgaaacgttaggg

SEQ ID NO: 119394 - DNA, 13 bp, Artificial Sequence
  Oligonucleotide for detection of SNP TSC0029810
ccctaacgtttca

SEQ ID NO: 119395 - DNA, 13 bp, Artificial Sequence
  Oligonucleotide for detection of SNP TSC0029810
cgaaacgttaggg

SEQ ID NO: 119396 - DNA, 13 bp, Artificial Sequence
  Oligonucleotide for detection of SNP TSC0029810
ccctaacgtttcg

SEQ ID NO: 119397 - DNA, 13 bp, Artificial Sequence
  Oligonucleotide for detection of SNP TSC0029812
gttataaaggttt

SEQ ID NO: 119398 - DNA, 13 bp, Artificial Sequence
  Oligonucleotide for detection of SNP TSC0029812
aaacctttataac

SEQ ID NO: 119399 - DNA, 13 bp, Artificial Sequence
  Oligonucleotide for detection of SNP TSC0029812
gttatagaggttt

SEQ ID NO: 119400 - DNA, 13 bp, Artificial Sequence
  Oligonucleotide for detection of SNP TSC0029812
aaacctctataac

SEQ ID NO: 119401 - DNA, 13 bp, Artificial Sequence
  Oligonucleotide for detection of SNP TSC0029813
atttgggtttttt

SEQ ID NO: 119402 - DNA, 13 bp, Artificial Sequence
  Oligonucleotide for detection of SNP TSC0029813
aaaaaacccaaat

SEQ ID NO: 119403 - DNA, 13 bp, Artificial Sequence
  Oligonucleotide for detection of SNP TSC0029813
aaaaaatttaaat

SEQ ID NO: 119404 - DNA, 13 bp, Artificial Sequence
  Oligonucleotide for detection of SNP TSC0029813
atttaaatttttt

SEQ ID NO: 119405 - DNA, 13 bp, Artificial Sequence
  Oligonucleotide for detection of SNP TSC0029813
aaaaaaattaaat

SEQ ID NO: 119406 - DNA, 13 bp, Artificial Sequence
  Oligonucleotide for detection of SNP TSC0029813
atttaattttttt

SEQ ID NO: 119407 - DNA, 13 bp, Artificial Sequence
  Oligonucleotide for detection of SNP TSC0029814
tttttgagataga

SEQ ID NO: 119408 - DNA, 13 bp, Artificial Sequence
  Oligonucleotide for detection of SNP TSC0029814
tctatctcaaaaa

SEQ ID NO: 119409 - DNA, 13 bp, Artificial Sequence
  Oligonucleotide for detection of SNP TSC0029814
tttttgggataga

SEQ ID NO: 119410 - DNA, 13 bp, Artificial Sequence
  Oligonucleotide for detection of SNP TSC0029814
tctatcccaaaaa

SEQ ID NO: 119411 - DNA, 13 bp, Artificial Sequence
  Oligonucleotide for detection of SNP TSC0029815
tttgtaaaatgat

SEQ ID NO: 119412 - DNA, 13 bp, Artificial Sequence
  Oligonucleotide for detection of SNP TSC0029815
atcattttacaaa

SEQ ID NO: 119413 - DNA, 13 bp, Artificial Sequence
  Oligonucleotide for detection of SNP TSC0029815
tttgtataatgat

SEQ ID NO: 119414 - DNA, 13 bp, Artificial Sequence
  Oligonucleotide for detection of SNP TSC0029815
atcattatacaaa

SEQ ID NO: 119415 - DNA, 13 bp, Artificial Sequence
  Oligonucleotide for detection of SNP TSC0029815
attattttgtaag

SEQ ID NO: 119416 - DNA, 13 bp, Artificial Sequence
  Oligonucleotide for detection of SNP TSC0029815
cttacaaaataat

SEQ ID NO: 119417 - DNA, 13 bp, Artificial Sequence
  Oligonucleotide for detection of SNP TSC0029815
attattatgtaag

SEQ ID NO: 119418 - DNA, 13 bp, Artificial Sequence
  Oligonucleotide for detection of SNP TSC0029815
cttacataataat

SEQ ID NO: 119419 - DNA, 13 bp, Artificial Sequence
  Oligonucleotide for detection of SNP TSC0029816
atatgttatatta

SEQ ID NO: 119420 - DNA, 13 bp, Artificial Sequence
  Oligonucleotide for detection of SNP TSC0029816
taatataacatat

SEQ ID NO: 119421 - DNA, 13 bp, Artificial Sequence
  Oligonucleotide for detection of SNP TSC0029816
atatgtgatatta

SEQ ID NO: 119422 - DNA, 13 bp, Artificial Sequence
  Oligonucleotide for detection of SNP TSC0029816
taatatcacatat

SEQ ID NO: 119423 - DNA, 13 bp, Artificial Sequence
  Oligonucleotide for detection of SNP TSC0029816
taatatgatatgt

SEQ ID NO: 119424 - DNA, 13 bp, Artificial Sequence
  Oligonucleotide for detection of SNP TSC0029816
acatatcatatta

SEQ ID NO: 119425 - DNA, 13 bp, Artificial Sequence
  Oligonucleotide for detection of SNP TSC0029816
taatattatatgt

SEQ ID NO: 119426 - DNA, 13 bp, Artificial Sequence
  Oligonucleotide for detection of SNP TSC0029816
acatataatatta

SEQ ID NO: 119427 - DNA, 13 bp, Artificial Sequence
  Oligonucleotide for detection of SNP TSC0029817
aattaaatgttaa

SEQ ID NO: 119428 - DNA, 13 bp, Artificial Sequence
  Oligonucleotide for detection of SNP TSC0029817
ttaacatttaatt

SEQ ID NO: 119429 - DNA, 13 bp, Artificial Sequence
  Oligonucleotide for detection of SNP TSC0029817
aattaagtgttaa

SEQ ID NO: 119430 - DNA, 13 bp, Artificial Sequence
  Oligonucleotide for detection of SNP TSC0029817
ttaacacttaatt

SEQ ID NO: 119431 - DNA, 13 bp, Artificial Sequence
  Oligonucleotide for detection of SNP TSC0029820
tgggttatggaty

SEQ ID NO: 119432 - DNA, 13 bp, Artificial Sequence
  Oligonucleotide for detection of SNP TSC0029820
ratccataaccca

SEQ ID NO: 119433 - DNA, 13 bp, Artificial Sequence
  Oligonucleotide for detection of SNP TSC0029820
tgggttgtggaty

SEQ ID NO: 119434 - DNA, 13 bp, Artificial Sequence
  Oligonucleotide for detection of SNP TSC0029820
ratccacaaccca

SEQ ID NO: 119435 - DNA, 13 bp, Artificial Sequence
  Oligonucleotide for detection of SNP TSC0029823
tttgagatttgty

SEQ ID NO: 119436 - DNA, 13 bp, Artificial Sequence
  Oligonucleotide for detection of SNP TSC0029823
racaaatctcaaa

SEQ ID NO: 119437 - DNA, 13 bp, Artificial Sequence
  Oligonucleotide for detection of SNP TSC0029823
tttgaggtttgty

SEQ ID NO: 119438 - DNA, 13 bp, Artificial Sequence
  Oligonucleotide for detection of SNP TSC0029823
racaaacctcaaa

SEQ ID NO: 119439 - DNA, 13 bp, Artificial Sequence
  Oligonucleotide for detection of SNP TSC0029824
gaggagatgaaay

SEQ ID NO: 119440 - DNA, 13 bp, Artificial Sequence
  Oligonucleotide for detection of SNP TSC0029824
rtttcatctcctc

SEQ ID NO: 119441 - DNA, 13 bp, Artificial Sequence
  Oligonucleotide for detection of SNP TSC0029824
gaggagttgaaay

SEQ ID NO: 119442 - DNA, 13 bp, Artificial Sequence
  Oligonucleotide for detection of SNP TSC0029824
rtttcaactcctc

SEQ ID NO: 119443 - DNA, 13 bp, Artificial Sequence
  Oligonucleotide for detection of SNP TSC0029825
gataagtggatty

SEQ ID NO: 119444 - DNA, 13 bp, Artificial Sequence
  Oligonucleotide for detection of SNP TSC0029825
raatccacttatc

SEQ ID NO: 119445 - DNA, 13 bp, Artificial Sequence
  Oligonucleotide for detection of SNP TSC0029825
gataaggggatty

SEQ ID NO: 119446 - DNA, 13 bp, Artificial Sequence
  Oligonucleotide for detection of SNP TSC0029825
raatccccttatc

SEQ ID NO: 119447 - DNA, 13 bp, Artificial Sequence
  Oligonucleotide for detection of SNP TSC0029825
gataagcggatty

SEQ ID NO: 119448 - DNA, 13 bp, Artificial Sequence
  Oligonucleotide for detection of SNP TSC0029825
raatccgcttatc

SEQ ID NO: 119449 - DNA, 13 bp, Artificial Sequence
  Oligonucleotide for detection of SNP TSC0029825
gagtttgtttgty

SEQ ID NO: 119450 - DNA, 13 bp, Artificial Sequence
  Oligonucleotide for detection of SNP TSC0029825
racaaacaaactc

SEQ ID NO: 119451 - DNA, 13 bp, Artificial Sequence
  Oligonucleotide for detection of SNP TSC0029825
gagtttttttgty

SEQ ID NO: 119452 - DNA, 13 bp, Artificial Sequence
  Oligonucleotide for detection of SNP TSC0029825
racaaaaaaactc

SEQ ID NO: 119453 - DNA, 13 bp, Artificial Sequence
  Oligonucleotide for detection of SNP TSC0029825
gagttcgtttgty

SEQ ID NO: 119454 - DNA, 13 bp, Artificial Sequence
  Oligonucleotide for detection of SNP TSC0029825
racaaacgaactc

SEQ ID NO: 119455 - DNA, 13 bp, Artificial Sequence
  Oligonucleotide for detection of SNP TSC0029828
gttttaatgagag

SEQ ID NO: 119456 - DNA, 13 bp, Artificial Sequence
  Oligonucleotide for detection of SNP TSC0029828
ctctcattaaaac

SEQ ID NO: 119457 - DNA, 13 bp, Artificial Sequence
  Oligonucleotide for detection of SNP TSC0029828
gttttagtgagag

SEQ ID NO: 119458 - DNA, 13 bp, Artificial Sequence
  Oligonucleotide for detection of SNP TSC0029828
ctctcactaaaac

SEQ ID NO: 119459 - DNA, 13 bp, Artificial Sequence
  Oligonucleotide for detection of SNP TSC0029829
ttgggtggaaggt

SEQ ID NO: 119460 - DNA, 13 bp, Artificial Sequence
  Oligonucleotide for detection of SNP TSC0029829
accttccacccaa

SEQ ID NO: 119461 - DNA, 13 bp, Artificial Sequence
  Oligonucleotide for detection of SNP TSC0029829
ttgggtagaaggt

SEQ ID NO: 119462 - DNA, 13 bp, Artificial Sequence
  Oligonucleotide for detection of SNP TSC0029829
accttctacccaa

SEQ ID NO: 119463 - DNA, 13 bp, Artificial Sequence
  Oligonucleotide for detection of SNP TSC0029830
atggttagtttat

SEQ ID NO: 119464 - DNA, 13 bp, Artificial Sequence
  Oligonucleotide for detection of SNP TSC0029830
ataaactaaccat

SEQ ID NO: 119465 - DNA, 13 bp, Artificial Sequence
  Oligonucleotide for detection of SNP TSC0029830
atggttggtttat

SEQ ID NO: 119466 - DNA, 13 bp, Artificial Sequence
  Oligonucleotide for detection of SNP TSC0029830
ataaaccaaccat

SEQ ID NO: 119467 - DNA, 13 bp, Artificial Sequence
  Oligonucleotide for detection of SNP TSC0029830
atggtcggtttat

SEQ ID NO: 119468 - DNA, 13 bp, Artificial Sequence
  Oligonucleotide for detection of SNP TSC0029830
ataaaccgaccat

SEQ ID NO: 119469 - DNA, 13 bp, Artificial Sequence
  Oligonucleotide for detection of SNP TSC0029830
atagattggttat

SEQ ID NO: 119470 - DNA, 13 bp, Artificial Sequence
  Oligonucleotide for detection of SNP TSC0029830
ataaccaatctat

SEQ ID NO: 119471 - DNA, 13 bp, Artificial Sequence
  Oligonucleotide for detection of SNP TSC0029830
atagatcggttat

SEQ ID NO: 119472 - DNA, 13 bp, Artificial Sequence
  Oligonucleotide for detection of SNP TSC0029830
ataaccgatctat

SEQ ID NO: 119473 - DNA, 13 bp, Artificial Sequence
  Oligonucleotide for detection of SNP TSC0029831
tttttttgagtta

SEQ ID NO: 119474 - DNA, 13 bp, Artificial Sequence
  Oligonucleotide for detection of SNP TSC0029831
taactcaaaaaaa

SEQ ID NO: 119475 - DNA, 13 bp, Artificial Sequence
  Oligonucleotide for detection of SNP TSC0029831
ttttttcgagtta

SEQ ID NO: 119476 - DNA, 13 bp, Artificial Sequence
  Oligonucleotide for detection of SNP TSC0029831
taactcgaaaaaa

SEQ ID NO: 119477 - DNA, 13 bp, Artificial Sequence
  Oligonucleotide for detection of SNP TSC0029831
tgatttgggagag

SEQ ID NO: 119478 - DNA, 13 bp, Artificial Sequence
  Oligonucleotide for detection of SNP TSC0029831
ctctcccaaatca

SEQ ID NO: 119479 - DNA, 13 bp, Artificial Sequence
  Oligonucleotide for detection of SNP TSC0029831
tgatttaggagag

SEQ ID NO: 119480 - DNA, 13 bp, Artificial Sequence
  Oligonucleotide for detection of SNP TSC0029831
ctctcctaaatca

SEQ ID NO: 119481 - DNA, 13 bp, Artificial Sequence
  Oligonucleotide for detection of SNP TSC0029831
tgattcgggagag

SEQ ID NO: 119482 - DNA, 13 bp, Artificial Sequence
  Oligonucleotide for detection of SNP TSC0029831
ctctcccgaatca

SEQ ID NO: 119483 - DNA, 13 bp, Artificial Sequence
  Oligonucleotide for detection of SNP TSC0029832
tggttaatgtgag

SEQ ID NO: 119484 - DNA, 13 bp, Artificial Sequence
  Oligonucleotide for detection of SNP TSC0029832
ctcacattaacca

SEQ ID NO: 119485 - DNA, 13 bp, Artificial Sequence
  Oligonucleotide for detection of SNP TSC0029832
tggttattgtgag

SEQ ID NO: 119486 - DNA, 13 bp, Artificial Sequence
  Oligonucleotide for detection of SNP TSC0029832
ctcacaataacca

SEQ ID NO: 119487 - DNA, 13 bp, Artificial Sequence
  Oligonucleotide for detection of SNP TSC0029832
tttatattagtta

SEQ ID NO: 119488 - DNA, 13 bp, Artificial Sequence
  Oligonucleotide for detection of SNP TSC0029832
taactaatataaa

SEQ ID NO: 119489 - DNA, 13 bp, Artificial Sequence
  Oligonucleotide for detection of SNP TSC0029832
tttatagtagtta

SEQ ID NO: 119490 - DNA, 13 bp, Artificial Sequence
  Oligonucleotide for detection of SNP TSC0029832
taactactataaa

SEQ ID NO: 119491 - DNA, 13 bp, Artificial Sequence
  Oligonucleotide for detection of SNP TSC0029833
aagagaggaaaag

SEQ ID NO: 119492 - DNA, 13 bp, Artificial Sequence
  Oligonucleotide for detection of SNP TSC0029833
cttttcctctctt

SEQ ID NO: 119493 - DNA, 13 bp, Artificial Sequence
  Oligonucleotide for detection of SNP TSC0029833
aagagaagaaaag

SEQ ID NO: 119494 - DNA, 13 bp, Artificial Sequence
  Oligonucleotide for detection of SNP TSC0029833
cttttcttctctt

SEQ ID NO: 119495 - DNA, 13 bp, Artificial Sequence
  Oligonucleotide for detection of SNP TSC0029834
tgtattaaaaatg

SEQ ID NO: 119496 - DNA, 13 bp, Artificial Sequence
  Oligonucleotide for detection of SNP TSC0029834
catttttaataca

SEQ ID NO: 119497 - DNA, 13 bp, Artificial Sequence
  Oligonucleotide for detection of SNP TSC0029834
tgtatttaaaatg

SEQ ID NO: 119498 - DNA, 13 bp, Artificial Sequence
  Oligonucleotide for detection of SNP TSC0029834
cattttaaataca

SEQ ID NO: 119499 - DNA, 13 bp, Artificial Sequence
  Oligonucleotide for detection of SNP TSC0029834
tatttttaatgta

SEQ ID NO: 119500 - DNA, 13 bp, Artificial Sequence
  Oligonucleotide for detection of SNP TSC0029834
tacattaaaaata

SEQ ID NO: 119501 - DNA, 13 bp, Artificial Sequence
  Oligonucleotide for detection of SNP TSC0029834
tattttaaatgta

SEQ ID NO: 119502 - DNA, 13 bp, Artificial Sequence
  Oligonucleotide for detection of SNP TSC0029834
tacatttaaaata

SEQ ID NO: 119503 - DNA, 13 bp, Artificial Sequence
  Oligonucleotide for detection of SNP TSC0029835
aaaatataagagt

SEQ ID NO: 119504 - DNA, 13 bp, Artificial Sequence
  Oligonucleotide for detection of SNP TSC0029835
actcttatatttt

SEQ ID NO: 119505 - DNA, 13 bp, Artificial Sequence
  Oligonucleotide for detection of SNP TSC0029835
aaaatagaagagt

SEQ ID NO: 119506 - DNA, 13 bp, Artificial Sequence
  Oligonucleotide for detection of SNP TSC0029835
actcttctatttt

SEQ ID NO: 119507 - DNA, 13 bp, Artificial Sequence
  Oligonucleotide for detection of SNP TSC0029836
agatttgtttagg

SEQ ID NO: 119508 - DNA, 13 bp, Artificial Sequence
  Oligonucleotide for detection of SNP TSC0029836
cctaaacaaatct

SEQ ID NO: 119509 - DNA, 13 bp, Artificial Sequence
  Oligonucleotide for detection of SNP TSC0029836
agatttatttagg

SEQ ID NO: 119510 - DNA, 13 bp, Artificial Sequence
  Oligonucleotide for detection of SNP TSC0029836
cctaaataaatct

SEQ ID NO: 119511 - DNA, 13 bp, Artificial Sequence
  Oligonucleotide for detection of SNP TSC0029837
tattattaaatat

SEQ ID NO: 119512 - DNA, 13 bp, Artificial Sequence
  Oligonucleotide for detection of SNP TSC0029837
atatttaataata

SEQ ID NO: 119513 - DNA, 13 bp, Artificial Sequence
  Oligonucleotide for detection of SNP TSC0029837
tattacgaaatat

SEQ ID NO: 119514 - DNA, 13 bp, Artificial Sequence
  Oligonucleotide for detection of SNP TSC0029837
atatttcgtaata

SEQ ID NO: 119515 - DNA, 13 bp, Artificial Sequence
  Oligonucleotide for detection of SNP TSC0029837
atgtttggtagta

SEQ ID NO: 119516 - DNA, 13 bp, Artificial Sequence
  Oligonucleotide for detection of SNP TSC0029837
tactaccaaacat

SEQ ID NO: 119517 - DNA, 13 bp, Artificial Sequence
  Oligonucleotide for detection of SNP TSC0029837
atgttttgtagta

SEQ ID NO: 119518 - DNA, 13 bp, Artificial Sequence
  Oligonucleotide for detection of SNP TSC0029837
tactacaaaacat

SEQ ID NO: 119519 - DNA, 13 bp, Artificial Sequence
  Oligonucleotide for detection of SNP TSC0029837
atgtttcgtagta

SEQ ID NO: 119520 - DNA, 13 bp, Artificial Sequence
  Oligonucleotide for detection of SNP TSC0029837
tactacgaaacat

SEQ ID NO: 119521 - DNA, 13 bp, Artificial Sequence
  Oligonucleotide for detection of SNP TSC0029838
aataatgtagtat

SEQ ID NO: 119522 - DNA, 13 bp, Artificial Sequence
  Oligonucleotide for detection of SNP TSC0029838
atactacattatt

SEQ ID NO: 119523 - DNA, 13 bp, Artificial Sequence
  Oligonucleotide for detection of SNP TSC0029838
aataatttagtat

SEQ ID NO: 119524 - DNA, 13 bp, Artificial Sequence
  Oligonucleotide for detection of SNP TSC0029838
atactaaattatt

SEQ ID NO: 119525 - DNA, 13 bp, Artificial Sequence
  Oligonucleotide for detection of SNP TSC0029838
atgttatattatt

SEQ ID NO: 119526 - DNA, 13 bp, Artificial Sequence
  Oligonucleotide for detection of SNP TSC0029838
aataatataacat

SEQ ID NO: 119527 - DNA, 13 bp, Artificial Sequence
  Oligonucleotide for detection of SNP TSC0029838
atgttaaattatt

SEQ ID NO: 119528 - DNA, 13 bp, Artificial Sequence
  Oligonucleotide for detection of SNP TSC0029838
aataatttaacat

SEQ ID NO: 119529 - DNA, 13 bp, Artificial Sequence
  Oligonucleotide for detection of SNP TSC0029839
ggatgtatttgag

SEQ ID NO: 119530 - DNA, 13 bp, Artificial Sequence
  Oligonucleotide for detection of SNP TSC0029839
ctcaaatacatcc

SEQ ID NO: 119531 - DNA, 13 bp, Artificial Sequence
  Oligonucleotide for detection of SNP TSC0029839
ggatgtgtttgag

SEQ ID NO: 119532 - DNA, 13 bp, Artificial Sequence
  Oligonucleotide for detection of SNP TSC0029839
ctcaaacacatcc

SEQ ID NO: 119533 - DNA, 13 bp, Artificial Sequence
  Oligonucleotide for detection of SNP TSC0029839
ggatgcgtttgag

SEQ ID NO: 119534 - DNA, 13 bp, Artificial Sequence
  Oligonucleotide for detection of SNP TSC0029839
ctcaaacgcatcc

SEQ ID NO: 119535 - DNA, 13 bp, Artificial Sequence
  Oligonucleotide for detection of SNP TSC0029839
tttaaatgtatty

SEQ ID NO: 119536 - DNA, 13 bp, Artificial Sequence
  Oligonucleotide for detection of SNP TSC0029839
raatacatttaaa

SEQ ID NO: 119537 - DNA, 13 bp, Artificial Sequence
  Oligonucleotide for detection of SNP TSC0029839
tttaaacgtatty

SEQ ID NO: 119538 - DNA, 13 bp, Artificial Sequence
  Oligonucleotide for detection of SNP TSC0029839
raatacgtttaaa

SEQ ID NO: 119539 - DNA, 13 bp, Artificial Sequence
  Oligonucleotide for detection of SNP TSC0029840
aatgtagatatay

SEQ ID NO: 119540 - DNA, 13 bp, Artificial Sequence
  Oligonucleotide for detection of SNP TSC0029840
rtatatctacatt

SEQ ID NO: 119541 - DNA, 13 bp, Artificial Sequence
  Oligonucleotide for detection of SNP TSC0029840
aatgtatatatay

SEQ ID NO: 119542 - DNA, 13 bp, Artificial Sequence
  Oligonucleotide for detection of SNP TSC0029840
rtatatatacatt

SEQ ID NO: 119543 - DNA, 13 bp, Artificial Sequence
  Oligonucleotide for detection of SNP TSC0029840
gtatgtttatatt

SEQ ID NO: 119544 - DNA, 13 bp, Artificial Sequence
  Oligonucleotide for detection of SNP TSC0029840
aatataaacatac

SEQ ID NO: 119545 - DNA, 13 bp, Artificial Sequence
  Oligonucleotide for detection of SNP TSC0029840
gtatgtatatatt

SEQ ID NO: 119546 - DNA, 13 bp, Artificial Sequence
  Oligonucleotide for detection of SNP TSC0029840
aatatatacatac

SEQ ID NO: 119547 - DNA, 13 bp, Artificial Sequence
  Oligonucleotide for detection of SNP TSC0029841
tatattattaatg

SEQ ID NO: 119548 - DNA, 13 bp, Artificial Sequence
  Oligonucleotide for detection of SNP TSC0029841
cattaataatata

SEQ ID NO: 119549 - DNA, 13 bp, Artificial Sequence
  Oligonucleotide for detection of SNP TSC0029841
tatattgttaatg

SEQ ID NO: 119550 - DNA, 13 bp, Artificial Sequence
  Oligonucleotide for detection of SNP TSC0029841
cattaacaatata

SEQ ID NO: 119551 - DNA, 13 bp, Artificial Sequence
  Oligonucleotide for detection of SNP TSC0029841
tatatcgttaatg

SEQ ID NO: 119552 - DNA, 13 bp, Artificial Sequence
  Oligonucleotide for detection of SNP TSC0029841
cattaacgatata

SEQ ID NO: 119553 - DNA, 13 bp, Artificial Sequence
  Oligonucleotide for detection of SNP TSC0029843
gtagaatgttaat

SEQ ID NO: 119554 - DNA, 13 bp, Artificial Sequence
  Oligonucleotide for detection of SNP TSC0029843
attaacattctac

SEQ ID NO: 119555 - DNA, 13 bp, Artificial Sequence
  Oligonucleotide for detection of SNP TSC0029843
gtagaacgttaat

SEQ ID NO: 119556 - DNA, 13 bp, Artificial Sequence
  Oligonucleotide for detection of SNP TSC0029843
attaacgttctac

SEQ ID NO: 119557 - DNA, 13 bp, Artificial Sequence
  Oligonucleotide for detection of SNP TSC0029843
attaatgttttgy

SEQ ID NO: 119558 - DNA, 13 bp, Artificial Sequence
  Oligonucleotide for detection of SNP TSC0029843
rcaaaacattaat

SEQ ID NO: 119559 - DNA, 13 bp, Artificial Sequence
  Oligonucleotide for detection of SNP TSC0029843
attaatattttgy

SEQ ID NO: 119560 - DNA, 13 bp, Artificial Sequence
  Oligonucleotide for detection of SNP TSC0029843
rcaaaatattaat

SEQ ID NO: 119561 - DNA, 13 bp, Artificial Sequence
  Oligonucleotide for detection of SNP TSC0029843
attaacgttttgy

SEQ ID NO: 119562 - DNA, 13 bp, Artificial Sequence
  Oligonucleotide for detection of SNP TSC0029843
rcaaaacgttaat

SEQ ID NO: 119563 - DNA, 13 bp, Artificial Sequence
  Oligonucleotide for detection of SNP TSC0029844
agatttgaaagga

SEQ ID NO: 119564 - DNA, 13 bp, Artificial Sequence
  Oligonucleotide for detection of SNP TSC0029844
tcctttcaaatct

SEQ ID NO: 119565 - DNA, 13 bp, Artificial Sequence
  Oligonucleotide for detection of SNP TSC0029844
agatttaaaagga

SEQ ID NO: 119566 - DNA, 13 bp, Artificial Sequence
  Oligonucleotide for detection of SNP TSC0029844
tccttttaaatct

SEQ ID NO: 119567 - DNA, 13 bp, Artificial Sequence
  Oligonucleotide for detection of SNP TSC0029845
atgatgaggagty

SEQ ID NO: 119568 - DNA, 13 bp, Artificial Sequence
  Oligonucleotide for detection of SNP TSC0029845
ractcctcatcat

SEQ ID NO: 119569 - DNA, 13 bp, Artificial Sequence
  Oligonucleotide for detection of SNP TSC0029845
atgatggggagty

SEQ ID NO: 119570 - DNA, 13 bp, Artificial Sequence
  Oligonucleotide for detection of SNP TSC0029845
ractccccatcat

SEQ ID NO: 119571 - DNA, 13 bp, Artificial Sequence
  Oligonucleotide for detection of SNP TSC0029845
atgacgaggagty

SEQ ID NO: 119572 - DNA, 13 bp, Artificial Sequence
  Oligonucleotide for detection of SNP TSC0029845
ractcctcgtcat

SEQ ID NO: 119573 - DNA, 13 bp, Artificial Sequence
  Oligonucleotide for detection of SNP TSC0029845
atgacggggagty

SEQ ID NO: 119574 - DNA, 13 bp, Artificial Sequence
  Oligonucleotide for detection of SNP TSC0029845
ractccccgtcat

SEQ ID NO: 119575 - DNA, 13 bp, Artificial Sequence
  Oligonucleotide for detection of SNP TSC0029846
taaaagattataa

SEQ ID NO: 119576 - DNA, 13 bp, Artificial Sequence
  Oligonucleotide for detection of SNP TSC0029846
ttataatctttta

SEQ ID NO: 119577 - DNA, 13 bp, Artificial Sequence
  Oligonucleotide for detection of SNP TSC0029846
taaaaggttataa

SEQ ID NO: 119578 - DNA, 13 bp, Artificial Sequence
  Oligonucleotide for detection of SNP TSC0029846
ttataacctttta

SEQ ID NO: 119579 - DNA, 13 bp, Artificial Sequence
  Oligonucleotide for detection of SNP TSC0029847
gtgttagtaaaag

SEQ ID NO: 119580 - DNA, 13 bp, Artificial Sequence
  Oligonucleotide for detection of SNP TSC0029847
cttttactaacac

SEQ ID NO: 119581 - DNA, 13 bp, Artificial Sequence
  Oligonucleotide for detection of SNP TSC0029847
gtgttaataaaag

SEQ ID NO: 119582 - DNA, 13 bp, Artificial Sequence
  Oligonucleotide for detection of SNP TSC0029847
cttttattaacac

SEQ ID NO: 119583 - DNA, 13 bp, Artificial Sequence
  Oligonucleotide for detection of SNP TSC0029849
gtggggggggggt

SEQ ID NO: 119584 - DNA, 13 bp, Artificial Sequence
  Oligonucleotide for detection of SNP TSC0029849
accccccccccac

SEQ ID NO: 119585 - DNA, 13 bp, Artificial Sequence
  Oligonucleotide for detection of SNP TSC0029849
gtggggtgggggt

SEQ ID NO: 119586 - DNA, 13 bp, Artificial Sequence
  Oligonucleotide for detection of SNP TSC0029849
acccccaccccac

SEQ ID NO: 119587 - DNA, 13 bp, Artificial Sequence
  Oligonucleotide for detection of SNP TSC0029851
tttaaaattattt

SEQ ID NO: 119588 - DNA, 13 bp, Artificial Sequence
  Oligonucleotide for detection of SNP TSC0029851
aaataattttaaa

SEQ ID NO: 119589 - DNA, 13 bp, Artificial Sequence
  Oligonucleotide for detection of SNP TSC0029851
tttaaagttattt

SEQ ID NO: 119590 - DNA, 13 bp, Artificial Sequence
  Oligonucleotide for detection of SNP TSC0029851
aaataactttaaa

SEQ ID NO: 119591 - DNA, 13 bp, Artificial Sequence
  Oligonucleotide for detection of SNP TSC0029852
tagagatgaggty

SEQ ID NO: 119592 - DNA, 13 bp, Artificial Sequence
  Oligonucleotide for detection of SNP TSC0029852
racctcatctcta

SEQ ID NO: 119593 - DNA, 13 bp, Artificial Sequence
  Oligonucleotide for detection of SNP TSC0029852
tagagacgaggty

SEQ ID NO: 119594 - DNA, 13 bp, Artificial Sequence
  Oligonucleotide for detection of SNP TSC0029852
racctcgtctcta

SEQ ID NO: 119595 - DNA, 13 bp, Artificial Sequence
  Oligonucleotide for detection of SNP TSC0029854
tagtgagagaaga

SEQ ID NO: 119596 - DNA, 13 bp, Artificial Sequence
  Oligonucleotide for detection of SNP TSC0029854
tcttctctcacta

SEQ ID NO: 119597 - DNA, 13 bp, Artificial Sequence
  Oligonucleotide for detection of SNP TSC0029854
tagtgatagaaga

SEQ ID NO: 119598 - DNA, 13 bp, Artificial Sequence
  Oligonucleotide for detection of SNP TSC0029854
tcttctatcacta

SEQ ID NO: 119599 - DNA, 13 bp, Artificial Sequence
  Oligonucleotide for detection of SNP TSC0029857
tagggaattatag

SEQ ID NO: 119600 - DNA, 13 bp, Artificial Sequence
  Oligonucleotide for detection of SNP TSC0029857
ctataattcccta

SEQ ID NO: 119601 - DNA, 13 bp, Artificial Sequence
  Oligonucleotide for detection of SNP TSC0029857
tagggatttatag

SEQ ID NO: 119602 - DNA, 13 bp, Artificial Sequence
  Oligonucleotide for detection of SNP TSC0029857
ctataaatcccta

SEQ ID NO: 119603 - DNA, 13 bp, Artificial Sequence
  Oligonucleotide for detection of SNP TSC0029857
ttgtaatttttta

SEQ ID NO: 119604 - DNA, 13 bp, Artificial Sequence
  Oligonucleotide for detection of SNP TSC0029857
taaaaaattacaa

SEQ ID NO: 119605 - DNA, 13 bp, Artificial Sequence
  Oligonucleotide for detection of SNP TSC0029857
ttgtaagttttta

SEQ ID NO: 119606 - DNA, 13 bp, Artificial Sequence
  Oligonucleotide for detection of SNP TSC0029857
taaaaacttacaa

SEQ ID NO: 119607 - DNA, 13 bp, Artificial Sequence
  Oligonucleotide for detection of SNP TSC0029858
tatgtgttgggty

SEQ ID NO: 119608 - DNA, 13 bp, Artificial Sequence
  Oligonucleotide for detection of SNP TSC0029858
racccaacacata

SEQ ID NO: 119609 - DNA, 13 bp, Artificial Sequence
  Oligonucleotide for detection of SNP TSC0029858
tatgtggtgggty

SEQ ID NO: 119610 - DNA, 13 bp, Artificial Sequence
  Oligonucleotide for detection of SNP TSC0029858
racccaccacata

SEQ ID NO: 119611 - DNA, 13 bp, Artificial Sequence
  Oligonucleotide for detection of SNP TSC0029858
ggtttagtatatg

SEQ ID NO: 119612 - DNA, 13 bp, Artificial Sequence
  Oligonucleotide for detection of SNP TSC0029858
catatactaaacc

SEQ ID NO: 119613 - DNA, 13 bp, Artificial Sequence
  Oligonucleotide for detection of SNP TSC0029858
ggtttattatatg

SEQ ID NO: 119614 - DNA, 13 bp, Artificial Sequence
  Oligonucleotide for detection of SNP TSC0029858
catataataaacc

SEQ ID NO: 119615 - DNA, 13 bp, Artificial Sequence
  Oligonucleotide for detection of SNP TSC0029859
ttaagtagtaagg

SEQ ID NO: 119616 - DNA, 13 bp, Artificial Sequence
  Oligonucleotide for detection of SNP TSC0029859
ccttactacttaa

SEQ ID NO: 119617 - DNA, 13 bp, Artificial Sequence
  Oligonucleotide for detection of SNP TSC0029859
ttaagtggtaagg

SEQ ID NO: 119618 - DNA, 13 bp, Artificial Sequence
  Oligonucleotide for detection of SNP TSC0029859
ccttaccacttaa

SEQ ID NO: 119619 - DNA, 13 bp, Artificial Sequence
  Oligonucleotide for detection of SNP TSC0029859
ttaagcggtaagg

SEQ ID NO: 119620 - DNA, 13 bp, Artificial Sequence
  Oligonucleotide for detection of SNP TSC0029859
ccttaccgcttaa

SEQ ID NO: 119621 - DNA, 13 bp, Artificial Sequence
  Oligonucleotide for detection of SNP TSC0029859
ttttgttgtttga

SEQ ID NO: 119622 - DNA, 13 bp, Artificial Sequence
  Oligonucleotide for detection of SNP TSC0029859
tcaaacaacaaaa

SEQ ID NO: 119623 - DNA, 13 bp, Artificial Sequence
  Oligonucleotide for detection of SNP TSC0029859
ttttgtcgtttga

SEQ ID NO: 119624 - DNA, 13 bp, Artificial Sequence
  Oligonucleotide for detection of SNP TSC0029859
tcaaacgacaaaa

SEQ ID NO: 119625 - DNA, 13 bp, Artificial Sequence
  Oligonucleotide for detection of SNP TSC0029860
aagtatagttaaa

SEQ ID NO: 119626 - DNA, 13 bp, Artificial Sequence
  Oligonucleotide for detection of SNP TSC0029860
tttaactatactt

SEQ ID NO: 119627 - DNA, 13 bp, Artificial Sequence
  Oligonucleotide for detection of SNP TSC0029860
aagtattgttaaa

SEQ ID NO: 119628 - DNA, 13 bp, Artificial Sequence
  Oligonucleotide for detection of SNP TSC0029860
tttaacaatactt

SEQ ID NO: 119629 - DNA, 13 bp, Artificial Sequence
  Oligonucleotide for detection of SNP TSC0029860
tttagttatattt

SEQ ID NO: 119630 - DNA, 13 bp, Artificial Sequence
  Oligonucleotide for detection of SNP TSC0029860
aaatataactaaa

SEQ ID NO: 119631 - DNA, 13 bp, Artificial Sequence
  Oligonucleotide for detection of SNP TSC0029860
tttagtaatattt

SEQ ID NO: 119632 - DNA, 13 bp, Artificial Sequence
  Oligonucleotide for detection of SNP TSC0029860
aaatattactaaa

SEQ ID NO: 119633 - DNA, 13 bp, Artificial Sequence
  Oligonucleotide for detection of SNP TSC0029861
ggtaattggtgtt

SEQ ID NO: 119634 - DNA, 13 bp, Artificial Sequence
  Oligonucleotide for detection of SNP TSC0029861
aacaccaattacc

SEQ ID NO: 119635 - DNA, 13 bp, Artificial Sequence
  Oligonucleotide for detection of SNP TSC0029861
ggtaatcggtgtt

SEQ ID NO: 119636 - DNA, 13 bp, Artificial Sequence
  Oligonucleotide for detection of SNP TSC0029861
aacaccgattacc

SEQ ID NO: 119637 - DNA, 13 bp, Artificial Sequence
  Oligonucleotide for detection of SNP TSC0029861
agtattgattaty

SEQ ID NO: 119638 - DNA, 13 bp, Artificial Sequence
  Oligonucleotide for detection of SNP TSC0029861
rataatcaatact

SEQ ID NO: 119639 - DNA, 13 bp, Artificial Sequence
  Oligonucleotide for detection of SNP TSC0029861
agtattaattaty

SEQ ID NO: 119640 - DNA, 13 bp, Artificial Sequence
  Oligonucleotide for detection of SNP TSC0029861
rataattaatact

SEQ ID NO: 119641 - DNA, 13 bp, Artificial Sequence
  Oligonucleotide for detection of SNP TSC0029861
agtatcgattaty

SEQ ID NO: 119642 - DNA, 13 bp, Artificial Sequence
  Oligonucleotide for detection of SNP TSC0029861
rataatcgatact

SEQ ID NO: 119643 - DNA, 13 bp, Artificial Sequence
  Oligonucleotide for detection of SNP TSC0029862
gattaatggtttg

SEQ ID NO: 119644 - DNA, 13 bp, Artificial Sequence
  Oligonucleotide for detection of SNP TSC0029862
caaaccattaatc

SEQ ID NO: 119645 - DNA, 13 bp, Artificial Sequence
  Oligonucleotide for detection of SNP TSC0029862
gattaacggtttg

SEQ ID NO: 119646 - DNA, 13 bp, Artificial Sequence
  Oligonucleotide for detection of SNP TSC0029862
caaaccgttaatc

SEQ ID NO: 119647 - DNA, 13 bp, Artificial Sequence
  Oligonucleotide for detection of SNP TSC0029862
taaattgttgaty

SEQ ID NO: 119648 - DNA, 13 bp, Artificial Sequence
  Oligonucleotide for detection of SNP TSC0029862
ratcaacaattta

SEQ ID NO: 119649 - DNA, 13 bp, Artificial Sequence
  Oligonucleotide for detection of SNP TSC0029862
taaattattgaty

SEQ ID NO: 119650 - DNA, 13 bp, Artificial Sequence
  Oligonucleotide for detection of SNP TSC0029862
ratcaataattta

SEQ ID NO: 119651 - DNA, 13 bp, Artificial Sequence
  Oligonucleotide for detection of SNP TSC0029862
taaatcgttgaty

SEQ ID NO: 119652 - DNA, 13 bp, Artificial Sequence
  Oligonucleotide for detection of SNP TSC0029862
ratcaacgattta

SEQ ID NO: 119653 - DNA, 13 bp, Artificial Sequence
  Oligonucleotide for detection of SNP TSC0029865
tttaattagaaty

SEQ ID NO: 119654 - DNA, 13 bp, Artificial Sequence
  Oligonucleotide for detection of SNP TSC0029865
rattctaattaaa

SEQ ID NO: 119655 - DNA, 13 bp, Artificial Sequence
  Oligonucleotide for detection of SNP TSC0029865
tttaatgagaaty

SEQ ID NO: 119656 - DNA, 13 bp, Artificial Sequence
  Oligonucleotide for detection of SNP TSC0029865
rattctcattaaa

SEQ ID NO: 119657 - DNA, 13 bp, Artificial Sequence
  Oligonucleotide for detection of SNP TSC0029865
tttaacgagaaty

SEQ ID NO: 119658 - DNA, 13 bp, Artificial Sequence
  Oligonucleotide for detection of SNP TSC0029865
rattctcgttaaa

SEQ ID NO: 119659 - DNA, 13 bp, Artificial Sequence
  Oligonucleotide for detection of SNP TSC0029865
gattttggttgga

SEQ ID NO: 119660 - DNA, 13 bp, Artificial Sequence
  Oligonucleotide for detection of SNP TSC0029865
tccaaccaaaatc

SEQ ID NO: 119661 - DNA, 13 bp, Artificial Sequence
  Oligonucleotide for detection of SNP TSC0029865
gatttttgttgga

SEQ ID NO: 119662 - DNA, 13 bp, Artificial Sequence
  Oligonucleotide for detection of SNP TSC0029865
tccaacaaaaatc

SEQ ID NO: 119663 - DNA, 13 bp, Artificial Sequence
  Oligonucleotide for detection of SNP TSC0029865
gattttcgttgga

SEQ ID NO: 119664 - DNA, 13 bp, Artificial Sequence
  Oligonucleotide for detection of SNP TSC0029865
tccaacgaaaatc

SEQ ID NO: 119665 - DNA, 13 bp, Artificial Sequence
  Oligonucleotide for detection of SNP TSC0029866
tatatagttaata

SEQ ID NO: 119666 - DNA, 13 bp, Artificial Sequence
  Oligonucleotide for detection of SNP TSC0029866
tattaactatata

SEQ ID NO: 119667 - DNA, 13 bp, Artificial Sequence
  Oligonucleotide for detection of SNP TSC0029866
tatataattaata

SEQ ID NO: 119668 - DNA, 13 bp, Artificial Sequence
  Oligonucleotide for detection of SNP TSC0029866
tattaattatata

SEQ ID NO: 119669 - DNA, 13 bp, Artificial Sequence
  Oligonucleotide for detection of SNP TSC0029867
agtggtatatttg

SEQ ID NO: 119670 - DNA, 13 bp, Artificial Sequence
  Oligonucleotide for detection of SNP TSC0029867
caaatataccact

SEQ ID NO: 119671 - DNA, 13 bp, Artificial Sequence
  Oligonucleotide for detection of SNP TSC0029867
agtggtttatttg

SEQ ID NO: 119672 - DNA, 13 bp, Artificial Sequence
  Oligonucleotide for detection of SNP TSC0029867
caaataaaccact

SEQ ID NO: 119673 - DNA, 13 bp, Artificial Sequence
  Oligonucleotide for detection of SNP TSC0029867
tagatgtattatt

SEQ ID NO: 119674 - DNA, 13 bp, Artificial Sequence
  Oligonucleotide for detection of SNP TSC0029867
aataatacatcta

SEQ ID NO: 119675 - DNA, 13 bp, Artificial Sequence
  Oligonucleotide for detection of SNP TSC0029867
tagatggattatt

SEQ ID NO: 119676 - DNA, 13 bp, Artificial Sequence
  Oligonucleotide for detection of SNP TSC0029867
aataatccatcta

SEQ ID NO: 119677 - DNA, 13 bp, Artificial Sequence
  Oligonucleotide for detection of SNP TSC0029868
gtgttatataaga

SEQ ID NO: 119678 - DNA, 13 bp, Artificial Sequence
  Oligonucleotide for detection of SNP TSC0029868
tcttatataacac

SEQ ID NO: 119679 - DNA, 13 bp, Artificial Sequence
  Oligonucleotide for detection of SNP TSC0029868
gtgttagataaga

SEQ ID NO: 119680 - DNA, 13 bp, Artificial Sequence
  Oligonucleotide for detection of SNP TSC0029868
tcttatctaacac

SEQ ID NO: 119681 - DNA, 13 bp, Artificial Sequence
  Oligonucleotide for detection of SNP TSC0029868
ttttgtgtagtay

SEQ ID NO: 119682 - DNA, 13 bp, Artificial Sequence
  Oligonucleotide for detection of SNP TSC0029868
rtactacacaaaa

SEQ ID NO: 119683 - DNA, 13 bp, Artificial Sequence
  Oligonucleotide for detection of SNP TSC0029868
ttttgtttagtay

SEQ ID NO: 119684 - DNA, 13 bp, Artificial Sequence
  Oligonucleotide for detection of SNP TSC0029868
rtactaaacaaaa

SEQ ID NO: 119685 - DNA, 13 bp, Artificial Sequence
  Oligonucleotide for detection of SNP TSC0029869
tagagatatggtg

SEQ ID NO: 119686 - DNA, 13 bp, Artificial Sequence
  Oligonucleotide for detection of SNP TSC0029869
caccatatctcta

SEQ ID NO: 119687 - DNA, 13 bp, Artificial Sequence
  Oligonucleotide for detection of SNP TSC0029869
tagagagatggtg

SEQ ID NO: 119688 - DNA, 13 bp, Artificial Sequence
  Oligonucleotide for detection of SNP TSC0029869
caccatctctcta

SEQ ID NO: 119689 - DNA, 13 bp, Artificial Sequence
  Oligonucleotide for detection of SNP TSC0029869
tagagatatggcg

SEQ ID NO: 119690 - DNA, 13 bp, Artificial Sequence
  Oligonucleotide for detection of SNP TSC0029869
cgccatatctcta

SEQ ID NO: 119691 - DNA, 13 bp, Artificial Sequence
  Oligonucleotide for detection of SNP TSC0029869
tagagagatggcg

SEQ ID NO: 119692 - DNA, 13 bp, Artificial Sequence
  Oligonucleotide for detection of SNP TSC0029869
cgccatctctcta

SEQ ID NO: 119693 - DNA, 13 bp, Artificial Sequence
  Oligonucleotide for detection of SNP TSC0029869
tgttatttttttg

SEQ ID NO: 119694 - DNA, 13 bp, Artificial Sequence
  Oligonucleotide for detection of SNP TSC0029869
caaaaaaataaca

SEQ ID NO: 119695 - DNA, 13 bp, Artificial Sequence
  Oligonucleotide for detection of SNP TSC0029869
cgttatgtttttg

SEQ ID NO: 119696 - DNA, 13 bp, Artificial Sequence
  Oligonucleotide for detection of SNP TSC0029869
caaaaacataacg

SEQ ID NO: 119697 - DNA, 13 bp, Artificial Sequence
  Oligonucleotide for detection of SNP TSC0029869
cgttatttttttg

SEQ ID NO: 119698 - DNA, 13 bp, Artificial Sequence
  Oligonucleotide for detection of SNP TSC0029869
caaaaaaataacg

SEQ ID NO: 119699 - DNA, 13 bp, Artificial Sequence
  Oligonucleotide for detection of SNP TSC0029870
ggtagtagaagag

SEQ ID NO: 119700 - DNA, 13 bp, Artificial Sequence
  Oligonucleotide for detection of SNP TSC0029870
ctcttctactacc

SEQ ID NO: 119701 - DNA, 13 bp, Artificial Sequence
  Oligonucleotide for detection of SNP TSC0029870
ggtagtggaagag

SEQ ID NO: 119702 - DNA, 13 bp, Artificial Sequence
  Oligonucleotide for detection of SNP TSC0029870
ctcttccactacc

SEQ ID NO: 119703 - DNA, 13 bp, Artificial Sequence
  Oligonucleotide for detection of SNP TSC0029870
ggtagcggaagag

SEQ ID NO: 119704 - DNA, 13 bp, Artificial Sequence
  Oligonucleotide for detection of SNP TSC0029870
ctcttccgctacc

SEQ ID NO: 119705 - DNA, 13 bp, Artificial Sequence
  Oligonucleotide for detection of SNP TSC0029871
aagagattaataa

SEQ ID NO: 119706 - DNA, 13 bp, Artificial Sequence
  Oligonucleotide for detection of SNP TSC0029871
ttattaatctctt

SEQ ID NO: 119707 - DNA, 13 bp, Artificial Sequence
  Oligonucleotide for detection of SNP TSC0029871
aagagaataataa

SEQ ID NO: 119708 - DNA, 13 bp, Artificial Sequence
  Oligonucleotide for detection of SNP TSC0029871
ttattattctctt

SEQ ID NO: 119709 - DNA, 13 bp, Artificial Sequence
  Oligonucleotide for detection of SNP TSC0029872
gggatttgtttgy

SEQ ID NO: 119710 - DNA, 13 bp, Artificial Sequence
  Oligonucleotide for detection of SNP TSC0029872
rcaaacaaatccc

SEQ ID NO: 119711 - DNA, 13 bp, Artificial Sequence
  Oligonucleotide for detection of SNP TSC0029872
gggattcgtttgy

SEQ ID NO: 119712 - DNA, 13 bp, Artificial Sequence
  Oligonucleotide for detection of SNP TSC0029872
rcaaacgaatccc

SEQ ID NO: 119713 - DNA, 13 bp, Artificial Sequence
  Oligonucleotide for detection of SNP TSC0029872
gtaaatgagttty

SEQ ID NO: 119714 - DNA, 13 bp, Artificial Sequence
  Oligonucleotide for detection of SNP TSC0029872
raaactcatttac

SEQ ID NO: 119715 - DNA, 13 bp, Artificial Sequence
  Oligonucleotide for detection of SNP TSC0029872
gtaaataagttty

SEQ ID NO: 119716 - DNA, 13 bp, Artificial Sequence
  Oligonucleotide for detection of SNP TSC0029872
raaacttatttac

SEQ ID NO: 119717 - DNA, 13 bp, Artificial Sequence
  Oligonucleotide for detection of SNP TSC0029872
gtaaacgagttty

SEQ ID NO: 119718 - DNA, 13 bp, Artificial Sequence
  Oligonucleotide for detection of SNP TSC0029872
raaactcgtttac

SEQ ID NO: 119719 - DNA, 13 bp, Artificial Sequence
  Oligonucleotide for detection of SNP TSC0029873
tgagaggattaag

SEQ ID NO: 119720 - DNA, 13 bp, Artificial Sequence
  Oligonucleotide for detection of SNP TSC0029873
cttaatcctctca

SEQ ID NO: 119721 - DNA, 13 bp, Artificial Sequence
  Oligonucleotide for detection of SNP TSC0029873
tgagagaattaag

SEQ ID NO: 119722 - DNA, 13 bp, Artificial Sequence
  Oligonucleotide for detection of SNP TSC0029873
cttaattctctca

SEQ ID NO: 119723 - DNA, 13 bp, Artificial Sequence
  Oligonucleotide for detection of SNP TSC0029874
gattttagattgy

SEQ ID NO: 119724 - DNA, 13 bp, Artificial Sequence
  Oligonucleotide for detection of SNP TSC0029874
rcaatctaaaatc

SEQ ID NO: 119725 - DNA, 13 bp, Artificial Sequence
  Oligonucleotide for detection of SNP TSC0029874
gatttttgattgy

SEQ ID NO: 119726 - DNA, 13 bp, Artificial Sequence
  Oligonucleotide for detection of SNP TSC0029874
rcaatcaaaaatc

SEQ ID NO: 119727 - DNA, 13 bp, Artificial Sequence
  Oligonucleotide for detection of SNP TSC0029874
gtagtttgagaty

SEQ ID NO: 119728 - DNA, 13 bp, Artificial Sequence
  Oligonucleotide for detection of SNP TSC0029874
ratctcaaactac

SEQ ID NO: 119729 - DNA, 13 bp, Artificial Sequence
  Oligonucleotide for detection of SNP TSC0029874
gtagttagagaty

SEQ ID NO: 119730 - DNA, 13 bp, Artificial Sequence
  Oligonucleotide for detection of SNP TSC0029874
ratctctaactac

SEQ ID NO: 119731 - DNA, 13 bp, Artificial Sequence
  Oligonucleotide for detection of SNP TSC0029875
gttttagatttag

SEQ ID NO: 119732 - DNA, 13 bp, Artificial Sequence
  Oligonucleotide for detection of SNP TSC0029875
ctaaatctaaaac

SEQ ID NO: 119733 - DNA, 13 bp, Artificial Sequence
  Oligonucleotide for detection of SNP TSC0029875
gttttaaatttag

SEQ ID NO: 119734 - DNA, 13 bp, Artificial Sequence
  Oligonucleotide for detection of SNP TSC0029875
ctaaatttaaaac

SEQ ID NO: 119735 - DNA, 13 bp, Artificial Sequence
  Oligonucleotide for detection of SNP TSC0029876
gaagaaaaattty

SEQ ID NO: 119736 - DNA, 13 bp, Artificial Sequence
  Oligonucleotide for detection of SNP TSC0029876
raaatttttcttc

SEQ ID NO: 119737 - DNA, 13 bp, Artificial Sequence
  Oligonucleotide for detection of SNP TSC0029876
gaagaataattty

SEQ ID NO: 119738 - DNA, 13 bp, Artificial Sequence
  Oligonucleotide for detection of SNP TSC0029876
raaattattcttc

SEQ ID NO: 119739 - DNA, 13 bp, Artificial Sequence
  Oligonucleotide for detection of SNP TSC0029876
gaaatttttttty

SEQ ID NO: 119740 - DNA, 13 bp, Artificial Sequence
  Oligonucleotide for detection of SNP TSC0029876
raaaaaaaatttc

SEQ ID NO: 119741 - DNA, 13 bp, Artificial Sequence
  Oligonucleotide for detection of SNP TSC0029876
gaaattgttttty

SEQ ID NO: 119742 - DNA, 13 bp, Artificial Sequence
  Oligonucleotide for detection of SNP TSC0029876
raaaaacaatttc

SEQ ID NO: 119743 - DNA, 13 bp, Artificial Sequence
  Oligonucleotide for detection of SNP TSC0029877
aatagaaaaataa

SEQ ID NO: 119744 - DNA, 13 bp, Artificial Sequence
  Oligonucleotide for detection of SNP TSC0029877
ttatttttctatt

SEQ ID NO: 119745 - DNA, 13 bp, Artificial Sequence
  Oligonucleotide for detection of SNP TSC0029877
aatagataaataa

SEQ ID NO: 119746 - DNA, 13 bp, Artificial Sequence
  Oligonucleotide for detection of SNP TSC0029877
ttatttatctatt

SEQ ID NO: 119747 - DNA, 13 bp, Artificial Sequence
  Oligonucleotide for detection of SNP TSC0029877
ttgtttttttgtt

SEQ ID NO: 119748 - DNA, 13 bp, Artificial Sequence
  Oligonucleotide for detection of SNP TSC0029877
aacaaaaaaacaa

SEQ ID NO: 119749 - DNA, 13 bp, Artificial Sequence
  Oligonucleotide for detection of SNP TSC0029882
tttatttattata

SEQ ID NO: 119750 - DNA, 13 bp, Artificial Sequence
  Oligonucleotide for detection of SNP TSC0029882
tataataaataaa

SEQ ID NO: 119751 - DNA, 13 bp, Artificial Sequence
  Oligonucleotide for detection of SNP TSC0029882
tttatcgattata

SEQ ID NO: 119752 - DNA, 13 bp, Artificial Sequence
  Oligonucleotide for detection of SNP TSC0029882
tataatcgataaa

SEQ ID NO: 119753 - DNA, 13 bp, Artificial Sequence
  Oligonucleotide for detection of SNP TSC0029882
tataattggtaag

SEQ ID NO: 119754 - DNA, 13 bp, Artificial Sequence
  Oligonucleotide for detection of SNP TSC0029882
cttaccaattata

SEQ ID NO: 119755 - DNA, 13 bp, Artificial Sequence
  Oligonucleotide for detection of SNP TSC0029882
tataataggtaag

SEQ ID NO: 119756 - DNA, 13 bp, Artificial Sequence
  Oligonucleotide for detection of SNP TSC0029882
cttacctattata

SEQ ID NO: 119757 - DNA, 13 bp, Artificial Sequence
  Oligonucleotide for detection of SNP TSC0029882
tataatcggtaag

SEQ ID NO: 119758 - DNA, 13 bp, Artificial Sequence
  Oligonucleotide for detection of SNP TSC0029882
cttaccgattata

SEQ ID NO: 119759 - DNA, 13 bp, Artificial Sequence
  Oligonucleotide for detection of SNP TSC0029883
agttttgattaaa

SEQ ID NO: 119760 - DNA, 13 bp, Artificial Sequence
  Oligonucleotide for detection of SNP TSC0029883
tttaatcaaaact

SEQ ID NO: 119761 - DNA, 13 bp, Artificial Sequence
  Oligonucleotide for detection of SNP TSC0029883
agtttttattaaa

SEQ ID NO: 119762 - DNA, 13 bp, Artificial Sequence
  Oligonucleotide for detection of SNP TSC0029883
tttaataaaaact

SEQ ID NO: 119763 - DNA, 13 bp, Artificial Sequence
  Oligonucleotide for detection of SNP TSC0029883
tttggttagagtt

SEQ ID NO: 119764 - DNA, 13 bp, Artificial Sequence
  Oligonucleotide for detection of SNP TSC0029883
aactctaaccaaa

SEQ ID NO: 119765 - DNA, 13 bp, Artificial Sequence
  Oligonucleotide for detection of SNP TSC0029883
tttggtaagagtt

SEQ ID NO: 119766 - DNA, 13 bp, Artificial Sequence
  Oligonucleotide for detection of SNP TSC0029883
aactcttaccaaa

SEQ ID NO: 119767 - DNA, 13 bp, Artificial Sequence
  Oligonucleotide for detection of SNP TSC0029884
tgagggtgttttt

SEQ ID NO: 119768 - DNA, 13 bp, Artificial Sequence
  Oligonucleotide for detection of SNP TSC0029884
aaaaacaccctca

SEQ ID NO: 119769 - DNA, 13 bp, Artificial Sequence
  Oligonucleotide for detection of SNP TSC0029884
tgagggcgttttt

SEQ ID NO: 119770 - DNA, 13 bp, Artificial Sequence
  Oligonucleotide for detection of SNP TSC0029884
aaaaacgccctca

SEQ ID NO: 119771 - DNA, 13 bp, Artificial Sequence
  Oligonucleotide for detection of SNP TSC0029884
agaagtgttttta

SEQ ID NO: 119772 - DNA, 13 bp, Artificial Sequence
  Oligonucleotide for detection of SNP TSC0029884
taaaaacacttct

SEQ ID NO: 119773 - DNA, 13 bp, Artificial Sequence
  Oligonucleotide for detection of SNP TSC0029884
agaagtattttta

SEQ ID NO: 119774 - DNA, 13 bp, Artificial Sequence
  Oligonucleotide for detection of SNP TSC0029884
taaaaatacttct

SEQ ID NO: 119775 - DNA, 13 bp, Artificial Sequence
  Oligonucleotide for detection of SNP TSC0029884
agaagcgttttta

SEQ ID NO: 119776 - DNA, 13 bp, Artificial Sequence
  Oligonucleotide for detection of SNP TSC0029884
taaaaacgcttct

SEQ ID NO: 119777 - DNA, 13 bp, Artificial Sequence
  Oligonucleotide for detection of SNP TSC0029889
ttataagaagatg

SEQ ID NO: 119778 - DNA, 13 bp, Artificial Sequence
  Oligonucleotide for detection of SNP TSC0029889
catcttcttataa

SEQ ID NO: 119779 - DNA, 13 bp, Artificial Sequence
  Oligonucleotide for detection of SNP TSC0029889
ttataataagatg

SEQ ID NO: 119780 - DNA, 13 bp, Artificial Sequence
  Oligonucleotide for detection of SNP TSC0029889
catcttattataa

SEQ ID NO: 119781 - DNA, 13 bp, Artificial Sequence
  Oligonucleotide for detection of SNP TSC0029890
ataggaagtttay

SEQ ID NO: 119782 - DNA, 13 bp, Artificial Sequence
  Oligonucleotide for detection of SNP TSC0029890
rtaaacttcctat

SEQ ID NO: 119783 - DNA, 13 bp, Artificial Sequence
  Oligonucleotide for detection of SNP TSC0029890
ataggaggtttay

SEQ ID NO: 119784 - DNA, 13 bp, Artificial Sequence
  Oligonucleotide for detection of SNP TSC0029890
rtaaacctcctat

SEQ ID NO: 119785 - DNA, 13 bp, Artificial Sequence
  Oligonucleotide for detection of SNP TSC0029892
ttttggagagagt

SEQ ID NO: 119786 - DNA, 13 bp, Artificial Sequence
  Oligonucleotide for detection of SNP TSC0029892
actctctccaaaa

SEQ ID NO: 119787 - DNA, 13 bp, Artificial Sequence
  Oligonucleotide for detection of SNP TSC0029892
ttttggggagagt

SEQ ID NO: 119788 - DNA, 13 bp, Artificial Sequence
  Oligonucleotide for detection of SNP TSC0029892
actctccccaaaa

SEQ ID NO: 119789 - DNA, 13 bp, Artificial Sequence
  Oligonucleotide for detection of SNP TSC0029893
taatgagttttgt

SEQ ID NO: 119790 - DNA, 13 bp, Artificial Sequence
  Oligonucleotide for detection of SNP TSC0029893
acaaaactcatta

SEQ ID NO: 119791 - DNA, 13 bp, Artificial Sequence
  Oligonucleotide for detection of SNP TSC0029893
taatgatttttgt

SEQ ID NO: 119792 - DNA, 13 bp, Artificial Sequence
  Oligonucleotide for detection of SNP TSC0029893
acaaaaatcatta

SEQ ID NO: 119793 - DNA, 13 bp, Artificial Sequence
  Oligonucleotide for detection of SNP TSC0029893
ataaagtttatta

SEQ ID NO: 119794 - DNA, 13 bp, Artificial Sequence
  Oligonucleotide for detection of SNP TSC0029893
taataaactttat

SEQ ID NO: 119795 - DNA, 13 bp, Artificial Sequence
  Oligonucleotide for detection of SNP TSC0029893
ataaagattatta

SEQ ID NO: 119796 - DNA, 13 bp, Artificial Sequence
  Oligonucleotide for detection of SNP TSC0029893
taataatctttat

SEQ ID NO: 119797 - DNA, 13 bp, Artificial Sequence
  Oligonucleotide for detection of SNP TSC0029894
agtaatggatata

SEQ ID NO: 119798 - DNA, 13 bp, Artificial Sequence
  Oligonucleotide for detection of SNP TSC0029894
tatatccattact

SEQ ID NO: 119799 - DNA, 13 bp, Artificial Sequence
  Oligonucleotide for detection of SNP TSC0029894
agtaacggatata

SEQ ID NO: 119800 - DNA, 13 bp, Artificial Sequence
  Oligonucleotide for detection of SNP TSC0029894
tatatccgttact

SEQ ID NO: 119801 - DNA, 13 bp, Artificial Sequence
  Oligonucleotide for detection of SNP TSC0029894
tatatttgttatt

SEQ ID NO: 119802 - DNA, 13 bp, Artificial Sequence
  Oligonucleotide for detection of SNP TSC0029894
aataacaaatata

SEQ ID NO: 119803 - DNA, 13 bp, Artificial Sequence
  Oligonucleotide for detection of SNP TSC0029894
tatattcgttatt

SEQ ID NO: 119804 - DNA, 13 bp, Artificial Sequence
  Oligonucleotide for detection of SNP TSC0029894
aataacgaatata

SEQ ID NO: 119805 - DNA, 13 bp, Artificial Sequence
  Oligonucleotide for detection of SNP TSC0029895
tatatgatgtttt

SEQ ID NO: 119806 - DNA, 13 bp, Artificial Sequence
  Oligonucleotide for detection of SNP TSC0029895
aaaacatcatata

SEQ ID NO: 119807 - DNA, 13 bp, Artificial Sequence
  Oligonucleotide for detection of SNP TSC0029895
tatatgttgtttt

SEQ ID NO: 119808 - DNA, 13 bp, Artificial Sequence
  Oligonucleotide for detection of SNP TSC0029895
aaaacaacatata

SEQ ID NO: 119809 - DNA, 13 bp, Artificial Sequence
  Oligonucleotide for detection of SNP TSC0029895
agggtattatata

SEQ ID NO: 119810 - DNA, 13 bp, Artificial Sequence
  Oligonucleotide for detection of SNP TSC0029895
tatataataccct

SEQ ID NO: 119811 - DNA, 13 bp, Artificial Sequence
  Oligonucleotide for detection of SNP TSC0029895
agggtagtatata

SEQ ID NO: 119812 - DNA, 13 bp, Artificial Sequence
  Oligonucleotide for detection of SNP TSC0029895
tatatactaccct

SEQ ID NO: 119813 - DNA, 13 bp, Artificial Sequence
  Oligonucleotide for detection of SNP TSC0029900
ttgttaaaaagaa

SEQ ID NO: 119814 - DNA, 13 bp, Artificial Sequence
  Oligonucleotide for detection of SNP TSC0029900
ttctttttaacaa

SEQ ID NO: 119815 - DNA, 13 bp, Artificial Sequence
  Oligonucleotide for detection of SNP TSC0029900
ttgttagaaagaa

SEQ ID NO: 119816 - DNA, 13 bp, Artificial Sequence
  Oligonucleotide for detection of SNP TSC0029900
ttctttctaacaa

SEQ ID NO: 119817 - DNA, 13 bp, Artificial Sequence
  Oligonucleotide for detection of SNP TSC0029901
tatttggtattta

SEQ ID NO: 119818 - DNA, 13 bp, Artificial Sequence
  Oligonucleotide for detection of SNP TSC0029901
taaataccaaata

SEQ ID NO: 119819 - DNA, 13 bp, Artificial Sequence
  Oligonucleotide for detection of SNP TSC0029901
tatttgatattta

SEQ ID NO: 119820 - DNA, 13 bp, Artificial Sequence
  Oligonucleotide for detection of SNP TSC0029901
taaatatcaaata

SEQ ID NO: 119821 - DNA, 13 bp, Artificial Sequence
  Oligonucleotide for detection of SNP TSC0029902
aattaatgtatgy

SEQ ID NO: 119822 - DNA, 13 bp, Artificial Sequence
  Oligonucleotide for detection of SNP TSC0029902
rcatacattaatt

SEQ ID NO: 119823 - DNA, 13 bp, Artificial Sequence
  Oligonucleotide for detection of SNP TSC0029902
aattaaggtatgy

SEQ ID NO: 119824 - DNA, 13 bp, Artificial Sequence
  Oligonucleotide for detection of SNP TSC0029902
rcataccttaatt

SEQ ID NO: 119825 - DNA, 13 bp, Artificial Sequence
  Oligonucleotide for detection of SNP TSC0029902
aattaacgtatgy

SEQ ID NO: 119826 - DNA, 13 bp, Artificial Sequence
  Oligonucleotide for detection of SNP TSC0029902
rcatacgttaatt

SEQ ID NO: 119827 - DNA, 13 bp, Artificial Sequence
  Oligonucleotide for detection of SNP TSC0029902
gtatatgttgatt

SEQ ID NO: 119828 - DNA, 13 bp, Artificial Sequence
  Oligonucleotide for detection of SNP TSC0029902
aatcaacatatac

SEQ ID NO: 119829 - DNA, 13 bp, Artificial Sequence
  Oligonucleotide for detection of SNP TSC0029902
gtatattttgatt

SEQ ID NO: 119830 - DNA, 13 bp, Artificial Sequence
  Oligonucleotide for detection of SNP TSC0029902
aatcaaaatatac

SEQ ID NO: 119831 - DNA, 13 bp, Artificial Sequence
  Oligonucleotide for detection of SNP TSC0029902
gtatacgttgatt

SEQ ID NO: 119832 - DNA, 13 bp, Artificial Sequence
  Oligonucleotide for detection of SNP TSC0029902
aatcaacgtatac

SEQ ID NO: 119833 - DNA, 13 bp, Artificial Sequence
  Oligonucleotide for detection of SNP TSC0029903
aaatgagttggtt

SEQ ID NO: 119834 - DNA, 13 bp, Artificial Sequence
  Oligonucleotide for detection of SNP TSC0029903
aaccaactcattt

SEQ ID NO: 119835 - DNA, 13 bp, Artificial Sequence
  Oligonucleotide for detection of SNP TSC0029903
aaatgaattggtt

SEQ ID NO: 119836 - DNA, 13 bp, Artificial Sequence
  Oligonucleotide for detection of SNP TSC0029903
aaccaattcattt

SEQ ID NO: 119837 - DNA, 13 bp, Artificial Sequence
  Oligonucleotide for detection of SNP TSC0029903
aaatgagtcggtt

SEQ ID NO: 119838 - DNA, 13 bp, Artificial Sequence
  Oligonucleotide for detection of SNP TSC0029903
aaccgactcattt

SEQ ID NO: 119839 - DNA, 13 bp, Artificial Sequence
  Oligonucleotide for detection of SNP TSC0029903
aaatgaatcggtt

SEQ ID NO: 119840 - DNA, 13 bp, Artificial Sequence
  Oligonucleotide for detection of SNP TSC0029903
aaccgattcattt

SEQ ID NO: 119841 - DNA, 13 bp, Artificial Sequence
  Oligonucleotide for detection of SNP TSC0029904
tttattatggttt

SEQ ID NO: 119842 - DNA, 13 bp, Artificial Sequence
  Oligonucleotide for detection of SNP TSC0029904
aaaccataataaa

SEQ ID NO: 119843 - DNA, 13 bp, Artificial Sequence
  Oligonucleotide for detection of SNP TSC0029904
tttattgtggttt

SEQ ID NO: 119844 - DNA, 13 bp, Artificial Sequence
  Oligonucleotide for detection of SNP TSC0029904
aaaccacaataaa

SEQ ID NO: 119845 - DNA, 13 bp, Artificial Sequence
  Oligonucleotide for detection of SNP TSC0029904
tttatcgtggttt

SEQ ID NO: 119846 - DNA, 13 bp, Artificial Sequence
  Oligonucleotide for detection of SNP TSC0029904
aaaccacgataaa

SEQ ID NO: 119847 - DNA, 13 bp, Artificial Sequence
  Oligonucleotide for detection of SNP TSC0029904
agattatgatagg

SEQ ID NO: 119848 - DNA, 13 bp, Artificial Sequence
  Oligonucleotide for detection of SNP TSC0029904
cctatcataatct

SEQ ID NO: 119849 - DNA, 13 bp, Artificial Sequence
  Oligonucleotide for detection of SNP TSC0029904
agattacgatagg

SEQ ID NO: 119850 - DNA, 13 bp, Artificial Sequence
  Oligonucleotide for detection of SNP TSC0029904
cctatcgtaatct

SEQ ID NO: 119851 - DNA, 13 bp, Artificial Sequence
  Oligonucleotide for detection of SNP TSC0029905
taaaatgaatatt

SEQ ID NO: 119852 - DNA, 13 bp, Artificial Sequence
  Oligonucleotide for detection of SNP TSC0029905
aatattcatttta

SEQ ID NO: 119853 - DNA, 13 bp, Artificial Sequence
  Oligonucleotide for detection of SNP TSC0029905
taaaataaatatt

SEQ ID NO: 119854 - DNA, 13 bp, Artificial Sequence
  Oligonucleotide for detection of SNP TSC0029905
aatatttatttta

SEQ ID NO: 119855 - DNA, 13 bp, Artificial Sequence
  Oligonucleotide for detection of SNP TSC0029906
tttaaggagtttg

SEQ ID NO: 119856 - DNA, 13 bp, Artificial Sequence
  Oligonucleotide for detection of SNP TSC0029906
caaactccttaaa

SEQ ID NO: 119857 - DNA, 13 bp, Artificial Sequence
  Oligonucleotide for detection of SNP TSC0029906
tttaagaagtttg

SEQ ID NO: 119858 - DNA, 13 bp, Artificial Sequence
  Oligonucleotide for detection of SNP TSC0029906
caaacttcttaaa

SEQ ID NO: 119859 - DNA, 13 bp, Artificial Sequence
  Oligonucleotide for detection of SNP TSC0029910
tttgtaatagtat

SEQ ID NO: 119860 - DNA, 13 bp, Artificial Sequence
  Oligonucleotide for detection of SNP TSC0029910
atactattacaaa

SEQ ID NO: 119861 - DNA, 13 bp, Artificial Sequence
  Oligonucleotide for detection of SNP TSC0029910
tttgtagtagtat

SEQ ID NO: 119862 - DNA, 13 bp, Artificial Sequence
  Oligonucleotide for detection of SNP TSC0029910
atactactacaaa

SEQ ID NO: 119863 - DNA, 13 bp, Artificial Sequence
  Oligonucleotide for detection of SNP TSC0029912
agtattgtatata

SEQ ID NO: 119864 - DNA, 13 bp, Artificial Sequence
  Oligonucleotide for detection of SNP TSC0029912
tatatacaatact

SEQ ID NO: 119865 - DNA, 13 bp, Artificial Sequence
  Oligonucleotide for detection of SNP TSC0029912
agtattatatata

SEQ ID NO: 119866 - DNA, 13 bp, Artificial Sequence
  Oligonucleotide for detection of SNP TSC0029912
tatatataatact

SEQ ID NO: 119867 - DNA, 13 bp, Artificial Sequence
  Oligonucleotide for detection of SNP TSC0029917
gtttggaaatttt

SEQ ID NO: 119868 - DNA, 13 bp, Artificial Sequence
  Oligonucleotide for detection of SNP TSC0029917
aaaatttccaaac

SEQ ID NO: 119869 - DNA, 13 bp, Artificial Sequence
  Oligonucleotide for detection of SNP TSC0029917
gtttgggaatttt

SEQ ID NO: 119870 - DNA, 13 bp, Artificial Sequence
  Oligonucleotide for detection of SNP TSC0029917
aaaattcccaaac

SEQ ID NO: 119871 - DNA, 13 bp, Artificial Sequence
  Oligonucleotide for detection of SNP TSC0029918
gtattaatggttg

SEQ ID NO: 119872 - DNA, 13 bp, Artificial Sequence
  Oligonucleotide for detection of SNP TSC0029918
caaccattaatac

SEQ ID NO: 119873 - DNA, 13 bp, Artificial Sequence
  Oligonucleotide for detection of SNP TSC0029918
gtattagtggttg

SEQ ID NO: 119874 - DNA, 13 bp, Artificial Sequence
  Oligonucleotide for detection of SNP TSC0029918
caaccactaatac

SEQ ID NO: 119875 - DNA, 13 bp, Artificial Sequence
  Oligonucleotide for detection of SNP TSC0029924
tggataggttaaa

SEQ ID NO: 119876 - DNA, 13 bp, Artificial Sequence
  Oligonucleotide for detection of SNP TSC0029924
tttaacctatcca

SEQ ID NO: 119877 - DNA, 13 bp, Artificial Sequence
  Oligonucleotide for detection of SNP TSC0029924
tggataagttaaa

SEQ ID NO: 119878 - DNA, 13 bp, Artificial Sequence
  Oligonucleotide for detection of SNP TSC0029924
tttaacttatcca

SEQ ID NO: 119879 - DNA, 13 bp, Artificial Sequence
  Oligonucleotide for detection of SNP TSC0029925
tttttaagtggtg

SEQ ID NO: 119880 - DNA, 13 bp, Artificial Sequence
  Oligonucleotide for detection of SNP TSC0029925
caccacttaaaaa

SEQ ID NO: 119881 - DNA, 13 bp, Artificial Sequence
  Oligonucleotide for detection of SNP TSC0029925
tttttatgtggtg

SEQ ID NO: 119882 - DNA, 13 bp, Artificial Sequence
  Oligonucleotide for detection of SNP TSC0029925
caccacataaaaa

SEQ ID NO: 119883 - DNA, 13 bp, Artificial Sequence
  Oligonucleotide for detection of SNP TSC0029925
tttttaagcggtg

SEQ ID NO: 119884 - DNA, 13 bp, Artificial Sequence
  Oligonucleotide for detection of SNP TSC0029925
caccgcttaaaaa

SEQ ID NO: 119885 - DNA, 13 bp, Artificial Sequence
  Oligonucleotide for detection of SNP TSC0029925
tttttatgcggtg

SEQ ID NO: 119886 - DNA, 13 bp, Artificial Sequence
  Oligonucleotide for detection of SNP TSC0029925
caccgcataaaaa

SEQ ID NO: 119887 - DNA, 13 bp, Artificial Sequence
  Oligonucleotide for detection of SNP TSC0029925
tattgtttgggaa

SEQ ID NO: 119888 - DNA, 13 bp, Artificial Sequence
  Oligonucleotide for detection of SNP TSC0029925
ttcccaaacaata

SEQ ID NO: 119889 - DNA, 13 bp, Artificial Sequence
  Oligonucleotide for detection of SNP TSC0029925
tattgtatgggaa

SEQ ID NO: 119890 - DNA, 13 bp, Artificial Sequence
  Oligonucleotide for detection of SNP TSC0029925
ttcccatacaata

SEQ ID NO: 119891 - DNA, 13 bp, Artificial Sequence
  Oligonucleotide for detection of SNP TSC0029925
tatcgtttgggaa

SEQ ID NO: 119892 - DNA, 13 bp, Artificial Sequence
  Oligonucleotide for detection of SNP TSC0029925
ttcccaaacgata

SEQ ID NO: 119893 - DNA, 13 bp, Artificial Sequence
  Oligonucleotide for detection of SNP TSC0029925
tatcgtatgggaa

SEQ ID NO: 119894 - DNA, 13 bp, Artificial Sequence
  Oligonucleotide for detection of SNP TSC0029925
ttcccatacgata

SEQ ID NO: 119895 - DNA, 13 bp, Artificial Sequence
  Oligonucleotide for detection of SNP TSC0029926
tatgtatgtatag

SEQ ID NO: 119896 - DNA, 13 bp, Artificial Sequence
  Oligonucleotide for detection of SNP TSC0029926
ctatacatacata

SEQ ID NO: 119897 - DNA, 13 bp, Artificial Sequence
  Oligonucleotide for detection of SNP TSC0029926
tatgtacgtatag

SEQ ID NO: 119898 - DNA, 13 bp, Artificial Sequence
  Oligonucleotide for detection of SNP TSC0029926
ctatacgtacata

SEQ ID NO: 119899 - DNA, 13 bp, Artificial Sequence
  Oligonucleotide for detection of SNP TSC0029926
ttgtatgtatatg

SEQ ID NO: 119900 - DNA, 13 bp, Artificial Sequence
  Oligonucleotide for detection of SNP TSC0029926
catatacatacaa

SEQ ID NO: 119901 - DNA, 13 bp, Artificial Sequence
  Oligonucleotide for detection of SNP TSC0029926
ttgtatatatatg

SEQ ID NO: 119902 - DNA, 13 bp, Artificial Sequence
  Oligonucleotide for detection of SNP TSC0029926
catatatatacaa

SEQ ID NO: 119903 - DNA, 13 bp, Artificial Sequence
  Oligonucleotide for detection of SNP TSC0029926
ttgtacgtatatg

SEQ ID NO: 119904 - DNA, 13 bp, Artificial Sequence
  Oligonucleotide for detection of SNP TSC0029926
catatacgtacaa

SEQ ID NO: 119905 - DNA, 13 bp, Artificial Sequence
  Oligonucleotide for detection of SNP TSC0029927
tgttggataattt

SEQ ID NO: 119906 - DNA, 13 bp, Artificial Sequence
  Oligonucleotide for detection of SNP TSC0029927
aaattatccaaca

SEQ ID NO: 119907 - DNA, 13 bp, Artificial Sequence
  Oligonucleotide for detection of SNP TSC0029927
tgttgggtaattt

SEQ ID NO: 119908 - DNA, 13 bp, Artificial Sequence
  Oligonucleotide for detection of SNP TSC0029927
aaattacccaaca

SEQ ID NO: 119909 - DNA, 13 bp, Artificial Sequence
  Oligonucleotide for detection of SNP TSC0029928
tataaattaattt

SEQ ID NO: 119910 - DNA, 13 bp, Artificial Sequence
  Oligonucleotide for detection of SNP TSC0029928
aaattaatttata

SEQ ID NO: 119911 - DNA, 13 bp, Artificial Sequence
  Oligonucleotide for detection of SNP TSC0029928
aggttattttatg

SEQ ID NO: 119912 - DNA, 13 bp, Artificial Sequence
  Oligonucleotide for detection of SNP TSC0029928
cataaaataacct

SEQ ID NO: 119913 - DNA, 13 bp, Artificial Sequence
  Oligonucleotide for detection of SNP TSC0029928
aggttagtttatg

SEQ ID NO: 119914 - DNA, 13 bp, Artificial Sequence
  Oligonucleotide for detection of SNP TSC0029928
cataaactaacct

SEQ ID NO: 119915 - DNA, 13 bp, Artificial Sequence
  Oligonucleotide for detection of SNP TSC0029929
agaggtaggggaa

SEQ ID NO: 119916 - DNA, 13 bp, Artificial Sequence
  Oligonucleotide for detection of SNP TSC0029929
ttcccctacctct

SEQ ID NO: 119917 - DNA, 13 bp, Artificial Sequence
  Oligonucleotide for detection of SNP TSC0029929
agaggtgggggaa

SEQ ID NO: 119918 - DNA, 13 bp, Artificial Sequence
  Oligonucleotide for detection of SNP TSC0029929
ttcccccacctct

SEQ ID NO: 119919 - DNA, 13 bp, Artificial Sequence
  Oligonucleotide for detection of SNP TSC0029930
tgttaggttttty

SEQ ID NO: 119920 - DNA, 13 bp, Artificial Sequence
  Oligonucleotide for detection of SNP TSC0029930
raaaaacctaaca

SEQ ID NO: 119921 - DNA, 13 bp, Artificial Sequence
  Oligonucleotide for detection of SNP TSC0029932
gaggaaggaaaaa

SEQ ID NO: 119922 - DNA, 13 bp, Artificial Sequence
  Oligonucleotide for detection of SNP TSC0029932
tttttccttcctc

SEQ ID NO: 119923 - DNA, 13 bp, Artificial Sequence
  Oligonucleotide for detection of SNP TSC0029932
gaggaatgaaaaa

SEQ ID NO: 119924 - DNA, 13 bp, Artificial Sequence
  Oligonucleotide for detection of SNP TSC0029932
tttttcattcctc

SEQ ID NO: 119925 - DNA, 13 bp, Artificial Sequence
  Oligonucleotide for detection of SNP TSC0029932
gaggaacgaaaaa

SEQ ID NO: 119926 - DNA, 13 bp, Artificial Sequence
  Oligonucleotide for detection of SNP TSC0029932
tttttcgttcctc

SEQ ID NO: 119927 - DNA, 13 bp, Artificial Sequence
  Oligonucleotide for detection of SNP TSC0029934
agagaggtattay

SEQ ID NO: 119928 - DNA, 13 bp, Artificial Sequence
  Oligonucleotide for detection of SNP TSC0029934
rtaatacctctct

SEQ ID NO: 119929 - DNA, 13 bp, Artificial Sequence
  Oligonucleotide for detection of SNP TSC0029934
agagagatattay

SEQ ID NO: 119930 - DNA, 13 bp, Artificial Sequence
  Oligonucleotide for detection of SNP TSC0029934
rtaatatctctct

SEQ ID NO: 119931 - DNA, 13 bp, Artificial Sequence
  Oligonucleotide for detection of SNP TSC0029935
tgtgtagggagag

SEQ ID NO: 119932 - DNA, 13 bp, Artificial Sequence
  Oligonucleotide for detection of SNP TSC0029935
ctctccctacaca

SEQ ID NO: 119933 - DNA, 13 bp, Artificial Sequence
  Oligonucleotide for detection of SNP TSC0029935
tgtgtaaggagag

SEQ ID NO: 119934 - DNA, 13 bp, Artificial Sequence
  Oligonucleotide for detection of SNP TSC0029935
ctctccttacaca

SEQ ID NO: 119935 - DNA, 13 bp, Artificial Sequence
  Oligonucleotide for detection of SNP TSC0029936
gagagtagagtag

SEQ ID NO: 119936 - DNA, 13 bp, Artificial Sequence
  Oligonucleotide for detection of SNP TSC0029936
ctactctactctc

SEQ ID NO: 119937 - DNA, 13 bp, Artificial Sequence
  Oligonucleotide for detection of SNP TSC0029936
gagagttgagtag

SEQ ID NO: 119938 - DNA, 13 bp, Artificial Sequence
  Oligonucleotide for detection of SNP TSC0029936
ctactcaactctc

SEQ ID NO: 119939 - DNA, 13 bp, Artificial Sequence
  Oligonucleotide for detection of SNP TSC0029936
ttgtttagtttty

SEQ ID NO: 119940 - DNA, 13 bp, Artificial Sequence
  Oligonucleotide for detection of SNP TSC0029936
raaaactaaacaa

SEQ ID NO: 119941 - DNA, 13 bp, Artificial Sequence
  Oligonucleotide for detection of SNP TSC0029940
agtgttaggaagy

SEQ ID NO: 119942 - DNA, 13 bp, Artificial Sequence
  Oligonucleotide for detection of SNP TSC0029940
rcttcctaacact

SEQ ID NO: 119943 - DNA, 13 bp, Artificial Sequence
  Oligonucleotide for detection of SNP TSC0029940
agtgttgggaagy

SEQ ID NO: 119944 - DNA, 13 bp, Artificial Sequence
  Oligonucleotide for detection of SNP TSC0029940
rcttcccaacact

SEQ ID NO: 119945 - DNA, 13 bp, Artificial Sequence
  Oligonucleotide for detection of SNP TSC0029940
agtgtcgggaagy

SEQ ID NO: 119946 - DNA, 13 bp, Artificial Sequence
  Oligonucleotide for detection of SNP TSC0029940
rcttcccgacact

SEQ ID NO: 119947 - DNA, 13 bp, Artificial Sequence
  Oligonucleotide for detection of SNP TSC0029941
tttttttgaggty

SEQ ID NO: 119948 - DNA, 13 bp, Artificial Sequence
  Oligonucleotide for detection of SNP TSC0029941
racctcaaaaaaa

SEQ ID NO: 119949 - DNA, 13 bp, Artificial Sequence
  Oligonucleotide for detection of SNP TSC0029941
ttttttcgaggty

SEQ ID NO: 119950 - DNA, 13 bp, Artificial Sequence
  Oligonucleotide for detection of SNP TSC0029941
racctcgaaaaaa

SEQ ID NO: 119951 - DNA, 13 bp, Artificial Sequence
  Oligonucleotide for detection of SNP TSC0029941
ggttttgggagga

SEQ ID NO: 119952 - DNA, 13 bp, Artificial Sequence
  Oligonucleotide for detection of SNP TSC0029941
tcctcccaaaacc

SEQ ID NO: 119953 - DNA, 13 bp, Artificial Sequence
  Oligonucleotide for detection of SNP TSC0029941
ggttttaggagga

SEQ ID NO: 119954 - DNA, 13 bp, Artificial Sequence
  Oligonucleotide for detection of SNP TSC0029941
tcctcctaaaacc

SEQ ID NO: 119955 - DNA, 13 bp, Artificial Sequence
  Oligonucleotide for detection of SNP TSC0029941
ggtttcgggagga

SEQ ID NO: 119956 - DNA, 13 bp, Artificial Sequence
  Oligonucleotide for detection of SNP TSC0029941
tcctcccgaaacc

SEQ ID NO: 119957 - DNA, 13 bp, Artificial Sequence
  Oligonucleotide for detection of SNP TSC0029942
ttaatggtggtty

SEQ ID NO: 119958 - DNA, 13 bp, Artificial Sequence
  Oligonucleotide for detection of SNP TSC0029942
raaccaccattaa

SEQ ID NO: 119959 - DNA, 13 bp, Artificial Sequence
  Oligonucleotide for detection of SNP TSC0029942
ttaatgatggtty

SEQ ID NO: 119960 - DNA, 13 bp, Artificial Sequence
  Oligonucleotide for detection of SNP TSC0029942
raaccatcattaa

SEQ ID NO: 119961 - DNA, 13 bp, Artificial Sequence
  Oligonucleotide for detection of SNP TSC0029943
gtagtagatagaa

SEQ ID NO: 119962 - DNA, 13 bp, Artificial Sequence
  Oligonucleotide for detection of SNP TSC0029943
ttctatctactac

SEQ ID NO: 119963 - DNA, 13 bp, Artificial Sequence
  Oligonucleotide for detection of SNP TSC0029943
gtagtaaatagaa

SEQ ID NO: 119964 - DNA, 13 bp, Artificial Sequence
  Oligonucleotide for detection of SNP TSC0029943
ttctatttactac

SEQ ID NO: 119965 - DNA, 13 bp, Artificial Sequence
  Oligonucleotide for detection of SNP TSC0029945
ttatttaatttty

SEQ ID NO: 119966 - DNA, 13 bp, Artificial Sequence
  Oligonucleotide for detection of SNP TSC0029945
raaaattaaataa

SEQ ID NO: 119967 - DNA, 13 bp, Artificial Sequence
  Oligonucleotide for detection of SNP TSC0029945
ttattttatttty

SEQ ID NO: 119968 - DNA, 13 bp, Artificial Sequence
  Oligonucleotide for detection of SNP TSC0029945
raaaataaaataa

SEQ ID NO: 119969 - DNA, 13 bp, Artificial Sequence
  Oligonucleotide for detection of SNP TSC0029945
gggggttgggtgg

SEQ ID NO: 119970 - DNA, 13 bp, Artificial Sequence
  Oligonucleotide for detection of SNP TSC0029945
ccacccaaccccc

SEQ ID NO: 119971 - DNA, 13 bp, Artificial Sequence
  Oligonucleotide for detection of SNP TSC0029945
gggggtggggtgg

SEQ ID NO: 119972 - DNA, 13 bp, Artificial Sequence
  Oligonucleotide for detection of SNP TSC0029945
ccaccccaccccc

SEQ ID NO: 119973 - DNA, 13 bp, Artificial Sequence
  Oligonucleotide for detection of SNP TSC0029946
atttttaaggttg

SEQ ID NO: 119974 - DNA, 13 bp, Artificial Sequence
  Oligonucleotide for detection of SNP TSC0029946
caaccttaaaaat

SEQ ID NO: 119975 - DNA, 13 bp, Artificial Sequence
  Oligonucleotide for detection of SNP TSC0029946
attttttaggttg

SEQ ID NO: 119976 - DNA, 13 bp, Artificial Sequence
  Oligonucleotide for detection of SNP TSC0029946
caacctaaaaaat

SEQ ID NO: 119977 - DNA, 13 bp, Artificial Sequence
  Oligonucleotide for detection of SNP TSC0029946
atttttaaggtcg

SEQ ID NO: 119978 - DNA, 13 bp, Artificial Sequence
  Oligonucleotide for detection of SNP TSC0029946
cgaccttaaaaat

SEQ ID NO: 119979 - DNA, 13 bp, Artificial Sequence
  Oligonucleotide for detection of SNP TSC0029946
attttttaggtcg

SEQ ID NO: 119980 - DNA, 13 bp, Artificial Sequence
  Oligonucleotide for detection of SNP TSC0029946
cgacctaaaaaat

SEQ ID NO: 119981 - DNA, 13 bp, Artificial Sequence
  Oligonucleotide for detection of SNP TSC0029946
tggttttgggggt

SEQ ID NO: 119982 - DNA, 13 bp, Artificial Sequence
  Oligonucleotide for detection of SNP TSC0029946
acccccaaaacca

SEQ ID NO: 119983 - DNA, 13 bp, Artificial Sequence
  Oligonucleotide for detection of SNP TSC0029946
tggtttggggggt

SEQ ID NO: 119984 - DNA, 13 bp, Artificial Sequence
  Oligonucleotide for detection of SNP TSC0029946
accccccaaacca

SEQ ID NO: 119985 - DNA, 13 bp, Artificial Sequence
  Oligonucleotide for detection of SNP TSC0029946
cggttttgggggt

SEQ ID NO: 119986 - DNA, 13 bp, Artificial Sequence
  Oligonucleotide for detection of SNP TSC0029946
acccccaaaaccg

SEQ ID NO: 119987 - DNA, 13 bp, Artificial Sequence
  Oligonucleotide for detection of SNP TSC0029946
cggtttggggggt

SEQ ID NO: 119988 - DNA, 13 bp, Artificial Sequence
  Oligonucleotide for detection of SNP TSC0029946
accccccaaaccg

SEQ ID NO: 119989 - DNA, 13 bp, Artificial Sequence
  Oligonucleotide for detection of SNP TSC0029947
gtttttgggtaga

SEQ ID NO: 119990 - DNA, 13 bp, Artificial Sequence
  Oligonucleotide for detection of SNP TSC0029947
tctacccaaaaac

SEQ ID NO: 119991 - DNA, 13 bp, Artificial Sequence
  Oligonucleotide for detection of SNP TSC0029947
gtttttaggtaga

SEQ ID NO: 119992 - DNA, 13 bp, Artificial Sequence
  Oligonucleotide for detection of SNP TSC0029947
tctacctaaaaac

SEQ ID NO: 119993 - DNA, 13 bp, Artificial Sequence
  Oligonucleotide for detection of SNP TSC0029948
ttgaattgaggtg

SEQ ID NO: 119994 - DNA, 13 bp, Artificial Sequence
  Oligonucleotide for detection of SNP TSC0029948
cacctcaattcaa

SEQ ID NO: 119995 - DNA, 13 bp, Artificial Sequence
  Oligonucleotide for detection of SNP TSC0029948
tcgaattgaggtg

SEQ ID NO: 119996 - DNA, 13 bp, Artificial Sequence
  Oligonucleotide for detection of SNP TSC0029948
cacctcaattcga

SEQ ID NO: 119997 - DNA, 13 bp, Artificial Sequence
  Oligonucleotide for detection of SNP TSC0029948
ttgaatcgaggtg

SEQ ID NO: 119998 - DNA, 13 bp, Artificial Sequence
  Oligonucleotide for detection of SNP TSC0029948
cacctcgattcaa

SEQ ID NO: 119999 - DNA, 13 bp, Artificial Sequence
  Oligonucleotide for detection of SNP TSC0029948
tcgaatcgaggtg

SEQ ID NO: 120000 - DNA, 13 bp, Artificial Sequence
  Oligonucleotide for detection of SNP TSC0029948
cacctcgattcga

SEQ ID NO: 120001 - DNA, 13 bp, Artificial Sequence
  Oligonucleotide for detection of SNP TSC0029948
tattttggtttga

SEQ ID NO: 120002 - DNA, 13 bp, Artificial Sequence
  Oligonucleotide for detection of SNP TSC0029948
tcaaaccaaaata

SEQ ID NO: 120003 - DNA, 13 bp, Artificial Sequence
  Oligonucleotide for detection of SNP TSC0029948
tatttcggtttga

SEQ ID NO: 120004 - DNA, 13 bp, Artificial Sequence
  Oligonucleotide for detection of SNP TSC0029948
tcaaaccgaaata

SEQ ID NO: 120005 - DNA, 13 bp, Artificial Sequence
  Oligonucleotide for detection of SNP TSC0029948
tattttagttcga

SEQ ID NO: 120006 - DNA, 13 bp, Artificial Sequence
  Oligonucleotide for detection of SNP TSC0029948
tcgaactaaaata

SEQ ID NO: 120007 - DNA, 13 bp, Artificial Sequence
  Oligonucleotide for detection of SNP TSC0029948
tattttggttcga

SEQ ID NO: 120008 - DNA, 13 bp, Artificial Sequence
  Oligonucleotide for detection of SNP TSC0029948
tcgaaccaaaata

SEQ ID NO: 120009 - DNA, 13 bp, Artificial Sequence
  Oligonucleotide for detection of SNP TSC0029948
tatttcggttcga

SEQ ID NO: 120010 - DNA, 13 bp, Artificial Sequence
  Oligonucleotide for detection of SNP TSC0029948
tcgaaccgaaata

SEQ ID NO: 120011 - DNA, 13 bp, Artificial Sequence
  Oligonucleotide for detection of SNP TSC0029954
tgtgattagtttg

SEQ ID NO: 120012 - DNA, 13 bp, Artificial Sequence
  Oligonucleotide for detection of SNP TSC0029954
caaactaatcaca

SEQ ID NO: 120013 - DNA, 13 bp, Artificial Sequence
  Oligonucleotide for detection of SNP TSC0029954
tgtgatgagtttg

SEQ ID NO: 120014 - DNA, 13 bp, Artificial Sequence
  Oligonucleotide for detection of SNP TSC0029954
caaactcatcaca

SEQ ID NO: 120015 - DNA, 13 bp, Artificial Sequence
  Oligonucleotide for detection of SNP TSC0029954
tgtgacgagtttg

SEQ ID NO: 120016 - DNA, 13 bp, Artificial Sequence
  Oligonucleotide for detection of SNP TSC0029954
caaactcgtcaca

SEQ ID NO: 120017 - DNA, 13 bp, Artificial Sequence
  Oligonucleotide for detection of SNP TSC0029954
taggttggttata

SEQ ID NO: 120018 - DNA, 13 bp, Artificial Sequence
  Oligonucleotide for detection of SNP TSC0029954
tataaccaaccta

SEQ ID NO: 120019 - DNA, 13 bp, Artificial Sequence
  Oligonucleotide for detection of SNP TSC0029954
taggtttgttata

SEQ ID NO: 120020 - DNA, 13 bp, Artificial Sequence
  Oligonucleotide for detection of SNP TSC0029954
tataacaaaccta

SEQ ID NO: 120021 - DNA, 13 bp, Artificial Sequence
  Oligonucleotide for detection of SNP TSC0029954
taggttcgttata

SEQ ID NO: 120022 - DNA, 13 bp, Artificial Sequence
  Oligonucleotide for detection of SNP TSC0029954
tataacgaaccta

SEQ ID NO: 120023 - DNA, 13 bp, Artificial Sequence
  Oligonucleotide for detection of SNP TSC0029956
taggataggttag

SEQ ID NO: 120024 - DNA, 13 bp, Artificial Sequence
  Oligonucleotide for detection of SNP TSC0029956
ctaacctatccta

SEQ ID NO: 120025 - DNA, 13 bp, Artificial Sequence
  Oligonucleotide for detection of SNP TSC0029956
taggatgggttag

SEQ ID NO: 120026 - DNA, 13 bp, Artificial Sequence
  Oligonucleotide for detection of SNP TSC0029956
ctaacccatccta

SEQ ID NO: 120027 - DNA, 13 bp, Artificial Sequence
  Oligonucleotide for detection of SNP TSC0029956
taggacgggttag

SEQ ID NO: 120028 - DNA, 13 bp, Artificial Sequence
  Oligonucleotide for detection of SNP TSC0029956
ctaacccgtccta

SEQ ID NO: 120029 - DNA, 13 bp, Artificial Sequence
  Oligonucleotide for detection of SNP TSC0029956
ttgatttgtttta

SEQ ID NO: 120030 - DNA, 13 bp, Artificial Sequence
  Oligonucleotide for detection of SNP TSC0029956
taaaacaaatcaa

SEQ ID NO: 120031 - DNA, 13 bp, Artificial Sequence
  Oligonucleotide for detection of SNP TSC0029956
ttgattcgtttta

SEQ ID NO: 120032 - DNA, 13 bp, Artificial Sequence
  Oligonucleotide for detection of SNP TSC0029956
taaaacgaatcaa

SEQ ID NO: 120033 - DNA, 13 bp, Artificial Sequence
  Oligonucleotide for detection of SNP TSC0029958
atgtaaaagtagg

SEQ ID NO: 120034 - DNA, 13 bp, Artificial Sequence
  Oligonucleotide for detection of SNP TSC0029958
cctacttttacat

SEQ ID NO: 120035 - DNA, 13 bp, Artificial Sequence
  Oligonucleotide for detection of SNP TSC0029958
atgtaatagtagg

SEQ ID NO: 120036 - DNA, 13 bp, Artificial Sequence
  Oligonucleotide for detection of SNP TSC0029958
cctactattacat

SEQ ID NO: 120037 - DNA, 13 bp, Artificial Sequence
  Oligonucleotide for detection of SNP TSC0029958
tttgtttttatat

SEQ ID NO: 120038 - DNA, 13 bp, Artificial Sequence
  Oligonucleotide for detection of SNP TSC0029958
atataaaaacaaa

SEQ ID NO: 120039 - DNA, 13 bp, Artificial Sequence
  Oligonucleotide for detection of SNP TSC0029958
tttgttattatat

SEQ ID NO: 120040 - DNA, 13 bp, Artificial Sequence
  Oligonucleotide for detection of SNP TSC0029958
atataataacaaa

SEQ ID NO: 120041 - DNA, 13 bp, Artificial Sequence
  Oligonucleotide for detection of SNP TSC0029961
tttataggaaaag

SEQ ID NO: 120042 - DNA, 13 bp, Artificial Sequence
  Oligonucleotide for detection of SNP TSC0029961
cttttcctataaa

SEQ ID NO: 120043 - DNA, 13 bp, Artificial Sequence
  Oligonucleotide for detection of SNP TSC0029961
tttataagaaaag

SEQ ID NO: 120044 - DNA, 13 bp, Artificial Sequence
  Oligonucleotide for detection of SNP TSC0029961
cttttcttataaa

SEQ ID NO: 120045 - DNA, 13 bp, Artificial Sequence
  Oligonucleotide for detection of SNP TSC0029969
gggtatgtagggt

SEQ ID NO: 120046 - DNA, 13 bp, Artificial Sequence
  Oligonucleotide for detection of SNP TSC0029969
accctacataccc

SEQ ID NO: 120047 - DNA, 13 bp, Artificial Sequence
  Oligonucleotide for detection of SNP TSC0029969
gggtatatagggt

SEQ ID NO: 120048 - DNA, 13 bp, Artificial Sequence
  Oligonucleotide for detection of SNP TSC0029969
accctatataccc

SEQ ID NO: 120049 - DNA, 13 bp, Artificial Sequence
  Oligonucleotide for detection of SNP TSC0029970
tgggtatgtaggg

SEQ ID NO: 120050 - DNA, 13 bp, Artificial Sequence
  Oligonucleotide for detection of SNP TSC0029970
ccctacataccca

SEQ ID NO: 120051 - DNA, 13 bp, Artificial Sequence
  Oligonucleotide for detection of SNP TSC0029970
tgggtacgtaggg

SEQ ID NO: 120052 - DNA, 13 bp, Artificial Sequence
  Oligonucleotide for detection of SNP TSC0029970
ccctacgtaccca

SEQ ID NO: 120053 - DNA, 13 bp, Artificial Sequence
  Oligonucleotide for detection of SNP TSC0029972
tttgaatgagaga

SEQ ID NO: 120054 - DNA, 13 bp, Artificial Sequence
  Oligonucleotide for detection of SNP TSC0029972
tctctcattcaaa

SEQ ID NO: 120055 - DNA, 13 bp, Artificial Sequence
  Oligonucleotide for detection of SNP TSC0029972
tttgaacgagaga

SEQ ID NO: 120056 - DNA, 13 bp, Artificial Sequence
  Oligonucleotide for detection of SNP TSC0029972
tctctcgttcaaa

SEQ ID NO: 120057 - DNA, 13 bp, Artificial Sequence
  Oligonucleotide for detection of SNP TSC0029972
tttttcgtttagg

SEQ ID NO: 120058 - DNA, 13 bp, Artificial Sequence
  Oligonucleotide for detection of SNP TSC0029972
cctaaacgaaaaa

SEQ ID NO: 120059 - DNA, 13 bp, Artificial Sequence
  Oligonucleotide for detection of SNP TSC0029973
ttgaaagaattaa

SEQ ID NO: 120060 - DNA, 13 bp, Artificial Sequence
  Oligonucleotide for detection of SNP TSC0029973
ttaattctttcaa

SEQ ID NO: 120061 - DNA, 13 bp, Artificial Sequence
  Oligonucleotide for detection of SNP TSC0029973
ttgaaataattaa

SEQ ID NO: 120062 - DNA, 13 bp, Artificial Sequence
  Oligonucleotide for detection of SNP TSC0029973
ttaattatttcaa

SEQ ID NO: 120063 - DNA, 13 bp, Artificial Sequence
  Oligonucleotide for detection of SNP TSC0029973
ttaatttttttaa

SEQ ID NO: 120064 - DNA, 13 bp, Artificial Sequence
  Oligonucleotide for detection of SNP TSC0029973
ttaaaaaaattaa

SEQ ID NO: 120065 - DNA, 13 bp, Artificial Sequence
  Oligonucleotide for detection of SNP TSC0029973
ttaattattttaa

SEQ ID NO: 120066 - DNA, 13 bp, Artificial Sequence
  Oligonucleotide for detection of SNP TSC0029973
ttaaaataattaa

SEQ ID NO: 120067 - DNA, 13 bp, Artificial Sequence
  Oligonucleotide for detection of SNP TSC0029974
atttgaatgatag

SEQ ID NO: 120068 - DNA, 13 bp, Artificial Sequence
  Oligonucleotide for detection of SNP TSC0029974
ctatcattcaaat

SEQ ID NO: 120069 - DNA, 13 bp, Artificial Sequence
  Oligonucleotide for detection of SNP TSC0029974
atttgagtgatag

SEQ ID NO: 120070 - DNA, 13 bp, Artificial Sequence
  Oligonucleotide for detection of SNP TSC0029974
ctatcactcaaat

SEQ ID NO: 120071 - DNA, 13 bp, Artificial Sequence
  Oligonucleotide for detection of SNP TSC0029974
attcgaatgatag

SEQ ID NO: 120072 - DNA, 13 bp, Artificial Sequence
  Oligonucleotide for detection of SNP TSC0029974
ctatcattcgaat

SEQ ID NO: 120073 - DNA, 13 bp, Artificial Sequence
  Oligonucleotide for detection of SNP TSC0029974
attcgagtgatag

SEQ ID NO: 120074 - DNA, 13 bp, Artificial Sequence
  Oligonucleotide for detection of SNP TSC0029974
ctatcactcgaat

SEQ ID NO: 120075 - DNA, 13 bp, Artificial Sequence
  Oligonucleotide for detection of SNP TSC0029975
ggagagggagagg

SEQ ID NO: 120076 - DNA, 13 bp, Artificial Sequence
  Oligonucleotide for detection of SNP TSC0029975
cctctccctctcc

SEQ ID NO: 120077 - DNA, 13 bp, Artificial Sequence
  Oligonucleotide for detection of SNP TSC0029975
ggagagagagagg

SEQ ID NO: 120078 - DNA, 13 bp, Artificial Sequence
  Oligonucleotide for detection of SNP TSC0029975
cctctctctctcc

SEQ ID NO: 120079 - DNA, 13 bp, Artificial Sequence
  Oligonucleotide for detection of SNP TSC0029976
tttggggtttaga

SEQ ID NO: 120080 - DNA, 13 bp, Artificial Sequence
  Oligonucleotide for detection of SNP TSC0029976
tctaaaccccaaa

SEQ ID NO: 120081 - DNA, 13 bp, Artificial Sequence
  Oligonucleotide for detection of SNP TSC0029976
tttgggttttaga

SEQ ID NO: 120082 - DNA, 13 bp, Artificial Sequence
  Oligonucleotide for detection of SNP TSC0029976
tctaaaacccaaa

SEQ ID NO: 120083 - DNA, 13 bp, Artificial Sequence
  Oligonucleotide for detection of SNP TSC0029976
tttggattttaga

SEQ ID NO: 120084 - DNA, 13 bp, Artificial Sequence
  Oligonucleotide for detection of SNP TSC0029976
tctaaaatccaaa

SEQ ID NO: 120085 - DNA, 13 bp, Artificial Sequence
  Oligonucleotide for detection of SNP TSC0029976
tttggaatttaga

SEQ ID NO: 120086 - DNA, 13 bp, Artificial Sequence
  Oligonucleotide for detection of SNP TSC0029976
tctaaattccaaa

SEQ ID NO: 120087 - DNA, 13 bp, Artificial Sequence
  Oligonucleotide for detection of SNP TSC0029977
aatattatgtgag

SEQ ID NO: 120088 - DNA, 13 bp, Artificial Sequence
  Oligonucleotide for detection of SNP TSC0029977
ctcacataatatt

SEQ ID NO: 120089 - DNA, 13 bp, Artificial Sequence
  Oligonucleotide for detection of SNP TSC0029977
aatattttgtgag

SEQ ID NO: 120090 - DNA, 13 bp, Artificial Sequence
  Oligonucleotide for detection of SNP TSC0029977
ctcacaaaatatt

SEQ ID NO: 120091 - DNA, 13 bp, Artificial Sequence
  Oligonucleotide for detection of SNP TSC0029977
tttatataatatt

SEQ ID NO: 120092 - DNA, 13 bp, Artificial Sequence
  Oligonucleotide for detection of SNP TSC0029977
aatattatataaa

SEQ ID NO: 120093 - DNA, 13 bp, Artificial Sequence
  Oligonucleotide for detection of SNP TSC0029977
tttatagaatatt

SEQ ID NO: 120094 - DNA, 13 bp, Artificial Sequence
  Oligonucleotide for detection of SNP TSC0029977
aatattctataaa

SEQ ID NO: 120095 - DNA, 13 bp, Artificial Sequence
  Oligonucleotide for detection of SNP TSC0029978
attaaagaagtty

SEQ ID NO: 120096 - DNA, 13 bp, Artificial Sequence
  Oligonucleotide for detection of SNP TSC0029978
raacttctttaat

SEQ ID NO: 120097 - DNA, 13 bp, Artificial Sequence
  Oligonucleotide for detection of SNP TSC0029978
attaaaaaagtty

SEQ ID NO: 120098 - DNA, 13 bp, Artificial Sequence
  Oligonucleotide for detection of SNP TSC0029978
raacttttttaat

SEQ ID NO: 120099 - DNA, 13 bp, Artificial Sequence
  Oligonucleotide for detection of SNP TSC0029979
ttaagagttgtta

SEQ ID NO: 120100 - DNA, 13 bp, Artificial Sequence
  Oligonucleotide for detection of SNP TSC0029979
taacaactcttaa

SEQ ID NO: 120101 - DNA, 13 bp, Artificial Sequence
  Oligonucleotide for detection of SNP TSC0029979
ttaagaattgtta

SEQ ID NO: 120102 - DNA, 13 bp, Artificial Sequence
  Oligonucleotide for detection of SNP TSC0029979
taacaattcttaa

SEQ ID NO: 120103 - DNA, 13 bp, Artificial Sequence
  Oligonucleotide for detection of SNP TSC0029980
attgatatagaag

SEQ ID NO: 120104 - DNA, 13 bp, Artificial Sequence
  Oligonucleotide for detection of SNP TSC0029980
cttctatatcaat

SEQ ID NO: 120105 - DNA, 13 bp, Artificial Sequence
  Oligonucleotide for detection of SNP TSC0029980
attgatgtagaag

SEQ ID NO: 120106 - DNA, 13 bp, Artificial Sequence
  Oligonucleotide for detection of SNP TSC0029980
cttctacatcaat

SEQ ID NO: 120107 - DNA, 13 bp, Artificial Sequence
  Oligonucleotide for detection of SNP TSC0029980
attgacgtagaag

SEQ ID NO: 120108 - DNA, 13 bp, Artificial Sequence
  Oligonucleotide for detection of SNP TSC0029980
cttctacgtcaat

SEQ ID NO: 120109 - DNA, 13 bp, Artificial Sequence
  Oligonucleotide for detection of SNP TSC0029981
aattgttgagggt

SEQ ID NO: 120110 - DNA, 13 bp, Artificial Sequence
  Oligonucleotide for detection of SNP TSC0029981
accctcaacaatt

SEQ ID NO: 120111 - DNA, 13 bp, Artificial Sequence
  Oligonucleotide for detection of SNP TSC0029981
aattgtcgagggt

SEQ ID NO: 120112 - DNA, 13 bp, Artificial Sequence
  Oligonucleotide for detection of SNP TSC0029981
accctcgacaatt

SEQ ID NO: 120113 - DNA, 13 bp, Artificial Sequence
  Oligonucleotide for detection of SNP TSC0029981
atttttgatagtt

SEQ ID NO: 120114 - DNA, 13 bp, Artificial Sequence
  Oligonucleotide for detection of SNP TSC0029981
aactatcaaaaat

SEQ ID NO: 120115 - DNA, 13 bp, Artificial Sequence
  Oligonucleotide for detection of SNP TSC0029981
atttttaatagtt

SEQ ID NO: 120116 - DNA, 13 bp, Artificial Sequence
  Oligonucleotide for detection of SNP TSC0029981
aactattaaaaat

SEQ ID NO: 120117 - DNA, 13 bp, Artificial Sequence
  Oligonucleotide for detection of SNP TSC0029981
attttcgatagtt

SEQ ID NO: 120118 - DNA, 13 bp, Artificial Sequence
  Oligonucleotide for detection of SNP TSC0029981
aactatcgaaaat

SEQ ID NO: 120119 - DNA, 13 bp, Artificial Sequence
  Oligonucleotide for detection of SNP TSC0029982
ttttttatttgay

SEQ ID NO: 120120 - DNA, 13 bp, Artificial Sequence
  Oligonucleotide for detection of SNP TSC0029982
rtcaaataaaaaa

SEQ ID NO: 120121 - DNA, 13 bp, Artificial Sequence
  Oligonucleotide for detection of SNP TSC0029982
ttttttgtttgay

SEQ ID NO: 120122 - DNA, 13 bp, Artificial Sequence
  Oligonucleotide for detection of SNP TSC0029982
rtcaaacaaaaaa

SEQ ID NO: 120123 - DNA, 13 bp, Artificial Sequence
  Oligonucleotide for detection of SNP TSC0029982
tttttcgtttgay

SEQ ID NO: 120124 - DNA, 13 bp, Artificial Sequence
  Oligonucleotide for detection of SNP TSC0029982
rtcaaacgaaaaa

SEQ ID NO: 120125 - DNA, 13 bp, Artificial Sequence
  Oligonucleotide for detection of SNP TSC0029982
gttagatgggaaa

SEQ ID NO: 120126 - DNA, 13 bp, Artificial Sequence
  Oligonucleotide for detection of SNP TSC0029982
tttcccatctaac

SEQ ID NO: 120127 - DNA, 13 bp, Artificial Sequence
  Oligonucleotide for detection of SNP TSC0029982
gttagacgggaaa

SEQ ID NO: 120128 - DNA, 13 bp, Artificial Sequence
  Oligonucleotide for detection of SNP TSC0029982
tttcccgtctaac

SEQ ID NO: 120129 - DNA, 13 bp, Artificial Sequence
  Oligonucleotide for detection of SNP TSC0029983
gagtataagaaag

SEQ ID NO: 120130 - DNA, 13 bp, Artificial Sequence
  Oligonucleotide for detection of SNP TSC0029983
ctttcttatactc

SEQ ID NO: 120131 - DNA, 13 bp, Artificial Sequence
  Oligonucleotide for detection of SNP TSC0029983
gagtattagaaag

SEQ ID NO: 120132 - DNA, 13 bp, Artificial Sequence
  Oligonucleotide for detection of SNP TSC0029983
ctttctaatactc

SEQ ID NO: 120133 - DNA, 13 bp, Artificial Sequence
  Oligonucleotide for detection of SNP TSC0029983
tttttttatatty

SEQ ID NO: 120134 - DNA, 13 bp, Artificial Sequence
  Oligonucleotide for detection of SNP TSC0029983
raatataaaaaaa

SEQ ID NO: 120135 - DNA, 13 bp, Artificial Sequence
  Oligonucleotide for detection of SNP TSC0029983
ttttttaatatty

SEQ ID NO: 120136 - DNA, 13 bp, Artificial Sequence
  Oligonucleotide for detection of SNP TSC0029983
raatattaaaaaa

SEQ ID NO: 120137 - DNA, 13 bp, Artificial Sequence
  Oligonucleotide for detection of SNP TSC0029984
gtttttattttay

SEQ ID NO: 120138 - DNA, 13 bp, Artificial Sequence
  Oligonucleotide for detection of SNP TSC0029984
rtaaaataaaaac

SEQ ID NO: 120139 - DNA, 13 bp, Artificial Sequence
  Oligonucleotide for detection of SNP TSC0029985
ttttttaattaag

SEQ ID NO: 120140 - DNA, 13 bp, Artificial Sequence
  Oligonucleotide for detection of SNP TSC0029985
cttaattaaaaaa

SEQ ID NO: 120141 - DNA, 13 bp, Artificial Sequence
  Oligonucleotide for detection of SNP TSC0029985
tttagttgagagg

SEQ ID NO: 120142 - DNA, 13 bp, Artificial Sequence
  Oligonucleotide for detection of SNP TSC0029985
cctctcaactaaa

SEQ ID NO: 120143 - DNA, 13 bp, Artificial Sequence
  Oligonucleotide for detection of SNP TSC0029985
tttagtcgagagg

SEQ ID NO: 120144 - DNA, 13 bp, Artificial Sequence
  Oligonucleotide for detection of SNP TSC0029985
cctctcgactaaa

SEQ ID NO: 120145 - DNA, 13 bp, Artificial Sequence
  Oligonucleotide for detection of SNP TSC0029986
tattttagtgtag

SEQ ID NO: 120146 - DNA, 13 bp, Artificial Sequence
  Oligonucleotide for detection of SNP TSC0029986
ctacactaaaata

SEQ ID NO: 120147 - DNA, 13 bp, Artificial Sequence
  Oligonucleotide for detection of SNP TSC0029986
tattttggtgtag

SEQ ID NO: 120148 - DNA, 13 bp, Artificial Sequence
  Oligonucleotide for detection of SNP TSC0029986
ctacaccaaaata

SEQ ID NO: 120149 - DNA, 13 bp, Artificial Sequence
  Oligonucleotide for detection of SNP TSC0029992
ttatttgttttgt

SEQ ID NO: 120150 - DNA, 13 bp, Artificial Sequence
  Oligonucleotide for detection of SNP TSC0029992
acaaaacaaataa

SEQ ID NO: 120151 - DNA, 13 bp, Artificial Sequence
  Oligonucleotide for detection of SNP TSC0029992
ttattttttttgt

SEQ ID NO: 120152 - DNA, 13 bp, Artificial Sequence
  Oligonucleotide for detection of SNP TSC0029992
acaaaaaaaataa

SEQ ID NO: 120153 - DNA, 13 bp, Artificial Sequence
  Oligonucleotide for detection of SNP TSC0029992
ataggataggtag

SEQ ID NO: 120154 - DNA, 13 bp, Artificial Sequence
  Oligonucleotide for detection of SNP TSC0029992
ctacctatcctat

SEQ ID NO: 120155 - DNA, 13 bp, Artificial Sequence
  Oligonucleotide for detection of SNP TSC0029992
ataggaaaggtag

SEQ ID NO: 120156 - DNA, 13 bp, Artificial Sequence
  Oligonucleotide for detection of SNP TSC0029992
ctacctttcctat

SEQ ID NO: 120157 - DNA, 13 bp, Artificial Sequence
  Oligonucleotide for detection of SNP TSC0029993
ggatgttaaaaty

SEQ ID NO: 120158 - DNA, 13 bp, Artificial Sequence
  Oligonucleotide for detection of SNP TSC0029993
rattttaacatcc

SEQ ID NO: 120159 - DNA, 13 bp, Artificial Sequence
  Oligonucleotide for detection of SNP TSC0029993
ggatgtgaaaaty

SEQ ID NO: 120160 - DNA, 13 bp, Artificial Sequence
  Oligonucleotide for detection of SNP TSC0029993
rattttcacatcc

SEQ ID NO: 120161 - DNA, 13 bp, Artificial Sequence
  Oligonucleotide for detection of SNP TSC0029993
ggatgcgaaaaty

SEQ ID NO: 120162 - DNA, 13 bp, Artificial Sequence
  Oligonucleotide for detection of SNP TSC0029993
rattttcgcatcc

SEQ ID NO: 120163 - DNA, 13 bp, Artificial Sequence
  Oligonucleotide for detection of SNP TSC0029993
ggttttggtatty

SEQ ID NO: 120164 - DNA, 13 bp, Artificial Sequence
  Oligonucleotide for detection of SNP TSC0029993
raataccaaaacc

SEQ ID NO: 120165 - DNA, 13 bp, Artificial Sequence
  Oligonucleotide for detection of SNP TSC0029994
taaatatggatgt

SEQ ID NO: 120166 - DNA, 13 bp, Artificial Sequence
  Oligonucleotide for detection of SNP TSC0029994
acatccatattta

SEQ ID NO: 120167 - DNA, 13 bp, Artificial Sequence
  Oligonucleotide for detection of SNP TSC0029994
taaatacggatgt

SEQ ID NO: 120168 - DNA, 13 bp, Artificial Sequence
  Oligonucleotide for detection of SNP TSC0029994
acatccgtattta

SEQ ID NO: 120169 - DNA, 13 bp, Artificial Sequence
  Oligonucleotide for detection of SNP TSC0029995
gggagtaaggggt

SEQ ID NO: 120170 - DNA, 13 bp, Artificial Sequence
  Oligonucleotide for detection of SNP TSC0029995
accccttactccc

SEQ ID NO: 120171 - DNA, 13 bp, Artificial Sequence
  Oligonucleotide for detection of SNP TSC0029995
gggagtgaggggt

SEQ ID NO: 120172 - DNA, 13 bp, Artificial Sequence
  Oligonucleotide for detection of SNP TSC0029995
acccctcactccc

SEQ ID NO: 120173 - DNA, 13 bp, Artificial Sequence
  Oligonucleotide for detection of SNP TSC0029996
tggttttggtatg

SEQ ID NO: 120174 - DNA, 13 bp, Artificial Sequence
  Oligonucleotide for detection of SNP TSC0029996
cataccaaaacca

SEQ ID NO: 120175 - DNA, 13 bp, Artificial Sequence
  Oligonucleotide for detection of SNP TSC0029996
tggtttcggtatg

SEQ ID NO: 120176 - DNA, 13 bp, Artificial Sequence
  Oligonucleotide for detection of SNP TSC0029996
cataccgaaacca

SEQ ID NO: 120177 - DNA, 13 bp, Artificial Sequence
  Oligonucleotide for detection of SNP TSC0029996
tggttttggtacg

SEQ ID NO: 120178 - DNA, 13 bp, Artificial Sequence
  Oligonucleotide for detection of SNP TSC0029996
cgtaccaaaacca

SEQ ID NO: 120179 - DNA, 13 bp, Artificial Sequence
  Oligonucleotide for detection of SNP TSC0029996
tggtttcggtacg

SEQ ID NO: 120180 - DNA, 13 bp, Artificial Sequence
  Oligonucleotide for detection of SNP TSC0029996
cgtaccgaaacca

SEQ ID NO: 120181 - DNA, 13 bp, Artificial Sequence
  Oligonucleotide for detection of SNP TSC0029996
tgtgttggagtta

SEQ ID NO: 120182 - DNA, 13 bp, Artificial Sequence
  Oligonucleotide for detection of SNP TSC0029996
taactccaacaca

SEQ ID NO: 120183 - DNA, 13 bp, Artificial Sequence
  Oligonucleotide for detection of SNP TSC0029996
tgtgttagagtta

SEQ ID NO: 120184 - DNA, 13 bp, Artificial Sequence
  Oligonucleotide for detection of SNP TSC0029996
taactctaacaca

SEQ ID NO: 120185 - DNA, 13 bp, Artificial Sequence
  Oligonucleotide for detection of SNP TSC0029996
cgtgttggagtta

SEQ ID NO: 120186 - DNA, 13 bp, Artificial Sequence
  Oligonucleotide for detection of SNP TSC0029996
taactccaacacg

SEQ ID NO: 120187 - DNA, 13 bp, Artificial Sequence
  Oligonucleotide for detection of SNP TSC0029996
cgtgttagagtta

SEQ ID NO: 120188 - DNA, 13 bp, Artificial Sequence
  Oligonucleotide for detection of SNP TSC0029996
taactctaacacg

SEQ ID NO: 120189 - DNA, 13 bp, Artificial Sequence
  Oligonucleotide for detection of SNP TSC0029996
tgtgtcggagtta

SEQ ID NO: 120190 - DNA, 13 bp, Artificial Sequence
  Oligonucleotide for detection of SNP TSC0029996
taactccgacaca

SEQ ID NO: 120191 - DNA, 13 bp, Artificial Sequence
  Oligonucleotide for detection of SNP TSC0029996
cgtgtcggagtta

SEQ ID NO: 120192 - DNA, 13 bp, Artificial Sequence
  Oligonucleotide for detection of SNP TSC0029996
taactccgacacg

SEQ ID NO: 120193 - DNA, 13 bp, Artificial Sequence
  Oligonucleotide for detection of SNP TSC0029997
tagtatggatgtg

SEQ ID NO: 120194 - DNA, 13 bp, Artificial Sequence
  Oligonucleotide for detection of SNP TSC0029997
cacatccatacta

SEQ ID NO: 120195 - DNA, 13 bp, Artificial Sequence
  Oligonucleotide for detection of SNP TSC0029997
tagtatagatgtg

SEQ ID NO: 120196 - DNA, 13 bp, Artificial Sequence
  Oligonucleotide for detection of SNP TSC0029997
cacatctatacta

SEQ ID NO: 120197 - DNA, 13 bp, Artificial Sequence
  Oligonucleotide for detection of SNP TSC0029997
tagtacggatgtg

SEQ ID NO: 120198 - DNA, 13 bp, Artificial Sequence
  Oligonucleotide for detection of SNP TSC0029997
cacatccgtacta

SEQ ID NO: 120199 - DNA, 13 bp, Artificial Sequence
  Oligonucleotide for detection of SNP TSC0029998
agttagaggaaaa

SEQ ID NO: 120200 - DNA, 13 bp, Artificial Sequence
  Oligonucleotide for detection of SNP TSC0029998
ttttcctctaact

SEQ ID NO: 120201 - DNA, 13 bp, Artificial Sequence
  Oligonucleotide for detection of SNP TSC0029998
agttaggggaaaa

SEQ ID NO: 120202 - DNA, 13 bp, Artificial Sequence
  Oligonucleotide for detection of SNP TSC0029998
ttttcccctaact

SEQ ID NO: 120203 - DNA, 13 bp, Artificial Sequence
  Oligonucleotide for detection of SNP TSC0030000
atataggaatttg

SEQ ID NO: 120204 - DNA, 13 bp, Artificial Sequence
  Oligonucleotide for detection of SNP TSC0030000
caaattcctatat

SEQ ID NO: 120205 - DNA, 13 bp, Artificial Sequence
  Oligonucleotide for detection of SNP TSC0030000
atatagtaatttg

SEQ ID NO: 120206 - DNA, 13 bp, Artificial Sequence
  Oligonucleotide for detection of SNP TSC0030000
caaattactatat

SEQ ID NO: 120207 - DNA, 13 bp, Artificial Sequence
  Oligonucleotide for detection of SNP TSC0030000
taggtttttgtgt

SEQ ID NO: 120208 - DNA, 13 bp, Artificial Sequence
  Oligonucleotide for detection of SNP TSC0030000
acacaaaaaccta

SEQ ID NO: 120209 - DNA, 13 bp, Artificial Sequence
  Oligonucleotide for detection of SNP TSC0030000
taggttattgtgt

SEQ ID NO: 120210 - DNA, 13 bp, Artificial Sequence
  Oligonucleotide for detection of SNP TSC0030000
acacaataaccta

SEQ ID NO: 120211 - DNA, 13 bp, Artificial Sequence
  Oligonucleotide for detection of SNP TSC0030002
ttttggtgagtgg

SEQ ID NO: 120212 - DNA, 13 bp, Artificial Sequence
  Oligonucleotide for detection of SNP TSC0030002
ccactcaccaaaa

SEQ ID NO: 120213 - DNA, 13 bp, Artificial Sequence
  Oligonucleotide for detection of SNP TSC0030002
ttttggggagtgg

SEQ ID NO: 120214 - DNA, 13 bp, Artificial Sequence
  Oligonucleotide for detection of SNP TSC0030002
ccactccccaaaa

SEQ ID NO: 120215 - DNA, 13 bp, Artificial Sequence
  Oligonucleotide for detection of SNP TSC0030002
ttttggcgagtgg

SEQ ID NO: 120216 - DNA, 13 bp, Artificial Sequence
  Oligonucleotide for detection of SNP TSC0030002
ccactcgccaaaa

SEQ ID NO: 120217 - DNA, 13 bp, Artificial Sequence
  Oligonucleotide for detection of SNP TSC0030002
ttatttgttagaa

SEQ ID NO: 120218 - DNA, 13 bp, Artificial Sequence
  Oligonucleotide for detection of SNP TSC0030002
ttctaacaaataa

SEQ ID NO: 120219 - DNA, 13 bp, Artificial Sequence
  Oligonucleotide for detection of SNP TSC0030002
ttattttttagaa

SEQ ID NO: 120220 - DNA, 13 bp, Artificial Sequence
  Oligonucleotide for detection of SNP TSC0030002
ttctaaaaaataa

SEQ ID NO: 120221 - DNA, 13 bp, Artificial Sequence
  Oligonucleotide for detection of SNP TSC0030002
ttattcgttagaa

SEQ ID NO: 120222 - DNA, 13 bp, Artificial Sequence
  Oligonucleotide for detection of SNP TSC0030002
ttctaacgaataa

SEQ ID NO: 120223 - DNA, 13 bp, Artificial Sequence
  Oligonucleotide for detection of SNP TSC0030004
tttatagataagg

SEQ ID NO: 120224 - DNA, 13 bp, Artificial Sequence
  Oligonucleotide for detection of SNP TSC0030004
ccttatctataaa

SEQ ID NO: 120225 - DNA, 13 bp, Artificial Sequence
  Oligonucleotide for detection of SNP TSC0030004
tttataaataagg

SEQ ID NO: 120226 - DNA, 13 bp, Artificial Sequence
  Oligonucleotide for detection of SNP TSC0030004
ccttatttataaa

SEQ ID NO: 120227 - DNA, 13 bp, Artificial Sequence
  Oligonucleotide for detection of SNP TSC0030005
ttattgagtgtat

SEQ ID NO: 120228 - DNA, 13 bp, Artificial Sequence
  Oligonucleotide for detection of SNP TSC0030005
atacactcaataa

SEQ ID NO: 120229 - DNA, 13 bp, Artificial Sequence
  Oligonucleotide for detection of SNP TSC0030005
ttattgtgtgtat

SEQ ID NO: 120230 - DNA, 13 bp, Artificial Sequence
  Oligonucleotide for detection of SNP TSC0030005
atacacacaataa

SEQ ID NO: 120231 - DNA, 13 bp, Artificial Sequence
  Oligonucleotide for detection of SNP TSC0030005
ttattgagcgtat

SEQ ID NO: 120232 - DNA, 13 bp, Artificial Sequence
  Oligonucleotide for detection of SNP TSC0030005
atacgctcaataa

SEQ ID NO: 120233 - DNA, 13 bp, Artificial Sequence
  Oligonucleotide for detection of SNP TSC0030005
ttattgtgcgtat

SEQ ID NO: 120234 - DNA, 13 bp, Artificial Sequence
  Oligonucleotide for detection of SNP TSC0030005
atacgcacaataa

SEQ ID NO: 120235 - DNA, 13 bp, Artificial Sequence
  Oligonucleotide for detection of SNP TSC0030005
atatgtttaatga

SEQ ID NO: 120236 - DNA, 13 bp, Artificial Sequence
  Oligonucleotide for detection of SNP TSC0030005
tcattaaacatat

SEQ ID NO: 120237 - DNA, 13 bp, Artificial Sequence
  Oligonucleotide for detection of SNP TSC0030005
atatgtataatga

SEQ ID NO: 120238 - DNA, 13 bp, Artificial Sequence
  Oligonucleotide for detection of SNP TSC0030005
tcattatacatat

SEQ ID NO: 120239 - DNA, 13 bp, Artificial Sequence
  Oligonucleotide for detection of SNP TSC0030005
atacgtttaatga

SEQ ID NO: 120240 - DNA, 13 bp, Artificial Sequence
  Oligonucleotide for detection of SNP TSC0030005
tcattaaacgtat

SEQ ID NO: 120241 - DNA, 13 bp, Artificial Sequence
  Oligonucleotide for detection of SNP TSC0030005
atacgtataatga

SEQ ID NO: 120242 - DNA, 13 bp, Artificial Sequence
  Oligonucleotide for detection of SNP TSC0030005
tcattatacgtat

SEQ ID NO: 120243 - DNA, 13 bp, Artificial Sequence
  Oligonucleotide for detection of SNP TSC0030006
gtatttattgtty

SEQ ID NO: 120244 - DNA, 13 bp, Artificial Sequence
  Oligonucleotide for detection of SNP TSC0030006
raacaataaatac

SEQ ID NO: 120245 - DNA, 13 bp, Artificial Sequence
  Oligonucleotide for detection of SNP TSC0030006
gtattttttgtty

SEQ ID NO: 120246 - DNA, 13 bp, Artificial Sequence
  Oligonucleotide for detection of SNP TSC0030006
raacaaaaaatac

SEQ ID NO: 120247 - DNA, 13 bp, Artificial Sequence
  Oligonucleotide for detection of SNP TSC0030006
gggtagtaaatay

SEQ ID NO: 120248 - DNA, 13 bp, Artificial Sequence
  Oligonucleotide for detection of SNP TSC0030006
rtatttactaccc

SEQ ID NO: 120249 - DNA, 13 bp, Artificial Sequence
  Oligonucleotide for detection of SNP TSC0030006
gggtaggaaatay

SEQ ID NO: 120250 - DNA, 13 bp, Artificial Sequence
  Oligonucleotide for detection of SNP TSC0030006
rtatttcctaccc

SEQ ID NO: 120251 - DNA, 13 bp, Artificial Sequence
  Oligonucleotide for detection of SNP TSC0030007
gtttggggttggg

SEQ ID NO: 120252 - DNA, 13 bp, Artificial Sequence
  Oligonucleotide for detection of SNP TSC0030007
cccaaccccaaac

SEQ ID NO: 120253 - DNA, 13 bp, Artificial Sequence
  Oligonucleotide for detection of SNP TSC0030007
gtttggtgttggg

SEQ ID NO: 120254 - DNA, 13 bp, Artificial Sequence
  Oligonucleotide for detection of SNP TSC0030007
cccaacaccaaac

SEQ ID NO: 120255 - DNA, 13 bp, Artificial Sequence
  Oligonucleotide for detection of SNP TSC0030007
tttagttttagay

SEQ ID NO: 120256 - DNA, 13 bp, Artificial Sequence
  Oligonucleotide for detection of SNP TSC0030007
rtctaaaactaaa

SEQ ID NO: 120257 - DNA, 13 bp, Artificial Sequence
  Oligonucleotide for detection of SNP TSC0030007
tttagtattagay

SEQ ID NO: 120258 - DNA, 13 bp, Artificial Sequence
  Oligonucleotide for detection of SNP TSC0030007
rtctaatactaaa

SEQ ID NO: 120259 - DNA, 13 bp, Artificial Sequence
  Oligonucleotide for detection of SNP TSC0030011
gggaggatttttg

SEQ ID NO: 120260 - DNA, 13 bp, Artificial Sequence
  Oligonucleotide for detection of SNP TSC0030011
caaaaatcctccc

SEQ ID NO: 120261 - DNA, 13 bp, Artificial Sequence
  Oligonucleotide for detection of SNP TSC0030011
gggagggtttttg

SEQ ID NO: 120262 - DNA, 13 bp, Artificial Sequence
  Oligonucleotide for detection of SNP TSC0030011
caaaaaccctccc

SEQ ID NO: 120263 - DNA, 13 bp, Artificial Sequence
  Oligonucleotide for detection of SNP TSC0030012
ggttagtgttaga

SEQ ID NO: 120264 - DNA, 13 bp, Artificial Sequence
  Oligonucleotide for detection of SNP TSC0030012
tctaacactaacc

SEQ ID NO: 120265 - DNA, 13 bp, Artificial Sequence
  Oligonucleotide for detection of SNP TSC0030012
ggttagcgttaga

SEQ ID NO: 120266 - DNA, 13 bp, Artificial Sequence
  Oligonucleotide for detection of SNP TSC0030012
tctaacgctaacc

SEQ ID NO: 120267 - DNA, 13 bp, Artificial Sequence
  Oligonucleotide for detection of SNP TSC0030012
tttggtgttggty

SEQ ID NO: 120268 - DNA, 13 bp, Artificial Sequence
  Oligonucleotide for detection of SNP TSC0030012
raccaacaccaaa

SEQ ID NO: 120269 - DNA, 13 bp, Artificial Sequence
  Oligonucleotide for detection of SNP TSC0030012
tttggtattggty

SEQ ID NO: 120270 - DNA, 13 bp, Artificial Sequence
  Oligonucleotide for detection of SNP TSC0030012
raccaataccaaa

SEQ ID NO: 120271 - DNA, 13 bp, Artificial Sequence
  Oligonucleotide for detection of SNP TSC0030012
tttggcgttggty

SEQ ID NO: 120272 - DNA, 13 bp, Artificial Sequence
  Oligonucleotide for detection of SNP TSC0030012
raccaacgccaaa

SEQ ID NO: 120273 - DNA, 13 bp, Artificial Sequence
  Oligonucleotide for detection of SNP TSC0030016
ggtatatggttgy

SEQ ID NO: 120274 - DNA, 13 bp, Artificial Sequence
  Oligonucleotide for detection of SNP TSC0030016
rcaaccatatacc

SEQ ID NO: 120275 - DNA, 13 bp, Artificial Sequence
  Oligonucleotide for detection of SNP TSC0030016
ggtatacggttgy

SEQ ID NO: 120276 - DNA, 13 bp, Artificial Sequence
  Oligonucleotide for detection of SNP TSC0030016
rcaaccgtatacc

SEQ ID NO: 120277 - DNA, 13 bp, Artificial Sequence
  Oligonucleotide for detection of SNP TSC0030017
gaaggaaaaagaa

SEQ ID NO: 120278 - DNA, 13 bp, Artificial Sequence
  Oligonucleotide for detection of SNP TSC0030017
ttctttttccttc

SEQ ID NO: 120279 - DNA, 13 bp, Artificial Sequence
  Oligonucleotide for detection of SNP TSC0030017
gaaggagaaagaa

SEQ ID NO: 120280 - DNA, 13 bp, Artificial Sequence
  Oligonucleotide for detection of SNP TSC0030017
ttctttctccttc

SEQ ID NO: 120281 - DNA, 13 bp, Artificial Sequence
  Oligonucleotide for detection of SNP TSC0030018
ttgtatgttttty

SEQ ID NO: 120282 - DNA, 13 bp, Artificial Sequence
  Oligonucleotide for detection of SNP TSC0030018
raaaaacatacaa

SEQ ID NO: 120283 - DNA, 13 bp, Artificial Sequence
  Oligonucleotide for detection of SNP TSC0030018
ttgtatattttty

SEQ ID NO: 120284 - DNA, 13 bp, Artificial Sequence
  Oligonucleotide for detection of SNP TSC0030018
raaaaatatacaa

SEQ ID NO: 120285 - DNA, 13 bp, Artificial Sequence
  Oligonucleotide for detection of SNP TSC0030019
tgtgggatttata

SEQ ID NO: 120286 - DNA, 13 bp, Artificial Sequence
  Oligonucleotide for detection of SNP TSC0030019
tataaatcccaca

SEQ ID NO: 120287 - DNA, 13 bp, Artificial Sequence
  Oligonucleotide for detection of SNP TSC0030019
tgtggggtttata

SEQ ID NO: 120288 - DNA, 13 bp, Artificial Sequence
  Oligonucleotide for detection of SNP TSC0030019
tataaaccccaca

SEQ ID NO: 120289 - DNA, 13 bp, Artificial Sequence
  Oligonucleotide for detection of SNP TSC0030020
tgtgggatgtgay

SEQ ID NO: 120290 - DNA, 13 bp, Artificial Sequence
  Oligonucleotide for detection of SNP TSC0030020
rtcacatcccaca

SEQ ID NO: 120291 - DNA, 13 bp, Artificial Sequence
  Oligonucleotide for detection of SNP TSC0030020
tgtgggttgtgay

SEQ ID NO: 120292 - DNA, 13 bp, Artificial Sequence
  Oligonucleotide for detection of SNP TSC0030020
rtcacaacccaca

SEQ ID NO: 120293 - DNA, 13 bp, Artificial Sequence
  Oligonucleotide for detection of SNP TSC0030020
gttatattttata

SEQ ID NO: 120294 - DNA, 13 bp, Artificial Sequence
  Oligonucleotide for detection of SNP TSC0030020
tataaaatataac

SEQ ID NO: 120295 - DNA, 13 bp, Artificial Sequence
  Oligonucleotide for detection of SNP TSC0030020
gttataatttata

SEQ ID NO: 120296 - DNA, 13 bp, Artificial Sequence
  Oligonucleotide for detection of SNP TSC0030020
tataaattataac

SEQ ID NO: 120297 - DNA, 13 bp, Artificial Sequence
  Oligonucleotide for detection of SNP TSC0030022
tttataatgttgg

SEQ ID NO: 120298 - DNA, 13 bp, Artificial Sequence
  Oligonucleotide for detection of SNP TSC0030022
ccaacattataaa

SEQ ID NO: 120299 - DNA, 13 bp, Artificial Sequence
  Oligonucleotide for detection of SNP TSC0030022
tttatagtgttgg

SEQ ID NO: 120300 - DNA, 13 bp, Artificial Sequence
  Oligonucleotide for detection of SNP TSC0030022
ccaacactataaa

SEQ ID NO: 120301 - DNA, 13 bp, Artificial Sequence
  Oligonucleotide for detection of SNP TSC0030027
atggggttgtatg

SEQ ID NO: 120302 - DNA, 13 bp, Artificial Sequence
  Oligonucleotide for detection of SNP TSC0030027
catacaaccccat

SEQ ID NO: 120303 - DNA, 13 bp, Artificial Sequence
  Oligonucleotide for detection of SNP TSC0030027
atgggggtgtatg

SEQ ID NO: 120304 - DNA, 13 bp, Artificial Sequence
  Oligonucleotide for detection of SNP TSC0030027
catacacccccat

SEQ ID NO: 120305 - DNA, 13 bp, Artificial Sequence
  Oligonucleotide for detection of SNP TSC0030027
tatgtagttttat

SEQ ID NO: 120306 - DNA, 13 bp, Artificial Sequence
  Oligonucleotide for detection of SNP TSC0030027
ataaaactacata

SEQ ID NO: 120307 - DNA, 13 bp, Artificial Sequence
  Oligonucleotide for detection of SNP TSC0030027
tatgtatttttat

SEQ ID NO: 120308 - DNA, 13 bp, Artificial Sequence
  Oligonucleotide for detection of SNP TSC0030027
ataaaaatacata

SEQ ID NO: 120309 - DNA, 13 bp, Artificial Sequence
  Oligonucleotide for detection of SNP TSC0030028
gtgagtattttay

SEQ ID NO: 120310 - DNA, 13 bp, Artificial Sequence
  Oligonucleotide for detection of SNP TSC0030028
rtaaaatactcac

SEQ ID NO: 120311 - DNA, 13 bp, Artificial Sequence
  Oligonucleotide for detection of SNP TSC0030028
gtgagtgttttay

SEQ ID NO: 120312 - DNA, 13 bp, Artificial Sequence
  Oligonucleotide for detection of SNP TSC0030028
rtaaaacactcac

SEQ ID NO: 120313 - DNA, 13 bp, Artificial Sequence
  Oligonucleotide for detection of SNP TSC0030028
gcgagtattttay

SEQ ID NO: 120314 - DNA, 13 bp, Artificial Sequence
  Oligonucleotide for detection of SNP TSC0030028
rtaaaatactcgc

SEQ ID NO: 120315 - DNA, 13 bp, Artificial Sequence
  Oligonucleotide for detection of SNP TSC0030028
gcgagtgttttay

SEQ ID NO: 120316 - DNA, 13 bp, Artificial Sequence
  Oligonucleotide for detection of SNP TSC0030028
rtaaaacactcgc

SEQ ID NO: 120317 - DNA, 13 bp, Artificial Sequence
  Oligonucleotide for detection of SNP TSC0030028
gtgagcgttttay

SEQ ID NO: 120318 - DNA, 13 bp, Artificial Sequence
  Oligonucleotide for detection of SNP TSC0030028
rtaaaacgctcac

SEQ ID NO: 120319 - DNA, 13 bp, Artificial Sequence
  Oligonucleotide for detection of SNP TSC0030028
gcgagcgttttay

SEQ ID NO: 120320 - DNA, 13 bp, Artificial Sequence
  Oligonucleotide for detection of SNP TSC0030028
rtaaaacgctcgc

SEQ ID NO: 120321 - DNA, 13 bp, Artificial Sequence
  Oligonucleotide for detection of SNP TSC0030028
gtgggatgtttgy

SEQ ID NO: 120322 - DNA, 13 bp, Artificial Sequence
  Oligonucleotide for detection of SNP TSC0030028
rcaaacatcccac

SEQ ID NO: 120323 - DNA, 13 bp, Artificial Sequence
  Oligonucleotide for detection of SNP TSC0030028
gtgggatgttcgy

SEQ ID NO: 120324 - DNA, 13 bp, Artificial Sequence
  Oligonucleotide for detection of SNP TSC0030028
rcgaacatcccac

SEQ ID NO: 120325 - DNA, 13 bp, Artificial Sequence
  Oligonucleotide for detection of SNP TSC0030028
gtgggacgtttgy

SEQ ID NO: 120326 - DNA, 13 bp, Artificial Sequence
  Oligonucleotide for detection of SNP TSC0030028
rcaaacgtcccac

SEQ ID NO: 120327 - DNA, 13 bp, Artificial Sequence
  Oligonucleotide for detection of SNP TSC0030028
gtgggacgttcgy

SEQ ID NO: 120328 - DNA, 13 bp, Artificial Sequence
  Oligonucleotide for detection of SNP TSC0030028
rcgaacgtcccac

SEQ ID NO: 120329 - DNA, 13 bp, Artificial Sequence
  Oligonucleotide for detection of SNP TSC0030029
agaaagaaaaata

SEQ ID NO: 120330 - DNA, 13 bp, Artificial Sequence
  Oligonucleotide for detection of SNP TSC0030029
tatttttctttct

SEQ ID NO: 120331 - DNA, 13 bp, Artificial Sequence
  Oligonucleotide for detection of SNP TSC0030029
agaaaggaaaata

SEQ ID NO: 120332 - DNA, 13 bp, Artificial Sequence
  Oligonucleotide for detection of SNP TSC0030029
tattttcctttct

SEQ ID NO: 120333 - DNA, 13 bp, Artificial Sequence
  Oligonucleotide for detection of SNP TSC0030030
aggttagtgagaa

SEQ ID NO: 120334 - DNA, 13 bp, Artificial Sequence
  Oligonucleotide for detection of SNP TSC0030030
ttctcactaacct

SEQ ID NO: 120335 - DNA, 13 bp, Artificial Sequence
  Oligonucleotide for detection of SNP TSC0030030
aggttaatgagaa

SEQ ID NO: 120336 - DNA, 13 bp, Artificial Sequence
  Oligonucleotide for detection of SNP TSC0030030
ttctcattaacct

SEQ ID NO: 120337 - DNA, 13 bp, Artificial Sequence
  Oligonucleotide for detection of SNP TSC0030031
ttgtttaaggttg

SEQ ID NO: 120338 - DNA, 13 bp, Artificial Sequence
  Oligonucleotide for detection of SNP TSC0030031
caaccttaaacaa

SEQ ID NO: 120339 - DNA, 13 bp, Artificial Sequence
  Oligonucleotide for detection of SNP TSC0030031
ttgtttgaggttg

SEQ ID NO: 120340 - DNA, 13 bp, Artificial Sequence
  Oligonucleotide for detection of SNP TSC0030031
caacctcaaacaa

SEQ ID NO: 120341 - DNA, 13 bp, Artificial Sequence
  Oligonucleotide for detection of SNP TSC0030031
ttgttcgaggttg

SEQ ID NO: 120342 - DNA, 13 bp, Artificial Sequence
  Oligonucleotide for detection of SNP TSC0030031
caacctcgaacaa

SEQ ID NO: 120343 - DNA, 13 bp, Artificial Sequence
  Oligonucleotide for detection of SNP TSC0030031
tagttttgggtag

SEQ ID NO: 120344 - DNA, 13 bp, Artificial Sequence
  Oligonucleotide for detection of SNP TSC0030031
ctacccaaaacta

SEQ ID NO: 120345 - DNA, 13 bp, Artificial Sequence
  Oligonucleotide for detection of SNP TSC0030031
tagtttcgggtag

SEQ ID NO: 120346 - DNA, 13 bp, Artificial Sequence
  Oligonucleotide for detection of SNP TSC0030031
ctacccgaaacta

SEQ ID NO: 120347 - DNA, 13 bp, Artificial Sequence
  Oligonucleotide for detection of SNP TSC0030035
aattaggtataat

SEQ ID NO: 120348 - DNA, 13 bp, Artificial Sequence
  Oligonucleotide for detection of SNP TSC0030035
attatacctaatt

SEQ ID NO: 120349 - DNA, 13 bp, Artificial Sequence
  Oligonucleotide for detection of SNP TSC0030035
aattagatataat

SEQ ID NO: 120350 - DNA, 13 bp, Artificial Sequence
  Oligonucleotide for detection of SNP TSC0030035
attatatctaatt

SEQ ID NO: 120351 - DNA, 13 bp, Artificial Sequence
  Oligonucleotide for detection of SNP TSC0030036
ggaggaaggtttg

SEQ ID NO: 120352 - DNA, 13 bp, Artificial Sequence
  Oligonucleotide for detection of SNP TSC0030036
caaaccttcctcc

SEQ ID NO: 120353 - DNA, 13 bp, Artificial Sequence
  Oligonucleotide for detection of SNP TSC0030036
ggaggagggtttg

SEQ ID NO: 120354 - DNA, 13 bp, Artificial Sequence
  Oligonucleotide for detection of SNP TSC0030036
caaaccctcctcc

SEQ ID NO: 120355 - DNA, 13 bp, Artificial Sequence
  Oligonucleotide for detection of SNP TSC0030038
ttattaagaatgy

SEQ ID NO: 120356 - DNA, 13 bp, Artificial Sequence
  Oligonucleotide for detection of SNP TSC0030038
rcattcttaataa

SEQ ID NO: 120357 - DNA, 13 bp, Artificial Sequence
  Oligonucleotide for detection of SNP TSC0030038
ttattatgaatgy

SEQ ID NO: 120358 - DNA, 13 bp, Artificial Sequence
  Oligonucleotide for detection of SNP TSC0030038
rcattcataataa

SEQ ID NO: 120359 - DNA, 13 bp, Artificial Sequence
  Oligonucleotide for detection of SNP TSC0030038
ttattacgaatgy

SEQ ID NO: 120360 - DNA, 13 bp, Artificial Sequence
  Oligonucleotide for detection of SNP TSC0030038
rcattcgtaataa

SEQ ID NO: 120361 - DNA, 13 bp, Artificial Sequence
  Oligonucleotide for detection of SNP TSC0030038
gtatttttggtag

SEQ ID NO: 120362 - DNA, 13 bp, Artificial Sequence
  Oligonucleotide for detection of SNP TSC0030038
ctaccaaaaatac

SEQ ID NO: 120363 - DNA, 13 bp, Artificial Sequence
  Oligonucleotide for detection of SNP TSC0030038
gtatttgtggtag

SEQ ID NO: 120364 - DNA, 13 bp, Artificial Sequence
  Oligonucleotide for detection of SNP TSC0030038
ctaccacaaatac

SEQ ID NO: 120365 - DNA, 13 bp, Artificial Sequence
  Oligonucleotide for detection of SNP TSC0030038
gtattcgtggtag

SEQ ID NO: 120366 - DNA, 13 bp, Artificial Sequence
  Oligonucleotide for detection of SNP TSC0030038
ctaccacgaatac

SEQ ID NO: 120367 - DNA, 13 bp, Artificial Sequence
  Oligonucleotide for detection of SNP TSC0030039
attttaggaattt

SEQ ID NO: 120368 - DNA, 13 bp, Artificial Sequence
  Oligonucleotide for detection of SNP TSC0030039
aaattcctaaaat

SEQ ID NO: 120369 - DNA, 13 bp, Artificial Sequence
  Oligonucleotide for detection of SNP TSC0030039
attttaagaattt

SEQ ID NO: 120370 - DNA, 13 bp, Artificial Sequence
  Oligonucleotide for detection of SNP TSC0030039
aaattcttaaaat

SEQ ID NO: 120371 - DNA, 13 bp, Artificial Sequence
  Oligonucleotide for detection of SNP TSC0030045
ttgagaattttat

SEQ ID NO: 120372 - DNA, 13 bp, Artificial Sequence
  Oligonucleotide for detection of SNP TSC0030045
ataaaattctcaa

SEQ ID NO: 120373 - DNA, 13 bp, Artificial Sequence
  Oligonucleotide for detection of SNP TSC0030045
ttgagagttttat

SEQ ID NO: 120374 - DNA, 13 bp, Artificial Sequence
  Oligonucleotide for detection of SNP TSC0030045
ataaaactctcaa

SEQ ID NO: 120375 - DNA, 13 bp, Artificial Sequence
  Oligonucleotide for detection of SNP TSC0030046
aatttaatttatg

SEQ ID NO: 120376 - DNA, 13 bp, Artificial Sequence
  Oligonucleotide for detection of SNP TSC0030046
cataaattaaatt

SEQ ID NO: 120377 - DNA, 13 bp, Artificial Sequence
  Oligonucleotide for detection of SNP TSC0030046
aatttagtttatg

SEQ ID NO: 120378 - DNA, 13 bp, Artificial Sequence
  Oligonucleotide for detection of SNP TSC0030046
cataaactaaatt

SEQ ID NO: 120379 - DNA, 13 bp, Artificial Sequence
  Oligonucleotide for detection of SNP TSC0030047
tgatggaatgtgy

SEQ ID NO: 120380 - DNA, 13 bp, Artificial Sequence
  Oligonucleotide for detection of SNP TSC0030047
rcacattccatca

SEQ ID NO: 120381 - DNA, 13 bp, Artificial Sequence
  Oligonucleotide for detection of SNP TSC0030047
tgatggtatgtgy

SEQ ID NO: 120382 - DNA, 13 bp, Artificial Sequence
  Oligonucleotide for detection of SNP TSC0030047
rcacataccatca

SEQ ID NO: 120383 - DNA, 13 bp, Artificial Sequence
  Oligonucleotide for detection of SNP TSC0030047
tgatggaatgcgy

SEQ ID NO: 120384 - DNA, 13 bp, Artificial Sequence
  Oligonucleotide for detection of SNP TSC0030047
rcgcattccatca

SEQ ID NO: 120385 - DNA, 13 bp, Artificial Sequence
  Oligonucleotide for detection of SNP TSC0030047
tgatggtatgcgy

SEQ ID NO: 120386 - DNA, 13 bp, Artificial Sequence
  Oligonucleotide for detection of SNP TSC0030047
rcgcataccatca

SEQ ID NO: 120387 - DNA, 13 bp, Artificial Sequence
  Oligonucleotide for detection of SNP TSC0030047
gtgtattttatta

SEQ ID NO: 120388 - DNA, 13 bp, Artificial Sequence
  Oligonucleotide for detection of SNP TSC0030047
taataaaatacac

SEQ ID NO: 120389 - DNA, 13 bp, Artificial Sequence
  Oligonucleotide for detection of SNP TSC0030047
gtgtatgttatta

SEQ ID NO: 120390 - DNA, 13 bp, Artificial Sequence
  Oligonucleotide for detection of SNP TSC0030047
taataacatacac

SEQ ID NO: 120391 - DNA, 13 bp, Artificial Sequence
  Oligonucleotide for detection of SNP TSC0030047
gcgtattttatta

SEQ ID NO: 120392 - DNA, 13 bp, Artificial Sequence
  Oligonucleotide for detection of SNP TSC0030047
taataaaatacgc

SEQ ID NO: 120393 - DNA, 13 bp, Artificial Sequence
  Oligonucleotide for detection of SNP TSC0030047
gcgtatgttatta

SEQ ID NO: 120394 - DNA, 13 bp, Artificial Sequence
  Oligonucleotide for detection of SNP TSC0030047
taataacatacgc

SEQ ID NO: 120395 - DNA, 13 bp, Artificial Sequence
  Oligonucleotide for detection of SNP TSC0030048
aggggttggtttg

SEQ ID NO: 120396 - DNA, 13 bp, Artificial Sequence
  Oligonucleotide for detection of SNP TSC0030048
caaaccaacccct

SEQ ID NO: 120397 - DNA, 13 bp, Artificial Sequence
  Oligonucleotide for detection of SNP TSC0030048
aggggtcggtttg

SEQ ID NO: 120398 - DNA, 13 bp, Artificial Sequence
  Oligonucleotide for detection of SNP TSC0030048
caaaccgacccct

SEQ ID NO: 120399 - DNA, 13 bp, Artificial Sequence
  Oligonucleotide for detection of SNP TSC0030048
taaattggttttt

SEQ ID NO: 120400 - DNA, 13 bp, Artificial Sequence
  Oligonucleotide for detection of SNP TSC0030048
aaaaaccaattta

SEQ ID NO: 120401 - DNA, 13 bp, Artificial Sequence
  Oligonucleotide for detection of SNP TSC0030048
taaattagttttt

SEQ ID NO: 120402 - DNA, 13 bp, Artificial Sequence
  Oligonucleotide for detection of SNP TSC0030048
aaaaactaattta

SEQ ID NO: 120403 - DNA, 13 bp, Artificial Sequence
  Oligonucleotide for detection of SNP TSC0030048
taaatcggttttt

SEQ ID NO: 120404 - DNA, 13 bp, Artificial Sequence
  Oligonucleotide for detection of SNP TSC0030048
aaaaaccgattta

SEQ ID NO: 120405 - DNA, 13 bp, Artificial Sequence
  Oligonucleotide for detection of SNP TSC0030049
attttgaatttay

SEQ ID NO: 120406 - DNA, 13 bp, Artificial Sequence
  Oligonucleotide for detection of SNP TSC0030049
rtaaattcaaaat

SEQ ID NO: 120407 - DNA, 13 bp, Artificial Sequence
  Oligonucleotide for detection of SNP TSC0030049
attttggatttay

SEQ ID NO: 120408 - DNA, 13 bp, Artificial Sequence
  Oligonucleotide for detection of SNP TSC0030049
rtaaatccaaaat

SEQ ID NO: 120409 - DNA, 13 bp, Artificial Sequence
  Oligonucleotide for detection of SNP TSC0030050
ggaagttaataat

SEQ ID NO: 120410 - DNA, 13 bp, Artificial Sequence
  Oligonucleotide for detection of SNP TSC0030050
attattaacttcc

SEQ ID NO: 120411 - DNA, 13 bp, Artificial Sequence
  Oligonucleotide for detection of SNP TSC0030050
ggaagtaaataat

SEQ ID NO: 120412 - DNA, 13 bp, Artificial Sequence
  Oligonucleotide for detection of SNP TSC0030050
attatttacttcc

SEQ ID NO: 120413 - DNA, 13 bp, Artificial Sequence
  Oligonucleotide for detection of SNP TSC0030051
ttattttattatg

SEQ ID NO: 120414 - DNA, 13 bp, Artificial Sequence
  Oligonucleotide for detection of SNP TSC0030051
cataataaaataa

SEQ ID NO: 120415 - DNA, 13 bp, Artificial Sequence
  Oligonucleotide for detection of SNP TSC0030051
ttatttgattatg

SEQ ID NO: 120416 - DNA, 13 bp, Artificial Sequence
  Oligonucleotide for detection of SNP TSC0030051
cataatcaaataa

SEQ ID NO: 120417 - DNA, 13 bp, Artificial Sequence
  Oligonucleotide for detection of SNP TSC0030051
ttattttattacg

SEQ ID NO: 120418 - DNA, 13 bp, Artificial Sequence
  Oligonucleotide for detection of SNP TSC0030051
cgtaataaaataa

SEQ ID NO: 120419 - DNA, 13 bp, Artificial Sequence
  Oligonucleotide for detection of SNP TSC0030051
ttatttgattacg

SEQ ID NO: 120420 - DNA, 13 bp, Artificial Sequence
  Oligonucleotide for detection of SNP TSC0030051
cgtaatcaaataa

SEQ ID NO: 120421 - DNA, 13 bp, Artificial Sequence
  Oligonucleotide for detection of SNP TSC0030051
tgtggtgagatgg

SEQ ID NO: 120422 - DNA, 13 bp, Artificial Sequence
  Oligonucleotide for detection of SNP TSC0030051
ccatctcaccaca

SEQ ID NO: 120423 - DNA, 13 bp, Artificial Sequence
  Oligonucleotide for detection of SNP TSC0030051
tgtggttagatgg

SEQ ID NO: 120424 - DNA, 13 bp, Artificial Sequence
  Oligonucleotide for detection of SNP TSC0030051
ccatctaaccaca

SEQ ID NO: 120425 - DNA, 13 bp, Artificial Sequence
  Oligonucleotide for detection of SNP TSC0030051
cgtggtgagatgg

SEQ ID NO: 120426 - DNA, 13 bp, Artificial Sequence
  Oligonucleotide for detection of SNP TSC0030051
ccatctcaccacg

SEQ ID NO: 120427 - DNA, 13 bp, Artificial Sequence
  Oligonucleotide for detection of SNP TSC0030051
cgtggttagatgg

SEQ ID NO: 120428 - DNA, 13 bp, Artificial Sequence
  Oligonucleotide for detection of SNP TSC0030051
ccatctaaccacg

SEQ ID NO: 120429 - DNA, 13 bp, Artificial Sequence
  Oligonucleotide for detection of SNP TSC0030052
ttagggggtgagt

SEQ ID NO: 120430 - DNA, 13 bp, Artificial Sequence
  Oligonucleotide for detection of SNP TSC0030052
actcaccccctaa

SEQ ID NO: 120431 - DNA, 13 bp, Artificial Sequence
  Oligonucleotide for detection of SNP TSC0030052
ttagggagtgagt

SEQ ID NO: 120432 - DNA, 13 bp, Artificial Sequence
  Oligonucleotide for detection of SNP TSC0030052
actcactccctaa

SEQ ID NO: 120433 - DNA, 13 bp, Artificial Sequence
  Oligonucleotide for detection of SNP TSC0030053
tagatatatatat

SEQ ID NO: 120434 - DNA, 13 bp, Artificial Sequence
  Oligonucleotide for detection of SNP TSC0030053
atatatatatcta

SEQ ID NO: 120435 - DNA, 13 bp, Artificial Sequence
  Oligonucleotide for detection of SNP TSC0030053
tagatagatatat

SEQ ID NO: 120436 - DNA, 13 bp, Artificial Sequence
  Oligonucleotide for detection of SNP TSC0030053
atatatctatcta

SEQ ID NO: 120437 - DNA, 13 bp, Artificial Sequence
  Oligonucleotide for detection of SNP TSC0030053
atgtatgtattta

SEQ ID NO: 120438 - DNA, 13 bp, Artificial Sequence
  Oligonucleotide for detection of SNP TSC0030053
taaatacatacat

SEQ ID NO: 120439 - DNA, 13 bp, Artificial Sequence
  Oligonucleotide for detection of SNP TSC0030053
atgtatttattta

SEQ ID NO: 120440 - DNA, 13 bp, Artificial Sequence
  Oligonucleotide for detection of SNP TSC0030053
taaataaatacat

SEQ ID NO: 120441 - DNA, 13 bp, Artificial Sequence
  Oligonucleotide for detection of SNP TSC0030057
aaatagttaggta

SEQ ID NO: 120442 - DNA, 13 bp, Artificial Sequence
  Oligonucleotide for detection of SNP TSC0030057
tacctaactattt

SEQ ID NO: 120443 - DNA, 13 bp, Artificial Sequence
  Oligonucleotide for detection of SNP TSC0030057
aaataggtaggta

SEQ ID NO: 120444 - DNA, 13 bp, Artificial Sequence
  Oligonucleotide for detection of SNP TSC0030057
tacctacctattt

SEQ ID NO: 120445 - DNA, 13 bp, Artificial Sequence
  Oligonucleotide for detection of SNP TSC0030057
tatttagttattt

SEQ ID NO: 120446 - DNA, 13 bp, Artificial Sequence
  Oligonucleotide for detection of SNP TSC0030057
aaataactaaata

SEQ ID NO: 120447 - DNA, 13 bp, Artificial Sequence
  Oligonucleotide for detection of SNP TSC0030058
aaagtttgggttg

SEQ ID NO: 120448 - DNA, 13 bp, Artificial Sequence
  Oligonucleotide for detection of SNP TSC0030058
caacccaaacttt

SEQ ID NO: 120449 - DNA, 13 bp, Artificial Sequence
  Oligonucleotide for detection of SNP TSC0030058
aaagttcgggttg

SEQ ID NO: 120450 - DNA, 13 bp, Artificial Sequence
  Oligonucleotide for detection of SNP TSC0030058
caacccgaacttt

SEQ ID NO: 120451 - DNA, 13 bp, Artificial Sequence
  Oligonucleotide for detection of SNP TSC0030058
tagtttgggtttt

SEQ ID NO: 120452 - DNA, 13 bp, Artificial Sequence
  Oligonucleotide for detection of SNP TSC0030058
aaaacccaaacta

SEQ ID NO: 120453 - DNA, 13 bp, Artificial Sequence
  Oligonucleotide for detection of SNP TSC0030058
tagtttaggtttt

SEQ ID NO: 120454 - DNA, 13 bp, Artificial Sequence
  Oligonucleotide for detection of SNP TSC0030058
aaaacctaaacta

SEQ ID NO: 120455 - DNA, 13 bp, Artificial Sequence
  Oligonucleotide for detection of SNP TSC0030058
tagttcgggtttt

SEQ ID NO: 120456 - DNA, 13 bp, Artificial Sequence
  Oligonucleotide for detection of SNP TSC0030058
aaaacccgaacta

SEQ ID NO: 120457 - DNA, 13 bp, Artificial Sequence
  Oligonucleotide for detection of SNP TSC0030067
tttatatatatag

SEQ ID NO: 120458 - DNA, 13 bp, Artificial Sequence
  Oligonucleotide for detection of SNP TSC0030067
ctatatatataaa

SEQ ID NO: 120459 - DNA, 13 bp, Artificial Sequence
  Oligonucleotide for detection of SNP TSC0030067
tttatagatatag

SEQ ID NO: 120460 - DNA, 13 bp, Artificial Sequence
  Oligonucleotide for detection of SNP TSC0030067
ctatatctataaa

SEQ ID NO: 120461 - DNA, 13 bp, Artificial Sequence
  Oligonucleotide for detection of SNP TSC0030067
ttgtatgtataga

SEQ ID NO: 120462 - DNA, 13 bp, Artificial Sequence
  Oligonucleotide for detection of SNP TSC0030067
tctatacatacaa

SEQ ID NO: 120463 - DNA, 13 bp, Artificial Sequence
  Oligonucleotide for detection of SNP TSC0030067
ttgtatttataga

SEQ ID NO: 120464 - DNA, 13 bp, Artificial Sequence
  Oligonucleotide for detection of SNP TSC0030067
tctataaatacaa

SEQ ID NO: 120465 - DNA, 13 bp, Artificial Sequence
  Oligonucleotide for detection of SNP TSC0030068
agttagaggttag

SEQ ID NO: 120466 - DNA, 13 bp, Artificial Sequence
  Oligonucleotide for detection of SNP TSC0030068
ctaacctctaact

SEQ ID NO: 120467 - DNA, 13 bp, Artificial Sequence
  Oligonucleotide for detection of SNP TSC0030068
agttaggggttag

SEQ ID NO: 120468 - DNA, 13 bp, Artificial Sequence
  Oligonucleotide for detection of SNP TSC0030068
ctaacccctaact

SEQ ID NO: 120469 - DNA, 13 bp, Artificial Sequence
  Oligonucleotide for detection of SNP TSC0030069
ttttgtcgtatty

SEQ ID NO: 120470 - DNA, 13 bp, Artificial Sequence
  Oligonucleotide for detection of SNP TSC0030069
raatacgacaaaa

SEQ ID NO: 120471 - DNA, 13 bp, Artificial Sequence
  Oligonucleotide for detection of SNP TSC0030069
gaatgtgatagga

SEQ ID NO: 120472 - DNA, 13 bp, Artificial Sequence
  Oligonucleotide for detection of SNP TSC0030069
tcctatcacattc

SEQ ID NO: 120473 - DNA, 13 bp, Artificial Sequence
  Oligonucleotide for detection of SNP TSC0030069
gaatgtaatagga

SEQ ID NO: 120474 - DNA, 13 bp, Artificial Sequence
  Oligonucleotide for detection of SNP TSC0030069
tcctattacattc

SEQ ID NO: 120475 - DNA, 13 bp, Artificial Sequence
  Oligonucleotide for detection of SNP TSC0030069
gaatgcgatagga

SEQ ID NO: 120476 - DNA, 13 bp, Artificial Sequence
  Oligonucleotide for detection of SNP TSC0030069
tcctatcgcattc

SEQ ID NO: 120477 - DNA, 13 bp, Artificial Sequence
  Oligonucleotide for detection of SNP TSC0030070
tggggtggattgy

SEQ ID NO: 120478 - DNA, 13 bp, Artificial Sequence
  Oligonucleotide for detection of SNP TSC0030070
rcaatccacccca

SEQ ID NO: 120479 - DNA, 13 bp, Artificial Sequence
  Oligonucleotide for detection of SNP TSC0030070
tggggttgattgy

SEQ ID NO: 120480 - DNA, 13 bp, Artificial Sequence
  Oligonucleotide for detection of SNP TSC0030070
rcaatcaacccca

SEQ ID NO: 120481 - DNA, 13 bp, Artificial Sequence
  Oligonucleotide for detection of SNP TSC0030070
cggggtggattgy

SEQ ID NO: 120482 - DNA, 13 bp, Artificial Sequence
  Oligonucleotide for detection of SNP TSC0030070
rcaatccaccccg

SEQ ID NO: 120483 - DNA, 13 bp, Artificial Sequence
  Oligonucleotide for detection of SNP TSC0030070
cggggttgattgy

SEQ ID NO: 120484 - DNA, 13 bp, Artificial Sequence
  Oligonucleotide for detection of SNP TSC0030070
rcaatcaaccccg

SEQ ID NO: 120485 - DNA, 13 bp, Artificial Sequence
  Oligonucleotide for detection of SNP TSC0030070
tggggcggattgy

SEQ ID NO: 120486 - DNA, 13 bp, Artificial Sequence
  Oligonucleotide for detection of SNP TSC0030070
rcaatccgcccca

SEQ ID NO: 120487 - DNA, 13 bp, Artificial Sequence
  Oligonucleotide for detection of SNP TSC0030070
cggggcggattgy

SEQ ID NO: 120488 - DNA, 13 bp, Artificial Sequence
  Oligonucleotide for detection of SNP TSC0030070
rcaatccgccccg

SEQ ID NO: 120489 - DNA, 13 bp, Artificial Sequence
  Oligonucleotide for detection of SNP TSC0030070
gtagttagttttg

SEQ ID NO: 120490 - DNA, 13 bp, Artificial Sequence
  Oligonucleotide for detection of SNP TSC0030070
caaaactaactac

SEQ ID NO: 120491 - DNA, 13 bp, Artificial Sequence
  Oligonucleotide for detection of SNP TSC0030070
gtagttagtttcg

SEQ ID NO: 120492 - DNA, 13 bp, Artificial Sequence
  Oligonucleotide for detection of SNP TSC0030070
cgaaactaactac

SEQ ID NO: 120493 - DNA, 13 bp, Artificial Sequence
  Oligonucleotide for detection of SNP TSC0030070
gtagtttgtttcg

SEQ ID NO: 120494 - DNA, 13 bp, Artificial Sequence
  Oligonucleotide for detection of SNP TSC0030070
cgaaacaaactac

SEQ ID NO: 120495 - DNA, 13 bp, Artificial Sequence
  Oligonucleotide for detection of SNP TSC0030070
gtagttcgtttcg

SEQ ID NO: 120496 - DNA, 13 bp, Artificial Sequence
  Oligonucleotide for detection of SNP TSC0030070
cgaaacgaactac

SEQ ID NO: 120497 - DNA, 13 bp, Artificial Sequence
  Oligonucleotide for detection of SNP TSC0030072
aaatttattttat

SEQ ID NO: 120498 - DNA, 13 bp, Artificial Sequence
  Oligonucleotide for detection of SNP TSC0030072
ataaaataaattt

SEQ ID NO: 120499 - DNA, 13 bp, Artificial Sequence
  Oligonucleotide for detection of SNP TSC0030072
aaatttgttttat

SEQ ID NO: 120500 - DNA, 13 bp, Artificial Sequence
  Oligonucleotide for detection of SNP TSC0030072
ataaaacaaattt

SEQ ID NO: 120501 - DNA, 13 bp, Artificial Sequence
  Oligonucleotide for detection of SNP TSC0030074
gagttagtgatag

SEQ ID NO: 120502 - DNA, 13 bp, Artificial Sequence
  Oligonucleotide for detection of SNP TSC0030074
ctatcactaactc

SEQ ID NO: 120503 - DNA, 13 bp, Artificial Sequence
  Oligonucleotide for detection of SNP TSC0030074
gagttattgatag

SEQ ID NO: 120504 - DNA, 13 bp, Artificial Sequence
  Oligonucleotide for detection of SNP TSC0030074
ctatcaataactc

SEQ ID NO: 120505 - DNA, 13 bp, Artificial Sequence
  Oligonucleotide for detection of SNP TSC0030074
gagttagcgatag

SEQ ID NO: 120506 - DNA, 13 bp, Artificial Sequence
  Oligonucleotide for detection of SNP TSC0030074
ctatcgctaactc

SEQ ID NO: 120507 - DNA, 13 bp, Artificial Sequence
  Oligonucleotide for detection of SNP TSC0030074
gagttatcgatag

SEQ ID NO: 120508 - DNA, 13 bp, Artificial Sequence
  Oligonucleotide for detection of SNP TSC0030074
ctatcgataactc

SEQ ID NO: 120509 - DNA, 13 bp, Artificial Sequence
  Oligonucleotide for detection of SNP TSC0030074
ttgttgttgatty

SEQ ID NO: 120510 - DNA, 13 bp, Artificial Sequence
  Oligonucleotide for detection of SNP TSC0030074
raatcaacaacaa

SEQ ID NO: 120511 - DNA, 13 bp, Artificial Sequence
  Oligonucleotide for detection of SNP TSC0030074
ttgttgatgatty

SEQ ID NO: 120512 - DNA, 13 bp, Artificial Sequence
  Oligonucleotide for detection of SNP TSC0030074
raatcatcaacaa

SEQ ID NO: 120513 - DNA, 13 bp, Artificial Sequence
  Oligonucleotide for detection of SNP TSC0030074
ttgtcgttgatty

SEQ ID NO: 120514 - DNA, 13 bp, Artificial Sequence
  Oligonucleotide for detection of SNP TSC0030074
raatcaacgacaa

SEQ ID NO: 120515 - DNA, 13 bp, Artificial Sequence
  Oligonucleotide for detection of SNP TSC0030074
ttgtcgatgatty

SEQ ID NO: 120516 - DNA, 13 bp, Artificial Sequence
  Oligonucleotide for detection of SNP TSC0030074
raatcatcgacaa

SEQ ID NO: 120517 - DNA, 13 bp, Artificial Sequence
  Oligonucleotide for detection of SNP TSC0030076
tagtggggtaaty

SEQ ID NO: 120518 - DNA, 13 bp, Artificial Sequence
  Oligonucleotide for detection of SNP TSC0030076
rattaccccacta

SEQ ID NO: 120519 - DNA, 13 bp, Artificial Sequence
  Oligonucleotide for detection of SNP TSC0030076
tagtggtgtaaty

SEQ ID NO: 120520 - DNA, 13 bp, Artificial Sequence
  Oligonucleotide for detection of SNP TSC0030076
rattacaccacta

SEQ ID NO: 120521 - DNA, 13 bp, Artificial Sequence
  Oligonucleotide for detection of SNP TSC0030077
atagatgtgttty

SEQ ID NO: 120522 - DNA, 13 bp, Artificial Sequence
  Oligonucleotide for detection of SNP TSC0030077
raaacacatctat

SEQ ID NO: 120523 - DNA, 13 bp, Artificial Sequence
  Oligonucleotide for detection of SNP TSC0030077
atagatatgttty

SEQ ID NO: 120524 - DNA, 13 bp, Artificial Sequence
  Oligonucleotide for detection of SNP TSC0030077
raaacatatctat

SEQ ID NO: 120525 - DNA, 13 bp, Artificial Sequence
  Oligonucleotide for detection of SNP TSC0030078
gtggatatgtttt

SEQ ID NO: 120526 - DNA, 13 bp, Artificial Sequence
  Oligonucleotide for detection of SNP TSC0030078
aaaacatatccac

SEQ ID NO: 120527 - DNA, 13 bp, Artificial Sequence
  Oligonucleotide for detection of SNP TSC0030078
gtggatgtgtttt

SEQ ID NO: 120528 - DNA, 13 bp, Artificial Sequence
  Oligonucleotide for detection of SNP TSC0030078
aaaacacatccac

SEQ ID NO: 120529 - DNA, 13 bp, Artificial Sequence
  Oligonucleotide for detection of SNP TSC0030078
gcggatatgtttt

SEQ ID NO: 120530 - DNA, 13 bp, Artificial Sequence
  Oligonucleotide for detection of SNP TSC0030078
aaaacatatccgc

SEQ ID NO: 120531 - DNA, 13 bp, Artificial Sequence
  Oligonucleotide for detection of SNP TSC0030078
gcggatgtgtttt

SEQ ID NO: 120532 - DNA, 13 bp, Artificial Sequence
  Oligonucleotide for detection of SNP TSC0030078
aaaacacatccgc

SEQ ID NO: 120533 - DNA, 13 bp, Artificial Sequence
  Oligonucleotide for detection of SNP TSC0030078
gtggacgtgtttt

SEQ ID NO: 120534 - DNA, 13 bp, Artificial Sequence
  Oligonucleotide for detection of SNP TSC0030078
aaaacacgtccac

SEQ ID NO: 120535 - DNA, 13 bp, Artificial Sequence
  Oligonucleotide for detection of SNP TSC0030078
gcggacgtgtttt

SEQ ID NO: 120536 - DNA, 13 bp, Artificial Sequence
  Oligonucleotide for detection of SNP TSC0030078
aaaacacgtccgc

SEQ ID NO: 120537 - DNA, 13 bp, Artificial Sequence
  Oligonucleotide for detection of SNP TSC0030079
tgttttatgaaag

SEQ ID NO: 120538 - DNA, 13 bp, Artificial Sequence
  Oligonucleotide for detection of SNP TSC0030079
ctttcataaaaca

SEQ ID NO: 120539 - DNA, 13 bp, Artificial Sequence
  Oligonucleotide for detection of SNP TSC0030079
tgttttgtgaaag

SEQ ID NO: 120540 - DNA, 13 bp, Artificial Sequence
  Oligonucleotide for detection of SNP TSC0030079
ctttcacaaaaca

SEQ ID NO: 120541 - DNA, 13 bp, Artificial Sequence
  Oligonucleotide for detection of SNP TSC0030079
cgttttatgaaag

SEQ ID NO: 120542 - DNA, 13 bp, Artificial Sequence
  Oligonucleotide for detection of SNP TSC0030079
ctttcataaaacg

SEQ ID NO: 120543 - DNA, 13 bp, Artificial Sequence
  Oligonucleotide for detection of SNP TSC0030079
cgttttgtgaaag

SEQ ID NO: 120544 - DNA, 13 bp, Artificial Sequence
  Oligonucleotide for detection of SNP TSC0030079
ctttcacaaaacg

SEQ ID NO: 120545 - DNA, 13 bp, Artificial Sequence
  Oligonucleotide for detection of SNP TSC0030079
tgtttcgtgaaag

SEQ ID NO: 120546 - DNA, 13 bp, Artificial Sequence
  Oligonucleotide for detection of SNP TSC0030079
ctttcacgaaaca

SEQ ID NO: 120547 - DNA, 13 bp, Artificial Sequence
  Oligonucleotide for detection of SNP TSC0030079
cgtttcgtgaaag

SEQ ID NO: 120548 - DNA, 13 bp, Artificial Sequence
  Oligonucleotide for detection of SNP TSC0030079
ctttcacgaaacg

SEQ ID NO: 120549 - DNA, 13 bp, Artificial Sequence
  Oligonucleotide for detection of SNP TSC0030079
tttttatggggtg

SEQ ID NO: 120550 - DNA, 13 bp, Artificial Sequence
  Oligonucleotide for detection of SNP TSC0030079
caccccataaaaa

SEQ ID NO: 120551 - DNA, 13 bp, Artificial Sequence
  Oligonucleotide for detection of SNP TSC0030079
tttttatggggcg

SEQ ID NO: 120552 - DNA, 13 bp, Artificial Sequence
  Oligonucleotide for detection of SNP TSC0030079
cgccccataaaaa

SEQ ID NO: 120553 - DNA, 13 bp, Artificial Sequence
  Oligonucleotide for detection of SNP TSC0030079
tttttacggggtg

SEQ ID NO: 120554 - DNA, 13 bp, Artificial Sequence
  Oligonucleotide for detection of SNP TSC0030079
caccccgtaaaaa

SEQ ID NO: 120555 - DNA, 13 bp, Artificial Sequence
  Oligonucleotide for detection of SNP TSC0030079
tttttacggggcg

SEQ ID NO: 120556 - DNA, 13 bp, Artificial Sequence
  Oligonucleotide for detection of SNP TSC0030079
cgccccgtaaaaa

SEQ ID NO: 120557 - DNA, 13 bp, Artificial Sequence
  Oligonucleotide for detection of SNP TSC0030081
tgttagatgaata

SEQ ID NO: 120558 - DNA, 13 bp, Artificial Sequence
  Oligonucleotide for detection of SNP TSC0030081
tattcatctaaca

SEQ ID NO: 120559 - DNA, 13 bp, Artificial Sequence
  Oligonucleotide for detection of SNP TSC0030081
tgttaggtgaata

SEQ ID NO: 120560 - DNA, 13 bp, Artificial Sequence
  Oligonucleotide for detection of SNP TSC0030081
tattcacctaaca

SEQ ID NO: 120561 - DNA, 13 bp, Artificial Sequence
  Oligonucleotide for detection of SNP TSC0030082
gtgttttatgtty

SEQ ID NO: 120562 - DNA, 13 bp, Artificial Sequence
  Oligonucleotide for detection of SNP TSC0030082
raacataaaacac

SEQ ID NO: 120563 - DNA, 13 bp, Artificial Sequence
  Oligonucleotide for detection of SNP TSC0030082
gtgtttgatgtty

SEQ ID NO: 120564 - DNA, 13 bp, Artificial Sequence
  Oligonucleotide for detection of SNP TSC0030082
raacatcaaacac

SEQ ID NO: 120565 - DNA, 13 bp, Artificial Sequence
  Oligonucleotide for detection of SNP TSC0030082
gcgttttatgtty

SEQ ID NO: 120566 - DNA, 13 bp, Artificial Sequence
  Oligonucleotide for detection of SNP TSC0030082
raacataaaacgc

SEQ ID NO: 120567 - DNA, 13 bp, Artificial Sequence
  Oligonucleotide for detection of SNP TSC0030082
gcgtttgatgtty

SEQ ID NO: 120568 - DNA, 13 bp, Artificial Sequence
  Oligonucleotide for detection of SNP TSC0030082
raacatcaaacgc

SEQ ID NO: 120569 - DNA, 13 bp, Artificial Sequence
  Oligonucleotide for detection of SNP TSC0030082
gagtatgaggtgy

SEQ ID NO: 120570 - DNA, 13 bp, Artificial Sequence
  Oligonucleotide for detection of SNP TSC0030082
rcacctcatactc

SEQ ID NO: 120571 - DNA, 13 bp, Artificial Sequence
  Oligonucleotide for detection of SNP TSC0030082
gagtattaggtgy

SEQ ID NO: 120572 - DNA, 13 bp, Artificial Sequence
  Oligonucleotide for detection of SNP TSC0030082
rcacctaatactc

SEQ ID NO: 120573 - DNA, 13 bp, Artificial Sequence
  Oligonucleotide for detection of SNP TSC0030082
gagtatgaggcgy

SEQ ID NO: 120574 - DNA, 13 bp, Artificial Sequence
  Oligonucleotide for detection of SNP TSC0030082
rcgcctcatactc

SEQ ID NO: 120575 - DNA, 13 bp, Artificial Sequence
  Oligonucleotide for detection of SNP TSC0030082
gagtattaggcgy

SEQ ID NO: 120576 - DNA, 13 bp, Artificial Sequence
  Oligonucleotide for detection of SNP TSC0030082
rcgcctaatactc

SEQ ID NO: 120577 - DNA, 13 bp, Artificial Sequence
  Oligonucleotide for detection of SNP TSC0030084
tgtttagtttatt

SEQ ID NO: 120578 - DNA, 13 bp, Artificial Sequence
  Oligonucleotide for detection of SNP TSC0030084
aataaactaaaca

SEQ ID NO: 120579 - DNA, 13 bp, Artificial Sequence
  Oligonucleotide for detection of SNP TSC0030084
tgtttaatttatt

SEQ ID NO: 120580 - DNA, 13 bp, Artificial Sequence
  Oligonucleotide for detection of SNP TSC0030084
aataaattaaaca

SEQ ID NO: 120581 - DNA, 13 bp, Artificial Sequence
  Oligonucleotide for detection of SNP TSC0030085
agttgtaaggtat

SEQ ID NO: 120582 - DNA, 13 bp, Artificial Sequence
  Oligonucleotide for detection of SNP TSC0030085
ataccttacaact

SEQ ID NO: 120583 - DNA, 13 bp, Artificial Sequence
  Oligonucleotide for detection of SNP TSC0030085
agttgtgaggtat

SEQ ID NO: 120584 - DNA, 13 bp, Artificial Sequence
  Oligonucleotide for detection of SNP TSC0030085
atacctcacaact

SEQ ID NO: 120585 - DNA, 13 bp, Artificial Sequence
  Oligonucleotide for detection of SNP TSC0030086
tgaggttgggtag

SEQ ID NO: 120586 - DNA, 13 bp, Artificial Sequence
  Oligonucleotide for detection of SNP TSC0030086
ctacccaacctca

SEQ ID NO: 120587 - DNA, 13 bp, Artificial Sequence
  Oligonucleotide for detection of SNP TSC0030086
tgaggtcgggtag

SEQ ID NO: 120588 - DNA, 13 bp, Artificial Sequence
  Oligonucleotide for detection of SNP TSC0030086
ctacccgacctca

SEQ ID NO: 120589 - DNA, 13 bp, Artificial Sequence
  Oligonucleotide for detection of SNP TSC0030086
ttgtttggtttta

SEQ ID NO: 120590 - DNA, 13 bp, Artificial Sequence
  Oligonucleotide for detection of SNP TSC0030086
taaaaccaaacaa

SEQ ID NO: 120591 - DNA, 13 bp, Artificial Sequence
  Oligonucleotide for detection of SNP TSC0030086
ttgtttagtttta

SEQ ID NO: 120592 - DNA, 13 bp, Artificial Sequence
  Oligonucleotide for detection of SNP TSC0030086
taaaactaaacaa

SEQ ID NO: 120593 - DNA, 13 bp, Artificial Sequence
  Oligonucleotide for detection of SNP TSC0030086
ttgttcggtttta

SEQ ID NO: 120594 - DNA, 13 bp, Artificial Sequence
  Oligonucleotide for detection of SNP TSC0030086
taaaaccgaacaa

SEQ ID NO: 120595 - DNA, 13 bp, Artificial Sequence
  Oligonucleotide for detection of SNP TSC0030087
tgaggagagtagt

SEQ ID NO: 120596 - DNA, 13 bp, Artificial Sequence
  Oligonucleotide for detection of SNP TSC0030087
actactctcctca

SEQ ID NO: 120597 - DNA, 13 bp, Artificial Sequence
  Oligonucleotide for detection of SNP TSC0030087
tgaggaaagtagt

SEQ ID NO: 120598 - DNA, 13 bp, Artificial Sequence
  Oligonucleotide for detection of SNP TSC0030087
actactttcctca

SEQ ID NO: 120599 - DNA, 13 bp, Artificial Sequence
  Oligonucleotide for detection of SNP TSC0030088
tatattataatgt

SEQ ID NO: 120600 - DNA, 13 bp, Artificial Sequence
  Oligonucleotide for detection of SNP TSC0030088
acattataatata

SEQ ID NO: 120601 - DNA, 13 bp, Artificial Sequence
  Oligonucleotide for detection of SNP TSC0030088
tatattgtaatgt

SEQ ID NO: 120602 - DNA, 13 bp, Artificial Sequence
  Oligonucleotide for detection of SNP TSC0030088
acattacaatata

SEQ ID NO: 120603 - DNA, 13 bp, Artificial Sequence
  Oligonucleotide for detection of SNP TSC0030088
tatattataacgt

SEQ ID NO: 120604 - DNA, 13 bp, Artificial Sequence
  Oligonucleotide for detection of SNP TSC0030088
acgttataatata

SEQ ID NO: 120605 - DNA, 13 bp, Artificial Sequence
  Oligonucleotide for detection of SNP TSC0030088
tatattgtaacgt

SEQ ID NO: 120606 - DNA, 13 bp, Artificial Sequence
  Oligonucleotide for detection of SNP TSC0030088
acgttacaatata

SEQ ID NO: 120607 - DNA, 13 bp, Artificial Sequence
  Oligonucleotide for detection of SNP TSC0030089
tgattagtggggy

SEQ ID NO: 120608 - DNA, 13 bp, Artificial Sequence
  Oligonucleotide for detection of SNP TSC0030089
rccccactaatca

SEQ ID NO: 120609 - DNA, 13 bp, Artificial Sequence
  Oligonucleotide for detection of SNP TSC0030089
tgattaatggggy

SEQ ID NO: 120610 - DNA, 13 bp, Artificial Sequence
  Oligonucleotide for detection of SNP TSC0030089
rccccattaatca

SEQ ID NO: 120611 - DNA, 13 bp, Artificial Sequence
  Oligonucleotide for detection of SNP TSC0030093
ttttttaataaty

SEQ ID NO: 120612 - DNA, 13 bp, Artificial Sequence
  Oligonucleotide for detection of SNP TSC0030093
rattattaaaaaa

SEQ ID NO: 120613 - DNA, 13 bp, Artificial Sequence
  Oligonucleotide for detection of SNP TSC0030093
ttttttgataaty

SEQ ID NO: 120614 - DNA, 13 bp, Artificial Sequence
  Oligonucleotide for detection of SNP TSC0030093
rattatcaaaaaa

SEQ ID NO: 120615 - DNA, 13 bp, Artificial Sequence
  Oligonucleotide for detection of SNP TSC0030093
tttttcgataaty

SEQ ID NO: 120616 - DNA, 13 bp, Artificial Sequence
  Oligonucleotide for detection of SNP TSC0030093
rattatcgaaaaa

SEQ ID NO: 120617 - DNA, 13 bp, Artificial Sequence
  Oligonucleotide for detection of SNP TSC0030093
ggttgttgaaagg

SEQ ID NO: 120618 - DNA, 13 bp, Artificial Sequence
  Oligonucleotide for detection of SNP TSC0030093
cctttcaacaacc

SEQ ID NO: 120619 - DNA, 13 bp, Artificial Sequence
  Oligonucleotide for detection of SNP TSC0030093
ggttgtcgaaagg

SEQ ID NO: 120620 - DNA, 13 bp, Artificial Sequence
  Oligonucleotide for detection of SNP TSC0030093
cctttcgacaacc

SEQ ID NO: 120621 - DNA, 13 bp, Artificial Sequence
  Oligonucleotide for detection of SNP TSC0030094
gtaaatgtggaag

SEQ ID NO: 120622 - DNA, 13 bp, Artificial Sequence
  Oligonucleotide for detection of SNP TSC0030094
cttccacatttac

SEQ ID NO: 120623 - DNA, 13 bp, Artificial Sequence
  Oligonucleotide for detection of SNP TSC0030094
gtaaatatggaag

SEQ ID NO: 120624 - DNA, 13 bp, Artificial Sequence
  Oligonucleotide for detection of SNP TSC0030094
cttccatatttac

SEQ ID NO: 120625 - DNA, 13 bp, Artificial Sequence
  Oligonucleotide for detection of SNP TSC0030094
gtaaacgtggaag

SEQ ID NO: 120626 - DNA, 13 bp, Artificial Sequence
  Oligonucleotide for detection of SNP TSC0030094
cttccacgtttac

SEQ ID NO: 120627 - DNA, 13 bp, Artificial Sequence
  Oligonucleotide for detection of SNP TSC0030095
ttgtttatatgtg

SEQ ID NO: 120628 - DNA, 13 bp, Artificial Sequence
  Oligonucleotide for detection of SNP TSC0030095
cacatataaacaa

SEQ ID NO: 120629 - DNA, 13 bp, Artificial Sequence
  Oligonucleotide for detection of SNP TSC0030096
gttttggagtttg

SEQ ID NO: 120630 - DNA, 13 bp, Artificial Sequence
  Oligonucleotide for detection of SNP TSC0030096
caaactccaaaac

SEQ ID NO: 120631 - DNA, 13 bp, Artificial Sequence
  Oligonucleotide for detection of SNP TSC0030096
gttttgaagtttg

SEQ ID NO: 120632 - DNA, 13 bp, Artificial Sequence
  Oligonucleotide for detection of SNP TSC0030096
caaacttcaaaac

SEQ ID NO: 120633 - DNA, 13 bp, Artificial Sequence
  Oligonucleotide for detection of SNP TSC0030097
ggttttagagtty

SEQ ID NO: 120634 - DNA, 13 bp, Artificial Sequence
  Oligonucleotide for detection of SNP TSC0030097
raactctaaaacc

SEQ ID NO: 120635 - DNA, 13 bp, Artificial Sequence
  Oligonucleotide for detection of SNP TSC0030097
ggttttggagtty

SEQ ID NO: 120636 - DNA, 13 bp, Artificial Sequence
  Oligonucleotide for detection of SNP TSC0030097
raactccaaaacc

SEQ ID NO: 120637 - DNA, 13 bp, Artificial Sequence
  Oligonucleotide for detection of SNP TSC0030097
ggtttcggagtty

SEQ ID NO: 120638 - DNA, 13 bp, Artificial Sequence
  Oligonucleotide for detection of SNP TSC0030097
raactccgaaacc

SEQ ID NO: 120639 - DNA, 13 bp, Artificial Sequence
  Oligonucleotide for detection of SNP TSC0030097
gagttttggagty

SEQ ID NO: 120640 - DNA, 13 bp, Artificial Sequence
  Oligonucleotide for detection of SNP TSC0030097
ractccaaaactc

SEQ ID NO: 120641 - DNA, 13 bp, Artificial Sequence
  Oligonucleotide for detection of SNP TSC0030097
gagtttcggagty

SEQ ID NO: 120642 - DNA, 13 bp, Artificial Sequence
  Oligonucleotide for detection of SNP TSC0030097
ractccgaaactc

SEQ ID NO: 120643 - DNA, 13 bp, Artificial Sequence
  Oligonucleotide for detection of SNP TSC0030107
gttagtatgttay

SEQ ID NO: 120644 - DNA, 13 bp, Artificial Sequence
  Oligonucleotide for detection of SNP TSC0030107
rtaacatactaac

SEQ ID NO: 120645 - DNA, 13 bp, Artificial Sequence
  Oligonucleotide for detection of SNP TSC0030107
gttagtgtgttay

SEQ ID NO: 120646 - DNA, 13 bp, Artificial Sequence
  Oligonucleotide for detection of SNP TSC0030107
rtaacacactaac

SEQ ID NO: 120647 - DNA, 13 bp, Artificial Sequence
  Oligonucleotide for detection of SNP TSC0030107
gttagcgtgttay

SEQ ID NO: 120648 - DNA, 13 bp, Artificial Sequence
  Oligonucleotide for detection of SNP TSC0030107
rtaacacgctaac

SEQ ID NO: 120649 - DNA, 13 bp, Artificial Sequence
  Oligonucleotide for detection of SNP TSC0030107
gtaatatgttaay

SEQ ID NO: 120650 - DNA, 13 bp, Artificial Sequence
  Oligonucleotide for detection of SNP TSC0030107
rttaacatattac

SEQ ID NO: 120651 - DNA, 13 bp, Artificial Sequence
  Oligonucleotide for detection of SNP TSC0030107
gtaatacgttaay

SEQ ID NO: 120652 - DNA, 13 bp, Artificial Sequence
  Oligonucleotide for detection of SNP TSC0030107
rttaacgtattac

SEQ ID NO: 120653 - DNA, 13 bp, Artificial Sequence
  Oligonucleotide for detection of SNP TSC0030109
tttattagttgaa

SEQ ID NO: 120654 - DNA, 13 bp, Artificial Sequence
  Oligonucleotide for detection of SNP TSC0030109
ttcaactaataaa

SEQ ID NO: 120655 - DNA, 13 bp, Artificial Sequence
  Oligonucleotide for detection of SNP TSC0030109
tttatttgttgaa

SEQ ID NO: 120656 - DNA, 13 bp, Artificial Sequence
  Oligonucleotide for detection of SNP TSC0030109
ttcaacaaataaa

SEQ ID NO: 120657 - DNA, 13 bp, Artificial Sequence
  Oligonucleotide for detection of SNP TSC0030109
tttattcgttgaa

SEQ ID NO: 120658 - DNA, 13 bp, Artificial Sequence
  Oligonucleotide for detection of SNP TSC0030109
ttcaacgaataaa

SEQ ID NO: 120659 - DNA, 13 bp, Artificial Sequence
  Oligonucleotide for detection of SNP TSC0030109
tttaattggtgag

SEQ ID NO: 120660 - DNA, 13 bp, Artificial Sequence
  Oligonucleotide for detection of SNP TSC0030109
ctcaccaattaaa

SEQ ID NO: 120661 - DNA, 13 bp, Artificial Sequence
  Oligonucleotide for detection of SNP TSC0030109
tttaatgggtgag

SEQ ID NO: 120662 - DNA, 13 bp, Artificial Sequence
  Oligonucleotide for detection of SNP TSC0030109
ctcacccattaaa

SEQ ID NO: 120663 - DNA, 13 bp, Artificial Sequence
  Oligonucleotide for detection of SNP TSC0030109
tttaacgggtgag

SEQ ID NO: 120664 - DNA, 13 bp, Artificial Sequence
  Oligonucleotide for detection of SNP TSC0030109
ctcacccgttaaa

SEQ ID NO: 120665 - DNA, 13 bp, Artificial Sequence
  Oligonucleotide for detection of SNP TSC0030110
gagtgtaggttag

SEQ ID NO: 120666 - DNA, 13 bp, Artificial Sequence
  Oligonucleotide for detection of SNP TSC0030110
ctaacctacactc

SEQ ID NO: 120667 - DNA, 13 bp, Artificial Sequence
  Oligonucleotide for detection of SNP TSC0030110
gagtgttggttag

SEQ ID NO: 120668 - DNA, 13 bp, Artificial Sequence
  Oligonucleotide for detection of SNP TSC0030110
ctaaccaacactc

SEQ ID NO: 120669 - DNA, 13 bp, Artificial Sequence
  Oligonucleotide for detection of SNP TSC0030110
ttggtttatatty

SEQ ID NO: 120670 - DNA, 13 bp, Artificial Sequence
  Oligonucleotide for detection of SNP TSC0030110
raatataaaccaa

SEQ ID NO: 120671 - DNA, 13 bp, Artificial Sequence
  Oligonucleotide for detection of SNP TSC0030110
ttggttaatatty

SEQ ID NO: 120672 - DNA, 13 bp, Artificial Sequence
  Oligonucleotide for detection of SNP TSC0030110
raatattaaccaa

SEQ ID NO: 120673 - DNA, 13 bp, Artificial Sequence
  Oligonucleotide for detection of SNP TSC0030111
ttttgggtatatt

SEQ ID NO: 120674 - DNA, 13 bp, Artificial Sequence
  Oligonucleotide for detection of SNP TSC0030111
aatatacccaaaa

SEQ ID NO: 120675 - DNA, 13 bp, Artificial Sequence
  Oligonucleotide for detection of SNP TSC0030111
ttttggatatatt

SEQ ID NO: 120676 - DNA, 13 bp, Artificial Sequence
  Oligonucleotide for detection of SNP TSC0030111
aatatatccaaaa

SEQ ID NO: 120677 - DNA, 13 bp, Artificial Sequence
  Oligonucleotide for detection of SNP TSC0030112
tagttgatattty

SEQ ID NO: 120678 - DNA, 13 bp, Artificial Sequence
  Oligonucleotide for detection of SNP TSC0030112
raaatatcaacta

SEQ ID NO: 120679 - DNA, 13 bp, Artificial Sequence
  Oligonucleotide for detection of SNP TSC0030112
tagttggtattty

SEQ ID NO: 120680 - DNA, 13 bp, Artificial Sequence
  Oligonucleotide for detection of SNP TSC0030112
raaataccaacta

SEQ ID NO: 120681 - DNA, 13 bp, Artificial Sequence
  Oligonucleotide for detection of SNP TSC0030112
tagtcgatattty

SEQ ID NO: 120682 - DNA, 13 bp, Artificial Sequence
  Oligonucleotide for detection of SNP TSC0030112
raaatatcgacta

SEQ ID NO: 120683 - DNA, 13 bp, Artificial Sequence
  Oligonucleotide for detection of SNP TSC0030112
tagtcggtattty

SEQ ID NO: 120684 - DNA, 13 bp, Artificial Sequence
  Oligonucleotide for detection of SNP TSC0030112
raaataccgacta

SEQ ID NO: 120685 - DNA, 13 bp, Artificial Sequence
  Oligonucleotide for detection of SNP TSC0030113
tgtttaattatag

SEQ ID NO: 120686 - DNA, 13 bp, Artificial Sequence
  Oligonucleotide for detection of SNP TSC0030113
ctataattaaaca

SEQ ID NO: 120687 - DNA, 13 bp, Artificial Sequence
  Oligonucleotide for detection of SNP TSC0030113
tgtttagttatag

SEQ ID NO: 120688 - DNA, 13 bp, Artificial Sequence
  Oligonucleotide for detection of SNP TSC0030113
ctataactaaaca

SEQ ID NO: 120689 - DNA, 13 bp, Artificial Sequence
  Oligonucleotide for detection of SNP TSC0030114
aagagaattttty

SEQ ID NO: 120690 - DNA, 13 bp, Artificial Sequence
  Oligonucleotide for detection of SNP TSC0030114
raaaaattctctt

SEQ ID NO: 120691 - DNA, 13 bp, Artificial Sequence
  Oligonucleotide for detection of SNP TSC0030114
aagagagttttty

SEQ ID NO: 120692 - DNA, 13 bp, Artificial Sequence
  Oligonucleotide for detection of SNP TSC0030114
raaaaactctctt

SEQ ID NO: 120693 - DNA, 13 bp, Artificial Sequence
  Oligonucleotide for detection of SNP TSC0030123
ttttattggatga

SEQ ID NO: 120694 - DNA, 13 bp, Artificial Sequence
  Oligonucleotide for detection of SNP TSC0030123
tcatccaataaaa

SEQ ID NO: 120695 - DNA, 13 bp, Artificial Sequence
  Oligonucleotide for detection of SNP TSC0030123
ttttatgggatga

SEQ ID NO: 120696 - DNA, 13 bp, Artificial Sequence
  Oligonucleotide for detection of SNP TSC0030123
tcatcccataaaa

SEQ ID NO: 120697 - DNA, 13 bp, Artificial Sequence
  Oligonucleotide for detection of SNP TSC0030123
ttttatcggatga

SEQ ID NO: 120698 - DNA, 13 bp, Artificial Sequence
  Oligonucleotide for detection of SNP TSC0030123
tcatccgataaaa

SEQ ID NO: 120699 - DNA, 13 bp, Artificial Sequence
  Oligonucleotide for detection of SNP TSC0030123
ttttacgggatga

SEQ ID NO: 120700 - DNA, 13 bp, Artificial Sequence
  Oligonucleotide for detection of SNP TSC0030123
tcatcccgtaaaa

SEQ ID NO: 120701 - DNA, 13 bp, Artificial Sequence
  Oligonucleotide for detection of SNP TSC0030123
ttttattggacga

SEQ ID NO: 120702 - DNA, 13 bp, Artificial Sequence
  Oligonucleotide for detection of SNP TSC0030123
tcgtccaataaaa

SEQ ID NO: 120703 - DNA, 13 bp, Artificial Sequence
  Oligonucleotide for detection of SNP TSC0030123
ttttatgggacga

SEQ ID NO: 120704 - DNA, 13 bp, Artificial Sequence
  Oligonucleotide for detection of SNP TSC0030123
tcgtcccataaaa

SEQ ID NO: 120705 - DNA, 13 bp, Artificial Sequence
  Oligonucleotide for detection of SNP TSC0030123
ttttatcggacga

SEQ ID NO: 120706 - DNA, 13 bp, Artificial Sequence
  Oligonucleotide for detection of SNP TSC0030123
tcgtccgataaaa

SEQ ID NO: 120707 - DNA, 13 bp, Artificial Sequence
  Oligonucleotide for detection of SNP TSC0030123
ttttacgggacga

SEQ ID NO: 120708 - DNA, 13 bp, Artificial Sequence
  Oligonucleotide for detection of SNP TSC0030123
tcgtcccgtaaaa

SEQ ID NO: 120709 - DNA, 13 bp, Artificial Sequence
  Oligonucleotide for detection of SNP TSC0030123
ttgtttggtaggg

SEQ ID NO: 120710 - DNA, 13 bp, Artificial Sequence
  Oligonucleotide for detection of SNP TSC0030123
ccctaccaaacaa

SEQ ID NO: 120711 - DNA, 13 bp, Artificial Sequence
  Oligonucleotide for detection of SNP TSC0030123
ttgttttgtaggg

SEQ ID NO: 120712 - DNA, 13 bp, Artificial Sequence
  Oligonucleotide for detection of SNP TSC0030123
ccctacaaaacaa

SEQ ID NO: 120713 - DNA, 13 bp, Artificial Sequence
  Oligonucleotide for detection of SNP TSC0030123
tcgtttggtaggg

SEQ ID NO: 120714 - DNA, 13 bp, Artificial Sequence
  Oligonucleotide for detection of SNP TSC0030123
ccctaccaaacga

SEQ ID NO: 120715 - DNA, 13 bp, Artificial Sequence
  Oligonucleotide for detection of SNP TSC0030123
tcgttttgtaggg

SEQ ID NO: 120716 - DNA, 13 bp, Artificial Sequence
  Oligonucleotide for detection of SNP TSC0030123
ccctacaaaacga

SEQ ID NO: 120717 - DNA, 13 bp, Artificial Sequence
  Oligonucleotide for detection of SNP TSC0030123
ttgttcggtaggg

SEQ ID NO: 120718 - DNA, 13 bp, Artificial Sequence
  Oligonucleotide for detection of SNP TSC0030123
ccctaccgaacaa

SEQ ID NO: 120719 - DNA, 13 bp, Artificial Sequence
  Oligonucleotide for detection of SNP TSC0030123
ttgtttcgtaggg

SEQ ID NO: 120720 - DNA, 13 bp, Artificial Sequence
  Oligonucleotide for detection of SNP TSC0030123
ccctacgaaacaa

SEQ ID NO: 120721 - DNA, 13 bp, Artificial Sequence
  Oligonucleotide for detection of SNP TSC0030123
tcgttcggtaggg

SEQ ID NO: 120722 - DNA, 13 bp, Artificial Sequence
  Oligonucleotide for detection of SNP TSC0030123
ccctaccgaacga

SEQ ID NO: 120723 - DNA, 13 bp, Artificial Sequence
  Oligonucleotide for detection of SNP TSC0030123
tcgtttcgtaggg

SEQ ID NO: 120724 - DNA, 13 bp, Artificial Sequence
  Oligonucleotide for detection of SNP TSC0030123
ccctacgaaacga

SEQ ID NO: 120725 - DNA, 13 bp, Artificial Sequence
  Oligonucleotide for detection of SNP TSC0030124
ttaattgggttaa

SEQ ID NO: 120726 - DNA, 13 bp, Artificial Sequence
  Oligonucleotide for detection of SNP TSC0030124
ttaacccaattaa

SEQ ID NO: 120727 - DNA, 13 bp, Artificial Sequence
  Oligonucleotide for detection of SNP TSC0030124
ttaattaggttaa

SEQ ID NO: 120728 - DNA, 13 bp, Artificial Sequence
  Oligonucleotide for detection of SNP TSC0030124
ttaacctaattaa

SEQ ID NO: 120729 - DNA, 13 bp, Artificial Sequence
  Oligonucleotide for detection of SNP TSC0030127
agttatatagggy

SEQ ID NO: 120730 - DNA, 13 bp, Artificial Sequence
  Oligonucleotide for detection of SNP TSC0030127
rccctatataact

SEQ ID NO: 120731 - DNA, 13 bp, Artificial Sequence
  Oligonucleotide for detection of SNP TSC0030127
agttatgtagggy

SEQ ID NO: 120732 - DNA, 13 bp, Artificial Sequence
  Oligonucleotide for detection of SNP TSC0030127
rccctacataact

SEQ ID NO: 120733 - DNA, 13 bp, Artificial Sequence
  Oligonucleotide for detection of SNP TSC0030127
agttacgtagggy

SEQ ID NO: 120734 - DNA, 13 bp, Artificial Sequence
  Oligonucleotide for detection of SNP TSC0030127
rccctacgtaact

SEQ ID NO: 120735 - DNA, 13 bp, Artificial Sequence
  Oligonucleotide for detection of SNP TSC0030127
gttttgtgtggtt

SEQ ID NO: 120736 - DNA, 13 bp, Artificial Sequence
  Oligonucleotide for detection of SNP TSC0030127
aaccacacaaaac

SEQ ID NO: 120737 - DNA, 13 bp, Artificial Sequence
  Oligonucleotide for detection of SNP TSC0030127
gttttgcgtggtt

SEQ ID NO: 120738 - DNA, 13 bp, Artificial Sequence
  Oligonucleotide for detection of SNP TSC0030127
aaccacgcaaaac

SEQ ID NO: 120739 - DNA, 13 bp, Artificial Sequence
  Oligonucleotide for detection of SNP TSC0030133
tagatagaaaaaa

SEQ ID NO: 120740 - DNA, 13 bp, Artificial Sequence
  Oligonucleotide for detection of SNP TSC0030133
ttttttctatcta

SEQ ID NO: 120741 - DNA, 13 bp, Artificial Sequence
  Oligonucleotide for detection of SNP TSC0030133
tagataaaaaaaa

SEQ ID NO: 120742 - DNA, 13 bp, Artificial Sequence
  Oligonucleotide for detection of SNP TSC0030133
ttttttttatcta

SEQ ID NO: 120743 - DNA, 13 bp, Artificial Sequence
  Oligonucleotide for detection of SNP TSC0030134
ttattggttttaa

SEQ ID NO: 120744 - DNA, 13 bp, Artificial Sequence
  Oligonucleotide for detection of SNP TSC0030134
ttaaaaccaataa

SEQ ID NO: 120745 - DNA, 13 bp, Artificial Sequence
  Oligonucleotide for detection of SNP TSC0030134
ttattgattttaa

SEQ ID NO: 120746 - DNA, 13 bp, Artificial Sequence
  Oligonucleotide for detection of SNP TSC0030134
ttaaaatcaataa

SEQ ID NO: 120747 - DNA, 13 bp, Artificial Sequence
  Oligonucleotide for detection of SNP TSC0030137
gattttgaaatga

SEQ ID NO: 120748 - DNA, 13 bp, Artificial Sequence
  Oligonucleotide for detection of SNP TSC0030137
tcatttcaaaatc

SEQ ID NO: 120749 - DNA, 13 bp, Artificial Sequence
  Oligonucleotide for detection of SNP TSC0030137
gatttttaaatga

SEQ ID NO: 120750 - DNA, 13 bp, Artificial Sequence
  Oligonucleotide for detection of SNP TSC0030137
tcatttaaaaatc

SEQ ID NO: 120751 - DNA, 13 bp, Artificial Sequence
  Oligonucleotide for detection of SNP TSC0030137
ttattttagggty

SEQ ID NO: 120752 - DNA, 13 bp, Artificial Sequence
  Oligonucleotide for detection of SNP TSC0030137
raccctaaaataa

SEQ ID NO: 120753 - DNA, 13 bp, Artificial Sequence
  Oligonucleotide for detection of SNP TSC0030137
ttatttaagggty

SEQ ID NO: 120754 - DNA, 13 bp, Artificial Sequence
  Oligonucleotide for detection of SNP TSC0030137
racccttaaataa

SEQ ID NO: 120755 - DNA, 13 bp, Artificial Sequence
  Oligonucleotide for detection of SNP TSC0030138
ttttgtgtttggg

SEQ ID NO: 120756 - DNA, 13 bp, Artificial Sequence
  Oligonucleotide for detection of SNP TSC0030138
cccaaacacaaaa

SEQ ID NO: 120757 - DNA, 13 bp, Artificial Sequence
  Oligonucleotide for detection of SNP TSC0030139
gatttagtttggg

SEQ ID NO: 120758 - DNA, 13 bp, Artificial Sequence
  Oligonucleotide for detection of SNP TSC0030139
cccaaactaaatc

SEQ ID NO: 120759 - DNA, 13 bp, Artificial Sequence
  Oligonucleotide for detection of SNP TSC0030139
gatttattttggg

SEQ ID NO: 120760 - DNA, 13 bp, Artificial Sequence
  Oligonucleotide for detection of SNP TSC0030139
cccaaaataaatc

SEQ ID NO: 120761 - DNA, 13 bp, Artificial Sequence
  Oligonucleotide for detection of SNP TSC0030139
tttaggttaagty

SEQ ID NO: 120762 - DNA, 13 bp, Artificial Sequence
  Oligonucleotide for detection of SNP TSC0030139
racttaacctaaa

SEQ ID NO: 120763 - DNA, 13 bp, Artificial Sequence
  Oligonucleotide for detection of SNP TSC0030139
tttaggataagty

SEQ ID NO: 120764 - DNA, 13 bp, Artificial Sequence
  Oligonucleotide for detection of SNP TSC0030139
racttatcctaaa

SEQ ID NO: 120765 - DNA, 13 bp, Artificial Sequence
  Oligonucleotide for detection of SNP TSC0030141
ttgtgaattttaa

SEQ ID NO: 120766 - DNA, 13 bp, Artificial Sequence
  Oligonucleotide for detection of SNP TSC0030141
ttaaaattcacaa

SEQ ID NO: 120767 - DNA, 13 bp, Artificial Sequence
  Oligonucleotide for detection of SNP TSC0030141
ttgtgatttttaa

SEQ ID NO: 120768 - DNA, 13 bp, Artificial Sequence
  Oligonucleotide for detection of SNP TSC0030141
ttaaaaatcacaa

SEQ ID NO: 120769 - DNA, 13 bp, Artificial Sequence
  Oligonucleotide for detection of SNP TSC0030141
ttgcgaattttaa

SEQ ID NO: 120770 - DNA, 13 bp, Artificial Sequence
  Oligonucleotide for detection of SNP TSC0030141
ttaaaattcgcaa

SEQ ID NO: 120771 - DNA, 13 bp, Artificial Sequence
  Oligonucleotide for detection of SNP TSC0030141
ttgcgatttttaa

SEQ ID NO: 120772 - DNA, 13 bp, Artificial Sequence
  Oligonucleotide for detection of SNP TSC0030141
ttaaaaatcgcaa

SEQ ID NO: 120773 - DNA, 13 bp, Artificial Sequence
  Oligonucleotide for detection of SNP TSC0030141
ttaaaatttgtaa

SEQ ID NO: 120774 - DNA, 13 bp, Artificial Sequence
  Oligonucleotide for detection of SNP TSC0030141
ttacaaattttaa

SEQ ID NO: 120775 - DNA, 13 bp, Artificial Sequence
  Oligonucleotide for detection of SNP TSC0030141
ttaaaagttgtaa

SEQ ID NO: 120776 - DNA, 13 bp, Artificial Sequence
  Oligonucleotide for detection of SNP TSC0030141
ttacaacttttaa

SEQ ID NO: 120777 - DNA, 13 bp, Artificial Sequence
  Oligonucleotide for detection of SNP TSC0030141
ttaaaattcgtaa

SEQ ID NO: 120778 - DNA, 13 bp, Artificial Sequence
  Oligonucleotide for detection of SNP TSC0030141
ttacgaattttaa

SEQ ID NO: 120779 - DNA, 13 bp, Artificial Sequence
  Oligonucleotide for detection of SNP TSC0030141
ttaaaagtcgtaa

SEQ ID NO: 120780 - DNA, 13 bp, Artificial Sequence
  Oligonucleotide for detection of SNP TSC0030141
ttacgacttttaa

SEQ ID NO: 120781 - DNA, 13 bp, Artificial Sequence
  Oligonucleotide for detection of SNP TSC0030142
gtttggtgttttt

SEQ ID NO: 120782 - DNA, 13 bp, Artificial Sequence
  Oligonucleotide for detection of SNP TSC0030142
aaaaacaccaaac

SEQ ID NO: 120783 - DNA, 13 bp, Artificial Sequence
  Oligonucleotide for detection of SNP TSC0030142
gtttggcgttttt

SEQ ID NO: 120784 - DNA, 13 bp, Artificial Sequence
  Oligonucleotide for detection of SNP TSC0030142
aaaaacgccaaac

SEQ ID NO: 120785 - DNA, 13 bp, Artificial Sequence
  Oligonucleotide for detection of SNP TSC0030142
agaggtgttaggy

SEQ ID NO: 120786 - DNA, 13 bp, Artificial Sequence
  Oligonucleotide for detection of SNP TSC0030142
rcctaacacctct

SEQ ID NO: 120787 - DNA, 13 bp, Artificial Sequence
  Oligonucleotide for detection of SNP TSC0030142
agaggtattaggy

SEQ ID NO: 120788 - DNA, 13 bp, Artificial Sequence
  Oligonucleotide for detection of SNP TSC0030142
rcctaatacctct

SEQ ID NO: 120789 - DNA, 13 bp, Artificial Sequence
  Oligonucleotide for detection of SNP TSC0030142
agaggcgttaggy

SEQ ID NO: 120790 - DNA, 13 bp, Artificial Sequence
  Oligonucleotide for detection of SNP TSC0030142
rcctaacgcctct

SEQ ID NO: 120791 - DNA, 13 bp, Artificial Sequence
  Oligonucleotide for detection of SNP TSC0030144
tgggttagtagtt

SEQ ID NO: 120792 - DNA, 13 bp, Artificial Sequence
  Oligonucleotide for detection of SNP TSC0030144
aactactaaccca

SEQ ID NO: 120793 - DNA, 13 bp, Artificial Sequence
  Oligonucleotide for detection of SNP TSC0030144
tgggtttgtagtt

SEQ ID NO: 120794 - DNA, 13 bp, Artificial Sequence
  Oligonucleotide for detection of SNP TSC0030144
aactacaaaccca

SEQ ID NO: 120795 - DNA, 13 bp, Artificial Sequence
  Oligonucleotide for detection of SNP TSC0030144
agttgttgattta

SEQ ID NO: 120796 - DNA, 13 bp, Artificial Sequence
  Oligonucleotide for detection of SNP TSC0030144
taaatcaacaact

SEQ ID NO: 120797 - DNA, 13 bp, Artificial Sequence
  Oligonucleotide for detection of SNP TSC0030144
agttgtagattta

SEQ ID NO: 120798 - DNA, 13 bp, Artificial Sequence
  Oligonucleotide for detection of SNP TSC0030144
taaatctacaact

SEQ ID NO: 120799 - DNA, 13 bp, Artificial Sequence
  Oligonucleotide for detection of SNP TSC0030145
agtattgttgtta

SEQ ID NO: 120800 - DNA, 13 bp, Artificial Sequence
  Oligonucleotide for detection of SNP TSC0030145
taacaacaatact

SEQ ID NO: 120801 - DNA, 13 bp, Artificial Sequence
  Oligonucleotide for detection of SNP TSC0030145
agtattattgtta

SEQ ID NO: 120802 - DNA, 13 bp, Artificial Sequence
  Oligonucleotide for detection of SNP TSC0030145
taacaataatact

SEQ ID NO: 120803 - DNA, 13 bp, Artificial Sequence
  Oligonucleotide for detection of SNP TSC0030146
tttgttgtagttt

SEQ ID NO: 120804 - DNA, 13 bp, Artificial Sequence
  Oligonucleotide for detection of SNP TSC0030146
aaactacaacaaa

SEQ ID NO: 120805 - DNA, 13 bp, Artificial Sequence
  Oligonucleotide for detection of SNP TSC0030146
tttgtcgtagttt

SEQ ID NO: 120806 - DNA, 13 bp, Artificial Sequence
  Oligonucleotide for detection of SNP TSC0030146
aaactacgacaaa

SEQ ID NO: 120807 - DNA, 13 bp, Artificial Sequence
  Oligonucleotide for detection of SNP TSC0030146
agattgtggtagg

SEQ ID NO: 120808 - DNA, 13 bp, Artificial Sequence
  Oligonucleotide for detection of SNP TSC0030146
cctaccacaatct

SEQ ID NO: 120809 - DNA, 13 bp, Artificial Sequence
  Oligonucleotide for detection of SNP TSC0030146
agattgaggtagg

SEQ ID NO: 120810 - DNA, 13 bp, Artificial Sequence
  Oligonucleotide for detection of SNP TSC0030146
cctacctcaatct

SEQ ID NO: 120811 - DNA, 13 bp, Artificial Sequence
  Oligonucleotide for detection of SNP TSC0030146
agattgcggtagg

SEQ ID NO: 120812 - DNA, 13 bp, Artificial Sequence
  Oligonucleotide for detection of SNP TSC0030146
cctaccgcaatct

SEQ ID NO: 120813 - DNA, 13 bp, Artificial Sequence
  Oligonucleotide for detection of SNP TSC0030147
tagtttatagtty

SEQ ID NO: 120814 - DNA, 13 bp, Artificial Sequence
  Oligonucleotide for detection of SNP TSC0030147
raactataaacta

SEQ ID NO: 120815 - DNA, 13 bp, Artificial Sequence
  Oligonucleotide for detection of SNP TSC0030147
tagtttgtagtty

SEQ ID NO: 120816 - DNA, 13 bp, Artificial Sequence
  Oligonucleotide for detection of SNP TSC0030147
raactacaaacta

SEQ ID NO: 120817 - DNA, 13 bp, Artificial Sequence
  Oligonucleotide for detection of SNP TSC0030148
taaggaatatttg

SEQ ID NO: 120818 - DNA, 13 bp, Artificial Sequence
  Oligonucleotide for detection of SNP TSC0030148
caaatattcctta

SEQ ID NO: 120819 - DNA, 13 bp, Artificial Sequence
  Oligonucleotide for detection of SNP TSC0030148
taaggagtatttg

SEQ ID NO: 120820 - DNA, 13 bp, Artificial Sequence
  Oligonucleotide for detection of SNP TSC0030148
caaatactcctta

SEQ ID NO: 120821 - DNA, 13 bp, Artificial Sequence
  Oligonucleotide for detection of SNP TSC0030149
atttttattttgt

SEQ ID NO: 120822 - DNA, 13 bp, Artificial Sequence
  Oligonucleotide for detection of SNP TSC0030149
acaaaataaaaat

SEQ ID NO: 120823 - DNA, 13 bp, Artificial Sequence
  Oligonucleotide for detection of SNP TSC0030149
attttcgttttgt

SEQ ID NO: 120824 - DNA, 13 bp, Artificial Sequence
  Oligonucleotide for detection of SNP TSC0030149
acaaaacgaaaat

SEQ ID NO: 120825 - DNA, 13 bp, Artificial Sequence
  Oligonucleotide for detection of SNP TSC0030149
ataagatggagat

SEQ ID NO: 120826 - DNA, 13 bp, Artificial Sequence
  Oligonucleotide for detection of SNP TSC0030149
atctccatcttat

SEQ ID NO: 120827 - DNA, 13 bp, Artificial Sequence
  Oligonucleotide for detection of SNP TSC0030149
ataagacggagat

SEQ ID NO: 120828 - DNA, 13 bp, Artificial Sequence
  Oligonucleotide for detection of SNP TSC0030149
atctccgtcttat

SEQ ID NO: 120829 - DNA, 13 bp, Artificial Sequence
  Oligonucleotide for detection of SNP TSC0030150
attattaattttt

SEQ ID NO: 120830 - DNA, 13 bp, Artificial Sequence
  Oligonucleotide for detection of SNP TSC0030150
aaaaattaataat

SEQ ID NO: 120831 - DNA, 13 bp, Artificial Sequence
  Oligonucleotide for detection of SNP TSC0030150
attattgattttt

SEQ ID NO: 120832 - DNA, 13 bp, Artificial Sequence
  Oligonucleotide for detection of SNP TSC0030150
aaaaatcaataat

SEQ ID NO: 120833 - DNA, 13 bp, Artificial Sequence
  Oligonucleotide for detection of SNP TSC0030151
ttttttaatatag

SEQ ID NO: 120834 - DNA, 13 bp, Artificial Sequence
  Oligonucleotide for detection of SNP TSC0030151
ctatattaaaaaa

SEQ ID NO: 120835 - DNA, 13 bp, Artificial Sequence
  Oligonucleotide for detection of SNP TSC0030152
ttattagttatay

SEQ ID NO: 120836 - DNA, 13 bp, Artificial Sequence
  Oligonucleotide for detection of SNP TSC0030152
rtataactaataa

SEQ ID NO: 120837 - DNA, 13 bp, Artificial Sequence
  Oligonucleotide for detection of SNP TSC0030152
ttattaattatay

SEQ ID NO: 120838 - DNA, 13 bp, Artificial Sequence
  Oligonucleotide for detection of SNP TSC0030152
rtataattaataa

SEQ ID NO: 120839 - DNA, 13 bp, Artificial Sequence
  Oligonucleotide for detection of SNP TSC0030156
ttgtttaatttat

SEQ ID NO: 120840 - DNA, 13 bp, Artificial Sequence
  Oligonucleotide for detection of SNP TSC0030156
ataaattaaacaa

SEQ ID NO: 120841 - DNA, 13 bp, Artificial Sequence
  Oligonucleotide for detection of SNP TSC0030156
ttgtttgatttat

SEQ ID NO: 120842 - DNA, 13 bp, Artificial Sequence
  Oligonucleotide for detection of SNP TSC0030156
ataaatcaaacaa

SEQ ID NO: 120843 - DNA, 13 bp, Artificial Sequence
  Oligonucleotide for detection of SNP TSC0030156
ttgttcgatttat

SEQ ID NO: 120844 - DNA, 13 bp, Artificial Sequence
  Oligonucleotide for detection of SNP TSC0030156
ataaatcgaacaa

SEQ ID NO: 120845 - DNA, 13 bp, Artificial Sequence
  Oligonucleotide for detection of SNP TSC0030156
atgaattgggtag

SEQ ID NO: 120846 - DNA, 13 bp, Artificial Sequence
  Oligonucleotide for detection of SNP TSC0030156
ctacccaattcat

SEQ ID NO: 120847 - DNA, 13 bp, Artificial Sequence
  Oligonucleotide for detection of SNP TSC0030156
atgaatcgggtag

SEQ ID NO: 120848 - DNA, 13 bp, Artificial Sequence
  Oligonucleotide for detection of SNP TSC0030156
ctacccgattcat

SEQ ID NO: 120849 - DNA, 13 bp, Artificial Sequence
  Oligonucleotide for detection of SNP TSC0030157
tggttaatataty

SEQ ID NO: 120850 - DNA, 13 bp, Artificial Sequence
  Oligonucleotide for detection of SNP TSC0030157
ratatattaacca

SEQ ID NO: 120851 - DNA, 13 bp, Artificial Sequence
  Oligonucleotide for detection of SNP TSC0030157
tggttagtataty

SEQ ID NO: 120852 - DNA, 13 bp, Artificial Sequence
  Oligonucleotide for detection of SNP TSC0030157
ratatactaacca

SEQ ID NO: 120853 - DNA, 13 bp, Artificial Sequence
  Oligonucleotide for detection of SNP TSC0030158
aatattatgagta

SEQ ID NO: 120854 - DNA, 13 bp, Artificial Sequence
  Oligonucleotide for detection of SNP TSC0030158
tactcataatatt

SEQ ID NO: 120855 - DNA, 13 bp, Artificial Sequence
  Oligonucleotide for detection of SNP TSC0030159
taatgattatggg

SEQ ID NO: 120856 - DNA, 13 bp, Artificial Sequence
  Oligonucleotide for detection of SNP TSC0030159
cccataatcatta

SEQ ID NO: 120857 - DNA, 13 bp, Artificial Sequence
  Oligonucleotide for detection of SNP TSC0030159
taatgaatatggg

SEQ ID NO: 120858 - DNA, 13 bp, Artificial Sequence
  Oligonucleotide for detection of SNP TSC0030159
cccatattcatta

SEQ ID NO: 120859 - DNA, 13 bp, Artificial Sequence
  Oligonucleotide for detection of SNP TSC0030160
atatgtgaaatgt

SEQ ID NO: 120860 - DNA, 13 bp, Artificial Sequence
  Oligonucleotide for detection of SNP TSC0030160
acatttcacatat

SEQ ID NO: 120861 - DNA, 13 bp, Artificial Sequence
  Oligonucleotide for detection of SNP TSC0030160
atatgttaaatgt

SEQ ID NO: 120862 - DNA, 13 bp, Artificial Sequence
  Oligonucleotide for detection of SNP TSC0030160
acatttaacatat

SEQ ID NO: 120863 - DNA, 13 bp, Artificial Sequence
  Oligonucleotide for detection of SNP TSC0030160
atattttatatat

SEQ ID NO: 120864 - DNA, 13 bp, Artificial Sequence
  Oligonucleotide for detection of SNP TSC0030160
atatataaaatat

SEQ ID NO: 120865 - DNA, 13 bp, Artificial Sequence
  Oligonucleotide for detection of SNP TSC0030160
atatttaatatat

SEQ ID NO: 120866 - DNA, 13 bp, Artificial Sequence
  Oligonucleotide for detection of SNP TSC0030160
atatattaaatat

SEQ ID NO: 120867 - DNA, 13 bp, Artificial Sequence
  Oligonucleotide for detection of SNP TSC0030162
tgatataagtgtg

SEQ ID NO: 120868 - DNA, 13 bp, Artificial Sequence
  Oligonucleotide for detection of SNP TSC0030162
cacacttatatca

SEQ ID NO: 120869 - DNA, 13 bp, Artificial Sequence
  Oligonucleotide for detection of SNP TSC0030162
tgatatgagtgtg

SEQ ID NO: 120870 - DNA, 13 bp, Artificial Sequence
  Oligonucleotide for detection of SNP TSC0030162
cacactcatatca

SEQ ID NO: 120871 - DNA, 13 bp, Artificial Sequence
  Oligonucleotide for detection of SNP TSC0030162
tgatataagtgcg

SEQ ID NO: 120872 - DNA, 13 bp, Artificial Sequence
  Oligonucleotide for detection of SNP TSC0030162
cgcacttatatca

SEQ ID NO: 120873 - DNA, 13 bp, Artificial Sequence
  Oligonucleotide for detection of SNP TSC0030162
tgatatgagtgcg

SEQ ID NO: 120874 - DNA, 13 bp, Artificial Sequence
  Oligonucleotide for detection of SNP TSC0030162
cgcactcatatca

SEQ ID NO: 120875 - DNA, 13 bp, Artificial Sequence
  Oligonucleotide for detection of SNP TSC0030164
agttgggtgggag

SEQ ID NO: 120876 - DNA, 13 bp, Artificial Sequence
  Oligonucleotide for detection of SNP TSC0030164
ctcccacccaact

SEQ ID NO: 120877 - DNA, 13 bp, Artificial Sequence
  Oligonucleotide for detection of SNP TSC0030164
agttggttgggag

SEQ ID NO: 120878 - DNA, 13 bp, Artificial Sequence
  Oligonucleotide for detection of SNP TSC0030164
ctcccaaccaact

SEQ ID NO: 120879 - DNA, 13 bp, Artificial Sequence
  Oligonucleotide for detection of SNP TSC0030165
taaaatgtttaty

SEQ ID NO: 120880 - DNA, 13 bp, Artificial Sequence
  Oligonucleotide for detection of SNP TSC0030165
rataaacatttta

SEQ ID NO: 120881 - DNA, 13 bp, Artificial Sequence
  Oligonucleotide for detection of SNP TSC0030165
taaaatttttaty

SEQ ID NO: 120882 - DNA, 13 bp, Artificial Sequence
  Oligonucleotide for detection of SNP TSC0030165
rataaaaatttta

SEQ ID NO: 120883 - DNA, 13 bp, Artificial Sequence
  Oligonucleotide for detection of SNP TSC0030165
ggtaaatatttta

SEQ ID NO: 120884 - DNA, 13 bp, Artificial Sequence
  Oligonucleotide for detection of SNP TSC0030165
taaaatatttacc

SEQ ID NO: 120885 - DNA, 13 bp, Artificial Sequence
  Oligonucleotide for detection of SNP TSC0030165
ggtaaaaatttta

SEQ ID NO: 120886 - DNA, 13 bp, Artificial Sequence
  Oligonucleotide for detection of SNP TSC0030165
taaaatttttacc

SEQ ID NO: 120887 - DNA, 13 bp, Artificial Sequence
  Oligonucleotide for detection of SNP TSC0030166
tgggttgtgttga

SEQ ID NO: 120888 - DNA, 13 bp, Artificial Sequence
  Oligonucleotide for detection of SNP TSC0030166
tcaacacaaccca

SEQ ID NO: 120889 - DNA, 13 bp, Artificial Sequence
  Oligonucleotide for detection of SNP TSC0030166
tgggttatgttga

SEQ ID NO: 120890 - DNA, 13 bp, Artificial Sequence
  Oligonucleotide for detection of SNP TSC0030166
tcaacataaccca

SEQ ID NO: 120891 - DNA, 13 bp, Artificial Sequence
  Oligonucleotide for detection of SNP TSC0030166
tgggtcgtgttga

SEQ ID NO: 120892 - DNA, 13 bp, Artificial Sequence
  Oligonucleotide for detection of SNP TSC0030166
tcaacacgaccca

SEQ ID NO: 120893 - DNA, 13 bp, Artificial Sequence
  Oligonucleotide for detection of SNP TSC0030167
taaggaggtttgy

SEQ ID NO: 120894 - DNA, 13 bp, Artificial Sequence
  Oligonucleotide for detection of SNP TSC0030167
rcaaacctcctta

SEQ ID NO: 120895 - DNA, 13 bp, Artificial Sequence
  Oligonucleotide for detection of SNP TSC0030167
taaggaagtttgy

SEQ ID NO: 120896 - DNA, 13 bp, Artificial Sequence
  Oligonucleotide for detection of SNP TSC0030167
rcaaacttcctta

SEQ ID NO: 120897 - DNA, 13 bp, Artificial Sequence
  Oligonucleotide for detection of SNP TSC0030168
gttgtttggggty

SEQ ID NO: 120898 - DNA, 13 bp, Artificial Sequence
  Oligonucleotide for detection of SNP TSC0030168
raccccaaacaac

SEQ ID NO: 120899 - DNA, 13 bp, Artificial Sequence
  Oligonucleotide for detection of SNP TSC0030168
gttgttcggggty

SEQ ID NO: 120900 - DNA, 13 bp, Artificial Sequence
  Oligonucleotide for detection of SNP TSC0030168
raccccgaacaac

SEQ ID NO: 120901 - DNA, 13 bp, Artificial Sequence
  Oligonucleotide for detection of SNP TSC0030168
gattttgagtagy

SEQ ID NO: 120902 - DNA, 13 bp, Artificial Sequence
  Oligonucleotide for detection of SNP TSC0030168
rctactcaaaatc

SEQ ID NO: 120903 - DNA, 13 bp, Artificial Sequence
  Oligonucleotide for detection of SNP TSC0030168
gattttaagtagy

SEQ ID NO: 120904 - DNA, 13 bp, Artificial Sequence
  Oligonucleotide for detection of SNP TSC0030168
rctacttaaaatc

SEQ ID NO: 120905 - DNA, 13 bp, Artificial Sequence
  Oligonucleotide for detection of SNP TSC0030168
gatttcgagtagy

SEQ ID NO: 120906 - DNA, 13 bp, Artificial Sequence
  Oligonucleotide for detection of SNP TSC0030168
rctactcgaaatc

SEQ ID NO: 120907 - DNA, 13 bp, Artificial Sequence
  Oligonucleotide for detection of SNP TSC0030169
gagaaggagaagy

SEQ ID NO: 120908 - DNA, 13 bp, Artificial Sequence
  Oligonucleotide for detection of SNP TSC0030169
rcttctccttctc

SEQ ID NO: 120909 - DNA, 13 bp, Artificial Sequence
  Oligonucleotide for detection of SNP TSC0030169
gagaagtagaagy

SEQ ID NO: 120910 - DNA, 13 bp, Artificial Sequence
  Oligonucleotide for detection of SNP TSC0030169
rcttctacttctc

SEQ ID NO: 120911 - DNA, 13 bp, Artificial Sequence
  Oligonucleotide for detection of SNP TSC0030170
tgtgatatattag

SEQ ID NO: 120912 - DNA, 13 bp, Artificial Sequence
  Oligonucleotide for detection of SNP TSC0030170
ctaatatatcaca

SEQ ID NO: 120913 - DNA, 13 bp, Artificial Sequence
  Oligonucleotide for detection of SNP TSC0030170
tgtgatgtattag

SEQ ID NO: 120914 - DNA, 13 bp, Artificial Sequence
  Oligonucleotide for detection of SNP TSC0030170
ctaatacatcaca

SEQ ID NO: 120915 - DNA, 13 bp, Artificial Sequence
  Oligonucleotide for detection of SNP TSC0030170
tgcgatatattag

SEQ ID NO: 120916 - DNA, 13 bp, Artificial Sequence
  Oligonucleotide for detection of SNP TSC0030170
ctaatatatcgca

SEQ ID NO: 120917 - DNA, 13 bp, Artificial Sequence
  Oligonucleotide for detection of SNP TSC0030170
tgcgatgtattag

SEQ ID NO: 120918 - DNA, 13 bp, Artificial Sequence
  Oligonucleotide for detection of SNP TSC0030170
ctaatacatcgca

SEQ ID NO: 120919 - DNA, 13 bp, Artificial Sequence
  Oligonucleotide for detection of SNP TSC0030170
tgtgacgtattag

SEQ ID NO: 120920 - DNA, 13 bp, Artificial Sequence
  Oligonucleotide for detection of SNP TSC0030170
ctaatacgtcaca

SEQ ID NO: 120921 - DNA, 13 bp, Artificial Sequence
  Oligonucleotide for detection of SNP TSC0030170
tgcgacgtattag

SEQ ID NO: 120922 - DNA, 13 bp, Artificial Sequence
  Oligonucleotide for detection of SNP TSC0030170
ctaatacgtcgca

SEQ ID NO: 120923 - DNA, 13 bp, Artificial Sequence
  Oligonucleotide for detection of SNP TSC0030170
ttaatatgttgta

SEQ ID NO: 120924 - DNA, 13 bp, Artificial Sequence
  Oligonucleotide for detection of SNP TSC0030170
tacaacatattaa

SEQ ID NO: 120925 - DNA, 13 bp, Artificial Sequence
  Oligonucleotide for detection of SNP TSC0030170
ttaatatgtcgta

SEQ ID NO: 120926 - DNA, 13 bp, Artificial Sequence
  Oligonucleotide for detection of SNP TSC0030170
tacgacatattaa

SEQ ID NO: 120927 - DNA, 13 bp, Artificial Sequence
  Oligonucleotide for detection of SNP TSC0030170
ttaatacgttgta

SEQ ID NO: 120928 - DNA, 13 bp, Artificial Sequence
  Oligonucleotide for detection of SNP TSC0030170
tacaacgtattaa

SEQ ID NO: 120929 - DNA, 13 bp, Artificial Sequence
  Oligonucleotide for detection of SNP TSC0030170
ttaatacgtcgta

SEQ ID NO: 120930 - DNA, 13 bp, Artificial Sequence
  Oligonucleotide for detection of SNP TSC0030170
tacgacgtattaa

SEQ ID NO: 120931 - DNA, 13 bp, Artificial Sequence
  Oligonucleotide for detection of SNP TSC0030171
attttgggttaat

SEQ ID NO: 120932 - DNA, 13 bp, Artificial Sequence
  Oligonucleotide for detection of SNP TSC0030171
attaacccaaaat

SEQ ID NO: 120933 - DNA, 13 bp, Artificial Sequence
  Oligonucleotide for detection of SNP TSC0030171
attttgagttaat

SEQ ID NO: 120934 - DNA, 13 bp, Artificial Sequence
  Oligonucleotide for detection of SNP TSC0030171
attaactcaaaat

SEQ ID NO: 120935 - DNA, 13 bp, Artificial Sequence
  Oligonucleotide for detection of SNP TSC0030172
tatagagggaggg

SEQ ID NO: 120936 - DNA, 13 bp, Artificial Sequence
  Oligonucleotide for detection of SNP TSC0030172
ccctccctctata

SEQ ID NO: 120937 - DNA, 13 bp, Artificial Sequence
  Oligonucleotide for detection of SNP TSC0030172
tatagaaggaggg

SEQ ID NO: 120938 - DNA, 13 bp, Artificial Sequence
  Oligonucleotide for detection of SNP TSC0030172
ccctccttctata

SEQ ID NO: 120939 - DNA, 13 bp, Artificial Sequence
  Oligonucleotide for detection of SNP TSC0030174
aatatagtataaa

SEQ ID NO: 120940 - DNA, 13 bp, Artificial Sequence
  Oligonucleotide for detection of SNP TSC0030174
tttatactatatt

SEQ ID NO: 120941 - DNA, 13 bp, Artificial Sequence
  Oligonucleotide for detection of SNP TSC0030174
aatataatataaa

SEQ ID NO: 120942 - DNA, 13 bp, Artificial Sequence
  Oligonucleotide for detection of SNP TSC0030174
tttatattatatt

SEQ ID NO: 120943 - DNA, 13 bp, Artificial Sequence
  Oligonucleotide for detection of SNP TSC0030178
tatagaaatttaa

SEQ ID NO: 120944 - DNA, 13 bp, Artificial Sequence
  Oligonucleotide for detection of SNP TSC0030178
ttaaatttctata

SEQ ID NO: 120945 - DNA, 13 bp, Artificial Sequence
  Oligonucleotide for detection of SNP TSC0030178
tatagatatttaa

SEQ ID NO: 120946 - DNA, 13 bp, Artificial Sequence
  Oligonucleotide for detection of SNP TSC0030178
ttaaatatctata

SEQ ID NO: 120947 - DNA, 13 bp, Artificial Sequence
  Oligonucleotide for detection of SNP TSC0030178
ttaggtttttatg

SEQ ID NO: 120948 - DNA, 13 bp, Artificial Sequence
  Oligonucleotide for detection of SNP TSC0030178
cataaaaacctaa

SEQ ID NO: 120949 - DNA, 13 bp, Artificial Sequence
  Oligonucleotide for detection of SNP TSC0030178
ttaggtatttatg

SEQ ID NO: 120950 - DNA, 13 bp, Artificial Sequence
  Oligonucleotide for detection of SNP TSC0030178
cataaatacctaa

SEQ ID NO: 120951 - DNA, 13 bp, Artificial Sequence
  Oligonucleotide for detection of SNP TSC0030179
tattgtaattgty

SEQ ID NO: 120952 - DNA, 13 bp, Artificial Sequence
  Oligonucleotide for detection of SNP TSC0030179
racaattacaata

SEQ ID NO: 120953 - DNA, 13 bp, Artificial Sequence
  Oligonucleotide for detection of SNP TSC0030179
tattgtgattgty

SEQ ID NO: 120954 - DNA, 13 bp, Artificial Sequence
  Oligonucleotide for detection of SNP TSC0030179
racaatcacaata

SEQ ID NO: 120955 - DNA, 13 bp, Artificial Sequence
  Oligonucleotide for detection of SNP TSC0030179
tattgcgattgty

SEQ ID NO: 120956 - DNA, 13 bp, Artificial Sequence
  Oligonucleotide for detection of SNP TSC0030179
racaatcgcaata

SEQ ID NO: 120957 - DNA, 13 bp, Artificial Sequence
  Oligonucleotide for detection of SNP TSC0030179
gatagttgtagta

SEQ ID NO: 120958 - DNA, 13 bp, Artificial Sequence
  Oligonucleotide for detection of SNP TSC0030179
tactacaactatc

SEQ ID NO: 120959 - DNA, 13 bp, Artificial Sequence
  Oligonucleotide for detection of SNP TSC0030179
gatagtcgtagta

SEQ ID NO: 120960 - DNA, 13 bp, Artificial Sequence
  Oligonucleotide for detection of SNP TSC0030179
tactacgactatc

SEQ ID NO: 120961 - DNA, 13 bp, Artificial Sequence
  Oligonucleotide for detection of SNP TSC0030181
tggagaggtgggg

SEQ ID NO: 120962 - DNA, 13 bp, Artificial Sequence
  Oligonucleotide for detection of SNP TSC0030181
ccccacctctcca

SEQ ID NO: 120963 - DNA, 13 bp, Artificial Sequence
  Oligonucleotide for detection of SNP TSC0030181
tggagatgtgggg

SEQ ID NO: 120964 - DNA, 13 bp, Artificial Sequence
  Oligonucleotide for detection of SNP TSC0030181
ccccacatctcca

SEQ ID NO: 120965 - DNA, 13 bp, Artificial Sequence
  Oligonucleotide for detection of SNP TSC0030181
tggagacgtgggg

SEQ ID NO: 120966 - DNA, 13 bp, Artificial Sequence
  Oligonucleotide for detection of SNP TSC0030181
ccccacgtctcca

SEQ ID NO: 120967 - DNA, 13 bp, Artificial Sequence
  Oligonucleotide for detection of SNP TSC0030182
aagaaagaaaatt

SEQ ID NO: 120968 - DNA, 13 bp, Artificial Sequence
  Oligonucleotide for detection of SNP TSC0030182
aattttctttctt

SEQ ID NO: 120969 - DNA, 13 bp, Artificial Sequence
  Oligonucleotide for detection of SNP TSC0030182
aagaaaaaaaatt

SEQ ID NO: 120970 - DNA, 13 bp, Artificial Sequence
  Oligonucleotide for detection of SNP TSC0030182
aattttttttctt

SEQ ID NO: 120971 - DNA, 13 bp, Artificial Sequence
  Oligonucleotide for detection of SNP TSC0030183
ttggaagaaagaa

SEQ ID NO: 120972 - DNA, 13 bp, Artificial Sequence
  Oligonucleotide for detection of SNP TSC0030183
ttctttcttccaa

SEQ ID NO: 120973 - DNA, 13 bp, Artificial Sequence
  Oligonucleotide for detection of SNP TSC0030183
ttggaaaaaagaa

SEQ ID NO: 120974 - DNA, 13 bp, Artificial Sequence
  Oligonucleotide for detection of SNP TSC0030183
ttcttttttccaa

SEQ ID NO: 120975 - DNA, 13 bp, Artificial Sequence
  Oligonucleotide for detection of SNP TSC0030187
gggttgtgggaag

SEQ ID NO: 120976 - DNA, 13 bp, Artificial Sequence
  Oligonucleotide for detection of SNP TSC0030187
cttcccacaaccc

SEQ ID NO: 120977 - DNA, 13 bp, Artificial Sequence
  Oligonucleotide for detection of SNP TSC0030187
gggttgcgggaag

SEQ ID NO: 120978 - DNA, 13 bp, Artificial Sequence
  Oligonucleotide for detection of SNP TSC0030187
cttcccgcaaccc

SEQ ID NO: 120979 - DNA, 13 bp, Artificial Sequence
  Oligonucleotide for detection of SNP TSC0030193
ggttatatgtggg

SEQ ID NO: 120980 - DNA, 13 bp, Artificial Sequence
  Oligonucleotide for detection of SNP TSC0030193
cccacatataacc

SEQ ID NO: 120981 - DNA, 13 bp, Artificial Sequence
  Oligonucleotide for detection of SNP TSC0030193
ggttatgtgtggg

SEQ ID NO: 120982 - DNA, 13 bp, Artificial Sequence
  Oligonucleotide for detection of SNP TSC0030193
cccacacataacc

SEQ ID NO: 120983 - DNA, 13 bp, Artificial Sequence
  Oligonucleotide for detection of SNP TSC0030193
ggttacgtgtggg

SEQ ID NO: 120984 - DNA, 13 bp, Artificial Sequence
  Oligonucleotide for detection of SNP TSC0030193
cccacacgtaacc

SEQ ID NO: 120985 - DNA, 13 bp, Artificial Sequence
  Oligonucleotide for detection of SNP TSC0030193
tttatacgtagty

SEQ ID NO: 120986 - DNA, 13 bp, Artificial Sequence
  Oligonucleotide for detection of SNP TSC0030193
ractacgtataaa

SEQ ID NO: 120987 - DNA, 13 bp, Artificial Sequence
  Oligonucleotide for detection of SNP TSC0030196
agtatagaattgg

SEQ ID NO: 120988 - DNA, 13 bp, Artificial Sequence
  Oligonucleotide for detection of SNP TSC0030196
ccaattctatact

SEQ ID NO: 120989 - DNA, 13 bp, Artificial Sequence
  Oligonucleotide for detection of SNP TSC0030196
agtataaaattgg

SEQ ID NO: 120990 - DNA, 13 bp, Artificial Sequence
  Oligonucleotide for detection of SNP TSC0030196
ccaattttatact

SEQ ID NO: 120991 - DNA, 13 bp, Artificial Sequence
  Oligonucleotide for detection of SNP TSC0030198
ggtgaggaaagta

SEQ ID NO: 120992 - DNA, 13 bp, Artificial Sequence
  Oligonucleotide for detection of SNP TSC0030198
tactttcctcacc

SEQ ID NO: 120993 - DNA, 13 bp, Artificial Sequence
  Oligonucleotide for detection of SNP TSC0030198
ggtgagaaaagta

SEQ ID NO: 120994 - DNA, 13 bp, Artificial Sequence
  Oligonucleotide for detection of SNP TSC0030198
tacttttctcacc

SEQ ID NO: 120995 - DNA, 13 bp, Artificial Sequence
  Oligonucleotide for detection of SNP TSC0030198
ggcgaggaaagta

SEQ ID NO: 120996 - DNA, 13 bp, Artificial Sequence
  Oligonucleotide for detection of SNP TSC0030198
tactttcctcgcc

SEQ ID NO: 120997 - DNA, 13 bp, Artificial Sequence
  Oligonucleotide for detection of SNP TSC0030198
ggcgagaaaagta

SEQ ID NO: 120998 - DNA, 13 bp, Artificial Sequence
  Oligonucleotide for detection of SNP TSC0030198
tacttttctcgcc

SEQ ID NO: 120999 - DNA, 13 bp, Artificial Sequence
  Oligonucleotide for detection of SNP TSC0030199
aaatagtgatata

SEQ ID NO: 121000 - DNA, 13 bp, Artificial Sequence
  Oligonucleotide for detection of SNP TSC0030199
tatatcactattt

SEQ ID NO: 121001 - DNA, 13 bp, Artificial Sequence
  Oligonucleotide for detection of SNP TSC0030199
aaatagcgatata

SEQ ID NO: 121002 - DNA, 13 bp, Artificial Sequence
  Oligonucleotide for detection of SNP TSC0030199
tatatcgctattt

SEQ ID NO: 121003 - DNA, 13 bp, Artificial Sequence
  Oligonucleotide for detection of SNP TSC0030199
tgtgttgttattt

SEQ ID NO: 121004 - DNA, 13 bp, Artificial Sequence
  Oligonucleotide for detection of SNP TSC0030199
aaataacaacaca

SEQ ID NO: 121005 - DNA, 13 bp, Artificial Sequence
  Oligonucleotide for detection of SNP TSC0030199
tgtgtcgttattt

SEQ ID NO: 121006 - DNA, 13 bp, Artificial Sequence
  Oligonucleotide for detection of SNP TSC0030199
aaataacgacaca

SEQ ID NO: 121007 - DNA, 13 bp, Artificial Sequence
  Oligonucleotide for detection of SNP TSC0030200
tatttgtttttta

SEQ ID NO: 121008 - DNA, 13 bp, Artificial Sequence
  Oligonucleotide for detection of SNP TSC0030200
taaaaaacaaata

SEQ ID NO: 121009 - DNA, 13 bp, Artificial Sequence
  Oligonucleotide for detection of SNP TSC0030200
tatttggttttta

SEQ ID NO: 121010 - DNA, 13 bp, Artificial Sequence
  Oligonucleotide for detection of SNP TSC0030200
taaaaaccaaata

SEQ ID NO: 121011 - DNA, 13 bp, Artificial Sequence
  Oligonucleotide for detection of SNP TSC0030200
tgaaaggtaggtg

SEQ ID NO: 121012 - DNA, 13 bp, Artificial Sequence
  Oligonucleotide for detection of SNP TSC0030200
cacctacctttca

SEQ ID NO: 121013 - DNA, 13 bp, Artificial Sequence
  Oligonucleotide for detection of SNP TSC0030200
tgaaagttaggtg

SEQ ID NO: 121014 - DNA, 13 bp, Artificial Sequence
  Oligonucleotide for detection of SNP TSC0030200
cacctaactttca

SEQ ID NO: 121015 - DNA, 13 bp, Artificial Sequence
  Oligonucleotide for detection of SNP TSC0030202
ggattttgtggtg

SEQ ID NO: 121016 - DNA, 13 bp, Artificial Sequence
  Oligonucleotide for detection of SNP TSC0030202
caccacaaaatcc

SEQ ID NO: 121017 - DNA, 13 bp, Artificial Sequence
  Oligonucleotide for detection of SNP TSC0030202
ggatttcgtggtg

SEQ ID NO: 121018 - DNA, 13 bp, Artificial Sequence
  Oligonucleotide for detection of SNP TSC0030202
caccacgaaatcc

SEQ ID NO: 121019 - DNA, 13 bp, Artificial Sequence
  Oligonucleotide for detection of SNP TSC0030202
tattatgaggtty

SEQ ID NO: 121020 - DNA, 13 bp, Artificial Sequence
  Oligonucleotide for detection of SNP TSC0030202
raacctcataata

SEQ ID NO: 121021 - DNA, 13 bp, Artificial Sequence
  Oligonucleotide for detection of SNP TSC0030202
tattataaggtty

SEQ ID NO: 121022 - DNA, 13 bp, Artificial Sequence
  Oligonucleotide for detection of SNP TSC0030202
raaccttataata

SEQ ID NO: 121023 - DNA, 13 bp, Artificial Sequence
  Oligonucleotide for detection of SNP TSC0030202
tattacgaggtty

SEQ ID NO: 121024 - DNA, 13 bp, Artificial Sequence
  Oligonucleotide for detection of SNP TSC0030202
raacctcgtaata

SEQ ID NO: 121025 - DNA, 13 bp, Artificial Sequence
  Oligonucleotide for detection of SNP TSC0030203
aagtttgaaatay

SEQ ID NO: 121026 - DNA, 13 bp, Artificial Sequence
  Oligonucleotide for detection of SNP TSC0030203
rtatttcaaactt

SEQ ID NO: 121027 - DNA, 13 bp, Artificial Sequence
  Oligonucleotide for detection of SNP TSC0030203
aagtttaaaatay

SEQ ID NO: 121028 - DNA, 13 bp, Artificial Sequence
  Oligonucleotide for detection of SNP TSC0030203
rtattttaaactt

SEQ ID NO: 121029 - DNA, 13 bp, Artificial Sequence
  Oligonucleotide for detection of SNP TSC0030203
aagttcgaaatay

SEQ ID NO: 121030 - DNA, 13 bp, Artificial Sequence
  Oligonucleotide for detection of SNP TSC0030203
rtatttcgaactt

SEQ ID NO: 121031 - DNA, 13 bp, Artificial Sequence
  Oligonucleotide for detection of SNP TSC0030204
ttggtttggatgy

SEQ ID NO: 121032 - DNA, 13 bp, Artificial Sequence
  Oligonucleotide for detection of SNP TSC0030204
rcatccaaaccaa

SEQ ID NO: 121033 - DNA, 13 bp, Artificial Sequence
  Oligonucleotide for detection of SNP TSC0030204
ttggttcggatgy

SEQ ID NO: 121034 - DNA, 13 bp, Artificial Sequence
  Oligonucleotide for detection of SNP TSC0030204
rcatccgaaccaa

SEQ ID NO: 121035 - DNA, 13 bp, Artificial Sequence
  Oligonucleotide for detection of SNP TSC0030204
ttggtttggacgy

SEQ ID NO: 121036 - DNA, 13 bp, Artificial Sequence
  Oligonucleotide for detection of SNP TSC0030204
rcgtccaaaccaa

SEQ ID NO: 121037 - DNA, 13 bp, Artificial Sequence
  Oligonucleotide for detection of SNP TSC0030204
ttggttcggacgy

SEQ ID NO: 121038 - DNA, 13 bp, Artificial Sequence
  Oligonucleotide for detection of SNP TSC0030204
rcgtccgaaccaa

SEQ ID NO: 121039 - DNA, 13 bp, Artificial Sequence
  Oligonucleotide for detection of SNP TSC0030204
gtgtttgggttaa

SEQ ID NO: 121040 - DNA, 13 bp, Artificial Sequence
  Oligonucleotide for detection of SNP TSC0030204
ttaacccaaacac

SEQ ID NO: 121041 - DNA, 13 bp, Artificial Sequence
  Oligonucleotide for detection of SNP TSC0030204
gtgtttaggttaa

SEQ ID NO: 121042 - DNA, 13 bp, Artificial Sequence
  Oligonucleotide for detection of SNP TSC0030204
ttaacctaaacac

SEQ ID NO: 121043 - DNA, 13 bp, Artificial Sequence
  Oligonucleotide for detection of SNP TSC0030204
gcgtttgggttaa

SEQ ID NO: 121044 - DNA, 13 bp, Artificial Sequence
  Oligonucleotide for detection of SNP TSC0030204
ttaacccaaacgc

SEQ ID NO: 121045 - DNA, 13 bp, Artificial Sequence
  Oligonucleotide for detection of SNP TSC0030204
gcgtttaggttaa

SEQ ID NO: 121046 - DNA, 13 bp, Artificial Sequence
  Oligonucleotide for detection of SNP TSC0030204
ttaacctaaacgc

SEQ ID NO: 121047 - DNA, 13 bp, Artificial Sequence
  Oligonucleotide for detection of SNP TSC0030204
gtgttcgggttaa

SEQ ID NO: 121048 - DNA, 13 bp, Artificial Sequence
  Oligonucleotide for detection of SNP TSC0030204
ttaacccgaacac

SEQ ID NO: 121049 - DNA, 13 bp, Artificial Sequence
  Oligonucleotide for detection of SNP TSC0030204
gcgttcgggttaa

SEQ ID NO: 121050 - DNA, 13 bp, Artificial Sequence
  Oligonucleotide for detection of SNP TSC0030204
ttaacccgaacgc

SEQ ID NO: 121051 - DNA, 13 bp, Artificial Sequence
  Oligonucleotide for detection of SNP TSC0030205
taagtatgtgatt

SEQ ID NO: 121052 - DNA, 13 bp, Artificial Sequence
  Oligonucleotide for detection of SNP TSC0030205
aatcacatactta

SEQ ID NO: 121053 - DNA, 13 bp, Artificial Sequence
  Oligonucleotide for detection of SNP TSC0030205
taagtacgtgatt

SEQ ID NO: 121054 - DNA, 13 bp, Artificial Sequence
  Oligonucleotide for detection of SNP TSC0030205
aatcacgtactta

SEQ ID NO: 121055 - DNA, 13 bp, Artificial Sequence
  Oligonucleotide for detection of SNP TSC0030205
aattatgtgttta

SEQ ID NO: 121056 - DNA, 13 bp, Artificial Sequence
  Oligonucleotide for detection of SNP TSC0030205
taaacacataatt

SEQ ID NO: 121057 - DNA, 13 bp, Artificial Sequence
  Oligonucleotide for detection of SNP TSC0030205
aattatatgttta

SEQ ID NO: 121058 - DNA, 13 bp, Artificial Sequence
  Oligonucleotide for detection of SNP TSC0030205
taaacatataatt

SEQ ID NO: 121059 - DNA, 13 bp, Artificial Sequence
  Oligonucleotide for detection of SNP TSC0030205
aattacgtgttta

SEQ ID NO: 121060 - DNA, 13 bp, Artificial Sequence
  Oligonucleotide for detection of SNP TSC0030205
taaacacgtaatt

SEQ ID NO: 121061 - DNA, 13 bp, Artificial Sequence
  Oligonucleotide for detection of SNP TSC0030206
ggggggtgggggt

SEQ ID NO: 121062 - DNA, 13 bp, Artificial Sequence
  Oligonucleotide for detection of SNP TSC0030206
acccccacccccc

SEQ ID NO: 121063 - DNA, 13 bp, Artificial Sequence
  Oligonucleotide for detection of SNP TSC0030206
ggggggggggggt

SEQ ID NO: 121064 - DNA, 13 bp, Artificial Sequence
  Oligonucleotide for detection of SNP TSC0030206
acccccccccccc

SEQ ID NO: 121065 - DNA, 13 bp, Artificial Sequence
  Oligonucleotide for detection of SNP TSC0030207
gggggggtggggg

SEQ ID NO: 121066 - DNA, 13 bp, Artificial Sequence
  Oligonucleotide for detection of SNP TSC0030207
cccccaccccccc

SEQ ID NO: 121067 - DNA, 13 bp, Artificial Sequence
  Oligonucleotide for detection of SNP TSC0030207
ggggggatggggg

SEQ ID NO: 121068 - DNA, 13 bp, Artificial Sequence
  Oligonucleotide for detection of SNP TSC0030207
cccccatcccccc

SEQ ID NO: 121069 - DNA, 13 bp, Artificial Sequence
  Oligonucleotide for detection of SNP TSC0030210
aattttagtattt

SEQ ID NO: 121070 - DNA, 13 bp, Artificial Sequence
  Oligonucleotide for detection of SNP TSC0030210
aaatactaaaatt

SEQ ID NO: 121071 - DNA, 13 bp, Artificial Sequence
  Oligonucleotide for detection of SNP TSC0030210
aattttggtattt

SEQ ID NO: 121072 - DNA, 13 bp, Artificial Sequence
  Oligonucleotide for detection of SNP TSC0030210
aaataccaaaatt

SEQ ID NO: 121073 - DNA, 13 bp, Artificial Sequence
  Oligonucleotide for detection of SNP TSC0030211
aggattatttggg

SEQ ID NO: 121074 - DNA, 13 bp, Artificial Sequence
  Oligonucleotide for detection of SNP TSC0030211
cccaaataatcct

SEQ ID NO: 121075 - DNA, 13 bp, Artificial Sequence
  Oligonucleotide for detection of SNP TSC0030211
aggattgtttggg

SEQ ID NO: 121076 - DNA, 13 bp, Artificial Sequence
  Oligonucleotide for detection of SNP TSC0030211
cccaaacaatcct

SEQ ID NO: 121077 - DNA, 13 bp, Artificial Sequence
  Oligonucleotide for detection of SNP TSC0030211
aggatcgtttggg

SEQ ID NO: 121078 - DNA, 13 bp, Artificial Sequence
  Oligonucleotide for detection of SNP TSC0030211
cccaaacgatcct

SEQ ID NO: 121079 - DNA, 13 bp, Artificial Sequence
  Oligonucleotide for detection of SNP TSC0030212
gaaaaaagaaaga

SEQ ID NO: 121080 - DNA, 13 bp, Artificial Sequence
  Oligonucleotide for detection of SNP TSC0030212
tctttcttttttc

SEQ ID NO: 121081 - DNA, 13 bp, Artificial Sequence
  Oligonucleotide for detection of SNP TSC0030212
gaaaaatgaaaga

SEQ ID NO: 121082 - DNA, 13 bp, Artificial Sequence
  Oligonucleotide for detection of SNP TSC0030212
tctttcatttttc

SEQ ID NO: 121083 - DNA, 13 bp, Artificial Sequence
  Oligonucleotide for detection of SNP TSC0030223
gtttgaatttgga

SEQ ID NO: 121084 - DNA, 13 bp, Artificial Sequence
  Oligonucleotide for detection of SNP TSC0030223
tccaaattcaaac

SEQ ID NO: 121085 - DNA, 13 bp, Artificial Sequence
  Oligonucleotide for detection of SNP TSC0030223
gtttgagtttgga

SEQ ID NO: 121086 - DNA, 13 bp, Artificial Sequence
  Oligonucleotide for detection of SNP TSC0030223
tccaaactcaaac

SEQ ID NO: 121087 - DNA, 13 bp, Artificial Sequence
  Oligonucleotide for detection of SNP TSC0030223
gtttgaattcgga

SEQ ID NO: 121088 - DNA, 13 bp, Artificial Sequence
  Oligonucleotide for detection of SNP TSC0030223
tccgaattcaaac

SEQ ID NO: 121089 - DNA, 13 bp, Artificial Sequence
  Oligonucleotide for detection of SNP TSC0030223
gtttgagttcgga

SEQ ID NO: 121090 - DNA, 13 bp, Artificial Sequence
  Oligonucleotide for detection of SNP TSC0030223
tccgaactcaaac

SEQ ID NO: 121091 - DNA, 13 bp, Artificial Sequence
  Oligonucleotide for detection of SNP TSC0030224
attttaatgaagt

SEQ ID NO: 121092 - DNA, 13 bp, Artificial Sequence
  Oligonucleotide for detection of SNP TSC0030224
acttcattaaaat

SEQ ID NO: 121093 - DNA, 13 bp, Artificial Sequence
  Oligonucleotide for detection of SNP TSC0030224
attttagtgaagt

SEQ ID NO: 121094 - DNA, 13 bp, Artificial Sequence
  Oligonucleotide for detection of SNP TSC0030224
acttcactaaaat

SEQ ID NO: 121095 - DNA, 13 bp, Artificial Sequence
  Oligonucleotide for detection of SNP TSC0030225
tgattatgatttt

SEQ ID NO: 121096 - DNA, 13 bp, Artificial Sequence
  Oligonucleotide for detection of SNP TSC0030225
aaaatcataatca

SEQ ID NO: 121097 - DNA, 13 bp, Artificial Sequence
  Oligonucleotide for detection of SNP TSC0030225
tgattacgatttt

SEQ ID NO: 121098 - DNA, 13 bp, Artificial Sequence
  Oligonucleotide for detection of SNP TSC0030225
aaaatcgtaatca

SEQ ID NO: 121099 - DNA, 13 bp, Artificial Sequence
  Oligonucleotide for detection of SNP TSC0030225
aaaattgtgatta

SEQ ID NO: 121100 - DNA, 13 bp, Artificial Sequence
  Oligonucleotide for detection of SNP TSC0030225
taatcacaatttt

SEQ ID NO: 121101 - DNA, 13 bp, Artificial Sequence
  Oligonucleotide for detection of SNP TSC0030225
aaaattatgatta

SEQ ID NO: 121102 - DNA, 13 bp, Artificial Sequence
  Oligonucleotide for detection of SNP TSC0030225
taatcataatttt

SEQ ID NO: 121103 - DNA, 13 bp, Artificial Sequence
  Oligonucleotide for detection of SNP TSC0030225
aaaatcgtgatta

SEQ ID NO: 121104 - DNA, 13 bp, Artificial Sequence
  Oligonucleotide for detection of SNP TSC0030225
taatcacgatttt

SEQ ID NO: 121105 - DNA, 13 bp, Artificial Sequence
  Oligonucleotide for detection of SNP TSC0030226
gttattgagtagg

SEQ ID NO: 121106 - DNA, 13 bp, Artificial Sequence
  Oligonucleotide for detection of SNP TSC0030226
cctactcaataac

SEQ ID NO: 121107 - DNA, 13 bp, Artificial Sequence
  Oligonucleotide for detection of SNP TSC0030226
gttattaagtagg

SEQ ID NO: 121108 - DNA, 13 bp, Artificial Sequence
  Oligonucleotide for detection of SNP TSC0030226
cctacttaataac

SEQ ID NO: 121109 - DNA, 13 bp, Artificial Sequence
  Oligonucleotide for detection of SNP TSC0030227
tttagtggttggy

SEQ ID NO: 121110 - DNA, 13 bp, Artificial Sequence
  Oligonucleotide for detection of SNP TSC0030227
rccaaccactaaa

SEQ ID NO: 121111 - DNA, 13 bp, Artificial Sequence
  Oligonucleotide for detection of SNP TSC0030227
tttagttgttggy

SEQ ID NO: 121112 - DNA, 13 bp, Artificial Sequence
  Oligonucleotide for detection of SNP TSC0030227
rccaacaactaaa

SEQ ID NO: 121113 - DNA, 13 bp, Artificial Sequence
  Oligonucleotide for detection of SNP TSC0030227
tttagtggtcggy

SEQ ID NO: 121114 - DNA, 13 bp, Artificial Sequence
  Oligonucleotide for detection of SNP TSC0030227
rccgaccactaaa

SEQ ID NO: 121115 - DNA, 13 bp, Artificial Sequence
  Oligonucleotide for detection of SNP TSC0030227
tttagttgtcggy

SEQ ID NO: 121116 - DNA, 13 bp, Artificial Sequence
  Oligonucleotide for detection of SNP TSC0030227
rccgacaactaaa

SEQ ID NO: 121117 - DNA, 13 bp, Artificial Sequence
  Oligonucleotide for detection of SNP TSC0030227
gttggttattgag

SEQ ID NO: 121118 - DNA, 13 bp, Artificial Sequence
  Oligonucleotide for detection of SNP TSC0030227
ctcaataaccaac

SEQ ID NO: 121119 - DNA, 13 bp, Artificial Sequence
  Oligonucleotide for detection of SNP TSC0030227
gttggtaattgag

SEQ ID NO: 121120 - DNA, 13 bp, Artificial Sequence
  Oligonucleotide for detection of SNP TSC0030227
ctcaattaccaac

SEQ ID NO: 121121 - DNA, 13 bp, Artificial Sequence
  Oligonucleotide for detection of SNP TSC0030227
gtcggttattgag

SEQ ID NO: 121122 - DNA, 13 bp, Artificial Sequence
  Oligonucleotide for detection of SNP TSC0030227
ctcaataaccgac

SEQ ID NO: 121123 - DNA, 13 bp, Artificial Sequence
  Oligonucleotide for detection of SNP TSC0030227
gtcggtaattgag

SEQ ID NO: 121124 - DNA, 13 bp, Artificial Sequence
  Oligonucleotide for detection of SNP TSC0030227
ctcaattaccgac

SEQ ID NO: 121125 - DNA, 13 bp, Artificial Sequence
  Oligonucleotide for detection of SNP TSC0030231
gtttgggaggtaa

SEQ ID NO: 121126 - DNA, 13 bp, Artificial Sequence
  Oligonucleotide for detection of SNP TSC0030231
ttacctcccaaac

SEQ ID NO: 121127 - DNA, 13 bp, Artificial Sequence
  Oligonucleotide for detection of SNP TSC0030231
gtttggaaggtaa

SEQ ID NO: 121128 - DNA, 13 bp, Artificial Sequence
  Oligonucleotide for detection of SNP TSC0030231
ttaccttccaaac

SEQ ID NO: 121129 - DNA, 13 bp, Artificial Sequence
  Oligonucleotide for detection of SNP TSC0030232
gagttataaagaa

SEQ ID NO: 121130 - DNA, 13 bp, Artificial Sequence
  Oligonucleotide for detection of SNP TSC0030232
ttctttataactc

SEQ ID NO: 121131 - DNA, 13 bp, Artificial Sequence
  Oligonucleotide for detection of SNP TSC0030232
gagttaaaaagaa

SEQ ID NO: 121132 - DNA, 13 bp, Artificial Sequence
  Oligonucleotide for detection of SNP TSC0030232
ttctttttaactc

SEQ ID NO: 121133 - DNA, 13 bp, Artificial Sequence
  Oligonucleotide for detection of SNP TSC0030233
aattttgttgaag

SEQ ID NO: 121134 - DNA, 13 bp, Artificial Sequence
  Oligonucleotide for detection of SNP TSC0030233
cttcaacaaaatt

SEQ ID NO: 121135 - DNA, 13 bp, Artificial Sequence
  Oligonucleotide for detection of SNP TSC0030233
aattttattgaag

SEQ ID NO: 121136 - DNA, 13 bp, Artificial Sequence
  Oligonucleotide for detection of SNP TSC0030233
cttcaataaaatt

SEQ ID NO: 121137 - DNA, 13 bp, Artificial Sequence
  Oligonucleotide for detection of SNP TSC0030234
ttttgggtggata

SEQ ID NO: 121138 - DNA, 13 bp, Artificial Sequence
  Oligonucleotide for detection of SNP TSC0030234
tatccacccaaaa

SEQ ID NO: 121139 - DNA, 13 bp, Artificial Sequence
  Oligonucleotide for detection of SNP TSC0030234
ttttggatggata

SEQ ID NO: 121140 - DNA, 13 bp, Artificial Sequence
  Oligonucleotide for detection of SNP TSC0030234
tatccatccaaaa

SEQ ID NO: 121141 - DNA, 13 bp, Artificial Sequence
  Oligonucleotide for detection of SNP TSC0030235
gtgttgagttttg

SEQ ID NO: 121142 - DNA, 13 bp, Artificial Sequence
  Oligonucleotide for detection of SNP TSC0030235
caaaactcaacac

SEQ ID NO: 121143 - DNA, 13 bp, Artificial Sequence
  Oligonucleotide for detection of SNP TSC0030235
gtgttgggttttg

SEQ ID NO: 121144 - DNA, 13 bp, Artificial Sequence
  Oligonucleotide for detection of SNP TSC0030235
caaaacccaacac

SEQ ID NO: 121145 - DNA, 13 bp, Artificial Sequence
  Oligonucleotide for detection of SNP TSC0030238
tttatggtattaa

SEQ ID NO: 121146 - DNA, 13 bp, Artificial Sequence
  Oligonucleotide for detection of SNP TSC0030238
ttaataccataaa

SEQ ID NO: 121147 - DNA, 13 bp, Artificial Sequence
  Oligonucleotide for detection of SNP TSC0030238
tttatgatattaa

SEQ ID NO: 121148 - DNA, 13 bp, Artificial Sequence
  Oligonucleotide for detection of SNP TSC0030238
ttaatatcataaa

SEQ ID NO: 121149 - DNA, 13 bp, Artificial Sequence
  Oligonucleotide for detection of SNP TSC0030239
ttttatgtgggtg

SEQ ID NO: 121150 - DNA, 13 bp, Artificial Sequence
  Oligonucleotide for detection of SNP TSC0030239
cacccacataaaa

SEQ ID NO: 121151 - DNA, 13 bp, Artificial Sequence
  Oligonucleotide for detection of SNP TSC0030239
ttttatatgggtg

SEQ ID NO: 121152 - DNA, 13 bp, Artificial Sequence
  Oligonucleotide for detection of SNP TSC0030239
cacccatataaaa

SEQ ID NO: 121153 - DNA, 13 bp, Artificial Sequence
  Oligonucleotide for detection of SNP TSC0030240
ttttagtgggaty

SEQ ID NO: 121154 - DNA, 13 bp, Artificial Sequence
  Oligonucleotide for detection of SNP TSC0030240
ratcccactaaaa

SEQ ID NO: 121155 - DNA, 13 bp, Artificial Sequence
  Oligonucleotide for detection of SNP TSC0030240
ttttagcgggaty

SEQ ID NO: 121156 - DNA, 13 bp, Artificial Sequence
  Oligonucleotide for detection of SNP TSC0030240
ratcccgctaaaa

SEQ ID NO: 121157 - DNA, 13 bp, Artificial Sequence
  Oligonucleotide for detection of SNP TSC0030240
ggttttgttgaga

SEQ ID NO: 121158 - DNA, 13 bp, Artificial Sequence
  Oligonucleotide for detection of SNP TSC0030240
tctcaacaaaacc

SEQ ID NO: 121159 - DNA, 13 bp, Artificial Sequence
  Oligonucleotide for detection of SNP TSC0030240
ggttttattgaga

SEQ ID NO: 121160 - DNA, 13 bp, Artificial Sequence
  Oligonucleotide for detection of SNP TSC0030240
tctcaataaaacc

SEQ ID NO: 121161 - DNA, 13 bp, Artificial Sequence
  Oligonucleotide for detection of SNP TSC0030240
ggtttcgttgaga

SEQ ID NO: 121162 - DNA, 13 bp, Artificial Sequence
  Oligonucleotide for detection of SNP TSC0030240
tctcaacgaaacc

SEQ ID NO: 121163 - DNA, 13 bp, Artificial Sequence
  Oligonucleotide for detection of SNP TSC0030241
gatggaatgatta

SEQ ID NO: 121164 - DNA, 13 bp, Artificial Sequence
  Oligonucleotide for detection of SNP TSC0030241
taatcattccatc

SEQ ID NO: 121165 - DNA, 13 bp, Artificial Sequence
  Oligonucleotide for detection of SNP TSC0030241
gatggagtgatta

SEQ ID NO: 121166 - DNA, 13 bp, Artificial Sequence
  Oligonucleotide for detection of SNP TSC0030241
taatcactccatc

SEQ ID NO: 121167 - DNA, 13 bp, Artificial Sequence
  Oligonucleotide for detection of SNP TSC0030247
agaggtataatty

SEQ ID NO: 121168 - DNA, 13 bp, Artificial Sequence
  Oligonucleotide for detection of SNP TSC0030247
raattatacctct

SEQ ID NO: 121169 - DNA, 13 bp, Artificial Sequence
  Oligonucleotide for detection of SNP TSC0030247
agaggtgtaatty

SEQ ID NO: 121170 - DNA, 13 bp, Artificial Sequence
  Oligonucleotide for detection of SNP TSC0030247
raattacacctct

SEQ ID NO: 121171 - DNA, 13 bp, Artificial Sequence
  Oligonucleotide for detection of SNP TSC0030253
atagttatatttt

SEQ ID NO: 121172 - DNA, 13 bp, Artificial Sequence
  Oligonucleotide for detection of SNP TSC0030253
aaaatataactat

SEQ ID NO: 121173 - DNA, 13 bp, Artificial Sequence
  Oligonucleotide for detection of SNP TSC0030253
atagttgtatttt

SEQ ID NO: 121174 - DNA, 13 bp, Artificial Sequence
  Oligonucleotide for detection of SNP TSC0030253
aaaatacaactat

SEQ ID NO: 121175 - DNA, 13 bp, Artificial Sequence
  Oligonucleotide for detection of SNP TSC0030254
ttttatatattat

SEQ ID NO: 121176 - DNA, 13 bp, Artificial Sequence
  Oligonucleotide for detection of SNP TSC0030254
ataatatataaaa

SEQ ID NO: 121177 - DNA, 13 bp, Artificial Sequence
  Oligonucleotide for detection of SNP TSC0030254
ttttatttattat

SEQ ID NO: 121178 - DNA, 13 bp, Artificial Sequence
  Oligonucleotide for detection of SNP TSC0030254
ataataaataaaa

SEQ ID NO: 121179 - DNA, 13 bp, Artificial Sequence
  Oligonucleotide for detection of SNP TSC0030254
atagtatataaga

SEQ ID NO: 121180 - DNA, 13 bp, Artificial Sequence
  Oligonucleotide for detection of SNP TSC0030254
tcttatatactat

SEQ ID NO: 121181 - DNA, 13 bp, Artificial Sequence
  Oligonucleotide for detection of SNP TSC0030254
atagtaaataaga

SEQ ID NO: 121182 - DNA, 13 bp, Artificial Sequence
  Oligonucleotide for detection of SNP TSC0030254
tcttatttactat

SEQ ID NO: 121183 - DNA, 13 bp, Artificial Sequence
  Oligonucleotide for detection of SNP TSC0030257
ttggatataggag

SEQ ID NO: 121184 - DNA, 13 bp, Artificial Sequence
  Oligonucleotide for detection of SNP TSC0030257
ctcctatatccaa

SEQ ID NO: 121185 - DNA, 13 bp, Artificial Sequence
  Oligonucleotide for detection of SNP TSC0030257
ttggatgtaggag

SEQ ID NO: 121186 - DNA, 13 bp, Artificial Sequence
  Oligonucleotide for detection of SNP TSC0030257
ctcctacatccaa

SEQ ID NO: 121187 - DNA, 13 bp, Artificial Sequence
  Oligonucleotide for detection of SNP TSC0030257
tcggatataggag

SEQ ID NO: 121188 - DNA, 13 bp, Artificial Sequence
  Oligonucleotide for detection of SNP TSC0030257
ctcctatatccga

SEQ ID NO: 121189 - DNA, 13 bp, Artificial Sequence
  Oligonucleotide for detection of SNP TSC0030257
tcggatgtaggag

SEQ ID NO: 121190 - DNA, 13 bp, Artificial Sequence
  Oligonucleotide for detection of SNP TSC0030257
ctcctacatccga

SEQ ID NO: 121191 - DNA, 13 bp, Artificial Sequence
  Oligonucleotide for detection of SNP TSC0030257
ttggacgtaggag

SEQ ID NO: 121192 - DNA, 13 bp, Artificial Sequence
  Oligonucleotide for detection of SNP TSC0030257
ctcctacgtccaa

SEQ ID NO: 121193 - DNA, 13 bp, Artificial Sequence
  Oligonucleotide for detection of SNP TSC0030257
tcggacgtaggag

SEQ ID NO: 121194 - DNA, 13 bp, Artificial Sequence
  Oligonucleotide for detection of SNP TSC0030257
ctcctacgtccga

SEQ ID NO: 121195 - DNA, 13 bp, Artificial Sequence
  Oligonucleotide for detection of SNP TSC0030257
tttttgtgttcgg

SEQ ID NO: 121196 - DNA, 13 bp, Artificial Sequence
  Oligonucleotide for detection of SNP TSC0030257
ccgaacacaaaaa

SEQ ID NO: 121197 - DNA, 13 bp, Artificial Sequence
  Oligonucleotide for detection of SNP TSC0030257
tttttgcgttcgg

SEQ ID NO: 121198 - DNA, 13 bp, Artificial Sequence
  Oligonucleotide for detection of SNP TSC0030257
ccgaacgcaaaaa

SEQ ID NO: 121199 - DNA, 13 bp, Artificial Sequence
  Oligonucleotide for detection of SNP TSC0030260
agaaggggtggga

SEQ ID NO: 121200 - DNA, 13 bp, Artificial Sequence
  Oligonucleotide for detection of SNP TSC0030260
tcccaccccttct

SEQ ID NO: 121201 - DNA, 13 bp, Artificial Sequence
  Oligonucleotide for detection of SNP TSC0030260
agaaggtgtggga

SEQ ID NO: 121202 - DNA, 13 bp, Artificial Sequence
  Oligonucleotide for detection of SNP TSC0030260
tcccacaccttct

SEQ ID NO: 121203 - DNA, 13 bp, Artificial Sequence
  Oligonucleotide for detection of SNP TSC0030261
aggtagtggtttt

SEQ ID NO: 121204 - DNA, 13 bp, Artificial Sequence
  Oligonucleotide for detection of SNP TSC0030261
aaaaccactacct

SEQ ID NO: 121205 - DNA, 13 bp, Artificial Sequence
  Oligonucleotide for detection of SNP TSC0030261
aggtagcggtttt

SEQ ID NO: 121206 - DNA, 13 bp, Artificial Sequence
  Oligonucleotide for detection of SNP TSC0030261
aaaaccgctacct

SEQ ID NO: 121207 - DNA, 13 bp, Artificial Sequence
  Oligonucleotide for detection of SNP TSC0030261
agaattgttgttt

SEQ ID NO: 121208 - DNA, 13 bp, Artificial Sequence
  Oligonucleotide for detection of SNP TSC0030261
aaacaacaattct

SEQ ID NO: 121209 - DNA, 13 bp, Artificial Sequence
  Oligonucleotide for detection of SNP TSC0030261
agaattattgttt

SEQ ID NO: 121210 - DNA, 13 bp, Artificial Sequence
  Oligonucleotide for detection of SNP TSC0030261
aaacaataattct

SEQ ID NO: 121211 - DNA, 13 bp, Artificial Sequence
  Oligonucleotide for detection of SNP TSC0030261
agaatcgttgttt

SEQ ID NO: 121212 - DNA, 13 bp, Artificial Sequence
  Oligonucleotide for detection of SNP TSC0030261
aaacaacgattct

SEQ ID NO: 121213 - DNA, 13 bp, Artificial Sequence
  Oligonucleotide for detection of SNP TSC0030265
attaggaatttgy

SEQ ID NO: 121214 - DNA, 13 bp, Artificial Sequence
  Oligonucleotide for detection of SNP TSC0030265
rcaaattcctaat

SEQ ID NO: 121215 - DNA, 13 bp, Artificial Sequence
  Oligonucleotide for detection of SNP TSC0030265
attagggatttgy

SEQ ID NO: 121216 - DNA, 13 bp, Artificial Sequence
  Oligonucleotide for detection of SNP TSC0030265
rcaaatccctaat

SEQ ID NO: 121217 - DNA, 13 bp, Artificial Sequence
  Oligonucleotide for detection of SNP TSC0030269
aaaaaatgtggaa

SEQ ID NO: 121218 - DNA, 13 bp, Artificial Sequence
  Oligonucleotide for detection of SNP TSC0030269
ttccacatttttt

SEQ ID NO: 121219 - DNA, 13 bp, Artificial Sequence
  Oligonucleotide for detection of SNP TSC0030269
aaaaaacgtggaa

SEQ ID NO: 121220 - DNA, 13 bp, Artificial Sequence
  Oligonucleotide for detection of SNP TSC0030269
ttccacgtttttt

SEQ ID NO: 121221 - DNA, 13 bp, Artificial Sequence
  Oligonucleotide for detection of SNP TSC0030269
aaaaaatgcggaa

SEQ ID NO: 121222 - DNA, 13 bp, Artificial Sequence
  Oligonucleotide for detection of SNP TSC0030269
ttccgcatttttt

SEQ ID NO: 121223 - DNA, 13 bp, Artificial Sequence
  Oligonucleotide for detection of SNP TSC0030269
aaaaaacgcggaa

SEQ ID NO: 121224 - DNA, 13 bp, Artificial Sequence
  Oligonucleotide for detection of SNP TSC0030269
ttccgcgtttttt

SEQ ID NO: 121225 - DNA, 13 bp, Artificial Sequence
  Oligonucleotide for detection of SNP TSC0030269
ttttgtgtttttt

SEQ ID NO: 121226 - DNA, 13 bp, Artificial Sequence
  Oligonucleotide for detection of SNP TSC0030269
aaaaaacacaaaa

SEQ ID NO: 121227 - DNA, 13 bp, Artificial Sequence
  Oligonucleotide for detection of SNP TSC0030269
tttcgtgtttttt

SEQ ID NO: 121228 - DNA, 13 bp, Artificial Sequence
  Oligonucleotide for detection of SNP TSC0030269
aaaaaacacgaaa

SEQ ID NO: 121229 - DNA, 13 bp, Artificial Sequence
  Oligonucleotide for detection of SNP TSC0030269
tttcgtatttttt

SEQ ID NO: 121230 - DNA, 13 bp, Artificial Sequence
  Oligonucleotide for detection of SNP TSC0030269
aaaaaatacgaaa

SEQ ID NO: 121231 - DNA, 13 bp, Artificial Sequence
  Oligonucleotide for detection of SNP TSC0030269
ttttgcgtttttt

SEQ ID NO: 121232 - DNA, 13 bp, Artificial Sequence
  Oligonucleotide for detection of SNP TSC0030269
aaaaaacgcaaaa

SEQ ID NO: 121233 - DNA, 13 bp, Artificial Sequence
  Oligonucleotide for detection of SNP TSC0030269
tttcgcgtttttt

SEQ ID NO: 121234 - DNA, 13 bp, Artificial Sequence
  Oligonucleotide for detection of SNP TSC0030269
aaaaaacgcgaaa

SEQ ID NO: 121235 - DNA, 13 bp, Artificial Sequence
  Oligonucleotide for detection of SNP TSC0030272
tgttaaaagaagy

SEQ ID NO: 121236 - DNA, 13 bp, Artificial Sequence
  Oligonucleotide for detection of SNP TSC0030272
rcttcttttaaca

SEQ ID NO: 121237 - DNA, 13 bp, Artificial Sequence
  Oligonucleotide for detection of SNP TSC0030272
tgttaatagaagy

SEQ ID NO: 121238 - DNA, 13 bp, Artificial Sequence
  Oligonucleotide for detection of SNP TSC0030272
rcttctattaaca

SEQ ID NO: 121239 - DNA, 13 bp, Artificial Sequence
  Oligonucleotide for detection of SNP TSC0030272
gttttttttgata

SEQ ID NO: 121240 - DNA, 13 bp, Artificial Sequence
  Oligonucleotide for detection of SNP TSC0030272
tatcaaaaaaaac

SEQ ID NO: 121241 - DNA, 13 bp, Artificial Sequence
  Oligonucleotide for detection of SNP TSC0030272
gtttttattgata

SEQ ID NO: 121242 - DNA, 13 bp, Artificial Sequence
  Oligonucleotide for detection of SNP TSC0030272
tatcaataaaaac

SEQ ID NO: 121243 - DNA, 13 bp, Artificial Sequence
  Oligonucleotide for detection of SNP TSC0030273
ttatttgtttata

SEQ ID NO: 121244 - DNA, 13 bp, Artificial Sequence
  Oligonucleotide for detection of SNP TSC0030273
tataaacaaataa

SEQ ID NO: 121245 - DNA, 13 bp, Artificial Sequence
  Oligonucleotide for detection of SNP TSC0030274
atgggtattgaaa

SEQ ID NO: 121246 - DNA, 13 bp, Artificial Sequence
  Oligonucleotide for detection of SNP TSC0030274
tttcaatacccat

SEQ ID NO: 121247 - DNA, 13 bp, Artificial Sequence
  Oligonucleotide for detection of SNP TSC0030274
atgggtgttgaaa

SEQ ID NO: 121248 - DNA, 13 bp, Artificial Sequence
  Oligonucleotide for detection of SNP TSC0030274
tttcaacacccat

SEQ ID NO: 121249 - DNA, 13 bp, Artificial Sequence
  Oligonucleotide for detection of SNP TSC0030274
acgggtattgaaa

SEQ ID NO: 121250 - DNA, 13 bp, Artificial Sequence
  Oligonucleotide for detection of SNP TSC0030274
tttcaatacccgt

SEQ ID NO: 121251 - DNA, 13 bp, Artificial Sequence
  Oligonucleotide for detection of SNP TSC0030274
acgggtgttgaaa

SEQ ID NO: 121252 - DNA, 13 bp, Artificial Sequence
  Oligonucleotide for detection of SNP TSC0030274
tttcaacacccgt

SEQ ID NO: 121253 - DNA, 13 bp, Artificial Sequence
  Oligonucleotide for detection of SNP TSC0030274
atgggcgttgaaa

SEQ ID NO: 121254 - DNA, 13 bp, Artificial Sequence
  Oligonucleotide for detection of SNP TSC0030274
tttcaacgcccat

SEQ ID NO: 121255 - DNA, 13 bp, Artificial Sequence
  Oligonucleotide for detection of SNP TSC0030274
acgggcgttgaaa

SEQ ID NO: 121256 - DNA, 13 bp, Artificial Sequence
  Oligonucleotide for detection of SNP TSC0030274
tttcaacgcccgt

SEQ ID NO: 121257 - DNA, 13 bp, Artificial Sequence
  Oligonucleotide for detection of SNP TSC0030274
ttttaatgtttgt

SEQ ID NO: 121258 - DNA, 13 bp, Artificial Sequence
  Oligonucleotide for detection of SNP TSC0030274
acaaacattaaaa

SEQ ID NO: 121259 - DNA, 13 bp, Artificial Sequence
  Oligonucleotide for detection of SNP TSC0030274
ttttaatgttcgt

SEQ ID NO: 121260 - DNA, 13 bp, Artificial Sequence
  Oligonucleotide for detection of SNP TSC0030274
acgaacattaaaa

SEQ ID NO: 121261 - DNA, 13 bp, Artificial Sequence
  Oligonucleotide for detection of SNP TSC0030274
ttttaacgtttgt

SEQ ID NO: 121262 - DNA, 13 bp, Artificial Sequence
  Oligonucleotide for detection of SNP TSC0030274
acaaacgttaaaa

SEQ ID NO: 121263 - DNA, 13 bp, Artificial Sequence
  Oligonucleotide for detection of SNP TSC0030274
ttttaacgttcgt

SEQ ID NO: 121264 - DNA, 13 bp, Artificial Sequence
  Oligonucleotide for detection of SNP TSC0030274
acgaacgttaaaa

SEQ ID NO: 121265 - DNA, 13 bp, Artificial Sequence
  Oligonucleotide for detection of SNP TSC0030282
atttatatgagty

SEQ ID NO: 121266 - DNA, 13 bp, Artificial Sequence
  Oligonucleotide for detection of SNP TSC0030282
ractcatataaat

SEQ ID NO: 121267 - DNA, 13 bp, Artificial Sequence
  Oligonucleotide for detection of SNP TSC0030282
atttatgtgagty

SEQ ID NO: 121268 - DNA, 13 bp, Artificial Sequence
  Oligonucleotide for detection of SNP TSC0030282
ractcacataaat

SEQ ID NO: 121269 - DNA, 13 bp, Artificial Sequence
  Oligonucleotide for detection of SNP TSC0030282
atttacgtgagty

SEQ ID NO: 121270 - DNA, 13 bp, Artificial Sequence
  Oligonucleotide for detection of SNP TSC0030282
ractcacgtaaat

SEQ ID NO: 121271 - DNA, 13 bp, Artificial Sequence
  Oligonucleotide for detection of SNP TSC0030282
gatttatgtggat

SEQ ID NO: 121272 - DNA, 13 bp, Artificial Sequence
  Oligonucleotide for detection of SNP TSC0030282
atccacataaatc

SEQ ID NO: 121273 - DNA, 13 bp, Artificial Sequence
  Oligonucleotide for detection of SNP TSC0030282
gatttacgtggat

SEQ ID NO: 121274 - DNA, 13 bp, Artificial Sequence
  Oligonucleotide for detection of SNP TSC0030282
atccacgtaaatc

SEQ ID NO: 121275 - DNA, 13 bp, Artificial Sequence
  Oligonucleotide for detection of SNP TSC0030283
tattagagggata

SEQ ID NO: 121276 - DNA, 13 bp, Artificial Sequence
  Oligonucleotide for detection of SNP TSC0030283
tatccctctaata

SEQ ID NO: 121277 - DNA, 13 bp, Artificial Sequence
  Oligonucleotide for detection of SNP TSC0030283
tattagggggata

SEQ ID NO: 121278 - DNA, 13 bp, Artificial Sequence
  Oligonucleotide for detection of SNP TSC0030283
tatccccctaata

SEQ ID NO: 121279 - DNA, 13 bp, Artificial Sequence
  Oligonucleotide for detection of SNP TSC0030284
agaaatggttgaa

SEQ ID NO: 121280 - DNA, 13 bp, Artificial Sequence
  Oligonucleotide for detection of SNP TSC0030284
ttcaaccatttct

SEQ ID NO: 121281 - DNA, 13 bp, Artificial Sequence
  Oligonucleotide for detection of SNP TSC0030284
agaaattgttgaa

SEQ ID NO: 121282 - DNA, 13 bp, Artificial Sequence
  Oligonucleotide for detection of SNP TSC0030284
ttcaacaatttct

SEQ ID NO: 121283 - DNA, 13 bp, Artificial Sequence
  Oligonucleotide for detection of SNP TSC0030284
tttaattattttt

SEQ ID NO: 121284 - DNA, 13 bp, Artificial Sequence
  Oligonucleotide for detection of SNP TSC0030284
aaaaataattaaa

SEQ ID NO: 121285 - DNA, 13 bp, Artificial Sequence
  Oligonucleotide for detection of SNP TSC0030284
tttaataattttt

SEQ ID NO: 121286 - DNA, 13 bp, Artificial Sequence
  Oligonucleotide for detection of SNP TSC0030284
aaaaattattaaa

SEQ ID NO: 121287 - DNA, 13 bp, Artificial Sequence
  Oligonucleotide for detection of SNP TSC0030288
ttgttgtgtgagy

SEQ ID NO: 121288 - DNA, 13 bp, Artificial Sequence
  Oligonucleotide for detection of SNP TSC0030288
rctcacacaacaa

SEQ ID NO: 121289 - DNA, 13 bp, Artificial Sequence
  Oligonucleotide for detection of SNP TSC0030288
ttgtcgtgtgagy

SEQ ID NO: 121290 - DNA, 13 bp, Artificial Sequence
  Oligonucleotide for detection of SNP TSC0030288
rctcacacgacaa

SEQ ID NO: 121291 - DNA, 13 bp, Artificial Sequence
  Oligonucleotide for detection of SNP TSC0030288
ttgttgcgtgagy

SEQ ID NO: 121292 - DNA, 13 bp, Artificial Sequence
  Oligonucleotide for detection of SNP TSC0030288
rctcacgcaacaa

SEQ ID NO: 121293 - DNA, 13 bp, Artificial Sequence
  Oligonucleotide for detection of SNP TSC0030288
ttgtcgcgtgagy

SEQ ID NO: 121294 - DNA, 13 bp, Artificial Sequence
  Oligonucleotide for detection of SNP TSC0030288
rctcacgcgacaa

SEQ ID NO: 121295 - DNA, 13 bp, Artificial Sequence
  Oligonucleotide for detection of SNP TSC0030288
gtttatgtggtaa

SEQ ID NO: 121296 - DNA, 13 bp, Artificial Sequence
  Oligonucleotide for detection of SNP TSC0030288
ttaccacataaac

SEQ ID NO: 121297 - DNA, 13 bp, Artificial Sequence
  Oligonucleotide for detection of SNP TSC0030288
gtttatatggtaa

SEQ ID NO: 121298 - DNA, 13 bp, Artificial Sequence
  Oligonucleotide for detection of SNP TSC0030288
ttaccatataaac

SEQ ID NO: 121299 - DNA, 13 bp, Artificial Sequence
  Oligonucleotide for detection of SNP TSC0030288
gtttacgtggtaa

SEQ ID NO: 121300 - DNA, 13 bp, Artificial Sequence
  Oligonucleotide for detection of SNP TSC0030288
ttaccacgtaaac

SEQ ID NO: 121301 - DNA, 13 bp, Artificial Sequence
  Oligonucleotide for detection of SNP TSC0030288
gtttatacggtaa

SEQ ID NO: 121302 - DNA, 13 bp, Artificial Sequence
  Oligonucleotide for detection of SNP TSC0030288
ttaccgtataaac

SEQ ID NO: 121303 - DNA, 13 bp, Artificial Sequence
  Oligonucleotide for detection of SNP TSC0030288
gtttatgcggtaa

SEQ ID NO: 121304 - DNA, 13 bp, Artificial Sequence
  Oligonucleotide for detection of SNP TSC0030288
ttaccgcataaac

SEQ ID NO: 121305 - DNA, 13 bp, Artificial Sequence
  Oligonucleotide for detection of SNP TSC0030288
gtttacgcggtaa

SEQ ID NO: 121306 - DNA, 13 bp, Artificial Sequence
  Oligonucleotide for detection of SNP TSC0030288
ttaccgcgtaaac

SEQ ID NO: 121307 - DNA, 13 bp, Artificial Sequence
  Oligonucleotide for detection of SNP TSC0030291
tttttagaagtag

SEQ ID NO: 121308 - DNA, 13 bp, Artificial Sequence
  Oligonucleotide for detection of SNP TSC0030291
ctacttctaaaaa

SEQ ID NO: 121309 - DNA, 13 bp, Artificial Sequence
  Oligonucleotide for detection of SNP TSC0030293
tgatagattgttt

SEQ ID NO: 121310 - DNA, 13 bp, Artificial Sequence
  Oligonucleotide for detection of SNP TSC0030293
aaacaatctatca

SEQ ID NO: 121311 - DNA, 13 bp, Artificial Sequence
  Oligonucleotide for detection of SNP TSC0030293
tgataggttgttt

SEQ ID NO: 121312 - DNA, 13 bp, Artificial Sequence
  Oligonucleotide for detection of SNP TSC0030293
aaacaacctatca

SEQ ID NO: 121313 - DNA, 13 bp, Artificial Sequence
  Oligonucleotide for detection of SNP TSC0030294
gttattgtgttay

SEQ ID NO: 121314 - DNA, 13 bp, Artificial Sequence
  Oligonucleotide for detection of SNP TSC0030294
rtaacacaataac

SEQ ID NO: 121315 - DNA, 13 bp, Artificial Sequence
  Oligonucleotide for detection of SNP TSC0030294
gttattatgttay

SEQ ID NO: 121316 - DNA, 13 bp, Artificial Sequence
  Oligonucleotide for detection of SNP TSC0030294
rtaacataataac

SEQ ID NO: 121317 - DNA, 13 bp, Artificial Sequence
  Oligonucleotide for detection of SNP TSC0030295
gtttttattaaag

SEQ ID NO: 121318 - DNA, 13 bp, Artificial Sequence
  Oligonucleotide for detection of SNP TSC0030295
ctttaataaaaac

SEQ ID NO: 121319 - DNA, 13 bp, Artificial Sequence
  Oligonucleotide for detection of SNP TSC0030295
gttttttttaaag

SEQ ID NO: 121320 - DNA, 13 bp, Artificial Sequence
  Oligonucleotide for detection of SNP TSC0030295
ctttaaaaaaaac

SEQ ID NO: 121321 - DNA, 13 bp, Artificial Sequence
  Oligonucleotide for detection of SNP TSC0030295
ttttgatgagaay

SEQ ID NO: 121322 - DNA, 13 bp, Artificial Sequence
  Oligonucleotide for detection of SNP TSC0030295
rttctcatcaaaa

SEQ ID NO: 121323 - DNA, 13 bp, Artificial Sequence
  Oligonucleotide for detection of SNP TSC0030295
ttttgaggagaay

SEQ ID NO: 121324 - DNA, 13 bp, Artificial Sequence
  Oligonucleotide for detection of SNP TSC0030295
rttctcctcaaaa

SEQ ID NO: 121325 - DNA, 13 bp, Artificial Sequence
  Oligonucleotide for detection of SNP TSC0030298
tttatttggttta

SEQ ID NO: 121326 - DNA, 13 bp, Artificial Sequence
  Oligonucleotide for detection of SNP TSC0030298
taaaccaaataaa

SEQ ID NO: 121327 - DNA, 13 bp, Artificial Sequence
  Oligonucleotide for detection of SNP TSC0030298
tttattcggttta

SEQ ID NO: 121328 - DNA, 13 bp, Artificial Sequence
  Oligonucleotide for detection of SNP TSC0030298
taaaccgaataaa

SEQ ID NO: 121329 - DNA, 13 bp, Artificial Sequence
  Oligonucleotide for detection of SNP TSC0030298
tgagttggataag

SEQ ID NO: 121330 - DNA, 13 bp, Artificial Sequence
  Oligonucleotide for detection of SNP TSC0030298
cttatccaactca

SEQ ID NO: 121331 - DNA, 13 bp, Artificial Sequence
  Oligonucleotide for detection of SNP TSC0030298
tgagttagataag

SEQ ID NO: 121332 - DNA, 13 bp, Artificial Sequence
  Oligonucleotide for detection of SNP TSC0030298
cttatctaactca

SEQ ID NO: 121333 - DNA, 13 bp, Artificial Sequence
  Oligonucleotide for detection of SNP TSC0030298
tgagtcggataag

SEQ ID NO: 121334 - DNA, 13 bp, Artificial Sequence
  Oligonucleotide for detection of SNP TSC0030298
cttatccgactca

SEQ ID NO: 121335 - DNA, 13 bp, Artificial Sequence
  Oligonucleotide for detection of SNP TSC0030310
tgttggaggtgty

SEQ ID NO: 121336 - DNA, 13 bp, Artificial Sequence
  Oligonucleotide for detection of SNP TSC0030310
racacctccaaca

SEQ ID NO: 121337 - DNA, 13 bp, Artificial Sequence
  Oligonucleotide for detection of SNP TSC0030310
tgttgggggtgty

SEQ ID NO: 121338 - DNA, 13 bp, Artificial Sequence
  Oligonucleotide for detection of SNP TSC0030310
racacccccaaca

SEQ ID NO: 121339 - DNA, 13 bp, Artificial Sequence
  Oligonucleotide for detection of SNP TSC0030310
cgttggaggtgty

SEQ ID NO: 121340 - DNA, 13 bp, Artificial Sequence
  Oligonucleotide for detection of SNP TSC0030310
racacctccaacg

SEQ ID NO: 121341 - DNA, 13 bp, Artificial Sequence
  Oligonucleotide for detection of SNP TSC0030310
cgttgggggtgty

SEQ ID NO: 121342 - DNA, 13 bp, Artificial Sequence
  Oligonucleotide for detection of SNP TSC0030310
racacccccaacg

SEQ ID NO: 121343 - DNA, 13 bp, Artificial Sequence
  Oligonucleotide for detection of SNP TSC0030311
attaattgtatga

SEQ ID NO: 121344 - DNA, 13 bp, Artificial Sequence
  Oligonucleotide for detection of SNP TSC0030311
tcatacaattaat

SEQ ID NO: 121345 - DNA, 13 bp, Artificial Sequence
  Oligonucleotide for detection of SNP TSC0030311
attaatcgtatga

SEQ ID NO: 121346 - DNA, 13 bp, Artificial Sequence
  Oligonucleotide for detection of SNP TSC0030311
tcatacgattaat

SEQ ID NO: 121347 - DNA, 13 bp, Artificial Sequence
  Oligonucleotide for detection of SNP TSC0030311
ttatatgattggt

SEQ ID NO: 121348 - DNA, 13 bp, Artificial Sequence
  Oligonucleotide for detection of SNP TSC0030311
accaatcatataa

SEQ ID NO: 121349 - DNA, 13 bp, Artificial Sequence
  Oligonucleotide for detection of SNP TSC0030311
ttatataattggt

SEQ ID NO: 121350 - DNA, 13 bp, Artificial Sequence
  Oligonucleotide for detection of SNP TSC0030311
accaattatataa

SEQ ID NO: 121351 - DNA, 13 bp, Artificial Sequence
  Oligonucleotide for detection of SNP TSC0030311
ttatacgattggt

SEQ ID NO: 121352 - DNA, 13 bp, Artificial Sequence
  Oligonucleotide for detection of SNP TSC0030311
accaatcgtataa

SEQ ID NO: 121353 - DNA, 13 bp, Artificial Sequence
  Oligonucleotide for detection of SNP TSC0030313
taaaataaattaa

SEQ ID NO: 121354 - DNA, 13 bp, Artificial Sequence
  Oligonucleotide for detection of SNP TSC0030313
ttaatttatttta

SEQ ID NO: 121355 - DNA, 13 bp, Artificial Sequence
  Oligonucleotide for detection of SNP TSC0030313
taaaatgaattaa

SEQ ID NO: 121356 - DNA, 13 bp, Artificial Sequence
  Oligonucleotide for detection of SNP TSC0030313
ttaattcatttta

SEQ ID NO: 121357 - DNA, 13 bp, Artificial Sequence
  Oligonucleotide for detection of SNP TSC0030313
taaaacgaattaa

SEQ ID NO: 121358 - DNA, 13 bp, Artificial Sequence
  Oligonucleotide for detection of SNP TSC0030313
ttaattcgtttta

SEQ ID NO: 121359 - DNA, 13 bp, Artificial Sequence
  Oligonucleotide for detection of SNP TSC0030313
ttggtttgttttg

SEQ ID NO: 121360 - DNA, 13 bp, Artificial Sequence
  Oligonucleotide for detection of SNP TSC0030313
caaaacaaaccaa

SEQ ID NO: 121361 - DNA, 13 bp, Artificial Sequence
  Oligonucleotide for detection of SNP TSC0030313
ttggttcgttttg

SEQ ID NO: 121362 - DNA, 13 bp, Artificial Sequence
  Oligonucleotide for detection of SNP TSC0030313
caaaacgaaccaa

SEQ ID NO: 121363 - DNA, 13 bp, Artificial Sequence
  Oligonucleotide for detection of SNP TSC0030314
atgggaattgggg

SEQ ID NO: 121364 - DNA, 13 bp, Artificial Sequence
  Oligonucleotide for detection of SNP TSC0030314
ccccaattcccat

SEQ ID NO: 121365 - DNA, 13 bp, Artificial Sequence
  Oligonucleotide for detection of SNP TSC0030314
atgggatttgggg

SEQ ID NO: 121366 - DNA, 13 bp, Artificial Sequence
  Oligonucleotide for detection of SNP TSC0030314
ccccaaatcccat

SEQ ID NO: 121367 - DNA, 13 bp, Artificial Sequence
  Oligonucleotide for detection of SNP TSC0030314
atgggaatcgggg

SEQ ID NO: 121368 - DNA, 13 bp, Artificial Sequence
  Oligonucleotide for detection of SNP TSC0030314
ccccgattcccat

SEQ ID NO: 121369 - DNA, 13 bp, Artificial Sequence
  Oligonucleotide for detection of SNP TSC0030314
atgggattcgggg

SEQ ID NO: 121370 - DNA, 13 bp, Artificial Sequence
  Oligonucleotide for detection of SNP TSC0030314
ccccgaatcccat

SEQ ID NO: 121371 - DNA, 13 bp, Artificial Sequence
  Oligonucleotide for detection of SNP TSC0030314
ttttggtttttat

SEQ ID NO: 121372 - DNA, 13 bp, Artificial Sequence
  Oligonucleotide for detection of SNP TSC0030314
ataaaaaccaaaa

SEQ ID NO: 121373 - DNA, 13 bp, Artificial Sequence
  Oligonucleotide for detection of SNP TSC0030314
ttttgggttttat

SEQ ID NO: 121374 - DNA, 13 bp, Artificial Sequence
  Oligonucleotide for detection of SNP TSC0030314
ataaaacccaaaa

SEQ ID NO: 121375 - DNA, 13 bp, Artificial Sequence
  Oligonucleotide for detection of SNP TSC0030314
tttcggtttttat

SEQ ID NO: 121376 - DNA, 13 bp, Artificial Sequence
  Oligonucleotide for detection of SNP TSC0030314
ataaaaaccgaaa

SEQ ID NO: 121377 - DNA, 13 bp, Artificial Sequence
  Oligonucleotide for detection of SNP TSC0030314
tttcgggttttat

SEQ ID NO: 121378 - DNA, 13 bp, Artificial Sequence
  Oligonucleotide for detection of SNP TSC0030314
ataaaacccgaaa

SEQ ID NO: 121379 - DNA, 13 bp, Artificial Sequence
  Oligonucleotide for detection of SNP TSC0030315
agtttaatgggtg

SEQ ID NO: 121380 - DNA, 13 bp, Artificial Sequence
  Oligonucleotide for detection of SNP TSC0030315
cacccattaaact

SEQ ID NO: 121381 - DNA, 13 bp, Artificial Sequence
  Oligonucleotide for detection of SNP TSC0030315
agtttagtgggtg

SEQ ID NO: 121382 - DNA, 13 bp, Artificial Sequence
  Oligonucleotide for detection of SNP TSC0030315
cacccactaaact

SEQ ID NO: 121383 - DNA, 13 bp, Artificial Sequence
  Oligonucleotide for detection of SNP TSC0030315
agtttaacgggtg

SEQ ID NO: 121384 - DNA, 13 bp, Artificial Sequence
  Oligonucleotide for detection of SNP TSC0030315
cacccgttaaact

SEQ ID NO: 121385 - DNA, 13 bp, Artificial Sequence
  Oligonucleotide for detection of SNP TSC0030315
agtttagcgggtg

SEQ ID NO: 121386 - DNA, 13 bp, Artificial Sequence
  Oligonucleotide for detection of SNP TSC0030315
cacccgctaaact

SEQ ID NO: 121387 - DNA, 13 bp, Artificial Sequence
  Oligonucleotide for detection of SNP TSC0030316
tttgaaaaggggy

SEQ ID NO: 121388 - DNA, 13 bp, Artificial Sequence
  Oligonucleotide for detection of SNP TSC0030316
rccccttttcaaa

SEQ ID NO: 121389 - DNA, 13 bp, Artificial Sequence
  Oligonucleotide for detection of SNP TSC0030316
tttgaataggggy

SEQ ID NO: 121390 - DNA, 13 bp, Artificial Sequence
  Oligonucleotide for detection of SNP TSC0030316
rcccctattcaaa

SEQ ID NO: 121391 - DNA, 13 bp, Artificial Sequence
  Oligonucleotide for detection of SNP TSC0030316
gtttttttttaaa

SEQ ID NO: 121392 - DNA, 13 bp, Artificial Sequence
  Oligonucleotide for detection of SNP TSC0030316
tttaaaaaaaaac

SEQ ID NO: 121393 - DNA, 13 bp, Artificial Sequence
  Oligonucleotide for detection of SNP TSC0030316
gtttttgtttaaa

SEQ ID NO: 121394 - DNA, 13 bp, Artificial Sequence
  Oligonucleotide for detection of SNP TSC0030316
tttaaacaaaaac

SEQ ID NO: 121395 - DNA, 13 bp, Artificial Sequence
  Oligonucleotide for detection of SNP TSC0030317
agaggtgaaatta

SEQ ID NO: 121396 - DNA, 13 bp, Artificial Sequence
  Oligonucleotide for detection of SNP TSC0030317
taatttcacctct

SEQ ID NO: 121397 - DNA, 13 bp, Artificial Sequence
  Oligonucleotide for detection of SNP TSC0030317
agaggtaaaatta

SEQ ID NO: 121398 - DNA, 13 bp, Artificial Sequence
  Oligonucleotide for detection of SNP TSC0030317
taattttacctct

SEQ ID NO: 121399 - DNA, 13 bp, Artificial Sequence
  Oligonucleotide for detection of SNP TSC0030319
aggtttggtaaty

SEQ ID NO: 121400 - DNA, 13 bp, Artificial Sequence
  Oligonucleotide for detection of SNP TSC0030319
rattaccaaacct

SEQ ID NO: 121401 - DNA, 13 bp, Artificial Sequence
  Oligonucleotide for detection of SNP TSC0030319
aggtttagtaaty

SEQ ID NO: 121402 - DNA, 13 bp, Artificial Sequence
  Oligonucleotide for detection of SNP TSC0030319
rattactaaacct

SEQ ID NO: 121403 - DNA, 13 bp, Artificial Sequence
  Oligonucleotide for detection of SNP TSC0030320
agaaaaattttaa

SEQ ID NO: 121404 - DNA, 13 bp, Artificial Sequence
  Oligonucleotide for detection of SNP TSC0030320
ttaaaatttttct

SEQ ID NO: 121405 - DNA, 13 bp, Artificial Sequence
  Oligonucleotide for detection of SNP TSC0030320
agaaaatttttaa

SEQ ID NO: 121406 - DNA, 13 bp, Artificial Sequence
  Oligonucleotide for detection of SNP TSC0030320
ttaaaaattttct

SEQ ID NO: 121407 - DNA, 13 bp, Artificial Sequence
  Oligonucleotide for detection of SNP TSC0030320
ttgaaattttttt

SEQ ID NO: 121408 - DNA, 13 bp, Artificial Sequence
  Oligonucleotide for detection of SNP TSC0030320
aaaaaaatttcaa

SEQ ID NO: 121409 - DNA, 13 bp, Artificial Sequence
  Oligonucleotide for detection of SNP TSC0030320
ttgaaaatttttt

SEQ ID NO: 121410 - DNA, 13 bp, Artificial Sequence
  Oligonucleotide for detection of SNP TSC0030320
aaaaaattttcaa

SEQ ID NO: 121411 - DNA, 13 bp, Artificial Sequence
  Oligonucleotide for detection of SNP TSC0030321
aaattttaaagat

SEQ ID NO: 121412 - DNA, 13 bp, Artificial Sequence
  Oligonucleotide for detection of SNP TSC0030321
atctttaaaattt

SEQ ID NO: 121413 - DNA, 13 bp, Artificial Sequence
  Oligonucleotide for detection of SNP TSC0030321
aaatttgaaagat

SEQ ID NO: 121414 - DNA, 13 bp, Artificial Sequence
  Oligonucleotide for detection of SNP TSC0030321
atctttcaaattt

SEQ ID NO: 121415 - DNA, 13 bp, Artificial Sequence
  Oligonucleotide for detection of SNP TSC0030321
attttttaaattt

SEQ ID NO: 121416 - DNA, 13 bp, Artificial Sequence
  Oligonucleotide for detection of SNP TSC0030321
aaatttaaaaaat

SEQ ID NO: 121417 - DNA, 13 bp, Artificial Sequence
  Oligonucleotide for detection of SNP TSC0030322
ggttaaatttttg

SEQ ID NO: 121418 - DNA, 13 bp, Artificial Sequence
  Oligonucleotide for detection of SNP TSC0030322
caaaaatttaacc

SEQ ID NO: 121419 - DNA, 13 bp, Artificial Sequence
  Oligonucleotide for detection of SNP TSC0030322
ggttaattttttg

SEQ ID NO: 121420 - DNA, 13 bp, Artificial Sequence
  Oligonucleotide for detection of SNP TSC0030322
caaaaaattaacc

SEQ ID NO: 121421 - DNA, 13 bp, Artificial Sequence
  Oligonucleotide for detection of SNP TSC0030322
taaaaatttagty

SEQ ID NO: 121422 - DNA, 13 bp, Artificial Sequence
  Oligonucleotide for detection of SNP TSC0030322
ractaaattttta

SEQ ID NO: 121423 - DNA, 13 bp, Artificial Sequence
  Oligonucleotide for detection of SNP TSC0030322
taaaaaattagty

SEQ ID NO: 121424 - DNA, 13 bp, Artificial Sequence
  Oligonucleotide for detection of SNP TSC0030322
ractaatttttta

SEQ ID NO: 121425 - DNA, 13 bp, Artificial Sequence
  Oligonucleotide for detection of SNP TSC0030323
atagtagttttgt

SEQ ID NO: 121426 - DNA, 13 bp, Artificial Sequence
  Oligonucleotide for detection of SNP TSC0030323
acaaaactactat

SEQ ID NO: 121427 - DNA, 13 bp, Artificial Sequence
  Oligonucleotide for detection of SNP TSC0030323
atagtaattttgt

SEQ ID NO: 121428 - DNA, 13 bp, Artificial Sequence
  Oligonucleotide for detection of SNP TSC0030323
acaaaattactat

SEQ ID NO: 121429 - DNA, 13 bp, Artificial Sequence
  Oligonucleotide for detection of SNP TSC0030324
aaataaataaatt

SEQ ID NO: 121430 - DNA, 13 bp, Artificial Sequence
  Oligonucleotide for detection of SNP TSC0030324
aatttatttattt

SEQ ID NO: 121431 - DNA, 13 bp, Artificial Sequence
  Oligonucleotide for detection of SNP TSC0030324
aaataattaaatt

SEQ ID NO: 121432 - DNA, 13 bp, Artificial Sequence
  Oligonucleotide for detection of SNP TSC0030324
aatttaattattt

SEQ ID NO: 121433 - DNA, 13 bp, Artificial Sequence
  Oligonucleotide for detection of SNP TSC0030325
taggtaaatatat

SEQ ID NO: 121434 - DNA, 13 bp, Artificial Sequence
  Oligonucleotide for detection of SNP TSC0030325
atatatttaccta

SEQ ID NO: 121435 - DNA, 13 bp, Artificial Sequence
  Oligonucleotide for detection of SNP TSC0030325
taggtagatatat

SEQ ID NO: 121436 - DNA, 13 bp, Artificial Sequence
  Oligonucleotide for detection of SNP TSC0030325
atatatctaccta

SEQ ID NO: 121437 - DNA, 13 bp, Artificial Sequence
  Oligonucleotide for detection of SNP TSC0030326
agttttagagttt

SEQ ID NO: 121438 - DNA, 13 bp, Artificial Sequence
  Oligonucleotide for detection of SNP TSC0030326
aaactctaaaact

SEQ ID NO: 121439 - DNA, 13 bp, Artificial Sequence
  Oligonucleotide for detection of SNP TSC0030326
agtttttgagttt

SEQ ID NO: 121440 - DNA, 13 bp, Artificial Sequence
  Oligonucleotide for detection of SNP TSC0030326
aaactcaaaaact

SEQ ID NO: 121441 - DNA, 13 bp, Artificial Sequence
  Oligonucleotide for detection of SNP TSC0030326
agattttagagtt

SEQ ID NO: 121442 - DNA, 13 bp, Artificial Sequence
  Oligonucleotide for detection of SNP TSC0030326
aactctaaaatct

SEQ ID NO: 121443 - DNA, 13 bp, Artificial Sequence
  Oligonucleotide for detection of SNP TSC0030326
agatttaagagtt

SEQ ID NO: 121444 - DNA, 13 bp, Artificial Sequence
  Oligonucleotide for detection of SNP TSC0030326
aactcttaaatct

SEQ ID NO: 121445 - DNA, 13 bp, Artificial Sequence
  Oligonucleotide for detection of SNP TSC0030327
tttgtgttgatta

SEQ ID NO: 121446 - DNA, 13 bp, Artificial Sequence
  Oligonucleotide for detection of SNP TSC0030327
taatcaacacaaa

SEQ ID NO: 121447 - DNA, 13 bp, Artificial Sequence
  Oligonucleotide for detection of SNP TSC0030327
tttgtggtgatta

SEQ ID NO: 121448 - DNA, 13 bp, Artificial Sequence
  Oligonucleotide for detection of SNP TSC0030327
taatcaccacaaa

SEQ ID NO: 121449 - DNA, 13 bp, Artificial Sequence
  Oligonucleotide for detection of SNP TSC0030327
ttcgtgttgatta

SEQ ID NO: 121450 - DNA, 13 bp, Artificial Sequence
  Oligonucleotide for detection of SNP TSC0030327
taatcaacacgaa

SEQ ID NO: 121451 - DNA, 13 bp, Artificial Sequence
  Oligonucleotide for detection of SNP TSC0030327
ttcgtggtgatta

SEQ ID NO: 121452 - DNA, 13 bp, Artificial Sequence
  Oligonucleotide for detection of SNP TSC0030327
taatcaccacgaa

SEQ ID NO: 121453 - DNA, 13 bp, Artificial Sequence
  Oligonucleotide for detection of SNP TSC0030327
tgattagtatggg

SEQ ID NO: 121454 - DNA, 13 bp, Artificial Sequence
  Oligonucleotide for detection of SNP TSC0030327
cccatactaatca

SEQ ID NO: 121455 - DNA, 13 bp, Artificial Sequence
  Oligonucleotide for detection of SNP TSC0030327
tgattattatggg

SEQ ID NO: 121456 - DNA, 13 bp, Artificial Sequence
  Oligonucleotide for detection of SNP TSC0030327
cccataataatca

SEQ ID NO: 121457 - DNA, 13 bp, Artificial Sequence
  Oligonucleotide for detection of SNP TSC0030327
tgattagtacggg

SEQ ID NO: 121458 - DNA, 13 bp, Artificial Sequence
  Oligonucleotide for detection of SNP TSC0030327
cccgtactaatca

SEQ ID NO: 121459 - DNA, 13 bp, Artificial Sequence
  Oligonucleotide for detection of SNP TSC0030327
tgattattacggg

SEQ ID NO: 121460 - DNA, 13 bp, Artificial Sequence
  Oligonucleotide for detection of SNP TSC0030327
cccgtaataatca

SEQ ID NO: 121461 - DNA, 13 bp, Artificial Sequence
  Oligonucleotide for detection of SNP TSC0030328
agtagtaggattg

SEQ ID NO: 121462 - DNA, 13 bp, Artificial Sequence
  Oligonucleotide for detection of SNP TSC0030328
caatcctactact

SEQ ID NO: 121463 - DNA, 13 bp, Artificial Sequence
  Oligonucleotide for detection of SNP TSC0030328
agtagtgggattg

SEQ ID NO: 121464 - DNA, 13 bp, Artificial Sequence
  Oligonucleotide for detection of SNP TSC0030328
caatcccactact

SEQ ID NO: 121465 - DNA, 13 bp, Artificial Sequence
  Oligonucleotide for detection of SNP TSC0030329
gttgttagaataa

SEQ ID NO: 121466 - DNA, 13 bp, Artificial Sequence
  Oligonucleotide for detection of SNP TSC0030329
ttattctaacaac

SEQ ID NO: 121467 - DNA, 13 bp, Artificial Sequence
  Oligonucleotide for detection of SNP TSC0030329
gttgttggaataa

SEQ ID NO: 121468 - DNA, 13 bp, Artificial Sequence
  Oligonucleotide for detection of SNP TSC0030329
ttattccaacaac

SEQ ID NO: 121469 - DNA, 13 bp, Artificial Sequence
  Oligonucleotide for detection of SNP TSC0030330
gtgttatttttgy

SEQ ID NO: 121470 - DNA, 13 bp, Artificial Sequence
  Oligonucleotide for detection of SNP TSC0030330
rcaaaaataacac

SEQ ID NO: 121471 - DNA, 13 bp, Artificial Sequence
  Oligonucleotide for detection of SNP TSC0030330
gtgttagttttgy

SEQ ID NO: 121472 - DNA, 13 bp, Artificial Sequence
  Oligonucleotide for detection of SNP TSC0030330
rcaaaactaacac

SEQ ID NO: 121473 - DNA, 13 bp, Artificial Sequence
  Oligonucleotide for detection of SNP TSC0030330
gtagaagtggtay

SEQ ID NO: 121474 - DNA, 13 bp, Artificial Sequence
  Oligonucleotide for detection of SNP TSC0030330
rtaccacttctac

SEQ ID NO: 121475 - DNA, 13 bp, Artificial Sequence
  Oligonucleotide for detection of SNP TSC0030330
gtagaattggtay

SEQ ID NO: 121476 - DNA, 13 bp, Artificial Sequence
  Oligonucleotide for detection of SNP TSC0030330
rtaccaattctac

SEQ ID NO: 121477 - DNA, 13 bp, Artificial Sequence
  Oligonucleotide for detection of SNP TSC0030331
tagttaaggaggg

SEQ ID NO: 121478 - DNA, 13 bp, Artificial Sequence
  Oligonucleotide for detection of SNP TSC0030331
ccctccttaacta

SEQ ID NO: 121479 - DNA, 13 bp, Artificial Sequence
  Oligonucleotide for detection of SNP TSC0030331
tagttagggaggg

SEQ ID NO: 121480 - DNA, 13 bp, Artificial Sequence
  Oligonucleotide for detection of SNP TSC0030331
ccctccctaacta

SEQ ID NO: 121481 - DNA, 13 bp, Artificial Sequence
  Oligonucleotide for detection of SNP TSC0030335
tgatgaatgatay

SEQ ID NO: 121482 - DNA, 13 bp, Artificial Sequence
  Oligonucleotide for detection of SNP TSC0030335
rtatcattcatca

SEQ ID NO: 121483 - DNA, 13 bp, Artificial Sequence
  Oligonucleotide for detection of SNP TSC0030335
tgatgagtgatay

SEQ ID NO: 121484 - DNA, 13 bp, Artificial Sequence
  Oligonucleotide for detection of SNP TSC0030335
rtatcactcatca

SEQ ID NO: 121485 - DNA, 13 bp, Artificial Sequence
  Oligonucleotide for detection of SNP TSC0030336
ggagttttaattt

SEQ ID NO: 121486 - DNA, 13 bp, Artificial Sequence
  Oligonucleotide for detection of SNP TSC0030336
aaattaaaactcc

SEQ ID NO: 121487 - DNA, 13 bp, Artificial Sequence
  Oligonucleotide for detection of SNP TSC0030336
ggagttgtaattt

SEQ ID NO: 121488 - DNA, 13 bp, Artificial Sequence
  Oligonucleotide for detection of SNP TSC0030336
aaattacaactcc

SEQ ID NO: 121489 - DNA, 13 bp, Artificial Sequence
  Oligonucleotide for detection of SNP TSC0030336
aggttagaattty

SEQ ID NO: 121490 - DNA, 13 bp, Artificial Sequence
  Oligonucleotide for detection of SNP TSC0030336
raaattctaacct

SEQ ID NO: 121491 - DNA, 13 bp, Artificial Sequence
  Oligonucleotide for detection of SNP TSC0030336
aggttataattty

SEQ ID NO: 121492 - DNA, 13 bp, Artificial Sequence
  Oligonucleotide for detection of SNP TSC0030336
raaattataacct

SEQ ID NO: 121493 - DNA, 13 bp, Artificial Sequence
  Oligonucleotide for detection of SNP TSC0030337
ggagatgttgttg

SEQ ID NO: 121494 - DNA, 13 bp, Artificial Sequence
  Oligonucleotide for detection of SNP TSC0030337
caacaacatctcc

SEQ ID NO: 121495 - DNA, 13 bp, Artificial Sequence
  Oligonucleotide for detection of SNP TSC0030337
ggagatattgttg

SEQ ID NO: 121496 - DNA, 13 bp, Artificial Sequence
  Oligonucleotide for detection of SNP TSC0030337
caacaatatctcc

SEQ ID NO: 121497 - DNA, 13 bp, Artificial Sequence
  Oligonucleotide for detection of SNP TSC0030339
gtaaaaaaaaaaa

SEQ ID NO: 121498 - DNA, 13 bp, Artificial Sequence
  Oligonucleotide for detection of SNP TSC0030339
tttttttttttac

SEQ ID NO: 121499 - DNA, 13 bp, Artificial Sequence
  Oligonucleotide for detection of SNP TSC0030339
gtaaaataaaaaa

SEQ ID NO: 121500 - DNA, 13 bp, Artificial Sequence
  Oligonucleotide for detection of SNP TSC0030339
ttttttattttac

SEQ ID NO: 121501 - DNA, 13 bp, Artificial Sequence
  Oligonucleotide for detection of SNP TSC0030340
attgtggtttatt

SEQ ID NO: 121502 - DNA, 13 bp, Artificial Sequence
  Oligonucleotide for detection of SNP TSC0030340
aataaaccacaat

SEQ ID NO: 121503 - DNA, 13 bp, Artificial Sequence
  Oligonucleotide for detection of SNP TSC0030340
attgtgatttatt

SEQ ID NO: 121504 - DNA, 13 bp, Artificial Sequence
  Oligonucleotide for detection of SNP TSC0030340
aataaatcacaat

SEQ ID NO: 121505 - DNA, 13 bp, Artificial Sequence
  Oligonucleotide for detection of SNP TSC0030340
atcgtggtttatt

SEQ ID NO: 121506 - DNA, 13 bp, Artificial Sequence
  Oligonucleotide for detection of SNP TSC0030340
aataaaccacgat

SEQ ID NO: 121507 - DNA, 13 bp, Artificial Sequence
  Oligonucleotide for detection of SNP TSC0030340
atcgtgatttatt

SEQ ID NO: 121508 - DNA, 13 bp, Artificial Sequence
  Oligonucleotide for detection of SNP TSC0030340
aataaatcacgat

SEQ ID NO: 121509 - DNA, 13 bp, Artificial Sequence
  Oligonucleotide for detection of SNP TSC0030341
tatttaggttgga

SEQ ID NO: 121510 - DNA, 13 bp, Artificial Sequence
  Oligonucleotide for detection of SNP TSC0030341
tccaacctaaata

SEQ ID NO: 121511 - DNA, 13 bp, Artificial Sequence
  Oligonucleotide for detection of SNP TSC0030341
tatttaagttgga

SEQ ID NO: 121512 - DNA, 13 bp, Artificial Sequence
  Oligonucleotide for detection of SNP TSC0030341
tccaacttaaata

SEQ ID NO: 121513 - DNA, 13 bp, Artificial Sequence
  Oligonucleotide for detection of SNP TSC0030342
taatttgttattt

SEQ ID NO: 121514 - DNA, 13 bp, Artificial Sequence
  Oligonucleotide for detection of SNP TSC0030342
aaataacaaatta

SEQ ID NO: 121515 - DNA, 13 bp, Artificial Sequence
  Oligonucleotide for detection of SNP TSC0030342
taattttttattt

SEQ ID NO: 121516 - DNA, 13 bp, Artificial Sequence
  Oligonucleotide for detection of SNP TSC0030342
aaataaaaaatta

SEQ ID NO: 121517 - DNA, 13 bp, Artificial Sequence
  Oligonucleotide for detection of SNP TSC0030342
aagtgatagattg

SEQ ID NO: 121518 - DNA, 13 bp, Artificial Sequence
  Oligonucleotide for detection of SNP TSC0030342
caatctatcactt

SEQ ID NO: 121519 - DNA, 13 bp, Artificial Sequence
  Oligonucleotide for detection of SNP TSC0030342
aagtgaaagattg

SEQ ID NO: 121520 - DNA, 13 bp, Artificial Sequence
  Oligonucleotide for detection of SNP TSC0030342
caatctttcactt

SEQ ID NO: 121521 - DNA, 13 bp, Artificial Sequence
  Oligonucleotide for detection of SNP TSC0030343
tatttgtgataaa

SEQ ID NO: 121522 - DNA, 13 bp, Artificial Sequence
  Oligonucleotide for detection of SNP TSC0030343
tttatcacaaata

SEQ ID NO: 121523 - DNA, 13 bp, Artificial Sequence
  Oligonucleotide for detection of SNP TSC0030343
tatttgggataaa

SEQ ID NO: 121524 - DNA, 13 bp, Artificial Sequence
  Oligonucleotide for detection of SNP TSC0030343
tttatcccaaata

SEQ ID NO: 121525 - DNA, 13 bp, Artificial Sequence
  Oligonucleotide for detection of SNP TSC0030343
tatttgcgataaa

SEQ ID NO: 121526 - DNA, 13 bp, Artificial Sequence
  Oligonucleotide for detection of SNP TSC0030343
tttatcgcaaata

SEQ ID NO: 121527 - DNA, 13 bp, Artificial Sequence
  Oligonucleotide for detection of SNP TSC0030343
tttattgtaaatg

SEQ ID NO: 121528 - DNA, 13 bp, Artificial Sequence
  Oligonucleotide for detection of SNP TSC0030343
catttacaataaa

SEQ ID NO: 121529 - DNA, 13 bp, Artificial Sequence
  Oligonucleotide for detection of SNP TSC0030343
tttattttaaatg

SEQ ID NO: 121530 - DNA, 13 bp, Artificial Sequence
  Oligonucleotide for detection of SNP TSC0030343
catttaaaataaa

SEQ ID NO: 121531 - DNA, 13 bp, Artificial Sequence
  Oligonucleotide for detection of SNP TSC0030343
tttatcgtaaatg

SEQ ID NO: 121532 - DNA, 13 bp, Artificial Sequence
  Oligonucleotide for detection of SNP TSC0030343
catttacgataaa

SEQ ID NO: 121533 - DNA, 13 bp, Artificial Sequence
  Oligonucleotide for detection of SNP TSC0030344
tgtggttggtggy

SEQ ID NO: 121534 - DNA, 13 bp, Artificial Sequence
  Oligonucleotide for detection of SNP TSC0030344
rccaccaaccaca

SEQ ID NO: 121535 - DNA, 13 bp, Artificial Sequence
  Oligonucleotide for detection of SNP TSC0030344
tgtggtcggtggy

SEQ ID NO: 121536 - DNA, 13 bp, Artificial Sequence
  Oligonucleotide for detection of SNP TSC0030344
rccaccgaccaca

SEQ ID NO: 121537 - DNA, 13 bp, Artificial Sequence
  Oligonucleotide for detection of SNP TSC0030344
gttattggttata

SEQ ID NO: 121538 - DNA, 13 bp, Artificial Sequence
  Oligonucleotide for detection of SNP TSC0030344
tataaccaataac

SEQ ID NO: 121539 - DNA, 13 bp, Artificial Sequence
  Oligonucleotide for detection of SNP TSC0030344
gttattagttata

SEQ ID NO: 121540 - DNA, 13 bp, Artificial Sequence
  Oligonucleotide for detection of SNP TSC0030344
tataactaataac

SEQ ID NO: 121541 - DNA, 13 bp, Artificial Sequence
  Oligonucleotide for detection of SNP TSC0030344
gttatcggttata

SEQ ID NO: 121542 - DNA, 13 bp, Artificial Sequence
  Oligonucleotide for detection of SNP TSC0030344
tataaccgataac

SEQ ID NO: 121543 - DNA, 13 bp, Artificial Sequence
  Oligonucleotide for detection of SNP TSC0030352
tgagggagggttg

SEQ ID NO: 121544 - DNA, 13 bp, Artificial Sequence
  Oligonucleotide for detection of SNP TSC0030352
caaccctccctca

SEQ ID NO: 121545 - DNA, 13 bp, Artificial Sequence
  Oligonucleotide for detection of SNP TSC0030352
tgagggggggttg

SEQ ID NO: 121546 - DNA, 13 bp, Artificial Sequence
  Oligonucleotide for detection of SNP TSC0030352
caaccccccctca

SEQ ID NO: 121547 - DNA, 13 bp, Artificial Sequence
  Oligonucleotide for detection of SNP TSC0030364
gagatggggttty

SEQ ID NO: 121548 - DNA, 13 bp, Artificial Sequence
  Oligonucleotide for detection of SNP TSC0030364
raaaccccatctc

SEQ ID NO: 121549 - DNA, 13 bp, Artificial Sequence
  Oligonucleotide for detection of SNP TSC0030364
gagatgaggttty

SEQ ID NO: 121550 - DNA, 13 bp, Artificial Sequence
  Oligonucleotide for detection of SNP TSC0030364
raaacctcatctc

SEQ ID NO: 121551 - DNA, 13 bp, Artificial Sequence
  Oligonucleotide for detection of SNP TSC0030364
gagacggggttty

SEQ ID NO: 121552 - DNA, 13 bp, Artificial Sequence
  Oligonucleotide for detection of SNP TSC0030364
raaaccccgtctc

SEQ ID NO: 121553 - DNA, 13 bp, Artificial Sequence
  Oligonucleotide for detection of SNP TSC0030364
gagacgaggttty

SEQ ID NO: 121554 - DNA, 13 bp, Artificial Sequence
  Oligonucleotide for detection of SNP TSC0030364
raaacctcgtctc

SEQ ID NO: 121555 - DNA, 13 bp, Artificial Sequence
  Oligonucleotide for detection of SNP TSC0030365
attgatattattt

SEQ ID NO: 121556 - DNA, 13 bp, Artificial Sequence
  Oligonucleotide for detection of SNP TSC0030365
aaataatatcaat

SEQ ID NO: 121557 - DNA, 13 bp, Artificial Sequence
  Oligonucleotide for detection of SNP TSC0030365
attgatgttattt

SEQ ID NO: 121558 - DNA, 13 bp, Artificial Sequence
  Oligonucleotide for detection of SNP TSC0030365
aaataacatcaat

SEQ ID NO: 121559 - DNA, 13 bp, Artificial Sequence
  Oligonucleotide for detection of SNP TSC0030365
attgacgttattt

SEQ ID NO: 121560 - DNA, 13 bp, Artificial Sequence
  Oligonucleotide for detection of SNP TSC0030365
aaataacgtcaat

SEQ ID NO: 121561 - DNA, 13 bp, Artificial Sequence
  Oligonucleotide for detection of SNP TSC0030365
aaatgatgttagt

SEQ ID NO: 121562 - DNA, 13 bp, Artificial Sequence
  Oligonucleotide for detection of SNP TSC0030365
actaacatcattt

SEQ ID NO: 121563 - DNA, 13 bp, Artificial Sequence
  Oligonucleotide for detection of SNP TSC0030365
aaatgacgttagt

SEQ ID NO: 121564 - DNA, 13 bp, Artificial Sequence
  Oligonucleotide for detection of SNP TSC0030365
actaacgtcattt

SEQ ID NO: 121565 - DNA, 13 bp, Artificial Sequence
  Oligonucleotide for detection of SNP TSC0030367
tgtataaagagtt

SEQ ID NO: 121566 - DNA, 13 bp, Artificial Sequence
  Oligonucleotide for detection of SNP TSC0030367
aactctttataca

SEQ ID NO: 121567 - DNA, 13 bp, Artificial Sequence
  Oligonucleotide for detection of SNP TSC0030367
tgtatagagagtt

SEQ ID NO: 121568 - DNA, 13 bp, Artificial Sequence
  Oligonucleotide for detection of SNP TSC0030367
aactctctataca

SEQ ID NO: 121569 - DNA, 13 bp, Artificial Sequence
  Oligonucleotide for detection of SNP TSC0030367
cgtataaagagtt

SEQ ID NO: 121570 - DNA, 13 bp, Artificial Sequence
  Oligonucleotide for detection of SNP TSC0030367
aactctttatacg

SEQ ID NO: 121571 - DNA, 13 bp, Artificial Sequence
  Oligonucleotide for detection of SNP TSC0030367
cgtatagagagtt

SEQ ID NO: 121572 - DNA, 13 bp, Artificial Sequence
  Oligonucleotide for detection of SNP TSC0030367
aactctctatacg

SEQ ID NO: 121573 - DNA, 13 bp, Artificial Sequence
  Oligonucleotide for detection of SNP TSC0030373
ttgttatttatay

SEQ ID NO: 121574 - DNA, 13 bp, Artificial Sequence
  Oligonucleotide for detection of SNP TSC0030373
rtataaataacaa

SEQ ID NO: 121575 - DNA, 13 bp, Artificial Sequence
  Oligonucleotide for detection of SNP TSC0030373
ttgttagttatay

SEQ ID NO: 121576 - DNA, 13 bp, Artificial Sequence
  Oligonucleotide for detection of SNP TSC0030373
rtataactaacaa

SEQ ID NO: 121577 - DNA, 13 bp, Artificial Sequence
  Oligonucleotide for detection of SNP TSC0030373
tcgttatttatay

SEQ ID NO: 121578 - DNA, 13 bp, Artificial Sequence
  Oligonucleotide for detection of SNP TSC0030373
rtataaataacga

SEQ ID NO: 121579 - DNA, 13 bp, Artificial Sequence
  Oligonucleotide for detection of SNP TSC0030373
tcgttagttatay

SEQ ID NO: 121580 - DNA, 13 bp, Artificial Sequence
  Oligonucleotide for detection of SNP TSC0030373
rtataactaacga

SEQ ID NO: 121581 - DNA, 13 bp, Artificial Sequence
  Oligonucleotide for detection of SNP TSC0030373
gtatgggtgatgg

SEQ ID NO: 121582 - DNA, 13 bp, Artificial Sequence
  Oligonucleotide for detection of SNP TSC0030373
ccatcacccatac

SEQ ID NO: 121583 - DNA, 13 bp, Artificial Sequence
  Oligonucleotide for detection of SNP TSC0030373
gtatggttgatgg

SEQ ID NO: 121584 - DNA, 13 bp, Artificial Sequence
  Oligonucleotide for detection of SNP TSC0030373
ccatcaaccatac

SEQ ID NO: 121585 - DNA, 13 bp, Artificial Sequence
  Oligonucleotide for detection of SNP TSC0030373
gtatgggtgacgg

SEQ ID NO: 121586 - DNA, 13 bp, Artificial Sequence
  Oligonucleotide for detection of SNP TSC0030373
ccgtcacccatac

SEQ ID NO: 121587 - DNA, 13 bp, Artificial Sequence
  Oligonucleotide for detection of SNP TSC0030373
gtatggttgacgg

SEQ ID NO: 121588 - DNA, 13 bp, Artificial Sequence
  Oligonucleotide for detection of SNP TSC0030373
ccgtcaaccatac

SEQ ID NO: 121589 - DNA, 13 bp, Artificial Sequence
  Oligonucleotide for detection of SNP TSC0030374
tgtgtaatgtgag

SEQ ID NO: 121590 - DNA, 13 bp, Artificial Sequence
  Oligonucleotide for detection of SNP TSC0030374
ctcacattacaca

SEQ ID NO: 121591 - DNA, 13 bp, Artificial Sequence
  Oligonucleotide for detection of SNP TSC0030374
tgtgtagtgtgag

SEQ ID NO: 121592 - DNA, 13 bp, Artificial Sequence
  Oligonucleotide for detection of SNP TSC0030374
ctcacactacaca

SEQ ID NO: 121593 - DNA, 13 bp, Artificial Sequence
  Oligonucleotide for detection of SNP TSC0030375
gttggaatatagt

SEQ ID NO: 121594 - DNA, 13 bp, Artificial Sequence
  Oligonucleotide for detection of SNP TSC0030375
actatattccaac

SEQ ID NO: 121595 - DNA, 13 bp, Artificial Sequence
  Oligonucleotide for detection of SNP TSC0030375
gttggagtatagt

SEQ ID NO: 121596 - DNA, 13 bp, Artificial Sequence
  Oligonucleotide for detection of SNP TSC0030375
actatactccaac

SEQ ID NO: 121597 - DNA, 13 bp, Artificial Sequence
  Oligonucleotide for detection of SNP TSC0030376
agataagttttgt

SEQ ID NO: 121598 - DNA, 13 bp, Artificial Sequence
  Oligonucleotide for detection of SNP TSC0030376
acaaaacttatct

SEQ ID NO: 121599 - DNA, 13 bp, Artificial Sequence
  Oligonucleotide for detection of SNP TSC0030376
agataatttttgt

SEQ ID NO: 121600 - DNA, 13 bp, Artificial Sequence
  Oligonucleotide for detection of SNP TSC0030376
acaaaaattatct

SEQ ID NO: 121601 - DNA, 13 bp, Artificial Sequence
  Oligonucleotide for detection of SNP TSC0030376
ataaaatttattt

SEQ ID NO: 121602 - DNA, 13 bp, Artificial Sequence
  Oligonucleotide for detection of SNP TSC0030376
aaataaattttat

SEQ ID NO: 121603 - DNA, 13 bp, Artificial Sequence
  Oligonucleotide for detection of SNP TSC0030376
ataaaaattattt

SEQ ID NO: 121604 - DNA, 13 bp, Artificial Sequence
  Oligonucleotide for detection of SNP TSC0030376
aaataatttttat

SEQ ID NO: 121605 - DNA, 13 bp, Artificial Sequence
  Oligonucleotide for detection of SNP TSC0030377
ttatggtggttty

SEQ ID NO: 121606 - DNA, 13 bp, Artificial Sequence
  Oligonucleotide for detection of SNP TSC0030377
raaaccaccataa

SEQ ID NO: 121607 - DNA, 13 bp, Artificial Sequence
  Oligonucleotide for detection of SNP TSC0030377
ttatggcggttty

SEQ ID NO: 121608 - DNA, 13 bp, Artificial Sequence
  Oligonucleotide for detection of SNP TSC0030377
raaaccgccataa

SEQ ID NO: 121609 - DNA, 13 bp, Artificial Sequence
  Oligonucleotide for detection of SNP TSC0030377
ggggttgttatag

SEQ ID NO: 121610 - DNA, 13 bp, Artificial Sequence
  Oligonucleotide for detection of SNP TSC0030377
ctataacaacccc

SEQ ID NO: 121611 - DNA, 13 bp, Artificial Sequence
  Oligonucleotide for detection of SNP TSC0030377
ggggttattatag

SEQ ID NO: 121612 - DNA, 13 bp, Artificial Sequence
  Oligonucleotide for detection of SNP TSC0030377
ctataataacccc

SEQ ID NO: 121613 - DNA, 13 bp, Artificial Sequence
  Oligonucleotide for detection of SNP TSC0030377
ggggtcgttatag

SEQ ID NO: 121614 - DNA, 13 bp, Artificial Sequence
  Oligonucleotide for detection of SNP TSC0030377
ctataacgacccc

SEQ ID NO: 121615 - DNA, 13 bp, Artificial Sequence
  Oligonucleotide for detection of SNP TSC0030378
aagaaaaggtaat

SEQ ID NO: 121616 - DNA, 13 bp, Artificial Sequence
  Oligonucleotide for detection of SNP TSC0030378
attaccttttctt

SEQ ID NO: 121617 - DNA, 13 bp, Artificial Sequence
  Oligonucleotide for detection of SNP TSC0030378
aagaaagggtaat

SEQ ID NO: 121618 - DNA, 13 bp, Artificial Sequence
  Oligonucleotide for detection of SNP TSC0030378
attaccctttctt

SEQ ID NO: 121619 - DNA, 13 bp, Artificial Sequence
  Oligonucleotide for detection of SNP TSC0030379
agttttgtagggy

SEQ ID NO: 121620 - DNA, 13 bp, Artificial Sequence
  Oligonucleotide for detection of SNP TSC0030379
rccctacaaaact

SEQ ID NO: 121621 - DNA, 13 bp, Artificial Sequence
  Oligonucleotide for detection of SNP TSC0030384
gagtttgatttty

SEQ ID NO: 121622 - DNA, 13 bp, Artificial Sequence
  Oligonucleotide for detection of SNP TSC0030384
raaaatcaaactc

SEQ ID NO: 121623 - DNA, 13 bp, Artificial Sequence
  Oligonucleotide for detection of SNP TSC0030384
gagtttaatttty

SEQ ID NO: 121624 - DNA, 13 bp, Artificial Sequence
  Oligonucleotide for detection of SNP TSC0030384
raaaattaaactc

SEQ ID NO: 121625 - DNA, 13 bp, Artificial Sequence
  Oligonucleotide for detection of SNP TSC0030385
ggatgtattttaa

SEQ ID NO: 121626 - DNA, 13 bp, Artificial Sequence
  Oligonucleotide for detection of SNP TSC0030385
ttaaaatacatcc

SEQ ID NO: 121627 - DNA, 13 bp, Artificial Sequence
  Oligonucleotide for detection of SNP TSC0030385
ggatgtgttttaa

SEQ ID NO: 121628 - DNA, 13 bp, Artificial Sequence
  Oligonucleotide for detection of SNP TSC0030385
ttaaaacacatcc

SEQ ID NO: 121629 - DNA, 13 bp, Artificial Sequence
  Oligonucleotide for detection of SNP TSC0030385
ggatgcgttttaa

SEQ ID NO: 121630 - DNA, 13 bp, Artificial Sequence
  Oligonucleotide for detection of SNP TSC0030385
ttaaaacgcatcc

SEQ ID NO: 121631 - DNA, 13 bp, Artificial Sequence
  Oligonucleotide for detection of SNP TSC0030385
ttgaagtgtatty

SEQ ID NO: 121632 - DNA, 13 bp, Artificial Sequence
  Oligonucleotide for detection of SNP TSC0030385
raatacacttcaa

SEQ ID NO: 121633 - DNA, 13 bp, Artificial Sequence
  Oligonucleotide for detection of SNP TSC0030385
ttgaagcgtatty

SEQ ID NO: 121634 - DNA, 13 bp, Artificial Sequence
  Oligonucleotide for detection of SNP TSC0030385
raatacgcttcaa

SEQ ID NO: 121635 - DNA, 13 bp, Artificial Sequence
  Oligonucleotide for detection of SNP TSC0030386
atttttagtgtty

SEQ ID NO: 121636 - DNA, 13 bp, Artificial Sequence
  Oligonucleotide for detection of SNP TSC0030386
raacactaaaaat

SEQ ID NO: 121637 - DNA, 13 bp, Artificial Sequence
  Oligonucleotide for detection of SNP TSC0030386
attttttgtgtty

SEQ ID NO: 121638 - DNA, 13 bp, Artificial Sequence
  Oligonucleotide for detection of SNP TSC0030386
raacacaaaaaat

SEQ ID NO: 121639 - DNA, 13 bp, Artificial Sequence
  Oligonucleotide for detection of SNP TSC0030386
atttttcgtgtty

SEQ ID NO: 121640 - DNA, 13 bp, Artificial Sequence
  Oligonucleotide for detection of SNP TSC0030386
raacacgaaaaat

SEQ ID NO: 121641 - DNA, 13 bp, Artificial Sequence
  Oligonucleotide for detection of SNP TSC0030386
gggtattaggggt

SEQ ID NO: 121642 - DNA, 13 bp, Artificial Sequence
  Oligonucleotide for detection of SNP TSC0030386
acccctaataccc

SEQ ID NO: 121643 - DNA, 13 bp, Artificial Sequence
  Oligonucleotide for detection of SNP TSC0030386
gggtatgaggggt

SEQ ID NO: 121644 - DNA, 13 bp, Artificial Sequence
  Oligonucleotide for detection of SNP TSC0030386
acccctcataccc

SEQ ID NO: 121645 - DNA, 13 bp, Artificial Sequence
  Oligonucleotide for detection of SNP TSC0030386
gggtacgaggggt

SEQ ID NO: 121646 - DNA, 13 bp, Artificial Sequence
  Oligonucleotide for detection of SNP TSC0030386
acccctcgtaccc

SEQ ID NO: 121647 - DNA, 13 bp, Artificial Sequence
  Oligonucleotide for detection of SNP TSC0030388
ataattaaagtaa

SEQ ID NO: 121648 - DNA, 13 bp, Artificial Sequence
  Oligonucleotide for detection of SNP TSC0030388
ttactttaattat

SEQ ID NO: 121649 - DNA, 13 bp, Artificial Sequence
  Oligonucleotide for detection of SNP TSC0030388
ataattgaagtaa

SEQ ID NO: 121650 - DNA, 13 bp, Artificial Sequence
  Oligonucleotide for detection of SNP TSC0030388
ttacttcaattat

SEQ ID NO: 121651 - DNA, 13 bp, Artificial Sequence
  Oligonucleotide for detection of SNP TSC0030388
ataatcgaagtaa

SEQ ID NO: 121652 - DNA, 13 bp, Artificial Sequence
  Oligonucleotide for detection of SNP TSC0030388
ttacttcgattat

SEQ ID NO: 121653 - DNA, 13 bp, Artificial Sequence
  Oligonucleotide for detection of SNP TSC0030388
ttattttgattat

SEQ ID NO: 121654 - DNA, 13 bp, Artificial Sequence
  Oligonucleotide for detection of SNP TSC0030388
ataatcaaaataa

SEQ ID NO: 121655 - DNA, 13 bp, Artificial Sequence
  Oligonucleotide for detection of SNP TSC0030388
ttatttcgattat

SEQ ID NO: 121656 - DNA, 13 bp, Artificial Sequence
  Oligonucleotide for detection of SNP TSC0030388
ataatcgaaataa

SEQ ID NO: 121657 - DNA, 13 bp, Artificial Sequence
  Oligonucleotide for detection of SNP TSC0030392
aaattagttaggy

SEQ ID NO: 121658 - DNA, 13 bp, Artificial Sequence
  Oligonucleotide for detection of SNP TSC0030392
rcctaactaattt

SEQ ID NO: 121659 - DNA, 13 bp, Artificial Sequence
  Oligonucleotide for detection of SNP TSC0030392
aaattaattaggy

SEQ ID NO: 121660 - DNA, 13 bp, Artificial Sequence
  Oligonucleotide for detection of SNP TSC0030392
rcctaattaattt

SEQ ID NO: 121661 - DNA, 13 bp, Artificial Sequence
  Oligonucleotide for detection of SNP TSC0030393
tggaagtaagggy

SEQ ID NO: 121662 - DNA, 13 bp, Artificial Sequence
  Oligonucleotide for detection of SNP TSC0030393
rcccttacttcca

SEQ ID NO: 121663 - DNA, 13 bp, Artificial Sequence
  Oligonucleotide for detection of SNP TSC0030393
tggaaggaagggy

SEQ ID NO: 121664 - DNA, 13 bp, Artificial Sequence
  Oligonucleotide for detection of SNP TSC0030393
rcccttccttcca

SEQ ID NO: 121665 - DNA, 13 bp, Artificial Sequence
  Oligonucleotide for detection of SNP TSC0030394
gttagtaggtagy

SEQ ID NO: 121666 - DNA, 13 bp, Artificial Sequence
  Oligonucleotide for detection of SNP TSC0030394
rctacctactaac

SEQ ID NO: 121667 - DNA, 13 bp, Artificial Sequence
  Oligonucleotide for detection of SNP TSC0030394
gttagtgggtagy

SEQ ID NO: 121668 - DNA, 13 bp, Artificial Sequence
  Oligonucleotide for detection of SNP TSC0030394
rctacccactaac

SEQ ID NO: 121669 - DNA, 13 bp, Artificial Sequence
  Oligonucleotide for detection of SNP TSC0030394
gttagcgggtagy

SEQ ID NO: 121670 - DNA, 13 bp, Artificial Sequence
  Oligonucleotide for detection of SNP TSC0030394
rctacccgctaac

SEQ ID NO: 121671 - DNA, 13 bp, Artificial Sequence
  Oligonucleotide for detection of SNP TSC0030394
gttgtttgttgay

SEQ ID NO: 121672 - DNA, 13 bp, Artificial Sequence
  Oligonucleotide for detection of SNP TSC0030394
rtcaacaaacaac

SEQ ID NO: 121673 - DNA, 13 bp, Artificial Sequence
  Oligonucleotide for detection of SNP TSC0030394
gttgttcgttgay

SEQ ID NO: 121674 - DNA, 13 bp, Artificial Sequence
  Oligonucleotide for detection of SNP TSC0030394
rtcaacgaacaac

SEQ ID NO: 121675 - DNA, 13 bp, Artificial Sequence
  Oligonucleotide for detection of SNP TSC0030398
gcgttttgttttg

SEQ ID NO: 121676 - DNA, 13 bp, Artificial Sequence
  Oligonucleotide for detection of SNP TSC0030398
caaaacaaaacgc

SEQ ID NO: 121677 - DNA, 13 bp, Artificial Sequence
  Oligonucleotide for detection of SNP TSC0030398
gtgtttcgttttg

SEQ ID NO: 121678 - DNA, 13 bp, Artificial Sequence
  Oligonucleotide for detection of SNP TSC0030398
caaaacgaaacac

SEQ ID NO: 121679 - DNA, 13 bp, Artificial Sequence
  Oligonucleotide for detection of SNP TSC0030398
gcgtttcgttttg

SEQ ID NO: 121680 - DNA, 13 bp, Artificial Sequence
  Oligonucleotide for detection of SNP TSC0030398
caaaacgaaacgc

SEQ ID NO: 121681 - DNA, 13 bp, Artificial Sequence
  Oligonucleotide for detection of SNP TSC0030398
tagagtgagatgy

SEQ ID NO: 121682 - DNA, 13 bp, Artificial Sequence
  Oligonucleotide for detection of SNP TSC0030398
rcatctcactcta

SEQ ID NO: 121683 - DNA, 13 bp, Artificial Sequence
  Oligonucleotide for detection of SNP TSC0030398
tagagtaagatgy

SEQ ID NO: 121684 - DNA, 13 bp, Artificial Sequence
  Oligonucleotide for detection of SNP TSC0030398
rcatcttactcta

SEQ ID NO: 121685 - DNA, 13 bp, Artificial Sequence
  Oligonucleotide for detection of SNP TSC0030398
tagagcgagatgy

SEQ ID NO: 121686 - DNA, 13 bp, Artificial Sequence
  Oligonucleotide for detection of SNP TSC0030398
rcatctcgctcta

SEQ ID NO: 121687 - DNA, 13 bp, Artificial Sequence
  Oligonucleotide for detection of SNP TSC0030398
tagagtaagacgy

SEQ ID NO: 121688 - DNA, 13 bp, Artificial Sequence
  Oligonucleotide for detection of SNP TSC0030398
rcgtcttactcta

SEQ ID NO: 121689 - DNA, 13 bp, Artificial Sequence
  Oligonucleotide for detection of SNP TSC0030398
tagagtgagacgy

SEQ ID NO: 121690 - DNA, 13 bp, Artificial Sequence
  Oligonucleotide for detection of SNP TSC0030398
rcgtctcactcta

SEQ ID NO: 121691 - DNA, 13 bp, Artificial Sequence
  Oligonucleotide for detection of SNP TSC0030398
tagagcgagacgy

SEQ ID NO: 121692 - DNA, 13 bp, Artificial Sequence
  Oligonucleotide for detection of SNP TSC0030398
rcgtctcgctcta

SEQ ID NO: 121693 - DNA, 13 bp, Artificial Sequence
  Oligonucleotide for detection of SNP TSC0030400
ggttttaagggaa

SEQ ID NO: 121694 - DNA, 13 bp, Artificial Sequence
  Oligonucleotide for detection of SNP TSC0030400
ttcccttaaaacc

SEQ ID NO: 121695 - DNA, 13 bp, Artificial Sequence
  Oligonucleotide for detection of SNP TSC0030400
ggttttgagggaa

SEQ ID NO: 121696 - DNA, 13 bp, Artificial Sequence
  Oligonucleotide for detection of SNP TSC0030400
ttccctcaaaacc

SEQ ID NO: 121697 - DNA, 13 bp, Artificial Sequence
  Oligonucleotide for detection of SNP TSC0030400
ggtttcgagggaa

SEQ ID NO: 121698 - DNA, 13 bp, Artificial Sequence
  Oligonucleotide for detection of SNP TSC0030400
ttccctcgaaacc

SEQ ID NO: 121699 - DNA, 13 bp, Artificial Sequence
  Oligonucleotide for detection of SNP TSC0030401
agggaaagttaty

SEQ ID NO: 121700 - DNA, 13 bp, Artificial Sequence
  Oligonucleotide for detection of SNP TSC0030401
rataactttccct

SEQ ID NO: 121701 - DNA, 13 bp, Artificial Sequence
  Oligonucleotide for detection of SNP TSC0030401
agggaaggttaty

SEQ ID NO: 121702 - DNA, 13 bp, Artificial Sequence
  Oligonucleotide for detection of SNP TSC0030401
rataaccttccct

SEQ ID NO: 121703 - DNA, 13 bp, Artificial Sequence
  Oligonucleotide for detection of SNP TSC0030403
tatggaggaatag

SEQ ID NO: 121704 - DNA, 13 bp, Artificial Sequence
  Oligonucleotide for detection of SNP TSC0030403
ctattcctccata

SEQ ID NO: 121705 - DNA, 13 bp, Artificial Sequence
  Oligonucleotide for detection of SNP TSC0030403
tatggaagaatag

SEQ ID NO: 121706 - DNA, 13 bp, Artificial Sequence
  Oligonucleotide for detection of SNP TSC0030403
ctattcttccata

SEQ ID NO: 121707 - DNA, 13 bp, Artificial Sequence
  Oligonucleotide for detection of SNP TSC0030404
taaaaaagttttt

SEQ ID NO: 121708 - DNA, 13 bp, Artificial Sequence
  Oligonucleotide for detection of SNP TSC0030404
aaaaactttttta

SEQ ID NO: 121709 - DNA, 13 bp, Artificial Sequence
  Oligonucleotide for detection of SNP TSC0030404
taaaaaggttttt

SEQ ID NO: 121710 - DNA, 13 bp, Artificial Sequence
  Oligonucleotide for detection of SNP TSC0030404
aaaaaccttttta

SEQ ID NO: 121711 - DNA, 13 bp, Artificial Sequence
  Oligonucleotide for detection of SNP TSC0030405
gtatttggtaagt

SEQ ID NO: 121712 - DNA, 13 bp, Artificial Sequence
  Oligonucleotide for detection of SNP TSC0030405
acttaccaaatac

SEQ ID NO: 121713 - DNA, 13 bp, Artificial Sequence
  Oligonucleotide for detection of SNP TSC0030405
gtatttagtaagt

SEQ ID NO: 121714 - DNA, 13 bp, Artificial Sequence
  Oligonucleotide for detection of SNP TSC0030405
acttactaaatac

SEQ ID NO: 121715 - DNA, 13 bp, Artificial Sequence
  Oligonucleotide for detection of SNP TSC0030406
gagtttattttga

SEQ ID NO: 121716 - DNA, 13 bp, Artificial Sequence
  Oligonucleotide for detection of SNP TSC0030406
tcaaaataaactc

SEQ ID NO: 121717 - DNA, 13 bp, Artificial Sequence
  Oligonucleotide for detection of SNP TSC0030406
gagtttgttttga

SEQ ID NO: 121718 - DNA, 13 bp, Artificial Sequence
  Oligonucleotide for detection of SNP TSC0030406
tcaaaacaaactc

SEQ ID NO: 121719 - DNA, 13 bp, Artificial Sequence
  Oligonucleotide for detection of SNP TSC0030406
gagttcgttttga

SEQ ID NO: 121720 - DNA, 13 bp, Artificial Sequence
  Oligonucleotide for detection of SNP TSC0030406
tcaaaacgaactc

SEQ ID NO: 121721 - DNA, 13 bp, Artificial Sequence
  Oligonucleotide for detection of SNP TSC0030406
ttagagtgagtty

SEQ ID NO: 121722 - DNA, 13 bp, Artificial Sequence
  Oligonucleotide for detection of SNP TSC0030406
raactcactctaa

SEQ ID NO: 121723 - DNA, 13 bp, Artificial Sequence
  Oligonucleotide for detection of SNP TSC0030406
ttagagcgagtty

SEQ ID NO: 121724 - DNA, 13 bp, Artificial Sequence
  Oligonucleotide for detection of SNP TSC0030406
raactcgctctaa

SEQ ID NO: 121725 - DNA, 13 bp, Artificial Sequence
  Oligonucleotide for detection of SNP TSC0030407
aatatagtggtta

SEQ ID NO: 121726 - DNA, 13 bp, Artificial Sequence
  Oligonucleotide for detection of SNP TSC0030407
taaccactatatt

SEQ ID NO: 121727 - DNA, 13 bp, Artificial Sequence
  Oligonucleotide for detection of SNP TSC0030407
aatataatggtta

SEQ ID NO: 121728 - DNA, 13 bp, Artificial Sequence
  Oligonucleotide for detection of SNP TSC0030407
taaccattatatt

SEQ ID NO: 121729 - DNA, 13 bp, Artificial Sequence
  Oligonucleotide for detection of SNP TSC0030408
tagttggaggggg

SEQ ID NO: 121730 - DNA, 13 bp, Artificial Sequence
  Oligonucleotide for detection of SNP TSC0030408
ccccctccaacta

SEQ ID NO: 121731 - DNA, 13 bp, Artificial Sequence
  Oligonucleotide for detection of SNP TSC0030408
tagttgtaggggg

SEQ ID NO: 121732 - DNA, 13 bp, Artificial Sequence
  Oligonucleotide for detection of SNP TSC0030408
ccccctacaacta

SEQ ID NO: 121733 - DNA, 13 bp, Artificial Sequence
  Oligonucleotide for detection of SNP TSC0030408
ttttttataattg

SEQ ID NO: 121734 - DNA, 13 bp, Artificial Sequence
  Oligonucleotide for detection of SNP TSC0030408
caattataaaaaa

SEQ ID NO: 121735 - DNA, 13 bp, Artificial Sequence
  Oligonucleotide for detection of SNP TSC0030413
gtgtattttgggt

SEQ ID NO: 121736 - DNA, 13 bp, Artificial Sequence
  Oligonucleotide for detection of SNP TSC0030413
acccaaaatacac

SEQ ID NO: 121737 - DNA, 13 bp, Artificial Sequence
  Oligonucleotide for detection of SNP TSC0030413
gtgtatgttgggt

SEQ ID NO: 121738 - DNA, 13 bp, Artificial Sequence
  Oligonucleotide for detection of SNP TSC0030413
acccaacatacac

SEQ ID NO: 121739 - DNA, 13 bp, Artificial Sequence
  Oligonucleotide for detection of SNP TSC0030413
gcgtattttgggt

SEQ ID NO: 121740 - DNA, 13 bp, Artificial Sequence
  Oligonucleotide for detection of SNP TSC0030413
acccaaaatacgc

SEQ ID NO: 121741 - DNA, 13 bp, Artificial Sequence
  Oligonucleotide for detection of SNP TSC0030413
gcgtatgttgggt

SEQ ID NO: 121742 - DNA, 13 bp, Artificial Sequence
  Oligonucleotide for detection of SNP TSC0030413
acccaacatacgc

SEQ ID NO: 121743 - DNA, 13 bp, Artificial Sequence
  Oligonucleotide for detection of SNP TSC0030413
gtgtacgttgggt

SEQ ID NO: 121744 - DNA, 13 bp, Artificial Sequence
  Oligonucleotide for detection of SNP TSC0030413
acccaacgtacac

SEQ ID NO: 121745 - DNA, 13 bp, Artificial Sequence
  Oligonucleotide for detection of SNP TSC0030413
gcgtacgttgggt

SEQ ID NO: 121746 - DNA, 13 bp, Artificial Sequence
  Oligonucleotide for detection of SNP TSC0030413
acccaacgtacgc

SEQ ID NO: 121747 - DNA, 13 bp, Artificial Sequence
  Oligonucleotide for detection of SNP TSC0030413
atttagggtgtgy

SEQ ID NO: 121748 - DNA, 13 bp, Artificial Sequence
  Oligonucleotide for detection of SNP TSC0030413
rcacaccctaaat

SEQ ID NO: 121749 - DNA, 13 bp, Artificial Sequence
  Oligonucleotide for detection of SNP TSC0030413
atttagtgtgtgy

SEQ ID NO: 121750 - DNA, 13 bp, Artificial Sequence
  Oligonucleotide for detection of SNP TSC0030413
rcacacactaaat

SEQ ID NO: 121751 - DNA, 13 bp, Artificial Sequence
  Oligonucleotide for detection of SNP TSC0030413
atttagggtgcgy

SEQ ID NO: 121752 - DNA, 13 bp, Artificial Sequence
  Oligonucleotide for detection of SNP TSC0030413
rcgcaccctaaat

SEQ ID NO: 121753 - DNA, 13 bp, Artificial Sequence
  Oligonucleotide for detection of SNP TSC0030413
atttagcgtgtgy

SEQ ID NO: 121754 - DNA, 13 bp, Artificial Sequence
  Oligonucleotide for detection of SNP TSC0030413
rcacacgctaaat

SEQ ID NO: 121755 - DNA, 13 bp, Artificial Sequence
  Oligonucleotide for detection of SNP TSC0030413
atttagtgtgcgy

SEQ ID NO: 121756 - DNA, 13 bp, Artificial Sequence
  Oligonucleotide for detection of SNP TSC0030413
rcgcacactaaat

SEQ ID NO: 121757 - DNA, 13 bp, Artificial Sequence
  Oligonucleotide for detection of SNP TSC0030413
atttagcgtgcgy

SEQ ID NO: 121758 - DNA, 13 bp, Artificial Sequence
  Oligonucleotide for detection of SNP TSC0030413
rcgcacgctaaat

SEQ ID NO: 121759 - DNA, 13 bp, Artificial Sequence
  Oligonucleotide for detection of SNP TSC0030415
tttagggttttay

SEQ ID NO: 121760 - DNA, 13 bp, Artificial Sequence
  Oligonucleotide for detection of SNP TSC0030415
rtaaaaccctaaa

SEQ ID NO: 121761 - DNA, 13 bp, Artificial Sequence
  Oligonucleotide for detection of SNP TSC0030417
agaaaggagtaty

SEQ ID NO: 121762 - DNA, 13 bp, Artificial Sequence
  Oligonucleotide for detection of SNP TSC0030417
ratactcctttct

SEQ ID NO: 121763 - DNA, 13 bp, Artificial Sequence
  Oligonucleotide for detection of SNP TSC0030417
agaaagaagtaty

SEQ ID NO: 121764 - DNA, 13 bp, Artificial Sequence
  Oligonucleotide for detection of SNP TSC0030417
ratacttctttct

SEQ ID NO: 121765 - DNA, 13 bp, Artificial Sequence
  Oligonucleotide for detection of SNP TSC0030418
aggaaggtatgag

SEQ ID NO: 121766 - DNA, 13 bp, Artificial Sequence
  Oligonucleotide for detection of SNP TSC0030418
ctcataccttcct

SEQ ID NO: 121767 - DNA, 13 bp, Artificial Sequence
  Oligonucleotide for detection of SNP TSC0030418
aggaagttatgag

SEQ ID NO: 121768 - DNA, 13 bp, Artificial Sequence
  Oligonucleotide for detection of SNP TSC0030418
ctcataacttcct

SEQ ID NO: 121769 - DNA, 13 bp, Artificial Sequence
  Oligonucleotide for detection of SNP TSC0030421
tagtgatggtggt

SEQ ID NO: 121770 - DNA, 13 bp, Artificial Sequence
  Oligonucleotide for detection of SNP TSC0030421
accaccatcacta

SEQ ID NO: 121771 - DNA, 13 bp, Artificial Sequence
  Oligonucleotide for detection of SNP TSC0030421
tagtgacggtggt

SEQ ID NO: 121772 - DNA, 13 bp, Artificial Sequence
  Oligonucleotide for detection of SNP TSC0030421
accaccgtcacta

SEQ ID NO: 121773 - DNA, 13 bp, Artificial Sequence
  Oligonucleotide for detection of SNP TSC0030422
attatagaattaa

SEQ ID NO: 121774 - DNA, 13 bp, Artificial Sequence
  Oligonucleotide for detection of SNP TSC0030422
ttaattctataat

SEQ ID NO: 121775 - DNA, 13 bp, Artificial Sequence
  Oligonucleotide for detection of SNP TSC0030422
ttaattttgtaat

SEQ ID NO: 121776 - DNA, 13 bp, Artificial Sequence
  Oligonucleotide for detection of SNP TSC0030422
attacaaaattaa

SEQ ID NO: 121777 - DNA, 13 bp, Artificial Sequence
  Oligonucleotide for detection of SNP TSC0030422
ttaattatgtaat

SEQ ID NO: 121778 - DNA, 13 bp, Artificial Sequence
  Oligonucleotide for detection of SNP TSC0030422
attacataattaa

SEQ ID NO: 121779 - DNA, 13 bp, Artificial Sequence
  Oligonucleotide for detection of SNP TSC0030423
atagatatggaat

SEQ ID NO: 121780 - DNA, 13 bp, Artificial Sequence
  Oligonucleotide for detection of SNP TSC0030423
attccatatctat

SEQ ID NO: 121781 - DNA, 13 bp, Artificial Sequence
  Oligonucleotide for detection of SNP TSC0030423
atagatgtggaat

SEQ ID NO: 121782 - DNA, 13 bp, Artificial Sequence
  Oligonucleotide for detection of SNP TSC0030423
attccacatctat

SEQ ID NO: 121783 - DNA, 13 bp, Artificial Sequence
  Oligonucleotide for detection of SNP TSC0030423
atagacgtggaat

SEQ ID NO: 121784 - DNA, 13 bp, Artificial Sequence
  Oligonucleotide for detection of SNP TSC0030423
attccacgtctat

SEQ ID NO: 121785 - DNA, 13 bp, Artificial Sequence
  Oligonucleotide for detection of SNP TSC0030424
gttagtatattay

SEQ ID NO: 121786 - DNA, 13 bp, Artificial Sequence
  Oligonucleotide for detection of SNP TSC0030424
rtaatatactaac

SEQ ID NO: 121787 - DNA, 13 bp, Artificial Sequence
  Oligonucleotide for detection of SNP TSC0030424
gttagtgtattay

SEQ ID NO: 121788 - DNA, 13 bp, Artificial Sequence
  Oligonucleotide for detection of SNP TSC0030424
rtaatacactaac

SEQ ID NO: 121789 - DNA, 13 bp, Artificial Sequence
  Oligonucleotide for detection of SNP TSC0030424
gttagcgtattay

SEQ ID NO: 121790 - DNA, 13 bp, Artificial Sequence
  Oligonucleotide for detection of SNP TSC0030424
rtaatacgctaac

SEQ ID NO: 121791 - DNA, 13 bp, Artificial Sequence
  Oligonucleotide for detection of SNP TSC0030424
gtaatgtgttaay

SEQ ID NO: 121792 - DNA, 13 bp, Artificial Sequence
  Oligonucleotide for detection of SNP TSC0030424
rttaacacattac

SEQ ID NO: 121793 - DNA, 13 bp, Artificial Sequence
  Oligonucleotide for detection of SNP TSC0030424
gtaatgcgttaay

SEQ ID NO: 121794 - DNA, 13 bp, Artificial Sequence
  Oligonucleotide for detection of SNP TSC0030424
rttaacgcattac

SEQ ID NO: 121795 - DNA, 13 bp, Artificial Sequence
  Oligonucleotide for detection of SNP TSC0030428
agtattgttattt

SEQ ID NO: 121796 - DNA, 13 bp, Artificial Sequence
  Oligonucleotide for detection of SNP TSC0030428
aaataacaatact

SEQ ID NO: 121797 - DNA, 13 bp, Artificial Sequence
  Oligonucleotide for detection of SNP TSC0030428
agtattattattt

SEQ ID NO: 121798 - DNA, 13 bp, Artificial Sequence
  Oligonucleotide for detection of SNP TSC0030428
aaataataatact

SEQ ID NO: 121799 - DNA, 13 bp, Artificial Sequence
  Oligonucleotide for detection of SNP TSC0030429
ttttaagtaggaa

SEQ ID NO: 121800 - DNA, 13 bp, Artificial Sequence
  Oligonucleotide for detection of SNP TSC0030429
ttcctacttaaaa

SEQ ID NO: 121801 - DNA, 13 bp, Artificial Sequence
  Oligonucleotide for detection of SNP TSC0030429
ttttaaataggaa

SEQ ID NO: 121802 - DNA, 13 bp, Artificial Sequence
  Oligonucleotide for detection of SNP TSC0030429
ttcctatttaaaa

SEQ ID NO: 121803 - DNA, 13 bp, Artificial Sequence
  Oligonucleotide for detection of SNP TSC0030430
agtgtagtagggt

SEQ ID NO: 121804 - DNA, 13 bp, Artificial Sequence
  Oligonucleotide for detection of SNP TSC0030430
accctactacact

SEQ ID NO: 121805 - DNA, 13 bp, Artificial Sequence
  Oligonucleotide for detection of SNP TSC0030430
agtgtaatagggt

SEQ ID NO: 121806 - DNA, 13 bp, Artificial Sequence
  Oligonucleotide for detection of SNP TSC0030430
accctattacact

SEQ ID NO: 121807 - DNA, 13 bp, Artificial Sequence
  Oligonucleotide for detection of SNP TSC0030431
attaaatgataaa

SEQ ID NO: 121808 - DNA, 13 bp, Artificial Sequence
  Oligonucleotide for detection of SNP TSC0030431
tttatcatttaat

SEQ ID NO: 121809 - DNA, 13 bp, Artificial Sequence
  Oligonucleotide for detection of SNP TSC0030431
tttgttgtttagt

SEQ ID NO: 121810 - DNA, 13 bp, Artificial Sequence
  Oligonucleotide for detection of SNP TSC0030431
actaaacaacaaa

SEQ ID NO: 121811 - DNA, 13 bp, Artificial Sequence
  Oligonucleotide for detection of SNP TSC0030431
tttgttatttagt

SEQ ID NO: 121812 - DNA, 13 bp, Artificial Sequence
  Oligonucleotide for detection of SNP TSC0030431
actaaataacaaa

SEQ ID NO: 121813 - DNA, 13 bp, Artificial Sequence
  Oligonucleotide for detection of SNP TSC0030431
tttgtcgtttagt

SEQ ID NO: 121814 - DNA, 13 bp, Artificial Sequence
  Oligonucleotide for detection of SNP TSC0030431
actaaacgacaaa

SEQ ID NO: 121815 - DNA, 13 bp, Artificial Sequence
  Oligonucleotide for detection of SNP TSC0030434
ttatttgagatgy

SEQ ID NO: 121816 - DNA, 13 bp, Artificial Sequence
  Oligonucleotide for detection of SNP TSC0030434
rcatctcaaataa

SEQ ID NO: 121817 - DNA, 13 bp, Artificial Sequence
  Oligonucleotide for detection of SNP TSC0030434
ttatttaagatgy

SEQ ID NO: 121818 - DNA, 13 bp, Artificial Sequence
  Oligonucleotide for detection of SNP TSC0030434
rcatcttaaataa

SEQ ID NO: 121819 - DNA, 13 bp, Artificial Sequence
  Oligonucleotide for detection of SNP TSC0030434
ttattcgagatgy

SEQ ID NO: 121820 - DNA, 13 bp, Artificial Sequence
  Oligonucleotide for detection of SNP TSC0030434
rcatctcgaataa

SEQ ID NO: 121821 - DNA, 13 bp, Artificial Sequence
  Oligonucleotide for detection of SNP TSC0030435
ttttttttttgay

SEQ ID NO: 121822 - DNA, 13 bp, Artificial Sequence
  Oligonucleotide for detection of SNP TSC0030435
rtcaaaaaaaaaa

SEQ ID NO: 121823 - DNA, 13 bp, Artificial Sequence
  Oligonucleotide for detection of SNP TSC0030435
gttagagagagga

SEQ ID NO: 121824 - DNA, 13 bp, Artificial Sequence
  Oligonucleotide for detection of SNP TSC0030435
tcctctctctaac

SEQ ID NO: 121825 - DNA, 13 bp, Artificial Sequence
  Oligonucleotide for detection of SNP TSC0030435
gttagatagagga

SEQ ID NO: 121826 - DNA, 13 bp, Artificial Sequence
  Oligonucleotide for detection of SNP TSC0030435
tcctctatctaac

SEQ ID NO: 121827 - DNA, 13 bp, Artificial Sequence
  Oligonucleotide for detection of SNP TSC0030436
aattatataataa

SEQ ID NO: 121828 - DNA, 13 bp, Artificial Sequence
  Oligonucleotide for detection of SNP TSC0030436
ttattatataatt

SEQ ID NO: 121829 - DNA, 13 bp, Artificial Sequence
  Oligonucleotide for detection of SNP TSC0030436
aattatgtaataa

SEQ ID NO: 121830 - DNA, 13 bp, Artificial Sequence
  Oligonucleotide for detection of SNP TSC0030436
ttattacataatt

SEQ ID NO: 121831 - DNA, 13 bp, Artificial Sequence
  Oligonucleotide for detection of SNP TSC0030438
tggtttgttttgy

SEQ ID NO: 121832 - DNA, 13 bp, Artificial Sequence
  Oligonucleotide for detection of SNP TSC0030438
rcaaaacaaacca

SEQ ID NO: 121833 - DNA, 13 bp, Artificial Sequence
  Oligonucleotide for detection of SNP TSC0030438
tggttttttttgy

SEQ ID NO: 121834 - DNA, 13 bp, Artificial Sequence
  Oligonucleotide for detection of SNP TSC0030438
rcaaaaaaaacca

SEQ ID NO: 121835 - DNA, 13 bp, Artificial Sequence
  Oligonucleotide for detection of SNP TSC0030438
gtagagtaagtta

SEQ ID NO: 121836 - DNA, 13 bp, Artificial Sequence
  Oligonucleotide for detection of SNP TSC0030438
taacttactctac

SEQ ID NO: 121837 - DNA, 13 bp, Artificial Sequence
  Oligonucleotide for detection of SNP TSC0030438
gtagagaaagtta

SEQ ID NO: 121838 - DNA, 13 bp, Artificial Sequence
  Oligonucleotide for detection of SNP TSC0030438
taactttctctac

SEQ ID NO: 121839 - DNA, 13 bp, Artificial Sequence
  Oligonucleotide for detection of SNP TSC0030444
atttatataggat

SEQ ID NO: 121840 - DNA, 13 bp, Artificial Sequence
  Oligonucleotide for detection of SNP TSC0030444
atcctatataaat

SEQ ID NO: 121841 - DNA, 13 bp, Artificial Sequence
  Oligonucleotide for detection of SNP TSC0030444
atttatttaggat

SEQ ID NO: 121842 - DNA, 13 bp, Artificial Sequence
  Oligonucleotide for detection of SNP TSC0030444
atcctaaataaat

SEQ ID NO: 121843 - DNA, 13 bp, Artificial Sequence
  Oligonucleotide for detection of SNP TSC0030444
attttgtatagat

SEQ ID NO: 121844 - DNA, 13 bp, Artificial Sequence
  Oligonucleotide for detection of SNP TSC0030444
atctatacaaaat

SEQ ID NO: 121845 - DNA, 13 bp, Artificial Sequence
  Oligonucleotide for detection of SNP TSC0030444
attttggatagat

SEQ ID NO: 121846 - DNA, 13 bp, Artificial Sequence
  Oligonucleotide for detection of SNP TSC0030444
atctatccaaaat

SEQ ID NO: 121847 - DNA, 13 bp, Artificial Sequence
  Oligonucleotide for detection of SNP TSC0030445
gtgtaatgtttta

SEQ ID NO: 121848 - DNA, 13 bp, Artificial Sequence
  Oligonucleotide for detection of SNP TSC0030445
taaaacattacac

SEQ ID NO: 121849 - DNA, 13 bp, Artificial Sequence
  Oligonucleotide for detection of SNP TSC0030445
gtgtaacgtttta

SEQ ID NO: 121850 - DNA, 13 bp, Artificial Sequence
  Oligonucleotide for detection of SNP TSC0030445
taaaacgttacac

SEQ ID NO: 121851 - DNA, 13 bp, Artificial Sequence
  Oligonucleotide for detection of SNP TSC0030445
taagatgttgtay

SEQ ID NO: 121852 - DNA, 13 bp, Artificial Sequence
  Oligonucleotide for detection of SNP TSC0030445
rtacaacatctta

SEQ ID NO: 121853 - DNA, 13 bp, Artificial Sequence
  Oligonucleotide for detection of SNP TSC0030445
taagatattgtay

SEQ ID NO: 121854 - DNA, 13 bp, Artificial Sequence
  Oligonucleotide for detection of SNP TSC0030445
rtacaatatctta

SEQ ID NO: 121855 - DNA, 13 bp, Artificial Sequence
  Oligonucleotide for detection of SNP TSC0030445
taagacgttgtay

SEQ ID NO: 121856 - DNA, 13 bp, Artificial Sequence
  Oligonucleotide for detection of SNP TSC0030445
rtacaacgtctta

SEQ ID NO: 121857 - DNA, 13 bp, Artificial Sequence
  Oligonucleotide for detection of SNP TSC0030447
tttgtttattaty

SEQ ID NO: 121858 - DNA, 13 bp, Artificial Sequence
  Oligonucleotide for detection of SNP TSC0030447
rataataaacaaa

SEQ ID NO: 121859 - DNA, 13 bp, Artificial Sequence
  Oligonucleotide for detection of SNP TSC0030447
gatggttagtaag

SEQ ID NO: 121860 - DNA, 13 bp, Artificial Sequence
  Oligonucleotide for detection of SNP TSC0030447
cttactaaccatc

SEQ ID NO: 121861 - DNA, 13 bp, Artificial Sequence
  Oligonucleotide for detection of SNP TSC0030447
gatggtgagtaag

SEQ ID NO: 121862 - DNA, 13 bp, Artificial Sequence
  Oligonucleotide for detection of SNP TSC0030447
cttactcaccatc

SEQ ID NO: 121863 - DNA, 13 bp, Artificial Sequence
  Oligonucleotide for detection of SNP TSC0030448
tattttgtatgaa

SEQ ID NO: 121864 - DNA, 13 bp, Artificial Sequence
  Oligonucleotide for detection of SNP TSC0030448
ttcatacaaaata

SEQ ID NO: 121865 - DNA, 13 bp, Artificial Sequence
  Oligonucleotide for detection of SNP TSC0030449
aataatatgtaay

SEQ ID NO: 121866 - DNA, 13 bp, Artificial Sequence
  Oligonucleotide for detection of SNP TSC0030449
rttacatattatt

SEQ ID NO: 121867 - DNA, 13 bp, Artificial Sequence
  Oligonucleotide for detection of SNP TSC0030449
aataatgtgtaay

SEQ ID NO: 121868 - DNA, 13 bp, Artificial Sequence
  Oligonucleotide for detection of SNP TSC0030449
rttacacattatt

SEQ ID NO: 121869 - DNA, 13 bp, Artificial Sequence
  Oligonucleotide for detection of SNP TSC0030449
aataatacgtaay

SEQ ID NO: 121870 - DNA, 13 bp, Artificial Sequence
  Oligonucleotide for detection of SNP TSC0030449
rttacgtattatt

SEQ ID NO: 121871 - DNA, 13 bp, Artificial Sequence
  Oligonucleotide for detection of SNP TSC0030449
aataacgtgtaay

SEQ ID NO: 121872 - DNA, 13 bp, Artificial Sequence
  Oligonucleotide for detection of SNP TSC0030449
rttacacgttatt

SEQ ID NO: 121873 - DNA, 13 bp, Artificial Sequence
  Oligonucleotide for detection of SNP TSC0030449
aataatgcgtaay

SEQ ID NO: 121874 - DNA, 13 bp, Artificial Sequence
  Oligonucleotide for detection of SNP TSC0030449
rttacgcattatt

SEQ ID NO: 121875 - DNA, 13 bp, Artificial Sequence
  Oligonucleotide for detection of SNP TSC0030449
aataacgcgtaay

SEQ ID NO: 121876 - DNA, 13 bp, Artificial Sequence
  Oligonucleotide for detection of SNP TSC0030449
rttacgcgttatt

SEQ ID NO: 121877 - DNA, 13 bp, Artificial Sequence
  Oligonucleotide for detection of SNP TSC0030449
gttgtgtgttatt

SEQ ID NO: 121878 - DNA, 13 bp, Artificial Sequence
  Oligonucleotide for detection of SNP TSC0030449
aataacacacaac

SEQ ID NO: 121879 - DNA, 13 bp, Artificial Sequence
  Oligonucleotide for detection of SNP TSC0030449
gttgcgtgttatt

SEQ ID NO: 121880 - DNA, 13 bp, Artificial Sequence
  Oligonucleotide for detection of SNP TSC0030449
aataacacgcaac

SEQ ID NO: 121881 - DNA, 13 bp, Artificial Sequence
  Oligonucleotide for detection of SNP TSC0030449
gttgtgcgttatt

SEQ ID NO: 121882 - DNA, 13 bp, Artificial Sequence
  Oligonucleotide for detection of SNP TSC0030449
aataacgcacaac

SEQ ID NO: 121883 - DNA, 13 bp, Artificial Sequence
  Oligonucleotide for detection of SNP TSC0030449
gttgcgcgttatt

SEQ ID NO: 121884 - DNA, 13 bp, Artificial Sequence
  Oligonucleotide for detection of SNP TSC0030449
aataacgcgcaac

SEQ ID NO: 121885 - DNA, 13 bp, Artificial Sequence
  Oligonucleotide for detection of SNP TSC0030451
tgtgttagaaatt

SEQ ID NO: 121886 - DNA, 13 bp, Artificial Sequence
  Oligonucleotide for detection of SNP TSC0030451
aatttctaacaca

SEQ ID NO: 121887 - DNA, 13 bp, Artificial Sequence
  Oligonucleotide for detection of SNP TSC0030451
tgtgttggaaatt

SEQ ID NO: 121888 - DNA, 13 bp, Artificial Sequence
  Oligonucleotide for detection of SNP TSC0030451
aatttccaacaca

SEQ ID NO: 121889 - DNA, 13 bp, Artificial Sequence
  Oligonucleotide for detection of SNP TSC0030451
tgtgtcggaaatt

SEQ ID NO: 121890 - DNA, 13 bp, Artificial Sequence
  Oligonucleotide for detection of SNP TSC0030451
aatttccgacaca

SEQ ID NO: 121891 - DNA, 13 bp, Artificial Sequence
  Oligonucleotide for detection of SNP TSC0030451
agtttttggtata

SEQ ID NO: 121892 - DNA, 13 bp, Artificial Sequence
  Oligonucleotide for detection of SNP TSC0030451
tataccaaaaact

SEQ ID NO: 121893 - DNA, 13 bp, Artificial Sequence
  Oligonucleotide for detection of SNP TSC0030451
agttttcggtata

SEQ ID NO: 121894 - DNA, 13 bp, Artificial Sequence
  Oligonucleotide for detection of SNP TSC0030451
tataccgaaaact

SEQ ID NO: 121895 - DNA, 13 bp, Artificial Sequence
  Oligonucleotide for detection of SNP TSC0030456
aatgatttggtty

SEQ ID NO: 121896 - DNA, 13 bp, Artificial Sequence
  Oligonucleotide for detection of SNP TSC0030456
raaccaaatcatt

SEQ ID NO: 121897 - DNA, 13 bp, Artificial Sequence
  Oligonucleotide for detection of SNP TSC0030456
aatgatgtggtty

SEQ ID NO: 121898 - DNA, 13 bp, Artificial Sequence
  Oligonucleotide for detection of SNP TSC0030456
raaccacatcatt

SEQ ID NO: 121899 - DNA, 13 bp, Artificial Sequence
  Oligonucleotide for detection of SNP TSC0030456
aatgacgtggtty

SEQ ID NO: 121900 - DNA, 13 bp, Artificial Sequence
  Oligonucleotide for detection of SNP TSC0030456
raaccacgtcatt

SEQ ID NO: 121901 - DNA, 13 bp, Artificial Sequence
  Oligonucleotide for detection of SNP TSC0030456
gaattaggttatt

SEQ ID NO: 121902 - DNA, 13 bp, Artificial Sequence
  Oligonucleotide for detection of SNP TSC0030456
aataacctaattc

SEQ ID NO: 121903 - DNA, 13 bp, Artificial Sequence
  Oligonucleotide for detection of SNP TSC0030456
gaattatgttatt

SEQ ID NO: 121904 - DNA, 13 bp, Artificial Sequence
  Oligonucleotide for detection of SNP TSC0030456
aataacataattc

SEQ ID NO: 121905 - DNA, 13 bp, Artificial Sequence
  Oligonucleotide for detection of SNP TSC0030456
gaattacgttatt

SEQ ID NO: 121906 - DNA, 13 bp, Artificial Sequence
  Oligonucleotide for detection of SNP TSC0030456
aataacgtaattc

SEQ ID NO: 121907 - DNA, 13 bp, Artificial Sequence
  Oligonucleotide for detection of SNP TSC0030457
gagtttggaaaty

SEQ ID NO: 121908 - DNA, 13 bp, Artificial Sequence
  Oligonucleotide for detection of SNP TSC0030457
ratttccaaactc

SEQ ID NO: 121909 - DNA, 13 bp, Artificial Sequence
  Oligonucleotide for detection of SNP TSC0030457
gagtttagaaaty

SEQ ID NO: 121910 - DNA, 13 bp, Artificial Sequence
  Oligonucleotide for detection of SNP TSC0030457
ratttctaaactc

SEQ ID NO: 121911 - DNA, 13 bp, Artificial Sequence
  Oligonucleotide for detection of SNP TSC0030457
gagttcggaaaty

SEQ ID NO: 121912 - DNA, 13 bp, Artificial Sequence
  Oligonucleotide for detection of SNP TSC0030457
ratttccgaactc

SEQ ID NO: 121913 - DNA, 13 bp, Artificial Sequence
  Oligonucleotide for detection of SNP TSC0030458
tattttataataa

SEQ ID NO: 121914 - DNA, 13 bp, Artificial Sequence
  Oligonucleotide for detection of SNP TSC0030458
ttattataaaata

SEQ ID NO: 121915 - DNA, 13 bp, Artificial Sequence
  Oligonucleotide for detection of SNP TSC0030458
tattttgtaataa

SEQ ID NO: 121916 - DNA, 13 bp, Artificial Sequence
  Oligonucleotide for detection of SNP TSC0030458
ttattacaaaata

SEQ ID NO: 121917 - DNA, 13 bp, Artificial Sequence
  Oligonucleotide for detection of SNP TSC0030459
aatatatgaatty

SEQ ID NO: 121918 - DNA, 13 bp, Artificial Sequence
  Oligonucleotide for detection of SNP TSC0030459
raattcatatatt

SEQ ID NO: 121919 - DNA, 13 bp, Artificial Sequence
  Oligonucleotide for detection of SNP TSC0030459
aatatacgaatty

SEQ ID NO: 121920 - DNA, 13 bp, Artificial Sequence
  Oligonucleotide for detection of SNP TSC0030459
raattcgtatatt

SEQ ID NO: 121921 - DNA, 13 bp, Artificial Sequence
  Oligonucleotide for detection of SNP TSC0030459
gaatttgtgtgtt

SEQ ID NO: 121922 - DNA, 13 bp, Artificial Sequence
  Oligonucleotide for detection of SNP TSC0030459
aacacacaaattc

SEQ ID NO: 121923 - DNA, 13 bp, Artificial Sequence
  Oligonucleotide for detection of SNP TSC0030459
gaatttatgtgtt

SEQ ID NO: 121924 - DNA, 13 bp, Artificial Sequence
  Oligonucleotide for detection of SNP TSC0030459
aacacataaattc

SEQ ID NO: 121925 - DNA, 13 bp, Artificial Sequence
  Oligonucleotide for detection of SNP TSC0030459
gaattcgtgtgtt

SEQ ID NO: 121926 - DNA, 13 bp, Artificial Sequence
  Oligonucleotide for detection of SNP TSC0030459
aacacacgaattc

SEQ ID NO: 121927 - DNA, 13 bp, Artificial Sequence
  Oligonucleotide for detection of SNP TSC0030460
ataagaattggga

SEQ ID NO: 121928 - DNA, 13 bp, Artificial Sequence
  Oligonucleotide for detection of SNP TSC0030460
tcccaattcttat

SEQ ID NO: 121929 - DNA, 13 bp, Artificial Sequence
  Oligonucleotide for detection of SNP TSC0030460
ataagagttggga

SEQ ID NO: 121930 - DNA, 13 bp, Artificial Sequence
  Oligonucleotide for detection of SNP TSC0030460
tcccaactcttat

SEQ ID NO: 121931 - DNA, 13 bp, Artificial Sequence
  Oligonucleotide for detection of SNP TSC0030461
ttttagaattttg

SEQ ID NO: 121932 - DNA, 13 bp, Artificial Sequence
  Oligonucleotide for detection of SNP TSC0030461
caaaattctaaaa

SEQ ID NO: 121933 - DNA, 13 bp, Artificial Sequence
  Oligonucleotide for detection of SNP TSC0030470
taggggataggty

SEQ ID NO: 121934 - DNA, 13 bp, Artificial Sequence
  Oligonucleotide for detection of SNP TSC0030470
racctatccccta

SEQ ID NO: 121935 - DNA, 13 bp, Artificial Sequence
  Oligonucleotide for detection of SNP TSC0030470
taggggttaggty

SEQ ID NO: 121936 - DNA, 13 bp, Artificial Sequence
  Oligonucleotide for detection of SNP TSC0030470
racctaaccccta

SEQ ID NO: 121937 - DNA, 13 bp, Artificial Sequence
  Oligonucleotide for detection of SNP TSC0030470
gatttgtttttta

SEQ ID NO: 121938 - DNA, 13 bp, Artificial Sequence
  Oligonucleotide for detection of SNP TSC0030470
taaaaaacaaatc

SEQ ID NO: 121939 - DNA, 13 bp, Artificial Sequence
  Oligonucleotide for detection of SNP TSC0030470
gatttggttttta

SEQ ID NO: 121940 - DNA, 13 bp, Artificial Sequence
  Oligonucleotide for detection of SNP TSC0030470
taaaaaccaaatc

SEQ ID NO: 121941 - DNA, 13 bp, Artificial Sequence
  Oligonucleotide for detection of SNP TSC0030471
tgggttagtttta

SEQ ID NO: 121942 - DNA, 13 bp, Artificial Sequence
  Oligonucleotide for detection of SNP TSC0030471
taaaactaaccca

SEQ ID NO: 121943 - DNA, 13 bp, Artificial Sequence
  Oligonucleotide for detection of SNP TSC0030471
tgggttggtttta

SEQ ID NO: 121944 - DNA, 13 bp, Artificial Sequence
  Oligonucleotide for detection of SNP TSC0030471
taaaaccaaccca

SEQ ID NO: 121945 - DNA, 13 bp, Artificial Sequence
  Oligonucleotide for detection of SNP TSC0030474
aaagttggttttt

SEQ ID NO: 121946 - DNA, 13 bp, Artificial Sequence
  Oligonucleotide for detection of SNP TSC0030474
aaaaaccaacttt

SEQ ID NO: 121947 - DNA, 13 bp, Artificial Sequence
  Oligonucleotide for detection of SNP TSC0030474
aaagtttgttttt

SEQ ID NO: 121948 - DNA, 13 bp, Artificial Sequence
  Oligonucleotide for detection of SNP TSC0030474
aaaaacaaacttt

SEQ ID NO: 121949 - DNA, 13 bp, Artificial Sequence
  Oligonucleotide for detection of SNP TSC0030474
aaaagtaaatttt

SEQ ID NO: 121950 - DNA, 13 bp, Artificial Sequence
  Oligonucleotide for detection of SNP TSC0030474
aaaatttactttt

SEQ ID NO: 121951 - DNA, 13 bp, Artificial Sequence
  Oligonucleotide for detection of SNP TSC0030479
gggattgtaggag

SEQ ID NO: 121952 - DNA, 13 bp, Artificial Sequence
  Oligonucleotide for detection of SNP TSC0030479
ctcctacaatccc

SEQ ID NO: 121953 - DNA, 13 bp, Artificial Sequence
  Oligonucleotide for detection of SNP TSC0030479
gggattataggag

SEQ ID NO: 121954 - DNA, 13 bp, Artificial Sequence
  Oligonucleotide for detection of SNP TSC0030479
ctcctataatccc

SEQ ID NO: 121955 - DNA, 13 bp, Artificial Sequence
  Oligonucleotide for detection of SNP TSC0030480
tatttttggtttt

SEQ ID NO: 121956 - DNA, 13 bp, Artificial Sequence
  Oligonucleotide for detection of SNP TSC0030480
aaaaccaaaaata

SEQ ID NO: 121957 - DNA, 13 bp, Artificial Sequence
  Oligonucleotide for detection of SNP TSC0030483
aggattttgaggg

SEQ ID NO: 121958 - DNA, 13 bp, Artificial Sequence
  Oligonucleotide for detection of SNP TSC0030483
ccctcaaaatcct

SEQ ID NO: 121959 - DNA, 13 bp, Artificial Sequence
  Oligonucleotide for detection of SNP TSC0030483
aggattgtgaggg

SEQ ID NO: 121960 - DNA, 13 bp, Artificial Sequence
  Oligonucleotide for detection of SNP TSC0030483
ccctcacaatcct

SEQ ID NO: 121961 - DNA, 13 bp, Artificial Sequence
  Oligonucleotide for detection of SNP TSC0030483
tttttagagtttt

SEQ ID NO: 121962 - DNA, 13 bp, Artificial Sequence
  Oligonucleotide for detection of SNP TSC0030483
aaaactctaaaaa

SEQ ID NO: 121963 - DNA, 13 bp, Artificial Sequence
  Oligonucleotide for detection of SNP TSC0030484
gggatagtgtata

SEQ ID NO: 121964 - DNA, 13 bp, Artificial Sequence
  Oligonucleotide for detection of SNP TSC0030484
tatacactatccc

SEQ ID NO: 121965 - DNA, 13 bp, Artificial Sequence
  Oligonucleotide for detection of SNP TSC0030484
gggataatgtata

SEQ ID NO: 121966 - DNA, 13 bp, Artificial Sequence
  Oligonucleotide for detection of SNP TSC0030484
tatacattatccc

SEQ ID NO: 121967 - DNA, 13 bp, Artificial Sequence
  Oligonucleotide for detection of SNP TSC0030488
ttatttatttgty

SEQ ID NO: 121968 - DNA, 13 bp, Artificial Sequence
  Oligonucleotide for detection of SNP TSC0030488
racaaataaataa

SEQ ID NO: 121969 - DNA, 13 bp, Artificial Sequence
  Oligonucleotide for detection of SNP TSC0030489
tataaaattttty

SEQ ID NO: 121970 - DNA, 13 bp, Artificial Sequence
  Oligonucleotide for detection of SNP TSC0030489
raaaaattttata

SEQ ID NO: 121971 - DNA, 13 bp, Artificial Sequence
  Oligonucleotide for detection of SNP TSC0030489
tataaatttttty

SEQ ID NO: 121972 - DNA, 13 bp, Artificial Sequence
  Oligonucleotide for detection of SNP TSC0030489
raaaaaatttata

SEQ ID NO: 121973 - DNA, 13 bp, Artificial Sequence
  Oligonucleotide for detection of SNP TSC0030493
atttagggaaagg

SEQ ID NO: 121974 - DNA, 13 bp, Artificial Sequence
  Oligonucleotide for detection of SNP TSC0030493
cctttccctaaat

SEQ ID NO: 121975 - DNA, 13 bp, Artificial Sequence
  Oligonucleotide for detection of SNP TSC0030493
atttagagaaagg

SEQ ID NO: 121976 - DNA, 13 bp, Artificial Sequence
  Oligonucleotide for detection of SNP TSC0030493
cctttctctaaat

SEQ ID NO: 121977 - DNA, 13 bp, Artificial Sequence
  Oligonucleotide for detection of SNP TSC0030494
gtagtttgtaaaa

SEQ ID NO: 121978 - DNA, 13 bp, Artificial Sequence
  Oligonucleotide for detection of SNP TSC0030494
ttttacaaactac

SEQ ID NO: 121979 - DNA, 13 bp, Artificial Sequence
  Oligonucleotide for detection of SNP TSC0030494
gtagttcgtaaaa

SEQ ID NO: 121980 - DNA, 13 bp, Artificial Sequence
  Oligonucleotide for detection of SNP TSC0030494
ttttacgaactac

SEQ ID NO: 121981 - DNA, 13 bp, Artificial Sequence
  Oligonucleotide for detection of SNP TSC0030494
ttttataagttgy

SEQ ID NO: 121982 - DNA, 13 bp, Artificial Sequence
  Oligonucleotide for detection of SNP TSC0030494
rcaacttataaaa

SEQ ID NO: 121983 - DNA, 13 bp, Artificial Sequence
  Oligonucleotide for detection of SNP TSC0030494
ttttacgagttgy

SEQ ID NO: 121984 - DNA, 13 bp, Artificial Sequence
  Oligonucleotide for detection of SNP TSC0030494
rcaactcgtaaaa

SEQ ID NO: 121985 - DNA, 13 bp, Artificial Sequence
  Oligonucleotide for detection of SNP TSC0030495
gtataggtggagg

SEQ ID NO: 121986 - DNA, 13 bp, Artificial Sequence
  Oligonucleotide for detection of SNP TSC0030495
cctccacctatac

SEQ ID NO: 121987 - DNA, 13 bp, Artificial Sequence
  Oligonucleotide for detection of SNP TSC0030495
gtatagttggagg

SEQ ID NO: 121988 - DNA, 13 bp, Artificial Sequence
  Oligonucleotide for detection of SNP TSC0030495
cctccaactatac

SEQ ID NO: 121989 - DNA, 13 bp, Artificial Sequence
  Oligonucleotide for detection of SNP TSC0030495
tttttatttgtay

SEQ ID NO: 121990 - DNA, 13 bp, Artificial Sequence
  Oligonucleotide for detection of SNP TSC0030495
rtacaaataaaaa

SEQ ID NO: 121991 - DNA, 13 bp, Artificial Sequence
  Oligonucleotide for detection of SNP TSC0030496
gaggatatgttgy

SEQ ID NO: 121992 - DNA, 13 bp, Artificial Sequence
  Oligonucleotide for detection of SNP TSC0030496
rcaacatatcctc

SEQ ID NO: 121993 - DNA, 13 bp, Artificial Sequence
  Oligonucleotide for detection of SNP TSC0030496
gaggatgtgttgy

SEQ ID NO: 121994 - DNA, 13 bp, Artificial Sequence
  Oligonucleotide for detection of SNP TSC0030496
rcaacacatcctc

SEQ ID NO: 121995 - DNA, 13 bp, Artificial Sequence
  Oligonucleotide for detection of SNP TSC0030497
taggtagaggtag

SEQ ID NO: 121996 - DNA, 13 bp, Artificial Sequence
  Oligonucleotide for detection of SNP TSC0030497
ctacctctaccta

SEQ ID NO: 121997 - DNA, 13 bp, Artificial Sequence
  Oligonucleotide for detection of SNP TSC0030497
taggtaaaggtag

SEQ ID NO: 121998 - DNA, 13 bp, Artificial Sequence
  Oligonucleotide for detection of SNP TSC0030497
ctacctttaccta

SEQ ID NO: 121999 - DNA, 13 bp, Artificial Sequence
  Oligonucleotide for detection of SNP TSC0030498
aagggtgagtgat

SEQ ID NO: 122000 - DNA, 13 bp, Artificial Sequence
  Oligonucleotide for detection of SNP TSC0030498
atcactcaccctt

SEQ ID NO: 122001 - DNA, 13 bp, Artificial Sequence
  Oligonucleotide for detection of SNP TSC0030498
aagggtaagtgat

SEQ ID NO: 122002 - DNA, 13 bp, Artificial Sequence
  Oligonucleotide for detection of SNP TSC0030498
atcacttaccctt

SEQ ID NO: 122003 - DNA, 13 bp, Artificial Sequence
  Oligonucleotide for detection of SNP TSC0030499
aaatatataatag

SEQ ID NO: 122004 - DNA, 13 bp, Artificial Sequence
  Oligonucleotide for detection of SNP TSC0030499
ctattatatattt

SEQ ID NO: 122005 - DNA, 13 bp, Artificial Sequence
  Oligonucleotide for detection of SNP TSC0030499
aaatatgtaatag

SEQ ID NO: 122006 - DNA, 13 bp, Artificial Sequence
  Oligonucleotide for detection of SNP TSC0030499
ctattacatattt

SEQ ID NO: 122007 - DNA, 13 bp, Artificial Sequence
  Oligonucleotide for detection of SNP TSC0030504
ttttgtatttttg

SEQ ID NO: 122008 - DNA, 13 bp, Artificial Sequence
  Oligonucleotide for detection of SNP TSC0030504
caaaaatacaaaa

SEQ ID NO: 122009 - DNA, 13 bp, Artificial Sequence
  Oligonucleotide for detection of SNP TSC0030504
ttttgtttttttg

SEQ ID NO: 122010 - DNA, 13 bp, Artificial Sequence
  Oligonucleotide for detection of SNP TSC0030504
caaaaaaacaaaa

SEQ ID NO: 122011 - DNA, 13 bp, Artificial Sequence
  Oligonucleotide for detection of SNP TSC0030504
taaaaatgtaaag

SEQ ID NO: 122012 - DNA, 13 bp, Artificial Sequence
  Oligonucleotide for detection of SNP TSC0030504
ctttacattttta

SEQ ID NO: 122013 - DNA, 13 bp, Artificial Sequence
  Oligonucleotide for detection of SNP TSC0030504
taaaaaagtaaag

SEQ ID NO: 122014 - DNA, 13 bp, Artificial Sequence
  Oligonucleotide for detection of SNP TSC0030504
ctttactttttta

SEQ ID NO: 122015 - DNA, 13 bp, Artificial Sequence
  Oligonucleotide for detection of SNP TSC0030505
gttaagagagaag

SEQ ID NO: 122016 - DNA, 13 bp, Artificial Sequence
  Oligonucleotide for detection of SNP TSC0030505
cttctctcttaac

SEQ ID NO: 122017 - DNA, 13 bp, Artificial Sequence
  Oligonucleotide for detection of SNP TSC0030505
gttaagggagaag

SEQ ID NO: 122018 - DNA, 13 bp, Artificial Sequence
  Oligonucleotide for detection of SNP TSC0030505
cttctcccttaac

SEQ ID NO: 122019 - DNA, 13 bp, Artificial Sequence
  Oligonucleotide for detection of SNP TSC0030506
aagtttaggttty

SEQ ID NO: 122020 - DNA, 13 bp, Artificial Sequence
  Oligonucleotide for detection of SNP TSC0030506
raaacctaaactt

SEQ ID NO: 122021 - DNA, 13 bp, Artificial Sequence
  Oligonucleotide for detection of SNP TSC0030506
aagtttgggttty

SEQ ID NO: 122022 - DNA, 13 bp, Artificial Sequence
  Oligonucleotide for detection of SNP TSC0030506
raaacccaaactt

SEQ ID NO: 122023 - DNA, 13 bp, Artificial Sequence
  Oligonucleotide for detection of SNP TSC0030506
aagttcgggttty

SEQ ID NO: 122024 - DNA, 13 bp, Artificial Sequence
  Oligonucleotide for detection of SNP TSC0030506
raaacccgaactt

SEQ ID NO: 122025 - DNA, 13 bp, Artificial Sequence
  Oligonucleotide for detection of SNP TSC0030506
gaagtttggattt

SEQ ID NO: 122026 - DNA, 13 bp, Artificial Sequence
  Oligonucleotide for detection of SNP TSC0030506
aaatccaaacttc

SEQ ID NO: 122027 - DNA, 13 bp, Artificial Sequence
  Oligonucleotide for detection of SNP TSC0030506
gaagttcggattt

SEQ ID NO: 122028 - DNA, 13 bp, Artificial Sequence
  Oligonucleotide for detection of SNP TSC0030506
aaatccgaacttc

SEQ ID NO: 122029 - DNA, 13 bp, Artificial Sequence
  Oligonucleotide for detection of SNP TSC0030509
ttggtaatttaaa

SEQ ID NO: 122030 - DNA, 13 bp, Artificial Sequence
  Oligonucleotide for detection of SNP TSC0030509
tttaaattaccaa

SEQ ID NO: 122031 - DNA, 13 bp, Artificial Sequence
  Oligonucleotide for detection of SNP TSC0030509
ttggtagtttaaa

SEQ ID NO: 122032 - DNA, 13 bp, Artificial Sequence
  Oligonucleotide for detection of SNP TSC0030509
tttaaactaccaa

SEQ ID NO: 122033 - DNA, 13 bp, Artificial Sequence
  Oligonucleotide for detection of SNP TSC0030510
tgttatatgttty

SEQ ID NO: 122034 - DNA, 13 bp, Artificial Sequence
  Oligonucleotide for detection of SNP TSC0030510
raaacatataaca

SEQ ID NO: 122035 - DNA, 13 bp, Artificial Sequence
  Oligonucleotide for detection of SNP TSC0030510
tgttatgtgttty

SEQ ID NO: 122036 - DNA, 13 bp, Artificial Sequence
  Oligonucleotide for detection of SNP TSC0030510
raaacacataaca

SEQ ID NO: 122037 - DNA, 13 bp, Artificial Sequence
  Oligonucleotide for detection of SNP TSC0030510
tgttacgtgttty

SEQ ID NO: 122038 - DNA, 13 bp, Artificial Sequence
  Oligonucleotide for detection of SNP TSC0030510
raaacacgtaaca

SEQ ID NO: 122039 - DNA, 13 bp, Artificial Sequence
  Oligonucleotide for detection of SNP TSC0030510
gagatatgtaata

SEQ ID NO: 122040 - DNA, 13 bp, Artificial Sequence
  Oligonucleotide for detection of SNP TSC0030510
tattacatatctc

SEQ ID NO: 122041 - DNA, 13 bp, Artificial Sequence
  Oligonucleotide for detection of SNP TSC0030510
gagatacgtaata

SEQ ID NO: 122042 - DNA, 13 bp, Artificial Sequence
  Oligonucleotide for detection of SNP TSC0030510
tattacgtatctc

SEQ ID NO: 122043 - DNA, 13 bp, Artificial Sequence
  Oligonucleotide for detection of SNP TSC0030511
gttgggggggatt

SEQ ID NO: 122044 - DNA, 13 bp, Artificial Sequence
  Oligonucleotide for detection of SNP TSC0030511
aatcccccccaac

SEQ ID NO: 122045 - DNA, 13 bp, Artificial Sequence
  Oligonucleotide for detection of SNP TSC0030511
gttgggagggatt

SEQ ID NO: 122046 - DNA, 13 bp, Artificial Sequence
  Oligonucleotide for detection of SNP TSC0030511
aatccctcccaac

SEQ ID NO: 122047 - DNA, 13 bp, Artificial Sequence
  Oligonucleotide for detection of SNP TSC0030514
atttttagatgty

SEQ ID NO: 122048 - DNA, 13 bp, Artificial Sequence
  Oligonucleotide for detection of SNP TSC0030514
racatctaaaaat

SEQ ID NO: 122049 - DNA, 13 bp, Artificial Sequence
  Oligonucleotide for detection of SNP TSC0030514
atttttggatgty

SEQ ID NO: 122050 - DNA, 13 bp, Artificial Sequence
  Oligonucleotide for detection of SNP TSC0030514
racatccaaaaat

SEQ ID NO: 122051 - DNA, 13 bp, Artificial Sequence
  Oligonucleotide for detection of SNP TSC0030514
attttcggatgty

SEQ ID NO: 122052 - DNA, 13 bp, Artificial Sequence
  Oligonucleotide for detection of SNP TSC0030514
racatccgaaaat

SEQ ID NO: 122053 - DNA, 13 bp, Artificial Sequence
  Oligonucleotide for detection of SNP TSC0030514
gatatttgaaagt

SEQ ID NO: 122054 - DNA, 13 bp, Artificial Sequence
  Oligonucleotide for detection of SNP TSC0030514
actttcaaatatc

SEQ ID NO: 122055 - DNA, 13 bp, Artificial Sequence
  Oligonucleotide for detection of SNP TSC0030514
gatattcgaaagt

SEQ ID NO: 122056 - DNA, 13 bp, Artificial Sequence
  Oligonucleotide for detection of SNP TSC0030514
actttcgaatatc

SEQ ID NO: 122057 - DNA, 13 bp, Artificial Sequence
  Oligonucleotide for detection of SNP TSC0030515
gttttatggtagt

SEQ ID NO: 122058 - DNA, 13 bp, Artificial Sequence
  Oligonucleotide for detection of SNP TSC0030515
actaccataaaac

SEQ ID NO: 122059 - DNA, 13 bp, Artificial Sequence
  Oligonucleotide for detection of SNP TSC0030515
gttttacggtagt

SEQ ID NO: 122060 - DNA, 13 bp, Artificial Sequence
  Oligonucleotide for detection of SNP TSC0030515
actaccgtaaaac

SEQ ID NO: 122061 - DNA, 13 bp, Artificial Sequence
  Oligonucleotide for detection of SNP TSC0030515
attattgtggggy

SEQ ID NO: 122062 - DNA, 13 bp, Artificial Sequence
  Oligonucleotide for detection of SNP TSC0030515
rccccacaataat

SEQ ID NO: 122063 - DNA, 13 bp, Artificial Sequence
  Oligonucleotide for detection of SNP TSC0030515
attattatggggy

SEQ ID NO: 122064 - DNA, 13 bp, Artificial Sequence
  Oligonucleotide for detection of SNP TSC0030515
rccccataataat

SEQ ID NO: 122065 - DNA, 13 bp, Artificial Sequence
  Oligonucleotide for detection of SNP TSC0030515
attatcgtggggy

SEQ ID NO: 122066 - DNA, 13 bp, Artificial Sequence
  Oligonucleotide for detection of SNP TSC0030515
rccccacgataat

SEQ ID NO: 122067 - DNA, 13 bp, Artificial Sequence
  Oligonucleotide for detection of SNP TSC0030516
ttttggattagty

SEQ ID NO: 122068 - DNA, 13 bp, Artificial Sequence
  Oligonucleotide for detection of SNP TSC0030516
ractaatccaaaa

SEQ ID NO: 122069 - DNA, 13 bp, Artificial Sequence
  Oligonucleotide for detection of SNP TSC0030516
ttttgggttagty

SEQ ID NO: 122070 - DNA, 13 bp, Artificial Sequence
  Oligonucleotide for detection of SNP TSC0030516
ractaacccaaaa

SEQ ID NO: 122071 - DNA, 13 bp, Artificial Sequence
  Oligonucleotide for detection of SNP TSC0030517
gggagatttgaag

SEQ ID NO: 122072 - DNA, 13 bp, Artificial Sequence
  Oligonucleotide for detection of SNP TSC0030517
cttcaaatctccc

SEQ ID NO: 122073 - DNA, 13 bp, Artificial Sequence
  Oligonucleotide for detection of SNP TSC0030517
gggagagttgaag

SEQ ID NO: 122074 - DNA, 13 bp, Artificial Sequence
  Oligonucleotide for detection of SNP TSC0030517
cttcaactctccc

SEQ ID NO: 122075 - DNA, 13 bp, Artificial Sequence
  Oligonucleotide for detection of SNP TSC0030517
ttttaggttttty

SEQ ID NO: 122076 - DNA, 13 bp, Artificial Sequence
  Oligonucleotide for detection of SNP TSC0030517
raaaaacctaaaa

SEQ ID NO: 122077 - DNA, 13 bp, Artificial Sequence
  Oligonucleotide for detection of SNP TSC0030517
ttttagtttttty

SEQ ID NO: 122078 - DNA, 13 bp, Artificial Sequence
  Oligonucleotide for detection of SNP TSC0030517
raaaaaactaaaa

SEQ ID NO: 122079 - DNA, 13 bp, Artificial Sequence
  Oligonucleotide for detection of SNP TSC0030520
attttatgtggtg

SEQ ID NO: 122080 - DNA, 13 bp, Artificial Sequence
  Oligonucleotide for detection of SNP TSC0030520
caccacataaaat

SEQ ID NO: 122081 - DNA, 13 bp, Artificial Sequence
  Oligonucleotide for detection of SNP TSC0030520
attttacgtggtg

SEQ ID NO: 122082 - DNA, 13 bp, Artificial Sequence
  Oligonucleotide for detection of SNP TSC0030520
caccacgtaaaat

SEQ ID NO: 122083 - DNA, 13 bp, Artificial Sequence
  Oligonucleotide for detection of SNP TSC0030520
tattacgtgagat

SEQ ID NO: 122084 - DNA, 13 bp, Artificial Sequence
  Oligonucleotide for detection of SNP TSC0030520
atctcacgtaata

SEQ ID NO: 122085 - DNA, 13 bp, Artificial Sequence
  Oligonucleotide for detection of SNP TSC0030521
ttatatatagatg

SEQ ID NO: 122086 - DNA, 13 bp, Artificial Sequence
  Oligonucleotide for detection of SNP TSC0030521
catctatatataa

SEQ ID NO: 122087 - DNA, 13 bp, Artificial Sequence
  Oligonucleotide for detection of SNP TSC0030521
ttatatgtagatg

SEQ ID NO: 122088 - DNA, 13 bp, Artificial Sequence
  Oligonucleotide for detection of SNP TSC0030521
catctacatataa

SEQ ID NO: 122089 - DNA, 13 bp, Artificial Sequence
  Oligonucleotide for detection of SNP TSC0030521
ttatacgtagatg

SEQ ID NO: 122090 - DNA, 13 bp, Artificial Sequence
  Oligonucleotide for detection of SNP TSC0030521
catctacgtataa

SEQ ID NO: 122091 - DNA, 13 bp, Artificial Sequence
  Oligonucleotide for detection of SNP TSC0030521
tatttatgtgtaa

SEQ ID NO: 122092 - DNA, 13 bp, Artificial Sequence
  Oligonucleotide for detection of SNP TSC0030521
ttacacataaata

SEQ ID NO: 122093 - DNA, 13 bp, Artificial Sequence
  Oligonucleotide for detection of SNP TSC0030521
tatttacgtgtaa

SEQ ID NO: 122094 - DNA, 13 bp, Artificial Sequence
  Oligonucleotide for detection of SNP TSC0030521
ttacacgtaaata

SEQ ID NO: 122095 - DNA, 13 bp, Artificial Sequence
  Oligonucleotide for detection of SNP TSC0030522
gttggtgttgaay

SEQ ID NO: 122096 - DNA, 13 bp, Artificial Sequence
  Oligonucleotide for detection of SNP TSC0030522
rttcaacaccaac

SEQ ID NO: 122097 - DNA, 13 bp, Artificial Sequence
  Oligonucleotide for detection of SNP TSC0030522
gttggtattgaay

SEQ ID NO: 122098 - DNA, 13 bp, Artificial Sequence
  Oligonucleotide for detection of SNP TSC0030522
rttcaataccaac

SEQ ID NO: 122099 - DNA, 13 bp, Artificial Sequence
  Oligonucleotide for detection of SNP TSC0030522
gttggtgtcgaay

SEQ ID NO: 122100 - DNA, 13 bp, Artificial Sequence
  Oligonucleotide for detection of SNP TSC0030522
rttcgacaccaac

SEQ ID NO: 122101 - DNA, 13 bp, Artificial Sequence
  Oligonucleotide for detection of SNP TSC0030522
gttggtatcgaay

SEQ ID NO: 122102 - DNA, 13 bp, Artificial Sequence
  Oligonucleotide for detection of SNP TSC0030522
rttcgataccaac

SEQ ID NO: 122103 - DNA, 13 bp, Artificial Sequence
  Oligonucleotide for detection of SNP TSC0030523
ttgtgatgttgtt

SEQ ID NO: 122104 - DNA, 13 bp, Artificial Sequence
  Oligonucleotide for detection of SNP TSC0030523
aacaacatcacaa

SEQ ID NO: 122105 - DNA, 13 bp, Artificial Sequence
  Oligonucleotide for detection of SNP TSC0030523
ttgtgacgttgtt

SEQ ID NO: 122106 - DNA, 13 bp, Artificial Sequence
  Oligonucleotide for detection of SNP TSC0030523
aacaacgtcacaa

SEQ ID NO: 122107 - DNA, 13 bp, Artificial Sequence
  Oligonucleotide for detection of SNP TSC0030523
agtagtgttatag

SEQ ID NO: 122108 - DNA, 13 bp, Artificial Sequence
  Oligonucleotide for detection of SNP TSC0030523
ctataacactact

SEQ ID NO: 122109 - DNA, 13 bp, Artificial Sequence
  Oligonucleotide for detection of SNP TSC0030523
agtagtattatag

SEQ ID NO: 122110 - DNA, 13 bp, Artificial Sequence
  Oligonucleotide for detection of SNP TSC0030523
ctataatactact

SEQ ID NO: 122111 - DNA, 13 bp, Artificial Sequence
  Oligonucleotide for detection of SNP TSC0030523
agtagcgttatag

SEQ ID NO: 122112 - DNA, 13 bp, Artificial Sequence
  Oligonucleotide for detection of SNP TSC0030523
ctataacgctact

SEQ ID NO: 122113 - DNA, 13 bp, Artificial Sequence
  Oligonucleotide for detection of SNP TSC0030525
tttataaggtagy

SEQ ID NO: 122114 - DNA, 13 bp, Artificial Sequence
  Oligonucleotide for detection of SNP TSC0030525
rctaccttataaa

SEQ ID NO: 122115 - DNA, 13 bp, Artificial Sequence
  Oligonucleotide for detection of SNP TSC0030525
tttatagggtagy

SEQ ID NO: 122116 - DNA, 13 bp, Artificial Sequence
  Oligonucleotide for detection of SNP TSC0030525
rctaccctataaa

SEQ ID NO: 122117 - DNA, 13 bp, Artificial Sequence
  Oligonucleotide for detection of SNP TSC0030526
gtatgtggaatty

SEQ ID NO: 122118 - DNA, 13 bp, Artificial Sequence
  Oligonucleotide for detection of SNP TSC0030526
raattccacatac

SEQ ID NO: 122119 - DNA, 13 bp, Artificial Sequence
  Oligonucleotide for detection of SNP TSC0030526
gtatgtagaatty

SEQ ID NO: 122120 - DNA, 13 bp, Artificial Sequence
  Oligonucleotide for detection of SNP TSC0030526
raattctacatac

SEQ ID NO: 122121 - DNA, 13 bp, Artificial Sequence
  Oligonucleotide for detection of SNP TSC0030527
ttttgtgtttttg

SEQ ID NO: 122122 - DNA, 13 bp, Artificial Sequence
  Oligonucleotide for detection of SNP TSC0030527
caaaaacacaaaa

SEQ ID NO: 122123 - DNA, 13 bp, Artificial Sequence
  Oligonucleotide for detection of SNP TSC0030527
ttttgcgtttttg

SEQ ID NO: 122124 - DNA, 13 bp, Artificial Sequence
  Oligonucleotide for detection of SNP TSC0030527
caaaaacgcaaaa

SEQ ID NO: 122125 - DNA, 13 bp, Artificial Sequence
  Oligonucleotide for detection of SNP TSC0030527
tagaaatgtagaa

SEQ ID NO: 122126 - DNA, 13 bp, Artificial Sequence
  Oligonucleotide for detection of SNP TSC0030527
ttctacatttcta

SEQ ID NO: 122127 - DNA, 13 bp, Artificial Sequence
  Oligonucleotide for detection of SNP TSC0030527
tagaaacgtagaa

SEQ ID NO: 122128 - DNA, 13 bp, Artificial Sequence
  Oligonucleotide for detection of SNP TSC0030527
ttctacgtttcta

SEQ ID NO: 122129 - DNA, 13 bp, Artificial Sequence
  Oligonucleotide for detection of SNP TSC0030528
tagtgagaagtta

SEQ ID NO: 122130 - DNA, 13 bp, Artificial Sequence
  Oligonucleotide for detection of SNP TSC0030528
taacttctcacta

SEQ ID NO: 122131 - DNA, 13 bp, Artificial Sequence
  Oligonucleotide for detection of SNP TSC0030528
tagtgaaaagtta

SEQ ID NO: 122132 - DNA, 13 bp, Artificial Sequence
  Oligonucleotide for detection of SNP TSC0030528
taacttttcacta

SEQ ID NO: 122133 - DNA, 13 bp, Artificial Sequence
  Oligonucleotide for detection of SNP TSC0030529
aataagaatgatt

SEQ ID NO: 122134 - DNA, 13 bp, Artificial Sequence
  Oligonucleotide for detection of SNP TSC0030529
aatcattcttatt

SEQ ID NO: 122135 - DNA, 13 bp, Artificial Sequence
  Oligonucleotide for detection of SNP TSC0030529
aataaggatgatt

SEQ ID NO: 122136 - DNA, 13 bp, Artificial Sequence
  Oligonucleotide for detection of SNP TSC0030529
aatcatccttatt

SEQ ID NO: 122137 - DNA, 13 bp, Artificial Sequence
  Oligonucleotide for detection of SNP TSC0030530
tgatgatgtgttt

SEQ ID NO: 122138 - DNA, 13 bp, Artificial Sequence
  Oligonucleotide for detection of SNP TSC0030530
aaacacatcatca

SEQ ID NO: 122139 - DNA, 13 bp, Artificial Sequence
  Oligonucleotide for detection of SNP TSC0030530
tgatgacgtgttt

SEQ ID NO: 122140 - DNA, 13 bp, Artificial Sequence
  Oligonucleotide for detection of SNP TSC0030530
aaacacgtcatca

SEQ ID NO: 122141 - DNA, 13 bp, Artificial Sequence
  Oligonucleotide for detection of SNP TSC0030530
aagtatgttatta

SEQ ID NO: 122142 - DNA, 13 bp, Artificial Sequence
  Oligonucleotide for detection of SNP TSC0030530
taataacatactt

SEQ ID NO: 122143 - DNA, 13 bp, Artificial Sequence
  Oligonucleotide for detection of SNP TSC0030530
aagtatattatta

SEQ ID NO: 122144 - DNA, 13 bp, Artificial Sequence
  Oligonucleotide for detection of SNP TSC0030530
taataatatactt

SEQ ID NO: 122145 - DNA, 13 bp, Artificial Sequence
  Oligonucleotide for detection of SNP TSC0030530
aagtacgttatta

SEQ ID NO: 122146 - DNA, 13 bp, Artificial Sequence
  Oligonucleotide for detection of SNP TSC0030530
taataacgtactt

SEQ ID NO: 122147 - DNA, 13 bp, Artificial Sequence
  Oligonucleotide for detection of SNP TSC0030531
tggggtatggaat

SEQ ID NO: 122148 - DNA, 13 bp, Artificial Sequence
  Oligonucleotide for detection of SNP TSC0030531
attccatacccca

SEQ ID NO: 122149 - DNA, 13 bp, Artificial Sequence
  Oligonucleotide for detection of SNP TSC0030531
tggggtttggaat

SEQ ID NO: 122150 - DNA, 13 bp, Artificial Sequence
  Oligonucleotide for detection of SNP TSC0030531
attccaaacccca

SEQ ID NO: 122151 - DNA, 13 bp, Artificial Sequence
  Oligonucleotide for detection of SNP TSC0030531
attttaagtttta

SEQ ID NO: 122152 - DNA, 13 bp, Artificial Sequence
  Oligonucleotide for detection of SNP TSC0030531
taaaacttaaaat

SEQ ID NO: 122153 - DNA, 13 bp, Artificial Sequence
  Oligonucleotide for detection of SNP TSC0030533
ggggtaagggtta

SEQ ID NO: 122154 - DNA, 13 bp, Artificial Sequence
  Oligonucleotide for detection of SNP TSC0030533
taacccttacccc

SEQ ID NO: 122155 - DNA, 13 bp, Artificial Sequence
  Oligonucleotide for detection of SNP TSC0030533
ggggtaggggtta

SEQ ID NO: 122156 - DNA, 13 bp, Artificial Sequence
  Oligonucleotide for detection of SNP TSC0030533
taacccctacccc

SEQ ID NO: 122157 - DNA, 13 bp, Artificial Sequence
  Oligonucleotide for detection of SNP TSC0030534
agggttatattta

SEQ ID NO: 122158 - DNA, 13 bp, Artificial Sequence
  Oligonucleotide for detection of SNP TSC0030534
taaatataaccct

SEQ ID NO: 122159 - DNA, 13 bp, Artificial Sequence
  Oligonucleotide for detection of SNP TSC0030534
agggttgtattta

SEQ ID NO: 122160 - DNA, 13 bp, Artificial Sequence
  Oligonucleotide for detection of SNP TSC0030534
taaatacaaccct

SEQ ID NO: 122161 - DNA, 13 bp, Artificial Sequence
  Oligonucleotide for detection of SNP TSC0030534
agggtcgtattta

SEQ ID NO: 122162 - DNA, 13 bp, Artificial Sequence
  Oligonucleotide for detection of SNP TSC0030534
taaatacgaccct

SEQ ID NO: 122163 - DNA, 13 bp, Artificial Sequence
  Oligonucleotide for detection of SNP TSC0030534
tgaatatggtttt

SEQ ID NO: 122164 - DNA, 13 bp, Artificial Sequence
  Oligonucleotide for detection of SNP TSC0030534
aaaaccatattca

SEQ ID NO: 122165 - DNA, 13 bp, Artificial Sequence
  Oligonucleotide for detection of SNP TSC0030534
tgaatacggtttt

SEQ ID NO: 122166 - DNA, 13 bp, Artificial Sequence
  Oligonucleotide for detection of SNP TSC0030534
aaaaccgtattca

SEQ ID NO: 122167 - DNA, 13 bp, Artificial Sequence
  Oligonucleotide for detection of SNP TSC0030535
ttagggaagtatg

SEQ ID NO: 122168 - DNA, 13 bp, Artificial Sequence
  Oligonucleotide for detection of SNP TSC0030535
catacttccctaa

SEQ ID NO: 122169 - DNA, 13 bp, Artificial Sequence
  Oligonucleotide for detection of SNP TSC0030535
ttagggtagtatg

SEQ ID NO: 122170 - DNA, 13 bp, Artificial Sequence
  Oligonucleotide for detection of SNP TSC0030535
catactaccctaa

SEQ ID NO: 122171 - DNA, 13 bp, Artificial Sequence
  Oligonucleotide for detection of SNP TSC0030535
tatgtttttttgg

SEQ ID NO: 122172 - DNA, 13 bp, Artificial Sequence
  Oligonucleotide for detection of SNP TSC0030535
ccaaaaaaacata

SEQ ID NO: 122173 - DNA, 13 bp, Artificial Sequence
  Oligonucleotide for detection of SNP TSC0030535
tatgttgttttgg

SEQ ID NO: 122174 - DNA, 13 bp, Artificial Sequence
  Oligonucleotide for detection of SNP TSC0030535
ccaaaacaacata

SEQ ID NO: 122175 - DNA, 13 bp, Artificial Sequence
  Oligonucleotide for detection of SNP TSC0030537
ttgattggaattg

SEQ ID NO: 122176 - DNA, 13 bp, Artificial Sequence
  Oligonucleotide for detection of SNP TSC0030537
caattccaatcaa

SEQ ID NO: 122177 - DNA, 13 bp, Artificial Sequence
  Oligonucleotide for detection of SNP TSC0030537
ttgatttgaattg

SEQ ID NO: 122178 - DNA, 13 bp, Artificial Sequence
  Oligonucleotide for detection of SNP TSC0030537
caattcaaatcaa

SEQ ID NO: 122179 - DNA, 13 bp, Artificial Sequence
  Oligonucleotide for detection of SNP TSC0030537
ttgatcggaattg

SEQ ID NO: 122180 - DNA, 13 bp, Artificial Sequence
  Oligonucleotide for detection of SNP TSC0030537
caattccgatcaa

SEQ ID NO: 122181 - DNA, 13 bp, Artificial Sequence
  Oligonucleotide for detection of SNP TSC0030537
taattttggttaa

SEQ ID NO: 122182 - DNA, 13 bp, Artificial Sequence
  Oligonucleotide for detection of SNP TSC0030537
ttaaccaaaatta

SEQ ID NO: 122183 - DNA, 13 bp, Artificial Sequence
  Oligonucleotide for detection of SNP TSC0030537
taatttaggttaa

SEQ ID NO: 122184 - DNA, 13 bp, Artificial Sequence
  Oligonucleotide for detection of SNP TSC0030537
ttaacctaaatta

SEQ ID NO: 122185 - DNA, 13 bp, Artificial Sequence
  Oligonucleotide for detection of SNP TSC0030537
taatttcggttaa

SEQ ID NO: 122186 - DNA, 13 bp, Artificial Sequence
  Oligonucleotide for detection of SNP TSC0030537
ttaaccgaaatta

SEQ ID NO: 122187 - DNA, 13 bp, Artificial Sequence
  Oligonucleotide for detection of SNP TSC0030538
gtgttatgttggt

SEQ ID NO: 122188 - DNA, 13 bp, Artificial Sequence
  Oligonucleotide for detection of SNP TSC0030538
accaacataacac

SEQ ID NO: 122189 - DNA, 13 bp, Artificial Sequence
  Oligonucleotide for detection of SNP TSC0030538
gtgttacgttggt

SEQ ID NO: 122190 - DNA, 13 bp, Artificial Sequence
  Oligonucleotide for detection of SNP TSC0030538
accaacgtaacac

SEQ ID NO: 122191 - DNA, 13 bp, Artificial Sequence
  Oligonucleotide for detection of SNP TSC0030538
attagtgtggtay

SEQ ID NO: 122192 - DNA, 13 bp, Artificial Sequence
  Oligonucleotide for detection of SNP TSC0030538
rtaccacactaat

SEQ ID NO: 122193 - DNA, 13 bp, Artificial Sequence
  Oligonucleotide for detection of SNP TSC0030538
attagtatggtay

SEQ ID NO: 122194 - DNA, 13 bp, Artificial Sequence
  Oligonucleotide for detection of SNP TSC0030538
rtaccatactaat

SEQ ID NO: 122195 - DNA, 13 bp, Artificial Sequence
  Oligonucleotide for detection of SNP TSC0030538
attagcgtggtay

SEQ ID NO: 122196 - DNA, 13 bp, Artificial Sequence
  Oligonucleotide for detection of SNP TSC0030538
rtaccacgctaat

SEQ ID NO: 122197 - DNA, 13 bp, Artificial Sequence
  Oligonucleotide for detection of SNP TSC0030539
ttatgttgtttag

SEQ ID NO: 122198 - DNA, 13 bp, Artificial Sequence
  Oligonucleotide for detection of SNP TSC0030539
ctaaacaacataa

SEQ ID NO: 122199 - DNA, 13 bp, Artificial Sequence
  Oligonucleotide for detection of SNP TSC0030539
ttatgtcgtttag

SEQ ID NO: 122200 - DNA, 13 bp, Artificial Sequence
  Oligonucleotide for detection of SNP TSC0030539
ctaaacgacataa

SEQ ID NO: 122201 - DNA, 13 bp, Artificial Sequence
  Oligonucleotide for detection of SNP TSC0030539
ttaaatgatatag

SEQ ID NO: 122202 - DNA, 13 bp, Artificial Sequence
  Oligonucleotide for detection of SNP TSC0030539
ctatatcatttaa

SEQ ID NO: 122203 - DNA, 13 bp, Artificial Sequence
  Oligonucleotide for detection of SNP TSC0030539
ttaaataatatag

SEQ ID NO: 122204 - DNA, 13 bp, Artificial Sequence
  Oligonucleotide for detection of SNP TSC0030539
ctatattatttaa

SEQ ID NO: 122205 - DNA, 13 bp, Artificial Sequence
  Oligonucleotide for detection of SNP TSC0030539
ttaaacgatatag

SEQ ID NO: 122206 - DNA, 13 bp, Artificial Sequence
  Oligonucleotide for detection of SNP TSC0030539
ctatatcgtttaa

SEQ ID NO: 122207 - DNA, 13 bp, Artificial Sequence
  Oligonucleotide for detection of SNP TSC0030540
gatttgagaggtg

SEQ ID NO: 122208 - DNA, 13 bp, Artificial Sequence
  Oligonucleotide for detection of SNP TSC0030540
cacctctcaaatc

SEQ ID NO: 122209 - DNA, 13 bp, Artificial Sequence
  Oligonucleotide for detection of SNP TSC0030540
gatttgggaggtg

SEQ ID NO: 122210 - DNA, 13 bp, Artificial Sequence
  Oligonucleotide for detection of SNP TSC0030540
cacctcccaaatc

SEQ ID NO: 122211 - DNA, 13 bp, Artificial Sequence
  Oligonucleotide for detection of SNP TSC0030540
gatttgagaggcg

SEQ ID NO: 122212 - DNA, 13 bp, Artificial Sequence
  Oligonucleotide for detection of SNP TSC0030540
cgcctctcaaatc

SEQ ID NO: 122213 - DNA, 13 bp, Artificial Sequence
  Oligonucleotide for detection of SNP TSC0030540
gatttgggaggcg

SEQ ID NO: 122214 - DNA, 13 bp, Artificial Sequence
  Oligonucleotide for detection of SNP TSC0030540
cgcctcccaaatc

SEQ ID NO: 122215 - DNA, 13 bp, Artificial Sequence
  Oligonucleotide for detection of SNP TSC0030543
taagaaatgttag

SEQ ID NO: 122216 - DNA, 13 bp, Artificial Sequence
  Oligonucleotide for detection of SNP TSC0030543
ctaacatttctta

SEQ ID NO: 122217 - DNA, 13 bp, Artificial Sequence
  Oligonucleotide for detection of SNP TSC0030543
taagaagtgttag

SEQ ID NO: 122218 - DNA, 13 bp, Artificial Sequence
  Oligonucleotide for detection of SNP TSC0030543
ctaacacttctta

SEQ ID NO: 122219 - DNA, 13 bp, Artificial Sequence
  Oligonucleotide for detection of SNP TSC0030548
ttttattattttg

SEQ ID NO: 122220 - DNA, 13 bp, Artificial Sequence
  Oligonucleotide for detection of SNP TSC0030548
caaaataataaaa

SEQ ID NO: 122221 - DNA, 13 bp, Artificial Sequence
  Oligonucleotide for detection of SNP TSC0030548
ttttatgattttg

SEQ ID NO: 122222 - DNA, 13 bp, Artificial Sequence
  Oligonucleotide for detection of SNP TSC0030548
caaaatcataaaa

SEQ ID NO: 122223 - DNA, 13 bp, Artificial Sequence
  Oligonucleotide for detection of SNP TSC0030548
ttttattatttcg

SEQ ID NO: 122224 - DNA, 13 bp, Artificial Sequence
  Oligonucleotide for detection of SNP TSC0030548
cgaaataataaaa

SEQ ID NO: 122225 - DNA, 13 bp, Artificial Sequence
  Oligonucleotide for detection of SNP TSC0030548
ttttacgattttg

SEQ ID NO: 122226 - DNA, 13 bp, Artificial Sequence
  Oligonucleotide for detection of SNP TSC0030548
caaaatcgtaaaa

SEQ ID NO: 122227 - DNA, 13 bp, Artificial Sequence
  Oligonucleotide for detection of SNP TSC0030548
ttttatgatttcg

SEQ ID NO: 122228 - DNA, 13 bp, Artificial Sequence
  Oligonucleotide for detection of SNP TSC0030548
cgaaatcataaaa

SEQ ID NO: 122229 - DNA, 13 bp, Artificial Sequence
  Oligonucleotide for detection of SNP TSC0030548
ttttacgatttcg

SEQ ID NO: 122230 - DNA, 13 bp, Artificial Sequence
  Oligonucleotide for detection of SNP TSC0030548
cgaaatcgtaaaa

SEQ ID NO: 122231 - DNA, 13 bp, Artificial Sequence
  Oligonucleotide for detection of SNP TSC0030548
tggggtggtaaaa

SEQ ID NO: 122232 - DNA, 13 bp, Artificial Sequence
  Oligonucleotide for detection of SNP TSC0030548
ttttaccacccca

SEQ ID NO: 122233 - DNA, 13 bp, Artificial Sequence
  Oligonucleotide for detection of SNP TSC0030548
tggggttgtaaaa

SEQ ID NO: 122234 - DNA, 13 bp, Artificial Sequence
  Oligonucleotide for detection of SNP TSC0030548
ttttacaacccca

SEQ ID NO: 122235 - DNA, 13 bp, Artificial Sequence
  Oligonucleotide for detection of SNP TSC0030548
cggggtggtaaaa

SEQ ID NO: 122236 - DNA, 13 bp, Artificial Sequence
  Oligonucleotide for detection of SNP TSC0030548
ttttaccaccccg

SEQ ID NO: 122237 - DNA, 13 bp, Artificial Sequence
  Oligonucleotide for detection of SNP TSC0030548
cggggttgtaaaa

SEQ ID NO: 122238 - DNA, 13 bp, Artificial Sequence
  Oligonucleotide for detection of SNP TSC0030548
ttttacaaccccg

SEQ ID NO: 122239 - DNA, 13 bp, Artificial Sequence
  Oligonucleotide for detection of SNP TSC0030548
tggggtcgtaaaa

SEQ ID NO: 122240 - DNA, 13 bp, Artificial Sequence
  Oligonucleotide for detection of SNP TSC0030548
ttttacgacccca

SEQ ID NO: 122241 - DNA, 13 bp, Artificial Sequence
  Oligonucleotide for detection of SNP TSC0030548
cggggtcgtaaaa

SEQ ID NO: 122242 - DNA, 13 bp, Artificial Sequence
  Oligonucleotide for detection of SNP TSC0030548
ttttacgaccccg

SEQ ID NO: 122243 - DNA, 13 bp, Artificial Sequence
  Oligonucleotide for detection of SNP TSC0030549
agtatgatgatty

SEQ ID NO: 122244 - DNA, 13 bp, Artificial Sequence
  Oligonucleotide for detection of SNP TSC0030549
raatcatcatact

SEQ ID NO: 122245 - DNA, 13 bp, Artificial Sequence
  Oligonucleotide for detection of SNP TSC0030549
agtatgttgatty

SEQ ID NO: 122246 - DNA, 13 bp, Artificial Sequence
  Oligonucleotide for detection of SNP TSC0030549
raatcaacatact

SEQ ID NO: 122247 - DNA, 13 bp, Artificial Sequence
  Oligonucleotide for detection of SNP TSC0030549
gagttattatgtt

SEQ ID NO: 122248 - DNA, 13 bp, Artificial Sequence
  Oligonucleotide for detection of SNP TSC0030549
aacataataactc

SEQ ID NO: 122249 - DNA, 13 bp, Artificial Sequence
  Oligonucleotide for detection of SNP TSC0030549
gagttaatatgtt

SEQ ID NO: 122250 - DNA, 13 bp, Artificial Sequence
  Oligonucleotide for detection of SNP TSC0030549
aacatattaactc

SEQ ID NO: 122251 - DNA, 13 bp, Artificial Sequence
  Oligonucleotide for detection of SNP TSC0030550
agaattataagaa

SEQ ID NO: 122252 - DNA, 13 bp, Artificial Sequence
  Oligonucleotide for detection of SNP TSC0030550
ttcttataattct

SEQ ID NO: 122253 - DNA, 13 bp, Artificial Sequence
  Oligonucleotide for detection of SNP TSC0030550
agaattgtaagaa

SEQ ID NO: 122254 - DNA, 13 bp, Artificial Sequence
  Oligonucleotide for detection of SNP TSC0030550
ttcttacaattct

SEQ ID NO: 122255 - DNA, 13 bp, Artificial Sequence
  Oligonucleotide for detection of SNP TSC0030550
agaatcgtaagaa

SEQ ID NO: 122256 - DNA, 13 bp, Artificial Sequence
  Oligonucleotide for detection of SNP TSC0030550
ttcttacgattct

SEQ ID NO: 122257 - DNA, 13 bp, Artificial Sequence
  Oligonucleotide for detection of SNP TSC0030551
aatgtatatttta

SEQ ID NO: 122258 - DNA, 13 bp, Artificial Sequence
  Oligonucleotide for detection of SNP TSC0030551
taaaatatacatt

SEQ ID NO: 122259 - DNA, 13 bp, Artificial Sequence
  Oligonucleotide for detection of SNP TSC0030551
aatgtagatttta

SEQ ID NO: 122260 - DNA, 13 bp, Artificial Sequence
  Oligonucleotide for detection of SNP TSC0030551
taaaatctacatt

SEQ ID NO: 122261 - DNA, 13 bp, Artificial Sequence
  Oligonucleotide for detection of SNP TSC0030551
tgaaatgtgtatt

SEQ ID NO: 122262 - DNA, 13 bp, Artificial Sequence
  Oligonucleotide for detection of SNP TSC0030551
aatacacatttca

SEQ ID NO: 122263 - DNA, 13 bp, Artificial Sequence
  Oligonucleotide for detection of SNP TSC0030551
tgaaatttgtatt

SEQ ID NO: 122264 - DNA, 13 bp, Artificial Sequence
  Oligonucleotide for detection of SNP TSC0030551
aatacaaatttca

SEQ ID NO: 122265 - DNA, 13 bp, Artificial Sequence
  Oligonucleotide for detection of SNP TSC0030552
ggtttaaaaaatt

SEQ ID NO: 122266 - DNA, 13 bp, Artificial Sequence
  Oligonucleotide for detection of SNP TSC0030552
aattttttaaacc

SEQ ID NO: 122267 - DNA, 13 bp, Artificial Sequence
  Oligonucleotide for detection of SNP TSC0030552
ggtttagaaaatt

SEQ ID NO: 122268 - DNA, 13 bp, Artificial Sequence
  Oligonucleotide for detection of SNP TSC0030552
aattttctaaacc

SEQ ID NO: 122269 - DNA, 13 bp, Artificial Sequence
  Oligonucleotide for detection of SNP TSC0030553
tgttttaggggty

SEQ ID NO: 122270 - DNA, 13 bp, Artificial Sequence
  Oligonucleotide for detection of SNP TSC0030553
racccctaaaaca

SEQ ID NO: 122271 - DNA, 13 bp, Artificial Sequence
  Oligonucleotide for detection of SNP TSC0030553
tgttttgggggty

SEQ ID NO: 122272 - DNA, 13 bp, Artificial Sequence
  Oligonucleotide for detection of SNP TSC0030553
racccccaaaaca

SEQ ID NO: 122273 - DNA, 13 bp, Artificial Sequence
  Oligonucleotide for detection of SNP TSC0030553
tgtttcgggggty

SEQ ID NO: 122274 - DNA, 13 bp, Artificial Sequence
  Oligonucleotide for detection of SNP TSC0030553
racccccgaaaca

SEQ ID NO: 122275 - DNA, 13 bp, Artificial Sequence
  Oligonucleotide for detection of SNP TSC0030553
ggtttttgaggta

SEQ ID NO: 122276 - DNA, 13 bp, Artificial Sequence
  Oligonucleotide for detection of SNP TSC0030553
tacctcaaaaacc

SEQ ID NO: 122277 - DNA, 13 bp, Artificial Sequence
  Oligonucleotide for detection of SNP TSC0030553
ggttttcgaggta

SEQ ID NO: 122278 - DNA, 13 bp, Artificial Sequence
  Oligonucleotide for detection of SNP TSC0030553
tacctcgaaaacc

SEQ ID NO: 122279 - DNA, 13 bp, Artificial Sequence
  Oligonucleotide for detection of SNP TSC0030557
ttgttggtgtagt

SEQ ID NO: 122280 - DNA, 13 bp, Artificial Sequence
  Oligonucleotide for detection of SNP TSC0030557
actacaccaacaa

SEQ ID NO: 122281 - DNA, 13 bp, Artificial Sequence
  Oligonucleotide for detection of SNP TSC0030557
ttgttgatgtagt

SEQ ID NO: 122282 - DNA, 13 bp, Artificial Sequence
  Oligonucleotide for detection of SNP TSC0030557
actacatcaacaa

SEQ ID NO: 122283 - DNA, 13 bp, Artificial Sequence
  Oligonucleotide for detection of SNP TSC0030557
ttgtcggtgtagt

SEQ ID NO: 122284 - DNA, 13 bp, Artificial Sequence
  Oligonucleotide for detection of SNP TSC0030557
actacaccgacaa

SEQ ID NO: 122285 - DNA, 13 bp, Artificial Sequence
  Oligonucleotide for detection of SNP TSC0030557
ttgtcgatgtagt

SEQ ID NO: 122286 - DNA, 13 bp, Artificial Sequence
  Oligonucleotide for detection of SNP TSC0030557
actacatcgacaa

SEQ ID NO: 122287 - DNA, 13 bp, Artificial Sequence
  Oligonucleotide for detection of SNP TSC0030559
tattttaggtgtt

SEQ ID NO: 122288 - DNA, 13 bp, Artificial Sequence
  Oligonucleotide for detection of SNP TSC0030559
aacacctaaaata

SEQ ID NO: 122289 - DNA, 13 bp, Artificial Sequence
  Oligonucleotide for detection of SNP TSC0030559
tatttttggtgtt

SEQ ID NO: 122290 - DNA, 13 bp, Artificial Sequence
  Oligonucleotide for detection of SNP TSC0030559
aacaccaaaaata

SEQ ID NO: 122291 - DNA, 13 bp, Artificial Sequence
  Oligonucleotide for detection of SNP TSC0030559
agtatttgggatg

SEQ ID NO: 122292 - DNA, 13 bp, Artificial Sequence
  Oligonucleotide for detection of SNP TSC0030559
catcccaaatact

SEQ ID NO: 122293 - DNA, 13 bp, Artificial Sequence
  Oligonucleotide for detection of SNP TSC0030559
agtattagggatg

SEQ ID NO: 122294 - DNA, 13 bp, Artificial Sequence
  Oligonucleotide for detection of SNP TSC0030559
catccctaatact

SEQ ID NO: 122295 - DNA, 13 bp, Artificial Sequence
  Oligonucleotide for detection of SNP TSC0030563
tgtattaatgata

SEQ ID NO: 122296 - DNA, 13 bp, Artificial Sequence
  Oligonucleotide for detection of SNP TSC0030563
tatcattaataca

SEQ ID NO: 122297 - DNA, 13 bp, Artificial Sequence
  Oligonucleotide for detection of SNP TSC0030563
tgtattgatgata

SEQ ID NO: 122298 - DNA, 13 bp, Artificial Sequence
  Oligonucleotide for detection of SNP TSC0030563
tatcatcaataca

SEQ ID NO: 122299 - DNA, 13 bp, Artificial Sequence
  Oligonucleotide for detection of SNP TSC0030564
gtatttggtaaat

SEQ ID NO: 122300 - DNA, 13 bp, Artificial Sequence
  Oligonucleotide for detection of SNP TSC0030564
atttaccaaatac

SEQ ID NO: 122301 - DNA, 13 bp, Artificial Sequence
  Oligonucleotide for detection of SNP TSC0030564
gtatttagtaaat

SEQ ID NO: 122302 - DNA, 13 bp, Artificial Sequence
  Oligonucleotide for detection of SNP TSC0030564
atttactaaatac

SEQ ID NO: 122303 - DNA, 13 bp, Artificial Sequence
  Oligonucleotide for detection of SNP TSC0030566
gaggagagaagga

SEQ ID NO: 122304 - DNA, 13 bp, Artificial Sequence
  Oligonucleotide for detection of SNP TSC0030566
tccttctctcctc

SEQ ID NO: 122305 - DNA, 13 bp, Artificial Sequence
  Oligonucleotide for detection of SNP TSC0030566
gaggagggaagga

SEQ ID NO: 122306 - DNA, 13 bp, Artificial Sequence
  Oligonucleotide for detection of SNP TSC0030566
tccttccctcctc

SEQ ID NO: 122307 - DNA, 13 bp, Artificial Sequence
  Oligonucleotide for detection of SNP TSC0030568
tgggttgaattty

SEQ ID NO: 122308 - DNA, 13 bp, Artificial Sequence
  Oligonucleotide for detection of SNP TSC0030568
raaattcaaccca

SEQ ID NO: 122309 - DNA, 13 bp, Artificial Sequence
  Oligonucleotide for detection of SNP TSC0030568
tgggttaaattty

SEQ ID NO: 122310 - DNA, 13 bp, Artificial Sequence
  Oligonucleotide for detection of SNP TSC0030568
raaatttaaccca

SEQ ID NO: 122311 - DNA, 13 bp, Artificial Sequence
  Oligonucleotide for detection of SNP TSC0030569
agtttaatttatt

SEQ ID NO: 122312 - DNA, 13 bp, Artificial Sequence
  Oligonucleotide for detection of SNP TSC0030569
aataaattaaact

SEQ ID NO: 122313 - DNA, 13 bp, Artificial Sequence
  Oligonucleotide for detection of SNP TSC0030569
agtttagtttatt

SEQ ID NO: 122314 - DNA, 13 bp, Artificial Sequence
  Oligonucleotide for detection of SNP TSC0030569
aataaactaaact

SEQ ID NO: 122315 - DNA, 13 bp, Artificial Sequence
  Oligonucleotide for detection of SNP TSC0030570
aaaattaatgtga

SEQ ID NO: 122316 - DNA, 13 bp, Artificial Sequence
  Oligonucleotide for detection of SNP TSC0030570
tcacattaatttt

SEQ ID NO: 122317 - DNA, 13 bp, Artificial Sequence
  Oligonucleotide for detection of SNP TSC0030571
ggtttaaaaagat

SEQ ID NO: 122318 - DNA, 13 bp, Artificial Sequence
  Oligonucleotide for detection of SNP TSC0030571
atctttttaaacc

SEQ ID NO: 122319 - DNA, 13 bp, Artificial Sequence
  Oligonucleotide for detection of SNP TSC0030571
ggtttataaagat

SEQ ID NO: 122320 - DNA, 13 bp, Artificial Sequence
  Oligonucleotide for detection of SNP TSC0030571
atctttataaacc

SEQ ID NO: 122321 - DNA, 13 bp, Artificial Sequence
  Oligonucleotide for detection of SNP TSC0030571
atttttttgaaty

SEQ ID NO: 122322 - DNA, 13 bp, Artificial Sequence
  Oligonucleotide for detection of SNP TSC0030571
rattcaaaaaaat

SEQ ID NO: 122323 - DNA, 13 bp, Artificial Sequence
  Oligonucleotide for detection of SNP TSC0030571
atttttgtgaaty

SEQ ID NO: 122324 - DNA, 13 bp, Artificial Sequence
  Oligonucleotide for detection of SNP TSC0030571
rattcacaaaaat

SEQ ID NO: 122325 - DNA, 13 bp, Artificial Sequence
  Oligonucleotide for detection of SNP TSC0030572
tgttgggaatttg

SEQ ID NO: 122326 - DNA, 13 bp, Artificial Sequence
  Oligonucleotide for detection of SNP TSC0030572
caaattcccaaca

SEQ ID NO: 122327 - DNA, 13 bp, Artificial Sequence
  Oligonucleotide for detection of SNP TSC0030572
tgttggaaatttg

SEQ ID NO: 122328 - DNA, 13 bp, Artificial Sequence
  Oligonucleotide for detection of SNP TSC0030572
caaatttccaaca

SEQ ID NO: 122329 - DNA, 13 bp, Artificial Sequence
  Oligonucleotide for detection of SNP TSC0030573
agggggaatttgy

SEQ ID NO: 122330 - DNA, 13 bp, Artificial Sequence
  Oligonucleotide for detection of SNP TSC0030573
rcaaattccccct

SEQ ID NO: 122331 - DNA, 13 bp, Artificial Sequence
  Oligonucleotide for detection of SNP TSC0030573
agggggtatttgy

SEQ ID NO: 122332 - DNA, 13 bp, Artificial Sequence
  Oligonucleotide for detection of SNP TSC0030573
rcaaataccccct

SEQ ID NO: 122333 - DNA, 13 bp, Artificial Sequence
  Oligonucleotide for detection of SNP TSC0030573
gtagatttttttt

SEQ ID NO: 122334 - DNA, 13 bp, Artificial Sequence
  Oligonucleotide for detection of SNP TSC0030573
aaaaaaaatctac

SEQ ID NO: 122335 - DNA, 13 bp, Artificial Sequence
  Oligonucleotide for detection of SNP TSC0030573
gtagatgtttttt

SEQ ID NO: 122336 - DNA, 13 bp, Artificial Sequence
  Oligonucleotide for detection of SNP TSC0030573
aaaaaacatctac

SEQ ID NO: 122337 - DNA, 13 bp, Artificial Sequence
  Oligonucleotide for detection of SNP TSC0030575
cgtttaattatay

SEQ ID NO: 122338 - DNA, 13 bp, Artificial Sequence
  Oligonucleotide for detection of SNP TSC0030575
rtataattaaacg

SEQ ID NO: 122339 - DNA, 13 bp, Artificial Sequence
  Oligonucleotide for detection of SNP TSC0030575
cgtttagttatay

SEQ ID NO: 122340 - DNA, 13 bp, Artificial Sequence
  Oligonucleotide for detection of SNP TSC0030575
rtataactaaacg

SEQ ID NO: 122341 - DNA, 13 bp, Artificial Sequence
  Oligonucleotide for detection of SNP TSC0030576
atttttattagaa

SEQ ID NO: 122342 - DNA, 13 bp, Artificial Sequence
  Oligonucleotide for detection of SNP TSC0030576
ttctaataaaaat

SEQ ID NO: 122343 - DNA, 13 bp, Artificial Sequence
  Oligonucleotide for detection of SNP TSC0030576
atttttgttagaa

SEQ ID NO: 122344 - DNA, 13 bp, Artificial Sequence
  Oligonucleotide for detection of SNP TSC0030576
ttctaacaaaaat

SEQ ID NO: 122345 - DNA, 13 bp, Artificial Sequence
  Oligonucleotide for detection of SNP TSC0030576
attttcgttagaa

SEQ ID NO: 122346 - DNA, 13 bp, Artificial Sequence
  Oligonucleotide for detection of SNP TSC0030576
ttctaacgaaaat

SEQ ID NO: 122347 - DNA, 13 bp, Artificial Sequence
  Oligonucleotide for detection of SNP TSC0030576
ttttaatgagaat

SEQ ID NO: 122348 - DNA, 13 bp, Artificial Sequence
  Oligonucleotide for detection of SNP TSC0030576
attctcattaaaa

SEQ ID NO: 122349 - DNA, 13 bp, Artificial Sequence
  Oligonucleotide for detection of SNP TSC0030576
ttttaacgagaat

SEQ ID NO: 122350 - DNA, 13 bp, Artificial Sequence
  Oligonucleotide for detection of SNP TSC0030576
attctcgttaaaa

SEQ ID NO: 122351 - DNA, 13 bp, Artificial Sequence
  Oligonucleotide for detection of SNP TSC0030577
gtgtttaaggtag

SEQ ID NO: 122352 - DNA, 13 bp, Artificial Sequence
  Oligonucleotide for detection of SNP TSC0030577
ctaccttaaacac

SEQ ID NO: 122353 - DNA, 13 bp, Artificial Sequence
  Oligonucleotide for detection of SNP TSC0030577
gtgtttgaggtag

SEQ ID NO: 122354 - DNA, 13 bp, Artificial Sequence
  Oligonucleotide for detection of SNP TSC0030577
ctacctcaaacac

SEQ ID NO: 122355 - DNA, 13 bp, Artificial Sequence
  Oligonucleotide for detection of SNP TSC0030578
ttattgagtatty

SEQ ID NO: 122356 - DNA, 13 bp, Artificial Sequence
  Oligonucleotide for detection of SNP TSC0030578
raatactcaataa

SEQ ID NO: 122357 - DNA, 13 bp, Artificial Sequence
  Oligonucleotide for detection of SNP TSC0030578
ttattgtgtatty

SEQ ID NO: 122358 - DNA, 13 bp, Artificial Sequence
  Oligonucleotide for detection of SNP TSC0030578
raatacacaataa

SEQ ID NO: 122359 - DNA, 13 bp, Artificial Sequence
  Oligonucleotide for detection of SNP TSC0030578
ttattgcgtatty

SEQ ID NO: 122360 - DNA, 13 bp, Artificial Sequence
  Oligonucleotide for detection of SNP TSC0030578
raatacgcaataa

SEQ ID NO: 122361 - DNA, 13 bp, Artificial Sequence
  Oligonucleotide for detection of SNP TSC0030578
gggtatttagtgg

SEQ ID NO: 122362 - DNA, 13 bp, Artificial Sequence
  Oligonucleotide for detection of SNP TSC0030578
ccactaaataccc

SEQ ID NO: 122363 - DNA, 13 bp, Artificial Sequence
  Oligonucleotide for detection of SNP TSC0030578
gggtatgtagtgg

SEQ ID NO: 122364 - DNA, 13 bp, Artificial Sequence
  Oligonucleotide for detection of SNP TSC0030578
ccactacataccc

SEQ ID NO: 122365 - DNA, 13 bp, Artificial Sequence
  Oligonucleotide for detection of SNP TSC0030578
gggtacgtagtgg

SEQ ID NO: 122366 - DNA, 13 bp, Artificial Sequence
  Oligonucleotide for detection of SNP TSC0030578
ccactacgtaccc

SEQ ID NO: 122367 - DNA, 13 bp, Artificial Sequence
  Oligonucleotide for detection of SNP TSC0030579
atttttatagtgy

SEQ ID NO: 122368 - DNA, 13 bp, Artificial Sequence
  Oligonucleotide for detection of SNP TSC0030579
rcactataaaaat

SEQ ID NO: 122369 - DNA, 13 bp, Artificial Sequence
  Oligonucleotide for detection of SNP TSC0030579
atttttgtagtgy

SEQ ID NO: 122370 - DNA, 13 bp, Artificial Sequence
  Oligonucleotide for detection of SNP TSC0030579
rcactacaaaaat

SEQ ID NO: 122371 - DNA, 13 bp, Artificial Sequence
  Oligonucleotide for detection of SNP TSC0030579
attttcgtagtgy

SEQ ID NO: 122372 - DNA, 13 bp, Artificial Sequence
  Oligonucleotide for detection of SNP TSC0030579
rcactacgaaaat

SEQ ID NO: 122373 - DNA, 13 bp, Artificial Sequence
  Oligonucleotide for detection of SNP TSC0030579
gtattgtgggagt

SEQ ID NO: 122374 - DNA, 13 bp, Artificial Sequence
  Oligonucleotide for detection of SNP TSC0030579
actcccacaatac

SEQ ID NO: 122375 - DNA, 13 bp, Artificial Sequence
  Oligonucleotide for detection of SNP TSC0030579
gtattgcgggagt

SEQ ID NO: 122376 - DNA, 13 bp, Artificial Sequence
  Oligonucleotide for detection of SNP TSC0030579
actcccgcaatac

SEQ ID NO: 122377 - DNA, 13 bp, Artificial Sequence
  Oligonucleotide for detection of SNP TSC0030583
gttttgatagttg

SEQ ID NO: 122378 - DNA, 13 bp, Artificial Sequence
  Oligonucleotide for detection of SNP TSC0030583
caactatcaaaac

SEQ ID NO: 122379 - DNA, 13 bp, Artificial Sequence
  Oligonucleotide for detection of SNP TSC0030583
gttttgttagttg

SEQ ID NO: 122380 - DNA, 13 bp, Artificial Sequence
  Oligonucleotide for detection of SNP TSC0030583
caactaacaaaac

SEQ ID NO: 122381 - DNA, 13 bp, Artificial Sequence
  Oligonucleotide for detection of SNP TSC0030583
gtttcgatagttg

SEQ ID NO: 122382 - DNA, 13 bp, Artificial Sequence
  Oligonucleotide for detection of SNP TSC0030583
caactatcgaaac

SEQ ID NO: 122383 - DNA, 13 bp, Artificial Sequence
  Oligonucleotide for detection of SNP TSC0030583
gtttcgttagttg

SEQ ID NO: 122384 - DNA, 13 bp, Artificial Sequence
  Oligonucleotide for detection of SNP TSC0030583
caactaacgaaac

SEQ ID NO: 122385 - DNA, 13 bp, Artificial Sequence
  Oligonucleotide for detection of SNP TSC0030583
gttttgatagtcg

SEQ ID NO: 122386 - DNA, 13 bp, Artificial Sequence
  Oligonucleotide for detection of SNP TSC0030583
cgactatcaaaac

SEQ ID NO: 122387 - DNA, 13 bp, Artificial Sequence
  Oligonucleotide for detection of SNP TSC0030583
gttttgttagtcg

SEQ ID NO: 122388 - DNA, 13 bp, Artificial Sequence
  Oligonucleotide for detection of SNP TSC0030583
cgactaacaaaac

SEQ ID NO: 122389 - DNA, 13 bp, Artificial Sequence
  Oligonucleotide for detection of SNP TSC0030583
gtttcgatagtcg

SEQ ID NO: 122390 - DNA, 13 bp, Artificial Sequence
  Oligonucleotide for detection of SNP TSC0030583
cgactatcgaaac

SEQ ID NO: 122391 - DNA, 13 bp, Artificial Sequence
  Oligonucleotide for detection of SNP TSC0030583
gtttcgttagtcg

SEQ ID NO: 122392 - DNA, 13 bp, Artificial Sequence
  Oligonucleotide for detection of SNP TSC0030583
cgactaacgaaac

SEQ ID NO: 122393 - DNA, 13 bp, Artificial Sequence
  Oligonucleotide for detection of SNP TSC0030583
tggttgttggagy

SEQ ID NO: 122394 - DNA, 13 bp, Artificial Sequence
  Oligonucleotide for detection of SNP TSC0030583
rctccaacaacca

SEQ ID NO: 122395 - DNA, 13 bp, Artificial Sequence
  Oligonucleotide for detection of SNP TSC0030583
tggttggtggagy

SEQ ID NO: 122396 - DNA, 13 bp, Artificial Sequence
  Oligonucleotide for detection of SNP TSC0030583
rctccaccaacca

SEQ ID NO: 122397 - DNA, 13 bp, Artificial Sequence
  Oligonucleotide for detection of SNP TSC0030583
cggttgttggagy

SEQ ID NO: 122398 - DNA, 13 bp, Artificial Sequence
  Oligonucleotide for detection of SNP TSC0030583
rctccaacaaccg

SEQ ID NO: 122399 - DNA, 13 bp, Artificial Sequence
  Oligonucleotide for detection of SNP TSC0030583
cggttggtggagy

SEQ ID NO: 122400 - DNA, 13 bp, Artificial Sequence
  Oligonucleotide for detection of SNP TSC0030583
rctccaccaaccg

SEQ ID NO: 122401 - DNA, 13 bp, Artificial Sequence
  Oligonucleotide for detection of SNP TSC0030583
tggttgtcggagy

SEQ ID NO: 122402 - DNA, 13 bp, Artificial Sequence
  Oligonucleotide for detection of SNP TSC0030583
rctccgacaacca

SEQ ID NO: 122403 - DNA, 13 bp, Artificial Sequence
  Oligonucleotide for detection of SNP TSC0030583
tggttggcggagy

SEQ ID NO: 122404 - DNA, 13 bp, Artificial Sequence
  Oligonucleotide for detection of SNP TSC0030583
rctccgccaacca

SEQ ID NO: 122405 - DNA, 13 bp, Artificial Sequence
  Oligonucleotide for detection of SNP TSC0030583
cggttgtcggagy

SEQ ID NO: 122406 - DNA, 13 bp, Artificial Sequence
  Oligonucleotide for detection of SNP TSC0030583
rctccgacaaccg

SEQ ID NO: 122407 - DNA, 13 bp, Artificial Sequence
  Oligonucleotide for detection of SNP TSC0030583
cggttggcggagy

SEQ ID NO: 122408 - DNA, 13 bp, Artificial Sequence
  Oligonucleotide for detection of SNP TSC0030583
rctccgccaaccg

SEQ ID NO: 122409 - DNA, 13 bp, Artificial Sequence
  Oligonucleotide for detection of SNP TSC0030584
gttattatgattg

SEQ ID NO: 122410 - DNA, 13 bp, Artificial Sequence
  Oligonucleotide for detection of SNP TSC0030584
caatcataataac

SEQ ID NO: 122411 - DNA, 13 bp, Artificial Sequence
  Oligonucleotide for detection of SNP TSC0030584
gttattttgattg

SEQ ID NO: 122412 - DNA, 13 bp, Artificial Sequence
  Oligonucleotide for detection of SNP TSC0030584
caatcaaaataac

SEQ ID NO: 122413 - DNA, 13 bp, Artificial Sequence
  Oligonucleotide for detection of SNP TSC0030584
tagttatggtaay

SEQ ID NO: 122414 - DNA, 13 bp, Artificial Sequence
  Oligonucleotide for detection of SNP TSC0030584
rttaccataacta

SEQ ID NO: 122415 - DNA, 13 bp, Artificial Sequence
  Oligonucleotide for detection of SNP TSC0030584
tagttagggtaay

SEQ ID NO: 122416 - DNA, 13 bp, Artificial Sequence
  Oligonucleotide for detection of SNP TSC0030584
rttaccctaacta

SEQ ID NO: 122417 - DNA, 13 bp, Artificial Sequence
  Oligonucleotide for detection of SNP TSC0030585
gtgattatatatg

SEQ ID NO: 122418 - DNA, 13 bp, Artificial Sequence
  Oligonucleotide for detection of SNP TSC0030585
catatataatcac

SEQ ID NO: 122419 - DNA, 13 bp, Artificial Sequence
  Oligonucleotide for detection of SNP TSC0030585
gtgattgtatatg

SEQ ID NO: 122420 - DNA, 13 bp, Artificial Sequence
  Oligonucleotide for detection of SNP TSC0030585
catatacaatcac

SEQ ID NO: 122421 - DNA, 13 bp, Artificial Sequence
  Oligonucleotide for detection of SNP TSC0030585
gtgatcgtatatg

SEQ ID NO: 122422 - DNA, 13 bp, Artificial Sequence
  Oligonucleotide for detection of SNP TSC0030585
catatacgatcac

SEQ ID NO: 122423 - DNA, 13 bp, Artificial Sequence
  Oligonucleotide for detection of SNP TSC0030585
tatatatgattay

SEQ ID NO: 122424 - DNA, 13 bp, Artificial Sequence
  Oligonucleotide for detection of SNP TSC0030585
rtaatcatatata

SEQ ID NO: 122425 - DNA, 13 bp, Artificial Sequence
  Oligonucleotide for detection of SNP TSC0030585
tatatacgattay

SEQ ID NO: 122426 - DNA, 13 bp, Artificial Sequence
  Oligonucleotide for detection of SNP TSC0030585
rtaatcgtatata

SEQ ID NO: 122427 - DNA, 13 bp, Artificial Sequence
  Oligonucleotide for detection of SNP TSC0030587
agttgggttgttt

SEQ ID NO: 122428 - DNA, 13 bp, Artificial Sequence
  Oligonucleotide for detection of SNP TSC0030587
aaacaacccaact

SEQ ID NO: 122429 - DNA, 13 bp, Artificial Sequence
  Oligonucleotide for detection of SNP TSC0030587
agttggtttgttt

SEQ ID NO: 122430 - DNA, 13 bp, Artificial Sequence
  Oligonucleotide for detection of SNP TSC0030587
aaacaaaccaact

SEQ ID NO: 122431 - DNA, 13 bp, Artificial Sequence
  Oligonucleotide for detection of SNP TSC0030587
aaataatttaatt

SEQ ID NO: 122432 - DNA, 13 bp, Artificial Sequence
  Oligonucleotide for detection of SNP TSC0030587
aattaaattattt

SEQ ID NO: 122433 - DNA, 13 bp, Artificial Sequence
  Oligonucleotide for detection of SNP TSC0030587
aaataaattaatt

SEQ ID NO: 122434 - DNA, 13 bp, Artificial Sequence
  Oligonucleotide for detection of SNP TSC0030587
aattaatttattt

SEQ ID NO: 122435 - DNA, 13 bp, Artificial Sequence
  Oligonucleotide for detection of SNP TSC0030589
aggtgttggttaa

SEQ ID NO: 122436 - DNA, 13 bp, Artificial Sequence
  Oligonucleotide for detection of SNP TSC0030589
ttaaccaacacct

SEQ ID NO: 122437 - DNA, 13 bp, Artificial Sequence
  Oligonucleotide for detection of SNP TSC0030589
aggtgtcggttaa

SEQ ID NO: 122438 - DNA, 13 bp, Artificial Sequence
  Oligonucleotide for detection of SNP TSC0030589
ttaaccgacacct

SEQ ID NO: 122439 - DNA, 13 bp, Artificial Sequence
  Oligonucleotide for detection of SNP TSC0030589
ttaattggtattt

SEQ ID NO: 122440 - DNA, 13 bp, Artificial Sequence
  Oligonucleotide for detection of SNP TSC0030589
aaataccaattaa

SEQ ID NO: 122441 - DNA, 13 bp, Artificial Sequence
  Oligonucleotide for detection of SNP TSC0030589
ttaattagtattt

SEQ ID NO: 122442 - DNA, 13 bp, Artificial Sequence
  Oligonucleotide for detection of SNP TSC0030589
aaatactaattaa

SEQ ID NO: 122443 - DNA, 13 bp, Artificial Sequence
  Oligonucleotide for detection of SNP TSC0030589
ttaatcggtattt

SEQ ID NO: 122444 - DNA, 13 bp, Artificial Sequence
  Oligonucleotide for detection of SNP TSC0030589
aaataccgattaa

SEQ ID NO: 122445 - DNA, 13 bp, Artificial Sequence
  Oligonucleotide for detection of SNP TSC0030592
ttagttatttggg

SEQ ID NO: 122446 - DNA, 13 bp, Artificial Sequence
  Oligonucleotide for detection of SNP TSC0030592
cccaaataactaa

SEQ ID NO: 122447 - DNA, 13 bp, Artificial Sequence
  Oligonucleotide for detection of SNP TSC0030592
ttagttttttggg

SEQ ID NO: 122448 - DNA, 13 bp, Artificial Sequence
  Oligonucleotide for detection of SNP TSC0030592
cccaaaaaactaa

SEQ ID NO: 122449 - DNA, 13 bp, Artificial Sequence
  Oligonucleotide for detection of SNP TSC0030592
tttagatagttga

SEQ ID NO: 122450 - DNA, 13 bp, Artificial Sequence
  Oligonucleotide for detection of SNP TSC0030592
tcaactatctaaa

SEQ ID NO: 122451 - DNA, 13 bp, Artificial Sequence
  Oligonucleotide for detection of SNP TSC0030592
tttagagagttga

SEQ ID NO: 122452 - DNA, 13 bp, Artificial Sequence
  Oligonucleotide for detection of SNP TSC0030592
tcaactctctaaa

SEQ ID NO: 122453 - DNA, 13 bp, Artificial Sequence
  Oligonucleotide for detection of SNP TSC0030593
gtgtttatatgaa

SEQ ID NO: 122454 - DNA, 13 bp, Artificial Sequence
  Oligonucleotide for detection of SNP TSC0030593
ttcatataaacac

SEQ ID NO: 122455 - DNA, 13 bp, Artificial Sequence
  Oligonucleotide for detection of SNP TSC0030593
gtgtttttatgaa

SEQ ID NO: 122456 - DNA, 13 bp, Artificial Sequence
  Oligonucleotide for detection of SNP TSC0030593
ttcataaaaacac

SEQ ID NO: 122457 - DNA, 13 bp, Artificial Sequence
  Oligonucleotide for detection of SNP TSC0030593
tttatgtgaatay

SEQ ID NO: 122458 - DNA, 13 bp, Artificial Sequence
  Oligonucleotide for detection of SNP TSC0030593
rtattcacataaa

SEQ ID NO: 122459 - DNA, 13 bp, Artificial Sequence
  Oligonucleotide for detection of SNP TSC0030593
tttatgagaatay

SEQ ID NO: 122460 - DNA, 13 bp, Artificial Sequence
  Oligonucleotide for detection of SNP TSC0030593
rtattctcataaa

SEQ ID NO: 122461 - DNA, 13 bp, Artificial Sequence
  Oligonucleotide for detection of SNP TSC0030594
tatttaatttaag

SEQ ID NO: 122462 - DNA, 13 bp, Artificial Sequence
  Oligonucleotide for detection of SNP TSC0030594
cttaaattaaata

SEQ ID NO: 122463 - DNA, 13 bp, Artificial Sequence
  Oligonucleotide for detection of SNP TSC0030594
tatttattttaag

SEQ ID NO: 122464 - DNA, 13 bp, Artificial Sequence
  Oligonucleotide for detection of SNP TSC0030594
cttaaaataaata

SEQ ID NO: 122465 - DNA, 13 bp, Artificial Sequence
  Oligonucleotide for detection of SNP TSC0030594
tttgagttgagta

SEQ ID NO: 122466 - DNA, 13 bp, Artificial Sequence
  Oligonucleotide for detection of SNP TSC0030594
tactcaactcaaa

SEQ ID NO: 122467 - DNA, 13 bp, Artificial Sequence
  Oligonucleotide for detection of SNP TSC0030594
tttgaggtgagta

SEQ ID NO: 122468 - DNA, 13 bp, Artificial Sequence
  Oligonucleotide for detection of SNP TSC0030594
tactcacctcaaa

SEQ ID NO: 122469 - DNA, 13 bp, Artificial Sequence
  Oligonucleotide for detection of SNP TSC0030597
attaatattaaga

SEQ ID NO: 122470 - DNA, 13 bp, Artificial Sequence
  Oligonucleotide for detection of SNP TSC0030597
tcttaatattaat

SEQ ID NO: 122471 - DNA, 13 bp, Artificial Sequence
  Oligonucleotide for detection of SNP TSC0030597
attaattttaaga

SEQ ID NO: 122472 - DNA, 13 bp, Artificial Sequence
  Oligonucleotide for detection of SNP TSC0030597
tcttaaaattaat

SEQ ID NO: 122473 - DNA, 13 bp, Artificial Sequence
  Oligonucleotide for detection of SNP TSC0030598
ttggtcgttttgg

SEQ ID NO: 122474 - DNA, 13 bp, Artificial Sequence
  Oligonucleotide for detection of SNP TSC0030598
ccaaaacgaccaa

SEQ ID NO: 122475 - DNA, 13 bp, Artificial Sequence
  Oligonucleotide for detection of SNP TSC0030598
ttaaggtggttag

SEQ ID NO: 122476 - DNA, 13 bp, Artificial Sequence
  Oligonucleotide for detection of SNP TSC0030598
ctaaccaccttaa

SEQ ID NO: 122477 - DNA, 13 bp, Artificial Sequence
  Oligonucleotide for detection of SNP TSC0030598
ttaaggcggttag

SEQ ID NO: 122478 - DNA, 13 bp, Artificial Sequence
  Oligonucleotide for detection of SNP TSC0030598
ctaaccgccttaa

SEQ ID NO: 122479 - DNA, 13 bp, Artificial Sequence
  Oligonucleotide for detection of SNP TSC0030599
gttattattggtt

SEQ ID NO: 122480 - DNA, 13 bp, Artificial Sequence
  Oligonucleotide for detection of SNP TSC0030599
aaccaataataac

SEQ ID NO: 122481 - DNA, 13 bp, Artificial Sequence
  Oligonucleotide for detection of SNP TSC0030599
gttattgttggtt

SEQ ID NO: 122482 - DNA, 13 bp, Artificial Sequence
  Oligonucleotide for detection of SNP TSC0030599
aaccaacaataac

SEQ ID NO: 122483 - DNA, 13 bp, Artificial Sequence
  Oligonucleotide for detection of SNP TSC0030599
gttatcgttggtt

SEQ ID NO: 122484 - DNA, 13 bp, Artificial Sequence
  Oligonucleotide for detection of SNP TSC0030599
aaccaacgataac

SEQ ID NO: 122485 - DNA, 13 bp, Artificial Sequence
  Oligonucleotide for detection of SNP TSC0030599
agttagtggtggy

SEQ ID NO: 122486 - DNA, 13 bp, Artificial Sequence
  Oligonucleotide for detection of SNP TSC0030599
rccaccactaact

SEQ ID NO: 122487 - DNA, 13 bp, Artificial Sequence
  Oligonucleotide for detection of SNP TSC0030599
agttagcggtggy

SEQ ID NO: 122488 - DNA, 13 bp, Artificial Sequence
  Oligonucleotide for detection of SNP TSC0030599
rccaccgctaact

SEQ ID NO: 122489 - DNA, 13 bp, Artificial Sequence
  Oligonucleotide for detection of SNP TSC0030601
aaaaatatatagt

SEQ ID NO: 122490 - DNA, 13 bp, Artificial Sequence
  Oligonucleotide for detection of SNP TSC0030601
actatatattttt

SEQ ID NO: 122491 - DNA, 13 bp, Artificial Sequence
  Oligonucleotide for detection of SNP TSC0030601
aaaaatgtatagt

SEQ ID NO: 122492 - DNA, 13 bp, Artificial Sequence
  Oligonucleotide for detection of SNP TSC0030601
actatacattttt

SEQ ID NO: 122493 - DNA, 13 bp, Artificial Sequence
  Oligonucleotide for detection of SNP TSC0030601
aaaaacgtatagt

SEQ ID NO: 122494 - DNA, 13 bp, Artificial Sequence
  Oligonucleotide for detection of SNP TSC0030601
actatacgttttt

SEQ ID NO: 122495 - DNA, 13 bp, Artificial Sequence
  Oligonucleotide for detection of SNP TSC0030601
attgtatgttttt

SEQ ID NO: 122496 - DNA, 13 bp, Artificial Sequence
  Oligonucleotide for detection of SNP TSC0030601
aaaaacatacaat

SEQ ID NO: 122497 - DNA, 13 bp, Artificial Sequence
  Oligonucleotide for detection of SNP TSC0030601
attgtacgttttt

SEQ ID NO: 122498 - DNA, 13 bp, Artificial Sequence
  Oligonucleotide for detection of SNP TSC0030601
aaaaacgtacaat

SEQ ID NO: 122499 - DNA, 13 bp, Artificial Sequence
  Oligonucleotide for detection of SNP TSC0030602
gtgaaagtagtaa

SEQ ID NO: 122500 - DNA, 13 bp, Artificial Sequence
  Oligonucleotide for detection of SNP TSC0030602
ttactactttcac

SEQ ID NO: 122501 - DNA, 13 bp, Artificial Sequence
  Oligonucleotide for detection of SNP TSC0030602
gtgaaaatagtaa

SEQ ID NO: 122502 - DNA, 13 bp, Artificial Sequence
  Oligonucleotide for detection of SNP TSC0030602
ttactattttcac

SEQ ID NO: 122503 - DNA, 13 bp, Artificial Sequence
  Oligonucleotide for detection of SNP TSC0030603
ggagttttttgtg

SEQ ID NO: 122504 - DNA, 13 bp, Artificial Sequence
  Oligonucleotide for detection of SNP TSC0030603
cacaaaaaactcc

SEQ ID NO: 122505 - DNA, 13 bp, Artificial Sequence
  Oligonucleotide for detection of SNP TSC0030603
ggagttgtttgtg

SEQ ID NO: 122506 - DNA, 13 bp, Artificial Sequence
  Oligonucleotide for detection of SNP TSC0030603
cacaaacaactcc

SEQ ID NO: 122507 - DNA, 13 bp, Artificial Sequence
  Oligonucleotide for detection of SNP TSC0030603
ggagttttttgcg

SEQ ID NO: 122508 - DNA, 13 bp, Artificial Sequence
  Oligonucleotide for detection of SNP TSC0030603
cgcaaaaaactcc

SEQ ID NO: 122509 - DNA, 13 bp, Artificial Sequence
  Oligonucleotide for detection of SNP TSC0030603
ggagttgtttgcg

SEQ ID NO: 122510 - DNA, 13 bp, Artificial Sequence
  Oligonucleotide for detection of SNP TSC0030603
cgcaaacaactcc

SEQ ID NO: 122511 - DNA, 13 bp, Artificial Sequence
  Oligonucleotide for detection of SNP TSC0030603
tgtagggagttty

SEQ ID NO: 122512 - DNA, 13 bp, Artificial Sequence
  Oligonucleotide for detection of SNP TSC0030603
raaactccctaca

SEQ ID NO: 122513 - DNA, 13 bp, Artificial Sequence
  Oligonucleotide for detection of SNP TSC0030603
tgtaggtagttty

SEQ ID NO: 122514 - DNA, 13 bp, Artificial Sequence
  Oligonucleotide for detection of SNP TSC0030603
raaactacctaca

SEQ ID NO: 122515 - DNA, 13 bp, Artificial Sequence
  Oligonucleotide for detection of SNP TSC0030603
cgtagggagttty

SEQ ID NO: 122516 - DNA, 13 bp, Artificial Sequence
  Oligonucleotide for detection of SNP TSC0030603
raaactccctacg

SEQ ID NO: 122517 - DNA, 13 bp, Artificial Sequence
  Oligonucleotide for detection of SNP TSC0030603
cgtaggtagttty

SEQ ID NO: 122518 - DNA, 13 bp, Artificial Sequence
  Oligonucleotide for detection of SNP TSC0030603
raaactacctacg

SEQ ID NO: 122519 - DNA, 13 bp, Artificial Sequence
  Oligonucleotide for detection of SNP TSC0030605
gaatagtgatagg

SEQ ID NO: 122520 - DNA, 13 bp, Artificial Sequence
  Oligonucleotide for detection of SNP TSC0030605
cctatcactattc

SEQ ID NO: 122521 - DNA, 13 bp, Artificial Sequence
  Oligonucleotide for detection of SNP TSC0030605
gaatagcgatagg

SEQ ID NO: 122522 - DNA, 13 bp, Artificial Sequence
  Oligonucleotide for detection of SNP TSC0030605
cctatcgctattc

SEQ ID NO: 122523 - DNA, 13 bp, Artificial Sequence
  Oligonucleotide for detection of SNP TSC0030605
tttgttgttgtty

SEQ ID NO: 122524 - DNA, 13 bp, Artificial Sequence
  Oligonucleotide for detection of SNP TSC0030605
raacaacaacaaa

SEQ ID NO: 122525 - DNA, 13 bp, Artificial Sequence
  Oligonucleotide for detection of SNP TSC0030605
tttgtcgttgtty

SEQ ID NO: 122526 - DNA, 13 bp, Artificial Sequence
  Oligonucleotide for detection of SNP TSC0030605
raacaacgacaaa

SEQ ID NO: 122527 - DNA, 13 bp, Artificial Sequence
  Oligonucleotide for detection of SNP TSC0030606
gaatttggttatt

SEQ ID NO: 122528 - DNA, 13 bp, Artificial Sequence
  Oligonucleotide for detection of SNP TSC0030606
aataaccaaattc

SEQ ID NO: 122529 - DNA, 13 bp, Artificial Sequence
  Oligonucleotide for detection of SNP TSC0030606
gaatttagttatt

SEQ ID NO: 122530 - DNA, 13 bp, Artificial Sequence
  Oligonucleotide for detection of SNP TSC0030606
aataactaaattc

SEQ ID NO: 122531 - DNA, 13 bp, Artificial Sequence
  Oligonucleotide for detection of SNP TSC0030609
ttggggattttgy

SEQ ID NO: 122532 - DNA, 13 bp, Artificial Sequence
  Oligonucleotide for detection of SNP TSC0030609
rcaaaatccccaa

SEQ ID NO: 122533 - DNA, 13 bp, Artificial Sequence
  Oligonucleotide for detection of SNP TSC0030609
ttggggtttttgy

SEQ ID NO: 122534 - DNA, 13 bp, Artificial Sequence
  Oligonucleotide for detection of SNP TSC0030609
rcaaaaaccccaa

SEQ ID NO: 122535 - DNA, 13 bp, Artificial Sequence
  Oligonucleotide for detection of SNP TSC0030609
tcggggattttgy

SEQ ID NO: 122536 - DNA, 13 bp, Artificial Sequence
  Oligonucleotide for detection of SNP TSC0030609
rcaaaatccccga

SEQ ID NO: 122537 - DNA, 13 bp, Artificial Sequence
  Oligonucleotide for detection of SNP TSC0030609
tcggggtttttgy

SEQ ID NO: 122538 - DNA, 13 bp, Artificial Sequence
  Oligonucleotide for detection of SNP TSC0030609
rcaaaaaccccga

SEQ ID NO: 122539 - DNA, 13 bp, Artificial Sequence
  Oligonucleotide for detection of SNP TSC0030609
ttggggatttcgy

SEQ ID NO: 122540 - DNA, 13 bp, Artificial Sequence
  Oligonucleotide for detection of SNP TSC0030609
rcgaaatccccaa

SEQ ID NO: 122541 - DNA, 13 bp, Artificial Sequence
  Oligonucleotide for detection of SNP TSC0030609
ttggggttttcgy

SEQ ID NO: 122542 - DNA, 13 bp, Artificial Sequence
  Oligonucleotide for detection of SNP TSC0030609
rcgaaaaccccaa

SEQ ID NO: 122543 - DNA, 13 bp, Artificial Sequence
  Oligonucleotide for detection of SNP TSC0030609
tcggggatttcgy

SEQ ID NO: 122544 - DNA, 13 bp, Artificial Sequence
  Oligonucleotide for detection of SNP TSC0030609
rcgaaatccccga

SEQ ID NO: 122545 - DNA, 13 bp, Artificial Sequence
  Oligonucleotide for detection of SNP TSC0030609
tcggggttttcgy

SEQ ID NO: 122546 - DNA, 13 bp, Artificial Sequence
  Oligonucleotide for detection of SNP TSC0030609
rcgaaaaccccga

SEQ ID NO: 122547 - DNA, 13 bp, Artificial Sequence
  Oligonucleotide for detection of SNP TSC0030609
gtgaagtttttgg

SEQ ID NO: 122548 - DNA, 13 bp, Artificial Sequence
  Oligonucleotide for detection of SNP TSC0030609
ccaaaaacttcac

SEQ ID NO: 122549 - DNA, 13 bp, Artificial Sequence
  Oligonucleotide for detection of SNP TSC0030609
gtgaaggttttgg

SEQ ID NO: 122550 - DNA, 13 bp, Artificial Sequence
  Oligonucleotide for detection of SNP TSC0030609
ccaaaaccttcac

SEQ ID NO: 122551 - DNA, 13 bp, Artificial Sequence
  Oligonucleotide for detection of SNP TSC0030609
gcgaagtttttgg

SEQ ID NO: 122552 - DNA, 13 bp, Artificial Sequence
  Oligonucleotide for detection of SNP TSC0030609
ccaaaaacttcgc

SEQ ID NO: 122553 - DNA, 13 bp, Artificial Sequence
  Oligonucleotide for detection of SNP TSC0030609
gcgaaggttttgg

SEQ ID NO: 122554 - DNA, 13 bp, Artificial Sequence
  Oligonucleotide for detection of SNP TSC0030609
ccaaaaccttcgc

SEQ ID NO: 122555 - DNA, 13 bp, Artificial Sequence
  Oligonucleotide for detection of SNP TSC0030609
gtgaagttttcgg

SEQ ID NO: 122556 - DNA, 13 bp, Artificial Sequence
  Oligonucleotide for detection of SNP TSC0030609
ccgaaaacttcac

SEQ ID NO: 122557 - DNA, 13 bp, Artificial Sequence
  Oligonucleotide for detection of SNP TSC0030609
gtgaaggtttcgg

SEQ ID NO: 122558 - DNA, 13 bp, Artificial Sequence
  Oligonucleotide for detection of SNP TSC0030609
ccgaaaccttcac

SEQ ID NO: 122559 - DNA, 13 bp, Artificial Sequence
  Oligonucleotide for detection of SNP TSC0030609
gcgaagttttcgg

SEQ ID NO: 122560 - DNA, 13 bp, Artificial Sequence
  Oligonucleotide for detection of SNP TSC0030609
ccgaaaacttcgc

SEQ ID NO: 122561 - DNA, 13 bp, Artificial Sequence
  Oligonucleotide for detection of SNP TSC0030609
gcgaaggtttcgg

SEQ ID NO: 122562 - DNA, 13 bp, Artificial Sequence
  Oligonucleotide for detection of SNP TSC0030609
ccgaaaccttcgc

SEQ ID NO: 122563 - DNA, 13 bp, Artificial Sequence
  Oligonucleotide for detection of SNP TSC0030611
attattaaaggat

SEQ ID NO: 122564 - DNA, 13 bp, Artificial Sequence
  Oligonucleotide for detection of SNP TSC0030611
atcctttaataat

SEQ ID NO: 122565 - DNA, 13 bp, Artificial Sequence
  Oligonucleotide for detection of SNP TSC0030611
attattgaaggat

SEQ ID NO: 122566 - DNA, 13 bp, Artificial Sequence
  Oligonucleotide for detection of SNP TSC0030611
atccttcaataat

SEQ ID NO: 122567 - DNA, 13 bp, Artificial Sequence
  Oligonucleotide for detection of SNP TSC0030616
tataaaatttttg

SEQ ID NO: 122568 - DNA, 13 bp, Artificial Sequence
  Oligonucleotide for detection of SNP TSC0030616
caaaaattttata

SEQ ID NO: 122569 - DNA, 13 bp, Artificial Sequence
  Oligonucleotide for detection of SNP TSC0030616
tataaagtttttg

SEQ ID NO: 122570 - DNA, 13 bp, Artificial Sequence
  Oligonucleotide for detection of SNP TSC0030616
caaaaactttata

SEQ ID NO: 122571 - DNA, 13 bp, Artificial Sequence
  Oligonucleotide for detection of SNP TSC0030622
tgggatttggggt

SEQ ID NO: 122572 - DNA, 13 bp, Artificial Sequence
  Oligonucleotide for detection of SNP TSC0030622
accccaaatccca

SEQ ID NO: 122573 - DNA, 13 bp, Artificial Sequence
  Oligonucleotide for detection of SNP TSC0030622
tgggatgtggggt

SEQ ID NO: 122574 - DNA, 13 bp, Artificial Sequence
  Oligonucleotide for detection of SNP TSC0030622
accccacatccca

SEQ ID NO: 122575 - DNA, 13 bp, Artificial Sequence
  Oligonucleotide for detection of SNP TSC0030622
tgggacgtggggt

SEQ ID NO: 122576 - DNA, 13 bp, Artificial Sequence
  Oligonucleotide for detection of SNP TSC0030622
accccacgtccca

SEQ ID NO: 122577 - DNA, 13 bp, Artificial Sequence
  Oligonucleotide for detection of SNP TSC0030622
attttaggtttta

SEQ ID NO: 122578 - DNA, 13 bp, Artificial Sequence
  Oligonucleotide for detection of SNP TSC0030622
taaaacctaaaat

SEQ ID NO: 122579 - DNA, 13 bp, Artificial Sequence
  Oligonucleotide for detection of SNP TSC0030625
tttaaagatatgt

SEQ ID NO: 122580 - DNA, 13 bp, Artificial Sequence
  Oligonucleotide for detection of SNP TSC0030625
acatatctttaaa

SEQ ID NO: 122581 - DNA, 13 bp, Artificial Sequence
  Oligonucleotide for detection of SNP TSC0030625
tttaaatatatgt

SEQ ID NO: 122582 - DNA, 13 bp, Artificial Sequence
  Oligonucleotide for detection of SNP TSC0030625
acatatatttaaa

SEQ ID NO: 122583 - DNA, 13 bp, Artificial Sequence
  Oligonucleotide for detection of SNP TSC0030625
atatgtttttgag

SEQ ID NO: 122584 - DNA, 13 bp, Artificial Sequence
  Oligonucleotide for detection of SNP TSC0030625
ctcaaaaacatat

SEQ ID NO: 122585 - DNA, 13 bp, Artificial Sequence
  Oligonucleotide for detection of SNP TSC0030625
atatgtatttgag

SEQ ID NO: 122586 - DNA, 13 bp, Artificial Sequence
  Oligonucleotide for detection of SNP TSC0030625
ctcaaatacatat

SEQ ID NO: 122587 - DNA, 13 bp, Artificial Sequence
  Oligonucleotide for detection of SNP TSC0030626
gttgtgagtaaag

SEQ ID NO: 122588 - DNA, 13 bp, Artificial Sequence
  Oligonucleotide for detection of SNP TSC0030626
ctttactcacaac

SEQ ID NO: 122589 - DNA, 13 bp, Artificial Sequence
  Oligonucleotide for detection of SNP TSC0030626
gttgtgggtaaag

SEQ ID NO: 122590 - DNA, 13 bp, Artificial Sequence
  Oligonucleotide for detection of SNP TSC0030626
ctttacccacaac

SEQ ID NO: 122591 - DNA, 13 bp, Artificial Sequence
  Oligonucleotide for detection of SNP TSC0030626
gtcgtgagtaaag

SEQ ID NO: 122592 - DNA, 13 bp, Artificial Sequence
  Oligonucleotide for detection of SNP TSC0030626
ctttactcacgac

SEQ ID NO: 122593 - DNA, 13 bp, Artificial Sequence
  Oligonucleotide for detection of SNP TSC0030626
gtcgtgggtaaag

SEQ ID NO: 122594 - DNA, 13 bp, Artificial Sequence
  Oligonucleotide for detection of SNP TSC0030626
ctttacccacgac

SEQ ID NO: 122595 - DNA, 13 bp, Artificial Sequence
  Oligonucleotide for detection of SNP TSC0030632
gttttgagaggay

SEQ ID NO: 122596 - DNA, 13 bp, Artificial Sequence
  Oligonucleotide for detection of SNP TSC0030632
rtcctctcaaaac

SEQ ID NO: 122597 - DNA, 13 bp, Artificial Sequence
  Oligonucleotide for detection of SNP TSC0030632
gttttgtgaggay

SEQ ID NO: 122598 - DNA, 13 bp, Artificial Sequence
  Oligonucleotide for detection of SNP TSC0030632
rtcctcacaaaac

SEQ ID NO: 122599 - DNA, 13 bp, Artificial Sequence
  Oligonucleotide for detection of SNP TSC0030632
gttttgcgaggay

SEQ ID NO: 122600 - DNA, 13 bp, Artificial Sequence
  Oligonucleotide for detection of SNP TSC0030632
rtcctcgcaaaac

SEQ ID NO: 122601 - DNA, 13 bp, Artificial Sequence
  Oligonucleotide for detection of SNP TSC0030632
gtttttttaaagy

SEQ ID NO: 122602 - DNA, 13 bp, Artificial Sequence
  Oligonucleotide for detection of SNP TSC0030632
rctttaaaaaaac

SEQ ID NO: 122603 - DNA, 13 bp, Artificial Sequence
  Oligonucleotide for detection of SNP TSC0030632
gtttttgtaaagy

SEQ ID NO: 122604 - DNA, 13 bp, Artificial Sequence
  Oligonucleotide for detection of SNP TSC0030632
rctttacaaaaac

SEQ ID NO: 122605 - DNA, 13 bp, Artificial Sequence
  Oligonucleotide for detection of SNP TSC0030632
gttttcgtaaagy

SEQ ID NO: 122606 - DNA, 13 bp, Artificial Sequence
  Oligonucleotide for detection of SNP TSC0030632
rctttacgaaaac

SEQ ID NO: 122607 - DNA, 13 bp, Artificial Sequence
  Oligonucleotide for detection of SNP TSC0030639
tgtattatttgtt

SEQ ID NO: 122608 - DNA, 13 bp, Artificial Sequence
  Oligonucleotide for detection of SNP TSC0030639
aacaaataataca

SEQ ID NO: 122609 - DNA, 13 bp, Artificial Sequence
  Oligonucleotide for detection of SNP TSC0030639
tgtattttttgtt

SEQ ID NO: 122610 - DNA, 13 bp, Artificial Sequence
  Oligonucleotide for detection of SNP TSC0030639
aacaaaaaataca

SEQ ID NO: 122611 - DNA, 13 bp, Artificial Sequence
  Oligonucleotide for detection of SNP TSC0030639
aataaatgatgta

SEQ ID NO: 122612 - DNA, 13 bp, Artificial Sequence
  Oligonucleotide for detection of SNP TSC0030639
tacatcatttatt

SEQ ID NO: 122613 - DNA, 13 bp, Artificial Sequence
  Oligonucleotide for detection of SNP TSC0030639
aataaaagatgta

SEQ ID NO: 122614 - DNA, 13 bp, Artificial Sequence
  Oligonucleotide for detection of SNP TSC0030639
tacatcttttatt

SEQ ID NO: 122615 - DNA, 13 bp, Artificial Sequence
  Oligonucleotide for detection of SNP TSC0030643
tatataattgttt

SEQ ID NO: 122616 - DNA, 13 bp, Artificial Sequence
  Oligonucleotide for detection of SNP TSC0030643
aaacaattatata

SEQ ID NO: 122617 - DNA, 13 bp, Artificial Sequence
  Oligonucleotide for detection of SNP TSC0030643
tatatatttgttt

SEQ ID NO: 122618 - DNA, 13 bp, Artificial Sequence
  Oligonucleotide for detection of SNP TSC0030643
aaacaaatatata

SEQ ID NO: 122619 - DNA, 13 bp, Artificial Sequence
  Oligonucleotide for detection of SNP TSC0030643
tatataatcgttt

SEQ ID NO: 122620 - DNA, 13 bp, Artificial Sequence
  Oligonucleotide for detection of SNP TSC0030643
aaacgattatata

SEQ ID NO: 122621 - DNA, 13 bp, Artificial Sequence
  Oligonucleotide for detection of SNP TSC0030643
tatatattcgttt

SEQ ID NO: 122622 - DNA, 13 bp, Artificial Sequence
  Oligonucleotide for detection of SNP TSC0030643
aaacgaatatata

SEQ ID NO: 122623 - DNA, 13 bp, Artificial Sequence
  Oligonucleotide for detection of SNP TSC0030643
aggtggttgtgtg

SEQ ID NO: 122624 - DNA, 13 bp, Artificial Sequence
  Oligonucleotide for detection of SNP TSC0030643
cacacaaccacct

SEQ ID NO: 122625 - DNA, 13 bp, Artificial Sequence
  Oligonucleotide for detection of SNP TSC0030643
aggtgggtgtgtg

SEQ ID NO: 122626 - DNA, 13 bp, Artificial Sequence
  Oligonucleotide for detection of SNP TSC0030643
cacacacccacct

SEQ ID NO: 122627 - DNA, 13 bp, Artificial Sequence
  Oligonucleotide for detection of SNP TSC0030643
aggcggttgtgtg

SEQ ID NO: 122628 - DNA, 13 bp, Artificial Sequence
  Oligonucleotide for detection of SNP TSC0030643
cacacaaccgcct

SEQ ID NO: 122629 - DNA, 13 bp, Artificial Sequence
  Oligonucleotide for detection of SNP TSC0030643
aggcgggtgtgtg

SEQ ID NO: 122630 - DNA, 13 bp, Artificial Sequence
  Oligonucleotide for detection of SNP TSC0030643
cacacacccgcct

SEQ ID NO: 122631 - DNA, 13 bp, Artificial Sequence
  Oligonucleotide for detection of SNP TSC0030644
gggagtgtgggag

SEQ ID NO: 122632 - DNA, 13 bp, Artificial Sequence
  Oligonucleotide for detection of SNP TSC0030644
ctcccacactccc

SEQ ID NO: 122633 - DNA, 13 bp, Artificial Sequence
  Oligonucleotide for detection of SNP TSC0030644
gggagtatgggag

SEQ ID NO: 122634 - DNA, 13 bp, Artificial Sequence
  Oligonucleotide for detection of SNP TSC0030644
ctcccatactccc

SEQ ID NO: 122635 - DNA, 13 bp, Artificial Sequence
  Oligonucleotide for detection of SNP TSC0030644
gggagcgtgggag

SEQ ID NO: 122636 - DNA, 13 bp, Artificial Sequence
  Oligonucleotide for detection of SNP TSC0030644
ctcccacgctccc

SEQ ID NO: 122637 - DNA, 13 bp, Artificial Sequence
  Oligonucleotide for detection of SNP TSC0030647
gttgtattgagtt

SEQ ID NO: 122638 - DNA, 13 bp, Artificial Sequence
  Oligonucleotide for detection of SNP TSC0030647
aactcaatacaac

SEQ ID NO: 122639 - DNA, 13 bp, Artificial Sequence
  Oligonucleotide for detection of SNP TSC0030647
gttgtagtgagtt

SEQ ID NO: 122640 - DNA, 13 bp, Artificial Sequence
  Oligonucleotide for detection of SNP TSC0030647
aactcactacaac

SEQ ID NO: 122641 - DNA, 13 bp, Artificial Sequence
  Oligonucleotide for detection of SNP TSC0030647
agtttagtgtaay

SEQ ID NO: 122642 - DNA, 13 bp, Artificial Sequence
  Oligonucleotide for detection of SNP TSC0030647
rttacactaaact

SEQ ID NO: 122643 - DNA, 13 bp, Artificial Sequence
  Oligonucleotide for detection of SNP TSC0030647
agtttattgtaay

SEQ ID NO: 122644 - DNA, 13 bp, Artificial Sequence
  Oligonucleotide for detection of SNP TSC0030647
rttacaataaact

SEQ ID NO: 122645 - DNA, 13 bp, Artificial Sequence
  Oligonucleotide for detection of SNP TSC0030649
aagggaggtttty

SEQ ID NO: 122646 - DNA, 13 bp, Artificial Sequence
  Oligonucleotide for detection of SNP TSC0030649
raaaacctccctt

SEQ ID NO: 122647 - DNA, 13 bp, Artificial Sequence
  Oligonucleotide for detection of SNP TSC0030649
aagggaagtttty

SEQ ID NO: 122648 - DNA, 13 bp, Artificial Sequence
  Oligonucleotide for detection of SNP TSC0030649
raaaacttccctt

SEQ ID NO: 122649 - DNA, 13 bp, Artificial Sequence
  Oligonucleotide for detection of SNP TSC0030653
agtttaattttaa

SEQ ID NO: 122650 - DNA, 13 bp, Artificial Sequence
  Oligonucleotide for detection of SNP TSC0030653
ttaaaattaaact

SEQ ID NO: 122651 - DNA, 13 bp, Artificial Sequence
  Oligonucleotide for detection of SNP TSC0030653
agtttagttttaa

SEQ ID NO: 122652 - DNA, 13 bp, Artificial Sequence
  Oligonucleotide for detection of SNP TSC0030653
ttaaaactaaact

SEQ ID NO: 122653 - DNA, 13 bp, Artificial Sequence
  Oligonucleotide for detection of SNP TSC0030654
tttatttgataat

SEQ ID NO: 122654 - DNA, 13 bp, Artificial Sequence
  Oligonucleotide for detection of SNP TSC0030654
attatcaaataaa

SEQ ID NO: 122655 - DNA, 13 bp, Artificial Sequence
  Oligonucleotide for detection of SNP TSC0030654
tttattcgataat

SEQ ID NO: 122656 - DNA, 13 bp, Artificial Sequence
  Oligonucleotide for detection of SNP TSC0030654
attatcgaataaa

SEQ ID NO: 122657 - DNA, 13 bp, Artificial Sequence
  Oligonucleotide for detection of SNP TSC0030654
attattgaatgaa

SEQ ID NO: 122658 - DNA, 13 bp, Artificial Sequence
  Oligonucleotide for detection of SNP TSC0030654
ttcattcaataat

SEQ ID NO: 122659 - DNA, 13 bp, Artificial Sequence
  Oligonucleotide for detection of SNP TSC0030654
attattaaatgaa

SEQ ID NO: 122660 - DNA, 13 bp, Artificial Sequence
  Oligonucleotide for detection of SNP TSC0030654
ttcatttaataat

SEQ ID NO: 122661 - DNA, 13 bp, Artificial Sequence
  Oligonucleotide for detection of SNP TSC0030654
attatcgaatgaa

SEQ ID NO: 122662 - DNA, 13 bp, Artificial Sequence
  Oligonucleotide for detection of SNP TSC0030654
ttcattcgataat

SEQ ID NO: 122663 - DNA, 13 bp, Artificial Sequence
  Oligonucleotide for detection of SNP TSC0030655
ttttggattgtgg

SEQ ID NO: 122664 - DNA, 13 bp, Artificial Sequence
  Oligonucleotide for detection of SNP TSC0030655
ccacaatccaaaa

SEQ ID NO: 122665 - DNA, 13 bp, Artificial Sequence
  Oligonucleotide for detection of SNP TSC0030655
ttttgggttgtgg

SEQ ID NO: 122666 - DNA, 13 bp, Artificial Sequence
  Oligonucleotide for detection of SNP TSC0030655
ccacaacccaaaa

SEQ ID NO: 122667 - DNA, 13 bp, Artificial Sequence
  Oligonucleotide for detection of SNP TSC0030660
taagtttgtttta

SEQ ID NO: 122668 - DNA, 13 bp, Artificial Sequence
  Oligonucleotide for detection of SNP TSC0030660
taaaacaaactta

SEQ ID NO: 122669 - DNA, 13 bp, Artificial Sequence
  Oligonucleotide for detection of SNP TSC0030660
taagttggtttta

SEQ ID NO: 122670 - DNA, 13 bp, Artificial Sequence
  Oligonucleotide for detection of SNP TSC0030660
taaaaccaactta

SEQ ID NO: 122671 - DNA, 13 bp, Artificial Sequence
  Oligonucleotide for detection of SNP TSC0030660
taagttcgtttta

SEQ ID NO: 122672 - DNA, 13 bp, Artificial Sequence
  Oligonucleotide for detection of SNP TSC0030660
taaaacgaactta

SEQ ID NO: 122673 - DNA, 13 bp, Artificial Sequence
  Oligonucleotide for detection of SNP TSC0030660
tgagatgagtttg

SEQ ID NO: 122674 - DNA, 13 bp, Artificial Sequence
  Oligonucleotide for detection of SNP TSC0030660
caaactcatctca

SEQ ID NO: 122675 - DNA, 13 bp, Artificial Sequence
  Oligonucleotide for detection of SNP TSC0030660
tgagattagtttg

SEQ ID NO: 122676 - DNA, 13 bp, Artificial Sequence
  Oligonucleotide for detection of SNP TSC0030660
caaactaatctca

SEQ ID NO: 122677 - DNA, 13 bp, Artificial Sequence
  Oligonucleotide for detection of SNP TSC0030660
tgagacgagtttg

SEQ ID NO: 122678 - DNA, 13 bp, Artificial Sequence
  Oligonucleotide for detection of SNP TSC0030660
caaactcgtctca

SEQ ID NO: 122679 - DNA, 13 bp, Artificial Sequence
  Oligonucleotide for detection of SNP TSC0030666
atagattgggtag

SEQ ID NO: 122680 - DNA, 13 bp, Artificial Sequence
  Oligonucleotide for detection of SNP TSC0030666
ctacccaatctat

SEQ ID NO: 122681 - DNA, 13 bp, Artificial Sequence
  Oligonucleotide for detection of SNP TSC0030666
atagatcgggtag

SEQ ID NO: 122682 - DNA, 13 bp, Artificial Sequence
  Oligonucleotide for detection of SNP TSC0030666
ctacccgatctat

SEQ ID NO: 122683 - DNA, 13 bp, Artificial Sequence
  Oligonucleotide for detection of SNP TSC0030667
tttatatggtagy

SEQ ID NO: 122684 - DNA, 13 bp, Artificial Sequence
  Oligonucleotide for detection of SNP TSC0030667
rctaccatataaa

SEQ ID NO: 122685 - DNA, 13 bp, Artificial Sequence
  Oligonucleotide for detection of SNP TSC0030667
tttatacggtagy

SEQ ID NO: 122686 - DNA, 13 bp, Artificial Sequence
  Oligonucleotide for detection of SNP TSC0030667
rctaccgtataaa

SEQ ID NO: 122687 - DNA, 13 bp, Artificial Sequence
  Oligonucleotide for detection of SNP TSC0030667
gttgttgtgtgaa

SEQ ID NO: 122688 - DNA, 13 bp, Artificial Sequence
  Oligonucleotide for detection of SNP TSC0030667
ttcacacaacaac

SEQ ID NO: 122689 - DNA, 13 bp, Artificial Sequence
  Oligonucleotide for detection of SNP TSC0030667
gttgttatgtgaa

SEQ ID NO: 122690 - DNA, 13 bp, Artificial Sequence
  Oligonucleotide for detection of SNP TSC0030667
ttcacataacaac

SEQ ID NO: 122691 - DNA, 13 bp, Artificial Sequence
  Oligonucleotide for detection of SNP TSC0030667
gttgtcgtgtgaa

SEQ ID NO: 122692 - DNA, 13 bp, Artificial Sequence
  Oligonucleotide for detection of SNP TSC0030667
ttcacacgacaac

SEQ ID NO: 122693 - DNA, 13 bp, Artificial Sequence
  Oligonucleotide for detection of SNP TSC0030668
gagaggtaggagy

SEQ ID NO: 122694 - DNA, 13 bp, Artificial Sequence
  Oligonucleotide for detection of SNP TSC0030668
rctcctacctctc

SEQ ID NO: 122695 - DNA, 13 bp, Artificial Sequence
  Oligonucleotide for detection of SNP TSC0030668
gagagggaggagy

SEQ ID NO: 122696 - DNA, 13 bp, Artificial Sequence
  Oligonucleotide for detection of SNP TSC0030668
rctcctccctctc

SEQ ID NO: 122697 - DNA, 13 bp, Artificial Sequence
  Oligonucleotide for detection of SNP TSC0030669
tattaatggtaat

SEQ ID NO: 122698 - DNA, 13 bp, Artificial Sequence
  Oligonucleotide for detection of SNP TSC0030669
attaccattaata

SEQ ID NO: 122699 - DNA, 13 bp, Artificial Sequence
  Oligonucleotide for detection of SNP TSC0030669
tattaacggtaat

SEQ ID NO: 122700 - DNA, 13 bp, Artificial Sequence
  Oligonucleotide for detection of SNP TSC0030669
attaccgttaata

SEQ ID NO: 122701 - DNA, 13 bp, Artificial Sequence
  Oligonucleotide for detection of SNP TSC0030669
attattgttaata

SEQ ID NO: 122702 - DNA, 13 bp, Artificial Sequence
  Oligonucleotide for detection of SNP TSC0030669
tattaacaataat

SEQ ID NO: 122703 - DNA, 13 bp, Artificial Sequence
  Oligonucleotide for detection of SNP TSC0030669
attattattaata

SEQ ID NO: 122704 - DNA, 13 bp, Artificial Sequence
  Oligonucleotide for detection of SNP TSC0030669
tattaataataat

SEQ ID NO: 122705 - DNA, 13 bp, Artificial Sequence
  Oligonucleotide for detection of SNP TSC0030669
attatcgttaata

SEQ ID NO: 122706 - DNA, 13 bp, Artificial Sequence
  Oligonucleotide for detection of SNP TSC0030669
tattaacgataat

SEQ ID NO: 122707 - DNA, 13 bp, Artificial Sequence
  Oligonucleotide for detection of SNP TSC0030671
tgaaaaatgtttt

SEQ ID NO: 122708 - DNA, 13 bp, Artificial Sequence
  Oligonucleotide for detection of SNP TSC0030671
aaaacatttttca

SEQ ID NO: 122709 - DNA, 13 bp, Artificial Sequence
  Oligonucleotide for detection of SNP TSC0030671
tgaaaagtgtttt

SEQ ID NO: 122710 - DNA, 13 bp, Artificial Sequence
  Oligonucleotide for detection of SNP TSC0030671
aaaacacttttca

SEQ ID NO: 122711 - DNA, 13 bp, Artificial Sequence
  Oligonucleotide for detection of SNP TSC0030672
tatatgggttttt

SEQ ID NO: 122712 - DNA, 13 bp, Artificial Sequence
  Oligonucleotide for detection of SNP TSC0030672
aaaaacccatata

SEQ ID NO: 122713 - DNA, 13 bp, Artificial Sequence
  Oligonucleotide for detection of SNP TSC0030672
tatatgtgttttt

SEQ ID NO: 122714 - DNA, 13 bp, Artificial Sequence
  Oligonucleotide for detection of SNP TSC0030672
aaaaacacatata

SEQ ID NO: 122715 - DNA, 13 bp, Artificial Sequence
  Oligonucleotide for detection of SNP TSC0030672
tatacgggttttt

SEQ ID NO: 122716 - DNA, 13 bp, Artificial Sequence
  Oligonucleotide for detection of SNP TSC0030672
aaaaacccgtata

SEQ ID NO: 122717 - DNA, 13 bp, Artificial Sequence
  Oligonucleotide for detection of SNP TSC0030672
tatacgtgttttt

SEQ ID NO: 122718 - DNA, 13 bp, Artificial Sequence
  Oligonucleotide for detection of SNP TSC0030672
aaaaacacgtata

SEQ ID NO: 122719 - DNA, 13 bp, Artificial Sequence
  Oligonucleotide for detection of SNP TSC0030672
aaaggtttgtgta

SEQ ID NO: 122720 - DNA, 13 bp, Artificial Sequence
  Oligonucleotide for detection of SNP TSC0030672
tacacaaaccttt

SEQ ID NO: 122721 - DNA, 13 bp, Artificial Sequence
  Oligonucleotide for detection of SNP TSC0030672
aaaggtatgtgta

SEQ ID NO: 122722 - DNA, 13 bp, Artificial Sequence
  Oligonucleotide for detection of SNP TSC0030672
tacacataccttt

SEQ ID NO: 122723 - DNA, 13 bp, Artificial Sequence
  Oligonucleotide for detection of SNP TSC0030672
aaaggttcgtgta

SEQ ID NO: 122724 - DNA, 13 bp, Artificial Sequence
  Oligonucleotide for detection of SNP TSC0030672
tacacgaaccttt

SEQ ID NO: 122725 - DNA, 13 bp, Artificial Sequence
  Oligonucleotide for detection of SNP TSC0030672
aaaggtacgtgta

SEQ ID NO: 122726 - DNA, 13 bp, Artificial Sequence
  Oligonucleotide for detection of SNP TSC0030672
tacacgtaccttt

SEQ ID NO: 122727 - DNA, 13 bp, Artificial Sequence
  Oligonucleotide for detection of SNP TSC0030673
aaattgaaattag

SEQ ID NO: 122728 - DNA, 13 bp, Artificial Sequence
  Oligonucleotide for detection of SNP TSC0030673
ctaatttcaattt

SEQ ID NO: 122729 - DNA, 13 bp, Artificial Sequence
  Oligonucleotide for detection of SNP TSC0030673
aaattgtaattag

SEQ ID NO: 122730 - DNA, 13 bp, Artificial Sequence
  Oligonucleotide for detection of SNP TSC0030673
ctaattacaattt

SEQ ID NO: 122731 - DNA, 13 bp, Artificial Sequence
  Oligonucleotide for detection of SNP TSC0030673
ttagttttagttt

SEQ ID NO: 122732 - DNA, 13 bp, Artificial Sequence
  Oligonucleotide for detection of SNP TSC0030673
aaactaaaactaa

SEQ ID NO: 122733 - DNA, 13 bp, Artificial Sequence
  Oligonucleotide for detection of SNP TSC0030673
ttagttgtagttt

SEQ ID NO: 122734 - DNA, 13 bp, Artificial Sequence
  Oligonucleotide for detection of SNP TSC0030673
aaactacaactaa

SEQ ID NO: 122735 - DNA, 13 bp, Artificial Sequence
  Oligonucleotide for detection of SNP TSC0030674
tttttttggttgy

SEQ ID NO: 122736 - DNA, 13 bp, Artificial Sequence
  Oligonucleotide for detection of SNP TSC0030674
rcaaccaaaaaaa

SEQ ID NO: 122737 - DNA, 13 bp, Artificial Sequence
  Oligonucleotide for detection of SNP TSC0030674
ttttttcggttgy

SEQ ID NO: 122738 - DNA, 13 bp, Artificial Sequence
  Oligonucleotide for detection of SNP TSC0030674
rcaaccgaaaaaa

SEQ ID NO: 122739 - DNA, 13 bp, Artificial Sequence
  Oligonucleotide for detection of SNP TSC0030674
gtagttgggaaag

SEQ ID NO: 122740 - DNA, 13 bp, Artificial Sequence
  Oligonucleotide for detection of SNP TSC0030674
ctttcccaactac

SEQ ID NO: 122741 - DNA, 13 bp, Artificial Sequence
  Oligonucleotide for detection of SNP TSC0030674
gtagttaggaaag

SEQ ID NO: 122742 - DNA, 13 bp, Artificial Sequence
  Oligonucleotide for detection of SNP TSC0030674
ctttcctaactac

SEQ ID NO: 122743 - DNA, 13 bp, Artificial Sequence
  Oligonucleotide for detection of SNP TSC0030674
gtagtcgggaaag

SEQ ID NO: 122744 - DNA, 13 bp, Artificial Sequence
  Oligonucleotide for detection of SNP TSC0030674
ctttcccgactac

SEQ ID NO: 122745 - DNA, 13 bp, Artificial Sequence
  Oligonucleotide for detection of SNP TSC0030675
gataagagatttt

SEQ ID NO: 122746 - DNA, 13 bp, Artificial Sequence
  Oligonucleotide for detection of SNP TSC0030675
aaaatctcttatc

SEQ ID NO: 122747 - DNA, 13 bp, Artificial Sequence
  Oligonucleotide for detection of SNP TSC0030675
gataagtgatttt

SEQ ID NO: 122748 - DNA, 13 bp, Artificial Sequence
  Oligonucleotide for detection of SNP TSC0030675
aaaatcacttatc

SEQ ID NO: 122749 - DNA, 13 bp, Artificial Sequence
  Oligonucleotide for detection of SNP TSC0030675
gataagcgatttt

SEQ ID NO: 122750 - DNA, 13 bp, Artificial Sequence
  Oligonucleotide for detection of SNP TSC0030675
aaaatcgcttatc

SEQ ID NO: 122751 - DNA, 13 bp, Artificial Sequence
  Oligonucleotide for detection of SNP TSC0030675
agggttttttgty

SEQ ID NO: 122752 - DNA, 13 bp, Artificial Sequence
  Oligonucleotide for detection of SNP TSC0030675
racaaaaaaccct

SEQ ID NO: 122753 - DNA, 13 bp, Artificial Sequence
  Oligonucleotide for detection of SNP TSC0030675
agggttgtttgty

SEQ ID NO: 122754 - DNA, 13 bp, Artificial Sequence
  Oligonucleotide for detection of SNP TSC0030675
racaaacaaccct

SEQ ID NO: 122755 - DNA, 13 bp, Artificial Sequence
  Oligonucleotide for detection of SNP TSC0030675
agggtcgtttgty

SEQ ID NO: 122756 - DNA, 13 bp, Artificial Sequence
  Oligonucleotide for detection of SNP TSC0030675
racaaacgaccct

SEQ ID NO: 122757 - DNA, 13 bp, Artificial Sequence
  Oligonucleotide for detection of SNP TSC0030676
aaaaatgggtaty

SEQ ID NO: 122758 - DNA, 13 bp, Artificial Sequence
  Oligonucleotide for detection of SNP TSC0030676
ratacccattttt

SEQ ID NO: 122759 - DNA, 13 bp, Artificial Sequence
  Oligonucleotide for detection of SNP TSC0030676
aaaaattggtaty

SEQ ID NO: 122760 - DNA, 13 bp, Artificial Sequence
  Oligonucleotide for detection of SNP TSC0030676
rataccaattttt

SEQ ID NO: 122761 - DNA, 13 bp, Artificial Sequence
  Oligonucleotide for detection of SNP TSC0030676
ggtatttattttt

SEQ ID NO: 122762 - DNA, 13 bp, Artificial Sequence
  Oligonucleotide for detection of SNP TSC0030676
aaaaataaatacc

SEQ ID NO: 122763 - DNA, 13 bp, Artificial Sequence
  Oligonucleotide for detection of SNP TSC0030676
ggtattaattttt

SEQ ID NO: 122764 - DNA, 13 bp, Artificial Sequence
  Oligonucleotide for detection of SNP TSC0030676
aaaaattaatacc

SEQ ID NO: 122765 - DNA, 13 bp, Artificial Sequence
  Oligonucleotide for detection of SNP TSC0030679
tgggttatttgta

SEQ ID NO: 122766 - DNA, 13 bp, Artificial Sequence
  Oligonucleotide for detection of SNP TSC0030679
tacaaataaccca

SEQ ID NO: 122767 - DNA, 13 bp, Artificial Sequence
  Oligonucleotide for detection of SNP TSC0030679
tgggttttttgta

SEQ ID NO: 122768 - DNA, 13 bp, Artificial Sequence
  Oligonucleotide for detection of SNP TSC0030679
tacaaaaaaccca

SEQ ID NO: 122769 - DNA, 13 bp, Artificial Sequence
  Oligonucleotide for detection of SNP TSC0030679
tataggtagttta

SEQ ID NO: 122770 - DNA, 13 bp, Artificial Sequence
  Oligonucleotide for detection of SNP TSC0030679
taaactacctata

SEQ ID NO: 122771 - DNA, 13 bp, Artificial Sequence
  Oligonucleotide for detection of SNP TSC0030679
tataggaagttta

SEQ ID NO: 122772 - DNA, 13 bp, Artificial Sequence
  Oligonucleotide for detection of SNP TSC0030679
taaacttcctata

SEQ ID NO: 122773 - DNA, 13 bp, Artificial Sequence
  Oligonucleotide for detection of SNP TSC0030687
gttttgagtttgg

SEQ ID NO: 122774 - DNA, 13 bp, Artificial Sequence
  Oligonucleotide for detection of SNP TSC0030687
ccaaactcaaaac

SEQ ID NO: 122775 - DNA, 13 bp, Artificial Sequence
  Oligonucleotide for detection of SNP TSC0030687
gttttgggtttgg

SEQ ID NO: 122776 - DNA, 13 bp, Artificial Sequence
  Oligonucleotide for detection of SNP TSC0030687
ccaaacccaaaac

SEQ ID NO: 122777 - DNA, 13 bp, Artificial Sequence
  Oligonucleotide for detection of SNP TSC0030687
gttttgagttcgg

SEQ ID NO: 122778 - DNA, 13 bp, Artificial Sequence
  Oligonucleotide for detection of SNP TSC0030687
ccgaactcaaaac

SEQ ID NO: 122779 - DNA, 13 bp, Artificial Sequence
  Oligonucleotide for detection of SNP TSC0030687
gttttgggttcgg

SEQ ID NO: 122780 - DNA, 13 bp, Artificial Sequence
  Oligonucleotide for detection of SNP TSC0030687
ccgaacccaaaac

SEQ ID NO: 122781 - DNA, 13 bp, Artificial Sequence
  Oligonucleotide for detection of SNP TSC0030688
gttaggagtttgy

SEQ ID NO: 122782 - DNA, 13 bp, Artificial Sequence
  Oligonucleotide for detection of SNP TSC0030688
rcaaactcctaac

SEQ ID NO: 122783 - DNA, 13 bp, Artificial Sequence
  Oligonucleotide for detection of SNP TSC0030688
gttaggggtttgy

SEQ ID NO: 122784 - DNA, 13 bp, Artificial Sequence
  Oligonucleotide for detection of SNP TSC0030688
rcaaacccctaac

SEQ ID NO: 122785 - DNA, 13 bp, Artificial Sequence
  Oligonucleotide for detection of SNP TSC0030691
atgtaagagttta

SEQ ID NO: 122786 - DNA, 13 bp, Artificial Sequence
  Oligonucleotide for detection of SNP TSC0030691
taaactcttacat

SEQ ID NO: 122787 - DNA, 13 bp, Artificial Sequence
  Oligonucleotide for detection of SNP TSC0030691
atgtaaaagttta

SEQ ID NO: 122788 - DNA, 13 bp, Artificial Sequence
  Oligonucleotide for detection of SNP TSC0030691
taaacttttacat

SEQ ID NO: 122789 - DNA, 13 bp, Artificial Sequence
  Oligonucleotide for detection of SNP TSC0030692
ataagtatatttg

SEQ ID NO: 122790 - DNA, 13 bp, Artificial Sequence
  Oligonucleotide for detection of SNP TSC0030692
caaatatacttat

SEQ ID NO: 122791 - DNA, 13 bp, Artificial Sequence
  Oligonucleotide for detection of SNP TSC0030692
ataagtgtatttg

SEQ ID NO: 122792 - DNA, 13 bp, Artificial Sequence
  Oligonucleotide for detection of SNP TSC0030692
caaatacacttat

SEQ ID NO: 122793 - DNA, 13 bp, Artificial Sequence
  Oligonucleotide for detection of SNP TSC0030692
ataagcgtatttg

SEQ ID NO: 122794 - DNA, 13 bp, Artificial Sequence
  Oligonucleotide for detection of SNP TSC0030692
caaatacgcttat

SEQ ID NO: 122795 - DNA, 13 bp, Artificial Sequence
  Oligonucleotide for detection of SNP TSC0030692
taaatgtgtttat

SEQ ID NO: 122796 - DNA, 13 bp, Artificial Sequence
  Oligonucleotide for detection of SNP TSC0030692
ataaacacattta

SEQ ID NO: 122797 - DNA, 13 bp, Artificial Sequence
  Oligonucleotide for detection of SNP TSC0030692
taaatgcgtttat

SEQ ID NO: 122798 - DNA, 13 bp, Artificial Sequence
  Oligonucleotide for detection of SNP TSC0030692
ataaacgcattta

SEQ ID NO: 122799 - DNA, 13 bp, Artificial Sequence
  Oligonucleotide for detection of SNP TSC0030696
gttttaatgatgt

SEQ ID NO: 122800 - DNA, 13 bp, Artificial Sequence
  Oligonucleotide for detection of SNP TSC0030696
acatcattaaaac

SEQ ID NO: 122801 - DNA, 13 bp, Artificial Sequence
  Oligonucleotide for detection of SNP TSC0030696
gttttagtgatgt

SEQ ID NO: 122802 - DNA, 13 bp, Artificial Sequence
  Oligonucleotide for detection of SNP TSC0030696
acatcactaaaac

SEQ ID NO: 122803 - DNA, 13 bp, Artificial Sequence
  Oligonucleotide for detection of SNP TSC0030697
gatttggtgaaay

SEQ ID NO: 122804 - DNA, 13 bp, Artificial Sequence
  Oligonucleotide for detection of SNP TSC0030697
rtttcaccaaatc

SEQ ID NO: 122805 - DNA, 13 bp, Artificial Sequence
  Oligonucleotide for detection of SNP TSC0030697
gatttgttgaaay

SEQ ID NO: 122806 - DNA, 13 bp, Artificial Sequence
  Oligonucleotide for detection of SNP TSC0030697
rtttcaacaaatc

SEQ ID NO: 122807 - DNA, 13 bp, Artificial Sequence
  Oligonucleotide for detection of SNP TSC0030698
gttgtagggagtt

SEQ ID NO: 122808 - DNA, 13 bp, Artificial Sequence
  Oligonucleotide for detection of SNP TSC0030698
aactccctacaac

SEQ ID NO: 122809 - DNA, 13 bp, Artificial Sequence
  Oligonucleotide for detection of SNP TSC0030698
gttgtaaggagtt

SEQ ID NO: 122810 - DNA, 13 bp, Artificial Sequence
  Oligonucleotide for detection of SNP TSC0030698
aactccttacaac

SEQ ID NO: 122811 - DNA, 13 bp, Artificial Sequence
  Oligonucleotide for detection of SNP TSC0030699
attgttttaggaa

SEQ ID NO: 122812 - DNA, 13 bp, Artificial Sequence
  Oligonucleotide for detection of SNP TSC0030699
ttcctaaaacaat

SEQ ID NO: 122813 - DNA, 13 bp, Artificial Sequence
  Oligonucleotide for detection of SNP TSC0030699
attgttgtaggaa

SEQ ID NO: 122814 - DNA, 13 bp, Artificial Sequence
  Oligonucleotide for detection of SNP TSC0030699
ttcctacaacaat

SEQ ID NO: 122815 - DNA, 13 bp, Artificial Sequence
  Oligonucleotide for detection of SNP TSC0030699
attgtcgtaggaa

SEQ ID NO: 122816 - DNA, 13 bp, Artificial Sequence
  Oligonucleotide for detection of SNP TSC0030699
ttcctacgacaat

SEQ ID NO: 122817 - DNA, 13 bp, Artificial Sequence
  Oligonucleotide for detection of SNP TSC0030699
tttttaggatagt

SEQ ID NO: 122818 - DNA, 13 bp, Artificial Sequence
  Oligonucleotide for detection of SNP TSC0030699
actatcctaaaaa

SEQ ID NO: 122819 - DNA, 13 bp, Artificial Sequence
  Oligonucleotide for detection of SNP TSC0030699
tttttatgatagt

SEQ ID NO: 122820 - DNA, 13 bp, Artificial Sequence
  Oligonucleotide for detection of SNP TSC0030699
actatcataaaaa

SEQ ID NO: 122821 - DNA, 13 bp, Artificial Sequence
  Oligonucleotide for detection of SNP TSC0030699
tttttacgatagt

SEQ ID NO: 122822 - DNA, 13 bp, Artificial Sequence
  Oligonucleotide for detection of SNP TSC0030699
actatcgtaaaaa

SEQ ID NO: 122823 - DNA, 13 bp, Artificial Sequence
  Oligonucleotide for detection of SNP TSC0030700
taattgtaaatta

SEQ ID NO: 122824 - DNA, 13 bp, Artificial Sequence
  Oligonucleotide for detection of SNP TSC0030700
taatttacaatta

SEQ ID NO: 122825 - DNA, 13 bp, Artificial Sequence
  Oligonucleotide for detection of SNP TSC0030700
taattggaaatta

SEQ ID NO: 122826 - DNA, 13 bp, Artificial Sequence
  Oligonucleotide for detection of SNP TSC0030700
taatttccaatta

SEQ ID NO: 122827 - DNA, 13 bp, Artificial Sequence
  Oligonucleotide for detection of SNP TSC0030700
tggtttgtaatta

SEQ ID NO: 122828 - DNA, 13 bp, Artificial Sequence
  Oligonucleotide for detection of SNP TSC0030700
taattacaaacca

SEQ ID NO: 122829 - DNA, 13 bp, Artificial Sequence
  Oligonucleotide for detection of SNP TSC0030700
tggtttttaatta

SEQ ID NO: 122830 - DNA, 13 bp, Artificial Sequence
  Oligonucleotide for detection of SNP TSC0030700
taattaaaaacca

SEQ ID NO: 122831 - DNA, 13 bp, Artificial Sequence
  Oligonucleotide for detection of SNP TSC0030701
gttttaatttgta

SEQ ID NO: 122832 - DNA, 13 bp, Artificial Sequence
  Oligonucleotide for detection of SNP TSC0030701
tacaaattaaaac

SEQ ID NO: 122833 - DNA, 13 bp, Artificial Sequence
  Oligonucleotide for detection of SNP TSC0030701
gttttattttgta

SEQ ID NO: 122834 - DNA, 13 bp, Artificial Sequence
  Oligonucleotide for detection of SNP TSC0030701
tacaaaataaaac

SEQ ID NO: 122835 - DNA, 13 bp, Artificial Sequence
  Oligonucleotide for detection of SNP TSC0030701
tatagattagggy

SEQ ID NO: 122836 - DNA, 13 bp, Artificial Sequence
  Oligonucleotide for detection of SNP TSC0030701
rccctaatctata

SEQ ID NO: 122837 - DNA, 13 bp, Artificial Sequence
  Oligonucleotide for detection of SNP TSC0030701
tatagagtagggy

SEQ ID NO: 122838 - DNA, 13 bp, Artificial Sequence
  Oligonucleotide for detection of SNP TSC0030701
rccctactctata

SEQ ID NO: 122839 - DNA, 13 bp, Artificial Sequence
  Oligonucleotide for detection of SNP TSC0030703
atttgtgtaggay

SEQ ID NO: 122840 - DNA, 13 bp, Artificial Sequence
  Oligonucleotide for detection of SNP TSC0030703
rtcctacacaaat

SEQ ID NO: 122841 - DNA, 13 bp, Artificial Sequence
  Oligonucleotide for detection of SNP TSC0030703
atttgtataggay

SEQ ID NO: 122842 - DNA, 13 bp, Artificial Sequence
  Oligonucleotide for detection of SNP TSC0030703
rtcctatacaaat

SEQ ID NO: 122843 - DNA, 13 bp, Artificial Sequence
  Oligonucleotide for detection of SNP TSC0030707
gtatttaggttty

SEQ ID NO: 122844 - DNA, 13 bp, Artificial Sequence
  Oligonucleotide for detection of SNP TSC0030707
raaacctaaatac

SEQ ID NO: 122845 - DNA, 13 bp, Artificial Sequence
  Oligonucleotide for detection of SNP TSC0030707
gtatttgggttty

SEQ ID NO: 122846 - DNA, 13 bp, Artificial Sequence
  Oligonucleotide for detection of SNP TSC0030707
raaacccaaatac

SEQ ID NO: 122847 - DNA, 13 bp, Artificial Sequence
  Oligonucleotide for detection of SNP TSC0030707
gtattcgggttty

SEQ ID NO: 122848 - DNA, 13 bp, Artificial Sequence
  Oligonucleotide for detection of SNP TSC0030707
raaacccgaatac

SEQ ID NO: 122849 - DNA, 13 bp, Artificial Sequence
  Oligonucleotide for detection of SNP TSC0030707
ggaatttggatgy

SEQ ID NO: 122850 - DNA, 13 bp, Artificial Sequence
  Oligonucleotide for detection of SNP TSC0030707
rcatccaaattcc

SEQ ID NO: 122851 - DNA, 13 bp, Artificial Sequence
  Oligonucleotide for detection of SNP TSC0030707
ggaattcggatgy

SEQ ID NO: 122852 - DNA, 13 bp, Artificial Sequence
  Oligonucleotide for detection of SNP TSC0030707
rcatccgaattcc

SEQ ID NO: 122853 - DNA, 13 bp, Artificial Sequence
  Oligonucleotide for detection of SNP TSC0030708
tagggtgttttag

SEQ ID NO: 122854 - DNA, 13 bp, Artificial Sequence
  Oligonucleotide for detection of SNP TSC0030708
ctaaaacacccta

SEQ ID NO: 122855 - DNA, 13 bp, Artificial Sequence
  Oligonucleotide for detection of SNP TSC0030708
tagggtattttag

SEQ ID NO: 122856 - DNA, 13 bp, Artificial Sequence
  Oligonucleotide for detection of SNP TSC0030708
ctaaaatacccta

SEQ ID NO: 122857 - DNA, 13 bp, Artificial Sequence
  Oligonucleotide for detection of SNP TSC0030709
attagagttttty

SEQ ID NO: 122858 - DNA, 13 bp, Artificial Sequence
  Oligonucleotide for detection of SNP TSC0030709
raaaaactctaat

SEQ ID NO: 122859 - DNA, 13 bp, Artificial Sequence
  Oligonucleotide for detection of SNP TSC0030710
aatggtggggttt

SEQ ID NO: 122860 - DNA, 13 bp, Artificial Sequence
  Oligonucleotide for detection of SNP TSC0030710
aaaccccaccatt

SEQ ID NO: 122861 - DNA, 13 bp, Artificial Sequence
  Oligonucleotide for detection of SNP TSC0030710
aatggtagggttt

SEQ ID NO: 122862 - DNA, 13 bp, Artificial Sequence
  Oligonucleotide for detection of SNP TSC0030710
aaaccctaccatt

SEQ ID NO: 122863 - DNA, 13 bp, Artificial Sequence
  Oligonucleotide for detection of SNP TSC0030710
aacggtggggttt

SEQ ID NO: 122864 - DNA, 13 bp, Artificial Sequence
  Oligonucleotide for detection of SNP TSC0030710
aaaccccaccgtt

SEQ ID NO: 122865 - DNA, 13 bp, Artificial Sequence
  Oligonucleotide for detection of SNP TSC0030710
aacggtagggttt

SEQ ID NO: 122866 - DNA, 13 bp, Artificial Sequence
  Oligonucleotide for detection of SNP TSC0030710
aaaccctaccgtt

SEQ ID NO: 122867 - DNA, 13 bp, Artificial Sequence
  Oligonucleotide for detection of SNP TSC0030712
ttatataattttt

SEQ ID NO: 122868 - DNA, 13 bp, Artificial Sequence
  Oligonucleotide for detection of SNP TSC0030712
aaaaattatataa

SEQ ID NO: 122869 - DNA, 13 bp, Artificial Sequence
  Oligonucleotide for detection of SNP TSC0030712
agaagttgtataa

SEQ ID NO: 122870 - DNA, 13 bp, Artificial Sequence
  Oligonucleotide for detection of SNP TSC0030712
ttatacaacttct

SEQ ID NO: 122871 - DNA, 13 bp, Artificial Sequence
  Oligonucleotide for detection of SNP TSC0030712
agaagtggtataa

SEQ ID NO: 122872 - DNA, 13 bp, Artificial Sequence
  Oligonucleotide for detection of SNP TSC0030712
ttataccacttct

SEQ ID NO: 122873 - DNA, 13 bp, Artificial Sequence
  Oligonucleotide for detection of SNP TSC0030713
aaaattattaatt

SEQ ID NO: 122874 - DNA, 13 bp, Artificial Sequence
  Oligonucleotide for detection of SNP TSC0030713
aattaataatttt

SEQ ID NO: 122875 - DNA, 13 bp, Artificial Sequence
  Oligonucleotide for detection of SNP TSC0030713
aaaattgttaatt

SEQ ID NO: 122876 - DNA, 13 bp, Artificial Sequence
  Oligonucleotide for detection of SNP TSC0030713
aattaacaatttt

SEQ ID NO: 122877 - DNA, 13 bp, Artificial Sequence
  Oligonucleotide for detection of SNP TSC0030713
aaaatcgttaatt

SEQ ID NO: 122878 - DNA, 13 bp, Artificial Sequence
  Oligonucleotide for detection of SNP TSC0030713
aattaacgatttt

SEQ ID NO: 122879 - DNA, 13 bp, Artificial Sequence
  Oligonucleotide for detection of SNP TSC0030713
aattgatggtttt

SEQ ID NO: 122880 - DNA, 13 bp, Artificial Sequence
  Oligonucleotide for detection of SNP TSC0030713
aaaaccatcaatt

SEQ ID NO: 122881 - DNA, 13 bp, Artificial Sequence
  Oligonucleotide for detection of SNP TSC0030713
aattgacggtttt

SEQ ID NO: 122882 - DNA, 13 bp, Artificial Sequence
  Oligonucleotide for detection of SNP TSC0030713
aaaaccgtcaatt

SEQ ID NO: 122883 - DNA, 13 bp, Artificial Sequence
  Oligonucleotide for detection of SNP TSC0030714
aaattggattggg

SEQ ID NO: 122884 - DNA, 13 bp, Artificial Sequence
  Oligonucleotide for detection of SNP TSC0030714
cccaatccaattt

SEQ ID NO: 122885 - DNA, 13 bp, Artificial Sequence
  Oligonucleotide for detection of SNP TSC0030714
aaattgaattggg

SEQ ID NO: 122886 - DNA, 13 bp, Artificial Sequence
  Oligonucleotide for detection of SNP TSC0030714
cccaattcaattt

SEQ ID NO: 122887 - DNA, 13 bp, Artificial Sequence
  Oligonucleotide for detection of SNP TSC0030718
tagtgttgtatty

SEQ ID NO: 122888 - DNA, 13 bp, Artificial Sequence
  Oligonucleotide for detection of SNP TSC0030718
raatacaacacta

SEQ ID NO: 122889 - DNA, 13 bp, Artificial Sequence
  Oligonucleotide for detection of SNP TSC0030718
tagtgtggtatty

SEQ ID NO: 122890 - DNA, 13 bp, Artificial Sequence
  Oligonucleotide for detection of SNP TSC0030718
raataccacacta

SEQ ID NO: 122891 - DNA, 13 bp, Artificial Sequence
  Oligonucleotide for detection of SNP TSC0030718
tagtgtcgtatty

SEQ ID NO: 122892 - DNA, 13 bp, Artificial Sequence
  Oligonucleotide for detection of SNP TSC0030718
raatacgacacta

SEQ ID NO: 122893 - DNA, 13 bp, Artificial Sequence
  Oligonucleotide for detection of SNP TSC0030718
tagtgcggtatty

SEQ ID NO: 122894 - DNA, 13 bp, Artificial Sequence
  Oligonucleotide for detection of SNP TSC0030718
raataccgcacta

SEQ ID NO: 122895 - DNA, 13 bp, Artificial Sequence
  Oligonucleotide for detection of SNP TSC0030718
gagtgtggtattg

SEQ ID NO: 122896 - DNA, 13 bp, Artificial Sequence
  Oligonucleotide for detection of SNP TSC0030718
caataccacactc

SEQ ID NO: 122897 - DNA, 13 bp, Artificial Sequence
  Oligonucleotide for detection of SNP TSC0030718
gagtgttgtattg

SEQ ID NO: 122898 - DNA, 13 bp, Artificial Sequence
  Oligonucleotide for detection of SNP TSC0030718
caatacaacactc

SEQ ID NO: 122899 - DNA, 13 bp, Artificial Sequence
  Oligonucleotide for detection of SNP TSC0030718
gagtgcggtattg

SEQ ID NO: 122900 - DNA, 13 bp, Artificial Sequence
  Oligonucleotide for detection of SNP TSC0030718
caataccgcactc

SEQ ID NO: 122901 - DNA, 13 bp, Artificial Sequence
  Oligonucleotide for detection of SNP TSC0030718
gagtgtcgtattg

SEQ ID NO: 122902 - DNA, 13 bp, Artificial Sequence
  Oligonucleotide for detection of SNP TSC0030718
caatacgacactc

SEQ ID NO: 122903 - DNA, 13 bp, Artificial Sequence
  Oligonucleotide for detection of SNP TSC0030724
gagtaatgtagaa

SEQ ID NO: 122904 - DNA, 13 bp, Artificial Sequence
  Oligonucleotide for detection of SNP TSC0030724
ttctacattactc

SEQ ID NO: 122905 - DNA, 13 bp, Artificial Sequence
  Oligonucleotide for detection of SNP TSC0030724
gagtaacgtagaa

SEQ ID NO: 122906 - DNA, 13 bp, Artificial Sequence
  Oligonucleotide for detection of SNP TSC0030724
ttctacgttactc

SEQ ID NO: 122907 - DNA, 13 bp, Artificial Sequence
  Oligonucleotide for detection of SNP TSC0030724
ttttgtattgtty

SEQ ID NO: 122908 - DNA, 13 bp, Artificial Sequence
  Oligonucleotide for detection of SNP TSC0030724
raacaatacaaaa

SEQ ID NO: 122909 - DNA, 13 bp, Artificial Sequence
  Oligonucleotide for detection of SNP TSC0030724
ttttgcgttgtty

SEQ ID NO: 122910 - DNA, 13 bp, Artificial Sequence
  Oligonucleotide for detection of SNP TSC0030724
raacaacgcaaaa

SEQ ID NO: 122911 - DNA, 13 bp, Artificial Sequence
  Oligonucleotide for detection of SNP TSC0030727
ggtaaagtatata

SEQ ID NO: 122912 - DNA, 13 bp, Artificial Sequence
  Oligonucleotide for detection of SNP TSC0030727
tatatactttacc

SEQ ID NO: 122913 - DNA, 13 bp, Artificial Sequence
  Oligonucleotide for detection of SNP TSC0030727
ggtaaattatata

SEQ ID NO: 122914 - DNA, 13 bp, Artificial Sequence
  Oligonucleotide for detection of SNP TSC0030727
tatataatttacc

SEQ ID NO: 122915 - DNA, 13 bp, Artificial Sequence
  Oligonucleotide for detection of SNP TSC0030727
tgtatgttttaty

SEQ ID NO: 122916 - DNA, 13 bp, Artificial Sequence
  Oligonucleotide for detection of SNP TSC0030727
rataaaacataca

SEQ ID NO: 122917 - DNA, 13 bp, Artificial Sequence
  Oligonucleotide for detection of SNP TSC0030727
tgtatgatttaty

SEQ ID NO: 122918 - DNA, 13 bp, Artificial Sequence
  Oligonucleotide for detection of SNP TSC0030727
rataaatcataca

SEQ ID NO: 122919 - DNA, 13 bp, Artificial Sequence
  Oligonucleotide for detection of SNP TSC0030730
aggagagaagtaa

SEQ ID NO: 122920 - DNA, 13 bp, Artificial Sequence
  Oligonucleotide for detection of SNP TSC0030730
ttacttctctcct

SEQ ID NO: 122921 - DNA, 13 bp, Artificial Sequence
  Oligonucleotide for detection of SNP TSC0030730
aggagataagtaa

SEQ ID NO: 122922 - DNA, 13 bp, Artificial Sequence
  Oligonucleotide for detection of SNP TSC0030730
ttacttatctcct

SEQ ID NO: 122923 - DNA, 13 bp, Artificial Sequence
  Oligonucleotide for detection of SNP TSC0030731
atgatatggttty

SEQ ID NO: 122924 - DNA, 13 bp, Artificial Sequence
  Oligonucleotide for detection of SNP TSC0030731
raaaccatatcat

SEQ ID NO: 122925 - DNA, 13 bp, Artificial Sequence
  Oligonucleotide for detection of SNP TSC0030731
atgatacggttty

SEQ ID NO: 122926 - DNA, 13 bp, Artificial Sequence
  Oligonucleotide for detection of SNP TSC0030731
raaaccgtatcat

SEQ ID NO: 122927 - DNA, 13 bp, Artificial Sequence
  Oligonucleotide for detection of SNP TSC0030731
ggggttgtgttat

SEQ ID NO: 122928 - DNA, 13 bp, Artificial Sequence
  Oligonucleotide for detection of SNP TSC0030731
ataacacaacccc

SEQ ID NO: 122929 - DNA, 13 bp, Artificial Sequence
  Oligonucleotide for detection of SNP TSC0030731
ggggttatgttat

SEQ ID NO: 122930 - DNA, 13 bp, Artificial Sequence
  Oligonucleotide for detection of SNP TSC0030731
ataacataacccc

SEQ ID NO: 122931 - DNA, 13 bp, Artificial Sequence
  Oligonucleotide for detection of SNP TSC0030731
ggggtcgtgttat

SEQ ID NO: 122932 - DNA, 13 bp, Artificial Sequence
  Oligonucleotide for detection of SNP TSC0030731
ataacacgacccc

SEQ ID NO: 122933 - DNA, 13 bp, Artificial Sequence
  Oligonucleotide for detection of SNP TSC0030732
aatattgtaattg

SEQ ID NO: 122934 - DNA, 13 bp, Artificial Sequence
  Oligonucleotide for detection of SNP TSC0030732
caattacaatatt

SEQ ID NO: 122935 - DNA, 13 bp, Artificial Sequence
  Oligonucleotide for detection of SNP TSC0030732
aatattataattg

SEQ ID NO: 122936 - DNA, 13 bp, Artificial Sequence
  Oligonucleotide for detection of SNP TSC0030732
caattataatatt

SEQ ID NO: 122937 - DNA, 13 bp, Artificial Sequence
  Oligonucleotide for detection of SNP TSC0030732
aatatcgtaattg

SEQ ID NO: 122938 - DNA, 13 bp, Artificial Sequence
  Oligonucleotide for detection of SNP TSC0030732
caattacgatatt

SEQ ID NO: 122939 - DNA, 13 bp, Artificial Sequence
  Oligonucleotide for detection of SNP TSC0030733
tttttggttgtta

SEQ ID NO: 122940 - DNA, 13 bp, Artificial Sequence
  Oligonucleotide for detection of SNP TSC0030733
taacaaccaaaaa

SEQ ID NO: 122941 - DNA, 13 bp, Artificial Sequence
  Oligonucleotide for detection of SNP TSC0030733
tttttgtttgtta

SEQ ID NO: 122942 - DNA, 13 bp, Artificial Sequence
  Oligonucleotide for detection of SNP TSC0030733
taacaaacaaaaa

SEQ ID NO: 122943 - DNA, 13 bp, Artificial Sequence
  Oligonucleotide for detection of SNP TSC0030734
aatagtgttaaaa

SEQ ID NO: 122944 - DNA, 13 bp, Artificial Sequence
  Oligonucleotide for detection of SNP TSC0030734
ttttaacactatt

SEQ ID NO: 122945 - DNA, 13 bp, Artificial Sequence
  Oligonucleotide for detection of SNP TSC0030734
aatagtattaaaa

SEQ ID NO: 122946 - DNA, 13 bp, Artificial Sequence
  Oligonucleotide for detection of SNP TSC0030734
ttttaatactatt

SEQ ID NO: 122947 - DNA, 13 bp, Artificial Sequence
  Oligonucleotide for detection of SNP TSC0030736
ttttaagtagttg

SEQ ID NO: 122948 - DNA, 13 bp, Artificial Sequence
  Oligonucleotide for detection of SNP TSC0030736
caactacttaaaa

SEQ ID NO: 122949 - DNA, 13 bp, Artificial Sequence
  Oligonucleotide for detection of SNP TSC0030736
ttttaaatagttg

SEQ ID NO: 122950 - DNA, 13 bp, Artificial Sequence
  Oligonucleotide for detection of SNP TSC0030736
caactatttaaaa

SEQ ID NO: 122951 - DNA, 13 bp, Artificial Sequence
  Oligonucleotide for detection of SNP TSC0030738
tttatttttttga

SEQ ID NO: 122952 - DNA, 13 bp, Artificial Sequence
  Oligonucleotide for detection of SNP TSC0030738
tcaaaaaaataaa

SEQ ID NO: 122953 - DNA, 13 bp, Artificial Sequence
  Oligonucleotide for detection of SNP TSC0030738
tttattgttttga

SEQ ID NO: 122954 - DNA, 13 bp, Artificial Sequence
  Oligonucleotide for detection of SNP TSC0030738
tcaaaacaataaa

SEQ ID NO: 122955 - DNA, 13 bp, Artificial Sequence
  Oligonucleotide for detection of SNP TSC0030738
ttagaagagtgga

SEQ ID NO: 122956 - DNA, 13 bp, Artificial Sequence
  Oligonucleotide for detection of SNP TSC0030738
tccactcttctaa

SEQ ID NO: 122957 - DNA, 13 bp, Artificial Sequence
  Oligonucleotide for detection of SNP TSC0030738
ttagaatagtgga

SEQ ID NO: 122958 - DNA, 13 bp, Artificial Sequence
  Oligonucleotide for detection of SNP TSC0030738
tccactattctaa

SEQ ID NO: 122959 - DNA, 13 bp, Artificial Sequence
  Oligonucleotide for detection of SNP TSC0030739
tgtaaatgaaagg

SEQ ID NO: 122960 - DNA, 13 bp, Artificial Sequence
  Oligonucleotide for detection of SNP TSC0030739
cctttcatttaca

SEQ ID NO: 122961 - DNA, 13 bp, Artificial Sequence
  Oligonucleotide for detection of SNP TSC0030739
tgtaaacgaaagg

SEQ ID NO: 122962 - DNA, 13 bp, Artificial Sequence
  Oligonucleotide for detection of SNP TSC0030739
cctttcgtttaca

SEQ ID NO: 122963 - DNA, 13 bp, Artificial Sequence
  Oligonucleotide for detection of SNP TSC0030740
taatatatattaa

SEQ ID NO: 122964 - DNA, 13 bp, Artificial Sequence
  Oligonucleotide for detection of SNP TSC0030740
ttaatatatatta

SEQ ID NO: 122965 - DNA, 13 bp, Artificial Sequence
  Oligonucleotide for detection of SNP TSC0030740
taatatgtattaa

SEQ ID NO: 122966 - DNA, 13 bp, Artificial Sequence
  Oligonucleotide for detection of SNP TSC0030740
ttaatacatatta

SEQ ID NO: 122967 - DNA, 13 bp, Artificial Sequence
  Oligonucleotide for detection of SNP TSC0030741
aggaatattaggy

SEQ ID NO: 122968 - DNA, 13 bp, Artificial Sequence
  Oligonucleotide for detection of SNP TSC0030741
rcctaatattcct

SEQ ID NO: 122969 - DNA, 13 bp, Artificial Sequence
  Oligonucleotide for detection of SNP TSC0030741
aggaatgttaggy

SEQ ID NO: 122970 - DNA, 13 bp, Artificial Sequence
  Oligonucleotide for detection of SNP TSC0030741
rcctaacattcct

SEQ ID NO: 122971 - DNA, 13 bp, Artificial Sequence
  Oligonucleotide for detection of SNP TSC0030741
aggaacgttaggy

SEQ ID NO: 122972 - DNA, 13 bp, Artificial Sequence
  Oligonucleotide for detection of SNP TSC0030741
rcctaacgttcct

SEQ ID NO: 122973 - DNA, 13 bp, Artificial Sequence
  Oligonucleotide for detection of SNP TSC0030741
gtttaatgttttt

SEQ ID NO: 122974 - DNA, 13 bp, Artificial Sequence
  Oligonucleotide for detection of SNP TSC0030741
aaaaacattaaac

SEQ ID NO: 122975 - DNA, 13 bp, Artificial Sequence
  Oligonucleotide for detection of SNP TSC0030741
gtttaacgttttt

SEQ ID NO: 122976 - DNA, 13 bp, Artificial Sequence
  Oligonucleotide for detection of SNP TSC0030741
aaaaacgttaaac

SEQ ID NO: 122977 - DNA, 13 bp, Artificial Sequence
  Oligonucleotide for detection of SNP TSC0030742
tttatatgatagg

SEQ ID NO: 122978 - DNA, 13 bp, Artificial Sequence
  Oligonucleotide for detection of SNP TSC0030742
cctatcatataaa

SEQ ID NO: 122979 - DNA, 13 bp, Artificial Sequence
  Oligonucleotide for detection of SNP TSC0030742
tttatacgatagg

SEQ ID NO: 122980 - DNA, 13 bp, Artificial Sequence
  Oligonucleotide for detection of SNP TSC0030742
cctatcgtataaa

SEQ ID NO: 122981 - DNA, 13 bp, Artificial Sequence
  Oligonucleotide for detection of SNP TSC0030742
tttgttgtgtaaa

SEQ ID NO: 122982 - DNA, 13 bp, Artificial Sequence
  Oligonucleotide for detection of SNP TSC0030742
tttacacaacaaa

SEQ ID NO: 122983 - DNA, 13 bp, Artificial Sequence
  Oligonucleotide for detection of SNP TSC0030742
tttgttatgtaaa

SEQ ID NO: 122984 - DNA, 13 bp, Artificial Sequence
  Oligonucleotide for detection of SNP TSC0030742
tttacataacaaa

SEQ ID NO: 122985 - DNA, 13 bp, Artificial Sequence
  Oligonucleotide for detection of SNP TSC0030742
tttgtcgtgtaaa

SEQ ID NO: 122986 - DNA, 13 bp, Artificial Sequence
  Oligonucleotide for detection of SNP TSC0030742
tttacacgacaaa

SEQ ID NO: 122987 - DNA, 13 bp, Artificial Sequence
  Oligonucleotide for detection of SNP TSC0030744
atttgttaaattt

SEQ ID NO: 122988 - DNA, 13 bp, Artificial Sequence
  Oligonucleotide for detection of SNP TSC0030744
aaatttaacaaat

SEQ ID NO: 122989 - DNA, 13 bp, Artificial Sequence
  Oligonucleotide for detection of SNP TSC0030744
atttgtgaaattt

SEQ ID NO: 122990 - DNA, 13 bp, Artificial Sequence
  Oligonucleotide for detection of SNP TSC0030744
aaatttcacaaat

SEQ ID NO: 122991 - DNA, 13 bp, Artificial Sequence
  Oligonucleotide for detection of SNP TSC0030744
aaatttgataggt

SEQ ID NO: 122992 - DNA, 13 bp, Artificial Sequence
  Oligonucleotide for detection of SNP TSC0030744
acctatcaaattt

SEQ ID NO: 122993 - DNA, 13 bp, Artificial Sequence
  Oligonucleotide for detection of SNP TSC0030744
aaattttataggt

SEQ ID NO: 122994 - DNA, 13 bp, Artificial Sequence
  Oligonucleotide for detection of SNP TSC0030744
acctataaaattt

SEQ ID NO: 122995 - DNA, 13 bp, Artificial Sequence
  Oligonucleotide for detection of SNP TSC0030745
tagtttgtgagty

SEQ ID NO: 122996 - DNA, 13 bp, Artificial Sequence
  Oligonucleotide for detection of SNP TSC0030745
ractcacaaacta

SEQ ID NO: 122997 - DNA, 13 bp, Artificial Sequence
  Oligonucleotide for detection of SNP TSC0030745
tagtttatgagty

SEQ ID NO: 122998 - DNA, 13 bp, Artificial Sequence
  Oligonucleotide for detection of SNP TSC0030745
ractcataaacta

SEQ ID NO: 122999 - DNA, 13 bp, Artificial Sequence
  Oligonucleotide for detection of SNP TSC0030747
taaagtgagtaga

SEQ ID NO: 123000 - DNA, 13 bp, Artificial Sequence
  Oligonucleotide for detection of SNP TSC0030747
tctactcacttta

SEQ ID NO: 123001 - DNA, 13 bp, Artificial Sequence
  Oligonucleotide for detection of SNP TSC0030747
taaagtaagtaga

SEQ ID NO: 123002 - DNA, 13 bp, Artificial Sequence
  Oligonucleotide for detection of SNP TSC0030747
tctacttacttta

SEQ ID NO: 123003 - DNA, 13 bp, Artificial Sequence
  Oligonucleotide for detection of SNP TSC0030747
taaagcgagtaga

SEQ ID NO: 123004 - DNA, 13 bp, Artificial Sequence
  Oligonucleotide for detection of SNP TSC0030747
tctactcgcttta

SEQ ID NO: 123005 - DNA, 13 bp, Artificial Sequence
  Oligonucleotide for detection of SNP TSC0030748
ttggatatgaaat

SEQ ID NO: 123006 - DNA, 13 bp, Artificial Sequence
  Oligonucleotide for detection of SNP TSC0030748
atttcatatccaa

SEQ ID NO: 123007 - DNA, 13 bp, Artificial Sequence
  Oligonucleotide for detection of SNP TSC0030748
ttggatgtgaaat

SEQ ID NO: 123008 - DNA, 13 bp, Artificial Sequence
  Oligonucleotide for detection of SNP TSC0030748
atttcacatccaa

SEQ ID NO: 123009 - DNA, 13 bp, Artificial Sequence
  Oligonucleotide for detection of SNP TSC0030749
ggtggtaggggga

SEQ ID NO: 123010 - DNA, 13 bp, Artificial Sequence
  Oligonucleotide for detection of SNP TSC0030749
tccccctaccacc

SEQ ID NO: 123011 - DNA, 13 bp, Artificial Sequence
  Oligonucleotide for detection of SNP TSC0030749
ggtggtgggggga

SEQ ID NO: 123012 - DNA, 13 bp, Artificial Sequence
  Oligonucleotide for detection of SNP TSC0030749
tccccccaccacc

SEQ ID NO: 123013 - DNA, 13 bp, Artificial Sequence
  Oligonucleotide for detection of SNP TSC0030749
ggtggcgggggga

SEQ ID NO: 123014 - DNA, 13 bp, Artificial Sequence
  Oligonucleotide for detection of SNP TSC0030749
tccccccgccacc

SEQ ID NO: 123015 - DNA, 13 bp, Artificial Sequence
  Oligonucleotide for detection of SNP TSC0030750
tttattattgtga

SEQ ID NO: 123016 - DNA, 13 bp, Artificial Sequence
  Oligonucleotide for detection of SNP TSC0030750
tcacaataataaa

SEQ ID NO: 123017 - DNA, 13 bp, Artificial Sequence
  Oligonucleotide for detection of SNP TSC0030750
tttattgttgtga

SEQ ID NO: 123018 - DNA, 13 bp, Artificial Sequence
  Oligonucleotide for detection of SNP TSC0030750
tcacaacaataaa

SEQ ID NO: 123019 - DNA, 13 bp, Artificial Sequence
  Oligonucleotide for detection of SNP TSC0030750
tttatcgttgtga

SEQ ID NO: 123020 - DNA, 13 bp, Artificial Sequence
  Oligonucleotide for detection of SNP TSC0030750
tcacaacgataaa

SEQ ID NO: 123021 - DNA, 13 bp, Artificial Sequence
  Oligonucleotide for detection of SNP TSC0030750
ttataatggtagg

SEQ ID NO: 123022 - DNA, 13 bp, Artificial Sequence
  Oligonucleotide for detection of SNP TSC0030750
cctaccattataa

SEQ ID NO: 123023 - DNA, 13 bp, Artificial Sequence
  Oligonucleotide for detection of SNP TSC0030750
ttataacggtagg

SEQ ID NO: 123024 - DNA, 13 bp, Artificial Sequence
  Oligonucleotide for detection of SNP TSC0030750
cctaccgttataa

SEQ ID NO: 123025 - DNA, 13 bp, Artificial Sequence
  Oligonucleotide for detection of SNP TSC0030755
agaagatgggtga

SEQ ID NO: 123026 - DNA, 13 bp, Artificial Sequence
  Oligonucleotide for detection of SNP TSC0030755
tcacccatcttct

SEQ ID NO: 123027 - DNA, 13 bp, Artificial Sequence
  Oligonucleotide for detection of SNP TSC0030755
agaagaagggtga

SEQ ID NO: 123028 - DNA, 13 bp, Artificial Sequence
  Oligonucleotide for detection of SNP TSC0030755
tcacccttcttct

SEQ ID NO: 123029 - DNA, 13 bp, Artificial Sequence
  Oligonucleotide for detection of SNP TSC0030756
gaagtaatatgtt

SEQ ID NO: 123030 - DNA, 13 bp, Artificial Sequence
  Oligonucleotide for detection of SNP TSC0030756
aacatattacttc

SEQ ID NO: 123031 - DNA, 13 bp, Artificial Sequence
  Oligonucleotide for detection of SNP TSC0030756
gaagtattatgtt

SEQ ID NO: 123032 - DNA, 13 bp, Artificial Sequence
  Oligonucleotide for detection of SNP TSC0030756
aacataatacttc

SEQ ID NO: 123033 - DNA, 13 bp, Artificial Sequence
  Oligonucleotide for detection of SNP TSC0030756
aatatgttattty

SEQ ID NO: 123034 - DNA, 13 bp, Artificial Sequence
  Oligonucleotide for detection of SNP TSC0030756
raaataacatatt

SEQ ID NO: 123035 - DNA, 13 bp, Artificial Sequence
  Oligonucleotide for detection of SNP TSC0030756
aatatgatattty

SEQ ID NO: 123036 - DNA, 13 bp, Artificial Sequence
  Oligonucleotide for detection of SNP TSC0030756
raaatatcatatt

SEQ ID NO: 123037 - DNA, 13 bp, Artificial Sequence
  Oligonucleotide for detection of SNP TSC0030757
tagttagtatttt

SEQ ID NO: 123038 - DNA, 13 bp, Artificial Sequence
  Oligonucleotide for detection of SNP TSC0030757
aaaatactaacta

SEQ ID NO: 123039 - DNA, 13 bp, Artificial Sequence
  Oligonucleotide for detection of SNP TSC0030764
tttgtagtttatt

SEQ ID NO: 123040 - DNA, 13 bp, Artificial Sequence
  Oligonucleotide for detection of SNP TSC0030764
aataaactacaaa

SEQ ID NO: 123041 - DNA, 13 bp, Artificial Sequence
  Oligonucleotide for detection of SNP TSC0030767
atataatgtgtty

SEQ ID NO: 123042 - DNA, 13 bp, Artificial Sequence
  Oligonucleotide for detection of SNP TSC0030767
raacacattatat

SEQ ID NO: 123043 - DNA, 13 bp, Artificial Sequence
  Oligonucleotide for detection of SNP TSC0030767
atataacgtgtty

SEQ ID NO: 123044 - DNA, 13 bp, Artificial Sequence
  Oligonucleotide for detection of SNP TSC0030767
raacacgttatat

SEQ ID NO: 123045 - DNA, 13 bp, Artificial Sequence
  Oligonucleotide for detection of SNP TSC0030767
gaatatgttatgt

SEQ ID NO: 123046 - DNA, 13 bp, Artificial Sequence
  Oligonucleotide for detection of SNP TSC0030767
acataacatattc

SEQ ID NO: 123047 - DNA, 13 bp, Artificial Sequence
  Oligonucleotide for detection of SNP TSC0030767
gaatatattatgt

SEQ ID NO: 123048 - DNA, 13 bp, Artificial Sequence
  Oligonucleotide for detection of SNP TSC0030767
acataatatattc

SEQ ID NO: 123049 - DNA, 13 bp, Artificial Sequence
  Oligonucleotide for detection of SNP TSC0030767
gaatacgttatgt

SEQ ID NO: 123050 - DNA, 13 bp, Artificial Sequence
  Oligonucleotide for detection of SNP TSC0030767
acataacgtattc

SEQ ID NO: 123051 - DNA, 13 bp, Artificial Sequence
  Oligonucleotide for detection of SNP TSC0030768
gtaaatattttta

SEQ ID NO: 123052 - DNA, 13 bp, Artificial Sequence
  Oligonucleotide for detection of SNP TSC0030768
taaaaatatttac

SEQ ID NO: 123053 - DNA, 13 bp, Artificial Sequence
  Oligonucleotide for detection of SNP TSC0030768
gtaaatgttttta

SEQ ID NO: 123054 - DNA, 13 bp, Artificial Sequence
  Oligonucleotide for detection of SNP TSC0030768
taaaaacatttac

SEQ ID NO: 123055 - DNA, 13 bp, Artificial Sequence
  Oligonucleotide for detection of SNP TSC0030768
gtaaacgttttta

SEQ ID NO: 123056 - DNA, 13 bp, Artificial Sequence
  Oligonucleotide for detection of SNP TSC0030768
taaaaacgtttac

SEQ ID NO: 123057 - DNA, 13 bp, Artificial Sequence
  Oligonucleotide for detection of SNP TSC0030768
taaggatgtttgy

SEQ ID NO: 123058 - DNA, 13 bp, Artificial Sequence
  Oligonucleotide for detection of SNP TSC0030768
rcaaacatcctta

SEQ ID NO: 123059 - DNA, 13 bp, Artificial Sequence
  Oligonucleotide for detection of SNP TSC0030768
taaggacgtttgy

SEQ ID NO: 123060 - DNA, 13 bp, Artificial Sequence
  Oligonucleotide for detection of SNP TSC0030768
rcaaacgtcctta

SEQ ID NO: 123061 - DNA, 13 bp, Artificial Sequence
  Oligonucleotide for detection of SNP TSC0030769
tatttaattaaag

SEQ ID NO: 123062 - DNA, 13 bp, Artificial Sequence
  Oligonucleotide for detection of SNP TSC0030769
ctttaattaaata

SEQ ID NO: 123063 - DNA, 13 bp, Artificial Sequence
  Oligonucleotide for detection of SNP TSC0030769
tatttatttaaag

SEQ ID NO: 123064 - DNA, 13 bp, Artificial Sequence
  Oligonucleotide for detection of SNP TSC0030769
ctttaaataaata

SEQ ID NO: 123065 - DNA, 13 bp, Artificial Sequence
  Oligonucleotide for detection of SNP TSC0030769
ttttggttgaatg

SEQ ID NO: 123066 - DNA, 13 bp, Artificial Sequence
  Oligonucleotide for detection of SNP TSC0030769
cattcaaccaaaa

SEQ ID NO: 123067 - DNA, 13 bp, Artificial Sequence
  Oligonucleotide for detection of SNP TSC0030769
ttttggatgaatg

SEQ ID NO: 123068 - DNA, 13 bp, Artificial Sequence
  Oligonucleotide for detection of SNP TSC0030769
cattcatccaaaa

SEQ ID NO: 123069 - DNA, 13 bp, Artificial Sequence
  Oligonucleotide for detection of SNP TSC0030774
ttaattgagaaaa

SEQ ID NO: 123070 - DNA, 13 bp, Artificial Sequence
  Oligonucleotide for detection of SNP TSC0030774
ttttctcaattaa

SEQ ID NO: 123071 - DNA, 13 bp, Artificial Sequence
  Oligonucleotide for detection of SNP TSC0030774
ttaattaagaaaa

SEQ ID NO: 123072 - DNA, 13 bp, Artificial Sequence
  Oligonucleotide for detection of SNP TSC0030774
ttttcttaattaa

SEQ ID NO: 123073 - DNA, 13 bp, Artificial Sequence
  Oligonucleotide for detection of SNP TSC0030775
gtgggtagattay

SEQ ID NO: 123074 - DNA, 13 bp, Artificial Sequence
  Oligonucleotide for detection of SNP TSC0030775
rtaatctacccac

SEQ ID NO: 123075 - DNA, 13 bp, Artificial Sequence
  Oligonucleotide for detection of SNP TSC0030775
gtgggtggattay

SEQ ID NO: 123076 - DNA, 13 bp, Artificial Sequence
  Oligonucleotide for detection of SNP TSC0030775
rtaatccacccac

SEQ ID NO: 123077 - DNA, 13 bp, Artificial Sequence
  Oligonucleotide for detection of SNP TSC0030775
gcgggtagattay

SEQ ID NO: 123078 - DNA, 13 bp, Artificial Sequence
  Oligonucleotide for detection of SNP TSC0030775
rtaatctacccgc

SEQ ID NO: 123079 - DNA, 13 bp, Artificial Sequence
  Oligonucleotide for detection of SNP TSC0030775
gcgggtggattay

SEQ ID NO: 123080 - DNA, 13 bp, Artificial Sequence
  Oligonucleotide for detection of SNP TSC0030775
rtaatccacccgc

SEQ ID NO: 123081 - DNA, 13 bp, Artificial Sequence
  Oligonucleotide for detection of SNP TSC0030775
gtgggcggattay

SEQ ID NO: 123082 - DNA, 13 bp, Artificial Sequence
  Oligonucleotide for detection of SNP TSC0030775
rtaatccgcccac

SEQ ID NO: 123083 - DNA, 13 bp, Artificial Sequence
  Oligonucleotide for detection of SNP TSC0030775
gcgggcggattay

SEQ ID NO: 123084 - DNA, 13 bp, Artificial Sequence
  Oligonucleotide for detection of SNP TSC0030775
rtaatccgcccgc

SEQ ID NO: 123085 - DNA, 13 bp, Artificial Sequence
  Oligonucleotide for detection of SNP TSC0030775
gtgatttgtttgy

SEQ ID NO: 123086 - DNA, 13 bp, Artificial Sequence
  Oligonucleotide for detection of SNP TSC0030775
rcaaacaaatcac

SEQ ID NO: 123087 - DNA, 13 bp, Artificial Sequence
  Oligonucleotide for detection of SNP TSC0030775
gtgatttgttcgy

SEQ ID NO: 123088 - DNA, 13 bp, Artificial Sequence
  Oligonucleotide for detection of SNP TSC0030775
rcgaacaaatcac

SEQ ID NO: 123089 - DNA, 13 bp, Artificial Sequence
  Oligonucleotide for detection of SNP TSC0030775
gtgattcgtttgy

SEQ ID NO: 123090 - DNA, 13 bp, Artificial Sequence
  Oligonucleotide for detection of SNP TSC0030775
rcaaacgaatcac

SEQ ID NO: 123091 - DNA, 13 bp, Artificial Sequence
  Oligonucleotide for detection of SNP TSC0030775
gtgattcgttcgy

SEQ ID NO: 123092 - DNA, 13 bp, Artificial Sequence
  Oligonucleotide for detection of SNP TSC0030775
rcgaacgaatcac

SEQ ID NO: 123093 - DNA, 13 bp, Artificial Sequence
  Oligonucleotide for detection of SNP TSC0030776
ttaataataaaat

SEQ ID NO: 123094 - DNA, 13 bp, Artificial Sequence
  Oligonucleotide for detection of SNP TSC0030776
attttattattaa

SEQ ID NO: 123095 - DNA, 13 bp, Artificial Sequence
  Oligonucleotide for detection of SNP TSC0030780
tttatttgaattg

SEQ ID NO: 123096 - DNA, 13 bp, Artificial Sequence
  Oligonucleotide for detection of SNP TSC0030780
caattcaaataaa

SEQ ID NO: 123097 - DNA, 13 bp, Artificial Sequence
  Oligonucleotide for detection of SNP TSC0030780
tttattcgaattg

SEQ ID NO: 123098 - DNA, 13 bp, Artificial Sequence
  Oligonucleotide for detection of SNP TSC0030780
caattcgaataaa

SEQ ID NO: 123099 - DNA, 13 bp, Artificial Sequence
  Oligonucleotide for detection of SNP TSC0030780
tagtttggataga

SEQ ID NO: 123100 - DNA, 13 bp, Artificial Sequence
  Oligonucleotide for detection of SNP TSC0030780
tctatccaaacta

SEQ ID NO: 123101 - DNA, 13 bp, Artificial Sequence
  Oligonucleotide for detection of SNP TSC0030780
tagtttagataga

SEQ ID NO: 123102 - DNA, 13 bp, Artificial Sequence
  Oligonucleotide for detection of SNP TSC0030780
tctatctaaacta

SEQ ID NO: 123103 - DNA, 13 bp, Artificial Sequence
  Oligonucleotide for detection of SNP TSC0030780
tagttcggataga

SEQ ID NO: 123104 - DNA, 13 bp, Artificial Sequence
  Oligonucleotide for detection of SNP TSC0030780
tctatccgaacta

SEQ ID NO: 123105 - DNA, 13 bp, Artificial Sequence
  Oligonucleotide for detection of SNP TSC0030782
ataggtaaaaaaa

SEQ ID NO: 123106 - DNA, 13 bp, Artificial Sequence
  Oligonucleotide for detection of SNP TSC0030782
tttttttacctat

SEQ ID NO: 123107 - DNA, 13 bp, Artificial Sequence
  Oligonucleotide for detection of SNP TSC0030782
ataggttaaaaaa

SEQ ID NO: 123108 - DNA, 13 bp, Artificial Sequence
  Oligonucleotide for detection of SNP TSC0030782
ttttttaacctat

SEQ ID NO: 123109 - DNA, 13 bp, Artificial Sequence
  Oligonucleotide for detection of SNP TSC0030782
ttttttgatttat

SEQ ID NO: 123110 - DNA, 13 bp, Artificial Sequence
  Oligonucleotide for detection of SNP TSC0030782
ataaatcaaaaaa

SEQ ID NO: 123111 - DNA, 13 bp, Artificial Sequence
  Oligonucleotide for detection of SNP TSC0030783
agatattgggtgt

SEQ ID NO: 123112 - DNA, 13 bp, Artificial Sequence
  Oligonucleotide for detection of SNP TSC0030783
acacccaatatct

SEQ ID NO: 123113 - DNA, 13 bp, Artificial Sequence
  Oligonucleotide for detection of SNP TSC0030783
agatatcgggtgt

SEQ ID NO: 123114 - DNA, 13 bp, Artificial Sequence
  Oligonucleotide for detection of SNP TSC0030783
acacccgatatct

SEQ ID NO: 123115 - DNA, 13 bp, Artificial Sequence
  Oligonucleotide for detection of SNP TSC0030783
atatttggtgttt

SEQ ID NO: 123116 - DNA, 13 bp, Artificial Sequence
  Oligonucleotide for detection of SNP TSC0030783
aaacaccaaatat

SEQ ID NO: 123117 - DNA, 13 bp, Artificial Sequence
  Oligonucleotide for detection of SNP TSC0030783
atatttagtgttt

SEQ ID NO: 123118 - DNA, 13 bp, Artificial Sequence
  Oligonucleotide for detection of SNP TSC0030783
aaacactaaatat

SEQ ID NO: 123119 - DNA, 13 bp, Artificial Sequence
  Oligonucleotide for detection of SNP TSC0030783
atattcggtgttt

SEQ ID NO: 123120 - DNA, 13 bp, Artificial Sequence
  Oligonucleotide for detection of SNP TSC0030783
aaacaccgaatat

SEQ ID NO: 123121 - DNA, 13 bp, Artificial Sequence
  Oligonucleotide for detection of SNP TSC0030784
ttttatgatgagy

SEQ ID NO: 123122 - DNA, 13 bp, Artificial Sequence
  Oligonucleotide for detection of SNP TSC0030784
rctcatcataaaa

SEQ ID NO: 123123 - DNA, 13 bp, Artificial Sequence
  Oligonucleotide for detection of SNP TSC0030784
ttttataatgagy

SEQ ID NO: 123124 - DNA, 13 bp, Artificial Sequence
  Oligonucleotide for detection of SNP TSC0030784
rctcattataaaa

SEQ ID NO: 123125 - DNA, 13 bp, Artificial Sequence
  Oligonucleotide for detection of SNP TSC0030787
ttgggattgtagg

SEQ ID NO: 123126 - DNA, 13 bp, Artificial Sequence
  Oligonucleotide for detection of SNP TSC0030787
cctacaatcccaa

SEQ ID NO: 123127 - DNA, 13 bp, Artificial Sequence
  Oligonucleotide for detection of SNP TSC0030787
ttgggaatgtagg

SEQ ID NO: 123128 - DNA, 13 bp, Artificial Sequence
  Oligonucleotide for detection of SNP TSC0030787
cctacattcccaa

SEQ ID NO: 123129 - DNA, 13 bp, Artificial Sequence
  Oligonucleotide for detection of SNP TSC0030788
ggtaggtggatta

SEQ ID NO: 123130 - DNA, 13 bp, Artificial Sequence
  Oligonucleotide for detection of SNP TSC0030788
taatccacctacc

SEQ ID NO: 123131 - DNA, 13 bp, Artificial Sequence
  Oligonucleotide for detection of SNP TSC0030788
ggtaggcggatta

SEQ ID NO: 123132 - DNA, 13 bp, Artificial Sequence
  Oligonucleotide for detection of SNP TSC0030788
taatccgcctacc

SEQ ID NO: 123133 - DNA, 13 bp, Artificial Sequence
  Oligonucleotide for detection of SNP TSC0030788
tgatttgtttgty

SEQ ID NO: 123134 - DNA, 13 bp, Artificial Sequence
  Oligonucleotide for detection of SNP TSC0030788
racaaacaaatca

SEQ ID NO: 123135 - DNA, 13 bp, Artificial Sequence
  Oligonucleotide for detection of SNP TSC0030788
tgatttatttgty

SEQ ID NO: 123136 - DNA, 13 bp, Artificial Sequence
  Oligonucleotide for detection of SNP TSC0030788
racaaataaatca

SEQ ID NO: 123137 - DNA, 13 bp, Artificial Sequence
  Oligonucleotide for detection of SNP TSC0030788
tgattcgtttgty

SEQ ID NO: 123138 - DNA, 13 bp, Artificial Sequence
  Oligonucleotide for detection of SNP TSC0030788
racaaacgaatca

SEQ ID NO: 123139 - DNA, 13 bp, Artificial Sequence
  Oligonucleotide for detection of SNP TSC0030790
ttaaagaggattg

SEQ ID NO: 123140 - DNA, 13 bp, Artificial Sequence
  Oligonucleotide for detection of SNP TSC0030790
caatcctctttaa

SEQ ID NO: 123141 - DNA, 13 bp, Artificial Sequence
  Oligonucleotide for detection of SNP TSC0030790
ttaaagtggattg

SEQ ID NO: 123142 - DNA, 13 bp, Artificial Sequence
  Oligonucleotide for detection of SNP TSC0030790
caatccactttaa

SEQ ID NO: 123143 - DNA, 13 bp, Artificial Sequence
  Oligonucleotide for detection of SNP TSC0030790
ttaaagcggattg

SEQ ID NO: 123144 - DNA, 13 bp, Artificial Sequence
  Oligonucleotide for detection of SNP TSC0030790
caatccgctttaa

SEQ ID NO: 123145 - DNA, 13 bp, Artificial Sequence
  Oligonucleotide for detection of SNP TSC0030790
tagttttttttga

SEQ ID NO: 123146 - DNA, 13 bp, Artificial Sequence
  Oligonucleotide for detection of SNP TSC0030790
tcaaaaaaaacta

SEQ ID NO: 123147 - DNA, 13 bp, Artificial Sequence
  Oligonucleotide for detection of SNP TSC0030790
tagtttgttttga

SEQ ID NO: 123148 - DNA, 13 bp, Artificial Sequence
  Oligonucleotide for detection of SNP TSC0030790
tcaaaacaaacta

SEQ ID NO: 123149 - DNA, 13 bp, Artificial Sequence
  Oligonucleotide for detection of SNP TSC0030790
tagttcgttttga

SEQ ID NO: 123150 - DNA, 13 bp, Artificial Sequence
  Oligonucleotide for detection of SNP TSC0030790
tcaaaacgaacta

SEQ ID NO: 123151 - DNA, 13 bp, Artificial Sequence
  Oligonucleotide for detection of SNP TSC0030791
tttagtagattga

SEQ ID NO: 123152 - DNA, 13 bp, Artificial Sequence
  Oligonucleotide for detection of SNP TSC0030791
tcaatctactaaa

SEQ ID NO: 123153 - DNA, 13 bp, Artificial Sequence
  Oligonucleotide for detection of SNP TSC0030791
tttagtggattga

SEQ ID NO: 123154 - DNA, 13 bp, Artificial Sequence
  Oligonucleotide for detection of SNP TSC0030791
tcaatccactaaa

SEQ ID NO: 123155 - DNA, 13 bp, Artificial Sequence
  Oligonucleotide for detection of SNP TSC0030791
tttagcggattga

SEQ ID NO: 123156 - DNA, 13 bp, Artificial Sequence
  Oligonucleotide for detection of SNP TSC0030791
tcaatccgctaaa

SEQ ID NO: 123157 - DNA, 13 bp, Artificial Sequence
  Oligonucleotide for detection of SNP TSC0030791
ttagtttgttgga

SEQ ID NO: 123158 - DNA, 13 bp, Artificial Sequence
  Oligonucleotide for detection of SNP TSC0030791
tccaacaaactaa

SEQ ID NO: 123159 - DNA, 13 bp, Artificial Sequence
  Oligonucleotide for detection of SNP TSC0030791
ttagttcgttgga

SEQ ID NO: 123160 - DNA, 13 bp, Artificial Sequence
  Oligonucleotide for detection of SNP TSC0030791
tccaacgaactaa

SEQ ID NO: 123161 - DNA, 13 bp, Artificial Sequence
  Oligonucleotide for detection of SNP TSC0030794
aagatagtgatag

SEQ ID NO: 123162 - DNA, 13 bp, Artificial Sequence
  Oligonucleotide for detection of SNP TSC0030794
ctatcactatctt

SEQ ID NO: 123163 - DNA, 13 bp, Artificial Sequence
  Oligonucleotide for detection of SNP TSC0030794
aagatattgatag

SEQ ID NO: 123164 - DNA, 13 bp, Artificial Sequence
  Oligonucleotide for detection of SNP TSC0030794
ctatcaatatctt

SEQ ID NO: 123165 - DNA, 13 bp, Artificial Sequence
  Oligonucleotide for detection of SNP TSC0030794
ttattattatttt

SEQ ID NO: 123166 - DNA, 13 bp, Artificial Sequence
  Oligonucleotide for detection of SNP TSC0030794
aaaataataataa

SEQ ID NO: 123167 - DNA, 13 bp, Artificial Sequence
  Oligonucleotide for detection of SNP TSC0030796
ggttatattatat

SEQ ID NO: 123168 - DNA, 13 bp, Artificial Sequence
  Oligonucleotide for detection of SNP TSC0030796
atataatataacc

SEQ ID NO: 123169 - DNA, 13 bp, Artificial Sequence
  Oligonucleotide for detection of SNP TSC0030796
ggttatgttatat

SEQ ID NO: 123170 - DNA, 13 bp, Artificial Sequence
  Oligonucleotide for detection of SNP TSC0030796
atataacataacc

SEQ ID NO: 123171 - DNA, 13 bp, Artificial Sequence
  Oligonucleotide for detection of SNP TSC0030796
ggttacgttatat

SEQ ID NO: 123172 - DNA, 13 bp, Artificial Sequence
  Oligonucleotide for detection of SNP TSC0030796
atataacgtaacc

SEQ ID NO: 123173 - DNA, 13 bp, Artificial Sequence
  Oligonucleotide for detection of SNP TSC0030796
atgtgatgtagty

SEQ ID NO: 123174 - DNA, 13 bp, Artificial Sequence
  Oligonucleotide for detection of SNP TSC0030796
ractacatcacat

SEQ ID NO: 123175 - DNA, 13 bp, Artificial Sequence
  Oligonucleotide for detection of SNP TSC0030796
atgtgacgtagty

SEQ ID NO: 123176 - DNA, 13 bp, Artificial Sequence
  Oligonucleotide for detection of SNP TSC0030796
ractacgtcacat

SEQ ID NO: 123177 - DNA, 13 bp, Artificial Sequence
  Oligonucleotide for detection of SNP TSC0030798
ttattgggtgtta

SEQ ID NO: 123178 - DNA, 13 bp, Artificial Sequence
  Oligonucleotide for detection of SNP TSC0030798
taacacccaataa

SEQ ID NO: 123179 - DNA, 13 bp, Artificial Sequence
  Oligonucleotide for detection of SNP TSC0030798
tggtatttagtgg

SEQ ID NO: 123180 - DNA, 13 bp, Artificial Sequence
  Oligonucleotide for detection of SNP TSC0030798
ccactaaatacca

SEQ ID NO: 123181 - DNA, 13 bp, Artificial Sequence
  Oligonucleotide for detection of SNP TSC0030798
tggtatatagtgg

SEQ ID NO: 123182 - DNA, 13 bp, Artificial Sequence
  Oligonucleotide for detection of SNP TSC0030798
ccactatatacca

SEQ ID NO: 123183 - DNA, 13 bp, Artificial Sequence
  Oligonucleotide for detection of SNP TSC0030799
gtgtttagagagt

SEQ ID NO: 123184 - DNA, 13 bp, Artificial Sequence
  Oligonucleotide for detection of SNP TSC0030799
actctctaaacac

SEQ ID NO: 123185 - DNA, 13 bp, Artificial Sequence
  Oligonucleotide for detection of SNP TSC0030799
gtgttttgagagt

SEQ ID NO: 123186 - DNA, 13 bp, Artificial Sequence
  Oligonucleotide for detection of SNP TSC0030799
actctcaaaacac

SEQ ID NO: 123187 - DNA, 13 bp, Artificial Sequence
  Oligonucleotide for detection of SNP TSC0030799
gtgtttcgagagt

SEQ ID NO: 123188 - DNA, 13 bp, Artificial Sequence
  Oligonucleotide for detection of SNP TSC0030799
actctcgaaacac

SEQ ID NO: 123189 - DNA, 13 bp, Artificial Sequence
  Oligonucleotide for detection of SNP TSC0030799
attttttgagtay

SEQ ID NO: 123190 - DNA, 13 bp, Artificial Sequence
  Oligonucleotide for detection of SNP TSC0030799
rtactcaaaaaat

SEQ ID NO: 123191 - DNA, 13 bp, Artificial Sequence
  Oligonucleotide for detection of SNP TSC0030799
atttttggagtay

SEQ ID NO: 123192 - DNA, 13 bp, Artificial Sequence
  Oligonucleotide for detection of SNP TSC0030799
rtactccaaaaat

SEQ ID NO: 123193 - DNA, 13 bp, Artificial Sequence
  Oligonucleotide for detection of SNP TSC0030799
attttcggagtay

SEQ ID NO: 123194 - DNA, 13 bp, Artificial Sequence
  Oligonucleotide for detection of SNP TSC0030799
rtactccgaaaat

SEQ ID NO: 123195 - DNA, 13 bp, Artificial Sequence
  Oligonucleotide for detection of SNP TSC0030802
attttggatttga

SEQ ID NO: 123196 - DNA, 13 bp, Artificial Sequence
  Oligonucleotide for detection of SNP TSC0030802
tcaaatccaaaat

SEQ ID NO: 123197 - DNA, 13 bp, Artificial Sequence
  Oligonucleotide for detection of SNP TSC0030802
attttgaatttga

SEQ ID NO: 123198 - DNA, 13 bp, Artificial Sequence
  Oligonucleotide for detection of SNP TSC0030802
tcaaattcaaaat

SEQ ID NO: 123199 - DNA, 13 bp, Artificial Sequence
  Oligonucleotide for detection of SNP TSC0030807
ttatgtatgggty

SEQ ID NO: 123200 - DNA, 13 bp, Artificial Sequence
  Oligonucleotide for detection of SNP TSC0030807
racccatacataa

SEQ ID NO: 123201 - DNA, 13 bp, Artificial Sequence
  Oligonucleotide for detection of SNP TSC0030807
ttatgtgtgggty

SEQ ID NO: 123202 - DNA, 13 bp, Artificial Sequence
  Oligonucleotide for detection of SNP TSC0030807
racccacacataa

SEQ ID NO: 123203 - DNA, 13 bp, Artificial Sequence
  Oligonucleotide for detection of SNP TSC0030807
ttacgtatgggty

SEQ ID NO: 123204 - DNA, 13 bp, Artificial Sequence
  Oligonucleotide for detection of SNP TSC0030807
racccatacgtaa

SEQ ID NO: 123205 - DNA, 13 bp, Artificial Sequence
  Oligonucleotide for detection of SNP TSC0030807
ttacgtgtgggty

SEQ ID NO: 123206 - DNA, 13 bp, Artificial Sequence
  Oligonucleotide for detection of SNP TSC0030807
racccacacgtaa

SEQ ID NO: 123207 - DNA, 13 bp, Artificial Sequence
  Oligonucleotide for detection of SNP TSC0030807
ttatgcgtgggty

SEQ ID NO: 123208 - DNA, 13 bp, Artificial Sequence
  Oligonucleotide for detection of SNP TSC0030807
racccacgcataa

SEQ ID NO: 123209 - DNA, 13 bp, Artificial Sequence
  Oligonucleotide for detection of SNP TSC0030807
ttacgcgtgggty

SEQ ID NO: 123210 - DNA, 13 bp, Artificial Sequence
  Oligonucleotide for detection of SNP TSC0030807
racccacgcgtaa

SEQ ID NO: 123211 - DNA, 13 bp, Artificial Sequence
  Oligonucleotide for detection of SNP TSC0030807
ggtttatgtgtgg

SEQ ID NO: 123212 - DNA, 13 bp, Artificial Sequence
  Oligonucleotide for detection of SNP TSC0030807
ccacacataaacc

SEQ ID NO: 123213 - DNA, 13 bp, Artificial Sequence
  Oligonucleotide for detection of SNP TSC0030807
ggtttatgcgtgg

SEQ ID NO: 123214 - DNA, 13 bp, Artificial Sequence
  Oligonucleotide for detection of SNP TSC0030807
ccacgcataaacc

SEQ ID NO: 123215 - DNA, 13 bp, Artificial Sequence
  Oligonucleotide for detection of SNP TSC0030807
ggtttacgtgtgg

SEQ ID NO: 123216 - DNA, 13 bp, Artificial Sequence
  Oligonucleotide for detection of SNP TSC0030807
ccacacgtaaacc

SEQ ID NO: 123217 - DNA, 13 bp, Artificial Sequence
  Oligonucleotide for detection of SNP TSC0030807
ggtttacgcgtgg

SEQ ID NO: 123218 - DNA, 13 bp, Artificial Sequence
  Oligonucleotide for detection of SNP TSC0030807
ccacgcgtaaacc

SEQ ID NO: 123219 - DNA, 13 bp, Artificial Sequence
  Oligonucleotide for detection of SNP TSC0030810
gattgggttatay

SEQ ID NO: 123220 - DNA, 13 bp, Artificial Sequence
  Oligonucleotide for detection of SNP TSC0030810
rtataacccaatc

SEQ ID NO: 123221 - DNA, 13 bp, Artificial Sequence
  Oligonucleotide for detection of SNP TSC0030810
gattggattatay

SEQ ID NO: 123222 - DNA, 13 bp, Artificial Sequence
  Oligonucleotide for detection of SNP TSC0030810
rtataatccaatc

SEQ ID NO: 123223 - DNA, 13 bp, Artificial Sequence
  Oligonucleotide for detection of SNP TSC0030810
gatcgggttatay

SEQ ID NO: 123224 - DNA, 13 bp, Artificial Sequence
  Oligonucleotide for detection of SNP TSC0030810
rtataacccgatc

SEQ ID NO: 123225 - DNA, 13 bp, Artificial Sequence
  Oligonucleotide for detection of SNP TSC0030810
gatcggattatay

SEQ ID NO: 123226 - DNA, 13 bp, Artificial Sequence
  Oligonucleotide for detection of SNP TSC0030810
rtataatccgatc

SEQ ID NO: 123227 - DNA, 13 bp, Artificial Sequence
  Oligonucleotide for detection of SNP TSC0030812
gatatgtggaata

SEQ ID NO: 123228 - DNA, 13 bp, Artificial Sequence
  Oligonucleotide for detection of SNP TSC0030812
tattccacatatc

SEQ ID NO: 123229 - DNA, 13 bp, Artificial Sequence
  Oligonucleotide for detection of SNP TSC0030812
gatatgcggaata

SEQ ID NO: 123230 - DNA, 13 bp, Artificial Sequence
  Oligonucleotide for detection of SNP TSC0030812
tattccgcatatc

SEQ ID NO: 123231 - DNA, 13 bp, Artificial Sequence
  Oligonucleotide for detection of SNP TSC0030812
tgttttgtatgty

SEQ ID NO: 123232 - DNA, 13 bp, Artificial Sequence
  Oligonucleotide for detection of SNP TSC0030812
racatacaaaaca

SEQ ID NO: 123233 - DNA, 13 bp, Artificial Sequence
  Oligonucleotide for detection of SNP TSC0030812
tgttttatatgty

SEQ ID NO: 123234 - DNA, 13 bp, Artificial Sequence
  Oligonucleotide for detection of SNP TSC0030812
racatataaaaca

SEQ ID NO: 123235 - DNA, 13 bp, Artificial Sequence
  Oligonucleotide for detection of SNP TSC0030812
tgtttcgtatgty

SEQ ID NO: 123236 - DNA, 13 bp, Artificial Sequence
  Oligonucleotide for detection of SNP TSC0030812
racatacgaaaca

SEQ ID NO: 123237 - DNA, 13 bp, Artificial Sequence
  Oligonucleotide for detection of SNP TSC0030813
tagaatgatgaag

SEQ ID NO: 123238 - DNA, 13 bp, Artificial Sequence
  Oligonucleotide for detection of SNP TSC0030813
cttcatcattcta

SEQ ID NO: 123239 - DNA, 13 bp, Artificial Sequence
  Oligonucleotide for detection of SNP TSC0030813
tagaataatgaag

SEQ ID NO: 123240 - DNA, 13 bp, Artificial Sequence
  Oligonucleotide for detection of SNP TSC0030813
cttcattattcta

SEQ ID NO: 123241 - DNA, 13 bp, Artificial Sequence
  Oligonucleotide for detection of SNP TSC0030814
agtgggggaatta

SEQ ID NO: 123242 - DNA, 13 bp, Artificial Sequence
  Oligonucleotide for detection of SNP TSC0030814
taattcccccact

SEQ ID NO: 123243 - DNA, 13 bp, Artificial Sequence
  Oligonucleotide for detection of SNP TSC0030814
agtgggtgaatta

SEQ ID NO: 123244 - DNA, 13 bp, Artificial Sequence
  Oligonucleotide for detection of SNP TSC0030814
taattcacccact

SEQ ID NO: 123245 - DNA, 13 bp, Artificial Sequence
  Oligonucleotide for detection of SNP TSC0030814
tggtttttttatt

SEQ ID NO: 123246 - DNA, 13 bp, Artificial Sequence
  Oligonucleotide for detection of SNP TSC0030814
aataaaaaaacca

SEQ ID NO: 123247 - DNA, 13 bp, Artificial Sequence
  Oligonucleotide for detection of SNP TSC0030817
tttttgatttaaa

SEQ ID NO: 123248 - DNA, 13 bp, Artificial Sequence
  Oligonucleotide for detection of SNP TSC0030817
tttaaatcaaaaa

SEQ ID NO: 123249 - DNA, 13 bp, Artificial Sequence
  Oligonucleotide for detection of SNP TSC0030817
tttttgttttaaa

SEQ ID NO: 123250 - DNA, 13 bp, Artificial Sequence
  Oligonucleotide for detection of SNP TSC0030817
tttaaaacaaaaa

SEQ ID NO: 123251 - DNA, 13 bp, Artificial Sequence
  Oligonucleotide for detection of SNP TSC0030817
tttggattaagga

SEQ ID NO: 123252 - DNA, 13 bp, Artificial Sequence
  Oligonucleotide for detection of SNP TSC0030817
tccttaatccaaa

SEQ ID NO: 123253 - DNA, 13 bp, Artificial Sequence
  Oligonucleotide for detection of SNP TSC0030817
tttggagtaagga

SEQ ID NO: 123254 - DNA, 13 bp, Artificial Sequence
  Oligonucleotide for detection of SNP TSC0030817
tccttactccaaa

SEQ ID NO: 123255 - DNA, 13 bp, Artificial Sequence
  Oligonucleotide for detection of SNP TSC0030818
ttttttttaaaga

SEQ ID NO: 123256 - DNA, 13 bp, Artificial Sequence
  Oligonucleotide for detection of SNP TSC0030818
tctttaaaaaaaa

SEQ ID NO: 123257 - DNA, 13 bp, Artificial Sequence
  Oligonucleotide for detection of SNP TSC0030818
ttttttgtaaaga

SEQ ID NO: 123258 - DNA, 13 bp, Artificial Sequence
  Oligonucleotide for detection of SNP TSC0030818
tctttacaaaaaa

SEQ ID NO: 123259 - DNA, 13 bp, Artificial Sequence
  Oligonucleotide for detection of SNP TSC0030818
tttttggaagaaa

SEQ ID NO: 123260 - DNA, 13 bp, Artificial Sequence
  Oligonucleotide for detection of SNP TSC0030818
tttcttccaaaaa

SEQ ID NO: 123261 - DNA, 13 bp, Artificial Sequence
  Oligonucleotide for detection of SNP TSC0030818
tttttgtaagaaa

SEQ ID NO: 123262 - DNA, 13 bp, Artificial Sequence
  Oligonucleotide for detection of SNP TSC0030818
tttcttacaaaaa

SEQ ID NO: 123263 - DNA, 13 bp, Artificial Sequence
  Oligonucleotide for detection of SNP TSC0030819
tatataaggtaay

SEQ ID NO: 123264 - DNA, 13 bp, Artificial Sequence
  Oligonucleotide for detection of SNP TSC0030819
rttaccttatata

SEQ ID NO: 123265 - DNA, 13 bp, Artificial Sequence
  Oligonucleotide for detection of SNP TSC0030819
tatatatggtaay

SEQ ID NO: 123266 - DNA, 13 bp, Artificial Sequence
  Oligonucleotide for detection of SNP TSC0030819
rttaccatatata

SEQ ID NO: 123267 - DNA, 13 bp, Artificial Sequence
  Oligonucleotide for detection of SNP TSC0030819
gttgttttgtgtg

SEQ ID NO: 123268 - DNA, 13 bp, Artificial Sequence
  Oligonucleotide for detection of SNP TSC0030819
cacacaaaacaac

SEQ ID NO: 123269 - DNA, 13 bp, Artificial Sequence
  Oligonucleotide for detection of SNP TSC0030819
gttgttatgtgtg

SEQ ID NO: 123270 - DNA, 13 bp, Artificial Sequence
  Oligonucleotide for detection of SNP TSC0030819
cacacataacaac

SEQ ID NO: 123271 - DNA, 13 bp, Artificial Sequence
  Oligonucleotide for detection of SNP TSC0030824
tttgaggttaata

SEQ ID NO: 123272 - DNA, 13 bp, Artificial Sequence
  Oligonucleotide for detection of SNP TSC0030824
tattaacctcaaa

SEQ ID NO: 123273 - DNA, 13 bp, Artificial Sequence
  Oligonucleotide for detection of SNP TSC0030824
tttgagtttaata

SEQ ID NO: 123274 - DNA, 13 bp, Artificial Sequence
  Oligonucleotide for detection of SNP TSC0030824
tattaaactcaaa

SEQ ID NO: 123275 - DNA, 13 bp, Artificial Sequence
  Oligonucleotide for detection of SNP TSC0030824
ttcgaggttaata

SEQ ID NO: 123276 - DNA, 13 bp, Artificial Sequence
  Oligonucleotide for detection of SNP TSC0030824
tattaacctcgaa

SEQ ID NO: 123277 - DNA, 13 bp, Artificial Sequence
  Oligonucleotide for detection of SNP TSC0030824
ttcgagtttaata

SEQ ID NO: 123278 - DNA, 13 bp, Artificial Sequence
  Oligonucleotide for detection of SNP TSC0030824
tattaaactcgaa

SEQ ID NO: 123279 - DNA, 13 bp, Artificial Sequence
  Oligonucleotide for detection of SNP TSC0030824
tgttaattttgag

SEQ ID NO: 123280 - DNA, 13 bp, Artificial Sequence
  Oligonucleotide for detection of SNP TSC0030824
ctcaaaattaaca

SEQ ID NO: 123281 - DNA, 13 bp, Artificial Sequence
  Oligonucleotide for detection of SNP TSC0030824
tgttaaatttgag

SEQ ID NO: 123282 - DNA, 13 bp, Artificial Sequence
  Oligonucleotide for detection of SNP TSC0030824
ctcaaatttaaca

SEQ ID NO: 123283 - DNA, 13 bp, Artificial Sequence
  Oligonucleotide for detection of SNP TSC0030824
tgttaatttcgag

SEQ ID NO: 123284 - DNA, 13 bp, Artificial Sequence
  Oligonucleotide for detection of SNP TSC0030824
ctcgaaattaaca

SEQ ID NO: 123285 - DNA, 13 bp, Artificial Sequence
  Oligonucleotide for detection of SNP TSC0030824
tgttaaattcgag

SEQ ID NO: 123286 - DNA, 13 bp, Artificial Sequence
  Oligonucleotide for detection of SNP TSC0030824
ctcgaatttaaca

SEQ ID NO: 123287 - DNA, 13 bp, Artificial Sequence
  Oligonucleotide for detection of SNP TSC0030825
attttgaggttaa

SEQ ID NO: 123288 - DNA, 13 bp, Artificial Sequence
  Oligonucleotide for detection of SNP TSC0030825
ttaacctcaaaat

SEQ ID NO: 123289 - DNA, 13 bp, Artificial Sequence
  Oligonucleotide for detection of SNP TSC0030825
attttggggttaa

SEQ ID NO: 123290 - DNA, 13 bp, Artificial Sequence
  Oligonucleotide for detection of SNP TSC0030825
ttaaccccaaaat

SEQ ID NO: 123291 - DNA, 13 bp, Artificial Sequence
  Oligonucleotide for detection of SNP TSC0030826
ttttggagtaggt

SEQ ID NO: 123292 - DNA, 13 bp, Artificial Sequence
  Oligonucleotide for detection of SNP TSC0030826
acctactccaaaa

SEQ ID NO: 123293 - DNA, 13 bp, Artificial Sequence
  Oligonucleotide for detection of SNP TSC0030826
ttttggggtaggt

SEQ ID NO: 123294 - DNA, 13 bp, Artificial Sequence
  Oligonucleotide for detection of SNP TSC0030826
acctaccccaaaa

SEQ ID NO: 123295 - DNA, 13 bp, Artificial Sequence
  Oligonucleotide for detection of SNP TSC0030829
aaaaaaaaataay

SEQ ID NO: 123296 - DNA, 13 bp, Artificial Sequence
  Oligonucleotide for detection of SNP TSC0030829
rttattttttttt

SEQ ID NO: 123297 - DNA, 13 bp, Artificial Sequence
  Oligonucleotide for detection of SNP TSC0030829
aaaaaataataay

SEQ ID NO: 123298 - DNA, 13 bp, Artificial Sequence
  Oligonucleotide for detection of SNP TSC0030829
rttattatttttt

SEQ ID NO: 123299 - DNA, 13 bp, Artificial Sequence
  Oligonucleotide for detection of SNP TSC0030830
ttattagtgaatt

SEQ ID NO: 123300 - DNA, 13 bp, Artificial Sequence
  Oligonucleotide for detection of SNP TSC0030830
aattcactaataa

SEQ ID NO: 123301 - DNA, 13 bp, Artificial Sequence
  Oligonucleotide for detection of SNP TSC0030830
ttattaatgaatt

SEQ ID NO: 123302 - DNA, 13 bp, Artificial Sequence
  Oligonucleotide for detection of SNP TSC0030830
aattcattaataa

SEQ ID NO: 123303 - DNA, 13 bp, Artificial Sequence
  Oligonucleotide for detection of SNP TSC0030833
tttgtaataaagy

SEQ ID NO: 123304 - DNA, 13 bp, Artificial Sequence
  Oligonucleotide for detection of SNP TSC0030833
rctttattacaaa

SEQ ID NO: 123305 - DNA, 13 bp, Artificial Sequence
  Oligonucleotide for detection of SNP TSC0030833
tttgtagtaaagy

SEQ ID NO: 123306 - DNA, 13 bp, Artificial Sequence
  Oligonucleotide for detection of SNP TSC0030833
rctttactacaaa

SEQ ID NO: 123307 - DNA, 13 bp, Artificial Sequence
  Oligonucleotide for detection of SNP TSC0030834
tgaattgatatga

SEQ ID NO: 123308 - DNA, 13 bp, Artificial Sequence
  Oligonucleotide for detection of SNP TSC0030834
tcatatcaattca

SEQ ID NO: 123309 - DNA, 13 bp, Artificial Sequence
  Oligonucleotide for detection of SNP TSC0030834
tgaatttatatga

SEQ ID NO: 123310 - DNA, 13 bp, Artificial Sequence
  Oligonucleotide for detection of SNP TSC0030834
tcatataaattca

SEQ ID NO: 123311 - DNA, 13 bp, Artificial Sequence
  Oligonucleotide for detection of SNP TSC0030834
ttatataaattta

SEQ ID NO: 123312 - DNA, 13 bp, Artificial Sequence
  Oligonucleotide for detection of SNP TSC0030834
taaatttatataa

SEQ ID NO: 123313 - DNA, 13 bp, Artificial Sequence
  Oligonucleotide for detection of SNP TSC0030835
gttattaggatgy

SEQ ID NO: 123314 - DNA, 13 bp, Artificial Sequence
  Oligonucleotide for detection of SNP TSC0030835
rcatcctaataac

SEQ ID NO: 123315 - DNA, 13 bp, Artificial Sequence
  Oligonucleotide for detection of SNP TSC0030835
gttatttggatgy

SEQ ID NO: 123316 - DNA, 13 bp, Artificial Sequence
  Oligonucleotide for detection of SNP TSC0030835
rcatccaaataac

SEQ ID NO: 123317 - DNA, 13 bp, Artificial Sequence
  Oligonucleotide for detection of SNP TSC0030835
gttattcggatgy

SEQ ID NO: 123318 - DNA, 13 bp, Artificial Sequence
  Oligonucleotide for detection of SNP TSC0030835
rcatccgaataac

SEQ ID NO: 123319 - DNA, 13 bp, Artificial Sequence
  Oligonucleotide for detection of SNP TSC0030835
gtattttaatggy

SEQ ID NO: 123320 - DNA, 13 bp, Artificial Sequence
  Oligonucleotide for detection of SNP TSC0030835
rccattaaaatac

SEQ ID NO: 123321 - DNA, 13 bp, Artificial Sequence
  Oligonucleotide for detection of SNP TSC0030835
gtatttgaatggy

SEQ ID NO: 123322 - DNA, 13 bp, Artificial Sequence
  Oligonucleotide for detection of SNP TSC0030835
rccattcaaatac

SEQ ID NO: 123323 - DNA, 13 bp, Artificial Sequence
  Oligonucleotide for detection of SNP TSC0030835
gtattcgaatggy

SEQ ID NO: 123324 - DNA, 13 bp, Artificial Sequence
  Oligonucleotide for detection of SNP TSC0030835
rccattcgaatac

SEQ ID NO: 123325 - DNA, 13 bp, Artificial Sequence
  Oligonucleotide for detection of SNP TSC0030836
gtggtggtttgga

SEQ ID NO: 123326 - DNA, 13 bp, Artificial Sequence
  Oligonucleotide for detection of SNP TSC0030836
tccaaaccaccac

SEQ ID NO: 123327 - DNA, 13 bp, Artificial Sequence
  Oligonucleotide for detection of SNP TSC0030836
gtggtgatttgga

SEQ ID NO: 123328 - DNA, 13 bp, Artificial Sequence
  Oligonucleotide for detection of SNP TSC0030836
tccaaatcaccac

SEQ ID NO: 123329 - DNA, 13 bp, Artificial Sequence
  Oligonucleotide for detection of SNP TSC0030837
gaaaatgagtaat

SEQ ID NO: 123330 - DNA, 13 bp, Artificial Sequence
  Oligonucleotide for detection of SNP TSC0030837
attactcattttc

SEQ ID NO: 123331 - DNA, 13 bp, Artificial Sequence
  Oligonucleotide for detection of SNP TSC0030837
gaaaataagtaat

SEQ ID NO: 123332 - DNA, 13 bp, Artificial Sequence
  Oligonucleotide for detection of SNP TSC0030837
attacttattttc

SEQ ID NO: 123333 - DNA, 13 bp, Artificial Sequence
  Oligonucleotide for detection of SNP TSC0030838
gtttttataaaaa

SEQ ID NO: 123334 - DNA, 13 bp, Artificial Sequence
  Oligonucleotide for detection of SNP TSC0030838
tttttataaaaac

SEQ ID NO: 123335 - DNA, 13 bp, Artificial Sequence
  Oligonucleotide for detection of SNP TSC0030838
gtttttttaaaaa

SEQ ID NO: 123336 - DNA, 13 bp, Artificial Sequence
  Oligonucleotide for detection of SNP TSC0030838
tttttaaaaaaac

SEQ ID NO: 123337 - DNA, 13 bp, Artificial Sequence
  Oligonucleotide for detection of SNP TSC0030838
tttttgtagagay

SEQ ID NO: 123338 - DNA, 13 bp, Artificial Sequence
  Oligonucleotide for detection of SNP TSC0030838
rtctctacaaaaa

SEQ ID NO: 123339 - DNA, 13 bp, Artificial Sequence
  Oligonucleotide for detection of SNP TSC0030838
tttttgaagagay

SEQ ID NO: 123340 - DNA, 13 bp, Artificial Sequence
  Oligonucleotide for detection of SNP TSC0030838
rtctcttcaaaaa

SEQ ID NO: 123341 - DNA, 13 bp, Artificial Sequence
  Oligonucleotide for detection of SNP TSC0030839
tgaggtaggaagg

SEQ ID NO: 123342 - DNA, 13 bp, Artificial Sequence
  Oligonucleotide for detection of SNP TSC0030839
ccttcctacctca

SEQ ID NO: 123343 - DNA, 13 bp, Artificial Sequence
  Oligonucleotide for detection of SNP TSC0030839
tgaggtgggaagg

SEQ ID NO: 123344 - DNA, 13 bp, Artificial Sequence
  Oligonucleotide for detection of SNP TSC0030839
ccttcccacctca

SEQ ID NO: 123345 - DNA, 13 bp, Artificial Sequence
  Oligonucleotide for detection of SNP TSC0030839
tgaggcgggaagg

SEQ ID NO: 123346 - DNA, 13 bp, Artificial Sequence
  Oligonucleotide for detection of SNP TSC0030839
ccttcccgcctca

SEQ ID NO: 123347 - DNA, 13 bp, Artificial Sequence
  Oligonucleotide for detection of SNP TSC0030840
agttggagtgagy

SEQ ID NO: 123348 - DNA, 13 bp, Artificial Sequence
  Oligonucleotide for detection of SNP TSC0030840
rctcactccaact

SEQ ID NO: 123349 - DNA, 13 bp, Artificial Sequence
  Oligonucleotide for detection of SNP TSC0030840
agttggggtgagy

SEQ ID NO: 123350 - DNA, 13 bp, Artificial Sequence
  Oligonucleotide for detection of SNP TSC0030840
rctcaccccaact

SEQ ID NO: 123351 - DNA, 13 bp, Artificial Sequence
  Oligonucleotide for detection of SNP TSC0030841
ggaaatagtattt

SEQ ID NO: 123352 - DNA, 13 bp, Artificial Sequence
  Oligonucleotide for detection of SNP TSC0030841
aaatactatttcc

SEQ ID NO: 123353 - DNA, 13 bp, Artificial Sequence
  Oligonucleotide for detection of SNP TSC0030841
ggaaattgtattt

SEQ ID NO: 123354 - DNA, 13 bp, Artificial Sequence
  Oligonucleotide for detection of SNP TSC0030841
aaatacaatttcc

SEQ ID NO: 123355 - DNA, 13 bp, Artificial Sequence
  Oligonucleotide for detection of SNP TSC0030841
ggaaatcgtattt

SEQ ID NO: 123356 - DNA, 13 bp, Artificial Sequence
  Oligonucleotide for detection of SNP TSC0030841
aaatacgatttcc

SEQ ID NO: 123357 - DNA, 13 bp, Artificial Sequence
  Oligonucleotide for detection of SNP TSC0030841
aaatattgtttty

SEQ ID NO: 123358 - DNA, 13 bp, Artificial Sequence
  Oligonucleotide for detection of SNP TSC0030841
raaaacaatattt

SEQ ID NO: 123359 - DNA, 13 bp, Artificial Sequence
  Oligonucleotide for detection of SNP TSC0030841
aaatatggtttty

SEQ ID NO: 123360 - DNA, 13 bp, Artificial Sequence
  Oligonucleotide for detection of SNP TSC0030841
raaaaccatattt

SEQ ID NO: 123361 - DNA, 13 bp, Artificial Sequence
  Oligonucleotide for detection of SNP TSC0030841
aaatacggtttty

SEQ ID NO: 123362 - DNA, 13 bp, Artificial Sequence
  Oligonucleotide for detection of SNP TSC0030841
raaaaccgtattt

SEQ ID NO: 123363 - DNA, 13 bp, Artificial Sequence
  Oligonucleotide for detection of SNP TSC0030847
aattttatatatt

SEQ ID NO: 123364 - DNA, 13 bp, Artificial Sequence
  Oligonucleotide for detection of SNP TSC0030847
aatatataaaatt

SEQ ID NO: 123365 - DNA, 13 bp, Artificial Sequence
  Oligonucleotide for detection of SNP TSC0030847
aattttgtatatt

SEQ ID NO: 123366 - DNA, 13 bp, Artificial Sequence
  Oligonucleotide for detection of SNP TSC0030847
aatatacaaaatt

SEQ ID NO: 123367 - DNA, 13 bp, Artificial Sequence
  Oligonucleotide for detection of SNP TSC0030847
aatttcgtatatt

SEQ ID NO: 123368 - DNA, 13 bp, Artificial Sequence
  Oligonucleotide for detection of SNP TSC0030847
aatatacgaaatt

SEQ ID NO: 123369 - DNA, 13 bp, Artificial Sequence
  Oligonucleotide for detection of SNP TSC0030847
agtgtatgaaatt

SEQ ID NO: 123370 - DNA, 13 bp, Artificial Sequence
  Oligonucleotide for detection of SNP TSC0030847
aatttcatacact

SEQ ID NO: 123371 - DNA, 13 bp, Artificial Sequence
  Oligonucleotide for detection of SNP TSC0030847
agtgtacgaaatt

SEQ ID NO: 123372 - DNA, 13 bp, Artificial Sequence
  Oligonucleotide for detection of SNP TSC0030847
aatttcgtacact

SEQ ID NO: 123373 - DNA, 13 bp, Artificial Sequence
  Oligonucleotide for detection of SNP TSC0030848
ttgagtgtatgaa

SEQ ID NO: 123374 - DNA, 13 bp, Artificial Sequence
  Oligonucleotide for detection of SNP TSC0030848
ttcatacactcaa

SEQ ID NO: 123375 - DNA, 13 bp, Artificial Sequence
  Oligonucleotide for detection of SNP TSC0030848
ttgagtatatgaa

SEQ ID NO: 123376 - DNA, 13 bp, Artificial Sequence
  Oligonucleotide for detection of SNP TSC0030848
ttcatatactcaa

SEQ ID NO: 123377 - DNA, 13 bp, Artificial Sequence
  Oligonucleotide for detection of SNP TSC0030852
atagtgggaattt

SEQ ID NO: 123378 - DNA, 13 bp, Artificial Sequence
  Oligonucleotide for detection of SNP TSC0030852
aaattcccactat

SEQ ID NO: 123379 - DNA, 13 bp, Artificial Sequence
  Oligonucleotide for detection of SNP TSC0030852
atagtgagaattt

SEQ ID NO: 123380 - DNA, 13 bp, Artificial Sequence
  Oligonucleotide for detection of SNP TSC0030852
aaattctcactat

SEQ ID NO: 123381 - DNA, 13 bp, Artificial Sequence
  Oligonucleotide for detection of SNP TSC0030854
tttagagttaggy

SEQ ID NO: 123382 - DNA, 13 bp, Artificial Sequence
  Oligonucleotide for detection of SNP TSC0030854
rcctaactctaaa

SEQ ID NO: 123383 - DNA, 13 bp, Artificial Sequence
  Oligonucleotide for detection of SNP TSC0030854
tttagaattaggy

SEQ ID NO: 123384 - DNA, 13 bp, Artificial Sequence
  Oligonucleotide for detection of SNP TSC0030854
rcctaattctaaa

SEQ ID NO: 123385 - DNA, 13 bp, Artificial Sequence
  Oligonucleotide for detection of SNP TSC0030855
tgttttgtttgtt

SEQ ID NO: 123386 - DNA, 13 bp, Artificial Sequence
  Oligonucleotide for detection of SNP TSC0030855
aacaaacaaaaca

SEQ ID NO: 123387 - DNA, 13 bp, Artificial Sequence
  Oligonucleotide for detection of SNP TSC0030855
agtagagaaagta

SEQ ID NO: 123388 - DNA, 13 bp, Artificial Sequence
  Oligonucleotide for detection of SNP TSC0030855
tactttctctact

SEQ ID NO: 123389 - DNA, 13 bp, Artificial Sequence
  Oligonucleotide for detection of SNP TSC0030855
agtagataaagta

SEQ ID NO: 123390 - DNA, 13 bp, Artificial Sequence
  Oligonucleotide for detection of SNP TSC0030855
tactttatctact

SEQ ID NO: 123391 - DNA, 13 bp, Artificial Sequence
  Oligonucleotide for detection of SNP TSC0030857
agataaatatgag

SEQ ID NO: 123392 - DNA, 13 bp, Artificial Sequence
  Oligonucleotide for detection of SNP TSC0030857
ctcatatttatct

SEQ ID NO: 123393 - DNA, 13 bp, Artificial Sequence
  Oligonucleotide for detection of SNP TSC0030857
agataagtatgag

SEQ ID NO: 123394 - DNA, 13 bp, Artificial Sequence
  Oligonucleotide for detection of SNP TSC0030857
ctcatacttatct

SEQ ID NO: 123395 - DNA, 13 bp, Artificial Sequence
  Oligonucleotide for detection of SNP TSC0030859
aggttggggatat

SEQ ID NO: 123396 - DNA, 13 bp, Artificial Sequence
  Oligonucleotide for detection of SNP TSC0030859
atatccccaacct

SEQ ID NO: 123397 - DNA, 13 bp, Artificial Sequence
  Oligonucleotide for detection of SNP TSC0030859
aggttgaggatat

SEQ ID NO: 123398 - DNA, 13 bp, Artificial Sequence
  Oligonucleotide for detection of SNP TSC0030859
atatcctcaacct

SEQ ID NO: 123399 - DNA, 13 bp, Artificial Sequence
  Oligonucleotide for detection of SNP TSC0030860
aagagatgagtta

SEQ ID NO: 123400 - DNA, 13 bp, Artificial Sequence
  Oligonucleotide for detection of SNP TSC0030860
taactcatctctt

SEQ ID NO: 123401 - DNA, 13 bp, Artificial Sequence
  Oligonucleotide for detection of SNP TSC0030860
aagagacgagtta

SEQ ID NO: 123402 - DNA, 13 bp, Artificial Sequence
  Oligonucleotide for detection of SNP TSC0030860
taactcgtctctt

SEQ ID NO: 123403 - DNA, 13 bp, Artificial Sequence
  Oligonucleotide for detection of SNP TSC0030864
gttatagtttttg

SEQ ID NO: 123404 - DNA, 13 bp, Artificial Sequence
  Oligonucleotide for detection of SNP TSC0030864
caaaaactataac

SEQ ID NO: 123405 - DNA, 13 bp, Artificial Sequence
  Oligonucleotide for detection of SNP TSC0030864
gttataatttttg

SEQ ID NO: 123406 - DNA, 13 bp, Artificial Sequence
  Oligonucleotide for detection of SNP TSC0030864
caaaaattataac

SEQ ID NO: 123407 - DNA, 13 bp, Artificial Sequence
  Oligonucleotide for detection of SNP TSC0030865
aatttagtttgta

SEQ ID NO: 123408 - DNA, 13 bp, Artificial Sequence
  Oligonucleotide for detection of SNP TSC0030865
tacaaactaaatt

SEQ ID NO: 123409 - DNA, 13 bp, Artificial Sequence
  Oligonucleotide for detection of SNP TSC0030865
aatttaatttgta

SEQ ID NO: 123410 - DNA, 13 bp, Artificial Sequence
  Oligonucleotide for detection of SNP TSC0030865
tacaaattaaatt

SEQ ID NO: 123411 - DNA, 13 bp, Artificial Sequence
  Oligonucleotide for detection of SNP TSC0030870
agttaaatggggg

SEQ ID NO: 123412 - DNA, 13 bp, Artificial Sequence
  Oligonucleotide for detection of SNP TSC0030870
cccccatttaact

SEQ ID NO: 123413 - DNA, 13 bp, Artificial Sequence
  Oligonucleotide for detection of SNP TSC0030870
agttaagtggggg

SEQ ID NO: 123414 - DNA, 13 bp, Artificial Sequence
  Oligonucleotide for detection of SNP TSC0030870
cccccacttaact

SEQ ID NO: 123415 - DNA, 13 bp, Artificial Sequence
  Oligonucleotide for detection of SNP TSC0030871
tattatagtgaty

SEQ ID NO: 123416 - DNA, 13 bp, Artificial Sequence
  Oligonucleotide for detection of SNP TSC0030871
ratcactataata

SEQ ID NO: 123417 - DNA, 13 bp, Artificial Sequence
  Oligonucleotide for detection of SNP TSC0030871
tattatggtgaty

SEQ ID NO: 123418 - DNA, 13 bp, Artificial Sequence
  Oligonucleotide for detection of SNP TSC0030871
ratcaccataata

SEQ ID NO: 123419 - DNA, 13 bp, Artificial Sequence
  Oligonucleotide for detection of SNP TSC0030872
ttgttgagtatty

SEQ ID NO: 123420 - DNA, 13 bp, Artificial Sequence
  Oligonucleotide for detection of SNP TSC0030872
raatactcaacaa

SEQ ID NO: 123421 - DNA, 13 bp, Artificial Sequence
  Oligonucleotide for detection of SNP TSC0030872
ttgttgggtatty

SEQ ID NO: 123422 - DNA, 13 bp, Artificial Sequence
  Oligonucleotide for detection of SNP TSC0030872
raatacccaacaa

SEQ ID NO: 123423 - DNA, 13 bp, Artificial Sequence
  Oligonucleotide for detection of SNP TSC0030872
tcgttgagtatty

SEQ ID NO: 123424 - DNA, 13 bp, Artificial Sequence
  Oligonucleotide for detection of SNP TSC0030872
raatactcaacga

SEQ ID NO: 123425 - DNA, 13 bp, Artificial Sequence
  Oligonucleotide for detection of SNP TSC0030872
tcgttgggtatty

SEQ ID NO: 123426 - DNA, 13 bp, Artificial Sequence
  Oligonucleotide for detection of SNP TSC0030872
raatacccaacga

SEQ ID NO: 123427 - DNA, 13 bp, Artificial Sequence
  Oligonucleotide for detection of SNP TSC0030872
ttgtcgagtatty

SEQ ID NO: 123428 - DNA, 13 bp, Artificial Sequence
  Oligonucleotide for detection of SNP TSC0030872
raatactcgacaa

SEQ ID NO: 123429 - DNA, 13 bp, Artificial Sequence
  Oligonucleotide for detection of SNP TSC0030872
ttgtcgggtatty

SEQ ID NO: 123430 - DNA, 13 bp, Artificial Sequence
  Oligonucleotide for detection of SNP TSC0030872
raatacccgacaa

SEQ ID NO: 123431 - DNA, 13 bp, Artificial Sequence
  Oligonucleotide for detection of SNP TSC0030872
tcgtcgagtatty

SEQ ID NO: 123432 - DNA, 13 bp, Artificial Sequence
  Oligonucleotide for detection of SNP TSC0030872
raatactcgacga

SEQ ID NO: 123433 - DNA, 13 bp, Artificial Sequence
  Oligonucleotide for detection of SNP TSC0030872
tcgtcgggtatty

SEQ ID NO: 123434 - DNA, 13 bp, Artificial Sequence
  Oligonucleotide for detection of SNP TSC0030872
raatacccgacga

SEQ ID NO: 123435 - DNA, 13 bp, Artificial Sequence
  Oligonucleotide for detection of SNP TSC0030873
atttatattttay

SEQ ID NO: 123436 - DNA, 13 bp, Artificial Sequence
  Oligonucleotide for detection of SNP TSC0030873
rtaaaatataaat

SEQ ID NO: 123437 - DNA, 13 bp, Artificial Sequence
  Oligonucleotide for detection of SNP TSC0030873
gtggagtgtgagt

SEQ ID NO: 123438 - DNA, 13 bp, Artificial Sequence
  Oligonucleotide for detection of SNP TSC0030873
actcacactccac

SEQ ID NO: 123439 - DNA, 13 bp, Artificial Sequence
  Oligonucleotide for detection of SNP TSC0030873
gtggagggtgagt

SEQ ID NO: 123440 - DNA, 13 bp, Artificial Sequence
  Oligonucleotide for detection of SNP TSC0030873
actcaccctccac

SEQ ID NO: 123441 - DNA, 13 bp, Artificial Sequence
  Oligonucleotide for detection of SNP TSC0030874
ttttgtagggtty

SEQ ID NO: 123442 - DNA, 13 bp, Artificial Sequence
  Oligonucleotide for detection of SNP TSC0030874
raaccctacaaaa

SEQ ID NO: 123443 - DNA, 13 bp, Artificial Sequence
  Oligonucleotide for detection of SNP TSC0030874
ttttgtggggtty

SEQ ID NO: 123444 - DNA, 13 bp, Artificial Sequence
  Oligonucleotide for detection of SNP TSC0030874
raaccccacaaaa

SEQ ID NO: 123445 - DNA, 13 bp, Artificial Sequence
  Oligonucleotide for detection of SNP TSC0030875
tatgttgaaaatt

SEQ ID NO: 123446 - DNA, 13 bp, Artificial Sequence
  Oligonucleotide for detection of SNP TSC0030875
aattttcaacata

SEQ ID NO: 123447 - DNA, 13 bp, Artificial Sequence
  Oligonucleotide for detection of SNP TSC0030875
tatgttaaaaatt

SEQ ID NO: 123448 - DNA, 13 bp, Artificial Sequence
  Oligonucleotide for detection of SNP TSC0030875
aatttttaacata

SEQ ID NO: 123449 - DNA, 13 bp, Artificial Sequence
  Oligonucleotide for detection of SNP TSC0030876
gtttttagatatg

SEQ ID NO: 123450 - DNA, 13 bp, Artificial Sequence
  Oligonucleotide for detection of SNP TSC0030876
catatctaaaaac

SEQ ID NO: 123451 - DNA, 13 bp, Artificial Sequence
  Oligonucleotide for detection of SNP TSC0030876
gtttttggatatg

SEQ ID NO: 123452 - DNA, 13 bp, Artificial Sequence
  Oligonucleotide for detection of SNP TSC0030876
catatccaaaaac

SEQ ID NO: 123453 - DNA, 13 bp, Artificial Sequence
  Oligonucleotide for detection of SNP TSC0030876
gttttcggatatg

SEQ ID NO: 123454 - DNA, 13 bp, Artificial Sequence
  Oligonucleotide for detection of SNP TSC0030876
catatccgaaaac

SEQ ID NO: 123455 - DNA, 13 bp, Artificial Sequence
  Oligonucleotide for detection of SNP TSC0030876
tatatttgaaagy

SEQ ID NO: 123456 - DNA, 13 bp, Artificial Sequence
  Oligonucleotide for detection of SNP TSC0030876
rctttcaaatata

SEQ ID NO: 123457 - DNA, 13 bp, Artificial Sequence
  Oligonucleotide for detection of SNP TSC0030876
tatattcgaaagy

SEQ ID NO: 123458 - DNA, 13 bp, Artificial Sequence
  Oligonucleotide for detection of SNP TSC0030876
rctttcgaatata

SEQ ID NO: 123459 - DNA, 13 bp, Artificial Sequence
  Oligonucleotide for detection of SNP TSC0030877
ttggttagtaaaa

SEQ ID NO: 123460 - DNA, 13 bp, Artificial Sequence
  Oligonucleotide for detection of SNP TSC0030877
ttttactaaccaa

SEQ ID NO: 123461 - DNA, 13 bp, Artificial Sequence
  Oligonucleotide for detection of SNP TSC0030877
ttggtttgtaaaa

SEQ ID NO: 123462 - DNA, 13 bp, Artificial Sequence
  Oligonucleotide for detection of SNP TSC0030877
ttttacaaaccaa

SEQ ID NO: 123463 - DNA, 13 bp, Artificial Sequence
  Oligonucleotide for detection of SNP TSC0030877
ttggttcgtaaaa

SEQ ID NO: 123464 - DNA, 13 bp, Artificial Sequence
  Oligonucleotide for detection of SNP TSC0030877
ttttacgaaccaa

SEQ ID NO: 123465 - DNA, 13 bp, Artificial Sequence
  Oligonucleotide for detection of SNP TSC0030877
ttttgttagttaa

SEQ ID NO: 123466 - DNA, 13 bp, Artificial Sequence
  Oligonucleotide for detection of SNP TSC0030877
ttaactaacaaaa

SEQ ID NO: 123467 - DNA, 13 bp, Artificial Sequence
  Oligonucleotide for detection of SNP TSC0030877
ttttgtgagttaa

SEQ ID NO: 123468 - DNA, 13 bp, Artificial Sequence
  Oligonucleotide for detection of SNP TSC0030877
ttaactcacaaaa

SEQ ID NO: 123469 - DNA, 13 bp, Artificial Sequence
  Oligonucleotide for detection of SNP TSC0030877
ttttgcgagttaa

SEQ ID NO: 123470 - DNA, 13 bp, Artificial Sequence
  Oligonucleotide for detection of SNP TSC0030877
ttaactcgcaaaa

SEQ ID NO: 123471 - DNA, 13 bp, Artificial Sequence
  Oligonucleotide for detection of SNP TSC0030878
ttttatatatatt

SEQ ID NO: 123472 - DNA, 13 bp, Artificial Sequence
  Oligonucleotide for detection of SNP TSC0030878
aatatatataaaa

SEQ ID NO: 123473 - DNA, 13 bp, Artificial Sequence
  Oligonucleotide for detection of SNP TSC0030878
ttttatgtatatt

SEQ ID NO: 123474 - DNA, 13 bp, Artificial Sequence
  Oligonucleotide for detection of SNP TSC0030878
aatatacataaaa

SEQ ID NO: 123475 - DNA, 13 bp, Artificial Sequence
  Oligonucleotide for detection of SNP TSC0030878
ttttacgtatatt

SEQ ID NO: 123476 - DNA, 13 bp, Artificial Sequence
  Oligonucleotide for detection of SNP TSC0030878
aatatacgtaaaa

SEQ ID NO: 123477 - DNA, 13 bp, Artificial Sequence
  Oligonucleotide for detection of SNP TSC0030878
agtatgtgtaaaa

SEQ ID NO: 123478 - DNA, 13 bp, Artificial Sequence
  Oligonucleotide for detection of SNP TSC0030878
ttttacacatact

SEQ ID NO: 123479 - DNA, 13 bp, Artificial Sequence
  Oligonucleotide for detection of SNP TSC0030878
agtatgcgtaaaa

SEQ ID NO: 123480 - DNA, 13 bp, Artificial Sequence
  Oligonucleotide for detection of SNP TSC0030878
ttttacgcatact

SEQ ID NO: 123481 - DNA, 13 bp, Artificial Sequence
  Oligonucleotide for detection of SNP TSC0030879
aagtaaggtttta

SEQ ID NO: 123482 - DNA, 13 bp, Artificial Sequence
  Oligonucleotide for detection of SNP TSC0030879
taaaaccttactt

SEQ ID NO: 123483 - DNA, 13 bp, Artificial Sequence
  Oligonucleotide for detection of SNP TSC0030879
aagtaaagtttta

SEQ ID NO: 123484 - DNA, 13 bp, Artificial Sequence
  Oligonucleotide for detection of SNP TSC0030879
taaaactttactt

SEQ ID NO: 123485 - DNA, 13 bp, Artificial Sequence
  Oligonucleotide for detection of SNP TSC0030884
tgttggttatttt

SEQ ID NO: 123486 - DNA, 13 bp, Artificial Sequence
  Oligonucleotide for detection of SNP TSC0030884
aaaataaccaaca

SEQ ID NO: 123487 - DNA, 13 bp, Artificial Sequence
  Oligonucleotide for detection of SNP TSC0030884
tgttgggtatttt

SEQ ID NO: 123488 - DNA, 13 bp, Artificial Sequence
  Oligonucleotide for detection of SNP TSC0030884
aaaatacccaaca

SEQ ID NO: 123489 - DNA, 13 bp, Artificial Sequence
  Oligonucleotide for detection of SNP TSC0030884
cgttggttatttt

SEQ ID NO: 123490 - DNA, 13 bp, Artificial Sequence
  Oligonucleotide for detection of SNP TSC0030884
aaaataaccaacg

SEQ ID NO: 123491 - DNA, 13 bp, Artificial Sequence
  Oligonucleotide for detection of SNP TSC0030884
cgttgggtatttt

SEQ ID NO: 123492 - DNA, 13 bp, Artificial Sequence
  Oligonucleotide for detection of SNP TSC0030884
aaaatacccaacg

SEQ ID NO: 123493 - DNA, 13 bp, Artificial Sequence
  Oligonucleotide for detection of SNP TSC0030884
tgtcggttatttt

SEQ ID NO: 123494 - DNA, 13 bp, Artificial Sequence
  Oligonucleotide for detection of SNP TSC0030884
aaaataaccgaca

SEQ ID NO: 123495 - DNA, 13 bp, Artificial Sequence
  Oligonucleotide for detection of SNP TSC0030884
tgtcgggtatttt

SEQ ID NO: 123496 - DNA, 13 bp, Artificial Sequence
  Oligonucleotide for detection of SNP TSC0030884
aaaatacccgaca

SEQ ID NO: 123497 - DNA, 13 bp, Artificial Sequence
  Oligonucleotide for detection of SNP TSC0030884
cgtcggttatttt

SEQ ID NO: 123498 - DNA, 13 bp, Artificial Sequence
  Oligonucleotide for detection of SNP TSC0030884
aaaataaccgacg

SEQ ID NO: 123499 - DNA, 13 bp, Artificial Sequence
  Oligonucleotide for detection of SNP TSC0030884
cgtcgggtatttt

SEQ ID NO: 123500 - DNA, 13 bp, Artificial Sequence
  Oligonucleotide for detection of SNP TSC0030884
aaaatacccgacg

SEQ ID NO: 123501 - DNA, 13 bp, Artificial Sequence
  Oligonucleotide for detection of SNP TSC0030884
aaggtagttggtg

SEQ ID NO: 123502 - DNA, 13 bp, Artificial Sequence
  Oligonucleotide for detection of SNP TSC0030884
caccaactacctt

SEQ ID NO: 123503 - DNA, 13 bp, Artificial Sequence
  Oligonucleotide for detection of SNP TSC0030884
aaggtatttggtg

SEQ ID NO: 123504 - DNA, 13 bp, Artificial Sequence
  Oligonucleotide for detection of SNP TSC0030884
caccaaatacctt

SEQ ID NO: 123505 - DNA, 13 bp, Artificial Sequence
  Oligonucleotide for detection of SNP TSC0030884
aaggtagtcggtg

SEQ ID NO: 123506 - DNA, 13 bp, Artificial Sequence
  Oligonucleotide for detection of SNP TSC0030884
caccgactacctt

SEQ ID NO: 123507 - DNA, 13 bp, Artificial Sequence
  Oligonucleotide for detection of SNP TSC0030884
aaggtattcggtg

SEQ ID NO: 123508 - DNA, 13 bp, Artificial Sequence
  Oligonucleotide for detection of SNP TSC0030884
caccgaatacctt

SEQ ID NO: 123509 - DNA, 13 bp, Artificial Sequence
  Oligonucleotide for detection of SNP TSC0030884
aaggtagttggcg

SEQ ID NO: 123510 - DNA, 13 bp, Artificial Sequence
  Oligonucleotide for detection of SNP TSC0030884
cgccaactacctt

SEQ ID NO: 123511 - DNA, 13 bp, Artificial Sequence
  Oligonucleotide for detection of SNP TSC0030884
aaggtatttggcg

SEQ ID NO: 123512 - DNA, 13 bp, Artificial Sequence
  Oligonucleotide for detection of SNP TSC0030884
cgccaaatacctt

SEQ ID NO: 123513 - DNA, 13 bp, Artificial Sequence
  Oligonucleotide for detection of SNP TSC0030884
aaggtagtcggcg

SEQ ID NO: 123514 - DNA, 13 bp, Artificial Sequence
  Oligonucleotide for detection of SNP TSC0030884
cgccgactacctt

SEQ ID NO: 123515 - DNA, 13 bp, Artificial Sequence
  Oligonucleotide for detection of SNP TSC0030884
aaggtattcggcg

SEQ ID NO: 123516 - DNA, 13 bp, Artificial Sequence
  Oligonucleotide for detection of SNP TSC0030884
cgccgaatacctt

SEQ ID NO: 123517 - DNA, 13 bp, Artificial Sequence
  Oligonucleotide for detection of SNP TSC0030889
aattttgagggta

SEQ ID NO: 123518 - DNA, 13 bp, Artificial Sequence
  Oligonucleotide for detection of SNP TSC0030889
taccctcaaaatt

SEQ ID NO: 123519 - DNA, 13 bp, Artificial Sequence
  Oligonucleotide for detection of SNP TSC0030889
aatttttagggta

SEQ ID NO: 123520 - DNA, 13 bp, Artificial Sequence
  Oligonucleotide for detection of SNP TSC0030889
taccctaaaaatt

SEQ ID NO: 123521 - DNA, 13 bp, Artificial Sequence
  Oligonucleotide for detection of SNP TSC0030889
aatttcgagggta

SEQ ID NO: 123522 - DNA, 13 bp, Artificial Sequence
  Oligonucleotide for detection of SNP TSC0030889
taccctcgaaatt

SEQ ID NO: 123523 - DNA, 13 bp, Artificial Sequence
  Oligonucleotide for detection of SNP TSC0030889
tatttttgaagtt

SEQ ID NO: 123524 - DNA, 13 bp, Artificial Sequence
  Oligonucleotide for detection of SNP TSC0030889
aacttcaaaaata

SEQ ID NO: 123525 - DNA, 13 bp, Artificial Sequence
  Oligonucleotide for detection of SNP TSC0030889
tattttagaagtt

SEQ ID NO: 123526 - DNA, 13 bp, Artificial Sequence
  Oligonucleotide for detection of SNP TSC0030889
aacttctaaaata

SEQ ID NO: 123527 - DNA, 13 bp, Artificial Sequence
  Oligonucleotide for detection of SNP TSC0030889
tattttcgaagtt

SEQ ID NO: 123528 - DNA, 13 bp, Artificial Sequence
  Oligonucleotide for detection of SNP TSC0030889
aacttcgaaaata

SEQ ID NO: 123529 - DNA, 13 bp, Artificial Sequence
  Oligonucleotide for detection of SNP TSC0030890
atatgtaatagtt

SEQ ID NO: 123530 - DNA, 13 bp, Artificial Sequence
  Oligonucleotide for detection of SNP TSC0030890
aactattacatat

SEQ ID NO: 123531 - DNA, 13 bp, Artificial Sequence
  Oligonucleotide for detection of SNP TSC0030890
atatgtgatagtt

SEQ ID NO: 123532 - DNA, 13 bp, Artificial Sequence
  Oligonucleotide for detection of SNP TSC0030890
aactatcacatat

SEQ ID NO: 123533 - DNA, 13 bp, Artificial Sequence
  Oligonucleotide for detection of SNP TSC0030890
atatgcgatagtt

SEQ ID NO: 123534 - DNA, 13 bp, Artificial Sequence
  Oligonucleotide for detection of SNP TSC0030890
aactatcgcatat

SEQ ID NO: 123535 - DNA, 13 bp, Artificial Sequence
  Oligonucleotide for detection of SNP TSC0030890
aattgttgtatgt

SEQ ID NO: 123536 - DNA, 13 bp, Artificial Sequence
  Oligonucleotide for detection of SNP TSC0030890
acatacaacaatt

SEQ ID NO: 123537 - DNA, 13 bp, Artificial Sequence
  Oligonucleotide for detection of SNP TSC0030890
aattgtcgtatgt

SEQ ID NO: 123538 - DNA, 13 bp, Artificial Sequence
  Oligonucleotide for detection of SNP TSC0030890
acatacgacaatt

SEQ ID NO: 123539 - DNA, 13 bp, Artificial Sequence
  Oligonucleotide for detection of SNP TSC0030891
ggaaatgatttaa

SEQ ID NO: 123540 - DNA, 13 bp, Artificial Sequence
  Oligonucleotide for detection of SNP TSC0030891
ttaaatcatttcc

SEQ ID NO: 123541 - DNA, 13 bp, Artificial Sequence
  Oligonucleotide for detection of SNP TSC0030891
ggaaattatttaa

SEQ ID NO: 123542 - DNA, 13 bp, Artificial Sequence
  Oligonucleotide for detection of SNP TSC0030891
ttaaataatttcc

SEQ ID NO: 123543 - DNA, 13 bp, Artificial Sequence
  Oligonucleotide for detection of SNP TSC0030891
ttaaataatttty

SEQ ID NO: 123544 - DNA, 13 bp, Artificial Sequence
  Oligonucleotide for detection of SNP TSC0030891
raaaattatttaa

SEQ ID NO: 123545 - DNA, 13 bp, Artificial Sequence
  Oligonucleotide for detection of SNP TSC0030894
ggtggtattgaty

SEQ ID NO: 123546 - DNA, 13 bp, Artificial Sequence
  Oligonucleotide for detection of SNP TSC0030894
ratcaataccacc

SEQ ID NO: 123547 - DNA, 13 bp, Artificial Sequence
  Oligonucleotide for detection of SNP TSC0030894
ggtggtgttgaty

SEQ ID NO: 123548 - DNA, 13 bp, Artificial Sequence
  Oligonucleotide for detection of SNP TSC0030894
ratcaacaccacc

SEQ ID NO: 123549 - DNA, 13 bp, Artificial Sequence
  Oligonucleotide for detection of SNP TSC0030894
ggcggtattgaty

SEQ ID NO: 123550 - DNA, 13 bp, Artificial Sequence
  Oligonucleotide for detection of SNP TSC0030894
ratcaataccgcc

SEQ ID NO: 123551 - DNA, 13 bp, Artificial Sequence
  Oligonucleotide for detection of SNP TSC0030894
ggcggtgttgaty

SEQ ID NO: 123552 - DNA, 13 bp, Artificial Sequence
  Oligonucleotide for detection of SNP TSC0030894
ratcaacaccgcc

SEQ ID NO: 123553 - DNA, 13 bp, Artificial Sequence
  Oligonucleotide for detection of SNP TSC0030894
ggtggcgttgaty

SEQ ID NO: 123554 - DNA, 13 bp, Artificial Sequence
  Oligonucleotide for detection of SNP TSC0030894
ratcaacgccacc

SEQ ID NO: 123555 - DNA, 13 bp, Artificial Sequence
  Oligonucleotide for detection of SNP TSC0030894
ggcggcgttgaty

SEQ ID NO: 123556 - DNA, 13 bp, Artificial Sequence
  Oligonucleotide for detection of SNP TSC0030894
ratcaacgccgcc

SEQ ID NO: 123557 - DNA, 13 bp, Artificial Sequence
  Oligonucleotide for detection of SNP TSC0030894
ggttaatgttgty

SEQ ID NO: 123558 - DNA, 13 bp, Artificial Sequence
  Oligonucleotide for detection of SNP TSC0030894
racaacattaacc

SEQ ID NO: 123559 - DNA, 13 bp, Artificial Sequence
  Oligonucleotide for detection of SNP TSC0030894
ggttaatgtcgty

SEQ ID NO: 123560 - DNA, 13 bp, Artificial Sequence
  Oligonucleotide for detection of SNP TSC0030894
racgacattaacc

SEQ ID NO: 123561 - DNA, 13 bp, Artificial Sequence
  Oligonucleotide for detection of SNP TSC0030894
ggttaacgttgty

SEQ ID NO: 123562 - DNA, 13 bp, Artificial Sequence
  Oligonucleotide for detection of SNP TSC0030894
racaacgttaacc

SEQ ID NO: 123563 - DNA, 13 bp, Artificial Sequence
  Oligonucleotide for detection of SNP TSC0030894
ggttaacgtcgty

SEQ ID NO: 123564 - DNA, 13 bp, Artificial Sequence
  Oligonucleotide for detection of SNP TSC0030894
racgacgttaacc

SEQ ID NO: 123565 - DNA, 13 bp, Artificial Sequence
  Oligonucleotide for detection of SNP TSC0030895
ggtgataggggtg

SEQ ID NO: 123566 - DNA, 13 bp, Artificial Sequence
  Oligonucleotide for detection of SNP TSC0030895
cacccctatcacc

SEQ ID NO: 123567 - DNA, 13 bp, Artificial Sequence
  Oligonucleotide for detection of SNP TSC0030895
ggtgatgggggtg

SEQ ID NO: 123568 - DNA, 13 bp, Artificial Sequence
  Oligonucleotide for detection of SNP TSC0030895
cacccccatcacc

SEQ ID NO: 123569 - DNA, 13 bp, Artificial Sequence
  Oligonucleotide for detection of SNP TSC0030897
tagatatgggaag

SEQ ID NO: 123570 - DNA, 13 bp, Artificial Sequence
  Oligonucleotide for detection of SNP TSC0030897
cttcccatatcta

SEQ ID NO: 123571 - DNA, 13 bp, Artificial Sequence
  Oligonucleotide for detection of SNP TSC0030897
tagatacgggaag

SEQ ID NO: 123572 - DNA, 13 bp, Artificial Sequence
  Oligonucleotide for detection of SNP TSC0030897
cttcccgtatcta

SEQ ID NO: 123573 - DNA, 13 bp, Artificial Sequence
  Oligonucleotide for detection of SNP TSC0030898
aaaatagttattt

SEQ ID NO: 123574 - DNA, 13 bp, Artificial Sequence
  Oligonucleotide for detection of SNP TSC0030898
aaataactatttt

SEQ ID NO: 123575 - DNA, 13 bp, Artificial Sequence
  Oligonucleotide for detection of SNP TSC0030898
aaataattgtttt

SEQ ID NO: 123576 - DNA, 13 bp, Artificial Sequence
  Oligonucleotide for detection of SNP TSC0030898
aaaacaattattt

SEQ ID NO: 123577 - DNA, 13 bp, Artificial Sequence
  Oligonucleotide for detection of SNP TSC0030899
gatttatgaagty

SEQ ID NO: 123578 - DNA, 13 bp, Artificial Sequence
  Oligonucleotide for detection of SNP TSC0030899
racttcataaatc

SEQ ID NO: 123579 - DNA, 13 bp, Artificial Sequence
  Oligonucleotide for detection of SNP TSC0030899
gatttacgaagty

SEQ ID NO: 123580 - DNA, 13 bp, Artificial Sequence
  Oligonucleotide for detection of SNP TSC0030899
racttcgtaaatc

SEQ ID NO: 123581 - DNA, 13 bp, Artificial Sequence
  Oligonucleotide for detection of SNP TSC0030899
ggttttgtaagty

SEQ ID NO: 123582 - DNA, 13 bp, Artificial Sequence
  Oligonucleotide for detection of SNP TSC0030899
racttacaaaacc

SEQ ID NO: 123583 - DNA, 13 bp, Artificial Sequence
  Oligonucleotide for detection of SNP TSC0030899
ggttttataagty

SEQ ID NO: 123584 - DNA, 13 bp, Artificial Sequence
  Oligonucleotide for detection of SNP TSC0030899
racttataaaacc

SEQ ID NO: 123585 - DNA, 13 bp, Artificial Sequence
  Oligonucleotide for detection of SNP TSC0030899
ggtttcgtaagty

SEQ ID NO: 123586 - DNA, 13 bp, Artificial Sequence
  Oligonucleotide for detection of SNP TSC0030899
racttacgaaacc

SEQ ID NO: 123587 - DNA, 13 bp, Artificial Sequence
  Oligonucleotide for detection of SNP TSC0030900
aatgtgatttaat

SEQ ID NO: 123588 - DNA, 13 bp, Artificial Sequence
  Oligonucleotide for detection of SNP TSC0030900
attaaatcacatt

SEQ ID NO: 123589 - DNA, 13 bp, Artificial Sequence
  Oligonucleotide for detection of SNP TSC0030900
aatgtgttttaat

SEQ ID NO: 123590 - DNA, 13 bp, Artificial Sequence
  Oligonucleotide for detection of SNP TSC0030900
attaaaacacatt

SEQ ID NO: 123591 - DNA, 13 bp, Artificial Sequence
  Oligonucleotide for detection of SNP TSC0030900
attaagttatatt

SEQ ID NO: 123592 - DNA, 13 bp, Artificial Sequence
  Oligonucleotide for detection of SNP TSC0030900
aatataacttaat

SEQ ID NO: 123593 - DNA, 13 bp, Artificial Sequence
  Oligonucleotide for detection of SNP TSC0030900
attaagatatatt

SEQ ID NO: 123594 - DNA, 13 bp, Artificial Sequence
  Oligonucleotide for detection of SNP TSC0030900
aatatatcttaat

SEQ ID NO: 123595 - DNA, 13 bp, Artificial Sequence
  Oligonucleotide for detection of SNP TSC0030904
tgattatgtaatt

SEQ ID NO: 123596 - DNA, 13 bp, Artificial Sequence
  Oligonucleotide for detection of SNP TSC0030904
aattacataatca

SEQ ID NO: 123597 - DNA, 13 bp, Artificial Sequence
  Oligonucleotide for detection of SNP TSC0030904
tgattacgtaatt

SEQ ID NO: 123598 - DNA, 13 bp, Artificial Sequence
  Oligonucleotide for detection of SNP TSC0030904
aattacgtaatca

SEQ ID NO: 123599 - DNA, 13 bp, Artificial Sequence
  Oligonucleotide for detection of SNP TSC0030904
agttgtgtgatta

SEQ ID NO: 123600 - DNA, 13 bp, Artificial Sequence
  Oligonucleotide for detection of SNP TSC0030904
taatcacacaact

SEQ ID NO: 123601 - DNA, 13 bp, Artificial Sequence
  Oligonucleotide for detection of SNP TSC0030904
agttgtatgatta

SEQ ID NO: 123602 - DNA, 13 bp, Artificial Sequence
  Oligonucleotide for detection of SNP TSC0030904
taatcatacaact

SEQ ID NO: 123603 - DNA, 13 bp, Artificial Sequence
  Oligonucleotide for detection of SNP TSC0030904
agttgcgtgatta

SEQ ID NO: 123604 - DNA, 13 bp, Artificial Sequence
  Oligonucleotide for detection of SNP TSC0030904
taatcacgcaact

SEQ ID NO: 123605 - DNA, 13 bp, Artificial Sequence
  Oligonucleotide for detection of SNP TSC0030905
gagagaggggtta

SEQ ID NO: 123606 - DNA, 13 bp, Artificial Sequence
  Oligonucleotide for detection of SNP TSC0030905
taacccctctctc

SEQ ID NO: 123607 - DNA, 13 bp, Artificial Sequence
  Oligonucleotide for detection of SNP TSC0030905
gagagaagggtta

SEQ ID NO: 123608 - DNA, 13 bp, Artificial Sequence
  Oligonucleotide for detection of SNP TSC0030905
taacccttctctc

SEQ ID NO: 123609 - DNA, 13 bp, Artificial Sequence
  Oligonucleotide for detection of SNP TSC0030907
taggatgatatty

SEQ ID NO: 123610 - DNA, 13 bp, Artificial Sequence
  Oligonucleotide for detection of SNP TSC0030907
raatatcatccta

SEQ ID NO: 123611 - DNA, 13 bp, Artificial Sequence
  Oligonucleotide for detection of SNP TSC0030907
taggataatatty

SEQ ID NO: 123612 - DNA, 13 bp, Artificial Sequence
  Oligonucleotide for detection of SNP TSC0030907
raatattatccta

SEQ ID NO: 123613 - DNA, 13 bp, Artificial Sequence
  Oligonucleotide for detection of SNP TSC0030908
gaaagttggatty

SEQ ID NO: 123614 - DNA, 13 bp, Artificial Sequence
  Oligonucleotide for detection of SNP TSC0030908
raatccaactttc

SEQ ID NO: 123615 - DNA, 13 bp, Artificial Sequence
  Oligonucleotide for detection of SNP TSC0030908
gaaagtcggatty

SEQ ID NO: 123616 - DNA, 13 bp, Artificial Sequence
  Oligonucleotide for detection of SNP TSC0030908
raatccgactttc

SEQ ID NO: 123617 - DNA, 13 bp, Artificial Sequence
  Oligonucleotide for detection of SNP TSC0030908
gggtttgatttty

SEQ ID NO: 123618 - DNA, 13 bp, Artificial Sequence
  Oligonucleotide for detection of SNP TSC0030908
raaaatcaaaccc

SEQ ID NO: 123619 - DNA, 13 bp, Artificial Sequence
  Oligonucleotide for detection of SNP TSC0030908
gggtttaatttty

SEQ ID NO: 123620 - DNA, 13 bp, Artificial Sequence
  Oligonucleotide for detection of SNP TSC0030908
raaaattaaaccc

SEQ ID NO: 123621 - DNA, 13 bp, Artificial Sequence
  Oligonucleotide for detection of SNP TSC0030908
gggttcgatttty

SEQ ID NO: 123622 - DNA, 13 bp, Artificial Sequence
  Oligonucleotide for detection of SNP TSC0030908
raaaatcgaaccc

SEQ ID NO: 123623 - DNA, 13 bp, Artificial Sequence
  Oligonucleotide for detection of SNP TSC0030916
gcgtttatttgtg

SEQ ID NO: 123624 - DNA, 13 bp, Artificial Sequence
  Oligonucleotide for detection of SNP TSC0030916
cacaaataaacgc

SEQ ID NO: 123625 - DNA, 13 bp, Artificial Sequence
  Oligonucleotide for detection of SNP TSC0030916
gcgtttgtttgtg

SEQ ID NO: 123626 - DNA, 13 bp, Artificial Sequence
  Oligonucleotide for detection of SNP TSC0030916
cacaaacaaacgc

SEQ ID NO: 123627 - DNA, 13 bp, Artificial Sequence
  Oligonucleotide for detection of SNP TSC0030916
gcgttcgtttgtg

SEQ ID NO: 123628 - DNA, 13 bp, Artificial Sequence
  Oligonucleotide for detection of SNP TSC0030916
cacaaacgaacgc

SEQ ID NO: 123629 - DNA, 13 bp, Artificial Sequence
  Oligonucleotide for detection of SNP TSC0030916
tatagatggatgy

SEQ ID NO: 123630 - DNA, 13 bp, Artificial Sequence
  Oligonucleotide for detection of SNP TSC0030916
rcatccatctata

SEQ ID NO: 123631 - DNA, 13 bp, Artificial Sequence
  Oligonucleotide for detection of SNP TSC0030916
tatagatggacgy

SEQ ID NO: 123632 - DNA, 13 bp, Artificial Sequence
  Oligonucleotide for detection of SNP TSC0030916
rcgtccatctata

SEQ ID NO: 123633 - DNA, 13 bp, Artificial Sequence
  Oligonucleotide for detection of SNP TSC0030916
tatagacggatgy

SEQ ID NO: 123634 - DNA, 13 bp, Artificial Sequence
  Oligonucleotide for detection of SNP TSC0030916
rcatccgtctata

SEQ ID NO: 123635 - DNA, 13 bp, Artificial Sequence
  Oligonucleotide for detection of SNP TSC0030916
tatagacggacgy

SEQ ID NO: 123636 - DNA, 13 bp, Artificial Sequence
  Oligonucleotide for detection of SNP TSC0030916
rcgtccgtctata

SEQ ID NO: 123637 - DNA, 13 bp, Artificial Sequence
  Oligonucleotide for detection of SNP TSC0030920
tgtgttaaatata

SEQ ID NO: 123638 - DNA, 13 bp, Artificial Sequence
  Oligonucleotide for detection of SNP TSC0030920
tatatttaacaca

SEQ ID NO: 123639 - DNA, 13 bp, Artificial Sequence
  Oligonucleotide for detection of SNP TSC0030920
tgtgttgaatata

SEQ ID NO: 123640 - DNA, 13 bp, Artificial Sequence
  Oligonucleotide for detection of SNP TSC0030920
tatattcaacaca

SEQ ID NO: 123641 - DNA, 13 bp, Artificial Sequence
  Oligonucleotide for detection of SNP TSC0030920
tgtgtcgaatata

SEQ ID NO: 123642 - DNA, 13 bp, Artificial Sequence
  Oligonucleotide for detection of SNP TSC0030920
tatattcgacaca

SEQ ID NO: 123643 - DNA, 13 bp, Artificial Sequence
  Oligonucleotide for detection of SNP TSC0030920
tgtatttgatata

SEQ ID NO: 123644 - DNA, 13 bp, Artificial Sequence
  Oligonucleotide for detection of SNP TSC0030920
tatatcaaataca

SEQ ID NO: 123645 - DNA, 13 bp, Artificial Sequence
  Oligonucleotide for detection of SNP TSC0030920
tgtattcgatata

SEQ ID NO: 123646 - DNA, 13 bp, Artificial Sequence
  Oligonucleotide for detection of SNP TSC0030920
tatatcgaataca

SEQ ID NO: 123647 - DNA, 13 bp, Artificial Sequence
  Oligonucleotide for detection of SNP TSC0030921
atggaaattagat

SEQ ID NO: 123648 - DNA, 13 bp, Artificial Sequence
  Oligonucleotide for detection of SNP TSC0030921
atctaatttccat

SEQ ID NO: 123649 - DNA, 13 bp, Artificial Sequence
  Oligonucleotide for detection of SNP TSC0030921
atggaagttagat

SEQ ID NO: 123650 - DNA, 13 bp, Artificial Sequence
  Oligonucleotide for detection of SNP TSC0030921
atctaacttccat

SEQ ID NO: 123651 - DNA, 13 bp, Artificial Sequence
  Oligonucleotide for detection of SNP TSC0030922
tttttatttagty

SEQ ID NO: 123652 - DNA, 13 bp, Artificial Sequence
  Oligonucleotide for detection of SNP TSC0030922
ractaaataaaaa

SEQ ID NO: 123653 - DNA, 13 bp, Artificial Sequence
  Oligonucleotide for detection of SNP TSC0030922
ggttgggtgggaa

SEQ ID NO: 123654 - DNA, 13 bp, Artificial Sequence
  Oligonucleotide for detection of SNP TSC0030922
ttcccacccaacc

SEQ ID NO: 123655 - DNA, 13 bp, Artificial Sequence
  Oligonucleotide for detection of SNP TSC0030922
ggttggttgggaa

SEQ ID NO: 123656 - DNA, 13 bp, Artificial Sequence
  Oligonucleotide for detection of SNP TSC0030922
ttcccaaccaacc

SEQ ID NO: 123657 - DNA, 13 bp, Artificial Sequence
  Oligonucleotide for detection of SNP TSC0030923
tgggaaatgaaty

SEQ ID NO: 123658 - DNA, 13 bp, Artificial Sequence
  Oligonucleotide for detection of SNP TSC0030923
rattcatttccca

SEQ ID NO: 123659 - DNA, 13 bp, Artificial Sequence
  Oligonucleotide for detection of SNP TSC0030923
tgggaattgaaty

SEQ ID NO: 123660 - DNA, 13 bp, Artificial Sequence
  Oligonucleotide for detection of SNP TSC0030923
rattcaattccca

SEQ ID NO: 123661 - DNA, 13 bp, Artificial Sequence
  Oligonucleotide for detection of SNP TSC0030923
cgggaaatgaaty

SEQ ID NO: 123662 - DNA, 13 bp, Artificial Sequence
  Oligonucleotide for detection of SNP TSC0030923
rattcatttcccg

SEQ ID NO: 123663 - DNA, 13 bp, Artificial Sequence
  Oligonucleotide for detection of SNP TSC0030923
cgggaattgaaty

SEQ ID NO: 123664 - DNA, 13 bp, Artificial Sequence
  Oligonucleotide for detection of SNP TSC0030923
rattcaattcccg

SEQ ID NO: 123665 - DNA, 13 bp, Artificial Sequence
  Oligonucleotide for detection of SNP TSC0030923
gatttattttttg

SEQ ID NO: 123666 - DNA, 13 bp, Artificial Sequence
  Oligonucleotide for detection of SNP TSC0030923
caaaaaataaatc

SEQ ID NO: 123667 - DNA, 13 bp, Artificial Sequence
  Oligonucleotide for detection of SNP TSC0030923
gatttagtttttg

SEQ ID NO: 123668 - DNA, 13 bp, Artificial Sequence
  Oligonucleotide for detection of SNP TSC0030923
caaaaactaaatc

SEQ ID NO: 123669 - DNA, 13 bp, Artificial Sequence
  Oligonucleotide for detection of SNP TSC0030923
gatttatttttcg

SEQ ID NO: 123670 - DNA, 13 bp, Artificial Sequence
  Oligonucleotide for detection of SNP TSC0030923
cgaaaaataaatc

SEQ ID NO: 123671 - DNA, 13 bp, Artificial Sequence
  Oligonucleotide for detection of SNP TSC0030923
gatttagttttcg

SEQ ID NO: 123672 - DNA, 13 bp, Artificial Sequence
  Oligonucleotide for detection of SNP TSC0030923
cgaaaactaaatc

SEQ ID NO: 123673 - DNA, 13 bp, Artificial Sequence
  Oligonucleotide for detection of SNP TSC0030925
tgtgttggagagg

SEQ ID NO: 123674 - DNA, 13 bp, Artificial Sequence
  Oligonucleotide for detection of SNP TSC0030925
cctctccaacaca

SEQ ID NO: 123675 - DNA, 13 bp, Artificial Sequence
  Oligonucleotide for detection of SNP TSC0030925
tgtgttagagagg

SEQ ID NO: 123676 - DNA, 13 bp, Artificial Sequence
  Oligonucleotide for detection of SNP TSC0030925
cctctctaacaca

SEQ ID NO: 123677 - DNA, 13 bp, Artificial Sequence
  Oligonucleotide for detection of SNP TSC0030926
tataatatttagt

SEQ ID NO: 123678 - DNA, 13 bp, Artificial Sequence
  Oligonucleotide for detection of SNP TSC0030926
actaaatattata

SEQ ID NO: 123679 - DNA, 13 bp, Artificial Sequence
  Oligonucleotide for detection of SNP TSC0030926
tataatttttagt

SEQ ID NO: 123680 - DNA, 13 bp, Artificial Sequence
  Oligonucleotide for detection of SNP TSC0030926
actaaaaattata

SEQ ID NO: 123681 - DNA, 13 bp, Artificial Sequence
  Oligonucleotide for detection of SNP TSC0030927
tttagaagtttat

SEQ ID NO: 123682 - DNA, 13 bp, Artificial Sequence
  Oligonucleotide for detection of SNP TSC0030927
ataaacttctaaa

SEQ ID NO: 123683 - DNA, 13 bp, Artificial Sequence
  Oligonucleotide for detection of SNP TSC0030927
tttagatgtttat

SEQ ID NO: 123684 - DNA, 13 bp, Artificial Sequence
  Oligonucleotide for detection of SNP TSC0030927
ataaacatctaaa

SEQ ID NO: 123685 - DNA, 13 bp, Artificial Sequence
  Oligonucleotide for detection of SNP TSC0030927
tttagacgtttat

SEQ ID NO: 123686 - DNA, 13 bp, Artificial Sequence
  Oligonucleotide for detection of SNP TSC0030927
ataaacgtctaaa

SEQ ID NO: 123687 - DNA, 13 bp, Artificial Sequence
  Oligonucleotide for detection of SNP TSC0030927
ataaatttttaag

SEQ ID NO: 123688 - DNA, 13 bp, Artificial Sequence
  Oligonucleotide for detection of SNP TSC0030927
cttaaaaatttat

SEQ ID NO: 123689 - DNA, 13 bp, Artificial Sequence
  Oligonucleotide for detection of SNP TSC0030928
agagggattaaga

SEQ ID NO: 123690 - DNA, 13 bp, Artificial Sequence
  Oligonucleotide for detection of SNP TSC0030928
tcttaatccctct

SEQ ID NO: 123691 - DNA, 13 bp, Artificial Sequence
  Oligonucleotide for detection of SNP TSC0030928
agaggggttaaga

SEQ ID NO: 123692 - DNA, 13 bp, Artificial Sequence
  Oligonucleotide for detection of SNP TSC0030928
tcttaacccctct

SEQ ID NO: 123693 - DNA, 13 bp, Artificial Sequence
  Oligonucleotide for detection of SNP TSC0030929
tattgtgttgtgy

SEQ ID NO: 123694 - DNA, 13 bp, Artificial Sequence
  Oligonucleotide for detection of SNP TSC0030929
rcacaacacaata

SEQ ID NO: 123695 - DNA, 13 bp, Artificial Sequence
  Oligonucleotide for detection of SNP TSC0030929
tattgttttgtgy

SEQ ID NO: 123696 - DNA, 13 bp, Artificial Sequence
  Oligonucleotide for detection of SNP TSC0030929
rcacaaaacaata

SEQ ID NO: 123697 - DNA, 13 bp, Artificial Sequence
  Oligonucleotide for detection of SNP TSC0030929
gtatagtatagtg

SEQ ID NO: 123698 - DNA, 13 bp, Artificial Sequence
  Oligonucleotide for detection of SNP TSC0030929
cactatactatac

SEQ ID NO: 123699 - DNA, 13 bp, Artificial Sequence
  Oligonucleotide for detection of SNP TSC0030929
gtatagaatagtg

SEQ ID NO: 123700 - DNA, 13 bp, Artificial Sequence
  Oligonucleotide for detection of SNP TSC0030929
cactattctatac

SEQ ID NO: 123701 - DNA, 13 bp, Artificial Sequence
  Oligonucleotide for detection of SNP TSC0030930
atttttattggta

SEQ ID NO: 123702 - DNA, 13 bp, Artificial Sequence
  Oligonucleotide for detection of SNP TSC0030930
taccaataaaaat

SEQ ID NO: 123703 - DNA, 13 bp, Artificial Sequence
  Oligonucleotide for detection of SNP TSC0030930
attttttttggta

SEQ ID NO: 123704 - DNA, 13 bp, Artificial Sequence
  Oligonucleotide for detection of SNP TSC0030930
taccaaaaaaaat

SEQ ID NO: 123705 - DNA, 13 bp, Artificial Sequence
  Oligonucleotide for detection of SNP TSC0030930
tgttaatgaaaat

SEQ ID NO: 123706 - DNA, 13 bp, Artificial Sequence
  Oligonucleotide for detection of SNP TSC0030930
attttcattaaca

SEQ ID NO: 123707 - DNA, 13 bp, Artificial Sequence
  Oligonucleotide for detection of SNP TSC0030930
tgttaaggaaaat

SEQ ID NO: 123708 - DNA, 13 bp, Artificial Sequence
  Oligonucleotide for detection of SNP TSC0030930
attttccttaaca

SEQ ID NO: 123709 - DNA, 13 bp, Artificial Sequence
  Oligonucleotide for detection of SNP TSC0030932
agtgttagggatg

SEQ ID NO: 123710 - DNA, 13 bp, Artificial Sequence
  Oligonucleotide for detection of SNP TSC0030932
catccctaacact

SEQ ID NO: 123711 - DNA, 13 bp, Artificial Sequence
  Oligonucleotide for detection of SNP TSC0030932
agtgttggggatg

SEQ ID NO: 123712 - DNA, 13 bp, Artificial Sequence
  Oligonucleotide for detection of SNP TSC0030932
catccccaacact

SEQ ID NO: 123713 - DNA, 13 bp, Artificial Sequence
  Oligonucleotide for detection of SNP TSC0030932
agcgttagggatg

SEQ ID NO: 123714 - DNA, 13 bp, Artificial Sequence
  Oligonucleotide for detection of SNP TSC0030932
catccctaacgct

SEQ ID NO: 123715 - DNA, 13 bp, Artificial Sequence
  Oligonucleotide for detection of SNP TSC0030932
agcgttggggatg

SEQ ID NO: 123716 - DNA, 13 bp, Artificial Sequence
  Oligonucleotide for detection of SNP TSC0030932
catccccaacgct

SEQ ID NO: 123717 - DNA, 13 bp, Artificial Sequence
  Oligonucleotide for detection of SNP TSC0030932
agtgttagggacg

SEQ ID NO: 123718 - DNA, 13 bp, Artificial Sequence
  Oligonucleotide for detection of SNP TSC0030932
cgtccctaacact

SEQ ID NO: 123719 - DNA, 13 bp, Artificial Sequence
  Oligonucleotide for detection of SNP TSC0030932
agtgtcggggatg

SEQ ID NO: 123720 - DNA, 13 bp, Artificial Sequence
  Oligonucleotide for detection of SNP TSC0030932
catccccgacact

SEQ ID NO: 123721 - DNA, 13 bp, Artificial Sequence
  Oligonucleotide for detection of SNP TSC0030932
agcgttagggacg

SEQ ID NO: 123722 - DNA, 13 bp, Artificial Sequence
  Oligonucleotide for detection of SNP TSC0030932
cgtccctaacgct

SEQ ID NO: 123723 - DNA, 13 bp, Artificial Sequence
  Oligonucleotide for detection of SNP TSC0030932
agtgttggggacg

SEQ ID NO: 123724 - DNA, 13 bp, Artificial Sequence
  Oligonucleotide for detection of SNP TSC0030932
cgtccccaacact

SEQ ID NO: 123725 - DNA, 13 bp, Artificial Sequence
  Oligonucleotide for detection of SNP TSC0030932
agcgtcggggatg

SEQ ID NO: 123726 - DNA, 13 bp, Artificial Sequence
  Oligonucleotide for detection of SNP TSC0030932
catccccgacgct

SEQ ID NO: 123727 - DNA, 13 bp, Artificial Sequence
  Oligonucleotide for detection of SNP TSC0030932
agcgttggggacg

SEQ ID NO: 123728 - DNA, 13 bp, Artificial Sequence
  Oligonucleotide for detection of SNP TSC0030932
cgtccccaacgct

SEQ ID NO: 123729 - DNA, 13 bp, Artificial Sequence
  Oligonucleotide for detection of SNP TSC0030932
agtgtcggggacg

SEQ ID NO: 123730 - DNA, 13 bp, Artificial Sequence
  Oligonucleotide for detection of SNP TSC0030932
cgtccccgacact

SEQ ID NO: 123731 - DNA, 13 bp, Artificial Sequence
  Oligonucleotide for detection of SNP TSC0030932
agcgtcggggacg

SEQ ID NO: 123732 - DNA, 13 bp, Artificial Sequence
  Oligonucleotide for detection of SNP TSC0030932
cgtccccgacgct

SEQ ID NO: 123733 - DNA, 13 bp, Artificial Sequence
  Oligonucleotide for detection of SNP TSC0030932
cgtttttggtgtt

SEQ ID NO: 123734 - DNA, 13 bp, Artificial Sequence
  Oligonucleotide for detection of SNP TSC0030932
aacaccaaaaacg

SEQ ID NO: 123735 - DNA, 13 bp, Artificial Sequence
  Oligonucleotide for detection of SNP TSC0030932
tgtttttggcgtt

SEQ ID NO: 123736 - DNA, 13 bp, Artificial Sequence
  Oligonucleotide for detection of SNP TSC0030932
aacgccaaaaaca

SEQ ID NO: 123737 - DNA, 13 bp, Artificial Sequence
  Oligonucleotide for detection of SNP TSC0030932
tgttttcggtgtt

SEQ ID NO: 123738 - DNA, 13 bp, Artificial Sequence
  Oligonucleotide for detection of SNP TSC0030932
aacaccgaaaaca

SEQ ID NO: 123739 - DNA, 13 bp, Artificial Sequence
  Oligonucleotide for detection of SNP TSC0030932
cgtttttggcgtt

SEQ ID NO: 123740 - DNA, 13 bp, Artificial Sequence
  Oligonucleotide for detection of SNP TSC0030932
aacgccaaaaacg

SEQ ID NO: 123741 - DNA, 13 bp, Artificial Sequence
  Oligonucleotide for detection of SNP TSC0030932
cgttttcggtgtt

SEQ ID NO: 123742 - DNA, 13 bp, Artificial Sequence
  Oligonucleotide for detection of SNP TSC0030932
aacaccgaaaacg

SEQ ID NO: 123743 - DNA, 13 bp, Artificial Sequence
  Oligonucleotide for detection of SNP TSC0030932
tgttttcggcgtt

SEQ ID NO: 123744 - DNA, 13 bp, Artificial Sequence
  Oligonucleotide for detection of SNP TSC0030932
aacgccgaaaaca

SEQ ID NO: 123745 - DNA, 13 bp, Artificial Sequence
  Oligonucleotide for detection of SNP TSC0030932
cgttttcggcgtt

SEQ ID NO: 123746 - DNA, 13 bp, Artificial Sequence
  Oligonucleotide for detection of SNP TSC0030932
aacgccgaaaacg

SEQ ID NO: 123747 - DNA, 13 bp, Artificial Sequence
  Oligonucleotide for detection of SNP TSC0030933
tttgttaggttgt

SEQ ID NO: 123748 - DNA, 13 bp, Artificial Sequence
  Oligonucleotide for detection of SNP TSC0030933
acaacctaacaaa

SEQ ID NO: 123749 - DNA, 13 bp, Artificial Sequence
  Oligonucleotide for detection of SNP TSC0030933
tttgttgggttgt

SEQ ID NO: 123750 - DNA, 13 bp, Artificial Sequence
  Oligonucleotide for detection of SNP TSC0030933
acaacccaacaaa

SEQ ID NO: 123751 - DNA, 13 bp, Artificial Sequence
  Oligonucleotide for detection of SNP TSC0030934
aagtaatggtata

SEQ ID NO: 123752 - DNA, 13 bp, Artificial Sequence
  Oligonucleotide for detection of SNP TSC0030934
tataccattactt

SEQ ID NO: 123753 - DNA, 13 bp, Artificial Sequence
  Oligonucleotide for detection of SNP TSC0030934
aagtaacggtata

SEQ ID NO: 123754 - DNA, 13 bp, Artificial Sequence
  Oligonucleotide for detection of SNP TSC0030934
tataccgttactt

SEQ ID NO: 123755 - DNA, 13 bp, Artificial Sequence
  Oligonucleotide for detection of SNP TSC0030936
aggtaatgtagag

SEQ ID NO: 123756 - DNA, 13 bp, Artificial Sequence
  Oligonucleotide for detection of SNP TSC0030936
ctctacattacct

SEQ ID NO: 123757 - DNA, 13 bp, Artificial Sequence
  Oligonucleotide for detection of SNP TSC0030936
aggtaacgtagag

SEQ ID NO: 123758 - DNA, 13 bp, Artificial Sequence
  Oligonucleotide for detection of SNP TSC0030936
ctctacgttacct

SEQ ID NO: 123759 - DNA, 13 bp, Artificial Sequence
  Oligonucleotide for detection of SNP TSC0030937
attgaggtataga

SEQ ID NO: 123760 - DNA, 13 bp, Artificial Sequence
  Oligonucleotide for detection of SNP TSC0030937
tctatacctcaat

SEQ ID NO: 123761 - DNA, 13 bp, Artificial Sequence
  Oligonucleotide for detection of SNP TSC0030937
attgagatataga

SEQ ID NO: 123762 - DNA, 13 bp, Artificial Sequence
  Oligonucleotide for detection of SNP TSC0030937
tctatatctcaat

SEQ ID NO: 123763 - DNA, 13 bp, Artificial Sequence
  Oligonucleotide for detection of SNP TSC0030942
ggtattaattatt

SEQ ID NO: 123764 - DNA, 13 bp, Artificial Sequence
  Oligonucleotide for detection of SNP TSC0030942
aataattaatacc

SEQ ID NO: 123765 - DNA, 13 bp, Artificial Sequence
  Oligonucleotide for detection of SNP TSC0030942
ggtatttattatt

SEQ ID NO: 123766 - DNA, 13 bp, Artificial Sequence
  Oligonucleotide for detection of SNP TSC0030942
aataataaatacc

SEQ ID NO: 123767 - DNA, 13 bp, Artificial Sequence
  Oligonucleotide for detection of SNP TSC0030942
aatagttggtgty

SEQ ID NO: 123768 - DNA, 13 bp, Artificial Sequence
  Oligonucleotide for detection of SNP TSC0030942
racaccaactatt

SEQ ID NO: 123769 - DNA, 13 bp, Artificial Sequence
  Oligonucleotide for detection of SNP TSC0030942
aatagtaggtgty

SEQ ID NO: 123770 - DNA, 13 bp, Artificial Sequence
  Oligonucleotide for detection of SNP TSC0030942
racacctactatt

SEQ ID NO: 123771 - DNA, 13 bp, Artificial Sequence
  Oligonucleotide for detection of SNP TSC0030947
ttatggggtagay

SEQ ID NO: 123772 - DNA, 13 bp, Artificial Sequence
  Oligonucleotide for detection of SNP TSC0030947
rtctaccccataa

SEQ ID NO: 123773 - DNA, 13 bp, Artificial Sequence
  Oligonucleotide for detection of SNP TSC0030947
ttatggagtagay

SEQ ID NO: 123774 - DNA, 13 bp, Artificial Sequence
  Oligonucleotide for detection of SNP TSC0030947
rtctactccataa

SEQ ID NO: 123775 - DNA, 13 bp, Artificial Sequence
  Oligonucleotide for detection of SNP TSC0030949
ttgggggtagagt

SEQ ID NO: 123776 - DNA, 13 bp, Artificial Sequence
  Oligonucleotide for detection of SNP TSC0030949
actctacccccaa

SEQ ID NO: 123777 - DNA, 13 bp, Artificial Sequence
  Oligonucleotide for detection of SNP TSC0030949
ttggggatagagt

SEQ ID NO: 123778 - DNA, 13 bp, Artificial Sequence
  Oligonucleotide for detection of SNP TSC0030949
actctatccccaa

SEQ ID NO: 123779 - DNA, 13 bp, Artificial Sequence
  Oligonucleotide for detection of SNP TSC0030950
ggtgatagggttg

SEQ ID NO: 123780 - DNA, 13 bp, Artificial Sequence
  Oligonucleotide for detection of SNP TSC0030950
caaccctatcacc

SEQ ID NO: 123781 - DNA, 13 bp, Artificial Sequence
  Oligonucleotide for detection of SNP TSC0030950
ggtgatggggttg

SEQ ID NO: 123782 - DNA, 13 bp, Artificial Sequence
  Oligonucleotide for detection of SNP TSC0030950
caaccccatcacc

SEQ ID NO: 123783 - DNA, 13 bp, Artificial Sequence
  Oligonucleotide for detection of SNP TSC0030950
ggtgatagggtcg

SEQ ID NO: 123784 - DNA, 13 bp, Artificial Sequence
  Oligonucleotide for detection of SNP TSC0030950
cgaccctatcacc

SEQ ID NO: 123785 - DNA, 13 bp, Artificial Sequence
  Oligonucleotide for detection of SNP TSC0030950
ggtgacggggttg

SEQ ID NO: 123786 - DNA, 13 bp, Artificial Sequence
  Oligonucleotide for detection of SNP TSC0030950
caaccccgtcacc

SEQ ID NO: 123787 - DNA, 13 bp, Artificial Sequence
  Oligonucleotide for detection of SNP TSC0030950
ggtgatggggtcg

SEQ ID NO: 123788 - DNA, 13 bp, Artificial Sequence
  Oligonucleotide for detection of SNP TSC0030950
cgaccccatcacc

SEQ ID NO: 123789 - DNA, 13 bp, Artificial Sequence
  Oligonucleotide for detection of SNP TSC0030950
ggtgacggggtcg

SEQ ID NO: 123790 - DNA, 13 bp, Artificial Sequence
  Oligonucleotide for detection of SNP TSC0030950
cgaccccgtcacc

SEQ ID NO: 123791 - DNA, 13 bp, Artificial Sequence
  Oligonucleotide for detection of SNP TSC0030950
tggttttgttaty

SEQ ID NO: 123792 - DNA, 13 bp, Artificial Sequence
  Oligonucleotide for detection of SNP TSC0030950
rataacaaaacca

SEQ ID NO: 123793 - DNA, 13 bp, Artificial Sequence
  Oligonucleotide for detection of SNP TSC0030950
cggttttgttaty

SEQ ID NO: 123794 - DNA, 13 bp, Artificial Sequence
  Oligonucleotide for detection of SNP TSC0030950
rataacaaaaccg

SEQ ID NO: 123795 - DNA, 13 bp, Artificial Sequence
  Oligonucleotide for detection of SNP TSC0030950
tggtttcgttaty

SEQ ID NO: 123796 - DNA, 13 bp, Artificial Sequence
  Oligonucleotide for detection of SNP TSC0030950
rataacgaaacca

SEQ ID NO: 123797 - DNA, 13 bp, Artificial Sequence
  Oligonucleotide for detection of SNP TSC0030950
cggtttcgttaty

SEQ ID NO: 123798 - DNA, 13 bp, Artificial Sequence
  Oligonucleotide for detection of SNP TSC0030950
rataacgaaaccg

SEQ ID NO: 123799 - DNA, 13 bp, Artificial Sequence
  Oligonucleotide for detection of SNP TSC0030951
ttttggtggttga

SEQ ID NO: 123800 - DNA, 13 bp, Artificial Sequence
  Oligonucleotide for detection of SNP TSC0030951
tcaaccaccaaaa

SEQ ID NO: 123801 - DNA, 13 bp, Artificial Sequence
  Oligonucleotide for detection of SNP TSC0030951
ttttggcggttga

SEQ ID NO: 123802 - DNA, 13 bp, Artificial Sequence
  Oligonucleotide for detection of SNP TSC0030951
tcaaccgccaaaa

SEQ ID NO: 123803 - DNA, 13 bp, Artificial Sequence
  Oligonucleotide for detection of SNP TSC0030951
ttagttgttagga

SEQ ID NO: 123804 - DNA, 13 bp, Artificial Sequence
  Oligonucleotide for detection of SNP TSC0030951
tcctaacaactaa

SEQ ID NO: 123805 - DNA, 13 bp, Artificial Sequence
  Oligonucleotide for detection of SNP TSC0030951
ttagttattagga

SEQ ID NO: 123806 - DNA, 13 bp, Artificial Sequence
  Oligonucleotide for detection of SNP TSC0030951
tcctaataactaa

SEQ ID NO: 123807 - DNA, 13 bp, Artificial Sequence
  Oligonucleotide for detection of SNP TSC0030951
ttagtcgttagga

SEQ ID NO: 123808 - DNA, 13 bp, Artificial Sequence
  Oligonucleotide for detection of SNP TSC0030951
tcctaacgactaa

SEQ ID NO: 123809 - DNA, 13 bp, Artificial Sequence
  Oligonucleotide for detection of SNP TSC0030952
gtagggaataaga

SEQ ID NO: 123810 - DNA, 13 bp, Artificial Sequence
  Oligonucleotide for detection of SNP TSC0030952
tcttattccctac

SEQ ID NO: 123811 - DNA, 13 bp, Artificial Sequence
  Oligonucleotide for detection of SNP TSC0030952
gtaggggataaga

SEQ ID NO: 123812 - DNA, 13 bp, Artificial Sequence
  Oligonucleotide for detection of SNP TSC0030952
tcttatcccctac

SEQ ID NO: 123813 - DNA, 13 bp, Artificial Sequence
  Oligonucleotide for detection of SNP TSC0030953
gtaggatgtagty

SEQ ID NO: 123814 - DNA, 13 bp, Artificial Sequence
  Oligonucleotide for detection of SNP TSC0030953
ractacatcctac

SEQ ID NO: 123815 - DNA, 13 bp, Artificial Sequence
  Oligonucleotide for detection of SNP TSC0030953
gtaggacgtagty

SEQ ID NO: 123816 - DNA, 13 bp, Artificial Sequence
  Oligonucleotide for detection of SNP TSC0030953
ractacgtcctac

SEQ ID NO: 123817 - DNA, 13 bp, Artificial Sequence
  Oligonucleotide for detection of SNP TSC0030953
ggttgtgttttgy

SEQ ID NO: 123818 - DNA, 13 bp, Artificial Sequence
  Oligonucleotide for detection of SNP TSC0030953
rcaaaacacaacc

SEQ ID NO: 123819 - DNA, 13 bp, Artificial Sequence
  Oligonucleotide for detection of SNP TSC0030953
ggttgtattttgy

SEQ ID NO: 123820 - DNA, 13 bp, Artificial Sequence
  Oligonucleotide for detection of SNP TSC0030953
rcaaaatacaacc

SEQ ID NO: 123821 - DNA, 13 bp, Artificial Sequence
  Oligonucleotide for detection of SNP TSC0030953
ggttgcgttttgy

SEQ ID NO: 123822 - DNA, 13 bp, Artificial Sequence
  Oligonucleotide for detection of SNP TSC0030953
rcaaaacgcaacc

SEQ ID NO: 123823 - DNA, 13 bp, Artificial Sequence
  Oligonucleotide for detection of SNP TSC0030956
ttttatgtgtttg

SEQ ID NO: 123824 - DNA, 13 bp, Artificial Sequence
  Oligonucleotide for detection of SNP TSC0030956
caaacacataaaa

SEQ ID NO: 123825 - DNA, 13 bp, Artificial Sequence
  Oligonucleotide for detection of SNP TSC0030956
ttttatatgtttg

SEQ ID NO: 123826 - DNA, 13 bp, Artificial Sequence
  Oligonucleotide for detection of SNP TSC0030956
caaacatataaaa

SEQ ID NO: 123827 - DNA, 13 bp, Artificial Sequence
  Oligonucleotide for detection of SNP TSC0030960
aagttttgtgaaa

SEQ ID NO: 123828 - DNA, 13 bp, Artificial Sequence
  Oligonucleotide for detection of SNP TSC0030960
tttcacaaaactt

SEQ ID NO: 123829 - DNA, 13 bp, Artificial Sequence
  Oligonucleotide for detection of SNP TSC0030960
aagtttcgtgaaa

SEQ ID NO: 123830 - DNA, 13 bp, Artificial Sequence
  Oligonucleotide for detection of SNP TSC0030960
tttcacgaaactt

SEQ ID NO: 123831 - DNA, 13 bp, Artificial Sequence
  Oligonucleotide for detection of SNP TSC0030961
tttagaagttaat

SEQ ID NO: 123832 - DNA, 13 bp, Artificial Sequence
  Oligonucleotide for detection of SNP TSC0030961
attaacttctaaa

SEQ ID NO: 123833 - DNA, 13 bp, Artificial Sequence
  Oligonucleotide for detection of SNP TSC0030961
tttagaggttaat

SEQ ID NO: 123834 - DNA, 13 bp, Artificial Sequence
  Oligonucleotide for detection of SNP TSC0030961
attaacctctaaa

SEQ ID NO: 123835 - DNA, 13 bp, Artificial Sequence
  Oligonucleotide for detection of SNP TSC0030962
ttttgtgaggttt

SEQ ID NO: 123836 - DNA, 13 bp, Artificial Sequence
  Oligonucleotide for detection of SNP TSC0030962
aaacctcacaaaa

SEQ ID NO: 123837 - DNA, 13 bp, Artificial Sequence
  Oligonucleotide for detection of SNP TSC0030962
ttttgtaaggttt

SEQ ID NO: 123838 - DNA, 13 bp, Artificial Sequence
  Oligonucleotide for detection of SNP TSC0030962
aaaccttacaaaa

SEQ ID NO: 123839 - DNA, 13 bp, Artificial Sequence
  Oligonucleotide for detection of SNP TSC0030968
agagaagttaaty

SEQ ID NO: 123840 - DNA, 13 bp, Artificial Sequence
  Oligonucleotide for detection of SNP TSC0030968
rattaacttctct

SEQ ID NO: 123841 - DNA, 13 bp, Artificial Sequence
  Oligonucleotide for detection of SNP TSC0030968
agagaaattaaty

SEQ ID NO: 123842 - DNA, 13 bp, Artificial Sequence
  Oligonucleotide for detection of SNP TSC0030968
rattaatttctct

SEQ ID NO: 123843 - DNA, 13 bp, Artificial Sequence
  Oligonucleotide for detection of SNP TSC0030969
gtatttaaagtty

SEQ ID NO: 123844 - DNA, 13 bp, Artificial Sequence
  Oligonucleotide for detection of SNP TSC0030969
raactttaaatac

SEQ ID NO: 123845 - DNA, 13 bp, Artificial Sequence
  Oligonucleotide for detection of SNP TSC0030969
gtatttgaagtty

SEQ ID NO: 123846 - DNA, 13 bp, Artificial Sequence
  Oligonucleotide for detection of SNP TSC0030969
raacttcaaatac

SEQ ID NO: 123847 - DNA, 13 bp, Artificial Sequence
  Oligonucleotide for detection of SNP TSC0030971
tttaaggtttaga

SEQ ID NO: 123848 - DNA, 13 bp, Artificial Sequence
  Oligonucleotide for detection of SNP TSC0030971
tctaaaccttaaa

SEQ ID NO: 123849 - DNA, 13 bp, Artificial Sequence
  Oligonucleotide for detection of SNP TSC0030971
tttaagatttaga

SEQ ID NO: 123850 - DNA, 13 bp, Artificial Sequence
  Oligonucleotide for detection of SNP TSC0030971
tctaaatcttaaa

SEQ ID NO: 123851 - DNA, 13 bp, Artificial Sequence
  Oligonucleotide for detection of SNP TSC0030972
tgtgttatatggt

SEQ ID NO: 123852 - DNA, 13 bp, Artificial Sequence
  Oligonucleotide for detection of SNP TSC0030972
accatataacaca

SEQ ID NO: 123853 - DNA, 13 bp, Artificial Sequence
  Oligonucleotide for detection of SNP TSC0030972
tgtgttgtatggt

SEQ ID NO: 123854 - DNA, 13 bp, Artificial Sequence
  Oligonucleotide for detection of SNP TSC0030972
accatacaacaca

SEQ ID NO: 123855 - DNA, 13 bp, Artificial Sequence
  Oligonucleotide for detection of SNP TSC0030972
tgtgttatacggt

SEQ ID NO: 123856 - DNA, 13 bp, Artificial Sequence
  Oligonucleotide for detection of SNP TSC0030972
accgtataacaca

SEQ ID NO: 123857 - DNA, 13 bp, Artificial Sequence
  Oligonucleotide for detection of SNP TSC0030972
tgtgttgtacggt

SEQ ID NO: 123858 - DNA, 13 bp, Artificial Sequence
  Oligonucleotide for detection of SNP TSC0030972
accgtacaacaca

SEQ ID NO: 123859 - DNA, 13 bp, Artificial Sequence
  Oligonucleotide for detection of SNP TSC0030976
gtttttgtgagag

SEQ ID NO: 123860 - DNA, 13 bp, Artificial Sequence
  Oligonucleotide for detection of SNP TSC0030976
ctctcacaaaaac

SEQ ID NO: 123861 - DNA, 13 bp, Artificial Sequence
  Oligonucleotide for detection of SNP TSC0030976
gtttttttgagag

SEQ ID NO: 123862 - DNA, 13 bp, Artificial Sequence
  Oligonucleotide for detection of SNP TSC0030976
ctctcaaaaaaac

SEQ ID NO: 123863 - DNA, 13 bp, Artificial Sequence
  Oligonucleotide for detection of SNP TSC0030976
gtttttgcgagag

SEQ ID NO: 123864 - DNA, 13 bp, Artificial Sequence
  Oligonucleotide for detection of SNP TSC0030976
ctctcgcaaaaac

SEQ ID NO: 123865 - DNA, 13 bp, Artificial Sequence
  Oligonucleotide for detection of SNP TSC0030976
gttttttcgagag

SEQ ID NO: 123866 - DNA, 13 bp, Artificial Sequence
  Oligonucleotide for detection of SNP TSC0030976
ctctcgaaaaaac

SEQ ID NO: 123867 - DNA, 13 bp, Artificial Sequence
  Oligonucleotide for detection of SNP TSC0030976
tttttgtaaaagy

SEQ ID NO: 123868 - DNA, 13 bp, Artificial Sequence
  Oligonucleotide for detection of SNP TSC0030976
rcttttacaaaaa

SEQ ID NO: 123869 - DNA, 13 bp, Artificial Sequence
  Oligonucleotide for detection of SNP TSC0030976
tttttgaaaaagy

SEQ ID NO: 123870 - DNA, 13 bp, Artificial Sequence
  Oligonucleotide for detection of SNP TSC0030976
rctttttcaaaaa

SEQ ID NO: 123871 - DNA, 13 bp, Artificial Sequence
  Oligonucleotide for detection of SNP TSC0030976
ttttcgtaaaagy

SEQ ID NO: 123872 - DNA, 13 bp, Artificial Sequence
  Oligonucleotide for detection of SNP TSC0030976
rcttttacgaaaa

SEQ ID NO: 123873 - DNA, 13 bp, Artificial Sequence
  Oligonucleotide for detection of SNP TSC0030976
ttttcgaaaaagy

SEQ ID NO: 123874 - DNA, 13 bp, Artificial Sequence
  Oligonucleotide for detection of SNP TSC0030976
rctttttcgaaaa

SEQ ID NO: 123875 - DNA, 13 bp, Artificial Sequence
  Oligonucleotide for detection of SNP TSC0030977
aatatgtgaagta

SEQ ID NO: 123876 - DNA, 13 bp, Artificial Sequence
  Oligonucleotide for detection of SNP TSC0030977
tacttcacatatt

SEQ ID NO: 123877 - DNA, 13 bp, Artificial Sequence
  Oligonucleotide for detection of SNP TSC0030977
aatatgcgaagta

SEQ ID NO: 123878 - DNA, 13 bp, Artificial Sequence
  Oligonucleotide for detection of SNP TSC0030977
tacttcgcatatt

SEQ ID NO: 123879 - DNA, 13 bp, Artificial Sequence
  Oligonucleotide for detection of SNP TSC0030977
tgttttgtatgtt

SEQ ID NO: 123880 - DNA, 13 bp, Artificial Sequence
  Oligonucleotide for detection of SNP TSC0030977
aacatacaaaaca

SEQ ID NO: 123881 - DNA, 13 bp, Artificial Sequence
  Oligonucleotide for detection of SNP TSC0030977
tgttttatatgtt

SEQ ID NO: 123882 - DNA, 13 bp, Artificial Sequence
  Oligonucleotide for detection of SNP TSC0030977
aacatataaaaca

SEQ ID NO: 123883 - DNA, 13 bp, Artificial Sequence
  Oligonucleotide for detection of SNP TSC0030977
tgtttcgtatgtt

SEQ ID NO: 123884 - DNA, 13 bp, Artificial Sequence
  Oligonucleotide for detection of SNP TSC0030977
aacatacgaaaca

SEQ ID NO: 123885 - DNA, 13 bp, Artificial Sequence
  Oligonucleotide for detection of SNP TSC0030978
ataataagatgat

SEQ ID NO: 123886 - DNA, 13 bp, Artificial Sequence
  Oligonucleotide for detection of SNP TSC0030978
atcatcttattat

SEQ ID NO: 123887 - DNA, 13 bp, Artificial Sequence
  Oligonucleotide for detection of SNP TSC0030978
ataataggatgat

SEQ ID NO: 123888 - DNA, 13 bp, Artificial Sequence
  Oligonucleotide for detection of SNP TSC0030978
atcatcctattat

SEQ ID NO: 123889 - DNA, 13 bp, Artificial Sequence
  Oligonucleotide for detection of SNP TSC0030979
gttttaagagttt

SEQ ID NO: 123890 - DNA, 13 bp, Artificial Sequence
  Oligonucleotide for detection of SNP TSC0030979
aaactcttaaaac

SEQ ID NO: 123891 - DNA, 13 bp, Artificial Sequence
  Oligonucleotide for detection of SNP TSC0030979
gttttaggagttt

SEQ ID NO: 123892 - DNA, 13 bp, Artificial Sequence
  Oligonucleotide for detection of SNP TSC0030979
aaactcctaaaac

SEQ ID NO: 123893 - DNA, 13 bp, Artificial Sequence
  Oligonucleotide for detection of SNP TSC0030980
ttttaaggtatta

SEQ ID NO: 123894 - DNA, 13 bp, Artificial Sequence
  Oligonucleotide for detection of SNP TSC0030980
taataccttaaaa

SEQ ID NO: 123895 - DNA, 13 bp, Artificial Sequence
  Oligonucleotide for detection of SNP TSC0030980
tagtgttttaaaa

SEQ ID NO: 123896 - DNA, 13 bp, Artificial Sequence
  Oligonucleotide for detection of SNP TSC0030980
ttttaaaacacta

SEQ ID NO: 123897 - DNA, 13 bp, Artificial Sequence
  Oligonucleotide for detection of SNP TSC0030980
tagtgtattaaaa

SEQ ID NO: 123898 - DNA, 13 bp, Artificial Sequence
  Oligonucleotide for detection of SNP TSC0030980
ttttaatacacta

SEQ ID NO: 123899 - DNA, 13 bp, Artificial Sequence
  Oligonucleotide for detection of SNP TSC0030983
gagagttgatgag

SEQ ID NO: 123900 - DNA, 13 bp, Artificial Sequence
  Oligonucleotide for detection of SNP TSC0030983
ctcatcaactctc

SEQ ID NO: 123901 - DNA, 13 bp, Artificial Sequence
  Oligonucleotide for detection of SNP TSC0030983
gagagtcgatgag

SEQ ID NO: 123902 - DNA, 13 bp, Artificial Sequence
  Oligonucleotide for detection of SNP TSC0030983
ctcatcgactctc

SEQ ID NO: 123903 - DNA, 13 bp, Artificial Sequence
  Oligonucleotide for detection of SNP TSC0030983
gagagttgacgag

SEQ ID NO: 123904 - DNA, 13 bp, Artificial Sequence
  Oligonucleotide for detection of SNP TSC0030983
ctcgtcaactctc

SEQ ID NO: 123905 - DNA, 13 bp, Artificial Sequence
  Oligonucleotide for detection of SNP TSC0030983
gagagtcgacgag

SEQ ID NO: 123906 - DNA, 13 bp, Artificial Sequence
  Oligonucleotide for detection of SNP TSC0030983
ctcgtcgactctc

SEQ ID NO: 123907 - DNA, 13 bp, Artificial Sequence
  Oligonucleotide for detection of SNP TSC0030983
ttcgttggtttty

SEQ ID NO: 123908 - DNA, 13 bp, Artificial Sequence
  Oligonucleotide for detection of SNP TSC0030983
raaaaccaacgaa

SEQ ID NO: 123909 - DNA, 13 bp, Artificial Sequence
  Oligonucleotide for detection of SNP TSC0030983
ttcgttagtttty

SEQ ID NO: 123910 - DNA, 13 bp, Artificial Sequence
  Oligonucleotide for detection of SNP TSC0030983
raaaactaacgaa

SEQ ID NO: 123911 - DNA, 13 bp, Artificial Sequence
  Oligonucleotide for detection of SNP TSC0030983
ttcgtcggtttty

SEQ ID NO: 123912 - DNA, 13 bp, Artificial Sequence
  Oligonucleotide for detection of SNP TSC0030983
raaaaccgacgaa

SEQ ID NO: 123913 - DNA, 13 bp, Artificial Sequence
  Oligonucleotide for detection of SNP TSC0030984
ttttttaggatgg

SEQ ID NO: 123914 - DNA, 13 bp, Artificial Sequence
  Oligonucleotide for detection of SNP TSC0030984
ccatcctaaaaaa

SEQ ID NO: 123915 - DNA, 13 bp, Artificial Sequence
  Oligonucleotide for detection of SNP TSC0030984
ttttttgggatgg

SEQ ID NO: 123916 - DNA, 13 bp, Artificial Sequence
  Oligonucleotide for detection of SNP TSC0030984
ccatcccaaaaaa

SEQ ID NO: 123917 - DNA, 13 bp, Artificial Sequence
  Oligonucleotide for detection of SNP TSC0030984
tttttcgggatgg

SEQ ID NO: 123918 - DNA, 13 bp, Artificial Sequence
  Oligonucleotide for detection of SNP TSC0030984
ccatcccgaaaaa

SEQ ID NO: 123919 - DNA, 13 bp, Artificial Sequence
  Oligonucleotide for detection of SNP TSC0030984
ttattttggagaa

SEQ ID NO: 123920 - DNA, 13 bp, Artificial Sequence
  Oligonucleotide for detection of SNP TSC0030984
ttctccaaaataa

SEQ ID NO: 123921 - DNA, 13 bp, Artificial Sequence
  Oligonucleotide for detection of SNP TSC0030984
ttatttcggagaa

SEQ ID NO: 123922 - DNA, 13 bp, Artificial Sequence
  Oligonucleotide for detection of SNP TSC0030984
ttctccgaaataa

SEQ ID NO: 123923 - DNA, 13 bp, Artificial Sequence
  Oligonucleotide for detection of SNP TSC0030985
tattagaaaaaaa

SEQ ID NO: 123924 - DNA, 13 bp, Artificial Sequence
  Oligonucleotide for detection of SNP TSC0030985
tttttttctaata

SEQ ID NO: 123925 - DNA, 13 bp, Artificial Sequence
  Oligonucleotide for detection of SNP TSC0030985
tattaggaaaaaa

SEQ ID NO: 123926 - DNA, 13 bp, Artificial Sequence
  Oligonucleotide for detection of SNP TSC0030985
ttttttcctaata

SEQ ID NO: 123927 - DNA, 13 bp, Artificial Sequence
  Oligonucleotide for detection of SNP TSC0030986
tgggggtgtggtg

SEQ ID NO: 123928 - DNA, 13 bp, Artificial Sequence
  Oligonucleotide for detection of SNP TSC0030986
caccacaccccca

SEQ ID NO: 123929 - DNA, 13 bp, Artificial Sequence
  Oligonucleotide for detection of SNP TSC0030986
tgggggggtggtg

SEQ ID NO: 123930 - DNA, 13 bp, Artificial Sequence
  Oligonucleotide for detection of SNP TSC0030986
caccaccccccca

SEQ ID NO: 123931 - DNA, 13 bp, Artificial Sequence
  Oligonucleotide for detection of SNP TSC0030986
tgggggcgtggtg

SEQ ID NO: 123932 - DNA, 13 bp, Artificial Sequence
  Oligonucleotide for detection of SNP TSC0030986
caccacgccccca

SEQ ID NO: 123933 - DNA, 13 bp, Artificial Sequence
  Oligonucleotide for detection of SNP TSC0030986
tgggggggcggtg

SEQ ID NO: 123934 - DNA, 13 bp, Artificial Sequence
  Oligonucleotide for detection of SNP TSC0030986
caccgccccccca

SEQ ID NO: 123935 - DNA, 13 bp, Artificial Sequence
  Oligonucleotide for detection of SNP TSC0030986
tgggggtgcggtg

SEQ ID NO: 123936 - DNA, 13 bp, Artificial Sequence
  Oligonucleotide for detection of SNP TSC0030986
caccgcaccccca

SEQ ID NO: 123937 - DNA, 13 bp, Artificial Sequence
  Oligonucleotide for detection of SNP TSC0030986
tgggggcgcggtg

SEQ ID NO: 123938 - DNA, 13 bp, Artificial Sequence
  Oligonucleotide for detection of SNP TSC0030986
caccgcgccccca

SEQ ID NO: 123939 - DNA, 13 bp, Artificial Sequence
  Oligonucleotide for detection of SNP TSC0030986
tattgtgttttta

SEQ ID NO: 123940 - DNA, 13 bp, Artificial Sequence
  Oligonucleotide for detection of SNP TSC0030986
taaaaacacaata

SEQ ID NO: 123941 - DNA, 13 bp, Artificial Sequence
  Oligonucleotide for detection of SNP TSC0030986
tattgttttttta

SEQ ID NO: 123942 - DNA, 13 bp, Artificial Sequence
  Oligonucleotide for detection of SNP TSC0030986
taaaaaaacaata

SEQ ID NO: 123943 - DNA, 13 bp, Artificial Sequence
  Oligonucleotide for detection of SNP TSC0030986
tatcgtgttttta

SEQ ID NO: 123944 - DNA, 13 bp, Artificial Sequence
  Oligonucleotide for detection of SNP TSC0030986
taaaaacacgata

SEQ ID NO: 123945 - DNA, 13 bp, Artificial Sequence
  Oligonucleotide for detection of SNP TSC0030986
tatcgttttttta

SEQ ID NO: 123946 - DNA, 13 bp, Artificial Sequence
  Oligonucleotide for detection of SNP TSC0030986
taaaaaaacgata

SEQ ID NO: 123947 - DNA, 13 bp, Artificial Sequence
  Oligonucleotide for detection of SNP TSC0030986
tattgcgttttta

SEQ ID NO: 123948 - DNA, 13 bp, Artificial Sequence
  Oligonucleotide for detection of SNP TSC0030986
taaaaacgcaata

SEQ ID NO: 123949 - DNA, 13 bp, Artificial Sequence
  Oligonucleotide for detection of SNP TSC0030986
tatcgcgttttta

SEQ ID NO: 123950 - DNA, 13 bp, Artificial Sequence
  Oligonucleotide for detection of SNP TSC0030986
taaaaacgcgata

SEQ ID NO: 123951 - DNA, 13 bp, Artificial Sequence
  Oligonucleotide for detection of SNP TSC0030988
gagaaatttatga

SEQ ID NO: 123952 - DNA, 13 bp, Artificial Sequence
  Oligonucleotide for detection of SNP TSC0030988
tcataaatttctc

SEQ ID NO: 123953 - DNA, 13 bp, Artificial Sequence
  Oligonucleotide for detection of SNP TSC0030988
gagaaaattatga

SEQ ID NO: 123954 - DNA, 13 bp, Artificial Sequence
  Oligonucleotide for detection of SNP TSC0030988
tcataattttctc

SEQ ID NO: 123955 - DNA, 13 bp, Artificial Sequence
  Oligonucleotide for detection of SNP TSC0030989
aaggaggaaaatt

SEQ ID NO: 123956 - DNA, 13 bp, Artificial Sequence
  Oligonucleotide for detection of SNP TSC0030989
aattttcctcctt

SEQ ID NO: 123957 - DNA, 13 bp, Artificial Sequence
  Oligonucleotide for detection of SNP TSC0030989
aaggagaaaaatt

SEQ ID NO: 123958 - DNA, 13 bp, Artificial Sequence
  Oligonucleotide for detection of SNP TSC0030989
aatttttctcctt

SEQ ID NO: 123959 - DNA, 13 bp, Artificial Sequence
  Oligonucleotide for detection of SNP TSC0030990
tttttaatttatt

SEQ ID NO: 123960 - DNA, 13 bp, Artificial Sequence
  Oligonucleotide for detection of SNP TSC0030990
aataaattaaaaa

SEQ ID NO: 123961 - DNA, 13 bp, Artificial Sequence
  Oligonucleotide for detection of SNP TSC0030993
gagtggaaagaaa

SEQ ID NO: 123962 - DNA, 13 bp, Artificial Sequence
  Oligonucleotide for detection of SNP TSC0030993
tttctttccactc

SEQ ID NO: 123963 - DNA, 13 bp, Artificial Sequence
  Oligonucleotide for detection of SNP TSC0030993
gagtgggaagaaa

SEQ ID NO: 123964 - DNA, 13 bp, Artificial Sequence
  Oligonucleotide for detection of SNP TSC0030993
tttcttcccactc

SEQ ID NO: 123965 - DNA, 13 bp, Artificial Sequence
  Oligonucleotide for detection of SNP TSC0030994
ggtttttagatgg

SEQ ID NO: 123966 - DNA, 13 bp, Artificial Sequence
  Oligonucleotide for detection of SNP TSC0030994
ccatctaaaaacc

SEQ ID NO: 123967 - DNA, 13 bp, Artificial Sequence
  Oligonucleotide for detection of SNP TSC0030994
ggttttgagatgg

SEQ ID NO: 123968 - DNA, 13 bp, Artificial Sequence
  Oligonucleotide for detection of SNP TSC0030994
ccatctcaaaacc

SEQ ID NO: 123969 - DNA, 13 bp, Artificial Sequence
  Oligonucleotide for detection of SNP TSC0030994
ggtttttagacgg

SEQ ID NO: 123970 - DNA, 13 bp, Artificial Sequence
  Oligonucleotide for detection of SNP TSC0030994
ccgtctaaaaacc

SEQ ID NO: 123971 - DNA, 13 bp, Artificial Sequence
  Oligonucleotide for detection of SNP TSC0030994
ggttttgagacgg

SEQ ID NO: 123972 - DNA, 13 bp, Artificial Sequence
  Oligonucleotide for detection of SNP TSC0030994
ccgtctcaaaacc

SEQ ID NO: 123973 - DNA, 13 bp, Artificial Sequence
  Oligonucleotide for detection of SNP TSC0030994
ttgtttgagaaty

SEQ ID NO: 123974 - DNA, 13 bp, Artificial Sequence
  Oligonucleotide for detection of SNP TSC0030994
rattctcaaacaa

SEQ ID NO: 123975 - DNA, 13 bp, Artificial Sequence
  Oligonucleotide for detection of SNP TSC0030994
ttgttttagaaty

SEQ ID NO: 123976 - DNA, 13 bp, Artificial Sequence
  Oligonucleotide for detection of SNP TSC0030994
rattctaaaacaa

SEQ ID NO: 123977 - DNA, 13 bp, Artificial Sequence
  Oligonucleotide for detection of SNP TSC0030994
tcgtttgagaaty

SEQ ID NO: 123978 - DNA, 13 bp, Artificial Sequence
  Oligonucleotide for detection of SNP TSC0030994
rattctcaaacga

SEQ ID NO: 123979 - DNA, 13 bp, Artificial Sequence
  Oligonucleotide for detection of SNP TSC0030994
tcgttttagaaty

SEQ ID NO: 123980 - DNA, 13 bp, Artificial Sequence
  Oligonucleotide for detection of SNP TSC0030994
rattctaaaacga

SEQ ID NO: 123981 - DNA, 13 bp, Artificial Sequence
  Oligonucleotide for detection of SNP TSC0030995
tttaataatgttt

SEQ ID NO: 123982 - DNA, 13 bp, Artificial Sequence
  Oligonucleotide for detection of SNP TSC0030995
aaacattattaaa

SEQ ID NO: 123983 - DNA, 13 bp, Artificial Sequence
  Oligonucleotide for detection of SNP TSC0030995
tttaatgatgttt

SEQ ID NO: 123984 - DNA, 13 bp, Artificial Sequence
  Oligonucleotide for detection of SNP TSC0030995
aaacatcattaaa

SEQ ID NO: 123985 - DNA, 13 bp, Artificial Sequence
  Oligonucleotide for detection of SNP TSC0030996
gatttagtttaga

SEQ ID NO: 123986 - DNA, 13 bp, Artificial Sequence
  Oligonucleotide for detection of SNP TSC0030996
tctaaactaaatc

SEQ ID NO: 123987 - DNA, 13 bp, Artificial Sequence
  Oligonucleotide for detection of SNP TSC0030996
gatttaatttaga

SEQ ID NO: 123988 - DNA, 13 bp, Artificial Sequence
  Oligonucleotide for detection of SNP TSC0030996
tctaaattaaatc

SEQ ID NO: 123989 - DNA, 13 bp, Artificial Sequence
  Oligonucleotide for detection of SNP TSC0030998
tggggaaatagta

SEQ ID NO: 123990 - DNA, 13 bp, Artificial Sequence
  Oligonucleotide for detection of SNP TSC0030998
tactatttcccca

SEQ ID NO: 123991 - DNA, 13 bp, Artificial Sequence
  Oligonucleotide for detection of SNP TSC0030998
tggggagatagta

SEQ ID NO: 123992 - DNA, 13 bp, Artificial Sequence
  Oligonucleotide for detection of SNP TSC0030998
tactatctcccca

SEQ ID NO: 123993 - DNA, 13 bp, Artificial Sequence
  Oligonucleotide for detection of SNP TSC0031000
tttttttttgttg

SEQ ID NO: 123994 - DNA, 13 bp, Artificial Sequence
  Oligonucleotide for detection of SNP TSC0031000
caacaaaaaaaaa

SEQ ID NO: 123995 - DNA, 13 bp, Artificial Sequence
  Oligonucleotide for detection of SNP TSC0031002
attatatgtgtag

SEQ ID NO: 123996 - DNA, 13 bp, Artificial Sequence
  Oligonucleotide for detection of SNP TSC0031002
ctacacatataat

SEQ ID NO: 123997 - DNA, 13 bp, Artificial Sequence
  Oligonucleotide for detection of SNP TSC0031002
attatacgtgtag

SEQ ID NO: 123998 - DNA, 13 bp, Artificial Sequence
  Oligonucleotide for detection of SNP TSC0031002
ctacacgtataat

SEQ ID NO: 123999 - DNA, 13 bp, Artificial Sequence
  Oligonucleotide for detection of SNP TSC0031002
ttatatgtatgat

SEQ ID NO: 124000 - DNA, 13 bp, Artificial Sequence
  Oligonucleotide for detection of SNP TSC0031002
atcatacatataa

SEQ ID NO: 124001 - DNA, 13 bp, Artificial Sequence
  Oligonucleotide for detection of SNP TSC0031002
ttatatatatgat

SEQ ID NO: 124002 - DNA, 13 bp, Artificial Sequence
  Oligonucleotide for detection of SNP TSC0031002
atcatatatataa

SEQ ID NO: 124003 - DNA, 13 bp, Artificial Sequence
  Oligonucleotide for detection of SNP TSC0031002
ttatacgtatgat

SEQ ID NO: 124004 - DNA, 13 bp, Artificial Sequence
  Oligonucleotide for detection of SNP TSC0031002
atcatacgtataa

SEQ ID NO: 124005 - DNA, 13 bp, Artificial Sequence
  Oligonucleotide for detection of SNP TSC0031003
taatatgtgtatt

SEQ ID NO: 124006 - DNA, 13 bp, Artificial Sequence
  Oligonucleotide for detection of SNP TSC0031003
aatacacatatta

SEQ ID NO: 124007 - DNA, 13 bp, Artificial Sequence
  Oligonucleotide for detection of SNP TSC0031003
taatatatgtatt

SEQ ID NO: 124008 - DNA, 13 bp, Artificial Sequence
  Oligonucleotide for detection of SNP TSC0031003
aatacatatatta

SEQ ID NO: 124009 - DNA, 13 bp, Artificial Sequence
  Oligonucleotide for detection of SNP TSC0031005
attataattttta

SEQ ID NO: 124010 - DNA, 13 bp, Artificial Sequence
  Oligonucleotide for detection of SNP TSC0031005
taaaaattataat

SEQ ID NO: 124011 - DNA, 13 bp, Artificial Sequence
  Oligonucleotide for detection of SNP TSC0031005
attatatttttta

SEQ ID NO: 124012 - DNA, 13 bp, Artificial Sequence
  Oligonucleotide for detection of SNP TSC0031005
taaaaaatataat

SEQ ID NO: 124013 - DNA, 13 bp, Artificial Sequence
  Oligonucleotide for detection of SNP TSC0031005
taggggttgtgat

SEQ ID NO: 124014 - DNA, 13 bp, Artificial Sequence
  Oligonucleotide for detection of SNP TSC0031005
atcacaaccccta

SEQ ID NO: 124015 - DNA, 13 bp, Artificial Sequence
  Oligonucleotide for detection of SNP TSC0031005
tagggggtgtgat

SEQ ID NO: 124016 - DNA, 13 bp, Artificial Sequence
  Oligonucleotide for detection of SNP TSC0031005
atcacacccccta

SEQ ID NO: 124017 - DNA, 13 bp, Artificial Sequence
  Oligonucleotide for detection of SNP TSC0031006
ataaaataatgat

SEQ ID NO: 124018 - DNA, 13 bp, Artificial Sequence
  Oligonucleotide for detection of SNP TSC0031006
atcattattttat

SEQ ID NO: 124019 - DNA, 13 bp, Artificial Sequence
  Oligonucleotide for detection of SNP TSC0031006
ataaaagaatgat

SEQ ID NO: 124020 - DNA, 13 bp, Artificial Sequence
  Oligonucleotide for detection of SNP TSC0031006
atcattcttttat

SEQ ID NO: 124021 - DNA, 13 bp, Artificial Sequence
  Oligonucleotide for detection of SNP TSC0031007
ttagtaatgttta

SEQ ID NO: 124022 - DNA, 13 bp, Artificial Sequence
  Oligonucleotide for detection of SNP TSC0031007
taaacattactaa

SEQ ID NO: 124023 - DNA, 13 bp, Artificial Sequence
  Oligonucleotide for detection of SNP TSC0031007
ttagtagtgttta

SEQ ID NO: 124024 - DNA, 13 bp, Artificial Sequence
  Oligonucleotide for detection of SNP TSC0031007
taaacactactaa

SEQ ID NO: 124025 - DNA, 13 bp, Artificial Sequence
  Oligonucleotide for detection of SNP TSC0031007
ttagtaacgttta

SEQ ID NO: 124026 - DNA, 13 bp, Artificial Sequence
  Oligonucleotide for detection of SNP TSC0031007
taaacgttactaa

SEQ ID NO: 124027 - DNA, 13 bp, Artificial Sequence
  Oligonucleotide for detection of SNP TSC0031007
ttagtagcgttta

SEQ ID NO: 124028 - DNA, 13 bp, Artificial Sequence
  Oligonucleotide for detection of SNP TSC0031007
taaacgctactaa

SEQ ID NO: 124029 - DNA, 13 bp, Artificial Sequence
  Oligonucleotide for detection of SNP TSC0031015
gaggttaggtagg

SEQ ID NO: 124030 - DNA, 13 bp, Artificial Sequence
  Oligonucleotide for detection of SNP TSC0031015
cctacctaacctc

SEQ ID NO: 124031 - DNA, 13 bp, Artificial Sequence
  Oligonucleotide for detection of SNP TSC0031015
gaggttgggtagg

SEQ ID NO: 124032 - DNA, 13 bp, Artificial Sequence
  Oligonucleotide for detection of SNP TSC0031015
cctacccaacctc

SEQ ID NO: 124033 - DNA, 13 bp, Artificial Sequence
  Oligonucleotide for detection of SNP TSC0031015
gaggtcgggtagg

SEQ ID NO: 124034 - DNA, 13 bp, Artificial Sequence
  Oligonucleotide for detection of SNP TSC0031015
cctacccgacctc

SEQ ID NO: 124035 - DNA, 13 bp, Artificial Sequence
  Oligonucleotide for detection of SNP TSC0031015
tttgtttggttty

SEQ ID NO: 124036 - DNA, 13 bp, Artificial Sequence
  Oligonucleotide for detection of SNP TSC0031015
raaaccaaacaaa

SEQ ID NO: 124037 - DNA, 13 bp, Artificial Sequence
  Oligonucleotide for detection of SNP TSC0031015
tttgttcggttty

SEQ ID NO: 124038 - DNA, 13 bp, Artificial Sequence
  Oligonucleotide for detection of SNP TSC0031015
raaaccgaacaaa

SEQ ID NO: 124039 - DNA, 13 bp, Artificial Sequence
  Oligonucleotide for detection of SNP TSC0031017
aaatgggaatgta

SEQ ID NO: 124040 - DNA, 13 bp, Artificial Sequence
  Oligonucleotide for detection of SNP TSC0031017
tacattcccattt

SEQ ID NO: 124041 - DNA, 13 bp, Artificial Sequence
  Oligonucleotide for detection of SNP TSC0031017
aaatggaaatgta

SEQ ID NO: 124042 - DNA, 13 bp, Artificial Sequence
  Oligonucleotide for detection of SNP TSC0031017
tacatttccattt

SEQ ID NO: 124043 - DNA, 13 bp, Artificial Sequence
  Oligonucleotide for detection of SNP TSC0031017
aaatgggaacgta

SEQ ID NO: 124044 - DNA, 13 bp, Artificial Sequence
  Oligonucleotide for detection of SNP TSC0031017
tacgttcccattt

SEQ ID NO: 124045 - DNA, 13 bp, Artificial Sequence
  Oligonucleotide for detection of SNP TSC0031017
aaatggaaacgta

SEQ ID NO: 124046 - DNA, 13 bp, Artificial Sequence
  Oligonucleotide for detection of SNP TSC0031017
tacgtttccattt

SEQ ID NO: 124047 - DNA, 13 bp, Artificial Sequence
  Oligonucleotide for detection of SNP TSC0031018
tagagagagtggy

SEQ ID NO: 124048 - DNA, 13 bp, Artificial Sequence
  Oligonucleotide for detection of SNP TSC0031018
rccactctctcta

SEQ ID NO: 124049 - DNA, 13 bp, Artificial Sequence
  Oligonucleotide for detection of SNP TSC0031018
tagagatagtggy

SEQ ID NO: 124050 - DNA, 13 bp, Artificial Sequence
  Oligonucleotide for detection of SNP TSC0031018
rccactatctcta

SEQ ID NO: 124051 - DNA, 13 bp, Artificial Sequence
  Oligonucleotide for detection of SNP TSC0031019
gtaaaggtaaaga

SEQ ID NO: 124052 - DNA, 13 bp, Artificial Sequence
  Oligonucleotide for detection of SNP TSC0031019
tctttacctttac

SEQ ID NO: 124053 - DNA, 13 bp, Artificial Sequence
  Oligonucleotide for detection of SNP TSC0031019
gtaaagataaaga

SEQ ID NO: 124054 - DNA, 13 bp, Artificial Sequence
  Oligonucleotide for detection of SNP TSC0031019
tctttatctttac

SEQ ID NO: 124055 - DNA, 13 bp, Artificial Sequence
  Oligonucleotide for detection of SNP TSC0031020
ttttgagggtttt

SEQ ID NO: 124056 - DNA, 13 bp, Artificial Sequence
  Oligonucleotide for detection of SNP TSC0031020
aaaaccctcaaaa

SEQ ID NO: 124057 - DNA, 13 bp, Artificial Sequence
  Oligonucleotide for detection of SNP TSC0031020
ttttgaaggtttt

SEQ ID NO: 124058 - DNA, 13 bp, Artificial Sequence
  Oligonucleotide for detection of SNP TSC0031020
aaaaccttcaaaa

SEQ ID NO: 124059 - DNA, 13 bp, Artificial Sequence
  Oligonucleotide for detection of SNP TSC0031020
tttcgagggtttt

SEQ ID NO: 124060 - DNA, 13 bp, Artificial Sequence
  Oligonucleotide for detection of SNP TSC0031020
aaaaccctcgaaa

SEQ ID NO: 124061 - DNA, 13 bp, Artificial Sequence
  Oligonucleotide for detection of SNP TSC0031020
tttcgaaggtttt

SEQ ID NO: 124062 - DNA, 13 bp, Artificial Sequence
  Oligonucleotide for detection of SNP TSC0031020
aaaaccttcgaaa

SEQ ID NO: 124063 - DNA, 13 bp, Artificial Sequence
  Oligonucleotide for detection of SNP TSC0031023
gttgatattatta

SEQ ID NO: 124064 - DNA, 13 bp, Artificial Sequence
  Oligonucleotide for detection of SNP TSC0031023
taataatatcaac

SEQ ID NO: 124065 - DNA, 13 bp, Artificial Sequence
  Oligonucleotide for detection of SNP TSC0031023
gttgatgttatta

SEQ ID NO: 124066 - DNA, 13 bp, Artificial Sequence
  Oligonucleotide for detection of SNP TSC0031023
taataacatcaac

SEQ ID NO: 124067 - DNA, 13 bp, Artificial Sequence
  Oligonucleotide for detection of SNP TSC0031026
atttagagtgtty

SEQ ID NO: 124068 - DNA, 13 bp, Artificial Sequence
  Oligonucleotide for detection of SNP TSC0031026
raacactctaaat

SEQ ID NO: 124069 - DNA, 13 bp, Artificial Sequence
  Oligonucleotide for detection of SNP TSC0031026
atttagtgtgtty

SEQ ID NO: 124070 - DNA, 13 bp, Artificial Sequence
  Oligonucleotide for detection of SNP TSC0031026
raacacactaaat

SEQ ID NO: 124071 - DNA, 13 bp, Artificial Sequence
  Oligonucleotide for detection of SNP TSC0031026
gaatattttgagt

SEQ ID NO: 124072 - DNA, 13 bp, Artificial Sequence
  Oligonucleotide for detection of SNP TSC0031026
actcaaaatattc

SEQ ID NO: 124073 - DNA, 13 bp, Artificial Sequence
  Oligonucleotide for detection of SNP TSC0031026
gaatatattgagt

SEQ ID NO: 124074 - DNA, 13 bp, Artificial Sequence
  Oligonucleotide for detection of SNP TSC0031026
actcaatatattc

SEQ ID NO: 124075 - DNA, 13 bp, Artificial Sequence
  Oligonucleotide for detection of SNP TSC0031027
taagtgtgaaaga

SEQ ID NO: 124076 - DNA, 13 bp, Artificial Sequence
  Oligonucleotide for detection of SNP TSC0031027
tctttcacactta

SEQ ID NO: 124077 - DNA, 13 bp, Artificial Sequence
  Oligonucleotide for detection of SNP TSC0031027
taagtgcgaaaga

SEQ ID NO: 124078 - DNA, 13 bp, Artificial Sequence
  Oligonucleotide for detection of SNP TSC0031027
tctttcgcactta

SEQ ID NO: 124079 - DNA, 13 bp, Artificial Sequence
  Oligonucleotide for detection of SNP TSC0031028
ggtttggttggta

SEQ ID NO: 124080 - DNA, 13 bp, Artificial Sequence
  Oligonucleotide for detection of SNP TSC0031028
taccaaccaaacc

SEQ ID NO: 124081 - DNA, 13 bp, Artificial Sequence
  Oligonucleotide for detection of SNP TSC0031028
ggtttgattggta

SEQ ID NO: 124082 - DNA, 13 bp, Artificial Sequence
  Oligonucleotide for detection of SNP TSC0031028
taccaatcaaacc

SEQ ID NO: 124083 - DNA, 13 bp, Artificial Sequence
  Oligonucleotide for detection of SNP TSC0031029
tgtatagttgtgy

SEQ ID NO: 124084 - DNA, 13 bp, Artificial Sequence
  Oligonucleotide for detection of SNP TSC0031029
rcacaactataca

SEQ ID NO: 124085 - DNA, 13 bp, Artificial Sequence
  Oligonucleotide for detection of SNP TSC0031029
tgtataattgtgy

SEQ ID NO: 124086 - DNA, 13 bp, Artificial Sequence
  Oligonucleotide for detection of SNP TSC0031029
rcacaattataca

SEQ ID NO: 124087 - DNA, 13 bp, Artificial Sequence
  Oligonucleotide for detection of SNP TSC0031029
tgtatagtcgtgy

SEQ ID NO: 124088 - DNA, 13 bp, Artificial Sequence
  Oligonucleotide for detection of SNP TSC0031029
rcacgactataca

SEQ ID NO: 124089 - DNA, 13 bp, Artificial Sequence
  Oligonucleotide for detection of SNP TSC0031029
tgtataatcgtgy

SEQ ID NO: 124090 - DNA, 13 bp, Artificial Sequence
  Oligonucleotide for detection of SNP TSC0031029
rcacgattataca

SEQ ID NO: 124091 - DNA, 13 bp, Artificial Sequence
  Oligonucleotide for detection of SNP TSC0031029
tgtatagttgcgy

SEQ ID NO: 124092 - DNA, 13 bp, Artificial Sequence
  Oligonucleotide for detection of SNP TSC0031029
rcgcaactataca

SEQ ID NO: 124093 - DNA, 13 bp, Artificial Sequence
  Oligonucleotide for detection of SNP TSC0031029
tgtataattgcgy

SEQ ID NO: 124094 - DNA, 13 bp, Artificial Sequence
  Oligonucleotide for detection of SNP TSC0031029
rcgcaattataca

SEQ ID NO: 124095 - DNA, 13 bp, Artificial Sequence
  Oligonucleotide for detection of SNP TSC0031029
tgtatagtcgcgy

SEQ ID NO: 124096 - DNA, 13 bp, Artificial Sequence
  Oligonucleotide for detection of SNP TSC0031029
rcgcgactataca

SEQ ID NO: 124097 - DNA, 13 bp, Artificial Sequence
  Oligonucleotide for detection of SNP TSC0031029
tgtataatcgcgy

SEQ ID NO: 124098 - DNA, 13 bp, Artificial Sequence
  Oligonucleotide for detection of SNP TSC0031029
rcgcgattataca

SEQ ID NO: 124099 - DNA, 13 bp, Artificial Sequence
  Oligonucleotide for detection of SNP TSC0031030
tagttggtttaga

SEQ ID NO: 124100 - DNA, 13 bp, Artificial Sequence
  Oligonucleotide for detection of SNP TSC0031030
tctaaaccaacta

SEQ ID NO: 124101 - DNA, 13 bp, Artificial Sequence
  Oligonucleotide for detection of SNP TSC0031030
tagttgatttaga

SEQ ID NO: 124102 - DNA, 13 bp, Artificial Sequence
  Oligonucleotide for detection of SNP TSC0031030
tctaaatcaacta

SEQ ID NO: 124103 - DNA, 13 bp, Artificial Sequence
  Oligonucleotide for detection of SNP TSC0031032
gggaagtgggagg

SEQ ID NO: 124104 - DNA, 13 bp, Artificial Sequence
  Oligonucleotide for detection of SNP TSC0031032
cctcccacttccc

SEQ ID NO: 124105 - DNA, 13 bp, Artificial Sequence
  Oligonucleotide for detection of SNP TSC0031032
gggaagggggagg

SEQ ID NO: 124106 - DNA, 13 bp, Artificial Sequence
  Oligonucleotide for detection of SNP TSC0031032
cctcccccttccc

SEQ ID NO: 124107 - DNA, 13 bp, Artificial Sequence
  Oligonucleotide for detection of SNP TSC0031032
gggaagcgggagg

SEQ ID NO: 124108 - DNA, 13 bp, Artificial Sequence
  Oligonucleotide for detection of SNP TSC0031032
cctcccgcttccc

SEQ ID NO: 124109 - DNA, 13 bp, Artificial Sequence
  Oligonucleotide for detection of SNP TSC0031033
ggatgtaaggttt

SEQ ID NO: 124110 - DNA, 13 bp, Artificial Sequence
  Oligonucleotide for detection of SNP TSC0031033
aaaccttacatcc

SEQ ID NO: 124111 - DNA, 13 bp, Artificial Sequence
  Oligonucleotide for detection of SNP TSC0031033
ggatgtgaggttt

SEQ ID NO: 124112 - DNA, 13 bp, Artificial Sequence
  Oligonucleotide for detection of SNP TSC0031033
aaacctcacatcc

SEQ ID NO: 124113 - DNA, 13 bp, Artificial Sequence
  Oligonucleotide for detection of SNP TSC0031034
tttgggaggttty

SEQ ID NO: 124114 - DNA, 13 bp, Artificial Sequence
  Oligonucleotide for detection of SNP TSC0031034
raaacctcccaaa

SEQ ID NO: 124115 - DNA, 13 bp, Artificial Sequence
  Oligonucleotide for detection of SNP TSC0031034
tttggggggttty

SEQ ID NO: 124116 - DNA, 13 bp, Artificial Sequence
  Oligonucleotide for detection of SNP TSC0031034
raaaccccccaaa

SEQ ID NO: 124117 - DNA, 13 bp, Artificial Sequence
  Oligonucleotide for detection of SNP TSC0031038
agggtaagtgtty

SEQ ID NO: 124118 - DNA, 13 bp, Artificial Sequence
  Oligonucleotide for detection of SNP TSC0031038
raacacttaccct

SEQ ID NO: 124119 - DNA, 13 bp, Artificial Sequence
  Oligonucleotide for detection of SNP TSC0031038
agggtaggtgtty

SEQ ID NO: 124120 - DNA, 13 bp, Artificial Sequence
  Oligonucleotide for detection of SNP TSC0031038
raacacctaccct

SEQ ID NO: 124121 - DNA, 13 bp, Artificial Sequence
  Oligonucleotide for detection of SNP TSC0031041
ttttatatgataa

SEQ ID NO: 124122 - DNA, 13 bp, Artificial Sequence
  Oligonucleotide for detection of SNP TSC0031041
ttatcatataaaa

SEQ ID NO: 124123 - DNA, 13 bp, Artificial Sequence
  Oligonucleotide for detection of SNP TSC0031041
ttttatgtgataa

SEQ ID NO: 124124 - DNA, 13 bp, Artificial Sequence
  Oligonucleotide for detection of SNP TSC0031041
ttatcacataaaa

SEQ ID NO: 124125 - DNA, 13 bp, Artificial Sequence
  Oligonucleotide for detection of SNP TSC0031041
ttttacgtgataa

SEQ ID NO: 124126 - DNA, 13 bp, Artificial Sequence
  Oligonucleotide for detection of SNP TSC0031041
ttatcacgtaaaa

SEQ ID NO: 124127 - DNA, 13 bp, Artificial Sequence
  Oligonucleotide for detection of SNP TSC0031041
ttgttatgtggga

SEQ ID NO: 124128 - DNA, 13 bp, Artificial Sequence
  Oligonucleotide for detection of SNP TSC0031041
tcccacataacaa

SEQ ID NO: 124129 - DNA, 13 bp, Artificial Sequence
  Oligonucleotide for detection of SNP TSC0031041
ttgttacgtggga

SEQ ID NO: 124130 - DNA, 13 bp, Artificial Sequence
  Oligonucleotide for detection of SNP TSC0031041
tcccacgtaacaa

SEQ ID NO: 124131 - DNA, 13 bp, Artificial Sequence
  Oligonucleotide for detection of SNP TSC0031043
gtggagtgagtgg

SEQ ID NO: 124132 - DNA, 13 bp, Artificial Sequence
  Oligonucleotide for detection of SNP TSC0031043
ccactcactccac

SEQ ID NO: 124133 - DNA, 13 bp, Artificial Sequence
  Oligonucleotide for detection of SNP TSC0031043
gtggagcgagtgg

SEQ ID NO: 124134 - DNA, 13 bp, Artificial Sequence
  Oligonucleotide for detection of SNP TSC0031043
ccactcgctccac

SEQ ID NO: 124135 - DNA, 13 bp, Artificial Sequence
  Oligonucleotide for detection of SNP TSC0031045
ttagaagaattta

SEQ ID NO: 124136 - DNA, 13 bp, Artificial Sequence
  Oligonucleotide for detection of SNP TSC0031045
taaattcttctaa

SEQ ID NO: 124137 - DNA, 13 bp, Artificial Sequence
  Oligonucleotide for detection of SNP TSC0031045
ttagaataattta

SEQ ID NO: 124138 - DNA, 13 bp, Artificial Sequence
  Oligonucleotide for detection of SNP TSC0031045
taaattattctaa

SEQ ID NO: 124139 - DNA, 13 bp, Artificial Sequence
  Oligonucleotide for detection of SNP TSC0031045
taaatttttttga

SEQ ID NO: 124140 - DNA, 13 bp, Artificial Sequence
  Oligonucleotide for detection of SNP TSC0031045
tcaaaaaaattta

SEQ ID NO: 124141 - DNA, 13 bp, Artificial Sequence
  Oligonucleotide for detection of SNP TSC0031045
taaattattttga

SEQ ID NO: 124142 - DNA, 13 bp, Artificial Sequence
  Oligonucleotide for detection of SNP TSC0031045
tcaaaataattta

SEQ ID NO: 124143 - DNA, 13 bp, Artificial Sequence
  Oligonucleotide for detection of SNP TSC0031046
tatttagttagta

SEQ ID NO: 124144 - DNA, 13 bp, Artificial Sequence
  Oligonucleotide for detection of SNP TSC0031046
tactaactaaata

SEQ ID NO: 124145 - DNA, 13 bp, Artificial Sequence
  Oligonucleotide for detection of SNP TSC0031047
agtgattgggagg

SEQ ID NO: 124146 - DNA, 13 bp, Artificial Sequence
  Oligonucleotide for detection of SNP TSC0031047
cctcccaatcact

SEQ ID NO: 124147 - DNA, 13 bp, Artificial Sequence
  Oligonucleotide for detection of SNP TSC0031047
agtgatcgggagg

SEQ ID NO: 124148 - DNA, 13 bp, Artificial Sequence
  Oligonucleotide for detection of SNP TSC0031047
cctcccgatcact

SEQ ID NO: 124149 - DNA, 13 bp, Artificial Sequence
  Oligonucleotide for detection of SNP TSC0031047
ttttttggttatt

SEQ ID NO: 124150 - DNA, 13 bp, Artificial Sequence
  Oligonucleotide for detection of SNP TSC0031047
aataaccaaaaaa

SEQ ID NO: 124151 - DNA, 13 bp, Artificial Sequence
  Oligonucleotide for detection of SNP TSC0031047
ttttttagttatt

SEQ ID NO: 124152 - DNA, 13 bp, Artificial Sequence
  Oligonucleotide for detection of SNP TSC0031047
aataactaaaaaa

SEQ ID NO: 124153 - DNA, 13 bp, Artificial Sequence
  Oligonucleotide for detection of SNP TSC0031047
tttttcggttatt

SEQ ID NO: 124154 - DNA, 13 bp, Artificial Sequence
  Oligonucleotide for detection of SNP TSC0031047
aataaccgaaaaa

SEQ ID NO: 124155 - DNA, 13 bp, Artificial Sequence
  Oligonucleotide for detection of SNP TSC0031049
ggtatagatatag

SEQ ID NO: 124156 - DNA, 13 bp, Artificial Sequence
  Oligonucleotide for detection of SNP TSC0031049
ctatatctatacc

SEQ ID NO: 124157 - DNA, 13 bp, Artificial Sequence
  Oligonucleotide for detection of SNP TSC0031049
ggtataaatatag

SEQ ID NO: 124158 - DNA, 13 bp, Artificial Sequence
  Oligonucleotide for detection of SNP TSC0031049
ctatatttatacc

SEQ ID NO: 124159 - DNA, 13 bp, Artificial Sequence
  Oligonucleotide for detection of SNP TSC0031050
ttttagaaggagg

SEQ ID NO: 124160 - DNA, 13 bp, Artificial Sequence
  Oligonucleotide for detection of SNP TSC0031050
cctccttctaaaa

SEQ ID NO: 124161 - DNA, 13 bp, Artificial Sequence
  Oligonucleotide for detection of SNP TSC0031050
ttttaggaggagg

SEQ ID NO: 124162 - DNA, 13 bp, Artificial Sequence
  Oligonucleotide for detection of SNP TSC0031050
cctcctcctaaaa

SEQ ID NO: 124163 - DNA, 13 bp, Artificial Sequence
  Oligonucleotide for detection of SNP TSC0031051
ttttagtggttta

SEQ ID NO: 124164 - DNA, 13 bp, Artificial Sequence
  Oligonucleotide for detection of SNP TSC0031051
taaaccactaaaa

SEQ ID NO: 124165 - DNA, 13 bp, Artificial Sequence
  Oligonucleotide for detection of SNP TSC0031051
ttttagcggttta

SEQ ID NO: 124166 - DNA, 13 bp, Artificial Sequence
  Oligonucleotide for detection of SNP TSC0031051
taaaccgctaaaa

SEQ ID NO: 124167 - DNA, 13 bp, Artificial Sequence
  Oligonucleotide for detection of SNP TSC0031051
tagattgttgaga

SEQ ID NO: 124168 - DNA, 13 bp, Artificial Sequence
  Oligonucleotide for detection of SNP TSC0031051
tctcaacaatcta

SEQ ID NO: 124169 - DNA, 13 bp, Artificial Sequence
  Oligonucleotide for detection of SNP TSC0031051
tagattattgaga

SEQ ID NO: 124170 - DNA, 13 bp, Artificial Sequence
  Oligonucleotide for detection of SNP TSC0031051
tctcaataatcta

SEQ ID NO: 124171 - DNA, 13 bp, Artificial Sequence
  Oligonucleotide for detection of SNP TSC0031051
tagatcgttgaga

SEQ ID NO: 124172 - DNA, 13 bp, Artificial Sequence
  Oligonucleotide for detection of SNP TSC0031051
tctcaacgatcta

SEQ ID NO: 124173 - DNA, 13 bp, Artificial Sequence
  Oligonucleotide for detection of SNP TSC0031054
ttttgtaggtttt

SEQ ID NO: 124174 - DNA, 13 bp, Artificial Sequence
  Oligonucleotide for detection of SNP TSC0031054
aaaacctacaaaa

SEQ ID NO: 124175 - DNA, 13 bp, Artificial Sequence
  Oligonucleotide for detection of SNP TSC0031054
ttttgtgggtttt

SEQ ID NO: 124176 - DNA, 13 bp, Artificial Sequence
  Oligonucleotide for detection of SNP TSC0031054
aaaacccacaaaa

SEQ ID NO: 124177 - DNA, 13 bp, Artificial Sequence
  Oligonucleotide for detection of SNP TSC0031054
ttttgcgggtttt

SEQ ID NO: 124178 - DNA, 13 bp, Artificial Sequence
  Oligonucleotide for detection of SNP TSC0031054
aaaacccgcaaaa

SEQ ID NO: 124179 - DNA, 13 bp, Artificial Sequence
  Oligonucleotide for detection of SNP TSC0031054
agggtttgtagga

SEQ ID NO: 124180 - DNA, 13 bp, Artificial Sequence
  Oligonucleotide for detection of SNP TSC0031054
tcctacaaaccct

SEQ ID NO: 124181 - DNA, 13 bp, Artificial Sequence
  Oligonucleotide for detection of SNP TSC0031054
agggttcgtagga

SEQ ID NO: 124182 - DNA, 13 bp, Artificial Sequence
  Oligonucleotide for detection of SNP TSC0031054
tcctacgaaccct

SEQ ID NO: 124183 - DNA, 13 bp, Artificial Sequence
  Oligonucleotide for detection of SNP TSC0031055
gtagttaggaagg

SEQ ID NO: 124184 - DNA, 13 bp, Artificial Sequence
  Oligonucleotide for detection of SNP TSC0031055
ccttcctaactac

SEQ ID NO: 124185 - DNA, 13 bp, Artificial Sequence
  Oligonucleotide for detection of SNP TSC0031055
gtagttgggaagg

SEQ ID NO: 124186 - DNA, 13 bp, Artificial Sequence
  Oligonucleotide for detection of SNP TSC0031055
ccttcccaactac

SEQ ID NO: 124187 - DNA, 13 bp, Artificial Sequence
  Oligonucleotide for detection of SNP TSC0031055
gtagtcgggaagg

SEQ ID NO: 124188 - DNA, 13 bp, Artificial Sequence
  Oligonucleotide for detection of SNP TSC0031055
ccttcccgactac

SEQ ID NO: 124189 - DNA, 13 bp, Artificial Sequence
  Oligonucleotide for detection of SNP TSC0031060
aattaggtttttt

SEQ ID NO: 124190 - DNA, 13 bp, Artificial Sequence
  Oligonucleotide for detection of SNP TSC0031060
aaaaaacctaatt

SEQ ID NO: 124191 - DNA, 13 bp, Artificial Sequence
  Oligonucleotide for detection of SNP TSC0031060
aattagttttttt

SEQ ID NO: 124192 - DNA, 13 bp, Artificial Sequence
  Oligonucleotide for detection of SNP TSC0031060
aaaaaaactaatt

SEQ ID NO: 124193 - DNA, 13 bp, Artificial Sequence
  Oligonucleotide for detection of SNP TSC0031060
aagaagtttggtt

SEQ ID NO: 124194 - DNA, 13 bp, Artificial Sequence
  Oligonucleotide for detection of SNP TSC0031060
aaccaaacttctt

SEQ ID NO: 124195 - DNA, 13 bp, Artificial Sequence
  Oligonucleotide for detection of SNP TSC0031060
aagaagattggtt

SEQ ID NO: 124196 - DNA, 13 bp, Artificial Sequence
  Oligonucleotide for detection of SNP TSC0031060
aaccaatcttctt

SEQ ID NO: 124197 - DNA, 13 bp, Artificial Sequence
  Oligonucleotide for detection of SNP TSC0031061
ttgtgtggataaa

SEQ ID NO: 124198 - DNA, 13 bp, Artificial Sequence
  Oligonucleotide for detection of SNP TSC0031061
tttatccacacaa

SEQ ID NO: 124199 - DNA, 13 bp, Artificial Sequence
  Oligonucleotide for detection of SNP TSC0031061
ttgtgtagataaa

SEQ ID NO: 124200 - DNA, 13 bp, Artificial Sequence
  Oligonucleotide for detection of SNP TSC0031061
tttatctacacaa

SEQ ID NO: 124201 - DNA, 13 bp, Artificial Sequence
  Oligonucleotide for detection of SNP TSC0031061
tcgtgtggataaa

SEQ ID NO: 124202 - DNA, 13 bp, Artificial Sequence
  Oligonucleotide for detection of SNP TSC0031061
tttatccacacga

SEQ ID NO: 124203 - DNA, 13 bp, Artificial Sequence
  Oligonucleotide for detection of SNP TSC0031061
tcgtgtagataaa

SEQ ID NO: 124204 - DNA, 13 bp, Artificial Sequence
  Oligonucleotide for detection of SNP TSC0031061
tttatctacacga

SEQ ID NO: 124205 - DNA, 13 bp, Artificial Sequence
  Oligonucleotide for detection of SNP TSC0031066
gagtatagtgtag

SEQ ID NO: 124206 - DNA, 13 bp, Artificial Sequence
  Oligonucleotide for detection of SNP TSC0031066
ctacactatactc

SEQ ID NO: 124207 - DNA, 13 bp, Artificial Sequence
  Oligonucleotide for detection of SNP TSC0031066
gagtatggtgtag

SEQ ID NO: 124208 - DNA, 13 bp, Artificial Sequence
  Oligonucleotide for detection of SNP TSC0031066
ctacaccatactc

SEQ ID NO: 124209 - DNA, 13 bp, Artificial Sequence
  Oligonucleotide for detection of SNP TSC0031066
gagtacggtgtag

SEQ ID NO: 124210 - DNA, 13 bp, Artificial Sequence
  Oligonucleotide for detection of SNP TSC0031066
ctacaccgtactc

SEQ ID NO: 124211 - DNA, 13 bp, Artificial Sequence
  Oligonucleotide for detection of SNP TSC0031066
ttgtattgtatty

SEQ ID NO: 124212 - DNA, 13 bp, Artificial Sequence
  Oligonucleotide for detection of SNP TSC0031066
raatacaatacaa

SEQ ID NO: 124213 - DNA, 13 bp, Artificial Sequence
  Oligonucleotide for detection of SNP TSC0031066
ttgtatcgtatty

SEQ ID NO: 124214 - DNA, 13 bp, Artificial Sequence
  Oligonucleotide for detection of SNP TSC0031066
raatacgatacaa

SEQ ID NO: 124215 - DNA, 13 bp, Artificial Sequence
  Oligonucleotide for detection of SNP TSC0031068
gggtgagggaggg

SEQ ID NO: 124216 - DNA, 13 bp, Artificial Sequence
  Oligonucleotide for detection of SNP TSC0031068
ccctccctcaccc

SEQ ID NO: 124217 - DNA, 13 bp, Artificial Sequence
  Oligonucleotide for detection of SNP TSC0031068
gggtgaaggaggg

SEQ ID NO: 124218 - DNA, 13 bp, Artificial Sequence
  Oligonucleotide for detection of SNP TSC0031068
ccctccttcaccc

SEQ ID NO: 124219 - DNA, 13 bp, Artificial Sequence
  Oligonucleotide for detection of SNP TSC0031070
tttttaatttagt

SEQ ID NO: 124220 - DNA, 13 bp, Artificial Sequence
  Oligonucleotide for detection of SNP TSC0031070
actaaattaaaaa

SEQ ID NO: 124221 - DNA, 13 bp, Artificial Sequence
  Oligonucleotide for detection of SNP TSC0031070
tttttattttagt

SEQ ID NO: 124222 - DNA, 13 bp, Artificial Sequence
  Oligonucleotide for detection of SNP TSC0031070
actaaaataaaaa

SEQ ID NO: 124223 - DNA, 13 bp, Artificial Sequence
  Oligonucleotide for detection of SNP TSC0031070
attgggttggggg

SEQ ID NO: 124224 - DNA, 13 bp, Artificial Sequence
  Oligonucleotide for detection of SNP TSC0031070
cccccaacccaat

SEQ ID NO: 124225 - DNA, 13 bp, Artificial Sequence
  Oligonucleotide for detection of SNP TSC0031070
attggggtggggg

SEQ ID NO: 124226 - DNA, 13 bp, Artificial Sequence
  Oligonucleotide for detection of SNP TSC0031070
cccccaccccaat

SEQ ID NO: 124227 - DNA, 13 bp, Artificial Sequence
  Oligonucleotide for detection of SNP TSC0031073
aagtttgattagy

SEQ ID NO: 124228 - DNA, 13 bp, Artificial Sequence
  Oligonucleotide for detection of SNP TSC0031073
rctaatcaaactt

SEQ ID NO: 124229 - DNA, 13 bp, Artificial Sequence
  Oligonucleotide for detection of SNP TSC0031073
aagtttaattagy

SEQ ID NO: 124230 - DNA, 13 bp, Artificial Sequence
  Oligonucleotide for detection of SNP TSC0031073
rctaattaaactt

SEQ ID NO: 124231 - DNA, 13 bp, Artificial Sequence
  Oligonucleotide for detection of SNP TSC0031074
ttgttgataagag

SEQ ID NO: 124232 - DNA, 13 bp, Artificial Sequence
  Oligonucleotide for detection of SNP TSC0031074
ctcttatcaacaa

SEQ ID NO: 124233 - DNA, 13 bp, Artificial Sequence
  Oligonucleotide for detection of SNP TSC0031074
ttgttggtaagag

SEQ ID NO: 124234 - DNA, 13 bp, Artificial Sequence
  Oligonucleotide for detection of SNP TSC0031074
ctcttaccaacaa

SEQ ID NO: 124235 - DNA, 13 bp, Artificial Sequence
  Oligonucleotide for detection of SNP TSC0031075
ggaagagttgtga

SEQ ID NO: 124236 - DNA, 13 bp, Artificial Sequence
  Oligonucleotide for detection of SNP TSC0031075
tcacaactcttcc

SEQ ID NO: 124237 - DNA, 13 bp, Artificial Sequence
  Oligonucleotide for detection of SNP TSC0031075
ggaagaattgtga

SEQ ID NO: 124238 - DNA, 13 bp, Artificial Sequence
  Oligonucleotide for detection of SNP TSC0031075
tcacaattcttcc

SEQ ID NO: 124239 - DNA, 13 bp, Artificial Sequence
  Oligonucleotide for detection of SNP TSC0031076
aaggttggttttt

SEQ ID NO: 124240 - DNA, 13 bp, Artificial Sequence
  Oligonucleotide for detection of SNP TSC0031076
aaaaaccaacctt

SEQ ID NO: 124241 - DNA, 13 bp, Artificial Sequence
  Oligonucleotide for detection of SNP TSC0031076
aaggttagttttt

SEQ ID NO: 124242 - DNA, 13 bp, Artificial Sequence
  Oligonucleotide for detection of SNP TSC0031076
aaaaactaacctt

SEQ ID NO: 124243 - DNA, 13 bp, Artificial Sequence
  Oligonucleotide for detection of SNP TSC0031082
aatgattgtttaa

SEQ ID NO: 124244 - DNA, 13 bp, Artificial Sequence
  Oligonucleotide for detection of SNP TSC0031082
ttaaacaatcatt

SEQ ID NO: 124245 - DNA, 13 bp, Artificial Sequence
  Oligonucleotide for detection of SNP TSC0031082
aatgatcgtttaa

SEQ ID NO: 124246 - DNA, 13 bp, Artificial Sequence
  Oligonucleotide for detection of SNP TSC0031082
ttaaacgatcatt

SEQ ID NO: 124247 - DNA, 13 bp, Artificial Sequence
  Oligonucleotide for detection of SNP TSC0031082
ttaaatgattatt

SEQ ID NO: 124248 - DNA, 13 bp, Artificial Sequence
  Oligonucleotide for detection of SNP TSC0031082
aataatcatttaa

SEQ ID NO: 124249 - DNA, 13 bp, Artificial Sequence
  Oligonucleotide for detection of SNP TSC0031082
ttaaataattatt

SEQ ID NO: 124250 - DNA, 13 bp, Artificial Sequence
  Oligonucleotide for detection of SNP TSC0031082
aataattatttaa

SEQ ID NO: 124251 - DNA, 13 bp, Artificial Sequence
  Oligonucleotide for detection of SNP TSC0031082
ttaaacgattatt

SEQ ID NO: 124252 - DNA, 13 bp, Artificial Sequence
  Oligonucleotide for detection of SNP TSC0031082
aataatcgtttaa

SEQ ID NO: 124253 - DNA, 13 bp, Artificial Sequence
  Oligonucleotide for detection of SNP TSC0031084
tgatttatgtgty

SEQ ID NO: 124254 - DNA, 13 bp, Artificial Sequence
  Oligonucleotide for detection of SNP TSC0031084
racacataaatca

SEQ ID NO: 124255 - DNA, 13 bp, Artificial Sequence
  Oligonucleotide for detection of SNP TSC0031084
cgatttatgtgty

SEQ ID NO: 124256 - DNA, 13 bp, Artificial Sequence
  Oligonucleotide for detection of SNP TSC0031084
racacataaatcg

SEQ ID NO: 124257 - DNA, 13 bp, Artificial Sequence
  Oligonucleotide for detection of SNP TSC0031084
cgatttgtgtgty

SEQ ID NO: 124258 - DNA, 13 bp, Artificial Sequence
  Oligonucleotide for detection of SNP TSC0031084
racacacaaatcg

SEQ ID NO: 124259 - DNA, 13 bp, Artificial Sequence
  Oligonucleotide for detection of SNP TSC0031084
tgatttacgtgty

SEQ ID NO: 124260 - DNA, 13 bp, Artificial Sequence
  Oligonucleotide for detection of SNP TSC0031084
racacgtaaatca

SEQ ID NO: 124261 - DNA, 13 bp, Artificial Sequence
  Oligonucleotide for detection of SNP TSC0031084
tgattcgtgtgty

SEQ ID NO: 124262 - DNA, 13 bp, Artificial Sequence
  Oligonucleotide for detection of SNP TSC0031084
racacacgaatca

SEQ ID NO: 124263 - DNA, 13 bp, Artificial Sequence
  Oligonucleotide for detection of SNP TSC0031084
tgatttatgcgty

SEQ ID NO: 124264 - DNA, 13 bp, Artificial Sequence
  Oligonucleotide for detection of SNP TSC0031084
racgcataaatca

SEQ ID NO: 124265 - DNA, 13 bp, Artificial Sequence
  Oligonucleotide for detection of SNP TSC0031084
tgatttgcgtgty

SEQ ID NO: 124266 - DNA, 13 bp, Artificial Sequence
  Oligonucleotide for detection of SNP TSC0031084
racacgcaaatca

SEQ ID NO: 124267 - DNA, 13 bp, Artificial Sequence
  Oligonucleotide for detection of SNP TSC0031084
cgatttacgtgty

SEQ ID NO: 124268 - DNA, 13 bp, Artificial Sequence
  Oligonucleotide for detection of SNP TSC0031084
racacgtaaatcg

SEQ ID NO: 124269 - DNA, 13 bp, Artificial Sequence
  Oligonucleotide for detection of SNP TSC0031084
tgatttgtgcgty

SEQ ID NO: 124270 - DNA, 13 bp, Artificial Sequence
  Oligonucleotide for detection of SNP TSC0031084
racgcacaaatca

SEQ ID NO: 124271 - DNA, 13 bp, Artificial Sequence
  Oligonucleotide for detection of SNP TSC0031084
cgatttatgcgty

SEQ ID NO: 124272 - DNA, 13 bp, Artificial Sequence
  Oligonucleotide for detection of SNP TSC0031084
racgcataaatcg

SEQ ID NO: 124273 - DNA, 13 bp, Artificial Sequence
  Oligonucleotide for detection of SNP TSC0031084
cgattcgtgtgty

SEQ ID NO: 124274 - DNA, 13 bp, Artificial Sequence
  Oligonucleotide for detection of SNP TSC0031084
racacacgaatcg

SEQ ID NO: 124275 - DNA, 13 bp, Artificial Sequence
  Oligonucleotide for detection of SNP TSC0031084
tgatttacgcgty

SEQ ID NO: 124276 - DNA, 13 bp, Artificial Sequence
  Oligonucleotide for detection of SNP TSC0031084
racgcgtaaatca

SEQ ID NO: 124277 - DNA, 13 bp, Artificial Sequence
  Oligonucleotide for detection of SNP TSC0031084
cgatttgcgtgty

SEQ ID NO: 124278 - DNA, 13 bp, Artificial Sequence
  Oligonucleotide for detection of SNP TSC0031084
racacgcaaatcg

SEQ ID NO: 124279 - DNA, 13 bp, Artificial Sequence
  Oligonucleotide for detection of SNP TSC0031084
cgatttacgcgty

SEQ ID NO: 124280 - DNA, 13 bp, Artificial Sequence
  Oligonucleotide for detection of SNP TSC0031084
racgcgtaaatcg

SEQ ID NO: 124281 - DNA, 13 bp, Artificial Sequence
  Oligonucleotide for detection of SNP TSC0031084
cgatttgtgcgty

SEQ ID NO: 124282 - DNA, 13 bp, Artificial Sequence
  Oligonucleotide for detection of SNP TSC0031084
racgcacaaatcg

SEQ ID NO: 124283 - DNA, 13 bp, Artificial Sequence
  Oligonucleotide for detection of SNP TSC0031084
tgattcgcgtgty

SEQ ID NO: 124284 - DNA, 13 bp, Artificial Sequence
  Oligonucleotide for detection of SNP TSC0031084
racacgcgaatca

SEQ ID NO: 124285 - DNA, 13 bp, Artificial Sequence
  Oligonucleotide for detection of SNP TSC0031084
tgattcgtgcgty

SEQ ID NO: 124286 - DNA, 13 bp, Artificial Sequence
  Oligonucleotide for detection of SNP TSC0031084
racgcacgaatca

SEQ ID NO: 124287 - DNA, 13 bp, Artificial Sequence
  Oligonucleotide for detection of SNP TSC0031084
tgatttgcgcgty

SEQ ID NO: 124288 - DNA, 13 bp, Artificial Sequence
  Oligonucleotide for detection of SNP TSC0031084
racgcgcaaatca

SEQ ID NO: 124289 - DNA, 13 bp, Artificial Sequence
  Oligonucleotide for detection of SNP TSC0031084
cgattcgcgtgty

SEQ ID NO: 124290 - DNA, 13 bp, Artificial Sequence
  Oligonucleotide for detection of SNP TSC0031084
racacgcgaatcg

SEQ ID NO: 124291 - DNA, 13 bp, Artificial Sequence
  Oligonucleotide for detection of SNP TSC0031084
cgattcgtgcgty

SEQ ID NO: 124292 - DNA, 13 bp, Artificial Sequence
  Oligonucleotide for detection of SNP TSC0031084
racgcacgaatcg

SEQ ID NO: 124293 - DNA, 13 bp, Artificial Sequence
  Oligonucleotide for detection of SNP TSC0031084
cgatttgcgcgty

SEQ ID NO: 124294 - DNA, 13 bp, Artificial Sequence
  Oligonucleotide for detection of SNP TSC0031084
racgcgcaaatcg

SEQ ID NO: 124295 - DNA, 13 bp, Artificial Sequence
  Oligonucleotide for detection of SNP TSC0031084
tgattcgcgcgty

SEQ ID NO: 124296 - DNA, 13 bp, Artificial Sequence
  Oligonucleotide for detection of SNP TSC0031084
racgcgcgaatca

SEQ ID NO: 124297 - DNA, 13 bp, Artificial Sequence
  Oligonucleotide for detection of SNP TSC0031084
cgattcgcgcgty

SEQ ID NO: 124298 - DNA, 13 bp, Artificial Sequence
  Oligonucleotide for detection of SNP TSC0031084
racgcgcgaatcg

SEQ ID NO: 124299 - DNA, 13 bp, Artificial Sequence
  Oligonucleotide for detection of SNP TSC0031084
ggtgtgtgggttg

SEQ ID NO: 124300 - DNA, 13 bp, Artificial Sequence
  Oligonucleotide for detection of SNP TSC0031084
caacccacacacc

SEQ ID NO: 124301 - DNA, 13 bp, Artificial Sequence
  Oligonucleotide for detection of SNP TSC0031084
ggcgtgtgggttg

SEQ ID NO: 124302 - DNA, 13 bp, Artificial Sequence
  Oligonucleotide for detection of SNP TSC0031084
caacccacacgcc

SEQ ID NO: 124303 - DNA, 13 bp, Artificial Sequence
  Oligonucleotide for detection of SNP TSC0031084
ggtgcgtgggttg

SEQ ID NO: 124304 - DNA, 13 bp, Artificial Sequence
  Oligonucleotide for detection of SNP TSC0031084
caacccacgcacc

SEQ ID NO: 124305 - DNA, 13 bp, Artificial Sequence
  Oligonucleotide for detection of SNP TSC0031084
ggtgtgtgggtcg

SEQ ID NO: 124306 - DNA, 13 bp, Artificial Sequence
  Oligonucleotide for detection of SNP TSC0031084
cgacccacacacc

SEQ ID NO: 124307 - DNA, 13 bp, Artificial Sequence
  Oligonucleotide for detection of SNP TSC0031084
ggtgtgcgggttg

SEQ ID NO: 124308 - DNA, 13 bp, Artificial Sequence
  Oligonucleotide for detection of SNP TSC0031084
caacccgcacacc

SEQ ID NO: 124309 - DNA, 13 bp, Artificial Sequence
  Oligonucleotide for detection of SNP TSC0031084
ggcgcgtgggttg

SEQ ID NO: 124310 - DNA, 13 bp, Artificial Sequence
  Oligonucleotide for detection of SNP TSC0031084
caacccacgcgcc

SEQ ID NO: 124311 - DNA, 13 bp, Artificial Sequence
  Oligonucleotide for detection of SNP TSC0031084
ggcgtgtgggtcg

SEQ ID NO: 124312 - DNA, 13 bp, Artificial Sequence
  Oligonucleotide for detection of SNP TSC0031084
cgacccacacgcc

SEQ ID NO: 124313 - DNA, 13 bp, Artificial Sequence
  Oligonucleotide for detection of SNP TSC0031084
ggtgcgtgggtcg

SEQ ID NO: 124314 - DNA, 13 bp, Artificial Sequence
  Oligonucleotide for detection of SNP TSC0031084
cgacccacgcacc

SEQ ID NO: 124315 - DNA, 13 bp, Artificial Sequence
  Oligonucleotide for detection of SNP TSC0031084
ggcgtgcgggttg

SEQ ID NO: 124316 - DNA, 13 bp, Artificial Sequence
  Oligonucleotide for detection of SNP TSC0031084
caacccgcacgcc

SEQ ID NO: 124317 - DNA, 13 bp, Artificial Sequence
  Oligonucleotide for detection of SNP TSC0031084
ggcgcgtgggtcg

SEQ ID NO: 124318 - DNA, 13 bp, Artificial Sequence
  Oligonucleotide for detection of SNP TSC0031084
cgacccacgcgcc

SEQ ID NO: 124319 - DNA, 13 bp, Artificial Sequence
  Oligonucleotide for detection of SNP TSC0031084
ggtgcgcgggttg

SEQ ID NO: 124320 - DNA, 13 bp, Artificial Sequence
  Oligonucleotide for detection of SNP TSC0031084
caacccgcgcacc

SEQ ID NO: 124321 - DNA, 13 bp, Artificial Sequence
  Oligonucleotide for detection of SNP TSC0031084
ggtgtgcgggtcg

SEQ ID NO: 124322 - DNA, 13 bp, Artificial Sequence
  Oligonucleotide for detection of SNP TSC0031084
cgacccgcacacc

SEQ ID NO: 124323 - DNA, 13 bp, Artificial Sequence
  Oligonucleotide for detection of SNP TSC0031084
ggcgcgcgggttg

SEQ ID NO: 124324 - DNA, 13 bp, Artificial Sequence
  Oligonucleotide for detection of SNP TSC0031084
caacccgcgcgcc

SEQ ID NO: 124325 - DNA, 13 bp, Artificial Sequence
  Oligonucleotide for detection of SNP TSC0031084
ggcgtgcgggtcg

SEQ ID NO: 124326 - DNA, 13 bp, Artificial Sequence
  Oligonucleotide for detection of SNP TSC0031084
cgacccgcacgcc

SEQ ID NO: 124327 - DNA, 13 bp, Artificial Sequence
  Oligonucleotide for detection of SNP TSC0031084
ggtgcgcgggtcg

SEQ ID NO: 124328 - DNA, 13 bp, Artificial Sequence
  Oligonucleotide for detection of SNP TSC0031084
cgacccgcgcacc

SEQ ID NO: 124329 - DNA, 13 bp, Artificial Sequence
  Oligonucleotide for detection of SNP TSC0031084
ggcgcgcgggtcg

SEQ ID NO: 124330 - DNA, 13 bp, Artificial Sequence
  Oligonucleotide for detection of SNP TSC0031084
cgacccgcgcgcc

SEQ ID NO: 124331 - DNA, 13 bp, Artificial Sequence
  Oligonucleotide for detection of SNP TSC0031086
atagatatttaaa

SEQ ID NO: 124332 - DNA, 13 bp, Artificial Sequence
  Oligonucleotide for detection of SNP TSC0031086
tttaaatatctat

SEQ ID NO: 124333 - DNA, 13 bp, Artificial Sequence
  Oligonucleotide for detection of SNP TSC0031086
atagatgtttaaa

SEQ ID NO: 124334 - DNA, 13 bp, Artificial Sequence
  Oligonucleotide for detection of SNP TSC0031086
tttaaacatctat

SEQ ID NO: 124335 - DNA, 13 bp, Artificial Sequence
  Oligonucleotide for detection of SNP TSC0031086
atagacgtttaaa

SEQ ID NO: 124336 - DNA, 13 bp, Artificial Sequence
  Oligonucleotide for detection of SNP TSC0031086
tttaaacgtctat

SEQ ID NO: 124337 - DNA, 13 bp, Artificial Sequence
  Oligonucleotide for detection of SNP TSC0031086
tttagatgtttgt

SEQ ID NO: 124338 - DNA, 13 bp, Artificial Sequence
  Oligonucleotide for detection of SNP TSC0031086
acaaacatctaaa

SEQ ID NO: 124339 - DNA, 13 bp, Artificial Sequence
  Oligonucleotide for detection of SNP TSC0031086
tttagacgtttgt

SEQ ID NO: 124340 - DNA, 13 bp, Artificial Sequence
  Oligonucleotide for detection of SNP TSC0031086
acaaacgtctaaa

SEQ ID NO: 124341 - DNA, 13 bp, Artificial Sequence
  Oligonucleotide for detection of SNP TSC0031088
agatggagattgt

SEQ ID NO: 124342 - DNA, 13 bp, Artificial Sequence
  Oligonucleotide for detection of SNP TSC0031088
acaatctccatct

SEQ ID NO: 124343 - DNA, 13 bp, Artificial Sequence
  Oligonucleotide for detection of SNP TSC0031088
agatggggattgt

SEQ ID NO: 124344 - DNA, 13 bp, Artificial Sequence
  Oligonucleotide for detection of SNP TSC0031088
acaatccccatct

SEQ ID NO: 124345 - DNA, 13 bp, Artificial Sequence
  Oligonucleotide for detection of SNP TSC0031088
agatggagatcgt

SEQ ID NO: 124346 - DNA, 13 bp, Artificial Sequence
  Oligonucleotide for detection of SNP TSC0031088
acgatctccatct

SEQ ID NO: 124347 - DNA, 13 bp, Artificial Sequence
  Oligonucleotide for detection of SNP TSC0031088
agatggggatcgt

SEQ ID NO: 124348 - DNA, 13 bp, Artificial Sequence
  Oligonucleotide for detection of SNP TSC0031088
acgatccccatct

SEQ ID NO: 124349 - DNA, 13 bp, Artificial Sequence
  Oligonucleotide for detection of SNP TSC0031090
ttaggggattttt

SEQ ID NO: 124350 - DNA, 13 bp, Artificial Sequence
  Oligonucleotide for detection of SNP TSC0031090
aaaaatcccctaa

SEQ ID NO: 124351 - DNA, 13 bp, Artificial Sequence
  Oligonucleotide for detection of SNP TSC0031090
ttagggaattttt

SEQ ID NO: 124352 - DNA, 13 bp, Artificial Sequence
  Oligonucleotide for detection of SNP TSC0031090
aaaaattccctaa

SEQ ID NO: 124353 - DNA, 13 bp, Artificial Sequence
  Oligonucleotide for detection of SNP TSC0031091
gattttttgagta

SEQ ID NO: 124354 - DNA, 13 bp, Artificial Sequence
  Oligonucleotide for detection of SNP TSC0031091
tactcaaaaaatc

SEQ ID NO: 124355 - DNA, 13 bp, Artificial Sequence
  Oligonucleotide for detection of SNP TSC0031091
gattttgtgagta

SEQ ID NO: 124356 - DNA, 13 bp, Artificial Sequence
  Oligonucleotide for detection of SNP TSC0031091
tactcacaaaatc

SEQ ID NO: 124357 - DNA, 13 bp, Artificial Sequence
  Oligonucleotide for detection of SNP TSC0031091
gatttcgtgagta

SEQ ID NO: 124358 - DNA, 13 bp, Artificial Sequence
  Oligonucleotide for detection of SNP TSC0031091
tactcacgaaatc

SEQ ID NO: 124359 - DNA, 13 bp, Artificial Sequence
  Oligonucleotide for detection of SNP TSC0031091
tatttaggggaty

SEQ ID NO: 124360 - DNA, 13 bp, Artificial Sequence
  Oligonucleotide for detection of SNP TSC0031091
ratcccctaaata

SEQ ID NO: 124361 - DNA, 13 bp, Artificial Sequence
  Oligonucleotide for detection of SNP TSC0031091
tatttatgggaty

SEQ ID NO: 124362 - DNA, 13 bp, Artificial Sequence
  Oligonucleotide for detection of SNP TSC0031091
ratcccataaata

SEQ ID NO: 124363 - DNA, 13 bp, Artificial Sequence
  Oligonucleotide for detection of SNP TSC0031091
tatttacgggaty

SEQ ID NO: 124364 - DNA, 13 bp, Artificial Sequence
  Oligonucleotide for detection of SNP TSC0031091
ratcccgtaaata

SEQ ID NO: 124365 - DNA, 13 bp, Artificial Sequence
  Oligonucleotide for detection of SNP TSC0031092
tgtttttttttgg

SEQ ID NO: 124366 - DNA, 13 bp, Artificial Sequence
  Oligonucleotide for detection of SNP TSC0031092
ccaaaaaaaaaca

SEQ ID NO: 124367 - DNA, 13 bp, Artificial Sequence
  Oligonucleotide for detection of SNP TSC0031092
tgttttgttttgg

SEQ ID NO: 124368 - DNA, 13 bp, Artificial Sequence
  Oligonucleotide for detection of SNP TSC0031092
ccaaaacaaaaca

SEQ ID NO: 124369 - DNA, 13 bp, Artificial Sequence
  Oligonucleotide for detection of SNP TSC0031092
tgttttttttcgg

SEQ ID NO: 124370 - DNA, 13 bp, Artificial Sequence
  Oligonucleotide for detection of SNP TSC0031092
ccgaaaaaaaaca

SEQ ID NO: 124371 - DNA, 13 bp, Artificial Sequence
  Oligonucleotide for detection of SNP TSC0031092
tgtttcgttttgg

SEQ ID NO: 124372 - DNA, 13 bp, Artificial Sequence
  Oligonucleotide for detection of SNP TSC0031092
ccaaaacgaaaca

SEQ ID NO: 124373 - DNA, 13 bp, Artificial Sequence
  Oligonucleotide for detection of SNP TSC0031092
tgttttgtttcgg

SEQ ID NO: 124374 - DNA, 13 bp, Artificial Sequence
  Oligonucleotide for detection of SNP TSC0031092
ccgaaacaaaaca

SEQ ID NO: 124375 - DNA, 13 bp, Artificial Sequence
  Oligonucleotide for detection of SNP TSC0031092
tgtttcgtttcgg

SEQ ID NO: 124376 - DNA, 13 bp, Artificial Sequence
  Oligonucleotide for detection of SNP TSC0031092
ccgaaacgaaaca

SEQ ID NO: 124377 - DNA, 13 bp, Artificial Sequence
  Oligonucleotide for detection of SNP TSC0031092
ttggggggaggta

SEQ ID NO: 124378 - DNA, 13 bp, Artificial Sequence
  Oligonucleotide for detection of SNP TSC0031092
tacctccccccaa

SEQ ID NO: 124379 - DNA, 13 bp, Artificial Sequence
  Oligonucleotide for detection of SNP TSC0031092
ttggggtgaggta

SEQ ID NO: 124380 - DNA, 13 bp, Artificial Sequence
  Oligonucleotide for detection of SNP TSC0031092
tacctcaccccaa

SEQ ID NO: 124381 - DNA, 13 bp, Artificial Sequence
  Oligonucleotide for detection of SNP TSC0031092
tcggggggaggta

SEQ ID NO: 124382 - DNA, 13 bp, Artificial Sequence
  Oligonucleotide for detection of SNP TSC0031092
tacctccccccga

SEQ ID NO: 124383 - DNA, 13 bp, Artificial Sequence
  Oligonucleotide for detection of SNP TSC0031092
tcggggtgaggta

SEQ ID NO: 124384 - DNA, 13 bp, Artificial Sequence
  Oligonucleotide for detection of SNP TSC0031092
tacctcaccccga

SEQ ID NO: 124385 - DNA, 13 bp, Artificial Sequence
  Oligonucleotide for detection of SNP TSC0031092
ttggggcgaggta

SEQ ID NO: 124386 - DNA, 13 bp, Artificial Sequence
  Oligonucleotide for detection of SNP TSC0031092
tacctcgccccaa

SEQ ID NO: 124387 - DNA, 13 bp, Artificial Sequence
  Oligonucleotide for detection of SNP TSC0031092
tcggggcgaggta

SEQ ID NO: 124388 - DNA, 13 bp, Artificial Sequence
  Oligonucleotide for detection of SNP TSC0031092
tacctcgccccga

SEQ ID NO: 124389 - DNA, 13 bp, Artificial Sequence
  Oligonucleotide for detection of SNP TSC0031094
tgttattttttty

SEQ ID NO: 124390 - DNA, 13 bp, Artificial Sequence
  Oligonucleotide for detection of SNP TSC0031094
raaaaaaataaca

SEQ ID NO: 124391 - DNA, 13 bp, Artificial Sequence
  Oligonucleotide for detection of SNP TSC0031094
tgttatgttttty

SEQ ID NO: 124392 - DNA, 13 bp, Artificial Sequence
  Oligonucleotide for detection of SNP TSC0031094
raaaaacataaca

SEQ ID NO: 124393 - DNA, 13 bp, Artificial Sequence
  Oligonucleotide for detection of SNP TSC0031094
tgttacgttttty

SEQ ID NO: 124394 - DNA, 13 bp, Artificial Sequence
  Oligonucleotide for detection of SNP TSC0031094
raaaaacgtaaca

SEQ ID NO: 124395 - DNA, 13 bp, Artificial Sequence
  Oligonucleotide for detection of SNP TSC0031094
gggaggggtggta

SEQ ID NO: 124396 - DNA, 13 bp, Artificial Sequence
  Oligonucleotide for detection of SNP TSC0031094
taccacccctccc

SEQ ID NO: 124397 - DNA, 13 bp, Artificial Sequence
  Oligonucleotide for detection of SNP TSC0031094
gggaggtgtggta

SEQ ID NO: 124398 - DNA, 13 bp, Artificial Sequence
  Oligonucleotide for detection of SNP TSC0031094
taccacacctccc

SEQ ID NO: 124399 - DNA, 13 bp, Artificial Sequence
  Oligonucleotide for detection of SNP TSC0031094
gggaggcgtggta

SEQ ID NO: 124400 - DNA, 13 bp, Artificial Sequence
  Oligonucleotide for detection of SNP TSC0031094
taccacgcctccc

SEQ ID NO: 124401 - DNA, 13 bp, Artificial Sequence
  Oligonucleotide for detection of SNP TSC0031095
gtgtggatggtgt

SEQ ID NO: 124402 - DNA, 13 bp, Artificial Sequence
  Oligonucleotide for detection of SNP TSC0031095
acaccatccacac

SEQ ID NO: 124403 - DNA, 13 bp, Artificial Sequence
  Oligonucleotide for detection of SNP TSC0031095
gtgtggttggtgt

SEQ ID NO: 124404 - DNA, 13 bp, Artificial Sequence
  Oligonucleotide for detection of SNP TSC0031095
acaccaaccacac

SEQ ID NO: 124405 - DNA, 13 bp, Artificial Sequence
  Oligonucleotide for detection of SNP TSC0031095
gtgcggatggtgt

SEQ ID NO: 124406 - DNA, 13 bp, Artificial Sequence
  Oligonucleotide for detection of SNP TSC0031095
acaccatccgcac

SEQ ID NO: 124407 - DNA, 13 bp, Artificial Sequence
  Oligonucleotide for detection of SNP TSC0031095
gtgcggttggtgt

SEQ ID NO: 124408 - DNA, 13 bp, Artificial Sequence
  Oligonucleotide for detection of SNP TSC0031095
acaccaaccgcac

SEQ ID NO: 124409 - DNA, 13 bp, Artificial Sequence
  Oligonucleotide for detection of SNP TSC0031095
atattatttgtay

SEQ ID NO: 124410 - DNA, 13 bp, Artificial Sequence
  Oligonucleotide for detection of SNP TSC0031095
rtacaaataatat

SEQ ID NO: 124411 - DNA, 13 bp, Artificial Sequence
  Oligonucleotide for detection of SNP TSC0031095
atattagttgtay

SEQ ID NO: 124412 - DNA, 13 bp, Artificial Sequence
  Oligonucleotide for detection of SNP TSC0031095
rtacaactaatat

SEQ ID NO: 124413 - DNA, 13 bp, Artificial Sequence
  Oligonucleotide for detection of SNP TSC0031095
atattattcgtay

SEQ ID NO: 124414 - DNA, 13 bp, Artificial Sequence
  Oligonucleotide for detection of SNP TSC0031095
rtacgaataatat

SEQ ID NO: 124415 - DNA, 13 bp, Artificial Sequence
  Oligonucleotide for detection of SNP TSC0031095
atattagtcgtay

SEQ ID NO: 124416 - DNA, 13 bp, Artificial Sequence
  Oligonucleotide for detection of SNP TSC0031095
rtacgactaatat

SEQ ID NO: 124417 - DNA, 13 bp, Artificial Sequence
  Oligonucleotide for detection of SNP TSC0031096
gggtatatttata

SEQ ID NO: 124418 - DNA, 13 bp, Artificial Sequence
  Oligonucleotide for detection of SNP TSC0031096
tataaatataccc

SEQ ID NO: 124419 - DNA, 13 bp, Artificial Sequence
  Oligonucleotide for detection of SNP TSC0031096
gggtatgtttata

SEQ ID NO: 124420 - DNA, 13 bp, Artificial Sequence
  Oligonucleotide for detection of SNP TSC0031096
tataaacataccc

SEQ ID NO: 124421 - DNA, 13 bp, Artificial Sequence
  Oligonucleotide for detection of SNP TSC0031096
gggtacgtttata

SEQ ID NO: 124422 - DNA, 13 bp, Artificial Sequence
  Oligonucleotide for detection of SNP TSC0031096
tataaacgtaccc

SEQ ID NO: 124423 - DNA, 13 bp, Artificial Sequence
  Oligonucleotide for detection of SNP TSC0031096
tataggtgtatty

SEQ ID NO: 124424 - DNA, 13 bp, Artificial Sequence
  Oligonucleotide for detection of SNP TSC0031096
raatacacctata

SEQ ID NO: 124425 - DNA, 13 bp, Artificial Sequence
  Oligonucleotide for detection of SNP TSC0031096
tataggcgtatty

SEQ ID NO: 124426 - DNA, 13 bp, Artificial Sequence
  Oligonucleotide for detection of SNP TSC0031096
raatacgcctata

SEQ ID NO: 124427 - DNA, 13 bp, Artificial Sequence
  Oligonucleotide for detection of SNP TSC0031100
ttttgtatggtty

SEQ ID NO: 124428 - DNA, 13 bp, Artificial Sequence
  Oligonucleotide for detection of SNP TSC0031100
raaccatacaaaa

SEQ ID NO: 124429 - DNA, 13 bp, Artificial Sequence
  Oligonucleotide for detection of SNP TSC0031100
ttttgtgtggtty

SEQ ID NO: 124430 - DNA, 13 bp, Artificial Sequence
  Oligonucleotide for detection of SNP TSC0031100
raaccacacaaaa

SEQ ID NO: 124431 - DNA, 13 bp, Artificial Sequence
  Oligonucleotide for detection of SNP TSC0031100
ttttgcgtggtty

SEQ ID NO: 124432 - DNA, 13 bp, Artificial Sequence
  Oligonucleotide for detection of SNP TSC0031100
raaccacgcaaaa

SEQ ID NO: 124433 - DNA, 13 bp, Artificial Sequence
  Oligonucleotide for detection of SNP TSC0031100
gagttatgtagaa

SEQ ID NO: 124434 - DNA, 13 bp, Artificial Sequence
  Oligonucleotide for detection of SNP TSC0031100
ttctacataactc

SEQ ID NO: 124435 - DNA, 13 bp, Artificial Sequence
  Oligonucleotide for detection of SNP TSC0031100
gagttacgtagaa

SEQ ID NO: 124436 - DNA, 13 bp, Artificial Sequence
  Oligonucleotide for detection of SNP TSC0031100
ttctacgtaactc

SEQ ID NO: 124437 - DNA, 13 bp, Artificial Sequence
  Oligonucleotide for detection of SNP TSC0031101
ttttggatgatgg

SEQ ID NO: 124438 - DNA, 13 bp, Artificial Sequence
  Oligonucleotide for detection of SNP TSC0031101
ccatcatccaaaa

SEQ ID NO: 124439 - DNA, 13 bp, Artificial Sequence
  Oligonucleotide for detection of SNP TSC0031101
ttttgggtgatgg

SEQ ID NO: 124440 - DNA, 13 bp, Artificial Sequence
  Oligonucleotide for detection of SNP TSC0031101
ccatcacccaaaa

SEQ ID NO: 124441 - DNA, 13 bp, Artificial Sequence
  Oligonucleotide for detection of SNP TSC0031102
ggatttatgaatg

SEQ ID NO: 124442 - DNA, 13 bp, Artificial Sequence
  Oligonucleotide for detection of SNP TSC0031102
cattcataaatcc

SEQ ID NO: 124443 - DNA, 13 bp, Artificial Sequence
  Oligonucleotide for detection of SNP TSC0031102
ggatttgtgaatg

SEQ ID NO: 124444 - DNA, 13 bp, Artificial Sequence
  Oligonucleotide for detection of SNP TSC0031102
cattcacaaatcc

SEQ ID NO: 124445 - DNA, 13 bp, Artificial Sequence
  Oligonucleotide for detection of SNP TSC0031102
ggattcgtgaatg

SEQ ID NO: 124446 - DNA, 13 bp, Artificial Sequence
  Oligonucleotide for detection of SNP TSC0031102
cattcacgaatcc

SEQ ID NO: 124447 - DNA, 13 bp, Artificial Sequence
  Oligonucleotide for detection of SNP TSC0031102
tatttatgaatty

SEQ ID NO: 124448 - DNA, 13 bp, Artificial Sequence
  Oligonucleotide for detection of SNP TSC0031102
raattcataaata

SEQ ID NO: 124449 - DNA, 13 bp, Artificial Sequence
  Oligonucleotide for detection of SNP TSC0031102
tatttacgaatty

SEQ ID NO: 124450 - DNA, 13 bp, Artificial Sequence
  Oligonucleotide for detection of SNP TSC0031102
raattcgtaaata

SEQ ID NO: 124451 - DNA, 13 bp, Artificial Sequence
  Oligonucleotide for detection of SNP TSC0031103
aatagtatttatt

SEQ ID NO: 124452 - DNA, 13 bp, Artificial Sequence
  Oligonucleotide for detection of SNP TSC0031103
aataaatactatt

SEQ ID NO: 124453 - DNA, 13 bp, Artificial Sequence
  Oligonucleotide for detection of SNP TSC0031103
aatagtgtttatt

SEQ ID NO: 124454 - DNA, 13 bp, Artificial Sequence
  Oligonucleotide for detection of SNP TSC0031103
aataaacactatt

SEQ ID NO: 124455 - DNA, 13 bp, Artificial Sequence
  Oligonucleotide for detection of SNP TSC0031103
aatagcgtttatt

SEQ ID NO: 124456 - DNA, 13 bp, Artificial Sequence
  Oligonucleotide for detection of SNP TSC0031103
aataaacgctatt

SEQ ID NO: 124457 - DNA, 13 bp, Artificial Sequence
  Oligonucleotide for detection of SNP TSC0031103
agtgaatgttgtt

SEQ ID NO: 124458 - DNA, 13 bp, Artificial Sequence
  Oligonucleotide for detection of SNP TSC0031103
aacaacattcact

SEQ ID NO: 124459 - DNA, 13 bp, Artificial Sequence
  Oligonucleotide for detection of SNP TSC0031103
agtgaacgttgtt

SEQ ID NO: 124460 - DNA, 13 bp, Artificial Sequence
  Oligonucleotide for detection of SNP TSC0031103
aacaacgttcact

SEQ ID NO: 124461 - DNA, 13 bp, Artificial Sequence
  Oligonucleotide for detection of SNP TSC0031104
gtttttgatttta

SEQ ID NO: 124462 - DNA, 13 bp, Artificial Sequence
  Oligonucleotide for detection of SNP TSC0031104
taaaatcaaaaac

SEQ ID NO: 124463 - DNA, 13 bp, Artificial Sequence
  Oligonucleotide for detection of SNP TSC0031104
gtttttaatttta

SEQ ID NO: 124464 - DNA, 13 bp, Artificial Sequence
  Oligonucleotide for detection of SNP TSC0031104
taaaattaaaaac

SEQ ID NO: 124465 - DNA, 13 bp, Artificial Sequence
  Oligonucleotide for detection of SNP TSC0031105
aaggtataatttt

SEQ ID NO: 124466 - DNA, 13 bp, Artificial Sequence
  Oligonucleotide for detection of SNP TSC0031105
aaaattatacctt

SEQ ID NO: 124467 - DNA, 13 bp, Artificial Sequence
  Oligonucleotide for detection of SNP TSC0031105
aaggtagaatttt

SEQ ID NO: 124468 - DNA, 13 bp, Artificial Sequence
  Oligonucleotide for detection of SNP TSC0031105
aaaattctacctt

SEQ ID NO: 124469 - DNA, 13 bp, Artificial Sequence
  Oligonucleotide for detection of SNP TSC0031105
aaagttttatttt

SEQ ID NO: 124470 - DNA, 13 bp, Artificial Sequence
  Oligonucleotide for detection of SNP TSC0031105
aaaataaaacttt

SEQ ID NO: 124471 - DNA, 13 bp, Artificial Sequence
  Oligonucleotide for detection of SNP TSC0031108
gattgtattttta

SEQ ID NO: 124472 - DNA, 13 bp, Artificial Sequence
  Oligonucleotide for detection of SNP TSC0031108
taaaaatacaatc

SEQ ID NO: 124473 - DNA, 13 bp, Artificial Sequence
  Oligonucleotide for detection of SNP TSC0031108
gattgtgttttta

SEQ ID NO: 124474 - DNA, 13 bp, Artificial Sequence
  Oligonucleotide for detection of SNP TSC0031108
taaaaacacaatc

SEQ ID NO: 124475 - DNA, 13 bp, Artificial Sequence
  Oligonucleotide for detection of SNP TSC0031109
taagattatgatt

SEQ ID NO: 124476 - DNA, 13 bp, Artificial Sequence
  Oligonucleotide for detection of SNP TSC0031109
aatcataatctta

SEQ ID NO: 124477 - DNA, 13 bp, Artificial Sequence
  Oligonucleotide for detection of SNP TSC0031109
taagatgatgatt

SEQ ID NO: 124478 - DNA, 13 bp, Artificial Sequence
  Oligonucleotide for detection of SNP TSC0031109
aatcatcatctta

SEQ ID NO: 124479 - DNA, 13 bp, Artificial Sequence
  Oligonucleotide for detection of SNP TSC0031110
ttgttcgttttty

SEQ ID NO: 124480 - DNA, 13 bp, Artificial Sequence
  Oligonucleotide for detection of SNP TSC0031110
raaaaacgaacaa

SEQ ID NO: 124481 - DNA, 13 bp, Artificial Sequence
  Oligonucleotide for detection of SNP TSC0031110
ggaaaatgggtaa

SEQ ID NO: 124482 - DNA, 13 bp, Artificial Sequence
  Oligonucleotide for detection of SNP TSC0031110
ttacccattttcc

SEQ ID NO: 124483 - DNA, 13 bp, Artificial Sequence
  Oligonucleotide for detection of SNP TSC0031110
ggaaaacgggtaa

SEQ ID NO: 124484 - DNA, 13 bp, Artificial Sequence
  Oligonucleotide for detection of SNP TSC0031110
ttacccgttttcc

SEQ ID NO: 124485 - DNA, 13 bp, Artificial Sequence
  Oligonucleotide for detection of SNP TSC0031111
agggtagttgggg

SEQ ID NO: 124486 - DNA, 13 bp, Artificial Sequence
  Oligonucleotide for detection of SNP TSC0031111
ccccaactaccct

SEQ ID NO: 124487 - DNA, 13 bp, Artificial Sequence
  Oligonucleotide for detection of SNP TSC0031111
agggtaattgggg

SEQ ID NO: 124488 - DNA, 13 bp, Artificial Sequence
  Oligonucleotide for detection of SNP TSC0031111
ccccaattaccct

SEQ ID NO: 124489 - DNA, 13 bp, Artificial Sequence
  Oligonucleotide for detection of SNP TSC0031111
agggtagtcgggg

SEQ ID NO: 124490 - DNA, 13 bp, Artificial Sequence
  Oligonucleotide for detection of SNP TSC0031111
ccccgactaccct

SEQ ID NO: 124491 - DNA, 13 bp, Artificial Sequence
  Oligonucleotide for detection of SNP TSC0031111
agggtaatcgggg

SEQ ID NO: 124492 - DNA, 13 bp, Artificial Sequence
  Oligonucleotide for detection of SNP TSC0031111
ccccgattaccct

SEQ ID NO: 124493 - DNA, 13 bp, Artificial Sequence
  Oligonucleotide for detection of SNP TSC0031113
agtggaatttgtt

SEQ ID NO: 124494 - DNA, 13 bp, Artificial Sequence
  Oligonucleotide for detection of SNP TSC0031113
aacaaattccact

SEQ ID NO: 124495 - DNA, 13 bp, Artificial Sequence
  Oligonucleotide for detection of SNP TSC0031113
agtggagtttgtt

SEQ ID NO: 124496 - DNA, 13 bp, Artificial Sequence
  Oligonucleotide for detection of SNP TSC0031113
aacaaactccact

SEQ ID NO: 124497 - DNA, 13 bp, Artificial Sequence
  Oligonucleotide for detection of SNP TSC0031114
ttaggagaaatat

SEQ ID NO: 124498 - DNA, 13 bp, Artificial Sequence
  Oligonucleotide for detection of SNP TSC0031114
atatttctcctaa

SEQ ID NO: 124499 - DNA, 13 bp, Artificial Sequence
  Oligonucleotide for detection of SNP TSC0031114
ttaggaaaaatat

SEQ ID NO: 124500 - DNA, 13 bp, Artificial Sequence
  Oligonucleotide for detection of SNP TSC0031114
atatttttcctaa

SEQ ID NO: 124501 - DNA, 13 bp, Artificial Sequence
  Oligonucleotide for detection of SNP TSC0031115
ttttggatggtty

SEQ ID NO: 124502 - DNA, 13 bp, Artificial Sequence
  Oligonucleotide for detection of SNP TSC0031115
raaccatccaaaa

SEQ ID NO: 124503 - DNA, 13 bp, Artificial Sequence
  Oligonucleotide for detection of SNP TSC0031115
ttttgggtggtty

SEQ ID NO: 124504 - DNA, 13 bp, Artificial Sequence
  Oligonucleotide for detection of SNP TSC0031115
raaccacccaaaa

SEQ ID NO: 124505 - DNA, 13 bp, Artificial Sequence
  Oligonucleotide for detection of SNP TSC0031117
ttttggagtttay

SEQ ID NO: 124506 - DNA, 13 bp, Artificial Sequence
  Oligonucleotide for detection of SNP TSC0031117
rtaaactccaaaa

SEQ ID NO: 124507 - DNA, 13 bp, Artificial Sequence
  Oligonucleotide for detection of SNP TSC0031117
ttttggtgtttay

SEQ ID NO: 124508 - DNA, 13 bp, Artificial Sequence
  Oligonucleotide for detection of SNP TSC0031117
rtaaacaccaaaa

SEQ ID NO: 124509 - DNA, 13 bp, Artificial Sequence
  Oligonucleotide for detection of SNP TSC0031117
ttttggcgtttay

SEQ ID NO: 124510 - DNA, 13 bp, Artificial Sequence
  Oligonucleotide for detection of SNP TSC0031117
rtaaacgccaaaa

SEQ ID NO: 124511 - DNA, 13 bp, Artificial Sequence
  Oligonucleotide for detection of SNP TSC0031117
gtgagttttagag

SEQ ID NO: 124512 - DNA, 13 bp, Artificial Sequence
  Oligonucleotide for detection of SNP TSC0031117
ctctaaaactcac

SEQ ID NO: 124513 - DNA, 13 bp, Artificial Sequence
  Oligonucleotide for detection of SNP TSC0031117
gtgagtgttagag

SEQ ID NO: 124514 - DNA, 13 bp, Artificial Sequence
  Oligonucleotide for detection of SNP TSC0031117
ctctaacactcac

SEQ ID NO: 124515 - DNA, 13 bp, Artificial Sequence
  Oligonucleotide for detection of SNP TSC0031117
gtgagcgttagag

SEQ ID NO: 124516 - DNA, 13 bp, Artificial Sequence
  Oligonucleotide for detection of SNP TSC0031117
ctctaacgctcac

SEQ ID NO: 124517 - DNA, 13 bp, Artificial Sequence
  Oligonucleotide for detection of SNP TSC0031121
tttgaggttagaa

SEQ ID NO: 124518 - DNA, 13 bp, Artificial Sequence
  Oligonucleotide for detection of SNP TSC0031121
ttctaacctcaaa

SEQ ID NO: 124519 - DNA, 13 bp, Artificial Sequence
  Oligonucleotide for detection of SNP TSC0031121
tttgagattagaa

SEQ ID NO: 124520 - DNA, 13 bp, Artificial Sequence
  Oligonucleotide for detection of SNP TSC0031121
ttctaatctcaaa

SEQ ID NO: 124521 - DNA, 13 bp, Artificial Sequence
  Oligonucleotide for detection of SNP TSC0031126
agaaaagagttaa

SEQ ID NO: 124522 - DNA, 13 bp, Artificial Sequence
  Oligonucleotide for detection of SNP TSC0031126
ttaactcttttct

SEQ ID NO: 124523 - DNA, 13 bp, Artificial Sequence
  Oligonucleotide for detection of SNP TSC0031126
agaaaaaagttaa

SEQ ID NO: 124524 - DNA, 13 bp, Artificial Sequence
  Oligonucleotide for detection of SNP TSC0031126
ttaacttttttct

SEQ ID NO: 124525 - DNA, 13 bp, Artificial Sequence
  Oligonucleotide for detection of SNP TSC0031127
ttgggtaggaatt

SEQ ID NO: 124526 - DNA, 13 bp, Artificial Sequence
  Oligonucleotide for detection of SNP TSC0031127
aattcctacccaa

SEQ ID NO: 124527 - DNA, 13 bp, Artificial Sequence
  Oligonucleotide for detection of SNP TSC0031127
ttgggttggaatt

SEQ ID NO: 124528 - DNA, 13 bp, Artificial Sequence
  Oligonucleotide for detection of SNP TSC0031127
aattccaacccaa

SEQ ID NO: 124529 - DNA, 13 bp, Artificial Sequence
  Oligonucleotide for detection of SNP TSC0031127
agtttttgtttaa

SEQ ID NO: 124530 - DNA, 13 bp, Artificial Sequence
  Oligonucleotide for detection of SNP TSC0031127
ttaaacaaaaact

SEQ ID NO: 124531 - DNA, 13 bp, Artificial Sequence
  Oligonucleotide for detection of SNP TSC0031129
gatataagttttt

SEQ ID NO: 124532 - DNA, 13 bp, Artificial Sequence
  Oligonucleotide for detection of SNP TSC0031129
aaaaacttatatc

SEQ ID NO: 124533 - DNA, 13 bp, Artificial Sequence
  Oligonucleotide for detection of SNP TSC0031129
gatataggttttt

SEQ ID NO: 124534 - DNA, 13 bp, Artificial Sequence
  Oligonucleotide for detection of SNP TSC0031129
aaaaacctatatc

SEQ ID NO: 124535 - DNA, 13 bp, Artificial Sequence
  Oligonucleotide for detection of SNP TSC0031136
atgtttattggtg

SEQ ID NO: 124536 - DNA, 13 bp, Artificial Sequence
  Oligonucleotide for detection of SNP TSC0031136
caccaataaacat

SEQ ID NO: 124537 - DNA, 13 bp, Artificial Sequence
  Oligonucleotide for detection of SNP TSC0031136
atgtttgttggtg

SEQ ID NO: 124538 - DNA, 13 bp, Artificial Sequence
  Oligonucleotide for detection of SNP TSC0031136
caccaacaaacat

SEQ ID NO: 124539 - DNA, 13 bp, Artificial Sequence
  Oligonucleotide for detection of SNP TSC0031137
gtttatgaaagtt

SEQ ID NO: 124540 - DNA, 13 bp, Artificial Sequence
  Oligonucleotide for detection of SNP TSC0031137
aactttcataaac

SEQ ID NO: 124541 - DNA, 13 bp, Artificial Sequence
  Oligonucleotide for detection of SNP TSC0031137
gtttattaaagtt

SEQ ID NO: 124542 - DNA, 13 bp, Artificial Sequence
  Oligonucleotide for detection of SNP TSC0031137
aactttaataaac

SEQ ID NO: 124543 - DNA, 13 bp, Artificial Sequence
  Oligonucleotide for detection of SNP TSC0031137
aatttttataagy

SEQ ID NO: 124544 - DNA, 13 bp, Artificial Sequence
  Oligonucleotide for detection of SNP TSC0031137
rcttataaaaatt

SEQ ID NO: 124545 - DNA, 13 bp, Artificial Sequence
  Oligonucleotide for detection of SNP TSC0031137
aattttaataagy

SEQ ID NO: 124546 - DNA, 13 bp, Artificial Sequence
  Oligonucleotide for detection of SNP TSC0031137
rcttattaaaatt

SEQ ID NO: 124547 - DNA, 13 bp, Artificial Sequence
  Oligonucleotide for detection of SNP TSC0031138
tattttatgattt

SEQ ID NO: 124548 - DNA, 13 bp, Artificial Sequence
  Oligonucleotide for detection of SNP TSC0031138
aaatcataaaata

SEQ ID NO: 124549 - DNA, 13 bp, Artificial Sequence
  Oligonucleotide for detection of SNP TSC0031138
tattttgtgattt

SEQ ID NO: 124550 - DNA, 13 bp, Artificial Sequence
  Oligonucleotide for detection of SNP TSC0031138
aaatcacaaaata

SEQ ID NO: 124551 - DNA, 13 bp, Artificial Sequence
  Oligonucleotide for detection of SNP TSC0031139
agatagagattat

SEQ ID NO: 124552 - DNA, 13 bp, Artificial Sequence
  Oligonucleotide for detection of SNP TSC0031139
ataatctctatct

SEQ ID NO: 124553 - DNA, 13 bp, Artificial Sequence
  Oligonucleotide for detection of SNP TSC0031139
agatagggattat

SEQ ID NO: 124554 - DNA, 13 bp, Artificial Sequence
  Oligonucleotide for detection of SNP TSC0031139
ataatccctatct

SEQ ID NO: 124555 - DNA, 13 bp, Artificial Sequence
  Oligonucleotide for detection of SNP TSC0031142
ttgtttaaagaga

SEQ ID NO: 124556 - DNA, 13 bp, Artificial Sequence
  Oligonucleotide for detection of SNP TSC0031142
tctctttaaacaa

SEQ ID NO: 124557 - DNA, 13 bp, Artificial Sequence
  Oligonucleotide for detection of SNP TSC0031142
ttgtttgaagaga

SEQ ID NO: 124558 - DNA, 13 bp, Artificial Sequence
  Oligonucleotide for detection of SNP TSC0031142
tctcttcaaacaa

SEQ ID NO: 124559 - DNA, 13 bp, Artificial Sequence
  Oligonucleotide for detection of SNP TSC0031143
ggttttgatgttt

SEQ ID NO: 124560 - DNA, 13 bp, Artificial Sequence
  Oligonucleotide for detection of SNP TSC0031143
aaacatcaaaacc

SEQ ID NO: 124561 - DNA, 13 bp, Artificial Sequence
  Oligonucleotide for detection of SNP TSC0031143
ggttttaatgttt

SEQ ID NO: 124562 - DNA, 13 bp, Artificial Sequence
  Oligonucleotide for detection of SNP TSC0031143
aaacattaaaacc

SEQ ID NO: 124563 - DNA, 13 bp, Artificial Sequence
  Oligonucleotide for detection of SNP TSC0031144
aataaaattgatt

SEQ ID NO: 124564 - DNA, 13 bp, Artificial Sequence
  Oligonucleotide for detection of SNP TSC0031144
aatcaattttatt

SEQ ID NO: 124565 - DNA, 13 bp, Artificial Sequence
  Oligonucleotide for detection of SNP TSC0031144
aataaatttgatt

SEQ ID NO: 124566 - DNA, 13 bp, Artificial Sequence
  Oligonucleotide for detection of SNP TSC0031144
aatcaaatttatt

SEQ ID NO: 124567 - DNA, 13 bp, Artificial Sequence
  Oligonucleotide for detection of SNP TSC0031144
aattagttttatt

SEQ ID NO: 124568 - DNA, 13 bp, Artificial Sequence
  Oligonucleotide for detection of SNP TSC0031144
aataaaactaatt

SEQ ID NO: 124569 - DNA, 13 bp, Artificial Sequence
  Oligonucleotide for detection of SNP TSC0031145
ttagatttaagtg

SEQ ID NO: 124570 - DNA, 13 bp, Artificial Sequence
  Oligonucleotide for detection of SNP TSC0031145
cacttaaatctaa

SEQ ID NO: 124571 - DNA, 13 bp, Artificial Sequence
  Oligonucleotide for detection of SNP TSC0031145
ttagatgtaagtg

SEQ ID NO: 124572 - DNA, 13 bp, Artificial Sequence
  Oligonucleotide for detection of SNP TSC0031145
cacttacatctaa

SEQ ID NO: 124573 - DNA, 13 bp, Artificial Sequence
  Oligonucleotide for detection of SNP TSC0031150
atatgaattttat

SEQ ID NO: 124574 - DNA, 13 bp, Artificial Sequence
  Oligonucleotide for detection of SNP TSC0031150
ataaaattcatat

SEQ ID NO: 124575 - DNA, 13 bp, Artificial Sequence
  Oligonucleotide for detection of SNP TSC0031150
atatgagttttat

SEQ ID NO: 124576 - DNA, 13 bp, Artificial Sequence
  Oligonucleotide for detection of SNP TSC0031150
ataaaactcatat

SEQ ID NO: 124577 - DNA, 13 bp, Artificial Sequence
  Oligonucleotide for detection of SNP TSC0031152
tttttagtgaatt

SEQ ID NO: 124578 - DNA, 13 bp, Artificial Sequence
  Oligonucleotide for detection of SNP TSC0031152
aattcactaaaaa

SEQ ID NO: 124579 - DNA, 13 bp, Artificial Sequence
  Oligonucleotide for detection of SNP TSC0031152
tttttaatgaatt

SEQ ID NO: 124580 - DNA, 13 bp, Artificial Sequence
  Oligonucleotide for detection of SNP TSC0031152
aattcattaaaaa

SEQ ID NO: 124581 - DNA, 13 bp, Artificial Sequence
  Oligonucleotide for detection of SNP TSC0031160
aggtgtataatta

SEQ ID NO: 124582 - DNA, 13 bp, Artificial Sequence
  Oligonucleotide for detection of SNP TSC0031160
taattatacacct

SEQ ID NO: 124583 - DNA, 13 bp, Artificial Sequence
  Oligonucleotide for detection of SNP TSC0031160
aggtgtttaatta

SEQ ID NO: 124584 - DNA, 13 bp, Artificial Sequence
  Oligonucleotide for detection of SNP TSC0031160
taattaaacacct

SEQ ID NO: 124585 - DNA, 13 bp, Artificial Sequence
  Oligonucleotide for detection of SNP TSC0031160
taattgtgtattt

SEQ ID NO: 124586 - DNA, 13 bp, Artificial Sequence
  Oligonucleotide for detection of SNP TSC0031160
aaatacacaatta

SEQ ID NO: 124587 - DNA, 13 bp, Artificial Sequence
  Oligonucleotide for detection of SNP TSC0031160
taattgagtattt

SEQ ID NO: 124588 - DNA, 13 bp, Artificial Sequence
  Oligonucleotide for detection of SNP TSC0031160
aaatactcaatta

SEQ ID NO: 124589 - DNA, 13 bp, Artificial Sequence
  Oligonucleotide for detection of SNP TSC0031161
gaggagaaagata

SEQ ID NO: 124590 - DNA, 13 bp, Artificial Sequence
  Oligonucleotide for detection of SNP TSC0031161
tatctttctcctc

SEQ ID NO: 124591 - DNA, 13 bp, Artificial Sequence
  Oligonucleotide for detection of SNP TSC0031161
gaggagtaagata

SEQ ID NO: 124592 - DNA, 13 bp, Artificial Sequence
  Oligonucleotide for detection of SNP TSC0031161
tatcttactcctc

SEQ ID NO: 124593 - DNA, 13 bp, Artificial Sequence
  Oligonucleotide for detection of SNP TSC0031162
gttttgtggtatg

SEQ ID NO: 124594 - DNA, 13 bp, Artificial Sequence
  Oligonucleotide for detection of SNP TSC0031162
cataccacaaaac

SEQ ID NO: 124595 - DNA, 13 bp, Artificial Sequence
  Oligonucleotide for detection of SNP TSC0031162
gttttgcggtatg

SEQ ID NO: 124596 - DNA, 13 bp, Artificial Sequence
  Oligonucleotide for detection of SNP TSC0031162
cataccgcaaaac

SEQ ID NO: 124597 - DNA, 13 bp, Artificial Sequence
  Oligonucleotide for detection of SNP TSC0031162
tatgttgtaaagy

SEQ ID NO: 124598 - DNA, 13 bp, Artificial Sequence
  Oligonucleotide for detection of SNP TSC0031162
rctttacaacata

SEQ ID NO: 124599 - DNA, 13 bp, Artificial Sequence
  Oligonucleotide for detection of SNP TSC0031162
tatgttataaagy

SEQ ID NO: 124600 - DNA, 13 bp, Artificial Sequence
  Oligonucleotide for detection of SNP TSC0031162
rctttataacata

SEQ ID NO: 124601 - DNA, 13 bp, Artificial Sequence
  Oligonucleotide for detection of SNP TSC0031162
tatgtcgtaaagy

SEQ ID NO: 124602 - DNA, 13 bp, Artificial Sequence
  Oligonucleotide for detection of SNP TSC0031162
rctttacgacata

SEQ ID NO: 124603 - DNA, 13 bp, Artificial Sequence
  Oligonucleotide for detection of SNP TSC0031163
tagttagaggaga

SEQ ID NO: 124604 - DNA, 13 bp, Artificial Sequence
  Oligonucleotide for detection of SNP TSC0031163
tctcctctaacta

SEQ ID NO: 124605 - DNA, 13 bp, Artificial Sequence
  Oligonucleotide for detection of SNP TSC0031163
tagttaaaggaga

SEQ ID NO: 124606 - DNA, 13 bp, Artificial Sequence
  Oligonucleotide for detection of SNP TSC0031163
tctcctttaacta

SEQ ID NO: 124607 - DNA, 13 bp, Artificial Sequence
  Oligonucleotide for detection of SNP TSC0031164
tatttggggttga

SEQ ID NO: 124608 - DNA, 13 bp, Artificial Sequence
  Oligonucleotide for detection of SNP TSC0031164
tcaaccccaaata

SEQ ID NO: 124609 - DNA, 13 bp, Artificial Sequence
  Oligonucleotide for detection of SNP TSC0031164
tatttgtggttga

SEQ ID NO: 124610 - DNA, 13 bp, Artificial Sequence
  Oligonucleotide for detection of SNP TSC0031164
tcaaccacaaata

SEQ ID NO: 124611 - DNA, 13 bp, Artificial Sequence
  Oligonucleotide for detection of SNP TSC0031164
ttaattttaagta

SEQ ID NO: 124612 - DNA, 13 bp, Artificial Sequence
  Oligonucleotide for detection of SNP TSC0031164
tacttaaaattaa

SEQ ID NO: 124613 - DNA, 13 bp, Artificial Sequence
  Oligonucleotide for detection of SNP TSC0031164
ttaattataagta

SEQ ID NO: 124614 - DNA, 13 bp, Artificial Sequence
  Oligonucleotide for detection of SNP TSC0031164
tacttataattaa

SEQ ID NO: 124615 - DNA, 13 bp, Artificial Sequence
  Oligonucleotide for detection of SNP TSC0031165
attttgtgggtgt

SEQ ID NO: 124616 - DNA, 13 bp, Artificial Sequence
  Oligonucleotide for detection of SNP TSC0031165
acacccacaaaat

SEQ ID NO: 124617 - DNA, 13 bp, Artificial Sequence
  Oligonucleotide for detection of SNP TSC0031165
atttcgtgggtgt

SEQ ID NO: 124618 - DNA, 13 bp, Artificial Sequence
  Oligonucleotide for detection of SNP TSC0031165
acacccacgaaat

SEQ ID NO: 124619 - DNA, 13 bp, Artificial Sequence
  Oligonucleotide for detection of SNP TSC0031165
attttgcgggtgt

SEQ ID NO: 124620 - DNA, 13 bp, Artificial Sequence
  Oligonucleotide for detection of SNP TSC0031165
acacccgcaaaat

SEQ ID NO: 124621 - DNA, 13 bp, Artificial Sequence
  Oligonucleotide for detection of SNP TSC0031165
atttcgcgggtgt

SEQ ID NO: 124622 - DNA, 13 bp, Artificial Sequence
  Oligonucleotide for detection of SNP TSC0031165
acacccgcgaaat

SEQ ID NO: 124623 - DNA, 13 bp, Artificial Sequence
  Oligonucleotide for detection of SNP TSC0031165
atatttgtggagt

SEQ ID NO: 124624 - DNA, 13 bp, Artificial Sequence
  Oligonucleotide for detection of SNP TSC0031165
actccacaaatat

SEQ ID NO: 124625 - DNA, 13 bp, Artificial Sequence
  Oligonucleotide for detection of SNP TSC0031165
atatttatggagt

SEQ ID NO: 124626 - DNA, 13 bp, Artificial Sequence
  Oligonucleotide for detection of SNP TSC0031165
actccataaatat

SEQ ID NO: 124627 - DNA, 13 bp, Artificial Sequence
  Oligonucleotide for detection of SNP TSC0031165
atattcgtggagt

SEQ ID NO: 124628 - DNA, 13 bp, Artificial Sequence
  Oligonucleotide for detection of SNP TSC0031165
actccacgaatat

SEQ ID NO: 124629 - DNA, 13 bp, Artificial Sequence
  Oligonucleotide for detection of SNP TSC0031165
atatttacggagt

SEQ ID NO: 124630 - DNA, 13 bp, Artificial Sequence
  Oligonucleotide for detection of SNP TSC0031165
actccgtaaatat

SEQ ID NO: 124631 - DNA, 13 bp, Artificial Sequence
  Oligonucleotide for detection of SNP TSC0031165
atatttgcggagt

SEQ ID NO: 124632 - DNA, 13 bp, Artificial Sequence
  Oligonucleotide for detection of SNP TSC0031165
actccgcaaatat

SEQ ID NO: 124633 - DNA, 13 bp, Artificial Sequence
  Oligonucleotide for detection of SNP TSC0031165
atattcgcggagt

SEQ ID NO: 124634 - DNA, 13 bp, Artificial Sequence
  Oligonucleotide for detection of SNP TSC0031165
actccgcgaatat

SEQ ID NO: 124635 - DNA, 13 bp, Artificial Sequence
  Oligonucleotide for detection of SNP TSC0031166
gtatatagataat

SEQ ID NO: 124636 - DNA, 13 bp, Artificial Sequence
  Oligonucleotide for detection of SNP TSC0031166
attatctatatac

SEQ ID NO: 124637 - DNA, 13 bp, Artificial Sequence
  Oligonucleotide for detection of SNP TSC0031166
gtatattgataat

SEQ ID NO: 124638 - DNA, 13 bp, Artificial Sequence
  Oligonucleotide for detection of SNP TSC0031166
attatcaatatac

SEQ ID NO: 124639 - DNA, 13 bp, Artificial Sequence
  Oligonucleotide for detection of SNP TSC0031166
attatttatgtay

SEQ ID NO: 124640 - DNA, 13 bp, Artificial Sequence
  Oligonucleotide for detection of SNP TSC0031166
rtacataaataat

SEQ ID NO: 124641 - DNA, 13 bp, Artificial Sequence
  Oligonucleotide for detection of SNP TSC0031166
attattaatgtay

SEQ ID NO: 124642 - DNA, 13 bp, Artificial Sequence
  Oligonucleotide for detection of SNP TSC0031166
rtacattaataat

SEQ ID NO: 124643 - DNA, 13 bp, Artificial Sequence
  Oligonucleotide for detection of SNP TSC0031167
atagaaattttty

SEQ ID NO: 124644 - DNA, 13 bp, Artificial Sequence
  Oligonucleotide for detection of SNP TSC0031167
raaaaatttctat

SEQ ID NO: 124645 - DNA, 13 bp, Artificial Sequence
  Oligonucleotide for detection of SNP TSC0031167
atagaagttttty

SEQ ID NO: 124646 - DNA, 13 bp, Artificial Sequence
  Oligonucleotide for detection of SNP TSC0031167
raaaaacttctat

SEQ ID NO: 124647 - DNA, 13 bp, Artificial Sequence
  Oligonucleotide for detection of SNP TSC0031171
attttaaattgtg

SEQ ID NO: 124648 - DNA, 13 bp, Artificial Sequence
  Oligonucleotide for detection of SNP TSC0031171
cacaatttaaaat

SEQ ID NO: 124649 - DNA, 13 bp, Artificial Sequence
  Oligonucleotide for detection of SNP TSC0031171
attttatattgtg

SEQ ID NO: 124650 - DNA, 13 bp, Artificial Sequence
  Oligonucleotide for detection of SNP TSC0031171
cacaatataaaat

SEQ ID NO: 124651 - DNA, 13 bp, Artificial Sequence
  Oligonucleotide for detection of SNP TSC0031171
tatagtttgggat

SEQ ID NO: 124652 - DNA, 13 bp, Artificial Sequence
  Oligonucleotide for detection of SNP TSC0031171
atcccaaactata

SEQ ID NO: 124653 - DNA, 13 bp, Artificial Sequence
  Oligonucleotide for detection of SNP TSC0031171
tatagtatgggat

SEQ ID NO: 124654 - DNA, 13 bp, Artificial Sequence
  Oligonucleotide for detection of SNP TSC0031171
atcccatactata

SEQ ID NO: 124655 - DNA, 13 bp, Artificial Sequence
  Oligonucleotide for detection of SNP TSC0031172
atatgtgaattty

SEQ ID NO: 124656 - DNA, 13 bp, Artificial Sequence
  Oligonucleotide for detection of SNP TSC0031172
raaattcacatat

SEQ ID NO: 124657 - DNA, 13 bp, Artificial Sequence
  Oligonucleotide for detection of SNP TSC0031172
atatgttaattty

SEQ ID NO: 124658 - DNA, 13 bp, Artificial Sequence
  Oligonucleotide for detection of SNP TSC0031172
raaattaacatat

SEQ ID NO: 124659 - DNA, 13 bp, Artificial Sequence
  Oligonucleotide for detection of SNP TSC0031172
atatgcgaattty

SEQ ID NO: 124660 - DNA, 13 bp, Artificial Sequence
  Oligonucleotide for detection of SNP TSC0031172
raaattcgcatat

SEQ ID NO: 124661 - DNA, 13 bp, Artificial Sequence
  Oligonucleotide for detection of SNP TSC0031172
gaaatttgtatgt

SEQ ID NO: 124662 - DNA, 13 bp, Artificial Sequence
  Oligonucleotide for detection of SNP TSC0031172
acatacaaatttc

SEQ ID NO: 124663 - DNA, 13 bp, Artificial Sequence
  Oligonucleotide for detection of SNP TSC0031172
gaaattagtatgt

SEQ ID NO: 124664 - DNA, 13 bp, Artificial Sequence
  Oligonucleotide for detection of SNP TSC0031172
acatactaatttc

SEQ ID NO: 124665 - DNA, 13 bp, Artificial Sequence
  Oligonucleotide for detection of SNP TSC0031172
gaaattcgtatgt

SEQ ID NO: 124666 - DNA, 13 bp, Artificial Sequence
  Oligonucleotide for detection of SNP TSC0031172
acatacgaatttc

SEQ ID NO: 124667 - DNA, 13 bp, Artificial Sequence
  Oligonucleotide for detection of SNP TSC0031173
ggtttggtataga

SEQ ID NO: 124668 - DNA, 13 bp, Artificial Sequence
  Oligonucleotide for detection of SNP TSC0031173
tctataccaaacc

SEQ ID NO: 124669 - DNA, 13 bp, Artificial Sequence
  Oligonucleotide for detection of SNP TSC0031173
ggtttgatataga

SEQ ID NO: 124670 - DNA, 13 bp, Artificial Sequence
  Oligonucleotide for detection of SNP TSC0031173
tctatatcaaacc

SEQ ID NO: 124671 - DNA, 13 bp, Artificial Sequence
  Oligonucleotide for detection of SNP TSC0031174
gagagtgggagga

SEQ ID NO: 124672 - DNA, 13 bp, Artificial Sequence
  Oligonucleotide for detection of SNP TSC0031174
tcctcccactctc

SEQ ID NO: 124673 - DNA, 13 bp, Artificial Sequence
  Oligonucleotide for detection of SNP TSC0031174
gagagtaggagga

SEQ ID NO: 124674 - DNA, 13 bp, Artificial Sequence
  Oligonucleotide for detection of SNP TSC0031174
tcctcctactctc

SEQ ID NO: 124675 - DNA, 13 bp, Artificial Sequence
  Oligonucleotide for detection of SNP TSC0031174
gagagcgggagga

SEQ ID NO: 124676 - DNA, 13 bp, Artificial Sequence
  Oligonucleotide for detection of SNP TSC0031174
tcctcccgctctc

SEQ ID NO: 124677 - DNA, 13 bp, Artificial Sequence
  Oligonucleotide for detection of SNP TSC0031176
ggggagggaagga

SEQ ID NO: 124678 - DNA, 13 bp, Artificial Sequence
  Oligonucleotide for detection of SNP TSC0031176
tccttccctcccc

SEQ ID NO: 124679 - DNA, 13 bp, Artificial Sequence
  Oligonucleotide for detection of SNP TSC0031176
ggggagagaagga

SEQ ID NO: 124680 - DNA, 13 bp, Artificial Sequence
  Oligonucleotide for detection of SNP TSC0031176
tccttctctcccc

SEQ ID NO: 124681 - DNA, 13 bp, Artificial Sequence
  Oligonucleotide for detection of SNP TSC0031177
gttatataaaatg

SEQ ID NO: 124682 - DNA, 13 bp, Artificial Sequence
  Oligonucleotide for detection of SNP TSC0031177
cattttatataac

SEQ ID NO: 124683 - DNA, 13 bp, Artificial Sequence
  Oligonucleotide for detection of SNP TSC0031177
gttatagaaaatg

SEQ ID NO: 124684 - DNA, 13 bp, Artificial Sequence
  Oligonucleotide for detection of SNP TSC0031177
cattttctataac

SEQ ID NO: 124685 - DNA, 13 bp, Artificial Sequence
  Oligonucleotide for detection of SNP TSC0031177
tattttttataay

SEQ ID NO: 124686 - DNA, 13 bp, Artificial Sequence
  Oligonucleotide for detection of SNP TSC0031177
rttataaaaaata

SEQ ID NO: 124687 - DNA, 13 bp, Artificial Sequence
  Oligonucleotide for detection of SNP TSC0031178
tttattttgtaay

SEQ ID NO: 124688 - DNA, 13 bp, Artificial Sequence
  Oligonucleotide for detection of SNP TSC0031178
rttacaaaataaa

SEQ ID NO: 124689 - DNA, 13 bp, Artificial Sequence
  Oligonucleotide for detection of SNP TSC0031178
gttatataatgga

SEQ ID NO: 124690 - DNA, 13 bp, Artificial Sequence
  Oligonucleotide for detection of SNP TSC0031178
tccattatataac

SEQ ID NO: 124691 - DNA, 13 bp, Artificial Sequence
  Oligonucleotide for detection of SNP TSC0031178
gttatagaatgga

SEQ ID NO: 124692 - DNA, 13 bp, Artificial Sequence
  Oligonucleotide for detection of SNP TSC0031178
tccattctataac

SEQ ID NO: 124693 - DNA, 13 bp, Artificial Sequence
  Oligonucleotide for detection of SNP TSC0031179
ggttgaattttga

SEQ ID NO: 124694 - DNA, 13 bp, Artificial Sequence
  Oligonucleotide for detection of SNP TSC0031179
tcaaaattcaacc

SEQ ID NO: 124695 - DNA, 13 bp, Artificial Sequence
  Oligonucleotide for detection of SNP TSC0031179
ggttgagttttga

SEQ ID NO: 124696 - DNA, 13 bp, Artificial Sequence
  Oligonucleotide for detection of SNP TSC0031179
tcaaaactcaacc

SEQ ID NO: 124697 - DNA, 13 bp, Artificial Sequence
  Oligonucleotide for detection of SNP TSC0031180
aaaaattgatgtt

SEQ ID NO: 124698 - DNA, 13 bp, Artificial Sequence
  Oligonucleotide for detection of SNP TSC0031180
aacatcaattttt

SEQ ID NO: 124699 - DNA, 13 bp, Artificial Sequence
  Oligonucleotide for detection of SNP TSC0031180
aaaaatcgatgtt

SEQ ID NO: 124700 - DNA, 13 bp, Artificial Sequence
  Oligonucleotide for detection of SNP TSC0031180
aacatcgattttt

SEQ ID NO: 124701 - DNA, 13 bp, Artificial Sequence
  Oligonucleotide for detection of SNP TSC0031180
aatattgattttt

SEQ ID NO: 124702 - DNA, 13 bp, Artificial Sequence
  Oligonucleotide for detection of SNP TSC0031180
aaaaatcaatatt

SEQ ID NO: 124703 - DNA, 13 bp, Artificial Sequence
  Oligonucleotide for detection of SNP TSC0031180
aatattaattttt

SEQ ID NO: 124704 - DNA, 13 bp, Artificial Sequence
  Oligonucleotide for detection of SNP TSC0031180
aaaaattaatatt

SEQ ID NO: 124705 - DNA, 13 bp, Artificial Sequence
  Oligonucleotide for detection of SNP TSC0031180
aatatcgattttt

SEQ ID NO: 124706 - DNA, 13 bp, Artificial Sequence
  Oligonucleotide for detection of SNP TSC0031180
aaaaatcgatatt

SEQ ID NO: 124707 - DNA, 13 bp, Artificial Sequence
  Oligonucleotide for detection of SNP TSC0031181
gtgttttgttagt

SEQ ID NO: 124708 - DNA, 13 bp, Artificial Sequence
  Oligonucleotide for detection of SNP TSC0031181
actaacaaaacac

SEQ ID NO: 124709 - DNA, 13 bp, Artificial Sequence
  Oligonucleotide for detection of SNP TSC0031181
gtgtttcgttagt

SEQ ID NO: 124710 - DNA, 13 bp, Artificial Sequence
  Oligonucleotide for detection of SNP TSC0031181
actaacgaaacac

SEQ ID NO: 124711 - DNA, 13 bp, Artificial Sequence
  Oligonucleotide for detection of SNP TSC0031181
attgatggggtay

SEQ ID NO: 124712 - DNA, 13 bp, Artificial Sequence
  Oligonucleotide for detection of SNP TSC0031181
rtaccccatcaat

SEQ ID NO: 124713 - DNA, 13 bp, Artificial Sequence
  Oligonucleotide for detection of SNP TSC0031181
attgatagggtay

SEQ ID NO: 124714 - DNA, 13 bp, Artificial Sequence
  Oligonucleotide for detection of SNP TSC0031181
rtaccctatcaat

SEQ ID NO: 124715 - DNA, 13 bp, Artificial Sequence
  Oligonucleotide for detection of SNP TSC0031181
attgacggggtay

SEQ ID NO: 124716 - DNA, 13 bp, Artificial Sequence
  Oligonucleotide for detection of SNP TSC0031181
rtaccccgtcaat

SEQ ID NO: 124717 - DNA, 13 bp, Artificial Sequence
  Oligonucleotide for detection of SNP TSC0031185
ttatagtttggty

SEQ ID NO: 124718 - DNA, 13 bp, Artificial Sequence
  Oligonucleotide for detection of SNP TSC0031185
raccaaactataa

SEQ ID NO: 124719 - DNA, 13 bp, Artificial Sequence
  Oligonucleotide for detection of SNP TSC0031185
ttataggttggty

SEQ ID NO: 124720 - DNA, 13 bp, Artificial Sequence
  Oligonucleotide for detection of SNP TSC0031185
raccaacctataa

SEQ ID NO: 124721 - DNA, 13 bp, Artificial Sequence
  Oligonucleotide for detection of SNP TSC0031185
ggttaggttgtga

SEQ ID NO: 124722 - DNA, 13 bp, Artificial Sequence
  Oligonucleotide for detection of SNP TSC0031185
tcacaacctaacc

SEQ ID NO: 124723 - DNA, 13 bp, Artificial Sequence
  Oligonucleotide for detection of SNP TSC0031185
ggttagtttgtga

SEQ ID NO: 124724 - DNA, 13 bp, Artificial Sequence
  Oligonucleotide for detection of SNP TSC0031185
tcacaaactaacc

SEQ ID NO: 124725 - DNA, 13 bp, Artificial Sequence
  Oligonucleotide for detection of SNP TSC0031186
tatataggtatay

SEQ ID NO: 124726 - DNA, 13 bp, Artificial Sequence
  Oligonucleotide for detection of SNP TSC0031186
rtatacctatata

SEQ ID NO: 124727 - DNA, 13 bp, Artificial Sequence
  Oligonucleotide for detection of SNP TSC0031187
tgtgttaagggta

SEQ ID NO: 124728 - DNA, 13 bp, Artificial Sequence
  Oligonucleotide for detection of SNP TSC0031187
tacccttaacaca

SEQ ID NO: 124729 - DNA, 13 bp, Artificial Sequence
  Oligonucleotide for detection of SNP TSC0031187
tgtgttgagggta

SEQ ID NO: 124730 - DNA, 13 bp, Artificial Sequence
  Oligonucleotide for detection of SNP TSC0031187
taccctcaacaca

SEQ ID NO: 124731 - DNA, 13 bp, Artificial Sequence
  Oligonucleotide for detection of SNP TSC0031187
tgtgtcgagggta

SEQ ID NO: 124732 - DNA, 13 bp, Artificial Sequence
  Oligonucleotide for detection of SNP TSC0031187
taccctcgacaca

SEQ ID NO: 124733 - DNA, 13 bp, Artificial Sequence
  Oligonucleotide for detection of SNP TSC0031187
tatttttggtata

SEQ ID NO: 124734 - DNA, 13 bp, Artificial Sequence
  Oligonucleotide for detection of SNP TSC0031187
tataccaaaaata

SEQ ID NO: 124735 - DNA, 13 bp, Artificial Sequence
  Oligonucleotide for detection of SNP TSC0031187
tattttcggtata

SEQ ID NO: 124736 - DNA, 13 bp, Artificial Sequence
  Oligonucleotide for detection of SNP TSC0031187
tataccgaaaata

SEQ ID NO: 124737 - DNA, 13 bp, Artificial Sequence
  Oligonucleotide for detection of SNP TSC0031188
ataaggggtatga

SEQ ID NO: 124738 - DNA, 13 bp, Artificial Sequence
  Oligonucleotide for detection of SNP TSC0031188
tcataccccttat

SEQ ID NO: 124739 - DNA, 13 bp, Artificial Sequence
  Oligonucleotide for detection of SNP TSC0031188
ataaggtgtatga

SEQ ID NO: 124740 - DNA, 13 bp, Artificial Sequence
  Oligonucleotide for detection of SNP TSC0031188
tcatacaccttat

SEQ ID NO: 124741 - DNA, 13 bp, Artificial Sequence
  Oligonucleotide for detection of SNP TSC0031190
tgtggataaatty

SEQ ID NO: 124742 - DNA, 13 bp, Artificial Sequence
  Oligonucleotide for detection of SNP TSC0031190
raatttatccaca

SEQ ID NO: 124743 - DNA, 13 bp, Artificial Sequence
  Oligonucleotide for detection of SNP TSC0031190
tgtggagaaatty

SEQ ID NO: 124744 - DNA, 13 bp, Artificial Sequence
  Oligonucleotide for detection of SNP TSC0031190
raatttctccaca

SEQ ID NO: 124745 - DNA, 13 bp, Artificial Sequence
  Oligonucleotide for detection of SNP TSC0031190
cgtggataaatty

SEQ ID NO: 124746 - DNA, 13 bp, Artificial Sequence
  Oligonucleotide for detection of SNP TSC0031190
raatttatccacg

SEQ ID NO: 124747 - DNA, 13 bp, Artificial Sequence
  Oligonucleotide for detection of SNP TSC0031190
cgtggagaaatty

SEQ ID NO: 124748 - DNA, 13 bp, Artificial Sequence
  Oligonucleotide for detection of SNP TSC0031190
raatttctccacg

SEQ ID NO: 124749 - DNA, 13 bp, Artificial Sequence
  Oligonucleotide for detection of SNP TSC0031190
gaatttgtttatg

SEQ ID NO: 124750 - DNA, 13 bp, Artificial Sequence
  Oligonucleotide for detection of SNP TSC0031190
cataaacaaattc

SEQ ID NO: 124751 - DNA, 13 bp, Artificial Sequence
  Oligonucleotide for detection of SNP TSC0031190
gaatttttttatg

SEQ ID NO: 124752 - DNA, 13 bp, Artificial Sequence
  Oligonucleotide for detection of SNP TSC0031190
cataaaaaaattc

SEQ ID NO: 124753 - DNA, 13 bp, Artificial Sequence
  Oligonucleotide for detection of SNP TSC0031190
gaatttgtttacg

SEQ ID NO: 124754 - DNA, 13 bp, Artificial Sequence
  Oligonucleotide for detection of SNP TSC0031190
cgtaaacaaattc

SEQ ID NO: 124755 - DNA, 13 bp, Artificial Sequence
  Oligonucleotide for detection of SNP TSC0031190
gaatttttttacg

SEQ ID NO: 124756 - DNA, 13 bp, Artificial Sequence
  Oligonucleotide for detection of SNP TSC0031190
cgtaaaaaaattc

SEQ ID NO: 124757 - DNA, 13 bp, Artificial Sequence
  Oligonucleotide for detection of SNP TSC0031191
tggggaatagtat

SEQ ID NO: 124758 - DNA, 13 bp, Artificial Sequence
  Oligonucleotide for detection of SNP TSC0031191
atactattcccca

SEQ ID NO: 124759 - DNA, 13 bp, Artificial Sequence
  Oligonucleotide for detection of SNP TSC0031191
tggggagtagtat

SEQ ID NO: 124760 - DNA, 13 bp, Artificial Sequence
  Oligonucleotide for detection of SNP TSC0031191
atactactcccca

SEQ ID NO: 124761 - DNA, 13 bp, Artificial Sequence
  Oligonucleotide for detection of SNP TSC0031192
agtgggtggggta

SEQ ID NO: 124762 - DNA, 13 bp, Artificial Sequence
  Oligonucleotide for detection of SNP TSC0031192
taccccacccact

SEQ ID NO: 124763 - DNA, 13 bp, Artificial Sequence
  Oligonucleotide for detection of SNP TSC0031192
agtgggcggggta

SEQ ID NO: 124764 - DNA, 13 bp, Artificial Sequence
  Oligonucleotide for detection of SNP TSC0031192
taccccgcccact

SEQ ID NO: 124765 - DNA, 13 bp, Artificial Sequence
  Oligonucleotide for detection of SNP TSC0031192
tgttttgtttatt

SEQ ID NO: 124766 - DNA, 13 bp, Artificial Sequence
  Oligonucleotide for detection of SNP TSC0031192
aataaacaaaaca

SEQ ID NO: 124767 - DNA, 13 bp, Artificial Sequence
  Oligonucleotide for detection of SNP TSC0031192
tgttttatttatt

SEQ ID NO: 124768 - DNA, 13 bp, Artificial Sequence
  Oligonucleotide for detection of SNP TSC0031192
aataaataaaaca

SEQ ID NO: 124769 - DNA, 13 bp, Artificial Sequence
  Oligonucleotide for detection of SNP TSC0031192
tgtttcgtttatt

SEQ ID NO: 124770 - DNA, 13 bp, Artificial Sequence
  Oligonucleotide for detection of SNP TSC0031192
aataaacgaaaca

SEQ ID NO: 124771 - DNA, 13 bp, Artificial Sequence
  Oligonucleotide for detection of SNP TSC0031193
tgtttaaagttag

SEQ ID NO: 124772 - DNA, 13 bp, Artificial Sequence
  Oligonucleotide for detection of SNP TSC0031193
ctaactttaaaca

SEQ ID NO: 124773 - DNA, 13 bp, Artificial Sequence
  Oligonucleotide for detection of SNP TSC0031193
tgtttagagttag

SEQ ID NO: 124774 - DNA, 13 bp, Artificial Sequence
  Oligonucleotide for detection of SNP TSC0031193
ctaactctaaaca

SEQ ID NO: 124775 - DNA, 13 bp, Artificial Sequence
  Oligonucleotide for detection of SNP TSC0031200
agtatagtagtta

SEQ ID NO: 124776 - DNA, 13 bp, Artificial Sequence
  Oligonucleotide for detection of SNP TSC0031200
taactactatact

SEQ ID NO: 124777 - DNA, 13 bp, Artificial Sequence
  Oligonucleotide for detection of SNP TSC0031200
agtatattagtta

SEQ ID NO: 124778 - DNA, 13 bp, Artificial Sequence
  Oligonucleotide for detection of SNP TSC0031200
taactaatatact

SEQ ID NO: 124779 - DNA, 13 bp, Artificial Sequence
  Oligonucleotide for detection of SNP TSC0031200
taattgttgtgtt

SEQ ID NO: 124780 - DNA, 13 bp, Artificial Sequence
  Oligonucleotide for detection of SNP TSC0031200
aacacaacaatta

SEQ ID NO: 124781 - DNA, 13 bp, Artificial Sequence
  Oligonucleotide for detection of SNP TSC0031200
taattgatgtgtt

SEQ ID NO: 124782 - DNA, 13 bp, Artificial Sequence
  Oligonucleotide for detection of SNP TSC0031200
aacacatcaatta

SEQ ID NO: 124783 - DNA, 13 bp, Artificial Sequence
  Oligonucleotide for detection of SNP TSC0031201
tgtttagtaataa

SEQ ID NO: 124784 - DNA, 13 bp, Artificial Sequence
  Oligonucleotide for detection of SNP TSC0031201
ttattactaaaca

SEQ ID NO: 124785 - DNA, 13 bp, Artificial Sequence
  Oligonucleotide for detection of SNP TSC0031201
tgtttaataataa

SEQ ID NO: 124786 - DNA, 13 bp, Artificial Sequence
  Oligonucleotide for detection of SNP TSC0031201
ttattattaaaca

SEQ ID NO: 124787 - DNA, 13 bp, Artificial Sequence
  Oligonucleotide for detection of SNP TSC0031202
ttaatggtgtgtt

SEQ ID NO: 124788 - DNA, 13 bp, Artificial Sequence
  Oligonucleotide for detection of SNP TSC0031202
aacacaccattaa

SEQ ID NO: 124789 - DNA, 13 bp, Artificial Sequence
  Oligonucleotide for detection of SNP TSC0031202
ttaatgatgtgtt

SEQ ID NO: 124790 - DNA, 13 bp, Artificial Sequence
  Oligonucleotide for detection of SNP TSC0031202
aacacatcattaa

SEQ ID NO: 124791 - DNA, 13 bp, Artificial Sequence
  Oligonucleotide for detection of SNP TSC0031202
ttaacggtgtgtt

SEQ ID NO: 124792 - DNA, 13 bp, Artificial Sequence
  Oligonucleotide for detection of SNP TSC0031202
aacacaccgttaa

SEQ ID NO: 124793 - DNA, 13 bp, Artificial Sequence
  Oligonucleotide for detection of SNP TSC0031202
ttaacgatgtgtt

SEQ ID NO: 124794 - DNA, 13 bp, Artificial Sequence
  Oligonucleotide for detection of SNP TSC0031202
aacacatcgttaa

SEQ ID NO: 124795 - DNA, 13 bp, Artificial Sequence
  Oligonucleotide for detection of SNP TSC0031202
ttaatggtgcgtt

SEQ ID NO: 124796 - DNA, 13 bp, Artificial Sequence
  Oligonucleotide for detection of SNP TSC0031202
aacgcaccattaa

SEQ ID NO: 124797 - DNA, 13 bp, Artificial Sequence
  Oligonucleotide for detection of SNP TSC0031202
ttaatgatgcgtt

SEQ ID NO: 124798 - DNA, 13 bp, Artificial Sequence
  Oligonucleotide for detection of SNP TSC0031202
aacgcatcattaa

SEQ ID NO: 124799 - DNA, 13 bp, Artificial Sequence
  Oligonucleotide for detection of SNP TSC0031202
ttaacggtgcgtt

SEQ ID NO: 124800 - DNA, 13 bp, Artificial Sequence
  Oligonucleotide for detection of SNP TSC0031202
aacgcaccgttaa

SEQ ID NO: 124801 - DNA, 13 bp, Artificial Sequence
  Oligonucleotide for detection of SNP TSC0031202
ttaacgatgcgtt

SEQ ID NO: 124802 - DNA, 13 bp, Artificial Sequence
  Oligonucleotide for detection of SNP TSC0031202
aacgcatcgttaa

SEQ ID NO: 124803 - DNA, 13 bp, Artificial Sequence
  Oligonucleotide for detection of SNP TSC0031203
atagagtgtattg

SEQ ID NO: 124804 - DNA, 13 bp, Artificial Sequence
  Oligonucleotide for detection of SNP TSC0031203
caatacactctat

SEQ ID NO: 124805 - DNA, 13 bp, Artificial Sequence
  Oligonucleotide for detection of SNP TSC0031203
atagagcgtattg

SEQ ID NO: 124806 - DNA, 13 bp, Artificial Sequence
  Oligonucleotide for detection of SNP TSC0031203
caatacgctctat

SEQ ID NO: 124807 - DNA, 13 bp, Artificial Sequence
  Oligonucleotide for detection of SNP TSC0031203
tagtatgttttat

SEQ ID NO: 124808 - DNA, 13 bp, Artificial Sequence
  Oligonucleotide for detection of SNP TSC0031203
ataaaacatacta

SEQ ID NO: 124809 - DNA, 13 bp, Artificial Sequence
  Oligonucleotide for detection of SNP TSC0031203
tagtatattttat

SEQ ID NO: 124810 - DNA, 13 bp, Artificial Sequence
  Oligonucleotide for detection of SNP TSC0031203
ataaaatatacta

SEQ ID NO: 124811 - DNA, 13 bp, Artificial Sequence
  Oligonucleotide for detection of SNP TSC0031203
tagtacgttttat

SEQ ID NO: 124812 - DNA, 13 bp, Artificial Sequence
  Oligonucleotide for detection of SNP TSC0031203
ataaaacgtacta

SEQ ID NO: 124813 - DNA, 13 bp, Artificial Sequence
  Oligonucleotide for detection of SNP TSC0031205
atttagtgtttat

SEQ ID NO: 124814 - DNA, 13 bp, Artificial Sequence
  Oligonucleotide for detection of SNP TSC0031205
ataaacactaaat

SEQ ID NO: 124815 - DNA, 13 bp, Artificial Sequence
  Oligonucleotide for detection of SNP TSC0031205
atttagcgtttat

SEQ ID NO: 124816 - DNA, 13 bp, Artificial Sequence
  Oligonucleotide for detection of SNP TSC0031205
ataaacgctaaat

SEQ ID NO: 124817 - DNA, 13 bp, Artificial Sequence
  Oligonucleotide for detection of SNP TSC0031205
atgaatgttgagt

SEQ ID NO: 124818 - DNA, 13 bp, Artificial Sequence
  Oligonucleotide for detection of SNP TSC0031205
actcaacattcat

SEQ ID NO: 124819 - DNA, 13 bp, Artificial Sequence
  Oligonucleotide for detection of SNP TSC0031205
atgaatattgagt

SEQ ID NO: 124820 - DNA, 13 bp, Artificial Sequence
  Oligonucleotide for detection of SNP TSC0031205
actcaatattcat

SEQ ID NO: 124821 - DNA, 13 bp, Artificial Sequence
  Oligonucleotide for detection of SNP TSC0031205
atgaacgttgagt

SEQ ID NO: 124822 - DNA, 13 bp, Artificial Sequence
  Oligonucleotide for detection of SNP TSC0031205
actcaacgttcat

SEQ ID NO: 124823 - DNA, 13 bp, Artificial Sequence
  Oligonucleotide for detection of SNP TSC0031207
aagagtaagggga

SEQ ID NO: 124824 - DNA, 13 bp, Artificial Sequence
  Oligonucleotide for detection of SNP TSC0031207
tccccttactctt

SEQ ID NO: 124825 - DNA, 13 bp, Artificial Sequence
  Oligonucleotide for detection of SNP TSC0031207
aagagtgagggga

SEQ ID NO: 124826 - DNA, 13 bp, Artificial Sequence
  Oligonucleotide for detection of SNP TSC0031207
tcccctcactctt

SEQ ID NO: 124827 - DNA, 13 bp, Artificial Sequence
  Oligonucleotide for detection of SNP TSC0031207
aagagcgagggga

SEQ ID NO: 124828 - DNA, 13 bp, Artificial Sequence
  Oligonucleotide for detection of SNP TSC0031207
tcccctcgctctt

SEQ ID NO: 124829 - DNA, 13 bp, Artificial Sequence
  Oligonucleotide for detection of SNP TSC0031208
gggaaaatgaagt

SEQ ID NO: 124830 - DNA, 13 bp, Artificial Sequence
  Oligonucleotide for detection of SNP TSC0031208
acttcattttccc

SEQ ID NO: 124831 - DNA, 13 bp, Artificial Sequence
  Oligonucleotide for detection of SNP TSC0031208
gggaaagtgaagt

SEQ ID NO: 124832 - DNA, 13 bp, Artificial Sequence
  Oligonucleotide for detection of SNP TSC0031208
acttcactttccc

SEQ ID NO: 124833 - DNA, 13 bp, Artificial Sequence
  Oligonucleotide for detection of SNP TSC0031208
gggaaaacgaagt

SEQ ID NO: 124834 - DNA, 13 bp, Artificial Sequence
  Oligonucleotide for detection of SNP TSC0031208
acttcgttttccc

SEQ ID NO: 124835 - DNA, 13 bp, Artificial Sequence
  Oligonucleotide for detection of SNP TSC0031208
gggaaagcgaagt

SEQ ID NO: 124836 - DNA, 13 bp, Artificial Sequence
  Oligonucleotide for detection of SNP TSC0031208
acttcgctttccc

SEQ ID NO: 124837 - DNA, 13 bp, Artificial Sequence
  Oligonucleotide for detection of SNP TSC0031209
atttttagtatty

SEQ ID NO: 124838 - DNA, 13 bp, Artificial Sequence
  Oligonucleotide for detection of SNP TSC0031209
raatactaaaaat

SEQ ID NO: 124839 - DNA, 13 bp, Artificial Sequence
  Oligonucleotide for detection of SNP TSC0031210
ggagggatgggag

SEQ ID NO: 124840 - DNA, 13 bp, Artificial Sequence
  Oligonucleotide for detection of SNP TSC0031210
ctcccatccctcc

SEQ ID NO: 124841 - DNA, 13 bp, Artificial Sequence
  Oligonucleotide for detection of SNP TSC0031210
ggagggttgggag

SEQ ID NO: 124842 - DNA, 13 bp, Artificial Sequence
  Oligonucleotide for detection of SNP TSC0031210
ctcccaaccctcc

SEQ ID NO: 124843 - DNA, 13 bp, Artificial Sequence
  Oligonucleotide for detection of SNP TSC0031211
gtttgtagtttgg

SEQ ID NO: 124844 - DNA, 13 bp, Artificial Sequence
  Oligonucleotide for detection of SNP TSC0031211
ccaaactacaaac

SEQ ID NO: 124845 - DNA, 13 bp, Artificial Sequence
  Oligonucleotide for detection of SNP TSC0031211
gtttgtggtttgg

SEQ ID NO: 124846 - DNA, 13 bp, Artificial Sequence
  Oligonucleotide for detection of SNP TSC0031211
ccaaaccacaaac

SEQ ID NO: 124847 - DNA, 13 bp, Artificial Sequence
  Oligonucleotide for detection of SNP TSC0031211
gttcgtagtttgg

SEQ ID NO: 124848 - DNA, 13 bp, Artificial Sequence
  Oligonucleotide for detection of SNP TSC0031211
ccaaactacgaac

SEQ ID NO: 124849 - DNA, 13 bp, Artificial Sequence
  Oligonucleotide for detection of SNP TSC0031211
gttcgtggtttgg

SEQ ID NO: 124850 - DNA, 13 bp, Artificial Sequence
  Oligonucleotide for detection of SNP TSC0031211
ccaaaccacgaac

SEQ ID NO: 124851 - DNA, 13 bp, Artificial Sequence
  Oligonucleotide for detection of SNP TSC0031211
gtttgtagttcgg

SEQ ID NO: 124852 - DNA, 13 bp, Artificial Sequence
  Oligonucleotide for detection of SNP TSC0031211
ccgaactacaaac

SEQ ID NO: 124853 - DNA, 13 bp, Artificial Sequence
  Oligonucleotide for detection of SNP TSC0031211
gtttgtggttcgg

SEQ ID NO: 124854 - DNA, 13 bp, Artificial Sequence
  Oligonucleotide for detection of SNP TSC0031211
ccgaaccacaaac

SEQ ID NO: 124855 - DNA, 13 bp, Artificial Sequence
  Oligonucleotide for detection of SNP TSC0031211
gttcgtagttcgg

SEQ ID NO: 124856 - DNA, 13 bp, Artificial Sequence
  Oligonucleotide for detection of SNP TSC0031211
ccgaactacgaac

SEQ ID NO: 124857 - DNA, 13 bp, Artificial Sequence
  Oligonucleotide for detection of SNP TSC0031211
gttcgtggttcgg

SEQ ID NO: 124858 - DNA, 13 bp, Artificial Sequence
  Oligonucleotide for detection of SNP TSC0031211
ccgaaccacgaac

SEQ ID NO: 124859 - DNA, 13 bp, Artificial Sequence
  Oligonucleotide for detection of SNP TSC0031212
ggaagaatagaat

SEQ ID NO: 124860 - DNA, 13 bp, Artificial Sequence
  Oligonucleotide for detection of SNP TSC0031212
attctattcttcc

SEQ ID NO: 124861 - DNA, 13 bp, Artificial Sequence
  Oligonucleotide for detection of SNP TSC0031212
ggaagagtagaat

SEQ ID NO: 124862 - DNA, 13 bp, Artificial Sequence
  Oligonucleotide for detection of SNP TSC0031212
attctactcttcc

SEQ ID NO: 124863 - DNA, 13 bp, Artificial Sequence
  Oligonucleotide for detection of SNP TSC0031213
gttttttttatay

SEQ ID NO: 124864 - DNA, 13 bp, Artificial Sequence
  Oligonucleotide for detection of SNP TSC0031213
rtataaaaaaaac

SEQ ID NO: 124865 - DNA, 13 bp, Artificial Sequence
  Oligonucleotide for detection of SNP TSC0031213
gtttttgttatay

SEQ ID NO: 124866 - DNA, 13 bp, Artificial Sequence
  Oligonucleotide for detection of SNP TSC0031213
rtataacaaaaac

SEQ ID NO: 124867 - DNA, 13 bp, Artificial Sequence
  Oligonucleotide for detection of SNP TSC0031213
gttttcgttatay

SEQ ID NO: 124868 - DNA, 13 bp, Artificial Sequence
  Oligonucleotide for detection of SNP TSC0031213
rtataacgaaaac

SEQ ID NO: 124869 - DNA, 13 bp, Artificial Sequence
  Oligonucleotide for detection of SNP TSC0031213
gtgtagggggggy

SEQ ID NO: 124870 - DNA, 13 bp, Artificial Sequence
  Oligonucleotide for detection of SNP TSC0031213
rccccccctacac

SEQ ID NO: 124871 - DNA, 13 bp, Artificial Sequence
  Oligonucleotide for detection of SNP TSC0031213
gtgtagtgggggy

SEQ ID NO: 124872 - DNA, 13 bp, Artificial Sequence
  Oligonucleotide for detection of SNP TSC0031213
rcccccactacac

SEQ ID NO: 124873 - DNA, 13 bp, Artificial Sequence
  Oligonucleotide for detection of SNP TSC0031213
gtgtagcgggggy

SEQ ID NO: 124874 - DNA, 13 bp, Artificial Sequence
  Oligonucleotide for detection of SNP TSC0031213
rcccccgctacac

SEQ ID NO: 124875 - DNA, 13 bp, Artificial Sequence
  Oligonucleotide for detection of SNP TSC0031218
agagttataggag

SEQ ID NO: 124876 - DNA, 13 bp, Artificial Sequence
  Oligonucleotide for detection of SNP TSC0031218
ctcctataactct

SEQ ID NO: 124877 - DNA, 13 bp, Artificial Sequence
  Oligonucleotide for detection of SNP TSC0031218
agagttgtaggag

SEQ ID NO: 124878 - DNA, 13 bp, Artificial Sequence
  Oligonucleotide for detection of SNP TSC0031218
ctcctacaactct

SEQ ID NO: 124879 - DNA, 13 bp, Artificial Sequence
  Oligonucleotide for detection of SNP TSC0031219
gaaattgaattgt

SEQ ID NO: 124880 - DNA, 13 bp, Artificial Sequence
  Oligonucleotide for detection of SNP TSC0031219
acaattcaatttc

SEQ ID NO: 124881 - DNA, 13 bp, Artificial Sequence
  Oligonucleotide for detection of SNP TSC0031219
gaaatttaattgt

SEQ ID NO: 124882 - DNA, 13 bp, Artificial Sequence
  Oligonucleotide for detection of SNP TSC0031219
acaattaaatttc

SEQ ID NO: 124883 - DNA, 13 bp, Artificial Sequence
  Oligonucleotide for detection of SNP TSC0031219
gaaatcgaattgt

SEQ ID NO: 124884 - DNA, 13 bp, Artificial Sequence
  Oligonucleotide for detection of SNP TSC0031219
acaattcgatttc

SEQ ID NO: 124885 - DNA, 13 bp, Artificial Sequence
  Oligonucleotide for detection of SNP TSC0031219
atagtttggttty

SEQ ID NO: 124886 - DNA, 13 bp, Artificial Sequence
  Oligonucleotide for detection of SNP TSC0031219
raaaccaaactat

SEQ ID NO: 124887 - DNA, 13 bp, Artificial Sequence
  Oligonucleotide for detection of SNP TSC0031219
atagttaggttty

SEQ ID NO: 124888 - DNA, 13 bp, Artificial Sequence
  Oligonucleotide for detection of SNP TSC0031219
raaacctaactat

SEQ ID NO: 124889 - DNA, 13 bp, Artificial Sequence
  Oligonucleotide for detection of SNP TSC0031219
atagttcggttty

SEQ ID NO: 124890 - DNA, 13 bp, Artificial Sequence
  Oligonucleotide for detection of SNP TSC0031219
raaaccgaactat

SEQ ID NO: 124891 - DNA, 13 bp, Artificial Sequence
  Oligonucleotide for detection of SNP TSC0031220
gttagtttattta

SEQ ID NO: 124892 - DNA, 13 bp, Artificial Sequence
  Oligonucleotide for detection of SNP TSC0031220
taaataaactaac

SEQ ID NO: 124893 - DNA, 13 bp, Artificial Sequence
  Oligonucleotide for detection of SNP TSC0031220
gttagtgtattta

SEQ ID NO: 124894 - DNA, 13 bp, Artificial Sequence
  Oligonucleotide for detection of SNP TSC0031220
taaatacactaac

SEQ ID NO: 124895 - DNA, 13 bp, Artificial Sequence
  Oligonucleotide for detection of SNP TSC0031220
taaatagattggy

SEQ ID NO: 124896 - DNA, 13 bp, Artificial Sequence
  Oligonucleotide for detection of SNP TSC0031220
rccaatctattta

SEQ ID NO: 124897 - DNA, 13 bp, Artificial Sequence
  Oligonucleotide for detection of SNP TSC0031220
taaatatattggy

SEQ ID NO: 124898 - DNA, 13 bp, Artificial Sequence
  Oligonucleotide for detection of SNP TSC0031220
rccaatatattta

SEQ ID NO: 124899 - DNA, 13 bp, Artificial Sequence
  Oligonucleotide for detection of SNP TSC0031222
tttttagtatagg

SEQ ID NO: 124900 - DNA, 13 bp, Artificial Sequence
  Oligonucleotide for detection of SNP TSC0031222
cctatactaaaaa

SEQ ID NO: 124901 - DNA, 13 bp, Artificial Sequence
  Oligonucleotide for detection of SNP TSC0031222
tttttattatagg

SEQ ID NO: 124902 - DNA, 13 bp, Artificial Sequence
  Oligonucleotide for detection of SNP TSC0031222
cctataataaaaa

SEQ ID NO: 124903 - DNA, 13 bp, Artificial Sequence
  Oligonucleotide for detection of SNP TSC0031222
tttatattaagaa

SEQ ID NO: 124904 - DNA, 13 bp, Artificial Sequence
  Oligonucleotide for detection of SNP TSC0031222
ttcttaatataaa

SEQ ID NO: 124905 - DNA, 13 bp, Artificial Sequence
  Oligonucleotide for detection of SNP TSC0031222
tttataataagaa

SEQ ID NO: 124906 - DNA, 13 bp, Artificial Sequence
  Oligonucleotide for detection of SNP TSC0031222
ttcttattataaa

SEQ ID NO: 124907 - DNA, 13 bp, Artificial Sequence
  Oligonucleotide for detection of SNP TSC0031223
attttgatgggty

SEQ ID NO: 124908 - DNA, 13 bp, Artificial Sequence
  Oligonucleotide for detection of SNP TSC0031223
racccatcaaaat

SEQ ID NO: 124909 - DNA, 13 bp, Artificial Sequence
  Oligonucleotide for detection of SNP TSC0031223
attttggtgggty

SEQ ID NO: 124910 - DNA, 13 bp, Artificial Sequence
  Oligonucleotide for detection of SNP TSC0031223
racccaccaaaat

SEQ ID NO: 124911 - DNA, 13 bp, Artificial Sequence
  Oligonucleotide for detection of SNP TSC0031224
ttagtggggatgg

SEQ ID NO: 124912 - DNA, 13 bp, Artificial Sequence
  Oligonucleotide for detection of SNP TSC0031224
ccatccccactaa

SEQ ID NO: 124913 - DNA, 13 bp, Artificial Sequence
  Oligonucleotide for detection of SNP TSC0031224
ttagtgaggatgg

SEQ ID NO: 124914 - DNA, 13 bp, Artificial Sequence
  Oligonucleotide for detection of SNP TSC0031224
ccatcctcactaa

SEQ ID NO: 124915 - DNA, 13 bp, Artificial Sequence
  Oligonucleotide for detection of SNP TSC0031224
ttagcggggatgg

SEQ ID NO: 124916 - DNA, 13 bp, Artificial Sequence
  Oligonucleotide for detection of SNP TSC0031224
ccatccccgctaa

SEQ ID NO: 124917 - DNA, 13 bp, Artificial Sequence
  Oligonucleotide for detection of SNP TSC0031224
ttagcgaggatgg

SEQ ID NO: 124918 - DNA, 13 bp, Artificial Sequence
  Oligonucleotide for detection of SNP TSC0031224
ccatcctcgctaa

SEQ ID NO: 124919 - DNA, 13 bp, Artificial Sequence
  Oligonucleotide for detection of SNP TSC0031226
agttttggaaagt

SEQ ID NO: 124920 - DNA, 13 bp, Artificial Sequence
  Oligonucleotide for detection of SNP TSC0031226
actttccaaaact

SEQ ID NO: 124921 - DNA, 13 bp, Artificial Sequence
  Oligonucleotide for detection of SNP TSC0031226
agttttagaaagt

SEQ ID NO: 124922 - DNA, 13 bp, Artificial Sequence
  Oligonucleotide for detection of SNP TSC0031226
actttctaaaact

SEQ ID NO: 124923 - DNA, 13 bp, Artificial Sequence
  Oligonucleotide for detection of SNP TSC0031227
gagaaaggatgaa

SEQ ID NO: 124924 - DNA, 13 bp, Artificial Sequence
  Oligonucleotide for detection of SNP TSC0031227
ttcatcctttctc

SEQ ID NO: 124925 - DNA, 13 bp, Artificial Sequence
  Oligonucleotide for detection of SNP TSC0031227
gagaaatgatgaa

SEQ ID NO: 124926 - DNA, 13 bp, Artificial Sequence
  Oligonucleotide for detection of SNP TSC0031227
ttcatcatttctc

SEQ ID NO: 124927 - DNA, 13 bp, Artificial Sequence
  Oligonucleotide for detection of SNP TSC0031227
gagaaacgatgaa

SEQ ID NO: 124928 - DNA, 13 bp, Artificial Sequence
  Oligonucleotide for detection of SNP TSC0031227
ttcatcgtttctc

SEQ ID NO: 124929 - DNA, 13 bp, Artificial Sequence
  Oligonucleotide for detection of SNP TSC0031228
attggtgagaagg

SEQ ID NO: 124930 - DNA, 13 bp, Artificial Sequence
  Oligonucleotide for detection of SNP TSC0031228
ccttctcaccaat

SEQ ID NO: 124931 - DNA, 13 bp, Artificial Sequence
  Oligonucleotide for detection of SNP TSC0031228
attggtaagaagg

SEQ ID NO: 124932 - DNA, 13 bp, Artificial Sequence
  Oligonucleotide for detection of SNP TSC0031228
ccttcttaccaat

SEQ ID NO: 124933 - DNA, 13 bp, Artificial Sequence
  Oligonucleotide for detection of SNP TSC0031229
tttgggcgttttt

SEQ ID NO: 124934 - DNA, 13 bp, Artificial Sequence
  Oligonucleotide for detection of SNP TSC0031229
aaaaacgcccaaa

SEQ ID NO: 124935 - DNA, 13 bp, Artificial Sequence
  Oligonucleotide for detection of SNP TSC0031229
agggatgtttagg

SEQ ID NO: 124936 - DNA, 13 bp, Artificial Sequence
  Oligonucleotide for detection of SNP TSC0031229
cctaaacatccct

SEQ ID NO: 124937 - DNA, 13 bp, Artificial Sequence
  Oligonucleotide for detection of SNP TSC0031229
agggatatttagg

SEQ ID NO: 124938 - DNA, 13 bp, Artificial Sequence
  Oligonucleotide for detection of SNP TSC0031229
cctaaatatccct

SEQ ID NO: 124939 - DNA, 13 bp, Artificial Sequence
  Oligonucleotide for detection of SNP TSC0031229
agggacgtttagg

SEQ ID NO: 124940 - DNA, 13 bp, Artificial Sequence
  Oligonucleotide for detection of SNP TSC0031229
cctaaacgtccct

SEQ ID NO: 124941 - DNA, 13 bp, Artificial Sequence
  Oligonucleotide for detection of SNP TSC0031231
ataggggttggag

SEQ ID NO: 124942 - DNA, 13 bp, Artificial Sequence
  Oligonucleotide for detection of SNP TSC0031231
ctccaacccctat

SEQ ID NO: 124943 - DNA, 13 bp, Artificial Sequence
  Oligonucleotide for detection of SNP TSC0031231
atagggattggag

SEQ ID NO: 124944 - DNA, 13 bp, Artificial Sequence
  Oligonucleotide for detection of SNP TSC0031231
ctccaatccctat

SEQ ID NO: 124945 - DNA, 13 bp, Artificial Sequence
  Oligonucleotide for detection of SNP TSC0031231
ataggggtcggag

SEQ ID NO: 124946 - DNA, 13 bp, Artificial Sequence
  Oligonucleotide for detection of SNP TSC0031231
ctccgacccctat

SEQ ID NO: 124947 - DNA, 13 bp, Artificial Sequence
  Oligonucleotide for detection of SNP TSC0031231
atagggatcggag

SEQ ID NO: 124948 - DNA, 13 bp, Artificial Sequence
  Oligonucleotide for detection of SNP TSC0031231
ctccgatccctat

SEQ ID NO: 124949 - DNA, 13 bp, Artificial Sequence
  Oligonucleotide for detection of SNP TSC0031232
tatattatgcgtg

SEQ ID NO: 124950 - DNA, 13 bp, Artificial Sequence
  Oligonucleotide for detection of SNP TSC0031232
cacgcataatata

SEQ ID NO: 124951 - DNA, 13 bp, Artificial Sequence
  Oligonucleotide for detection of SNP TSC0031232
tatatcgtgtgtg

SEQ ID NO: 124952 - DNA, 13 bp, Artificial Sequence
  Oligonucleotide for detection of SNP TSC0031232
cacacacgatata

SEQ ID NO: 124953 - DNA, 13 bp, Artificial Sequence
  Oligonucleotide for detection of SNP TSC0031232
tatattatgtgcg

SEQ ID NO: 124954 - DNA, 13 bp, Artificial Sequence
  Oligonucleotide for detection of SNP TSC0031232
cgcacataatata

SEQ ID NO: 124955 - DNA, 13 bp, Artificial Sequence
  Oligonucleotide for detection of SNP TSC0031232
tatattgtgcgtg

SEQ ID NO: 124956 - DNA, 13 bp, Artificial Sequence
  Oligonucleotide for detection of SNP TSC0031232
cacgcacaatata

SEQ ID NO: 124957 - DNA, 13 bp, Artificial Sequence
  Oligonucleotide for detection of SNP TSC0031232
tatattatgcgcg

SEQ ID NO: 124958 - DNA, 13 bp, Artificial Sequence
  Oligonucleotide for detection of SNP TSC0031232
cgcgcataatata

SEQ ID NO: 124959 - DNA, 13 bp, Artificial Sequence
  Oligonucleotide for detection of SNP TSC0031232
tatattgtgtgcg

SEQ ID NO: 124960 - DNA, 13 bp, Artificial Sequence
  Oligonucleotide for detection of SNP TSC0031232
cgcacacaatata

SEQ ID NO: 124961 - DNA, 13 bp, Artificial Sequence
  Oligonucleotide for detection of SNP TSC0031232
tatatcgtgcgtg

SEQ ID NO: 124962 - DNA, 13 bp, Artificial Sequence
  Oligonucleotide for detection of SNP TSC0031232
cacgcacgatata

SEQ ID NO: 124963 - DNA, 13 bp, Artificial Sequence
  Oligonucleotide for detection of SNP TSC0031232
tatatcgtgtgcg

SEQ ID NO: 124964 - DNA, 13 bp, Artificial Sequence
  Oligonucleotide for detection of SNP TSC0031232
cgcacacgatata

SEQ ID NO: 124965 - DNA, 13 bp, Artificial Sequence
  Oligonucleotide for detection of SNP TSC0031232
tatattgtgcgcg

SEQ ID NO: 124966 - DNA, 13 bp, Artificial Sequence
  Oligonucleotide for detection of SNP TSC0031232
cgcgcacaatata

SEQ ID NO: 124967 - DNA, 13 bp, Artificial Sequence
  Oligonucleotide for detection of SNP TSC0031232
tatatcgtgcgcg

SEQ ID NO: 124968 - DNA, 13 bp, Artificial Sequence
  Oligonucleotide for detection of SNP TSC0031232
cgcgcacgatata

SEQ ID NO: 124969 - DNA, 13 bp, Artificial Sequence
  Oligonucleotide for detection of SNP TSC0031232
tgtgtatggtgtg

SEQ ID NO: 124970 - DNA, 13 bp, Artificial Sequence
  Oligonucleotide for detection of SNP TSC0031232
cacaccatacaca

SEQ ID NO: 124971 - DNA, 13 bp, Artificial Sequence
  Oligonucleotide for detection of SNP TSC0031232
cgtgtatggtgtg

SEQ ID NO: 124972 - DNA, 13 bp, Artificial Sequence
  Oligonucleotide for detection of SNP TSC0031232
cacaccatacacg

SEQ ID NO: 124973 - DNA, 13 bp, Artificial Sequence
  Oligonucleotide for detection of SNP TSC0031232
tgcgtatggtgtg

SEQ ID NO: 124974 - DNA, 13 bp, Artificial Sequence
  Oligonucleotide for detection of SNP TSC0031232
cacaccatacgca

SEQ ID NO: 124975 - DNA, 13 bp, Artificial Sequence
  Oligonucleotide for detection of SNP TSC0031232
cgcgtatggtgtg

SEQ ID NO: 124976 - DNA, 13 bp, Artificial Sequence
  Oligonucleotide for detection of SNP TSC0031232
cacaccatacgcg

SEQ ID NO: 124977 - DNA, 13 bp, Artificial Sequence
  Oligonucleotide for detection of SNP TSC0031232
tgtgtacggtgtg

SEQ ID NO: 124978 - DNA, 13 bp, Artificial Sequence
  Oligonucleotide for detection of SNP TSC0031232
cacaccgtacaca

SEQ ID NO: 124979 - DNA, 13 bp, Artificial Sequence
  Oligonucleotide for detection of SNP TSC0031232
cgtgtacggtgtg

SEQ ID NO: 124980 - DNA, 13 bp, Artificial Sequence
  Oligonucleotide for detection of SNP TSC0031232
cacaccgtacacg

SEQ ID NO: 124981 - DNA, 13 bp, Artificial Sequence
  Oligonucleotide for detection of SNP TSC0031232
tgcgtacggtgtg

SEQ ID NO: 124982 - DNA, 13 bp, Artificial Sequence
  Oligonucleotide for detection of SNP TSC0031232
cacaccgtacgca

SEQ ID NO: 124983 - DNA, 13 bp, Artificial Sequence
  Oligonucleotide for detection of SNP TSC0031232
cgcgtacggtgtg

SEQ ID NO: 124984 - DNA, 13 bp, Artificial Sequence
  Oligonucleotide for detection of SNP TSC0031232
cacaccgtacgcg

SEQ ID NO: 124985 - DNA, 13 bp, Artificial Sequence
  Oligonucleotide for detection of SNP TSC0031233
gatattgtttttt

SEQ ID NO: 124986 - DNA, 13 bp, Artificial Sequence
  Oligonucleotide for detection of SNP TSC0031233
aaaaaacaatatc

SEQ ID NO: 124987 - DNA, 13 bp, Artificial Sequence
  Oligonucleotide for detection of SNP TSC0031233
gatattatttttt

SEQ ID NO: 124988 - DNA, 13 bp, Artificial Sequence
  Oligonucleotide for detection of SNP TSC0031233
aaaaaataatatc

SEQ ID NO: 124989 - DNA, 13 bp, Artificial Sequence
  Oligonucleotide for detection of SNP TSC0031235
atggtgaggtgga

SEQ ID NO: 124990 - DNA, 13 bp, Artificial Sequence
  Oligonucleotide for detection of SNP TSC0031235
tccacctcaccat

SEQ ID NO: 124991 - DNA, 13 bp, Artificial Sequence
  Oligonucleotide for detection of SNP TSC0031235
atggtggggtgga

SEQ ID NO: 124992 - DNA, 13 bp, Artificial Sequence
  Oligonucleotide for detection of SNP TSC0031235
tccaccccaccat

SEQ ID NO: 124993 - DNA, 13 bp, Artificial Sequence
  Oligonucleotide for detection of SNP TSC0031238
tatttttggttty

SEQ ID NO: 124994 - DNA, 13 bp, Artificial Sequence
  Oligonucleotide for detection of SNP TSC0031238
raaaccaaaaata

SEQ ID NO: 124995 - DNA, 13 bp, Artificial Sequence
  Oligonucleotide for detection of SNP TSC0031238
tattttcggttty

SEQ ID NO: 124996 - DNA, 13 bp, Artificial Sequence
  Oligonucleotide for detection of SNP TSC0031238
raaaccgaaaata

SEQ ID NO: 124997 - DNA, 13 bp, Artificial Sequence
  Oligonucleotide for detection of SNP TSC0031238
gaagttgggagtg

SEQ ID NO: 124998 - DNA, 13 bp, Artificial Sequence
  Oligonucleotide for detection of SNP TSC0031238
cactcccaacttc

SEQ ID NO: 124999 - DNA, 13 bp, Artificial Sequence
  Oligonucleotide for detection of SNP TSC0031238
gaagttaggagtg

SEQ ID NO: 125000 - DNA, 13 bp, Artificial Sequence
  Oligonucleotide for detection of SNP TSC0031238
cactcctaacttc

SEQ ID NO: 125001 - DNA, 13 bp, Artificial Sequence
  Oligonucleotide for detection of SNP TSC0031238
gaagtcgggagtg

SEQ ID NO: 125002 - DNA, 13 bp, Artificial Sequence
  Oligonucleotide for detection of SNP TSC0031238
cactcccgacttc

SEQ ID NO: 125003 - DNA, 13 bp, Artificial Sequence
  Oligonucleotide for detection of SNP TSC0031239
tttggtagtttta

SEQ ID NO: 125004 - DNA, 13 bp, Artificial Sequence
  Oligonucleotide for detection of SNP TSC0031239
taaaactaccaaa

SEQ ID NO: 125005 - DNA, 13 bp, Artificial Sequence
  Oligonucleotide for detection of SNP TSC0031239
tttggtggtttta

SEQ ID NO: 125006 - DNA, 13 bp, Artificial Sequence
  Oligonucleotide for detection of SNP TSC0031239
taaaaccaccaaa

SEQ ID NO: 125007 - DNA, 13 bp, Artificial Sequence
  Oligonucleotide for detection of SNP TSC0031239
tttggcggtttta

SEQ ID NO: 125008 - DNA, 13 bp, Artificial Sequence
  Oligonucleotide for detection of SNP TSC0031239
taaaaccgccaaa

SEQ ID NO: 125009 - DNA, 13 bp, Artificial Sequence
  Oligonucleotide for detection of SNP TSC0031240
aaaaagtaagtga

SEQ ID NO: 125010 - DNA, 13 bp, Artificial Sequence
  Oligonucleotide for detection of SNP TSC0031240
tcacttacttttt

SEQ ID NO: 125011 - DNA, 13 bp, Artificial Sequence
  Oligonucleotide for detection of SNP TSC0031240
aaaaagaaagtga

SEQ ID NO: 125012 - DNA, 13 bp, Artificial Sequence
  Oligonucleotide for detection of SNP TSC0031240
tcactttcttttt

SEQ ID NO: 125013 - DNA, 13 bp, Artificial Sequence
  Oligonucleotide for detection of SNP TSC0031241
ttttaatgattgt

SEQ ID NO: 125014 - DNA, 13 bp, Artificial Sequence
  Oligonucleotide for detection of SNP TSC0031241
acaatcattaaaa

SEQ ID NO: 125015 - DNA, 13 bp, Artificial Sequence
  Oligonucleotide for detection of SNP TSC0031241
ttttaacgattgt

SEQ ID NO: 125016 - DNA, 13 bp, Artificial Sequence
  Oligonucleotide for detection of SNP TSC0031241
acaatcgttaaaa

SEQ ID NO: 125017 - DNA, 13 bp, Artificial Sequence
  Oligonucleotide for detection of SNP TSC0031241
atagttgttaaaa

SEQ ID NO: 125018 - DNA, 13 bp, Artificial Sequence
  Oligonucleotide for detection of SNP TSC0031241
ttttaacaactat

SEQ ID NO: 125019 - DNA, 13 bp, Artificial Sequence
  Oligonucleotide for detection of SNP TSC0031241
atagttattaaaa

SEQ ID NO: 125020 - DNA, 13 bp, Artificial Sequence
  Oligonucleotide for detection of SNP TSC0031241
ttttaataactat

SEQ ID NO: 125021 - DNA, 13 bp, Artificial Sequence
  Oligonucleotide for detection of SNP TSC0031241
atagtcgttaaaa

SEQ ID NO: 125022 - DNA, 13 bp, Artificial Sequence
  Oligonucleotide for detection of SNP TSC0031241
ttttaacgactat

SEQ ID NO: 125023 - DNA, 13 bp, Artificial Sequence
  Oligonucleotide for detection of SNP TSC0031242
tatggtgtaatgg

SEQ ID NO: 125024 - DNA, 13 bp, Artificial Sequence
  Oligonucleotide for detection of SNP TSC0031242
ccattacaccata

SEQ ID NO: 125025 - DNA, 13 bp, Artificial Sequence
  Oligonucleotide for detection of SNP TSC0031242
tatggtttaatgg

SEQ ID NO: 125026 - DNA, 13 bp, Artificial Sequence
  Oligonucleotide for detection of SNP TSC0031242
ccattaaaccata

SEQ ID NO: 125027 - DNA, 13 bp, Artificial Sequence
  Oligonucleotide for detection of SNP TSC0031242
ttattatattata

SEQ ID NO: 125028 - DNA, 13 bp, Artificial Sequence
  Oligonucleotide for detection of SNP TSC0031242
tataatataataa

SEQ ID NO: 125029 - DNA, 13 bp, Artificial Sequence
  Oligonucleotide for detection of SNP TSC0031242
ttattaaattata

SEQ ID NO: 125030 - DNA, 13 bp, Artificial Sequence
  Oligonucleotide for detection of SNP TSC0031242
tataatttaataa

SEQ ID NO: 125031 - DNA, 13 bp, Artificial Sequence
  Oligonucleotide for detection of SNP TSC0031243
gagttggaaatay

SEQ ID NO: 125032 - DNA, 13 bp, Artificial Sequence
  Oligonucleotide for detection of SNP TSC0031243
rtatttccaactc

SEQ ID NO: 125033 - DNA, 13 bp, Artificial Sequence
  Oligonucleotide for detection of SNP TSC0031243
gagttgaaaatay

SEQ ID NO: 125034 - DNA, 13 bp, Artificial Sequence
  Oligonucleotide for detection of SNP TSC0031243
rtattttcaactc

SEQ ID NO: 125035 - DNA, 13 bp, Artificial Sequence
  Oligonucleotide for detection of SNP TSC0031244
gttgtagtgttta

SEQ ID NO: 125036 - DNA, 13 bp, Artificial Sequence
  Oligonucleotide for detection of SNP TSC0031244
taaacactacaac

SEQ ID NO: 125037 - DNA, 13 bp, Artificial Sequence
  Oligonucleotide for detection of SNP TSC0031244
gttgtaatgttta

SEQ ID NO: 125038 - DNA, 13 bp, Artificial Sequence
  Oligonucleotide for detection of SNP TSC0031244
taaacattacaac

SEQ ID NO: 125039 - DNA, 13 bp, Artificial Sequence
  Oligonucleotide for detection of SNP TSC0031244
gttgtagcgttta

SEQ ID NO: 125040 - DNA, 13 bp, Artificial Sequence
  Oligonucleotide for detection of SNP TSC0031244
taaacgctacaac

SEQ ID NO: 125041 - DNA, 13 bp, Artificial Sequence
  Oligonucleotide for detection of SNP TSC0031244
gttgtaacgttta

SEQ ID NO: 125042 - DNA, 13 bp, Artificial Sequence
  Oligonucleotide for detection of SNP TSC0031244
taaacgttacaac

SEQ ID NO: 125043 - DNA, 13 bp, Artificial Sequence
  Oligonucleotide for detection of SNP TSC0031245
aaaattaaataty

SEQ ID NO: 125044 - DNA, 13 bp, Artificial Sequence
  Oligonucleotide for detection of SNP TSC0031245
ratatttaatttt

SEQ ID NO: 125045 - DNA, 13 bp, Artificial Sequence
  Oligonucleotide for detection of SNP TSC0031245
aaaattgaataty

SEQ ID NO: 125046 - DNA, 13 bp, Artificial Sequence
  Oligonucleotide for detection of SNP TSC0031245
ratattcaatttt

SEQ ID NO: 125047 - DNA, 13 bp, Artificial Sequence
  Oligonucleotide for detection of SNP TSC0031246
gttattagttgty

SEQ ID NO: 125048 - DNA, 13 bp, Artificial Sequence
  Oligonucleotide for detection of SNP TSC0031246
racaactaataac

SEQ ID NO: 125049 - DNA, 13 bp, Artificial Sequence
  Oligonucleotide for detection of SNP TSC0031246
gttattagtcgty

SEQ ID NO: 125050 - DNA, 13 bp, Artificial Sequence
  Oligonucleotide for detection of SNP TSC0031246
racgactaataac

SEQ ID NO: 125051 - DNA, 13 bp, Artificial Sequence
  Oligonucleotide for detection of SNP TSC0031246
gttatcggttgty

SEQ ID NO: 125052 - DNA, 13 bp, Artificial Sequence
  Oligonucleotide for detection of SNP TSC0031246
racaaccgataac

SEQ ID NO: 125053 - DNA, 13 bp, Artificial Sequence
  Oligonucleotide for detection of SNP TSC0031246
gttattggtcgty

SEQ ID NO: 125054 - DNA, 13 bp, Artificial Sequence
  Oligonucleotide for detection of SNP TSC0031246
racgaccaataac

SEQ ID NO: 125055 - DNA, 13 bp, Artificial Sequence
  Oligonucleotide for detection of SNP TSC0031246
gttatcggtcgty

SEQ ID NO: 125056 - DNA, 13 bp, Artificial Sequence
  Oligonucleotide for detection of SNP TSC0031246
racgaccgataac

SEQ ID NO: 125057 - DNA, 13 bp, Artificial Sequence
  Oligonucleotide for detection of SNP TSC0031246
ggtggttggtggy

SEQ ID NO: 125058 - DNA, 13 bp, Artificial Sequence
  Oligonucleotide for detection of SNP TSC0031246
rccaccaaccacc

SEQ ID NO: 125059 - DNA, 13 bp, Artificial Sequence
  Oligonucleotide for detection of SNP TSC0031246
ggcggttggtggy

SEQ ID NO: 125060 - DNA, 13 bp, Artificial Sequence
  Oligonucleotide for detection of SNP TSC0031246
rccaccaaccgcc

SEQ ID NO: 125061 - DNA, 13 bp, Artificial Sequence
  Oligonucleotide for detection of SNP TSC0031246
ggtggtcggtggy

SEQ ID NO: 125062 - DNA, 13 bp, Artificial Sequence
  Oligonucleotide for detection of SNP TSC0031246
rccaccgaccacc

SEQ ID NO: 125063 - DNA, 13 bp, Artificial Sequence
  Oligonucleotide for detection of SNP TSC0031246
ggcggtcggtggy

SEQ ID NO: 125064 - DNA, 13 bp, Artificial Sequence
  Oligonucleotide for detection of SNP TSC0031246
rccaccgaccgcc

SEQ ID NO: 125065 - DNA, 13 bp, Artificial Sequence
  Oligonucleotide for detection of SNP TSC0031247
tagagtgggggtg

SEQ ID NO: 125066 - DNA, 13 bp, Artificial Sequence
  Oligonucleotide for detection of SNP TSC0031247
cacccccactcta

SEQ ID NO: 125067 - DNA, 13 bp, Artificial Sequence
  Oligonucleotide for detection of SNP TSC0031247
tagagttggggtg

SEQ ID NO: 125068 - DNA, 13 bp, Artificial Sequence
  Oligonucleotide for detection of SNP TSC0031247
caccccaactcta

SEQ ID NO: 125069 - DNA, 13 bp, Artificial Sequence
  Oligonucleotide for detection of SNP TSC0031247
tagagcgggggtg

SEQ ID NO: 125070 - DNA, 13 bp, Artificial Sequence
  Oligonucleotide for detection of SNP TSC0031247
cacccccgctcta

SEQ ID NO: 125071 - DNA, 13 bp, Artificial Sequence
  Oligonucleotide for detection of SNP TSC0031247
tagagttggggcg

SEQ ID NO: 125072 - DNA, 13 bp, Artificial Sequence
  Oligonucleotide for detection of SNP TSC0031247
cgccccaactcta

SEQ ID NO: 125073 - DNA, 13 bp, Artificial Sequence
  Oligonucleotide for detection of SNP TSC0031247
tagagtgggggcg

SEQ ID NO: 125074 - DNA, 13 bp, Artificial Sequence
  Oligonucleotide for detection of SNP TSC0031247
cgcccccactcta

SEQ ID NO: 125075 - DNA, 13 bp, Artificial Sequence
  Oligonucleotide for detection of SNP TSC0031247
tagagcgggggcg

SEQ ID NO: 125076 - DNA, 13 bp, Artificial Sequence
  Oligonucleotide for detection of SNP TSC0031247
cgcccccgctcta

SEQ ID NO: 125077 - DNA, 13 bp, Artificial Sequence
  Oligonucleotide for detection of SNP TSC0031247
tgttttagttttg

SEQ ID NO: 125078 - DNA, 13 bp, Artificial Sequence
  Oligonucleotide for detection of SNP TSC0031247
caaaactaaaaca

SEQ ID NO: 125079 - DNA, 13 bp, Artificial Sequence
  Oligonucleotide for detection of SNP TSC0031247
cgtttttgttttg

SEQ ID NO: 125080 - DNA, 13 bp, Artificial Sequence
  Oligonucleotide for detection of SNP TSC0031247
caaaacaaaaacg

SEQ ID NO: 125081 - DNA, 13 bp, Artificial Sequence
  Oligonucleotide for detection of SNP TSC0031247
cgttttagttttg

SEQ ID NO: 125082 - DNA, 13 bp, Artificial Sequence
  Oligonucleotide for detection of SNP TSC0031247
caaaactaaaacg

SEQ ID NO: 125083 - DNA, 13 bp, Artificial Sequence
  Oligonucleotide for detection of SNP TSC0031247
cgttttcgttttg

SEQ ID NO: 125084 - DNA, 13 bp, Artificial Sequence
  Oligonucleotide for detection of SNP TSC0031247
caaaacgaaaacg

SEQ ID NO: 125085 - DNA, 13 bp, Artificial Sequence
  Oligonucleotide for detection of SNP TSC0031248
aattagatattgy

SEQ ID NO: 125086 - DNA, 13 bp, Artificial Sequence
  Oligonucleotide for detection of SNP TSC0031248
rcaatatctaatt

SEQ ID NO: 125087 - DNA, 13 bp, Artificial Sequence
  Oligonucleotide for detection of SNP TSC0031248
aattaggtattgy

SEQ ID NO: 125088 - DNA, 13 bp, Artificial Sequence
  Oligonucleotide for detection of SNP TSC0031248
rcaatacctaatt

SEQ ID NO: 125089 - DNA, 13 bp, Artificial Sequence
  Oligonucleotide for detection of SNP TSC0031253
ggtaagtagtttg

SEQ ID NO: 125090 - DNA, 13 bp, Artificial Sequence
  Oligonucleotide for detection of SNP TSC0031253
caaactacttacc

SEQ ID NO: 125091 - DNA, 13 bp, Artificial Sequence
  Oligonucleotide for detection of SNP TSC0031253
ggtaaggagtttg

SEQ ID NO: 125092 - DNA, 13 bp, Artificial Sequence
  Oligonucleotide for detection of SNP TSC0031253
caaactccttacc

SEQ ID NO: 125093 - DNA, 13 bp, Artificial Sequence
  Oligonucleotide for detection of SNP TSC0031253
taagttgtttaty

SEQ ID NO: 125094 - DNA, 13 bp, Artificial Sequence
  Oligonucleotide for detection of SNP TSC0031253
rataaacaactta

SEQ ID NO: 125095 - DNA, 13 bp, Artificial Sequence
  Oligonucleotide for detection of SNP TSC0031253
taagttttttaty

SEQ ID NO: 125096 - DNA, 13 bp, Artificial Sequence
  Oligonucleotide for detection of SNP TSC0031253
rataaaaaactta

SEQ ID NO: 125097 - DNA, 13 bp, Artificial Sequence
  Oligonucleotide for detection of SNP TSC0031257
aggttgaaaatag

SEQ ID NO: 125098 - DNA, 13 bp, Artificial Sequence
  Oligonucleotide for detection of SNP TSC0031257
ctattttcaacct

SEQ ID NO: 125099 - DNA, 13 bp, Artificial Sequence
  Oligonucleotide for detection of SNP TSC0031257
aggttggaaatag

SEQ ID NO: 125100 - DNA, 13 bp, Artificial Sequence
  Oligonucleotide for detection of SNP TSC0031257
ctatttccaacct

SEQ ID NO: 125101 - DNA, 13 bp, Artificial Sequence
  Oligonucleotide for detection of SNP TSC0031258
ttaggtcggagtg

SEQ ID NO: 125102 - DNA, 13 bp, Artificial Sequence
  Oligonucleotide for detection of SNP TSC0031258
cactccgacctaa

SEQ ID NO: 125103 - DNA, 13 bp, Artificial Sequence
  Oligonucleotide for detection of SNP TSC0031259
ggtttttgtgtga

SEQ ID NO: 125104 - DNA, 13 bp, Artificial Sequence
  Oligonucleotide for detection of SNP TSC0031259
tcacacaaaaacc

SEQ ID NO: 125105 - DNA, 13 bp, Artificial Sequence
  Oligonucleotide for detection of SNP TSC0031259
ggttttcgtgtga

SEQ ID NO: 125106 - DNA, 13 bp, Artificial Sequence
  Oligonucleotide for detection of SNP TSC0031259
tcacacgaaaacc

SEQ ID NO: 125107 - DNA, 13 bp, Artificial Sequence
  Oligonucleotide for detection of SNP TSC0031259
ggtttttgcgtga

SEQ ID NO: 125108 - DNA, 13 bp, Artificial Sequence
  Oligonucleotide for detection of SNP TSC0031259
tcacgcaaaaacc

SEQ ID NO: 125109 - DNA, 13 bp, Artificial Sequence
  Oligonucleotide for detection of SNP TSC0031259
ggttttcgcgtga

SEQ ID NO: 125110 - DNA, 13 bp, Artificial Sequence
  Oligonucleotide for detection of SNP TSC0031259
tcacgcgaaaacc

SEQ ID NO: 125111 - DNA, 13 bp, Artificial Sequence
  Oligonucleotide for detection of SNP TSC0031259
ttatgtggggaty

SEQ ID NO: 125112 - DNA, 13 bp, Artificial Sequence
  Oligonucleotide for detection of SNP TSC0031259
ratccccacataa

SEQ ID NO: 125113 - DNA, 13 bp, Artificial Sequence
  Oligonucleotide for detection of SNP TSC0031259
ttatgtagggaty

SEQ ID NO: 125114 - DNA, 13 bp, Artificial Sequence
  Oligonucleotide for detection of SNP TSC0031259
ratccctacataa

SEQ ID NO: 125115 - DNA, 13 bp, Artificial Sequence
  Oligonucleotide for detection of SNP TSC0031259
ttacgtggggaty

SEQ ID NO: 125116 - DNA, 13 bp, Artificial Sequence
  Oligonucleotide for detection of SNP TSC0031259
ratccccacgtaa

SEQ ID NO: 125117 - DNA, 13 bp, Artificial Sequence
  Oligonucleotide for detection of SNP TSC0031259
ttacgtagggaty

SEQ ID NO: 125118 - DNA, 13 bp, Artificial Sequence
  Oligonucleotide for detection of SNP TSC0031259
ratccctacgtaa

SEQ ID NO: 125119 - DNA, 13 bp, Artificial Sequence
  Oligonucleotide for detection of SNP TSC0031259
ttatgcggggaty

SEQ ID NO: 125120 - DNA, 13 bp, Artificial Sequence
  Oligonucleotide for detection of SNP TSC0031259
ratccccgcataa

SEQ ID NO: 125121 - DNA, 13 bp, Artificial Sequence
  Oligonucleotide for detection of SNP TSC0031259
ttacgcggggaty

SEQ ID NO: 125122 - DNA, 13 bp, Artificial Sequence
  Oligonucleotide for detection of SNP TSC0031259
ratccccgcgtaa

SEQ ID NO: 125123 - DNA, 13 bp, Artificial Sequence
  Oligonucleotide for detection of SNP TSC0031261
gaggagaggggag

SEQ ID NO: 125124 - DNA, 13 bp, Artificial Sequence
  Oligonucleotide for detection of SNP TSC0031261
ctcccctctcctc

SEQ ID NO: 125125 - DNA, 13 bp, Artificial Sequence
  Oligonucleotide for detection of SNP TSC0031261
gaggaggggggag

SEQ ID NO: 125126 - DNA, 13 bp, Artificial Sequence
  Oligonucleotide for detection of SNP TSC0031261
ctcccccctcctc

SEQ ID NO: 125127 - DNA, 13 bp, Artificial Sequence
  Oligonucleotide for detection of SNP TSC0031262
attgataatgaty

SEQ ID NO: 125128 - DNA, 13 bp, Artificial Sequence
  Oligonucleotide for detection of SNP TSC0031262
ratcattatcaat

SEQ ID NO: 125129 - DNA, 13 bp, Artificial Sequence
  Oligonucleotide for detection of SNP TSC0031262
attgattatgaty

SEQ ID NO: 125130 - DNA, 13 bp, Artificial Sequence
  Oligonucleotide for detection of SNP TSC0031262
ratcataatcaat

SEQ ID NO: 125131 - DNA, 13 bp, Artificial Sequence
  Oligonucleotide for detection of SNP TSC0031262
atcgataatgaty

SEQ ID NO: 125132 - DNA, 13 bp, Artificial Sequence
  Oligonucleotide for detection of SNP TSC0031262
ratcattatcgat

SEQ ID NO: 125133 - DNA, 13 bp, Artificial Sequence
  Oligonucleotide for detection of SNP TSC0031262
atcgattatgaty

SEQ ID NO: 125134 - DNA, 13 bp, Artificial Sequence
  Oligonucleotide for detection of SNP TSC0031262
ratcataatcgat

SEQ ID NO: 125135 - DNA, 13 bp, Artificial Sequence
  Oligonucleotide for detection of SNP TSC0031262
ggttattattggt

SEQ ID NO: 125136 - DNA, 13 bp, Artificial Sequence
  Oligonucleotide for detection of SNP TSC0031262
accaataataacc

SEQ ID NO: 125137 - DNA, 13 bp, Artificial Sequence
  Oligonucleotide for detection of SNP TSC0031262
ggttataattggt

SEQ ID NO: 125138 - DNA, 13 bp, Artificial Sequence
  Oligonucleotide for detection of SNP TSC0031262
accaattataacc

SEQ ID NO: 125139 - DNA, 13 bp, Artificial Sequence
  Oligonucleotide for detection of SNP TSC0031262
ggttattatcggt

SEQ ID NO: 125140 - DNA, 13 bp, Artificial Sequence
  Oligonucleotide for detection of SNP TSC0031262
accgataataacc

SEQ ID NO: 125141 - DNA, 13 bp, Artificial Sequence
  Oligonucleotide for detection of SNP TSC0031262
ggttataatcggt

SEQ ID NO: 125142 - DNA, 13 bp, Artificial Sequence
  Oligonucleotide for detection of SNP TSC0031262
accgattataacc

SEQ ID NO: 125143 - DNA, 13 bp, Artificial Sequence
  Oligonucleotide for detection of SNP TSC0031267
tttatatgtatat

SEQ ID NO: 125144 - DNA, 13 bp, Artificial Sequence
  Oligonucleotide for detection of SNP TSC0031267
atatacatataaa

SEQ ID NO: 125145 - DNA, 13 bp, Artificial Sequence
  Oligonucleotide for detection of SNP TSC0031267
tttatacgtatat

SEQ ID NO: 125146 - DNA, 13 bp, Artificial Sequence
  Oligonucleotide for detection of SNP TSC0031267
atatacgtataaa

SEQ ID NO: 125147 - DNA, 13 bp, Artificial Sequence
  Oligonucleotide for detection of SNP TSC0031267
atgtgtgtgtagg

SEQ ID NO: 125148 - DNA, 13 bp, Artificial Sequence
  Oligonucleotide for detection of SNP TSC0031267
cctacacacacat

SEQ ID NO: 125149 - DNA, 13 bp, Artificial Sequence
  Oligonucleotide for detection of SNP TSC0031267
atgtgtatgtagg

SEQ ID NO: 125150 - DNA, 13 bp, Artificial Sequence
  Oligonucleotide for detection of SNP TSC0031267
cctacatacacat

SEQ ID NO: 125151 - DNA, 13 bp, Artificial Sequence
  Oligonucleotide for detection of SNP TSC0031267
atgtgcgtgtagg

SEQ ID NO: 125152 - DNA, 13 bp, Artificial Sequence
  Oligonucleotide for detection of SNP TSC0031267
cctacacgcacat

SEQ ID NO: 125153 - DNA, 13 bp, Artificial Sequence
  Oligonucleotide for detection of SNP TSC0031270
tggtaggggagag

SEQ ID NO: 125154 - DNA, 13 bp, Artificial Sequence
  Oligonucleotide for detection of SNP TSC0031270
ctctcccctacca

SEQ ID NO: 125155 - DNA, 13 bp, Artificial Sequence
  Oligonucleotide for detection of SNP TSC0031270
tggtagaggagag

SEQ ID NO: 125156 - DNA, 13 bp, Artificial Sequence
  Oligonucleotide for detection of SNP TSC0031270
ctctcctctacca

SEQ ID NO: 125157 - DNA, 13 bp, Artificial Sequence
  Oligonucleotide for detection of SNP TSC0031272
gttttttatttty

SEQ ID NO: 125158 - DNA, 13 bp, Artificial Sequence
  Oligonucleotide for detection of SNP TSC0031272
raaaataaaaaac

SEQ ID NO: 125159 - DNA, 13 bp, Artificial Sequence
  Oligonucleotide for detection of SNP TSC0031272
gagggtggggggy

SEQ ID NO: 125160 - DNA, 13 bp, Artificial Sequence
  Oligonucleotide for detection of SNP TSC0031272
rccccccaccctc

SEQ ID NO: 125161 - DNA, 13 bp, Artificial Sequence
  Oligonucleotide for detection of SNP TSC0031272
gagggttgggggy

SEQ ID NO: 125162 - DNA, 13 bp, Artificial Sequence
  Oligonucleotide for detection of SNP TSC0031272
rcccccaaccctc

SEQ ID NO: 125163 - DNA, 13 bp, Artificial Sequence
  Oligonucleotide for detection of SNP TSC0031272
gagggtcgggggy

SEQ ID NO: 125164 - DNA, 13 bp, Artificial Sequence
  Oligonucleotide for detection of SNP TSC0031272
rcccccgaccctc

SEQ ID NO: 125165 - DNA, 13 bp, Artificial Sequence
  Oligonucleotide for detection of SNP TSC0031274
gtgttgtgggtag

SEQ ID NO: 125166 - DNA, 13 bp, Artificial Sequence
  Oligonucleotide for detection of SNP TSC0031274
ctacccacaacac

SEQ ID NO: 125167 - DNA, 13 bp, Artificial Sequence
  Oligonucleotide for detection of SNP TSC0031274
gtgttgcgggtag

SEQ ID NO: 125168 - DNA, 13 bp, Artificial Sequence
  Oligonucleotide for detection of SNP TSC0031274
ctacccgcaacac

SEQ ID NO: 125169 - DNA, 13 bp, Artificial Sequence
  Oligonucleotide for detection of SNP TSC0031274
ttgtttgtagtay

SEQ ID NO: 125170 - DNA, 13 bp, Artificial Sequence
  Oligonucleotide for detection of SNP TSC0031274
rtactacaaacaa

SEQ ID NO: 125171 - DNA, 13 bp, Artificial Sequence
  Oligonucleotide for detection of SNP TSC0031274
ttgtttatagtay

SEQ ID NO: 125172 - DNA, 13 bp, Artificial Sequence
  Oligonucleotide for detection of SNP TSC0031274
rtactataaacaa

SEQ ID NO: 125173 - DNA, 13 bp, Artificial Sequence
  Oligonucleotide for detection of SNP TSC0031274
ttgttcgtagtay

SEQ ID NO: 125174 - DNA, 13 bp, Artificial Sequence
  Oligonucleotide for detection of SNP TSC0031274
rtactacgaacaa

SEQ ID NO: 125175 - DNA, 13 bp, Artificial Sequence
  Oligonucleotide for detection of SNP TSC0031275
tgttttgtatata

SEQ ID NO: 125176 - DNA, 13 bp, Artificial Sequence
  Oligonucleotide for detection of SNP TSC0031275
tatatacaaaaca

SEQ ID NO: 125177 - DNA, 13 bp, Artificial Sequence
  Oligonucleotide for detection of SNP TSC0031275
tgttttatatata

SEQ ID NO: 125178 - DNA, 13 bp, Artificial Sequence
  Oligonucleotide for detection of SNP TSC0031275
tatatataaaaca

SEQ ID NO: 125179 - DNA, 13 bp, Artificial Sequence
  Oligonucleotide for detection of SNP TSC0031276
gagggaggtttay

SEQ ID NO: 125180 - DNA, 13 bp, Artificial Sequence
  Oligonucleotide for detection of SNP TSC0031276
rtaaacctccctc

SEQ ID NO: 125181 - DNA, 13 bp, Artificial Sequence
  Oligonucleotide for detection of SNP TSC0031276
gagggaagtttay

SEQ ID NO: 125182 - DNA, 13 bp, Artificial Sequence
  Oligonucleotide for detection of SNP TSC0031276
rtaaacttccctc

SEQ ID NO: 125183 - DNA, 13 bp, Artificial Sequence
  Oligonucleotide for detection of SNP TSC0031278
agttttgggggga

SEQ ID NO: 125184 - DNA, 13 bp, Artificial Sequence
  Oligonucleotide for detection of SNP TSC0031278
tccccccaaaact

SEQ ID NO: 125185 - DNA, 13 bp, Artificial Sequence
  Oligonucleotide for detection of SNP TSC0031278
agttttaggggga

SEQ ID NO: 125186 - DNA, 13 bp, Artificial Sequence
  Oligonucleotide for detection of SNP TSC0031278
tccccctaaaact

SEQ ID NO: 125187 - DNA, 13 bp, Artificial Sequence
  Oligonucleotide for detection of SNP TSC0031278
agtttcgggggga

SEQ ID NO: 125188 - DNA, 13 bp, Artificial Sequence
  Oligonucleotide for detection of SNP TSC0031278
tccccccgaaact

SEQ ID NO: 125189 - DNA, 13 bp, Artificial Sequence
  Oligonucleotide for detection of SNP TSC0031282
aaatggagagtgg

SEQ ID NO: 125190 - DNA, 13 bp, Artificial Sequence
  Oligonucleotide for detection of SNP TSC0031282
ccactctccattt

SEQ ID NO: 125191 - DNA, 13 bp, Artificial Sequence
  Oligonucleotide for detection of SNP TSC0031282
aaatggggagtgg

SEQ ID NO: 125192 - DNA, 13 bp, Artificial Sequence
  Oligonucleotide for detection of SNP TSC0031282
ccactccccattt

SEQ ID NO: 125193 - DNA, 13 bp, Artificial Sequence
  Oligonucleotide for detection of SNP TSC0031284
gtaggtgtgggga

SEQ ID NO: 125194 - DNA, 13 bp, Artificial Sequence
  Oligonucleotide for detection of SNP TSC0031284
tccccacacctac

SEQ ID NO: 125195 - DNA, 13 bp, Artificial Sequence
  Oligonucleotide for detection of SNP TSC0031284
gtaggtatgggga

SEQ ID NO: 125196 - DNA, 13 bp, Artificial Sequence
  Oligonucleotide for detection of SNP TSC0031284
tccccatacctac

SEQ ID NO: 125197 - DNA, 13 bp, Artificial Sequence
  Oligonucleotide for detection of SNP TSC0031285
ggttttaaaatty

SEQ ID NO: 125198 - DNA, 13 bp, Artificial Sequence
  Oligonucleotide for detection of SNP TSC0031285
raattttaaaacc

SEQ ID NO: 125199 - DNA, 13 bp, Artificial Sequence
  Oligonucleotide for detection of SNP TSC0031285
ggttttgaaatty

SEQ ID NO: 125200 - DNA, 13 bp, Artificial Sequence
  Oligonucleotide for detection of SNP TSC0031285
raatttcaaaacc

SEQ ID NO: 125201 - DNA, 13 bp, Artificial Sequence
  Oligonucleotide for detection of SNP TSC0031289
ttataagttattt

SEQ ID NO: 125202 - DNA, 13 bp, Artificial Sequence
  Oligonucleotide for detection of SNP TSC0031289
aaataacttataa

SEQ ID NO: 125203 - DNA, 13 bp, Artificial Sequence
  Oligonucleotide for detection of SNP TSC0031292
ttttttgaaaaty

SEQ ID NO: 125204 - DNA, 13 bp, Artificial Sequence
  Oligonucleotide for detection of SNP TSC0031292
rattttcaaaaaa

SEQ ID NO: 125205 - DNA, 13 bp, Artificial Sequence
  Oligonucleotide for detection of SNP TSC0031292
ggtttttaaaaaa

SEQ ID NO: 125206 - DNA, 13 bp, Artificial Sequence
  Oligonucleotide for detection of SNP TSC0031292
ttttttaaaaacc

SEQ ID NO: 125207 - DNA, 13 bp, Artificial Sequence
  Oligonucleotide for detection of SNP TSC0031292
ggttttaaaaaaa

SEQ ID NO: 125208 - DNA, 13 bp, Artificial Sequence
  Oligonucleotide for detection of SNP TSC0031292
tttttttaaaacc

SEQ ID NO: 125209 - DNA, 13 bp, Artificial Sequence
  Oligonucleotide for detection of SNP TSC0031293
agggaatgagaga

SEQ ID NO: 125210 - DNA, 13 bp, Artificial Sequence
  Oligonucleotide for detection of SNP TSC0031293
tctctcattccct

SEQ ID NO: 125211 - DNA, 13 bp, Artificial Sequence
  Oligonucleotide for detection of SNP TSC0031293
agggaaagagaga

SEQ ID NO: 125212 - DNA, 13 bp, Artificial Sequence
  Oligonucleotide for detection of SNP TSC0031293
tctctctttccct

SEQ ID NO: 125213 - DNA, 13 bp, Artificial Sequence
  Oligonucleotide for detection of SNP TSC0031295
gggagggatgatt

SEQ ID NO: 125214 - DNA, 13 bp, Artificial Sequence
  Oligonucleotide for detection of SNP TSC0031295
aatcatccctccc

SEQ ID NO: 125215 - DNA, 13 bp, Artificial Sequence
  Oligonucleotide for detection of SNP TSC0031295
gggaggtatgatt

SEQ ID NO: 125216 - DNA, 13 bp, Artificial Sequence
  Oligonucleotide for detection of SNP TSC0031295
aatcatacctccc

SEQ ID NO: 125217 - DNA, 13 bp, Artificial Sequence
  Oligonucleotide for detection of SNP TSC0031295
aattattttttty

SEQ ID NO: 125218 - DNA, 13 bp, Artificial Sequence
  Oligonucleotide for detection of SNP TSC0031295
raaaaaaataatt

SEQ ID NO: 125219 - DNA, 13 bp, Artificial Sequence
  Oligonucleotide for detection of SNP TSC0031295
aattatattttty

SEQ ID NO: 125220 - DNA, 13 bp, Artificial Sequence
  Oligonucleotide for detection of SNP TSC0031295
raaaaatataatt

SEQ ID NO: 125221 - DNA, 13 bp, Artificial Sequence
  Oligonucleotide for detection of SNP TSC0031298
ttttataatgtat

SEQ ID NO: 125222 - DNA, 13 bp, Artificial Sequence
  Oligonucleotide for detection of SNP TSC0031298
atacattataaaa

SEQ ID NO: 125223 - DNA, 13 bp, Artificial Sequence
  Oligonucleotide for detection of SNP TSC0031298
ttttattatgtat

SEQ ID NO: 125224 - DNA, 13 bp, Artificial Sequence
  Oligonucleotide for detection of SNP TSC0031298
atacataataaaa

SEQ ID NO: 125225 - DNA, 13 bp, Artificial Sequence
  Oligonucleotide for detection of SNP TSC0031298
atgtatgataagg

SEQ ID NO: 125226 - DNA, 13 bp, Artificial Sequence
  Oligonucleotide for detection of SNP TSC0031298
ccttatcatacat

SEQ ID NO: 125227 - DNA, 13 bp, Artificial Sequence
  Oligonucleotide for detection of SNP TSC0031299
tatataattttaa

SEQ ID NO: 125228 - DNA, 13 bp, Artificial Sequence
  Oligonucleotide for detection of SNP TSC0031299
ttaaaattatata

SEQ ID NO: 125229 - DNA, 13 bp, Artificial Sequence
  Oligonucleotide for detection of SNP TSC0031299
tatatatttttaa

SEQ ID NO: 125230 - DNA, 13 bp, Artificial Sequence
  Oligonucleotide for detection of SNP TSC0031299
ttaaaaatatata

SEQ ID NO: 125231 - DNA, 13 bp, Artificial Sequence
  Oligonucleotide for detection of SNP TSC0031299
ttagggttgtgtg

SEQ ID NO: 125232 - DNA, 13 bp, Artificial Sequence
  Oligonucleotide for detection of SNP TSC0031299
cacacaaccctaa

SEQ ID NO: 125233 - DNA, 13 bp, Artificial Sequence
  Oligonucleotide for detection of SNP TSC0031299
ttaggggtgtgtg

SEQ ID NO: 125234 - DNA, 13 bp, Artificial Sequence
  Oligonucleotide for detection of SNP TSC0031299
cacacacccctaa

SEQ ID NO: 125235 - DNA, 13 bp, Artificial Sequence
  Oligonucleotide for detection of SNP TSC0031301
agtaatatgttty

SEQ ID NO: 125236 - DNA, 13 bp, Artificial Sequence
  Oligonucleotide for detection of SNP TSC0031301
raaacatattact

SEQ ID NO: 125237 - DNA, 13 bp, Artificial Sequence
  Oligonucleotide for detection of SNP TSC0031301
agtaatttgttty

SEQ ID NO: 125238 - DNA, 13 bp, Artificial Sequence
  Oligonucleotide for detection of SNP TSC0031301
raaacaaattact

SEQ ID NO: 125239 - DNA, 13 bp, Artificial Sequence
  Oligonucleotide for detection of SNP TSC0031301
gaaatatgttgtt

SEQ ID NO: 125240 - DNA, 13 bp, Artificial Sequence
  Oligonucleotide for detection of SNP TSC0031301
aacaacatatttc

SEQ ID NO: 125241 - DNA, 13 bp, Artificial Sequence
  Oligonucleotide for detection of SNP TSC0031301
gaaataggttgtt

SEQ ID NO: 125242 - DNA, 13 bp, Artificial Sequence
  Oligonucleotide for detection of SNP TSC0031301
aacaacctatttc

SEQ ID NO: 125243 - DNA, 13 bp, Artificial Sequence
  Oligonucleotide for detection of SNP TSC0031302
ttggtttgagtgy

SEQ ID NO: 125244 - DNA, 13 bp, Artificial Sequence
  Oligonucleotide for detection of SNP TSC0031302
rcactcaaaccaa

SEQ ID NO: 125245 - DNA, 13 bp, Artificial Sequence
  Oligonucleotide for detection of SNP TSC0031302
tcggtttgagtgy

SEQ ID NO: 125246 - DNA, 13 bp, Artificial Sequence
  Oligonucleotide for detection of SNP TSC0031302
rcactcaaaccga

SEQ ID NO: 125247 - DNA, 13 bp, Artificial Sequence
  Oligonucleotide for detection of SNP TSC0031302
ttggttcgagtgy

SEQ ID NO: 125248 - DNA, 13 bp, Artificial Sequence
  Oligonucleotide for detection of SNP TSC0031302
rcactcgaaccaa

SEQ ID NO: 125249 - DNA, 13 bp, Artificial Sequence
  Oligonucleotide for detection of SNP TSC0031302
ttggtttgagcgy

SEQ ID NO: 125250 - DNA, 13 bp, Artificial Sequence
  Oligonucleotide for detection of SNP TSC0031302
rcgctcaaaccaa

SEQ ID NO: 125251 - DNA, 13 bp, Artificial Sequence
  Oligonucleotide for detection of SNP TSC0031302
tcggtttgagcgy

SEQ ID NO: 125252 - DNA, 13 bp, Artificial Sequence
  Oligonucleotide for detection of SNP TSC0031302
rcgctcaaaccga

SEQ ID NO: 125253 - DNA, 13 bp, Artificial Sequence
  Oligonucleotide for detection of SNP TSC0031302
tcggttcgagtgy

SEQ ID NO: 125254 - DNA, 13 bp, Artificial Sequence
  Oligonucleotide for detection of SNP TSC0031302
rcactcgaaccga

SEQ ID NO: 125255 - DNA, 13 bp, Artificial Sequence
  Oligonucleotide for detection of SNP TSC0031302
ttggttcgagcgy

SEQ ID NO: 125256 - DNA, 13 bp, Artificial Sequence
  Oligonucleotide for detection of SNP TSC0031302
rcgctcgaaccaa

SEQ ID NO: 125257 - DNA, 13 bp, Artificial Sequence
  Oligonucleotide for detection of SNP TSC0031302
tcggttcgagcgy

SEQ ID NO: 125258 - DNA, 13 bp, Artificial Sequence
  Oligonucleotide for detection of SNP TSC0031302
rcgctcgaaccga

SEQ ID NO: 125259 - DNA, 13 bp, Artificial Sequence
  Oligonucleotide for detection of SNP TSC0031302
gtgtttgggttgg

SEQ ID NO: 125260 - DNA, 13 bp, Artificial Sequence
  Oligonucleotide for detection of SNP TSC0031302
ccaacccaaacac

SEQ ID NO: 125261 - DNA, 13 bp, Artificial Sequence
  Oligonucleotide for detection of SNP TSC0031302
gtgtttaggttgg

SEQ ID NO: 125262 - DNA, 13 bp, Artificial Sequence
  Oligonucleotide for detection of SNP TSC0031302
ccaacctaaacac

SEQ ID NO: 125263 - DNA, 13 bp, Artificial Sequence
  Oligonucleotide for detection of SNP TSC0031302
gcgtttgggttgg

SEQ ID NO: 125264 - DNA, 13 bp, Artificial Sequence
  Oligonucleotide for detection of SNP TSC0031302
ccaacccaaacgc

SEQ ID NO: 125265 - DNA, 13 bp, Artificial Sequence
  Oligonucleotide for detection of SNP TSC0031302
gcgtttaggttgg

SEQ ID NO: 125266 - DNA, 13 bp, Artificial Sequence
  Oligonucleotide for detection of SNP TSC0031302
ccaacctaaacgc

SEQ ID NO: 125267 - DNA, 13 bp, Artificial Sequence
  Oligonucleotide for detection of SNP TSC0031302
gtgttcgggttgg

SEQ ID NO: 125268 - DNA, 13 bp, Artificial Sequence
  Oligonucleotide for detection of SNP TSC0031302
ccaacccgaacac

SEQ ID NO: 125269 - DNA, 13 bp, Artificial Sequence
  Oligonucleotide for detection of SNP TSC0031302
gtgtttaggtcgg

SEQ ID NO: 125270 - DNA, 13 bp, Artificial Sequence
  Oligonucleotide for detection of SNP TSC0031302
ccgacctaaacac

SEQ ID NO: 125271 - DNA, 13 bp, Artificial Sequence
  Oligonucleotide for detection of SNP TSC0031302
gtgtttgggtcgg

SEQ ID NO: 125272 - DNA, 13 bp, Artificial Sequence
  Oligonucleotide for detection of SNP TSC0031302
ccgacccaaacac

SEQ ID NO: 125273 - DNA, 13 bp, Artificial Sequence
  Oligonucleotide for detection of SNP TSC0031302
gcgtttaggtcgg

SEQ ID NO: 125274 - DNA, 13 bp, Artificial Sequence
  Oligonucleotide for detection of SNP TSC0031302
ccgacctaaacgc

SEQ ID NO: 125275 - DNA, 13 bp, Artificial Sequence
  Oligonucleotide for detection of SNP TSC0031302
gcgttcgggttgg

SEQ ID NO: 125276 - DNA, 13 bp, Artificial Sequence
  Oligonucleotide for detection of SNP TSC0031302
ccaacccgaacgc

SEQ ID NO: 125277 - DNA, 13 bp, Artificial Sequence
  Oligonucleotide for detection of SNP TSC0031302
gcgtttgggtcgg

SEQ ID NO: 125278 - DNA, 13 bp, Artificial Sequence
  Oligonucleotide for detection of SNP TSC0031302
ccgacccaaacgc

SEQ ID NO: 125279 - DNA, 13 bp, Artificial Sequence
  Oligonucleotide for detection of SNP TSC0031302
gtgttcgggtcgg

SEQ ID NO: 125280 - DNA, 13 bp, Artificial Sequence
  Oligonucleotide for detection of SNP TSC0031302
ccgacccgaacac

SEQ ID NO: 125281 - DNA, 13 bp, Artificial Sequence
  Oligonucleotide for detection of SNP TSC0031302
gcgttcgggtcgg

SEQ ID NO: 125282 - DNA, 13 bp, Artificial Sequence
  Oligonucleotide for detection of SNP TSC0031302
ccgacccgaacgc

SEQ ID NO: 125283 - DNA, 13 bp, Artificial Sequence
  Oligonucleotide for detection of SNP TSC0031303
tgtatgattaagg

SEQ ID NO: 125284 - DNA, 13 bp, Artificial Sequence
  Oligonucleotide for detection of SNP TSC0031303
ccttaatcataca

SEQ ID NO: 125285 - DNA, 13 bp, Artificial Sequence
  Oligonucleotide for detection of SNP TSC0031303
tgtatggttaagg

SEQ ID NO: 125286 - DNA, 13 bp, Artificial Sequence
  Oligonucleotide for detection of SNP TSC0031303
ccttaaccataca

SEQ ID NO: 125287 - DNA, 13 bp, Artificial Sequence
  Oligonucleotide for detection of SNP TSC0031303
cgtatgattaagg

SEQ ID NO: 125288 - DNA, 13 bp, Artificial Sequence
  Oligonucleotide for detection of SNP TSC0031303
ccttaatcatacg

SEQ ID NO: 125289 - DNA, 13 bp, Artificial Sequence
  Oligonucleotide for detection of SNP TSC0031303
cgtatggttaagg

SEQ ID NO: 125290 - DNA, 13 bp, Artificial Sequence
  Oligonucleotide for detection of SNP TSC0031303
ccttaaccatacg

SEQ ID NO: 125291 - DNA, 13 bp, Artificial Sequence
  Oligonucleotide for detection of SNP TSC0031305
gttgttgtgtagt

SEQ ID NO: 125292 - DNA, 13 bp, Artificial Sequence
  Oligonucleotide for detection of SNP TSC0031305
actacacaacaac

SEQ ID NO: 125293 - DNA, 13 bp, Artificial Sequence
  Oligonucleotide for detection of SNP TSC0031305
gttgttatgtagt

SEQ ID NO: 125294 - DNA, 13 bp, Artificial Sequence
  Oligonucleotide for detection of SNP TSC0031305
actacataacaac

SEQ ID NO: 125295 - DNA, 13 bp, Artificial Sequence
  Oligonucleotide for detection of SNP TSC0031307
gtattggggtttt

SEQ ID NO: 125296 - DNA, 13 bp, Artificial Sequence
  Oligonucleotide for detection of SNP TSC0031307
aaaaccccaatac

SEQ ID NO: 125297 - DNA, 13 bp, Artificial Sequence
  Oligonucleotide for detection of SNP TSC0031307
gtattgtggtttt

SEQ ID NO: 125298 - DNA, 13 bp, Artificial Sequence
  Oligonucleotide for detection of SNP TSC0031307
aaaaccacaatac

SEQ ID NO: 125299 - DNA, 13 bp, Artificial Sequence
  Oligonucleotide for detection of SNP TSC0031307
aaagttttaatay

SEQ ID NO: 125300 - DNA, 13 bp, Artificial Sequence
  Oligonucleotide for detection of SNP TSC0031307
rtattaaaacttt

SEQ ID NO: 125301 - DNA, 13 bp, Artificial Sequence
  Oligonucleotide for detection of SNP TSC0031307
aaagttataatay

SEQ ID NO: 125302 - DNA, 13 bp, Artificial Sequence
  Oligonucleotide for detection of SNP TSC0031307
rtattataacttt

SEQ ID NO: 125303 - DNA, 13 bp, Artificial Sequence
  Oligonucleotide for detection of SNP TSC0031308
aaaaaagtataga

SEQ ID NO: 125304 - DNA, 13 bp, Artificial Sequence
  Oligonucleotide for detection of SNP TSC0031308
tctatactttttt

SEQ ID NO: 125305 - DNA, 13 bp, Artificial Sequence
  Oligonucleotide for detection of SNP TSC0031308
aaaaaaatataga

SEQ ID NO: 125306 - DNA, 13 bp, Artificial Sequence
  Oligonucleotide for detection of SNP TSC0031308
tctatattttttt

SEQ ID NO: 125307 - DNA, 13 bp, Artificial Sequence
  Oligonucleotide for detection of SNP TSC0031310
aatatgagggaay

SEQ ID NO: 125308 - DNA, 13 bp, Artificial Sequence
  Oligonucleotide for detection of SNP TSC0031310
rttccctcatatt

SEQ ID NO: 125309 - DNA, 13 bp, Artificial Sequence
  Oligonucleotide for detection of SNP TSC0031310
aatatgggggaay

SEQ ID NO: 125310 - DNA, 13 bp, Artificial Sequence
  Oligonucleotide for detection of SNP TSC0031310
rttcccccatatt

SEQ ID NO: 125311 - DNA, 13 bp, Artificial Sequence
  Oligonucleotide for detection of SNP TSC0031311
atatgagggaaty

SEQ ID NO: 125312 - DNA, 13 bp, Artificial Sequence
  Oligonucleotide for detection of SNP TSC0031311
rattccctcatat

SEQ ID NO: 125313 - DNA, 13 bp, Artificial Sequence
  Oligonucleotide for detection of SNP TSC0031311
atatgatggaaty

SEQ ID NO: 125314 - DNA, 13 bp, Artificial Sequence
  Oligonucleotide for detection of SNP TSC0031311
rattccatcatat

SEQ ID NO: 125315 - DNA, 13 bp, Artificial Sequence
  Oligonucleotide for detection of SNP TSC0031316
agtaggaatatta

SEQ ID NO: 125316 - DNA, 13 bp, Artificial Sequence
  Oligonucleotide for detection of SNP TSC0031316
taatattcctact

SEQ ID NO: 125317 - DNA, 13 bp, Artificial Sequence
  Oligonucleotide for detection of SNP TSC0031316
agtagggatatta

SEQ ID NO: 125318 - DNA, 13 bp, Artificial Sequence
  Oligonucleotide for detection of SNP TSC0031316
taatatccctact

SEQ ID NO: 125319 - DNA, 13 bp, Artificial Sequence
  Oligonucleotide for detection of SNP TSC0031320
ggttttgatttty

SEQ ID NO: 125320 - DNA, 13 bp, Artificial Sequence
  Oligonucleotide for detection of SNP TSC0031320
raaaatcaaaacc

SEQ ID NO: 125321 - DNA, 13 bp, Artificial Sequence
  Oligonucleotide for detection of SNP TSC0031320
ggtttttatttty

SEQ ID NO: 125322 - DNA, 13 bp, Artificial Sequence
  Oligonucleotide for detection of SNP TSC0031320
raaaataaaaacc

SEQ ID NO: 125323 - DNA, 13 bp, Artificial Sequence
  Oligonucleotide for detection of SNP TSC0031320
gagaattagagty

SEQ ID NO: 125324 - DNA, 13 bp, Artificial Sequence
  Oligonucleotide for detection of SNP TSC0031320
ractctaattctc

SEQ ID NO: 125325 - DNA, 13 bp, Artificial Sequence
  Oligonucleotide for detection of SNP TSC0031320
gagaataagagty

SEQ ID NO: 125326 - DNA, 13 bp, Artificial Sequence
  Oligonucleotide for detection of SNP TSC0031320
ractcttattctc

SEQ ID NO: 125327 - DNA, 13 bp, Artificial Sequence
  Oligonucleotide for detection of SNP TSC0031323
aagagcggaataa

SEQ ID NO: 125328 - DNA, 13 bp, Artificial Sequence
  Oligonucleotide for detection of SNP TSC0031323
ttattccgctctt

SEQ ID NO: 125329 - DNA, 13 bp, Artificial Sequence
  Oligonucleotide for detection of SNP TSC0031324
ttttttatttgga

SEQ ID NO: 125330 - DNA, 13 bp, Artificial Sequence
  Oligonucleotide for detection of SNP TSC0031324
tccaaataaaaaa

SEQ ID NO: 125331 - DNA, 13 bp, Artificial Sequence
  Oligonucleotide for detection of SNP TSC0031324
ttttttttttgga

SEQ ID NO: 125332 - DNA, 13 bp, Artificial Sequence
  Oligonucleotide for detection of SNP TSC0031324
tccaaaaaaaaaa

SEQ ID NO: 125333 - DNA, 13 bp, Artificial Sequence
  Oligonucleotide for detection of SNP TSC0031324
tttagatgagaaa

SEQ ID NO: 125334 - DNA, 13 bp, Artificial Sequence
  Oligonucleotide for detection of SNP TSC0031324
tttctcatctaaa

SEQ ID NO: 125335 - DNA, 13 bp, Artificial Sequence
  Oligonucleotide for detection of SNP TSC0031324
tttagaggagaaa

SEQ ID NO: 125336 - DNA, 13 bp, Artificial Sequence
  Oligonucleotide for detection of SNP TSC0031324
tttctcctctaaa

SEQ ID NO: 125337 - DNA, 13 bp, Artificial Sequence
  Oligonucleotide for detection of SNP TSC0031327
tgttatatttggg

SEQ ID NO: 125338 - DNA, 13 bp, Artificial Sequence
  Oligonucleotide for detection of SNP TSC0031327
cccaaatataaca

SEQ ID NO: 125339 - DNA, 13 bp, Artificial Sequence
  Oligonucleotide for detection of SNP TSC0031327
tgttatgtttggg

SEQ ID NO: 125340 - DNA, 13 bp, Artificial Sequence
  Oligonucleotide for detection of SNP TSC0031327
cccaaacataaca

SEQ ID NO: 125341 - DNA, 13 bp, Artificial Sequence
  Oligonucleotide for detection of SNP TSC0031327
tgttacgtttggg

SEQ ID NO: 125342 - DNA, 13 bp, Artificial Sequence
  Oligonucleotide for detection of SNP TSC0031327
cccaaacgtaaca

SEQ ID NO: 125343 - DNA, 13 bp, Artificial Sequence
  Oligonucleotide for detection of SNP TSC0031327
tttagatgtgata

SEQ ID NO: 125344 - DNA, 13 bp, Artificial Sequence
  Oligonucleotide for detection of SNP TSC0031327
tatcacatctaaa

SEQ ID NO: 125345 - DNA, 13 bp, Artificial Sequence
  Oligonucleotide for detection of SNP TSC0031327
tttagacgtgata

SEQ ID NO: 125346 - DNA, 13 bp, Artificial Sequence
  Oligonucleotide for detection of SNP TSC0031327
tatcacgtctaaa

SEQ ID NO: 125347 - DNA, 13 bp, Artificial Sequence
  Oligonucleotide for detection of SNP TSC0031331
taaagatgttgag

SEQ ID NO: 125348 - DNA, 13 bp, Artificial Sequence
  Oligonucleotide for detection of SNP TSC0031331
ctcaacatcttta

SEQ ID NO: 125349 - DNA, 13 bp, Artificial Sequence
  Oligonucleotide for detection of SNP TSC0031331
taaagacgttgag

SEQ ID NO: 125350 - DNA, 13 bp, Artificial Sequence
  Oligonucleotide for detection of SNP TSC0031331
ctcaacgtcttta

SEQ ID NO: 125351 - DNA, 13 bp, Artificial Sequence
  Oligonucleotide for detection of SNP TSC0031337
agaggtatgtgty

SEQ ID NO: 125352 - DNA, 13 bp, Artificial Sequence
  Oligonucleotide for detection of SNP TSC0031337
racacatacctct

SEQ ID NO: 125353 - DNA, 13 bp, Artificial Sequence
  Oligonucleotide for detection of SNP TSC0031337
agaggtgtgtgty

SEQ ID NO: 125354 - DNA, 13 bp, Artificial Sequence
  Oligonucleotide for detection of SNP TSC0031337
racacacacctct

SEQ ID NO: 125355 - DNA, 13 bp, Artificial Sequence
  Oligonucleotide for detection of SNP TSC0031337
agaggtatgcgty

SEQ ID NO: 125356 - DNA, 13 bp, Artificial Sequence
  Oligonucleotide for detection of SNP TSC0031337
racgcatacctct

SEQ ID NO: 125357 - DNA, 13 bp, Artificial Sequence
  Oligonucleotide for detection of SNP TSC0031337
agaggcgtgtgty

SEQ ID NO: 125358 - DNA, 13 bp, Artificial Sequence
  Oligonucleotide for detection of SNP TSC0031337
racacacgcctct

SEQ ID NO: 125359 - DNA, 13 bp, Artificial Sequence
  Oligonucleotide for detection of SNP TSC0031337
agaggtgtgcgty

SEQ ID NO: 125360 - DNA, 13 bp, Artificial Sequence
  Oligonucleotide for detection of SNP TSC0031337
racgcacacctct

SEQ ID NO: 125361 - DNA, 13 bp, Artificial Sequence
  Oligonucleotide for detection of SNP TSC0031337
agaggcgtgcgty

SEQ ID NO: 125362 - DNA, 13 bp, Artificial Sequence
  Oligonucleotide for detection of SNP TSC0031337
racgcacgcctct

SEQ ID NO: 125363 - DNA, 13 bp, Artificial Sequence
  Oligonucleotide for detection of SNP TSC0031337
ggtgtatgttttt

SEQ ID NO: 125364 - DNA, 13 bp, Artificial Sequence
  Oligonucleotide for detection of SNP TSC0031337
aaaaacatacacc

SEQ ID NO: 125365 - DNA, 13 bp, Artificial Sequence
  Oligonucleotide for detection of SNP TSC0031337
ggcgtatgttttt

SEQ ID NO: 125366 - DNA, 13 bp, Artificial Sequence
  Oligonucleotide for detection of SNP TSC0031337
aaaaacatacgcc

SEQ ID NO: 125367 - DNA, 13 bp, Artificial Sequence
  Oligonucleotide for detection of SNP TSC0031337
ggtgtacgttttt

SEQ ID NO: 125368 - DNA, 13 bp, Artificial Sequence
  Oligonucleotide for detection of SNP TSC0031337
aaaaacgtacacc

SEQ ID NO: 125369 - DNA, 13 bp, Artificial Sequence
  Oligonucleotide for detection of SNP TSC0031337
ggcgtacgttttt

SEQ ID NO: 125370 - DNA, 13 bp, Artificial Sequence
  Oligonucleotide for detection of SNP TSC0031337
aaaaacgtacgcc

SEQ ID NO: 125371 - DNA, 13 bp, Artificial Sequence
  Oligonucleotide for detection of SNP TSC0031339
gtgagagggtttg

SEQ ID NO: 125372 - DNA, 13 bp, Artificial Sequence
  Oligonucleotide for detection of SNP TSC0031339
caaaccctctcac

SEQ ID NO: 125373 - DNA, 13 bp, Artificial Sequence
  Oligonucleotide for detection of SNP TSC0031339
gtgagaaggtttg

SEQ ID NO: 125374 - DNA, 13 bp, Artificial Sequence
  Oligonucleotide for detection of SNP TSC0031339
caaaccttctcac

SEQ ID NO: 125375 - DNA, 13 bp, Artificial Sequence
  Oligonucleotide for detection of SNP TSC0031340
tgatagggtggag

SEQ ID NO: 125376 - DNA, 13 bp, Artificial Sequence
  Oligonucleotide for detection of SNP TSC0031340
ctccaccctatca

SEQ ID NO: 125377 - DNA, 13 bp, Artificial Sequence
  Oligonucleotide for detection of SNP TSC0031340
tgatagtgtggag

SEQ ID NO: 125378 - DNA, 13 bp, Artificial Sequence
  Oligonucleotide for detection of SNP TSC0031340
ctccacactatca

SEQ ID NO: 125379 - DNA, 13 bp, Artificial Sequence
  Oligonucleotide for detection of SNP TSC0031340
cgatagggtggag

SEQ ID NO: 125380 - DNA, 13 bp, Artificial Sequence
  Oligonucleotide for detection of SNP TSC0031340
ctccaccctatcg

SEQ ID NO: 125381 - DNA, 13 bp, Artificial Sequence
  Oligonucleotide for detection of SNP TSC0031340
cgatagtgtggag

SEQ ID NO: 125382 - DNA, 13 bp, Artificial Sequence
  Oligonucleotide for detection of SNP TSC0031340
ctccacactatcg

SEQ ID NO: 125383 - DNA, 13 bp, Artificial Sequence
  Oligonucleotide for detection of SNP TSC0031340
ttttattttattg

SEQ ID NO: 125384 - DNA, 13 bp, Artificial Sequence
  Oligonucleotide for detection of SNP TSC0031340
caataaaataaaa

SEQ ID NO: 125385 - DNA, 13 bp, Artificial Sequence
  Oligonucleotide for detection of SNP TSC0031340
ttttattttatcg

SEQ ID NO: 125386 - DNA, 13 bp, Artificial Sequence
  Oligonucleotide for detection of SNP TSC0031340
cgataaaataaaa

SEQ ID NO: 125387 - DNA, 13 bp, Artificial Sequence
  Oligonucleotide for detection of SNP TSC0031340
ttttatattatcg

SEQ ID NO: 125388 - DNA, 13 bp, Artificial Sequence
  Oligonucleotide for detection of SNP TSC0031340
cgataatataaaa

SEQ ID NO: 125389 - DNA, 13 bp, Artificial Sequence
  Oligonucleotide for detection of SNP TSC0031341
ttatatagataag

SEQ ID NO: 125390 - DNA, 13 bp, Artificial Sequence
  Oligonucleotide for detection of SNP TSC0031341
cttatctatataa

SEQ ID NO: 125391 - DNA, 13 bp, Artificial Sequence
  Oligonucleotide for detection of SNP TSC0031341
ttatatggataag

SEQ ID NO: 125392 - DNA, 13 bp, Artificial Sequence
  Oligonucleotide for detection of SNP TSC0031341
cttatccatataa

SEQ ID NO: 125393 - DNA, 13 bp, Artificial Sequence
  Oligonucleotide for detection of SNP TSC0031341
ttatacggataag

SEQ ID NO: 125394 - DNA, 13 bp, Artificial Sequence
  Oligonucleotide for detection of SNP TSC0031341
cttatccgtataa

SEQ ID NO: 125395 - DNA, 13 bp, Artificial Sequence
  Oligonucleotide for detection of SNP TSC0031341
tttgtttgtgtaa

SEQ ID NO: 125396 - DNA, 13 bp, Artificial Sequence
  Oligonucleotide for detection of SNP TSC0031341
ttacacaaacaaa

SEQ ID NO: 125397 - DNA, 13 bp, Artificial Sequence
  Oligonucleotide for detection of SNP TSC0031341
tttgttcgtgtaa

SEQ ID NO: 125398 - DNA, 13 bp, Artificial Sequence
  Oligonucleotide for detection of SNP TSC0031341
ttacacgaacaaa

SEQ ID NO: 125399 - DNA, 13 bp, Artificial Sequence
  Oligonucleotide for detection of SNP TSC0031342
tagggggaagggy

SEQ ID NO: 125400 - DNA, 13 bp, Artificial Sequence
  Oligonucleotide for detection of SNP TSC0031342
rcccttcccccta

SEQ ID NO: 125401 - DNA, 13 bp, Artificial Sequence
  Oligonucleotide for detection of SNP TSC0031342
taggggaaagggy

SEQ ID NO: 125402 - DNA, 13 bp, Artificial Sequence
  Oligonucleotide for detection of SNP TSC0031342
rccctttccccta

SEQ ID NO: 125403 - DNA, 13 bp, Artificial Sequence
  Oligonucleotide for detection of SNP TSC0031343
gtaggagaaaaag

SEQ ID NO: 125404 - DNA, 13 bp, Artificial Sequence
  Oligonucleotide for detection of SNP TSC0031343
ctttttctcctac

SEQ ID NO: 125405 - DNA, 13 bp, Artificial Sequence
  Oligonucleotide for detection of SNP TSC0031343
gtaggaaaaaaag

SEQ ID NO: 125406 - DNA, 13 bp, Artificial Sequence
  Oligonucleotide for detection of SNP TSC0031343
ctttttttcctac

SEQ ID NO: 125407 - DNA, 13 bp, Artificial Sequence
  Oligonucleotide for detection of SNP TSC0031349
taaaggtatattg

SEQ ID NO: 125408 - DNA, 13 bp, Artificial Sequence
  Oligonucleotide for detection of SNP TSC0031349
caatataccttta

SEQ ID NO: 125409 - DNA, 13 bp, Artificial Sequence
  Oligonucleotide for detection of SNP TSC0031349
taaagggatattg

SEQ ID NO: 125410 - DNA, 13 bp, Artificial Sequence
  Oligonucleotide for detection of SNP TSC0031349
caatatcccttta

SEQ ID NO: 125411 - DNA, 13 bp, Artificial Sequence
  Oligonucleotide for detection of SNP TSC0031349
tagtgtgttttta

SEQ ID NO: 125412 - DNA, 13 bp, Artificial Sequence
  Oligonucleotide for detection of SNP TSC0031349
taaaaacacacta

SEQ ID NO: 125413 - DNA, 13 bp, Artificial Sequence
  Oligonucleotide for detection of SNP TSC0031349
tagtgttttttta

SEQ ID NO: 125414 - DNA, 13 bp, Artificial Sequence
  Oligonucleotide for detection of SNP TSC0031349
taaaaaaacacta

SEQ ID NO: 125415 - DNA, 13 bp, Artificial Sequence
  Oligonucleotide for detection of SNP TSC0031350
ggttttataaaat

SEQ ID NO: 125416 - DNA, 13 bp, Artificial Sequence
  Oligonucleotide for detection of SNP TSC0031350
attttataaaacc

SEQ ID NO: 125417 - DNA, 13 bp, Artificial Sequence
  Oligonucleotide for detection of SNP TSC0031350
ggttttgtaaaat

SEQ ID NO: 125418 - DNA, 13 bp, Artificial Sequence
  Oligonucleotide for detection of SNP TSC0031350
attttacaaaacc

SEQ ID NO: 125419 - DNA, 13 bp, Artificial Sequence
  Oligonucleotide for detection of SNP TSC0031351
ttagtagtgggty

SEQ ID NO: 125420 - DNA, 13 bp, Artificial Sequence
  Oligonucleotide for detection of SNP TSC0031351
racccactactaa

SEQ ID NO: 125421 - DNA, 13 bp, Artificial Sequence
  Oligonucleotide for detection of SNP TSC0031351
ttagtaatgggty

SEQ ID NO: 125422 - DNA, 13 bp, Artificial Sequence
  Oligonucleotide for detection of SNP TSC0031351
racccattactaa

SEQ ID NO: 125423 - DNA, 13 bp, Artificial Sequence
  Oligonucleotide for detection of SNP TSC0031351
ttagtagcgggty

SEQ ID NO: 125424 - DNA, 13 bp, Artificial Sequence
  Oligonucleotide for detection of SNP TSC0031351
racccgctactaa

SEQ ID NO: 125425 - DNA, 13 bp, Artificial Sequence
  Oligonucleotide for detection of SNP TSC0031351
ttagtaacgggty

SEQ ID NO: 125426 - DNA, 13 bp, Artificial Sequence
  Oligonucleotide for detection of SNP TSC0031351
racccgttactaa

SEQ ID NO: 125427 - DNA, 13 bp, Artificial Sequence
  Oligonucleotide for detection of SNP TSC0031353
tttttaaagagty

SEQ ID NO: 125428 - DNA, 13 bp, Artificial Sequence
  Oligonucleotide for detection of SNP TSC0031353
ractctttaaaaa

SEQ ID NO: 125429 - DNA, 13 bp, Artificial Sequence
  Oligonucleotide for detection of SNP TSC0031353
tttttatagagty

SEQ ID NO: 125430 - DNA, 13 bp, Artificial Sequence
  Oligonucleotide for detection of SNP TSC0031353
ractctataaaaa

SEQ ID NO: 125431 - DNA, 13 bp, Artificial Sequence
  Oligonucleotide for detection of SNP TSC0031356
agggggtaggggg

SEQ ID NO: 125432 - DNA, 13 bp, Artificial Sequence
  Oligonucleotide for detection of SNP TSC0031356
ccccctaccccct

SEQ ID NO: 125433 - DNA, 13 bp, Artificial Sequence
  Oligonucleotide for detection of SNP TSC0031356
aggggggaggggg

SEQ ID NO: 125434 - DNA, 13 bp, Artificial Sequence
  Oligonucleotide for detection of SNP TSC0031356
ccccctcccccct

SEQ ID NO: 125435 - DNA, 13 bp, Artificial Sequence
  Oligonucleotide for detection of SNP TSC0031358
aattaggtgagag

SEQ ID NO: 125436 - DNA, 13 bp, Artificial Sequence
  Oligonucleotide for detection of SNP TSC0031358
ctctcacctaatt

SEQ ID NO: 125437 - DNA, 13 bp, Artificial Sequence
  Oligonucleotide for detection of SNP TSC0031358
aattagatgagag

SEQ ID NO: 125438 - DNA, 13 bp, Artificial Sequence
  Oligonucleotide for detection of SNP TSC0031358
ctctcatctaatt

SEQ ID NO: 125439 - DNA, 13 bp, Artificial Sequence
  Oligonucleotide for detection of SNP TSC0031361
tgttttatgatta

SEQ ID NO: 125440 - DNA, 13 bp, Artificial Sequence
  Oligonucleotide for detection of SNP TSC0031361
taatcataaaaca

SEQ ID NO: 125441 - DNA, 13 bp, Artificial Sequence
  Oligonucleotide for detection of SNP TSC0031361
tgttttgtgatta

SEQ ID NO: 125442 - DNA, 13 bp, Artificial Sequence
  Oligonucleotide for detection of SNP TSC0031361
taatcacaaaaca

SEQ ID NO: 125443 - DNA, 13 bp, Artificial Sequence
  Oligonucleotide for detection of SNP TSC0031361
cgttttatgatta

SEQ ID NO: 125444 - DNA, 13 bp, Artificial Sequence
  Oligonucleotide for detection of SNP TSC0031361
taatcataaaacg

SEQ ID NO: 125445 - DNA, 13 bp, Artificial Sequence
  Oligonucleotide for detection of SNP TSC0031361
cgttttgtgatta

SEQ ID NO: 125446 - DNA, 13 bp, Artificial Sequence
  Oligonucleotide for detection of SNP TSC0031361
taatcacaaaacg

SEQ ID NO: 125447 - DNA, 13 bp, Artificial Sequence
  Oligonucleotide for detection of SNP TSC0031362
tgttttcggggag

SEQ ID NO: 125448 - DNA, 13 bp, Artificial Sequence
  Oligonucleotide for detection of SNP TSC0031362
ctccccgaaaaca

SEQ ID NO: 125449 - DNA, 13 bp, Artificial Sequence
  Oligonucleotide for detection of SNP TSC0031362
ttttttgggggta

SEQ ID NO: 125450 - DNA, 13 bp, Artificial Sequence
  Oligonucleotide for detection of SNP TSC0031362
tacccccaaaaaa

SEQ ID NO: 125451 - DNA, 13 bp, Artificial Sequence
  Oligonucleotide for detection of SNP TSC0031362
tttttcgggggta

SEQ ID NO: 125452 - DNA, 13 bp, Artificial Sequence
  Oligonucleotide for detection of SNP TSC0031362
tacccccgaaaaa

SEQ ID NO: 125453 - DNA, 13 bp, Artificial Sequence
  Oligonucleotide for detection of SNP TSC0031368
gttttaattatta

SEQ ID NO: 125454 - DNA, 13 bp, Artificial Sequence
  Oligonucleotide for detection of SNP TSC0031368
taataattaaaac

SEQ ID NO: 125455 - DNA, 13 bp, Artificial Sequence
  Oligonucleotide for detection of SNP TSC0031368
gttttagttatta

SEQ ID NO: 125456 - DNA, 13 bp, Artificial Sequence
  Oligonucleotide for detection of SNP TSC0031368
taataactaaaac

SEQ ID NO: 125457 - DNA, 13 bp, Artificial Sequence
  Oligonucleotide for detection of SNP TSC0031370
tattggattaatt

SEQ ID NO: 125458 - DNA, 13 bp, Artificial Sequence
  Oligonucleotide for detection of SNP TSC0031370
aattaatccaata

SEQ ID NO: 125459 - DNA, 13 bp, Artificial Sequence
  Oligonucleotide for detection of SNP TSC0031370
tattgggttaatt

SEQ ID NO: 125460 - DNA, 13 bp, Artificial Sequence
  Oligonucleotide for detection of SNP TSC0031370
aattaacccaata

SEQ ID NO: 125461 - DNA, 13 bp, Artificial Sequence
  Oligonucleotide for detection of SNP TSC0031370
tatcggattaatt

SEQ ID NO: 125462 - DNA, 13 bp, Artificial Sequence
  Oligonucleotide for detection of SNP TSC0031370
aattaatccgata

SEQ ID NO: 125463 - DNA, 13 bp, Artificial Sequence
  Oligonucleotide for detection of SNP TSC0031370
tatcgggttaatt

SEQ ID NO: 125464 - DNA, 13 bp, Artificial Sequence
  Oligonucleotide for detection of SNP TSC0031370
aattaacccgata

SEQ ID NO: 125465 - DNA, 13 bp, Artificial Sequence
  Oligonucleotide for detection of SNP TSC0031371
ggatataataggg

SEQ ID NO: 125466 - DNA, 13 bp, Artificial Sequence
  Oligonucleotide for detection of SNP TSC0031371
ccctattatatcc

SEQ ID NO: 125467 - DNA, 13 bp, Artificial Sequence
  Oligonucleotide for detection of SNP TSC0031371
ggatatgataggg

SEQ ID NO: 125468 - DNA, 13 bp, Artificial Sequence
  Oligonucleotide for detection of SNP TSC0031371
ccctatcatatcc

SEQ ID NO: 125469 - DNA, 13 bp, Artificial Sequence
  Oligonucleotide for detection of SNP TSC0031371
ggatacgataggg

SEQ ID NO: 125470 - DNA, 13 bp, Artificial Sequence
  Oligonucleotide for detection of SNP TSC0031371
ccctatcgtatcc

SEQ ID NO: 125471 - DNA, 13 bp, Artificial Sequence
  Oligonucleotide for detection of SNP TSC0031371
ttttgttgtgtty

SEQ ID NO: 125472 - DNA, 13 bp, Artificial Sequence
  Oligonucleotide for detection of SNP TSC0031371
raacacaacaaaa

SEQ ID NO: 125473 - DNA, 13 bp, Artificial Sequence
  Oligonucleotide for detection of SNP TSC0031371
ttttgtcgtgtty

SEQ ID NO: 125474 - DNA, 13 bp, Artificial Sequence
  Oligonucleotide for detection of SNP TSC0031371
raacacgacaaaa

SEQ ID NO: 125475 - DNA, 13 bp, Artificial Sequence
  Oligonucleotide for detection of SNP TSC0031372
ttaggggtttgaa

SEQ ID NO: 125476 - DNA, 13 bp, Artificial Sequence
  Oligonucleotide for detection of SNP TSC0031372
ttcaaacccctaa

SEQ ID NO: 125477 - DNA, 13 bp, Artificial Sequence
  Oligonucleotide for detection of SNP TSC0031372
ttagggatttgaa

SEQ ID NO: 125478 - DNA, 13 bp, Artificial Sequence
  Oligonucleotide for detection of SNP TSC0031372
ttcaaatccctaa

SEQ ID NO: 125479 - DNA, 13 bp, Artificial Sequence
  Oligonucleotide for detection of SNP TSC0031375
tatatgagatttt

SEQ ID NO: 125480 - DNA, 13 bp, Artificial Sequence
  Oligonucleotide for detection of SNP TSC0031375
aaaatctcatata

SEQ ID NO: 125481 - DNA, 13 bp, Artificial Sequence
  Oligonucleotide for detection of SNP TSC0031375
tatatgggatttt

SEQ ID NO: 125482 - DNA, 13 bp, Artificial Sequence
  Oligonucleotide for detection of SNP TSC0031375
aaaatcccatata

SEQ ID NO: 125483 - DNA, 13 bp, Artificial Sequence
  Oligonucleotide for detection of SNP TSC0031376
tttggagaaatga

SEQ ID NO: 125484 - DNA, 13 bp, Artificial Sequence
  Oligonucleotide for detection of SNP TSC0031376
tcatttctccaaa

SEQ ID NO: 125485 - DNA, 13 bp, Artificial Sequence
  Oligonucleotide for detection of SNP TSC0031376
tttggaaaaatga

SEQ ID NO: 125486 - DNA, 13 bp, Artificial Sequence
  Oligonucleotide for detection of SNP TSC0031376
tcatttttccaaa

SEQ ID NO: 125487 - DNA, 13 bp, Artificial Sequence
  Oligonucleotide for detection of SNP TSC0031377
tatttagtattty

SEQ ID NO: 125488 - DNA, 13 bp, Artificial Sequence
  Oligonucleotide for detection of SNP TSC0031377
raaatactaaata

SEQ ID NO: 125489 - DNA, 13 bp, Artificial Sequence
  Oligonucleotide for detection of SNP TSC0031377
tatttaatattty

SEQ ID NO: 125490 - DNA, 13 bp, Artificial Sequence
  Oligonucleotide for detection of SNP TSC0031377
raaatattaaata

SEQ ID NO: 125491 - DNA, 13 bp, Artificial Sequence
  Oligonucleotide for detection of SNP TSC0031378
gtgagatggaaay

SEQ ID NO: 125492 - DNA, 13 bp, Artificial Sequence
  Oligonucleotide for detection of SNP TSC0031378
rtttccatctcac

SEQ ID NO: 125493 - DNA, 13 bp, Artificial Sequence
  Oligonucleotide for detection of SNP TSC0031378
gtgagacggaaay

SEQ ID NO: 125494 - DNA, 13 bp, Artificial Sequence
  Oligonucleotide for detection of SNP TSC0031378
rtttccgtctcac

SEQ ID NO: 125495 - DNA, 13 bp, Artificial Sequence
  Oligonucleotide for detection of SNP TSC0031379
agtggagaatgtg

SEQ ID NO: 125496 - DNA, 13 bp, Artificial Sequence
  Oligonucleotide for detection of SNP TSC0031379
cacattctccact

SEQ ID NO: 125497 - DNA, 13 bp, Artificial Sequence
  Oligonucleotide for detection of SNP TSC0031379
agtggataatgtg

SEQ ID NO: 125498 - DNA, 13 bp, Artificial Sequence
  Oligonucleotide for detection of SNP TSC0031379
cacattatccact

SEQ ID NO: 125499 - DNA, 13 bp, Artificial Sequence
  Oligonucleotide for detection of SNP TSC0031379
tatattttttatt

SEQ ID NO: 125500 - DNA, 13 bp, Artificial Sequence
  Oligonucleotide for detection of SNP TSC0031379
aataaaaaatata

SEQ ID NO: 125501 - DNA, 13 bp, Artificial Sequence
  Oligonucleotide for detection of SNP TSC0031379
tatattatttatt

SEQ ID NO: 125502 - DNA, 13 bp, Artificial Sequence
  Oligonucleotide for detection of SNP TSC0031379
aataaataatata

SEQ ID NO: 125503 - DNA, 13 bp, Artificial Sequence
  Oligonucleotide for detection of SNP TSC0031380
attgagggtgggy

SEQ ID NO: 125504 - DNA, 13 bp, Artificial Sequence
  Oligonucleotide for detection of SNP TSC0031380
rcccaccctcaat

SEQ ID NO: 125505 - DNA, 13 bp, Artificial Sequence
  Oligonucleotide for detection of SNP TSC0031380
attgagtgtgggy

SEQ ID NO: 125506 - DNA, 13 bp, Artificial Sequence
  Oligonucleotide for detection of SNP TSC0031380
rcccacactcaat

SEQ ID NO: 125507 - DNA, 13 bp, Artificial Sequence
  Oligonucleotide for detection of SNP TSC0031380
gtttatttttagt

SEQ ID NO: 125508 - DNA, 13 bp, Artificial Sequence
  Oligonucleotide for detection of SNP TSC0031380
actaaaaataaac

SEQ ID NO: 125509 - DNA, 13 bp, Artificial Sequence
  Oligonucleotide for detection of SNP TSC0031380
gtttatatttagt

SEQ ID NO: 125510 - DNA, 13 bp, Artificial Sequence
  Oligonucleotide for detection of SNP TSC0031380
actaaatataaac

SEQ ID NO: 125511 - DNA, 13 bp, Artificial Sequence
  Oligonucleotide for detection of SNP TSC0031382
ataaggtgaggaa

SEQ ID NO: 125512 - DNA, 13 bp, Artificial Sequence
  Oligonucleotide for detection of SNP TSC0031382
ttcctcaccttat

SEQ ID NO: 125513 - DNA, 13 bp, Artificial Sequence
  Oligonucleotide for detection of SNP TSC0031382
ataaggcgaggaa

SEQ ID NO: 125514 - DNA, 13 bp, Artificial Sequence
  Oligonucleotide for detection of SNP TSC0031382
ttcctcgccttat

SEQ ID NO: 125515 - DNA, 13 bp, Artificial Sequence
  Oligonucleotide for detection of SNP TSC0031383
ttattgtgaggag

SEQ ID NO: 125516 - DNA, 13 bp, Artificial Sequence
  Oligonucleotide for detection of SNP TSC0031383
ctcctcacaataa

SEQ ID NO: 125517 - DNA, 13 bp, Artificial Sequence
  Oligonucleotide for detection of SNP TSC0031383
ttattgcgaggag

SEQ ID NO: 125518 - DNA, 13 bp, Artificial Sequence
  Oligonucleotide for detection of SNP TSC0031383
ctcctcgcaataa

SEQ ID NO: 125519 - DNA, 13 bp, Artificial Sequence
  Oligonucleotide for detection of SNP TSC0031384
gagatagggttty

SEQ ID NO: 125520 - DNA, 13 bp, Artificial Sequence
  Oligonucleotide for detection of SNP TSC0031384
raaaccctatctc

SEQ ID NO: 125521 - DNA, 13 bp, Artificial Sequence
  Oligonucleotide for detection of SNP TSC0031384
gagataaggttty

SEQ ID NO: 125522 - DNA, 13 bp, Artificial Sequence
  Oligonucleotide for detection of SNP TSC0031384
raaaccttatctc

SEQ ID NO: 125523 - DNA, 13 bp, Artificial Sequence
  Oligonucleotide for detection of SNP TSC0031386
taattggagttay

SEQ ID NO: 125524 - DNA, 13 bp, Artificial Sequence
  Oligonucleotide for detection of SNP TSC0031386
rtaactccaatta

SEQ ID NO: 125525 - DNA, 13 bp, Artificial Sequence
  Oligonucleotide for detection of SNP TSC0031386
taattgaagttay

SEQ ID NO: 125526 - DNA, 13 bp, Artificial Sequence
  Oligonucleotide for detection of SNP TSC0031386
rtaacttcaatta

SEQ ID NO: 125527 - DNA, 13 bp, Artificial Sequence
  Oligonucleotide for detection of SNP TSC0031387
gtatgggtttatg

SEQ ID NO: 125528 - DNA, 13 bp, Artificial Sequence
  Oligonucleotide for detection of SNP TSC0031387
cataaacccatac

SEQ ID NO: 125529 - DNA, 13 bp, Artificial Sequence
  Oligonucleotide for detection of SNP TSC0031387
gtatggatttatg

SEQ ID NO: 125530 - DNA, 13 bp, Artificial Sequence
  Oligonucleotide for detection of SNP TSC0031387
cataaatccatac

SEQ ID NO: 125531 - DNA, 13 bp, Artificial Sequence
  Oligonucleotide for detection of SNP TSC0031387
gtatgggtttacg

SEQ ID NO: 125532 - DNA, 13 bp, Artificial Sequence
  Oligonucleotide for detection of SNP TSC0031387
cgtaaacccatac

SEQ ID NO: 125533 - DNA, 13 bp, Artificial Sequence
  Oligonucleotide for detection of SNP TSC0031387
gtatggatttacg

SEQ ID NO: 125534 - DNA, 13 bp, Artificial Sequence
  Oligonucleotide for detection of SNP TSC0031387
cgtaaatccatac

SEQ ID NO: 125535 - DNA, 13 bp, Artificial Sequence
  Oligonucleotide for detection of SNP TSC0031388
attatgattagga

SEQ ID NO: 125536 - DNA, 13 bp, Artificial Sequence
  Oligonucleotide for detection of SNP TSC0031388
tcctaatcataat

SEQ ID NO: 125537 - DNA, 13 bp, Artificial Sequence
  Oligonucleotide for detection of SNP TSC0031388
attatggttagga

SEQ ID NO: 125538 - DNA, 13 bp, Artificial Sequence
  Oligonucleotide for detection of SNP TSC0031388
tcctaaccataat

SEQ ID NO: 125539 - DNA, 13 bp, Artificial Sequence
  Oligonucleotide for detection of SNP TSC0031389
gtttaaattgaaa

SEQ ID NO: 125540 - DNA, 13 bp, Artificial Sequence
  Oligonucleotide for detection of SNP TSC0031389
tttcaatttaaac

SEQ ID NO: 125541 - DNA, 13 bp, Artificial Sequence
  Oligonucleotide for detection of SNP TSC0031389
gtttaagttgaaa

SEQ ID NO: 125542 - DNA, 13 bp, Artificial Sequence
  Oligonucleotide for detection of SNP TSC0031389
tttcaacttaaac

SEQ ID NO: 125543 - DNA, 13 bp, Artificial Sequence
  Oligonucleotide for detection of SNP TSC0031390
ttaatggtgtata

SEQ ID NO: 125544 - DNA, 13 bp, Artificial Sequence
  Oligonucleotide for detection of SNP TSC0031390
tatacaccattaa

SEQ ID NO: 125545 - DNA, 13 bp, Artificial Sequence
  Oligonucleotide for detection of SNP TSC0031390
ttaatgatgtata

SEQ ID NO: 125546 - DNA, 13 bp, Artificial Sequence
  Oligonucleotide for detection of SNP TSC0031390
tatacatcattaa

SEQ ID NO: 125547 - DNA, 13 bp, Artificial Sequence
  Oligonucleotide for detection of SNP TSC0031395
ggttatattggag

SEQ ID NO: 125548 - DNA, 13 bp, Artificial Sequence
  Oligonucleotide for detection of SNP TSC0031395
ctccaatataacc

SEQ ID NO: 125549 - DNA, 13 bp, Artificial Sequence
  Oligonucleotide for detection of SNP TSC0031395
ggttatgttggag

SEQ ID NO: 125550 - DNA, 13 bp, Artificial Sequence
  Oligonucleotide for detection of SNP TSC0031395
ctccaacataacc

SEQ ID NO: 125551 - DNA, 13 bp, Artificial Sequence
  Oligonucleotide for detection of SNP TSC0031395
ggttacgttggag

SEQ ID NO: 125552 - DNA, 13 bp, Artificial Sequence
  Oligonucleotide for detection of SNP TSC0031395
ctccaacgtaacc

SEQ ID NO: 125553 - DNA, 13 bp, Artificial Sequence
  Oligonucleotide for detection of SNP TSC0031398
tagaaaagatgag

SEQ ID NO: 125554 - DNA, 13 bp, Artificial Sequence
  Oligonucleotide for detection of SNP TSC0031398
ctcatcttttcta

SEQ ID NO: 125555 - DNA, 13 bp, Artificial Sequence
  Oligonucleotide for detection of SNP TSC0031398
tagaaatgatgag

SEQ ID NO: 125556 - DNA, 13 bp, Artificial Sequence
  Oligonucleotide for detection of SNP TSC0031398
ctcatcatttcta

SEQ ID NO: 125557 - DNA, 13 bp, Artificial Sequence
  Oligonucleotide for detection of SNP TSC0031398
tagaaacgatgag

SEQ ID NO: 125558 - DNA, 13 bp, Artificial Sequence
  Oligonucleotide for detection of SNP TSC0031398
ctcatcgtttcta

SEQ ID NO: 125559 - DNA, 13 bp, Artificial Sequence
  Oligonucleotide for detection of SNP TSC0031398
tttattttttttg

SEQ ID NO: 125560 - DNA, 13 bp, Artificial Sequence
  Oligonucleotide for detection of SNP TSC0031398
caaaaaaaataaa

SEQ ID NO: 125561 - DNA, 13 bp, Artificial Sequence
  Oligonucleotide for detection of SNP TSC0031399
tatgaaattgtta

SEQ ID NO: 125562 - DNA, 13 bp, Artificial Sequence
  Oligonucleotide for detection of SNP TSC0031399
taacaatttcata

SEQ ID NO: 125563 - DNA, 13 bp, Artificial Sequence
  Oligonucleotide for detection of SNP TSC0031399
tatgaatttgtta

SEQ ID NO: 125564 - DNA, 13 bp, Artificial Sequence
  Oligonucleotide for detection of SNP TSC0031399
taacaaattcata

SEQ ID NO: 125565 - DNA, 13 bp, Artificial Sequence
  Oligonucleotide for detection of SNP TSC0031399
tacgaaattgtta

SEQ ID NO: 125566 - DNA, 13 bp, Artificial Sequence
  Oligonucleotide for detection of SNP TSC0031399
taacaatttcgta

SEQ ID NO: 125567 - DNA, 13 bp, Artificial Sequence
  Oligonucleotide for detection of SNP TSC0031399
tacgaatttgtta

SEQ ID NO: 125568 - DNA, 13 bp, Artificial Sequence
  Oligonucleotide for detection of SNP TSC0031399
taacaaattcgta

SEQ ID NO: 125569 - DNA, 13 bp, Artificial Sequence
  Oligonucleotide for detection of SNP TSC0031399
tatgaaatcgtta

SEQ ID NO: 125570 - DNA, 13 bp, Artificial Sequence
  Oligonucleotide for detection of SNP TSC0031399
taacgatttcata

SEQ ID NO: 125571 - DNA, 13 bp, Artificial Sequence
  Oligonucleotide for detection of SNP TSC0031399
tatgaattcgtta

SEQ ID NO: 125572 - DNA, 13 bp, Artificial Sequence
  Oligonucleotide for detection of SNP TSC0031399
taacgaattcata

SEQ ID NO: 125573 - DNA, 13 bp, Artificial Sequence
  Oligonucleotide for detection of SNP TSC0031399
tacgaaatcgtta

SEQ ID NO: 125574 - DNA, 13 bp, Artificial Sequence
  Oligonucleotide for detection of SNP TSC0031399
taacgatttcgta

SEQ ID NO: 125575 - DNA, 13 bp, Artificial Sequence
  Oligonucleotide for detection of SNP TSC0031399
tacgaattcgtta

SEQ ID NO: 125576 - DNA, 13 bp, Artificial Sequence
  Oligonucleotide for detection of SNP TSC0031399
taacgaattcgta

SEQ ID NO: 125577 - DNA, 13 bp, Artificial Sequence
  Oligonucleotide for detection of SNP TSC0031399
tggtggttttgtg

SEQ ID NO: 125578 - DNA, 13 bp, Artificial Sequence
  Oligonucleotide for detection of SNP TSC0031399
cacaaaaccacca

SEQ ID NO: 125579 - DNA, 13 bp, Artificial Sequence
  Oligonucleotide for detection of SNP TSC0031399
tggtgggtttgtg

SEQ ID NO: 125580 - DNA, 13 bp, Artificial Sequence
  Oligonucleotide for detection of SNP TSC0031399
cacaaacccacca

SEQ ID NO: 125581 - DNA, 13 bp, Artificial Sequence
  Oligonucleotide for detection of SNP TSC0031399
tggcggttttgtg

SEQ ID NO: 125582 - DNA, 13 bp, Artificial Sequence
  Oligonucleotide for detection of SNP TSC0031399
cacaaaaccgcca

SEQ ID NO: 125583 - DNA, 13 bp, Artificial Sequence
  Oligonucleotide for detection of SNP TSC0031399
tggcgggtttgtg

SEQ ID NO: 125584 - DNA, 13 bp, Artificial Sequence
  Oligonucleotide for detection of SNP TSC0031399
cacaaacccgcca

SEQ ID NO: 125585 - DNA, 13 bp, Artificial Sequence
  Oligonucleotide for detection of SNP TSC0031399
tggtggtttcgtg

SEQ ID NO: 125586 - DNA, 13 bp, Artificial Sequence
  Oligonucleotide for detection of SNP TSC0031399
cacgaaaccacca

SEQ ID NO: 125587 - DNA, 13 bp, Artificial Sequence
  Oligonucleotide for detection of SNP TSC0031399
tggtgggttcgtg

SEQ ID NO: 125588 - DNA, 13 bp, Artificial Sequence
  Oligonucleotide for detection of SNP TSC0031399
cacgaacccacca

SEQ ID NO: 125589 - DNA, 13 bp, Artificial Sequence
  Oligonucleotide for detection of SNP TSC0031399
tggcggtttcgtg

SEQ ID NO: 125590 - DNA, 13 bp, Artificial Sequence
  Oligonucleotide for detection of SNP TSC0031399
cacgaaaccgcca

SEQ ID NO: 125591 - DNA, 13 bp, Artificial Sequence
  Oligonucleotide for detection of SNP TSC0031399
tggcgggttcgtg

SEQ ID NO: 125592 - DNA, 13 bp, Artificial Sequence
  Oligonucleotide for detection of SNP TSC0031399
cacgaacccgcca

SEQ ID NO: 125593 - DNA, 13 bp, Artificial Sequence
  Oligonucleotide for detection of SNP TSC0031402
agagtagttgttt

SEQ ID NO: 125594 - DNA, 13 bp, Artificial Sequence
  Oligonucleotide for detection of SNP TSC0031402
aaacaactactct

SEQ ID NO: 125595 - DNA, 13 bp, Artificial Sequence
  Oligonucleotide for detection of SNP TSC0031402
agagtatttgttt

SEQ ID NO: 125596 - DNA, 13 bp, Artificial Sequence
  Oligonucleotide for detection of SNP TSC0031402
aaacaaatactct

SEQ ID NO: 125597 - DNA, 13 bp, Artificial Sequence
  Oligonucleotide for detection of SNP TSC0031402
agataattatttt

SEQ ID NO: 125598 - DNA, 13 bp, Artificial Sequence
  Oligonucleotide for detection of SNP TSC0031402
aaaataattatct

SEQ ID NO: 125599 - DNA, 13 bp, Artificial Sequence
  Oligonucleotide for detection of SNP TSC0031402
agataaatatttt

SEQ ID NO: 125600 - DNA, 13 bp, Artificial Sequence
  Oligonucleotide for detection of SNP TSC0031402
aaaatatttatct

SEQ ID NO: 125601 - DNA, 13 bp, Artificial Sequence
  Oligonucleotide for detection of SNP TSC0031407
gaaggatgaagta

SEQ ID NO: 125602 - DNA, 13 bp, Artificial Sequence
  Oligonucleotide for detection of SNP TSC0031407
tacttcatccttc

SEQ ID NO: 125603 - DNA, 13 bp, Artificial Sequence
  Oligonucleotide for detection of SNP TSC0031407
gaaggaggaagta

SEQ ID NO: 125604 - DNA, 13 bp, Artificial Sequence
  Oligonucleotide for detection of SNP TSC0031407
tacttcctccttc

SEQ ID NO: 125605 - DNA, 13 bp, Artificial Sequence
  Oligonucleotide for detection of SNP TSC0031407
gaaggacgaagta

SEQ ID NO: 125606 - DNA, 13 bp, Artificial Sequence
  Oligonucleotide for detection of SNP TSC0031407
tacttcgtccttc

SEQ ID NO: 125607 - DNA, 13 bp, Artificial Sequence
  Oligonucleotide for detection of SNP TSC0031408
gggggagtgggaa

SEQ ID NO: 125608 - DNA, 13 bp, Artificial Sequence
  Oligonucleotide for detection of SNP TSC0031408
ttcccactccccc

SEQ ID NO: 125609 - DNA, 13 bp, Artificial Sequence
  Oligonucleotide for detection of SNP TSC0031408
gggggaatgggaa

SEQ ID NO: 125610 - DNA, 13 bp, Artificial Sequence
  Oligonucleotide for detection of SNP TSC0031408
ttcccattccccc

SEQ ID NO: 125611 - DNA, 13 bp, Artificial Sequence
  Oligonucleotide for detection of SNP TSC0031409
gtttgaagttttg

SEQ ID NO: 125612 - DNA, 13 bp, Artificial Sequence
  Oligonucleotide for detection of SNP TSC0031409
caaaacttcaaac

SEQ ID NO: 125613 - DNA, 13 bp, Artificial Sequence
  Oligonucleotide for detection of SNP TSC0031409
gtttgatgttttg

SEQ ID NO: 125614 - DNA, 13 bp, Artificial Sequence
  Oligonucleotide for detection of SNP TSC0031409
caaaacatcaaac

SEQ ID NO: 125615 - DNA, 13 bp, Artificial Sequence
  Oligonucleotide for detection of SNP TSC0031409
taagattttaagy

SEQ ID NO: 125616 - DNA, 13 bp, Artificial Sequence
  Oligonucleotide for detection of SNP TSC0031409
rcttaaaatctta

SEQ ID NO: 125617 - DNA, 13 bp, Artificial Sequence
  Oligonucleotide for detection of SNP TSC0031409
taagatattaagy

SEQ ID NO: 125618 - DNA, 13 bp, Artificial Sequence
  Oligonucleotide for detection of SNP TSC0031409
rcttaatatctta

SEQ ID NO: 125619 - DNA, 13 bp, Artificial Sequence
  Oligonucleotide for detection of SNP TSC0031412
aattttatttaty

SEQ ID NO: 125620 - DNA, 13 bp, Artificial Sequence
  Oligonucleotide for detection of SNP TSC0031412
rataaataaaatt

SEQ ID NO: 125621 - DNA, 13 bp, Artificial Sequence
  Oligonucleotide for detection of SNP TSC0031412
aattttttttaty

SEQ ID NO: 125622 - DNA, 13 bp, Artificial Sequence
  Oligonucleotide for detection of SNP TSC0031412
rataaaaaaaatt

SEQ ID NO: 125623 - DNA, 13 bp, Artificial Sequence
  Oligonucleotide for detection of SNP TSC0031412
ggtaaataaaatt

SEQ ID NO: 125624 - DNA, 13 bp, Artificial Sequence
  Oligonucleotide for detection of SNP TSC0031412
aattttatttacc

SEQ ID NO: 125625 - DNA, 13 bp, Artificial Sequence
  Oligonucleotide for detection of SNP TSC0031412
ggtaaaaaaaatt

SEQ ID NO: 125626 - DNA, 13 bp, Artificial Sequence
  Oligonucleotide for detection of SNP TSC0031412
aattttttttacc

SEQ ID NO: 125627 - DNA, 13 bp, Artificial Sequence
  Oligonucleotide for detection of SNP TSC0031413
ttttataggtgga

SEQ ID NO: 125628 - DNA, 13 bp, Artificial Sequence
  Oligonucleotide for detection of SNP TSC0031413
tccacctataaaa

SEQ ID NO: 125629 - DNA, 13 bp, Artificial Sequence
  Oligonucleotide for detection of SNP TSC0031413
ttttatgggtgga

SEQ ID NO: 125630 - DNA, 13 bp, Artificial Sequence
  Oligonucleotide for detection of SNP TSC0031413
tccacccataaaa

SEQ ID NO: 125631 - DNA, 13 bp, Artificial Sequence
  Oligonucleotide for detection of SNP TSC0031413
ttttacgggtgga

SEQ ID NO: 125632 - DNA, 13 bp, Artificial Sequence
  Oligonucleotide for detection of SNP TSC0031413
tccacccgtaaaa

SEQ ID NO: 125633 - DNA, 13 bp, Artificial Sequence
  Oligonucleotide for detection of SNP TSC0031413
tttatttgtgaga

SEQ ID NO: 125634 - DNA, 13 bp, Artificial Sequence
  Oligonucleotide for detection of SNP TSC0031413
tctcacaaataaa

SEQ ID NO: 125635 - DNA, 13 bp, Artificial Sequence
  Oligonucleotide for detection of SNP TSC0031413
tttattcgtgaga

SEQ ID NO: 125636 - DNA, 13 bp, Artificial Sequence
  Oligonucleotide for detection of SNP TSC0031413
tctcacgaataaa

SEQ ID NO: 125637 - DNA, 13 bp, Artificial Sequence
  Oligonucleotide for detection of SNP TSC0031414
tttggtattaaat

SEQ ID NO: 125638 - DNA, 13 bp, Artificial Sequence
  Oligonucleotide for detection of SNP TSC0031414
atttaataccaaa

SEQ ID NO: 125639 - DNA, 13 bp, Artificial Sequence
  Oligonucleotide for detection of SNP TSC0031414
tttggtgttaaat

SEQ ID NO: 125640 - DNA, 13 bp, Artificial Sequence
  Oligonucleotide for detection of SNP TSC0031414
atttaacaccaaa

SEQ ID NO: 125641 - DNA, 13 bp, Artificial Sequence
  Oligonucleotide for detection of SNP TSC0031416
tatatggatataa

SEQ ID NO: 125642 - DNA, 13 bp, Artificial Sequence
  Oligonucleotide for detection of SNP TSC0031416
ttatatccatata

SEQ ID NO: 125643 - DNA, 13 bp, Artificial Sequence
  Oligonucleotide for detection of SNP TSC0031416
tatatgaatataa

SEQ ID NO: 125644 - DNA, 13 bp, Artificial Sequence
  Oligonucleotide for detection of SNP TSC0031416
ttatattcatata

SEQ ID NO: 125645 - DNA, 13 bp, Artificial Sequence
  Oligonucleotide for detection of SNP TSC0031422
gtatttgtagtag

SEQ ID NO: 125646 - DNA, 13 bp, Artificial Sequence
  Oligonucleotide for detection of SNP TSC0031422
ctactacaaatac

SEQ ID NO: 125647 - DNA, 13 bp, Artificial Sequence
  Oligonucleotide for detection of SNP TSC0031422
gtatttttagtag

SEQ ID NO: 125648 - DNA, 13 bp, Artificial Sequence
  Oligonucleotide for detection of SNP TSC0031422
ctactaaaaatac

SEQ ID NO: 125649 - DNA, 13 bp, Artificial Sequence
  Oligonucleotide for detection of SNP TSC0031422
ttattataaatay

SEQ ID NO: 125650 - DNA, 13 bp, Artificial Sequence
  Oligonucleotide for detection of SNP TSC0031422
rtatttataataa

SEQ ID NO: 125651 - DNA, 13 bp, Artificial Sequence
  Oligonucleotide for detection of SNP TSC0031422
ttattaaaaatay

SEQ ID NO: 125652 - DNA, 13 bp, Artificial Sequence
  Oligonucleotide for detection of SNP TSC0031422
rtatttttaataa

SEQ ID NO: 125653 - DNA, 13 bp, Artificial Sequence
  Oligonucleotide for detection of SNP TSC0031424
tgatatagttttt

SEQ ID NO: 125654 - DNA, 13 bp, Artificial Sequence
  Oligonucleotide for detection of SNP TSC0031424
aaaaactatatca

SEQ ID NO: 125655 - DNA, 13 bp, Artificial Sequence
  Oligonucleotide for detection of SNP TSC0031424
tgatattgttttt

SEQ ID NO: 125656 - DNA, 13 bp, Artificial Sequence
  Oligonucleotide for detection of SNP TSC0031424
aaaaacaatatca

SEQ ID NO: 125657 - DNA, 13 bp, Artificial Sequence
  Oligonucleotide for detection of SNP TSC0031424
aggaattgtgtta

SEQ ID NO: 125658 - DNA, 13 bp, Artificial Sequence
  Oligonucleotide for detection of SNP TSC0031424
taacacaattcct

SEQ ID NO: 125659 - DNA, 13 bp, Artificial Sequence
  Oligonucleotide for detection of SNP TSC0031424
aggaatagtgtta

SEQ ID NO: 125660 - DNA, 13 bp, Artificial Sequence
  Oligonucleotide for detection of SNP TSC0031424
taacactattcct

SEQ ID NO: 125661 - DNA, 13 bp, Artificial Sequence
  Oligonucleotide for detection of SNP TSC0031425
gtgatatgatgat

SEQ ID NO: 125662 - DNA, 13 bp, Artificial Sequence
  Oligonucleotide for detection of SNP TSC0031425
atcatcatatcac

SEQ ID NO: 125663 - DNA, 13 bp, Artificial Sequence
  Oligonucleotide for detection of SNP TSC0031425
gtgatacgatgat

SEQ ID NO: 125664 - DNA, 13 bp, Artificial Sequence
  Oligonucleotide for detection of SNP TSC0031425
atcatcgtatcac

SEQ ID NO: 125665 - DNA, 13 bp, Artificial Sequence
  Oligonucleotide for detection of SNP TSC0031425
attattgtattay

SEQ ID NO: 125666 - DNA, 13 bp, Artificial Sequence
  Oligonucleotide for detection of SNP TSC0031425
rtaatacaataat

SEQ ID NO: 125667 - DNA, 13 bp, Artificial Sequence
  Oligonucleotide for detection of SNP TSC0031425
attattatattay

SEQ ID NO: 125668 - DNA, 13 bp, Artificial Sequence
  Oligonucleotide for detection of SNP TSC0031425
rtaatataataat

SEQ ID NO: 125669 - DNA, 13 bp, Artificial Sequence
  Oligonucleotide for detection of SNP TSC0031425
attatcgtattay

SEQ ID NO: 125670 - DNA, 13 bp, Artificial Sequence
  Oligonucleotide for detection of SNP TSC0031425
rtaatacgataat

SEQ ID NO: 125671 - DNA, 13 bp, Artificial Sequence
  Oligonucleotide for detection of SNP TSC0031426
gagtatttattta

SEQ ID NO: 125672 - DNA, 13 bp, Artificial Sequence
  Oligonucleotide for detection of SNP TSC0031426
taaataaatactc

SEQ ID NO: 125673 - DNA, 13 bp, Artificial Sequence
  Oligonucleotide for detection of SNP TSC0031426
gagtatgtattta

SEQ ID NO: 125674 - DNA, 13 bp, Artificial Sequence
  Oligonucleotide for detection of SNP TSC0031426
taaatacatactc

SEQ ID NO: 125675 - DNA, 13 bp, Artificial Sequence
  Oligonucleotide for detection of SNP TSC0031426
tgagtagatgtty

SEQ ID NO: 125676 - DNA, 13 bp, Artificial Sequence
  Oligonucleotide for detection of SNP TSC0031426
raacatctactca

SEQ ID NO: 125677 - DNA, 13 bp, Artificial Sequence
  Oligonucleotide for detection of SNP TSC0031426
tgagtatatgtty

SEQ ID NO: 125678 - DNA, 13 bp, Artificial Sequence
  Oligonucleotide for detection of SNP TSC0031426
raacatatactca

SEQ ID NO: 125679 - DNA, 13 bp, Artificial Sequence
  Oligonucleotide for detection of SNP TSC0031428
agttatattattt

SEQ ID NO: 125680 - DNA, 13 bp, Artificial Sequence
  Oligonucleotide for detection of SNP TSC0031428
aaataatataact

SEQ ID NO: 125681 - DNA, 13 bp, Artificial Sequence
  Oligonucleotide for detection of SNP TSC0031428
aagtggtgtagtt

SEQ ID NO: 125682 - DNA, 13 bp, Artificial Sequence
  Oligonucleotide for detection of SNP TSC0031428
aactacaccactt

SEQ ID NO: 125683 - DNA, 13 bp, Artificial Sequence
  Oligonucleotide for detection of SNP TSC0031428
aagtggggtagtt

SEQ ID NO: 125684 - DNA, 13 bp, Artificial Sequence
  Oligonucleotide for detection of SNP TSC0031428
aactaccccactt

SEQ ID NO: 125685 - DNA, 13 bp, Artificial Sequence
  Oligonucleotide for detection of SNP TSC0031432
tgggttgagttty

SEQ ID NO: 125686 - DNA, 13 bp, Artificial Sequence
  Oligonucleotide for detection of SNP TSC0031432
raaactcaaccca

SEQ ID NO: 125687 - DNA, 13 bp, Artificial Sequence
  Oligonucleotide for detection of SNP TSC0031432
tgggttaagttty

SEQ ID NO: 125688 - DNA, 13 bp, Artificial Sequence
  Oligonucleotide for detection of SNP TSC0031432
raaacttaaccca

SEQ ID NO: 125689 - DNA, 13 bp, Artificial Sequence
  Oligonucleotide for detection of SNP TSC0031433
tttttagattttt

SEQ ID NO: 125690 - DNA, 13 bp, Artificial Sequence
  Oligonucleotide for detection of SNP TSC0031433
aaaaatctaaaaa

SEQ ID NO: 125691 - DNA, 13 bp, Artificial Sequence
  Oligonucleotide for detection of SNP TSC0031434
atttgtggtttgt

SEQ ID NO: 125692 - DNA, 13 bp, Artificial Sequence
  Oligonucleotide for detection of SNP TSC0031434
acaaaccacaaat

SEQ ID NO: 125693 - DNA, 13 bp, Artificial Sequence
  Oligonucleotide for detection of SNP TSC0031434
atttgtagtttgt

SEQ ID NO: 125694 - DNA, 13 bp, Artificial Sequence
  Oligonucleotide for detection of SNP TSC0031434
acaaactacaaat

SEQ ID NO: 125695 - DNA, 13 bp, Artificial Sequence
  Oligonucleotide for detection of SNP TSC0031435
atgattttattta

SEQ ID NO: 125696 - DNA, 13 bp, Artificial Sequence
  Oligonucleotide for detection of SNP TSC0031435
taaataaaatcat

SEQ ID NO: 125697 - DNA, 13 bp, Artificial Sequence
  Oligonucleotide for detection of SNP TSC0031435
atgattgtattta

SEQ ID NO: 125698 - DNA, 13 bp, Artificial Sequence
  Oligonucleotide for detection of SNP TSC0031435
taaatacaatcat

SEQ ID NO: 125699 - DNA, 13 bp, Artificial Sequence
  Oligonucleotide for detection of SNP TSC0031435
tgaatagagttat

SEQ ID NO: 125700 - DNA, 13 bp, Artificial Sequence
  Oligonucleotide for detection of SNP TSC0031435
ataactctattca

SEQ ID NO: 125701 - DNA, 13 bp, Artificial Sequence
  Oligonucleotide for detection of SNP TSC0031435
tgaatatagttat

SEQ ID NO: 125702 - DNA, 13 bp, Artificial Sequence
  Oligonucleotide for detection of SNP TSC0031435
ataactatattca

SEQ ID NO: 125703 - DNA, 13 bp, Artificial Sequence
  Oligonucleotide for detection of SNP TSC0031437
ttgttttggtcgg

SEQ ID NO: 125704 - DNA, 13 bp, Artificial Sequence
  Oligonucleotide for detection of SNP TSC0031437
ccgaccaaaacaa

SEQ ID NO: 125705 - DNA, 13 bp, Artificial Sequence
  Oligonucleotide for detection of SNP TSC0031437
ttgtttgggtcgg

SEQ ID NO: 125706 - DNA, 13 bp, Artificial Sequence
  Oligonucleotide for detection of SNP TSC0031437
ccgacccaaacaa

SEQ ID NO: 125707 - DNA, 13 bp, Artificial Sequence
  Oligonucleotide for detection of SNP TSC0031437
ttgttcgggtcgg

SEQ ID NO: 125708 - DNA, 13 bp, Artificial Sequence
  Oligonucleotide for detection of SNP TSC0031437
ccgacccgaacaa

SEQ ID NO: 125709 - DNA, 13 bp, Artificial Sequence
  Oligonucleotide for detection of SNP TSC0031437
ttggtttgggtag

SEQ ID NO: 125710 - DNA, 13 bp, Artificial Sequence
  Oligonucleotide for detection of SNP TSC0031437
ctacccaaaccaa

SEQ ID NO: 125711 - DNA, 13 bp, Artificial Sequence
  Oligonucleotide for detection of SNP TSC0031437
ttggttagggtag

SEQ ID NO: 125712 - DNA, 13 bp, Artificial Sequence
  Oligonucleotide for detection of SNP TSC0031437
ctaccctaaccaa

SEQ ID NO: 125713 - DNA, 13 bp, Artificial Sequence
  Oligonucleotide for detection of SNP TSC0031437
tcggtttgggtag

SEQ ID NO: 125714 - DNA, 13 bp, Artificial Sequence
  Oligonucleotide for detection of SNP TSC0031437
ctacccaaaccga

SEQ ID NO: 125715 - DNA, 13 bp, Artificial Sequence
  Oligonucleotide for detection of SNP TSC0031437
tcggttagggtag

SEQ ID NO: 125716 - DNA, 13 bp, Artificial Sequence
  Oligonucleotide for detection of SNP TSC0031437
ctaccctaaccga

SEQ ID NO: 125717 - DNA, 13 bp, Artificial Sequence
  Oligonucleotide for detection of SNP TSC0031437
ttggttcgggtag

SEQ ID NO: 125718 - DNA, 13 bp, Artificial Sequence
  Oligonucleotide for detection of SNP TSC0031437
ctacccgaaccaa

SEQ ID NO: 125719 - DNA, 13 bp, Artificial Sequence
  Oligonucleotide for detection of SNP TSC0031437
tcggttcgggtag

SEQ ID NO: 125720 - DNA, 13 bp, Artificial Sequence
  Oligonucleotide for detection of SNP TSC0031437
ctacccgaaccga

SEQ ID NO: 125721 - DNA, 13 bp, Artificial Sequence
  Oligonucleotide for detection of SNP TSC0031438
ggtttttagtgtg

SEQ ID NO: 125722 - DNA, 13 bp, Artificial Sequence
  Oligonucleotide for detection of SNP TSC0031438
cacactaaaaacc

SEQ ID NO: 125723 - DNA, 13 bp, Artificial Sequence
  Oligonucleotide for detection of SNP TSC0031438
ggttttgagtgtg

SEQ ID NO: 125724 - DNA, 13 bp, Artificial Sequence
  Oligonucleotide for detection of SNP TSC0031438
cacactcaaaacc

SEQ ID NO: 125725 - DNA, 13 bp, Artificial Sequence
  Oligonucleotide for detection of SNP TSC0031438
ggtttttagtgcg

SEQ ID NO: 125726 - DNA, 13 bp, Artificial Sequence
  Oligonucleotide for detection of SNP TSC0031438
cgcactaaaaacc

SEQ ID NO: 125727 - DNA, 13 bp, Artificial Sequence
  Oligonucleotide for detection of SNP TSC0031438
ggtttcgagtgtg

SEQ ID NO: 125728 - DNA, 13 bp, Artificial Sequence
  Oligonucleotide for detection of SNP TSC0031438
cacactcgaaacc

SEQ ID NO: 125729 - DNA, 13 bp, Artificial Sequence
  Oligonucleotide for detection of SNP TSC0031438
ggttttgagtgcg

SEQ ID NO: 125730 - DNA, 13 bp, Artificial Sequence
  Oligonucleotide for detection of SNP TSC0031438
cgcactcaaaacc

SEQ ID NO: 125731 - DNA, 13 bp, Artificial Sequence
  Oligonucleotide for detection of SNP TSC0031438
ggtttcgagtgcg

SEQ ID NO: 125732 - DNA, 13 bp, Artificial Sequence
  Oligonucleotide for detection of SNP TSC0031438
cgcactcgaaacc

SEQ ID NO: 125733 - DNA, 13 bp, Artificial Sequence
  Oligonucleotide for detection of SNP TSC0031438
tgtattgggagty

SEQ ID NO: 125734 - DNA, 13 bp, Artificial Sequence
  Oligonucleotide for detection of SNP TSC0031438
ractcccaataca

SEQ ID NO: 125735 - DNA, 13 bp, Artificial Sequence
  Oligonucleotide for detection of SNP TSC0031438
tgtatttggagty

SEQ ID NO: 125736 - DNA, 13 bp, Artificial Sequence
  Oligonucleotide for detection of SNP TSC0031438
ractccaaataca

SEQ ID NO: 125737 - DNA, 13 bp, Artificial Sequence
  Oligonucleotide for detection of SNP TSC0031438
cgtattgggagty

SEQ ID NO: 125738 - DNA, 13 bp, Artificial Sequence
  Oligonucleotide for detection of SNP TSC0031438
ractcccaatacg

SEQ ID NO: 125739 - DNA, 13 bp, Artificial Sequence
  Oligonucleotide for detection of SNP TSC0031438
cgtatttggagty

SEQ ID NO: 125740 - DNA, 13 bp, Artificial Sequence
  Oligonucleotide for detection of SNP TSC0031438
ractccaaatacg

SEQ ID NO: 125741 - DNA, 13 bp, Artificial Sequence
  Oligonucleotide for detection of SNP TSC0031438
tgtattcggagty

SEQ ID NO: 125742 - DNA, 13 bp, Artificial Sequence
  Oligonucleotide for detection of SNP TSC0031438
ractccgaataca

SEQ ID NO: 125743 - DNA, 13 bp, Artificial Sequence
  Oligonucleotide for detection of SNP TSC0031438
cgtattcggagty

SEQ ID NO: 125744 - DNA, 13 bp, Artificial Sequence
  Oligonucleotide for detection of SNP TSC0031438
ractccgaatacg

SEQ ID NO: 125745 - DNA, 13 bp, Artificial Sequence
  Oligonucleotide for detection of SNP TSC0031439
ggtttgtgttttg

SEQ ID NO: 125746 - DNA, 13 bp, Artificial Sequence
  Oligonucleotide for detection of SNP TSC0031439
caaaacacaaacc

SEQ ID NO: 125747 - DNA, 13 bp, Artificial Sequence
  Oligonucleotide for detection of SNP TSC0031439
ggtttgggttttg

SEQ ID NO: 125748 - DNA, 13 bp, Artificial Sequence
  Oligonucleotide for detection of SNP TSC0031439
caaaacccaaacc

SEQ ID NO: 125749 - DNA, 13 bp, Artificial Sequence
  Oligonucleotide for detection of SNP TSC0031439
ggtttgcgttttg

SEQ ID NO: 125750 - DNA, 13 bp, Artificial Sequence
  Oligonucleotide for detection of SNP TSC0031439
caaaacgcaaacc

SEQ ID NO: 125751 - DNA, 13 bp, Artificial Sequence
  Oligonucleotide for detection of SNP TSC0031439
tagaatgtaggty

SEQ ID NO: 125752 - DNA, 13 bp, Artificial Sequence
  Oligonucleotide for detection of SNP TSC0031439
racctacattcta

SEQ ID NO: 125753 - DNA, 13 bp, Artificial Sequence
  Oligonucleotide for detection of SNP TSC0031439
tagaatttaggty

SEQ ID NO: 125754 - DNA, 13 bp, Artificial Sequence
  Oligonucleotide for detection of SNP TSC0031439
racctaaattcta

SEQ ID NO: 125755 - DNA, 13 bp, Artificial Sequence
  Oligonucleotide for detection of SNP TSC0031439
tagaacgtaggty

SEQ ID NO: 125756 - DNA, 13 bp, Artificial Sequence
  Oligonucleotide for detection of SNP TSC0031439
racctacgttcta

SEQ ID NO: 125757 - DNA, 13 bp, Artificial Sequence
  Oligonucleotide for detection of SNP TSC0031441
tgtttatttttty

SEQ ID NO: 125758 - DNA, 13 bp, Artificial Sequence
  Oligonucleotide for detection of SNP TSC0031441
raaaaaataaaca

SEQ ID NO: 125759 - DNA, 13 bp, Artificial Sequence
  Oligonucleotide for detection of SNP TSC0031441
gaaaagttggata

SEQ ID NO: 125760 - DNA, 13 bp, Artificial Sequence
  Oligonucleotide for detection of SNP TSC0031441
tatccaacttttc

SEQ ID NO: 125761 - DNA, 13 bp, Artificial Sequence
  Oligonucleotide for detection of SNP TSC0031441
gaaaaggtggata

SEQ ID NO: 125762 - DNA, 13 bp, Artificial Sequence
  Oligonucleotide for detection of SNP TSC0031441
tatccaccttttc

SEQ ID NO: 125763 - DNA, 13 bp, Artificial Sequence
  Oligonucleotide for detection of SNP TSC0031442
taatggatttggg

SEQ ID NO: 125764 - DNA, 13 bp, Artificial Sequence
  Oligonucleotide for detection of SNP TSC0031442
cccaaatccatta

SEQ ID NO: 125765 - DNA, 13 bp, Artificial Sequence
  Oligonucleotide for detection of SNP TSC0031442
taatggttttggg

SEQ ID NO: 125766 - DNA, 13 bp, Artificial Sequence
  Oligonucleotide for detection of SNP TSC0031442
cccaaaaccatta

SEQ ID NO: 125767 - DNA, 13 bp, Artificial Sequence
  Oligonucleotide for detection of SNP TSC0031442
tttaaatttattg

SEQ ID NO: 125768 - DNA, 13 bp, Artificial Sequence
  Oligonucleotide for detection of SNP TSC0031442
caataaatttaaa

SEQ ID NO: 125769 - DNA, 13 bp, Artificial Sequence
  Oligonucleotide for detection of SNP TSC0031442
tttaaaattattg

SEQ ID NO: 125770 - DNA, 13 bp, Artificial Sequence
  Oligonucleotide for detection of SNP TSC0031442
caataattttaaa

SEQ ID NO: 125771 - DNA, 13 bp, Artificial Sequence
  Oligonucleotide for detection of SNP TSC0031443
tttttttgaatgg

SEQ ID NO: 125772 - DNA, 13 bp, Artificial Sequence
  Oligonucleotide for detection of SNP TSC0031443
ccattcaaaaaaa

SEQ ID NO: 125773 - DNA, 13 bp, Artificial Sequence
  Oligonucleotide for detection of SNP TSC0031443
ttttttcgaatgg

SEQ ID NO: 125774 - DNA, 13 bp, Artificial Sequence
  Oligonucleotide for detection of SNP TSC0031443
ccattcgaaaaaa

SEQ ID NO: 125775 - DNA, 13 bp, Artificial Sequence
  Oligonucleotide for detection of SNP TSC0031443
ttatttggaggag

SEQ ID NO: 125776 - DNA, 13 bp, Artificial Sequence
  Oligonucleotide for detection of SNP TSC0031443
ctcctccaaataa

SEQ ID NO: 125777 - DNA, 13 bp, Artificial Sequence
  Oligonucleotide for detection of SNP TSC0031443
ttatttagaggag

SEQ ID NO: 125778 - DNA, 13 bp, Artificial Sequence
  Oligonucleotide for detection of SNP TSC0031443
ctcctctaaataa

SEQ ID NO: 125779 - DNA, 13 bp, Artificial Sequence
  Oligonucleotide for detection of SNP TSC0031443
ttattcggaggag

SEQ ID NO: 125780 - DNA, 13 bp, Artificial Sequence
  Oligonucleotide for detection of SNP TSC0031443
ctcctccgaataa

SEQ ID NO: 125781 - DNA, 13 bp, Artificial Sequence
  Oligonucleotide for detection of SNP TSC0031444
ttttgaaggttgg

SEQ ID NO: 125782 - DNA, 13 bp, Artificial Sequence
  Oligonucleotide for detection of SNP TSC0031444
ccaaccttcaaaa

SEQ ID NO: 125783 - DNA, 13 bp, Artificial Sequence
  Oligonucleotide for detection of SNP TSC0031444
ttagtttttagaa

SEQ ID NO: 125784 - DNA, 13 bp, Artificial Sequence
  Oligonucleotide for detection of SNP TSC0031444
ttctaaaaactaa

SEQ ID NO: 125785 - DNA, 13 bp, Artificial Sequence
  Oligonucleotide for detection of SNP TSC0031444
ttagttgttagaa

SEQ ID NO: 125786 - DNA, 13 bp, Artificial Sequence
  Oligonucleotide for detection of SNP TSC0031444
ttctaacaactaa

SEQ ID NO: 125787 - DNA, 13 bp, Artificial Sequence
  Oligonucleotide for detection of SNP TSC0031444
ttagtcgttagaa

SEQ ID NO: 125788 - DNA, 13 bp, Artificial Sequence
  Oligonucleotide for detection of SNP TSC0031444
ttctaacgactaa

SEQ ID NO: 125789 - DNA, 13 bp, Artificial Sequence
  Oligonucleotide for detection of SNP TSC0031445
tttttagtgggta

SEQ ID NO: 125790 - DNA, 13 bp, Artificial Sequence
  Oligonucleotide for detection of SNP TSC0031445
tacccactaaaaa

SEQ ID NO: 125791 - DNA, 13 bp, Artificial Sequence
  Oligonucleotide for detection of SNP TSC0031445
tttttaatgggta

SEQ ID NO: 125792 - DNA, 13 bp, Artificial Sequence
  Oligonucleotide for detection of SNP TSC0031445
tacccattaaaaa

SEQ ID NO: 125793 - DNA, 13 bp, Artificial Sequence
  Oligonucleotide for detection of SNP TSC0031448
gtatatagattgg

SEQ ID NO: 125794 - DNA, 13 bp, Artificial Sequence
  Oligonucleotide for detection of SNP TSC0031448
ccaatctatatac

SEQ ID NO: 125795 - DNA, 13 bp, Artificial Sequence
  Oligonucleotide for detection of SNP TSC0031448
gtatatggattgg

SEQ ID NO: 125796 - DNA, 13 bp, Artificial Sequence
  Oligonucleotide for detection of SNP TSC0031448
ccaatccatatac

SEQ ID NO: 125797 - DNA, 13 bp, Artificial Sequence
  Oligonucleotide for detection of SNP TSC0031448
gtatacggattgg

SEQ ID NO: 125798 - DNA, 13 bp, Artificial Sequence
  Oligonucleotide for detection of SNP TSC0031448
ccaatccgtatac

SEQ ID NO: 125799 - DNA, 13 bp, Artificial Sequence
  Oligonucleotide for detection of SNP TSC0031448
ttagtttgtgtay

SEQ ID NO: 125800 - DNA, 13 bp, Artificial Sequence
  Oligonucleotide for detection of SNP TSC0031448
rtacacaaactaa

SEQ ID NO: 125801 - DNA, 13 bp, Artificial Sequence
  Oligonucleotide for detection of SNP TSC0031448
ttagttcgtgtay

SEQ ID NO: 125802 - DNA, 13 bp, Artificial Sequence
  Oligonucleotide for detection of SNP TSC0031448
rtacacgaactaa

SEQ ID NO: 125803 - DNA, 13 bp, Artificial Sequence
  Oligonucleotide for detection of SNP TSC0031449
ggtggtggtttta

SEQ ID NO: 125804 - DNA, 13 bp, Artificial Sequence
  Oligonucleotide for detection of SNP TSC0031449
taaaaccaccacc

SEQ ID NO: 125805 - DNA, 13 bp, Artificial Sequence
  Oligonucleotide for detection of SNP TSC0031449
ggtggtagtttta

SEQ ID NO: 125806 - DNA, 13 bp, Artificial Sequence
  Oligonucleotide for detection of SNP TSC0031449
taaaactaccacc

SEQ ID NO: 125807 - DNA, 13 bp, Artificial Sequence
  Oligonucleotide for detection of SNP TSC0031451
tgtttaatttaaa

SEQ ID NO: 125808 - DNA, 13 bp, Artificial Sequence
  Oligonucleotide for detection of SNP TSC0031451
tttaaattaaaca

SEQ ID NO: 125809 - DNA, 13 bp, Artificial Sequence
  Oligonucleotide for detection of SNP TSC0031451
tgtttagtttaaa

SEQ ID NO: 125810 - DNA, 13 bp, Artificial Sequence
  Oligonucleotide for detection of SNP TSC0031451
tttaaactaaaca

SEQ ID NO: 125811 - DNA, 13 bp, Artificial Sequence
  Oligonucleotide for detection of SNP TSC0031455
aaaaaaagaattg

SEQ ID NO: 125812 - DNA, 13 bp, Artificial Sequence
  Oligonucleotide for detection of SNP TSC0031455
caattcttttttt

SEQ ID NO: 125813 - DNA, 13 bp, Artificial Sequence
  Oligonucleotide for detection of SNP TSC0031455
aaaaaaggaattg

SEQ ID NO: 125814 - DNA, 13 bp, Artificial Sequence
  Oligonucleotide for detection of SNP TSC0031455
caattcctttttt

SEQ ID NO: 125815 - DNA, 13 bp, Artificial Sequence
  Oligonucleotide for detection of SNP TSC0031456
gaatttagaaagy

SEQ ID NO: 125816 - DNA, 13 bp, Artificial Sequence
  Oligonucleotide for detection of SNP TSC0031456
rctttctaaattc

SEQ ID NO: 125817 - DNA, 13 bp, Artificial Sequence
  Oligonucleotide for detection of SNP TSC0031456
gaatttggaaagy

SEQ ID NO: 125818 - DNA, 13 bp, Artificial Sequence
  Oligonucleotide for detection of SNP TSC0031456
rctttccaaattc

SEQ ID NO: 125819 - DNA, 13 bp, Artificial Sequence
  Oligonucleotide for detection of SNP TSC0031456
gaattcggaaagy

SEQ ID NO: 125820 - DNA, 13 bp, Artificial Sequence
  Oligonucleotide for detection of SNP TSC0031456
rctttccgaattc

SEQ ID NO: 125821 - DNA, 13 bp, Artificial Sequence
  Oligonucleotide for detection of SNP TSC0031463
aaagggaaatata

SEQ ID NO: 125822 - DNA, 13 bp, Artificial Sequence
  Oligonucleotide for detection of SNP TSC0031463
tatatttcccttt

SEQ ID NO: 125823 - DNA, 13 bp, Artificial Sequence
  Oligonucleotide for detection of SNP TSC0031463
aaaggggaatata

SEQ ID NO: 125824 - DNA, 13 bp, Artificial Sequence
  Oligonucleotide for detection of SNP TSC0031463
tatattccccttt

SEQ ID NO: 125825 - DNA, 13 bp, Artificial Sequence
  Oligonucleotide for detection of SNP TSC0031464
gtggataagtaga

SEQ ID NO: 125826 - DNA, 13 bp, Artificial Sequence
  Oligonucleotide for detection of SNP TSC0031464
tctacttatccac

SEQ ID NO: 125827 - DNA, 13 bp, Artificial Sequence
  Oligonucleotide for detection of SNP TSC0031464
gtggatgagtaga

SEQ ID NO: 125828 - DNA, 13 bp, Artificial Sequence
  Oligonucleotide for detection of SNP TSC0031464
tctactcatccac

SEQ ID NO: 125829 - DNA, 13 bp, Artificial Sequence
  Oligonucleotide for detection of SNP TSC0031465
atataaattttgy

SEQ ID NO: 125830 - DNA, 13 bp, Artificial Sequence
  Oligonucleotide for detection of SNP TSC0031465
rcaaaatttatat

SEQ ID NO: 125831 - DNA, 13 bp, Artificial Sequence
  Oligonucleotide for detection of SNP TSC0031465
atataatttttgy

SEQ ID NO: 125832 - DNA, 13 bp, Artificial Sequence
  Oligonucleotide for detection of SNP TSC0031465
rcaaaaattatat

SEQ ID NO: 125833 - DNA, 13 bp, Artificial Sequence
  Oligonucleotide for detection of SNP TSC0031465
gtagggtttatgt

SEQ ID NO: 125834 - DNA, 13 bp, Artificial Sequence
  Oligonucleotide for detection of SNP TSC0031465
acataaaccctac

SEQ ID NO: 125835 - DNA, 13 bp, Artificial Sequence
  Oligonucleotide for detection of SNP TSC0031465
gtaggggttatgt

SEQ ID NO: 125836 - DNA, 13 bp, Artificial Sequence
  Oligonucleotide for detection of SNP TSC0031465
acataacccctac

SEQ ID NO: 125837 - DNA, 13 bp, Artificial Sequence
  Oligonucleotide for detection of SNP TSC0031466
gtttaagttgtag

SEQ ID NO: 125838 - DNA, 13 bp, Artificial Sequence
  Oligonucleotide for detection of SNP TSC0031466
ctacaacttaaac

SEQ ID NO: 125839 - DNA, 13 bp, Artificial Sequence
  Oligonucleotide for detection of SNP TSC0031466
gtttaaattgtag

SEQ ID NO: 125840 - DNA, 13 bp, Artificial Sequence
  Oligonucleotide for detection of SNP TSC0031466
ctacaatttaaac

SEQ ID NO: 125841 - DNA, 13 bp, Artificial Sequence
  Oligonucleotide for detection of SNP TSC0031467
tggggtgtaaggg

SEQ ID NO: 125842 - DNA, 13 bp, Artificial Sequence
  Oligonucleotide for detection of SNP TSC0031467
cccttacacccca

SEQ ID NO: 125843 - DNA, 13 bp, Artificial Sequence
  Oligonucleotide for detection of SNP TSC0031467
tggggtataaggg

SEQ ID NO: 125844 - DNA, 13 bp, Artificial Sequence
  Oligonucleotide for detection of SNP TSC0031467
cccttatacccca

SEQ ID NO: 125845 - DNA, 13 bp, Artificial Sequence
  Oligonucleotide for detection of SNP TSC0031467
tggggcgtaaggg

SEQ ID NO: 125846 - DNA, 13 bp, Artificial Sequence
  Oligonucleotide for detection of SNP TSC0031467
cccttacgcccca

SEQ ID NO: 125847 - DNA, 13 bp, Artificial Sequence
  Oligonucleotide for detection of SNP TSC0031469
aaggaggaggtag

SEQ ID NO: 125848 - DNA, 13 bp, Artificial Sequence
  Oligonucleotide for detection of SNP TSC0031469
ctacctcctcctt

SEQ ID NO: 125849 - DNA, 13 bp, Artificial Sequence
  Oligonucleotide for detection of SNP TSC0031469
aaggagaaggtag

SEQ ID NO: 125850 - DNA, 13 bp, Artificial Sequence
  Oligonucleotide for detection of SNP TSC0031469
ctaccttctcctt

SEQ ID NO: 125851 - DNA, 13 bp, Artificial Sequence
  Oligonucleotide for detection of SNP TSC0031470
ataaatgatagtg

SEQ ID NO: 125852 - DNA, 13 bp, Artificial Sequence
  Oligonucleotide for detection of SNP TSC0031470
cactatcatttat

SEQ ID NO: 125853 - DNA, 13 bp, Artificial Sequence
  Oligonucleotide for detection of SNP TSC0031470
ataaattatagtg

SEQ ID NO: 125854 - DNA, 13 bp, Artificial Sequence
  Oligonucleotide for detection of SNP TSC0031470
cactataatttat

SEQ ID NO: 125855 - DNA, 13 bp, Artificial Sequence
  Oligonucleotide for detection of SNP TSC0031470
tattgttatttat

SEQ ID NO: 125856 - DNA, 13 bp, Artificial Sequence
  Oligonucleotide for detection of SNP TSC0031470
ataaataacaata

SEQ ID NO: 125857 - DNA, 13 bp, Artificial Sequence
  Oligonucleotide for detection of SNP TSC0031470
tattgtaatttat

SEQ ID NO: 125858 - DNA, 13 bp, Artificial Sequence
  Oligonucleotide for detection of SNP TSC0031470
ataaattacaata

SEQ ID NO: 125859 - DNA, 13 bp, Artificial Sequence
  Oligonucleotide for detection of SNP TSC0031476
taggaggttagag

SEQ ID NO: 125860 - DNA, 13 bp, Artificial Sequence
  Oligonucleotide for detection of SNP TSC0031476
ctctaacctccta

SEQ ID NO: 125861 - DNA, 13 bp, Artificial Sequence
  Oligonucleotide for detection of SNP TSC0031476
taggagattagag

SEQ ID NO: 125862 - DNA, 13 bp, Artificial Sequence
  Oligonucleotide for detection of SNP TSC0031476
ctctaatctccta

SEQ ID NO: 125863 - DNA, 13 bp, Artificial Sequence
  Oligonucleotide for detection of SNP TSC0031477
gggtaggtgtttt

SEQ ID NO: 125864 - DNA, 13 bp, Artificial Sequence
  Oligonucleotide for detection of SNP TSC0031477
aaaacacctaccc

SEQ ID NO: 125865 - DNA, 13 bp, Artificial Sequence
  Oligonucleotide for detection of SNP TSC0031477
gggtagttgtttt

SEQ ID NO: 125866 - DNA, 13 bp, Artificial Sequence
  Oligonucleotide for detection of SNP TSC0031477
aaaacaactaccc

SEQ ID NO: 125867 - DNA, 13 bp, Artificial Sequence
  Oligonucleotide for detection of SNP TSC0031477
aaggtatttgtty

SEQ ID NO: 125868 - DNA, 13 bp, Artificial Sequence
  Oligonucleotide for detection of SNP TSC0031477
raacaaatacctt

SEQ ID NO: 125869 - DNA, 13 bp, Artificial Sequence
  Oligonucleotide for detection of SNP TSC0031477
aaggtaattgtty

SEQ ID NO: 125870 - DNA, 13 bp, Artificial Sequence
  Oligonucleotide for detection of SNP TSC0031477
raacaattacctt

SEQ ID NO: 125871 - DNA, 13 bp, Artificial Sequence
  Oligonucleotide for detection of SNP TSC0031478
aggaggtggaggt

SEQ ID NO: 125872 - DNA, 13 bp, Artificial Sequence
  Oligonucleotide for detection of SNP TSC0031478
acctccacctcct

SEQ ID NO: 125873 - DNA, 13 bp, Artificial Sequence
  Oligonucleotide for detection of SNP TSC0031478
aggaggcggaggt

SEQ ID NO: 125874 - DNA, 13 bp, Artificial Sequence
  Oligonucleotide for detection of SNP TSC0031478
acctccgcctcct

SEQ ID NO: 125875 - DNA, 13 bp, Artificial Sequence
  Oligonucleotide for detection of SNP TSC0031483
tagatattgggaa

SEQ ID NO: 125876 - DNA, 13 bp, Artificial Sequence
  Oligonucleotide for detection of SNP TSC0031483
ttcccaatatcta

SEQ ID NO: 125877 - DNA, 13 bp, Artificial Sequence
  Oligonucleotide for detection of SNP TSC0031483
tagatagtgggaa

SEQ ID NO: 125878 - DNA, 13 bp, Artificial Sequence
  Oligonucleotide for detection of SNP TSC0031483
ttcccactatcta

SEQ ID NO: 125879 - DNA, 13 bp, Artificial Sequence
  Oligonucleotide for detection of SNP TSC0031483
tttttagtgtttg

SEQ ID NO: 125880 - DNA, 13 bp, Artificial Sequence
  Oligonucleotide for detection of SNP TSC0031483
caaacactaaaaa

SEQ ID NO: 125881 - DNA, 13 bp, Artificial Sequence
  Oligonucleotide for detection of SNP TSC0031483
tttttattgtttg

SEQ ID NO: 125882 - DNA, 13 bp, Artificial Sequence
  Oligonucleotide for detection of SNP TSC0031483
caaacaataaaaa

SEQ ID NO: 125883 - DNA, 13 bp, Artificial Sequence
  Oligonucleotide for detection of SNP TSC0031485
tttagtagtattt

SEQ ID NO: 125884 - DNA, 13 bp, Artificial Sequence
  Oligonucleotide for detection of SNP TSC0031485
aaatactactaaa

SEQ ID NO: 125885 - DNA, 13 bp, Artificial Sequence
  Oligonucleotide for detection of SNP TSC0031485
tttagtggtattt

SEQ ID NO: 125886 - DNA, 13 bp, Artificial Sequence
  Oligonucleotide for detection of SNP TSC0031485
aaataccactaaa

SEQ ID NO: 125887 - DNA, 13 bp, Artificial Sequence
  Oligonucleotide for detection of SNP TSC0031485
tttagcggtattt

SEQ ID NO: 125888 - DNA, 13 bp, Artificial Sequence
  Oligonucleotide for detection of SNP TSC0031485
aaataccgctaaa

SEQ ID NO: 125889 - DNA, 13 bp, Artificial Sequence
  Oligonucleotide for detection of SNP TSC0031485
agatgttgttggg

SEQ ID NO: 125890 - DNA, 13 bp, Artificial Sequence
  Oligonucleotide for detection of SNP TSC0031485
cccaacaacatct

SEQ ID NO: 125891 - DNA, 13 bp, Artificial Sequence
  Oligonucleotide for detection of SNP TSC0031485
agatgtcgttggg

SEQ ID NO: 125892 - DNA, 13 bp, Artificial Sequence
  Oligonucleotide for detection of SNP TSC0031485
cccaacgacatct

SEQ ID NO: 125893 - DNA, 13 bp, Artificial Sequence
  Oligonucleotide for detection of SNP TSC0031492
tgggaagatggat

SEQ ID NO: 125894 - DNA, 13 bp, Artificial Sequence
  Oligonucleotide for detection of SNP TSC0031492
atccatcttccca

SEQ ID NO: 125895 - DNA, 13 bp, Artificial Sequence
  Oligonucleotide for detection of SNP TSC0031492
tgggaatatggat

SEQ ID NO: 125896 - DNA, 13 bp, Artificial Sequence
  Oligonucleotide for detection of SNP TSC0031492
atccatattccca

SEQ ID NO: 125897 - DNA, 13 bp, Artificial Sequence
  Oligonucleotide for detection of SNP TSC0031493
tttgttatttggg

SEQ ID NO: 125898 - DNA, 13 bp, Artificial Sequence
  Oligonucleotide for detection of SNP TSC0031493
cccaaataacaaa

SEQ ID NO: 125899 - DNA, 13 bp, Artificial Sequence
  Oligonucleotide for detection of SNP TSC0031493
tttgttgtttggg

SEQ ID NO: 125900 - DNA, 13 bp, Artificial Sequence
  Oligonucleotide for detection of SNP TSC0031493
cccaaacaacaaa

SEQ ID NO: 125901 - DNA, 13 bp, Artificial Sequence
  Oligonucleotide for detection of SNP TSC0031496
tttataagggtga

SEQ ID NO: 125902 - DNA, 13 bp, Artificial Sequence
  Oligonucleotide for detection of SNP TSC0031496
tcacccttataaa

SEQ ID NO: 125903 - DNA, 13 bp, Artificial Sequence
  Oligonucleotide for detection of SNP TSC0031496
tttataggggtga

SEQ ID NO: 125904 - DNA, 13 bp, Artificial Sequence
  Oligonucleotide for detection of SNP TSC0031496
tcacccctataaa

SEQ ID NO: 125905 - DNA, 13 bp, Artificial Sequence
  Oligonucleotide for detection of SNP TSC0031497
tggattaagtaga

SEQ ID NO: 125906 - DNA, 13 bp, Artificial Sequence
  Oligonucleotide for detection of SNP TSC0031497
tctacttaatcca

SEQ ID NO: 125907 - DNA, 13 bp, Artificial Sequence
  Oligonucleotide for detection of SNP TSC0031497
tggattgagtaga

SEQ ID NO: 125908 - DNA, 13 bp, Artificial Sequence
  Oligonucleotide for detection of SNP TSC0031497
tctactcaatcca

SEQ ID NO: 125909 - DNA, 13 bp, Artificial Sequence
  Oligonucleotide for detection of SNP TSC0031497
tggatcgagtaga

SEQ ID NO: 125910 - DNA, 13 bp, Artificial Sequence
  Oligonucleotide for detection of SNP TSC0031497
tctactcgatcca

SEQ ID NO: 125911 - DNA, 13 bp, Artificial Sequence
  Oligonucleotide for detection of SNP TSC0031498
tagaagggataga

SEQ ID NO: 125912 - DNA, 13 bp, Artificial Sequence
  Oligonucleotide for detection of SNP TSC0031498
tctatcccttcta

SEQ ID NO: 125913 - DNA, 13 bp, Artificial Sequence
  Oligonucleotide for detection of SNP TSC0031498
tagaagagataga

SEQ ID NO: 125914 - DNA, 13 bp, Artificial Sequence
  Oligonucleotide for detection of SNP TSC0031498
tctatctcttcta

SEQ ID NO: 125915 - DNA, 13 bp, Artificial Sequence
  Oligonucleotide for detection of SNP TSC0031499
ttgggaagaggat

SEQ ID NO: 125916 - DNA, 13 bp, Artificial Sequence
  Oligonucleotide for detection of SNP TSC0031499
atcctcttcccaa

SEQ ID NO: 125917 - DNA, 13 bp, Artificial Sequence
  Oligonucleotide for detection of SNP TSC0031499
ttgggaggaggat

SEQ ID NO: 125918 - DNA, 13 bp, Artificial Sequence
  Oligonucleotide for detection of SNP TSC0031499
atcctcctcccaa

SEQ ID NO: 125919 - DNA, 13 bp, Artificial Sequence
  Oligonucleotide for detection of SNP TSC0031500
agattgtaatagy

SEQ ID NO: 125920 - DNA, 13 bp, Artificial Sequence
  Oligonucleotide for detection of SNP TSC0031500
rctattacaatct

SEQ ID NO: 125921 - DNA, 13 bp, Artificial Sequence
  Oligonucleotide for detection of SNP TSC0031500
agattggaatagy

SEQ ID NO: 125922 - DNA, 13 bp, Artificial Sequence
  Oligonucleotide for detection of SNP TSC0031500
rctattccaatct

SEQ ID NO: 125923 - DNA, 13 bp, Artificial Sequence
  Oligonucleotide for detection of SNP TSC0031500
gttgttgtaattt

SEQ ID NO: 125924 - DNA, 13 bp, Artificial Sequence
  Oligonucleotide for detection of SNP TSC0031500
aaattacaacaac

SEQ ID NO: 125925 - DNA, 13 bp, Artificial Sequence
  Oligonucleotide for detection of SNP TSC0031500
gttgttttaattt

SEQ ID NO: 125926 - DNA, 13 bp, Artificial Sequence
  Oligonucleotide for detection of SNP TSC0031500
aaattaaaacaac

SEQ ID NO: 125927 - DNA, 13 bp, Artificial Sequence
  Oligonucleotide for detection of SNP TSC0031503
gtaatgatttatt

SEQ ID NO: 125928 - DNA, 13 bp, Artificial Sequence
  Oligonucleotide for detection of SNP TSC0031503
aataaatcattac

SEQ ID NO: 125929 - DNA, 13 bp, Artificial Sequence
  Oligonucleotide for detection of SNP TSC0031503
gtaatggtttatt

SEQ ID NO: 125930 - DNA, 13 bp, Artificial Sequence
  Oligonucleotide for detection of SNP TSC0031503
aataaaccattac

SEQ ID NO: 125931 - DNA, 13 bp, Artificial Sequence
  Oligonucleotide for detection of SNP TSC0031504
tttgaatggaagg

SEQ ID NO: 125932 - DNA, 13 bp, Artificial Sequence
  Oligonucleotide for detection of SNP TSC0031504
ccttccattcaaa

SEQ ID NO: 125933 - DNA, 13 bp, Artificial Sequence
  Oligonucleotide for detection of SNP TSC0031504
tttgaacggaagg

SEQ ID NO: 125934 - DNA, 13 bp, Artificial Sequence
  Oligonucleotide for detection of SNP TSC0031504
ccttccgttcaaa

SEQ ID NO: 125935 - DNA, 13 bp, Artificial Sequence
  Oligonucleotide for detection of SNP TSC0031505
taatttgaattty

SEQ ID NO: 125936 - DNA, 13 bp, Artificial Sequence
  Oligonucleotide for detection of SNP TSC0031505
raaattcaaatta

SEQ ID NO: 125937 - DNA, 13 bp, Artificial Sequence
  Oligonucleotide for detection of SNP TSC0031505
taatttaaattty

SEQ ID NO: 125938 - DNA, 13 bp, Artificial Sequence
  Oligonucleotide for detection of SNP TSC0031505
raaatttaaatta

SEQ ID NO: 125939 - DNA, 13 bp, Artificial Sequence
  Oligonucleotide for detection of SNP TSC0031508
gttaggagttcgy

SEQ ID NO: 125940 - DNA, 13 bp, Artificial Sequence
  Oligonucleotide for detection of SNP TSC0031508
rcgaactcctaac

SEQ ID NO: 125941 - DNA, 13 bp, Artificial Sequence
  Oligonucleotide for detection of SNP TSC0031508
gttaggggttcgy

SEQ ID NO: 125942 - DNA, 13 bp, Artificial Sequence
  Oligonucleotide for detection of SNP TSC0031508
rcgaacccctaac

SEQ ID NO: 125943 - DNA, 13 bp, Artificial Sequence
  Oligonucleotide for detection of SNP TSC0031510
tattaggtttagy

SEQ ID NO: 125944 - DNA, 13 bp, Artificial Sequence
  Oligonucleotide for detection of SNP TSC0031510
rctaaacctaata

SEQ ID NO: 125945 - DNA, 13 bp, Artificial Sequence
  Oligonucleotide for detection of SNP TSC0031510
tattagatttagy

SEQ ID NO: 125946 - DNA, 13 bp, Artificial Sequence
  Oligonucleotide for detection of SNP TSC0031510
rctaaatctaata

SEQ ID NO: 125947 - DNA, 13 bp, Artificial Sequence
  Oligonucleotide for detection of SNP TSC0031516
ttagaggttatgg

SEQ ID NO: 125948 - DNA, 13 bp, Artificial Sequence
  Oligonucleotide for detection of SNP TSC0031516
ccataacctctaa

SEQ ID NO: 125949 - DNA, 13 bp, Artificial Sequence
  Oligonucleotide for detection of SNP TSC0031516
ttagagtttatgg

SEQ ID NO: 125950 - DNA, 13 bp, Artificial Sequence
  Oligonucleotide for detection of SNP TSC0031516
ccataaactctaa

SEQ ID NO: 125951 - DNA, 13 bp, Artificial Sequence
  Oligonucleotide for detection of SNP TSC0031516
ttatagtttttga

SEQ ID NO: 125952 - DNA, 13 bp, Artificial Sequence
  Oligonucleotide for detection of SNP TSC0031516
tcaaaaactataa

SEQ ID NO: 125953 - DNA, 13 bp, Artificial Sequence
  Oligonucleotide for detection of SNP TSC0031516
ttatagattttga

SEQ ID NO: 125954 - DNA, 13 bp, Artificial Sequence
  Oligonucleotide for detection of SNP TSC0031516
tcaaaatctataa

SEQ ID NO: 125955 - DNA, 13 bp, Artificial Sequence
  Oligonucleotide for detection of SNP TSC0031517
gagagagagatag

SEQ ID NO: 125956 - DNA, 13 bp, Artificial Sequence
  Oligonucleotide for detection of SNP TSC0031517
ctatctctctctc

SEQ ID NO: 125957 - DNA, 13 bp, Artificial Sequence
  Oligonucleotide for detection of SNP TSC0031517
gagagatagatag

SEQ ID NO: 125958 - DNA, 13 bp, Artificial Sequence
  Oligonucleotide for detection of SNP TSC0031517
ctatctatctctc

SEQ ID NO: 125959 - DNA, 13 bp, Artificial Sequence
  Oligonucleotide for detection of SNP TSC0031518
gtggttgtagaag

SEQ ID NO: 125960 - DNA, 13 bp, Artificial Sequence
  Oligonucleotide for detection of SNP TSC0031518
cttctacaaccac

SEQ ID NO: 125961 - DNA, 13 bp, Artificial Sequence
  Oligonucleotide for detection of SNP TSC0031518
gtggttatagaag

SEQ ID NO: 125962 - DNA, 13 bp, Artificial Sequence
  Oligonucleotide for detection of SNP TSC0031518
cttctataaccac

SEQ ID NO: 125963 - DNA, 13 bp, Artificial Sequence
  Oligonucleotide for detection of SNP TSC0031518
gtggtcgtagaag

SEQ ID NO: 125964 - DNA, 13 bp, Artificial Sequence
  Oligonucleotide for detection of SNP TSC0031518
cttctacgaccac

SEQ ID NO: 125965 - DNA, 13 bp, Artificial Sequence
  Oligonucleotide for detection of SNP TSC0031519
aatttgtgaggta

SEQ ID NO: 125966 - DNA, 13 bp, Artificial Sequence
  Oligonucleotide for detection of SNP TSC0031519
tacctcacaaatt

SEQ ID NO: 125967 - DNA, 13 bp, Artificial Sequence
  Oligonucleotide for detection of SNP TSC0031519
aatttgcgaggta

SEQ ID NO: 125968 - DNA, 13 bp, Artificial Sequence
  Oligonucleotide for detection of SNP TSC0031519
tacctcgcaaatt

SEQ ID NO: 125969 - DNA, 13 bp, Artificial Sequence
  Oligonucleotide for detection of SNP TSC0031519
tgtttcgtaggtt

SEQ ID NO: 125970 - DNA, 13 bp, Artificial Sequence
  Oligonucleotide for detection of SNP TSC0031519
aacctacgaaaca

SEQ ID NO: 125971 - DNA, 13 bp, Artificial Sequence
  Oligonucleotide for detection of SNP TSC0031520
gatgttatagtta

SEQ ID NO: 125972 - DNA, 13 bp, Artificial Sequence
  Oligonucleotide for detection of SNP TSC0031520
taactataacatc

SEQ ID NO: 125973 - DNA, 13 bp, Artificial Sequence
  Oligonucleotide for detection of SNP TSC0031520
gatgttgtagtta

SEQ ID NO: 125974 - DNA, 13 bp, Artificial Sequence
  Oligonucleotide for detection of SNP TSC0031520
taactacaacatc

SEQ ID NO: 125975 - DNA, 13 bp, Artificial Sequence
  Oligonucleotide for detection of SNP TSC0031520
gatgtcgtagtta

SEQ ID NO: 125976 - DNA, 13 bp, Artificial Sequence
  Oligonucleotide for detection of SNP TSC0031520
taactacgacatc

SEQ ID NO: 125977 - DNA, 13 bp, Artificial Sequence
  Oligonucleotide for detection of SNP TSC0031520
taattatgataty

SEQ ID NO: 125978 - DNA, 13 bp, Artificial Sequence
  Oligonucleotide for detection of SNP TSC0031520
ratatcataatta

SEQ ID NO: 125979 - DNA, 13 bp, Artificial Sequence
  Oligonucleotide for detection of SNP TSC0031520
taattacgataty

SEQ ID NO: 125980 - DNA, 13 bp, Artificial Sequence
  Oligonucleotide for detection of SNP TSC0031520
ratatcgtaatta

SEQ ID NO: 125981 - DNA, 13 bp, Artificial Sequence
  Oligonucleotide for detection of SNP TSC0031523
tttagtttgggtg

SEQ ID NO: 125982 - DNA, 13 bp, Artificial Sequence
  Oligonucleotide for detection of SNP TSC0031523
cacccaaactaaa

SEQ ID NO: 125983 - DNA, 13 bp, Artificial Sequence
  Oligonucleotide for detection of SNP TSC0031523
tttagtttgggcg

SEQ ID NO: 125984 - DNA, 13 bp, Artificial Sequence
  Oligonucleotide for detection of SNP TSC0031523
cgcccaaactaaa

SEQ ID NO: 125985 - DNA, 13 bp, Artificial Sequence
  Oligonucleotide for detection of SNP TSC0031523
tttagtgtgggcg

SEQ ID NO: 125986 - DNA, 13 bp, Artificial Sequence
  Oligonucleotide for detection of SNP TSC0031523
cgcccacactaaa

SEQ ID NO: 125987 - DNA, 13 bp, Artificial Sequence
  Oligonucleotide for detection of SNP TSC0031523
tttagcgtgggcg

SEQ ID NO: 125988 - DNA, 13 bp, Artificial Sequence
  Oligonucleotide for detection of SNP TSC0031523
cgcccacgctaaa

SEQ ID NO: 125989 - DNA, 13 bp, Artificial Sequence
  Oligonucleotide for detection of SNP TSC0031523
cgtttaggttgaa

SEQ ID NO: 125990 - DNA, 13 bp, Artificial Sequence
  Oligonucleotide for detection of SNP TSC0031523
ttcaacctaaacg

SEQ ID NO: 125991 - DNA, 13 bp, Artificial Sequence
  Oligonucleotide for detection of SNP TSC0031523
cgtttatgttgaa

SEQ ID NO: 125992 - DNA, 13 bp, Artificial Sequence
  Oligonucleotide for detection of SNP TSC0031523
ttcaacataaacg

SEQ ID NO: 125993 - DNA, 13 bp, Artificial Sequence
  Oligonucleotide for detection of SNP TSC0031523
tgtttacgttgaa

SEQ ID NO: 125994 - DNA, 13 bp, Artificial Sequence
  Oligonucleotide for detection of SNP TSC0031523
ttcaacgtaaaca

SEQ ID NO: 125995 - DNA, 13 bp, Artificial Sequence
  Oligonucleotide for detection of SNP TSC0031523
cgtttacgttgaa

SEQ ID NO: 125996 - DNA, 13 bp, Artificial Sequence
  Oligonucleotide for detection of SNP TSC0031523
ttcaacgtaaacg

SEQ ID NO: 125997 - DNA, 13 bp, Artificial Sequence
  Oligonucleotide for detection of SNP TSC0031524
atttatattgaaa

SEQ ID NO: 125998 - DNA, 13 bp, Artificial Sequence
  Oligonucleotide for detection of SNP TSC0031524
tttcaatataaat

SEQ ID NO: 125999 - DNA, 13 bp, Artificial Sequence
  Oligonucleotide for detection of SNP TSC0031524
atttacgttgaaa

SEQ ID NO: 126000 - DNA, 13 bp, Artificial Sequence
  Oligonucleotide for detection of SNP TSC0031524
tttcaacgtaaat

SEQ ID NO: 126001 - DNA, 13 bp, Artificial Sequence
  Oligonucleotide for detection of SNP TSC0031524
ttttaatgtaggt

SEQ ID NO: 126002 - DNA, 13 bp, Artificial Sequence
  Oligonucleotide for detection of SNP TSC0031524
acctacattaaaa

SEQ ID NO: 126003 - DNA, 13 bp, Artificial Sequence
  Oligonucleotide for detection of SNP TSC0031524
ttttaacgtaggt

SEQ ID NO: 126004 - DNA, 13 bp, Artificial Sequence
  Oligonucleotide for detection of SNP TSC0031524
acctacgttaaaa

SEQ ID NO: 126005 - DNA, 13 bp, Artificial Sequence
  Oligonucleotide for detection of SNP TSC0031525
ttaattattgttt

SEQ ID NO: 126006 - DNA, 13 bp, Artificial Sequence
  Oligonucleotide for detection of SNP TSC0031525
aaacaataattaa

SEQ ID NO: 126007 - DNA, 13 bp, Artificial Sequence
  Oligonucleotide for detection of SNP TSC0031525
ttaattgttgttt

SEQ ID NO: 126008 - DNA, 13 bp, Artificial Sequence
  Oligonucleotide for detection of SNP TSC0031525
aaacaacaattaa

SEQ ID NO: 126009 - DNA, 13 bp, Artificial Sequence
  Oligonucleotide for detection of SNP TSC0031525
ttaatcgttgttt

SEQ ID NO: 126010 - DNA, 13 bp, Artificial Sequence
  Oligonucleotide for detection of SNP TSC0031525
aaacaacgattaa

SEQ ID NO: 126011 - DNA, 13 bp, Artificial Sequence
  Oligonucleotide for detection of SNP TSC0031525
agataatgattga

SEQ ID NO: 126012 - DNA, 13 bp, Artificial Sequence
  Oligonucleotide for detection of SNP TSC0031525
tcaatcattatct

SEQ ID NO: 126013 - DNA, 13 bp, Artificial Sequence
  Oligonucleotide for detection of SNP TSC0031525
agataacgattga

SEQ ID NO: 126014 - DNA, 13 bp, Artificial Sequence
  Oligonucleotide for detection of SNP TSC0031525
tcaatcgttatct

SEQ ID NO: 126015 - DNA, 13 bp, Artificial Sequence
  Oligonucleotide for detection of SNP TSC0031526
tttgtggtttgaa

SEQ ID NO: 126016 - DNA, 13 bp, Artificial Sequence
  Oligonucleotide for detection of SNP TSC0031526
ttcaaaccacaaa

SEQ ID NO: 126017 - DNA, 13 bp, Artificial Sequence
  Oligonucleotide for detection of SNP TSC0031526
tttgtgttttgaa

SEQ ID NO: 126018 - DNA, 13 bp, Artificial Sequence
  Oligonucleotide for detection of SNP TSC0031526
ttcaaaacacaaa

SEQ ID NO: 126019 - DNA, 13 bp, Artificial Sequence
  Oligonucleotide for detection of SNP TSC0031526
tttaggttataga

SEQ ID NO: 126020 - DNA, 13 bp, Artificial Sequence
  Oligonucleotide for detection of SNP TSC0031526
tctataacctaaa

SEQ ID NO: 126021 - DNA, 13 bp, Artificial Sequence
  Oligonucleotide for detection of SNP TSC0031526
tttaggatataga

SEQ ID NO: 126022 - DNA, 13 bp, Artificial Sequence
  Oligonucleotide for detection of SNP TSC0031526
tctatatcctaaa

SEQ ID NO: 126023 - DNA, 13 bp, Artificial Sequence
  Oligonucleotide for detection of SNP TSC0031527
aaaaattaagtaa

SEQ ID NO: 126024 - DNA, 13 bp, Artificial Sequence
  Oligonucleotide for detection of SNP TSC0031527
ttacttaattttt

SEQ ID NO: 126025 - DNA, 13 bp, Artificial Sequence
  Oligonucleotide for detection of SNP TSC0031527
aaaaatgaagtaa

SEQ ID NO: 126026 - DNA, 13 bp, Artificial Sequence
  Oligonucleotide for detection of SNP TSC0031527
ttacttcattttt

SEQ ID NO: 126027 - DNA, 13 bp, Artificial Sequence
  Oligonucleotide for detection of SNP TSC0031527
aaaaacgaagtaa

SEQ ID NO: 126028 - DNA, 13 bp, Artificial Sequence
  Oligonucleotide for detection of SNP TSC0031527
ttacttcgttttt

SEQ ID NO: 126029 - DNA, 13 bp, Artificial Sequence
  Oligonucleotide for detection of SNP TSC0031534
ttagtgtaggtta

SEQ ID NO: 126030 - DNA, 13 bp, Artificial Sequence
  Oligonucleotide for detection of SNP TSC0031534
taacctacactaa

SEQ ID NO: 126031 - DNA, 13 bp, Artificial Sequence
  Oligonucleotide for detection of SNP TSC0031534
ttagtggaggtta

SEQ ID NO: 126032 - DNA, 13 bp, Artificial Sequence
  Oligonucleotide for detection of SNP TSC0031534
taacctccactaa

SEQ ID NO: 126033 - DNA, 13 bp, Artificial Sequence
  Oligonucleotide for detection of SNP TSC0031534
tggtttgtattgg

SEQ ID NO: 126034 - DNA, 13 bp, Artificial Sequence
  Oligonucleotide for detection of SNP TSC0031534
ccaatacaaacca

SEQ ID NO: 126035 - DNA, 13 bp, Artificial Sequence
  Oligonucleotide for detection of SNP TSC0031534
tggtttttattgg

SEQ ID NO: 126036 - DNA, 13 bp, Artificial Sequence
  Oligonucleotide for detection of SNP TSC0031534
ccaataaaaacca

SEQ ID NO: 126037 - DNA, 13 bp, Artificial Sequence
  Oligonucleotide for detection of SNP TSC0031535
atgtaggtaggtt

SEQ ID NO: 126038 - DNA, 13 bp, Artificial Sequence
  Oligonucleotide for detection of SNP TSC0031535
aacctacctacat

SEQ ID NO: 126039 - DNA, 13 bp, Artificial Sequence
  Oligonucleotide for detection of SNP TSC0031535
atgtagataggtt

SEQ ID NO: 126040 - DNA, 13 bp, Artificial Sequence
  Oligonucleotide for detection of SNP TSC0031535
aacctatctacat

SEQ ID NO: 126041 - DNA, 13 bp, Artificial Sequence
  Oligonucleotide for detection of SNP TSC0031536
atattatgtgttg

SEQ ID NO: 126042 - DNA, 13 bp, Artificial Sequence
  Oligonucleotide for detection of SNP TSC0031536
caacacataatat

SEQ ID NO: 126043 - DNA, 13 bp, Artificial Sequence
  Oligonucleotide for detection of SNP TSC0031536
atattacgtgttg

SEQ ID NO: 126044 - DNA, 13 bp, Artificial Sequence
  Oligonucleotide for detection of SNP TSC0031536
caacacgtaatat

SEQ ID NO: 126045 - DNA, 13 bp, Artificial Sequence
  Oligonucleotide for detection of SNP TSC0031536
taatatgtaatgt

SEQ ID NO: 126046 - DNA, 13 bp, Artificial Sequence
  Oligonucleotide for detection of SNP TSC0031536
acattacatatta

SEQ ID NO: 126047 - DNA, 13 bp, Artificial Sequence
  Oligonucleotide for detection of SNP TSC0031536
taatatataatgt

SEQ ID NO: 126048 - DNA, 13 bp, Artificial Sequence
  Oligonucleotide for detection of SNP TSC0031536
acattatatatta

SEQ ID NO: 126049 - DNA, 13 bp, Artificial Sequence
  Oligonucleotide for detection of SNP TSC0031536
taatacgtaatgt

SEQ ID NO: 126050 - DNA, 13 bp, Artificial Sequence
  Oligonucleotide for detection of SNP TSC0031536
acattacgtatta

SEQ ID NO: 126051 - DNA, 13 bp, Artificial Sequence
  Oligonucleotide for detection of SNP TSC0031537
tttgttgatgtta

SEQ ID NO: 126052 - DNA, 13 bp, Artificial Sequence
  Oligonucleotide for detection of SNP TSC0031537
taacatcaacaaa

SEQ ID NO: 126053 - DNA, 13 bp, Artificial Sequence
  Oligonucleotide for detection of SNP TSC0031537
tttgtttatgtta

SEQ ID NO: 126054 - DNA, 13 bp, Artificial Sequence
  Oligonucleotide for detection of SNP TSC0031537
taacataaacaaa

SEQ ID NO: 126055 - DNA, 13 bp, Artificial Sequence
  Oligonucleotide for detection of SNP TSC0031537
tttgtcgatgtta

SEQ ID NO: 126056 - DNA, 13 bp, Artificial Sequence
  Oligonucleotide for detection of SNP TSC0031537
taacatcgacaaa

SEQ ID NO: 126057 - DNA, 13 bp, Artificial Sequence
  Oligonucleotide for detection of SNP TSC0031537
tgatattggtaaa

SEQ ID NO: 126058 - DNA, 13 bp, Artificial Sequence
  Oligonucleotide for detection of SNP TSC0031537
tttaccaatatca

SEQ ID NO: 126059 - DNA, 13 bp, Artificial Sequence
  Oligonucleotide for detection of SNP TSC0031537
tgatataggtaaa

SEQ ID NO: 126060 - DNA, 13 bp, Artificial Sequence
  Oligonucleotide for detection of SNP TSC0031537
tttacctatatca

SEQ ID NO: 126061 - DNA, 13 bp, Artificial Sequence
  Oligonucleotide for detection of SNP TSC0031537
tgatatcggtaaa

SEQ ID NO: 126062 - DNA, 13 bp, Artificial Sequence
  Oligonucleotide for detection of SNP TSC0031537
tttaccgatatca

SEQ ID NO: 126063 - DNA, 13 bp, Artificial Sequence
  Oligonucleotide for detection of SNP TSC0031544
aaggtgggttaty

SEQ ID NO: 126064 - DNA, 13 bp, Artificial Sequence
  Oligonucleotide for detection of SNP TSC0031544
rataacccacctt

SEQ ID NO: 126065 - DNA, 13 bp, Artificial Sequence
  Oligonucleotide for detection of SNP TSC0031544
aaggtgtgttaty

SEQ ID NO: 126066 - DNA, 13 bp, Artificial Sequence
  Oligonucleotide for detection of SNP TSC0031544
rataacacacctt

SEQ ID NO: 126067 - DNA, 13 bp, Artificial Sequence
  Oligonucleotide for detection of SNP TSC0031544
gataatttatttt

SEQ ID NO: 126068 - DNA, 13 bp, Artificial Sequence
  Oligonucleotide for detection of SNP TSC0031544
aaaataaattatc

SEQ ID NO: 126069 - DNA, 13 bp, Artificial Sequence
  Oligonucleotide for detection of SNP TSC0031545
ttttatatagtta

SEQ ID NO: 126070 - DNA, 13 bp, Artificial Sequence
  Oligonucleotide for detection of SNP TSC0031545
taactatataaaa

SEQ ID NO: 126071 - DNA, 13 bp, Artificial Sequence
  Oligonucleotide for detection of SNP TSC0031546
tatatatttaata

SEQ ID NO: 126072 - DNA, 13 bp, Artificial Sequence
  Oligonucleotide for detection of SNP TSC0031546
tattaaatatata

SEQ ID NO: 126073 - DNA, 13 bp, Artificial Sequence
  Oligonucleotide for detection of SNP TSC0031546
tattgattatatg

SEQ ID NO: 126074 - DNA, 13 bp, Artificial Sequence
  Oligonucleotide for detection of SNP TSC0031546
catataatcaata

SEQ ID NO: 126075 - DNA, 13 bp, Artificial Sequence
  Oligonucleotide for detection of SNP TSC0031546
tattgaatatatg

SEQ ID NO: 126076 - DNA, 13 bp, Artificial Sequence
  Oligonucleotide for detection of SNP TSC0031546
catatattcaata

SEQ ID NO: 126077 - DNA, 13 bp, Artificial Sequence
  Oligonucleotide for detection of SNP TSC0031547
ggtaataagagtg

SEQ ID NO: 126078 - DNA, 13 bp, Artificial Sequence
  Oligonucleotide for detection of SNP TSC0031547
cactcttattacc

SEQ ID NO: 126079 - DNA, 13 bp, Artificial Sequence
  Oligonucleotide for detection of SNP TSC0031547
ggtaatgagagtg

SEQ ID NO: 126080 - DNA, 13 bp, Artificial Sequence
  Oligonucleotide for detection of SNP TSC0031547
cactctcattacc

SEQ ID NO: 126081 - DNA, 13 bp, Artificial Sequence
  Oligonucleotide for detection of SNP TSC0031547
ggtaacgagagtg

SEQ ID NO: 126082 - DNA, 13 bp, Artificial Sequence
  Oligonucleotide for detection of SNP TSC0031547
cactctcgttacc

SEQ ID NO: 126083 - DNA, 13 bp, Artificial Sequence
  Oligonucleotide for detection of SNP TSC0031548
gtagtgatgtatg

SEQ ID NO: 126084 - DNA, 13 bp, Artificial Sequence
  Oligonucleotide for detection of SNP TSC0031548
catacatcactac

SEQ ID NO: 126085 - DNA, 13 bp, Artificial Sequence
  Oligonucleotide for detection of SNP TSC0031548
gtagtggtgtatg

SEQ ID NO: 126086 - DNA, 13 bp, Artificial Sequence
  Oligonucleotide for detection of SNP TSC0031548
catacaccactac

SEQ ID NO: 126087 - DNA, 13 bp, Artificial Sequence
  Oligonucleotide for detection of SNP TSC0031548
gtagtgatgtacg

SEQ ID NO: 126088 - DNA, 13 bp, Artificial Sequence
  Oligonucleotide for detection of SNP TSC0031548
cgtacatcactac

SEQ ID NO: 126089 - DNA, 13 bp, Artificial Sequence
  Oligonucleotide for detection of SNP TSC0031548
gtagtggtgtacg

SEQ ID NO: 126090 - DNA, 13 bp, Artificial Sequence
  Oligonucleotide for detection of SNP TSC0031548
cgtacaccactac

SEQ ID NO: 126091 - DNA, 13 bp, Artificial Sequence
  Oligonucleotide for detection of SNP TSC0031549
gtgattaatgtta

SEQ ID NO: 126092 - DNA, 13 bp, Artificial Sequence
  Oligonucleotide for detection of SNP TSC0031549
taacattaatcac

SEQ ID NO: 126093 - DNA, 13 bp, Artificial Sequence
  Oligonucleotide for detection of SNP TSC0031549
gtgattgatgtta

SEQ ID NO: 126094 - DNA, 13 bp, Artificial Sequence
  Oligonucleotide for detection of SNP TSC0031549
taacatcaatcac

SEQ ID NO: 126095 - DNA, 13 bp, Artificial Sequence
  Oligonucleotide for detection of SNP TSC0031549
gtgatcgatgtta

SEQ ID NO: 126096 - DNA, 13 bp, Artificial Sequence
  Oligonucleotide for detection of SNP TSC0031549
taacatcgatcac

SEQ ID NO: 126097 - DNA, 13 bp, Artificial Sequence
  Oligonucleotide for detection of SNP TSC0031549
tggtattgattay

SEQ ID NO: 126098 - DNA, 13 bp, Artificial Sequence
  Oligonucleotide for detection of SNP TSC0031549
rtaatcaatacca

SEQ ID NO: 126099 - DNA, 13 bp, Artificial Sequence
  Oligonucleotide for detection of SNP TSC0031549
tggtatcgattay

SEQ ID NO: 126100 - DNA, 13 bp, Artificial Sequence
  Oligonucleotide for detection of SNP TSC0031549
rtaatcgatacca

SEQ ID NO: 126101 - DNA, 13 bp, Artificial Sequence
  Oligonucleotide for detection of SNP TSC0031550
gttatgtgagaag

SEQ ID NO: 126102 - DNA, 13 bp, Artificial Sequence
  Oligonucleotide for detection of SNP TSC0031550
cttctcacataac

SEQ ID NO: 126103 - DNA, 13 bp, Artificial Sequence
  Oligonucleotide for detection of SNP TSC0031550
gttatgcgagaag

SEQ ID NO: 126104 - DNA, 13 bp, Artificial Sequence
  Oligonucleotide for detection of SNP TSC0031550
cttctcgcataac

SEQ ID NO: 126105 - DNA, 13 bp, Artificial Sequence
  Oligonucleotide for detection of SNP TSC0031550
ttttttgtatggy

SEQ ID NO: 126106 - DNA, 13 bp, Artificial Sequence
  Oligonucleotide for detection of SNP TSC0031550
rccatacaaaaaa

SEQ ID NO: 126107 - DNA, 13 bp, Artificial Sequence
  Oligonucleotide for detection of SNP TSC0031550
ttttttatatggy

SEQ ID NO: 126108 - DNA, 13 bp, Artificial Sequence
  Oligonucleotide for detection of SNP TSC0031550
rccatataaaaaa

SEQ ID NO: 126109 - DNA, 13 bp, Artificial Sequence
  Oligonucleotide for detection of SNP TSC0031550
tttttcgtatggy

SEQ ID NO: 126110 - DNA, 13 bp, Artificial Sequence
  Oligonucleotide for detection of SNP TSC0031550
rccatacgaaaaa

SEQ ID NO: 126111 - DNA, 13 bp, Artificial Sequence
  Oligonucleotide for detection of SNP TSC0031551
tttaataaatgtg

SEQ ID NO: 126112 - DNA, 13 bp, Artificial Sequence
  Oligonucleotide for detection of SNP TSC0031551
cacatttattaaa

SEQ ID NO: 126113 - DNA, 13 bp, Artificial Sequence
  Oligonucleotide for detection of SNP TSC0031551
tttaattaatgtg

SEQ ID NO: 126114 - DNA, 13 bp, Artificial Sequence
  Oligonucleotide for detection of SNP TSC0031551
cacattaattaaa

SEQ ID NO: 126115 - DNA, 13 bp, Artificial Sequence
  Oligonucleotide for detection of SNP TSC0031551
tatatttgttaag

SEQ ID NO: 126116 - DNA, 13 bp, Artificial Sequence
  Oligonucleotide for detection of SNP TSC0031551
cttaacaaatata

SEQ ID NO: 126117 - DNA, 13 bp, Artificial Sequence
  Oligonucleotide for detection of SNP TSC0031551
tatattagttaag

SEQ ID NO: 126118 - DNA, 13 bp, Artificial Sequence
  Oligonucleotide for detection of SNP TSC0031551
cttaactaatata

SEQ ID NO: 126119 - DNA, 13 bp, Artificial Sequence
  Oligonucleotide for detection of SNP TSC0031552
gtttttggttggy

SEQ ID NO: 126120 - DNA, 13 bp, Artificial Sequence
  Oligonucleotide for detection of SNP TSC0031552
rccaaccaaaaac

SEQ ID NO: 126121 - DNA, 13 bp, Artificial Sequence
  Oligonucleotide for detection of SNP TSC0031552
gtttttagttggy

SEQ ID NO: 126122 - DNA, 13 bp, Artificial Sequence
  Oligonucleotide for detection of SNP TSC0031552
rccaactaaaaac

SEQ ID NO: 126123 - DNA, 13 bp, Artificial Sequence
  Oligonucleotide for detection of SNP TSC0031555
gagagtaattagt

SEQ ID NO: 126124 - DNA, 13 bp, Artificial Sequence
  Oligonucleotide for detection of SNP TSC0031555
actaattactctc

SEQ ID NO: 126125 - DNA, 13 bp, Artificial Sequence
  Oligonucleotide for detection of SNP TSC0031555
gagagttattagt

SEQ ID NO: 126126 - DNA, 13 bp, Artificial Sequence
  Oligonucleotide for detection of SNP TSC0031555
actaataactctc

SEQ ID NO: 126127 - DNA, 13 bp, Artificial Sequence
  Oligonucleotide for detection of SNP TSC0031555
attggttgtttty

SEQ ID NO: 126128 - DNA, 13 bp, Artificial Sequence
  Oligonucleotide for detection of SNP TSC0031555
raaaacaaccaat

SEQ ID NO: 126129 - DNA, 13 bp, Artificial Sequence
  Oligonucleotide for detection of SNP TSC0031555
attggtagtttty

SEQ ID NO: 126130 - DNA, 13 bp, Artificial Sequence
  Oligonucleotide for detection of SNP TSC0031555
raaaactaccaat

SEQ ID NO: 126131 - DNA, 13 bp, Artificial Sequence
  Oligonucleotide for detection of SNP TSC0031560
gtggaaataggtg

SEQ ID NO: 126132 - DNA, 13 bp, Artificial Sequence
  Oligonucleotide for detection of SNP TSC0031560
cacctatttccac

SEQ ID NO: 126133 - DNA, 13 bp, Artificial Sequence
  Oligonucleotide for detection of SNP TSC0031560
gtggaagtaggtg

SEQ ID NO: 126134 - DNA, 13 bp, Artificial Sequence
  Oligonucleotide for detection of SNP TSC0031560
cacctacttccac

SEQ ID NO: 126135 - DNA, 13 bp, Artificial Sequence
  Oligonucleotide for detection of SNP TSC0031561
ttttataagtttg

SEQ ID NO: 126136 - DNA, 13 bp, Artificial Sequence
  Oligonucleotide for detection of SNP TSC0031561
caaacttataaaa

SEQ ID NO: 126137 - DNA, 13 bp, Artificial Sequence
  Oligonucleotide for detection of SNP TSC0031561
ttttatgagtttg

SEQ ID NO: 126138 - DNA, 13 bp, Artificial Sequence
  Oligonucleotide for detection of SNP TSC0031561
caaactcataaaa

SEQ ID NO: 126139 - DNA, 13 bp, Artificial Sequence
  Oligonucleotide for detection of SNP TSC0031562
gttggtatgttag

SEQ ID NO: 126140 - DNA, 13 bp, Artificial Sequence
  Oligonucleotide for detection of SNP TSC0031562
ctaacataccaac

SEQ ID NO: 126141 - DNA, 13 bp, Artificial Sequence
  Oligonucleotide for detection of SNP TSC0031562
gttggtgtgttag

SEQ ID NO: 126142 - DNA, 13 bp, Artificial Sequence
  Oligonucleotide for detection of SNP TSC0031562
ctaacacaccaac

SEQ ID NO: 126143 - DNA, 13 bp, Artificial Sequence
  Oligonucleotide for detection of SNP TSC0031563
agtttaattttgy

SEQ ID NO: 126144 - DNA, 13 bp, Artificial Sequence
  Oligonucleotide for detection of SNP TSC0031563
rcaaaattaaact

SEQ ID NO: 126145 - DNA, 13 bp, Artificial Sequence
  Oligonucleotide for detection of SNP TSC0031563
agtttagttttgy

SEQ ID NO: 126146 - DNA, 13 bp, Artificial Sequence
  Oligonucleotide for detection of SNP TSC0031563
rcaaaactaaact

SEQ ID NO: 126147 - DNA, 13 bp, Artificial Sequence
  Oligonucleotide for detection of SNP TSC0031564
ttttttagtttgy

SEQ ID NO: 126148 - DNA, 13 bp, Artificial Sequence
  Oligonucleotide for detection of SNP TSC0031564
rcaaactaaaaaa

SEQ ID NO: 126149 - DNA, 13 bp, Artificial Sequence
  Oligonucleotide for detection of SNP TSC0031564
ttttttggtttgy

SEQ ID NO: 126150 - DNA, 13 bp, Artificial Sequence
  Oligonucleotide for detection of SNP TSC0031564
rcaaaccaaaaaa

SEQ ID NO: 126151 - DNA, 13 bp, Artificial Sequence
  Oligonucleotide for detection of SNP TSC0031564
tttttcggtttgy

SEQ ID NO: 126152 - DNA, 13 bp, Artificial Sequence
  Oligonucleotide for detection of SNP TSC0031564
rcaaaccgaaaaa

SEQ ID NO: 126153 - DNA, 13 bp, Artificial Sequence
  Oligonucleotide for detection of SNP TSC0031564
gtagattgaaaaa

SEQ ID NO: 126154 - DNA, 13 bp, Artificial Sequence
  Oligonucleotide for detection of SNP TSC0031564
tttttcaatctac

SEQ ID NO: 126155 - DNA, 13 bp, Artificial Sequence
  Oligonucleotide for detection of SNP TSC0031564
gtagatcgaaaaa

SEQ ID NO: 126156 - DNA, 13 bp, Artificial Sequence
  Oligonucleotide for detection of SNP TSC0031564
tttttcgatctac

SEQ ID NO: 126157 - DNA, 13 bp, Artificial Sequence
  Oligonucleotide for detection of SNP TSC0031565
tgggttatttttt

SEQ ID NO: 126158 - DNA, 13 bp, Artificial Sequence
  Oligonucleotide for detection of SNP TSC0031565
aaaaaataaccca

SEQ ID NO: 126159 - DNA, 13 bp, Artificial Sequence
  Oligonucleotide for detection of SNP TSC0031565
tgggttgtttttt

SEQ ID NO: 126160 - DNA, 13 bp, Artificial Sequence
  Oligonucleotide for detection of SNP TSC0031565
aaaaaacaaccca

SEQ ID NO: 126161 - DNA, 13 bp, Artificial Sequence
  Oligonucleotide for detection of SNP TSC0031571
ggggtgatgaaay

SEQ ID NO: 126162 - DNA, 13 bp, Artificial Sequence
  Oligonucleotide for detection of SNP TSC0031571
rtttcatcacccc

SEQ ID NO: 126163 - DNA, 13 bp, Artificial Sequence
  Oligonucleotide for detection of SNP TSC0031571
ggggtggtgaaay

SEQ ID NO: 126164 - DNA, 13 bp, Artificial Sequence
  Oligonucleotide for detection of SNP TSC0031571
rtttcaccacccc

SEQ ID NO: 126165 - DNA, 13 bp, Artificial Sequence
  Oligonucleotide for detection of SNP TSC0031572
gtttggtgtttay

SEQ ID NO: 126166 - DNA, 13 bp, Artificial Sequence
  Oligonucleotide for detection of SNP TSC0031572
rtaaacaccaaac

SEQ ID NO: 126167 - DNA, 13 bp, Artificial Sequence
  Oligonucleotide for detection of SNP TSC0031572
gtttggggtttay

SEQ ID NO: 126168 - DNA, 13 bp, Artificial Sequence
  Oligonucleotide for detection of SNP TSC0031572
rtaaaccccaaac

SEQ ID NO: 126169 - DNA, 13 bp, Artificial Sequence
  Oligonucleotide for detection of SNP TSC0031572
gtttggcgtttay

SEQ ID NO: 126170 - DNA, 13 bp, Artificial Sequence
  Oligonucleotide for detection of SNP TSC0031572
rtaaacgccaaac

SEQ ID NO: 126171 - DNA, 13 bp, Artificial Sequence
  Oligonucleotide for detection of SNP TSC0031572
gtaagtgttaggy

SEQ ID NO: 126172 - DNA, 13 bp, Artificial Sequence
  Oligonucleotide for detection of SNP TSC0031572
rcctaacacttac

SEQ ID NO: 126173 - DNA, 13 bp, Artificial Sequence
  Oligonucleotide for detection of SNP TSC0031572
gtaagttttaggy

SEQ ID NO: 126174 - DNA, 13 bp, Artificial Sequence
  Oligonucleotide for detection of SNP TSC0031572
rcctaaaacttac

SEQ ID NO: 126175 - DNA, 13 bp, Artificial Sequence
  Oligonucleotide for detection of SNP TSC0031572
gtaagcgttaggy

SEQ ID NO: 126176 - DNA, 13 bp, Artificial Sequence
  Oligonucleotide for detection of SNP TSC0031572
rcctaacgcttac

SEQ ID NO: 126177 - DNA, 13 bp, Artificial Sequence
  Oligonucleotide for detection of SNP TSC0031574
agttttattgtgg

SEQ ID NO: 126178 - DNA, 13 bp, Artificial Sequence
  Oligonucleotide for detection of SNP TSC0031574
ccacaataaaact

SEQ ID NO: 126179 - DNA, 13 bp, Artificial Sequence
  Oligonucleotide for detection of SNP TSC0031576
tgttagggaaaaa

SEQ ID NO: 126180 - DNA, 13 bp, Artificial Sequence
  Oligonucleotide for detection of SNP TSC0031576
tttttccctaaca

SEQ ID NO: 126181 - DNA, 13 bp, Artificial Sequence
  Oligonucleotide for detection of SNP TSC0031576
tgttagagaaaaa

SEQ ID NO: 126182 - DNA, 13 bp, Artificial Sequence
  Oligonucleotide for detection of SNP TSC0031576
tttttctctaaca

SEQ ID NO: 126183 - DNA, 13 bp, Artificial Sequence
  Oligonucleotide for detection of SNP TSC0031577
tttgattgttgtt

SEQ ID NO: 126184 - DNA, 13 bp, Artificial Sequence
  Oligonucleotide for detection of SNP TSC0031577
aacaacaatcaaa

SEQ ID NO: 126185 - DNA, 13 bp, Artificial Sequence
  Oligonucleotide for detection of SNP TSC0031577
tttgatcgttgtt

SEQ ID NO: 126186 - DNA, 13 bp, Artificial Sequence
  Oligonucleotide for detection of SNP TSC0031577
aacaacgatcaaa

SEQ ID NO: 126187 - DNA, 13 bp, Artificial Sequence
  Oligonucleotide for detection of SNP TSC0031577
aataatggttaaa

SEQ ID NO: 126188 - DNA, 13 bp, Artificial Sequence
  Oligonucleotide for detection of SNP TSC0031577
tttaaccattatt

SEQ ID NO: 126189 - DNA, 13 bp, Artificial Sequence
  Oligonucleotide for detection of SNP TSC0031577
aataatagttaaa

SEQ ID NO: 126190 - DNA, 13 bp, Artificial Sequence
  Oligonucleotide for detection of SNP TSC0031577
tttaactattatt

SEQ ID NO: 126191 - DNA, 13 bp, Artificial Sequence
  Oligonucleotide for detection of SNP TSC0031577
aataacggttaaa

SEQ ID NO: 126192 - DNA, 13 bp, Artificial Sequence
  Oligonucleotide for detection of SNP TSC0031577
tttaaccgttatt

SEQ ID NO: 126193 - DNA, 13 bp, Artificial Sequence
  Oligonucleotide for detection of SNP TSC0031578
cgtttttggttty

SEQ ID NO: 126194 - DNA, 13 bp, Artificial Sequence
  Oligonucleotide for detection of SNP TSC0031578
raaaccaaaaacg

SEQ ID NO: 126195 - DNA, 13 bp, Artificial Sequence
  Oligonucleotide for detection of SNP TSC0031578
cgttttcggttty

SEQ ID NO: 126196 - DNA, 13 bp, Artificial Sequence
  Oligonucleotide for detection of SNP TSC0031578
raaaccgaaaacg

SEQ ID NO: 126197 - DNA, 13 bp, Artificial Sequence
  Oligonucleotide for detection of SNP TSC0031578
gaggttgaaggtg

SEQ ID NO: 126198 - DNA, 13 bp, Artificial Sequence
  Oligonucleotide for detection of SNP TSC0031578
caccttcaacctc

SEQ ID NO: 126199 - DNA, 13 bp, Artificial Sequence
  Oligonucleotide for detection of SNP TSC0031578
gaggttaaaggtg

SEQ ID NO: 126200 - DNA, 13 bp, Artificial Sequence
  Oligonucleotide for detection of SNP TSC0031578
cacctttaacctc

SEQ ID NO: 126201 - DNA, 13 bp, Artificial Sequence
  Oligonucleotide for detection of SNP TSC0031578
gaggtcgaaggtg

SEQ ID NO: 126202 - DNA, 13 bp, Artificial Sequence
  Oligonucleotide for detection of SNP TSC0031578
caccttcgacctc

SEQ ID NO: 126203 - DNA, 13 bp, Artificial Sequence
  Oligonucleotide for detection of SNP TSC0031578
gaggttaaaggcg

SEQ ID NO: 126204 - DNA, 13 bp, Artificial Sequence
  Oligonucleotide for detection of SNP TSC0031578
cgcctttaacctc

SEQ ID NO: 126205 - DNA, 13 bp, Artificial Sequence
  Oligonucleotide for detection of SNP TSC0031578
gaggttgaaggcg

SEQ ID NO: 126206 - DNA, 13 bp, Artificial Sequence
  Oligonucleotide for detection of SNP TSC0031578
cgccttcaacctc

SEQ ID NO: 126207 - DNA, 13 bp, Artificial Sequence
  Oligonucleotide for detection of SNP TSC0031578
gaggtcgaaggcg

SEQ ID NO: 126208 - DNA, 13 bp, Artificial Sequence
  Oligonucleotide for detection of SNP TSC0031578
cgccttcgacctc

SEQ ID NO: 126209 - DNA, 13 bp, Artificial Sequence
  Oligonucleotide for detection of SNP TSC0031579
tttttagtttggg

SEQ ID NO: 126210 - DNA, 13 bp, Artificial Sequence
  Oligonucleotide for detection of SNP TSC0031579
cccaaactaaaaa

SEQ ID NO: 126211 - DNA, 13 bp, Artificial Sequence
  Oligonucleotide for detection of SNP TSC0031579
tttttaatttggg

SEQ ID NO: 126212 - DNA, 13 bp, Artificial Sequence
  Oligonucleotide for detection of SNP TSC0031579
cccaaattaaaaa

SEQ ID NO: 126213 - DNA, 13 bp, Artificial Sequence
  Oligonucleotide for detection of SNP TSC0031580
tgtaggagagttt

SEQ ID NO: 126214 - DNA, 13 bp, Artificial Sequence
  Oligonucleotide for detection of SNP TSC0031580
aaactctcctaca

SEQ ID NO: 126215 - DNA, 13 bp, Artificial Sequence
  Oligonucleotide for detection of SNP TSC0031580
tgtaggggagttt

SEQ ID NO: 126216 - DNA, 13 bp, Artificial Sequence
  Oligonucleotide for detection of SNP TSC0031580
aaactcccctaca

SEQ ID NO: 126217 - DNA, 13 bp, Artificial Sequence
  Oligonucleotide for detection of SNP TSC0031581
tattaagtattty

SEQ ID NO: 126218 - DNA, 13 bp, Artificial Sequence
  Oligonucleotide for detection of SNP TSC0031581
raaatacttaata

SEQ ID NO: 126219 - DNA, 13 bp, Artificial Sequence
  Oligonucleotide for detection of SNP TSC0031581
tattaattattty

SEQ ID NO: 126220 - DNA, 13 bp, Artificial Sequence
  Oligonucleotide for detection of SNP TSC0031581
raaataattaata

SEQ ID NO: 126221 - DNA, 13 bp, Artificial Sequence
  Oligonucleotide for detection of SNP TSC0031581
ggagtgtttaatg

SEQ ID NO: 126222 - DNA, 13 bp, Artificial Sequence
  Oligonucleotide for detection of SNP TSC0031581
cattaaacactcc

SEQ ID NO: 126223 - DNA, 13 bp, Artificial Sequence
  Oligonucleotide for detection of SNP TSC0031581
ggagtgattaatg

SEQ ID NO: 126224 - DNA, 13 bp, Artificial Sequence
  Oligonucleotide for detection of SNP TSC0031581
cattaatcactcc

SEQ ID NO: 126225 - DNA, 13 bp, Artificial Sequence
  Oligonucleotide for detection of SNP TSC0031585
aaggaaaagttat

SEQ ID NO: 126226 - DNA, 13 bp, Artificial Sequence
  Oligonucleotide for detection of SNP TSC0031585
ataacttttcctt

SEQ ID NO: 126227 - DNA, 13 bp, Artificial Sequence
  Oligonucleotide for detection of SNP TSC0031585
aaggaagagttat

SEQ ID NO: 126228 - DNA, 13 bp, Artificial Sequence
  Oligonucleotide for detection of SNP TSC0031585
ataactcttcctt

SEQ ID NO: 126229 - DNA, 13 bp, Artificial Sequence
  Oligonucleotide for detection of SNP TSC0031586
aaaaagatttggg

SEQ ID NO: 126230 - DNA, 13 bp, Artificial Sequence
  Oligonucleotide for detection of SNP TSC0031586
cccaaatcttttt

SEQ ID NO: 126231 - DNA, 13 bp, Artificial Sequence
  Oligonucleotide for detection of SNP TSC0031586
aaaaagttttggg

SEQ ID NO: 126232 - DNA, 13 bp, Artificial Sequence
  Oligonucleotide for detection of SNP TSC0031586
cccaaaacttttt

SEQ ID NO: 126233 - DNA, 13 bp, Artificial Sequence
  Oligonucleotide for detection of SNP TSC0031586
aaaaagattcggg

SEQ ID NO: 126234 - DNA, 13 bp, Artificial Sequence
  Oligonucleotide for detection of SNP TSC0031586
cccgaatcttttt

SEQ ID NO: 126235 - DNA, 13 bp, Artificial Sequence
  Oligonucleotide for detection of SNP TSC0031586
aaaaagtttcggg

SEQ ID NO: 126236 - DNA, 13 bp, Artificial Sequence
  Oligonucleotide for detection of SNP TSC0031586
cccgaaacttttt

SEQ ID NO: 126237 - DNA, 13 bp, Artificial Sequence
  Oligonucleotide for detection of SNP TSC0031586
ttcgaattttttt

SEQ ID NO: 126238 - DNA, 13 bp, Artificial Sequence
  Oligonucleotide for detection of SNP TSC0031586
aaaaaaattcgaa

SEQ ID NO: 126239 - DNA, 13 bp, Artificial Sequence
  Oligonucleotide for detection of SNP TSC0031586
ttcgaaatttttt

SEQ ID NO: 126240 - DNA, 13 bp, Artificial Sequence
  Oligonucleotide for detection of SNP TSC0031586
aaaaaatttcgaa

SEQ ID NO: 126241 - DNA, 13 bp, Artificial Sequence
  Oligonucleotide for detection of SNP TSC0031587
ggtaatattttat

SEQ ID NO: 126242 - DNA, 13 bp, Artificial Sequence
  Oligonucleotide for detection of SNP TSC0031587
ataaaatattacc

SEQ ID NO: 126243 - DNA, 13 bp, Artificial Sequence
  Oligonucleotide for detection of SNP TSC0031587
ggtaatgttttat

SEQ ID NO: 126244 - DNA, 13 bp, Artificial Sequence
  Oligonucleotide for detection of SNP TSC0031587
ataaaacattacc

SEQ ID NO: 126245 - DNA, 13 bp, Artificial Sequence
  Oligonucleotide for detection of SNP TSC0031587
ggtaacgttttat

SEQ ID NO: 126246 - DNA, 13 bp, Artificial Sequence
  Oligonucleotide for detection of SNP TSC0031587
ataaaacgttacc

SEQ ID NO: 126247 - DNA, 13 bp, Artificial Sequence
  Oligonucleotide for detection of SNP TSC0031587
ataagatgttgty

SEQ ID NO: 126248 - DNA, 13 bp, Artificial Sequence
  Oligonucleotide for detection of SNP TSC0031587
racaacatcttat

SEQ ID NO: 126249 - DNA, 13 bp, Artificial Sequence
  Oligonucleotide for detection of SNP TSC0031587
ataagacgttgty

SEQ ID NO: 126250 - DNA, 13 bp, Artificial Sequence
  Oligonucleotide for detection of SNP TSC0031587
racaacgtcttat

SEQ ID NO: 126251 - DNA, 13 bp, Artificial Sequence
  Oligonucleotide for detection of SNP TSC0031588
aatttagagagtt

SEQ ID NO: 126252 - DNA, 13 bp, Artificial Sequence
  Oligonucleotide for detection of SNP TSC0031588
aactctctaaatt

SEQ ID NO: 126253 - DNA, 13 bp, Artificial Sequence
  Oligonucleotide for detection of SNP TSC0031588
aatttaaagagtt

SEQ ID NO: 126254 - DNA, 13 bp, Artificial Sequence
  Oligonucleotide for detection of SNP TSC0031588
aactctttaaatt

SEQ ID NO: 126255 - DNA, 13 bp, Artificial Sequence
  Oligonucleotide for detection of SNP TSC0031591
gatagttataagy

SEQ ID NO: 126256 - DNA, 13 bp, Artificial Sequence
  Oligonucleotide for detection of SNP TSC0031591
rcttataactatc

SEQ ID NO: 126257 - DNA, 13 bp, Artificial Sequence
  Oligonucleotide for detection of SNP TSC0031591
gatagtgataagy

SEQ ID NO: 126258 - DNA, 13 bp, Artificial Sequence
  Oligonucleotide for detection of SNP TSC0031591
rcttatcactatc

SEQ ID NO: 126259 - DNA, 13 bp, Artificial Sequence
  Oligonucleotide for detection of SNP TSC0031591
gtttatgattaty

SEQ ID NO: 126260 - DNA, 13 bp, Artificial Sequence
  Oligonucleotide for detection of SNP TSC0031591
rataatcataaac

SEQ ID NO: 126261 - DNA, 13 bp, Artificial Sequence
  Oligonucleotide for detection of SNP TSC0031591
gtttattattaty

SEQ ID NO: 126262 - DNA, 13 bp, Artificial Sequence
  Oligonucleotide for detection of SNP TSC0031591
rataataataaac

SEQ ID NO: 126263 - DNA, 13 bp, Artificial Sequence
  Oligonucleotide for detection of SNP TSC0031592
tgagtagtttagy

SEQ ID NO: 126264 - DNA, 13 bp, Artificial Sequence
  Oligonucleotide for detection of SNP TSC0031592
rctaaactactca

SEQ ID NO: 126265 - DNA, 13 bp, Artificial Sequence
  Oligonucleotide for detection of SNP TSC0031592
tgagtaatttagy

SEQ ID NO: 126266 - DNA, 13 bp, Artificial Sequence
  Oligonucleotide for detection of SNP TSC0031592
rctaaattactca

SEQ ID NO: 126267 - DNA, 13 bp, Artificial Sequence
  Oligonucleotide for detection of SNP TSC0031594
tagggtaaatgaa

SEQ ID NO: 126268 - DNA, 13 bp, Artificial Sequence
  Oligonucleotide for detection of SNP TSC0031594
ttcatttacccta

SEQ ID NO: 126269 - DNA, 13 bp, Artificial Sequence
  Oligonucleotide for detection of SNP TSC0031594
tagggtgaatgaa

SEQ ID NO: 126270 - DNA, 13 bp, Artificial Sequence
  Oligonucleotide for detection of SNP TSC0031594
ttcattcacccta

SEQ ID NO: 126271 - DNA, 13 bp, Artificial Sequence
  Oligonucleotide for detection of SNP TSC0031599
gttataattatgt

SEQ ID NO: 126272 - DNA, 13 bp, Artificial Sequence
  Oligonucleotide for detection of SNP TSC0031599
acataattataac

SEQ ID NO: 126273 - DNA, 13 bp, Artificial Sequence
  Oligonucleotide for detection of SNP TSC0031599
gttatagttatgt

SEQ ID NO: 126274 - DNA, 13 bp, Artificial Sequence
  Oligonucleotide for detection of SNP TSC0031599
acataactataac

SEQ ID NO: 126275 - DNA, 13 bp, Artificial Sequence
  Oligonucleotide for detection of SNP TSC0031602
tagtataagtaty

SEQ ID NO: 126276 - DNA, 13 bp, Artificial Sequence
  Oligonucleotide for detection of SNP TSC0031602
ratacttatacta

SEQ ID NO: 126277 - DNA, 13 bp, Artificial Sequence
  Oligonucleotide for detection of SNP TSC0031602
tagtatgagtaty

SEQ ID NO: 126278 - DNA, 13 bp, Artificial Sequence
  Oligonucleotide for detection of SNP TSC0031602
ratactcatacta

SEQ ID NO: 126279 - DNA, 13 bp, Artificial Sequence
  Oligonucleotide for detection of SNP TSC0031602
tagtacgagtaty

SEQ ID NO: 126280 - DNA, 13 bp, Artificial Sequence
  Oligonucleotide for detection of SNP TSC0031602
ratactcgtacta

SEQ ID NO: 126281 - DNA, 13 bp, Artificial Sequence
  Oligonucleotide for detection of SNP TSC0031602
ggtatttgtatta

SEQ ID NO: 126282 - DNA, 13 bp, Artificial Sequence
  Oligonucleotide for detection of SNP TSC0031602
taatacaaatacc

SEQ ID NO: 126283 - DNA, 13 bp, Artificial Sequence
  Oligonucleotide for detection of SNP TSC0031602
ggtattcgtatta

SEQ ID NO: 126284 - DNA, 13 bp, Artificial Sequence
  Oligonucleotide for detection of SNP TSC0031602
taatacgaatacc

SEQ ID NO: 126285 - DNA, 13 bp, Artificial Sequence
  Oligonucleotide for detection of SNP TSC0031607
taggtatgtgtta

SEQ ID NO: 126286 - DNA, 13 bp, Artificial Sequence
  Oligonucleotide for detection of SNP TSC0031607
taacacataccta

SEQ ID NO: 126287 - DNA, 13 bp, Artificial Sequence
  Oligonucleotide for detection of SNP TSC0031607
taggtacgtgtta

SEQ ID NO: 126288 - DNA, 13 bp, Artificial Sequence
  Oligonucleotide for detection of SNP TSC0031607
taacacgtaccta

SEQ ID NO: 126289 - DNA, 13 bp, Artificial Sequence
  Oligonucleotide for detection of SNP TSC0031607
tggtatgtatttg

SEQ ID NO: 126290 - DNA, 13 bp, Artificial Sequence
  Oligonucleotide for detection of SNP TSC0031607
caaatacatacca

SEQ ID NO: 126291 - DNA, 13 bp, Artificial Sequence
  Oligonucleotide for detection of SNP TSC0031607
tggtacgtatttg

SEQ ID NO: 126292 - DNA, 13 bp, Artificial Sequence
  Oligonucleotide for detection of SNP TSC0031607
caaatacgtacca

SEQ ID NO: 126293 - DNA, 13 bp, Artificial Sequence
  Oligonucleotide for detection of SNP TSC0031608
gtgagaatatttg

SEQ ID NO: 126294 - DNA, 13 bp, Artificial Sequence
  Oligonucleotide for detection of SNP TSC0031608
caaatattctcac

SEQ ID NO: 126295 - DNA, 13 bp, Artificial Sequence
  Oligonucleotide for detection of SNP TSC0031608
gtgagagtatttg

SEQ ID NO: 126296 - DNA, 13 bp, Artificial Sequence
  Oligonucleotide for detection of SNP TSC0031608
caaatactctcac

SEQ ID NO: 126297 - DNA, 13 bp, Artificial Sequence
  Oligonucleotide for detection of SNP TSC0031609
tagggtgggggag

SEQ ID NO: 126298 - DNA, 13 bp, Artificial Sequence
  Oligonucleotide for detection of SNP TSC0031609
ctcccccacccta

SEQ ID NO: 126299 - DNA, 13 bp, Artificial Sequence
  Oligonucleotide for detection of SNP TSC0031609
tagggtaggggag

SEQ ID NO: 126300 - DNA, 13 bp, Artificial Sequence
  Oligonucleotide for detection of SNP TSC0031609
ctcccctacccta

SEQ ID NO: 126301 - DNA, 13 bp, Artificial Sequence
  Oligonucleotide for detection of SNP TSC0031609
tagggcgggggag

SEQ ID NO: 126302 - DNA, 13 bp, Artificial Sequence
  Oligonucleotide for detection of SNP TSC0031609
ctcccccgcccta

SEQ ID NO: 126303 - DNA, 13 bp, Artificial Sequence
  Oligonucleotide for detection of SNP TSC0031610
aaatgttgttttg

SEQ ID NO: 126304 - DNA, 13 bp, Artificial Sequence
  Oligonucleotide for detection of SNP TSC0031610
caaaacaacattt

SEQ ID NO: 126305 - DNA, 13 bp, Artificial Sequence
  Oligonucleotide for detection of SNP TSC0031610
aaacgttgttttg

SEQ ID NO: 126306 - DNA, 13 bp, Artificial Sequence
  Oligonucleotide for detection of SNP TSC0031610
caaaacaacgttt

SEQ ID NO: 126307 - DNA, 13 bp, Artificial Sequence
  Oligonucleotide for detection of SNP TSC0031610
aaatgtcgttttg

SEQ ID NO: 126308 - DNA, 13 bp, Artificial Sequence
  Oligonucleotide for detection of SNP TSC0031610
caaaacgacattt

SEQ ID NO: 126309 - DNA, 13 bp, Artificial Sequence
  Oligonucleotide for detection of SNP TSC0031610
aaacgtcgttttg

SEQ ID NO: 126310 - DNA, 13 bp, Artificial Sequence
  Oligonucleotide for detection of SNP TSC0031610
caaaacgacgttt

SEQ ID NO: 126311 - DNA, 13 bp, Artificial Sequence
  Oligonucleotide for detection of SNP TSC0031610
taaggtggtgttt

SEQ ID NO: 126312 - DNA, 13 bp, Artificial Sequence
  Oligonucleotide for detection of SNP TSC0031610
aaacaccacctta

SEQ ID NO: 126313 - DNA, 13 bp, Artificial Sequence
  Oligonucleotide for detection of SNP TSC0031610
taaggtagtgttt

SEQ ID NO: 126314 - DNA, 13 bp, Artificial Sequence
  Oligonucleotide for detection of SNP TSC0031610
aaacactacctta

SEQ ID NO: 126315 - DNA, 13 bp, Artificial Sequence
  Oligonucleotide for detection of SNP TSC0031610
taaggcggtgttt

SEQ ID NO: 126316 - DNA, 13 bp, Artificial Sequence
  Oligonucleotide for detection of SNP TSC0031610
aaacaccgcctta

SEQ ID NO: 126317 - DNA, 13 bp, Artificial Sequence
  Oligonucleotide for detection of SNP TSC0031610
taaggtagcgttt

SEQ ID NO: 126318 - DNA, 13 bp, Artificial Sequence
  Oligonucleotide for detection of SNP TSC0031610
aaacgctacctta

SEQ ID NO: 126319 - DNA, 13 bp, Artificial Sequence
  Oligonucleotide for detection of SNP TSC0031610
taaggtggcgttt

SEQ ID NO: 126320 - DNA, 13 bp, Artificial Sequence
  Oligonucleotide for detection of SNP TSC0031610
aaacgccacctta

SEQ ID NO: 126321 - DNA, 13 bp, Artificial Sequence
  Oligonucleotide for detection of SNP TSC0031610
taaggcggcgttt

SEQ ID NO: 126322 - DNA, 13 bp, Artificial Sequence
  Oligonucleotide for detection of SNP TSC0031610
aaacgccgcctta

SEQ ID NO: 126323 - DNA, 13 bp, Artificial Sequence
  Oligonucleotide for detection of SNP TSC0031612
tagttgatagggg

SEQ ID NO: 126324 - DNA, 13 bp, Artificial Sequence
  Oligonucleotide for detection of SNP TSC0031612
cccctatcaacta

SEQ ID NO: 126325 - DNA, 13 bp, Artificial Sequence
  Oligonucleotide for detection of SNP TSC0031612
tagttggtagggg

SEQ ID NO: 126326 - DNA, 13 bp, Artificial Sequence
  Oligonucleotide for detection of SNP TSC0031612
cccctaccaacta

SEQ ID NO: 126327 - DNA, 13 bp, Artificial Sequence
  Oligonucleotide for detection of SNP TSC0031613
agattgagatgta

SEQ ID NO: 126328 - DNA, 13 bp, Artificial Sequence
  Oligonucleotide for detection of SNP TSC0031613
tacatctcaatct

SEQ ID NO: 126329 - DNA, 13 bp, Artificial Sequence
  Oligonucleotide for detection of SNP TSC0031613
agattgtgatgta

SEQ ID NO: 126330 - DNA, 13 bp, Artificial Sequence
  Oligonucleotide for detection of SNP TSC0031613
tacatcacaatct

SEQ ID NO: 126331 - DNA, 13 bp, Artificial Sequence
  Oligonucleotide for detection of SNP TSC0031613
agatcgagatgta

SEQ ID NO: 126332 - DNA, 13 bp, Artificial Sequence
  Oligonucleotide for detection of SNP TSC0031613
tacatctcgatct

SEQ ID NO: 126333 - DNA, 13 bp, Artificial Sequence
  Oligonucleotide for detection of SNP TSC0031613
agatcgtgatgta

SEQ ID NO: 126334 - DNA, 13 bp, Artificial Sequence
  Oligonucleotide for detection of SNP TSC0031613
tacatcacgatct

SEQ ID NO: 126335 - DNA, 13 bp, Artificial Sequence
  Oligonucleotide for detection of SNP TSC0031613
agattgcgatgta

SEQ ID NO: 126336 - DNA, 13 bp, Artificial Sequence
  Oligonucleotide for detection of SNP TSC0031613
tacatcgcaatct

SEQ ID NO: 126337 - DNA, 13 bp, Artificial Sequence
  Oligonucleotide for detection of SNP TSC0031613
agatcgcgatgta

SEQ ID NO: 126338 - DNA, 13 bp, Artificial Sequence
  Oligonucleotide for detection of SNP TSC0031613
tacatcgcgatct

SEQ ID NO: 126339 - DNA, 13 bp, Artificial Sequence
  Oligonucleotide for detection of SNP TSC0031613
tatattttggttt

SEQ ID NO: 126340 - DNA, 13 bp, Artificial Sequence
  Oligonucleotide for detection of SNP TSC0031613
aaaccaaaatata

SEQ ID NO: 126341 - DNA, 13 bp, Artificial Sequence
  Oligonucleotide for detection of SNP TSC0031613
tatattgtggttt

SEQ ID NO: 126342 - DNA, 13 bp, Artificial Sequence
  Oligonucleotide for detection of SNP TSC0031613
aaaccacaatata

SEQ ID NO: 126343 - DNA, 13 bp, Artificial Sequence
  Oligonucleotide for detection of SNP TSC0031613
tatatttcggttt

SEQ ID NO: 126344 - DNA, 13 bp, Artificial Sequence
  Oligonucleotide for detection of SNP TSC0031613
aaaccgaaatata

SEQ ID NO: 126345 - DNA, 13 bp, Artificial Sequence
  Oligonucleotide for detection of SNP TSC0031613
tatatcgtggttt

SEQ ID NO: 126346 - DNA, 13 bp, Artificial Sequence
  Oligonucleotide for detection of SNP TSC0031613
aaaccacgatata

SEQ ID NO: 126347 - DNA, 13 bp, Artificial Sequence
  Oligonucleotide for detection of SNP TSC0031613
tatattgcggttt

SEQ ID NO: 126348 - DNA, 13 bp, Artificial Sequence
  Oligonucleotide for detection of SNP TSC0031613
aaaccgcaatata

SEQ ID NO: 126349 - DNA, 13 bp, Artificial Sequence
  Oligonucleotide for detection of SNP TSC0031613
tatatcgcggttt

SEQ ID NO: 126350 - DNA, 13 bp, Artificial Sequence
  Oligonucleotide for detection of SNP TSC0031613
aaaccgcgatata

SEQ ID NO: 126351 - DNA, 13 bp, Artificial Sequence
  Oligonucleotide for detection of SNP TSC0031615
ggtttagtttagg

SEQ ID NO: 126352 - DNA, 13 bp, Artificial Sequence
  Oligonucleotide for detection of SNP TSC0031615
cctaaactaaacc

SEQ ID NO: 126353 - DNA, 13 bp, Artificial Sequence
  Oligonucleotide for detection of SNP TSC0031615
ggtttaatttagg

SEQ ID NO: 126354 - DNA, 13 bp, Artificial Sequence
  Oligonucleotide for detection of SNP TSC0031615
cctaaattaaacc

SEQ ID NO: 126355 - DNA, 13 bp, Artificial Sequence
  Oligonucleotide for detection of SNP TSC0031616
gattatgattatg

SEQ ID NO: 126356 - DNA, 13 bp, Artificial Sequence
  Oligonucleotide for detection of SNP TSC0031616
cataatcataatc

SEQ ID NO: 126357 - DNA, 13 bp, Artificial Sequence
  Oligonucleotide for detection of SNP TSC0031616
gattattattatg

SEQ ID NO: 126358 - DNA, 13 bp, Artificial Sequence
  Oligonucleotide for detection of SNP TSC0031616
cataataataatc

SEQ ID NO: 126359 - DNA, 13 bp, Artificial Sequence
  Oligonucleotide for detection of SNP TSC0031616
tatagttatagty

SEQ ID NO: 126360 - DNA, 13 bp, Artificial Sequence
  Oligonucleotide for detection of SNP TSC0031616
ractataactata

SEQ ID NO: 126361 - DNA, 13 bp, Artificial Sequence
  Oligonucleotide for detection of SNP TSC0031616
tatagtaatagty

SEQ ID NO: 126362 - DNA, 13 bp, Artificial Sequence
  Oligonucleotide for detection of SNP TSC0031616
ractattactata

SEQ ID NO: 126363 - DNA, 13 bp, Artificial Sequence
  Oligonucleotide for detection of SNP TSC0031617
agattaatttgty

SEQ ID NO: 126364 - DNA, 13 bp, Artificial Sequence
  Oligonucleotide for detection of SNP TSC0031617
racaaattaatct

SEQ ID NO: 126365 - DNA, 13 bp, Artificial Sequence
  Oligonucleotide for detection of SNP TSC0031617
agattattttgty

SEQ ID NO: 126366 - DNA, 13 bp, Artificial Sequence
  Oligonucleotide for detection of SNP TSC0031617
racaaaataatct

SEQ ID NO: 126367 - DNA, 13 bp, Artificial Sequence
  Oligonucleotide for detection of SNP TSC0031617
gataggttggttt

SEQ ID NO: 126368 - DNA, 13 bp, Artificial Sequence
  Oligonucleotide for detection of SNP TSC0031617
aaaccaacctatc

SEQ ID NO: 126369 - DNA, 13 bp, Artificial Sequence
  Oligonucleotide for detection of SNP TSC0031617
gatagggtggttt

SEQ ID NO: 126370 - DNA, 13 bp, Artificial Sequence
  Oligonucleotide for detection of SNP TSC0031617
aaaccaccctatc

SEQ ID NO: 126371 - DNA, 13 bp, Artificial Sequence
  Oligonucleotide for detection of SNP TSC0031618
agttttagttatt

SEQ ID NO: 126372 - DNA, 13 bp, Artificial Sequence
  Oligonucleotide for detection of SNP TSC0031618
aataactaaaact

SEQ ID NO: 126373 - DNA, 13 bp, Artificial Sequence
  Oligonucleotide for detection of SNP TSC0031618
agttttggttatt

SEQ ID NO: 126374 - DNA, 13 bp, Artificial Sequence
  Oligonucleotide for detection of SNP TSC0031618
aataaccaaaact

SEQ ID NO: 126375 - DNA, 13 bp, Artificial Sequence
  Oligonucleotide for detection of SNP TSC0031618
agtttcggttatt

SEQ ID NO: 126376 - DNA, 13 bp, Artificial Sequence
  Oligonucleotide for detection of SNP TSC0031618
aataaccgaaact

SEQ ID NO: 126377 - DNA, 13 bp, Artificial Sequence
  Oligonucleotide for detection of SNP TSC0031620
taaaattgtgaty

SEQ ID NO: 126378 - DNA, 13 bp, Artificial Sequence
  Oligonucleotide for detection of SNP TSC0031620
ratcacaatttta

SEQ ID NO: 126379 - DNA, 13 bp, Artificial Sequence
  Oligonucleotide for detection of SNP TSC0031620
taaaatcgtgaty

SEQ ID NO: 126380 - DNA, 13 bp, Artificial Sequence
  Oligonucleotide for detection of SNP TSC0031620
ratcacgatttta

SEQ ID NO: 126381 - DNA, 13 bp, Artificial Sequence
  Oligonucleotide for detection of SNP TSC0031620
gattatggtttta

SEQ ID NO: 126382 - DNA, 13 bp, Artificial Sequence
  Oligonucleotide for detection of SNP TSC0031620
taaaaccataatc

SEQ ID NO: 126383 - DNA, 13 bp, Artificial Sequence
  Oligonucleotide for detection of SNP TSC0031620
gattatagtttta

SEQ ID NO: 126384 - DNA, 13 bp, Artificial Sequence
  Oligonucleotide for detection of SNP TSC0031620
taaaactataatc

SEQ ID NO: 126385 - DNA, 13 bp, Artificial Sequence
  Oligonucleotide for detection of SNP TSC0031620
gattacggtttta

SEQ ID NO: 126386 - DNA, 13 bp, Artificial Sequence
  Oligonucleotide for detection of SNP TSC0031620
taaaaccgtaatc

SEQ ID NO: 126387 - DNA, 13 bp, Artificial Sequence
  Oligonucleotide for detection of SNP TSC0031623
ggatgaagaaatt

SEQ ID NO: 126388 - DNA, 13 bp, Artificial Sequence
  Oligonucleotide for detection of SNP TSC0031623
aatttcttcatcc

SEQ ID NO: 126389 - DNA, 13 bp, Artificial Sequence
  Oligonucleotide for detection of SNP TSC0031623
ggatgaggaaatt

SEQ ID NO: 126390 - DNA, 13 bp, Artificial Sequence
  Oligonucleotide for detection of SNP TSC0031623
aatttcctcatcc

SEQ ID NO: 126391 - DNA, 13 bp, Artificial Sequence
  Oligonucleotide for detection of SNP TSC0031624
gtttgtatttaaa

SEQ ID NO: 126392 - DNA, 13 bp, Artificial Sequence
  Oligonucleotide for detection of SNP TSC0031624
tttaaatacaaac

SEQ ID NO: 126393 - DNA, 13 bp, Artificial Sequence
  Oligonucleotide for detection of SNP TSC0031624
gtttgtttttaaa

SEQ ID NO: 126394 - DNA, 13 bp, Artificial Sequence
  Oligonucleotide for detection of SNP TSC0031624
tttaaaaacaaac

SEQ ID NO: 126395 - DNA, 13 bp, Artificial Sequence
  Oligonucleotide for detection of SNP TSC0031624
tttgggtataggy

SEQ ID NO: 126396 - DNA, 13 bp, Artificial Sequence
  Oligonucleotide for detection of SNP TSC0031624
rcctatacccaaa

SEQ ID NO: 126397 - DNA, 13 bp, Artificial Sequence
  Oligonucleotide for detection of SNP TSC0031624
tttgggaataggy

SEQ ID NO: 126398 - DNA, 13 bp, Artificial Sequence
  Oligonucleotide for detection of SNP TSC0031624
rcctattcccaaa

SEQ ID NO: 126399 - DNA, 13 bp, Artificial Sequence
  Oligonucleotide for detection of SNP TSC0031626
gtgtggaggtttg

SEQ ID NO: 126400 - DNA, 13 bp, Artificial Sequence
  Oligonucleotide for detection of SNP TSC0031626
caaacctccacac

SEQ ID NO: 126401 - DNA, 13 bp, Artificial Sequence
  Oligonucleotide for detection of SNP TSC0031626
gtgtggtggtttg

SEQ ID NO: 126402 - DNA, 13 bp, Artificial Sequence
  Oligonucleotide for detection of SNP TSC0031626
caaaccaccacac

SEQ ID NO: 126403 - DNA, 13 bp, Artificial Sequence
  Oligonucleotide for detection of SNP TSC0031626
gtgtggaggttcg

SEQ ID NO: 126404 - DNA, 13 bp, Artificial Sequence
  Oligonucleotide for detection of SNP TSC0031626
cgaacctccacac

SEQ ID NO: 126405 - DNA, 13 bp, Artificial Sequence
  Oligonucleotide for detection of SNP TSC0031626
gtgtggtggttcg

SEQ ID NO: 126406 - DNA, 13 bp, Artificial Sequence
  Oligonucleotide for detection of SNP TSC0031626
cgaaccaccacac

SEQ ID NO: 126407 - DNA, 13 bp, Artificial Sequence
  Oligonucleotide for detection of SNP TSC0031626
tgggtttttatay

SEQ ID NO: 126408 - DNA, 13 bp, Artificial Sequence
  Oligonucleotide for detection of SNP TSC0031626
rtataaaaaccca

SEQ ID NO: 126409 - DNA, 13 bp, Artificial Sequence
  Oligonucleotide for detection of SNP TSC0031626
tgggttattatay

SEQ ID NO: 126410 - DNA, 13 bp, Artificial Sequence
  Oligonucleotide for detection of SNP TSC0031626
rtataataaccca

SEQ ID NO: 126411 - DNA, 13 bp, Artificial Sequence
  Oligonucleotide for detection of SNP TSC0031626
cgggtttttatay

SEQ ID NO: 126412 - DNA, 13 bp, Artificial Sequence
  Oligonucleotide for detection of SNP TSC0031626
rtataaaaacccg

SEQ ID NO: 126413 - DNA, 13 bp, Artificial Sequence
  Oligonucleotide for detection of SNP TSC0031626
cgggttattatay

SEQ ID NO: 126414 - DNA, 13 bp, Artificial Sequence
  Oligonucleotide for detection of SNP TSC0031626
rtataataacccg

SEQ ID NO: 126415 - DNA, 13 bp, Artificial Sequence
  Oligonucleotide for detection of SNP TSC0031627
agatcgtgttatt

SEQ ID NO: 126416 - DNA, 13 bp, Artificial Sequence
  Oligonucleotide for detection of SNP TSC0031627
aataacacgatct

SEQ ID NO: 126417 - DNA, 13 bp, Artificial Sequence
  Oligonucleotide for detection of SNP TSC0031627
agatcgcgttatt

SEQ ID NO: 126418 - DNA, 13 bp, Artificial Sequence
  Oligonucleotide for detection of SNP TSC0031627
aataacgcgatct

SEQ ID NO: 126419 - DNA, 13 bp, Artificial Sequence
  Oligonucleotide for detection of SNP TSC0031627
agtgatgtgattt

SEQ ID NO: 126420 - DNA, 13 bp, Artificial Sequence
  Oligonucleotide for detection of SNP TSC0031627
aaatcacatcact

SEQ ID NO: 126421 - DNA, 13 bp, Artificial Sequence
  Oligonucleotide for detection of SNP TSC0031627
agtgatatgattt

SEQ ID NO: 126422 - DNA, 13 bp, Artificial Sequence
  Oligonucleotide for detection of SNP TSC0031627
aaatcatatcact

SEQ ID NO: 126423 - DNA, 13 bp, Artificial Sequence
  Oligonucleotide for detection of SNP TSC0031627
agtgacgtgattt

SEQ ID NO: 126424 - DNA, 13 bp, Artificial Sequence
  Oligonucleotide for detection of SNP TSC0031627
aaatcacgtcact

SEQ ID NO: 126425 - DNA, 13 bp, Artificial Sequence
  Oligonucleotide for detection of SNP TSC0031627
agtgatacgattt

SEQ ID NO: 126426 - DNA, 13 bp, Artificial Sequence
  Oligonucleotide for detection of SNP TSC0031627
aaatcgtatcact

SEQ ID NO: 126427 - DNA, 13 bp, Artificial Sequence
  Oligonucleotide for detection of SNP TSC0031627
agtgatgcgattt

SEQ ID NO: 126428 - DNA, 13 bp, Artificial Sequence
  Oligonucleotide for detection of SNP TSC0031627
aaatcgcatcact

SEQ ID NO: 126429 - DNA, 13 bp, Artificial Sequence
  Oligonucleotide for detection of SNP TSC0031627
agtgacgcgattt

SEQ ID NO: 126430 - DNA, 13 bp, Artificial Sequence
  Oligonucleotide for detection of SNP TSC0031627
aaatcgcgtcact

SEQ ID NO: 126431 - DNA, 13 bp, Artificial Sequence
  Oligonucleotide for detection of SNP TSC0031628
atgataaaggtaa

SEQ ID NO: 126432 - DNA, 13 bp, Artificial Sequence
  Oligonucleotide for detection of SNP TSC0031628
ttacctttatcat

SEQ ID NO: 126433 - DNA, 13 bp, Artificial Sequence
  Oligonucleotide for detection of SNP TSC0031628
atgatataggtaa

SEQ ID NO: 126434 - DNA, 13 bp, Artificial Sequence
  Oligonucleotide for detection of SNP TSC0031628
ttacctatatcat

SEQ ID NO: 126435 - DNA, 13 bp, Artificial Sequence
  Oligonucleotide for detection of SNP TSC0031628
ttgtttttgttat

SEQ ID NO: 126436 - DNA, 13 bp, Artificial Sequence
  Oligonucleotide for detection of SNP TSC0031628
ataacaaaaacaa

SEQ ID NO: 126437 - DNA, 13 bp, Artificial Sequence
  Oligonucleotide for detection of SNP TSC0031628
ttgtttatgttat

SEQ ID NO: 126438 - DNA, 13 bp, Artificial Sequence
  Oligonucleotide for detection of SNP TSC0031628
ataacataaacaa

SEQ ID NO: 126439 - DNA, 13 bp, Artificial Sequence
  Oligonucleotide for detection of SNP TSC0031629
ttttaggtttggg

SEQ ID NO: 126440 - DNA, 13 bp, Artificial Sequence
  Oligonucleotide for detection of SNP TSC0031629
cccaaacctaaaa

SEQ ID NO: 126441 - DNA, 13 bp, Artificial Sequence
  Oligonucleotide for detection of SNP TSC0031629
ttttagatttggg

SEQ ID NO: 126442 - DNA, 13 bp, Artificial Sequence
  Oligonucleotide for detection of SNP TSC0031629
cccaaatctaaaa

SEQ ID NO: 126443 - DNA, 13 bp, Artificial Sequence
  Oligonucleotide for detection of SNP TSC0031637
aggttagttaata

SEQ ID NO: 126444 - DNA, 13 bp, Artificial Sequence
  Oligonucleotide for detection of SNP TSC0031637
tattaactaacct

SEQ ID NO: 126445 - DNA, 13 bp, Artificial Sequence
  Oligonucleotide for detection of SNP TSC0031637
aggttaattaata

SEQ ID NO: 126446 - DNA, 13 bp, Artificial Sequence
  Oligonucleotide for detection of SNP TSC0031637
tattaattaacct

SEQ ID NO: 126447 - DNA, 13 bp, Artificial Sequence
  Oligonucleotide for detection of SNP TSC0031638
ttagaaagttaaa

SEQ ID NO: 126448 - DNA, 13 bp, Artificial Sequence
  Oligonucleotide for detection of SNP TSC0031638
tttaactttctaa

SEQ ID NO: 126449 - DNA, 13 bp, Artificial Sequence
  Oligonucleotide for detection of SNP TSC0031638
ttagaaggttaaa

SEQ ID NO: 126450 - DNA, 13 bp, Artificial Sequence
  Oligonucleotide for detection of SNP TSC0031638
tttaaccttctaa

SEQ ID NO: 126451 - DNA, 13 bp, Artificial Sequence
  Oligonucleotide for detection of SNP TSC0031640
agtttaatgtttt

SEQ ID NO: 126452 - DNA, 13 bp, Artificial Sequence
  Oligonucleotide for detection of SNP TSC0031640
aaaacattaaact

SEQ ID NO: 126453 - DNA, 13 bp, Artificial Sequence
  Oligonucleotide for detection of SNP TSC0031640
agtttagtgtttt

SEQ ID NO: 126454 - DNA, 13 bp, Artificial Sequence
  Oligonucleotide for detection of SNP TSC0031640
aaaacactaaact

SEQ ID NO: 126455 - DNA, 13 bp, Artificial Sequence
  Oligonucleotide for detection of SNP TSC0031643
gttagggtgtgaa

SEQ ID NO: 126456 - DNA, 13 bp, Artificial Sequence
  Oligonucleotide for detection of SNP TSC0031643
ttcacaccctaac

SEQ ID NO: 126457 - DNA, 13 bp, Artificial Sequence
  Oligonucleotide for detection of SNP TSC0031643
gttaggatgtgaa

SEQ ID NO: 126458 - DNA, 13 bp, Artificial Sequence
  Oligonucleotide for detection of SNP TSC0031643
ttcacatcctaac

SEQ ID NO: 126459 - DNA, 13 bp, Artificial Sequence
  Oligonucleotide for detection of SNP TSC0031644
tttggaatttaaa

SEQ ID NO: 126460 - DNA, 13 bp, Artificial Sequence
  Oligonucleotide for detection of SNP TSC0031644
tttaaattccaaa

SEQ ID NO: 126461 - DNA, 13 bp, Artificial Sequence
  Oligonucleotide for detection of SNP TSC0031644
tttggagtttaaa

SEQ ID NO: 126462 - DNA, 13 bp, Artificial Sequence
  Oligonucleotide for detection of SNP TSC0031644
tttaaactccaaa

SEQ ID NO: 126463 - DNA, 13 bp, Artificial Sequence
  Oligonucleotide for detection of SNP TSC0031645
tagggaataggga

SEQ ID NO: 126464 - DNA, 13 bp, Artificial Sequence
  Oligonucleotide for detection of SNP TSC0031645
tccctattcccta

SEQ ID NO: 126465 - DNA, 13 bp, Artificial Sequence
  Oligonucleotide for detection of SNP TSC0031645
tagggagtaggga

SEQ ID NO: 126466 - DNA, 13 bp, Artificial Sequence
  Oligonucleotide for detection of SNP TSC0031645
tccctactcccta

SEQ ID NO: 126467 - DNA, 13 bp, Artificial Sequence
  Oligonucleotide for detection of SNP TSC0031646
tgatttatgggag

SEQ ID NO: 126468 - DNA, 13 bp, Artificial Sequence
  Oligonucleotide for detection of SNP TSC0031646
ctcccataaatca

SEQ ID NO: 126469 - DNA, 13 bp, Artificial Sequence
  Oligonucleotide for detection of SNP TSC0031646
tgatttgtgggag

SEQ ID NO: 126470 - DNA, 13 bp, Artificial Sequence
  Oligonucleotide for detection of SNP TSC0031646
ctcccacaaatca

SEQ ID NO: 126471 - DNA, 13 bp, Artificial Sequence
  Oligonucleotide for detection of SNP TSC0031646
tgattcgtgggag

SEQ ID NO: 126472 - DNA, 13 bp, Artificial Sequence
  Oligonucleotide for detection of SNP TSC0031646
ctcccacgaatca

SEQ ID NO: 126473 - DNA, 13 bp, Artificial Sequence
  Oligonucleotide for detection of SNP TSC0031646
tttttacggatta

SEQ ID NO: 126474 - DNA, 13 bp, Artificial Sequence
  Oligonucleotide for detection of SNP TSC0031646
taatccgtaaaaa

SEQ ID NO: 126475 - DNA, 13 bp, Artificial Sequence
  Oligonucleotide for detection of SNP TSC0031647
ttgagtggttgag

SEQ ID NO: 126476 - DNA, 13 bp, Artificial Sequence
  Oligonucleotide for detection of SNP TSC0031647
ctcaaccactcaa

SEQ ID NO: 126477 - DNA, 13 bp, Artificial Sequence
  Oligonucleotide for detection of SNP TSC0031647
ttgagttgttgag

SEQ ID NO: 126478 - DNA, 13 bp, Artificial Sequence
  Oligonucleotide for detection of SNP TSC0031647
ctcaacaactcaa

SEQ ID NO: 126479 - DNA, 13 bp, Artificial Sequence
  Oligonucleotide for detection of SNP TSC0031647
tttagttatttaa

SEQ ID NO: 126480 - DNA, 13 bp, Artificial Sequence
  Oligonucleotide for detection of SNP TSC0031647
ttaaataactaaa

SEQ ID NO: 126481 - DNA, 13 bp, Artificial Sequence
  Oligonucleotide for detection of SNP TSC0031647
tttagtaatttaa

SEQ ID NO: 126482 - DNA, 13 bp, Artificial Sequence
  Oligonucleotide for detection of SNP TSC0031647
ttaaattactaaa

SEQ ID NO: 126483 - DNA, 13 bp, Artificial Sequence
  Oligonucleotide for detection of SNP TSC0031648
gaaggaatagaty

SEQ ID NO: 126484 - DNA, 13 bp, Artificial Sequence
  Oligonucleotide for detection of SNP TSC0031648
ratctattccttc

SEQ ID NO: 126485 - DNA, 13 bp, Artificial Sequence
  Oligonucleotide for detection of SNP TSC0031648
gaaggattagaty

SEQ ID NO: 126486 - DNA, 13 bp, Artificial Sequence
  Oligonucleotide for detection of SNP TSC0031648
ratctaatccttc

SEQ ID NO: 126487 - DNA, 13 bp, Artificial Sequence
  Oligonucleotide for detection of SNP TSC0031649
aaatagtaataga

SEQ ID NO: 126488 - DNA, 13 bp, Artificial Sequence
  Oligonucleotide for detection of SNP TSC0031649
tctattactattt

SEQ ID NO: 126489 - DNA, 13 bp, Artificial Sequence
  Oligonucleotide for detection of SNP TSC0031649
aaataggaataga

SEQ ID NO: 126490 - DNA, 13 bp, Artificial Sequence
  Oligonucleotide for detection of SNP TSC0031649
tctattcctattt

SEQ ID NO: 126491 - DNA, 13 bp, Artificial Sequence
  Oligonucleotide for detection of SNP TSC0031650
tttgtaatttaag

SEQ ID NO: 126492 - DNA, 13 bp, Artificial Sequence
  Oligonucleotide for detection of SNP TSC0031650
cttaaattacaaa

SEQ ID NO: 126493 - DNA, 13 bp, Artificial Sequence
  Oligonucleotide for detection of SNP TSC0031650
tttgtagtttaag

SEQ ID NO: 126494 - DNA, 13 bp, Artificial Sequence
  Oligonucleotide for detection of SNP TSC0031650
cttaaactacaaa

SEQ ID NO: 126495 - DNA, 13 bp, Artificial Sequence
  Oligonucleotide for detection of SNP TSC0031652
agtgattaggaag

SEQ ID NO: 126496 - DNA, 13 bp, Artificial Sequence
  Oligonucleotide for detection of SNP TSC0031652
cttcctaatcact

SEQ ID NO: 126497 - DNA, 13 bp, Artificial Sequence
  Oligonucleotide for detection of SNP TSC0031652
agtgatgaggaag

SEQ ID NO: 126498 - DNA, 13 bp, Artificial Sequence
  Oligonucleotide for detection of SNP TSC0031652
cttcctcatcact

SEQ ID NO: 126499 - DNA, 13 bp, Artificial Sequence
  Oligonucleotide for detection of SNP TSC0031652
agtgacgaggaag

SEQ ID NO: 126500 - DNA, 13 bp, Artificial Sequence
  Oligonucleotide for detection of SNP TSC0031652
cttcctcgtcact

SEQ ID NO: 126501 - DNA, 13 bp, Artificial Sequence
  Oligonucleotide for detection of SNP TSC0031654
ttatttgaagtag

SEQ ID NO: 126502 - DNA, 13 bp, Artificial Sequence
  Oligonucleotide for detection of SNP TSC0031654
ctacttcaaataa

SEQ ID NO: 126503 - DNA, 13 bp, Artificial Sequence
  Oligonucleotide for detection of SNP TSC0031654
ttatttaaagtag

SEQ ID NO: 126504 - DNA, 13 bp, Artificial Sequence
  Oligonucleotide for detection of SNP TSC0031654
ctactttaaataa

SEQ ID NO: 126505 - DNA, 13 bp, Artificial Sequence
  Oligonucleotide for detection of SNP TSC0031657
gtttattatgggy

SEQ ID NO: 126506 - DNA, 13 bp, Artificial Sequence
  Oligonucleotide for detection of SNP TSC0031657
rcccataataaac

SEQ ID NO: 126507 - DNA, 13 bp, Artificial Sequence
  Oligonucleotide for detection of SNP TSC0031657
gtttatgatgggy

SEQ ID NO: 126508 - DNA, 13 bp, Artificial Sequence
  Oligonucleotide for detection of SNP TSC0031657
rcccatcataaac

SEQ ID NO: 126509 - DNA, 13 bp, Artificial Sequence
  Oligonucleotide for detection of SNP TSC0031657
gtttatgatgagy

SEQ ID NO: 126510 - DNA, 13 bp, Artificial Sequence
  Oligonucleotide for detection of SNP TSC0031657
rctcatcataaac

SEQ ID NO: 126511 - DNA, 13 bp, Artificial Sequence
  Oligonucleotide for detection of SNP TSC0031657
gtttattatgagy

SEQ ID NO: 126512 - DNA, 13 bp, Artificial Sequence
  Oligonucleotide for detection of SNP TSC0031657
rctcataataaac

SEQ ID NO: 126513 - DNA, 13 bp, Artificial Sequence
  Oligonucleotide for detection of SNP TSC0031658
gtatttagtttgy

SEQ ID NO: 126514 - DNA, 13 bp, Artificial Sequence
  Oligonucleotide for detection of SNP TSC0031658
rcaaactaaatac

SEQ ID NO: 126515 - DNA, 13 bp, Artificial Sequence
  Oligonucleotide for detection of SNP TSC0031658
gtatttggtttgy

SEQ ID NO: 126516 - DNA, 13 bp, Artificial Sequence
  Oligonucleotide for detection of SNP TSC0031658
rcaaaccaaatac

SEQ ID NO: 126517 - DNA, 13 bp, Artificial Sequence
  Oligonucleotide for detection of SNP TSC0031658
gtatttagttcgy

SEQ ID NO: 126518 - DNA, 13 bp, Artificial Sequence
  Oligonucleotide for detection of SNP TSC0031658
rcgaactaaatac

SEQ ID NO: 126519 - DNA, 13 bp, Artificial Sequence
  Oligonucleotide for detection of SNP TSC0031658
gtattcggtttgy

SEQ ID NO: 126520 - DNA, 13 bp, Artificial Sequence
  Oligonucleotide for detection of SNP TSC0031658
rcaaaccgaatac

SEQ ID NO: 126521 - DNA, 13 bp, Artificial Sequence
  Oligonucleotide for detection of SNP TSC0031658
gtatttggttcgy

SEQ ID NO: 126522 - DNA, 13 bp, Artificial Sequence
  Oligonucleotide for detection of SNP TSC0031658
rcgaaccaaatac

SEQ ID NO: 126523 - DNA, 13 bp, Artificial Sequence
  Oligonucleotide for detection of SNP TSC0031658
gtattcggttcgy

SEQ ID NO: 126524 - DNA, 13 bp, Artificial Sequence
  Oligonucleotide for detection of SNP TSC0031658
rcgaaccgaatac

SEQ ID NO: 126525 - DNA, 13 bp, Artificial Sequence
  Oligonucleotide for detection of SNP TSC0031658
gtgggttgagtgy

SEQ ID NO: 126526 - DNA, 13 bp, Artificial Sequence
  Oligonucleotide for detection of SNP TSC0031658
rcactcaacccac

SEQ ID NO: 126527 - DNA, 13 bp, Artificial Sequence
  Oligonucleotide for detection of SNP TSC0031658
gcgggttgagtgy

SEQ ID NO: 126528 - DNA, 13 bp, Artificial Sequence
  Oligonucleotide for detection of SNP TSC0031658
rcactcaacccgc

SEQ ID NO: 126529 - DNA, 13 bp, Artificial Sequence
  Oligonucleotide for detection of SNP TSC0031658
gtgggtcgagtgy

SEQ ID NO: 126530 - DNA, 13 bp, Artificial Sequence
  Oligonucleotide for detection of SNP TSC0031658
rcactcgacccac

SEQ ID NO: 126531 - DNA, 13 bp, Artificial Sequence
  Oligonucleotide for detection of SNP TSC0031658
gcgggtcgagtgy

SEQ ID NO: 126532 - DNA, 13 bp, Artificial Sequence
  Oligonucleotide for detection of SNP TSC0031658
rcactcgacccgc

SEQ ID NO: 126533 - DNA, 13 bp, Artificial Sequence
  Oligonucleotide for detection of SNP TSC0031661
tttggtatgatgg

SEQ ID NO: 126534 - DNA, 13 bp, Artificial Sequence
  Oligonucleotide for detection of SNP TSC0031661
ccatcataccaaa

SEQ ID NO: 126535 - DNA, 13 bp, Artificial Sequence
  Oligonucleotide for detection of SNP TSC0031661
tttggtgtgatgg

SEQ ID NO: 126536 - DNA, 13 bp, Artificial Sequence
  Oligonucleotide for detection of SNP TSC0031661
ccatcacaccaaa

SEQ ID NO: 126537 - DNA, 13 bp, Artificial Sequence
  Oligonucleotide for detection of SNP TSC0031669
tttagtggtgtag

SEQ ID NO: 126538 - DNA, 13 bp, Artificial Sequence
  Oligonucleotide for detection of SNP TSC0031669
ctacaccactaaa

SEQ ID NO: 126539 - DNA, 13 bp, Artificial Sequence
  Oligonucleotide for detection of SNP TSC0031669
tttagtagtgtag

SEQ ID NO: 126540 - DNA, 13 bp, Artificial Sequence
  Oligonucleotide for detection of SNP TSC0031669
ctacactactaaa

SEQ ID NO: 126541 - DNA, 13 bp, Artificial Sequence
  Oligonucleotide for detection of SNP TSC0031670
ggtgttaagtgtg

SEQ ID NO: 126542 - DNA, 13 bp, Artificial Sequence
  Oligonucleotide for detection of SNP TSC0031670
cacacttaacacc

SEQ ID NO: 126543 - DNA, 13 bp, Artificial Sequence
  Oligonucleotide for detection of SNP TSC0031670
ggtgttgagtgtg

SEQ ID NO: 126544 - DNA, 13 bp, Artificial Sequence
  Oligonucleotide for detection of SNP TSC0031670
cacactcaacacc

SEQ ID NO: 126545 - DNA, 13 bp, Artificial Sequence
  Oligonucleotide for detection of SNP TSC0031670
ggcgttaagtgtg

SEQ ID NO: 126546 - DNA, 13 bp, Artificial Sequence
  Oligonucleotide for detection of SNP TSC0031670
cacacttaacgcc

SEQ ID NO: 126547 - DNA, 13 bp, Artificial Sequence
  Oligonucleotide for detection of SNP TSC0031670
ggcgttgagtgtg

SEQ ID NO: 126548 - DNA, 13 bp, Artificial Sequence
  Oligonucleotide for detection of SNP TSC0031670
cacactcaacgcc

SEQ ID NO: 126549 - DNA, 13 bp, Artificial Sequence
  Oligonucleotide for detection of SNP TSC0031670
ggtgttaagcgtg

SEQ ID NO: 126550 - DNA, 13 bp, Artificial Sequence
  Oligonucleotide for detection of SNP TSC0031670
cacgcttaacacc

SEQ ID NO: 126551 - DNA, 13 bp, Artificial Sequence
  Oligonucleotide for detection of SNP TSC0031670
ggtgtcgagtgtg

SEQ ID NO: 126552 - DNA, 13 bp, Artificial Sequence
  Oligonucleotide for detection of SNP TSC0031670
cacactcgacacc

SEQ ID NO: 126553 - DNA, 13 bp, Artificial Sequence
  Oligonucleotide for detection of SNP TSC0031670
ggtgttaagtgcg

SEQ ID NO: 126554 - DNA, 13 bp, Artificial Sequence
  Oligonucleotide for detection of SNP TSC0031670
cgcacttaacacc

SEQ ID NO: 126555 - DNA, 13 bp, Artificial Sequence
  Oligonucleotide for detection of SNP TSC0031670
ggtgttgagcgtg

SEQ ID NO: 126556 - DNA, 13 bp, Artificial Sequence
  Oligonucleotide for detection of SNP TSC0031670
cacgctcaacacc

SEQ ID NO: 126557 - DNA, 13 bp, Artificial Sequence
  Oligonucleotide for detection of SNP TSC0031670
ggcgttaagcgtg

SEQ ID NO: 126558 - DNA, 13 bp, Artificial Sequence
  Oligonucleotide for detection of SNP TSC0031670
cacgcttaacgcc

SEQ ID NO: 126559 - DNA, 13 bp, Artificial Sequence
  Oligonucleotide for detection of SNP TSC0031670
ggtgttgagtgcg

SEQ ID NO: 126560 - DNA, 13 bp, Artificial Sequence
  Oligonucleotide for detection of SNP TSC0031670
cgcactcaacacc

SEQ ID NO: 126561 - DNA, 13 bp, Artificial Sequence
  Oligonucleotide for detection of SNP TSC0031670
ggcgttaagtgcg

SEQ ID NO: 126562 - DNA, 13 bp, Artificial Sequence
  Oligonucleotide for detection of SNP TSC0031670
cgcacttaacgcc

SEQ ID NO: 126563 - DNA, 13 bp, Artificial Sequence
  Oligonucleotide for detection of SNP TSC0031670
ggcgtcgagtgtg

SEQ ID NO: 126564 - DNA, 13 bp, Artificial Sequence
  Oligonucleotide for detection of SNP TSC0031670
cacactcgacgcc

SEQ ID NO: 126565 - DNA, 13 bp, Artificial Sequence
  Oligonucleotide for detection of SNP TSC0031670
ggtgttaagcgcg

SEQ ID NO: 126566 - DNA, 13 bp, Artificial Sequence
  Oligonucleotide for detection of SNP TSC0031670
cgcgcttaacacc

SEQ ID NO: 126567 - DNA, 13 bp, Artificial Sequence
  Oligonucleotide for detection of SNP TSC0031670
ggcgttgagcgtg

SEQ ID NO: 126568 - DNA, 13 bp, Artificial Sequence
  Oligonucleotide for detection of SNP TSC0031670
cacgctcaacgcc

SEQ ID NO: 126569 - DNA, 13 bp, Artificial Sequence
  Oligonucleotide for detection of SNP TSC0031670
ggcgttaagcgcg

SEQ ID NO: 126570 - DNA, 13 bp, Artificial Sequence
  Oligonucleotide for detection of SNP TSC0031670
cgcgcttaacgcc

SEQ ID NO: 126571 - DNA, 13 bp, Artificial Sequence
  Oligonucleotide for detection of SNP TSC0031670
ggcgttgagtgcg

SEQ ID NO: 126572 - DNA, 13 bp, Artificial Sequence
  Oligonucleotide for detection of SNP TSC0031670
cgcactcaacgcc

SEQ ID NO: 126573 - DNA, 13 bp, Artificial Sequence
  Oligonucleotide for detection of SNP TSC0031670
ggtgtcgagcgtg

SEQ ID NO: 126574 - DNA, 13 bp, Artificial Sequence
  Oligonucleotide for detection of SNP TSC0031670
cacgctcgacacc

SEQ ID NO: 126575 - DNA, 13 bp, Artificial Sequence
  Oligonucleotide for detection of SNP TSC0031670
ggtgtcgagtgcg

SEQ ID NO: 126576 - DNA, 13 bp, Artificial Sequence
  Oligonucleotide for detection of SNP TSC0031670
cgcactcgacacc

SEQ ID NO: 126577 - DNA, 13 bp, Artificial Sequence
  Oligonucleotide for detection of SNP TSC0031670
ggtgttgagcgcg

SEQ ID NO: 126578 - DNA, 13 bp, Artificial Sequence
  Oligonucleotide for detection of SNP TSC0031670
cgcgctcaacacc

SEQ ID NO: 126579 - DNA, 13 bp, Artificial Sequence
  Oligonucleotide for detection of SNP TSC0031670
ggcgtcgagcgtg

SEQ ID NO: 126580 - DNA, 13 bp, Artificial Sequence
  Oligonucleotide for detection of SNP TSC0031670
cacgctcgacgcc

SEQ ID NO: 126581 - DNA, 13 bp, Artificial Sequence
  Oligonucleotide for detection of SNP TSC0031670
ggcgtcgagtgcg

SEQ ID NO: 126582 - DNA, 13 bp, Artificial Sequence
  Oligonucleotide for detection of SNP TSC0031670
cgcactcgacgcc

SEQ ID NO: 126583 - DNA, 13 bp, Artificial Sequence
  Oligonucleotide for detection of SNP TSC0031670
ggcgttgagcgcg

SEQ ID NO: 126584 - DNA, 13 bp, Artificial Sequence
  Oligonucleotide for detection of SNP TSC0031670
cgcgctcaacgcc

SEQ ID NO: 126585 - DNA, 13 bp, Artificial Sequence
  Oligonucleotide for detection of SNP TSC0031670
ggtgtcgagcgcg

SEQ ID NO: 126586 - DNA, 13 bp, Artificial Sequence
  Oligonucleotide for detection of SNP TSC0031670
cgcgctcgacacc

SEQ ID NO: 126587 - DNA, 13 bp, Artificial Sequence
  Oligonucleotide for detection of SNP TSC0031670
ggcgtcgagcgcg

SEQ ID NO: 126588 - DNA, 13 bp, Artificial Sequence
  Oligonucleotide for detection of SNP TSC0031670
cgcgctcgacgcc

SEQ ID NO: 126589 - DNA, 13 bp, Artificial Sequence
  Oligonucleotide for detection of SNP TSC0031670
tgtgtttgatgty

SEQ ID NO: 126590 - DNA, 13 bp, Artificial Sequence
  Oligonucleotide for detection of SNP TSC0031670
racatcaaacaca

SEQ ID NO: 126591 - DNA, 13 bp, Artificial Sequence
  Oligonucleotide for detection of SNP TSC0031670
cgtgtttgatgty

SEQ ID NO: 126592 - DNA, 13 bp, Artificial Sequence
  Oligonucleotide for detection of SNP TSC0031670
racatcaaacacg

SEQ ID NO: 126593 - DNA, 13 bp, Artificial Sequence
  Oligonucleotide for detection of SNP TSC0031670
tgcgtttgatgty

SEQ ID NO: 126594 - DNA, 13 bp, Artificial Sequence
  Oligonucleotide for detection of SNP TSC0031670
racatcaaacgca

SEQ ID NO: 126595 - DNA, 13 bp, Artificial Sequence
  Oligonucleotide for detection of SNP TSC0031670
tgtgtttgacgty

SEQ ID NO: 126596 - DNA, 13 bp, Artificial Sequence
  Oligonucleotide for detection of SNP TSC0031670
racgtcaaacaca

SEQ ID NO: 126597 - DNA, 13 bp, Artificial Sequence
  Oligonucleotide for detection of SNP TSC0031670
tgtgttcgatgty

SEQ ID NO: 126598 - DNA, 13 bp, Artificial Sequence
  Oligonucleotide for detection of SNP TSC0031670
racatcgaacaca

SEQ ID NO: 126599 - DNA, 13 bp, Artificial Sequence
  Oligonucleotide for detection of SNP TSC0031670
cgcgtttgatgty

SEQ ID NO: 126600 - DNA, 13 bp, Artificial Sequence
  Oligonucleotide for detection of SNP TSC0031670
racatcaaacgcg

SEQ ID NO: 126601 - DNA, 13 bp, Artificial Sequence
  Oligonucleotide for detection of SNP TSC0031670
cgtgtttgacgty

SEQ ID NO: 126602 - DNA, 13 bp, Artificial Sequence
  Oligonucleotide for detection of SNP TSC0031670
racgtcaaacacg

SEQ ID NO: 126603 - DNA, 13 bp, Artificial Sequence
  Oligonucleotide for detection of SNP TSC0031670
tgcgtttgacgty

SEQ ID NO: 126604 - DNA, 13 bp, Artificial Sequence
  Oligonucleotide for detection of SNP TSC0031670
racgtcaaacgca

SEQ ID NO: 126605 - DNA, 13 bp, Artificial Sequence
  Oligonucleotide for detection of SNP TSC0031670
cgtgttcgatgty

SEQ ID NO: 126606 - DNA, 13 bp, Artificial Sequence
  Oligonucleotide for detection of SNP TSC0031670
racatcgaacacg

SEQ ID NO: 126607 - DNA, 13 bp, Artificial Sequence
  Oligonucleotide for detection of SNP TSC0031670
cgcgtttgacgty

SEQ ID NO: 126608 - DNA, 13 bp, Artificial Sequence
  Oligonucleotide for detection of SNP TSC0031670
racgtcaaacgcg

SEQ ID NO: 126609 - DNA, 13 bp, Artificial Sequence
  Oligonucleotide for detection of SNP TSC0031670
tgcgttcgatgty

SEQ ID NO: 126610 - DNA, 13 bp, Artificial Sequence
  Oligonucleotide for detection of SNP TSC0031670
racatcgaacgca

SEQ ID NO: 126611 - DNA, 13 bp, Artificial Sequence
  Oligonucleotide for detection of SNP TSC0031670
tgtgttcgacgty

SEQ ID NO: 126612 - DNA, 13 bp, Artificial Sequence
  Oligonucleotide for detection of SNP TSC0031670
racgtcgaacaca

SEQ ID NO: 126613 - DNA, 13 bp, Artificial Sequence
  Oligonucleotide for detection of SNP TSC0031670
cgcgttcgatgty

SEQ ID NO: 126614 - DNA, 13 bp, Artificial Sequence
  Oligonucleotide for detection of SNP TSC0031670
racatcgaacgcg

SEQ ID NO: 126615 - DNA, 13 bp, Artificial Sequence
  Oligonucleotide for detection of SNP TSC0031670
cgtgttcgacgty

SEQ ID NO: 126616 - DNA, 13 bp, Artificial Sequence
  Oligonucleotide for detection of SNP TSC0031670
racgtcgaacacg

SEQ ID NO: 126617 - DNA, 13 bp, Artificial Sequence
  Oligonucleotide for detection of SNP TSC0031670
tgcgttcgacgty

SEQ ID NO: 126618 - DNA, 13 bp, Artificial Sequence
  Oligonucleotide for detection of SNP TSC0031670
racgtcgaacgca

SEQ ID NO: 126619 - DNA, 13 bp, Artificial Sequence
  Oligonucleotide for detection of SNP TSC0031670
cgcgttcgacgty

SEQ ID NO: 126620 - DNA, 13 bp, Artificial Sequence
  Oligonucleotide for detection of SNP TSC0031670
racgtcgaacgcg

SEQ ID NO: 126621 - DNA, 13 bp, Artificial Sequence
  Oligonucleotide for detection of SNP TSC0031671
tattttatattta

SEQ ID NO: 126622 - DNA, 13 bp, Artificial Sequence
  Oligonucleotide for detection of SNP TSC0031671
taaatataaaata

SEQ ID NO: 126623 - DNA, 13 bp, Artificial Sequence
  Oligonucleotide for detection of SNP TSC0031671
tattttgtattta

SEQ ID NO: 126624 - DNA, 13 bp, Artificial Sequence
  Oligonucleotide for detection of SNP TSC0031671
taaatacaaaata

SEQ ID NO: 126625 - DNA, 13 bp, Artificial Sequence
  Oligonucleotide for detection of SNP TSC0031672
ttatttgtgtagt

SEQ ID NO: 126626 - DNA, 13 bp, Artificial Sequence
  Oligonucleotide for detection of SNP TSC0031672
actacacaaataa

SEQ ID NO: 126627 - DNA, 13 bp, Artificial Sequence
  Oligonucleotide for detection of SNP TSC0031672
ttatttttgtagt

SEQ ID NO: 126628 - DNA, 13 bp, Artificial Sequence
  Oligonucleotide for detection of SNP TSC0031672
actacaaaaataa

SEQ ID NO: 126629 - DNA, 13 bp, Artificial Sequence
  Oligonucleotide for detection of SNP TSC0031672
ttatttgcgtagt

SEQ ID NO: 126630 - DNA, 13 bp, Artificial Sequence
  Oligonucleotide for detection of SNP TSC0031672
actacgcaaataa

SEQ ID NO: 126631 - DNA, 13 bp, Artificial Sequence
  Oligonucleotide for detection of SNP TSC0031672
ttattttcgtagt

SEQ ID NO: 126632 - DNA, 13 bp, Artificial Sequence
  Oligonucleotide for detection of SNP TSC0031672
actacgaaaataa

SEQ ID NO: 126633 - DNA, 13 bp, Artificial Sequence
  Oligonucleotide for detection of SNP TSC0031672
attatgtaagtgg

SEQ ID NO: 126634 - DNA, 13 bp, Artificial Sequence
  Oligonucleotide for detection of SNP TSC0031672
ccacttacataat

SEQ ID NO: 126635 - DNA, 13 bp, Artificial Sequence
  Oligonucleotide for detection of SNP TSC0031672
attatgaaagtgg

SEQ ID NO: 126636 - DNA, 13 bp, Artificial Sequence
  Oligonucleotide for detection of SNP TSC0031672
ccactttcataat

SEQ ID NO: 126637 - DNA, 13 bp, Artificial Sequence
  Oligonucleotide for detection of SNP TSC0031672
attacgtaagtgg

SEQ ID NO: 126638 - DNA, 13 bp, Artificial Sequence
  Oligonucleotide for detection of SNP TSC0031672
ccacttacgtaat

SEQ ID NO: 126639 - DNA, 13 bp, Artificial Sequence
  Oligonucleotide for detection of SNP TSC0031672
attacgaaagtgg

SEQ ID NO: 126640 - DNA, 13 bp, Artificial Sequence
  Oligonucleotide for detection of SNP TSC0031672
ccactttcgtaat

SEQ ID NO: 126641 - DNA, 13 bp, Artificial Sequence
  Oligonucleotide for detection of SNP TSC0031674
tgagttatgattg

SEQ ID NO: 126642 - DNA, 13 bp, Artificial Sequence
  Oligonucleotide for detection of SNP TSC0031674
caatcataactca

SEQ ID NO: 126643 - DNA, 13 bp, Artificial Sequence
  Oligonucleotide for detection of SNP TSC0031674
tgagttgtgattg

SEQ ID NO: 126644 - DNA, 13 bp, Artificial Sequence
  Oligonucleotide for detection of SNP TSC0031674
caatcacaactca

SEQ ID NO: 126645 - DNA, 13 bp, Artificial Sequence
  Oligonucleotide for detection of SNP TSC0031674
tgagtcgtgattg

SEQ ID NO: 126646 - DNA, 13 bp, Artificial Sequence
  Oligonucleotide for detection of SNP TSC0031674
caatcacgactca

SEQ ID NO: 126647 - DNA, 13 bp, Artificial Sequence
  Oligonucleotide for detection of SNP TSC0031675
gatttatggaaaa

SEQ ID NO: 126648 - DNA, 13 bp, Artificial Sequence
  Oligonucleotide for detection of SNP TSC0031675
ttttccataaatc

SEQ ID NO: 126649 - DNA, 13 bp, Artificial Sequence
  Oligonucleotide for detection of SNP TSC0031675
gatttacggaaaa

SEQ ID NO: 126650 - DNA, 13 bp, Artificial Sequence
  Oligonucleotide for detection of SNP TSC0031675
ttttccgtaaatc

SEQ ID NO: 126651 - DNA, 13 bp, Artificial Sequence
  Oligonucleotide for detection of SNP TSC0031675
ttttttgtaggty

SEQ ID NO: 126652 - DNA, 13 bp, Artificial Sequence
  Oligonucleotide for detection of SNP TSC0031675
racctacaaaaaa

SEQ ID NO: 126653 - DNA, 13 bp, Artificial Sequence
  Oligonucleotide for detection of SNP TSC0031675
ttttttataggty

SEQ ID NO: 126654 - DNA, 13 bp, Artificial Sequence
  Oligonucleotide for detection of SNP TSC0031675
racctataaaaaa

SEQ ID NO: 126655 - DNA, 13 bp, Artificial Sequence
  Oligonucleotide for detection of SNP TSC0031675
tttttcgtaggty

SEQ ID NO: 126656 - DNA, 13 bp, Artificial Sequence
  Oligonucleotide for detection of SNP TSC0031675
racctacgaaaaa

SEQ ID NO: 126657 - DNA, 13 bp, Artificial Sequence
  Oligonucleotide for detection of SNP TSC0031678
gaggtagttttgg

SEQ ID NO: 126658 - DNA, 13 bp, Artificial Sequence
  Oligonucleotide for detection of SNP TSC0031678
ccaaaactacctc

SEQ ID NO: 126659 - DNA, 13 bp, Artificial Sequence
  Oligonucleotide for detection of SNP TSC0031678
gaggtaattttgg

SEQ ID NO: 126660 - DNA, 13 bp, Artificial Sequence
  Oligonucleotide for detection of SNP TSC0031678
ccaaaattacctc

SEQ ID NO: 126661 - DNA, 13 bp, Artificial Sequence
  Oligonucleotide for detection of SNP TSC0031678
gaggtagtttcgg

SEQ ID NO: 126662 - DNA, 13 bp, Artificial Sequence
  Oligonucleotide for detection of SNP TSC0031678
ccgaaactacctc

SEQ ID NO: 126663 - DNA, 13 bp, Artificial Sequence
  Oligonucleotide for detection of SNP TSC0031678
gaggtaatttcgg

SEQ ID NO: 126664 - DNA, 13 bp, Artificial Sequence
  Oligonucleotide for detection of SNP TSC0031678
ccgaaattacctc

SEQ ID NO: 126665 - DNA, 13 bp, Artificial Sequence
  Oligonucleotide for detection of SNP TSC0031679
tggtgtgggtgga

SEQ ID NO: 126666 - DNA, 13 bp, Artificial Sequence
  Oligonucleotide for detection of SNP TSC0031679
tccacccacacca

SEQ ID NO: 126667 - DNA, 13 bp, Artificial Sequence
  Oligonucleotide for detection of SNP TSC0031679
tggtgtaggtgga

SEQ ID NO: 126668 - DNA, 13 bp, Artificial Sequence
  Oligonucleotide for detection of SNP TSC0031679
tccacctacacca

SEQ ID NO: 126669 - DNA, 13 bp, Artificial Sequence
  Oligonucleotide for detection of SNP TSC0031680
tgtttttggggty

SEQ ID NO: 126670 - DNA, 13 bp, Artificial Sequence
  Oligonucleotide for detection of SNP TSC0031680
raccccaaaaaca

SEQ ID NO: 126671 - DNA, 13 bp, Artificial Sequence
  Oligonucleotide for detection of SNP TSC0031680
tgttttcggggty

SEQ ID NO: 126672 - DNA, 13 bp, Artificial Sequence
  Oligonucleotide for detection of SNP TSC0031680
raccccgaaaaca

SEQ ID NO: 126673 - DNA, 13 bp, Artificial Sequence
  Oligonucleotide for detection of SNP TSC0031680
ggttttgaaggta

SEQ ID NO: 126674 - DNA, 13 bp, Artificial Sequence
  Oligonucleotide for detection of SNP TSC0031680
taccttcaaaacc

SEQ ID NO: 126675 - DNA, 13 bp, Artificial Sequence
  Oligonucleotide for detection of SNP TSC0031680
ggttttaaaggta

SEQ ID NO: 126676 - DNA, 13 bp, Artificial Sequence
  Oligonucleotide for detection of SNP TSC0031680
tacctttaaaacc

SEQ ID NO: 126677 - DNA, 13 bp, Artificial Sequence
  Oligonucleotide for detection of SNP TSC0031680
ggtttcgaaggta

SEQ ID NO: 126678 - DNA, 13 bp, Artificial Sequence
  Oligonucleotide for detection of SNP TSC0031680
taccttcgaaacc

SEQ ID NO: 126679 - DNA, 13 bp, Artificial Sequence
  Oligonucleotide for detection of SNP TSC0031682
aaaattataagtg

SEQ ID NO: 126680 - DNA, 13 bp, Artificial Sequence
  Oligonucleotide for detection of SNP TSC0031682
cacttataatttt

SEQ ID NO: 126681 - DNA, 13 bp, Artificial Sequence
  Oligonucleotide for detection of SNP TSC0031682
aaaattgtaagtg

SEQ ID NO: 126682 - DNA, 13 bp, Artificial Sequence
  Oligonucleotide for detection of SNP TSC0031682
cacttacaatttt

SEQ ID NO: 126683 - DNA, 13 bp, Artificial Sequence
  Oligonucleotide for detection of SNP TSC0031682
aaaatcgtaagtg

SEQ ID NO: 126684 - DNA, 13 bp, Artificial Sequence
  Oligonucleotide for detection of SNP TSC0031682
cacttacgatttt

SEQ ID NO: 126685 - DNA, 13 bp, Artificial Sequence
  Oligonucleotide for detection of SNP TSC0031682
tatttatggtttt

SEQ ID NO: 126686 - DNA, 13 bp, Artificial Sequence
  Oligonucleotide for detection of SNP TSC0031682
aaaaccataaata

SEQ ID NO: 126687 - DNA, 13 bp, Artificial Sequence
  Oligonucleotide for detection of SNP TSC0031682
tatttacggtttt

SEQ ID NO: 126688 - DNA, 13 bp, Artificial Sequence
  Oligonucleotide for detection of SNP TSC0031682
aaaaccgtaaata

SEQ ID NO: 126689 - DNA, 13 bp, Artificial Sequence
  Oligonucleotide for detection of SNP TSC0031683
aatataggttgtt

SEQ ID NO: 126690 - DNA, 13 bp, Artificial Sequence
  Oligonucleotide for detection of SNP TSC0031683
aacaacctatatt

SEQ ID NO: 126691 - DNA, 13 bp, Artificial Sequence
  Oligonucleotide for detection of SNP TSC0031683
aatataagttgtt

SEQ ID NO: 126692 - DNA, 13 bp, Artificial Sequence
  Oligonucleotide for detection of SNP TSC0031683
aacaacttatatt

SEQ ID NO: 126693 - DNA, 13 bp, Artificial Sequence
  Oligonucleotide for detection of SNP TSC0031690
tgtaagtgatagt

SEQ ID NO: 126694 - DNA, 13 bp, Artificial Sequence
  Oligonucleotide for detection of SNP TSC0031690
actatcacttaca

SEQ ID NO: 126695 - DNA, 13 bp, Artificial Sequence
  Oligonucleotide for detection of SNP TSC0031690
tgtaagcgatagt

SEQ ID NO: 126696 - DNA, 13 bp, Artificial Sequence
  Oligonucleotide for detection of SNP TSC0031690
actatcgcttaca

SEQ ID NO: 126697 - DNA, 13 bp, Artificial Sequence
  Oligonucleotide for detection of SNP TSC0031690
attgttgtttgta

SEQ ID NO: 126698 - DNA, 13 bp, Artificial Sequence
  Oligonucleotide for detection of SNP TSC0031690
tacaaacaacaat

SEQ ID NO: 126699 - DNA, 13 bp, Artificial Sequence
  Oligonucleotide for detection of SNP TSC0031690
attgttatttgta

SEQ ID NO: 126700 - DNA, 13 bp, Artificial Sequence
  Oligonucleotide for detection of SNP TSC0031690
tacaaataacaat

SEQ ID NO: 126701 - DNA, 13 bp, Artificial Sequence
  Oligonucleotide for detection of SNP TSC0031690
attgtcgtttgta

SEQ ID NO: 126702 - DNA, 13 bp, Artificial Sequence
  Oligonucleotide for detection of SNP TSC0031690
tacaaacgacaat

SEQ ID NO: 126703 - DNA, 13 bp, Artificial Sequence
  Oligonucleotide for detection of SNP TSC0031691
ggatttagtagga

SEQ ID NO: 126704 - DNA, 13 bp, Artificial Sequence
  Oligonucleotide for detection of SNP TSC0031691
tcctactaaatcc

SEQ ID NO: 126705 - DNA, 13 bp, Artificial Sequence
  Oligonucleotide for detection of SNP TSC0031691
ggatttggtagga

SEQ ID NO: 126706 - DNA, 13 bp, Artificial Sequence
  Oligonucleotide for detection of SNP TSC0031691
tcctaccaaatcc

SEQ ID NO: 126707 - DNA, 13 bp, Artificial Sequence
  Oligonucleotide for detection of SNP TSC0031691
ggattcggtagga

SEQ ID NO: 126708 - DNA, 13 bp, Artificial Sequence
  Oligonucleotide for detection of SNP TSC0031691
tcctaccgaatcc

SEQ ID NO: 126709 - DNA, 13 bp, Artificial Sequence
  Oligonucleotide for detection of SNP TSC0031691
ttttgttgagtty

SEQ ID NO: 126710 - DNA, 13 bp, Artificial Sequence
  Oligonucleotide for detection of SNP TSC0031691
raactcaacaaaa

SEQ ID NO: 126711 - DNA, 13 bp, Artificial Sequence
  Oligonucleotide for detection of SNP TSC0031691
ttttgtcgagtty

SEQ ID NO: 126712 - DNA, 13 bp, Artificial Sequence
  Oligonucleotide for detection of SNP TSC0031691
raactcgacaaaa

SEQ ID NO: 126713 - DNA, 13 bp, Artificial Sequence
  Oligonucleotide for detection of SNP TSC0031694
aataagatattty

SEQ ID NO: 126714 - DNA, 13 bp, Artificial Sequence
  Oligonucleotide for detection of SNP TSC0031694
raaatatcttatt

SEQ ID NO: 126715 - DNA, 13 bp, Artificial Sequence
  Oligonucleotide for detection of SNP TSC0031694
aataaggtattty

SEQ ID NO: 126716 - DNA, 13 bp, Artificial Sequence
  Oligonucleotide for detection of SNP TSC0031694
raaataccttatt

SEQ ID NO: 126717 - DNA, 13 bp, Artificial Sequence
  Oligonucleotide for detection of SNP TSC0031695
tgattagaaaaat

SEQ ID NO: 126718 - DNA, 13 bp, Artificial Sequence
  Oligonucleotide for detection of SNP TSC0031695
atttttctaatca

SEQ ID NO: 126719 - DNA, 13 bp, Artificial Sequence
  Oligonucleotide for detection of SNP TSC0031695
tgattaaaaaaat

SEQ ID NO: 126720 - DNA, 13 bp, Artificial Sequence
  Oligonucleotide for detection of SNP TSC0031695
atttttttaatca

SEQ ID NO: 126721 - DNA, 13 bp, Artificial Sequence
  Oligonucleotide for detection of SNP TSC0031700
aatttggaagggy

SEQ ID NO: 126722 - DNA, 13 bp, Artificial Sequence
  Oligonucleotide for detection of SNP TSC0031700
rcccttccaaatt

SEQ ID NO: 126723 - DNA, 13 bp, Artificial Sequence
  Oligonucleotide for detection of SNP TSC0031700
aatttgaaagggy

SEQ ID NO: 126724 - DNA, 13 bp, Artificial Sequence
  Oligonucleotide for detection of SNP TSC0031700
rccctttcaaatt

SEQ ID NO: 126725 - DNA, 13 bp, Artificial Sequence
  Oligonucleotide for detection of SNP TSC0031700
aattcggaagggy

SEQ ID NO: 126726 - DNA, 13 bp, Artificial Sequence
  Oligonucleotide for detection of SNP TSC0031700
rcccttccgaatt

SEQ ID NO: 126727 - DNA, 13 bp, Artificial Sequence
  Oligonucleotide for detection of SNP TSC0031700
aattcgaaagggy

SEQ ID NO: 126728 - DNA, 13 bp, Artificial Sequence
  Oligonucleotide for detection of SNP TSC0031700
rccctttcgaatt

SEQ ID NO: 126729 - DNA, 13 bp, Artificial Sequence
  Oligonucleotide for detection of SNP TSC0031703
tataaatgtaaty

SEQ ID NO: 126730 - DNA, 13 bp, Artificial Sequence
  Oligonucleotide for detection of SNP TSC0031703
rattacatttata

SEQ ID NO: 126731 - DNA, 13 bp, Artificial Sequence
  Oligonucleotide for detection of SNP TSC0031703
tataaacgtaaty

SEQ ID NO: 126732 - DNA, 13 bp, Artificial Sequence
  Oligonucleotide for detection of SNP TSC0031703
rattacgtttata

SEQ ID NO: 126733 - DNA, 13 bp, Artificial Sequence
  Oligonucleotide for detection of SNP TSC0031703
gattgtgtttgta

SEQ ID NO: 126734 - DNA, 13 bp, Artificial Sequence
  Oligonucleotide for detection of SNP TSC0031703
tacaaacacaatc

SEQ ID NO: 126735 - DNA, 13 bp, Artificial Sequence
  Oligonucleotide for detection of SNP TSC0031703
gattgtatttgta

SEQ ID NO: 126736 - DNA, 13 bp, Artificial Sequence
  Oligonucleotide for detection of SNP TSC0031703
tacaaatacaatc

SEQ ID NO: 126737 - DNA, 13 bp, Artificial Sequence
  Oligonucleotide for detection of SNP TSC0031703
gattgcgtttgta

SEQ ID NO: 126738 - DNA, 13 bp, Artificial Sequence
  Oligonucleotide for detection of SNP TSC0031703
tacaaacgcaatc

SEQ ID NO: 126739 - DNA, 13 bp, Artificial Sequence
  Oligonucleotide for detection of SNP TSC0031704
aagaaagaaaaaa

SEQ ID NO: 126740 - DNA, 13 bp, Artificial Sequence
  Oligonucleotide for detection of SNP TSC0031704
ttttttctttctt

SEQ ID NO: 126741 - DNA, 13 bp, Artificial Sequence
  Oligonucleotide for detection of SNP TSC0031704
aagaaaaaaaaaa

SEQ ID NO: 126742 - DNA, 13 bp, Artificial Sequence
  Oligonucleotide for detection of SNP TSC0031704
ttttttttttctt

SEQ ID NO: 126743 - DNA, 13 bp, Artificial Sequence
  Oligonucleotide for detection of SNP TSC0031705
aattgtatataag

SEQ ID NO: 126744 - DNA, 13 bp, Artificial Sequence
  Oligonucleotide for detection of SNP TSC0031705
cttatatacaatt

SEQ ID NO: 126745 - DNA, 13 bp, Artificial Sequence
  Oligonucleotide for detection of SNP TSC0031705
aattgtttataag

SEQ ID NO: 126746 - DNA, 13 bp, Artificial Sequence
  Oligonucleotide for detection of SNP TSC0031705
cttataaacaatt

SEQ ID NO: 126747 - DNA, 13 bp, Artificial Sequence
  Oligonucleotide for detection of SNP TSC0031705
tttgtgtataatt

SEQ ID NO: 126748 - DNA, 13 bp, Artificial Sequence
  Oligonucleotide for detection of SNP TSC0031705
aattatacacaaa

SEQ ID NO: 126749 - DNA, 13 bp, Artificial Sequence
  Oligonucleotide for detection of SNP TSC0031705
tttgtggataatt

SEQ ID NO: 126750 - DNA, 13 bp, Artificial Sequence
  Oligonucleotide for detection of SNP TSC0031705
aattatccacaaa

SEQ ID NO: 126751 - DNA, 13 bp, Artificial Sequence
  Oligonucleotide for detection of SNP TSC0031707
gtttttattatgt

SEQ ID NO: 126752 - DNA, 13 bp, Artificial Sequence
  Oligonucleotide for detection of SNP TSC0031707
acataataaaaac

SEQ ID NO: 126753 - DNA, 13 bp, Artificial Sequence
  Oligonucleotide for detection of SNP TSC0031707
gttttcgttatgt

SEQ ID NO: 126754 - DNA, 13 bp, Artificial Sequence
  Oligonucleotide for detection of SNP TSC0031707
acataacgaaaac

SEQ ID NO: 126755 - DNA, 13 bp, Artificial Sequence
  Oligonucleotide for detection of SNP TSC0031707
atatggtgaaaay

SEQ ID NO: 126756 - DNA, 13 bp, Artificial Sequence
  Oligonucleotide for detection of SNP TSC0031707
rttttcaccatat

SEQ ID NO: 126757 - DNA, 13 bp, Artificial Sequence
  Oligonucleotide for detection of SNP TSC0031707
atatggcgaaaay

SEQ ID NO: 126758 - DNA, 13 bp, Artificial Sequence
  Oligonucleotide for detection of SNP TSC0031707
rttttcgccatat

SEQ ID NO: 126759 - DNA, 13 bp, Artificial Sequence
  Oligonucleotide for detection of SNP TSC0031708
attattatttgag

SEQ ID NO: 126760 - DNA, 13 bp, Artificial Sequence
  Oligonucleotide for detection of SNP TSC0031708
ctcaaataataat

SEQ ID NO: 126761 - DNA, 13 bp, Artificial Sequence
  Oligonucleotide for detection of SNP TSC0031708
attattttttgag

SEQ ID NO: 126762 - DNA, 13 bp, Artificial Sequence
  Oligonucleotide for detection of SNP TSC0031708
ctcaaaaaataat

SEQ ID NO: 126763 - DNA, 13 bp, Artificial Sequence
  Oligonucleotide for detection of SNP TSC0031708
tttaaataataat

SEQ ID NO: 126764 - DNA, 13 bp, Artificial Sequence
  Oligonucleotide for detection of SNP TSC0031708
attattatttaaa

SEQ ID NO: 126765 - DNA, 13 bp, Artificial Sequence
  Oligonucleotide for detection of SNP TSC0031708
tttaaaaaataat

SEQ ID NO: 126766 - DNA, 13 bp, Artificial Sequence
  Oligonucleotide for detection of SNP TSC0031708
attattttttaaa

SEQ ID NO: 126767 - DNA, 13 bp, Artificial Sequence
  Oligonucleotide for detection of SNP TSC0031709
attttaataatat

SEQ ID NO: 126768 - DNA, 13 bp, Artificial Sequence
  Oligonucleotide for detection of SNP TSC0031709
atattattaaaat

SEQ ID NO: 126769 - DNA, 13 bp, Artificial Sequence
  Oligonucleotide for detection of SNP TSC0031709
attttagtaatat

SEQ ID NO: 126770 - DNA, 13 bp, Artificial Sequence
  Oligonucleotide for detection of SNP TSC0031709
atattactaaaat

SEQ ID NO: 126771 - DNA, 13 bp, Artificial Sequence
  Oligonucleotide for detection of SNP TSC0031713
agaagaggttaga

SEQ ID NO: 126772 - DNA, 13 bp, Artificial Sequence
  Oligonucleotide for detection of SNP TSC0031713
tctaacctcttct

SEQ ID NO: 126773 - DNA, 13 bp, Artificial Sequence
  Oligonucleotide for detection of SNP TSC0031713
agaagatgttaga

SEQ ID NO: 126774 - DNA, 13 bp, Artificial Sequence
  Oligonucleotide for detection of SNP TSC0031713
tctaacatcttct

SEQ ID NO: 126775 - DNA, 13 bp, Artificial Sequence
  Oligonucleotide for detection of SNP TSC0031713
agaagacgttaga

SEQ ID NO: 126776 - DNA, 13 bp, Artificial Sequence
  Oligonucleotide for detection of SNP TSC0031713
tctaacgtcttct

SEQ ID NO: 126777 - DNA, 13 bp, Artificial Sequence
  Oligonucleotide for detection of SNP TSC0031716
tgtatagtttttg

SEQ ID NO: 126778 - DNA, 13 bp, Artificial Sequence
  Oligonucleotide for detection of SNP TSC0031716
caaaaactataca

SEQ ID NO: 126779 - DNA, 13 bp, Artificial Sequence
  Oligonucleotide for detection of SNP TSC0031716
tgtataatttttg

SEQ ID NO: 126780 - DNA, 13 bp, Artificial Sequence
  Oligonucleotide for detection of SNP TSC0031716
caaaaattataca

SEQ ID NO: 126781 - DNA, 13 bp, Artificial Sequence
  Oligonucleotide for detection of SNP TSC0031717
tagtagtggttgt

SEQ ID NO: 126782 - DNA, 13 bp, Artificial Sequence
  Oligonucleotide for detection of SNP TSC0031717
acaaccactacta

SEQ ID NO: 126783 - DNA, 13 bp, Artificial Sequence
  Oligonucleotide for detection of SNP TSC0031717
tagtagcggttgt

SEQ ID NO: 126784 - DNA, 13 bp, Artificial Sequence
  Oligonucleotide for detection of SNP TSC0031717
acaaccgctacta

SEQ ID NO: 126785 - DNA, 13 bp, Artificial Sequence
  Oligonucleotide for detection of SNP TSC0031717
atagttgttgttg

SEQ ID NO: 126786 - DNA, 13 bp, Artificial Sequence
  Oligonucleotide for detection of SNP TSC0031717
caacaacaactat

SEQ ID NO: 126787 - DNA, 13 bp, Artificial Sequence
  Oligonucleotide for detection of SNP TSC0031717
atagttattgttg

SEQ ID NO: 126788 - DNA, 13 bp, Artificial Sequence
  Oligonucleotide for detection of SNP TSC0031717
caacaataactat

SEQ ID NO: 126789 - DNA, 13 bp, Artificial Sequence
  Oligonucleotide for detection of SNP TSC0031717
atagtcgttgttg

SEQ ID NO: 126790 - DNA, 13 bp, Artificial Sequence
  Oligonucleotide for detection of SNP TSC0031717
caacaacgactat

SEQ ID NO: 126791 - DNA, 13 bp, Artificial Sequence
  Oligonucleotide for detection of SNP TSC0031718
tatatagtttttg

SEQ ID NO: 126792 - DNA, 13 bp, Artificial Sequence
  Oligonucleotide for detection of SNP TSC0031718
caaaaactatata

SEQ ID NO: 126793 - DNA, 13 bp, Artificial Sequence
  Oligonucleotide for detection of SNP TSC0031718
tatataatttttg

SEQ ID NO: 126794 - DNA, 13 bp, Artificial Sequence
  Oligonucleotide for detection of SNP TSC0031718
caaaaattatata

SEQ ID NO: 126795 - DNA, 13 bp, Artificial Sequence
  Oligonucleotide for detection of SNP TSC0031720
gttgttgggttta

SEQ ID NO: 126796 - DNA, 13 bp, Artificial Sequence
  Oligonucleotide for detection of SNP TSC0031720
taaacccaacaac

SEQ ID NO: 126797 - DNA, 13 bp, Artificial Sequence
  Oligonucleotide for detection of SNP TSC0031720
gttgttaggttta

SEQ ID NO: 126798 - DNA, 13 bp, Artificial Sequence
  Oligonucleotide for detection of SNP TSC0031720
taaacctaacaac

SEQ ID NO: 126799 - DNA, 13 bp, Artificial Sequence
  Oligonucleotide for detection of SNP TSC0031722
taattaatggatg

SEQ ID NO: 126800 - DNA, 13 bp, Artificial Sequence
  Oligonucleotide for detection of SNP TSC0031722
catccattaatta

SEQ ID NO: 126801 - DNA, 13 bp, Artificial Sequence
  Oligonucleotide for detection of SNP TSC0031722
taattagtggatg

SEQ ID NO: 126802 - DNA, 13 bp, Artificial Sequence
  Oligonucleotide for detection of SNP TSC0031722
catccactaatta

SEQ ID NO: 126803 - DNA, 13 bp, Artificial Sequence
  Oligonucleotide for detection of SNP TSC0031723
tagggggggggta

SEQ ID NO: 126804 - DNA, 13 bp, Artificial Sequence
  Oligonucleotide for detection of SNP TSC0031723
tacccccccccta

SEQ ID NO: 126805 - DNA, 13 bp, Artificial Sequence
  Oligonucleotide for detection of SNP TSC0031723
taggggtggggta

SEQ ID NO: 126806 - DNA, 13 bp, Artificial Sequence
  Oligonucleotide for detection of SNP TSC0031723
taccccaccccta

SEQ ID NO: 126807 - DNA, 13 bp, Artificial Sequence
  Oligonucleotide for detection of SNP TSC0031728
gatgtgtggtaty

SEQ ID NO: 126808 - DNA, 13 bp, Artificial Sequence
  Oligonucleotide for detection of SNP TSC0031728
rataccacacatc

SEQ ID NO: 126809 - DNA, 13 bp, Artificial Sequence
  Oligonucleotide for detection of SNP TSC0031728
gatgtgcggtaty

SEQ ID NO: 126810 - DNA, 13 bp, Artificial Sequence
  Oligonucleotide for detection of SNP TSC0031728
rataccgcacatc

SEQ ID NO: 126811 - DNA, 13 bp, Artificial Sequence
  Oligonucleotide for detection of SNP TSC0031728
gatgttgtataty

SEQ ID NO: 126812 - DNA, 13 bp, Artificial Sequence
  Oligonucleotide for detection of SNP TSC0031728
ratatacaacatc

SEQ ID NO: 126813 - DNA, 13 bp, Artificial Sequence
  Oligonucleotide for detection of SNP TSC0031728
gatgttatataty

SEQ ID NO: 126814 - DNA, 13 bp, Artificial Sequence
  Oligonucleotide for detection of SNP TSC0031728
ratatataacatc

SEQ ID NO: 126815 - DNA, 13 bp, Artificial Sequence
  Oligonucleotide for detection of SNP TSC0031728
gatgtcgtataty

SEQ ID NO: 126816 - DNA, 13 bp, Artificial Sequence
  Oligonucleotide for detection of SNP TSC0031728
ratatacgacatc

SEQ ID NO: 126817 - DNA, 13 bp, Artificial Sequence
  Oligonucleotide for detection of SNP TSC0031729
atagatgttatgg

SEQ ID NO: 126818 - DNA, 13 bp, Artificial Sequence
  Oligonucleotide for detection of SNP TSC0031729
ccataacatctat

SEQ ID NO: 126819 - DNA, 13 bp, Artificial Sequence
  Oligonucleotide for detection of SNP TSC0031729
atagatattatgg

SEQ ID NO: 126820 - DNA, 13 bp, Artificial Sequence
  Oligonucleotide for detection of SNP TSC0031729
ccataatatctat

SEQ ID NO: 126821 - DNA, 13 bp, Artificial Sequence
  Oligonucleotide for detection of SNP TSC0031730
tttggtttaattt

SEQ ID NO: 126822 - DNA, 13 bp, Artificial Sequence
  Oligonucleotide for detection of SNP TSC0031730
aaattaaaccaaa

SEQ ID NO: 126823 - DNA, 13 bp, Artificial Sequence
  Oligonucleotide for detection of SNP TSC0031730
tttggtgtaattt

SEQ ID NO: 126824 - DNA, 13 bp, Artificial Sequence
  Oligonucleotide for detection of SNP TSC0031730
aaattacaccaaa

SEQ ID NO: 126825 - DNA, 13 bp, Artificial Sequence
  Oligonucleotide for detection of SNP TSC0031730
ttcggtttaattt

SEQ ID NO: 126826 - DNA, 13 bp, Artificial Sequence
  Oligonucleotide for detection of SNP TSC0031730
aaattaaaccgaa

SEQ ID NO: 126827 - DNA, 13 bp, Artificial Sequence
  Oligonucleotide for detection of SNP TSC0031730
ttcggtgtaattt

SEQ ID NO: 126828 - DNA, 13 bp, Artificial Sequence
  Oligonucleotide for detection of SNP TSC0031730
aaattacaccgaa

SEQ ID NO: 126829 - DNA, 13 bp, Artificial Sequence
  Oligonucleotide for detection of SNP TSC0031730
tttggcgtaattt

SEQ ID NO: 126830 - DNA, 13 bp, Artificial Sequence
  Oligonucleotide for detection of SNP TSC0031730
aaattacgccaaa

SEQ ID NO: 126831 - DNA, 13 bp, Artificial Sequence
  Oligonucleotide for detection of SNP TSC0031730
ttcggcgtaattt

SEQ ID NO: 126832 - DNA, 13 bp, Artificial Sequence
  Oligonucleotide for detection of SNP TSC0031730
aaattacgccgaa

SEQ ID NO: 126833 - DNA, 13 bp, Artificial Sequence
  Oligonucleotide for detection of SNP TSC0031730
aaattaggttggg

SEQ ID NO: 126834 - DNA, 13 bp, Artificial Sequence
  Oligonucleotide for detection of SNP TSC0031730
cccaacctaattt

SEQ ID NO: 126835 - DNA, 13 bp, Artificial Sequence
  Oligonucleotide for detection of SNP TSC0031730
aaattatgttggg

SEQ ID NO: 126836 - DNA, 13 bp, Artificial Sequence
  Oligonucleotide for detection of SNP TSC0031730
cccaacataattt

SEQ ID NO: 126837 - DNA, 13 bp, Artificial Sequence
  Oligonucleotide for detection of SNP TSC0031730
aaattaggtcggg

SEQ ID NO: 126838 - DNA, 13 bp, Artificial Sequence
  Oligonucleotide for detection of SNP TSC0031730
cccgacctaattt

SEQ ID NO: 126839 - DNA, 13 bp, Artificial Sequence
  Oligonucleotide for detection of SNP TSC0031730
aaattacgttggg

SEQ ID NO: 126840 - DNA, 13 bp, Artificial Sequence
  Oligonucleotide for detection of SNP TSC0031730
cccaacgtaattt

SEQ ID NO: 126841 - DNA, 13 bp, Artificial Sequence
  Oligonucleotide for detection of SNP TSC0031730
aaattatgtcggg

SEQ ID NO: 126842 - DNA, 13 bp, Artificial Sequence
  Oligonucleotide for detection of SNP TSC0031730
cccgacataattt

SEQ ID NO: 126843 - DNA, 13 bp, Artificial Sequence
  Oligonucleotide for detection of SNP TSC0031730
aaattacgtcggg

SEQ ID NO: 126844 - DNA, 13 bp, Artificial Sequence
  Oligonucleotide for detection of SNP TSC0031730
cccgacgtaattt

SEQ ID NO: 126845 - DNA, 13 bp, Artificial Sequence
  Oligonucleotide for detection of SNP TSC0031731
atatatgtaatat

SEQ ID NO: 126846 - DNA, 13 bp, Artificial Sequence
  Oligonucleotide for detection of SNP TSC0031731
atattacatatat

SEQ ID NO: 126847 - DNA, 13 bp, Artificial Sequence
  Oligonucleotide for detection of SNP TSC0031731
atatatataatat

SEQ ID NO: 126848 - DNA, 13 bp, Artificial Sequence
  Oligonucleotide for detection of SNP TSC0031731
atattatatatat

SEQ ID NO: 126849 - DNA, 13 bp, Artificial Sequence
  Oligonucleotide for detection of SNP TSC0031735
tatatatagagtg

SEQ ID NO: 126850 - DNA, 13 bp, Artificial Sequence
  Oligonucleotide for detection of SNP TSC0031735
cactctatatata

SEQ ID NO: 126851 - DNA, 13 bp, Artificial Sequence
  Oligonucleotide for detection of SNP TSC0031735
tatatagagagtg

SEQ ID NO: 126852 - DNA, 13 bp, Artificial Sequence
  Oligonucleotide for detection of SNP TSC0031735
cactctctatata

SEQ ID NO: 126853 - DNA, 13 bp, Artificial Sequence
  Oligonucleotide for detection of SNP TSC0031735
tatatatagagcg

SEQ ID NO: 126854 - DNA, 13 bp, Artificial Sequence
  Oligonucleotide for detection of SNP TSC0031735
cgctctatatata

SEQ ID NO: 126855 - DNA, 13 bp, Artificial Sequence
  Oligonucleotide for detection of SNP TSC0031735
tatatagagagcg

SEQ ID NO: 126856 - DNA, 13 bp, Artificial Sequence
  Oligonucleotide for detection of SNP TSC0031735
cgctctctatata

SEQ ID NO: 126857 - DNA, 13 bp, Artificial Sequence
  Oligonucleotide for detection of SNP TSC0031735
tgttttgtgtgtg

SEQ ID NO: 126858 - DNA, 13 bp, Artificial Sequence
  Oligonucleotide for detection of SNP TSC0031735
cacacacaaaaca

SEQ ID NO: 126859 - DNA, 13 bp, Artificial Sequence
  Oligonucleotide for detection of SNP TSC0031735
tgttttttgtgtg

SEQ ID NO: 126860 - DNA, 13 bp, Artificial Sequence
  Oligonucleotide for detection of SNP TSC0031735
cacacaaaaaaca

SEQ ID NO: 126861 - DNA, 13 bp, Artificial Sequence
  Oligonucleotide for detection of SNP TSC0031735
cgttttgtgtgtg

SEQ ID NO: 126862 - DNA, 13 bp, Artificial Sequence
  Oligonucleotide for detection of SNP TSC0031735
cacacacaaaacg

SEQ ID NO: 126863 - DNA, 13 bp, Artificial Sequence
  Oligonucleotide for detection of SNP TSC0031735
cgttttttgtgtg

SEQ ID NO: 126864 - DNA, 13 bp, Artificial Sequence
  Oligonucleotide for detection of SNP TSC0031735
cacacaaaaaacg

SEQ ID NO: 126865 - DNA, 13 bp, Artificial Sequence
  Oligonucleotide for detection of SNP TSC0031736
aattttggagagt

SEQ ID NO: 126866 - DNA, 13 bp, Artificial Sequence
  Oligonucleotide for detection of SNP TSC0031736
actctccaaaatt

SEQ ID NO: 126867 - DNA, 13 bp, Artificial Sequence
  Oligonucleotide for detection of SNP TSC0031736
aattttagagagt

SEQ ID NO: 126868 - DNA, 13 bp, Artificial Sequence
  Oligonucleotide for detection of SNP TSC0031736
actctctaaaatt

SEQ ID NO: 126869 - DNA, 13 bp, Artificial Sequence
  Oligonucleotide for detection of SNP TSC0031736
aatttcggagagt

SEQ ID NO: 126870 - DNA, 13 bp, Artificial Sequence
  Oligonucleotide for detection of SNP TSC0031736
actctccgaaatt

SEQ ID NO: 126871 - DNA, 13 bp, Artificial Sequence
  Oligonucleotide for detection of SNP TSC0031738
gtgatttggtatg

SEQ ID NO: 126872 - DNA, 13 bp, Artificial Sequence
  Oligonucleotide for detection of SNP TSC0031738
cataccaaatcac

SEQ ID NO: 126873 - DNA, 13 bp, Artificial Sequence
  Oligonucleotide for detection of SNP TSC0031738
gtgattgggtatg

SEQ ID NO: 126874 - DNA, 13 bp, Artificial Sequence
  Oligonucleotide for detection of SNP TSC0031738
catacccaatcac

SEQ ID NO: 126875 - DNA, 13 bp, Artificial Sequence
  Oligonucleotide for detection of SNP TSC0031738
gtgattcggtatg

SEQ ID NO: 126876 - DNA, 13 bp, Artificial Sequence
  Oligonucleotide for detection of SNP TSC0031738
cataccgaatcac

SEQ ID NO: 126877 - DNA, 13 bp, Artificial Sequence
  Oligonucleotide for detection of SNP TSC0031738
gtgattgggtacg

SEQ ID NO: 126878 - DNA, 13 bp, Artificial Sequence
  Oligonucleotide for detection of SNP TSC0031738
cgtacccaatcac

SEQ ID NO: 126879 - DNA, 13 bp, Artificial Sequence
  Oligonucleotide for detection of SNP TSC0031738
gtgatttggtacg

SEQ ID NO: 126880 - DNA, 13 bp, Artificial Sequence
  Oligonucleotide for detection of SNP TSC0031738
cgtaccaaatcac

SEQ ID NO: 126881 - DNA, 13 bp, Artificial Sequence
  Oligonucleotide for detection of SNP TSC0031738
gtgattcggtacg

SEQ ID NO: 126882 - DNA, 13 bp, Artificial Sequence
  Oligonucleotide for detection of SNP TSC0031738
cgtaccgaatcac

SEQ ID NO: 126883 - DNA, 13 bp, Artificial Sequence
  Oligonucleotide for detection of SNP TSC0031738
tgtgttgagttay

SEQ ID NO: 126884 - DNA, 13 bp, Artificial Sequence
  Oligonucleotide for detection of SNP TSC0031738
rtaactcaacaca

SEQ ID NO: 126885 - DNA, 13 bp, Artificial Sequence
  Oligonucleotide for detection of SNP TSC0031738
tgtgtttagttay

SEQ ID NO: 126886 - DNA, 13 bp, Artificial Sequence
  Oligonucleotide for detection of SNP TSC0031738
rtaactaaacaca

SEQ ID NO: 126887 - DNA, 13 bp, Artificial Sequence
  Oligonucleotide for detection of SNP TSC0031738
cgtgttgagttay

SEQ ID NO: 126888 - DNA, 13 bp, Artificial Sequence
  Oligonucleotide for detection of SNP TSC0031738
rtaactcaacacg

SEQ ID NO: 126889 - DNA, 13 bp, Artificial Sequence
  Oligonucleotide for detection of SNP TSC0031738
cgtgtttagttay

SEQ ID NO: 126890 - DNA, 13 bp, Artificial Sequence
  Oligonucleotide for detection of SNP TSC0031738
rtaactaaacacg

SEQ ID NO: 126891 - DNA, 13 bp, Artificial Sequence
  Oligonucleotide for detection of SNP TSC0031738
tgtgtcgagttay

SEQ ID NO: 126892 - DNA, 13 bp, Artificial Sequence
  Oligonucleotide for detection of SNP TSC0031738
rtaactcgacaca

SEQ ID NO: 126893 - DNA, 13 bp, Artificial Sequence
  Oligonucleotide for detection of SNP TSC0031738
cgtgtcgagttay

SEQ ID NO: 126894 - DNA, 13 bp, Artificial Sequence
  Oligonucleotide for detection of SNP TSC0031738
rtaactcgacacg

SEQ ID NO: 126895 - DNA, 13 bp, Artificial Sequence
  Oligonucleotide for detection of SNP TSC0031740
taaatttaaaaaa

SEQ ID NO: 126896 - DNA, 13 bp, Artificial Sequence
  Oligonucleotide for detection of SNP TSC0031740
ttttttaaattta

SEQ ID NO: 126897 - DNA, 13 bp, Artificial Sequence
  Oligonucleotide for detection of SNP TSC0031741
atggagggggaaa

SEQ ID NO: 126898 - DNA, 13 bp, Artificial Sequence
  Oligonucleotide for detection of SNP TSC0031741
tttccccctccat

SEQ ID NO: 126899 - DNA, 13 bp, Artificial Sequence
  Oligonucleotide for detection of SNP TSC0031741
atggagtgggaaa

SEQ ID NO: 126900 - DNA, 13 bp, Artificial Sequence
  Oligonucleotide for detection of SNP TSC0031741
tttcccactccat

SEQ ID NO: 126901 - DNA, 13 bp, Artificial Sequence
  Oligonucleotide for detection of SNP TSC0031745
aatagaaagtata

SEQ ID NO: 126902 - DNA, 13 bp, Artificial Sequence
  Oligonucleotide for detection of SNP TSC0031745
tatactttctatt

SEQ ID NO: 126903 - DNA, 13 bp, Artificial Sequence
  Oligonucleotide for detection of SNP TSC0031745
aatagagagtata

SEQ ID NO: 126904 - DNA, 13 bp, Artificial Sequence
  Oligonucleotide for detection of SNP TSC0031745
tatactctctatt

SEQ ID NO: 126905 - DNA, 13 bp, Artificial Sequence
  Oligonucleotide for detection of SNP TSC0031746
gaggaagtatatt

SEQ ID NO: 126906 - DNA, 13 bp, Artificial Sequence
  Oligonucleotide for detection of SNP TSC0031746
aatatacttcctc

SEQ ID NO: 126907 - DNA, 13 bp, Artificial Sequence
  Oligonucleotide for detection of SNP TSC0031746
gaggaaatatatt

SEQ ID NO: 126908 - DNA, 13 bp, Artificial Sequence
  Oligonucleotide for detection of SNP TSC0031746
aatatatttcctc

SEQ ID NO: 126909 - DNA, 13 bp, Artificial Sequence
  Oligonucleotide for detection of SNP TSC0031748
aggtgttggtgtt

SEQ ID NO: 126910 - DNA, 13 bp, Artificial Sequence
  Oligonucleotide for detection of SNP TSC0031748
aacaccaacacct

SEQ ID NO: 126911 - DNA, 13 bp, Artificial Sequence
  Oligonucleotide for detection of SNP TSC0031748
aggtgtcggtgtt

SEQ ID NO: 126912 - DNA, 13 bp, Artificial Sequence
  Oligonucleotide for detection of SNP TSC0031748
aacaccgacacct

SEQ ID NO: 126913 - DNA, 13 bp, Artificial Sequence
  Oligonucleotide for detection of SNP TSC0031748
aatatcgatattt

SEQ ID NO: 126914 - DNA, 13 bp, Artificial Sequence
  Oligonucleotide for detection of SNP TSC0031748
aaatatcgatatt

SEQ ID NO: 126915 - DNA, 13 bp, Artificial Sequence
  Oligonucleotide for detection of SNP TSC0031751
aagtttattttaa

SEQ ID NO: 126916 - DNA, 13 bp, Artificial Sequence
  Oligonucleotide for detection of SNP TSC0031751
ttaaaataaactt

SEQ ID NO: 126917 - DNA, 13 bp, Artificial Sequence
  Oligonucleotide for detection of SNP TSC0031751
aagttttttttaa

SEQ ID NO: 126918 - DNA, 13 bp, Artificial Sequence
  Oligonucleotide for detection of SNP TSC0031751
ttaaaaaaaactt

SEQ ID NO: 126919 - DNA, 13 bp, Artificial Sequence
  Oligonucleotide for detection of SNP TSC0031751
ttaaaatagattt

SEQ ID NO: 126920 - DNA, 13 bp, Artificial Sequence
  Oligonucleotide for detection of SNP TSC0031751
aaatctattttaa

SEQ ID NO: 126921 - DNA, 13 bp, Artificial Sequence
  Oligonucleotide for detection of SNP TSC0031751
ttaaaaaagattt

SEQ ID NO: 126922 - DNA, 13 bp, Artificial Sequence
  Oligonucleotide for detection of SNP TSC0031751
aaatcttttttaa

SEQ ID NO: 126923 - DNA, 13 bp, Artificial Sequence
  Oligonucleotide for detection of SNP TSC0031760
tagtagtagggtg

SEQ ID NO: 126924 - DNA, 13 bp, Artificial Sequence
  Oligonucleotide for detection of SNP TSC0031760
caccctactacta

SEQ ID NO: 126925 - DNA, 13 bp, Artificial Sequence
  Oligonucleotide for detection of SNP TSC0031760
tagtaggagggtg

SEQ ID NO: 126926 - DNA, 13 bp, Artificial Sequence
  Oligonucleotide for detection of SNP TSC0031760
caccctcctacta

SEQ ID NO: 126927 - DNA, 13 bp, Artificial Sequence
  Oligonucleotide for detection of SNP TSC0031760
tatttttttgttg

SEQ ID NO: 126928 - DNA, 13 bp, Artificial Sequence
  Oligonucleotide for detection of SNP TSC0031760
caacaaaaaaata

SEQ ID NO: 126929 - DNA, 13 bp, Artificial Sequence
  Oligonucleotide for detection of SNP TSC0031761
taaatagttaatg

SEQ ID NO: 126930 - DNA, 13 bp, Artificial Sequence
  Oligonucleotide for detection of SNP TSC0031761
cattaactattta

SEQ ID NO: 126931 - DNA, 13 bp, Artificial Sequence
  Oligonucleotide for detection of SNP TSC0031761
taaatatttaatg

SEQ ID NO: 126932 - DNA, 13 bp, Artificial Sequence
  Oligonucleotide for detection of SNP TSC0031761
cattaaatattta

SEQ ID NO: 126933 - DNA, 13 bp, Artificial Sequence
  Oligonucleotide for detection of SNP TSC0031761
tattaaatattta

SEQ ID NO: 126934 - DNA, 13 bp, Artificial Sequence
  Oligonucleotide for detection of SNP TSC0031761
taaatatttaata

SEQ ID NO: 126935 - DNA, 13 bp, Artificial Sequence
  Oligonucleotide for detection of SNP TSC0031768
atgagggtagatt

SEQ ID NO: 126936 - DNA, 13 bp, Artificial Sequence
  Oligonucleotide for detection of SNP TSC0031768
aatctaccctcat

SEQ ID NO: 126937 - DNA, 13 bp, Artificial Sequence
  Oligonucleotide for detection of SNP TSC0031768
atgaggatagatt

SEQ ID NO: 126938 - DNA, 13 bp, Artificial Sequence
  Oligonucleotide for detection of SNP TSC0031768
aatctatcctcat

SEQ ID NO: 126939 - DNA, 13 bp, Artificial Sequence
  Oligonucleotide for detection of SNP TSC0031769
atttaatggattt

SEQ ID NO: 126940 - DNA, 13 bp, Artificial Sequence
  Oligonucleotide for detection of SNP TSC0031769
aaatccattaaat

SEQ ID NO: 126941 - DNA, 13 bp, Artificial Sequence
  Oligonucleotide for detection of SNP TSC0031769
atttaacggattt

SEQ ID NO: 126942 - DNA, 13 bp, Artificial Sequence
  Oligonucleotide for detection of SNP TSC0031769
aaatccgttaaat

SEQ ID NO: 126943 - DNA, 13 bp, Artificial Sequence
  Oligonucleotide for detection of SNP TSC0031769
aaatttgttgaat

SEQ ID NO: 126944 - DNA, 13 bp, Artificial Sequence
  Oligonucleotide for detection of SNP TSC0031769
attcaacaaattt

SEQ ID NO: 126945 - DNA, 13 bp, Artificial Sequence
  Oligonucleotide for detection of SNP TSC0031769
aaatttattgaat

SEQ ID NO: 126946 - DNA, 13 bp, Artificial Sequence
  Oligonucleotide for detection of SNP TSC0031769
attcaataaattt

SEQ ID NO: 126947 - DNA, 13 bp, Artificial Sequence
  Oligonucleotide for detection of SNP TSC0031769
aaattcgttgaat

SEQ ID NO: 126948 - DNA, 13 bp, Artificial Sequence
  Oligonucleotide for detection of SNP TSC0031769
attcaacgaattt

SEQ ID NO: 126949 - DNA, 13 bp, Artificial Sequence
  Oligonucleotide for detection of SNP TSC0031773
ggttgtagaaatt

SEQ ID NO: 126950 - DNA, 13 bp, Artificial Sequence
  Oligonucleotide for detection of SNP TSC0031773
aatttctacaacc

SEQ ID NO: 126951 - DNA, 13 bp, Artificial Sequence
  Oligonucleotide for detection of SNP TSC0031773
ggttgttgaaatt

SEQ ID NO: 126952 - DNA, 13 bp, Artificial Sequence
  Oligonucleotide for detection of SNP TSC0031773
aatttcaacaacc

SEQ ID NO: 126953 - DNA, 13 bp, Artificial Sequence
  Oligonucleotide for detection of SNP TSC0031773
ggttgtcgaaatt

SEQ ID NO: 126954 - DNA, 13 bp, Artificial Sequence
  Oligonucleotide for detection of SNP TSC0031773
aatttcgacaacc

SEQ ID NO: 126955 - DNA, 13 bp, Artificial Sequence
  Oligonucleotide for detection of SNP TSC0031773
aatttttataaty

SEQ ID NO: 126956 - DNA, 13 bp, Artificial Sequence
  Oligonucleotide for detection of SNP TSC0031773
rattataaaaatt

SEQ ID NO: 126957 - DNA, 13 bp, Artificial Sequence
  Oligonucleotide for detection of SNP TSC0031773
aattttgataaty

SEQ ID NO: 126958 - DNA, 13 bp, Artificial Sequence
  Oligonucleotide for detection of SNP TSC0031773
rattatcaaaatt

SEQ ID NO: 126959 - DNA, 13 bp, Artificial Sequence
  Oligonucleotide for detection of SNP TSC0031773
aatttcgataaty

SEQ ID NO: 126960 - DNA, 13 bp, Artificial Sequence
  Oligonucleotide for detection of SNP TSC0031773
rattatcgaaatt

SEQ ID NO: 126961 - DNA, 13 bp, Artificial Sequence
  Oligonucleotide for detection of SNP TSC0031774
attttttggtaat

SEQ ID NO: 126962 - DNA, 13 bp, Artificial Sequence
  Oligonucleotide for detection of SNP TSC0031774
attaccaaaaaat

SEQ ID NO: 126963 - DNA, 13 bp, Artificial Sequence
  Oligonucleotide for detection of SNP TSC0031774
atttttcggtaat

SEQ ID NO: 126964 - DNA, 13 bp, Artificial Sequence
  Oligonucleotide for detection of SNP TSC0031774
attaccgaaaaat

SEQ ID NO: 126965 - DNA, 13 bp, Artificial Sequence
  Oligonucleotide for detection of SNP TSC0031774
attgttggagaat

SEQ ID NO: 126966 - DNA, 13 bp, Artificial Sequence
  Oligonucleotide for detection of SNP TSC0031774
attctccaacaat

SEQ ID NO: 126967 - DNA, 13 bp, Artificial Sequence
  Oligonucleotide for detection of SNP TSC0031774
attgttagagaat

SEQ ID NO: 126968 - DNA, 13 bp, Artificial Sequence
  Oligonucleotide for detection of SNP TSC0031774
attctctaacaat

SEQ ID NO: 126969 - DNA, 13 bp, Artificial Sequence
  Oligonucleotide for detection of SNP TSC0031774
attgtcggagaat

SEQ ID NO: 126970 - DNA, 13 bp, Artificial Sequence
  Oligonucleotide for detection of SNP TSC0031774
attctccgacaat

SEQ ID NO: 126971 - DNA, 13 bp, Artificial Sequence
  Oligonucleotide for detection of SNP TSC0031781
agtttaatgttty

SEQ ID NO: 126972 - DNA, 13 bp, Artificial Sequence
  Oligonucleotide for detection of SNP TSC0031781
raaacattaaact

SEQ ID NO: 126973 - DNA, 13 bp, Artificial Sequence
  Oligonucleotide for detection of SNP TSC0031781
agtttagtgttty

SEQ ID NO: 126974 - DNA, 13 bp, Artificial Sequence
  Oligonucleotide for detection of SNP TSC0031781
raaacactaaact

SEQ ID NO: 126975 - DNA, 13 bp, Artificial Sequence
  Oligonucleotide for detection of SNP TSC0031782
aataaatgtttat

SEQ ID NO: 126976 - DNA, 13 bp, Artificial Sequence
  Oligonucleotide for detection of SNP TSC0031782
ataaacatttatt

SEQ ID NO: 126977 - DNA, 13 bp, Artificial Sequence
  Oligonucleotide for detection of SNP TSC0031782
aataaacgtttat

SEQ ID NO: 126978 - DNA, 13 bp, Artificial Sequence
  Oligonucleotide for detection of SNP TSC0031782
ataaacgtttatt

SEQ ID NO: 126979 - DNA, 13 bp, Artificial Sequence
  Oligonucleotide for detection of SNP TSC0031782
ataagtgtttgtt

SEQ ID NO: 126980 - DNA, 13 bp, Artificial Sequence
  Oligonucleotide for detection of SNP TSC0031782
aacaaacacttat

SEQ ID NO: 126981 - DNA, 13 bp, Artificial Sequence
  Oligonucleotide for detection of SNP TSC0031782
ataagtatttgtt

SEQ ID NO: 126982 - DNA, 13 bp, Artificial Sequence
  Oligonucleotide for detection of SNP TSC0031782
aacaaatacttat

SEQ ID NO: 126983 - DNA, 13 bp, Artificial Sequence
  Oligonucleotide for detection of SNP TSC0031782
ataagcgtttgtt

SEQ ID NO: 126984 - DNA, 13 bp, Artificial Sequence
  Oligonucleotide for detection of SNP TSC0031782
aacaaacgcttat

SEQ ID NO: 126985 - DNA, 13 bp, Artificial Sequence
  Oligonucleotide for detection of SNP TSC0031783
aattaagtgtgga

SEQ ID NO: 126986 - DNA, 13 bp, Artificial Sequence
  Oligonucleotide for detection of SNP TSC0031783
tccacacttaatt

SEQ ID NO: 126987 - DNA, 13 bp, Artificial Sequence
  Oligonucleotide for detection of SNP TSC0031783
aattaaatgtgga

SEQ ID NO: 126988 - DNA, 13 bp, Artificial Sequence
  Oligonucleotide for detection of SNP TSC0031783
tccacatttaatt

SEQ ID NO: 126989 - DNA, 13 bp, Artificial Sequence
  Oligonucleotide for detection of SNP TSC0031784
ttgatttattttt

SEQ ID NO: 126990 - DNA, 13 bp, Artificial Sequence
  Oligonucleotide for detection of SNP TSC0031784
aaaaataaatcaa

SEQ ID NO: 126991 - DNA, 13 bp, Artificial Sequence
  Oligonucleotide for detection of SNP TSC0031784
ttgattgattttt

SEQ ID NO: 126992 - DNA, 13 bp, Artificial Sequence
  Oligonucleotide for detection of SNP TSC0031784
aaaaatcaatcaa

SEQ ID NO: 126993 - DNA, 13 bp, Artificial Sequence
  Oligonucleotide for detection of SNP TSC0031788
ttgttggggagaa

SEQ ID NO: 126994 - DNA, 13 bp, Artificial Sequence
  Oligonucleotide for detection of SNP TSC0031788
ttctccccaacaa

SEQ ID NO: 126995 - DNA, 13 bp, Artificial Sequence
  Oligonucleotide for detection of SNP TSC0031788
ttgttgaggagaa

SEQ ID NO: 126996 - DNA, 13 bp, Artificial Sequence
  Oligonucleotide for detection of SNP TSC0031788
ttctcctcaacaa

SEQ ID NO: 126997 - DNA, 13 bp, Artificial Sequence
  Oligonucleotide for detection of SNP TSC0031792
tgattagagatty

SEQ ID NO: 126998 - DNA, 13 bp, Artificial Sequence
  Oligonucleotide for detection of SNP TSC0031792
raatctctaatca

SEQ ID NO: 126999 - DNA, 13 bp, Artificial Sequence
  Oligonucleotide for detection of SNP TSC0031792
tgattaaagatty

SEQ ID NO: 127000 - DNA, 13 bp, Artificial Sequence
  Oligonucleotide for detection of SNP TSC0031792
raatctttaatca

SEQ ID NO: 127001 - DNA, 13 bp, Artificial Sequence
  Oligonucleotide for detection of SNP TSC0031793
gaatttattgttt

SEQ ID NO: 127002 - DNA, 13 bp, Artificial Sequence
  Oligonucleotide for detection of SNP TSC0031793
aaacaataaattc

SEQ ID NO: 127003 - DNA, 13 bp, Artificial Sequence
  Oligonucleotide for detection of SNP TSC0031793
gaattttttgttt

SEQ ID NO: 127004 - DNA, 13 bp, Artificial Sequence
  Oligonucleotide for detection of SNP TSC0031793
aaacaaaaaattc

SEQ ID NO: 127005 - DNA, 13 bp, Artificial Sequence
  Oligonucleotide for detection of SNP TSC0031793
aggtaataagtty

SEQ ID NO: 127006 - DNA, 13 bp, Artificial Sequence
  Oligonucleotide for detection of SNP TSC0031793
raacttattacct

SEQ ID NO: 127007 - DNA, 13 bp, Artificial Sequence
  Oligonucleotide for detection of SNP TSC0031793
aggtaagaagtty

SEQ ID NO: 127008 - DNA, 13 bp, Artificial Sequence
  Oligonucleotide for detection of SNP TSC0031793
raacttcttacct

SEQ ID NO: 127009 - DNA, 13 bp, Artificial Sequence
  Oligonucleotide for detection of SNP TSC0031794
ttaagtaattgat

SEQ ID NO: 127010 - DNA, 13 bp, Artificial Sequence
  Oligonucleotide for detection of SNP TSC0031794
atcaattacttaa

SEQ ID NO: 127011 - DNA, 13 bp, Artificial Sequence
  Oligonucleotide for detection of SNP TSC0031794
ttaagtgattgat

SEQ ID NO: 127012 - DNA, 13 bp, Artificial Sequence
  Oligonucleotide for detection of SNP TSC0031794
atcaatcacttaa

SEQ ID NO: 127013 - DNA, 13 bp, Artificial Sequence
  Oligonucleotide for detection of SNP TSC0031795
ataaatatttgty

SEQ ID NO: 127014 - DNA, 13 bp, Artificial Sequence
  Oligonucleotide for detection of SNP TSC0031795
racaaatatttat

SEQ ID NO: 127015 - DNA, 13 bp, Artificial Sequence
  Oligonucleotide for detection of SNP TSC0031795
ataaatgtttgty

SEQ ID NO: 127016 - DNA, 13 bp, Artificial Sequence
  Oligonucleotide for detection of SNP TSC0031795
racaaacatttat

SEQ ID NO: 127017 - DNA, 13 bp, Artificial Sequence
  Oligonucleotide for detection of SNP TSC0031795
ataaatattcgty

SEQ ID NO: 127018 - DNA, 13 bp, Artificial Sequence
  Oligonucleotide for detection of SNP TSC0031795
racgaatatttat

SEQ ID NO: 127019 - DNA, 13 bp, Artificial Sequence
  Oligonucleotide for detection of SNP TSC0031795
ataaacgtttgty

SEQ ID NO: 127020 - DNA, 13 bp, Artificial Sequence
  Oligonucleotide for detection of SNP TSC0031795
racaaacgtttat

SEQ ID NO: 127021 - DNA, 13 bp, Artificial Sequence
  Oligonucleotide for detection of SNP TSC0031795
ataaatgttcgty

SEQ ID NO: 127022 - DNA, 13 bp, Artificial Sequence
  Oligonucleotide for detection of SNP TSC0031795
racgaacatttat

SEQ ID NO: 127023 - DNA, 13 bp, Artificial Sequence
  Oligonucleotide for detection of SNP TSC0031795
ataaacgttcgty

SEQ ID NO: 127024 - DNA, 13 bp, Artificial Sequence
  Oligonucleotide for detection of SNP TSC0031795
racgaacgtttat

SEQ ID NO: 127025 - DNA, 13 bp, Artificial Sequence
  Oligonucleotide for detection of SNP TSC0031795
ggtgaatgtttat

SEQ ID NO: 127026 - DNA, 13 bp, Artificial Sequence
  Oligonucleotide for detection of SNP TSC0031795
ataaacattcacc

SEQ ID NO: 127027 - DNA, 13 bp, Artificial Sequence
  Oligonucleotide for detection of SNP TSC0031795
ggcgaatgtttat

SEQ ID NO: 127028 - DNA, 13 bp, Artificial Sequence
  Oligonucleotide for detection of SNP TSC0031795
ataaacattcgcc

SEQ ID NO: 127029 - DNA, 13 bp, Artificial Sequence
  Oligonucleotide for detection of SNP TSC0031795
ggtgaacgtttat

SEQ ID NO: 127030 - DNA, 13 bp, Artificial Sequence
  Oligonucleotide for detection of SNP TSC0031795
ataaacgttcacc

SEQ ID NO: 127031 - DNA, 13 bp, Artificial Sequence
  Oligonucleotide for detection of SNP TSC0031795
ggcgaacgtttat

SEQ ID NO: 127032 - DNA, 13 bp, Artificial Sequence
  Oligonucleotide for detection of SNP TSC0031795
ataaacgttcgcc

SEQ ID NO: 127033 - DNA, 13 bp, Artificial Sequence
  Oligonucleotide for detection of SNP TSC0031797
tagtttttgaaty

SEQ ID NO: 127034 - DNA, 13 bp, Artificial Sequence
  Oligonucleotide for detection of SNP TSC0031797
rattcaaaaacta

SEQ ID NO: 127035 - DNA, 13 bp, Artificial Sequence
  Oligonucleotide for detection of SNP TSC0031797
tagtttgtgaaty

SEQ ID NO: 127036 - DNA, 13 bp, Artificial Sequence
  Oligonucleotide for detection of SNP TSC0031797
rattcacaaacta

SEQ ID NO: 127037 - DNA, 13 bp, Artificial Sequence
  Oligonucleotide for detection of SNP TSC0031797
gatttagagattg

SEQ ID NO: 127038 - DNA, 13 bp, Artificial Sequence
  Oligonucleotide for detection of SNP TSC0031797
caatctctaaatc

SEQ ID NO: 127039 - DNA, 13 bp, Artificial Sequence
  Oligonucleotide for detection of SNP TSC0031797
gatttatagattg

SEQ ID NO: 127040 - DNA, 13 bp, Artificial Sequence
  Oligonucleotide for detection of SNP TSC0031797
caatctataaatc

SEQ ID NO: 127041 - DNA, 13 bp, Artificial Sequence
  Oligonucleotide for detection of SNP TSC0031798
tagggaagatgty

SEQ ID NO: 127042 - DNA, 13 bp, Artificial Sequence
  Oligonucleotide for detection of SNP TSC0031798
racatcttcccta

SEQ ID NO: 127043 - DNA, 13 bp, Artificial Sequence
  Oligonucleotide for detection of SNP TSC0031798
tagggaggatgty

SEQ ID NO: 127044 - DNA, 13 bp, Artificial Sequence
  Oligonucleotide for detection of SNP TSC0031798
racatcctcccta

SEQ ID NO: 127045 - DNA, 13 bp, Artificial Sequence
  Oligonucleotide for detection of SNP TSC0031802
tttttttgaaggy

SEQ ID NO: 127046 - DNA, 13 bp, Artificial Sequence
  Oligonucleotide for detection of SNP TSC0031802
rccttcaaaaaaa

SEQ ID NO: 127047 - DNA, 13 bp, Artificial Sequence
  Oligonucleotide for detection of SNP TSC0031802
ttttttcgaaggy

SEQ ID NO: 127048 - DNA, 13 bp, Artificial Sequence
  Oligonucleotide for detection of SNP TSC0031802
rccttcgaaaaaa

SEQ ID NO: 127049 - DNA, 13 bp, Artificial Sequence
  Oligonucleotide for detection of SNP TSC0031802
gtttttgaaaaga

SEQ ID NO: 127050 - DNA, 13 bp, Artificial Sequence
  Oligonucleotide for detection of SNP TSC0031802
tcttttcaaaaac

SEQ ID NO: 127051 - DNA, 13 bp, Artificial Sequence
  Oligonucleotide for detection of SNP TSC0031802
gtttttaaaaaga

SEQ ID NO: 127052 - DNA, 13 bp, Artificial Sequence
  Oligonucleotide for detection of SNP TSC0031802
tctttttaaaaac

SEQ ID NO: 127053 - DNA, 13 bp, Artificial Sequence
  Oligonucleotide for detection of SNP TSC0031802
gttttcgaaaaga

SEQ ID NO: 127054 - DNA, 13 bp, Artificial Sequence
  Oligonucleotide for detection of SNP TSC0031802
tcttttcgaaaac

SEQ ID NO: 127055 - DNA, 13 bp, Artificial Sequence
  Oligonucleotide for detection of SNP TSC0031803
agtagatttgtty

SEQ ID NO: 127056 - DNA, 13 bp, Artificial Sequence
  Oligonucleotide for detection of SNP TSC0031803
raacaaatctact

SEQ ID NO: 127057 - DNA, 13 bp, Artificial Sequence
  Oligonucleotide for detection of SNP TSC0031803
agtagagttgtty

SEQ ID NO: 127058 - DNA, 13 bp, Artificial Sequence
  Oligonucleotide for detection of SNP TSC0031803
raacaactctact

SEQ ID NO: 127059 - DNA, 13 bp, Artificial Sequence
  Oligonucleotide for detection of SNP TSC0031803
gagtaagtttgtt

SEQ ID NO: 127060 - DNA, 13 bp, Artificial Sequence
  Oligonucleotide for detection of SNP TSC0031803
aacaaacttactc

SEQ ID NO: 127061 - DNA, 13 bp, Artificial Sequence
  Oligonucleotide for detection of SNP TSC0031803
gagtaattttgtt

SEQ ID NO: 127062 - DNA, 13 bp, Artificial Sequence
  Oligonucleotide for detection of SNP TSC0031803
aacaaaattactc

SEQ ID NO: 127063 - DNA, 13 bp, Artificial Sequence
  Oligonucleotide for detection of SNP TSC0031804
aagagtatgtgtt

SEQ ID NO: 127064 - DNA, 13 bp, Artificial Sequence
  Oligonucleotide for detection of SNP TSC0031804
aacacatactctt

SEQ ID NO: 127065 - DNA, 13 bp, Artificial Sequence
  Oligonucleotide for detection of SNP TSC0031804
aagagtgtgtgtt

SEQ ID NO: 127066 - DNA, 13 bp, Artificial Sequence
  Oligonucleotide for detection of SNP TSC0031804
aacacacactctt

SEQ ID NO: 127067 - DNA, 13 bp, Artificial Sequence
  Oligonucleotide for detection of SNP TSC0031804
aagagcgtgtgtt

SEQ ID NO: 127068 - DNA, 13 bp, Artificial Sequence
  Oligonucleotide for detection of SNP TSC0031804
aacacacgctctt

SEQ ID NO: 127069 - DNA, 13 bp, Artificial Sequence
  Oligonucleotide for detection of SNP TSC0031804
agtatatgttttt

SEQ ID NO: 127070 - DNA, 13 bp, Artificial Sequence
  Oligonucleotide for detection of SNP TSC0031804
aaaaacatatact

SEQ ID NO: 127071 - DNA, 13 bp, Artificial Sequence
  Oligonucleotide for detection of SNP TSC0031804
agtatacgttttt

SEQ ID NO: 127072 - DNA, 13 bp, Artificial Sequence
  Oligonucleotide for detection of SNP TSC0031804
aaaaacgtatact

SEQ ID NO: 127073 - DNA, 13 bp, Artificial Sequence
  Oligonucleotide for detection of SNP TSC0031805
aaagaaaggatgg

SEQ ID NO: 127074 - DNA, 13 bp, Artificial Sequence
  Oligonucleotide for detection of SNP TSC0031805
ccatcctttcttt

SEQ ID NO: 127075 - DNA, 13 bp, Artificial Sequence
  Oligonucleotide for detection of SNP TSC0031805
aaagaagggatgg

SEQ ID NO: 127076 - DNA, 13 bp, Artificial Sequence
  Oligonucleotide for detection of SNP TSC0031805
ccatcccttcttt

SEQ ID NO: 127077 - DNA, 13 bp, Artificial Sequence
  Oligonucleotide for detection of SNP TSC0031806
ataggaggttttg

SEQ ID NO: 127078 - DNA, 13 bp, Artificial Sequence
  Oligonucleotide for detection of SNP TSC0031806
caaaacctcctat

SEQ ID NO: 127079 - DNA, 13 bp, Artificial Sequence
  Oligonucleotide for detection of SNP TSC0031806
ataggatgttttg

SEQ ID NO: 127080 - DNA, 13 bp, Artificial Sequence
  Oligonucleotide for detection of SNP TSC0031806
caaaacatcctat

SEQ ID NO: 127081 - DNA, 13 bp, Artificial Sequence
  Oligonucleotide for detection of SNP TSC0031806
tagaattttttgt

SEQ ID NO: 127082 - DNA, 13 bp, Artificial Sequence
  Oligonucleotide for detection of SNP TSC0031806
acaaaaaattcta

SEQ ID NO: 127083 - DNA, 13 bp, Artificial Sequence
  Oligonucleotide for detection of SNP TSC0031806
tagaatattttgt

SEQ ID NO: 127084 - DNA, 13 bp, Artificial Sequence
  Oligonucleotide for detection of SNP TSC0031806
acaaaatattcta

SEQ ID NO: 127085 - DNA, 13 bp, Artificial Sequence
  Oligonucleotide for detection of SNP TSC0031807
aaagtaggattgt

SEQ ID NO: 127086 - DNA, 13 bp, Artificial Sequence
  Oligonucleotide for detection of SNP TSC0031807
acaatcctacttt

SEQ ID NO: 127087 - DNA, 13 bp, Artificial Sequence
  Oligonucleotide for detection of SNP TSC0031807
aaagtaagattgt

SEQ ID NO: 127088 - DNA, 13 bp, Artificial Sequence
  Oligonucleotide for detection of SNP TSC0031807
acaatcttacttt

SEQ ID NO: 127089 - DNA, 13 bp, Artificial Sequence
  Oligonucleotide for detection of SNP TSC0031810
agttagatattta

SEQ ID NO: 127090 - DNA, 13 bp, Artificial Sequence
  Oligonucleotide for detection of SNP TSC0031810
taaatatctaact

SEQ ID NO: 127091 - DNA, 13 bp, Artificial Sequence
  Oligonucleotide for detection of SNP TSC0031810
agttaggtattta

SEQ ID NO: 127092 - DNA, 13 bp, Artificial Sequence
  Oligonucleotide for detection of SNP TSC0031810
taaatacctaact

SEQ ID NO: 127093 - DNA, 13 bp, Artificial Sequence
  Oligonucleotide for detection of SNP TSC0031811
tttttgtgtaaag

SEQ ID NO: 127094 - DNA, 13 bp, Artificial Sequence
  Oligonucleotide for detection of SNP TSC0031811
ctttacacaaaaa

SEQ ID NO: 127095 - DNA, 13 bp, Artificial Sequence
  Oligonucleotide for detection of SNP TSC0031811
tttttgcgtaaag

SEQ ID NO: 127096 - DNA, 13 bp, Artificial Sequence
  Oligonucleotide for detection of SNP TSC0031811
ctttacgcaaaaa

SEQ ID NO: 127097 - DNA, 13 bp, Artificial Sequence
  Oligonucleotide for detection of SNP TSC0031811
ttttgtgtagggg

SEQ ID NO: 127098 - DNA, 13 bp, Artificial Sequence
  Oligonucleotide for detection of SNP TSC0031811
cccctacacaaaa

SEQ ID NO: 127099 - DNA, 13 bp, Artificial Sequence
  Oligonucleotide for detection of SNP TSC0031811
ttttgtatagggg

SEQ ID NO: 127100 - DNA, 13 bp, Artificial Sequence
  Oligonucleotide for detection of SNP TSC0031811
cccctatacaaaa

SEQ ID NO: 127101 - DNA, 13 bp, Artificial Sequence
  Oligonucleotide for detection of SNP TSC0031811
ttttgcgtagggg

SEQ ID NO: 127102 - DNA, 13 bp, Artificial Sequence
  Oligonucleotide for detection of SNP TSC0031811
cccctacgcaaaa

SEQ ID NO: 127103 - DNA, 13 bp, Artificial Sequence
  Oligonucleotide for detection of SNP TSC0031812
agttattgtgggy

SEQ ID NO: 127104 - DNA, 13 bp, Artificial Sequence
  Oligonucleotide for detection of SNP TSC0031812
rcccacaataact

SEQ ID NO: 127105 - DNA, 13 bp, Artificial Sequence
  Oligonucleotide for detection of SNP TSC0031812
agttatcgtgggy

SEQ ID NO: 127106 - DNA, 13 bp, Artificial Sequence
  Oligonucleotide for detection of SNP TSC0031812
rcccacgataact

SEQ ID NO: 127107 - DNA, 13 bp, Artificial Sequence
  Oligonucleotide for detection of SNP TSC0031812
agttattgcgggy

SEQ ID NO: 127108 - DNA, 13 bp, Artificial Sequence
  Oligonucleotide for detection of SNP TSC0031812
rcccgcaataact

SEQ ID NO: 127109 - DNA, 13 bp, Artificial Sequence
  Oligonucleotide for detection of SNP TSC0031812
agttatcgcgggy

SEQ ID NO: 127110 - DNA, 13 bp, Artificial Sequence
  Oligonucleotide for detection of SNP TSC0031812
rcccgcgataact

SEQ ID NO: 127111 - DNA, 13 bp, Artificial Sequence
  Oligonucleotide for detection of SNP TSC0031812
gtttgtggtgatt

SEQ ID NO: 127112 - DNA, 13 bp, Artificial Sequence
  Oligonucleotide for detection of SNP TSC0031812
aatcaccacaaac

SEQ ID NO: 127113 - DNA, 13 bp, Artificial Sequence
  Oligonucleotide for detection of SNP TSC0031812
gtttgtagtgatt

SEQ ID NO: 127114 - DNA, 13 bp, Artificial Sequence
  Oligonucleotide for detection of SNP TSC0031812
aatcactacaaac

SEQ ID NO: 127115 - DNA, 13 bp, Artificial Sequence
  Oligonucleotide for detection of SNP TSC0031812
gttcgtggtgatt

SEQ ID NO: 127116 - DNA, 13 bp, Artificial Sequence
  Oligonucleotide for detection of SNP TSC0031812
aatcaccacgaac

SEQ ID NO: 127117 - DNA, 13 bp, Artificial Sequence
  Oligonucleotide for detection of SNP TSC0031812
gttcgtagtgatt

SEQ ID NO: 127118 - DNA, 13 bp, Artificial Sequence
  Oligonucleotide for detection of SNP TSC0031812
aatcactacgaac

SEQ ID NO: 127119 - DNA, 13 bp, Artificial Sequence
  Oligonucleotide for detection of SNP TSC0031812
gtttgcggtgatt

SEQ ID NO: 127120 - DNA, 13 bp, Artificial Sequence
  Oligonucleotide for detection of SNP TSC0031812
aatcaccgcaaac

SEQ ID NO: 127121 - DNA, 13 bp, Artificial Sequence
  Oligonucleotide for detection of SNP TSC0031812
gttcgcggtgatt

SEQ ID NO: 127122 - DNA, 13 bp, Artificial Sequence
  Oligonucleotide for detection of SNP TSC0031812
aatcaccgcgaac

SEQ ID NO: 127123 - DNA, 13 bp, Artificial Sequence
  Oligonucleotide for detection of SNP TSC0031813
gttggaatgtata

SEQ ID NO: 127124 - DNA, 13 bp, Artificial Sequence
  Oligonucleotide for detection of SNP TSC0031813
tatacattccaac

SEQ ID NO: 127125 - DNA, 13 bp, Artificial Sequence
  Oligonucleotide for detection of SNP TSC0031813
gttggagtgtata

SEQ ID NO: 127126 - DNA, 13 bp, Artificial Sequence
  Oligonucleotide for detection of SNP TSC0031813
tatacactccaac

SEQ ID NO: 127127 - DNA, 13 bp, Artificial Sequence
  Oligonucleotide for detection of SNP TSC0031814
tatattgattttg

SEQ ID NO: 127128 - DNA, 13 bp, Artificial Sequence
  Oligonucleotide for detection of SNP TSC0031814
caaaatcaatata

SEQ ID NO: 127129 - DNA, 13 bp, Artificial Sequence
  Oligonucleotide for detection of SNP TSC0031814
tatattaattttg

SEQ ID NO: 127130 - DNA, 13 bp, Artificial Sequence
  Oligonucleotide for detection of SNP TSC0031814
caaaattaatata

SEQ ID NO: 127131 - DNA, 13 bp, Artificial Sequence
  Oligonucleotide for detection of SNP TSC0031815
ggataggatttty

SEQ ID NO: 127132 - DNA, 13 bp, Artificial Sequence
  Oligonucleotide for detection of SNP TSC0031815
raaaatcctatcc

SEQ ID NO: 127133 - DNA, 13 bp, Artificial Sequence
  Oligonucleotide for detection of SNP TSC0031815
ggatagaatttty

SEQ ID NO: 127134 - DNA, 13 bp, Artificial Sequence
  Oligonucleotide for detection of SNP TSC0031815
raaaattctatcc

SEQ ID NO: 127135 - DNA, 13 bp, Artificial Sequence
  Oligonucleotide for detection of SNP TSC0031818
gaagtgggtttag

SEQ ID NO: 127136 - DNA, 13 bp, Artificial Sequence
  Oligonucleotide for detection of SNP TSC0031818
ctaaacccacttc

SEQ ID NO: 127137 - DNA, 13 bp, Artificial Sequence
  Oligonucleotide for detection of SNP TSC0031818
gaagtgagtttag

SEQ ID NO: 127138 - DNA, 13 bp, Artificial Sequence
  Oligonucleotide for detection of SNP TSC0031818
ctaaactcacttc

SEQ ID NO: 127139 - DNA, 13 bp, Artificial Sequence
  Oligonucleotide for detection of SNP TSC0031819
ggttatatggttt

SEQ ID NO: 127140 - DNA, 13 bp, Artificial Sequence
  Oligonucleotide for detection of SNP TSC0031819
aaaccatataacc

SEQ ID NO: 127141 - DNA, 13 bp, Artificial Sequence
  Oligonucleotide for detection of SNP TSC0031819
ggttatgtggttt

SEQ ID NO: 127142 - DNA, 13 bp, Artificial Sequence
  Oligonucleotide for detection of SNP TSC0031819
aaaccacataacc

SEQ ID NO: 127143 - DNA, 13 bp, Artificial Sequence
  Oligonucleotide for detection of SNP TSC0031819
ggttacgtggttt

SEQ ID NO: 127144 - DNA, 13 bp, Artificial Sequence
  Oligonucleotide for detection of SNP TSC0031819
aaaccacgtaacc

SEQ ID NO: 127145 - DNA, 13 bp, Artificial Sequence
  Oligonucleotide for detection of SNP TSC0031819
agattatgtaaty

SEQ ID NO: 127146 - DNA, 13 bp, Artificial Sequence
  Oligonucleotide for detection of SNP TSC0031819
rattacataatct

SEQ ID NO: 127147 - DNA, 13 bp, Artificial Sequence
  Oligonucleotide for detection of SNP TSC0031819
agattacgtaaty

SEQ ID NO: 127148 - DNA, 13 bp, Artificial Sequence
  Oligonucleotide for detection of SNP TSC0031819
rattacgtaatct

SEQ ID NO: 127149 - DNA, 13 bp, Artificial Sequence
  Oligonucleotide for detection of SNP TSC0031820
gaggaaagttgay

SEQ ID NO: 127150 - DNA, 13 bp, Artificial Sequence
  Oligonucleotide for detection of SNP TSC0031820
rtcaactttcctc

SEQ ID NO: 127151 - DNA, 13 bp, Artificial Sequence
  Oligonucleotide for detection of SNP TSC0031820
gaggaaggttgay

SEQ ID NO: 127152 - DNA, 13 bp, Artificial Sequence
  Oligonucleotide for detection of SNP TSC0031820
rtcaaccttcctc

SEQ ID NO: 127153 - DNA, 13 bp, Artificial Sequence
  Oligonucleotide for detection of SNP TSC0031821
aggaaagttgaty

SEQ ID NO: 127154 - DNA, 13 bp, Artificial Sequence
  Oligonucleotide for detection of SNP TSC0031821
ratcaactttcct

SEQ ID NO: 127155 - DNA, 13 bp, Artificial Sequence
  Oligonucleotide for detection of SNP TSC0031821
aggaaatttgaty

SEQ ID NO: 127156 - DNA, 13 bp, Artificial Sequence
  Oligonucleotide for detection of SNP TSC0031821
ratcaaatttcct

SEQ ID NO: 127157 - DNA, 13 bp, Artificial Sequence
  Oligonucleotide for detection of SNP TSC0031821
ggttagttttttt

SEQ ID NO: 127158 - DNA, 13 bp, Artificial Sequence
  Oligonucleotide for detection of SNP TSC0031821
aaaaaaactaacc

SEQ ID NO: 127159 - DNA, 13 bp, Artificial Sequence
  Oligonucleotide for detection of SNP TSC0031821
ggttagatttttt

SEQ ID NO: 127160 - DNA, 13 bp, Artificial Sequence
  Oligonucleotide for detection of SNP TSC0031821
aaaaaatctaacc

SEQ ID NO: 127161 - DNA, 13 bp, Artificial Sequence
  Oligonucleotide for detection of SNP TSC0031822
tagagatgtttgt

SEQ ID NO: 127162 - DNA, 13 bp, Artificial Sequence
  Oligonucleotide for detection of SNP TSC0031822
acaaacatctcta

SEQ ID NO: 127163 - DNA, 13 bp, Artificial Sequence
  Oligonucleotide for detection of SNP TSC0031822
tagagacgtttgt

SEQ ID NO: 127164 - DNA, 13 bp, Artificial Sequence
  Oligonucleotide for detection of SNP TSC0031822
acaaacgtctcta

SEQ ID NO: 127165 - DNA, 13 bp, Artificial Sequence
  Oligonucleotide for detection of SNP TSC0031822
ataggtgtttttg

SEQ ID NO: 127166 - DNA, 13 bp, Artificial Sequence
  Oligonucleotide for detection of SNP TSC0031822
caaaaacacctat

SEQ ID NO: 127167 - DNA, 13 bp, Artificial Sequence
  Oligonucleotide for detection of SNP TSC0031822
ataggtatttttg

SEQ ID NO: 127168 - DNA, 13 bp, Artificial Sequence
  Oligonucleotide for detection of SNP TSC0031822
caaaaatacctat

SEQ ID NO: 127169 - DNA, 13 bp, Artificial Sequence
  Oligonucleotide for detection of SNP TSC0031822
ataggcgtttttg

SEQ ID NO: 127170 - DNA, 13 bp, Artificial Sequence
  Oligonucleotide for detection of SNP TSC0031822
caaaaacgcctat

SEQ ID NO: 127171 - DNA, 13 bp, Artificial Sequence
  Oligonucleotide for detection of SNP TSC0031823
gagtggaagattt

SEQ ID NO: 127172 - DNA, 13 bp, Artificial Sequence
  Oligonucleotide for detection of SNP TSC0031823
aaatcttccactc

SEQ ID NO: 127173 - DNA, 13 bp, Artificial Sequence
  Oligonucleotide for detection of SNP TSC0031823
gagtgggagattt

SEQ ID NO: 127174 - DNA, 13 bp, Artificial Sequence
  Oligonucleotide for detection of SNP TSC0031823
aaatctcccactc

SEQ ID NO: 127175 - DNA, 13 bp, Artificial Sequence
  Oligonucleotide for detection of SNP TSC0031827
aagtgaatttttt

SEQ ID NO: 127176 - DNA, 13 bp, Artificial Sequence
  Oligonucleotide for detection of SNP TSC0031827
aaaaaattcactt

SEQ ID NO: 127177 - DNA, 13 bp, Artificial Sequence
  Oligonucleotide for detection of SNP TSC0031827
aagcgaatttttt

SEQ ID NO: 127178 - DNA, 13 bp, Artificial Sequence
  Oligonucleotide for detection of SNP TSC0031827
aaaaaattcgctt

SEQ ID NO: 127179 - DNA, 13 bp, Artificial Sequence
  Oligonucleotide for detection of SNP TSC0031827
aggagatttgttt

SEQ ID NO: 127180 - DNA, 13 bp, Artificial Sequence
  Oligonucleotide for detection of SNP TSC0031827
aaacaaatctcct

SEQ ID NO: 127181 - DNA, 13 bp, Artificial Sequence
  Oligonucleotide for detection of SNP TSC0031827
aggagaattgttt

SEQ ID NO: 127182 - DNA, 13 bp, Artificial Sequence
  Oligonucleotide for detection of SNP TSC0031827
aaacaattctcct

SEQ ID NO: 127183 - DNA, 13 bp, Artificial Sequence
  Oligonucleotide for detection of SNP TSC0031827
aggagattcgttt

SEQ ID NO: 127184 - DNA, 13 bp, Artificial Sequence
  Oligonucleotide for detection of SNP TSC0031827
aaacgaatctcct

SEQ ID NO: 127185 - DNA, 13 bp, Artificial Sequence
  Oligonucleotide for detection of SNP TSC0031827
aggagaatcgttt

SEQ ID NO: 127186 - DNA, 13 bp, Artificial Sequence
  Oligonucleotide for detection of SNP TSC0031827
aaacgattctcct

SEQ ID NO: 127187 - DNA, 13 bp, Artificial Sequence
  Oligonucleotide for detection of SNP TSC0031831
aaagaatgtaaaa

SEQ ID NO: 127188 - DNA, 13 bp, Artificial Sequence
  Oligonucleotide for detection of SNP TSC0031831
ttttacattcttt

SEQ ID NO: 127189 - DNA, 13 bp, Artificial Sequence
  Oligonucleotide for detection of SNP TSC0031831
aaagaacgtaaaa

SEQ ID NO: 127190 - DNA, 13 bp, Artificial Sequence
  Oligonucleotide for detection of SNP TSC0031831
ttttacgttcttt

SEQ ID NO: 127191 - DNA, 13 bp, Artificial Sequence
  Oligonucleotide for detection of SNP TSC0031833
tatgattggatta

SEQ ID NO: 127192 - DNA, 13 bp, Artificial Sequence
  Oligonucleotide for detection of SNP TSC0031833
taatccaatcata

SEQ ID NO: 127193 - DNA, 13 bp, Artificial Sequence
  Oligonucleotide for detection of SNP TSC0031833
tatgatcggatta

SEQ ID NO: 127194 - DNA, 13 bp, Artificial Sequence
  Oligonucleotide for detection of SNP TSC0031833
taatccgatcata

SEQ ID NO: 127195 - DNA, 13 bp, Artificial Sequence
  Oligonucleotide for detection of SNP TSC0031833
tggtttgattatg

SEQ ID NO: 127196 - DNA, 13 bp, Artificial Sequence
  Oligonucleotide for detection of SNP TSC0031833
cataatcaaacca

SEQ ID NO: 127197 - DNA, 13 bp, Artificial Sequence
  Oligonucleotide for detection of SNP TSC0031833
tggtttaattatg

SEQ ID NO: 127198 - DNA, 13 bp, Artificial Sequence
  Oligonucleotide for detection of SNP TSC0031833
cataattaaacca

SEQ ID NO: 127199 - DNA, 13 bp, Artificial Sequence
  Oligonucleotide for detection of SNP TSC0031833
tggttcgattatg

SEQ ID NO: 127200 - DNA, 13 bp, Artificial Sequence
  Oligonucleotide for detection of SNP TSC0031833
cataatcgaacca

SEQ ID NO: 127201 - DNA, 13 bp, Artificial Sequence
  Oligonucleotide for detection of SNP TSC0031834
aggattatttaty

SEQ ID NO: 127202 - DNA, 13 bp, Artificial Sequence
  Oligonucleotide for detection of SNP TSC0031834
rataaataatcct

SEQ ID NO: 127203 - DNA, 13 bp, Artificial Sequence
  Oligonucleotide for detection of SNP TSC0031834
aggattgtttaty

SEQ ID NO: 127204 - DNA, 13 bp, Artificial Sequence
  Oligonucleotide for detection of SNP TSC0031834
rataaacaatcct

SEQ ID NO: 127205 - DNA, 13 bp, Artificial Sequence
  Oligonucleotide for detection of SNP TSC0031834
aggatcgtttaty

SEQ ID NO: 127206 - DNA, 13 bp, Artificial Sequence
  Oligonucleotide for detection of SNP TSC0031834
rataaacgatcct

SEQ ID NO: 127207 - DNA, 13 bp, Artificial Sequence
  Oligonucleotide for detection of SNP TSC0031834
ggtaggtggtttt

SEQ ID NO: 127208 - DNA, 13 bp, Artificial Sequence
  Oligonucleotide for detection of SNP TSC0031834
aaaaccacctacc

SEQ ID NO: 127209 - DNA, 13 bp, Artificial Sequence
  Oligonucleotide for detection of SNP TSC0031834
ggtaggcggtttt

SEQ ID NO: 127210 - DNA, 13 bp, Artificial Sequence
  Oligonucleotide for detection of SNP TSC0031834
aaaaccgcctacc

SEQ ID NO: 127211 - DNA, 13 bp, Artificial Sequence
  Oligonucleotide for detection of SNP TSC0031835
ttgagatgtggag

SEQ ID NO: 127212 - DNA, 13 bp, Artificial Sequence
  Oligonucleotide for detection of SNP TSC0031835
ctccacatctcaa

SEQ ID NO: 127213 - DNA, 13 bp, Artificial Sequence
  Oligonucleotide for detection of SNP TSC0031835
ttgagacgtggag

SEQ ID NO: 127214 - DNA, 13 bp, Artificial Sequence
  Oligonucleotide for detection of SNP TSC0031835
ctccacgtctcaa

SEQ ID NO: 127215 - DNA, 13 bp, Artificial Sequence
  Oligonucleotide for detection of SNP TSC0031842
aggttatgttttg

SEQ ID NO: 127216 - DNA, 13 bp, Artificial Sequence
  Oligonucleotide for detection of SNP TSC0031842
caaaacataacct

SEQ ID NO: 127217 - DNA, 13 bp, Artificial Sequence
  Oligonucleotide for detection of SNP TSC0031842
aggttacgttttg

SEQ ID NO: 127218 - DNA, 13 bp, Artificial Sequence
  Oligonucleotide for detection of SNP TSC0031842
caaaacgtaacct

SEQ ID NO: 127219 - DNA, 13 bp, Artificial Sequence
  Oligonucleotide for detection of SNP TSC0031842
tagggtgtggttt

SEQ ID NO: 127220 - DNA, 13 bp, Artificial Sequence
  Oligonucleotide for detection of SNP TSC0031842
aaaccacacccta

SEQ ID NO: 127221 - DNA, 13 bp, Artificial Sequence
  Oligonucleotide for detection of SNP TSC0031842
tagggtatggttt

SEQ ID NO: 127222 - DNA, 13 bp, Artificial Sequence
  Oligonucleotide for detection of SNP TSC0031842
aaaccatacccta

SEQ ID NO: 127223 - DNA, 13 bp, Artificial Sequence
  Oligonucleotide for detection of SNP TSC0031842
tagggcgtggttt

SEQ ID NO: 127224 - DNA, 13 bp, Artificial Sequence
  Oligonucleotide for detection of SNP TSC0031842
aaaccacgcccta

SEQ ID NO: 127225 - DNA, 13 bp, Artificial Sequence
  Oligonucleotide for detection of SNP TSC0031843
gtgttggtttaaa

SEQ ID NO: 127226 - DNA, 13 bp, Artificial Sequence
  Oligonucleotide for detection of SNP TSC0031843
tttaaaccaacac

SEQ ID NO: 127227 - DNA, 13 bp, Artificial Sequence
  Oligonucleotide for detection of SNP TSC0031843
gtgttgatttaaa

SEQ ID NO: 127228 - DNA, 13 bp, Artificial Sequence
  Oligonucleotide for detection of SNP TSC0031843
tttaaatcaacac

SEQ ID NO: 127229 - DNA, 13 bp, Artificial Sequence
  Oligonucleotide for detection of SNP TSC0031843
gcgttggtttaaa

SEQ ID NO: 127230 - DNA, 13 bp, Artificial Sequence
  Oligonucleotide for detection of SNP TSC0031843
tttaaaccaacgc

SEQ ID NO: 127231 - DNA, 13 bp, Artificial Sequence
  Oligonucleotide for detection of SNP TSC0031843
gcgttgatttaaa

SEQ ID NO: 127232 - DNA, 13 bp, Artificial Sequence
  Oligonucleotide for detection of SNP TSC0031843
tttaaatcaacgc

SEQ ID NO: 127233 - DNA, 13 bp, Artificial Sequence
  Oligonucleotide for detection of SNP TSC0031844
gataaataaaaat

SEQ ID NO: 127234 - DNA, 13 bp, Artificial Sequence
  Oligonucleotide for detection of SNP TSC0031844
atttttatttatc

SEQ ID NO: 127235 - DNA, 13 bp, Artificial Sequence
  Oligonucleotide for detection of SNP TSC0031844
gataaaaaaaaat

SEQ ID NO: 127236 - DNA, 13 bp, Artificial Sequence
  Oligonucleotide for detection of SNP TSC0031844
atttttttttatc

SEQ ID NO: 127237 - DNA, 13 bp, Artificial Sequence
  Oligonucleotide for detection of SNP TSC0031845
ttttttgggtttg

SEQ ID NO: 127238 - DNA, 13 bp, Artificial Sequence
  Oligonucleotide for detection of SNP TSC0031845
caaacccaaaaaa

SEQ ID NO: 127239 - DNA, 13 bp, Artificial Sequence
  Oligonucleotide for detection of SNP TSC0031845
tttttttggtttg

SEQ ID NO: 127240 - DNA, 13 bp, Artificial Sequence
  Oligonucleotide for detection of SNP TSC0031845
caaaccaaaaaaa

SEQ ID NO: 127241 - DNA, 13 bp, Artificial Sequence
  Oligonucleotide for detection of SNP TSC0031845
tttttcgggtttg

SEQ ID NO: 127242 - DNA, 13 bp, Artificial Sequence
  Oligonucleotide for detection of SNP TSC0031845
caaacccgaaaaa

SEQ ID NO: 127243 - DNA, 13 bp, Artificial Sequence
  Oligonucleotide for detection of SNP TSC0031845
taagtttggggaa

SEQ ID NO: 127244 - DNA, 13 bp, Artificial Sequence
  Oligonucleotide for detection of SNP TSC0031845
ttccccaaactta

SEQ ID NO: 127245 - DNA, 13 bp, Artificial Sequence
  Oligonucleotide for detection of SNP TSC0031845
taagttaggggaa

SEQ ID NO: 127246 - DNA, 13 bp, Artificial Sequence
  Oligonucleotide for detection of SNP TSC0031845
ttcccctaactta

SEQ ID NO: 127247 - DNA, 13 bp, Artificial Sequence
  Oligonucleotide for detection of SNP TSC0031845
taagttcggggaa

SEQ ID NO: 127248 - DNA, 13 bp, Artificial Sequence
  Oligonucleotide for detection of SNP TSC0031845
ttccccgaactta

SEQ ID NO: 127249 - DNA, 13 bp, Artificial Sequence
  Oligonucleotide for detection of SNP TSC0031846
tatagagaggaat

SEQ ID NO: 127250 - DNA, 13 bp, Artificial Sequence
  Oligonucleotide for detection of SNP TSC0031846
attcctctctata

SEQ ID NO: 127251 - DNA, 13 bp, Artificial Sequence
  Oligonucleotide for detection of SNP TSC0031846
tatagaaaggaat

SEQ ID NO: 127252 - DNA, 13 bp, Artificial Sequence
  Oligonucleotide for detection of SNP TSC0031846
attcctttctata

SEQ ID NO: 127253 - DNA, 13 bp, Artificial Sequence
  Oligonucleotide for detection of SNP TSC0031847
tttttagagatgy

SEQ ID NO: 127254 - DNA, 13 bp, Artificial Sequence
  Oligonucleotide for detection of SNP TSC0031847
rcatctctaaaaa

SEQ ID NO: 127255 - DNA, 13 bp, Artificial Sequence
  Oligonucleotide for detection of SNP TSC0031847
tttttaaagatgy

SEQ ID NO: 127256 - DNA, 13 bp, Artificial Sequence
  Oligonucleotide for detection of SNP TSC0031847
rcatctttaaaaa

SEQ ID NO: 127257 - DNA, 13 bp, Artificial Sequence
  Oligonucleotide for detection of SNP TSC0031850
gggagaaggaaga

SEQ ID NO: 127258 - DNA, 13 bp, Artificial Sequence
  Oligonucleotide for detection of SNP TSC0031850
tcttccttctccc

SEQ ID NO: 127259 - DNA, 13 bp, Artificial Sequence
  Oligonucleotide for detection of SNP TSC0031850
gggagagggaaga

SEQ ID NO: 127260 - DNA, 13 bp, Artificial Sequence
  Oligonucleotide for detection of SNP TSC0031850
tcttccctctccc

SEQ ID NO: 127261 - DNA, 13 bp, Artificial Sequence
  Oligonucleotide for detection of SNP TSC0031851
attttggttttgg

SEQ ID NO: 127262 - DNA, 13 bp, Artificial Sequence
  Oligonucleotide for detection of SNP TSC0031851
ccaaaaccaaaat

SEQ ID NO: 127263 - DNA, 13 bp, Artificial Sequence
  Oligonucleotide for detection of SNP TSC0031851
attttgattttgg

SEQ ID NO: 127264 - DNA, 13 bp, Artificial Sequence
  Oligonucleotide for detection of SNP TSC0031851
ccaaaatcaaaat

SEQ ID NO: 127265 - DNA, 13 bp, Artificial Sequence
  Oligonucleotide for detection of SNP TSC0031852
gtgtttatagatg

SEQ ID NO: 127266 - DNA, 13 bp, Artificial Sequence
  Oligonucleotide for detection of SNP TSC0031852
catctataaacac

SEQ ID NO: 127267 - DNA, 13 bp, Artificial Sequence
  Oligonucleotide for detection of SNP TSC0031852
gtgtttgtagatg

SEQ ID NO: 127268 - DNA, 13 bp, Artificial Sequence
  Oligonucleotide for detection of SNP TSC0031852
catctacaaacac

SEQ ID NO: 127269 - DNA, 13 bp, Artificial Sequence
  Oligonucleotide for detection of SNP TSC0031852
gtgttcgtagatg

SEQ ID NO: 127270 - DNA, 13 bp, Artificial Sequence
  Oligonucleotide for detection of SNP TSC0031852
catctacgaacac

SEQ ID NO: 127271 - DNA, 13 bp, Artificial Sequence
  Oligonucleotide for detection of SNP TSC0031852
tatttatgagtay

SEQ ID NO: 127272 - DNA, 13 bp, Artificial Sequence
  Oligonucleotide for detection of SNP TSC0031852
rtactcataaata

SEQ ID NO: 127273 - DNA, 13 bp, Artificial Sequence
  Oligonucleotide for detection of SNP TSC0031852
tatttacgagtay

SEQ ID NO: 127274 - DNA, 13 bp, Artificial Sequence
  Oligonucleotide for detection of SNP TSC0031852
rtactcgtaaata

SEQ ID NO: 127275 - DNA, 13 bp, Artificial Sequence
  Oligonucleotide for detection of SNP TSC0031854
ttaatgggattty

SEQ ID NO: 127276 - DNA, 13 bp, Artificial Sequence
  Oligonucleotide for detection of SNP TSC0031854
raaatcccattaa

SEQ ID NO: 127277 - DNA, 13 bp, Artificial Sequence
  Oligonucleotide for detection of SNP TSC0031854
ttaatgtgattty

SEQ ID NO: 127278 - DNA, 13 bp, Artificial Sequence
  Oligonucleotide for detection of SNP TSC0031854
raaatcacattaa

SEQ ID NO: 127279 - DNA, 13 bp, Artificial Sequence
  Oligonucleotide for detection of SNP TSC0031854
ggaattttattaa

SEQ ID NO: 127280 - DNA, 13 bp, Artificial Sequence
  Oligonucleotide for detection of SNP TSC0031854
ttaataaaattcc

SEQ ID NO: 127281 - DNA, 13 bp, Artificial Sequence
  Oligonucleotide for detection of SNP TSC0031854
ggaattatattaa

SEQ ID NO: 127282 - DNA, 13 bp, Artificial Sequence
  Oligonucleotide for detection of SNP TSC0031854
ttaatataattcc

SEQ ID NO: 127283 - DNA, 13 bp, Artificial Sequence
  Oligonucleotide for detection of SNP TSC0031855
ttagtagtagtgg

SEQ ID NO: 127284 - DNA, 13 bp, Artificial Sequence
  Oligonucleotide for detection of SNP TSC0031855
ccactactactaa

SEQ ID NO: 127285 - DNA, 13 bp, Artificial Sequence
  Oligonucleotide for detection of SNP TSC0031855
ttagtaatagtgg

SEQ ID NO: 127286 - DNA, 13 bp, Artificial Sequence
  Oligonucleotide for detection of SNP TSC0031855
ccactattactaa

SEQ ID NO: 127287 - DNA, 13 bp, Artificial Sequence
  Oligonucleotide for detection of SNP TSC0031856
aaagtttggtttt

SEQ ID NO: 127288 - DNA, 13 bp, Artificial Sequence
  Oligonucleotide for detection of SNP TSC0031856
aaaaccaaacttt

SEQ ID NO: 127289 - DNA, 13 bp, Artificial Sequence
  Oligonucleotide for detection of SNP TSC0031856
aaagttcggtttt

SEQ ID NO: 127290 - DNA, 13 bp, Artificial Sequence
  Oligonucleotide for detection of SNP TSC0031856
aaaaccgaacttt

SEQ ID NO: 127291 - DNA, 13 bp, Artificial Sequence
  Oligonucleotide for detection of SNP TSC0031856
aggattgagtttt

SEQ ID NO: 127292 - DNA, 13 bp, Artificial Sequence
  Oligonucleotide for detection of SNP TSC0031856
aaaactcaatcct

SEQ ID NO: 127293 - DNA, 13 bp, Artificial Sequence
  Oligonucleotide for detection of SNP TSC0031856
aggattaagtttt

SEQ ID NO: 127294 - DNA, 13 bp, Artificial Sequence
  Oligonucleotide for detection of SNP TSC0031856
aaaacttaatcct

SEQ ID NO: 127295 - DNA, 13 bp, Artificial Sequence
  Oligonucleotide for detection of SNP TSC0031856
aggatcgagtttt

SEQ ID NO: 127296 - DNA, 13 bp, Artificial Sequence
  Oligonucleotide for detection of SNP TSC0031856
aaaactcgatcct

SEQ ID NO: 127297 - DNA, 13 bp, Artificial Sequence
  Oligonucleotide for detection of SNP TSC0031857
agaattattaagg

SEQ ID NO: 127298 - DNA, 13 bp, Artificial Sequence
  Oligonucleotide for detection of SNP TSC0031857
ccttaataattct

SEQ ID NO: 127299 - DNA, 13 bp, Artificial Sequence
  Oligonucleotide for detection of SNP TSC0031857
agaattgttaagg

SEQ ID NO: 127300 - DNA, 13 bp, Artificial Sequence
  Oligonucleotide for detection of SNP TSC0031857
ccttaacaattct

SEQ ID NO: 127301 - DNA, 13 bp, Artificial Sequence
  Oligonucleotide for detection of SNP TSC0031858
tggaggataggty

SEQ ID NO: 127302 - DNA, 13 bp, Artificial Sequence
  Oligonucleotide for detection of SNP TSC0031858
racctatcctcca

SEQ ID NO: 127303 - DNA, 13 bp, Artificial Sequence
  Oligonucleotide for detection of SNP TSC0031858
tggagggtaggty

SEQ ID NO: 127304 - DNA, 13 bp, Artificial Sequence
  Oligonucleotide for detection of SNP TSC0031858
racctaccctcca

SEQ ID NO: 127305 - DNA, 13 bp, Artificial Sequence
  Oligonucleotide for detection of SNP TSC0031859
gaagtgatttttt

SEQ ID NO: 127306 - DNA, 13 bp, Artificial Sequence
  Oligonucleotide for detection of SNP TSC0031859
aaaaaatcacttc

SEQ ID NO: 127307 - DNA, 13 bp, Artificial Sequence
  Oligonucleotide for detection of SNP TSC0031859
gaagtgttttttt

SEQ ID NO: 127308 - DNA, 13 bp, Artificial Sequence
  Oligonucleotide for detection of SNP TSC0031859
aaaaaaacacttc

SEQ ID NO: 127309 - DNA, 13 bp, Artificial Sequence
  Oligonucleotide for detection of SNP TSC0031859
gaagcgatttttt

SEQ ID NO: 127310 - DNA, 13 bp, Artificial Sequence
  Oligonucleotide for detection of SNP TSC0031859
aaaaaatcgcttc

SEQ ID NO: 127311 - DNA, 13 bp, Artificial Sequence
  Oligonucleotide for detection of SNP TSC0031859
gaagcgttttttt

SEQ ID NO: 127312 - DNA, 13 bp, Artificial Sequence
  Oligonucleotide for detection of SNP TSC0031859
aaaaaaacgcttc

SEQ ID NO: 127313 - DNA, 13 bp, Artificial Sequence
  Oligonucleotide for detection of SNP TSC0031859
aaagagttgttty

SEQ ID NO: 127314 - DNA, 13 bp, Artificial Sequence
  Oligonucleotide for detection of SNP TSC0031859
raaacaactcttt

SEQ ID NO: 127315 - DNA, 13 bp, Artificial Sequence
  Oligonucleotide for detection of SNP TSC0031859
aaagaggtgttty

SEQ ID NO: 127316 - DNA, 13 bp, Artificial Sequence
  Oligonucleotide for detection of SNP TSC0031859
raaacacctcttt

SEQ ID NO: 127317 - DNA, 13 bp, Artificial Sequence
  Oligonucleotide for detection of SNP TSC0031859
aaagagtcgttty

SEQ ID NO: 127318 - DNA, 13 bp, Artificial Sequence
  Oligonucleotide for detection of SNP TSC0031859
raaacgactcttt

SEQ ID NO: 127319 - DNA, 13 bp, Artificial Sequence
  Oligonucleotide for detection of SNP TSC0031859
aaagaggcgttty

SEQ ID NO: 127320 - DNA, 13 bp, Artificial Sequence
  Oligonucleotide for detection of SNP TSC0031859
raaacgcctcttt

SEQ ID NO: 127321 - DNA, 13 bp, Artificial Sequence
  Oligonucleotide for detection of SNP TSC0031860
gtgatgattttty

SEQ ID NO: 127322 - DNA, 13 bp, Artificial Sequence
  Oligonucleotide for detection of SNP TSC0031860
raaaaatcatcac

SEQ ID NO: 127323 - DNA, 13 bp, Artificial Sequence
  Oligonucleotide for detection of SNP TSC0031860
gtgatggttttty

SEQ ID NO: 127324 - DNA, 13 bp, Artificial Sequence
  Oligonucleotide for detection of SNP TSC0031860
raaaaaccatcac

SEQ ID NO: 127325 - DNA, 13 bp, Artificial Sequence
  Oligonucleotide for detection of SNP TSC0031861
ttttatattattt

SEQ ID NO: 127326 - DNA, 13 bp, Artificial Sequence
  Oligonucleotide for detection of SNP TSC0031861
aaataatataaaa

SEQ ID NO: 127327 - DNA, 13 bp, Artificial Sequence
  Oligonucleotide for detection of SNP TSC0031861
ttttatgttattt

SEQ ID NO: 127328 - DNA, 13 bp, Artificial Sequence
  Oligonucleotide for detection of SNP TSC0031861
aaataacataaaa

SEQ ID NO: 127329 - DNA, 13 bp, Artificial Sequence
  Oligonucleotide for detection of SNP TSC0031863
ttagttagaaaaa

SEQ ID NO: 127330 - DNA, 13 bp, Artificial Sequence
  Oligonucleotide for detection of SNP TSC0031863
tttttctaactaa

SEQ ID NO: 127331 - DNA, 13 bp, Artificial Sequence
  Oligonucleotide for detection of SNP TSC0031863
ttagtttgaaaaa

SEQ ID NO: 127332 - DNA, 13 bp, Artificial Sequence
  Oligonucleotide for detection of SNP TSC0031863
tttttcaaactaa

SEQ ID NO: 127333 - DNA, 13 bp, Artificial Sequence
  Oligonucleotide for detection of SNP TSC0031863
ttagttcgaaaaa

SEQ ID NO: 127334 - DNA, 13 bp, Artificial Sequence
  Oligonucleotide for detection of SNP TSC0031863
tttttcgaactaa

SEQ ID NO: 127335 - DNA, 13 bp, Artificial Sequence
  Oligonucleotide for detection of SNP TSC0031863
tttttttgattaa

SEQ ID NO: 127336 - DNA, 13 bp, Artificial Sequence
  Oligonucleotide for detection of SNP TSC0031863
ttaatcaaaaaaa

SEQ ID NO: 127337 - DNA, 13 bp, Artificial Sequence
  Oligonucleotide for detection of SNP TSC0031863
ttttttggattaa

SEQ ID NO: 127338 - DNA, 13 bp, Artificial Sequence
  Oligonucleotide for detection of SNP TSC0031863
ttaatccaaaaaa

SEQ ID NO: 127339 - DNA, 13 bp, Artificial Sequence
  Oligonucleotide for detection of SNP TSC0031863
tttttcggattaa

SEQ ID NO: 127340 - DNA, 13 bp, Artificial Sequence
  Oligonucleotide for detection of SNP TSC0031863
ttaatccgaaaaa

SEQ ID NO: 127341 - DNA, 13 bp, Artificial Sequence
  Oligonucleotide for detection of SNP TSC0031869
ttttttcgtttgg

SEQ ID NO: 127342 - DNA, 13 bp, Artificial Sequence
  Oligonucleotide for detection of SNP TSC0031869
ccaaacgaaaaaa

SEQ ID NO: 127343 - DNA, 13 bp, Artificial Sequence
  Oligonucleotide for detection of SNP TSC0031869
ttaagtggaaaag

SEQ ID NO: 127344 - DNA, 13 bp, Artificial Sequence
  Oligonucleotide for detection of SNP TSC0031869
cttttccacttaa

SEQ ID NO: 127345 - DNA, 13 bp, Artificial Sequence
  Oligonucleotide for detection of SNP TSC0031869
ttaagtagaaaag

SEQ ID NO: 127346 - DNA, 13 bp, Artificial Sequence
  Oligonucleotide for detection of SNP TSC0031869
cttttctacttaa

SEQ ID NO: 127347 - DNA, 13 bp, Artificial Sequence
  Oligonucleotide for detection of SNP TSC0031869
ttaagcggaaaag

SEQ ID NO: 127348 - DNA, 13 bp, Artificial Sequence
  Oligonucleotide for detection of SNP TSC0031869
cttttccgcttaa

SEQ ID NO: 127349 - DNA, 13 bp, Artificial Sequence
  Oligonucleotide for detection of SNP TSC0031870
gggaggtgtgggg

SEQ ID NO: 127350 - DNA, 13 bp, Artificial Sequence
  Oligonucleotide for detection of SNP TSC0031870
ccccacacctccc

SEQ ID NO: 127351 - DNA, 13 bp, Artificial Sequence
  Oligonucleotide for detection of SNP TSC0031870
gggaggggtgggg

SEQ ID NO: 127352 - DNA, 13 bp, Artificial Sequence
  Oligonucleotide for detection of SNP TSC0031870
ccccacccctccc

SEQ ID NO: 127353 - DNA, 13 bp, Artificial Sequence
  Oligonucleotide for detection of SNP TSC0031873
tttagaaagatgg

SEQ ID NO: 127354 - DNA, 13 bp, Artificial Sequence
  Oligonucleotide for detection of SNP TSC0031873
ccatctttctaaa

SEQ ID NO: 127355 - DNA, 13 bp, Artificial Sequence
  Oligonucleotide for detection of SNP TSC0031873
tttagagagatgg

SEQ ID NO: 127356 - DNA, 13 bp, Artificial Sequence
  Oligonucleotide for detection of SNP TSC0031873
ccatctctctaaa

SEQ ID NO: 127357 - DNA, 13 bp, Artificial Sequence
  Oligonucleotide for detection of SNP TSC0031876
tatggtgttatty

SEQ ID NO: 127358 - DNA, 13 bp, Artificial Sequence
  Oligonucleotide for detection of SNP TSC0031876
raataacaccata

SEQ ID NO: 127359 - DNA, 13 bp, Artificial Sequence
  Oligonucleotide for detection of SNP TSC0031876
tatggtattatty

SEQ ID NO: 127360 - DNA, 13 bp, Artificial Sequence
  Oligonucleotide for detection of SNP TSC0031876
raataataccata

SEQ ID NO: 127361 - DNA, 13 bp, Artificial Sequence
  Oligonucleotide for detection of SNP TSC0031879
tttgatgtgatty

SEQ ID NO: 127362 - DNA, 13 bp, Artificial Sequence
  Oligonucleotide for detection of SNP TSC0031879
raatcacatcaaa

SEQ ID NO: 127363 - DNA, 13 bp, Artificial Sequence
  Oligonucleotide for detection of SNP TSC0031879
tttgatatgatty

SEQ ID NO: 127364 - DNA, 13 bp, Artificial Sequence
  Oligonucleotide for detection of SNP TSC0031879
raatcatatcaaa

SEQ ID NO: 127365 - DNA, 13 bp, Artificial Sequence
  Oligonucleotide for detection of SNP TSC0031880
agttatattaggg

SEQ ID NO: 127366 - DNA, 13 bp, Artificial Sequence
  Oligonucleotide for detection of SNP TSC0031880
ccctaatataact

SEQ ID NO: 127367 - DNA, 13 bp, Artificial Sequence
  Oligonucleotide for detection of SNP TSC0031880
agttatgttaggg

SEQ ID NO: 127368 - DNA, 13 bp, Artificial Sequence
  Oligonucleotide for detection of SNP TSC0031880
ccctaacataact

SEQ ID NO: 127369 - DNA, 13 bp, Artificial Sequence
  Oligonucleotide for detection of SNP TSC0031880
agttacgttaggg

SEQ ID NO: 127370 - DNA, 13 bp, Artificial Sequence
  Oligonucleotide for detection of SNP TSC0031880
ccctaacgtaact

SEQ ID NO: 127371 - DNA, 13 bp, Artificial Sequence
  Oligonucleotide for detection of SNP TSC0031880
ttttgatgtgatt

SEQ ID NO: 127372 - DNA, 13 bp, Artificial Sequence
  Oligonucleotide for detection of SNP TSC0031880
aatcacatcaaaa

SEQ ID NO: 127373 - DNA, 13 bp, Artificial Sequence
  Oligonucleotide for detection of SNP TSC0031880
ttttgacgtgatt

SEQ ID NO: 127374 - DNA, 13 bp, Artificial Sequence
  Oligonucleotide for detection of SNP TSC0031880
aatcacgtcaaaa

SEQ ID NO: 127375 - DNA, 13 bp, Artificial Sequence
  Oligonucleotide for detection of SNP TSC0031882
tttaatatgtgag

SEQ ID NO: 127376 - DNA, 13 bp, Artificial Sequence
  Oligonucleotide for detection of SNP TSC0031882
ctcacatattaaa

SEQ ID NO: 127377 - DNA, 13 bp, Artificial Sequence
  Oligonucleotide for detection of SNP TSC0031882
tttaatgtgtgag

SEQ ID NO: 127378 - DNA, 13 bp, Artificial Sequence
  Oligonucleotide for detection of SNP TSC0031882
ctcacacattaaa

SEQ ID NO: 127379 - DNA, 13 bp, Artificial Sequence
  Oligonucleotide for detection of SNP TSC0031882
tttaacgtgtgag

SEQ ID NO: 127380 - DNA, 13 bp, Artificial Sequence
  Oligonucleotide for detection of SNP TSC0031882
ctcacacgttaaa

SEQ ID NO: 127381 - DNA, 13 bp, Artificial Sequence
  Oligonucleotide for detection of SNP TSC0031883
ttatgagtgttgg

SEQ ID NO: 127382 - DNA, 13 bp, Artificial Sequence
  Oligonucleotide for detection of SNP TSC0031883
ccaacactcataa

SEQ ID NO: 127383 - DNA, 13 bp, Artificial Sequence
  Oligonucleotide for detection of SNP TSC0031883
ttatgaatgttgg

SEQ ID NO: 127384 - DNA, 13 bp, Artificial Sequence
  Oligonucleotide for detection of SNP TSC0031883
ccaacattcataa

SEQ ID NO: 127385 - DNA, 13 bp, Artificial Sequence
  Oligonucleotide for detection of SNP TSC0031883
ttacgagtgttgg

SEQ ID NO: 127386 - DNA, 13 bp, Artificial Sequence
  Oligonucleotide for detection of SNP TSC0031883
ccaacactcgtaa

SEQ ID NO: 127387 - DNA, 13 bp, Artificial Sequence
  Oligonucleotide for detection of SNP TSC0031883
ttacgaatgttgg

SEQ ID NO: 127388 - DNA, 13 bp, Artificial Sequence
  Oligonucleotide for detection of SNP TSC0031883
ccaacattcgtaa

SEQ ID NO: 127389 - DNA, 13 bp, Artificial Sequence
  Oligonucleotide for detection of SNP TSC0031883
ttatgagcgttgg

SEQ ID NO: 127390 - DNA, 13 bp, Artificial Sequence
  Oligonucleotide for detection of SNP TSC0031883
ccaacgctcataa

SEQ ID NO: 127391 - DNA, 13 bp, Artificial Sequence
  Oligonucleotide for detection of SNP TSC0031883
ttatgaacgttgg

SEQ ID NO: 127392 - DNA, 13 bp, Artificial Sequence
  Oligonucleotide for detection of SNP TSC0031883
ccaacgttcataa

SEQ ID NO: 127393 - DNA, 13 bp, Artificial Sequence
  Oligonucleotide for detection of SNP TSC0031883
ttatgagtgtcgg

SEQ ID NO: 127394 - DNA, 13 bp, Artificial Sequence
  Oligonucleotide for detection of SNP TSC0031883
ccgacactcataa

SEQ ID NO: 127395 - DNA, 13 bp, Artificial Sequence
  Oligonucleotide for detection of SNP TSC0031883
ttatgaatgtcgg

SEQ ID NO: 127396 - DNA, 13 bp, Artificial Sequence
  Oligonucleotide for detection of SNP TSC0031883
ccgacattcataa

SEQ ID NO: 127397 - DNA, 13 bp, Artificial Sequence
  Oligonucleotide for detection of SNP TSC0031883
ttacgagcgttgg

SEQ ID NO: 127398 - DNA, 13 bp, Artificial Sequence
  Oligonucleotide for detection of SNP TSC0031883
ccaacgctcgtaa

SEQ ID NO: 127399 - DNA, 13 bp, Artificial Sequence
  Oligonucleotide for detection of SNP TSC0031883
ttacgaacgttgg

SEQ ID NO: 127400 - DNA, 13 bp, Artificial Sequence
  Oligonucleotide for detection of SNP TSC0031883
ccaacgttcgtaa

SEQ ID NO: 127401 - DNA, 13 bp, Artificial Sequence
  Oligonucleotide for detection of SNP TSC0031883
ttacgagtgtcgg

SEQ ID NO: 127402 - DNA, 13 bp, Artificial Sequence
  Oligonucleotide for detection of SNP TSC0031883
ccgacactcgtaa

SEQ ID NO: 127403 - DNA, 13 bp, Artificial Sequence
  Oligonucleotide for detection of SNP TSC0031883
ttacgaatgtcgg

SEQ ID NO: 127404 - DNA, 13 bp, Artificial Sequence
  Oligonucleotide for detection of SNP TSC0031883
ccgacattcgtaa

SEQ ID NO: 127405 - DNA, 13 bp, Artificial Sequence
  Oligonucleotide for detection of SNP TSC0031883
ttatgagcgtcgg

SEQ ID NO: 127406 - DNA, 13 bp, Artificial Sequence
  Oligonucleotide for detection of SNP TSC0031883
ccgacgctcataa

SEQ ID NO: 127407 - DNA, 13 bp, Artificial Sequence
  Oligonucleotide for detection of SNP TSC0031883
ttatgaacgtcgg

SEQ ID NO: 127408 - DNA, 13 bp, Artificial Sequence
  Oligonucleotide for detection of SNP TSC0031883
ccgacgttcataa

SEQ ID NO: 127409 - DNA, 13 bp, Artificial Sequence
  Oligonucleotide for detection of SNP TSC0031883
ttacgagcgtcgg

SEQ ID NO: 127410 - DNA, 13 bp, Artificial Sequence
  Oligonucleotide for detection of SNP TSC0031883
ccgacgctcgtaa

SEQ ID NO: 127411 - DNA, 13 bp, Artificial Sequence
  Oligonucleotide for detection of SNP TSC0031883
ttacgaacgtcgg

SEQ ID NO: 127412 - DNA, 13 bp, Artificial Sequence
  Oligonucleotide for detection of SNP TSC0031883
ccgacgttcgtaa

SEQ ID NO: 127413 - DNA, 13 bp, Artificial Sequence
  Oligonucleotide for detection of SNP TSC0031885
gtttgtgattttt

SEQ ID NO: 127414 - DNA, 13 bp, Artificial Sequence
  Oligonucleotide for detection of SNP TSC0031885
aaaaatcacaaac

SEQ ID NO: 127415 - DNA, 13 bp, Artificial Sequence
  Oligonucleotide for detection of SNP TSC0031885
gtttgtaattttt

SEQ ID NO: 127416 - DNA, 13 bp, Artificial Sequence
  Oligonucleotide for detection of SNP TSC0031885
aaaaattacaaac

SEQ ID NO: 127417 - DNA, 13 bp, Artificial Sequence
  Oligonucleotide for detection of SNP TSC0031889
tattagaggtgta

SEQ ID NO: 127418 - DNA, 13 bp, Artificial Sequence
  Oligonucleotide for detection of SNP TSC0031889
tacacctctaata

SEQ ID NO: 127419 - DNA, 13 bp, Artificial Sequence
  Oligonucleotide for detection of SNP TSC0031889
tattaggggtgta

SEQ ID NO: 127420 - DNA, 13 bp, Artificial Sequence
  Oligonucleotide for detection of SNP TSC0031889
tacacccctaata

SEQ ID NO: 127421 - DNA, 13 bp, Artificial Sequence
  Oligonucleotide for detection of SNP TSC0031895
attgatgaatgty

SEQ ID NO: 127422 - DNA, 13 bp, Artificial Sequence
  Oligonucleotide for detection of SNP TSC0031895
racattcatcaat

SEQ ID NO: 127423 - DNA, 13 bp, Artificial Sequence
  Oligonucleotide for detection of SNP TSC0031895
attgataaatgty

SEQ ID NO: 127424 - DNA, 13 bp, Artificial Sequence
  Oligonucleotide for detection of SNP TSC0031895
racatttatcaat

SEQ ID NO: 127425 - DNA, 13 bp, Artificial Sequence
  Oligonucleotide for detection of SNP TSC0031898
tggggtaggatta

SEQ ID NO: 127426 - DNA, 13 bp, Artificial Sequence
  Oligonucleotide for detection of SNP TSC0031898
taatcctacccca

SEQ ID NO: 127427 - DNA, 13 bp, Artificial Sequence
  Oligonucleotide for detection of SNP TSC0031898
tggggtgggatta

SEQ ID NO: 127428 - DNA, 13 bp, Artificial Sequence
  Oligonucleotide for detection of SNP TSC0031898
taatcccacccca

SEQ ID NO: 127429 - DNA, 13 bp, Artificial Sequence
  Oligonucleotide for detection of SNP TSC0031898
tggggcgggatta

SEQ ID NO: 127430 - DNA, 13 bp, Artificial Sequence
  Oligonucleotide for detection of SNP TSC0031898
taatcccgcccca

SEQ ID NO: 127431 - DNA, 13 bp, Artificial Sequence
  Oligonucleotide for detection of SNP TSC0031899
ttttttgaggtgg

SEQ ID NO: 127432 - DNA, 13 bp, Artificial Sequence
  Oligonucleotide for detection of SNP TSC0031899
ccacctcaaaaaa

SEQ ID NO: 127433 - DNA, 13 bp, Artificial Sequence
  Oligonucleotide for detection of SNP TSC0031899
ttttttaaggtgg

SEQ ID NO: 127434 - DNA, 13 bp, Artificial Sequence
  Oligonucleotide for detection of SNP TSC0031899
ccaccttaaaaaa

SEQ ID NO: 127435 - DNA, 13 bp, Artificial Sequence
  Oligonucleotide for detection of SNP TSC0031899
tttttcgaggtgg

SEQ ID NO: 127436 - DNA, 13 bp, Artificial Sequence
  Oligonucleotide for detection of SNP TSC0031899
ccacctcgaaaaa

SEQ ID NO: 127437 - DNA, 13 bp, Artificial Sequence
  Oligonucleotide for detection of SNP TSC0031900
taaattatgttty

SEQ ID NO: 127438 - DNA, 13 bp, Artificial Sequence
  Oligonucleotide for detection of SNP TSC0031900
raaacataattta

SEQ ID NO: 127439 - DNA, 13 bp, Artificial Sequence
  Oligonucleotide for detection of SNP TSC0031900
taaattgtgttty

SEQ ID NO: 127440 - DNA, 13 bp, Artificial Sequence
  Oligonucleotide for detection of SNP TSC0031900
raaacacaattta

SEQ ID NO: 127441 - DNA, 13 bp, Artificial Sequence
  Oligonucleotide for detection of SNP TSC0031900
taaatcgtgttty

SEQ ID NO: 127442 - DNA, 13 bp, Artificial Sequence
  Oligonucleotide for detection of SNP TSC0031900
raaacacgattta

SEQ ID NO: 127443 - DNA, 13 bp, Artificial Sequence
  Oligonucleotide for detection of SNP TSC0031900
gagatatggtttg

SEQ ID NO: 127444 - DNA, 13 bp, Artificial Sequence
  Oligonucleotide for detection of SNP TSC0031900
caaaccatatctc

SEQ ID NO: 127445 - DNA, 13 bp, Artificial Sequence
  Oligonucleotide for detection of SNP TSC0031900
gagatacggtttg

SEQ ID NO: 127446 - DNA, 13 bp, Artificial Sequence
  Oligonucleotide for detection of SNP TSC0031900
caaaccgtatctc

SEQ ID NO: 127447 - DNA, 13 bp, Artificial Sequence
  Oligonucleotide for detection of SNP TSC0031902
tttgatattggga

SEQ ID NO: 127448 - DNA, 13 bp, Artificial Sequence
  Oligonucleotide for detection of SNP TSC0031902
tcccaatatcaaa

SEQ ID NO: 127449 - DNA, 13 bp, Artificial Sequence
  Oligonucleotide for detection of SNP TSC0031902
tttgatgttggga

SEQ ID NO: 127450 - DNA, 13 bp, Artificial Sequence
  Oligonucleotide for detection of SNP TSC0031902
tcccaacatcaaa

SEQ ID NO: 127451 - DNA, 13 bp, Artificial Sequence
  Oligonucleotide for detection of SNP TSC0031917
gggtgaagtaaay

SEQ ID NO: 127452 - DNA, 13 bp, Artificial Sequence
  Oligonucleotide for detection of SNP TSC0031917
rtttacttcaccc

SEQ ID NO: 127453 - DNA, 13 bp, Artificial Sequence
  Oligonucleotide for detection of SNP TSC0031917
gggtgatgtaaay

SEQ ID NO: 127454 - DNA, 13 bp, Artificial Sequence
  Oligonucleotide for detection of SNP TSC0031917
rtttacatcaccc

SEQ ID NO: 127455 - DNA, 13 bp, Artificial Sequence
  Oligonucleotide for detection of SNP TSC0031917
gtttgttttatty

SEQ ID NO: 127456 - DNA, 13 bp, Artificial Sequence
  Oligonucleotide for detection of SNP TSC0031917
raataaaacaaac

SEQ ID NO: 127457 - DNA, 13 bp, Artificial Sequence
  Oligonucleotide for detection of SNP TSC0031917
gtttgtattatty

SEQ ID NO: 127458 - DNA, 13 bp, Artificial Sequence
  Oligonucleotide for detection of SNP TSC0031917
raataatacaaac

SEQ ID NO: 127459 - DNA, 13 bp, Artificial Sequence
  Oligonucleotide for detection of SNP TSC0031921
atgggtaatagag

SEQ ID NO: 127460 - DNA, 13 bp, Artificial Sequence
  Oligonucleotide for detection of SNP TSC0031921
ctctattacccat

SEQ ID NO: 127461 - DNA, 13 bp, Artificial Sequence
  Oligonucleotide for detection of SNP TSC0031921
atgggtgatagag

SEQ ID NO: 127462 - DNA, 13 bp, Artificial Sequence
  Oligonucleotide for detection of SNP TSC0031921
ctctatcacccat

SEQ ID NO: 127463 - DNA, 13 bp, Artificial Sequence
  Oligonucleotide for detection of SNP TSC0031921
atgggcgatagag

SEQ ID NO: 127464 - DNA, 13 bp, Artificial Sequence
  Oligonucleotide for detection of SNP TSC0031921
ctctatcgcccat

SEQ ID NO: 127465 - DNA, 13 bp, Artificial Sequence
  Oligonucleotide for detection of SNP TSC0031921
ttttgttgtttat

SEQ ID NO: 127466 - DNA, 13 bp, Artificial Sequence
  Oligonucleotide for detection of SNP TSC0031921
ataaacaacaaaa

SEQ ID NO: 127467 - DNA, 13 bp, Artificial Sequence
  Oligonucleotide for detection of SNP TSC0031921
ttttgtcgtttat

SEQ ID NO: 127468 - DNA, 13 bp, Artificial Sequence
  Oligonucleotide for detection of SNP TSC0031921
ataaacgacaaaa

SEQ ID NO: 127469 - DNA, 13 bp, Artificial Sequence
  Oligonucleotide for detection of SNP TSC0031922
atatttggagttt

SEQ ID NO: 127470 - DNA, 13 bp, Artificial Sequence
  Oligonucleotide for detection of SNP TSC0031922
aaactccaaatat

SEQ ID NO: 127471 - DNA, 13 bp, Artificial Sequence
  Oligonucleotide for detection of SNP TSC0031924
aggttatgagtty

SEQ ID NO: 127472 - DNA, 13 bp, Artificial Sequence
  Oligonucleotide for detection of SNP TSC0031924
raactcataacct

SEQ ID NO: 127473 - DNA, 13 bp, Artificial Sequence
  Oligonucleotide for detection of SNP TSC0031924
aggttacgagtty

SEQ ID NO: 127474 - DNA, 13 bp, Artificial Sequence
  Oligonucleotide for detection of SNP TSC0031924
raactcgtaacct

SEQ ID NO: 127475 - DNA, 13 bp, Artificial Sequence
  Oligonucleotide for detection of SNP TSC0031924
gaatttgtgattt

SEQ ID NO: 127476 - DNA, 13 bp, Artificial Sequence
  Oligonucleotide for detection of SNP TSC0031924
aaatcacaaattc

SEQ ID NO: 127477 - DNA, 13 bp, Artificial Sequence
  Oligonucleotide for detection of SNP TSC0031924
gaatttttgattt

SEQ ID NO: 127478 - DNA, 13 bp, Artificial Sequence
  Oligonucleotide for detection of SNP TSC0031924
aaatcaaaaattc

SEQ ID NO: 127479 - DNA, 13 bp, Artificial Sequence
  Oligonucleotide for detection of SNP TSC0031924
gaattcgtgattt

SEQ ID NO: 127480 - DNA, 13 bp, Artificial Sequence
  Oligonucleotide for detection of SNP TSC0031924
aaatcacgaattc

SEQ ID NO: 127481 - DNA, 13 bp, Artificial Sequence
  Oligonucleotide for detection of SNP TSC0031925
tattatagtgtag

SEQ ID NO: 127482 - DNA, 13 bp, Artificial Sequence
  Oligonucleotide for detection of SNP TSC0031925
ctacactataata

SEQ ID NO: 127483 - DNA, 13 bp, Artificial Sequence
  Oligonucleotide for detection of SNP TSC0031925
tattatggtgtag

SEQ ID NO: 127484 - DNA, 13 bp, Artificial Sequence
  Oligonucleotide for detection of SNP TSC0031925
ctacaccataata

SEQ ID NO: 127485 - DNA, 13 bp, Artificial Sequence
  Oligonucleotide for detection of SNP TSC0031925
tattacggtgtag

SEQ ID NO: 127486 - DNA, 13 bp, Artificial Sequence
  Oligonucleotide for detection of SNP TSC0031925
ctacaccgtaata

SEQ ID NO: 127487 - DNA, 13 bp, Artificial Sequence
  Oligonucleotide for detection of SNP TSC0031925
ttatattgtggta

SEQ ID NO: 127488 - DNA, 13 bp, Artificial Sequence
  Oligonucleotide for detection of SNP TSC0031925
taccacaatataa

SEQ ID NO: 127489 - DNA, 13 bp, Artificial Sequence
  Oligonucleotide for detection of SNP TSC0031925
ttatatcgtggta

SEQ ID NO: 127490 - DNA, 13 bp, Artificial Sequence
  Oligonucleotide for detection of SNP TSC0031925
taccacgatataa

SEQ ID NO: 127491 - DNA, 13 bp, Artificial Sequence
  Oligonucleotide for detection of SNP TSC0031926
gattaggtgtgty

SEQ ID NO: 127492 - DNA, 13 bp, Artificial Sequence
  Oligonucleotide for detection of SNP TSC0031926
racacacctaatc

SEQ ID NO: 127493 - DNA, 13 bp, Artificial Sequence
  Oligonucleotide for detection of SNP TSC0031926
gattagatgtgty

SEQ ID NO: 127494 - DNA, 13 bp, Artificial Sequence
  Oligonucleotide for detection of SNP TSC0031926
racacatctaatc

SEQ ID NO: 127495 - DNA, 13 bp, Artificial Sequence
  Oligonucleotide for detection of SNP TSC0031926
gattaggcgtgty

SEQ ID NO: 127496 - DNA, 13 bp, Artificial Sequence
  Oligonucleotide for detection of SNP TSC0031926
racacgcctaatc

SEQ ID NO: 127497 - DNA, 13 bp, Artificial Sequence
  Oligonucleotide for detection of SNP TSC0031926
gattagacgtgty

SEQ ID NO: 127498 - DNA, 13 bp, Artificial Sequence
  Oligonucleotide for detection of SNP TSC0031926
racacgtctaatc

SEQ ID NO: 127499 - DNA, 13 bp, Artificial Sequence
  Oligonucleotide for detection of SNP TSC0031927
gtttagagtggtt

SEQ ID NO: 127500 - DNA, 13 bp, Artificial Sequence
  Oligonucleotide for detection of SNP TSC0031927
aaccactctaaac

SEQ ID NO: 127501 - DNA, 13 bp, Artificial Sequence
  Oligonucleotide for detection of SNP TSC0031927
gtttagggtggtt

SEQ ID NO: 127502 - DNA, 13 bp, Artificial Sequence
  Oligonucleotide for detection of SNP TSC0031927
aaccaccctaaac

SEQ ID NO: 127503 - DNA, 13 bp, Artificial Sequence
  Oligonucleotide for detection of SNP TSC0031928
gtttagtgtaata

SEQ ID NO: 127504 - DNA, 13 bp, Artificial Sequence
  Oligonucleotide for detection of SNP TSC0031928
tattacactaaac

SEQ ID NO: 127505 - DNA, 13 bp, Artificial Sequence
  Oligonucleotide for detection of SNP TSC0031928
gtttagcgtaata

SEQ ID NO: 127506 - DNA, 13 bp, Artificial Sequence
  Oligonucleotide for detection of SNP TSC0031928
tattacgctaaac

SEQ ID NO: 127507 - DNA, 13 bp, Artificial Sequence
  Oligonucleotide for detection of SNP TSC0031931
aggagatggtgaa

SEQ ID NO: 127508 - DNA, 13 bp, Artificial Sequence
  Oligonucleotide for detection of SNP TSC0031931
ttcaccatctcct

SEQ ID NO: 127509 - DNA, 13 bp, Artificial Sequence
  Oligonucleotide for detection of SNP TSC0031931
aggagacggtgaa

SEQ ID NO: 127510 - DNA, 13 bp, Artificial Sequence
  Oligonucleotide for detection of SNP TSC0031931
ttcaccgtctcct

SEQ ID NO: 127511 - DNA, 13 bp, Artificial Sequence
  Oligonucleotide for detection of SNP TSC0031933
ggagagatatagy

SEQ ID NO: 127512 - DNA, 13 bp, Artificial Sequence
  Oligonucleotide for detection of SNP TSC0031933
rctatatctctcc

SEQ ID NO: 127513 - DNA, 13 bp, Artificial Sequence
  Oligonucleotide for detection of SNP TSC0031933
ggagaggtatagy

SEQ ID NO: 127514 - DNA, 13 bp, Artificial Sequence
  Oligonucleotide for detection of SNP TSC0031933
rctatacctctcc

SEQ ID NO: 127515 - DNA, 13 bp, Artificial Sequence
  Oligonucleotide for detection of SNP TSC0031936
agatatagattgt

SEQ ID NO: 127516 - DNA, 13 bp, Artificial Sequence
  Oligonucleotide for detection of SNP TSC0031936
acaatctatatct

SEQ ID NO: 127517 - DNA, 13 bp, Artificial Sequence
  Oligonucleotide for detection of SNP TSC0031936
agatattgattgt

SEQ ID NO: 127518 - DNA, 13 bp, Artificial Sequence
  Oligonucleotide for detection of SNP TSC0031936
acaatcaatatct

SEQ ID NO: 127519 - DNA, 13 bp, Artificial Sequence
  Oligonucleotide for detection of SNP TSC0031936
agatatcgattgt

SEQ ID NO: 127520 - DNA, 13 bp, Artificial Sequence
  Oligonucleotide for detection of SNP TSC0031936
acaatcgatatct

SEQ ID NO: 127521 - DNA, 13 bp, Artificial Sequence
  Oligonucleotide for detection of SNP TSC0031936
atagtttatattt

SEQ ID NO: 127522 - DNA, 13 bp, Artificial Sequence
  Oligonucleotide for detection of SNP TSC0031936
aaatataaactat

SEQ ID NO: 127523 - DNA, 13 bp, Artificial Sequence
  Oligonucleotide for detection of SNP TSC0031936
atagttgatattt

SEQ ID NO: 127524 - DNA, 13 bp, Artificial Sequence
  Oligonucleotide for detection of SNP TSC0031936
aaatatcaactat

SEQ ID NO: 127525 - DNA, 13 bp, Artificial Sequence
  Oligonucleotide for detection of SNP TSC0031936
atagtcgatattt

SEQ ID NO: 127526 - DNA, 13 bp, Artificial Sequence
  Oligonucleotide for detection of SNP TSC0031936
aaatatcgactat

SEQ ID NO: 127527 - DNA, 13 bp, Artificial Sequence
  Oligonucleotide for detection of SNP TSC0031937
atttttattatgg

SEQ ID NO: 127528 - DNA, 13 bp, Artificial Sequence
  Oligonucleotide for detection of SNP TSC0031937
ccataataaaaat

SEQ ID NO: 127529 - DNA, 13 bp, Artificial Sequence
  Oligonucleotide for detection of SNP TSC0031937
attttttttatgg

SEQ ID NO: 127530 - DNA, 13 bp, Artificial Sequence
  Oligonucleotide for detection of SNP TSC0031937
ccataaaaaaaat

SEQ ID NO: 127531 - DNA, 13 bp, Artificial Sequence
  Oligonucleotide for detection of SNP TSC0031937
ttatgatgagagt

SEQ ID NO: 127532 - DNA, 13 bp, Artificial Sequence
  Oligonucleotide for detection of SNP TSC0031937
actctcatcataa

SEQ ID NO: 127533 - DNA, 13 bp, Artificial Sequence
  Oligonucleotide for detection of SNP TSC0031937
ttatgaagagagt

SEQ ID NO: 127534 - DNA, 13 bp, Artificial Sequence
  Oligonucleotide for detection of SNP TSC0031937
actctcttcataa

SEQ ID NO: 127535 - DNA, 13 bp, Artificial Sequence
  Oligonucleotide for detection of SNP TSC0031938
gtgtgtatgtttt

SEQ ID NO: 127536 - DNA, 13 bp, Artificial Sequence
  Oligonucleotide for detection of SNP TSC0031938
aaaacatacacac

SEQ ID NO: 127537 - DNA, 13 bp, Artificial Sequence
  Oligonucleotide for detection of SNP TSC0031938
gtgtgtgtgtttt

SEQ ID NO: 127538 - DNA, 13 bp, Artificial Sequence
  Oligonucleotide for detection of SNP TSC0031938
aaaacacacacac

SEQ ID NO: 127539 - DNA, 13 bp, Artificial Sequence
  Oligonucleotide for detection of SNP TSC0031939
ggttgattgggtg

SEQ ID NO: 127540 - DNA, 13 bp, Artificial Sequence
  Oligonucleotide for detection of SNP TSC0031939
cacccaatcaacc

SEQ ID NO: 127541 - DNA, 13 bp, Artificial Sequence
  Oligonucleotide for detection of SNP TSC0031939
ggttgagtgggtg

SEQ ID NO: 127542 - DNA, 13 bp, Artificial Sequence
  Oligonucleotide for detection of SNP TSC0031939
cacccactcaacc

SEQ ID NO: 127543 - DNA, 13 bp, Artificial Sequence
  Oligonucleotide for detection of SNP TSC0031939
tatttagttagty

SEQ ID NO: 127544 - DNA, 13 bp, Artificial Sequence
  Oligonucleotide for detection of SNP TSC0031939
ractaactaaata

SEQ ID NO: 127545 - DNA, 13 bp, Artificial Sequence
  Oligonucleotide for detection of SNP TSC0031939
tatttatttagty

SEQ ID NO: 127546 - DNA, 13 bp, Artificial Sequence
  Oligonucleotide for detection of SNP TSC0031939
ractaaataaata

SEQ ID NO: 127547 - DNA, 13 bp, Artificial Sequence
  Oligonucleotide for detection of SNP TSC0031940
tgaggggtaggta

SEQ ID NO: 127548 - DNA, 13 bp, Artificial Sequence
  Oligonucleotide for detection of SNP TSC0031940
tacctacccctca

SEQ ID NO: 127549 - DNA, 13 bp, Artificial Sequence
  Oligonucleotide for detection of SNP TSC0031940
tgagggttaggta

SEQ ID NO: 127550 - DNA, 13 bp, Artificial Sequence
  Oligonucleotide for detection of SNP TSC0031940
tacctaaccctca

SEQ ID NO: 127551 - DNA, 13 bp, Artificial Sequence
  Oligonucleotide for detection of SNP TSC0031940
tgtttatttttta

SEQ ID NO: 127552 - DNA, 13 bp, Artificial Sequence
  Oligonucleotide for detection of SNP TSC0031940
taaaaaataaaca

SEQ ID NO: 127553 - DNA, 13 bp, Artificial Sequence
  Oligonucleotide for detection of SNP TSC0031940
tgtttaattttta

SEQ ID NO: 127554 - DNA, 13 bp, Artificial Sequence
  Oligonucleotide for detection of SNP TSC0031940
taaaaattaaaca

SEQ ID NO: 127555 - DNA, 13 bp, Artificial Sequence
  Oligonucleotide for detection of SNP TSC0031941
taattaaaggttg

SEQ ID NO: 127556 - DNA, 13 bp, Artificial Sequence
  Oligonucleotide for detection of SNP TSC0031941
caacctttaatta

SEQ ID NO: 127557 - DNA, 13 bp, Artificial Sequence
  Oligonucleotide for detection of SNP TSC0031941
taattagaggttg

SEQ ID NO: 127558 - DNA, 13 bp, Artificial Sequence
  Oligonucleotide for detection of SNP TSC0031941
caacctctaatta

SEQ ID NO: 127559 - DNA, 13 bp, Artificial Sequence
  Oligonucleotide for detection of SNP TSC0031942
attatagtattaa

SEQ ID NO: 127560 - DNA, 13 bp, Artificial Sequence
  Oligonucleotide for detection of SNP TSC0031942
ttaatactataat

SEQ ID NO: 127561 - DNA, 13 bp, Artificial Sequence
  Oligonucleotide for detection of SNP TSC0031942
attataatattaa

SEQ ID NO: 127562 - DNA, 13 bp, Artificial Sequence
  Oligonucleotide for detection of SNP TSC0031942
ttaatattataat

SEQ ID NO: 127563 - DNA, 13 bp, Artificial Sequence
  Oligonucleotide for detection of SNP TSC0031943
agttgggtgtagg

SEQ ID NO: 127564 - DNA, 13 bp, Artificial Sequence
  Oligonucleotide for detection of SNP TSC0031943
cctacacccaact

SEQ ID NO: 127565 - DNA, 13 bp, Artificial Sequence
  Oligonucleotide for detection of SNP TSC0031943
agttggatgtagg

SEQ ID NO: 127566 - DNA, 13 bp, Artificial Sequence
  Oligonucleotide for detection of SNP TSC0031943
cctacatccaact

SEQ ID NO: 127567 - DNA, 13 bp, Artificial Sequence
  Oligonucleotide for detection of SNP TSC0031944
aaaaaaatattta

SEQ ID NO: 127568 - DNA, 13 bp, Artificial Sequence
  Oligonucleotide for detection of SNP TSC0031944
taaatattttttt

SEQ ID NO: 127569 - DNA, 13 bp, Artificial Sequence
  Oligonucleotide for detection of SNP TSC0031944
aaaaaattattta

SEQ ID NO: 127570 - DNA, 13 bp, Artificial Sequence
  Oligonucleotide for detection of SNP TSC0031944
taaataatttttt

SEQ ID NO: 127571 - DNA, 13 bp, Artificial Sequence
  Oligonucleotide for detection of SNP TSC0031944
tgggtgttttttt

SEQ ID NO: 127572 - DNA, 13 bp, Artificial Sequence
  Oligonucleotide for detection of SNP TSC0031944
aaaaaaacaccca

SEQ ID NO: 127573 - DNA, 13 bp, Artificial Sequence
  Oligonucleotide for detection of SNP TSC0031944
tgggtggtttttt

SEQ ID NO: 127574 - DNA, 13 bp, Artificial Sequence
  Oligonucleotide for detection of SNP TSC0031944
aaaaaaccaccca

SEQ ID NO: 127575 - DNA, 13 bp, Artificial Sequence
  Oligonucleotide for detection of SNP TSC0031948
gttttagttaagt

SEQ ID NO: 127576 - DNA, 13 bp, Artificial Sequence
  Oligonucleotide for detection of SNP TSC0031948
acttaactaaaac

SEQ ID NO: 127577 - DNA, 13 bp, Artificial Sequence
  Oligonucleotide for detection of SNP TSC0031948
gttttatttaagt

SEQ ID NO: 127578 - DNA, 13 bp, Artificial Sequence
  Oligonucleotide for detection of SNP TSC0031948
acttaaataaaac

SEQ ID NO: 127579 - DNA, 13 bp, Artificial Sequence
  Oligonucleotide for detection of SNP TSC0031948
atttgattgaggy

SEQ ID NO: 127580 - DNA, 13 bp, Artificial Sequence
  Oligonucleotide for detection of SNP TSC0031948
rcctcaatcaaat

SEQ ID NO: 127581 - DNA, 13 bp, Artificial Sequence
  Oligonucleotide for detection of SNP TSC0031948
atttgaatgaggy

SEQ ID NO: 127582 - DNA, 13 bp, Artificial Sequence
  Oligonucleotide for detection of SNP TSC0031948
rcctcattcaaat

SEQ ID NO: 127583 - DNA, 13 bp, Artificial Sequence
  Oligonucleotide for detection of SNP TSC0031949
ggtgtttgtgtgy

SEQ ID NO: 127584 - DNA, 13 bp, Artificial Sequence
  Oligonucleotide for detection of SNP TSC0031949
rcacacaaacacc

SEQ ID NO: 127585 - DNA, 13 bp, Artificial Sequence
  Oligonucleotide for detection of SNP TSC0031949
ggtgttcgtgtgy

SEQ ID NO: 127586 - DNA, 13 bp, Artificial Sequence
  Oligonucleotide for detection of SNP TSC0031949
rcacacgaacacc

SEQ ID NO: 127587 - DNA, 13 bp, Artificial Sequence
  Oligonucleotide for detection of SNP TSC0031949
ggtgtttgcgtgy

SEQ ID NO: 127588 - DNA, 13 bp, Artificial Sequence
  Oligonucleotide for detection of SNP TSC0031949
rcacgcaaacacc

SEQ ID NO: 127589 - DNA, 13 bp, Artificial Sequence
  Oligonucleotide for detection of SNP TSC0031949
ggtgtttgtgcgy

SEQ ID NO: 127590 - DNA, 13 bp, Artificial Sequence
  Oligonucleotide for detection of SNP TSC0031949
rcgcacaaacacc

SEQ ID NO: 127591 - DNA, 13 bp, Artificial Sequence
  Oligonucleotide for detection of SNP TSC0031949
ggtgtttgcgcgy

SEQ ID NO: 127592 - DNA, 13 bp, Artificial Sequence
  Oligonucleotide for detection of SNP TSC0031949
rcgcgcaaacacc

SEQ ID NO: 127593 - DNA, 13 bp, Artificial Sequence
  Oligonucleotide for detection of SNP TSC0031949
ggtgttcgcgtgy

SEQ ID NO: 127594 - DNA, 13 bp, Artificial Sequence
  Oligonucleotide for detection of SNP TSC0031949
rcacgcgaacacc

SEQ ID NO: 127595 - DNA, 13 bp, Artificial Sequence
  Oligonucleotide for detection of SNP TSC0031949
ggtgttcgtgcgy

SEQ ID NO: 127596 - DNA, 13 bp, Artificial Sequence
  Oligonucleotide for detection of SNP TSC0031949
rcgcacgaacacc

SEQ ID NO: 127597 - DNA, 13 bp, Artificial Sequence
  Oligonucleotide for detection of SNP TSC0031949
ggtgttcgcgcgy

SEQ ID NO: 127598 - DNA, 13 bp, Artificial Sequence
  Oligonucleotide for detection of SNP TSC0031949
rcgcgcgaacacc

SEQ ID NO: 127599 - DNA, 13 bp, Artificial Sequence
  Oligonucleotide for detection of SNP TSC0031949
gtgtgtggataty

SEQ ID NO: 127600 - DNA, 13 bp, Artificial Sequence
  Oligonucleotide for detection of SNP TSC0031949
ratatccacacac

SEQ ID NO: 127601 - DNA, 13 bp, Artificial Sequence
  Oligonucleotide for detection of SNP TSC0031949
gtgtgtagataty

SEQ ID NO: 127602 - DNA, 13 bp, Artificial Sequence
  Oligonucleotide for detection of SNP TSC0031949
ratatctacacac

SEQ ID NO: 127603 - DNA, 13 bp, Artificial Sequence
  Oligonucleotide for detection of SNP TSC0031949
gcgtgtggataty

SEQ ID NO: 127604 - DNA, 13 bp, Artificial Sequence
  Oligonucleotide for detection of SNP TSC0031949
ratatccacacgc

SEQ ID NO: 127605 - DNA, 13 bp, Artificial Sequence
  Oligonucleotide for detection of SNP TSC0031949
gcgtgtagataty

SEQ ID NO: 127606 - DNA, 13 bp, Artificial Sequence
  Oligonucleotide for detection of SNP TSC0031949
ratatctacacgc

SEQ ID NO: 127607 - DNA, 13 bp, Artificial Sequence
  Oligonucleotide for detection of SNP TSC0031949
gtgcgtggataty

SEQ ID NO: 127608 - DNA, 13 bp, Artificial Sequence
  Oligonucleotide for detection of SNP TSC0031949
ratatccacgcac

SEQ ID NO: 127609 - DNA, 13 bp, Artificial Sequence
  Oligonucleotide for detection of SNP TSC0031949
gtgcgtagataty

SEQ ID NO: 127610 - DNA, 13 bp, Artificial Sequence
  Oligonucleotide for detection of SNP TSC0031949
ratatctacgcac

SEQ ID NO: 127611 - DNA, 13 bp, Artificial Sequence
  Oligonucleotide for detection of SNP TSC0031949
gtgtgcggataty

SEQ ID NO: 127612 - DNA, 13 bp, Artificial Sequence
  Oligonucleotide for detection of SNP TSC0031949
ratatccgcacac

SEQ ID NO: 127613 - DNA, 13 bp, Artificial Sequence
  Oligonucleotide for detection of SNP TSC0031949
gcgcgtagataty

SEQ ID NO: 127614 - DNA, 13 bp, Artificial Sequence
  Oligonucleotide for detection of SNP TSC0031949
ratatctacgcgc

SEQ ID NO: 127615 - DNA, 13 bp, Artificial Sequence
  Oligonucleotide for detection of SNP TSC0031949
gcgcgtggataty

SEQ ID NO: 127616 - DNA, 13 bp, Artificial Sequence
  Oligonucleotide for detection of SNP TSC0031949
ratatccacgcgc

SEQ ID NO: 127617 - DNA, 13 bp, Artificial Sequence
  Oligonucleotide for detection of SNP TSC0031949
gcgtgcggataty

SEQ ID NO: 127618 - DNA, 13 bp, Artificial Sequence
  Oligonucleotide for detection of SNP TSC0031949
ratatccgcacgc

SEQ ID NO: 127619 - DNA, 13 bp, Artificial Sequence
  Oligonucleotide for detection of SNP TSC0031949
gtgcgcggataty

SEQ ID NO: 127620 - DNA, 13 bp, Artificial Sequence
  Oligonucleotide for detection of SNP TSC0031949
ratatccgcgcac

SEQ ID NO: 127621 - DNA, 13 bp, Artificial Sequence
  Oligonucleotide for detection of SNP TSC0031949
gcgcgcggataty

SEQ ID NO: 127622 - DNA, 13 bp, Artificial Sequence
  Oligonucleotide for detection of SNP TSC0031949
ratatccgcgcgc

SEQ ID NO: 127623 - DNA, 13 bp, Artificial Sequence
  Oligonucleotide for detection of SNP TSC0031951
atttagtttttty

SEQ ID NO: 127624 - DNA, 13 bp, Artificial Sequence
  Oligonucleotide for detection of SNP TSC0031951
raaaaaactaaat

SEQ ID NO: 127625 - DNA, 13 bp, Artificial Sequence
  Oligonucleotide for detection of SNP TSC0031951
atttaggttttty

SEQ ID NO: 127626 - DNA, 13 bp, Artificial Sequence
  Oligonucleotide for detection of SNP TSC0031951
raaaaacctaaat

SEQ ID NO: 127627 - DNA, 13 bp, Artificial Sequence
  Oligonucleotide for detection of SNP TSC0031951
gggaaagttgggt

SEQ ID NO: 127628 - DNA, 13 bp, Artificial Sequence
  Oligonucleotide for detection of SNP TSC0031951
acccaactttccc

SEQ ID NO: 127629 - DNA, 13 bp, Artificial Sequence
  Oligonucleotide for detection of SNP TSC0031951
gggaaatttgggt

SEQ ID NO: 127630 - DNA, 13 bp, Artificial Sequence
  Oligonucleotide for detection of SNP TSC0031951
acccaaatttccc

SEQ ID NO: 127631 - DNA, 13 bp, Artificial Sequence
  Oligonucleotide for detection of SNP TSC0031952
gatggtataatag

SEQ ID NO: 127632 - DNA, 13 bp, Artificial Sequence
  Oligonucleotide for detection of SNP TSC0031952
ctattataccatc

SEQ ID NO: 127633 - DNA, 13 bp, Artificial Sequence
  Oligonucleotide for detection of SNP TSC0031952
gatggtttaatag

SEQ ID NO: 127634 - DNA, 13 bp, Artificial Sequence
  Oligonucleotide for detection of SNP TSC0031952
ctattaaaccatc

SEQ ID NO: 127635 - DNA, 13 bp, Artificial Sequence
  Oligonucleotide for detection of SNP TSC0031952
ttgttgtgttaty

SEQ ID NO: 127636 - DNA, 13 bp, Artificial Sequence
  Oligonucleotide for detection of SNP TSC0031952
rataacacaacaa

SEQ ID NO: 127637 - DNA, 13 bp, Artificial Sequence
  Oligonucleotide for detection of SNP TSC0031952
ttgttgggttaty

SEQ ID NO: 127638 - DNA, 13 bp, Artificial Sequence
  Oligonucleotide for detection of SNP TSC0031952
rataacccaacaa

SEQ ID NO: 127639 - DNA, 13 bp, Artificial Sequence
  Oligonucleotide for detection of SNP TSC0031954
gtagaggagaaaa

SEQ ID NO: 127640 - DNA, 13 bp, Artificial Sequence
  Oligonucleotide for detection of SNP TSC0031954
ttttctcctctac

SEQ ID NO: 127641 - DNA, 13 bp, Artificial Sequence
  Oligonucleotide for detection of SNP TSC0031954
gtagagaagaaaa

SEQ ID NO: 127642 - DNA, 13 bp, Artificial Sequence
  Oligonucleotide for detection of SNP TSC0031954
ttttcttctctac

SEQ ID NO: 127643 - DNA, 13 bp, Artificial Sequence
  Oligonucleotide for detection of SNP TSC0031955
agagagtggaagy

SEQ ID NO: 127644 - DNA, 13 bp, Artificial Sequence
  Oligonucleotide for detection of SNP TSC0031955
rcttccactctct

SEQ ID NO: 127645 - DNA, 13 bp, Artificial Sequence
  Oligonucleotide for detection of SNP TSC0031955
agagagcggaagy

SEQ ID NO: 127646 - DNA, 13 bp, Artificial Sequence
  Oligonucleotide for detection of SNP TSC0031955
rcttccgctctct

SEQ ID NO: 127647 - DNA, 13 bp, Artificial Sequence
  Oligonucleotide for detection of SNP TSC0031956
ttttgtaggtagg

SEQ ID NO: 127648 - DNA, 13 bp, Artificial Sequence
  Oligonucleotide for detection of SNP TSC0031956
cctacctacaaaa

SEQ ID NO: 127649 - DNA, 13 bp, Artificial Sequence
  Oligonucleotide for detection of SNP TSC0031956
ttttgtgggtagg

SEQ ID NO: 127650 - DNA, 13 bp, Artificial Sequence
  Oligonucleotide for detection of SNP TSC0031956
cctacccacaaaa

SEQ ID NO: 127651 - DNA, 13 bp, Artificial Sequence
  Oligonucleotide for detection of SNP TSC0031957
agtgttattgtgt

SEQ ID NO: 127652 - DNA, 13 bp, Artificial Sequence
  Oligonucleotide for detection of SNP TSC0031957
acacaataacact

SEQ ID NO: 127653 - DNA, 13 bp, Artificial Sequence
  Oligonucleotide for detection of SNP TSC0031957
agtgttgttgtgt

SEQ ID NO: 127654 - DNA, 13 bp, Artificial Sequence
  Oligonucleotide for detection of SNP TSC0031957
acacaacaacact

SEQ ID NO: 127655 - DNA, 13 bp, Artificial Sequence
  Oligonucleotide for detection of SNP TSC0031957
agtgtcgttgtgt

SEQ ID NO: 127656 - DNA, 13 bp, Artificial Sequence
  Oligonucleotide for detection of SNP TSC0031957
acacaacgacact

SEQ ID NO: 127657 - DNA, 13 bp, Artificial Sequence
  Oligonucleotide for detection of SNP TSC0031958
aaataggtatttt

SEQ ID NO: 127658 - DNA, 13 bp, Artificial Sequence
  Oligonucleotide for detection of SNP TSC0031958
aaaatacctattt

SEQ ID NO: 127659 - DNA, 13 bp, Artificial Sequence
  Oligonucleotide for detection of SNP TSC0031958
aaatagttatttt

SEQ ID NO: 127660 - DNA, 13 bp, Artificial Sequence
  Oligonucleotide for detection of SNP TSC0031958
aaaataactattt

SEQ ID NO: 127661 - DNA, 13 bp, Artificial Sequence
  Oligonucleotide for detection of SNP TSC0031958
aggatgtttgttt

SEQ ID NO: 127662 - DNA, 13 bp, Artificial Sequence
  Oligonucleotide for detection of SNP TSC0031958
aaacaaacatcct

SEQ ID NO: 127663 - DNA, 13 bp, Artificial Sequence
  Oligonucleotide for detection of SNP TSC0031958
aggatgattgttt

SEQ ID NO: 127664 - DNA, 13 bp, Artificial Sequence
  Oligonucleotide for detection of SNP TSC0031958
aaacaatcatcct

SEQ ID NO: 127665 - DNA, 13 bp, Artificial Sequence
  Oligonucleotide for detection of SNP TSC0031965
taagtaatttggg

SEQ ID NO: 127666 - DNA, 13 bp, Artificial Sequence
  Oligonucleotide for detection of SNP TSC0031965
cccaaattactta

SEQ ID NO: 127667 - DNA, 13 bp, Artificial Sequence
  Oligonucleotide for detection of SNP TSC0031965
taagtattttggg

SEQ ID NO: 127668 - DNA, 13 bp, Artificial Sequence
  Oligonucleotide for detection of SNP TSC0031965
cccaaaatactta

SEQ ID NO: 127669 - DNA, 13 bp, Artificial Sequence
  Oligonucleotide for detection of SNP TSC0031965
tttaaggtgttta

SEQ ID NO: 127670 - DNA, 13 bp, Artificial Sequence
  Oligonucleotide for detection of SNP TSC0031965
taaacaccttaaa

SEQ ID NO: 127671 - DNA, 13 bp, Artificial Sequence
  Oligonucleotide for detection of SNP TSC0031966
ttttgtatgttat

SEQ ID NO: 127672 - DNA, 13 bp, Artificial Sequence
  Oligonucleotide for detection of SNP TSC0031966
ataacatacaaaa

SEQ ID NO: 127673 - DNA, 13 bp, Artificial Sequence
  Oligonucleotide for detection of SNP TSC0031966
ttttgtgtgttat

SEQ ID NO: 127674 - DNA, 13 bp, Artificial Sequence
  Oligonucleotide for detection of SNP TSC0031966
ataacacacaaaa

SEQ ID NO: 127675 - DNA, 13 bp, Artificial Sequence
  Oligonucleotide for detection of SNP TSC0031966
ttttgcgtgttat

SEQ ID NO: 127676 - DNA, 13 bp, Artificial Sequence
  Oligonucleotide for detection of SNP TSC0031966
ataacacgcaaaa

SEQ ID NO: 127677 - DNA, 13 bp, Artificial Sequence
  Oligonucleotide for detection of SNP TSC0031966
ataatatgtaaag

SEQ ID NO: 127678 - DNA, 13 bp, Artificial Sequence
  Oligonucleotide for detection of SNP TSC0031966
ctttacatattat

SEQ ID NO: 127679 - DNA, 13 bp, Artificial Sequence
  Oligonucleotide for detection of SNP TSC0031966
ataatacgtaaag

SEQ ID NO: 127680 - DNA, 13 bp, Artificial Sequence
  Oligonucleotide for detection of SNP TSC0031966
ctttacgtattat

SEQ ID NO: 127681 - DNA, 13 bp, Artificial Sequence
  Oligonucleotide for detection of SNP TSC0031970
attaggatgattg

SEQ ID NO: 127682 - DNA, 13 bp, Artificial Sequence
  Oligonucleotide for detection of SNP TSC0031970
caatcatcctaat

SEQ ID NO: 127683 - DNA, 13 bp, Artificial Sequence
  Oligonucleotide for detection of SNP TSC0031970
attagggtgattg

SEQ ID NO: 127684 - DNA, 13 bp, Artificial Sequence
  Oligonucleotide for detection of SNP TSC0031970
caatcaccctaat

SEQ ID NO: 127685 - DNA, 13 bp, Artificial Sequence
  Oligonucleotide for detection of SNP TSC0031971
tttatagttggty

SEQ ID NO: 127686 - DNA, 13 bp, Artificial Sequence
  Oligonucleotide for detection of SNP TSC0031971
raccaactataaa

SEQ ID NO: 127687 - DNA, 13 bp, Artificial Sequence
  Oligonucleotide for detection of SNP TSC0031971
tttataattggty

SEQ ID NO: 127688 - DNA, 13 bp, Artificial Sequence
  Oligonucleotide for detection of SNP TSC0031971
raccaattataaa

SEQ ID NO: 127689 - DNA, 13 bp, Artificial Sequence
  Oligonucleotide for detection of SNP TSC0031973
ggttgtaggaata

SEQ ID NO: 127690 - DNA, 13 bp, Artificial Sequence
  Oligonucleotide for detection of SNP TSC0031973
tattcctacaacc

SEQ ID NO: 127691 - DNA, 13 bp, Artificial Sequence
  Oligonucleotide for detection of SNP TSC0031973
ggttgtgggaata

SEQ ID NO: 127692 - DNA, 13 bp, Artificial Sequence
  Oligonucleotide for detection of SNP TSC0031973
tattcccacaacc

SEQ ID NO: 127693 - DNA, 13 bp, Artificial Sequence
  Oligonucleotide for detection of SNP TSC0031973
ggtcgtaggaata

SEQ ID NO: 127694 - DNA, 13 bp, Artificial Sequence
  Oligonucleotide for detection of SNP TSC0031973
tattcctacgacc

SEQ ID NO: 127695 - DNA, 13 bp, Artificial Sequence
  Oligonucleotide for detection of SNP TSC0031973
ggtcgtgggaata

SEQ ID NO: 127696 - DNA, 13 bp, Artificial Sequence
  Oligonucleotide for detection of SNP TSC0031973
tattcccacgacc

SEQ ID NO: 127697 - DNA, 13 bp, Artificial Sequence
  Oligonucleotide for detection of SNP TSC0031975
agatagtgtgtaa

SEQ ID NO: 127698 - DNA, 13 bp, Artificial Sequence
  Oligonucleotide for detection of SNP TSC0031975
ttacacactatct

SEQ ID NO: 127699 - DNA, 13 bp, Artificial Sequence
  Oligonucleotide for detection of SNP TSC0031975
agatagcgtgtaa

SEQ ID NO: 127700 - DNA, 13 bp, Artificial Sequence
  Oligonucleotide for detection of SNP TSC0031975
ttacacgctatct

SEQ ID NO: 127701 - DNA, 13 bp, Artificial Sequence
  Oligonucleotide for detection of SNP TSC0031976
agatttttgagat

SEQ ID NO: 127702 - DNA, 13 bp, Artificial Sequence
  Oligonucleotide for detection of SNP TSC0031976
atctcaaaaatct

SEQ ID NO: 127703 - DNA, 13 bp, Artificial Sequence
  Oligonucleotide for detection of SNP TSC0031976
attttatgagttt

SEQ ID NO: 127704 - DNA, 13 bp, Artificial Sequence
  Oligonucleotide for detection of SNP TSC0031976
aaactcataaaat

SEQ ID NO: 127705 - DNA, 13 bp, Artificial Sequence
  Oligonucleotide for detection of SNP TSC0031977
gttttgggggtay

SEQ ID NO: 127706 - DNA, 13 bp, Artificial Sequence
  Oligonucleotide for detection of SNP TSC0031977
rtacccccaaaac

SEQ ID NO: 127707 - DNA, 13 bp, Artificial Sequence
  Oligonucleotide for detection of SNP TSC0031977
gttttgagggtay

SEQ ID NO: 127708 - DNA, 13 bp, Artificial Sequence
  Oligonucleotide for detection of SNP TSC0031977
rtaccctcaaaac

SEQ ID NO: 127709 - DNA, 13 bp, Artificial Sequence
  Oligonucleotide for detection of SNP TSC0031980
tgattagttttty

SEQ ID NO: 127710 - DNA, 13 bp, Artificial Sequence
  Oligonucleotide for detection of SNP TSC0031980
raaaaactaatca

SEQ ID NO: 127711 - DNA, 13 bp, Artificial Sequence
  Oligonucleotide for detection of SNP TSC0031980
tgattaattttty

SEQ ID NO: 127712 - DNA, 13 bp, Artificial Sequence
  Oligonucleotide for detection of SNP TSC0031980
raaaaattaatca

SEQ ID NO: 127713 - DNA, 13 bp, Artificial Sequence
  Oligonucleotide for detection of SNP TSC0031981
atattggtaaaat

SEQ ID NO: 127714 - DNA, 13 bp, Artificial Sequence
  Oligonucleotide for detection of SNP TSC0031981
attttaccaatat

SEQ ID NO: 127715 - DNA, 13 bp, Artificial Sequence
  Oligonucleotide for detection of SNP TSC0031981
atattgttaaaat

SEQ ID NO: 127716 - DNA, 13 bp, Artificial Sequence
  Oligonucleotide for detection of SNP TSC0031981
attttaacaatat

SEQ ID NO: 127717 - DNA, 13 bp, Artificial Sequence
  Oligonucleotide for detection of SNP TSC0031981
attttgttagtat

SEQ ID NO: 127718 - DNA, 13 bp, Artificial Sequence
  Oligonucleotide for detection of SNP TSC0031981
atactaacaaaat

SEQ ID NO: 127719 - DNA, 13 bp, Artificial Sequence
  Oligonucleotide for detection of SNP TSC0031981
attttgatagtat

SEQ ID NO: 127720 - DNA, 13 bp, Artificial Sequence
  Oligonucleotide for detection of SNP TSC0031981
atactatcaaaat

SEQ ID NO: 127721 - DNA, 13 bp, Artificial Sequence
  Oligonucleotide for detection of SNP TSC0031982
gttttgtgtttaa

SEQ ID NO: 127722 - DNA, 13 bp, Artificial Sequence
  Oligonucleotide for detection of SNP TSC0031982
ttaaacacaaaac

SEQ ID NO: 127723 - DNA, 13 bp, Artificial Sequence
  Oligonucleotide for detection of SNP TSC0031982
gttttgggtttaa

SEQ ID NO: 127724 - DNA, 13 bp, Artificial Sequence
  Oligonucleotide for detection of SNP TSC0031982
ttaaacccaaaac

SEQ ID NO: 127725 - DNA, 13 bp, Artificial Sequence
  Oligonucleotide for detection of SNP TSC0031982
gttttgcgtttaa

SEQ ID NO: 127726 - DNA, 13 bp, Artificial Sequence
  Oligonucleotide for detection of SNP TSC0031982
ttaaacgcaaaac

SEQ ID NO: 127727 - DNA, 13 bp, Artificial Sequence
  Oligonucleotide for detection of SNP TSC0031982
ttggatgtagggy

SEQ ID NO: 127728 - DNA, 13 bp, Artificial Sequence
  Oligonucleotide for detection of SNP TSC0031982
rccctacatccaa

SEQ ID NO: 127729 - DNA, 13 bp, Artificial Sequence
  Oligonucleotide for detection of SNP TSC0031982
ttggatttagggy

SEQ ID NO: 127730 - DNA, 13 bp, Artificial Sequence
  Oligonucleotide for detection of SNP TSC0031982
rccctaaatccaa

SEQ ID NO: 127731 - DNA, 13 bp, Artificial Sequence
  Oligonucleotide for detection of SNP TSC0031982
ttggacgtagggy

SEQ ID NO: 127732 - DNA, 13 bp, Artificial Sequence
  Oligonucleotide for detection of SNP TSC0031982
rccctacgtccaa

SEQ ID NO: 127733 - DNA, 13 bp, Artificial Sequence
  Oligonucleotide for detection of SNP TSC0031983
ataagtgtgtatg

SEQ ID NO: 127734 - DNA, 13 bp, Artificial Sequence
  Oligonucleotide for detection of SNP TSC0031983
catacacacttat

SEQ ID NO: 127735 - DNA, 13 bp, Artificial Sequence
  Oligonucleotide for detection of SNP TSC0031983
ataagtatgtatg

SEQ ID NO: 127736 - DNA, 13 bp, Artificial Sequence
  Oligonucleotide for detection of SNP TSC0031983
catacatacttat

SEQ ID NO: 127737 - DNA, 13 bp, Artificial Sequence
  Oligonucleotide for detection of SNP TSC0031984
ttttttgtaatty

SEQ ID NO: 127738 - DNA, 13 bp, Artificial Sequence
  Oligonucleotide for detection of SNP TSC0031984
raattacaaaaaa

SEQ ID NO: 127739 - DNA, 13 bp, Artificial Sequence
  Oligonucleotide for detection of SNP TSC0031984
tttttcgtaatty

SEQ ID NO: 127740 - DNA, 13 bp, Artificial Sequence
  Oligonucleotide for detection of SNP TSC0031984
raattacgaaaaa

SEQ ID NO: 127741 - DNA, 13 bp, Artificial Sequence
  Oligonucleotide for detection of SNP TSC0031984
gggttgtggagaa

SEQ ID NO: 127742 - DNA, 13 bp, Artificial Sequence
  Oligonucleotide for detection of SNP TSC0031984
ttctccacaaccc

SEQ ID NO: 127743 - DNA, 13 bp, Artificial Sequence
  Oligonucleotide for detection of SNP TSC0031984
gggttgcggagaa

SEQ ID NO: 127744 - DNA, 13 bp, Artificial Sequence
  Oligonucleotide for detection of SNP TSC0031984
ttctccgcaaccc

SEQ ID NO: 127745 - DNA, 13 bp, Artificial Sequence
  Oligonucleotide for detection of SNP TSC0031988
ttgtgtattttgy

SEQ ID NO: 127746 - DNA, 13 bp, Artificial Sequence
  Oligonucleotide for detection of SNP TSC0031988
rcaaaatacacaa

SEQ ID NO: 127747 - DNA, 13 bp, Artificial Sequence
  Oligonucleotide for detection of SNP TSC0031988
ttgtgttttttgy

SEQ ID NO: 127748 - DNA, 13 bp, Artificial Sequence
  Oligonucleotide for detection of SNP TSC0031988
rcaaaaaacacaa

SEQ ID NO: 127749 - DNA, 13 bp, Artificial Sequence
  Oligonucleotide for detection of SNP TSC0031988
ttgcgtattttgy

SEQ ID NO: 127750 - DNA, 13 bp, Artificial Sequence
  Oligonucleotide for detection of SNP TSC0031988
rcaaaatacgcaa

SEQ ID NO: 127751 - DNA, 13 bp, Artificial Sequence
  Oligonucleotide for detection of SNP TSC0031988
ttgcgttttttgy

SEQ ID NO: 127752 - DNA, 13 bp, Artificial Sequence
  Oligonucleotide for detection of SNP TSC0031988
rcaaaaaacgcaa

SEQ ID NO: 127753 - DNA, 13 bp, Artificial Sequence
  Oligonucleotide for detection of SNP TSC0031988
gtagagtgtgtag

SEQ ID NO: 127754 - DNA, 13 bp, Artificial Sequence
  Oligonucleotide for detection of SNP TSC0031988
ctacacactctac

SEQ ID NO: 127755 - DNA, 13 bp, Artificial Sequence
  Oligonucleotide for detection of SNP TSC0031988
gtagagggtgtag

SEQ ID NO: 127756 - DNA, 13 bp, Artificial Sequence
  Oligonucleotide for detection of SNP TSC0031988
ctacaccctctac

SEQ ID NO: 127757 - DNA, 13 bp, Artificial Sequence
  Oligonucleotide for detection of SNP TSC0031988
gtagagtgcgtag

SEQ ID NO: 127758 - DNA, 13 bp, Artificial Sequence
  Oligonucleotide for detection of SNP TSC0031988
ctacgcactctac

SEQ ID NO: 127759 - DNA, 13 bp, Artificial Sequence
  Oligonucleotide for detection of SNP TSC0031988
gtagagggcgtag

SEQ ID NO: 127760 - DNA, 13 bp, Artificial Sequence
  Oligonucleotide for detection of SNP TSC0031988
ctacgccctctac

SEQ ID NO: 127761 - DNA, 13 bp, Artificial Sequence
  Oligonucleotide for detection of SNP TSC0031989
gtttttagtttcg

SEQ ID NO: 127762 - DNA, 13 bp, Artificial Sequence
  Oligonucleotide for detection of SNP TSC0031989
cgaaactaaaaac

SEQ ID NO: 127763 - DNA, 13 bp, Artificial Sequence
  Oligonucleotide for detection of SNP TSC0031989
gtttttggtttcg

SEQ ID NO: 127764 - DNA, 13 bp, Artificial Sequence
  Oligonucleotide for detection of SNP TSC0031989
cgaaaccaaaaac

SEQ ID NO: 127765 - DNA, 13 bp, Artificial Sequence
  Oligonucleotide for detection of SNP TSC0031989
gttttcggtttcg

SEQ ID NO: 127766 - DNA, 13 bp, Artificial Sequence
  Oligonucleotide for detection of SNP TSC0031989
cgaaaccgaaaac

SEQ ID NO: 127767 - DNA, 13 bp, Artificial Sequence
  Oligonucleotide for detection of SNP TSC0031989
tgggattgaaggy

SEQ ID NO: 127768 - DNA, 13 bp, Artificial Sequence
  Oligonucleotide for detection of SNP TSC0031989
rccttcaatccca

SEQ ID NO: 127769 - DNA, 13 bp, Artificial Sequence
  Oligonucleotide for detection of SNP TSC0031989
cgggattgaaggy

SEQ ID NO: 127770 - DNA, 13 bp, Artificial Sequence
  Oligonucleotide for detection of SNP TSC0031989
rccttcaatcccg

SEQ ID NO: 127771 - DNA, 13 bp, Artificial Sequence
  Oligonucleotide for detection of SNP TSC0031989
tgggatcgaaggy

SEQ ID NO: 127772 - DNA, 13 bp, Artificial Sequence
  Oligonucleotide for detection of SNP TSC0031989
rccttcgatccca

SEQ ID NO: 127773 - DNA, 13 bp, Artificial Sequence
  Oligonucleotide for detection of SNP TSC0031989
cgggatcgaaggy

SEQ ID NO: 127774 - DNA, 13 bp, Artificial Sequence
  Oligonucleotide for detection of SNP TSC0031989
rccttcgatcccg

SEQ ID NO: 127775 - DNA, 13 bp, Artificial Sequence
  Oligonucleotide for detection of SNP TSC0031993
taaaataatagaa

SEQ ID NO: 127776 - DNA, 13 bp, Artificial Sequence
  Oligonucleotide for detection of SNP TSC0031993
ttctattatttta

SEQ ID NO: 127777 - DNA, 13 bp, Artificial Sequence
  Oligonucleotide for detection of SNP TSC0031993
taaaatgatagaa

SEQ ID NO: 127778 - DNA, 13 bp, Artificial Sequence
  Oligonucleotide for detection of SNP TSC0031993
ttctatcatttta

SEQ ID NO: 127779 - DNA, 13 bp, Artificial Sequence
  Oligonucleotide for detection of SNP TSC0031993
taaaacgatagaa

SEQ ID NO: 127780 - DNA, 13 bp, Artificial Sequence
  Oligonucleotide for detection of SNP TSC0031993
ttctatcgtttta

SEQ ID NO: 127781 - DNA, 13 bp, Artificial Sequence
  Oligonucleotide for detection of SNP TSC0031998
agtgttagaagay

SEQ ID NO: 127782 - DNA, 13 bp, Artificial Sequence
  Oligonucleotide for detection of SNP TSC0031998
rtcttctaacact

SEQ ID NO: 127783 - DNA, 13 bp, Artificial Sequence
  Oligonucleotide for detection of SNP TSC0031998
agtgttggaagay

SEQ ID NO: 127784 - DNA, 13 bp, Artificial Sequence
  Oligonucleotide for detection of SNP TSC0031998
rtcttccaacact

SEQ ID NO: 127785 - DNA, 13 bp, Artificial Sequence
  Oligonucleotide for detection of SNP TSC0031999
tgaggttgagttg

SEQ ID NO: 127786 - DNA, 13 bp, Artificial Sequence
  Oligonucleotide for detection of SNP TSC0031999
caactcaacctca

SEQ ID NO: 127787 - DNA, 13 bp, Artificial Sequence
  Oligonucleotide for detection of SNP TSC0031999
cgaggttgagttg

SEQ ID NO: 127788 - DNA, 13 bp, Artificial Sequence
  Oligonucleotide for detection of SNP TSC0031999
caactcaacctcg

SEQ ID NO: 127789 - DNA, 13 bp, Artificial Sequence
  Oligonucleotide for detection of SNP TSC0031999
tgaggtcgagttg

SEQ ID NO: 127790 - DNA, 13 bp, Artificial Sequence
  Oligonucleotide for detection of SNP TSC0031999
caactcgacctca

SEQ ID NO: 127791 - DNA, 13 bp, Artificial Sequence
  Oligonucleotide for detection of SNP TSC0031999
cgaggtcgagttg

SEQ ID NO: 127792 - DNA, 13 bp, Artificial Sequence
  Oligonucleotide for detection of SNP TSC0031999
caactcgacctcg

SEQ ID NO: 127793 - DNA, 13 bp, Artificial Sequence
  Oligonucleotide for detection of SNP TSC0031999
tagtttggttttg

SEQ ID NO: 127794 - DNA, 13 bp, Artificial Sequence
  Oligonucleotide for detection of SNP TSC0031999
caaaaccaaacta

SEQ ID NO: 127795 - DNA, 13 bp, Artificial Sequence
  Oligonucleotide for detection of SNP TSC0031999
tagtttagttttg

SEQ ID NO: 127796 - DNA, 13 bp, Artificial Sequence
  Oligonucleotide for detection of SNP TSC0031999
caaaactaaacta

SEQ ID NO: 127797 - DNA, 13 bp, Artificial Sequence
  Oligonucleotide for detection of SNP TSC0031999
tagttcggttttg

SEQ ID NO: 127798 - DNA, 13 bp, Artificial Sequence
  Oligonucleotide for detection of SNP TSC0031999
caaaaccgaacta

SEQ ID NO: 127799 - DNA, 13 bp, Artificial Sequence
  Oligonucleotide for detection of SNP TSC0031999
tagtttagtttcg

SEQ ID NO: 127800 - DNA, 13 bp, Artificial Sequence
  Oligonucleotide for detection of SNP TSC0031999
cgaaactaaacta

SEQ ID NO: 127801 - DNA, 13 bp, Artificial Sequence
  Oligonucleotide for detection of SNP TSC0031999
tagtttggtttcg

SEQ ID NO: 127802 - DNA, 13 bp, Artificial Sequence
  Oligonucleotide for detection of SNP TSC0031999
cgaaaccaaacta

SEQ ID NO: 127803 - DNA, 13 bp, Artificial Sequence
  Oligonucleotide for detection of SNP TSC0031999
tagttcggtttcg

SEQ ID NO: 127804 - DNA, 13 bp, Artificial Sequence
  Oligonucleotide for detection of SNP TSC0031999
cgaaaccgaacta

SEQ ID NO: 127805 - DNA, 13 bp, Artificial Sequence
  Oligonucleotide for detection of SNP TSC0032000
agagtttgtagaa

SEQ ID NO: 127806 - DNA, 13 bp, Artificial Sequence
  Oligonucleotide for detection of SNP TSC0032000
ttctacaaactct

SEQ ID NO: 127807 - DNA, 13 bp, Artificial Sequence
  Oligonucleotide for detection of SNP TSC0032000
agagttagtagaa

SEQ ID NO: 127808 - DNA, 13 bp, Artificial Sequence
  Oligonucleotide for detection of SNP TSC0032000
ttctactaactct

SEQ ID NO: 127809 - DNA, 13 bp, Artificial Sequence
  Oligonucleotide for detection of SNP TSC0032002
ttggggataggta

SEQ ID NO: 127810 - DNA, 13 bp, Artificial Sequence
  Oligonucleotide for detection of SNP TSC0032002
tacctatccccaa

SEQ ID NO: 127811 - DNA, 13 bp, Artificial Sequence
  Oligonucleotide for detection of SNP TSC0032002
ttggggttaggta

SEQ ID NO: 127812 - DNA, 13 bp, Artificial Sequence
  Oligonucleotide for detection of SNP TSC0032002
tacctaaccccaa

SEQ ID NO: 127813 - DNA, 13 bp, Artificial Sequence
  Oligonucleotide for detection of SNP TSC0032002
tgtttgtttttag

SEQ ID NO: 127814 - DNA, 13 bp, Artificial Sequence
  Oligonucleotide for detection of SNP TSC0032002
ctaaaaacaaaca

SEQ ID NO: 127815 - DNA, 13 bp, Artificial Sequence
  Oligonucleotide for detection of SNP TSC0032002
tgtttggttttag

SEQ ID NO: 127816 - DNA, 13 bp, Artificial Sequence
  Oligonucleotide for detection of SNP TSC0032002
ctaaaaccaaaca

SEQ ID NO: 127817 - DNA, 13 bp, Artificial Sequence
  Oligonucleotide for detection of SNP TSC0032003
ggttttgttttty

SEQ ID NO: 127818 - DNA, 13 bp, Artificial Sequence
  Oligonucleotide for detection of SNP TSC0032003
raaaaacaaaacc

SEQ ID NO: 127819 - DNA, 13 bp, Artificial Sequence
  Oligonucleotide for detection of SNP TSC0032003
ggtttcgttttty

SEQ ID NO: 127820 - DNA, 13 bp, Artificial Sequence
  Oligonucleotide for detection of SNP TSC0032003
raaaaacgaaacc

SEQ ID NO: 127821 - DNA, 13 bp, Artificial Sequence
  Oligonucleotide for detection of SNP TSC0032003
ggaagatgaggty

SEQ ID NO: 127822 - DNA, 13 bp, Artificial Sequence
  Oligonucleotide for detection of SNP TSC0032003
racctcatcttcc

SEQ ID NO: 127823 - DNA, 13 bp, Artificial Sequence
  Oligonucleotide for detection of SNP TSC0032003
ggaagaagaggty

SEQ ID NO: 127824 - DNA, 13 bp, Artificial Sequence
  Oligonucleotide for detection of SNP TSC0032003
racctcttcttcc

SEQ ID NO: 127825 - DNA, 13 bp, Artificial Sequence
  Oligonucleotide for detection of SNP TSC0032003
ggaagacgaggty

SEQ ID NO: 127826 - DNA, 13 bp, Artificial Sequence
  Oligonucleotide for detection of SNP TSC0032003
racctcgtcttcc

SEQ ID NO: 127827 - DNA, 13 bp, Artificial Sequence
  Oligonucleotide for detection of SNP TSC0032007
ttgagtatgttgt

SEQ ID NO: 127828 - DNA, 13 bp, Artificial Sequence
  Oligonucleotide for detection of SNP TSC0032007
acaacatactcaa

SEQ ID NO: 127829 - DNA, 13 bp, Artificial Sequence
  Oligonucleotide for detection of SNP TSC0032007
ttgagtttgttgt

SEQ ID NO: 127830 - DNA, 13 bp, Artificial Sequence
  Oligonucleotide for detection of SNP TSC0032007
acaacaaactcaa

SEQ ID NO: 127831 - DNA, 13 bp, Artificial Sequence
  Oligonucleotide for detection of SNP TSC0032007
atagtatatttag

SEQ ID NO: 127832 - DNA, 13 bp, Artificial Sequence
  Oligonucleotide for detection of SNP TSC0032007
ctaaatatactat

SEQ ID NO: 127833 - DNA, 13 bp, Artificial Sequence
  Oligonucleotide for detection of SNP TSC0032007
atagtaaatttag

SEQ ID NO: 127834 - DNA, 13 bp, Artificial Sequence
  Oligonucleotide for detection of SNP TSC0032007
ctaaatttactat

SEQ ID NO: 127835 - DNA, 13 bp, Artificial Sequence
  Oligonucleotide for detection of SNP TSC0032008
attgttgtgtttg

SEQ ID NO: 127836 - DNA, 13 bp, Artificial Sequence
  Oligonucleotide for detection of SNP TSC0032008
caaacacaacaat

SEQ ID NO: 127837 - DNA, 13 bp, Artificial Sequence
  Oligonucleotide for detection of SNP TSC0032008
taaatagaatagt

SEQ ID NO: 127838 - DNA, 13 bp, Artificial Sequence
  Oligonucleotide for detection of SNP TSC0032008
actattctattta

SEQ ID NO: 127839 - DNA, 13 bp, Artificial Sequence
  Oligonucleotide for detection of SNP TSC0032008
taaatataatagt

SEQ ID NO: 127840 - DNA, 13 bp, Artificial Sequence
  Oligonucleotide for detection of SNP TSC0032008
actattatattta

SEQ ID NO: 127841 - DNA, 13 bp, Artificial Sequence
  Oligonucleotide for detection of SNP TSC0032009
aaaaaataaatag

SEQ ID NO: 127842 - DNA, 13 bp, Artificial Sequence
  Oligonucleotide for detection of SNP TSC0032009
ctatttatttttt

SEQ ID NO: 127843 - DNA, 13 bp, Artificial Sequence
  Oligonucleotide for detection of SNP TSC0032010
agtaagtgatggt

SEQ ID NO: 127844 - DNA, 13 bp, Artificial Sequence
  Oligonucleotide for detection of SNP TSC0032010
accatcacttact

SEQ ID NO: 127845 - DNA, 13 bp, Artificial Sequence
  Oligonucleotide for detection of SNP TSC0032010
agtaagggatggt

SEQ ID NO: 127846 - DNA, 13 bp, Artificial Sequence
  Oligonucleotide for detection of SNP TSC0032010
accatcccttact

SEQ ID NO: 127847 - DNA, 13 bp, Artificial Sequence
  Oligonucleotide for detection of SNP TSC0032010
agtaagcgatggt

SEQ ID NO: 127848 - DNA, 13 bp, Artificial Sequence
  Oligonucleotide for detection of SNP TSC0032010
accatcgcttact

SEQ ID NO: 127849 - DNA, 13 bp, Artificial Sequence
  Oligonucleotide for detection of SNP TSC0032010
attattgtttgtt

SEQ ID NO: 127850 - DNA, 13 bp, Artificial Sequence
  Oligonucleotide for detection of SNP TSC0032010
aacaaacaataat

SEQ ID NO: 127851 - DNA, 13 bp, Artificial Sequence
  Oligonucleotide for detection of SNP TSC0032010
attattttttgtt

SEQ ID NO: 127852 - DNA, 13 bp, Artificial Sequence
  Oligonucleotide for detection of SNP TSC0032010
aacaaaaaataat

SEQ ID NO: 127853 - DNA, 13 bp, Artificial Sequence
  Oligonucleotide for detection of SNP TSC0032010
attatcgtttgtt

SEQ ID NO: 127854 - DNA, 13 bp, Artificial Sequence
  Oligonucleotide for detection of SNP TSC0032010
aacaaacgataat

SEQ ID NO: 127855 - DNA, 13 bp, Artificial Sequence
  Oligonucleotide for detection of SNP TSC0032011
gtaagtgatggtt

SEQ ID NO: 127856 - DNA, 13 bp, Artificial Sequence
  Oligonucleotide for detection of SNP TSC0032011
aaccatcacttac

SEQ ID NO: 127857 - DNA, 13 bp, Artificial Sequence
  Oligonucleotide for detection of SNP TSC0032011
gtaagttatggtt

SEQ ID NO: 127858 - DNA, 13 bp, Artificial Sequence
  Oligonucleotide for detection of SNP TSC0032011
aaccataacttac

SEQ ID NO: 127859 - DNA, 13 bp, Artificial Sequence
  Oligonucleotide for detection of SNP TSC0032011
gtaagcgatggtt

SEQ ID NO: 127860 - DNA, 13 bp, Artificial Sequence
  Oligonucleotide for detection of SNP TSC0032011
aaccatcgcttac

SEQ ID NO: 127861 - DNA, 13 bp, Artificial Sequence
  Oligonucleotide for detection of SNP TSC0032011
aattattgtttgy

SEQ ID NO: 127862 - DNA, 13 bp, Artificial Sequence
  Oligonucleotide for detection of SNP TSC0032011
rcaaacaataatt

SEQ ID NO: 127863 - DNA, 13 bp, Artificial Sequence
  Oligonucleotide for detection of SNP TSC0032011
aattatagtttgy

SEQ ID NO: 127864 - DNA, 13 bp, Artificial Sequence
  Oligonucleotide for detection of SNP TSC0032011
rcaaactataatt

SEQ ID NO: 127865 - DNA, 13 bp, Artificial Sequence
  Oligonucleotide for detection of SNP TSC0032011
aattatcgtttgy

SEQ ID NO: 127866 - DNA, 13 bp, Artificial Sequence
  Oligonucleotide for detection of SNP TSC0032011
rcaaacgataatt

SEQ ID NO: 127867 - DNA, 13 bp, Artificial Sequence
  Oligonucleotide for detection of SNP TSC0032013
tgggagattttta

SEQ ID NO: 127868 - DNA, 13 bp, Artificial Sequence
  Oligonucleotide for detection of SNP TSC0032013
taaaaatctccca

SEQ ID NO: 127869 - DNA, 13 bp, Artificial Sequence
  Oligonucleotide for detection of SNP TSC0032013
tgggagtttttta

SEQ ID NO: 127870 - DNA, 13 bp, Artificial Sequence
  Oligonucleotide for detection of SNP TSC0032013
taaaaaactccca

SEQ ID NO: 127871 - DNA, 13 bp, Artificial Sequence
  Oligonucleotide for detection of SNP TSC0032013
cgggagattttta

SEQ ID NO: 127872 - DNA, 13 bp, Artificial Sequence
  Oligonucleotide for detection of SNP TSC0032013
taaaaatctcccg

SEQ ID NO: 127873 - DNA, 13 bp, Artificial Sequence
  Oligonucleotide for detection of SNP TSC0032013
cgggagtttttta

SEQ ID NO: 127874 - DNA, 13 bp, Artificial Sequence
  Oligonucleotide for detection of SNP TSC0032013
taaaaaactcccg

SEQ ID NO: 127875 - DNA, 13 bp, Artificial Sequence
  Oligonucleotide for detection of SNP TSC0032013
taggggttttttg

SEQ ID NO: 127876 - DNA, 13 bp, Artificial Sequence
  Oligonucleotide for detection of SNP TSC0032013
caaaaaaccccta

SEQ ID NO: 127877 - DNA, 13 bp, Artificial Sequence
  Oligonucleotide for detection of SNP TSC0032013
tagggggtttttg

SEQ ID NO: 127878 - DNA, 13 bp, Artificial Sequence
  Oligonucleotide for detection of SNP TSC0032013
caaaaacccccta

SEQ ID NO: 127879 - DNA, 13 bp, Artificial Sequence
  Oligonucleotide for detection of SNP TSC0032013
taggggtttttcg

SEQ ID NO: 127880 - DNA, 13 bp, Artificial Sequence
  Oligonucleotide for detection of SNP TSC0032013
cgaaaaaccccta

SEQ ID NO: 127881 - DNA, 13 bp, Artificial Sequence
  Oligonucleotide for detection of SNP TSC0032013
tagggggttttcg

SEQ ID NO: 127882 - DNA, 13 bp, Artificial Sequence
  Oligonucleotide for detection of SNP TSC0032013
cgaaaacccccta

SEQ ID NO: 127883 - DNA, 13 bp, Artificial Sequence
  Oligonucleotide for detection of SNP TSC0032014
taagaggagtttt

SEQ ID NO: 127884 - DNA, 13 bp, Artificial Sequence
  Oligonucleotide for detection of SNP TSC0032014
aaaactcctctta

SEQ ID NO: 127885 - DNA, 13 bp, Artificial Sequence
  Oligonucleotide for detection of SNP TSC0032014
taagagaagtttt

SEQ ID NO: 127886 - DNA, 13 bp, Artificial Sequence
  Oligonucleotide for detection of SNP TSC0032014
aaaacttctctta

SEQ ID NO: 127887 - DNA, 13 bp, Artificial Sequence
  Oligonucleotide for detection of SNP TSC0032016
atattggaattag

SEQ ID NO: 127888 - DNA, 13 bp, Artificial Sequence
  Oligonucleotide for detection of SNP TSC0032016
ctaattccaatat

SEQ ID NO: 127889 - DNA, 13 bp, Artificial Sequence
  Oligonucleotide for detection of SNP TSC0032016
atattgtaattag

SEQ ID NO: 127890 - DNA, 13 bp, Artificial Sequence
  Oligonucleotide for detection of SNP TSC0032016
ctaattacaatat

SEQ ID NO: 127891 - DNA, 13 bp, Artificial Sequence
  Oligonucleotide for detection of SNP TSC0032016
ttgattttaatgt

SEQ ID NO: 127892 - DNA, 13 bp, Artificial Sequence
  Oligonucleotide for detection of SNP TSC0032016
acattaaaatcaa

SEQ ID NO: 127893 - DNA, 13 bp, Artificial Sequence
  Oligonucleotide for detection of SNP TSC0032016
ttgattataatgt

SEQ ID NO: 127894 - DNA, 13 bp, Artificial Sequence
  Oligonucleotide for detection of SNP TSC0032016
acattataatcaa

SEQ ID NO: 127895 - DNA, 13 bp, Artificial Sequence
  Oligonucleotide for detection of SNP TSC0032017
tatttttgtaggg

SEQ ID NO: 127896 - DNA, 13 bp, Artificial Sequence
  Oligonucleotide for detection of SNP TSC0032017
ccctacaaaaata

SEQ ID NO: 127897 - DNA, 13 bp, Artificial Sequence
  Oligonucleotide for detection of SNP TSC0032017
tattttggtaggg

SEQ ID NO: 127898 - DNA, 13 bp, Artificial Sequence
  Oligonucleotide for detection of SNP TSC0032017
ccctaccaaaata

SEQ ID NO: 127899 - DNA, 13 bp, Artificial Sequence
  Oligonucleotide for detection of SNP TSC0032017
tattttcgtaggg

SEQ ID NO: 127900 - DNA, 13 bp, Artificial Sequence
  Oligonucleotide for detection of SNP TSC0032017
ccctacgaaaata

SEQ ID NO: 127901 - DNA, 13 bp, Artificial Sequence
  Oligonucleotide for detection of SNP TSC0032017
tatttcggtaggg

SEQ ID NO: 127902 - DNA, 13 bp, Artificial Sequence
  Oligonucleotide for detection of SNP TSC0032017
ccctaccgaaata

SEQ ID NO: 127903 - DNA, 13 bp, Artificial Sequence
  Oligonucleotide for detection of SNP TSC0032017
ttttgtggaagtg

SEQ ID NO: 127904 - DNA, 13 bp, Artificial Sequence
  Oligonucleotide for detection of SNP TSC0032017
cacttccacaaaa

SEQ ID NO: 127905 - DNA, 13 bp, Artificial Sequence
  Oligonucleotide for detection of SNP TSC0032017
ttttgttgaagtg

SEQ ID NO: 127906 - DNA, 13 bp, Artificial Sequence
  Oligonucleotide for detection of SNP TSC0032017
cacttcaacaaaa

SEQ ID NO: 127907 - DNA, 13 bp, Artificial Sequence
  Oligonucleotide for detection of SNP TSC0032017
ttttgcggaagtg

SEQ ID NO: 127908 - DNA, 13 bp, Artificial Sequence
  Oligonucleotide for detection of SNP TSC0032017
cacttccgcaaaa

SEQ ID NO: 127909 - DNA, 13 bp, Artificial Sequence
  Oligonucleotide for detection of SNP TSC0032017
ttttgtcgaagtg

SEQ ID NO: 127910 - DNA, 13 bp, Artificial Sequence
  Oligonucleotide for detection of SNP TSC0032017
cacttcgacaaaa

SEQ ID NO: 127911 - DNA, 13 bp, Artificial Sequence
  Oligonucleotide for detection of SNP TSC0032018
gttttaaatgagg

SEQ ID NO: 127912 - DNA, 13 bp, Artificial Sequence
  Oligonucleotide for detection of SNP TSC0032018
cctcatttaaaac

SEQ ID NO: 127913 - DNA, 13 bp, Artificial Sequence
  Oligonucleotide for detection of SNP TSC0032018
gttttagatgagg

SEQ ID NO: 127914 - DNA, 13 bp, Artificial Sequence
  Oligonucleotide for detection of SNP TSC0032018
cctcatctaaaac

SEQ ID NO: 127915 - DNA, 13 bp, Artificial Sequence
  Oligonucleotide for detection of SNP TSC0032020
gtttttgtttaty

SEQ ID NO: 127916 - DNA, 13 bp, Artificial Sequence
  Oligonucleotide for detection of SNP TSC0032020
rataaacaaaaac

SEQ ID NO: 127917 - DNA, 13 bp, Artificial Sequence
  Oligonucleotide for detection of SNP TSC0032020
gtttttttttaty

SEQ ID NO: 127918 - DNA, 13 bp, Artificial Sequence
  Oligonucleotide for detection of SNP TSC0032020
rataaaaaaaaac

SEQ ID NO: 127919 - DNA, 13 bp, Artificial Sequence
  Oligonucleotide for detection of SNP TSC0032020
gttttcgtttaty

SEQ ID NO: 127920 - DNA, 13 bp, Artificial Sequence
  Oligonucleotide for detection of SNP TSC0032020
rataaacgaaaac

SEQ ID NO: 127921 - DNA, 13 bp, Artificial Sequence
  Oligonucleotide for detection of SNP TSC0032020
ggtgggtggaggy

SEQ ID NO: 127922 - DNA, 13 bp, Artificial Sequence
  Oligonucleotide for detection of SNP TSC0032020
rcctccacccacc

SEQ ID NO: 127923 - DNA, 13 bp, Artificial Sequence
  Oligonucleotide for detection of SNP TSC0032020
ggtgggaggaggy

SEQ ID NO: 127924 - DNA, 13 bp, Artificial Sequence
  Oligonucleotide for detection of SNP TSC0032020
rcctcctcccacc

SEQ ID NO: 127925 - DNA, 13 bp, Artificial Sequence
  Oligonucleotide for detection of SNP TSC0032020
ggtgggcggaggy

SEQ ID NO: 127926 - DNA, 13 bp, Artificial Sequence
  Oligonucleotide for detection of SNP TSC0032020
rcctccgcccacc

SEQ ID NO: 127927 - DNA, 13 bp, Artificial Sequence
  Oligonucleotide for detection of SNP TSC0032022
aaatgtatattag

SEQ ID NO: 127928 - DNA, 13 bp, Artificial Sequence
  Oligonucleotide for detection of SNP TSC0032022
ctaatatacattt

SEQ ID NO: 127929 - DNA, 13 bp, Artificial Sequence
  Oligonucleotide for detection of SNP TSC0032022
aaatgtgtattag

SEQ ID NO: 127930 - DNA, 13 bp, Artificial Sequence
  Oligonucleotide for detection of SNP TSC0032022
ctaatacacattt

SEQ ID NO: 127931 - DNA, 13 bp, Artificial Sequence
  Oligonucleotide for detection of SNP TSC0032022
aaatgcgtattag

SEQ ID NO: 127932 - DNA, 13 bp, Artificial Sequence
  Oligonucleotide for detection of SNP TSC0032022
ctaatacgcattt

SEQ ID NO: 127933 - DNA, 13 bp, Artificial Sequence
  Oligonucleotide for detection of SNP TSC0032022
ttaatatgtattt

SEQ ID NO: 127934 - DNA, 13 bp, Artificial Sequence
  Oligonucleotide for detection of SNP TSC0032022
aaatacatattaa

SEQ ID NO: 127935 - DNA, 13 bp, Artificial Sequence
  Oligonucleotide for detection of SNP TSC0032022
ttaatacgtattt

SEQ ID NO: 127936 - DNA, 13 bp, Artificial Sequence
  Oligonucleotide for detection of SNP TSC0032022
aaatacgtattaa

SEQ ID NO: 127937 - DNA, 13 bp, Artificial Sequence
  Oligonucleotide for detection of SNP TSC0032024
atttaggtagtay

SEQ ID NO: 127938 - DNA, 13 bp, Artificial Sequence
  Oligonucleotide for detection of SNP TSC0032024
rtactacctaaat

SEQ ID NO: 127939 - DNA, 13 bp, Artificial Sequence
  Oligonucleotide for detection of SNP TSC0032024
atttagatagtay

SEQ ID NO: 127940 - DNA, 13 bp, Artificial Sequence
  Oligonucleotide for detection of SNP TSC0032024
rtactatctaaat

SEQ ID NO: 127941 - DNA, 13 bp, Artificial Sequence
  Oligonucleotide for detection of SNP TSC0032025
ggaatgatagata

SEQ ID NO: 127942 - DNA, 13 bp, Artificial Sequence
  Oligonucleotide for detection of SNP TSC0032025
tatctatcattcc

SEQ ID NO: 127943 - DNA, 13 bp, Artificial Sequence
  Oligonucleotide for detection of SNP TSC0032025
ggaatggtagata

SEQ ID NO: 127944 - DNA, 13 bp, Artificial Sequence
  Oligonucleotide for detection of SNP TSC0032025
tatctaccattcc

SEQ ID NO: 127945 - DNA, 13 bp, Artificial Sequence
  Oligonucleotide for detection of SNP TSC0032026
aagaataggaggg

SEQ ID NO: 127946 - DNA, 13 bp, Artificial Sequence
  Oligonucleotide for detection of SNP TSC0032026
ccctcctattctt

SEQ ID NO: 127947 - DNA, 13 bp, Artificial Sequence
  Oligonucleotide for detection of SNP TSC0032026
aagaatgggaggg

SEQ ID NO: 127948 - DNA, 13 bp, Artificial Sequence
  Oligonucleotide for detection of SNP TSC0032026
ccctcccattctt

SEQ ID NO: 127949 - DNA, 13 bp, Artificial Sequence
  Oligonucleotide for detection of SNP TSC0032026
aagaacgggaggg

SEQ ID NO: 127950 - DNA, 13 bp, Artificial Sequence
  Oligonucleotide for detection of SNP TSC0032026
ccctcccgttctt

SEQ ID NO: 127951 - DNA, 13 bp, Artificial Sequence
  Oligonucleotide for detection of SNP TSC0032030
gtttttcgttttg

SEQ ID NO: 127952 - DNA, 13 bp, Artificial Sequence
  Oligonucleotide for detection of SNP TSC0032030
caaaacgaaaaac

SEQ ID NO: 127953 - DNA, 13 bp, Artificial Sequence
  Oligonucleotide for detection of SNP TSC0032030
taagatggaaaay

SEQ ID NO: 127954 - DNA, 13 bp, Artificial Sequence
  Oligonucleotide for detection of SNP TSC0032030
rttttccatctta

SEQ ID NO: 127955 - DNA, 13 bp, Artificial Sequence
  Oligonucleotide for detection of SNP TSC0032030
taagatagaaaay

SEQ ID NO: 127956 - DNA, 13 bp, Artificial Sequence
  Oligonucleotide for detection of SNP TSC0032030
rttttctatctta

SEQ ID NO: 127957 - DNA, 13 bp, Artificial Sequence
  Oligonucleotide for detection of SNP TSC0032030
taagacggaaaay

SEQ ID NO: 127958 - DNA, 13 bp, Artificial Sequence
  Oligonucleotide for detection of SNP TSC0032030
rttttccgtctta

SEQ ID NO: 127959 - DNA, 13 bp, Artificial Sequence
  Oligonucleotide for detection of SNP TSC0032032
ggtggatgtgttt

SEQ ID NO: 127960 - DNA, 13 bp, Artificial Sequence
  Oligonucleotide for detection of SNP TSC0032032
aaacacatccacc

SEQ ID NO: 127961 - DNA, 13 bp, Artificial Sequence
  Oligonucleotide for detection of SNP TSC0032032
ggtggacgtgttt

SEQ ID NO: 127962 - DNA, 13 bp, Artificial Sequence
  Oligonucleotide for detection of SNP TSC0032032
aaacacgtccacc

SEQ ID NO: 127963 - DNA, 13 bp, Artificial Sequence
  Oligonucleotide for detection of SNP TSC0032032
agatatgtttaty

SEQ ID NO: 127964 - DNA, 13 bp, Artificial Sequence
  Oligonucleotide for detection of SNP TSC0032032
rataaacatatct

SEQ ID NO: 127965 - DNA, 13 bp, Artificial Sequence
  Oligonucleotide for detection of SNP TSC0032032
agatatatttaty

SEQ ID NO: 127966 - DNA, 13 bp, Artificial Sequence
  Oligonucleotide for detection of SNP TSC0032032
rataaatatatct

SEQ ID NO: 127967 - DNA, 13 bp, Artificial Sequence
  Oligonucleotide for detection of SNP TSC0032032
agatacgtttaty

SEQ ID NO: 127968 - DNA, 13 bp, Artificial Sequence
  Oligonucleotide for detection of SNP TSC0032032
rataaacgtatct

SEQ ID NO: 127969 - DNA, 13 bp, Artificial Sequence
  Oligonucleotide for detection of SNP TSC0032035
atgtgttgtgtay

SEQ ID NO: 127970 - DNA, 13 bp, Artificial Sequence
  Oligonucleotide for detection of SNP TSC0032035
rtacacaacacat

SEQ ID NO: 127971 - DNA, 13 bp, Artificial Sequence
  Oligonucleotide for detection of SNP TSC0032035
atgtgtcgtgtay

SEQ ID NO: 127972 - DNA, 13 bp, Artificial Sequence
  Oligonucleotide for detection of SNP TSC0032035
rtacacgacacat

SEQ ID NO: 127973 - DNA, 13 bp, Artificial Sequence
  Oligonucleotide for detection of SNP TSC0032035
gtgtatgatatat

SEQ ID NO: 127974 - DNA, 13 bp, Artificial Sequence
  Oligonucleotide for detection of SNP TSC0032035
atatatcatacac

SEQ ID NO: 127975 - DNA, 13 bp, Artificial Sequence
  Oligonucleotide for detection of SNP TSC0032035
gtgtataatatat

SEQ ID NO: 127976 - DNA, 13 bp, Artificial Sequence
  Oligonucleotide for detection of SNP TSC0032035
atatattatacac

SEQ ID NO: 127977 - DNA, 13 bp, Artificial Sequence
  Oligonucleotide for detection of SNP TSC0032035
gtgtacgatatat

SEQ ID NO: 127978 - DNA, 13 bp, Artificial Sequence
  Oligonucleotide for detection of SNP TSC0032035
atatatcgtacac

SEQ ID NO: 127979 - DNA, 13 bp, Artificial Sequence
  Oligonucleotide for detection of SNP TSC0032036
gagaatatatagy

SEQ ID NO: 127980 - DNA, 13 bp, Artificial Sequence
  Oligonucleotide for detection of SNP TSC0032036
rctatatattctc

SEQ ID NO: 127981 - DNA, 13 bp, Artificial Sequence
  Oligonucleotide for detection of SNP TSC0032036
gagaatgtatagy

SEQ ID NO: 127982 - DNA, 13 bp, Artificial Sequence
  Oligonucleotide for detection of SNP TSC0032036
rctatacattctc

SEQ ID NO: 127983 - DNA, 13 bp, Artificial Sequence
  Oligonucleotide for detection of SNP TSC0032036
gagaacgtatagy

SEQ ID NO: 127984 - DNA, 13 bp, Artificial Sequence
  Oligonucleotide for detection of SNP TSC0032036
rctatacgttctc

SEQ ID NO: 127985 - DNA, 13 bp, Artificial Sequence
  Oligonucleotide for detection of SNP TSC0032036
gttgtatgtttty

SEQ ID NO: 127986 - DNA, 13 bp, Artificial Sequence
  Oligonucleotide for detection of SNP TSC0032036
raaaacatacaac

SEQ ID NO: 127987 - DNA, 13 bp, Artificial Sequence
  Oligonucleotide for detection of SNP TSC0032036
gttgtacgtttty

SEQ ID NO: 127988 - DNA, 13 bp, Artificial Sequence
  Oligonucleotide for detection of SNP TSC0032036
raaaacgtacaac

SEQ ID NO: 127989 - DNA, 13 bp, Artificial Sequence
  Oligonucleotide for detection of SNP TSC0032037
tgaagtaggaaga

SEQ ID NO: 127990 - DNA, 13 bp, Artificial Sequence
  Oligonucleotide for detection of SNP TSC0032037
tcttcctacttca

SEQ ID NO: 127991 - DNA, 13 bp, Artificial Sequence
  Oligonucleotide for detection of SNP TSC0032037
tgaagtgggaaga

SEQ ID NO: 127992 - DNA, 13 bp, Artificial Sequence
  Oligonucleotide for detection of SNP TSC0032037
tcttcccacttca

SEQ ID NO: 127993 - DNA, 13 bp, Artificial Sequence
  Oligonucleotide for detection of SNP TSC0032037
tgaagcgggaaga

SEQ ID NO: 127994 - DNA, 13 bp, Artificial Sequence
  Oligonucleotide for detection of SNP TSC0032037
tcttcccgcttca

SEQ ID NO: 127995 - DNA, 13 bp, Artificial Sequence
  Oligonucleotide for detection of SNP TSC0032044
ttaatatgtaaaa

SEQ ID NO: 127996 - DNA, 13 bp, Artificial Sequence
  Oligonucleotide for detection of SNP TSC0032044
ttttacatattaa

SEQ ID NO: 127997 - DNA, 13 bp, Artificial Sequence
  Oligonucleotide for detection of SNP TSC0032044
ttaatacgtaaaa

SEQ ID NO: 127998 - DNA, 13 bp, Artificial Sequence
  Oligonucleotide for detection of SNP TSC0032044
ttttacgtattaa

SEQ ID NO: 127999 - DNA, 13 bp, Artificial Sequence
  Oligonucleotide for detection of SNP TSC0032044
ttttatgtattag

SEQ ID NO: 128000 - DNA, 13 bp, Artificial Sequence
  Oligonucleotide for detection of SNP TSC0032044
ctaatacataaaa

SEQ ID NO: 128001 - DNA, 13 bp, Artificial Sequence
  Oligonucleotide for detection of SNP TSC0032044
ttttatatattag

SEQ ID NO: 128002 - DNA, 13 bp, Artificial Sequence
  Oligonucleotide for detection of SNP TSC0032044
ctaatatataaaa

SEQ ID NO: 128003 - DNA, 13 bp, Artificial Sequence
  Oligonucleotide for detection of SNP TSC0032044
ttttacgtattag

SEQ ID NO: 128004 - DNA, 13 bp, Artificial Sequence
  Oligonucleotide for detection of SNP TSC0032044
ctaatacgtaaaa

SEQ ID NO: 128005 - DNA, 13 bp, Artificial Sequence
  Oligonucleotide for detection of SNP TSC0032052
atatatagtggta

SEQ ID NO: 128006 - DNA, 13 bp, Artificial Sequence
  Oligonucleotide for detection of SNP TSC0032052
taccactatatat

SEQ ID NO: 128007 - DNA, 13 bp, Artificial Sequence
  Oligonucleotide for detection of SNP TSC0032052
atatatggtggta

SEQ ID NO: 128008 - DNA, 13 bp, Artificial Sequence
  Oligonucleotide for detection of SNP TSC0032052
taccaccatatat

SEQ ID NO: 128009 - DNA, 13 bp, Artificial Sequence
  Oligonucleotide for detection of SNP TSC0032052
atatacggtggta

SEQ ID NO: 128010 - DNA, 13 bp, Artificial Sequence
  Oligonucleotide for detection of SNP TSC0032052
taccaccgtatat

SEQ ID NO: 128011 - DNA, 13 bp, Artificial Sequence
  Oligonucleotide for detection of SNP TSC0032052
tgttattgtgtgt

SEQ ID NO: 128012 - DNA, 13 bp, Artificial Sequence
  Oligonucleotide for detection of SNP TSC0032052
acacacaataaca

SEQ ID NO: 128013 - DNA, 13 bp, Artificial Sequence
  Oligonucleotide for detection of SNP TSC0032052
tgttatcgtgtgt

SEQ ID NO: 128014 - DNA, 13 bp, Artificial Sequence
  Oligonucleotide for detection of SNP TSC0032052
acacacgataaca

SEQ ID NO: 128015 - DNA, 13 bp, Artificial Sequence
  Oligonucleotide for detection of SNP TSC0032053
gttttgggtagtt

SEQ ID NO: 128016 - DNA, 13 bp, Artificial Sequence
  Oligonucleotide for detection of SNP TSC0032053
aactacccaaaac

SEQ ID NO: 128017 - DNA, 13 bp, Artificial Sequence
  Oligonucleotide for detection of SNP TSC0032053
gttttgagtagtt

SEQ ID NO: 128018 - DNA, 13 bp, Artificial Sequence
  Oligonucleotide for detection of SNP TSC0032053
aactactcaaaac

SEQ ID NO: 128019 - DNA, 13 bp, Artificial Sequence
  Oligonucleotide for detection of SNP TSC0032054
tttatgaattata

SEQ ID NO: 128020 - DNA, 13 bp, Artificial Sequence
  Oligonucleotide for detection of SNP TSC0032054
tataattcataaa

SEQ ID NO: 128021 - DNA, 13 bp, Artificial Sequence
  Oligonucleotide for detection of SNP TSC0032054
tttatggattata

SEQ ID NO: 128022 - DNA, 13 bp, Artificial Sequence
  Oligonucleotide for detection of SNP TSC0032054
tataatccataaa

SEQ ID NO: 128023 - DNA, 13 bp, Artificial Sequence
  Oligonucleotide for detection of SNP TSC0032055
tattataggggaa

SEQ ID NO: 128024 - DNA, 13 bp, Artificial Sequence
  Oligonucleotide for detection of SNP TSC0032055
ttcccctataata

SEQ ID NO: 128025 - DNA, 13 bp, Artificial Sequence
  Oligonucleotide for detection of SNP TSC0032055
tattatgggggaa

SEQ ID NO: 128026 - DNA, 13 bp, Artificial Sequence
  Oligonucleotide for detection of SNP TSC0032055
ttcccccataata

SEQ ID NO: 128027 - DNA, 13 bp, Artificial Sequence
  Oligonucleotide for detection of SNP TSC0032055
tattacgggggaa

SEQ ID NO: 128028 - DNA, 13 bp, Artificial Sequence
  Oligonucleotide for detection of SNP TSC0032055
ttcccccgtaata

SEQ ID NO: 128029 - DNA, 13 bp, Artificial Sequence
  Oligonucleotide for detection of SNP TSC0032055
tttttttgtaata

SEQ ID NO: 128030 - DNA, 13 bp, Artificial Sequence
  Oligonucleotide for detection of SNP TSC0032055
tattacaaaaaaa

SEQ ID NO: 128031 - DNA, 13 bp, Artificial Sequence
  Oligonucleotide for detection of SNP TSC0032055
ttttttcgtaata

SEQ ID NO: 128032 - DNA, 13 bp, Artificial Sequence
  Oligonucleotide for detection of SNP TSC0032055
tattacgaaaaaa

SEQ ID NO: 128033 - DNA, 13 bp, Artificial Sequence
  Oligonucleotide for detection of SNP TSC0032056
aaaatagtggtta

SEQ ID NO: 128034 - DNA, 13 bp, Artificial Sequence
  Oligonucleotide for detection of SNP TSC0032056
taaccactatttt

SEQ ID NO: 128035 - DNA, 13 bp, Artificial Sequence
  Oligonucleotide for detection of SNP TSC0032056
aaaataatggtta

SEQ ID NO: 128036 - DNA, 13 bp, Artificial Sequence
  Oligonucleotide for detection of SNP TSC0032056
taaccattatttt

SEQ ID NO: 128037 - DNA, 13 bp, Artificial Sequence
  Oligonucleotide for detection of SNP TSC0032057
aataaagtaattt

SEQ ID NO: 128038 - DNA, 13 bp, Artificial Sequence
  Oligonucleotide for detection of SNP TSC0032057
aaattactttatt

SEQ ID NO: 128039 - DNA, 13 bp, Artificial Sequence
  Oligonucleotide for detection of SNP TSC0032057
aataaaataattt

SEQ ID NO: 128040 - DNA, 13 bp, Artificial Sequence
  Oligonucleotide for detection of SNP TSC0032057
aaattattttatt

SEQ ID NO: 128041 - DNA, 13 bp, Artificial Sequence
  Oligonucleotide for detection of SNP TSC0032058
tttttgaatttaa

SEQ ID NO: 128042 - DNA, 13 bp, Artificial Sequence
  Oligonucleotide for detection of SNP TSC0032058
ttaaattcaaaaa

SEQ ID NO: 128043 - DNA, 13 bp, Artificial Sequence
  Oligonucleotide for detection of SNP TSC0032058
tttttggatttaa

SEQ ID NO: 128044 - DNA, 13 bp, Artificial Sequence
  Oligonucleotide for detection of SNP TSC0032058
ttaaatccaaaaa

SEQ ID NO: 128045 - DNA, 13 bp, Artificial Sequence
  Oligonucleotide for detection of SNP TSC0032058
ttttcgaatttaa

SEQ ID NO: 128046 - DNA, 13 bp, Artificial Sequence
  Oligonucleotide for detection of SNP TSC0032058
ttaaattcgaaaa

SEQ ID NO: 128047 - DNA, 13 bp, Artificial Sequence
  Oligonucleotide for detection of SNP TSC0032058
ttttcggatttaa

SEQ ID NO: 128048 - DNA, 13 bp, Artificial Sequence
  Oligonucleotide for detection of SNP TSC0032058
ttaaatccgaaaa

SEQ ID NO: 128049 - DNA, 13 bp, Artificial Sequence
  Oligonucleotide for detection of SNP TSC0032059
tttgagtgagagg

SEQ ID NO: 128050 - DNA, 13 bp, Artificial Sequence
  Oligonucleotide for detection of SNP TSC0032059
cctctcactcaaa

SEQ ID NO: 128051 - DNA, 13 bp, Artificial Sequence
  Oligonucleotide for detection of SNP TSC0032059
tttgagagagagg

SEQ ID NO: 128052 - DNA, 13 bp, Artificial Sequence
  Oligonucleotide for detection of SNP TSC0032059
cctctctctcaaa

SEQ ID NO: 128053 - DNA, 13 bp, Artificial Sequence
  Oligonucleotide for detection of SNP TSC0032061
agtttttgaggta

SEQ ID NO: 128054 - DNA, 13 bp, Artificial Sequence
  Oligonucleotide for detection of SNP TSC0032061
tacctcaaaaact

SEQ ID NO: 128055 - DNA, 13 bp, Artificial Sequence
  Oligonucleotide for detection of SNP TSC0032061
agttttggaggta

SEQ ID NO: 128056 - DNA, 13 bp, Artificial Sequence
  Oligonucleotide for detection of SNP TSC0032061
tacctccaaaact

SEQ ID NO: 128057 - DNA, 13 bp, Artificial Sequence
  Oligonucleotide for detection of SNP TSC0032061
agttttcgaggta

SEQ ID NO: 128058 - DNA, 13 bp, Artificial Sequence
  Oligonucleotide for detection of SNP TSC0032061
tacctcgaaaact

SEQ ID NO: 128059 - DNA, 13 bp, Artificial Sequence
  Oligonucleotide for detection of SNP TSC0032061
agtttcggaggta

SEQ ID NO: 128060 - DNA, 13 bp, Artificial Sequence
  Oligonucleotide for detection of SNP TSC0032061
tacctccgaaact

SEQ ID NO: 128061 - DNA, 13 bp, Artificial Sequence
  Oligonucleotide for detection of SNP TSC0032061
tgttttggaagtt

SEQ ID NO: 128062 - DNA, 13 bp, Artificial Sequence
  Oligonucleotide for detection of SNP TSC0032061
aacttccaaaaca

SEQ ID NO: 128063 - DNA, 13 bp, Artificial Sequence
  Oligonucleotide for detection of SNP TSC0032061
tgtttttgaagtt

SEQ ID NO: 128064 - DNA, 13 bp, Artificial Sequence
  Oligonucleotide for detection of SNP TSC0032061
aacttcaaaaaca

SEQ ID NO: 128065 - DNA, 13 bp, Artificial Sequence
  Oligonucleotide for detection of SNP TSC0032061
tgtttcggaagtt

SEQ ID NO: 128066 - DNA, 13 bp, Artificial Sequence
  Oligonucleotide for detection of SNP TSC0032061
aacttccgaaaca

SEQ ID NO: 128067 - DNA, 13 bp, Artificial Sequence
  Oligonucleotide for detection of SNP TSC0032061
tgttttcgaagtt

SEQ ID NO: 128068 - DNA, 13 bp, Artificial Sequence
  Oligonucleotide for detection of SNP TSC0032061
aacttcgaaaaca

SEQ ID NO: 128069 - DNA, 13 bp, Artificial Sequence
  Oligonucleotide for detection of SNP TSC0032062
tttaaggttgatt

SEQ ID NO: 128070 - DNA, 13 bp, Artificial Sequence
  Oligonucleotide for detection of SNP TSC0032062
aatcaaccttaaa

SEQ ID NO: 128071 - DNA, 13 bp, Artificial Sequence
  Oligonucleotide for detection of SNP TSC0032062
tttaagtttgatt

SEQ ID NO: 128072 - DNA, 13 bp, Artificial Sequence
  Oligonucleotide for detection of SNP TSC0032062
aatcaaacttaaa

SEQ ID NO: 128073 - DNA, 13 bp, Artificial Sequence
  Oligonucleotide for detection of SNP TSC0032062
agttagttttaga

SEQ ID NO: 128074 - DNA, 13 bp, Artificial Sequence
  Oligonucleotide for detection of SNP TSC0032062
tctaaaactaact

SEQ ID NO: 128075 - DNA, 13 bp, Artificial Sequence
  Oligonucleotide for detection of SNP TSC0032062
agttagatttaga

SEQ ID NO: 128076 - DNA, 13 bp, Artificial Sequence
  Oligonucleotide for detection of SNP TSC0032062
tctaaatctaact

SEQ ID NO: 128077 - DNA, 13 bp, Artificial Sequence
  Oligonucleotide for detection of SNP TSC0032063
ttttttgaggtga

SEQ ID NO: 128078 - DNA, 13 bp, Artificial Sequence
  Oligonucleotide for detection of SNP TSC0032063
tcacctcaaaaaa

SEQ ID NO: 128079 - DNA, 13 bp, Artificial Sequence
  Oligonucleotide for detection of SNP TSC0032063
ttttttaaggtga

SEQ ID NO: 128080 - DNA, 13 bp, Artificial Sequence
  Oligonucleotide for detection of SNP TSC0032063
tcaccttaaaaaa

SEQ ID NO: 128081 - DNA, 13 bp, Artificial Sequence
  Oligonucleotide for detection of SNP TSC0032063
tttttcgaggtga

SEQ ID NO: 128082 - DNA, 13 bp, Artificial Sequence
  Oligonucleotide for detection of SNP TSC0032063
tcacctcgaaaaa

SEQ ID NO: 128083 - DNA, 13 bp, Artificial Sequence
  Oligonucleotide for detection of SNP TSC0032067
aagggggtgatay

SEQ ID NO: 128084 - DNA, 13 bp, Artificial Sequence
  Oligonucleotide for detection of SNP TSC0032067
rtatcaccccctt

SEQ ID NO: 128085 - DNA, 13 bp, Artificial Sequence
  Oligonucleotide for detection of SNP TSC0032067
aaggggatgatay

SEQ ID NO: 128086 - DNA, 13 bp, Artificial Sequence
  Oligonucleotide for detection of SNP TSC0032067
rtatcatcccctt

SEQ ID NO: 128087 - DNA, 13 bp, Artificial Sequence
  Oligonucleotide for detection of SNP TSC0032070
ttaaaagttttga

SEQ ID NO: 128088 - DNA, 13 bp, Artificial Sequence
  Oligonucleotide for detection of SNP TSC0032070
tcaaaacttttaa

SEQ ID NO: 128089 - DNA, 13 bp, Artificial Sequence
  Oligonucleotide for detection of SNP TSC0032070
ttaaaaattttga

SEQ ID NO: 128090 - DNA, 13 bp, Artificial Sequence
  Oligonucleotide for detection of SNP TSC0032070
tcaaaatttttaa

SEQ ID NO: 128091 - DNA, 13 bp, Artificial Sequence
  Oligonucleotide for detection of SNP TSC0032071
attttgaattatg

SEQ ID NO: 128092 - DNA, 13 bp, Artificial Sequence
  Oligonucleotide for detection of SNP TSC0032071
cataattcaaaat

SEQ ID NO: 128093 - DNA, 13 bp, Artificial Sequence
  Oligonucleotide for detection of SNP TSC0032071
attttggattatg

SEQ ID NO: 128094 - DNA, 13 bp, Artificial Sequence
  Oligonucleotide for detection of SNP TSC0032071
cataatccaaaat

SEQ ID NO: 128095 - DNA, 13 bp, Artificial Sequence
  Oligonucleotide for detection of SNP TSC0032072
gattgagttggtt

SEQ ID NO: 128096 - DNA, 13 bp, Artificial Sequence
  Oligonucleotide for detection of SNP TSC0032072
aaccaactcaatc

SEQ ID NO: 128097 - DNA, 13 bp, Artificial Sequence
  Oligonucleotide for detection of SNP TSC0032072
gattgaattggtt

SEQ ID NO: 128098 - DNA, 13 bp, Artificial Sequence
  Oligonucleotide for detection of SNP TSC0032072
aaccaattcaatc

SEQ ID NO: 128099 - DNA, 13 bp, Artificial Sequence
  Oligonucleotide for detection of SNP TSC0032073
ggtgtgatgattt

SEQ ID NO: 128100 - DNA, 13 bp, Artificial Sequence
  Oligonucleotide for detection of SNP TSC0032073
aaatcatcacacc

SEQ ID NO: 128101 - DNA, 13 bp, Artificial Sequence
  Oligonucleotide for detection of SNP TSC0032073
ggtgtggtgattt

SEQ ID NO: 128102 - DNA, 13 bp, Artificial Sequence
  Oligonucleotide for detection of SNP TSC0032073
aaatcaccacacc

SEQ ID NO: 128103 - DNA, 13 bp, Artificial Sequence
  Oligonucleotide for detection of SNP TSC0032073
ggcgtgatgattt

SEQ ID NO: 128104 - DNA, 13 bp, Artificial Sequence
  Oligonucleotide for detection of SNP TSC0032073
aaatcatcacgcc

SEQ ID NO: 128105 - DNA, 13 bp, Artificial Sequence
  Oligonucleotide for detection of SNP TSC0032073
ggcgtggtgattt

SEQ ID NO: 128106 - DNA, 13 bp, Artificial Sequence
  Oligonucleotide for detection of SNP TSC0032073
aaatcaccacgcc

SEQ ID NO: 128107 - DNA, 13 bp, Artificial Sequence
  Oligonucleotide for detection of SNP TSC0032073
ggtgcgatgattt

SEQ ID NO: 128108 - DNA, 13 bp, Artificial Sequence
  Oligonucleotide for detection of SNP TSC0032073
aaatcatcgcacc

SEQ ID NO: 128109 - DNA, 13 bp, Artificial Sequence
  Oligonucleotide for detection of SNP TSC0032073
ggtgcggtgattt

SEQ ID NO: 128110 - DNA, 13 bp, Artificial Sequence
  Oligonucleotide for detection of SNP TSC0032073
aaatcaccgcacc

SEQ ID NO: 128111 - DNA, 13 bp, Artificial Sequence
  Oligonucleotide for detection of SNP TSC0032073
ggtgtgacgattt

SEQ ID NO: 128112 - DNA, 13 bp, Artificial Sequence
  Oligonucleotide for detection of SNP TSC0032073
aaatcgtcacacc

SEQ ID NO: 128113 - DNA, 13 bp, Artificial Sequence
  Oligonucleotide for detection of SNP TSC0032073
ggtgtggcgattt

SEQ ID NO: 128114 - DNA, 13 bp, Artificial Sequence
  Oligonucleotide for detection of SNP TSC0032073
aaatcgccacacc

SEQ ID NO: 128115 - DNA, 13 bp, Artificial Sequence
  Oligonucleotide for detection of SNP TSC0032073
ggcgcgatgattt

SEQ ID NO: 128116 - DNA, 13 bp, Artificial Sequence
  Oligonucleotide for detection of SNP TSC0032073
aaatcatcgcgcc

SEQ ID NO: 128117 - DNA, 13 bp, Artificial Sequence
  Oligonucleotide for detection of SNP TSC0032073
ggcgcggtgattt

SEQ ID NO: 128118 - DNA, 13 bp, Artificial Sequence
  Oligonucleotide for detection of SNP TSC0032073
aaatcaccgcgcc

SEQ ID NO: 128119 - DNA, 13 bp, Artificial Sequence
  Oligonucleotide for detection of SNP TSC0032073
ggcgtgacgattt

SEQ ID NO: 128120 - DNA, 13 bp, Artificial Sequence
  Oligonucleotide for detection of SNP TSC0032073
aaatcgtcacgcc

SEQ ID NO: 128121 - DNA, 13 bp, Artificial Sequence
  Oligonucleotide for detection of SNP TSC0032073
ggcgtggcgattt

SEQ ID NO: 128122 - DNA, 13 bp, Artificial Sequence
  Oligonucleotide for detection of SNP TSC0032073
aaatcgccacgcc

SEQ ID NO: 128123 - DNA, 13 bp, Artificial Sequence
  Oligonucleotide for detection of SNP TSC0032073
ggtgcgacgattt

SEQ ID NO: 128124 - DNA, 13 bp, Artificial Sequence
  Oligonucleotide for detection of SNP TSC0032073
aaatcgtcgcacc

SEQ ID NO: 128125 - DNA, 13 bp, Artificial Sequence
  Oligonucleotide for detection of SNP TSC0032073
ggtgcggcgattt

SEQ ID NO: 128126 - DNA, 13 bp, Artificial Sequence
  Oligonucleotide for detection of SNP TSC0032073
aaatcgccgcacc

SEQ ID NO: 128127 - DNA, 13 bp, Artificial Sequence
  Oligonucleotide for detection of SNP TSC0032073
ggcgcgacgattt

SEQ ID NO: 128128 - DNA, 13 bp, Artificial Sequence
  Oligonucleotide for detection of SNP TSC0032073
aaatcgtcgcgcc

SEQ ID NO: 128129 - DNA, 13 bp, Artificial Sequence
  Oligonucleotide for detection of SNP TSC0032073
ggcgcggcgattt

SEQ ID NO: 128130 - DNA, 13 bp, Artificial Sequence
  Oligonucleotide for detection of SNP TSC0032073
aaatcgccgcgcc

SEQ ID NO: 128131 - DNA, 13 bp, Artificial Sequence
  Oligonucleotide for detection of SNP TSC0032076
aaaaaaggggggt

SEQ ID NO: 128132 - DNA, 13 bp, Artificial Sequence
  Oligonucleotide for detection of SNP TSC0032076
acccccctttttt

SEQ ID NO: 128133 - DNA, 13 bp, Artificial Sequence
  Oligonucleotide for detection of SNP TSC0032076
aaaaaaagggggt

SEQ ID NO: 128134 - DNA, 13 bp, Artificial Sequence
  Oligonucleotide for detection of SNP TSC0032076
acccccttttttt

SEQ ID NO: 128135 - DNA, 13 bp, Artificial Sequence
  Oligonucleotide for detection of SNP TSC0032085
ttagggggttgta

SEQ ID NO: 128136 - DNA, 13 bp, Artificial Sequence
  Oligonucleotide for detection of SNP TSC0032085
tacaaccccctaa

SEQ ID NO: 128137 - DNA, 13 bp, Artificial Sequence
  Oligonucleotide for detection of SNP TSC0032085
ttagggagttgta

SEQ ID NO: 128138 - DNA, 13 bp, Artificial Sequence
  Oligonucleotide for detection of SNP TSC0032085
tacaactccctaa

SEQ ID NO: 128139 - DNA, 13 bp, Artificial Sequence
  Oligonucleotide for detection of SNP TSC0032086
taaagagtttggg

SEQ ID NO: 128140 - DNA, 13 bp, Artificial Sequence
  Oligonucleotide for detection of SNP TSC0032086
cccaaactcttta

SEQ ID NO: 128141 - DNA, 13 bp, Artificial Sequence
  Oligonucleotide for detection of SNP TSC0032086
taaagaatttggg

SEQ ID NO: 128142 - DNA, 13 bp, Artificial Sequence
  Oligonucleotide for detection of SNP TSC0032086
cccaaattcttta

SEQ ID NO: 128143 - DNA, 13 bp, Artificial Sequence
  Oligonucleotide for detection of SNP TSC0032087
agtagggttttag

SEQ ID NO: 128144 - DNA, 13 bp, Artificial Sequence
  Oligonucleotide for detection of SNP TSC0032087
ctaaaaccctact

SEQ ID NO: 128145 - DNA, 13 bp, Artificial Sequence
  Oligonucleotide for detection of SNP TSC0032087
agtaggtttttag

SEQ ID NO: 128146 - DNA, 13 bp, Artificial Sequence
  Oligonucleotide for detection of SNP TSC0032087
ctaaaaacctact

SEQ ID NO: 128147 - DNA, 13 bp, Artificial Sequence
  Oligonucleotide for detection of SNP TSC0032087
ttggggttttatt

SEQ ID NO: 128148 - DNA, 13 bp, Artificial Sequence
  Oligonucleotide for detection of SNP TSC0032087
aataaaaccccaa

SEQ ID NO: 128149 - DNA, 13 bp, Artificial Sequence
  Oligonucleotide for detection of SNP TSC0032087
ttggggatttatt

SEQ ID NO: 128150 - DNA, 13 bp, Artificial Sequence
  Oligonucleotide for detection of SNP TSC0032087
aataaatccccaa

SEQ ID NO: 128151 - DNA, 13 bp, Artificial Sequence
  Oligonucleotide for detection of SNP TSC0032093
gggagatatttat

SEQ ID NO: 128152 - DNA, 13 bp, Artificial Sequence
  Oligonucleotide for detection of SNP TSC0032093
ataaatatctccc

SEQ ID NO: 128153 - DNA, 13 bp, Artificial Sequence
  Oligonucleotide for detection of SNP TSC0032093
gggagagatttat

SEQ ID NO: 128154 - DNA, 13 bp, Artificial Sequence
  Oligonucleotide for detection of SNP TSC0032093
ataaatctctccc

SEQ ID NO: 128155 - DNA, 13 bp, Artificial Sequence
  Oligonucleotide for detection of SNP TSC0032093
atgaattttttty

SEQ ID NO: 128156 - DNA, 13 bp, Artificial Sequence
  Oligonucleotide for detection of SNP TSC0032093
raaaaaaattcat

SEQ ID NO: 128157 - DNA, 13 bp, Artificial Sequence
  Oligonucleotide for detection of SNP TSC0032094
aattgaggtgggy

SEQ ID NO: 128158 - DNA, 13 bp, Artificial Sequence
  Oligonucleotide for detection of SNP TSC0032094
rcccacctcaatt

SEQ ID NO: 128159 - DNA, 13 bp, Artificial Sequence
  Oligonucleotide for detection of SNP TSC0032094
aattgaagtgggy

SEQ ID NO: 128160 - DNA, 13 bp, Artificial Sequence
  Oligonucleotide for detection of SNP TSC0032094
rcccacttcaatt

SEQ ID NO: 128161 - DNA, 13 bp, Artificial Sequence
  Oligonucleotide for detection of SNP TSC0032096
tgatgttgaggtt

SEQ ID NO: 128162 - DNA, 13 bp, Artificial Sequence
  Oligonucleotide for detection of SNP TSC0032096
aacctcaacatca

SEQ ID NO: 128163 - DNA, 13 bp, Artificial Sequence
  Oligonucleotide for detection of SNP TSC0032096
cgatgttgaggtt

SEQ ID NO: 128164 - DNA, 13 bp, Artificial Sequence
  Oligonucleotide for detection of SNP TSC0032096
aacctcaacatcg

SEQ ID NO: 128165 - DNA, 13 bp, Artificial Sequence
  Oligonucleotide for detection of SNP TSC0032096
tgacgttgaggtt

SEQ ID NO: 128166 - DNA, 13 bp, Artificial Sequence
  Oligonucleotide for detection of SNP TSC0032096
aacctcaacgtca

SEQ ID NO: 128167 - DNA, 13 bp, Artificial Sequence
  Oligonucleotide for detection of SNP TSC0032096
tgatgtcgaggtt

SEQ ID NO: 128168 - DNA, 13 bp, Artificial Sequence
  Oligonucleotide for detection of SNP TSC0032096
aacctcgacatca

SEQ ID NO: 128169 - DNA, 13 bp, Artificial Sequence
  Oligonucleotide for detection of SNP TSC0032096
cgacgttgaggtt

SEQ ID NO: 128170 - DNA, 13 bp, Artificial Sequence
  Oligonucleotide for detection of SNP TSC0032096
aacctcaacgtcg

SEQ ID NO: 128171 - DNA, 13 bp, Artificial Sequence
  Oligonucleotide for detection of SNP TSC0032096
cgatgtcgaggtt

SEQ ID NO: 128172 - DNA, 13 bp, Artificial Sequence
  Oligonucleotide for detection of SNP TSC0032096
aacctcgacatcg

SEQ ID NO: 128173 - DNA, 13 bp, Artificial Sequence
  Oligonucleotide for detection of SNP TSC0032096
tgacgtcgaggtt

SEQ ID NO: 128174 - DNA, 13 bp, Artificial Sequence
  Oligonucleotide for detection of SNP TSC0032096
aacctcgacgtca

SEQ ID NO: 128175 - DNA, 13 bp, Artificial Sequence
  Oligonucleotide for detection of SNP TSC0032096
cgacgtcgaggtt

SEQ ID NO: 128176 - DNA, 13 bp, Artificial Sequence
  Oligonucleotide for detection of SNP TSC0032096
aacctcgacgtcg

SEQ ID NO: 128177 - DNA, 13 bp, Artificial Sequence
  Oligonucleotide for detection of SNP TSC0032096
agttttggtgttg

SEQ ID NO: 128178 - DNA, 13 bp, Artificial Sequence
  Oligonucleotide for detection of SNP TSC0032096
caacaccaaaact

SEQ ID NO: 128179 - DNA, 13 bp, Artificial Sequence
  Oligonucleotide for detection of SNP TSC0032096
agttttagtgttg

SEQ ID NO: 128180 - DNA, 13 bp, Artificial Sequence
  Oligonucleotide for detection of SNP TSC0032096
caacactaaaact

SEQ ID NO: 128181 - DNA, 13 bp, Artificial Sequence
  Oligonucleotide for detection of SNP TSC0032096
agtttcggtgttg

SEQ ID NO: 128182 - DNA, 13 bp, Artificial Sequence
  Oligonucleotide for detection of SNP TSC0032096
caacaccgaaact

SEQ ID NO: 128183 - DNA, 13 bp, Artificial Sequence
  Oligonucleotide for detection of SNP TSC0032096
agttttagcgttg

SEQ ID NO: 128184 - DNA, 13 bp, Artificial Sequence
  Oligonucleotide for detection of SNP TSC0032096
caacgctaaaact

SEQ ID NO: 128185 - DNA, 13 bp, Artificial Sequence
  Oligonucleotide for detection of SNP TSC0032096
agttttggcgttg

SEQ ID NO: 128186 - DNA, 13 bp, Artificial Sequence
  Oligonucleotide for detection of SNP TSC0032096
caacgccaaaact

SEQ ID NO: 128187 - DNA, 13 bp, Artificial Sequence
  Oligonucleotide for detection of SNP TSC0032096
agttttagtgtcg

SEQ ID NO: 128188 - DNA, 13 bp, Artificial Sequence
  Oligonucleotide for detection of SNP TSC0032096
cgacactaaaact

SEQ ID NO: 128189 - DNA, 13 bp, Artificial Sequence
  Oligonucleotide for detection of SNP TSC0032096
agttttggtgtcg

SEQ ID NO: 128190 - DNA, 13 bp, Artificial Sequence
  Oligonucleotide for detection of SNP TSC0032096
cgacaccaaaact

SEQ ID NO: 128191 - DNA, 13 bp, Artificial Sequence
  Oligonucleotide for detection of SNP TSC0032096
agttttagcgtcg

SEQ ID NO: 128192 - DNA, 13 bp, Artificial Sequence
  Oligonucleotide for detection of SNP TSC0032096
cgacgctaaaact

SEQ ID NO: 128193 - DNA, 13 bp, Artificial Sequence
  Oligonucleotide for detection of SNP TSC0032096
agtttcggcgttg

SEQ ID NO: 128194 - DNA, 13 bp, Artificial Sequence
  Oligonucleotide for detection of SNP TSC0032096
caacgccgaaact

SEQ ID NO: 128195 - DNA, 13 bp, Artificial Sequence
  Oligonucleotide for detection of SNP TSC0032096
agtttcggtgtcg

SEQ ID NO: 128196 - DNA, 13 bp, Artificial Sequence
  Oligonucleotide for detection of SNP TSC0032096
cgacaccgaaact

SEQ ID NO: 128197 - DNA, 13 bp, Artificial Sequence
  Oligonucleotide for detection of SNP TSC0032096
agttttggcgtcg

SEQ ID NO: 128198 - DNA, 13 bp, Artificial Sequence
  Oligonucleotide for detection of SNP TSC0032096
cgacgccaaaact

SEQ ID NO: 128199 - DNA, 13 bp, Artificial Sequence
  Oligonucleotide for detection of SNP TSC0032096
agtttcggcgtcg

SEQ ID NO: 128200 - DNA, 13 bp, Artificial Sequence
  Oligonucleotide for detection of SNP TSC0032096
cgacgccgaaact

SEQ ID NO: 128201 - DNA, 13 bp, Artificial Sequence
  Oligonucleotide for detection of SNP TSC0032097
gttttgatttggy

SEQ ID NO: 128202 - DNA, 13 bp, Artificial Sequence
  Oligonucleotide for detection of SNP TSC0032097
rccaaatcaaaac

SEQ ID NO: 128203 - DNA, 13 bp, Artificial Sequence
  Oligonucleotide for detection of SNP TSC0032097
gttttgttttggy

SEQ ID NO: 128204 - DNA, 13 bp, Artificial Sequence
  Oligonucleotide for detection of SNP TSC0032097
rccaaaacaaaac

SEQ ID NO: 128205 - DNA, 13 bp, Artificial Sequence
  Oligonucleotide for detection of SNP TSC0032097
gttaggttaaagy

SEQ ID NO: 128206 - DNA, 13 bp, Artificial Sequence
  Oligonucleotide for detection of SNP TSC0032097
rctttaacctaac

SEQ ID NO: 128207 - DNA, 13 bp, Artificial Sequence
  Oligonucleotide for detection of SNP TSC0032097
gttagggtaaagy

SEQ ID NO: 128208 - DNA, 13 bp, Artificial Sequence
  Oligonucleotide for detection of SNP TSC0032097
rctttaccctaac

SEQ ID NO: 128209 - DNA, 13 bp, Artificial Sequence
  Oligonucleotide for detection of SNP TSC0032098
gttgttgaagatt

SEQ ID NO: 128210 - DNA, 13 bp, Artificial Sequence
  Oligonucleotide for detection of SNP TSC0032098
aatcttcaacaac

SEQ ID NO: 128211 - DNA, 13 bp, Artificial Sequence
  Oligonucleotide for detection of SNP TSC0032098
gttgttaaagatt

SEQ ID NO: 128212 - DNA, 13 bp, Artificial Sequence
  Oligonucleotide for detection of SNP TSC0032098
aatctttaacaac

SEQ ID NO: 128213 - DNA, 13 bp, Artificial Sequence
  Oligonucleotide for detection of SNP TSC0032099
gttttgggggttg

SEQ ID NO: 128214 - DNA, 13 bp, Artificial Sequence
  Oligonucleotide for detection of SNP TSC0032099
caacccccaaaac

SEQ ID NO: 128215 - DNA, 13 bp, Artificial Sequence
  Oligonucleotide for detection of SNP TSC0032099
gttttgagggttg

SEQ ID NO: 128216 - DNA, 13 bp, Artificial Sequence
  Oligonucleotide for detection of SNP TSC0032099
caaccctcaaaac

SEQ ID NO: 128217 - DNA, 13 bp, Artificial Sequence
  Oligonucleotide for detection of SNP TSC0032100
gggggaattgggg

SEQ ID NO: 128218 - DNA, 13 bp, Artificial Sequence
  Oligonucleotide for detection of SNP TSC0032100
ccccaattccccc

SEQ ID NO: 128219 - DNA, 13 bp, Artificial Sequence
  Oligonucleotide for detection of SNP TSC0032100
gggggatttgggg

SEQ ID NO: 128220 - DNA, 13 bp, Artificial Sequence
  Oligonucleotide for detection of SNP TSC0032100
ccccaaatccccc

SEQ ID NO: 128221 - DNA, 13 bp, Artificial Sequence
  Oligonucleotide for detection of SNP TSC0032100
ttttaagttttty

SEQ ID NO: 128222 - DNA, 13 bp, Artificial Sequence
  Oligonucleotide for detection of SNP TSC0032100
raaaaacttaaaa

SEQ ID NO: 128223 - DNA, 13 bp, Artificial Sequence
  Oligonucleotide for detection of SNP TSC0032107
atattatatttga

SEQ ID NO: 128224 - DNA, 13 bp, Artificial Sequence
  Oligonucleotide for detection of SNP TSC0032107
tcaaatataatat

SEQ ID NO: 128225 - DNA, 13 bp, Artificial Sequence
  Oligonucleotide for detection of SNP TSC0032107
atattagatttga

SEQ ID NO: 128226 - DNA, 13 bp, Artificial Sequence
  Oligonucleotide for detection of SNP TSC0032107
tcaaatctaatat

SEQ ID NO: 128227 - DNA, 13 bp, Artificial Sequence
  Oligonucleotide for detection of SNP TSC0032107
ttaagtgtggtat

SEQ ID NO: 128228 - DNA, 13 bp, Artificial Sequence
  Oligonucleotide for detection of SNP TSC0032107
ataccacacttaa

SEQ ID NO: 128229 - DNA, 13 bp, Artificial Sequence
  Oligonucleotide for detection of SNP TSC0032107
ttaagtttggtat

SEQ ID NO: 128230 - DNA, 13 bp, Artificial Sequence
  Oligonucleotide for detection of SNP TSC0032107
ataccaaacttaa

SEQ ID NO: 128231 - DNA, 13 bp, Artificial Sequence
  Oligonucleotide for detection of SNP TSC0032108
gttaagggggaag

SEQ ID NO: 128232 - DNA, 13 bp, Artificial Sequence
  Oligonucleotide for detection of SNP TSC0032108
cttcccccttaac

SEQ ID NO: 128233 - DNA, 13 bp, Artificial Sequence
  Oligonucleotide for detection of SNP TSC0032108
gttaagagggaag

SEQ ID NO: 128234 - DNA, 13 bp, Artificial Sequence
  Oligonucleotide for detection of SNP TSC0032108
cttccctcttaac

SEQ ID NO: 128235 - DNA, 13 bp, Artificial Sequence
  Oligonucleotide for detection of SNP TSC0032110
gaaattgtggaty

SEQ ID NO: 128236 - DNA, 13 bp, Artificial Sequence
  Oligonucleotide for detection of SNP TSC0032110
ratccacaatttc

SEQ ID NO: 128237 - DNA, 13 bp, Artificial Sequence
  Oligonucleotide for detection of SNP TSC0032110
gaaattatggaty

SEQ ID NO: 128238 - DNA, 13 bp, Artificial Sequence
  Oligonucleotide for detection of SNP TSC0032110
ratccataatttc

SEQ ID NO: 128239 - DNA, 13 bp, Artificial Sequence
  Oligonucleotide for detection of SNP TSC0032112
tatgaggttttgt

SEQ ID NO: 128240 - DNA, 13 bp, Artificial Sequence
  Oligonucleotide for detection of SNP TSC0032112
acaaaacctcata

SEQ ID NO: 128241 - DNA, 13 bp, Artificial Sequence
  Oligonucleotide for detection of SNP TSC0032112
tatgagtttttgt

SEQ ID NO: 128242 - DNA, 13 bp, Artificial Sequence
  Oligonucleotide for detection of SNP TSC0032112
acaaaaactcata

SEQ ID NO: 128243 - DNA, 13 bp, Artificial Sequence
  Oligonucleotide for detection of SNP TSC0032114
gaattggggtttt

SEQ ID NO: 128244 - DNA, 13 bp, Artificial Sequence
  Oligonucleotide for detection of SNP TSC0032114
aaaaccccaattc

SEQ ID NO: 128245 - DNA, 13 bp, Artificial Sequence
  Oligonucleotide for detection of SNP TSC0032114
gaattgtggtttt

SEQ ID NO: 128246 - DNA, 13 bp, Artificial Sequence
  Oligonucleotide for detection of SNP TSC0032114
aaaaccacaattc

SEQ ID NO: 128247 - DNA, 13 bp, Artificial Sequence
  Oligonucleotide for detection of SNP TSC0032114
aaagttttagtty

SEQ ID NO: 128248 - DNA, 13 bp, Artificial Sequence
  Oligonucleotide for detection of SNP TSC0032114
raactaaaacttt

SEQ ID NO: 128249 - DNA, 13 bp, Artificial Sequence
  Oligonucleotide for detection of SNP TSC0032114
aaagttatagtty

SEQ ID NO: 128250 - DNA, 13 bp, Artificial Sequence
  Oligonucleotide for detection of SNP TSC0032114
raactataacttt

SEQ ID NO: 128251 - DNA, 13 bp, Artificial Sequence
  Oligonucleotide for detection of SNP TSC0032119
tggttatgtttga

SEQ ID NO: 128252 - DNA, 13 bp, Artificial Sequence
  Oligonucleotide for detection of SNP TSC0032119
tcaaacataacca

SEQ ID NO: 128253 - DNA, 13 bp, Artificial Sequence
  Oligonucleotide for detection of SNP TSC0032119
cggttatgtttga

SEQ ID NO: 128254 - DNA, 13 bp, Artificial Sequence
  Oligonucleotide for detection of SNP TSC0032119
tcaaacataaccg

SEQ ID NO: 128255 - DNA, 13 bp, Artificial Sequence
  Oligonucleotide for detection of SNP TSC0032119
tggttacgtttga

SEQ ID NO: 128256 - DNA, 13 bp, Artificial Sequence
  Oligonucleotide for detection of SNP TSC0032119
tcaaacgtaacca

SEQ ID NO: 128257 - DNA, 13 bp, Artificial Sequence
  Oligonucleotide for detection of SNP TSC0032119
cggttacgtttga

SEQ ID NO: 128258 - DNA, 13 bp, Artificial Sequence
  Oligonucleotide for detection of SNP TSC0032119
tcaaacgtaaccg

SEQ ID NO: 128259 - DNA, 13 bp, Artificial Sequence
  Oligonucleotide for detection of SNP TSC0032119
ttagatgtgattg

SEQ ID NO: 128260 - DNA, 13 bp, Artificial Sequence
  Oligonucleotide for detection of SNP TSC0032119
caatcacatctaa

SEQ ID NO: 128261 - DNA, 13 bp, Artificial Sequence
  Oligonucleotide for detection of SNP TSC0032119
ttagatatgattg

SEQ ID NO: 128262 - DNA, 13 bp, Artificial Sequence
  Oligonucleotide for detection of SNP TSC0032119
caatcatatctaa

SEQ ID NO: 128263 - DNA, 13 bp, Artificial Sequence
  Oligonucleotide for detection of SNP TSC0032119
ttagacgtgattg

SEQ ID NO: 128264 - DNA, 13 bp, Artificial Sequence
  Oligonucleotide for detection of SNP TSC0032119
caatcacgtctaa

SEQ ID NO: 128265 - DNA, 13 bp, Artificial Sequence
  Oligonucleotide for detection of SNP TSC0032119
ttagatatgatcg

SEQ ID NO: 128266 - DNA, 13 bp, Artificial Sequence
  Oligonucleotide for detection of SNP TSC0032119
cgatcatatctaa

SEQ ID NO: 128267 - DNA, 13 bp, Artificial Sequence
  Oligonucleotide for detection of SNP TSC0032119
ttagatgtgatcg

SEQ ID NO: 128268 - DNA, 13 bp, Artificial Sequence
  Oligonucleotide for detection of SNP TSC0032119
cgatcacatctaa

SEQ ID NO: 128269 - DNA, 13 bp, Artificial Sequence
  Oligonucleotide for detection of SNP TSC0032119
ttagacgtgatcg

SEQ ID NO: 128270 - DNA, 13 bp, Artificial Sequence
  Oligonucleotide for detection of SNP TSC0032119
cgatcacgtctaa

SEQ ID NO: 128271 - DNA, 13 bp, Artificial Sequence
  Oligonucleotide for detection of SNP TSC0032120
taaatgaatttta

SEQ ID NO: 128272 - DNA, 13 bp, Artificial Sequence
  Oligonucleotide for detection of SNP TSC0032120
taaaattcattta

SEQ ID NO: 128273 - DNA, 13 bp, Artificial Sequence
  Oligonucleotide for detection of SNP TSC0032121
gtatagttgggga

SEQ ID NO: 128274 - DNA, 13 bp, Artificial Sequence
  Oligonucleotide for detection of SNP TSC0032121
tccccaactatac

SEQ ID NO: 128275 - DNA, 13 bp, Artificial Sequence
  Oligonucleotide for detection of SNP TSC0032121
gtatagatgggga

SEQ ID NO: 128276 - DNA, 13 bp, Artificial Sequence
  Oligonucleotide for detection of SNP TSC0032121
tccccatctatac

SEQ ID NO: 128277 - DNA, 13 bp, Artificial Sequence
  Oligonucleotide for detection of SNP TSC0032123
atagttatggaag

SEQ ID NO: 128278 - DNA, 13 bp, Artificial Sequence
  Oligonucleotide for detection of SNP TSC0032123
cttccataactat

SEQ ID NO: 128279 - DNA, 13 bp, Artificial Sequence
  Oligonucleotide for detection of SNP TSC0032123
atagttgtggaag

SEQ ID NO: 128280 - DNA, 13 bp, Artificial Sequence
  Oligonucleotide for detection of SNP TSC0032123
cttccacaactat

SEQ ID NO: 128281 - DNA, 13 bp, Artificial Sequence
  Oligonucleotide for detection of SNP TSC0032127
gtttgagtgatta

SEQ ID NO: 128282 - DNA, 13 bp, Artificial Sequence
  Oligonucleotide for detection of SNP TSC0032127
taatcactcaaac

SEQ ID NO: 128283 - DNA, 13 bp, Artificial Sequence
  Oligonucleotide for detection of SNP TSC0032127
gtttgaatgatta

SEQ ID NO: 128284 - DNA, 13 bp, Artificial Sequence
  Oligonucleotide for detection of SNP TSC0032127
taatcattcaaac

SEQ ID NO: 128285 - DNA, 13 bp, Artificial Sequence
  Oligonucleotide for detection of SNP TSC0032127
gttcgagtgatta

SEQ ID NO: 128286 - DNA, 13 bp, Artificial Sequence
  Oligonucleotide for detection of SNP TSC0032127
taatcactcgaac

SEQ ID NO: 128287 - DNA, 13 bp, Artificial Sequence
  Oligonucleotide for detection of SNP TSC0032127
gttcgaatgatta

SEQ ID NO: 128288 - DNA, 13 bp, Artificial Sequence
  Oligonucleotide for detection of SNP TSC0032127
taatcattcgaac

SEQ ID NO: 128289 - DNA, 13 bp, Artificial Sequence
  Oligonucleotide for detection of SNP TSC0032133
ggtaggggggggg

SEQ ID NO: 128290 - DNA, 13 bp, Artificial Sequence
  Oligonucleotide for detection of SNP TSC0032133
ccccccccctacc

SEQ ID NO: 128291 - DNA, 13 bp, Artificial Sequence
  Oligonucleotide for detection of SNP TSC0032133
ggtaggtgggggg

SEQ ID NO: 128292 - DNA, 13 bp, Artificial Sequence
  Oligonucleotide for detection of SNP TSC0032133
ccccccacctacc

SEQ ID NO: 128293 - DNA, 13 bp, Artificial Sequence
  Oligonucleotide for detection of SNP TSC0032134
gtagggggggggg

SEQ ID NO: 128294 - DNA, 13 bp, Artificial Sequence
  Oligonucleotide for detection of SNP TSC0032134
cccccccccctac

SEQ ID NO: 128295 - DNA, 13 bp, Artificial Sequence
  Oligonucleotide for detection of SNP TSC0032134
gtagggtgggggg

SEQ ID NO: 128296 - DNA, 13 bp, Artificial Sequence
  Oligonucleotide for detection of SNP TSC0032134
ccccccaccctac

SEQ ID NO: 128297 - DNA, 13 bp, Artificial Sequence
  Oligonucleotide for detection of SNP TSC0032135
tggtttgtggtag

SEQ ID NO: 128298 - DNA, 13 bp, Artificial Sequence
  Oligonucleotide for detection of SNP TSC0032135
ctaccacaaacca

SEQ ID NO: 128299 - DNA, 13 bp, Artificial Sequence
  Oligonucleotide for detection of SNP TSC0032135
tggtttatggtag

SEQ ID NO: 128300 - DNA, 13 bp, Artificial Sequence
  Oligonucleotide for detection of SNP TSC0032135
ctaccataaacca

SEQ ID NO: 128301 - DNA, 13 bp, Artificial Sequence
  Oligonucleotide for detection of SNP TSC0032141
aattatatttgga

SEQ ID NO: 128302 - DNA, 13 bp, Artificial Sequence
  Oligonucleotide for detection of SNP TSC0032141
tccaaatataatt

SEQ ID NO: 128303 - DNA, 13 bp, Artificial Sequence
  Oligonucleotide for detection of SNP TSC0032141
aattatgtttgga

SEQ ID NO: 128304 - DNA, 13 bp, Artificial Sequence
  Oligonucleotide for detection of SNP TSC0032141
tccaaacataatt

SEQ ID NO: 128305 - DNA, 13 bp, Artificial Sequence
  Oligonucleotide for detection of SNP TSC0032144
ttttggaagttag

SEQ ID NO: 128306 - DNA, 13 bp, Artificial Sequence
  Oligonucleotide for detection of SNP TSC0032144
ctaacttccaaaa

SEQ ID NO: 128307 - DNA, 13 bp, Artificial Sequence
  Oligonucleotide for detection of SNP TSC0032144
ttttggtagttag

SEQ ID NO: 128308 - DNA, 13 bp, Artificial Sequence
  Oligonucleotide for detection of SNP TSC0032144
ctaactaccaaaa

SEQ ID NO: 128309 - DNA, 13 bp, Artificial Sequence
  Oligonucleotide for detection of SNP TSC0032144
ttggtttttaaga

SEQ ID NO: 128310 - DNA, 13 bp, Artificial Sequence
  Oligonucleotide for detection of SNP TSC0032144
tcttaaaaaccaa

SEQ ID NO: 128311 - DNA, 13 bp, Artificial Sequence
  Oligonucleotide for detection of SNP TSC0032144
ttggttgttaaga

SEQ ID NO: 128312 - DNA, 13 bp, Artificial Sequence
  Oligonucleotide for detection of SNP TSC0032144
tcttaacaaccaa

SEQ ID NO: 128313 - DNA, 13 bp, Artificial Sequence
  Oligonucleotide for detection of SNP TSC0032146
ttgttaatttaay

SEQ ID NO: 128314 - DNA, 13 bp, Artificial Sequence
  Oligonucleotide for detection of SNP TSC0032146
rttaaattaacaa

SEQ ID NO: 128315 - DNA, 13 bp, Artificial Sequence
  Oligonucleotide for detection of SNP TSC0032146
ttgttagtttaay

SEQ ID NO: 128316 - DNA, 13 bp, Artificial Sequence
  Oligonucleotide for detection of SNP TSC0032146
rttaaactaacaa

SEQ ID NO: 128317 - DNA, 13 bp, Artificial Sequence
  Oligonucleotide for detection of SNP TSC0032146
tcgttaatttaay

SEQ ID NO: 128318 - DNA, 13 bp, Artificial Sequence
  Oligonucleotide for detection of SNP TSC0032146
rttaaattaacga

SEQ ID NO: 128319 - DNA, 13 bp, Artificial Sequence
  Oligonucleotide for detection of SNP TSC0032146
tcgttagtttaay

SEQ ID NO: 128320 - DNA, 13 bp, Artificial Sequence
  Oligonucleotide for detection of SNP TSC0032146
rttaaactaacga

SEQ ID NO: 128321 - DNA, 13 bp, Artificial Sequence
  Oligonucleotide for detection of SNP TSC0032149
agaaagggtattt

SEQ ID NO: 128322 - DNA, 13 bp, Artificial Sequence
  Oligonucleotide for detection of SNP TSC0032149
aaataccctttct

SEQ ID NO: 128323 - DNA, 13 bp, Artificial Sequence
  Oligonucleotide for detection of SNP TSC0032149
agaaagtgtattt

SEQ ID NO: 128324 - DNA, 13 bp, Artificial Sequence
  Oligonucleotide for detection of SNP TSC0032149
aaatacactttct

SEQ ID NO: 128325 - DNA, 13 bp, Artificial Sequence
  Oligonucleotide for detection of SNP TSC0032149
agatatttttttt

SEQ ID NO: 128326 - DNA, 13 bp, Artificial Sequence
  Oligonucleotide for detection of SNP TSC0032149
aaaaaaaatatct

SEQ ID NO: 128327 - DNA, 13 bp, Artificial Sequence
  Oligonucleotide for detection of SNP TSC0032149
agatatatttttt

SEQ ID NO: 128328 - DNA, 13 bp, Artificial Sequence
  Oligonucleotide for detection of SNP TSC0032149
aaaaaatatatct

SEQ ID NO: 128329 - DNA, 13 bp, Artificial Sequence
  Oligonucleotide for detection of SNP TSC0032151
ttggagatattay

SEQ ID NO: 128330 - DNA, 13 bp, Artificial Sequence
  Oligonucleotide for detection of SNP TSC0032151
rtaatatctccaa

SEQ ID NO: 128331 - DNA, 13 bp, Artificial Sequence
  Oligonucleotide for detection of SNP TSC0032151
ttggaggtattay

SEQ ID NO: 128332 - DNA, 13 bp, Artificial Sequence
  Oligonucleotide for detection of SNP TSC0032151
rtaatacctccaa

SEQ ID NO: 128333 - DNA, 13 bp, Artificial Sequence
  Oligonucleotide for detection of SNP TSC0032152
tgaggatagtgag

SEQ ID NO: 128334 - DNA, 13 bp, Artificial Sequence
  Oligonucleotide for detection of SNP TSC0032152
ctcactatcctca

SEQ ID NO: 128335 - DNA, 13 bp, Artificial Sequence
  Oligonucleotide for detection of SNP TSC0032152
tgaggaaagtgag

SEQ ID NO: 128336 - DNA, 13 bp, Artificial Sequence
  Oligonucleotide for detection of SNP TSC0032152
ctcactttcctca

SEQ ID NO: 128337 - DNA, 13 bp, Artificial Sequence
  Oligonucleotide for detection of SNP TSC0032153
gtgtgtatatgta

SEQ ID NO: 128338 - DNA, 13 bp, Artificial Sequence
  Oligonucleotide for detection of SNP TSC0032153
tacatatacacac

SEQ ID NO: 128339 - DNA, 13 bp, Artificial Sequence
  Oligonucleotide for detection of SNP TSC0032153
gtgtgtgtatgta

SEQ ID NO: 128340 - DNA, 13 bp, Artificial Sequence
  Oligonucleotide for detection of SNP TSC0032153
tacatacacacac

SEQ ID NO: 128341 - DNA, 13 bp, Artificial Sequence
  Oligonucleotide for detection of SNP TSC0032153
gtgtgcgtatgta

SEQ ID NO: 128342 - DNA, 13 bp, Artificial Sequence
  Oligonucleotide for detection of SNP TSC0032153
tacatacgcacac

SEQ ID NO: 128343 - DNA, 13 bp, Artificial Sequence
  Oligonucleotide for detection of SNP TSC0032153
tgtatgcgtatay

SEQ ID NO: 128344 - DNA, 13 bp, Artificial Sequence
  Oligonucleotide for detection of SNP TSC0032153
rtatacgcataca

SEQ ID NO: 128345 - DNA, 13 bp, Artificial Sequence
  Oligonucleotide for detection of SNP TSC0032154
gtggatatagttt

SEQ ID NO: 128346 - DNA, 13 bp, Artificial Sequence
  Oligonucleotide for detection of SNP TSC0032154
aaactatatccac

SEQ ID NO: 128347 - DNA, 13 bp, Artificial Sequence
  Oligonucleotide for detection of SNP TSC0032154
gtggatgtagttt

SEQ ID NO: 128348 - DNA, 13 bp, Artificial Sequence
  Oligonucleotide for detection of SNP TSC0032154
aaactacatccac

SEQ ID NO: 128349 - DNA, 13 bp, Artificial Sequence
  Oligonucleotide for detection of SNP TSC0032154
gtggacgtagttt

SEQ ID NO: 128350 - DNA, 13 bp, Artificial Sequence
  Oligonucleotide for detection of SNP TSC0032154
aaactacgtccac

SEQ ID NO: 128351 - DNA, 13 bp, Artificial Sequence
  Oligonucleotide for detection of SNP TSC0032154
aggttgtgtttay

SEQ ID NO: 128352 - DNA, 13 bp, Artificial Sequence
  Oligonucleotide for detection of SNP TSC0032154
rtaaacacaacct

SEQ ID NO: 128353 - DNA, 13 bp, Artificial Sequence
  Oligonucleotide for detection of SNP TSC0032154
aggttgcgtttay

SEQ ID NO: 128354 - DNA, 13 bp, Artificial Sequence
  Oligonucleotide for detection of SNP TSC0032154
rtaaacgcaacct

SEQ ID NO: 128355 - DNA, 13 bp, Artificial Sequence
  Oligonucleotide for detection of SNP TSC0032156
ggtgggaggatta

SEQ ID NO: 128356 - DNA, 13 bp, Artificial Sequence
  Oligonucleotide for detection of SNP TSC0032156
taatcctcccacc

SEQ ID NO: 128357 - DNA, 13 bp, Artificial Sequence
  Oligonucleotide for detection of SNP TSC0032156
tgatttttttaty

SEQ ID NO: 128358 - DNA, 13 bp, Artificial Sequence
  Oligonucleotide for detection of SNP TSC0032156
rataaaaaaatca

SEQ ID NO: 128359 - DNA, 13 bp, Artificial Sequence
  Oligonucleotide for detection of SNP TSC0032157
aagttgattttga

SEQ ID NO: 128360 - DNA, 13 bp, Artificial Sequence
  Oligonucleotide for detection of SNP TSC0032157
tcaaaatcaactt

SEQ ID NO: 128361 - DNA, 13 bp, Artificial Sequence
  Oligonucleotide for detection of SNP TSC0032157
aagttggttttga

SEQ ID NO: 128362 - DNA, 13 bp, Artificial Sequence
  Oligonucleotide for detection of SNP TSC0032157
tcaaaaccaactt

SEQ ID NO: 128363 - DNA, 13 bp, Artificial Sequence
  Oligonucleotide for detection of SNP TSC0032157
aagttgatttcga

SEQ ID NO: 128364 - DNA, 13 bp, Artificial Sequence
  Oligonucleotide for detection of SNP TSC0032157
tcgaaatcaactt

SEQ ID NO: 128365 - DNA, 13 bp, Artificial Sequence
  Oligonucleotide for detection of SNP TSC0032157
aagttggtttcga

SEQ ID NO: 128366 - DNA, 13 bp, Artificial Sequence
  Oligonucleotide for detection of SNP TSC0032157
tcgaaaccaactt

SEQ ID NO: 128367 - DNA, 13 bp, Artificial Sequence
  Oligonucleotide for detection of SNP TSC0032158
ttattagaatttt

SEQ ID NO: 128368 - DNA, 13 bp, Artificial Sequence
  Oligonucleotide for detection of SNP TSC0032158
aaaattctaataa

SEQ ID NO: 128369 - DNA, 13 bp, Artificial Sequence
  Oligonucleotide for detection of SNP TSC0032158
ttattaaaatttt

SEQ ID NO: 128370 - DNA, 13 bp, Artificial Sequence
  Oligonucleotide for detection of SNP TSC0032158
aaaattttaataa

SEQ ID NO: 128371 - DNA, 13 bp, Artificial Sequence
  Oligonucleotide for detection of SNP TSC0032160
gagttatgttagg

SEQ ID NO: 128372 - DNA, 13 bp, Artificial Sequence
  Oligonucleotide for detection of SNP TSC0032160
cctaacataactc

SEQ ID NO: 128373 - DNA, 13 bp, Artificial Sequence
  Oligonucleotide for detection of SNP TSC0032160
gagttacgttagg

SEQ ID NO: 128374 - DNA, 13 bp, Artificial Sequence
  Oligonucleotide for detection of SNP TSC0032160
cctaacgtaactc

SEQ ID NO: 128375 - DNA, 13 bp, Artificial Sequence
  Oligonucleotide for detection of SNP TSC0032160
tttggtgtaatty

SEQ ID NO: 128376 - DNA, 13 bp, Artificial Sequence
  Oligonucleotide for detection of SNP TSC0032160
raattacaccaaa

SEQ ID NO: 128377 - DNA, 13 bp, Artificial Sequence
  Oligonucleotide for detection of SNP TSC0032160
tttggtataatty

SEQ ID NO: 128378 - DNA, 13 bp, Artificial Sequence
  Oligonucleotide for detection of SNP TSC0032160
raattataccaaa

SEQ ID NO: 128379 - DNA, 13 bp, Artificial Sequence
  Oligonucleotide for detection of SNP TSC0032160
tttggcgtaatty

SEQ ID NO: 128380 - DNA, 13 bp, Artificial Sequence
  Oligonucleotide for detection of SNP TSC0032160
raattacgccaaa

SEQ ID NO: 128381 - DNA, 13 bp, Artificial Sequence
  Oligonucleotide for detection of SNP TSC0032162
gggtgttatggga

SEQ ID NO: 128382 - DNA, 13 bp, Artificial Sequence
  Oligonucleotide for detection of SNP TSC0032162
tcccataacaccc

SEQ ID NO: 128383 - DNA, 13 bp, Artificial Sequence
  Oligonucleotide for detection of SNP TSC0032162
gggtgtgatggga

SEQ ID NO: 128384 - DNA, 13 bp, Artificial Sequence
  Oligonucleotide for detection of SNP TSC0032162
tcccatcacaccc

SEQ ID NO: 128385 - DNA, 13 bp, Artificial Sequence
  Oligonucleotide for detection of SNP TSC0032162
ttttatgatatty

SEQ ID NO: 128386 - DNA, 13 bp, Artificial Sequence
  Oligonucleotide for detection of SNP TSC0032162
raatatcataaaa

SEQ ID NO: 128387 - DNA, 13 bp, Artificial Sequence
  Oligonucleotide for detection of SNP TSC0032162
ttttattatatty

SEQ ID NO: 128388 - DNA, 13 bp, Artificial Sequence
  Oligonucleotide for detection of SNP TSC0032162
raatataataaaa

SEQ ID NO: 128389 - DNA, 13 bp, Artificial Sequence
  Oligonucleotide for detection of SNP TSC0032163
ttgaatagtatgg

SEQ ID NO: 128390 - DNA, 13 bp, Artificial Sequence
  Oligonucleotide for detection of SNP TSC0032163
ccatactattcaa

SEQ ID NO: 128391 - DNA, 13 bp, Artificial Sequence
  Oligonucleotide for detection of SNP TSC0032163
ttgaattgtatgg

SEQ ID NO: 128392 - DNA, 13 bp, Artificial Sequence
  Oligonucleotide for detection of SNP TSC0032163
ccatacaattcaa

SEQ ID NO: 128393 - DNA, 13 bp, Artificial Sequence
  Oligonucleotide for detection of SNP TSC0032163
ttgaatagtacgg

SEQ ID NO: 128394 - DNA, 13 bp, Artificial Sequence
  Oligonucleotide for detection of SNP TSC0032163
ccgtactattcaa

SEQ ID NO: 128395 - DNA, 13 bp, Artificial Sequence
  Oligonucleotide for detection of SNP TSC0032163
ttgaattgtacgg

SEQ ID NO: 128396 - DNA, 13 bp, Artificial Sequence
  Oligonucleotide for detection of SNP TSC0032163
ccgtacaattcaa

SEQ ID NO: 128397 - DNA, 13 bp, Artificial Sequence
  Oligonucleotide for detection of SNP TSC0032163
ttgtattgtttaa

SEQ ID NO: 128398 - DNA, 13 bp, Artificial Sequence
  Oligonucleotide for detection of SNP TSC0032163
ttaaacaatacaa

SEQ ID NO: 128399 - DNA, 13 bp, Artificial Sequence
  Oligonucleotide for detection of SNP TSC0032163
ttgtatagtttaa

SEQ ID NO: 128400 - DNA, 13 bp, Artificial Sequence
  Oligonucleotide for detection of SNP TSC0032163
ttaaactatacaa

SEQ ID NO: 128401 - DNA, 13 bp, Artificial Sequence
  Oligonucleotide for detection of SNP TSC0032163
tcgtattgtttaa

SEQ ID NO: 128402 - DNA, 13 bp, Artificial Sequence
  Oligonucleotide for detection of SNP TSC0032163
ttaaacaatacga

SEQ ID NO: 128403 - DNA, 13 bp, Artificial Sequence
  Oligonucleotide for detection of SNP TSC0032163
tcgtatagtttaa

SEQ ID NO: 128404 - DNA, 13 bp, Artificial Sequence
  Oligonucleotide for detection of SNP TSC0032163
ttaaactatacga

SEQ ID NO: 128405 - DNA, 13 bp, Artificial Sequence
  Oligonucleotide for detection of SNP TSC0032164
ttttttgtaaaat

SEQ ID NO: 128406 - DNA, 13 bp, Artificial Sequence
  Oligonucleotide for detection of SNP TSC0032164
attttacaaaaaa

SEQ ID NO: 128407 - DNA, 13 bp, Artificial Sequence
  Oligonucleotide for detection of SNP TSC0032164
attttggaaaaag

SEQ ID NO: 128408 - DNA, 13 bp, Artificial Sequence
  Oligonucleotide for detection of SNP TSC0032164
ctttttccaaaat

SEQ ID NO: 128409 - DNA, 13 bp, Artificial Sequence
  Oligonucleotide for detection of SNP TSC0032164
attttgtaaaaag

SEQ ID NO: 128410 - DNA, 13 bp, Artificial Sequence
  Oligonucleotide for detection of SNP TSC0032164
ctttttacaaaat

SEQ ID NO: 128411 - DNA, 13 bp, Artificial Sequence
  Oligonucleotide for detection of SNP TSC0032169
atttatagggtag

SEQ ID NO: 128412 - DNA, 13 bp, Artificial Sequence
  Oligonucleotide for detection of SNP TSC0032169
ctaccctataaat

SEQ ID NO: 128413 - DNA, 13 bp, Artificial Sequence
  Oligonucleotide for detection of SNP TSC0032169
atttatggggtag

SEQ ID NO: 128414 - DNA, 13 bp, Artificial Sequence
  Oligonucleotide for detection of SNP TSC0032169
ctaccccataaat

SEQ ID NO: 128415 - DNA, 13 bp, Artificial Sequence
  Oligonucleotide for detection of SNP TSC0032169
atttacggggtag

SEQ ID NO: 128416 - DNA, 13 bp, Artificial Sequence
  Oligonucleotide for detection of SNP TSC0032169
ctaccccgtaaat

SEQ ID NO: 128417 - DNA, 13 bp, Artificial Sequence
  Oligonucleotide for detection of SNP TSC0032169
ttattttgtgggt

SEQ ID NO: 128418 - DNA, 13 bp, Artificial Sequence
  Oligonucleotide for detection of SNP TSC0032169
acccacaaaataa

SEQ ID NO: 128419 - DNA, 13 bp, Artificial Sequence
  Oligonucleotide for detection of SNP TSC0032169
ttatttcgtgggt

SEQ ID NO: 128420 - DNA, 13 bp, Artificial Sequence
  Oligonucleotide for detection of SNP TSC0032169
acccacgaaataa

SEQ ID NO: 128421 - DNA, 13 bp, Artificial Sequence
  Oligonucleotide for detection of SNP TSC0032171
tttatgtaaaaty

SEQ ID NO: 128422 - DNA, 13 bp, Artificial Sequence
  Oligonucleotide for detection of SNP TSC0032171
rattttacataaa

SEQ ID NO: 128423 - DNA, 13 bp, Artificial Sequence
  Oligonucleotide for detection of SNP TSC0032171
tttatggaaaaty

SEQ ID NO: 128424 - DNA, 13 bp, Artificial Sequence
  Oligonucleotide for detection of SNP TSC0032171
rattttccataaa

SEQ ID NO: 128425 - DNA, 13 bp, Artificial Sequence
  Oligonucleotide for detection of SNP TSC0032171
gattttgtatgaa

SEQ ID NO: 128426 - DNA, 13 bp, Artificial Sequence
  Oligonucleotide for detection of SNP TSC0032171
ttcatacaaaatc

SEQ ID NO: 128427 - DNA, 13 bp, Artificial Sequence
  Oligonucleotide for detection of SNP TSC0032171
gattttttatgaa

SEQ ID NO: 128428 - DNA, 13 bp, Artificial Sequence
  Oligonucleotide for detection of SNP TSC0032171
ttcataaaaaatc

SEQ ID NO: 128429 - DNA, 13 bp, Artificial Sequence
  Oligonucleotide for detection of SNP TSC0032172
aaaattatgattt

SEQ ID NO: 128430 - DNA, 13 bp, Artificial Sequence
  Oligonucleotide for detection of SNP TSC0032172
aaatcataatttt

SEQ ID NO: 128431 - DNA, 13 bp, Artificial Sequence
  Oligonucleotide for detection of SNP TSC0032172
aaaattgtgattt

SEQ ID NO: 128432 - DNA, 13 bp, Artificial Sequence
  Oligonucleotide for detection of SNP TSC0032172
aaatcacaatttt

SEQ ID NO: 128433 - DNA, 13 bp, Artificial Sequence
  Oligonucleotide for detection of SNP TSC0032172
aaaatcgtgattt

SEQ ID NO: 128434 - DNA, 13 bp, Artificial Sequence
  Oligonucleotide for detection of SNP TSC0032172
aaatcacgatttt

SEQ ID NO: 128435 - DNA, 13 bp, Artificial Sequence
  Oligonucleotide for detection of SNP TSC0032172
aaattatgatttt

SEQ ID NO: 128436 - DNA, 13 bp, Artificial Sequence
  Oligonucleotide for detection of SNP TSC0032172
aaaatcataattt

SEQ ID NO: 128437 - DNA, 13 bp, Artificial Sequence
  Oligonucleotide for detection of SNP TSC0032172
aaattacgatttt

SEQ ID NO: 128438 - DNA, 13 bp, Artificial Sequence
  Oligonucleotide for detection of SNP TSC0032172
aaaatcgtaattt

SEQ ID NO: 128439 - DNA, 13 bp, Artificial Sequence
  Oligonucleotide for detection of SNP TSC0032173
attatagttaaat

SEQ ID NO: 128440 - DNA, 13 bp, Artificial Sequence
  Oligonucleotide for detection of SNP TSC0032173
atttaactataat

SEQ ID NO: 128441 - DNA, 13 bp, Artificial Sequence
  Oligonucleotide for detection of SNP TSC0032173
attataattaaat

SEQ ID NO: 128442 - DNA, 13 bp, Artificial Sequence
  Oligonucleotide for detection of SNP TSC0032173
atttaattataat

SEQ ID NO: 128443 - DNA, 13 bp, Artificial Sequence
  Oligonucleotide for detection of SNP TSC0032174
atttttataataa

SEQ ID NO: 128444 - DNA, 13 bp, Artificial Sequence
  Oligonucleotide for detection of SNP TSC0032174
ttattataaaaat

SEQ ID NO: 128445 - DNA, 13 bp, Artificial Sequence
  Oligonucleotide for detection of SNP TSC0032174
atttttgtaataa

SEQ ID NO: 128446 - DNA, 13 bp, Artificial Sequence
  Oligonucleotide for detection of SNP TSC0032174
ttattacaaaaat

SEQ ID NO: 128447 - DNA, 13 bp, Artificial Sequence
  Oligonucleotide for detection of SNP TSC0032174
attttcgtaataa

SEQ ID NO: 128448 - DNA, 13 bp, Artificial Sequence
  Oligonucleotide for detection of SNP TSC0032174
ttattacgaaaat

SEQ ID NO: 128449 - DNA, 13 bp, Artificial Sequence
  Oligonucleotide for detection of SNP TSC0032174
ttgttatgaaagt

SEQ ID NO: 128450 - DNA, 13 bp, Artificial Sequence
  Oligonucleotide for detection of SNP TSC0032174
actttcataacaa

SEQ ID NO: 128451 - DNA, 13 bp, Artificial Sequence
  Oligonucleotide for detection of SNP TSC0032174
ttgttacgaaagt

SEQ ID NO: 128452 - DNA, 13 bp, Artificial Sequence
  Oligonucleotide for detection of SNP TSC0032174
actttcgtaacaa

SEQ ID NO: 128453 - DNA, 13 bp, Artificial Sequence
  Oligonucleotide for detection of SNP TSC0032177
tttggtattgtgy

SEQ ID NO: 128454 - DNA, 13 bp, Artificial Sequence
  Oligonucleotide for detection of SNP TSC0032177
rcacaataccaaa

SEQ ID NO: 128455 - DNA, 13 bp, Artificial Sequence
  Oligonucleotide for detection of SNP TSC0032177
tttggtgttgtgy

SEQ ID NO: 128456 - DNA, 13 bp, Artificial Sequence
  Oligonucleotide for detection of SNP TSC0032177
rcacaacaccaaa

SEQ ID NO: 128457 - DNA, 13 bp, Artificial Sequence
  Oligonucleotide for detection of SNP TSC0032177
tttggcgttgtgy

SEQ ID NO: 128458 - DNA, 13 bp, Artificial Sequence
  Oligonucleotide for detection of SNP TSC0032177
rcacaacgccaaa

SEQ ID NO: 128459 - DNA, 13 bp, Artificial Sequence
  Oligonucleotide for detection of SNP TSC0032177
gtatagtgttagg

SEQ ID NO: 128460 - DNA, 13 bp, Artificial Sequence
  Oligonucleotide for detection of SNP TSC0032177
cctaacactatac

SEQ ID NO: 128461 - DNA, 13 bp, Artificial Sequence
  Oligonucleotide for detection of SNP TSC0032177
gtatagcgttagg

SEQ ID NO: 128462 - DNA, 13 bp, Artificial Sequence
  Oligonucleotide for detection of SNP TSC0032177
cctaacgctatac

SEQ ID NO: 128463 - DNA, 13 bp, Artificial Sequence
  Oligonucleotide for detection of SNP TSC0032178
gtatggaatattt

SEQ ID NO: 128464 - DNA, 13 bp, Artificial Sequence
  Oligonucleotide for detection of SNP TSC0032178
aaatattccatac

SEQ ID NO: 128465 - DNA, 13 bp, Artificial Sequence
  Oligonucleotide for detection of SNP TSC0032178
gtatgggatattt

SEQ ID NO: 128466 - DNA, 13 bp, Artificial Sequence
  Oligonucleotide for detection of SNP TSC0032178
aaatatcccatac

SEQ ID NO: 128467 - DNA, 13 bp, Artificial Sequence
  Oligonucleotide for detection of SNP TSC0032180
tatattagaaaga

SEQ ID NO: 128468 - DNA, 13 bp, Artificial Sequence
  Oligonucleotide for detection of SNP TSC0032180
tctttctaatata

SEQ ID NO: 128469 - DNA, 13 bp, Artificial Sequence
  Oligonucleotide for detection of SNP TSC0032180
tatattggaaaga

SEQ ID NO: 128470 - DNA, 13 bp, Artificial Sequence
  Oligonucleotide for detection of SNP TSC0032180
tctttccaatata

SEQ ID NO: 128471 - DNA, 13 bp, Artificial Sequence
  Oligonucleotide for detection of SNP TSC0032180
tatatcggaaaga

SEQ ID NO: 128472 - DNA, 13 bp, Artificial Sequence
  Oligonucleotide for detection of SNP TSC0032180
tctttccgatata

SEQ ID NO: 128473 - DNA, 13 bp, Artificial Sequence
  Oligonucleotide for detection of SNP TSC0032180
tttttttgatata

SEQ ID NO: 128474 - DNA, 13 bp, Artificial Sequence
  Oligonucleotide for detection of SNP TSC0032180
tatatcaaaaaaa

SEQ ID NO: 128475 - DNA, 13 bp, Artificial Sequence
  Oligonucleotide for detection of SNP TSC0032180
ttttttcgatata

SEQ ID NO: 128476 - DNA, 13 bp, Artificial Sequence
  Oligonucleotide for detection of SNP TSC0032180
tatatcgaaaaaa

SEQ ID NO: 128477 - DNA, 13 bp, Artificial Sequence
  Oligonucleotide for detection of SNP TSC0032181
agtatatggaaga

SEQ ID NO: 128478 - DNA, 13 bp, Artificial Sequence
  Oligonucleotide for detection of SNP TSC0032181
tcttccatatact

SEQ ID NO: 128479 - DNA, 13 bp, Artificial Sequence
  Oligonucleotide for detection of SNP TSC0032181
agtatacggaaga

SEQ ID NO: 128480 - DNA, 13 bp, Artificial Sequence
  Oligonucleotide for detection of SNP TSC0032181
tcttccgtatact

SEQ ID NO: 128481 - DNA, 13 bp, Artificial Sequence
  Oligonucleotide for detection of SNP TSC0032184
taggttatttagy

SEQ ID NO: 128482 - DNA, 13 bp, Artificial Sequence
  Oligonucleotide for detection of SNP TSC0032184
rctaaataaccta

SEQ ID NO: 128483 - DNA, 13 bp, Artificial Sequence
  Oligonucleotide for detection of SNP TSC0032184
taggttgtttagy

SEQ ID NO: 128484 - DNA, 13 bp, Artificial Sequence
  Oligonucleotide for detection of SNP TSC0032184
rctaaacaaccta

SEQ ID NO: 128485 - DNA, 13 bp, Artificial Sequence
  Oligonucleotide for detection of SNP TSC0032184
taggtcgtttagy

SEQ ID NO: 128486 - DNA, 13 bp, Artificial Sequence
  Oligonucleotide for detection of SNP TSC0032184
rctaaacgaccta

SEQ ID NO: 128487 - DNA, 13 bp, Artificial Sequence
  Oligonucleotide for detection of SNP TSC0032184
gttaaatgatttg

SEQ ID NO: 128488 - DNA, 13 bp, Artificial Sequence
  Oligonucleotide for detection of SNP TSC0032184
caaatcatttaac

SEQ ID NO: 128489 - DNA, 13 bp, Artificial Sequence
  Oligonucleotide for detection of SNP TSC0032184
gttaaacgatttg

SEQ ID NO: 128490 - DNA, 13 bp, Artificial Sequence
  Oligonucleotide for detection of SNP TSC0032184
caaatcgtttaac

SEQ ID NO: 128491 - DNA, 13 bp, Artificial Sequence
  Oligonucleotide for detection of SNP TSC0032185
ttttttatggtay

SEQ ID NO: 128492 - DNA, 13 bp, Artificial Sequence
  Oligonucleotide for detection of SNP TSC0032185
rtaccataaaaaa

SEQ ID NO: 128493 - DNA, 13 bp, Artificial Sequence
  Oligonucleotide for detection of SNP TSC0032185
ttttttacggtay

SEQ ID NO: 128494 - DNA, 13 bp, Artificial Sequence
  Oligonucleotide for detection of SNP TSC0032185
rtaccgtaaaaaa

SEQ ID NO: 128495 - DNA, 13 bp, Artificial Sequence
  Oligonucleotide for detection of SNP TSC0032185
gtgttgtggggaa

SEQ ID NO: 128496 - DNA, 13 bp, Artificial Sequence
  Oligonucleotide for detection of SNP TSC0032185
ttccccacaacac

SEQ ID NO: 128497 - DNA, 13 bp, Artificial Sequence
  Oligonucleotide for detection of SNP TSC0032185
gtgttgaggggaa

SEQ ID NO: 128498 - DNA, 13 bp, Artificial Sequence
  Oligonucleotide for detection of SNP TSC0032185
ttcccctcaacac

SEQ ID NO: 128499 - DNA, 13 bp, Artificial Sequence
  Oligonucleotide for detection of SNP TSC0032185
gtgtcgtggggaa

SEQ ID NO: 128500 - DNA, 13 bp, Artificial Sequence
  Oligonucleotide for detection of SNP TSC0032185
ttccccacgacac

SEQ ID NO: 128501 - DNA, 13 bp, Artificial Sequence
  Oligonucleotide for detection of SNP TSC0032185
gtgtcgaggggaa

SEQ ID NO: 128502 - DNA, 13 bp, Artificial Sequence
  Oligonucleotide for detection of SNP TSC0032185
ttcccctcgacac

SEQ ID NO: 128503 - DNA, 13 bp, Artificial Sequence
  Oligonucleotide for detection of SNP TSC0032186
atatataatttag

SEQ ID NO: 128504 - DNA, 13 bp, Artificial Sequence
  Oligonucleotide for detection of SNP TSC0032186
ctaaattatatat

SEQ ID NO: 128505 - DNA, 13 bp, Artificial Sequence
  Oligonucleotide for detection of SNP TSC0032186
atatatgatttag

SEQ ID NO: 128506 - DNA, 13 bp, Artificial Sequence
  Oligonucleotide for detection of SNP TSC0032186
ctaaatcatatat

SEQ ID NO: 128507 - DNA, 13 bp, Artificial Sequence
  Oligonucleotide for detection of SNP TSC0032186
atatacgatttag

SEQ ID NO: 128508 - DNA, 13 bp, Artificial Sequence
  Oligonucleotide for detection of SNP TSC0032186
ctaaatcgtatat

SEQ ID NO: 128509 - DNA, 13 bp, Artificial Sequence
  Oligonucleotide for detection of SNP TSC0032186
ttgagttgtgtgt

SEQ ID NO: 128510 - DNA, 13 bp, Artificial Sequence
  Oligonucleotide for detection of SNP TSC0032186
acacacaactcaa

SEQ ID NO: 128511 - DNA, 13 bp, Artificial Sequence
  Oligonucleotide for detection of SNP TSC0032186
ttgagtcgtgtgt

SEQ ID NO: 128512 - DNA, 13 bp, Artificial Sequence
  Oligonucleotide for detection of SNP TSC0032186
acacacgactcaa

SEQ ID NO: 128513 - DNA, 13 bp, Artificial Sequence
  Oligonucleotide for detection of SNP TSC0032187
gttatgggttttg

SEQ ID NO: 128514 - DNA, 13 bp, Artificial Sequence
  Oligonucleotide for detection of SNP TSC0032187
caaaacccataac

SEQ ID NO: 128515 - DNA, 13 bp, Artificial Sequence
  Oligonucleotide for detection of SNP TSC0032187
gttatgagttttg

SEQ ID NO: 128516 - DNA, 13 bp, Artificial Sequence
  Oligonucleotide for detection of SNP TSC0032187
caaaactcataac

SEQ ID NO: 128517 - DNA, 13 bp, Artificial Sequence
  Oligonucleotide for detection of SNP TSC0032187
gttatgggtttcg

SEQ ID NO: 128518 - DNA, 13 bp, Artificial Sequence
  Oligonucleotide for detection of SNP TSC0032187
cgaaacccataac

SEQ ID NO: 128519 - DNA, 13 bp, Artificial Sequence
  Oligonucleotide for detection of SNP TSC0032187
gttatgagtttcg

SEQ ID NO: 128520 - DNA, 13 bp, Artificial Sequence
  Oligonucleotide for detection of SNP TSC0032187
cgaaactcataac

SEQ ID NO: 128521 - DNA, 13 bp, Artificial Sequence
  Oligonucleotide for detection of SNP TSC0032188
tttttaggaagat

SEQ ID NO: 128522 - DNA, 13 bp, Artificial Sequence
  Oligonucleotide for detection of SNP TSC0032188
atcttcctaaaaa

SEQ ID NO: 128523 - DNA, 13 bp, Artificial Sequence
  Oligonucleotide for detection of SNP TSC0032188
tttttaagaagat

SEQ ID NO: 128524 - DNA, 13 bp, Artificial Sequence
  Oligonucleotide for detection of SNP TSC0032188
atcttcttaaaaa

SEQ ID NO: 128525 - DNA, 13 bp, Artificial Sequence
  Oligonucleotide for detection of SNP TSC0032189
aggggtggggtag

SEQ ID NO: 128526 - DNA, 13 bp, Artificial Sequence
  Oligonucleotide for detection of SNP TSC0032189
ctaccccacccct

SEQ ID NO: 128527 - DNA, 13 bp, Artificial Sequence
  Oligonucleotide for detection of SNP TSC0032189
aggggttgggtag

SEQ ID NO: 128528 - DNA, 13 bp, Artificial Sequence
  Oligonucleotide for detection of SNP TSC0032189
ctacccaacccct

SEQ ID NO: 128529 - DNA, 13 bp, Artificial Sequence
  Oligonucleotide for detection of SNP TSC0032189
aggggtcgggtag

SEQ ID NO: 128530 - DNA, 13 bp, Artificial Sequence
  Oligonucleotide for detection of SNP TSC0032189
ctacccgacccct

SEQ ID NO: 128531 - DNA, 13 bp, Artificial Sequence
  Oligonucleotide for detection of SNP TSC0032190
ggtaatatggtga

SEQ ID NO: 128532 - DNA, 13 bp, Artificial Sequence
  Oligonucleotide for detection of SNP TSC0032190
tcaccatattacc

SEQ ID NO: 128533 - DNA, 13 bp, Artificial Sequence
  Oligonucleotide for detection of SNP TSC0032190
ggtaatttggtga

SEQ ID NO: 128534 - DNA, 13 bp, Artificial Sequence
  Oligonucleotide for detection of SNP TSC0032190
tcaccaaattacc

SEQ ID NO: 128535 - DNA, 13 bp, Artificial Sequence
  Oligonucleotide for detection of SNP TSC0032190
ttattatgttgty

SEQ ID NO: 128536 - DNA, 13 bp, Artificial Sequence
  Oligonucleotide for detection of SNP TSC0032190
racaacataataa

SEQ ID NO: 128537 - DNA, 13 bp, Artificial Sequence
  Oligonucleotide for detection of SNP TSC0032190
ttattaagttgty

SEQ ID NO: 128538 - DNA, 13 bp, Artificial Sequence
  Oligonucleotide for detection of SNP TSC0032190
racaacttaataa

SEQ ID NO: 128539 - DNA, 13 bp, Artificial Sequence
  Oligonucleotide for detection of SNP TSC0032191
ttttggaaagagg

SEQ ID NO: 128540 - DNA, 13 bp, Artificial Sequence
  Oligonucleotide for detection of SNP TSC0032191
cctctttccaaaa

SEQ ID NO: 128541 - DNA, 13 bp, Artificial Sequence
  Oligonucleotide for detection of SNP TSC0032191
ttttgggaagagg

SEQ ID NO: 128542 - DNA, 13 bp, Artificial Sequence
  Oligonucleotide for detection of SNP TSC0032191
cctcttcccaaaa

SEQ ID NO: 128543 - DNA, 13 bp, Artificial Sequence
  Oligonucleotide for detection of SNP TSC0032193
gttttaggtgata

SEQ ID NO: 128544 - DNA, 13 bp, Artificial Sequence
  Oligonucleotide for detection of SNP TSC0032193
tatcacctaaaac

SEQ ID NO: 128545 - DNA, 13 bp, Artificial Sequence
  Oligonucleotide for detection of SNP TSC0032193
gttttaagtgata

SEQ ID NO: 128546 - DNA, 13 bp, Artificial Sequence
  Oligonucleotide for detection of SNP TSC0032193
tatcacttaaaac

SEQ ID NO: 128547 - DNA, 13 bp, Artificial Sequence
  Oligonucleotide for detection of SNP TSC0032194
gggtttatgtttg

SEQ ID NO: 128548 - DNA, 13 bp, Artificial Sequence
  Oligonucleotide for detection of SNP TSC0032194
caaacataaaccc

SEQ ID NO: 128549 - DNA, 13 bp, Artificial Sequence
  Oligonucleotide for detection of SNP TSC0032194
gggtttgtgtttg

SEQ ID NO: 128550 - DNA, 13 bp, Artificial Sequence
  Oligonucleotide for detection of SNP TSC0032194
caaacacaaaccc

SEQ ID NO: 128551 - DNA, 13 bp, Artificial Sequence
  Oligonucleotide for detection of SNP TSC0032195
ttagtatagtatt

SEQ ID NO: 128552 - DNA, 13 bp, Artificial Sequence
  Oligonucleotide for detection of SNP TSC0032195
aatactatactaa

SEQ ID NO: 128553 - DNA, 13 bp, Artificial Sequence
  Oligonucleotide for detection of SNP TSC0032195
ttagtagagtatt

SEQ ID NO: 128554 - DNA, 13 bp, Artificial Sequence
  Oligonucleotide for detection of SNP TSC0032195
aatactctactaa

SEQ ID NO: 128555 - DNA, 13 bp, Artificial Sequence
  Oligonucleotide for detection of SNP TSC0032195
aatattgtgttag

SEQ ID NO: 128556 - DNA, 13 bp, Artificial Sequence
  Oligonucleotide for detection of SNP TSC0032195
ctaacacaatatt

SEQ ID NO: 128557 - DNA, 13 bp, Artificial Sequence
  Oligonucleotide for detection of SNP TSC0032195
aatattttgttag

SEQ ID NO: 128558 - DNA, 13 bp, Artificial Sequence
  Oligonucleotide for detection of SNP TSC0032195
ctaacaaaatatt

SEQ ID NO: 128559 - DNA, 13 bp, Artificial Sequence
  Oligonucleotide for detection of SNP TSC0032199
gtgtgaattgtay

SEQ ID NO: 128560 - DNA, 13 bp, Artificial Sequence
  Oligonucleotide for detection of SNP TSC0032199
rtacaattcacac

SEQ ID NO: 128561 - DNA, 13 bp, Artificial Sequence
  Oligonucleotide for detection of SNP TSC0032199
gtgtgatttgtay

SEQ ID NO: 128562 - DNA, 13 bp, Artificial Sequence
  Oligonucleotide for detection of SNP TSC0032199
rtacaaatcacac

SEQ ID NO: 128563 - DNA, 13 bp, Artificial Sequence
  Oligonucleotide for detection of SNP TSC0032199
gtgtaatttatay

SEQ ID NO: 128564 - DNA, 13 bp, Artificial Sequence
  Oligonucleotide for detection of SNP TSC0032199
rtataaattacac

SEQ ID NO: 128565 - DNA, 13 bp, Artificial Sequence
  Oligonucleotide for detection of SNP TSC0032199
gtgtaagttatay

SEQ ID NO: 128566 - DNA, 13 bp, Artificial Sequence
  Oligonucleotide for detection of SNP TSC0032199
rtataacttacac

SEQ ID NO: 128567 - DNA, 13 bp, Artificial Sequence
  Oligonucleotide for detection of SNP TSC0032200
aaattaaattaty

SEQ ID NO: 128568 - DNA, 13 bp, Artificial Sequence
  Oligonucleotide for detection of SNP TSC0032200
rataatttaattt

SEQ ID NO: 128569 - DNA, 13 bp, Artificial Sequence
  Oligonucleotide for detection of SNP TSC0032200
aaattagattaty

SEQ ID NO: 128570 - DNA, 13 bp, Artificial Sequence
  Oligonucleotide for detection of SNP TSC0032200
rataatctaattt

SEQ ID NO: 128571 - DNA, 13 bp, Artificial Sequence
  Oligonucleotide for detection of SNP TSC0032201
tattatgtttgga

SEQ ID NO: 128572 - DNA, 13 bp, Artificial Sequence
  Oligonucleotide for detection of SNP TSC0032201
tccaaacataata

SEQ ID NO: 128573 - DNA, 13 bp, Artificial Sequence
  Oligonucleotide for detection of SNP TSC0032201
tattatatttgga

SEQ ID NO: 128574 - DNA, 13 bp, Artificial Sequence
  Oligonucleotide for detection of SNP TSC0032201
tccaaatataata

SEQ ID NO: 128575 - DNA, 13 bp, Artificial Sequence
  Oligonucleotide for detection of SNP TSC0032201
tattatgttcgga

SEQ ID NO: 128576 - DNA, 13 bp, Artificial Sequence
  Oligonucleotide for detection of SNP TSC0032201
tccgaacataata

SEQ ID NO: 128577 - DNA, 13 bp, Artificial Sequence
  Oligonucleotide for detection of SNP TSC0032201
tattatattcgga

SEQ ID NO: 128578 - DNA, 13 bp, Artificial Sequence
  Oligonucleotide for detection of SNP TSC0032201
tccgaatataata

SEQ ID NO: 128579 - DNA, 13 bp, Artificial Sequence
  Oligonucleotide for detection of SNP TSC0032202
ggttggaatgtty

SEQ ID NO: 128580 - DNA, 13 bp, Artificial Sequence
  Oligonucleotide for detection of SNP TSC0032202
raacattccaacc

SEQ ID NO: 128581 - DNA, 13 bp, Artificial Sequence
  Oligonucleotide for detection of SNP TSC0032202
ggttgggatgtty

SEQ ID NO: 128582 - DNA, 13 bp, Artificial Sequence
  Oligonucleotide for detection of SNP TSC0032202
raacatcccaacc

SEQ ID NO: 128583 - DNA, 13 bp, Artificial Sequence
  Oligonucleotide for detection of SNP TSC0032203
aaaaagttttaag

SEQ ID NO: 128584 - DNA, 13 bp, Artificial Sequence
  Oligonucleotide for detection of SNP TSC0032203
cttaaaacttttt

SEQ ID NO: 128585 - DNA, 13 bp, Artificial Sequence
  Oligonucleotide for detection of SNP TSC0032203
aaaaaggtttaag

SEQ ID NO: 128586 - DNA, 13 bp, Artificial Sequence
  Oligonucleotide for detection of SNP TSC0032203
cttaaaccttttt

SEQ ID NO: 128587 - DNA, 13 bp, Artificial Sequence
  Oligonucleotide for detection of SNP TSC0032204
gtatttattggag

SEQ ID NO: 128588 - DNA, 13 bp, Artificial Sequence
  Oligonucleotide for detection of SNP TSC0032204
ctccaataaatac

SEQ ID NO: 128589 - DNA, 13 bp, Artificial Sequence
  Oligonucleotide for detection of SNP TSC0032204
gtatttgttggag

SEQ ID NO: 128590 - DNA, 13 bp, Artificial Sequence
  Oligonucleotide for detection of SNP TSC0032204
ctccaacaaatac

SEQ ID NO: 128591 - DNA, 13 bp, Artificial Sequence
  Oligonucleotide for detection of SNP TSC0032206
tggggttgttgty

SEQ ID NO: 128592 - DNA, 13 bp, Artificial Sequence
  Oligonucleotide for detection of SNP TSC0032206
racaacaacccca

SEQ ID NO: 128593 - DNA, 13 bp, Artificial Sequence
  Oligonucleotide for detection of SNP TSC0032206
tggggtcgttgty

SEQ ID NO: 128594 - DNA, 13 bp, Artificial Sequence
  Oligonucleotide for detection of SNP TSC0032206
racaacgacccca

SEQ ID NO: 128595 - DNA, 13 bp, Artificial Sequence
  Oligonucleotide for detection of SNP TSC0032206
tggggttgtcgty

SEQ ID NO: 128596 - DNA, 13 bp, Artificial Sequence
  Oligonucleotide for detection of SNP TSC0032206
racgacaacccca

SEQ ID NO: 128597 - DNA, 13 bp, Artificial Sequence
  Oligonucleotide for detection of SNP TSC0032206
tggggtcgtcgty

SEQ ID NO: 128598 - DNA, 13 bp, Artificial Sequence
  Oligonucleotide for detection of SNP TSC0032206
racgacgacccca

SEQ ID NO: 128599 - DNA, 13 bp, Artificial Sequence
  Oligonucleotide for detection of SNP TSC0032206
ggcggtggtttta

SEQ ID NO: 128600 - DNA, 13 bp, Artificial Sequence
  Oligonucleotide for detection of SNP TSC0032206
taaaaccaccgcc

SEQ ID NO: 128601 - DNA, 13 bp, Artificial Sequence
  Oligonucleotide for detection of SNP TSC0032206
ggcggtagtttta

SEQ ID NO: 128602 - DNA, 13 bp, Artificial Sequence
  Oligonucleotide for detection of SNP TSC0032206
taaaactaccgcc

SEQ ID NO: 128603 - DNA, 13 bp, Artificial Sequence
  Oligonucleotide for detection of SNP TSC0032206
ggtggcggtttta

SEQ ID NO: 128604 - DNA, 13 bp, Artificial Sequence
  Oligonucleotide for detection of SNP TSC0032206
taaaaccgccacc

SEQ ID NO: 128605 - DNA, 13 bp, Artificial Sequence
  Oligonucleotide for detection of SNP TSC0032206
ggcggcggtttta

SEQ ID NO: 128606 - DNA, 13 bp, Artificial Sequence
  Oligonucleotide for detection of SNP TSC0032206
taaaaccgccgcc

SEQ ID NO: 128607 - DNA, 13 bp, Artificial Sequence
  Oligonucleotide for detection of SNP TSC0032207
gttttgtgaggga

SEQ ID NO: 128608 - DNA, 13 bp, Artificial Sequence
  Oligonucleotide for detection of SNP TSC0032207
tccctcacaaaac

SEQ ID NO: 128609 - DNA, 13 bp, Artificial Sequence
  Oligonucleotide for detection of SNP TSC0032207
gttttgggaggga

SEQ ID NO: 128610 - DNA, 13 bp, Artificial Sequence
  Oligonucleotide for detection of SNP TSC0032207
tccctcccaaaac

SEQ ID NO: 128611 - DNA, 13 bp, Artificial Sequence
  Oligonucleotide for detection of SNP TSC0032207
gttttgcgaggga

SEQ ID NO: 128612 - DNA, 13 bp, Artificial Sequence
  Oligonucleotide for detection of SNP TSC0032207
tccctcgcaaaac

SEQ ID NO: 128613 - DNA, 13 bp, Artificial Sequence
  Oligonucleotide for detection of SNP TSC0032207
ttttttgtaaagy

SEQ ID NO: 128614 - DNA, 13 bp, Artificial Sequence
  Oligonucleotide for detection of SNP TSC0032207
rctttacaaaaaa

SEQ ID NO: 128615 - DNA, 13 bp, Artificial Sequence
  Oligonucleotide for detection of SNP TSC0032207
ttttttttaaagy

SEQ ID NO: 128616 - DNA, 13 bp, Artificial Sequence
  Oligonucleotide for detection of SNP TSC0032207
rctttaaaaaaaa

SEQ ID NO: 128617 - DNA, 13 bp, Artificial Sequence
  Oligonucleotide for detection of SNP TSC0032207
tttttcgtaaagy

SEQ ID NO: 128618 - DNA, 13 bp, Artificial Sequence
  Oligonucleotide for detection of SNP TSC0032207
rctttacgaaaaa

SEQ ID NO: 128619 - DNA, 13 bp, Artificial Sequence
  Oligonucleotide for detection of SNP TSC0032208
agtagtaagggtt

SEQ ID NO: 128620 - DNA, 13 bp, Artificial Sequence
  Oligonucleotide for detection of SNP TSC0032208
aacccttactact

SEQ ID NO: 128621 - DNA, 13 bp, Artificial Sequence
  Oligonucleotide for detection of SNP TSC0032208
agtagtgagggtt

SEQ ID NO: 128622 - DNA, 13 bp, Artificial Sequence
  Oligonucleotide for detection of SNP TSC0032208
aaccctcactact

SEQ ID NO: 128623 - DNA, 13 bp, Artificial Sequence
  Oligonucleotide for detection of SNP TSC0032209
ttagataggtttt

SEQ ID NO: 128624 - DNA, 13 bp, Artificial Sequence
  Oligonucleotide for detection of SNP TSC0032209
aaaacctatctaa

SEQ ID NO: 128625 - DNA, 13 bp, Artificial Sequence
  Oligonucleotide for detection of SNP TSC0032209
ttagatgggtttt

SEQ ID NO: 128626 - DNA, 13 bp, Artificial Sequence
  Oligonucleotide for detection of SNP TSC0032209
aaaacccatctaa

SEQ ID NO: 128627 - DNA, 13 bp, Artificial Sequence
  Oligonucleotide for detection of SNP TSC0032210
tgtatgagttagy

SEQ ID NO: 128628 - DNA, 13 bp, Artificial Sequence
  Oligonucleotide for detection of SNP TSC0032210
rctaactcataca

SEQ ID NO: 128629 - DNA, 13 bp, Artificial Sequence
  Oligonucleotide for detection of SNP TSC0032210
tgtatgtgttagy

SEQ ID NO: 128630 - DNA, 13 bp, Artificial Sequence
  Oligonucleotide for detection of SNP TSC0032210
rctaacacataca

SEQ ID NO: 128631 - DNA, 13 bp, Artificial Sequence
  Oligonucleotide for detection of SNP TSC0032210
tgtatgcgttagy

SEQ ID NO: 128632 - DNA, 13 bp, Artificial Sequence
  Oligonucleotide for detection of SNP TSC0032210
rctaacgcataca

SEQ ID NO: 128633 - DNA, 13 bp, Artificial Sequence
  Oligonucleotide for detection of SNP TSC0032210
gttgatttatgta

SEQ ID NO: 128634 - DNA, 13 bp, Artificial Sequence
  Oligonucleotide for detection of SNP TSC0032210
tacataaatcaac

SEQ ID NO: 128635 - DNA, 13 bp, Artificial Sequence
  Oligonucleotide for detection of SNP TSC0032210
gttgatgtatgta

SEQ ID NO: 128636 - DNA, 13 bp, Artificial Sequence
  Oligonucleotide for detection of SNP TSC0032210
tacatacatcaac

SEQ ID NO: 128637 - DNA, 13 bp, Artificial Sequence
  Oligonucleotide for detection of SNP TSC0032210
gttgacgtatgta

SEQ ID NO: 128638 - DNA, 13 bp, Artificial Sequence
  Oligonucleotide for detection of SNP TSC0032210
tacatacgtcaac

SEQ ID NO: 128639 - DNA, 13 bp, Artificial Sequence
  Oligonucleotide for detection of SNP TSC0032211
ggttggaagtggg

SEQ ID NO: 128640 - DNA, 13 bp, Artificial Sequence
  Oligonucleotide for detection of SNP TSC0032211
cccacttccaacc

SEQ ID NO: 128641 - DNA, 13 bp, Artificial Sequence
  Oligonucleotide for detection of SNP TSC0032211
ggttgggagtggg

SEQ ID NO: 128642 - DNA, 13 bp, Artificial Sequence
  Oligonucleotide for detection of SNP TSC0032211
cccactcccaacc

SEQ ID NO: 128643 - DNA, 13 bp, Artificial Sequence
  Oligonucleotide for detection of SNP TSC0032213
ttatgggttgtta

SEQ ID NO: 128644 - DNA, 13 bp, Artificial Sequence
  Oligonucleotide for detection of SNP TSC0032213
taacaacccataa

SEQ ID NO: 128645 - DNA, 13 bp, Artificial Sequence
  Oligonucleotide for detection of SNP TSC0032213
ttatggtttgtta

SEQ ID NO: 128646 - DNA, 13 bp, Artificial Sequence
  Oligonucleotide for detection of SNP TSC0032213
taacaaaccataa

SEQ ID NO: 128647 - DNA, 13 bp, Artificial Sequence
  Oligonucleotide for detection of SNP TSC0032213
tggtagtttatga

SEQ ID NO: 128648 - DNA, 13 bp, Artificial Sequence
  Oligonucleotide for detection of SNP TSC0032213
tcataaactacca

SEQ ID NO: 128649 - DNA, 13 bp, Artificial Sequence
  Oligonucleotide for detection of SNP TSC0032213
tggtagattatga

SEQ ID NO: 128650 - DNA, 13 bp, Artificial Sequence
  Oligonucleotide for detection of SNP TSC0032213
tcataatctacca

SEQ ID NO: 128651 - DNA, 13 bp, Artificial Sequence
  Oligonucleotide for detection of SNP TSC0032214
aaattggttttgt

SEQ ID NO: 128652 - DNA, 13 bp, Artificial Sequence
  Oligonucleotide for detection of SNP TSC0032214
acaaaaccaattt

SEQ ID NO: 128653 - DNA, 13 bp, Artificial Sequence
  Oligonucleotide for detection of SNP TSC0032214
aaattgtttttgt

SEQ ID NO: 128654 - DNA, 13 bp, Artificial Sequence
  Oligonucleotide for detection of SNP TSC0032214
acaaaaacaattt

SEQ ID NO: 128655 - DNA, 13 bp, Artificial Sequence
  Oligonucleotide for detection of SNP TSC0032214
atagagttagttt

SEQ ID NO: 128656 - DNA, 13 bp, Artificial Sequence
  Oligonucleotide for detection of SNP TSC0032214
aaactaactctat

SEQ ID NO: 128657 - DNA, 13 bp, Artificial Sequence
  Oligonucleotide for detection of SNP TSC0032214
atagagatagttt

SEQ ID NO: 128658 - DNA, 13 bp, Artificial Sequence
  Oligonucleotide for detection of SNP TSC0032214
aaactatctctat

SEQ ID NO: 128659 - DNA, 13 bp, Artificial Sequence
  Oligonucleotide for detection of SNP TSC0032215
ttgttgaagtatt

SEQ ID NO: 128660 - DNA, 13 bp, Artificial Sequence
  Oligonucleotide for detection of SNP TSC0032215
aatacttcaacaa

SEQ ID NO: 128661 - DNA, 13 bp, Artificial Sequence
  Oligonucleotide for detection of SNP TSC0032215
ttgttggagtatt

SEQ ID NO: 128662 - DNA, 13 bp, Artificial Sequence
  Oligonucleotide for detection of SNP TSC0032215
aatactccaacaa

SEQ ID NO: 128663 - DNA, 13 bp, Artificial Sequence
  Oligonucleotide for detection of SNP TSC0032215
tcgttgaagtatt

SEQ ID NO: 128664 - DNA, 13 bp, Artificial Sequence
  Oligonucleotide for detection of SNP TSC0032215
aatacttcaacga

SEQ ID NO: 128665 - DNA, 13 bp, Artificial Sequence
  Oligonucleotide for detection of SNP TSC0032215
tcgttggagtatt

SEQ ID NO: 128666 - DNA, 13 bp, Artificial Sequence
  Oligonucleotide for detection of SNP TSC0032215
aatactccaacga

SEQ ID NO: 128667 - DNA, 13 bp, Artificial Sequence
  Oligonucleotide for detection of SNP TSC0032216
tggggtatggttt

SEQ ID NO: 128668 - DNA, 13 bp, Artificial Sequence
  Oligonucleotide for detection of SNP TSC0032216
aaaccatacccca

SEQ ID NO: 128669 - DNA, 13 bp, Artificial Sequence
  Oligonucleotide for detection of SNP TSC0032216
tggggtgtggttt

SEQ ID NO: 128670 - DNA, 13 bp, Artificial Sequence
  Oligonucleotide for detection of SNP TSC0032216
aaaccacacccca

SEQ ID NO: 128671 - DNA, 13 bp, Artificial Sequence
  Oligonucleotide for detection of SNP TSC0032217
ttgggaaaagaga

SEQ ID NO: 128672 - DNA, 13 bp, Artificial Sequence
  Oligonucleotide for detection of SNP TSC0032217
tctcttttcccaa

SEQ ID NO: 128673 - DNA, 13 bp, Artificial Sequence
  Oligonucleotide for detection of SNP TSC0032217
ttgggagaagaga

SEQ ID NO: 128674 - DNA, 13 bp, Artificial Sequence
  Oligonucleotide for detection of SNP TSC0032217
tctcttctcccaa

SEQ ID NO: 128675 - DNA, 13 bp, Artificial Sequence
  Oligonucleotide for detection of SNP TSC0032220
aggatttgtttty

SEQ ID NO: 128676 - DNA, 13 bp, Artificial Sequence
  Oligonucleotide for detection of SNP TSC0032220
raaaacaaatcct

SEQ ID NO: 128677 - DNA, 13 bp, Artificial Sequence
  Oligonucleotide for detection of SNP TSC0032220
aggattcgtttty

SEQ ID NO: 128678 - DNA, 13 bp, Artificial Sequence
  Oligonucleotide for detection of SNP TSC0032220
raaaacgaatcct

SEQ ID NO: 128679 - DNA, 13 bp, Artificial Sequence
  Oligonucleotide for detection of SNP TSC0032220
ggggatgggtttt

SEQ ID NO: 128680 - DNA, 13 bp, Artificial Sequence
  Oligonucleotide for detection of SNP TSC0032220
aaaacccatcccc

SEQ ID NO: 128681 - DNA, 13 bp, Artificial Sequence
  Oligonucleotide for detection of SNP TSC0032220
ggggataggtttt

SEQ ID NO: 128682 - DNA, 13 bp, Artificial Sequence
  Oligonucleotide for detection of SNP TSC0032220
aaaacctatcccc

SEQ ID NO: 128683 - DNA, 13 bp, Artificial Sequence
  Oligonucleotide for detection of SNP TSC0032220
ggggacgggtttt

SEQ ID NO: 128684 - DNA, 13 bp, Artificial Sequence
  Oligonucleotide for detection of SNP TSC0032220
aaaacccgtcccc

SEQ ID NO: 128685 - DNA, 13 bp, Artificial Sequence
  Oligonucleotide for detection of SNP TSC0032221
ggttgtagtgaga

SEQ ID NO: 128686 - DNA, 13 bp, Artificial Sequence
  Oligonucleotide for detection of SNP TSC0032221
tctcactacaacc

SEQ ID NO: 128687 - DNA, 13 bp, Artificial Sequence
  Oligonucleotide for detection of SNP TSC0032221
ggttgtggtgaga

SEQ ID NO: 128688 - DNA, 13 bp, Artificial Sequence
  Oligonucleotide for detection of SNP TSC0032221
tctcaccacaacc

SEQ ID NO: 128689 - DNA, 13 bp, Artificial Sequence
  Oligonucleotide for detection of SNP TSC0032221
ggttgtagcgaga

SEQ ID NO: 128690 - DNA, 13 bp, Artificial Sequence
  Oligonucleotide for detection of SNP TSC0032221
tctcgctacaacc

SEQ ID NO: 128691 - DNA, 13 bp, Artificial Sequence
  Oligonucleotide for detection of SNP TSC0032221
ggttgcggtgaga

SEQ ID NO: 128692 - DNA, 13 bp, Artificial Sequence
  Oligonucleotide for detection of SNP TSC0032221
tctcaccgcaacc

SEQ ID NO: 128693 - DNA, 13 bp, Artificial Sequence
  Oligonucleotide for detection of SNP TSC0032221
ggttgtggcgaga

SEQ ID NO: 128694 - DNA, 13 bp, Artificial Sequence
  Oligonucleotide for detection of SNP TSC0032221
tctcgccacaacc

SEQ ID NO: 128695 - DNA, 13 bp, Artificial Sequence
  Oligonucleotide for detection of SNP TSC0032221
ggttgcggcgaga

SEQ ID NO: 128696 - DNA, 13 bp, Artificial Sequence
  Oligonucleotide for detection of SNP TSC0032221
tctcgccgcaacc

SEQ ID NO: 128697 - DNA, 13 bp, Artificial Sequence
  Oligonucleotide for detection of SNP TSC0032221
ttttgttgtagty

SEQ ID NO: 128698 - DNA, 13 bp, Artificial Sequence
  Oligonucleotide for detection of SNP TSC0032221
ractacaacaaaa

SEQ ID NO: 128699 - DNA, 13 bp, Artificial Sequence
  Oligonucleotide for detection of SNP TSC0032221
tttcgttgtagty

SEQ ID NO: 128700 - DNA, 13 bp, Artificial Sequence
  Oligonucleotide for detection of SNP TSC0032221
ractacaacgaaa

SEQ ID NO: 128701 - DNA, 13 bp, Artificial Sequence
  Oligonucleotide for detection of SNP TSC0032221
ttttgtcgtagty

SEQ ID NO: 128702 - DNA, 13 bp, Artificial Sequence
  Oligonucleotide for detection of SNP TSC0032221
ractacgacaaaa

SEQ ID NO: 128703 - DNA, 13 bp, Artificial Sequence
  Oligonucleotide for detection of SNP TSC0032221
tttcgtcgtagty

SEQ ID NO: 128704 - DNA, 13 bp, Artificial Sequence
  Oligonucleotide for detection of SNP TSC0032221
ractacgacgaaa

SEQ ID NO: 128705 - DNA, 13 bp, Artificial Sequence
  Oligonucleotide for detection of SNP TSC0032223
ttggagtggggay

SEQ ID NO: 128706 - DNA, 13 bp, Artificial Sequence
  Oligonucleotide for detection of SNP TSC0032223
rtccccactccaa

SEQ ID NO: 128707 - DNA, 13 bp, Artificial Sequence
  Oligonucleotide for detection of SNP TSC0032223
ttggaggggggay

SEQ ID NO: 128708 - DNA, 13 bp, Artificial Sequence
  Oligonucleotide for detection of SNP TSC0032223
rtcccccctccaa

SEQ ID NO: 128709 - DNA, 13 bp, Artificial Sequence
  Oligonucleotide for detection of SNP TSC0032223
ttggagcggggay

SEQ ID NO: 128710 - DNA, 13 bp, Artificial Sequence
  Oligonucleotide for detection of SNP TSC0032223
rtccccgctccaa

SEQ ID NO: 128711 - DNA, 13 bp, Artificial Sequence
  Oligonucleotide for detection of SNP TSC0032223
gtttttgttttag

SEQ ID NO: 128712 - DNA, 13 bp, Artificial Sequence
  Oligonucleotide for detection of SNP TSC0032223
ctaaaacaaaaac

SEQ ID NO: 128713 - DNA, 13 bp, Artificial Sequence
  Oligonucleotide for detection of SNP TSC0032223
gttttttttttag

SEQ ID NO: 128714 - DNA, 13 bp, Artificial Sequence
  Oligonucleotide for detection of SNP TSC0032223
ctaaaaaaaaaac

SEQ ID NO: 128715 - DNA, 13 bp, Artificial Sequence
  Oligonucleotide for detection of SNP TSC0032223
gttttcgttttag

SEQ ID NO: 128716 - DNA, 13 bp, Artificial Sequence
  Oligonucleotide for detection of SNP TSC0032223
ctaaaacgaaaac

SEQ ID NO: 128717 - DNA, 13 bp, Artificial Sequence
  Oligonucleotide for detection of SNP TSC0032226
gtattttgattty

SEQ ID NO: 128718 - DNA, 13 bp, Artificial Sequence
  Oligonucleotide for detection of SNP TSC0032226
raaatcaaaatac

SEQ ID NO: 128719 - DNA, 13 bp, Artificial Sequence
  Oligonucleotide for detection of SNP TSC0032226
gtatttcgattty

SEQ ID NO: 128720 - DNA, 13 bp, Artificial Sequence
  Oligonucleotide for detection of SNP TSC0032226
raaatcgaaatac

SEQ ID NO: 128721 - DNA, 13 bp, Artificial Sequence
  Oligonucleotide for detection of SNP TSC0032226
ggagttggaatgy

SEQ ID NO: 128722 - DNA, 13 bp, Artificial Sequence
  Oligonucleotide for detection of SNP TSC0032226
rcattccaactcc

SEQ ID NO: 128723 - DNA, 13 bp, Artificial Sequence
  Oligonucleotide for detection of SNP TSC0032226
ggagttagaatgy

SEQ ID NO: 128724 - DNA, 13 bp, Artificial Sequence
  Oligonucleotide for detection of SNP TSC0032226
rcattctaactcc

SEQ ID NO: 128725 - DNA, 13 bp, Artificial Sequence
  Oligonucleotide for detection of SNP TSC0032226
ggagtcggaatgy

SEQ ID NO: 128726 - DNA, 13 bp, Artificial Sequence
  Oligonucleotide for detection of SNP TSC0032226
rcattccgactcc

SEQ ID NO: 128727 - DNA, 13 bp, Artificial Sequence
  Oligonucleotide for detection of SNP TSC0032227
gatgagatatagg

SEQ ID NO: 128728 - DNA, 13 bp, Artificial Sequence
  Oligonucleotide for detection of SNP TSC0032227
cctatatctcatc

SEQ ID NO: 128729 - DNA, 13 bp, Artificial Sequence
  Oligonucleotide for detection of SNP TSC0032227
gatgagttatagg

SEQ ID NO: 128730 - DNA, 13 bp, Artificial Sequence
  Oligonucleotide for detection of SNP TSC0032227
cctataactcatc

SEQ ID NO: 128731 - DNA, 13 bp, Artificial Sequence
  Oligonucleotide for detection of SNP TSC0032227
tttgtgttttaty

SEQ ID NO: 128732 - DNA, 13 bp, Artificial Sequence
  Oligonucleotide for detection of SNP TSC0032227
rataaaacacaaa

SEQ ID NO: 128733 - DNA, 13 bp, Artificial Sequence
  Oligonucleotide for detection of SNP TSC0032227
tttgtgatttaty

SEQ ID NO: 128734 - DNA, 13 bp, Artificial Sequence
  Oligonucleotide for detection of SNP TSC0032227
rataaatcacaaa

SEQ ID NO: 128735 - DNA, 13 bp, Artificial Sequence
  Oligonucleotide for detection of SNP TSC0032229
ggtgtaattagga

SEQ ID NO: 128736 - DNA, 13 bp, Artificial Sequence
  Oligonucleotide for detection of SNP TSC0032229
tcctaattacacc

SEQ ID NO: 128737 - DNA, 13 bp, Artificial Sequence
  Oligonucleotide for detection of SNP TSC0032229
ggtgtagttagga

SEQ ID NO: 128738 - DNA, 13 bp, Artificial Sequence
  Oligonucleotide for detection of SNP TSC0032229
tcctaactacacc

SEQ ID NO: 128739 - DNA, 13 bp, Artificial Sequence
  Oligonucleotide for detection of SNP TSC0032230
aaaatgaggaatt

SEQ ID NO: 128740 - DNA, 13 bp, Artificial Sequence
  Oligonucleotide for detection of SNP TSC0032230
aattcctcatttt

SEQ ID NO: 128741 - DNA, 13 bp, Artificial Sequence
  Oligonucleotide for detection of SNP TSC0032230
aaaatggggaatt

SEQ ID NO: 128742 - DNA, 13 bp, Artificial Sequence
  Oligonucleotide for detection of SNP TSC0032230
aattccccatttt

SEQ ID NO: 128743 - DNA, 13 bp, Artificial Sequence
  Oligonucleotide for detection of SNP TSC0032231
tatatttggtgta

SEQ ID NO: 128744 - DNA, 13 bp, Artificial Sequence
  Oligonucleotide for detection of SNP TSC0032231
tacaccaaatata

SEQ ID NO: 128745 - DNA, 13 bp, Artificial Sequence
  Oligonucleotide for detection of SNP TSC0032231
tatattcggtgta

SEQ ID NO: 128746 - DNA, 13 bp, Artificial Sequence
  Oligonucleotide for detection of SNP TSC0032231
tacaccgaatata

SEQ ID NO: 128747 - DNA, 13 bp, Artificial Sequence
  Oligonucleotide for detection of SNP TSC0032231
tgtattgggtgtg

SEQ ID NO: 128748 - DNA, 13 bp, Artificial Sequence
  Oligonucleotide for detection of SNP TSC0032231
cacacccaataca

SEQ ID NO: 128749 - DNA, 13 bp, Artificial Sequence
  Oligonucleotide for detection of SNP TSC0032231
tgtattaggtgtg

SEQ ID NO: 128750 - DNA, 13 bp, Artificial Sequence
  Oligonucleotide for detection of SNP TSC0032231
cacacctaataca

SEQ ID NO: 128751 - DNA, 13 bp, Artificial Sequence
  Oligonucleotide for detection of SNP TSC0032231
tgtatcgggtgtg

SEQ ID NO: 128752 - DNA, 13 bp, Artificial Sequence
  Oligonucleotide for detection of SNP TSC0032231
cacacccgataca

SEQ ID NO: 128753 - DNA, 13 bp, Artificial Sequence
  Oligonucleotide for detection of SNP TSC0032232
tggttgataggta

SEQ ID NO: 128754 - DNA, 13 bp, Artificial Sequence
  Oligonucleotide for detection of SNP TSC0032232
tacctatcaacca

SEQ ID NO: 128755 - DNA, 13 bp, Artificial Sequence
  Oligonucleotide for detection of SNP TSC0032232
tggttgttaggta

SEQ ID NO: 128756 - DNA, 13 bp, Artificial Sequence
  Oligonucleotide for detection of SNP TSC0032232
tacctaacaacca

SEQ ID NO: 128757 - DNA, 13 bp, Artificial Sequence
  Oligonucleotide for detection of SNP TSC0032232
tatttgttagtta

SEQ ID NO: 128758 - DNA, 13 bp, Artificial Sequence
  Oligonucleotide for detection of SNP TSC0032232
taactaacaaata

SEQ ID NO: 128759 - DNA, 13 bp, Artificial Sequence
  Oligonucleotide for detection of SNP TSC0032232
tatttggtagtta

SEQ ID NO: 128760 - DNA, 13 bp, Artificial Sequence
  Oligonucleotide for detection of SNP TSC0032232
taactaccaaata

SEQ ID NO: 128761 - DNA, 13 bp, Artificial Sequence
  Oligonucleotide for detection of SNP TSC0032233
gaagttatttgat

SEQ ID NO: 128762 - DNA, 13 bp, Artificial Sequence
  Oligonucleotide for detection of SNP TSC0032233
atcaaataacttc

SEQ ID NO: 128763 - DNA, 13 bp, Artificial Sequence
  Oligonucleotide for detection of SNP TSC0032233
gaagttttttgat

SEQ ID NO: 128764 - DNA, 13 bp, Artificial Sequence
  Oligonucleotide for detection of SNP TSC0032233
atcaaaaaacttc

SEQ ID NO: 128765 - DNA, 13 bp, Artificial Sequence
  Oligonucleotide for detection of SNP TSC0032233
attagatgattty

SEQ ID NO: 128766 - DNA, 13 bp, Artificial Sequence
  Oligonucleotide for detection of SNP TSC0032233
raaatcatctaat

SEQ ID NO: 128767 - DNA, 13 bp, Artificial Sequence
  Oligonucleotide for detection of SNP TSC0032233
attagaggattty

SEQ ID NO: 128768 - DNA, 13 bp, Artificial Sequence
  Oligonucleotide for detection of SNP TSC0032233
raaatcctctaat

SEQ ID NO: 128769 - DNA, 13 bp, Artificial Sequence
  Oligonucleotide for detection of SNP TSC0032234
attaaggattaay

SEQ ID NO: 128770 - DNA, 13 bp, Artificial Sequence
  Oligonucleotide for detection of SNP TSC0032234
rttaatccttaat

SEQ ID NO: 128771 - DNA, 13 bp, Artificial Sequence
  Oligonucleotide for detection of SNP TSC0032234
attaagaattaay

SEQ ID NO: 128772 - DNA, 13 bp, Artificial Sequence
  Oligonucleotide for detection of SNP TSC0032234
rttaattcttaat

SEQ ID NO: 128773 - DNA, 13 bp, Artificial Sequence
  Oligonucleotide for detection of SNP TSC0032235
ttttttcgtttgt

SEQ ID NO: 128774 - DNA, 13 bp, Artificial Sequence
  Oligonucleotide for detection of SNP TSC0032235
acaaacgaaaaaa

SEQ ID NO: 128775 - DNA, 13 bp, Artificial Sequence
  Oligonucleotide for detection of SNP TSC0032235
ataggtgggagga

SEQ ID NO: 128776 - DNA, 13 bp, Artificial Sequence
  Oligonucleotide for detection of SNP TSC0032235
tcctcccacctat

SEQ ID NO: 128777 - DNA, 13 bp, Artificial Sequence
  Oligonucleotide for detection of SNP TSC0032235
ataggtaggagga

SEQ ID NO: 128778 - DNA, 13 bp, Artificial Sequence
  Oligonucleotide for detection of SNP TSC0032235
tcctcctacctat

SEQ ID NO: 128779 - DNA, 13 bp, Artificial Sequence
  Oligonucleotide for detection of SNP TSC0032235
ataggcgggagga

SEQ ID NO: 128780 - DNA, 13 bp, Artificial Sequence
  Oligonucleotide for detection of SNP TSC0032235
tcctcccgcctat

SEQ ID NO: 128781 - DNA, 13 bp, Artificial Sequence
  Oligonucleotide for detection of SNP TSC0032242
gtaggaagatttt

SEQ ID NO: 128782 - DNA, 13 bp, Artificial Sequence
  Oligonucleotide for detection of SNP TSC0032242
aaaatcttcctac

SEQ ID NO: 128783 - DNA, 13 bp, Artificial Sequence
  Oligonucleotide for detection of SNP TSC0032242
gtaggaggatttt

SEQ ID NO: 128784 - DNA, 13 bp, Artificial Sequence
  Oligonucleotide for detection of SNP TSC0032242
aaaatcctcctac

SEQ ID NO: 128785 - DNA, 13 bp, Artificial Sequence
  Oligonucleotide for detection of SNP TSC0032243
atatatgtaatta

SEQ ID NO: 128786 - DNA, 13 bp, Artificial Sequence
  Oligonucleotide for detection of SNP TSC0032243
taattacatatat

SEQ ID NO: 128787 - DNA, 13 bp, Artificial Sequence
  Oligonucleotide for detection of SNP TSC0032247
atatgtatgtttt

SEQ ID NO: 128788 - DNA, 13 bp, Artificial Sequence
  Oligonucleotide for detection of SNP TSC0032247
aaaacatacatat

SEQ ID NO: 128789 - DNA, 13 bp, Artificial Sequence
  Oligonucleotide for detection of SNP TSC0032247
atatgtgtgtttt

SEQ ID NO: 128790 - DNA, 13 bp, Artificial Sequence
  Oligonucleotide for detection of SNP TSC0032247
aaaacacacatat

SEQ ID NO: 128791 - DNA, 13 bp, Artificial Sequence
  Oligonucleotide for detection of SNP TSC0032247
atacgtatgtttt

SEQ ID NO: 128792 - DNA, 13 bp, Artificial Sequence
  Oligonucleotide for detection of SNP TSC0032247
aaaacatacgtat

SEQ ID NO: 128793 - DNA, 13 bp, Artificial Sequence
  Oligonucleotide for detection of SNP TSC0032247
atacgtgtgtttt

SEQ ID NO: 128794 - DNA, 13 bp, Artificial Sequence
  Oligonucleotide for detection of SNP TSC0032247
aaaacacacgtat

SEQ ID NO: 128795 - DNA, 13 bp, Artificial Sequence
  Oligonucleotide for detection of SNP TSC0032247
atatgcgtgtttt

SEQ ID NO: 128796 - DNA, 13 bp, Artificial Sequence
  Oligonucleotide for detection of SNP TSC0032247
aaaacacgcatat

SEQ ID NO: 128797 - DNA, 13 bp, Artificial Sequence
  Oligonucleotide for detection of SNP TSC0032247
atacgcgtgtttt

SEQ ID NO: 128798 - DNA, 13 bp, Artificial Sequence
  Oligonucleotide for detection of SNP TSC0032247
aaaacacgcgtat

SEQ ID NO: 128799 - DNA, 13 bp, Artificial Sequence
  Oligonucleotide for detection of SNP TSC0032247
agggtatgtgtgt

SEQ ID NO: 128800 - DNA, 13 bp, Artificial Sequence
  Oligonucleotide for detection of SNP TSC0032247
acacacataccct

SEQ ID NO: 128801 - DNA, 13 bp, Artificial Sequence
  Oligonucleotide for detection of SNP TSC0032247
agggtatgcgtgt

SEQ ID NO: 128802 - DNA, 13 bp, Artificial Sequence
  Oligonucleotide for detection of SNP TSC0032247
acacgcataccct

SEQ ID NO: 128803 - DNA, 13 bp, Artificial Sequence
  Oligonucleotide for detection of SNP TSC0032247
agggtacgtgtgt

SEQ ID NO: 128804 - DNA, 13 bp, Artificial Sequence
  Oligonucleotide for detection of SNP TSC0032247
acacacgtaccct

SEQ ID NO: 128805 - DNA, 13 bp, Artificial Sequence
  Oligonucleotide for detection of SNP TSC0032247
agggtacgcgtgt

SEQ ID NO: 128806 - DNA, 13 bp, Artificial Sequence
  Oligonucleotide for detection of SNP TSC0032247
acacgcgtaccct

SEQ ID NO: 128807 - DNA, 13 bp, Artificial Sequence
  Oligonucleotide for detection of SNP TSC0032252
gtagtggtgatgt

SEQ ID NO: 128808 - DNA, 13 bp, Artificial Sequence
  Oligonucleotide for detection of SNP TSC0032252
acatcaccactac

SEQ ID NO: 128809 - DNA, 13 bp, Artificial Sequence
  Oligonucleotide for detection of SNP TSC0032252
gtagtgatgatgt

SEQ ID NO: 128810 - DNA, 13 bp, Artificial Sequence
  Oligonucleotide for detection of SNP TSC0032252
acatcatcactac

SEQ ID NO: 128811 - DNA, 13 bp, Artificial Sequence
  Oligonucleotide for detection of SNP TSC0032253
tgttgtagggagy

SEQ ID NO: 128812 - DNA, 13 bp, Artificial Sequence
  Oligonucleotide for detection of SNP TSC0032253
rctccctacaaca

SEQ ID NO: 128813 - DNA, 13 bp, Artificial Sequence
  Oligonucleotide for detection of SNP TSC0032253
tgttgtggggagy

SEQ ID NO: 128814 - DNA, 13 bp, Artificial Sequence
  Oligonucleotide for detection of SNP TSC0032253
rctccccacaaca

SEQ ID NO: 128815 - DNA, 13 bp, Artificial Sequence
  Oligonucleotide for detection of SNP TSC0032253
tgttgcggggagy

SEQ ID NO: 128816 - DNA, 13 bp, Artificial Sequence
  Oligonucleotide for detection of SNP TSC0032253
rctccccgcaaca

SEQ ID NO: 128817 - DNA, 13 bp, Artificial Sequence
  Oligonucleotide for detection of SNP TSC0032253
gttttttgtaata

SEQ ID NO: 128818 - DNA, 13 bp, Artificial Sequence
  Oligonucleotide for detection of SNP TSC0032253
tattacaaaaaac

SEQ ID NO: 128819 - DNA, 13 bp, Artificial Sequence
  Oligonucleotide for detection of SNP TSC0032253
gtttttcgtaata

SEQ ID NO: 128820 - DNA, 13 bp, Artificial Sequence
  Oligonucleotide for detection of SNP TSC0032253
tattacgaaaaac

SEQ ID NO: 128821 - DNA, 13 bp, Artificial Sequence
  Oligonucleotide for detection of SNP TSC0032254
tggtggggtgaag

SEQ ID NO: 128822 - DNA, 13 bp, Artificial Sequence
  Oligonucleotide for detection of SNP TSC0032254
cttcaccccacca

SEQ ID NO: 128823 - DNA, 13 bp, Artificial Sequence
  Oligonucleotide for detection of SNP TSC0032254
tggtggagtgaag

SEQ ID NO: 128824 - DNA, 13 bp, Artificial Sequence
  Oligonucleotide for detection of SNP TSC0032254
cttcactccacca

SEQ ID NO: 128825 - DNA, 13 bp, Artificial Sequence
  Oligonucleotide for detection of SNP TSC0032254
cggtggggtgaag

SEQ ID NO: 128826 - DNA, 13 bp, Artificial Sequence
  Oligonucleotide for detection of SNP TSC0032254
cttcaccccaccg

SEQ ID NO: 128827 - DNA, 13 bp, Artificial Sequence
  Oligonucleotide for detection of SNP TSC0032254
cggtggagtgaag

SEQ ID NO: 128828 - DNA, 13 bp, Artificial Sequence
  Oligonucleotide for detection of SNP TSC0032254
cttcactccaccg

SEQ ID NO: 128829 - DNA, 13 bp, Artificial Sequence
  Oligonucleotide for detection of SNP TSC0032254
tggcggggtgaag

SEQ ID NO: 128830 - DNA, 13 bp, Artificial Sequence
  Oligonucleotide for detection of SNP TSC0032254
cttcaccccgcca

SEQ ID NO: 128831 - DNA, 13 bp, Artificial Sequence
  Oligonucleotide for detection of SNP TSC0032254
tggcggagtgaag

SEQ ID NO: 128832 - DNA, 13 bp, Artificial Sequence
  Oligonucleotide for detection of SNP TSC0032254
cttcactccgcca

SEQ ID NO: 128833 - DNA, 13 bp, Artificial Sequence
  Oligonucleotide for detection of SNP TSC0032254
cggcggggtgaag

SEQ ID NO: 128834 - DNA, 13 bp, Artificial Sequence
  Oligonucleotide for detection of SNP TSC0032254
cttcaccccgccg

SEQ ID NO: 128835 - DNA, 13 bp, Artificial Sequence
  Oligonucleotide for detection of SNP TSC0032254
cggcggagtgaag

SEQ ID NO: 128836 - DNA, 13 bp, Artificial Sequence
  Oligonucleotide for detection of SNP TSC0032254
cttcactccgccg

SEQ ID NO: 128837 - DNA, 13 bp, Artificial Sequence
  Oligonucleotide for detection of SNP TSC0032261
gagaattgggtgt

SEQ ID NO: 128838 - DNA, 13 bp, Artificial Sequence
  Oligonucleotide for detection of SNP TSC0032261
acacccaattctc

SEQ ID NO: 128839 - DNA, 13 bp, Artificial Sequence
  Oligonucleotide for detection of SNP TSC0032261
gagaatcgggtgt

SEQ ID NO: 128840 - DNA, 13 bp, Artificial Sequence
  Oligonucleotide for detection of SNP TSC0032261
acacccgattctc

SEQ ID NO: 128841 - DNA, 13 bp, Artificial Sequence
  Oligonucleotide for detection of SNP TSC0032261
atatttggtttty

SEQ ID NO: 128842 - DNA, 13 bp, Artificial Sequence
  Oligonucleotide for detection of SNP TSC0032261
raaaaccaaatat

SEQ ID NO: 128843 - DNA, 13 bp, Artificial Sequence
  Oligonucleotide for detection of SNP TSC0032261
atatttagtttty

SEQ ID NO: 128844 - DNA, 13 bp, Artificial Sequence
  Oligonucleotide for detection of SNP TSC0032261
raaaactaaatat

SEQ ID NO: 128845 - DNA, 13 bp, Artificial Sequence
  Oligonucleotide for detection of SNP TSC0032261
atattcggtttty

SEQ ID NO: 128846 - DNA, 13 bp, Artificial Sequence
  Oligonucleotide for detection of SNP TSC0032261
raaaaccgaatat

SEQ ID NO: 128847 - DNA, 13 bp, Artificial Sequence
  Oligonucleotide for detection of SNP TSC0032262
ggaaataagaaty

SEQ ID NO: 128848 - DNA, 13 bp, Artificial Sequence
  Oligonucleotide for detection of SNP TSC0032262
rattcttatttcc

SEQ ID NO: 128849 - DNA, 13 bp, Artificial Sequence
  Oligonucleotide for detection of SNP TSC0032262
ggaaatgagaaty

SEQ ID NO: 128850 - DNA, 13 bp, Artificial Sequence
  Oligonucleotide for detection of SNP TSC0032262
rattctcatttcc

SEQ ID NO: 128851 - DNA, 13 bp, Artificial Sequence
  Oligonucleotide for detection of SNP TSC0032267
tttgttagttgta

SEQ ID NO: 128852 - DNA, 13 bp, Artificial Sequence
  Oligonucleotide for detection of SNP TSC0032267
tacaactaacaaa

SEQ ID NO: 128853 - DNA, 13 bp, Artificial Sequence
  Oligonucleotide for detection of SNP TSC0032267
tttgtttgttgta

SEQ ID NO: 128854 - DNA, 13 bp, Artificial Sequence
  Oligonucleotide for detection of SNP TSC0032267
tacaacaaacaaa

SEQ ID NO: 128855 - DNA, 13 bp, Artificial Sequence
  Oligonucleotide for detection of SNP TSC0032267
tttgttcgttgta

SEQ ID NO: 128856 - DNA, 13 bp, Artificial Sequence
  Oligonucleotide for detection of SNP TSC0032267
tacaacgaacaaa

SEQ ID NO: 128857 - DNA, 13 bp, Artificial Sequence
  Oligonucleotide for detection of SNP TSC0032267
tgtagttaataag

SEQ ID NO: 128858 - DNA, 13 bp, Artificial Sequence
  Oligonucleotide for detection of SNP TSC0032267
cttattaactaca

SEQ ID NO: 128859 - DNA, 13 bp, Artificial Sequence
  Oligonucleotide for detection of SNP TSC0032267
tgtagtgaataag

SEQ ID NO: 128860 - DNA, 13 bp, Artificial Sequence
  Oligonucleotide for detection of SNP TSC0032267
cttattcactaca

SEQ ID NO: 128861 - DNA, 13 bp, Artificial Sequence
  Oligonucleotide for detection of SNP TSC0032267
tgtagcgaataag

SEQ ID NO: 128862 - DNA, 13 bp, Artificial Sequence
  Oligonucleotide for detection of SNP TSC0032267
cttattcgctaca

SEQ ID NO: 128863 - DNA, 13 bp, Artificial Sequence
  Oligonucleotide for detection of SNP TSC0032268
gtagtttggatty

SEQ ID NO: 128864 - DNA, 13 bp, Artificial Sequence
  Oligonucleotide for detection of SNP TSC0032268
raatccaaactac

SEQ ID NO: 128865 - DNA, 13 bp, Artificial Sequence
  Oligonucleotide for detection of SNP TSC0032268
gtagttcggatty

SEQ ID NO: 128866 - DNA, 13 bp, Artificial Sequence
  Oligonucleotide for detection of SNP TSC0032268
raatccgaactac

SEQ ID NO: 128867 - DNA, 13 bp, Artificial Sequence
  Oligonucleotide for detection of SNP TSC0032268
gaatttggattay

SEQ ID NO: 128868 - DNA, 13 bp, Artificial Sequence
  Oligonucleotide for detection of SNP TSC0032268
rtaatccaaattc

SEQ ID NO: 128869 - DNA, 13 bp, Artificial Sequence
  Oligonucleotide for detection of SNP TSC0032268
gaatttagattay

SEQ ID NO: 128870 - DNA, 13 bp, Artificial Sequence
  Oligonucleotide for detection of SNP TSC0032268
rtaatctaaattc

SEQ ID NO: 128871 - DNA, 13 bp, Artificial Sequence
  Oligonucleotide for detection of SNP TSC0032268
gaattcggattay

SEQ ID NO: 128872 - DNA, 13 bp, Artificial Sequence
  Oligonucleotide for detection of SNP TSC0032268
rtaatccgaattc

SEQ ID NO: 128873 - DNA, 13 bp, Artificial Sequence
  Oligonucleotide for detection of SNP TSC0032269
tgtattatatatt

SEQ ID NO: 128874 - DNA, 13 bp, Artificial Sequence
  Oligonucleotide for detection of SNP TSC0032269
aatatataataca

SEQ ID NO: 128875 - DNA, 13 bp, Artificial Sequence
  Oligonucleotide for detection of SNP TSC0032269
tgtattgtatatt

SEQ ID NO: 128876 - DNA, 13 bp, Artificial Sequence
  Oligonucleotide for detection of SNP TSC0032269
aatatacaataca

SEQ ID NO: 128877 - DNA, 13 bp, Artificial Sequence
  Oligonucleotide for detection of SNP TSC0032270
aggagaatttggg

SEQ ID NO: 128878 - DNA, 13 bp, Artificial Sequence
  Oligonucleotide for detection of SNP TSC0032270
cccaaattctcct

SEQ ID NO: 128879 - DNA, 13 bp, Artificial Sequence
  Oligonucleotide for detection of SNP TSC0032270
aggagagtttggg

SEQ ID NO: 128880 - DNA, 13 bp, Artificial Sequence
  Oligonucleotide for detection of SNP TSC0032270
cccaaactctcct

SEQ ID NO: 128881 - DNA, 13 bp, Artificial Sequence
  Oligonucleotide for detection of SNP TSC0032271
atattaaatttta

SEQ ID NO: 128882 - DNA, 13 bp, Artificial Sequence
  Oligonucleotide for detection of SNP TSC0032271
taaaatttaatat

SEQ ID NO: 128883 - DNA, 13 bp, Artificial Sequence
  Oligonucleotide for detection of SNP TSC0032271
atattatatttta

SEQ ID NO: 128884 - DNA, 13 bp, Artificial Sequence
  Oligonucleotide for detection of SNP TSC0032271
taaaatataatat

SEQ ID NO: 128885 - DNA, 13 bp, Artificial Sequence
  Oligonucleotide for detection of SNP TSC0032271
taaaatttgatat

SEQ ID NO: 128886 - DNA, 13 bp, Artificial Sequence
  Oligonucleotide for detection of SNP TSC0032271
atatcaaatttta

SEQ ID NO: 128887 - DNA, 13 bp, Artificial Sequence
  Oligonucleotide for detection of SNP TSC0032271
taaaatatgatat

SEQ ID NO: 128888 - DNA, 13 bp, Artificial Sequence
  Oligonucleotide for detection of SNP TSC0032271
atatcatatttta

SEQ ID NO: 128889 - DNA, 13 bp, Artificial Sequence
  Oligonucleotide for detection of SNP TSC0032272
agtgttggtttag

SEQ ID NO: 128890 - DNA, 13 bp, Artificial Sequence
  Oligonucleotide for detection of SNP TSC0032272
ctaaaccaacact

SEQ ID NO: 128891 - DNA, 13 bp, Artificial Sequence
  Oligonucleotide for detection of SNP TSC0032272
agtgttagtttag

SEQ ID NO: 128892 - DNA, 13 bp, Artificial Sequence
  Oligonucleotide for detection of SNP TSC0032272
ctaaactaacact

SEQ ID NO: 128893 - DNA, 13 bp, Artificial Sequence
  Oligonucleotide for detection of SNP TSC0032272
agcgttggtttag

SEQ ID NO: 128894 - DNA, 13 bp, Artificial Sequence
  Oligonucleotide for detection of SNP TSC0032272
ctaaaccaacgct

SEQ ID NO: 128895 - DNA, 13 bp, Artificial Sequence
  Oligonucleotide for detection of SNP TSC0032272
agcgttagtttag

SEQ ID NO: 128896 - DNA, 13 bp, Artificial Sequence
  Oligonucleotide for detection of SNP TSC0032272
ctaaactaacgct

SEQ ID NO: 128897 - DNA, 13 bp, Artificial Sequence
  Oligonucleotide for detection of SNP TSC0032274
aagttgtaaaaga

SEQ ID NO: 128898 - DNA, 13 bp, Artificial Sequence
  Oligonucleotide for detection of SNP TSC0032274
tcttttacaactt

SEQ ID NO: 128899 - DNA, 13 bp, Artificial Sequence
  Oligonucleotide for detection of SNP TSC0032274
aagttgaaaaaga

SEQ ID NO: 128900 - DNA, 13 bp, Artificial Sequence
  Oligonucleotide for detection of SNP TSC0032274
tctttttcaactt

SEQ ID NO: 128901 - DNA, 13 bp, Artificial Sequence
  Oligonucleotide for detection of SNP TSC0032277
ttattgggggtgy

SEQ ID NO: 128902 - DNA, 13 bp, Artificial Sequence
  Oligonucleotide for detection of SNP TSC0032277
rcacccccaataa

SEQ ID NO: 128903 - DNA, 13 bp, Artificial Sequence
  Oligonucleotide for detection of SNP TSC0032277
ttattgtgggtgy

SEQ ID NO: 128904 - DNA, 13 bp, Artificial Sequence
  Oligonucleotide for detection of SNP TSC0032277
rcacccacaataa

SEQ ID NO: 128905 - DNA, 13 bp, Artificial Sequence
  Oligonucleotide for detection of SNP TSC0032277
gtatttttaataa

SEQ ID NO: 128906 - DNA, 13 bp, Artificial Sequence
  Oligonucleotide for detection of SNP TSC0032277
ttattaaaaatac

SEQ ID NO: 128907 - DNA, 13 bp, Artificial Sequence
  Oligonucleotide for detection of SNP TSC0032277
gtatttataataa

SEQ ID NO: 128908 - DNA, 13 bp, Artificial Sequence
  Oligonucleotide for detection of SNP TSC0032277
ttattataaatac

SEQ ID NO: 128909 - DNA, 13 bp, Artificial Sequence
  Oligonucleotide for detection of SNP TSC0032278
gagaaataatgta

SEQ ID NO: 128910 - DNA, 13 bp, Artificial Sequence
  Oligonucleotide for detection of SNP TSC0032278
tacattatttctc

SEQ ID NO: 128911 - DNA, 13 bp, Artificial Sequence
  Oligonucleotide for detection of SNP TSC0032278
gagaaagaatgta

SEQ ID NO: 128912 - DNA, 13 bp, Artificial Sequence
  Oligonucleotide for detection of SNP TSC0032278
tacattctttctc

SEQ ID NO: 128913 - DNA, 13 bp, Artificial Sequence
  Oligonucleotide for detection of SNP TSC0032278
gagaaataacgta

SEQ ID NO: 128914 - DNA, 13 bp, Artificial Sequence
  Oligonucleotide for detection of SNP TSC0032278
tacgttatttctc

SEQ ID NO: 128915 - DNA, 13 bp, Artificial Sequence
  Oligonucleotide for detection of SNP TSC0032278
gagaaagaacgta

SEQ ID NO: 128916 - DNA, 13 bp, Artificial Sequence
  Oligonucleotide for detection of SNP TSC0032278
tacgttctttctc

SEQ ID NO: 128917 - DNA, 13 bp, Artificial Sequence
  Oligonucleotide for detection of SNP TSC0032278
tgcgttgttttty

SEQ ID NO: 128918 - DNA, 13 bp, Artificial Sequence
  Oligonucleotide for detection of SNP TSC0032278
raaaaacaacgca

SEQ ID NO: 128919 - DNA, 13 bp, Artificial Sequence
  Oligonucleotide for detection of SNP TSC0032278
tgcgtttttttty

SEQ ID NO: 128920 - DNA, 13 bp, Artificial Sequence
  Oligonucleotide for detection of SNP TSC0032278
raaaaaaaacgca

SEQ ID NO: 128921 - DNA, 13 bp, Artificial Sequence
  Oligonucleotide for detection of SNP TSC0032279
gagttagatgtgt

SEQ ID NO: 128922 - DNA, 13 bp, Artificial Sequence
  Oligonucleotide for detection of SNP TSC0032279
acacatctaactc

SEQ ID NO: 128923 - DNA, 13 bp, Artificial Sequence
  Oligonucleotide for detection of SNP TSC0032279
gagttaaatgtgt

SEQ ID NO: 128924 - DNA, 13 bp, Artificial Sequence
  Oligonucleotide for detection of SNP TSC0032279
acacatttaactc

SEQ ID NO: 128925 - DNA, 13 bp, Artificial Sequence
  Oligonucleotide for detection of SNP TSC0032279
gagttagatgcgt

SEQ ID NO: 128926 - DNA, 13 bp, Artificial Sequence
  Oligonucleotide for detection of SNP TSC0032279
acgcatctaactc

SEQ ID NO: 128927 - DNA, 13 bp, Artificial Sequence
  Oligonucleotide for detection of SNP TSC0032279
gagttaaatgcgt

SEQ ID NO: 128928 - DNA, 13 bp, Artificial Sequence
  Oligonucleotide for detection of SNP TSC0032279
acgcatttaactc

SEQ ID NO: 128929 - DNA, 13 bp, Artificial Sequence
  Oligonucleotide for detection of SNP TSC0032280
aggattattatty

SEQ ID NO: 128930 - DNA, 13 bp, Artificial Sequence
  Oligonucleotide for detection of SNP TSC0032280
raataataatcct

SEQ ID NO: 128931 - DNA, 13 bp, Artificial Sequence
  Oligonucleotide for detection of SNP TSC0032280
aggattgttatty

SEQ ID NO: 128932 - DNA, 13 bp, Artificial Sequence
  Oligonucleotide for detection of SNP TSC0032280
raataacaatcct

SEQ ID NO: 128933 - DNA, 13 bp, Artificial Sequence
  Oligonucleotide for detection of SNP TSC0032280
aggatcgttatty

SEQ ID NO: 128934 - DNA, 13 bp, Artificial Sequence
  Oligonucleotide for detection of SNP TSC0032280
raataacgatcct

SEQ ID NO: 128935 - DNA, 13 bp, Artificial Sequence
  Oligonucleotide for detection of SNP TSC0032280
gagtggtggtttt

SEQ ID NO: 128936 - DNA, 13 bp, Artificial Sequence
  Oligonucleotide for detection of SNP TSC0032280
aaaaccaccactc

SEQ ID NO: 128937 - DNA, 13 bp, Artificial Sequence
  Oligonucleotide for detection of SNP TSC0032280
gagtggcggtttt

SEQ ID NO: 128938 - DNA, 13 bp, Artificial Sequence
  Oligonucleotide for detection of SNP TSC0032280
aaaaccgccactc

SEQ ID NO: 128939 - DNA, 13 bp, Artificial Sequence
  Oligonucleotide for detection of SNP TSC0032281
aggagtggtggty

SEQ ID NO: 128940 - DNA, 13 bp, Artificial Sequence
  Oligonucleotide for detection of SNP TSC0032281
raccaccactcct

SEQ ID NO: 128941 - DNA, 13 bp, Artificial Sequence
  Oligonucleotide for detection of SNP TSC0032281
aggagtagtggty

SEQ ID NO: 128942 - DNA, 13 bp, Artificial Sequence
  Oligonucleotide for detection of SNP TSC0032281
raccactactcct

SEQ ID NO: 128943 - DNA, 13 bp, Artificial Sequence
  Oligonucleotide for detection of SNP TSC0032282
gaatttatgattt

SEQ ID NO: 128944 - DNA, 13 bp, Artificial Sequence
  Oligonucleotide for detection of SNP TSC0032282
aaatcataaattc

SEQ ID NO: 128945 - DNA, 13 bp, Artificial Sequence
  Oligonucleotide for detection of SNP TSC0032283
ttgttagtgttty

SEQ ID NO: 128946 - DNA, 13 bp, Artificial Sequence
  Oligonucleotide for detection of SNP TSC0032283
raaacactaacaa

SEQ ID NO: 128947 - DNA, 13 bp, Artificial Sequence
  Oligonucleotide for detection of SNP TSC0032283
ttgttaatgttty

SEQ ID NO: 128948 - DNA, 13 bp, Artificial Sequence
  Oligonucleotide for detection of SNP TSC0032283
raaacattaacaa

SEQ ID NO: 128949 - DNA, 13 bp, Artificial Sequence
  Oligonucleotide for detection of SNP TSC0032283
tcgttagtgttty

SEQ ID NO: 128950 - DNA, 13 bp, Artificial Sequence
  Oligonucleotide for detection of SNP TSC0032283
raaacactaacga

SEQ ID NO: 128951 - DNA, 13 bp, Artificial Sequence
  Oligonucleotide for detection of SNP TSC0032283
tcgttaatgttty

SEQ ID NO: 128952 - DNA, 13 bp, Artificial Sequence
  Oligonucleotide for detection of SNP TSC0032283
raaacattaacga

SEQ ID NO: 128953 - DNA, 13 bp, Artificial Sequence
  Oligonucleotide for detection of SNP TSC0032284
agatatatatgty

SEQ ID NO: 128954 - DNA, 13 bp, Artificial Sequence
  Oligonucleotide for detection of SNP TSC0032284
racatatatatct

SEQ ID NO: 128955 - DNA, 13 bp, Artificial Sequence
  Oligonucleotide for detection of SNP TSC0032284
agatatttatgty

SEQ ID NO: 128956 - DNA, 13 bp, Artificial Sequence
  Oligonucleotide for detection of SNP TSC0032284
racataaatatct

SEQ ID NO: 128957 - DNA, 13 bp, Artificial Sequence
  Oligonucleotide for detection of SNP TSC0032284
gatatgtgtgttt

SEQ ID NO: 128958 - DNA, 13 bp, Artificial Sequence
  Oligonucleotide for detection of SNP TSC0032284
aaacacacatatc

SEQ ID NO: 128959 - DNA, 13 bp, Artificial Sequence
  Oligonucleotide for detection of SNP TSC0032284
gatatgggtgttt

SEQ ID NO: 128960 - DNA, 13 bp, Artificial Sequence
  Oligonucleotide for detection of SNP TSC0032284
aaacacccatatc

SEQ ID NO: 128961 - DNA, 13 bp, Artificial Sequence
  Oligonucleotide for detection of SNP TSC0032286
agtagaaatataa

SEQ ID NO: 128962 - DNA, 13 bp, Artificial Sequence
  Oligonucleotide for detection of SNP TSC0032286
ttatatttctact

SEQ ID NO: 128963 - DNA, 13 bp, Artificial Sequence
  Oligonucleotide for detection of SNP TSC0032286
agtagagatataa

SEQ ID NO: 128964 - DNA, 13 bp, Artificial Sequence
  Oligonucleotide for detection of SNP TSC0032286
ttatatctctact

SEQ ID NO: 128965 - DNA, 13 bp, Artificial Sequence
  Oligonucleotide for detection of SNP TSC0032287
tgagttaggagtg

SEQ ID NO: 128966 - DNA, 13 bp, Artificial Sequence
  Oligonucleotide for detection of SNP TSC0032287
cactcctaactca

SEQ ID NO: 128967 - DNA, 13 bp, Artificial Sequence
  Oligonucleotide for detection of SNP TSC0032287
tgagttgggagtg

SEQ ID NO: 128968 - DNA, 13 bp, Artificial Sequence
  Oligonucleotide for detection of SNP TSC0032287
cactcccaactca

SEQ ID NO: 128969 - DNA, 13 bp, Artificial Sequence
  Oligonucleotide for detection of SNP TSC0032287
tgagttaggagcg

SEQ ID NO: 128970 - DNA, 13 bp, Artificial Sequence
  Oligonucleotide for detection of SNP TSC0032287
cgctcctaactca

SEQ ID NO: 128971 - DNA, 13 bp, Artificial Sequence
  Oligonucleotide for detection of SNP TSC0032287
tgagtcgggagtg

SEQ ID NO: 128972 - DNA, 13 bp, Artificial Sequence
  Oligonucleotide for detection of SNP TSC0032287
cactcccgactca

SEQ ID NO: 128973 - DNA, 13 bp, Artificial Sequence
  Oligonucleotide for detection of SNP TSC0032287
tgagttgggagcg

SEQ ID NO: 128974 - DNA, 13 bp, Artificial Sequence
  Oligonucleotide for detection of SNP TSC0032287
cgctcccaactca

SEQ ID NO: 128975 - DNA, 13 bp, Artificial Sequence
  Oligonucleotide for detection of SNP TSC0032287
tgagtcgggagcg

SEQ ID NO: 128976 - DNA, 13 bp, Artificial Sequence
  Oligonucleotide for detection of SNP TSC0032287
cgctcccgactca

SEQ ID NO: 128977 - DNA, 13 bp, Artificial Sequence
  Oligonucleotide for detection of SNP TSC0032287
tgtttttgattta

SEQ ID NO: 128978 - DNA, 13 bp, Artificial Sequence
  Oligonucleotide for detection of SNP TSC0032287
taaatcaaaaaca

SEQ ID NO: 128979 - DNA, 13 bp, Artificial Sequence
  Oligonucleotide for detection of SNP TSC0032287
cgtttttgattta

SEQ ID NO: 128980 - DNA, 13 bp, Artificial Sequence
  Oligonucleotide for detection of SNP TSC0032287
taaatcaaaaacg

SEQ ID NO: 128981 - DNA, 13 bp, Artificial Sequence
  Oligonucleotide for detection of SNP TSC0032287
tgttttcgattta

SEQ ID NO: 128982 - DNA, 13 bp, Artificial Sequence
  Oligonucleotide for detection of SNP TSC0032287
taaatcgaaaaca

SEQ ID NO: 128983 - DNA, 13 bp, Artificial Sequence
  Oligonucleotide for detection of SNP TSC0032287
cgttttcgattta

SEQ ID NO: 128984 - DNA, 13 bp, Artificial Sequence
  Oligonucleotide for detection of SNP TSC0032287
taaatcgaaaacg

SEQ ID NO: 128985 - DNA, 13 bp, Artificial Sequence
  Oligonucleotide for detection of SNP TSC0032288
atagagggtgaag

SEQ ID NO: 128986 - DNA, 13 bp, Artificial Sequence
  Oligonucleotide for detection of SNP TSC0032288
cttcaccctctat

SEQ ID NO: 128987 - DNA, 13 bp, Artificial Sequence
  Oligonucleotide for detection of SNP TSC0032288
atagagagtgaag

SEQ ID NO: 128988 - DNA, 13 bp, Artificial Sequence
  Oligonucleotide for detection of SNP TSC0032288
cttcactctctat

SEQ ID NO: 128989 - DNA, 13 bp, Artificial Sequence
  Oligonucleotide for detection of SNP TSC0032294
ataatgtgttgga

SEQ ID NO: 128990 - DNA, 13 bp, Artificial Sequence
  Oligonucleotide for detection of SNP TSC0032294
tccaacacattat

SEQ ID NO: 128991 - DNA, 13 bp, Artificial Sequence
  Oligonucleotide for detection of SNP TSC0032294
ataacgtgttgga

SEQ ID NO: 128992 - DNA, 13 bp, Artificial Sequence
  Oligonucleotide for detection of SNP TSC0032294
tccaacacgttat

SEQ ID NO: 128993 - DNA, 13 bp, Artificial Sequence
  Oligonucleotide for detection of SNP TSC0032294
ataatgcgttgga

SEQ ID NO: 128994 - DNA, 13 bp, Artificial Sequence
  Oligonucleotide for detection of SNP TSC0032294
tccaacgcattat

SEQ ID NO: 128995 - DNA, 13 bp, Artificial Sequence
  Oligonucleotide for detection of SNP TSC0032294
ataacgcgttgga

SEQ ID NO: 128996 - DNA, 13 bp, Artificial Sequence
  Oligonucleotide for detection of SNP TSC0032294
tccaacgcgttat

SEQ ID NO: 128997 - DNA, 13 bp, Artificial Sequence
  Oligonucleotide for detection of SNP TSC0032294
tttagtatgttat

SEQ ID NO: 128998 - DNA, 13 bp, Artificial Sequence
  Oligonucleotide for detection of SNP TSC0032294
ataacatactaaa

SEQ ID NO: 128999 - DNA, 13 bp, Artificial Sequence
  Oligonucleotide for detection of SNP TSC0032294
tttagcgtgttat

SEQ ID NO: 129000 - DNA, 13 bp, Artificial Sequence
  Oligonucleotide for detection of SNP TSC0032294
ataacacgctaaa

SEQ ID NO: 129001 - DNA, 13 bp, Artificial Sequence
  Oligonucleotide for detection of SNP TSC0032294
tttagtacgttat

SEQ ID NO: 129002 - DNA, 13 bp, Artificial Sequence
  Oligonucleotide for detection of SNP TSC0032294
ataacgtactaaa

SEQ ID NO: 129003 - DNA, 13 bp, Artificial Sequence
  Oligonucleotide for detection of SNP TSC0032294
tttagtgcgttat

SEQ ID NO: 129004 - DNA, 13 bp, Artificial Sequence
  Oligonucleotide for detection of SNP TSC0032294
ataacgcactaaa

SEQ ID NO: 129005 - DNA, 13 bp, Artificial Sequence
  Oligonucleotide for detection of SNP TSC0032294
tttagcgcgttat

SEQ ID NO: 129006 - DNA, 13 bp, Artificial Sequence
  Oligonucleotide for detection of SNP TSC0032294
ataacgcgctaaa

SEQ ID NO: 129007 - DNA, 13 bp, Artificial Sequence
  Oligonucleotide for detection of SNP TSC0032298
ttattggtttagt

SEQ ID NO: 129008 - DNA, 13 bp, Artificial Sequence
  Oligonucleotide for detection of SNP TSC0032298
actaaaccaataa

SEQ ID NO: 129009 - DNA, 13 bp, Artificial Sequence
  Oligonucleotide for detection of SNP TSC0032298
ttattgttttagt

SEQ ID NO: 129010 - DNA, 13 bp, Artificial Sequence
  Oligonucleotide for detection of SNP TSC0032298
actaaaacaataa

SEQ ID NO: 129011 - DNA, 13 bp, Artificial Sequence
  Oligonucleotide for detection of SNP TSC0032298
attaaattaataa

SEQ ID NO: 129012 - DNA, 13 bp, Artificial Sequence
  Oligonucleotide for detection of SNP TSC0032298
ttattaatttaat

SEQ ID NO: 129013 - DNA, 13 bp, Artificial Sequence
  Oligonucleotide for detection of SNP TSC0032298
attaaaataataa

SEQ ID NO: 129014 - DNA, 13 bp, Artificial Sequence
  Oligonucleotide for detection of SNP TSC0032298
ttattattttaat

SEQ ID NO: 129015 - DNA, 13 bp, Artificial Sequence
  Oligonucleotide for detection of SNP TSC0032299
tgtaagatttttt

SEQ ID NO: 129016 - DNA, 13 bp, Artificial Sequence
  Oligonucleotide for detection of SNP TSC0032299
aaaaaatcttaca

SEQ ID NO: 129017 - DNA, 13 bp, Artificial Sequence
  Oligonucleotide for detection of SNP TSC0032299
tgtaaggtttttt

SEQ ID NO: 129018 - DNA, 13 bp, Artificial Sequence
  Oligonucleotide for detection of SNP TSC0032299
aaaaaaccttaca

SEQ ID NO: 129019 - DNA, 13 bp, Artificial Sequence
  Oligonucleotide for detection of SNP TSC0032300
aggaaggatttta

SEQ ID NO: 129020 - DNA, 13 bp, Artificial Sequence
  Oligonucleotide for detection of SNP TSC0032300
taaaatccttcct

SEQ ID NO: 129021 - DNA, 13 bp, Artificial Sequence
  Oligonucleotide for detection of SNP TSC0032300
aggaagaatttta

SEQ ID NO: 129022 - DNA, 13 bp, Artificial Sequence
  Oligonucleotide for detection of SNP TSC0032300
taaaattcttcct

SEQ ID NO: 129023 - DNA, 13 bp, Artificial Sequence
  Oligonucleotide for detection of SNP TSC0032301
tatataatttatt

SEQ ID NO: 129024 - DNA, 13 bp, Artificial Sequence
  Oligonucleotide for detection of SNP TSC0032301
aataaattatata

SEQ ID NO: 129025 - DNA, 13 bp, Artificial Sequence
  Oligonucleotide for detection of SNP TSC0032301
tatatattttatt

SEQ ID NO: 129026 - DNA, 13 bp, Artificial Sequence
  Oligonucleotide for detection of SNP TSC0032301
aataaaatatata

SEQ ID NO: 129027 - DNA, 13 bp, Artificial Sequence
  Oligonucleotide for detection of SNP TSC0032301
aataagttatata

SEQ ID NO: 129028 - DNA, 13 bp, Artificial Sequence
  Oligonucleotide for detection of SNP TSC0032301
tatataacttatt

SEQ ID NO: 129029 - DNA, 13 bp, Artificial Sequence
  Oligonucleotide for detection of SNP TSC0032301
aataaggtatata

SEQ ID NO: 129030 - DNA, 13 bp, Artificial Sequence
  Oligonucleotide for detection of SNP TSC0032301
tatataccttatt

SEQ ID NO: 129031 - DNA, 13 bp, Artificial Sequence
  Oligonucleotide for detection of SNP TSC0032304
gatgtaggtatta

SEQ ID NO: 129032 - DNA, 13 bp, Artificial Sequence
  Oligonucleotide for detection of SNP TSC0032304
taatacctacatc

SEQ ID NO: 129033 - DNA, 13 bp, Artificial Sequence
  Oligonucleotide for detection of SNP TSC0032304
gatgtaagtatta

SEQ ID NO: 129034 - DNA, 13 bp, Artificial Sequence
  Oligonucleotide for detection of SNP TSC0032304
taatacttacatc

SEQ ID NO: 129035 - DNA, 13 bp, Artificial Sequence
  Oligonucleotide for detection of SNP TSC0032304
gacgtaggtatta

SEQ ID NO: 129036 - DNA, 13 bp, Artificial Sequence
  Oligonucleotide for detection of SNP TSC0032304
taatacctacgtc

SEQ ID NO: 129037 - DNA, 13 bp, Artificial Sequence
  Oligonucleotide for detection of SNP TSC0032304
gacgtaagtatta

SEQ ID NO: 129038 - DNA, 13 bp, Artificial Sequence
  Oligonucleotide for detection of SNP TSC0032304
taatacttacgtc

SEQ ID NO: 129039 - DNA, 13 bp, Artificial Sequence
  Oligonucleotide for detection of SNP TSC0032305
tttaaaattgtty

SEQ ID NO: 129040 - DNA, 13 bp, Artificial Sequence
  Oligonucleotide for detection of SNP TSC0032305
raacaattttaaa

SEQ ID NO: 129041 - DNA, 13 bp, Artificial Sequence
  Oligonucleotide for detection of SNP TSC0032305
tttaaatttgtty

SEQ ID NO: 129042 - DNA, 13 bp, Artificial Sequence
  Oligonucleotide for detection of SNP TSC0032305
raacaaatttaaa

SEQ ID NO: 129043 - DNA, 13 bp, Artificial Sequence
  Oligonucleotide for detection of SNP TSC0032305
gaatagttttaaa

SEQ ID NO: 129044 - DNA, 13 bp, Artificial Sequence
  Oligonucleotide for detection of SNP TSC0032305
tttaaaactattc

SEQ ID NO: 129045 - DNA, 13 bp, Artificial Sequence
  Oligonucleotide for detection of SNP TSC0032305
gaataggtttaaa

SEQ ID NO: 129046 - DNA, 13 bp, Artificial Sequence
  Oligonucleotide for detection of SNP TSC0032305
tttaaacctattc

SEQ ID NO: 129047 - DNA, 13 bp, Artificial Sequence
  Oligonucleotide for detection of SNP TSC0032306
aatttaataaaaa

SEQ ID NO: 129048 - DNA, 13 bp, Artificial Sequence
  Oligonucleotide for detection of SNP TSC0032306
tttttattaaatt

SEQ ID NO: 129049 - DNA, 13 bp, Artificial Sequence
  Oligonucleotide for detection of SNP TSC0032306
aatttagtaaaaa

SEQ ID NO: 129050 - DNA, 13 bp, Artificial Sequence
  Oligonucleotide for detection of SNP TSC0032306
tttttactaaatt

SEQ ID NO: 129051 - DNA, 13 bp, Artificial Sequence
  Oligonucleotide for detection of SNP TSC0032307
taaaggtttttgt

SEQ ID NO: 129052 - DNA, 13 bp, Artificial Sequence
  Oligonucleotide for detection of SNP TSC0032307
acaaaaaccttta

SEQ ID NO: 129053 - DNA, 13 bp, Artificial Sequence
  Oligonucleotide for detection of SNP TSC0032307
taaagggttttgt

SEQ ID NO: 129054 - DNA, 13 bp, Artificial Sequence
  Oligonucleotide for detection of SNP TSC0032307
acaaaacccttta

SEQ ID NO: 129055 - DNA, 13 bp, Artificial Sequence
  Oligonucleotide for detection of SNP TSC0032308
aagtttggataga

SEQ ID NO: 129056 - DNA, 13 bp, Artificial Sequence
  Oligonucleotide for detection of SNP TSC0032308
tctatccaaactt

SEQ ID NO: 129057 - DNA, 13 bp, Artificial Sequence
  Oligonucleotide for detection of SNP TSC0032308
aagtttagataga

SEQ ID NO: 129058 - DNA, 13 bp, Artificial Sequence
  Oligonucleotide for detection of SNP TSC0032308
tctatctaaactt

SEQ ID NO: 129059 - DNA, 13 bp, Artificial Sequence
  Oligonucleotide for detection of SNP TSC0032309
gaatagtgatata

SEQ ID NO: 129060 - DNA, 13 bp, Artificial Sequence
  Oligonucleotide for detection of SNP TSC0032309
tatatcactattc

SEQ ID NO: 129061 - DNA, 13 bp, Artificial Sequence
  Oligonucleotide for detection of SNP TSC0032309
gaatagcgatata

SEQ ID NO: 129062 - DNA, 13 bp, Artificial Sequence
  Oligonucleotide for detection of SNP TSC0032309
tatatcgctattc

SEQ ID NO: 129063 - DNA, 13 bp, Artificial Sequence
  Oligonucleotide for detection of SNP TSC0032311
atttaggtatttt

SEQ ID NO: 129064 - DNA, 13 bp, Artificial Sequence
  Oligonucleotide for detection of SNP TSC0032311
aaaatacctaaat

SEQ ID NO: 129065 - DNA, 13 bp, Artificial Sequence
  Oligonucleotide for detection of SNP TSC0032311
atttagttatttt

SEQ ID NO: 129066 - DNA, 13 bp, Artificial Sequence
  Oligonucleotide for detection of SNP TSC0032311
aaaataactaaat

SEQ ID NO: 129067 - DNA, 13 bp, Artificial Sequence
  Oligonucleotide for detection of SNP TSC0032311
aaaatatttaaat

SEQ ID NO: 129068 - DNA, 13 bp, Artificial Sequence
  Oligonucleotide for detection of SNP TSC0032311
atttaaatatttt

SEQ ID NO: 129069 - DNA, 13 bp, Artificial Sequence
  Oligonucleotide for detection of SNP TSC0032312
aagtattgttttt

SEQ ID NO: 129070 - DNA, 13 bp, Artificial Sequence
  Oligonucleotide for detection of SNP TSC0032312
aaaaacaatactt

SEQ ID NO: 129071 - DNA, 13 bp, Artificial Sequence
  Oligonucleotide for detection of SNP TSC0032312
aagtatcgttttt

SEQ ID NO: 129072 - DNA, 13 bp, Artificial Sequence
  Oligonucleotide for detection of SNP TSC0032312
aaaaacgatactt

SEQ ID NO: 129073 - DNA, 13 bp, Artificial Sequence
  Oligonucleotide for detection of SNP TSC0032312
aaagatggtgttt

SEQ ID NO: 129074 - DNA, 13 bp, Artificial Sequence
  Oligonucleotide for detection of SNP TSC0032312
aaacaccatcttt

SEQ ID NO: 129075 - DNA, 13 bp, Artificial Sequence
  Oligonucleotide for detection of SNP TSC0032312
aaagatagtgttt

SEQ ID NO: 129076 - DNA, 13 bp, Artificial Sequence
  Oligonucleotide for detection of SNP TSC0032312
aaacactatcttt

SEQ ID NO: 129077 - DNA, 13 bp, Artificial Sequence
  Oligonucleotide for detection of SNP TSC0032312
aaagacggtgttt

SEQ ID NO: 129078 - DNA, 13 bp, Artificial Sequence
  Oligonucleotide for detection of SNP TSC0032312
aaacaccgtcttt

SEQ ID NO: 129079 - DNA, 13 bp, Artificial Sequence
  Oligonucleotide for detection of SNP TSC0032313
attattaaagttt

SEQ ID NO: 129080 - DNA, 13 bp, Artificial Sequence
  Oligonucleotide for detection of SNP TSC0032313
aaactttaataat

SEQ ID NO: 129081 - DNA, 13 bp, Artificial Sequence
  Oligonucleotide for detection of SNP TSC0032313
attatttaagttt

SEQ ID NO: 129082 - DNA, 13 bp, Artificial Sequence
  Oligonucleotide for detection of SNP TSC0032313
aaacttaaataat

SEQ ID NO: 129083 - DNA, 13 bp, Artificial Sequence
  Oligonucleotide for detection of SNP TSC0032313
aaattttggtggt

SEQ ID NO: 129084 - DNA, 13 bp, Artificial Sequence
  Oligonucleotide for detection of SNP TSC0032313
accaccaaaattt

SEQ ID NO: 129085 - DNA, 13 bp, Artificial Sequence
  Oligonucleotide for detection of SNP TSC0032313
aaatttaggtggt

SEQ ID NO: 129086 - DNA, 13 bp, Artificial Sequence
  Oligonucleotide for detection of SNP TSC0032313
accacctaaattt

SEQ ID NO: 129087 - DNA, 13 bp, Artificial Sequence
  Oligonucleotide for detection of SNP TSC0032314
tgatagattttty

SEQ ID NO: 129088 - DNA, 13 bp, Artificial Sequence
  Oligonucleotide for detection of SNP TSC0032314
raaaaatctatca

SEQ ID NO: 129089 - DNA, 13 bp, Artificial Sequence
  Oligonucleotide for detection of SNP TSC0032314
tgataggttttty

SEQ ID NO: 129090 - DNA, 13 bp, Artificial Sequence
  Oligonucleotide for detection of SNP TSC0032314
raaaaacctatca

SEQ ID NO: 129091 - DNA, 13 bp, Artificial Sequence
  Oligonucleotide for detection of SNP TSC0032315
ggtaaagtttttt

SEQ ID NO: 129092 - DNA, 13 bp, Artificial Sequence
  Oligonucleotide for detection of SNP TSC0032315
aaaaaactttacc

SEQ ID NO: 129093 - DNA, 13 bp, Artificial Sequence
  Oligonucleotide for detection of SNP TSC0032315
ggtaaattttttt

SEQ ID NO: 129094 - DNA, 13 bp, Artificial Sequence
  Oligonucleotide for detection of SNP TSC0032315
aaaaaaatttacc

SEQ ID NO: 129095 - DNA, 13 bp, Artificial Sequence
  Oligonucleotide for detection of SNP TSC0032315
aaggggttttgty

SEQ ID NO: 129096 - DNA, 13 bp, Artificial Sequence
  Oligonucleotide for detection of SNP TSC0032315
racaaaacccctt

SEQ ID NO: 129097 - DNA, 13 bp, Artificial Sequence
  Oligonucleotide for detection of SNP TSC0032315
aaggggatttgty

SEQ ID NO: 129098 - DNA, 13 bp, Artificial Sequence
  Oligonucleotide for detection of SNP TSC0032315
racaaatcccctt

SEQ ID NO: 129099 - DNA, 13 bp, Artificial Sequence
  Oligonucleotide for detection of SNP TSC0032316
ttttaagttttaa

SEQ ID NO: 129100 - DNA, 13 bp, Artificial Sequence
  Oligonucleotide for detection of SNP TSC0032316
ttaaaacttaaaa

SEQ ID NO: 129101 - DNA, 13 bp, Artificial Sequence
  Oligonucleotide for detection of SNP TSC0032316
ttttaaattttaa

SEQ ID NO: 129102 - DNA, 13 bp, Artificial Sequence
  Oligonucleotide for detection of SNP TSC0032316
ttaaaatttaaaa

SEQ ID NO: 129103 - DNA, 13 bp, Artificial Sequence
  Oligonucleotide for detection of SNP TSC0032319
ttggtttgttata

SEQ ID NO: 129104 - DNA, 13 bp, Artificial Sequence
  Oligonucleotide for detection of SNP TSC0032319
tataacaaaccaa

SEQ ID NO: 129105 - DNA, 13 bp, Artificial Sequence
  Oligonucleotide for detection of SNP TSC0032319
ttggttcgttata

SEQ ID NO: 129106 - DNA, 13 bp, Artificial Sequence
  Oligonucleotide for detection of SNP TSC0032319
tataacgaaccaa

SEQ ID NO: 129107 - DNA, 13 bp, Artificial Sequence
  Oligonucleotide for detection of SNP TSC0032319
tgtggtgagttag

SEQ ID NO: 129108 - DNA, 13 bp, Artificial Sequence
  Oligonucleotide for detection of SNP TSC0032319
ctaactcaccaca

SEQ ID NO: 129109 - DNA, 13 bp, Artificial Sequence
  Oligonucleotide for detection of SNP TSC0032319
tgtggtaagttag

SEQ ID NO: 129110 - DNA, 13 bp, Artificial Sequence
  Oligonucleotide for detection of SNP TSC0032319
ctaacttaccaca

SEQ ID NO: 129111 - DNA, 13 bp, Artificial Sequence
  Oligonucleotide for detection of SNP TSC0032319
tgtggcgagttag

SEQ ID NO: 129112 - DNA, 13 bp, Artificial Sequence
  Oligonucleotide for detection of SNP TSC0032319
ctaactcgccaca

SEQ ID NO: 129113 - DNA, 13 bp, Artificial Sequence
  Oligonucleotide for detection of SNP TSC0032320
tagttttgagatg

SEQ ID NO: 129114 - DNA, 13 bp, Artificial Sequence
  Oligonucleotide for detection of SNP TSC0032320
catctcaaaacta

SEQ ID NO: 129115 - DNA, 13 bp, Artificial Sequence
  Oligonucleotide for detection of SNP TSC0032320
tagtttcgagatg

SEQ ID NO: 129116 - DNA, 13 bp, Artificial Sequence
  Oligonucleotide for detection of SNP TSC0032320
catctcgaaacta

SEQ ID NO: 129117 - DNA, 13 bp, Artificial Sequence
  Oligonucleotide for detection of SNP TSC0032320
tattttggggttg

SEQ ID NO: 129118 - DNA, 13 bp, Artificial Sequence
  Oligonucleotide for detection of SNP TSC0032320
caaccccaaaata

SEQ ID NO: 129119 - DNA, 13 bp, Artificial Sequence
  Oligonucleotide for detection of SNP TSC0032320
tattttagggttg

SEQ ID NO: 129120 - DNA, 13 bp, Artificial Sequence
  Oligonucleotide for detection of SNP TSC0032320
caaccctaaaata

SEQ ID NO: 129121 - DNA, 13 bp, Artificial Sequence
  Oligonucleotide for detection of SNP TSC0032320
tatttcggggttg

SEQ ID NO: 129122 - DNA, 13 bp, Artificial Sequence
  Oligonucleotide for detection of SNP TSC0032320
caaccccgaaata

SEQ ID NO: 129123 - DNA, 13 bp, Artificial Sequence
  Oligonucleotide for detection of SNP TSC0032321
tatatatgtaagt

SEQ ID NO: 129124 - DNA, 13 bp, Artificial Sequence
  Oligonucleotide for detection of SNP TSC0032321
acttacatatata

SEQ ID NO: 129125 - DNA, 13 bp, Artificial Sequence
  Oligonucleotide for detection of SNP TSC0032321
tatataagtaagt

SEQ ID NO: 129126 - DNA, 13 bp, Artificial Sequence
  Oligonucleotide for detection of SNP TSC0032321
acttacttatata

SEQ ID NO: 129127 - DNA, 13 bp, Artificial Sequence
  Oligonucleotide for detection of SNP TSC0032322
aagagggttagty

SEQ ID NO: 129128 - DNA, 13 bp, Artificial Sequence
  Oligonucleotide for detection of SNP TSC0032322
ractaaccctctt

SEQ ID NO: 129129 - DNA, 13 bp, Artificial Sequence
  Oligonucleotide for detection of SNP TSC0032322
aagaggattagty

SEQ ID NO: 129130 - DNA, 13 bp, Artificial Sequence
  Oligonucleotide for detection of SNP TSC0032322
ractaatcctctt

SEQ ID NO: 129131 - DNA, 13 bp, Artificial Sequence
  Oligonucleotide for detection of SNP TSC0032323
gagtatatgttaa

SEQ ID NO: 129132 - DNA, 13 bp, Artificial Sequence
  Oligonucleotide for detection of SNP TSC0032323
ttaacatatactc

SEQ ID NO: 129133 - DNA, 13 bp, Artificial Sequence
  Oligonucleotide for detection of SNP TSC0032323
gagtatgtgttaa

SEQ ID NO: 129134 - DNA, 13 bp, Artificial Sequence
  Oligonucleotide for detection of SNP TSC0032323
ttaacacatactc

SEQ ID NO: 129135 - DNA, 13 bp, Artificial Sequence
  Oligonucleotide for detection of SNP TSC0032326
tgttggattatay

SEQ ID NO: 129136 - DNA, 13 bp, Artificial Sequence
  Oligonucleotide for detection of SNP TSC0032326
rtataatccaaca

SEQ ID NO: 129137 - DNA, 13 bp, Artificial Sequence
  Oligonucleotide for detection of SNP TSC0032326
tgttgggttatay

SEQ ID NO: 129138 - DNA, 13 bp, Artificial Sequence
  Oligonucleotide for detection of SNP TSC0032326
rtataacccaaca

SEQ ID NO: 129139 - DNA, 13 bp, Artificial Sequence
  Oligonucleotide for detection of SNP TSC0032330
tgtgtgagggtgy

SEQ ID NO: 129140 - DNA, 13 bp, Artificial Sequence
  Oligonucleotide for detection of SNP TSC0032330
rcaccctcacaca

SEQ ID NO: 129141 - DNA, 13 bp, Artificial Sequence
  Oligonucleotide for detection of SNP TSC0032330
tgtgtgggggtgy

SEQ ID NO: 129142 - DNA, 13 bp, Artificial Sequence
  Oligonucleotide for detection of SNP TSC0032330
rcacccccacaca

SEQ ID NO: 129143 - DNA, 13 bp, Artificial Sequence
  Oligonucleotide for detection of SNP TSC0032330
tgcgtgagggtgy

SEQ ID NO: 129144 - DNA, 13 bp, Artificial Sequence
  Oligonucleotide for detection of SNP TSC0032330
rcaccctcacgca

SEQ ID NO: 129145 - DNA, 13 bp, Artificial Sequence
  Oligonucleotide for detection of SNP TSC0032330
tgcgtgggggtgy

SEQ ID NO: 129146 - DNA, 13 bp, Artificial Sequence
  Oligonucleotide for detection of SNP TSC0032330
rcacccccacgca

SEQ ID NO: 129147 - DNA, 13 bp, Artificial Sequence
  Oligonucleotide for detection of SNP TSC0032330
tgtgtgagggcgy

SEQ ID NO: 129148 - DNA, 13 bp, Artificial Sequence
  Oligonucleotide for detection of SNP TSC0032330
rcgccctcacaca

SEQ ID NO: 129149 - DNA, 13 bp, Artificial Sequence
  Oligonucleotide for detection of SNP TSC0032330
tgtgtgggggcgy

SEQ ID NO: 129150 - DNA, 13 bp, Artificial Sequence
  Oligonucleotide for detection of SNP TSC0032330
rcgcccccacaca

SEQ ID NO: 129151 - DNA, 13 bp, Artificial Sequence
  Oligonucleotide for detection of SNP TSC0032330
tgcgtgagggcgy

SEQ ID NO: 129152 - DNA, 13 bp, Artificial Sequence
  Oligonucleotide for detection of SNP TSC0032330
rcgccctcacgca

SEQ ID NO: 129153 - DNA, 13 bp, Artificial Sequence
  Oligonucleotide for detection of SNP TSC0032330
tgcgtgggggcgy

SEQ ID NO: 129154 - DNA, 13 bp, Artificial Sequence
  Oligonucleotide for detection of SNP TSC0032330
rcgcccccacgca

SEQ ID NO: 129155 - DNA, 13 bp, Artificial Sequence
  Oligonucleotide for detection of SNP TSC0032335
taggtaatggagt

SEQ ID NO: 129156 - DNA, 13 bp, Artificial Sequence
  Oligonucleotide for detection of SNP TSC0032335
actccattaccta

SEQ ID NO: 129157 - DNA, 13 bp, Artificial Sequence
  Oligonucleotide for detection of SNP TSC0032335
taggtagtggagt

SEQ ID NO: 129158 - DNA, 13 bp, Artificial Sequence
  Oligonucleotide for detection of SNP TSC0032335
actccactaccta

SEQ ID NO: 129159 - DNA, 13 bp, Artificial Sequence
  Oligonucleotide for detection of SNP TSC0032336
ggatgtatgatgg

SEQ ID NO: 129160 - DNA, 13 bp, Artificial Sequence
  Oligonucleotide for detection of SNP TSC0032336
ccatcatacatcc

SEQ ID NO: 129161 - DNA, 13 bp, Artificial Sequence
  Oligonucleotide for detection of SNP TSC0032336
ggatgtgtgatgg

SEQ ID NO: 129162 - DNA, 13 bp, Artificial Sequence
  Oligonucleotide for detection of SNP TSC0032336
ccatcacacatcc

SEQ ID NO: 129163 - DNA, 13 bp, Artificial Sequence
  Oligonucleotide for detection of SNP TSC0032336
ggacgtatgatgg

SEQ ID NO: 129164 - DNA, 13 bp, Artificial Sequence
  Oligonucleotide for detection of SNP TSC0032336
ccatcatacgtcc

SEQ ID NO: 129165 - DNA, 13 bp, Artificial Sequence
  Oligonucleotide for detection of SNP TSC0032336
ggacgtgtgatgg

SEQ ID NO: 129166 - DNA, 13 bp, Artificial Sequence
  Oligonucleotide for detection of SNP TSC0032336
ccatcacacgtcc

SEQ ID NO: 129167 - DNA, 13 bp, Artificial Sequence
  Oligonucleotide for detection of SNP TSC0032336
ggatgtatgacgg

SEQ ID NO: 129168 - DNA, 13 bp, Artificial Sequence
  Oligonucleotide for detection of SNP TSC0032336
ccgtcatacatcc

SEQ ID NO: 129169 - DNA, 13 bp, Artificial Sequence
  Oligonucleotide for detection of SNP TSC0032336
ggatgcgtgatgg

SEQ ID NO: 129170 - DNA, 13 bp, Artificial Sequence
  Oligonucleotide for detection of SNP TSC0032336
ccatcacgcatcc

SEQ ID NO: 129171 - DNA, 13 bp, Artificial Sequence
  Oligonucleotide for detection of SNP TSC0032336
ggacgtatgacgg

SEQ ID NO: 129172 - DNA, 13 bp, Artificial Sequence
  Oligonucleotide for detection of SNP TSC0032336
ccgtcatacgtcc

SEQ ID NO: 129173 - DNA, 13 bp, Artificial Sequence
  Oligonucleotide for detection of SNP TSC0032336
ggatgtgtgacgg

SEQ ID NO: 129174 - DNA, 13 bp, Artificial Sequence
  Oligonucleotide for detection of SNP TSC0032336
ccgtcacacatcc

SEQ ID NO: 129175 - DNA, 13 bp, Artificial Sequence
  Oligonucleotide for detection of SNP TSC0032336
ggacgcgtgatgg

SEQ ID NO: 129176 - DNA, 13 bp, Artificial Sequence
  Oligonucleotide for detection of SNP TSC0032336
ccatcacgcgtcc

SEQ ID NO: 129177 - DNA, 13 bp, Artificial Sequence
  Oligonucleotide for detection of SNP TSC0032336
ggacgtgtgacgg

SEQ ID NO: 129178 - DNA, 13 bp, Artificial Sequence
  Oligonucleotide for detection of SNP TSC0032336
ccgtcacacgtcc

SEQ ID NO: 129179 - DNA, 13 bp, Artificial Sequence
  Oligonucleotide for detection of SNP TSC0032336
ggatgcgtgacgg

SEQ ID NO: 129180 - DNA, 13 bp, Artificial Sequence
  Oligonucleotide for detection of SNP TSC0032336
ccgtcacgcatcc

SEQ ID NO: 129181 - DNA, 13 bp, Artificial Sequence
  Oligonucleotide for detection of SNP TSC0032336
ggacgcgtgacgg

SEQ ID NO: 129182 - DNA, 13 bp, Artificial Sequence
  Oligonucleotide for detection of SNP TSC0032336
ccgtcacgcgtcc

SEQ ID NO: 129183 - DNA, 13 bp, Artificial Sequence
  Oligonucleotide for detection of SNP TSC0032336
ttgttatgtgtty

SEQ ID NO: 129184 - DNA, 13 bp, Artificial Sequence
  Oligonucleotide for detection of SNP TSC0032336
raacacataacaa

SEQ ID NO: 129185 - DNA, 13 bp, Artificial Sequence
  Oligonucleotide for detection of SNP TSC0032336
tcgttatgtgtty

SEQ ID NO: 129186 - DNA, 13 bp, Artificial Sequence
  Oligonucleotide for detection of SNP TSC0032336
raacacataacga

SEQ ID NO: 129187 - DNA, 13 bp, Artificial Sequence
  Oligonucleotide for detection of SNP TSC0032336
ttgttatgcgtty

SEQ ID NO: 129188 - DNA, 13 bp, Artificial Sequence
  Oligonucleotide for detection of SNP TSC0032336
raacgcataacaa

SEQ ID NO: 129189 - DNA, 13 bp, Artificial Sequence
  Oligonucleotide for detection of SNP TSC0032336
ttgttacgtgtty

SEQ ID NO: 129190 - DNA, 13 bp, Artificial Sequence
  Oligonucleotide for detection of SNP TSC0032336
raacacgtaacaa

SEQ ID NO: 129191 - DNA, 13 bp, Artificial Sequence
  Oligonucleotide for detection of SNP TSC0032336
tcgttatgcgtty

SEQ ID NO: 129192 - DNA, 13 bp, Artificial Sequence
  Oligonucleotide for detection of SNP TSC0032336
raacgcataacga

SEQ ID NO: 129193 - DNA, 13 bp, Artificial Sequence
  Oligonucleotide for detection of SNP TSC0032336
tcgttacgtgtty

SEQ ID NO: 129194 - DNA, 13 bp, Artificial Sequence
  Oligonucleotide for detection of SNP TSC0032336
raacacgtaacga

SEQ ID NO: 129195 - DNA, 13 bp, Artificial Sequence
  Oligonucleotide for detection of SNP TSC0032336
ttgttacgcgtty

SEQ ID NO: 129196 - DNA, 13 bp, Artificial Sequence
  Oligonucleotide for detection of SNP TSC0032336
raacgcgtaacaa

SEQ ID NO: 129197 - DNA, 13 bp, Artificial Sequence
  Oligonucleotide for detection of SNP TSC0032336
tcgttacgcgtty

SEQ ID NO: 129198 - DNA, 13 bp, Artificial Sequence
  Oligonucleotide for detection of SNP TSC0032336
raacgcgtaacga

SEQ ID NO: 129199 - DNA, 13 bp, Artificial Sequence
  Oligonucleotide for detection of SNP TSC0032337
attgaatgaaata

SEQ ID NO: 129200 - DNA, 13 bp, Artificial Sequence
  Oligonucleotide for detection of SNP TSC0032337
tatttcattcaat

SEQ ID NO: 129201 - DNA, 13 bp, Artificial Sequence
  Oligonucleotide for detection of SNP TSC0032337
attgaaggaaata

SEQ ID NO: 129202 - DNA, 13 bp, Artificial Sequence
  Oligonucleotide for detection of SNP TSC0032337
tatttccttcaat

SEQ ID NO: 129203 - DNA, 13 bp, Artificial Sequence
  Oligonucleotide for detection of SNP TSC0032337
atcgaatgaaata

SEQ ID NO: 129204 - DNA, 13 bp, Artificial Sequence
  Oligonucleotide for detection of SNP TSC0032337
tatttcattcgat

SEQ ID NO: 129205 - DNA, 13 bp, Artificial Sequence
  Oligonucleotide for detection of SNP TSC0032337
atcgaaggaaata

SEQ ID NO: 129206 - DNA, 13 bp, Artificial Sequence
  Oligonucleotide for detection of SNP TSC0032337
tatttccttcgat

SEQ ID NO: 129207 - DNA, 13 bp, Artificial Sequence
  Oligonucleotide for detection of SNP TSC0032337
attgaacgaaata

SEQ ID NO: 129208 - DNA, 13 bp, Artificial Sequence
  Oligonucleotide for detection of SNP TSC0032337
tatttcgttcaat

SEQ ID NO: 129209 - DNA, 13 bp, Artificial Sequence
  Oligonucleotide for detection of SNP TSC0032337
atcgaacgaaata

SEQ ID NO: 129210 - DNA, 13 bp, Artificial Sequence
  Oligonucleotide for detection of SNP TSC0032337
tatttcgttcgat

SEQ ID NO: 129211 - DNA, 13 bp, Artificial Sequence
  Oligonucleotide for detection of SNP TSC0032337
tattttgtttgat

SEQ ID NO: 129212 - DNA, 13 bp, Artificial Sequence
  Oligonucleotide for detection of SNP TSC0032337
atcaaacaaaata

SEQ ID NO: 129213 - DNA, 13 bp, Artificial Sequence
  Oligonucleotide for detection of SNP TSC0032337
tattttttttgat

SEQ ID NO: 129214 - DNA, 13 bp, Artificial Sequence
  Oligonucleotide for detection of SNP TSC0032337
atcaaaaaaaata

SEQ ID NO: 129215 - DNA, 13 bp, Artificial Sequence
  Oligonucleotide for detection of SNP TSC0032337
tatttcgtttgat

SEQ ID NO: 129216 - DNA, 13 bp, Artificial Sequence
  Oligonucleotide for detection of SNP TSC0032337
atcaaacgaaata

SEQ ID NO: 129217 - DNA, 13 bp, Artificial Sequence
  Oligonucleotide for detection of SNP TSC0032337
tatttttttcgat

SEQ ID NO: 129218 - DNA, 13 bp, Artificial Sequence
  Oligonucleotide for detection of SNP TSC0032337
atcgaaaaaaata

SEQ ID NO: 129219 - DNA, 13 bp, Artificial Sequence
  Oligonucleotide for detection of SNP TSC0032337
tattttgttcgat

SEQ ID NO: 129220 - DNA, 13 bp, Artificial Sequence
  Oligonucleotide for detection of SNP TSC0032337
atcgaacaaaata

SEQ ID NO: 129221 - DNA, 13 bp, Artificial Sequence
  Oligonucleotide for detection of SNP TSC0032338
ttatttattgtaa

SEQ ID NO: 129222 - DNA, 13 bp, Artificial Sequence
  Oligonucleotide for detection of SNP TSC0032338
ttacaataaataa

SEQ ID NO: 129223 - DNA, 13 bp, Artificial Sequence
  Oligonucleotide for detection of SNP TSC0032339
aatggatggaagt

SEQ ID NO: 129224 - DNA, 13 bp, Artificial Sequence
  Oligonucleotide for detection of SNP TSC0032339
acttccatccatt

SEQ ID NO: 129225 - DNA, 13 bp, Artificial Sequence
  Oligonucleotide for detection of SNP TSC0032339
aatggacggaagt

SEQ ID NO: 129226 - DNA, 13 bp, Artificial Sequence
  Oligonucleotide for detection of SNP TSC0032339
acttccgtccatt

SEQ ID NO: 129227 - DNA, 13 bp, Artificial Sequence
  Oligonucleotide for detection of SNP TSC0032340
tattggagagtty

SEQ ID NO: 129228 - DNA, 13 bp, Artificial Sequence
  Oligonucleotide for detection of SNP TSC0032340
raactctccaata

SEQ ID NO: 129229 - DNA, 13 bp, Artificial Sequence
  Oligonucleotide for detection of SNP TSC0032340
tattggggagtty

SEQ ID NO: 129230 - DNA, 13 bp, Artificial Sequence
  Oligonucleotide for detection of SNP TSC0032340
raactccccaata

SEQ ID NO: 129231 - DNA, 13 bp, Artificial Sequence
  Oligonucleotide for detection of SNP TSC0032340
tatcggagagtty

SEQ ID NO: 129232 - DNA, 13 bp, Artificial Sequence
  Oligonucleotide for detection of SNP TSC0032340
raactctccgata

SEQ ID NO: 129233 - DNA, 13 bp, Artificial Sequence
  Oligonucleotide for detection of SNP TSC0032340
tatcggggagtty

SEQ ID NO: 129234 - DNA, 13 bp, Artificial Sequence
  Oligonucleotide for detection of SNP TSC0032340
raactccccgata

SEQ ID NO: 129235 - DNA, 13 bp, Artificial Sequence
  Oligonucleotide for detection of SNP TSC0032341
ataattatttatg

SEQ ID NO: 129236 - DNA, 13 bp, Artificial Sequence
  Oligonucleotide for detection of SNP TSC0032341
cataaataattat

SEQ ID NO: 129237 - DNA, 13 bp, Artificial Sequence
  Oligonucleotide for detection of SNP TSC0032341
ataattttttatg

SEQ ID NO: 129238 - DNA, 13 bp, Artificial Sequence
  Oligonucleotide for detection of SNP TSC0032341
cataaaaaattat

SEQ ID NO: 129239 - DNA, 13 bp, Artificial Sequence
  Oligonucleotide for detection of SNP TSC0032341
tatagatgattgt

SEQ ID NO: 129240 - DNA, 13 bp, Artificial Sequence
  Oligonucleotide for detection of SNP TSC0032341
acaatcatctata

SEQ ID NO: 129241 - DNA, 13 bp, Artificial Sequence
  Oligonucleotide for detection of SNP TSC0032341
tatagaagattgt

SEQ ID NO: 129242 - DNA, 13 bp, Artificial Sequence
  Oligonucleotide for detection of SNP TSC0032341
acaatcttctata

SEQ ID NO: 129243 - DNA, 13 bp, Artificial Sequence
  Oligonucleotide for detection of SNP TSC0032342
ttatttgttggty

SEQ ID NO: 129244 - DNA, 13 bp, Artificial Sequence
  Oligonucleotide for detection of SNP TSC0032342
raccaacaaataa

SEQ ID NO: 129245 - DNA, 13 bp, Artificial Sequence
  Oligonucleotide for detection of SNP TSC0032342
ttattttttggty

SEQ ID NO: 129246 - DNA, 13 bp, Artificial Sequence
  Oligonucleotide for detection of SNP TSC0032342
raccaaaaaataa

SEQ ID NO: 129247 - DNA, 13 bp, Artificial Sequence
  Oligonucleotide for detection of SNP TSC0032342
ggttagtaggtgg

SEQ ID NO: 129248 - DNA, 13 bp, Artificial Sequence
  Oligonucleotide for detection of SNP TSC0032342
ccacctactaacc

SEQ ID NO: 129249 - DNA, 13 bp, Artificial Sequence
  Oligonucleotide for detection of SNP TSC0032342
ggttagaaggtgg

SEQ ID NO: 129250 - DNA, 13 bp, Artificial Sequence
  Oligonucleotide for detection of SNP TSC0032342
ccaccttctaacc

SEQ ID NO: 129251 - DNA, 13 bp, Artificial Sequence
  Oligonucleotide for detection of SNP TSC0032343
ttttggatgtggy

SEQ ID NO: 129252 - DNA, 13 bp, Artificial Sequence
  Oligonucleotide for detection of SNP TSC0032343
rccacatccaaaa

SEQ ID NO: 129253 - DNA, 13 bp, Artificial Sequence
  Oligonucleotide for detection of SNP TSC0032343
ttttgggtgtggy

SEQ ID NO: 129254 - DNA, 13 bp, Artificial Sequence
  Oligonucleotide for detection of SNP TSC0032343
rccacacccaaaa

SEQ ID NO: 129255 - DNA, 13 bp, Artificial Sequence
  Oligonucleotide for detection of SNP TSC0032343
ttttggacgtggy

SEQ ID NO: 129256 - DNA, 13 bp, Artificial Sequence
  Oligonucleotide for detection of SNP TSC0032343
rccacgtccaaaa

SEQ ID NO: 129257 - DNA, 13 bp, Artificial Sequence
  Oligonucleotide for detection of SNP TSC0032343
ttttgggcgtggy

SEQ ID NO: 129258 - DNA, 13 bp, Artificial Sequence
  Oligonucleotide for detection of SNP TSC0032343
rccacgcccaaaa

SEQ ID NO: 129259 - DNA, 13 bp, Artificial Sequence
  Oligonucleotide for detection of SNP TSC0032344
atttggaagatat

SEQ ID NO: 129260 - DNA, 13 bp, Artificial Sequence
  Oligonucleotide for detection of SNP TSC0032344
atatcttccaaat

SEQ ID NO: 129261 - DNA, 13 bp, Artificial Sequence
  Oligonucleotide for detection of SNP TSC0032344
atttgggagatat

SEQ ID NO: 129262 - DNA, 13 bp, Artificial Sequence
  Oligonucleotide for detection of SNP TSC0032344
atatctcccaaat

SEQ ID NO: 129263 - DNA, 13 bp, Artificial Sequence
  Oligonucleotide for detection of SNP TSC0032345
aagttaggatgaa

SEQ ID NO: 129264 - DNA, 13 bp, Artificial Sequence
  Oligonucleotide for detection of SNP TSC0032345
ttcatcctaactt

SEQ ID NO: 129265 - DNA, 13 bp, Artificial Sequence
  Oligonucleotide for detection of SNP TSC0032345
aagttaagatgaa

SEQ ID NO: 129266 - DNA, 13 bp, Artificial Sequence
  Oligonucleotide for detection of SNP TSC0032345
ttcatcttaactt

SEQ ID NO: 129267 - DNA, 13 bp, Artificial Sequence
  Oligonucleotide for detection of SNP TSC0032346
taggttatagtta

SEQ ID NO: 129268 - DNA, 13 bp, Artificial Sequence
  Oligonucleotide for detection of SNP TSC0032346
taactataaccta

SEQ ID NO: 129269 - DNA, 13 bp, Artificial Sequence
  Oligonucleotide for detection of SNP TSC0032346
taggttttagtta

SEQ ID NO: 129270 - DNA, 13 bp, Artificial Sequence
  Oligonucleotide for detection of SNP TSC0032346
taactaaaaccta

SEQ ID NO: 129271 - DNA, 13 bp, Artificial Sequence
  Oligonucleotide for detection of SNP TSC0032346
tgattgtggttta

SEQ ID NO: 129272 - DNA, 13 bp, Artificial Sequence
  Oligonucleotide for detection of SNP TSC0032346
taaaccacaatca

SEQ ID NO: 129273 - DNA, 13 bp, Artificial Sequence
  Oligonucleotide for detection of SNP TSC0032346
tgattggggttta

SEQ ID NO: 129274 - DNA, 13 bp, Artificial Sequence
  Oligonucleotide for detection of SNP TSC0032346
taaaccccaatca

SEQ ID NO: 129275 - DNA, 13 bp, Artificial Sequence
  Oligonucleotide for detection of SNP TSC0032347
agttttataaaaa

SEQ ID NO: 129276 - DNA, 13 bp, Artificial Sequence
  Oligonucleotide for detection of SNP TSC0032347
tttttataaaact

SEQ ID NO: 129277 - DNA, 13 bp, Artificial Sequence
  Oligonucleotide for detection of SNP TSC0032347
agtttcgtaaaaa

SEQ ID NO: 129278 - DNA, 13 bp, Artificial Sequence
  Oligonucleotide for detection of SNP TSC0032347
tttttacgaaact

SEQ ID NO: 129279 - DNA, 13 bp, Artificial Sequence
  Oligonucleotide for detection of SNP TSC0032347
tttttatggagtt

SEQ ID NO: 129280 - DNA, 13 bp, Artificial Sequence
  Oligonucleotide for detection of SNP TSC0032347
aactccataaaaa

SEQ ID NO: 129281 - DNA, 13 bp, Artificial Sequence
  Oligonucleotide for detection of SNP TSC0032347
tttttacggagtt

SEQ ID NO: 129282 - DNA, 13 bp, Artificial Sequence
  Oligonucleotide for detection of SNP TSC0032347
aactccgtaaaaa

SEQ ID NO: 129283 - DNA, 13 bp, Artificial Sequence
  Oligonucleotide for detection of SNP TSC0032349
gagattaggatta

SEQ ID NO: 129284 - DNA, 13 bp, Artificial Sequence
  Oligonucleotide for detection of SNP TSC0032349
taatcctaatctc

SEQ ID NO: 129285 - DNA, 13 bp, Artificial Sequence
  Oligonucleotide for detection of SNP TSC0032349
gagatttggatta

SEQ ID NO: 129286 - DNA, 13 bp, Artificial Sequence
  Oligonucleotide for detection of SNP TSC0032349
taatccaaatctc

SEQ ID NO: 129287 - DNA, 13 bp, Artificial Sequence
  Oligonucleotide for detection of SNP TSC0032349
taattttaattty

SEQ ID NO: 129288 - DNA, 13 bp, Artificial Sequence
  Oligonucleotide for detection of SNP TSC0032349
raaattaaaatta

SEQ ID NO: 129289 - DNA, 13 bp, Artificial Sequence
  Oligonucleotide for detection of SNP TSC0032350
aattggatttttg

SEQ ID NO: 129290 - DNA, 13 bp, Artificial Sequence
  Oligonucleotide for detection of SNP TSC0032350
caaaaatccaatt

SEQ ID NO: 129291 - DNA, 13 bp, Artificial Sequence
  Oligonucleotide for detection of SNP TSC0032350
aattggttttttg

SEQ ID NO: 129292 - DNA, 13 bp, Artificial Sequence
  Oligonucleotide for detection of SNP TSC0032350
caaaaaaccaatt

SEQ ID NO: 129293 - DNA, 13 bp, Artificial Sequence
  Oligonucleotide for detection of SNP TSC0032350
taggggtttagtt

SEQ ID NO: 129294 - DNA, 13 bp, Artificial Sequence
  Oligonucleotide for detection of SNP TSC0032350
aactaaaccccta

SEQ ID NO: 129295 - DNA, 13 bp, Artificial Sequence
  Oligonucleotide for detection of SNP TSC0032350
tagggggttagtt

SEQ ID NO: 129296 - DNA, 13 bp, Artificial Sequence
  Oligonucleotide for detection of SNP TSC0032350
aactaacccccta

SEQ ID NO: 129297 - DNA, 13 bp, Artificial Sequence
  Oligonucleotide for detection of SNP TSC0032351
gatgtttggtgta

SEQ ID NO: 129298 - DNA, 13 bp, Artificial Sequence
  Oligonucleotide for detection of SNP TSC0032351
tacaccaaacatc

SEQ ID NO: 129299 - DNA, 13 bp, Artificial Sequence
  Oligonucleotide for detection of SNP TSC0032351
gatgttgggtgta

SEQ ID NO: 129300 - DNA, 13 bp, Artificial Sequence
  Oligonucleotide for detection of SNP TSC0032351
tacacccaacatc

SEQ ID NO: 129301 - DNA, 13 bp, Artificial Sequence
  Oligonucleotide for detection of SNP TSC0032351
gatgttcggtgta

SEQ ID NO: 129302 - DNA, 13 bp, Artificial Sequence
  Oligonucleotide for detection of SNP TSC0032351
tacaccgaacatc

SEQ ID NO: 129303 - DNA, 13 bp, Artificial Sequence
  Oligonucleotide for detection of SNP TSC0032351
gatgtcgggtgta

SEQ ID NO: 129304 - DNA, 13 bp, Artificial Sequence
  Oligonucleotide for detection of SNP TSC0032351
tacacccgacatc

SEQ ID NO: 129305 - DNA, 13 bp, Artificial Sequence
  Oligonucleotide for detection of SNP TSC0032351
gatgtttggcgta

SEQ ID NO: 129306 - DNA, 13 bp, Artificial Sequence
  Oligonucleotide for detection of SNP TSC0032351
tacgccaaacatc

SEQ ID NO: 129307 - DNA, 13 bp, Artificial Sequence
  Oligonucleotide for detection of SNP TSC0032351
gatgttgggcgta

SEQ ID NO: 129308 - DNA, 13 bp, Artificial Sequence
  Oligonucleotide for detection of SNP TSC0032351
tacgcccaacatc

SEQ ID NO: 129309 - DNA, 13 bp, Artificial Sequence
  Oligonucleotide for detection of SNP TSC0032351
gatgttcggcgta

SEQ ID NO: 129310 - DNA, 13 bp, Artificial Sequence
  Oligonucleotide for detection of SNP TSC0032351
tacgccgaacatc

SEQ ID NO: 129311 - DNA, 13 bp, Artificial Sequence
  Oligonucleotide for detection of SNP TSC0032351
gatgtcgggcgta

SEQ ID NO: 129312 - DNA, 13 bp, Artificial Sequence
  Oligonucleotide for detection of SNP TSC0032351
tacgcccgacatc

SEQ ID NO: 129313 - DNA, 13 bp, Artificial Sequence
  Oligonucleotide for detection of SNP TSC0032351
tgtgttgggtaty

SEQ ID NO: 129314 - DNA, 13 bp, Artificial Sequence
  Oligonucleotide for detection of SNP TSC0032351
ratacccaacaca

SEQ ID NO: 129315 - DNA, 13 bp, Artificial Sequence
  Oligonucleotide for detection of SNP TSC0032351
tgcgttgggtaty

SEQ ID NO: 129316 - DNA, 13 bp, Artificial Sequence
  Oligonucleotide for detection of SNP TSC0032351
ratacccaacgca

SEQ ID NO: 129317 - DNA, 13 bp, Artificial Sequence
  Oligonucleotide for detection of SNP TSC0032351
tgtgtcgggtaty

SEQ ID NO: 129318 - DNA, 13 bp, Artificial Sequence
  Oligonucleotide for detection of SNP TSC0032351
ratacccgacaca

SEQ ID NO: 129319 - DNA, 13 bp, Artificial Sequence
  Oligonucleotide for detection of SNP TSC0032351
tgcgtcgggtaty

SEQ ID NO: 129320 - DNA, 13 bp, Artificial Sequence
  Oligonucleotide for detection of SNP TSC0032351
ratacccgacgca

SEQ ID NO: 129321 - DNA, 13 bp, Artificial Sequence
  Oligonucleotide for detection of SNP TSC0032352
tatattaatagta

SEQ ID NO: 129322 - DNA, 13 bp, Artificial Sequence
  Oligonucleotide for detection of SNP TSC0032352
tactattaatata

SEQ ID NO: 129323 - DNA, 13 bp, Artificial Sequence
  Oligonucleotide for detection of SNP TSC0032352
tatattgatagta

SEQ ID NO: 129324 - DNA, 13 bp, Artificial Sequence
  Oligonucleotide for detection of SNP TSC0032352
tactatcaatata

SEQ ID NO: 129325 - DNA, 13 bp, Artificial Sequence
  Oligonucleotide for detection of SNP TSC0032354
tggtaagtataga

SEQ ID NO: 129326 - DNA, 13 bp, Artificial Sequence
  Oligonucleotide for detection of SNP TSC0032354
tctatacttacca

SEQ ID NO: 129327 - DNA, 13 bp, Artificial Sequence
  Oligonucleotide for detection of SNP TSC0032354
tggtaaatataga

SEQ ID NO: 129328 - DNA, 13 bp, Artificial Sequence
  Oligonucleotide for detection of SNP TSC0032354
tctatatttacca

SEQ ID NO: 129329 - DNA, 13 bp, Artificial Sequence
  Oligonucleotide for detection of SNP TSC0032356
tatggttgtgagy

SEQ ID NO: 129330 - DNA, 13 bp, Artificial Sequence
  Oligonucleotide for detection of SNP TSC0032356
rctcacaaccata

SEQ ID NO: 129331 - DNA, 13 bp, Artificial Sequence
  Oligonucleotide for detection of SNP TSC0032356
tacggttgtgagy

SEQ ID NO: 129332 - DNA, 13 bp, Artificial Sequence
  Oligonucleotide for detection of SNP TSC0032356
rctcacaaccgta

SEQ ID NO: 129333 - DNA, 13 bp, Artificial Sequence
  Oligonucleotide for detection of SNP TSC0032356
tatggtcgtgagy

SEQ ID NO: 129334 - DNA, 13 bp, Artificial Sequence
  Oligonucleotide for detection of SNP TSC0032356
rctcacgaccata

SEQ ID NO: 129335 - DNA, 13 bp, Artificial Sequence
  Oligonucleotide for detection of SNP TSC0032356
tacggtcgtgagy

SEQ ID NO: 129336 - DNA, 13 bp, Artificial Sequence
  Oligonucleotide for detection of SNP TSC0032356
rctcacgaccgta

SEQ ID NO: 129337 - DNA, 13 bp, Artificial Sequence
  Oligonucleotide for detection of SNP TSC0032356
gtttatggttgtg

SEQ ID NO: 129338 - DNA, 13 bp, Artificial Sequence
  Oligonucleotide for detection of SNP TSC0032356
cacaaccataaac

SEQ ID NO: 129339 - DNA, 13 bp, Artificial Sequence
  Oligonucleotide for detection of SNP TSC0032356
gtttatagttgtg

SEQ ID NO: 129340 - DNA, 13 bp, Artificial Sequence
  Oligonucleotide for detection of SNP TSC0032356
cacaactataaac

SEQ ID NO: 129341 - DNA, 13 bp, Artificial Sequence
  Oligonucleotide for detection of SNP TSC0032356
gtttacggttgtg

SEQ ID NO: 129342 - DNA, 13 bp, Artificial Sequence
  Oligonucleotide for detection of SNP TSC0032356
cacaaccgtaaac

SEQ ID NO: 129343 - DNA, 13 bp, Artificial Sequence
  Oligonucleotide for detection of SNP TSC0032356
gtttatagtcgtg

SEQ ID NO: 129344 - DNA, 13 bp, Artificial Sequence
  Oligonucleotide for detection of SNP TSC0032356
cacgactataaac

SEQ ID NO: 129345 - DNA, 13 bp, Artificial Sequence
  Oligonucleotide for detection of SNP TSC0032356
gtttatggtcgtg

SEQ ID NO: 129346 - DNA, 13 bp, Artificial Sequence
  Oligonucleotide for detection of SNP TSC0032356
cacgaccataaac

SEQ ID NO: 129347 - DNA, 13 bp, Artificial Sequence
  Oligonucleotide for detection of SNP TSC0032356
gtttacggtcgtg

SEQ ID NO: 129348 - DNA, 13 bp, Artificial Sequence
  Oligonucleotide for detection of SNP TSC0032356
cacgaccgtaaac

SEQ ID NO: 129349 - DNA, 13 bp, Artificial Sequence
  Oligonucleotide for detection of SNP TSC0032357
gtagtttggtttg

SEQ ID NO: 129350 - DNA, 13 bp, Artificial Sequence
  Oligonucleotide for detection of SNP TSC0032357
caaaccaaactac

SEQ ID NO: 129351 - DNA, 13 bp, Artificial Sequence
  Oligonucleotide for detection of SNP TSC0032357
gtagttcggtttg

SEQ ID NO: 129352 - DNA, 13 bp, Artificial Sequence
  Oligonucleotide for detection of SNP TSC0032357
caaaccgaactac

SEQ ID NO: 129353 - DNA, 13 bp, Artificial Sequence
  Oligonucleotide for detection of SNP TSC0032357
tagattgggttay

SEQ ID NO: 129354 - DNA, 13 bp, Artificial Sequence
  Oligonucleotide for detection of SNP TSC0032357
rtaacccaatcta

SEQ ID NO: 129355 - DNA, 13 bp, Artificial Sequence
  Oligonucleotide for detection of SNP TSC0032357
tagattaggttay

SEQ ID NO: 129356 - DNA, 13 bp, Artificial Sequence
  Oligonucleotide for detection of SNP TSC0032357
rtaacctaatcta

SEQ ID NO: 129357 - DNA, 13 bp, Artificial Sequence
  Oligonucleotide for detection of SNP TSC0032357
tagatcgggttay

SEQ ID NO: 129358 - DNA, 13 bp, Artificial Sequence
  Oligonucleotide for detection of SNP TSC0032357
rtaacccgatcta

SEQ ID NO: 129359 - DNA, 13 bp, Artificial Sequence
  Oligonucleotide for detection of SNP TSC0032360
gtattaataatat

SEQ ID NO: 129360 - DNA, 13 bp, Artificial Sequence
  Oligonucleotide for detection of SNP TSC0032360
atattattaatac

SEQ ID NO: 129361 - DNA, 13 bp, Artificial Sequence
  Oligonucleotide for detection of SNP TSC0032360
gtattagtaatat

SEQ ID NO: 129362 - DNA, 13 bp, Artificial Sequence
  Oligonucleotide for detection of SNP TSC0032360
atattactaatac

SEQ ID NO: 129363 - DNA, 13 bp, Artificial Sequence
  Oligonucleotide for detection of SNP TSC0032361
taatatagaagay

SEQ ID NO: 129364 - DNA, 13 bp, Artificial Sequence
  Oligonucleotide for detection of SNP TSC0032361
rtcttctatatta

SEQ ID NO: 129365 - DNA, 13 bp, Artificial Sequence
  Oligonucleotide for detection of SNP TSC0032361
taatatggaagay

SEQ ID NO: 129366 - DNA, 13 bp, Artificial Sequence
  Oligonucleotide for detection of SNP TSC0032361
rtcttccatatta

SEQ ID NO: 129367 - DNA, 13 bp, Artificial Sequence
  Oligonucleotide for detection of SNP TSC0032361
taatacggaagay

SEQ ID NO: 129368 - DNA, 13 bp, Artificial Sequence
  Oligonucleotide for detection of SNP TSC0032361
rtcttccgtatta

SEQ ID NO: 129369 - DNA, 13 bp, Artificial Sequence
  Oligonucleotide for detection of SNP TSC0032361
gttttttgtgttg

SEQ ID NO: 129370 - DNA, 13 bp, Artificial Sequence
  Oligonucleotide for detection of SNP TSC0032361
caacacaaaaaac

SEQ ID NO: 129371 - DNA, 13 bp, Artificial Sequence
  Oligonucleotide for detection of SNP TSC0032361
gtttttcgtgttg

SEQ ID NO: 129372 - DNA, 13 bp, Artificial Sequence
  Oligonucleotide for detection of SNP TSC0032361
caacacgaaaaac

SEQ ID NO: 129373 - DNA, 13 bp, Artificial Sequence
  Oligonucleotide for detection of SNP TSC0032371
gttgtaatgagtt

SEQ ID NO: 129374 - DNA, 13 bp, Artificial Sequence
  Oligonucleotide for detection of SNP TSC0032371
aactcattacaac

SEQ ID NO: 129375 - DNA, 13 bp, Artificial Sequence
  Oligonucleotide for detection of SNP TSC0032372
ttttttaagtaty

SEQ ID NO: 129376 - DNA, 13 bp, Artificial Sequence
  Oligonucleotide for detection of SNP TSC0032372
ratacttaaaaaa

SEQ ID NO: 129377 - DNA, 13 bp, Artificial Sequence
  Oligonucleotide for detection of SNP TSC0032372
ttttttgagtaty

SEQ ID NO: 129378 - DNA, 13 bp, Artificial Sequence
  Oligonucleotide for detection of SNP TSC0032372
ratactcaaaaaa

SEQ ID NO: 129379 - DNA, 13 bp, Artificial Sequence
  Oligonucleotide for detection of SNP TSC0032372
tttttcgagtaty

SEQ ID NO: 129380 - DNA, 13 bp, Artificial Sequence
  Oligonucleotide for detection of SNP TSC0032372
ratactcgaaaaa

SEQ ID NO: 129381 - DNA, 13 bp, Artificial Sequence
  Oligonucleotide for detection of SNP TSC0032372
gatgtttgggagg

SEQ ID NO: 129382 - DNA, 13 bp, Artificial Sequence
  Oligonucleotide for detection of SNP TSC0032372
cctcccaaacatc

SEQ ID NO: 129383 - DNA, 13 bp, Artificial Sequence
  Oligonucleotide for detection of SNP TSC0032372
gatgttcgggagg

SEQ ID NO: 129384 - DNA, 13 bp, Artificial Sequence
  Oligonucleotide for detection of SNP TSC0032372
cctcccgaacatc

SEQ ID NO: 129385 - DNA, 13 bp, Artificial Sequence
  Oligonucleotide for detection of SNP TSC0032377
attttagaattta

SEQ ID NO: 129386 - DNA, 13 bp, Artificial Sequence
  Oligonucleotide for detection of SNP TSC0032377
taaattctaaaat

SEQ ID NO: 129387 - DNA, 13 bp, Artificial Sequence
  Oligonucleotide for detection of SNP TSC0032377
tggattgtaggat

SEQ ID NO: 129388 - DNA, 13 bp, Artificial Sequence
  Oligonucleotide for detection of SNP TSC0032377
atcctacaatcca

SEQ ID NO: 129389 - DNA, 13 bp, Artificial Sequence
  Oligonucleotide for detection of SNP TSC0032377
tggattttaggat

SEQ ID NO: 129390 - DNA, 13 bp, Artificial Sequence
  Oligonucleotide for detection of SNP TSC0032377
atcctaaaatcca

SEQ ID NO: 129391 - DNA, 13 bp, Artificial Sequence
  Oligonucleotide for detection of SNP TSC0032378
ttttggggggtat

SEQ ID NO: 129392 - DNA, 13 bp, Artificial Sequence
  Oligonucleotide for detection of SNP TSC0032378
ataccccccaaaa

SEQ ID NO: 129393 - DNA, 13 bp, Artificial Sequence
  Oligonucleotide for detection of SNP TSC0032378
ttttggtgggtat

SEQ ID NO: 129394 - DNA, 13 bp, Artificial Sequence
  Oligonucleotide for detection of SNP TSC0032378
atacccaccaaaa

SEQ ID NO: 129395 - DNA, 13 bp, Artificial Sequence
  Oligonucleotide for detection of SNP TSC0032378
atgttttttagga

SEQ ID NO: 129396 - DNA, 13 bp, Artificial Sequence
  Oligonucleotide for detection of SNP TSC0032378
tcctaaaaaacat

SEQ ID NO: 129397 - DNA, 13 bp, Artificial Sequence
  Oligonucleotide for detection of SNP TSC0032378
atgtttattagga

SEQ ID NO: 129398 - DNA, 13 bp, Artificial Sequence
  Oligonucleotide for detection of SNP TSC0032378
tcctaataaacat

SEQ ID NO: 129399 - DNA, 13 bp, Artificial Sequence
  Oligonucleotide for detection of SNP TSC0032382
aaggtattttaaa

SEQ ID NO: 129400 - DNA, 13 bp, Artificial Sequence
  Oligonucleotide for detection of SNP TSC0032382
tttaaaatacctt

SEQ ID NO: 129401 - DNA, 13 bp, Artificial Sequence
  Oligonucleotide for detection of SNP TSC0032382
aaggtagtttaaa

SEQ ID NO: 129402 - DNA, 13 bp, Artificial Sequence
  Oligonucleotide for detection of SNP TSC0032382
tttaaactacctt

SEQ ID NO: 129403 - DNA, 13 bp, Artificial Sequence
  Oligonucleotide for detection of SNP TSC0032382
tttaaggtatttt

SEQ ID NO: 129404 - DNA, 13 bp, Artificial Sequence
  Oligonucleotide for detection of SNP TSC0032382
aaaataccttaaa

SEQ ID NO: 129405 - DNA, 13 bp, Artificial Sequence
  Oligonucleotide for detection of SNP TSC0032382
tttaagttatttt

SEQ ID NO: 129406 - DNA, 13 bp, Artificial Sequence
  Oligonucleotide for detection of SNP TSC0032382
aaaataacttaaa

SEQ ID NO: 129407 - DNA, 13 bp, Artificial Sequence
  Oligonucleotide for detection of SNP TSC0032383
ttgagtagagtgg

SEQ ID NO: 129408 - DNA, 13 bp, Artificial Sequence
  Oligonucleotide for detection of SNP TSC0032383
ccactctactcaa

SEQ ID NO: 129409 - DNA, 13 bp, Artificial Sequence
  Oligonucleotide for detection of SNP TSC0032383
ttgagtggagtgg

SEQ ID NO: 129410 - DNA, 13 bp, Artificial Sequence
  Oligonucleotide for detection of SNP TSC0032383
ccactccactcaa

SEQ ID NO: 129411 - DNA, 13 bp, Artificial Sequence
  Oligonucleotide for detection of SNP TSC0032383
ttgagtagagcgg

SEQ ID NO: 129412 - DNA, 13 bp, Artificial Sequence
  Oligonucleotide for detection of SNP TSC0032383
ccgctctactcaa

SEQ ID NO: 129413 - DNA, 13 bp, Artificial Sequence
  Oligonucleotide for detection of SNP TSC0032383
ttgagcggagtgg

SEQ ID NO: 129414 - DNA, 13 bp, Artificial Sequence
  Oligonucleotide for detection of SNP TSC0032383
ccactccgctcaa

SEQ ID NO: 129415 - DNA, 13 bp, Artificial Sequence
  Oligonucleotide for detection of SNP TSC0032383
ttgagtggagcgg

SEQ ID NO: 129416 - DNA, 13 bp, Artificial Sequence
  Oligonucleotide for detection of SNP TSC0032383
ccgctccactcaa

SEQ ID NO: 129417 - DNA, 13 bp, Artificial Sequence
  Oligonucleotide for detection of SNP TSC0032383
ttgagcggagcgg

SEQ ID NO: 129418 - DNA, 13 bp, Artificial Sequence
  Oligonucleotide for detection of SNP TSC0032383
ccgctccgctcaa

SEQ ID NO: 129419 - DNA, 13 bp, Artificial Sequence
  Oligonucleotide for detection of SNP TSC0032383
ttgttttgtttag

SEQ ID NO: 129420 - DNA, 13 bp, Artificial Sequence
  Oligonucleotide for detection of SNP TSC0032383
ctaaacaaaacaa

SEQ ID NO: 129421 - DNA, 13 bp, Artificial Sequence
  Oligonucleotide for detection of SNP TSC0032383
tcgttttgtttag

SEQ ID NO: 129422 - DNA, 13 bp, Artificial Sequence
  Oligonucleotide for detection of SNP TSC0032383
ctaaacaaaacga

SEQ ID NO: 129423 - DNA, 13 bp, Artificial Sequence
  Oligonucleotide for detection of SNP TSC0032383
ttgtttcgtttag

SEQ ID NO: 129424 - DNA, 13 bp, Artificial Sequence
  Oligonucleotide for detection of SNP TSC0032383
ctaaacgaaacaa

SEQ ID NO: 129425 - DNA, 13 bp, Artificial Sequence
  Oligonucleotide for detection of SNP TSC0032383
tcgtttcgtttag

SEQ ID NO: 129426 - DNA, 13 bp, Artificial Sequence
  Oligonucleotide for detection of SNP TSC0032383
ctaaacgaaacga

SEQ ID NO: 129427 - DNA, 13 bp, Artificial Sequence
  Oligonucleotide for detection of SNP TSC0032384
gaggtgggaggat

SEQ ID NO: 129428 - DNA, 13 bp, Artificial Sequence
  Oligonucleotide for detection of SNP TSC0032384
atcctcccacctc

SEQ ID NO: 129429 - DNA, 13 bp, Artificial Sequence
  Oligonucleotide for detection of SNP TSC0032384
gaggtgtgaggat

SEQ ID NO: 129430 - DNA, 13 bp, Artificial Sequence
  Oligonucleotide for detection of SNP TSC0032384
atcctcacacctc

SEQ ID NO: 129431 - DNA, 13 bp, Artificial Sequence
  Oligonucleotide for detection of SNP TSC0032385
ggaggttgggtgy

SEQ ID NO: 129432 - DNA, 13 bp, Artificial Sequence
  Oligonucleotide for detection of SNP TSC0032385
rcacccaacctcc

SEQ ID NO: 129433 - DNA, 13 bp, Artificial Sequence
  Oligonucleotide for detection of SNP TSC0032385
gtatttagtttty

SEQ ID NO: 129434 - DNA, 13 bp, Artificial Sequence
  Oligonucleotide for detection of SNP TSC0032385
raaaactaaatac

SEQ ID NO: 129435 - DNA, 13 bp, Artificial Sequence
  Oligonucleotide for detection of SNP TSC0032386
ttaggtgtttttt

SEQ ID NO: 129436 - DNA, 13 bp, Artificial Sequence
  Oligonucleotide for detection of SNP TSC0032386
aaaaaacacctaa

SEQ ID NO: 129437 - DNA, 13 bp, Artificial Sequence
  Oligonucleotide for detection of SNP TSC0032386
ttaggtatttttt

SEQ ID NO: 129438 - DNA, 13 bp, Artificial Sequence
  Oligonucleotide for detection of SNP TSC0032386
aaaaaatacctaa

SEQ ID NO: 129439 - DNA, 13 bp, Artificial Sequence
  Oligonucleotide for detection of SNP TSC0032389
gtttttattatag

SEQ ID NO: 129440 - DNA, 13 bp, Artificial Sequence
  Oligonucleotide for detection of SNP TSC0032389
ctataataaaaac

SEQ ID NO: 129441 - DNA, 13 bp, Artificial Sequence
  Oligonucleotide for detection of SNP TSC0032389
gttttttttatag

SEQ ID NO: 129442 - DNA, 13 bp, Artificial Sequence
  Oligonucleotide for detection of SNP TSC0032389
ctataaaaaaaac

SEQ ID NO: 129443 - DNA, 13 bp, Artificial Sequence
  Oligonucleotide for detection of SNP TSC0032389
ttgtggtggagay

SEQ ID NO: 129444 - DNA, 13 bp, Artificial Sequence
  Oligonucleotide for detection of SNP TSC0032389
rtctccaccacaa

SEQ ID NO: 129445 - DNA, 13 bp, Artificial Sequence
  Oligonucleotide for detection of SNP TSC0032389
ttgtggaggagay

SEQ ID NO: 129446 - DNA, 13 bp, Artificial Sequence
  Oligonucleotide for detection of SNP TSC0032389
rtctcctccacaa

SEQ ID NO: 129447 - DNA, 13 bp, Artificial Sequence
  Oligonucleotide for detection of SNP TSC0032390
ttattttgggtag

SEQ ID NO: 129448 - DNA, 13 bp, Artificial Sequence
  Oligonucleotide for detection of SNP TSC0032390
ctacccaaaataa

SEQ ID NO: 129449 - DNA, 13 bp, Artificial Sequence
  Oligonucleotide for detection of SNP TSC0032390
ttatttcgggtag

SEQ ID NO: 129450 - DNA, 13 bp, Artificial Sequence
  Oligonucleotide for detection of SNP TSC0032390
ctacccgaaataa

SEQ ID NO: 129451 - DNA, 13 bp, Artificial Sequence
  Oligonucleotide for detection of SNP TSC0032390
ttgttcgaggtga

SEQ ID NO: 129452 - DNA, 13 bp, Artificial Sequence
  Oligonucleotide for detection of SNP TSC0032390
tcacctcgaacaa

SEQ ID NO: 129453 - DNA, 13 bp, Artificial Sequence
  Oligonucleotide for detection of SNP TSC0032391
agggttggagggy

SEQ ID NO: 129454 - DNA, 13 bp, Artificial Sequence
  Oligonucleotide for detection of SNP TSC0032391
rccctccaaccct

SEQ ID NO: 129455 - DNA, 13 bp, Artificial Sequence
  Oligonucleotide for detection of SNP TSC0032391
agggtttgagggy

SEQ ID NO: 129456 - DNA, 13 bp, Artificial Sequence
  Oligonucleotide for detection of SNP TSC0032391
rccctcaaaccct

SEQ ID NO: 129457 - DNA, 13 bp, Artificial Sequence
  Oligonucleotide for detection of SNP TSC0032391
gtttttaagtttt

SEQ ID NO: 129458 - DNA, 13 bp, Artificial Sequence
  Oligonucleotide for detection of SNP TSC0032391
aaaacttaaaaac

SEQ ID NO: 129459 - DNA, 13 bp, Artificial Sequence
  Oligonucleotide for detection of SNP TSC0032392
atatgaagggaat

SEQ ID NO: 129460 - DNA, 13 bp, Artificial Sequence
  Oligonucleotide for detection of SNP TSC0032392
attcccttcatat

SEQ ID NO: 129461 - DNA, 13 bp, Artificial Sequence
  Oligonucleotide for detection of SNP TSC0032392
atatgaggggaat

SEQ ID NO: 129462 - DNA, 13 bp, Artificial Sequence
  Oligonucleotide for detection of SNP TSC0032392
attcccctcatat

SEQ ID NO: 129463 - DNA, 13 bp, Artificial Sequence
  Oligonucleotide for detection of SNP TSC0032392
atacgaagggaat

SEQ ID NO: 129464 - DNA, 13 bp, Artificial Sequence
  Oligonucleotide for detection of SNP TSC0032392
attcccttcgtat

SEQ ID NO: 129465 - DNA, 13 bp, Artificial Sequence
  Oligonucleotide for detection of SNP TSC0032392
atacgaggggaat

SEQ ID NO: 129466 - DNA, 13 bp, Artificial Sequence
  Oligonucleotide for detection of SNP TSC0032392
attcccctcgtat

SEQ ID NO: 129467 - DNA, 13 bp, Artificial Sequence
  Oligonucleotide for detection of SNP TSC0032393
taaaaagaataaa

SEQ ID NO: 129468 - DNA, 13 bp, Artificial Sequence
  Oligonucleotide for detection of SNP TSC0032393
tttattcttttta

SEQ ID NO: 129469 - DNA, 13 bp, Artificial Sequence
  Oligonucleotide for detection of SNP TSC0032394
gttttggatatgy

SEQ ID NO: 129470 - DNA, 13 bp, Artificial Sequence
  Oligonucleotide for detection of SNP TSC0032394
rcatatccaaaac

SEQ ID NO: 129471 - DNA, 13 bp, Artificial Sequence
  Oligonucleotide for detection of SNP TSC0032394
gttttgaatatgy

SEQ ID NO: 129472 - DNA, 13 bp, Artificial Sequence
  Oligonucleotide for detection of SNP TSC0032394
rcatattcaaaac

SEQ ID NO: 129473 - DNA, 13 bp, Artificial Sequence
  Oligonucleotide for detection of SNP TSC0032397
aaatttgtttaga

SEQ ID NO: 129474 - DNA, 13 bp, Artificial Sequence
  Oligonucleotide for detection of SNP TSC0032397
tctaaacaaattt

SEQ ID NO: 129475 - DNA, 13 bp, Artificial Sequence
  Oligonucleotide for detection of SNP TSC0032397
aaatttatttaga

SEQ ID NO: 129476 - DNA, 13 bp, Artificial Sequence
  Oligonucleotide for detection of SNP TSC0032397
tctaaataaattt

SEQ ID NO: 129477 - DNA, 13 bp, Artificial Sequence
  Oligonucleotide for detection of SNP TSC0032398
gtttaggatttta

SEQ ID NO: 129478 - DNA, 13 bp, Artificial Sequence
  Oligonucleotide for detection of SNP TSC0032398
taaaatcctaaac

SEQ ID NO: 129479 - DNA, 13 bp, Artificial Sequence
  Oligonucleotide for detection of SNP TSC0032398
gtttagaatttta

SEQ ID NO: 129480 - DNA, 13 bp, Artificial Sequence
  Oligonucleotide for detection of SNP TSC0032398
taaaattctaaac

SEQ ID NO: 129481 - DNA, 13 bp, Artificial Sequence
  Oligonucleotide for detection of SNP TSC0032399
tataaaatagttt

SEQ ID NO: 129482 - DNA, 13 bp, Artificial Sequence
  Oligonucleotide for detection of SNP TSC0032399
aaactattttata

SEQ ID NO: 129483 - DNA, 13 bp, Artificial Sequence
  Oligonucleotide for detection of SNP TSC0032400
ggtatagggttay

SEQ ID NO: 129484 - DNA, 13 bp, Artificial Sequence
  Oligonucleotide for detection of SNP TSC0032400
rtaaccctatacc

SEQ ID NO: 129485 - DNA, 13 bp, Artificial Sequence
  Oligonucleotide for detection of SNP TSC0032400
ggtataaggttay

SEQ ID NO: 129486 - DNA, 13 bp, Artificial Sequence
  Oligonucleotide for detection of SNP TSC0032400
rtaaccttatacc

SEQ ID NO: 129487 - DNA, 13 bp, Artificial Sequence
  Oligonucleotide for detection of SNP TSC0032401
aagaagagttttg

SEQ ID NO: 129488 - DNA, 13 bp, Artificial Sequence
  Oligonucleotide for detection of SNP TSC0032401
caaaactcttctt

SEQ ID NO: 129489 - DNA, 13 bp, Artificial Sequence
  Oligonucleotide for detection of SNP TSC0032401
aagaagggttttg

SEQ ID NO: 129490 - DNA, 13 bp, Artificial Sequence
  Oligonucleotide for detection of SNP TSC0032401
caaaacccttctt

SEQ ID NO: 129491 - DNA, 13 bp, Artificial Sequence
  Oligonucleotide for detection of SNP TSC0032402
ttaattattataa

SEQ ID NO: 129492 - DNA, 13 bp, Artificial Sequence
  Oligonucleotide for detection of SNP TSC0032402
ttataataattaa

SEQ ID NO: 129493 - DNA, 13 bp, Artificial Sequence
  Oligonucleotide for detection of SNP TSC0032402
ttaattgttataa

SEQ ID NO: 129494 - DNA, 13 bp, Artificial Sequence
  Oligonucleotide for detection of SNP TSC0032402
ttataacaattaa

SEQ ID NO: 129495 - DNA, 13 bp, Artificial Sequence
  Oligonucleotide for detection of SNP TSC0032402
ttaatcgttataa

SEQ ID NO: 129496 - DNA, 13 bp, Artificial Sequence
  Oligonucleotide for detection of SNP TSC0032402
ttataacgattaa

SEQ ID NO: 129497 - DNA, 13 bp, Artificial Sequence
  Oligonucleotide for detection of SNP TSC0032402
ttatgatgattga

SEQ ID NO: 129498 - DNA, 13 bp, Artificial Sequence
  Oligonucleotide for detection of SNP TSC0032402
tcaatcatcataa

SEQ ID NO: 129499 - DNA, 13 bp, Artificial Sequence
  Oligonucleotide for detection of SNP TSC0032402
ttatgacgattga

SEQ ID NO: 129500 - DNA, 13 bp, Artificial Sequence
  Oligonucleotide for detection of SNP TSC0032402
tcaatcgtcataa

SEQ ID NO: 129501 - DNA, 13 bp, Artificial Sequence
  Oligonucleotide for detection of SNP TSC0032403
attattataattt

SEQ ID NO: 129502 - DNA, 13 bp, Artificial Sequence
  Oligonucleotide for detection of SNP TSC0032403
aaattataataat

SEQ ID NO: 129503 - DNA, 13 bp, Artificial Sequence
  Oligonucleotide for detection of SNP TSC0032403
attattgtaattt

SEQ ID NO: 129504 - DNA, 13 bp, Artificial Sequence
  Oligonucleotide for detection of SNP TSC0032403
aaattacaataat

SEQ ID NO: 129505 - DNA, 13 bp, Artificial Sequence
  Oligonucleotide for detection of SNP TSC0032403
attatcgtaattt

SEQ ID NO: 129506 - DNA, 13 bp, Artificial Sequence
  Oligonucleotide for detection of SNP TSC0032403
aaattacgataat

SEQ ID NO: 129507 - DNA, 13 bp, Artificial Sequence
  Oligonucleotide for detection of SNP TSC0032403
aaattatgatgat

SEQ ID NO: 129508 - DNA, 13 bp, Artificial Sequence
  Oligonucleotide for detection of SNP TSC0032403
atcatcataattt

SEQ ID NO: 129509 - DNA, 13 bp, Artificial Sequence
  Oligonucleotide for detection of SNP TSC0032403
aaattacgatgat

SEQ ID NO: 129510 - DNA, 13 bp, Artificial Sequence
  Oligonucleotide for detection of SNP TSC0032403
atcatcgtaattt

SEQ ID NO: 129511 - DNA, 13 bp, Artificial Sequence
  Oligonucleotide for detection of SNP TSC0032404
atattagatgttt

SEQ ID NO: 129512 - DNA, 13 bp, Artificial Sequence
  Oligonucleotide for detection of SNP TSC0032404
aaacatctaatat

SEQ ID NO: 129513 - DNA, 13 bp, Artificial Sequence
  Oligonucleotide for detection of SNP TSC0032404
atattaaatgttt

SEQ ID NO: 129514 - DNA, 13 bp, Artificial Sequence
  Oligonucleotide for detection of SNP TSC0032404
aaacatttaatat

SEQ ID NO: 129515 - DNA, 13 bp, Artificial Sequence
  Oligonucleotide for detection of SNP TSC0032404
atattagacgttt

SEQ ID NO: 129516 - DNA, 13 bp, Artificial Sequence
  Oligonucleotide for detection of SNP TSC0032404
aaacgtctaatat

SEQ ID NO: 129517 - DNA, 13 bp, Artificial Sequence
  Oligonucleotide for detection of SNP TSC0032404
atattaaacgttt

SEQ ID NO: 129518 - DNA, 13 bp, Artificial Sequence
  Oligonucleotide for detection of SNP TSC0032404
aaacgtttaatat

SEQ ID NO: 129519 - DNA, 13 bp, Artificial Sequence
  Oligonucleotide for detection of SNP TSC0032405
gtttatgtaggat

SEQ ID NO: 129520 - DNA, 13 bp, Artificial Sequence
  Oligonucleotide for detection of SNP TSC0032405
atcctacataaac

SEQ ID NO: 129521 - DNA, 13 bp, Artificial Sequence
  Oligonucleotide for detection of SNP TSC0032405
gtttatttaggat

SEQ ID NO: 129522 - DNA, 13 bp, Artificial Sequence
  Oligonucleotide for detection of SNP TSC0032405
atcctaaataaac

SEQ ID NO: 129523 - DNA, 13 bp, Artificial Sequence
  Oligonucleotide for detection of SNP TSC0032405
gtttacgtaggat

SEQ ID NO: 129524 - DNA, 13 bp, Artificial Sequence
  Oligonucleotide for detection of SNP TSC0032405
atcctacgtaaac

SEQ ID NO: 129525 - DNA, 13 bp, Artificial Sequence
  Oligonucleotide for detection of SNP TSC0032405
attttgtgtaaay

SEQ ID NO: 129526 - DNA, 13 bp, Artificial Sequence
  Oligonucleotide for detection of SNP TSC0032405
rtttacacaaaat

SEQ ID NO: 129527 - DNA, 13 bp, Artificial Sequence
  Oligonucleotide for detection of SNP TSC0032405
attttgagtaaay

SEQ ID NO: 129528 - DNA, 13 bp, Artificial Sequence
  Oligonucleotide for detection of SNP TSC0032405
rtttactcaaaat

SEQ ID NO: 129529 - DNA, 13 bp, Artificial Sequence
  Oligonucleotide for detection of SNP TSC0032405
attttgcgtaaay

SEQ ID NO: 129530 - DNA, 13 bp, Artificial Sequence
  Oligonucleotide for detection of SNP TSC0032405
rtttacgcaaaat

SEQ ID NO: 129531 - DNA, 13 bp, Artificial Sequence
  Oligonucleotide for detection of SNP TSC0032412
gaaatagtttttt

SEQ ID NO: 129532 - DNA, 13 bp, Artificial Sequence
  Oligonucleotide for detection of SNP TSC0032412
aaaaaactatttc

SEQ ID NO: 129533 - DNA, 13 bp, Artificial Sequence
  Oligonucleotide for detection of SNP TSC0032414
tatttaagttaat

SEQ ID NO: 129534 - DNA, 13 bp, Artificial Sequence
  Oligonucleotide for detection of SNP TSC0032414
attaacttaaata

SEQ ID NO: 129535 - DNA, 13 bp, Artificial Sequence
  Oligonucleotide for detection of SNP TSC0032414
tatttaggttaat

SEQ ID NO: 129536 - DNA, 13 bp, Artificial Sequence
  Oligonucleotide for detection of SNP TSC0032414
attaacctaaata

SEQ ID NO: 129537 - DNA, 13 bp, Artificial Sequence
  Oligonucleotide for detection of SNP TSC0032415
attttggatttag

SEQ ID NO: 129538 - DNA, 13 bp, Artificial Sequence
  Oligonucleotide for detection of SNP TSC0032415
ctaaatccaaaat

SEQ ID NO: 129539 - DNA, 13 bp, Artificial Sequence
  Oligonucleotide for detection of SNP TSC0032415
attttgaatttag

SEQ ID NO: 129540 - DNA, 13 bp, Artificial Sequence
  Oligonucleotide for detection of SNP TSC0032415
ctaaattcaaaat

SEQ ID NO: 129541 - DNA, 13 bp, Artificial Sequence
  Oligonucleotide for detection of SNP TSC0032417
tatagtggtgata

SEQ ID NO: 129542 - DNA, 13 bp, Artificial Sequence
  Oligonucleotide for detection of SNP TSC0032417
tatcaccactata

SEQ ID NO: 129543 - DNA, 13 bp, Artificial Sequence
  Oligonucleotide for detection of SNP TSC0032417
tatagtagtgata

SEQ ID NO: 129544 - DNA, 13 bp, Artificial Sequence
  Oligonucleotide for detection of SNP TSC0032417
tatcactactata

SEQ ID NO: 129545 - DNA, 13 bp, Artificial Sequence
  Oligonucleotide for detection of SNP TSC0032418
ttattattgtgta

SEQ ID NO: 129546 - DNA, 13 bp, Artificial Sequence
  Oligonucleotide for detection of SNP TSC0032418
tacacaataataa

SEQ ID NO: 129547 - DNA, 13 bp, Artificial Sequence
  Oligonucleotide for detection of SNP TSC0032418
ttattagtgtgta

SEQ ID NO: 129548 - DNA, 13 bp, Artificial Sequence
  Oligonucleotide for detection of SNP TSC0032418
tacacactaataa

SEQ ID NO: 129549 - DNA, 13 bp, Artificial Sequence
  Oligonucleotide for detection of SNP TSC0032418
tgtatagtggtga

SEQ ID NO: 129550 - DNA, 13 bp, Artificial Sequence
  Oligonucleotide for detection of SNP TSC0032418
tcaccactataca

SEQ ID NO: 129551 - DNA, 13 bp, Artificial Sequence
  Oligonucleotide for detection of SNP TSC0032418
tgtatattggtga

SEQ ID NO: 129552 - DNA, 13 bp, Artificial Sequence
  Oligonucleotide for detection of SNP TSC0032418
tcaccaatataca

SEQ ID NO: 129553 - DNA, 13 bp, Artificial Sequence
  Oligonucleotide for detection of SNP TSC0032419
ttttttgagaggg

SEQ ID NO: 129554 - DNA, 13 bp, Artificial Sequence
  Oligonucleotide for detection of SNP TSC0032419
ccctctcaaaaaa

SEQ ID NO: 129555 - DNA, 13 bp, Artificial Sequence
  Oligonucleotide for detection of SNP TSC0032419
ttttttaagaggg

SEQ ID NO: 129556 - DNA, 13 bp, Artificial Sequence
  Oligonucleotide for detection of SNP TSC0032419
ccctcttaaaaaa

SEQ ID NO: 129557 - DNA, 13 bp, Artificial Sequence
  Oligonucleotide for detection of SNP TSC0032419
tttttcgagaggg

SEQ ID NO: 129558 - DNA, 13 bp, Artificial Sequence
  Oligonucleotide for detection of SNP TSC0032419
ccctctcgaaaaa

SEQ ID NO: 129559 - DNA, 13 bp, Artificial Sequence
  Oligonucleotide for detection of SNP TSC0032420
ttttaaatttaay

SEQ ID NO: 129560 - DNA, 13 bp, Artificial Sequence
  Oligonucleotide for detection of SNP TSC0032420
rttaaatttaaaa

SEQ ID NO: 129561 - DNA, 13 bp, Artificial Sequence
  Oligonucleotide for detection of SNP TSC0032420
ttttaagtttaay

SEQ ID NO: 129562 - DNA, 13 bp, Artificial Sequence
  Oligonucleotide for detection of SNP TSC0032420
rttaaacttaaaa

SEQ ID NO: 129563 - DNA, 13 bp, Artificial Sequence
  Oligonucleotide for detection of SNP TSC0032421
ttggtattttttt

SEQ ID NO: 129564 - DNA, 13 bp, Artificial Sequence
  Oligonucleotide for detection of SNP TSC0032421
aaaaaaataccaa

SEQ ID NO: 129565 - DNA, 13 bp, Artificial Sequence
  Oligonucleotide for detection of SNP TSC0032421
aaagagttgttaa

SEQ ID NO: 129566 - DNA, 13 bp, Artificial Sequence
  Oligonucleotide for detection of SNP TSC0032421
ttaacaactcttt

SEQ ID NO: 129567 - DNA, 13 bp, Artificial Sequence
  Oligonucleotide for detection of SNP TSC0032421
aaagagatgttaa

SEQ ID NO: 129568 - DNA, 13 bp, Artificial Sequence
  Oligonucleotide for detection of SNP TSC0032421
ttaacatctcttt

SEQ ID NO: 129569 - DNA, 13 bp, Artificial Sequence
  Oligonucleotide for detection of SNP TSC0032422
ttgtaggttgtag

SEQ ID NO: 129570 - DNA, 13 bp, Artificial Sequence
  Oligonucleotide for detection of SNP TSC0032422
ctacaacctacaa

SEQ ID NO: 129571 - DNA, 13 bp, Artificial Sequence
  Oligonucleotide for detection of SNP TSC0032422
ttgtagattgtag

SEQ ID NO: 129572 - DNA, 13 bp, Artificial Sequence
  Oligonucleotide for detection of SNP TSC0032422
ctacaatctacaa

SEQ ID NO: 129573 - DNA, 13 bp, Artificial Sequence
  Oligonucleotide for detection of SNP TSC0032425
atagtagagtagg

SEQ ID NO: 129574 - DNA, 13 bp, Artificial Sequence
  Oligonucleotide for detection of SNP TSC0032425
cctactctactat

SEQ ID NO: 129575 - DNA, 13 bp, Artificial Sequence
  Oligonucleotide for detection of SNP TSC0032425
atagtaaagtagg

SEQ ID NO: 129576 - DNA, 13 bp, Artificial Sequence
  Oligonucleotide for detection of SNP TSC0032425
cctactttactat

SEQ ID NO: 129577 - DNA, 13 bp, Artificial Sequence
  Oligonucleotide for detection of SNP TSC0032426
tataggaagggta

SEQ ID NO: 129578 - DNA, 13 bp, Artificial Sequence
  Oligonucleotide for detection of SNP TSC0032426
tacccttcctata

SEQ ID NO: 129579 - DNA, 13 bp, Artificial Sequence
  Oligonucleotide for detection of SNP TSC0032426
tatagggagggta

SEQ ID NO: 129580 - DNA, 13 bp, Artificial Sequence
  Oligonucleotide for detection of SNP TSC0032426
taccctccctata

SEQ ID NO: 129581 - DNA, 13 bp, Artificial Sequence
  Oligonucleotide for detection of SNP TSC0032428
gaagtggaaagta

SEQ ID NO: 129582 - DNA, 13 bp, Artificial Sequence
  Oligonucleotide for detection of SNP TSC0032428
tactttccacttc

SEQ ID NO: 129583 - DNA, 13 bp, Artificial Sequence
  Oligonucleotide for detection of SNP TSC0032428
gaagtgtaaagta

SEQ ID NO: 129584 - DNA, 13 bp, Artificial Sequence
  Oligonucleotide for detection of SNP TSC0032428
tactttacacttc

SEQ ID NO: 129585 - DNA, 13 bp, Artificial Sequence
  Oligonucleotide for detection of SNP TSC0032429
atatatatgttag

SEQ ID NO: 129586 - DNA, 13 bp, Artificial Sequence
  Oligonucleotide for detection of SNP TSC0032429
ctaacatatatat

SEQ ID NO: 129587 - DNA, 13 bp, Artificial Sequence
  Oligonucleotide for detection of SNP TSC0032429
atatatgtgttag

SEQ ID NO: 129588 - DNA, 13 bp, Artificial Sequence
  Oligonucleotide for detection of SNP TSC0032429
ctaacacatatat

SEQ ID NO: 129589 - DNA, 13 bp, Artificial Sequence
  Oligonucleotide for detection of SNP TSC0032430
ggggggggtttay

SEQ ID NO: 129590 - DNA, 13 bp, Artificial Sequence
  Oligonucleotide for detection of SNP TSC0032430
rtaaacccccccc

SEQ ID NO: 129591 - DNA, 13 bp, Artificial Sequence
  Oligonucleotide for detection of SNP TSC0032430
ggggggtgtttay

SEQ ID NO: 129592 - DNA, 13 bp, Artificial Sequence
  Oligonucleotide for detection of SNP TSC0032430
rtaaacacccccc

SEQ ID NO: 129593 - DNA, 13 bp, Artificial Sequence
  Oligonucleotide for detection of SNP TSC0032430
gtagattttttty

SEQ ID NO: 129594 - DNA, 13 bp, Artificial Sequence
  Oligonucleotide for detection of SNP TSC0032430
raaaaaaatctac

SEQ ID NO: 129595 - DNA, 13 bp, Artificial Sequence
  Oligonucleotide for detection of SNP TSC0032430
gtagatattttty

SEQ ID NO: 129596 - DNA, 13 bp, Artificial Sequence
  Oligonucleotide for detection of SNP TSC0032430
raaaaatatctac

SEQ ID NO: 129597 - DNA, 13 bp, Artificial Sequence
  Oligonucleotide for detection of SNP TSC0032434
ttttataatttty

SEQ ID NO: 129598 - DNA, 13 bp, Artificial Sequence
  Oligonucleotide for detection of SNP TSC0032434
raaaattataaaa

SEQ ID NO: 129599 - DNA, 13 bp, Artificial Sequence
  Oligonucleotide for detection of SNP TSC0032434
ttttatgatttty

SEQ ID NO: 129600 - DNA, 13 bp, Artificial Sequence
  Oligonucleotide for detection of SNP TSC0032434
raaaatcataaaa

SEQ ID NO: 129601 - DNA, 13 bp, Artificial Sequence
  Oligonucleotide for detection of SNP TSC0032434
ttttacgatttty

SEQ ID NO: 129602 - DNA, 13 bp, Artificial Sequence
  Oligonucleotide for detection of SNP TSC0032434
raaaatcgtaaaa

SEQ ID NO: 129603 - DNA, 13 bp, Artificial Sequence
  Oligonucleotide for detection of SNP TSC0032434
ggagattgtagaa

SEQ ID NO: 129604 - DNA, 13 bp, Artificial Sequence
  Oligonucleotide for detection of SNP TSC0032434
ttctacaatctcc

SEQ ID NO: 129605 - DNA, 13 bp, Artificial Sequence
  Oligonucleotide for detection of SNP TSC0032434
ggagatcgtagaa

SEQ ID NO: 129606 - DNA, 13 bp, Artificial Sequence
  Oligonucleotide for detection of SNP TSC0032434
ttctacgatctcc

SEQ ID NO: 129607 - DNA, 13 bp, Artificial Sequence
  Oligonucleotide for detection of SNP TSC0032436
ttggtaaagatta

SEQ ID NO: 129608 - DNA, 13 bp, Artificial Sequence
  Oligonucleotide for detection of SNP TSC0032436
taatctttaccaa

SEQ ID NO: 129609 - DNA, 13 bp, Artificial Sequence
  Oligonucleotide for detection of SNP TSC0032436
ttggtatagatta

SEQ ID NO: 129610 - DNA, 13 bp, Artificial Sequence
  Oligonucleotide for detection of SNP TSC0032436
taatctataccaa

SEQ ID NO: 129611 - DNA, 13 bp, Artificial Sequence
  Oligonucleotide for detection of SNP TSC0032436
tcggtaaagatta

SEQ ID NO: 129612 - DNA, 13 bp, Artificial Sequence
  Oligonucleotide for detection of SNP TSC0032436
taatctttaccga

SEQ ID NO: 129613 - DNA, 13 bp, Artificial Sequence
  Oligonucleotide for detection of SNP TSC0032436
tcggtatagatta

SEQ ID NO: 129614 - DNA, 13 bp, Artificial Sequence
  Oligonucleotide for detection of SNP TSC0032436
taatctataccga

SEQ ID NO: 129615 - DNA, 13 bp, Artificial Sequence
  Oligonucleotide for detection of SNP TSC0032436
tgatttttgttgg

SEQ ID NO: 129616 - DNA, 13 bp, Artificial Sequence
  Oligonucleotide for detection of SNP TSC0032436
ccaacaaaaatca

SEQ ID NO: 129617 - DNA, 13 bp, Artificial Sequence
  Oligonucleotide for detection of SNP TSC0032436
tgatttatgttgg

SEQ ID NO: 129618 - DNA, 13 bp, Artificial Sequence
  Oligonucleotide for detection of SNP TSC0032436
ccaacataaatca

SEQ ID NO: 129619 - DNA, 13 bp, Artificial Sequence
  Oligonucleotide for detection of SNP TSC0032436
tgatttttgtcgg

SEQ ID NO: 129620 - DNA, 13 bp, Artificial Sequence
  Oligonucleotide for detection of SNP TSC0032436
ccgacaaaaatca

SEQ ID NO: 129621 - DNA, 13 bp, Artificial Sequence
  Oligonucleotide for detection of SNP TSC0032436
tgatttatgtcgg

SEQ ID NO: 129622 - DNA, 13 bp, Artificial Sequence
  Oligonucleotide for detection of SNP TSC0032436
ccgacataaatca

SEQ ID NO: 129623 - DNA, 13 bp, Artificial Sequence
  Oligonucleotide for detection of SNP TSC0032437
aattatgtgatag

SEQ ID NO: 129624 - DNA, 13 bp, Artificial Sequence
  Oligonucleotide for detection of SNP TSC0032437
ctatcacataatt

SEQ ID NO: 129625 - DNA, 13 bp, Artificial Sequence
  Oligonucleotide for detection of SNP TSC0032437
aattatatgatag

SEQ ID NO: 129626 - DNA, 13 bp, Artificial Sequence
  Oligonucleotide for detection of SNP TSC0032437
ctatcatataatt

SEQ ID NO: 129627 - DNA, 13 bp, Artificial Sequence
  Oligonucleotide for detection of SNP TSC0032437
aattacgtgatag

SEQ ID NO: 129628 - DNA, 13 bp, Artificial Sequence
  Oligonucleotide for detection of SNP TSC0032437
ctatcacgtaatt

SEQ ID NO: 129629 - DNA, 13 bp, Artificial Sequence
  Oligonucleotide for detection of SNP TSC0032438
gtttttgggggta

SEQ ID NO: 129630 - DNA, 13 bp, Artificial Sequence
  Oligonucleotide for detection of SNP TSC0032438
tacccccaaaaac

SEQ ID NO: 129631 - DNA, 13 bp, Artificial Sequence
  Oligonucleotide for detection of SNP TSC0032438
gttttttggggta

SEQ ID NO: 129632 - DNA, 13 bp, Artificial Sequence
  Oligonucleotide for detection of SNP TSC0032438
taccccaaaaaac

SEQ ID NO: 129633 - DNA, 13 bp, Artificial Sequence
  Oligonucleotide for detection of SNP TSC0032438
tatttttaagagy

SEQ ID NO: 129634 - DNA, 13 bp, Artificial Sequence
  Oligonucleotide for detection of SNP TSC0032438
rctcttaaaaata

SEQ ID NO: 129635 - DNA, 13 bp, Artificial Sequence
  Oligonucleotide for detection of SNP TSC0032438
tattttaaagagy

SEQ ID NO: 129636 - DNA, 13 bp, Artificial Sequence
  Oligonucleotide for detection of SNP TSC0032438
rctctttaaaata

SEQ ID NO: 129637 - DNA, 13 bp, Artificial Sequence
  Oligonucleotide for detection of SNP TSC0032439
aaaattattttat

SEQ ID NO: 129638 - DNA, 13 bp, Artificial Sequence
  Oligonucleotide for detection of SNP TSC0032439
ataaaataatttt

SEQ ID NO: 129639 - DNA, 13 bp, Artificial Sequence
  Oligonucleotide for detection of SNP TSC0032439
aaaattgttttat

SEQ ID NO: 129640 - DNA, 13 bp, Artificial Sequence
  Oligonucleotide for detection of SNP TSC0032439
ataaaacaatttt

SEQ ID NO: 129641 - DNA, 13 bp, Artificial Sequence
  Oligonucleotide for detection of SNP TSC0032439
aaaatcgttttat

SEQ ID NO: 129642 - DNA, 13 bp, Artificial Sequence
  Oligonucleotide for detection of SNP TSC0032439
ataaaacgatttt

SEQ ID NO: 129643 - DNA, 13 bp, Artificial Sequence
  Oligonucleotide for detection of SNP TSC0032439
ataaaatggtttt

SEQ ID NO: 129644 - DNA, 13 bp, Artificial Sequence
  Oligonucleotide for detection of SNP TSC0032439
aaaaccattttat

SEQ ID NO: 129645 - DNA, 13 bp, Artificial Sequence
  Oligonucleotide for detection of SNP TSC0032439
ataaaacggtttt

SEQ ID NO: 129646 - DNA, 13 bp, Artificial Sequence
  Oligonucleotide for detection of SNP TSC0032439
aaaaccgttttat

SEQ ID NO: 129647 - DNA, 13 bp, Artificial Sequence
  Oligonucleotide for detection of SNP TSC0032442
gagttaatataga

SEQ ID NO: 129648 - DNA, 13 bp, Artificial Sequence
  Oligonucleotide for detection of SNP TSC0032442
tctatattaactc

SEQ ID NO: 129649 - DNA, 13 bp, Artificial Sequence
  Oligonucleotide for detection of SNP TSC0032442
gagttagtataga

SEQ ID NO: 129650 - DNA, 13 bp, Artificial Sequence
  Oligonucleotide for detection of SNP TSC0032442
tctatactaactc

SEQ ID NO: 129651 - DNA, 13 bp, Artificial Sequence
  Oligonucleotide for detection of SNP TSC0032447
atataaatttgtg

SEQ ID NO: 129652 - DNA, 13 bp, Artificial Sequence
  Oligonucleotide for detection of SNP TSC0032447
cacaaatttatat

SEQ ID NO: 129653 - DNA, 13 bp, Artificial Sequence
  Oligonucleotide for detection of SNP TSC0032447
atataagtttgtg

SEQ ID NO: 129654 - DNA, 13 bp, Artificial Sequence
  Oligonucleotide for detection of SNP TSC0032447
cacaaacttatat

SEQ ID NO: 129655 - DNA, 13 bp, Artificial Sequence
  Oligonucleotide for detection of SNP TSC0032447
atataaattcgtg

SEQ ID NO: 129656 - DNA, 13 bp, Artificial Sequence
  Oligonucleotide for detection of SNP TSC0032447
cacgaatttatat

SEQ ID NO: 129657 - DNA, 13 bp, Artificial Sequence
  Oligonucleotide for detection of SNP TSC0032447
atataagttcgtg

SEQ ID NO: 129658 - DNA, 13 bp, Artificial Sequence
  Oligonucleotide for detection of SNP TSC0032447
cacgaacttatat

SEQ ID NO: 129659 - DNA, 13 bp, Artificial Sequence
  Oligonucleotide for detection of SNP TSC0032450
tttttgtttatty

SEQ ID NO: 129660 - DNA, 13 bp, Artificial Sequence
  Oligonucleotide for detection of SNP TSC0032450
raataaacaaaaa

SEQ ID NO: 129661 - DNA, 13 bp, Artificial Sequence
  Oligonucleotide for detection of SNP TSC0032450
gagtaattaaaga

SEQ ID NO: 129662 - DNA, 13 bp, Artificial Sequence
  Oligonucleotide for detection of SNP TSC0032450
tctttaattactc

SEQ ID NO: 129663 - DNA, 13 bp, Artificial Sequence
  Oligonucleotide for detection of SNP TSC0032450
gagtaaataaaga

SEQ ID NO: 129664 - DNA, 13 bp, Artificial Sequence
  Oligonucleotide for detection of SNP TSC0032450
tctttatttactc

SEQ ID NO: 129665 - DNA, 13 bp, Artificial Sequence
  Oligonucleotide for detection of SNP TSC0032451
aaatttggaagta

SEQ ID NO: 129666 - DNA, 13 bp, Artificial Sequence
  Oligonucleotide for detection of SNP TSC0032451
tacttccaaattt

SEQ ID NO: 129667 - DNA, 13 bp, Artificial Sequence
  Oligonucleotide for detection of SNP TSC0032451
aaatttagaagta

SEQ ID NO: 129668 - DNA, 13 bp, Artificial Sequence
  Oligonucleotide for detection of SNP TSC0032451
tacttctaaattt

SEQ ID NO: 129669 - DNA, 13 bp, Artificial Sequence
  Oligonucleotide for detection of SNP TSC0032452
gggttttgttgga

SEQ ID NO: 129670 - DNA, 13 bp, Artificial Sequence
  Oligonucleotide for detection of SNP TSC0032452
tccaacaaaaccc

SEQ ID NO: 129671 - DNA, 13 bp, Artificial Sequence
  Oligonucleotide for detection of SNP TSC0032452
gggtttcgttgga

SEQ ID NO: 129672 - DNA, 13 bp, Artificial Sequence
  Oligonucleotide for detection of SNP TSC0032452
tccaacgaaaccc

SEQ ID NO: 129673 - DNA, 13 bp, Artificial Sequence
  Oligonucleotide for detection of SNP TSC0032452
tttagtggagtty

SEQ ID NO: 129674 - DNA, 13 bp, Artificial Sequence
  Oligonucleotide for detection of SNP TSC0032452
raactccactaaa

SEQ ID NO: 129675 - DNA, 13 bp, Artificial Sequence
  Oligonucleotide for detection of SNP TSC0032452
tttagtagagtty

SEQ ID NO: 129676 - DNA, 13 bp, Artificial Sequence
  Oligonucleotide for detection of SNP TSC0032452
raactctactaaa

SEQ ID NO: 129677 - DNA, 13 bp, Artificial Sequence
  Oligonucleotide for detection of SNP TSC0032452
tttagcggagtty

SEQ ID NO: 129678 - DNA, 13 bp, Artificial Sequence
  Oligonucleotide for detection of SNP TSC0032452
raactccgctaaa

SEQ ID NO: 129679 - DNA, 13 bp, Artificial Sequence
  Oligonucleotide for detection of SNP TSC0032453
ggttagtgtttta

SEQ ID NO: 129680 - DNA, 13 bp, Artificial Sequence
  Oligonucleotide for detection of SNP TSC0032453
taaaacactaacc

SEQ ID NO: 129681 - DNA, 13 bp, Artificial Sequence
  Oligonucleotide for detection of SNP TSC0032453
ggttagggtttta

SEQ ID NO: 129682 - DNA, 13 bp, Artificial Sequence
  Oligonucleotide for detection of SNP TSC0032453
taaaaccctaacc

SEQ ID NO: 129683 - DNA, 13 bp, Artificial Sequence
  Oligonucleotide for detection of SNP TSC0032453
ggttagcgtttta

SEQ ID NO: 129684 - DNA, 13 bp, Artificial Sequence
  Oligonucleotide for detection of SNP TSC0032453
taaaacgctaacc

SEQ ID NO: 129685 - DNA, 13 bp, Artificial Sequence
  Oligonucleotide for detection of SNP TSC0032453
tagggtgttgaty

SEQ ID NO: 129686 - DNA, 13 bp, Artificial Sequence
  Oligonucleotide for detection of SNP TSC0032453
ratcaacacccta

SEQ ID NO: 129687 - DNA, 13 bp, Artificial Sequence
  Oligonucleotide for detection of SNP TSC0032453
tagggttttgaty

SEQ ID NO: 129688 - DNA, 13 bp, Artificial Sequence
  Oligonucleotide for detection of SNP TSC0032453
ratcaaaacccta

SEQ ID NO: 129689 - DNA, 13 bp, Artificial Sequence
  Oligonucleotide for detection of SNP TSC0032453
tagggcgttgaty

SEQ ID NO: 129690 - DNA, 13 bp, Artificial Sequence
  Oligonucleotide for detection of SNP TSC0032453
ratcaacgcccta

SEQ ID NO: 129691 - DNA, 13 bp, Artificial Sequence
  Oligonucleotide for detection of SNP TSC0032455
agttgttgggaat

SEQ ID NO: 129692 - DNA, 13 bp, Artificial Sequence
  Oligonucleotide for detection of SNP TSC0032455
attcccaacaact

SEQ ID NO: 129693 - DNA, 13 bp, Artificial Sequence
  Oligonucleotide for detection of SNP TSC0032455
agttgtcgggaat

SEQ ID NO: 129694 - DNA, 13 bp, Artificial Sequence
  Oligonucleotide for detection of SNP TSC0032455
attcccgacaact

SEQ ID NO: 129695 - DNA, 13 bp, Artificial Sequence
  Oligonucleotide for detection of SNP TSC0032456
ttgatgtggttgt

SEQ ID NO: 129696 - DNA, 13 bp, Artificial Sequence
  Oligonucleotide for detection of SNP TSC0032456
acaaccacatcaa

SEQ ID NO: 129697 - DNA, 13 bp, Artificial Sequence
  Oligonucleotide for detection of SNP TSC0032456
tcgatgtggttgt

SEQ ID NO: 129698 - DNA, 13 bp, Artificial Sequence
  Oligonucleotide for detection of SNP TSC0032456
acaaccacatcga

SEQ ID NO: 129699 - DNA, 13 bp, Artificial Sequence
  Oligonucleotide for detection of SNP TSC0032456
ttgatgcggttgt

SEQ ID NO: 129700 - DNA, 13 bp, Artificial Sequence
  Oligonucleotide for detection of SNP TSC0032456
acaaccgcatcaa

SEQ ID NO: 129701 - DNA, 13 bp, Artificial Sequence
  Oligonucleotide for detection of SNP TSC0032456
tcgatgcggttgt

SEQ ID NO: 129702 - DNA, 13 bp, Artificial Sequence
  Oligonucleotide for detection of SNP TSC0032456
acaaccgcatcga

SEQ ID NO: 129703 - DNA, 13 bp, Artificial Sequence
  Oligonucleotide for detection of SNP TSC0032456
ataattgtattga

SEQ ID NO: 129704 - DNA, 13 bp, Artificial Sequence
  Oligonucleotide for detection of SNP TSC0032456
tcaatacaattat

SEQ ID NO: 129705 - DNA, 13 bp, Artificial Sequence
  Oligonucleotide for detection of SNP TSC0032456
ataattatattga

SEQ ID NO: 129706 - DNA, 13 bp, Artificial Sequence
  Oligonucleotide for detection of SNP TSC0032456
tcaatataattat

SEQ ID NO: 129707 - DNA, 13 bp, Artificial Sequence
  Oligonucleotide for detection of SNP TSC0032456
ataatcgtattga

SEQ ID NO: 129708 - DNA, 13 bp, Artificial Sequence
  Oligonucleotide for detection of SNP TSC0032456
tcaatacgattat

SEQ ID NO: 129709 - DNA, 13 bp, Artificial Sequence
  Oligonucleotide for detection of SNP TSC0032456
ataattatatcga

SEQ ID NO: 129710 - DNA, 13 bp, Artificial Sequence
  Oligonucleotide for detection of SNP TSC0032456
tcgatataattat

SEQ ID NO: 129711 - DNA, 13 bp, Artificial Sequence
  Oligonucleotide for detection of SNP TSC0032456
ataattgtatcga

SEQ ID NO: 129712 - DNA, 13 bp, Artificial Sequence
  Oligonucleotide for detection of SNP TSC0032456
tcgatacaattat

SEQ ID NO: 129713 - DNA, 13 bp, Artificial Sequence
  Oligonucleotide for detection of SNP TSC0032456
ataatcgtatcga

SEQ ID NO: 129714 - DNA, 13 bp, Artificial Sequence
  Oligonucleotide for detection of SNP TSC0032456
tcgatacgattat

SEQ ID NO: 129715 - DNA, 13 bp, Artificial Sequence
  Oligonucleotide for detection of SNP TSC0032457
agtttgattttta

SEQ ID NO: 129716 - DNA, 13 bp, Artificial Sequence
  Oligonucleotide for detection of SNP TSC0032457
taaaaatcaaact

SEQ ID NO: 129717 - DNA, 13 bp, Artificial Sequence
  Oligonucleotide for detection of SNP TSC0032457
agtttggttttta

SEQ ID NO: 129718 - DNA, 13 bp, Artificial Sequence
  Oligonucleotide for detection of SNP TSC0032457
taaaaaccaaact

SEQ ID NO: 129719 - DNA, 13 bp, Artificial Sequence
  Oligonucleotide for detection of SNP TSC0032458
ttaagtgtagttt

SEQ ID NO: 129720 - DNA, 13 bp, Artificial Sequence
  Oligonucleotide for detection of SNP TSC0032458
aaactacacttaa

SEQ ID NO: 129721 - DNA, 13 bp, Artificial Sequence
  Oligonucleotide for detection of SNP TSC0032458
ttaagtatagttt

SEQ ID NO: 129722 - DNA, 13 bp, Artificial Sequence
  Oligonucleotide for detection of SNP TSC0032458
aaactatacttaa

SEQ ID NO: 129723 - DNA, 13 bp, Artificial Sequence
  Oligonucleotide for detection of SNP TSC0032459
tgggttataaatg

SEQ ID NO: 129724 - DNA, 13 bp, Artificial Sequence
  Oligonucleotide for detection of SNP TSC0032459
catttataaccca

SEQ ID NO: 129725 - DNA, 13 bp, Artificial Sequence
  Oligonucleotide for detection of SNP TSC0032459
tgggttgtaaatg

SEQ ID NO: 129726 - DNA, 13 bp, Artificial Sequence
  Oligonucleotide for detection of SNP TSC0032459
catttacaaccca

SEQ ID NO: 129727 - DNA, 13 bp, Artificial Sequence
  Oligonucleotide for detection of SNP TSC0032459
tgggttataaacg

SEQ ID NO: 129728 - DNA, 13 bp, Artificial Sequence
  Oligonucleotide for detection of SNP TSC0032459
cgtttataaccca

SEQ ID NO: 129729 - DNA, 13 bp, Artificial Sequence
  Oligonucleotide for detection of SNP TSC0032459
tgggtcgtaaatg

SEQ ID NO: 129730 - DNA, 13 bp, Artificial Sequence
  Oligonucleotide for detection of SNP TSC0032459
catttacgaccca

SEQ ID NO: 129731 - DNA, 13 bp, Artificial Sequence
  Oligonucleotide for detection of SNP TSC0032459
tgggttgtaaacg

SEQ ID NO: 129732 - DNA, 13 bp, Artificial Sequence
  Oligonucleotide for detection of SNP TSC0032459
cgtttacaaccca

SEQ ID NO: 129733 - DNA, 13 bp, Artificial Sequence
  Oligonucleotide for detection of SNP TSC0032459
tgggtcgtaaacg

SEQ ID NO: 129734 - DNA, 13 bp, Artificial Sequence
  Oligonucleotide for detection of SNP TSC0032459
cgtttacgaccca

SEQ ID NO: 129735 - DNA, 13 bp, Artificial Sequence
  Oligonucleotide for detection of SNP TSC0032459
tgtttatgattta

SEQ ID NO: 129736 - DNA, 13 bp, Artificial Sequence
  Oligonucleotide for detection of SNP TSC0032459
taaatcataaaca

SEQ ID NO: 129737 - DNA, 13 bp, Artificial Sequence
  Oligonucleotide for detection of SNP TSC0032459
cgtttatgattta

SEQ ID NO: 129738 - DNA, 13 bp, Artificial Sequence
  Oligonucleotide for detection of SNP TSC0032459
taaatcataaacg

SEQ ID NO: 129739 - DNA, 13 bp, Artificial Sequence
  Oligonucleotide for detection of SNP TSC0032459
tgtttacgattta

SEQ ID NO: 129740 - DNA, 13 bp, Artificial Sequence
  Oligonucleotide for detection of SNP TSC0032459
taaatcgtaaaca

SEQ ID NO: 129741 - DNA, 13 bp, Artificial Sequence
  Oligonucleotide for detection of SNP TSC0032459
cgtttacgattta

SEQ ID NO: 129742 - DNA, 13 bp, Artificial Sequence
  Oligonucleotide for detection of SNP TSC0032459
taaatcgtaaacg

SEQ ID NO: 129743 - DNA, 13 bp, Artificial Sequence
  Oligonucleotide for detection of SNP TSC0032461
ataagtttagaat

SEQ ID NO: 129744 - DNA, 13 bp, Artificial Sequence
  Oligonucleotide for detection of SNP TSC0032461
attctaaacttat

SEQ ID NO: 129745 - DNA, 13 bp, Artificial Sequence
  Oligonucleotide for detection of SNP TSC0032461
ataagtgtagaat

SEQ ID NO: 129746 - DNA, 13 bp, Artificial Sequence
  Oligonucleotide for detection of SNP TSC0032461
attctacacttat

SEQ ID NO: 129747 - DNA, 13 bp, Artificial Sequence
  Oligonucleotide for detection of SNP TSC0032461
ataagcgtagaat

SEQ ID NO: 129748 - DNA, 13 bp, Artificial Sequence
  Oligonucleotide for detection of SNP TSC0032461
attctacgcttat

SEQ ID NO: 129749 - DNA, 13 bp, Artificial Sequence
  Oligonucleotide for detection of SNP TSC0032461
attttgggtttgt

SEQ ID NO: 129750 - DNA, 13 bp, Artificial Sequence
  Oligonucleotide for detection of SNP TSC0032461
acaaacccaaaat

SEQ ID NO: 129751 - DNA, 13 bp, Artificial Sequence
  Oligonucleotide for detection of SNP TSC0032461
attttgtgtttgt

SEQ ID NO: 129752 - DNA, 13 bp, Artificial Sequence
  Oligonucleotide for detection of SNP TSC0032461
acaaacacaaaat

SEQ ID NO: 129753 - DNA, 13 bp, Artificial Sequence
  Oligonucleotide for detection of SNP TSC0032461
attttgcgtttgt

SEQ ID NO: 129754 - DNA, 13 bp, Artificial Sequence
  Oligonucleotide for detection of SNP TSC0032461
acaaacgcaaaat

SEQ ID NO: 129755 - DNA, 13 bp, Artificial Sequence
  Oligonucleotide for detection of SNP TSC0032462
aaaaaaagttaaa

SEQ ID NO: 129756 - DNA, 13 bp, Artificial Sequence
  Oligonucleotide for detection of SNP TSC0032462
tttaacttttttt

SEQ ID NO: 129757 - DNA, 13 bp, Artificial Sequence
  Oligonucleotide for detection of SNP TSC0032462
aaaaaaggttaaa

SEQ ID NO: 129758 - DNA, 13 bp, Artificial Sequence
  Oligonucleotide for detection of SNP TSC0032462
tttaacctttttt

SEQ ID NO: 129759 - DNA, 13 bp, Artificial Sequence
  Oligonucleotide for detection of SNP TSC0032463
tgttgtatataga

SEQ ID NO: 129760 - DNA, 13 bp, Artificial Sequence
  Oligonucleotide for detection of SNP TSC0032463
tctatatacaaca

SEQ ID NO: 129761 - DNA, 13 bp, Artificial Sequence
  Oligonucleotide for detection of SNP TSC0032463
tgttgtttataga

SEQ ID NO: 129762 - DNA, 13 bp, Artificial Sequence
  Oligonucleotide for detection of SNP TSC0032463
tctataaacaaca

SEQ ID NO: 129763 - DNA, 13 bp, Artificial Sequence
  Oligonucleotide for detection of SNP TSC0032463
tttgtatgtagta

SEQ ID NO: 129764 - DNA, 13 bp, Artificial Sequence
  Oligonucleotide for detection of SNP TSC0032463
tactacatacaaa

SEQ ID NO: 129765 - DNA, 13 bp, Artificial Sequence
  Oligonucleotide for detection of SNP TSC0032463
tttgtaggtagta

SEQ ID NO: 129766 - DNA, 13 bp, Artificial Sequence
  Oligonucleotide for detection of SNP TSC0032463
tactacctacaaa

SEQ ID NO: 129767 - DNA, 13 bp, Artificial Sequence
  Oligonucleotide for detection of SNP TSC0032466
aggtatatatata

SEQ ID NO: 129768 - DNA, 13 bp, Artificial Sequence
  Oligonucleotide for detection of SNP TSC0032466
tatatatatacct

SEQ ID NO: 129769 - DNA, 13 bp, Artificial Sequence
  Oligonucleotide for detection of SNP TSC0032466
aggtatttatata

SEQ ID NO: 129770 - DNA, 13 bp, Artificial Sequence
  Oligonucleotide for detection of SNP TSC0032466
tatataaatacct

SEQ ID NO: 129771 - DNA, 13 bp, Artificial Sequence
  Oligonucleotide for detection of SNP TSC0032466
tatatatgtattt

SEQ ID NO: 129772 - DNA, 13 bp, Artificial Sequence
  Oligonucleotide for detection of SNP TSC0032466
aaatacatatata

SEQ ID NO: 129773 - DNA, 13 bp, Artificial Sequence
  Oligonucleotide for detection of SNP TSC0032466
tatataggtattt

SEQ ID NO: 129774 - DNA, 13 bp, Artificial Sequence
  Oligonucleotide for detection of SNP TSC0032466
aaatacctatata

SEQ ID NO: 129775 - DNA, 13 bp, Artificial Sequence
  Oligonucleotide for detection of SNP TSC0032469
tgagatgttaatt

SEQ ID NO: 129776 - DNA, 13 bp, Artificial Sequence
  Oligonucleotide for detection of SNP TSC0032469
aattaacatctca

SEQ ID NO: 129777 - DNA, 13 bp, Artificial Sequence
  Oligonucleotide for detection of SNP TSC0032469
tgagattttaatt

SEQ ID NO: 129778 - DNA, 13 bp, Artificial Sequence
  Oligonucleotide for detection of SNP TSC0032469
aattaaaatctca

SEQ ID NO: 129779 - DNA, 13 bp, Artificial Sequence
  Oligonucleotide for detection of SNP TSC0032469
agttggtatttta

SEQ ID NO: 129780 - DNA, 13 bp, Artificial Sequence
  Oligonucleotide for detection of SNP TSC0032469
taaaataccaact

SEQ ID NO: 129781 - DNA, 13 bp, Artificial Sequence
  Oligonucleotide for detection of SNP TSC0032469
agttggaatttta

SEQ ID NO: 129782 - DNA, 13 bp, Artificial Sequence
  Oligonucleotide for detection of SNP TSC0032469
taaaattccaact

SEQ ID NO: 129783 - DNA, 13 bp, Artificial Sequence
  Oligonucleotide for detection of SNP TSC0032471
ttaattgtaagty

SEQ ID NO: 129784 - DNA, 13 bp, Artificial Sequence
  Oligonucleotide for detection of SNP TSC0032471
racttacaattaa

SEQ ID NO: 129785 - DNA, 13 bp, Artificial Sequence
  Oligonucleotide for detection of SNP TSC0032471
ttaattttaagty

SEQ ID NO: 129786 - DNA, 13 bp, Artificial Sequence
  Oligonucleotide for detection of SNP TSC0032471
racttaaaattaa

SEQ ID NO: 129787 - DNA, 13 bp, Artificial Sequence
  Oligonucleotide for detection of SNP TSC0032471
gatttgtaattgg

SEQ ID NO: 129788 - DNA, 13 bp, Artificial Sequence
  Oligonucleotide for detection of SNP TSC0032471
ccaattacaaatc

SEQ ID NO: 129789 - DNA, 13 bp, Artificial Sequence
  Oligonucleotide for detection of SNP TSC0032471
gatttgaaattgg

SEQ ID NO: 129790 - DNA, 13 bp, Artificial Sequence
  Oligonucleotide for detection of SNP TSC0032471
ccaatttcaaatc

SEQ ID NO: 129791 - DNA, 13 bp, Artificial Sequence
  Oligonucleotide for detection of SNP TSC0032473
aattgtatatttt

SEQ ID NO: 129792 - DNA, 13 bp, Artificial Sequence
  Oligonucleotide for detection of SNP TSC0032473
aaaatatacaatt

SEQ ID NO: 129793 - DNA, 13 bp, Artificial Sequence
  Oligonucleotide for detection of SNP TSC0032473
aattgtgtatttt

SEQ ID NO: 129794 - DNA, 13 bp, Artificial Sequence
  Oligonucleotide for detection of SNP TSC0032473
aaaatacacaatt

SEQ ID NO: 129795 - DNA, 13 bp, Artificial Sequence
  Oligonucleotide for detection of SNP TSC0032473
aattgcgtatttt

SEQ ID NO: 129796 - DNA, 13 bp, Artificial Sequence
  Oligonucleotide for detection of SNP TSC0032473
aaaatacgcaatt

SEQ ID NO: 129797 - DNA, 13 bp, Artificial Sequence
  Oligonucleotide for detection of SNP TSC0032473
aaaatgtgtagtt

SEQ ID NO: 129798 - DNA, 13 bp, Artificial Sequence
  Oligonucleotide for detection of SNP TSC0032473
aactacacatttt

SEQ ID NO: 129799 - DNA, 13 bp, Artificial Sequence
  Oligonucleotide for detection of SNP TSC0032473
aaaatgcgtagtt

SEQ ID NO: 129800 - DNA, 13 bp, Artificial Sequence
  Oligonucleotide for detection of SNP TSC0032473
aactacgcatttt

SEQ ID NO: 129801 - DNA, 13 bp, Artificial Sequence
  Oligonucleotide for detection of SNP TSC0032475
attagaatttagt

SEQ ID NO: 129802 - DNA, 13 bp, Artificial Sequence
  Oligonucleotide for detection of SNP TSC0032475
actaaattctaat

SEQ ID NO: 129803 - DNA, 13 bp, Artificial Sequence
  Oligonucleotide for detection of SNP TSC0032475
attagagtttagt

SEQ ID NO: 129804 - DNA, 13 bp, Artificial Sequence
  Oligonucleotide for detection of SNP TSC0032475
actaaactctaat

SEQ ID NO: 129805 - DNA, 13 bp, Artificial Sequence
  Oligonucleotide for detection of SNP TSC0032476
tagaagttgtaty

SEQ ID NO: 129806 - DNA, 13 bp, Artificial Sequence
  Oligonucleotide for detection of SNP TSC0032476
ratacaacttcta

SEQ ID NO: 129807 - DNA, 13 bp, Artificial Sequence
  Oligonucleotide for detection of SNP TSC0032476
tagaaggtgtaty

SEQ ID NO: 129808 - DNA, 13 bp, Artificial Sequence
  Oligonucleotide for detection of SNP TSC0032476
ratacaccttcta

SEQ ID NO: 129809 - DNA, 13 bp, Artificial Sequence
  Oligonucleotide for detection of SNP TSC0032476
ggtgtagtttttg

SEQ ID NO: 129810 - DNA, 13 bp, Artificial Sequence
  Oligonucleotide for detection of SNP TSC0032476
caaaaactacacc

SEQ ID NO: 129811 - DNA, 13 bp, Artificial Sequence
  Oligonucleotide for detection of SNP TSC0032476
ggtgtattttttg

SEQ ID NO: 129812 - DNA, 13 bp, Artificial Sequence
  Oligonucleotide for detection of SNP TSC0032476
caaaaaatacacc

SEQ ID NO: 129813 - DNA, 13 bp, Artificial Sequence
  Oligonucleotide for detection of SNP TSC0032477
ttttatagggaaa

SEQ ID NO: 129814 - DNA, 13 bp, Artificial Sequence
  Oligonucleotide for detection of SNP TSC0032477
tttccctataaaa

SEQ ID NO: 129815 - DNA, 13 bp, Artificial Sequence
  Oligonucleotide for detection of SNP TSC0032477
ttttatggggaaa

SEQ ID NO: 129816 - DNA, 13 bp, Artificial Sequence
  Oligonucleotide for detection of SNP TSC0032477
tttccccataaaa

SEQ ID NO: 129817 - DNA, 13 bp, Artificial Sequence
  Oligonucleotide for detection of SNP TSC0032479
ttagggagagata

SEQ ID NO: 129818 - DNA, 13 bp, Artificial Sequence
  Oligonucleotide for detection of SNP TSC0032479
tatctctccctaa

SEQ ID NO: 129819 - DNA, 13 bp, Artificial Sequence
  Oligonucleotide for detection of SNP TSC0032479
ttagggggagata

SEQ ID NO: 129820 - DNA, 13 bp, Artificial Sequence
  Oligonucleotide for detection of SNP TSC0032479
tatctccccctaa

SEQ ID NO: 129821 - DNA, 13 bp, Artificial Sequence
  Oligonucleotide for detection of SNP TSC0032480
atattagtgaaaa

SEQ ID NO: 129822 - DNA, 13 bp, Artificial Sequence
  Oligonucleotide for detection of SNP TSC0032480
ttttcactaatat

SEQ ID NO: 129823 - DNA, 13 bp, Artificial Sequence
  Oligonucleotide for detection of SNP TSC0032480
atattaatgaaaa

SEQ ID NO: 129824 - DNA, 13 bp, Artificial Sequence
  Oligonucleotide for detection of SNP TSC0032480
ttttcattaatat

SEQ ID NO: 129825 - DNA, 13 bp, Artificial Sequence
  Oligonucleotide for detection of SNP TSC0032481
ttggggtgaggtt

SEQ ID NO: 129826 - DNA, 13 bp, Artificial Sequence
  Oligonucleotide for detection of SNP TSC0032481
aacctcaccccaa

SEQ ID NO: 129827 - DNA, 13 bp, Artificial Sequence
  Oligonucleotide for detection of SNP TSC0032481
ttggggcgaggtt

SEQ ID NO: 129828 - DNA, 13 bp, Artificial Sequence
  Oligonucleotide for detection of SNP TSC0032481
aacctcgccccaa

SEQ ID NO: 129829 - DNA, 13 bp, Artificial Sequence
  Oligonucleotide for detection of SNP TSC0032482
ttggatattatat

SEQ ID NO: 129830 - DNA, 13 bp, Artificial Sequence
  Oligonucleotide for detection of SNP TSC0032482
atataatatccaa

SEQ ID NO: 129831 - DNA, 13 bp, Artificial Sequence
  Oligonucleotide for detection of SNP TSC0032482
ttggattttatat

SEQ ID NO: 129832 - DNA, 13 bp, Artificial Sequence
  Oligonucleotide for detection of SNP TSC0032482
atataaaatccaa

SEQ ID NO: 129833 - DNA, 13 bp, Artificial Sequence
  Oligonucleotide for detection of SNP TSC0032482
atgtgatgtttag

SEQ ID NO: 129834 - DNA, 13 bp, Artificial Sequence
  Oligonucleotide for detection of SNP TSC0032482
ctaaacatcacat

SEQ ID NO: 129835 - DNA, 13 bp, Artificial Sequence
  Oligonucleotide for detection of SNP TSC0032482
atgtgaggtttag

SEQ ID NO: 129836 - DNA, 13 bp, Artificial Sequence
  Oligonucleotide for detection of SNP TSC0032482
ctaaacctcacat

SEQ ID NO: 129837 - DNA, 13 bp, Artificial Sequence
  Oligonucleotide for detection of SNP TSC0032485
tgtgttgtgttaa

SEQ ID NO: 129838 - DNA, 13 bp, Artificial Sequence
  Oligonucleotide for detection of SNP TSC0032485
ttaacacaacaca

SEQ ID NO: 129839 - DNA, 13 bp, Artificial Sequence
  Oligonucleotide for detection of SNP TSC0032485
tgtgttatgttaa

SEQ ID NO: 129840 - DNA, 13 bp, Artificial Sequence
  Oligonucleotide for detection of SNP TSC0032485
ttaacataacaca

SEQ ID NO: 129841 - DNA, 13 bp, Artificial Sequence
  Oligonucleotide for detection of SNP TSC0032487
gtttggagttgty

SEQ ID NO: 129842 - DNA, 13 bp, Artificial Sequence
  Oligonucleotide for detection of SNP TSC0032487
racaactccaaac

SEQ ID NO: 129843 - DNA, 13 bp, Artificial Sequence
  Oligonucleotide for detection of SNP TSC0032487
gtttggggttgty

SEQ ID NO: 129844 - DNA, 13 bp, Artificial Sequence
  Oligonucleotide for detection of SNP TSC0032487
racaaccccaaac

SEQ ID NO: 129845 - DNA, 13 bp, Artificial Sequence
  Oligonucleotide for detection of SNP TSC0032488
agtgatagatggt

SEQ ID NO: 129846 - DNA, 13 bp, Artificial Sequence
  Oligonucleotide for detection of SNP TSC0032488
accatctatcact

SEQ ID NO: 129847 - DNA, 13 bp, Artificial Sequence
  Oligonucleotide for detection of SNP TSC0032488
agtgattgatggt

SEQ ID NO: 129848 - DNA, 13 bp, Artificial Sequence
  Oligonucleotide for detection of SNP TSC0032488
accatcaatcact

SEQ ID NO: 129849 - DNA, 13 bp, Artificial Sequence
  Oligonucleotide for detection of SNP TSC0032488
agcgatagatggt

SEQ ID NO: 129850 - DNA, 13 bp, Artificial Sequence
  Oligonucleotide for detection of SNP TSC0032488
accatctatcgct

SEQ ID NO: 129851 - DNA, 13 bp, Artificial Sequence
  Oligonucleotide for detection of SNP TSC0032488
agcgattgatggt

SEQ ID NO: 129852 - DNA, 13 bp, Artificial Sequence
  Oligonucleotide for detection of SNP TSC0032488
accatcaatcgct

SEQ ID NO: 129853 - DNA, 13 bp, Artificial Sequence
  Oligonucleotide for detection of SNP TSC0032488
agtgatagacggt

SEQ ID NO: 129854 - DNA, 13 bp, Artificial Sequence
  Oligonucleotide for detection of SNP TSC0032488
accgtctatcact

SEQ ID NO: 129855 - DNA, 13 bp, Artificial Sequence
  Oligonucleotide for detection of SNP TSC0032488
agtgatcgatggt

SEQ ID NO: 129856 - DNA, 13 bp, Artificial Sequence
  Oligonucleotide for detection of SNP TSC0032488
accatcgatcact

SEQ ID NO: 129857 - DNA, 13 bp, Artificial Sequence
  Oligonucleotide for detection of SNP TSC0032488
agcgatagacggt

SEQ ID NO: 129858 - DNA, 13 bp, Artificial Sequence
  Oligonucleotide for detection of SNP TSC0032488
accgtctatcgct

SEQ ID NO: 129859 - DNA, 13 bp, Artificial Sequence
  Oligonucleotide for detection of SNP TSC0032488
agtgattgacggt

SEQ ID NO: 129860 - DNA, 13 bp, Artificial Sequence
  Oligonucleotide for detection of SNP TSC0032488
accgtcaatcact

SEQ ID NO: 129861 - DNA, 13 bp, Artificial Sequence
  Oligonucleotide for detection of SNP TSC0032488
agcgatcgatggt

SEQ ID NO: 129862 - DNA, 13 bp, Artificial Sequence
  Oligonucleotide for detection of SNP TSC0032488
accatcgatcgct

SEQ ID NO: 129863 - DNA, 13 bp, Artificial Sequence
  Oligonucleotide for detection of SNP TSC0032488
agcgattgacggt

SEQ ID NO: 129864 - DNA, 13 bp, Artificial Sequence
  Oligonucleotide for detection of SNP TSC0032488
accgtcaatcgct

SEQ ID NO: 129865 - DNA, 13 bp, Artificial Sequence
  Oligonucleotide for detection of SNP TSC0032488
agtgatcgacggt

SEQ ID NO: 129866 - DNA, 13 bp, Artificial Sequence
  Oligonucleotide for detection of SNP TSC0032488
accgtcgatcact

SEQ ID NO: 129867 - DNA, 13 bp, Artificial Sequence
  Oligonucleotide for detection of SNP TSC0032488
agcgatcgacggt

SEQ ID NO: 129868 - DNA, 13 bp, Artificial Sequence
  Oligonucleotide for detection of SNP TSC0032488
accgtcgatcgct

SEQ ID NO: 129869 - DNA, 13 bp, Artificial Sequence
  Oligonucleotide for detection of SNP TSC0032488
attgtttgttgtt

SEQ ID NO: 129870 - DNA, 13 bp, Artificial Sequence
  Oligonucleotide for detection of SNP TSC0032488
aacaacaaacaat

SEQ ID NO: 129871 - DNA, 13 bp, Artificial Sequence
  Oligonucleotide for detection of SNP TSC0032488
attgttggttgtt

SEQ ID NO: 129872 - DNA, 13 bp, Artificial Sequence
  Oligonucleotide for detection of SNP TSC0032488
aacaaccaacaat

SEQ ID NO: 129873 - DNA, 13 bp, Artificial Sequence
  Oligonucleotide for detection of SNP TSC0032488
atcgtttgttgtt

SEQ ID NO: 129874 - DNA, 13 bp, Artificial Sequence
  Oligonucleotide for detection of SNP TSC0032488
aacaacaaacgat

SEQ ID NO: 129875 - DNA, 13 bp, Artificial Sequence
  Oligonucleotide for detection of SNP TSC0032488
atcgttggttgtt

SEQ ID NO: 129876 - DNA, 13 bp, Artificial Sequence
  Oligonucleotide for detection of SNP TSC0032488
aacaaccaacgat

SEQ ID NO: 129877 - DNA, 13 bp, Artificial Sequence
  Oligonucleotide for detection of SNP TSC0032488
attgtttgtcgtt

SEQ ID NO: 129878 - DNA, 13 bp, Artificial Sequence
  Oligonucleotide for detection of SNP TSC0032488
aacgacaaacaat

SEQ ID NO: 129879 - DNA, 13 bp, Artificial Sequence
  Oligonucleotide for detection of SNP TSC0032488
attgtcggttgtt

SEQ ID NO: 129880 - DNA, 13 bp, Artificial Sequence
  Oligonucleotide for detection of SNP TSC0032488
aacaaccgacaat

SEQ ID NO: 129881 - DNA, 13 bp, Artificial Sequence
  Oligonucleotide for detection of SNP TSC0032488
atcgtttgtcgtt

SEQ ID NO: 129882 - DNA, 13 bp, Artificial Sequence
  Oligonucleotide for detection of SNP TSC0032488
aacgacaaacgat

SEQ ID NO: 129883 - DNA, 13 bp, Artificial Sequence
  Oligonucleotide for detection of SNP TSC0032488
attgttggtcgtt

SEQ ID NO: 129884 - DNA, 13 bp, Artificial Sequence
  Oligonucleotide for detection of SNP TSC0032488
aacgaccaacaat

SEQ ID NO: 129885 - DNA, 13 bp, Artificial Sequence
  Oligonucleotide for detection of SNP TSC0032488
atcgtcggttgtt

SEQ ID NO: 129886 - DNA, 13 bp, Artificial Sequence
  Oligonucleotide for detection of SNP TSC0032488
aacaaccgacgat

SEQ ID NO: 129887 - DNA, 13 bp, Artificial Sequence
  Oligonucleotide for detection of SNP TSC0032488
atcgttggtcgtt

SEQ ID NO: 129888 - DNA, 13 bp, Artificial Sequence
  Oligonucleotide for detection of SNP TSC0032488
aacgaccaacgat

SEQ ID NO: 129889 - DNA, 13 bp, Artificial Sequence
  Oligonucleotide for detection of SNP TSC0032488
attgtcggtcgtt

SEQ ID NO: 129890 - DNA, 13 bp, Artificial Sequence
  Oligonucleotide for detection of SNP TSC0032488
aacgaccgacaat

SEQ ID NO: 129891 - DNA, 13 bp, Artificial Sequence
  Oligonucleotide for detection of SNP TSC0032488
atcgtcggtcgtt

SEQ ID NO: 129892 - DNA, 13 bp, Artificial Sequence
  Oligonucleotide for detection of SNP TSC0032488
aacgaccgacgat

SEQ ID NO: 129893 - DNA, 13 bp, Artificial Sequence
  Oligonucleotide for detection of SNP TSC0032491
tttaggtatagaa

SEQ ID NO: 129894 - DNA, 13 bp, Artificial Sequence
  Oligonucleotide for detection of SNP TSC0032491
ttctatacctaaa

SEQ ID NO: 129895 - DNA, 13 bp, Artificial Sequence
  Oligonucleotide for detection of SNP TSC0032491
tttagggatagaa

SEQ ID NO: 129896 - DNA, 13 bp, Artificial Sequence
  Oligonucleotide for detection of SNP TSC0032491
ttctatccctaaa

SEQ ID NO: 129897 - DNA, 13 bp, Artificial Sequence
  Oligonucleotide for detection of SNP TSC0032492
tatttaattaagg

SEQ ID NO: 129898 - DNA, 13 bp, Artificial Sequence
  Oligonucleotide for detection of SNP TSC0032492
ccttaattaaata

SEQ ID NO: 129899 - DNA, 13 bp, Artificial Sequence
  Oligonucleotide for detection of SNP TSC0032492
tatttagttaagg

SEQ ID NO: 129900 - DNA, 13 bp, Artificial Sequence
  Oligonucleotide for detection of SNP TSC0032492
ccttaactaaata

SEQ ID NO: 129901 - DNA, 13 bp, Artificial Sequence
  Oligonucleotide for detection of SNP TSC0032493
tatgatagtttgg

SEQ ID NO: 129902 - DNA, 13 bp, Artificial Sequence
  Oligonucleotide for detection of SNP TSC0032493
ccaaactatcata

SEQ ID NO: 129903 - DNA, 13 bp, Artificial Sequence
  Oligonucleotide for detection of SNP TSC0032493
tatgatggtttgg

SEQ ID NO: 129904 - DNA, 13 bp, Artificial Sequence
  Oligonucleotide for detection of SNP TSC0032493
ccaaaccatcata

SEQ ID NO: 129905 - DNA, 13 bp, Artificial Sequence
  Oligonucleotide for detection of SNP TSC0032493
tacgatagtttgg

SEQ ID NO: 129906 - DNA, 13 bp, Artificial Sequence
  Oligonucleotide for detection of SNP TSC0032493
ccaaactatcgta

SEQ ID NO: 129907 - DNA, 13 bp, Artificial Sequence
  Oligonucleotide for detection of SNP TSC0032493
tacgatggtttgg

SEQ ID NO: 129908 - DNA, 13 bp, Artificial Sequence
  Oligonucleotide for detection of SNP TSC0032493
ccaaaccatcgta

SEQ ID NO: 129909 - DNA, 13 bp, Artificial Sequence
  Oligonucleotide for detection of SNP TSC0032493
tatgacggtttgg

SEQ ID NO: 129910 - DNA, 13 bp, Artificial Sequence
  Oligonucleotide for detection of SNP TSC0032493
ccaaaccgtcata

SEQ ID NO: 129911 - DNA, 13 bp, Artificial Sequence
  Oligonucleotide for detection of SNP TSC0032493
tacgacggtttgg

SEQ ID NO: 129912 - DNA, 13 bp, Artificial Sequence
  Oligonucleotide for detection of SNP TSC0032493
ccaaaccgtcgta

SEQ ID NO: 129913 - DNA, 13 bp, Artificial Sequence
  Oligonucleotide for detection of SNP TSC0032493
ttaggttgttgtg

SEQ ID NO: 129914 - DNA, 13 bp, Artificial Sequence
  Oligonucleotide for detection of SNP TSC0032493
cacaacaacctaa

SEQ ID NO: 129915 - DNA, 13 bp, Artificial Sequence
  Oligonucleotide for detection of SNP TSC0032493
ttaggttgtcgtg

SEQ ID NO: 129916 - DNA, 13 bp, Artificial Sequence
  Oligonucleotide for detection of SNP TSC0032493
cacgacaacctaa

SEQ ID NO: 129917 - DNA, 13 bp, Artificial Sequence
  Oligonucleotide for detection of SNP TSC0032493
ttaggtcgttgtg

SEQ ID NO: 129918 - DNA, 13 bp, Artificial Sequence
  Oligonucleotide for detection of SNP TSC0032493
cacaacgacctaa

SEQ ID NO: 129919 - DNA, 13 bp, Artificial Sequence
  Oligonucleotide for detection of SNP TSC0032493
ttaggtcgtcgtg

SEQ ID NO: 129920 - DNA, 13 bp, Artificial Sequence
  Oligonucleotide for detection of SNP TSC0032493
cacgacgacctaa

SEQ ID NO: 129921 - DNA, 13 bp, Artificial Sequence
  Oligonucleotide for detection of SNP TSC0032494
ttatgatggatgg

SEQ ID NO: 129922 - DNA, 13 bp, Artificial Sequence
  Oligonucleotide for detection of SNP TSC0032494
ccatccatcataa

SEQ ID NO: 129923 - DNA, 13 bp, Artificial Sequence
  Oligonucleotide for detection of SNP TSC0032494
ttatgacggatgg

SEQ ID NO: 129924 - DNA, 13 bp, Artificial Sequence
  Oligonucleotide for detection of SNP TSC0032494
ccatccgtcataa

SEQ ID NO: 129925 - DNA, 13 bp, Artificial Sequence
  Oligonucleotide for detection of SNP TSC0032494
ttatttattatga

SEQ ID NO: 129926 - DNA, 13 bp, Artificial Sequence
  Oligonucleotide for detection of SNP TSC0032494
tcataataaataa

SEQ ID NO: 129927 - DNA, 13 bp, Artificial Sequence
  Oligonucleotide for detection of SNP TSC0032494
ttattcgttatga

SEQ ID NO: 129928 - DNA, 13 bp, Artificial Sequence
  Oligonucleotide for detection of SNP TSC0032494
tcataacgaataa

SEQ ID NO: 129929 - DNA, 13 bp, Artificial Sequence
  Oligonucleotide for detection of SNP TSC0032495
gagatgaatgatt

SEQ ID NO: 129930 - DNA, 13 bp, Artificial Sequence
  Oligonucleotide for detection of SNP TSC0032495
aatcattcatctc

SEQ ID NO: 129931 - DNA, 13 bp, Artificial Sequence
  Oligonucleotide for detection of SNP TSC0032495
gagatggatgatt

SEQ ID NO: 129932 - DNA, 13 bp, Artificial Sequence
  Oligonucleotide for detection of SNP TSC0032495
aatcatccatctc

SEQ ID NO: 129933 - DNA, 13 bp, Artificial Sequence
  Oligonucleotide for detection of SNP TSC0032496
ttttatgtgaggt

SEQ ID NO: 129934 - DNA, 13 bp, Artificial Sequence
  Oligonucleotide for detection of SNP TSC0032496
acctcacataaaa

SEQ ID NO: 129935 - DNA, 13 bp, Artificial Sequence
  Oligonucleotide for detection of SNP TSC0032496
ttttatatgaggt

SEQ ID NO: 129936 - DNA, 13 bp, Artificial Sequence
  Oligonucleotide for detection of SNP TSC0032496
acctcatataaaa

SEQ ID NO: 129937 - DNA, 13 bp, Artificial Sequence
  Oligonucleotide for detection of SNP TSC0032496
ttttatgcgaggt

SEQ ID NO: 129938 - DNA, 13 bp, Artificial Sequence
  Oligonucleotide for detection of SNP TSC0032496
acctcgcataaaa

SEQ ID NO: 129939 - DNA, 13 bp, Artificial Sequence
  Oligonucleotide for detection of SNP TSC0032496
ttttatacgaggt

SEQ ID NO: 129940 - DNA, 13 bp, Artificial Sequence
  Oligonucleotide for detection of SNP TSC0032496
acctcgtataaaa

SEQ ID NO: 129941 - DNA, 13 bp, Artificial Sequence
  Oligonucleotide for detection of SNP TSC0032499
gaggttagtataa

SEQ ID NO: 129942 - DNA, 13 bp, Artificial Sequence
  Oligonucleotide for detection of SNP TSC0032499
ttatactaacctc

SEQ ID NO: 129943 - DNA, 13 bp, Artificial Sequence
  Oligonucleotide for detection of SNP TSC0032499
gaggttggtataa

SEQ ID NO: 129944 - DNA, 13 bp, Artificial Sequence
  Oligonucleotide for detection of SNP TSC0032499
ttataccaacctc

SEQ ID NO: 129945 - DNA, 13 bp, Artificial Sequence
  Oligonucleotide for detection of SNP TSC0032499
gaggtcggtataa

SEQ ID NO: 129946 - DNA, 13 bp, Artificial Sequence
  Oligonucleotide for detection of SNP TSC0032499
ttataccgacctc

SEQ ID NO: 129947 - DNA, 13 bp, Artificial Sequence
  Oligonucleotide for detection of SNP TSC0032500
atttgtagttata

SEQ ID NO: 129948 - DNA, 13 bp, Artificial Sequence
  Oligonucleotide for detection of SNP TSC0032500
tataactacaaat

SEQ ID NO: 129949 - DNA, 13 bp, Artificial Sequence
  Oligonucleotide for detection of SNP TSC0032500
atttgtggttata

SEQ ID NO: 129950 - DNA, 13 bp, Artificial Sequence
  Oligonucleotide for detection of SNP TSC0032500
tataaccacaaat

SEQ ID NO: 129951 - DNA, 13 bp, Artificial Sequence
  Oligonucleotide for detection of SNP TSC0032500
atttgcggttata

SEQ ID NO: 129952 - DNA, 13 bp, Artificial Sequence
  Oligonucleotide for detection of SNP TSC0032500
tataaccgcaaat

SEQ ID NO: 129953 - DNA, 13 bp, Artificial Sequence
  Oligonucleotide for detection of SNP TSC0032500
tgtggttgtagat

SEQ ID NO: 129954 - DNA, 13 bp, Artificial Sequence
  Oligonucleotide for detection of SNP TSC0032500
atctacaaccaca

SEQ ID NO: 129955 - DNA, 13 bp, Artificial Sequence
  Oligonucleotide for detection of SNP TSC0032500
tgtggtcgtagat

SEQ ID NO: 129956 - DNA, 13 bp, Artificial Sequence
  Oligonucleotide for detection of SNP TSC0032500
atctacgaccaca

SEQ ID NO: 129957 - DNA, 13 bp, Artificial Sequence
  Oligonucleotide for detection of SNP TSC0032504
gtagatgtatttt

SEQ ID NO: 129958 - DNA, 13 bp, Artificial Sequence
  Oligonucleotide for detection of SNP TSC0032504
aaaatacatctac

SEQ ID NO: 129959 - DNA, 13 bp, Artificial Sequence
  Oligonucleotide for detection of SNP TSC0032504
gtagatttatttt

SEQ ID NO: 129960 - DNA, 13 bp, Artificial Sequence
  Oligonucleotide for detection of SNP TSC0032504
aaaataaatctac

SEQ ID NO: 129961 - DNA, 13 bp, Artificial Sequence
  Oligonucleotide for detection of SNP TSC0032504
gtagacgtatttt

SEQ ID NO: 129962 - DNA, 13 bp, Artificial Sequence
  Oligonucleotide for detection of SNP TSC0032504
aaaatacgtctac

SEQ ID NO: 129963 - DNA, 13 bp, Artificial Sequence
  Oligonucleotide for detection of SNP TSC0032504
aaaatgtgtttgy

SEQ ID NO: 129964 - DNA, 13 bp, Artificial Sequence
  Oligonucleotide for detection of SNP TSC0032504
rcaaacacatttt

SEQ ID NO: 129965 - DNA, 13 bp, Artificial Sequence
  Oligonucleotide for detection of SNP TSC0032504
aaaatgagtttgy

SEQ ID NO: 129966 - DNA, 13 bp, Artificial Sequence
  Oligonucleotide for detection of SNP TSC0032504
rcaaactcatttt

SEQ ID NO: 129967 - DNA, 13 bp, Artificial Sequence
  Oligonucleotide for detection of SNP TSC0032504
aaaatgcgtttgy

SEQ ID NO: 129968 - DNA, 13 bp, Artificial Sequence
  Oligonucleotide for detection of SNP TSC0032504
rcaaacgcatttt

SEQ ID NO: 129969 - DNA, 13 bp, Artificial Sequence
  Oligonucleotide for detection of SNP TSC0032506
gtgtgggagttay

SEQ ID NO: 129970 - DNA, 13 bp, Artificial Sequence
  Oligonucleotide for detection of SNP TSC0032506
rtaactcccacac

SEQ ID NO: 129971 - DNA, 13 bp, Artificial Sequence
  Oligonucleotide for detection of SNP TSC0032506
gtgtggaagttay

SEQ ID NO: 129972 - DNA, 13 bp, Artificial Sequence
  Oligonucleotide for detection of SNP TSC0032506
rtaacttccacac

SEQ ID NO: 129973 - DNA, 13 bp, Artificial Sequence
  Oligonucleotide for detection of SNP TSC0032506
gtgcgggagttay

SEQ ID NO: 129974 - DNA, 13 bp, Artificial Sequence
  Oligonucleotide for detection of SNP TSC0032506
rtaactcccgcac

SEQ ID NO: 129975 - DNA, 13 bp, Artificial Sequence
  Oligonucleotide for detection of SNP TSC0032506
gtgcggaagttay

SEQ ID NO: 129976 - DNA, 13 bp, Artificial Sequence
  Oligonucleotide for detection of SNP TSC0032506
rtaacttccgcac

SEQ ID NO: 129977 - DNA, 13 bp, Artificial Sequence
  Oligonucleotide for detection of SNP TSC0032508
taggttgtgttat

SEQ ID NO: 129978 - DNA, 13 bp, Artificial Sequence
  Oligonucleotide for detection of SNP TSC0032508
ataacacaaccta

SEQ ID NO: 129979 - DNA, 13 bp, Artificial Sequence
  Oligonucleotide for detection of SNP TSC0032508
taggttttgttat

SEQ ID NO: 129980 - DNA, 13 bp, Artificial Sequence
  Oligonucleotide for detection of SNP TSC0032508
ataacaaaaccta

SEQ ID NO: 129981 - DNA, 13 bp, Artificial Sequence
  Oligonucleotide for detection of SNP TSC0032508
taggttgcgttat

SEQ ID NO: 129982 - DNA, 13 bp, Artificial Sequence
  Oligonucleotide for detection of SNP TSC0032508
ataacgcaaccta

SEQ ID NO: 129983 - DNA, 13 bp, Artificial Sequence
  Oligonucleotide for detection of SNP TSC0032508
taggtttcgttat

SEQ ID NO: 129984 - DNA, 13 bp, Artificial Sequence
  Oligonucleotide for detection of SNP TSC0032508
ataacgaaaccta

SEQ ID NO: 129985 - DNA, 13 bp, Artificial Sequence
  Oligonucleotide for detection of SNP TSC0032508
atgatgtagtttg

SEQ ID NO: 129986 - DNA, 13 bp, Artificial Sequence
  Oligonucleotide for detection of SNP TSC0032508
caaactacatcat

SEQ ID NO: 129987 - DNA, 13 bp, Artificial Sequence
  Oligonucleotide for detection of SNP TSC0032508
atgatgaagtttg

SEQ ID NO: 129988 - DNA, 13 bp, Artificial Sequence
  Oligonucleotide for detection of SNP TSC0032508
caaacttcatcat

SEQ ID NO: 129989 - DNA, 13 bp, Artificial Sequence
  Oligonucleotide for detection of SNP TSC0032508
atgacgtagtttg

SEQ ID NO: 129990 - DNA, 13 bp, Artificial Sequence
  Oligonucleotide for detection of SNP TSC0032508
caaactacgtcat

SEQ ID NO: 129991 - DNA, 13 bp, Artificial Sequence
  Oligonucleotide for detection of SNP TSC0032508
atgacgaagtttg

SEQ ID NO: 129992 - DNA, 13 bp, Artificial Sequence
  Oligonucleotide for detection of SNP TSC0032508
caaacttcgtcat

SEQ ID NO: 129993 - DNA, 13 bp, Artificial Sequence
  Oligonucleotide for detection of SNP TSC0032509
tgtatagtaggtg

SEQ ID NO: 129994 - DNA, 13 bp, Artificial Sequence
  Oligonucleotide for detection of SNP TSC0032509
cacctactataca

SEQ ID NO: 129995 - DNA, 13 bp, Artificial Sequence
  Oligonucleotide for detection of SNP TSC0032509
tgtatattaggtg

SEQ ID NO: 129996 - DNA, 13 bp, Artificial Sequence
  Oligonucleotide for detection of SNP TSC0032509
cacctaatataca

SEQ ID NO: 129997 - DNA, 13 bp, Artificial Sequence
  Oligonucleotide for detection of SNP TSC0032509
tatttattatgta

SEQ ID NO: 129998 - DNA, 13 bp, Artificial Sequence
  Oligonucleotide for detection of SNP TSC0032509
tacataataaata

SEQ ID NO: 129999 - DNA, 13 bp, Artificial Sequence
  Oligonucleotide for detection of SNP TSC0032510
ttgggagatttta

SEQ ID NO: 130000 - DNA, 13 bp, Artificial Sequence
  Oligonucleotide for detection of SNP TSC0032510
taaaatctcccaa

SEQ ID NO: 130001 - DNA, 13 bp, Artificial Sequence
  Oligonucleotide for detection of SNP TSC0032510
ttgggaaatttta

SEQ ID NO: 130002 - DNA, 13 bp, Artificial Sequence
  Oligonucleotide for detection of SNP TSC0032510
taaaatttcccaa

SEQ ID NO: 130003 - DNA, 13 bp, Artificial Sequence
  Oligonucleotide for detection of SNP TSC0032511
tgggtttgttagg

SEQ ID NO: 130004 - DNA, 13 bp, Artificial Sequence
  Oligonucleotide for detection of SNP TSC0032511
cctaacaaaccca

SEQ ID NO: 130005 - DNA, 13 bp, Artificial Sequence
  Oligonucleotide for detection of SNP TSC0032511
tgggttcgttagg

SEQ ID NO: 130006 - DNA, 13 bp, Artificial Sequence
  Oligonucleotide for detection of SNP TSC0032511
cctaacgaaccca

SEQ ID NO: 130007 - DNA, 13 bp, Artificial Sequence
  Oligonucleotide for detection of SNP TSC0032511
tttgatgggttta

SEQ ID NO: 130008 - DNA, 13 bp, Artificial Sequence
  Oligonucleotide for detection of SNP TSC0032511
taaacccatcaaa

SEQ ID NO: 130009 - DNA, 13 bp, Artificial Sequence
  Oligonucleotide for detection of SNP TSC0032511
tttgataggttta

SEQ ID NO: 130010 - DNA, 13 bp, Artificial Sequence
  Oligonucleotide for detection of SNP TSC0032511
taaacctatcaaa

SEQ ID NO: 130011 - DNA, 13 bp, Artificial Sequence
  Oligonucleotide for detection of SNP TSC0032511
tttgacgggttta

SEQ ID NO: 130012 - DNA, 13 bp, Artificial Sequence
  Oligonucleotide for detection of SNP TSC0032511
taaacccgtcaaa

SEQ ID NO: 130013 - DNA, 13 bp, Artificial Sequence
  Oligonucleotide for detection of SNP TSC0032512
aagtttgatgtaa

SEQ ID NO: 130014 - DNA, 13 bp, Artificial Sequence
  Oligonucleotide for detection of SNP TSC0032512
ttacatcaaactt

SEQ ID NO: 130015 - DNA, 13 bp, Artificial Sequence
  Oligonucleotide for detection of SNP TSC0032512
aagttttatgtaa

SEQ ID NO: 130016 - DNA, 13 bp, Artificial Sequence
  Oligonucleotide for detection of SNP TSC0032512
ttacataaaactt

SEQ ID NO: 130017 - DNA, 13 bp, Artificial Sequence
  Oligonucleotide for detection of SNP TSC0032512
aagttcgatgtaa

SEQ ID NO: 130018 - DNA, 13 bp, Artificial Sequence
  Oligonucleotide for detection of SNP TSC0032512
ttacatcgaactt

SEQ ID NO: 130019 - DNA, 13 bp, Artificial Sequence
  Oligonucleotide for detection of SNP TSC0032512
ttgtattgaattt

SEQ ID NO: 130020 - DNA, 13 bp, Artificial Sequence
  Oligonucleotide for detection of SNP TSC0032512
aaattcaatacaa

SEQ ID NO: 130021 - DNA, 13 bp, Artificial Sequence
  Oligonucleotide for detection of SNP TSC0032512
ttgtatcgaattt

SEQ ID NO: 130022 - DNA, 13 bp, Artificial Sequence
  Oligonucleotide for detection of SNP TSC0032512
aaattcgatacaa

SEQ ID NO: 130023 - DNA, 13 bp, Artificial Sequence
  Oligonucleotide for detection of SNP TSC0032513
tttgtttgggatt

SEQ ID NO: 130024 - DNA, 13 bp, Artificial Sequence
  Oligonucleotide for detection of SNP TSC0032513
aatcccaaacaaa

SEQ ID NO: 130025 - DNA, 13 bp, Artificial Sequence
  Oligonucleotide for detection of SNP TSC0032513
tttgttcgggatt

SEQ ID NO: 130026 - DNA, 13 bp, Artificial Sequence
  Oligonucleotide for detection of SNP TSC0032513
aatcccgaacaaa

SEQ ID NO: 130027 - DNA, 13 bp, Artificial Sequence
  Oligonucleotide for detection of SNP TSC0032513
agttttgagtaga

SEQ ID NO: 130028 - DNA, 13 bp, Artificial Sequence
  Oligonucleotide for detection of SNP TSC0032513
tctactcaaaact

SEQ ID NO: 130029 - DNA, 13 bp, Artificial Sequence
  Oligonucleotide for detection of SNP TSC0032513
agttttaagtaga

SEQ ID NO: 130030 - DNA, 13 bp, Artificial Sequence
  Oligonucleotide for detection of SNP TSC0032513
tctacttaaaact

SEQ ID NO: 130031 - DNA, 13 bp, Artificial Sequence
  Oligonucleotide for detection of SNP TSC0032513
agtttcgagtaga

SEQ ID NO: 130032 - DNA, 13 bp, Artificial Sequence
  Oligonucleotide for detection of SNP TSC0032513
tctactcgaaact

SEQ ID NO: 130033 - DNA, 13 bp, Artificial Sequence
  Oligonucleotide for detection of SNP TSC0032516
atgaagttattta

SEQ ID NO: 130034 - DNA, 13 bp, Artificial Sequence
  Oligonucleotide for detection of SNP TSC0032516
taaataacttcat

SEQ ID NO: 130035 - DNA, 13 bp, Artificial Sequence
  Oligonucleotide for detection of SNP TSC0032516
atgaaggtattta

SEQ ID NO: 130036 - DNA, 13 bp, Artificial Sequence
  Oligonucleotide for detection of SNP TSC0032516
taaataccttcat

SEQ ID NO: 130037 - DNA, 13 bp, Artificial Sequence
  Oligonucleotide for detection of SNP TSC0032516
acgaagttattta

SEQ ID NO: 130038 - DNA, 13 bp, Artificial Sequence
  Oligonucleotide for detection of SNP TSC0032516
taaataacttcgt

SEQ ID NO: 130039 - DNA, 13 bp, Artificial Sequence
  Oligonucleotide for detection of SNP TSC0032516
acgaaggtattta

SEQ ID NO: 130040 - DNA, 13 bp, Artificial Sequence
  Oligonucleotide for detection of SNP TSC0032516
taaataccttcgt

SEQ ID NO: 130041 - DNA, 13 bp, Artificial Sequence
  Oligonucleotide for detection of SNP TSC0032516
taaatggttttgt

SEQ ID NO: 130042 - DNA, 13 bp, Artificial Sequence
  Oligonucleotide for detection of SNP TSC0032516
acaaaaccattta

SEQ ID NO: 130043 - DNA, 13 bp, Artificial Sequence
  Oligonucleotide for detection of SNP TSC0032516
taaatgtttttgt

SEQ ID NO: 130044 - DNA, 13 bp, Artificial Sequence
  Oligonucleotide for detection of SNP TSC0032516
acaaaaacattta

SEQ ID NO: 130045 - DNA, 13 bp, Artificial Sequence
  Oligonucleotide for detection of SNP TSC0032516
taaatggtttcgt

SEQ ID NO: 130046 - DNA, 13 bp, Artificial Sequence
  Oligonucleotide for detection of SNP TSC0032516
acgaaaccattta

SEQ ID NO: 130047 - DNA, 13 bp, Artificial Sequence
  Oligonucleotide for detection of SNP TSC0032516
taaatgttttcgt

SEQ ID NO: 130048 - DNA, 13 bp, Artificial Sequence
  Oligonucleotide for detection of SNP TSC0032516
acgaaaacattta

SEQ ID NO: 130049 - DNA, 13 bp, Artificial Sequence
  Oligonucleotide for detection of SNP TSC0032517
gttagttgtattt

SEQ ID NO: 130050 - DNA, 13 bp, Artificial Sequence
  Oligonucleotide for detection of SNP TSC0032517
aaatacaactaac

SEQ ID NO: 130051 - DNA, 13 bp, Artificial Sequence
  Oligonucleotide for detection of SNP TSC0032517
gttagtcgtattt

SEQ ID NO: 130052 - DNA, 13 bp, Artificial Sequence
  Oligonucleotide for detection of SNP TSC0032517
aaatacgactaac

SEQ ID NO: 130053 - DNA, 13 bp, Artificial Sequence
  Oligonucleotide for detection of SNP TSC0032517
aaatatggttaay

SEQ ID NO: 130054 - DNA, 13 bp, Artificial Sequence
  Oligonucleotide for detection of SNP TSC0032517
rttaaccatattt

SEQ ID NO: 130055 - DNA, 13 bp, Artificial Sequence
  Oligonucleotide for detection of SNP TSC0032517
aaatatagttaay

SEQ ID NO: 130056 - DNA, 13 bp, Artificial Sequence
  Oligonucleotide for detection of SNP TSC0032517
rttaactatattt

SEQ ID NO: 130057 - DNA, 13 bp, Artificial Sequence
  Oligonucleotide for detection of SNP TSC0032517
aaatacggttaay

SEQ ID NO: 130058 - DNA, 13 bp, Artificial Sequence
  Oligonucleotide for detection of SNP TSC0032517
rttaaccgtattt

SEQ ID NO: 130059 - DNA, 13 bp, Artificial Sequence
  Oligonucleotide for detection of SNP TSC0032518
attttaattttat

SEQ ID NO: 130060 - DNA, 13 bp, Artificial Sequence
  Oligonucleotide for detection of SNP TSC0032518
ataaaattaaaat

SEQ ID NO: 130061 - DNA, 13 bp, Artificial Sequence
  Oligonucleotide for detection of SNP TSC0032518
attttatttttat

SEQ ID NO: 130062 - DNA, 13 bp, Artificial Sequence
  Oligonucleotide for detection of SNP TSC0032518
ataaaaataaaat

SEQ ID NO: 130063 - DNA, 13 bp, Artificial Sequence
  Oligonucleotide for detection of SNP TSC0032518
atgagattaaagt

SEQ ID NO: 130064 - DNA, 13 bp, Artificial Sequence
  Oligonucleotide for detection of SNP TSC0032518
actttaatctcat

SEQ ID NO: 130065 - DNA, 13 bp, Artificial Sequence
  Oligonucleotide for detection of SNP TSC0032518
atgagagtaaagt

SEQ ID NO: 130066 - DNA, 13 bp, Artificial Sequence
  Oligonucleotide for detection of SNP TSC0032518
actttactctcat

SEQ ID NO: 130067 - DNA, 13 bp, Artificial Sequence
  Oligonucleotide for detection of SNP TSC0032519
agaatttttcgaa

SEQ ID NO: 130068 - DNA, 13 bp, Artificial Sequence
  Oligonucleotide for detection of SNP TSC0032519
ttcgaaaaattct

SEQ ID NO: 130069 - DNA, 13 bp, Artificial Sequence
  Oligonucleotide for detection of SNP TSC0032519
agaattgttcgaa

SEQ ID NO: 130070 - DNA, 13 bp, Artificial Sequence
  Oligonucleotide for detection of SNP TSC0032519
ttcgaacaattct

SEQ ID NO: 130071 - DNA, 13 bp, Artificial Sequence
  Oligonucleotide for detection of SNP TSC0032519
agaatcgttcgaa

SEQ ID NO: 130072 - DNA, 13 bp, Artificial Sequence
  Oligonucleotide for detection of SNP TSC0032519
ttcgaacgattct

SEQ ID NO: 130073 - DNA, 13 bp, Artificial Sequence
  Oligonucleotide for detection of SNP TSC0032519
tttgagggatttt

SEQ ID NO: 130074 - DNA, 13 bp, Artificial Sequence
  Oligonucleotide for detection of SNP TSC0032519
aaaatccctcaaa

SEQ ID NO: 130075 - DNA, 13 bp, Artificial Sequence
  Oligonucleotide for detection of SNP TSC0032519
tttgagtgatttt

SEQ ID NO: 130076 - DNA, 13 bp, Artificial Sequence
  Oligonucleotide for detection of SNP TSC0032519
aaaatcactcaaa

SEQ ID NO: 130077 - DNA, 13 bp, Artificial Sequence
  Oligonucleotide for detection of SNP TSC0032519
ttcgagggatttt

SEQ ID NO: 130078 - DNA, 13 bp, Artificial Sequence
  Oligonucleotide for detection of SNP TSC0032519
aaaatccctcgaa

SEQ ID NO: 130079 - DNA, 13 bp, Artificial Sequence
  Oligonucleotide for detection of SNP TSC0032519
ttcgagtgatttt

SEQ ID NO: 130080 - DNA, 13 bp, Artificial Sequence
  Oligonucleotide for detection of SNP TSC0032519
aaaatcactcgaa

SEQ ID NO: 130081 - DNA, 13 bp, Artificial Sequence
  Oligonucleotide for detection of SNP TSC0032519
tttgagcgatttt

SEQ ID NO: 130082 - DNA, 13 bp, Artificial Sequence
  Oligonucleotide for detection of SNP TSC0032519
aaaatcgctcaaa

SEQ ID NO: 130083 - DNA, 13 bp, Artificial Sequence
  Oligonucleotide for detection of SNP TSC0032519
ttcgagcgatttt

SEQ ID NO: 130084 - DNA, 13 bp, Artificial Sequence
  Oligonucleotide for detection of SNP TSC0032519
aaaatcgctcgaa

SEQ ID NO: 130085 - DNA, 13 bp, Artificial Sequence
  Oligonucleotide for detection of SNP TSC0032520
ggttttagttagt

SEQ ID NO: 130086 - DNA, 13 bp, Artificial Sequence
  Oligonucleotide for detection of SNP TSC0032520
actaactaaaacc

SEQ ID NO: 130087 - DNA, 13 bp, Artificial Sequence
  Oligonucleotide for detection of SNP TSC0032520
ggttttggttagt

SEQ ID NO: 130088 - DNA, 13 bp, Artificial Sequence
  Oligonucleotide for detection of SNP TSC0032520
actaaccaaaacc

SEQ ID NO: 130089 - DNA, 13 bp, Artificial Sequence
  Oligonucleotide for detection of SNP TSC0032520
ggtttcggttagt

SEQ ID NO: 130090 - DNA, 13 bp, Artificial Sequence
  Oligonucleotide for detection of SNP TSC0032520
actaaccgaaacc

SEQ ID NO: 130091 - DNA, 13 bp, Artificial Sequence
  Oligonucleotide for detection of SNP TSC0032520
attaattgggaty

SEQ ID NO: 130092 - DNA, 13 bp, Artificial Sequence
  Oligonucleotide for detection of SNP TSC0032520
ratcccaattaat

SEQ ID NO: 130093 - DNA, 13 bp, Artificial Sequence
  Oligonucleotide for detection of SNP TSC0032520
attaatcgggaty

SEQ ID NO: 130094 - DNA, 13 bp, Artificial Sequence
  Oligonucleotide for detection of SNP TSC0032520
ratcccgattaat

SEQ ID NO: 130095 - DNA, 13 bp, Artificial Sequence
  Oligonucleotide for detection of SNP TSC0032521
gggttgatatgga

SEQ ID NO: 130096 - DNA, 13 bp, Artificial Sequence
  Oligonucleotide for detection of SNP TSC0032521
tccatatcaaccc

SEQ ID NO: 130097 - DNA, 13 bp, Artificial Sequence
  Oligonucleotide for detection of SNP TSC0032521
gggttggtatgga

SEQ ID NO: 130098 - DNA, 13 bp, Artificial Sequence
  Oligonucleotide for detection of SNP TSC0032521
tccataccaaccc

SEQ ID NO: 130099 - DNA, 13 bp, Artificial Sequence
  Oligonucleotide for detection of SNP TSC0032523
tattttgtaaggg

SEQ ID NO: 130100 - DNA, 13 bp, Artificial Sequence
  Oligonucleotide for detection of SNP TSC0032523
cccttacaaaata

SEQ ID NO: 130101 - DNA, 13 bp, Artificial Sequence
  Oligonucleotide for detection of SNP TSC0032523
tattttttaaggg

SEQ ID NO: 130102 - DNA, 13 bp, Artificial Sequence
  Oligonucleotide for detection of SNP TSC0032523
cccttaaaaaata

SEQ ID NO: 130103 - DNA, 13 bp, Artificial Sequence
  Oligonucleotide for detection of SNP TSC0032523
tttttataaagtg

SEQ ID NO: 130104 - DNA, 13 bp, Artificial Sequence
  Oligonucleotide for detection of SNP TSC0032523
cactttataaaaa

SEQ ID NO: 130105 - DNA, 13 bp, Artificial Sequence
  Oligonucleotide for detection of SNP TSC0032523
tttttaaaaagtg

SEQ ID NO: 130106 - DNA, 13 bp, Artificial Sequence
  Oligonucleotide for detection of SNP TSC0032523
cactttttaaaaa

SEQ ID NO: 130107 - DNA, 13 bp, Artificial Sequence
  Oligonucleotide for detection of SNP TSC0032524
agaggagtaaaty

SEQ ID NO: 130108 - DNA, 13 bp, Artificial Sequence
  Oligonucleotide for detection of SNP TSC0032524
ratttactcctct

SEQ ID NO: 130109 - DNA, 13 bp, Artificial Sequence
  Oligonucleotide for detection of SNP TSC0032524
agaggaataaaty

SEQ ID NO: 130110 - DNA, 13 bp, Artificial Sequence
  Oligonucleotide for detection of SNP TSC0032524
ratttattcctct

SEQ ID NO: 130111 - DNA, 13 bp, Artificial Sequence
  Oligonucleotide for detection of SNP TSC0032525
tttagtgtttgtt

SEQ ID NO: 130112 - DNA, 13 bp, Artificial Sequence
  Oligonucleotide for detection of SNP TSC0032525
aacaaacactaaa

SEQ ID NO: 130113 - DNA, 13 bp, Artificial Sequence
  Oligonucleotide for detection of SNP TSC0032526
gaagatagatgga

SEQ ID NO: 130114 - DNA, 13 bp, Artificial Sequence
  Oligonucleotide for detection of SNP TSC0032526
tccatctatcttc

SEQ ID NO: 130115 - DNA, 13 bp, Artificial Sequence
  Oligonucleotide for detection of SNP TSC0032526
gaagatggatgga

SEQ ID NO: 130116 - DNA, 13 bp, Artificial Sequence
  Oligonucleotide for detection of SNP TSC0032526
tccatccatcttc

SEQ ID NO: 130117 - DNA, 13 bp, Artificial Sequence
  Oligonucleotide for detection of SNP TSC0032527
agtttaatgattt

SEQ ID NO: 130118 - DNA, 13 bp, Artificial Sequence
  Oligonucleotide for detection of SNP TSC0032527
aaatcattaaact

SEQ ID NO: 130119 - DNA, 13 bp, Artificial Sequence
  Oligonucleotide for detection of SNP TSC0032527
agtttagtgattt

SEQ ID NO: 130120 - DNA, 13 bp, Artificial Sequence
  Oligonucleotide for detection of SNP TSC0032527
aaatcactaaact

SEQ ID NO: 130121 - DNA, 13 bp, Artificial Sequence
  Oligonucleotide for detection of SNP TSC0032528
ttattaggattty

SEQ ID NO: 130122 - DNA, 13 bp, Artificial Sequence
  Oligonucleotide for detection of SNP TSC0032528
raaatcctaataa

SEQ ID NO: 130123 - DNA, 13 bp, Artificial Sequence
  Oligonucleotide for detection of SNP TSC0032528
ttattatgattty

SEQ ID NO: 130124 - DNA, 13 bp, Artificial Sequence
  Oligonucleotide for detection of SNP TSC0032528
raaatcataataa

SEQ ID NO: 130125 - DNA, 13 bp, Artificial Sequence
  Oligonucleotide for detection of SNP TSC0032528
gagattttggtgg

SEQ ID NO: 130126 - DNA, 13 bp, Artificial Sequence
  Oligonucleotide for detection of SNP TSC0032528
ccaccaaaatctc

SEQ ID NO: 130127 - DNA, 13 bp, Artificial Sequence
  Oligonucleotide for detection of SNP TSC0032528
gagattatggtgg

SEQ ID NO: 130128 - DNA, 13 bp, Artificial Sequence
  Oligonucleotide for detection of SNP TSC0032528
ccaccataatctc

SEQ ID NO: 130129 - DNA, 13 bp, Artificial Sequence
  Oligonucleotide for detection of SNP TSC0032529
gaggaggagatty

SEQ ID NO: 130130 - DNA, 13 bp, Artificial Sequence
  Oligonucleotide for detection of SNP TSC0032529
raatctcctcctc

SEQ ID NO: 130131 - DNA, 13 bp, Artificial Sequence
  Oligonucleotide for detection of SNP TSC0032529
gaggagaagatty

SEQ ID NO: 130132 - DNA, 13 bp, Artificial Sequence
  Oligonucleotide for detection of SNP TSC0032529
raatcttctcctc

SEQ ID NO: 130133 - DNA, 13 bp, Artificial Sequence
  Oligonucleotide for detection of SNP TSC0032531
tatttggttagaa

SEQ ID NO: 130134 - DNA, 13 bp, Artificial Sequence
  Oligonucleotide for detection of SNP TSC0032531
ttctaaccaaata

SEQ ID NO: 130135 - DNA, 13 bp, Artificial Sequence
  Oligonucleotide for detection of SNP TSC0032531
tatttgtttagaa

SEQ ID NO: 130136 - DNA, 13 bp, Artificial Sequence
  Oligonucleotide for detection of SNP TSC0032531
ttctaaacaaata

SEQ ID NO: 130137 - DNA, 13 bp, Artificial Sequence
  Oligonucleotide for detection of SNP TSC0032531
tattcggttagaa

SEQ ID NO: 130138 - DNA, 13 bp, Artificial Sequence
  Oligonucleotide for detection of SNP TSC0032531
ttctaaccgaata

SEQ ID NO: 130139 - DNA, 13 bp, Artificial Sequence
  Oligonucleotide for detection of SNP TSC0032531
tattcgtttagaa

SEQ ID NO: 130140 - DNA, 13 bp, Artificial Sequence
  Oligonucleotide for detection of SNP TSC0032531
ttctaaacgaata

SEQ ID NO: 130141 - DNA, 13 bp, Artificial Sequence
  Oligonucleotide for detection of SNP TSC0032531
ttttggttgagtg

SEQ ID NO: 130142 - DNA, 13 bp, Artificial Sequence
  Oligonucleotide for detection of SNP TSC0032531
cactcaaccaaaa

SEQ ID NO: 130143 - DNA, 13 bp, Artificial Sequence
  Oligonucleotide for detection of SNP TSC0032531
ttttggatgagtg

SEQ ID NO: 130144 - DNA, 13 bp, Artificial Sequence
  Oligonucleotide for detection of SNP TSC0032531
cactcatccaaaa

SEQ ID NO: 130145 - DNA, 13 bp, Artificial Sequence
  Oligonucleotide for detection of SNP TSC0032531
ttttggtcgagtg

SEQ ID NO: 130146 - DNA, 13 bp, Artificial Sequence
  Oligonucleotide for detection of SNP TSC0032531
cactcgaccaaaa

SEQ ID NO: 130147 - DNA, 13 bp, Artificial Sequence
  Oligonucleotide for detection of SNP TSC0032531
ttttggacgagtg

SEQ ID NO: 130148 - DNA, 13 bp, Artificial Sequence
  Oligonucleotide for detection of SNP TSC0032531
cactcgtccaaaa

SEQ ID NO: 130149 - DNA, 13 bp, Artificial Sequence
  Oligonucleotide for detection of SNP TSC0032532
ttgttgtttaggy

SEQ ID NO: 130150 - DNA, 13 bp, Artificial Sequence
  Oligonucleotide for detection of SNP TSC0032532
rcctaaacaacaa

SEQ ID NO: 130151 - DNA, 13 bp, Artificial Sequence
  Oligonucleotide for detection of SNP TSC0032532
ttgttggttaggy

SEQ ID NO: 130152 - DNA, 13 bp, Artificial Sequence
  Oligonucleotide for detection of SNP TSC0032532
rcctaaccaacaa

SEQ ID NO: 130153 - DNA, 13 bp, Artificial Sequence
  Oligonucleotide for detection of SNP TSC0032532
ttgtcgtttaggy

SEQ ID NO: 130154 - DNA, 13 bp, Artificial Sequence
  Oligonucleotide for detection of SNP TSC0032532
rcctaaacgacaa

SEQ ID NO: 130155 - DNA, 13 bp, Artificial Sequence
  Oligonucleotide for detection of SNP TSC0032532
ttgtcggttaggy

SEQ ID NO: 130156 - DNA, 13 bp, Artificial Sequence
  Oligonucleotide for detection of SNP TSC0032532
rcctaaccgacaa

SEQ ID NO: 130157 - DNA, 13 bp, Artificial Sequence
  Oligonucleotide for detection of SNP TSC0032532
gtttgggtgatag

SEQ ID NO: 130158 - DNA, 13 bp, Artificial Sequence
  Oligonucleotide for detection of SNP TSC0032532
ctatcacccaaac

SEQ ID NO: 130159 - DNA, 13 bp, Artificial Sequence
  Oligonucleotide for detection of SNP TSC0032532
gtttggttgatag

SEQ ID NO: 130160 - DNA, 13 bp, Artificial Sequence
  Oligonucleotide for detection of SNP TSC0032532
ctatcaaccaaac

SEQ ID NO: 130161 - DNA, 13 bp, Artificial Sequence
  Oligonucleotide for detection of SNP TSC0032532
gtttgggcgatag

SEQ ID NO: 130162 - DNA, 13 bp, Artificial Sequence
  Oligonucleotide for detection of SNP TSC0032532
ctatcgcccaaac

SEQ ID NO: 130163 - DNA, 13 bp, Artificial Sequence
  Oligonucleotide for detection of SNP TSC0032532
gtttggtcgatag

SEQ ID NO: 130164 - DNA, 13 bp, Artificial Sequence
  Oligonucleotide for detection of SNP TSC0032532
ctatcgaccaaac

SEQ ID NO: 130165 - DNA, 13 bp, Artificial Sequence
  Oligonucleotide for detection of SNP TSC0032533
gggtggatggtgy

SEQ ID NO: 130166 - DNA, 13 bp, Artificial Sequence
  Oligonucleotide for detection of SNP TSC0032533
rcaccatccaccc

SEQ ID NO: 130167 - DNA, 13 bp, Artificial Sequence
  Oligonucleotide for detection of SNP TSC0032533
gggtggttggtgy

SEQ ID NO: 130168 - DNA, 13 bp, Artificial Sequence
  Oligonucleotide for detection of SNP TSC0032533
rcaccaaccaccc

SEQ ID NO: 130169 - DNA, 13 bp, Artificial Sequence
  Oligonucleotide for detection of SNP TSC0032533
gggcggatggtgy

SEQ ID NO: 130170 - DNA, 13 bp, Artificial Sequence
  Oligonucleotide for detection of SNP TSC0032533
rcaccatccgccc

SEQ ID NO: 130171 - DNA, 13 bp, Artificial Sequence
  Oligonucleotide for detection of SNP TSC0032533
gggcggttggtgy

SEQ ID NO: 130172 - DNA, 13 bp, Artificial Sequence
  Oligonucleotide for detection of SNP TSC0032533
rcaccaaccgccc

SEQ ID NO: 130173 - DNA, 13 bp, Artificial Sequence
  Oligonucleotide for detection of SNP TSC0032533
gggtggacggtgy

SEQ ID NO: 130174 - DNA, 13 bp, Artificial Sequence
  Oligonucleotide for detection of SNP TSC0032533
rcaccgtccaccc

SEQ ID NO: 130175 - DNA, 13 bp, Artificial Sequence
  Oligonucleotide for detection of SNP TSC0032533
gggtggtcggtgy

SEQ ID NO: 130176 - DNA, 13 bp, Artificial Sequence
  Oligonucleotide for detection of SNP TSC0032533
rcaccgaccaccc

SEQ ID NO: 130177 - DNA, 13 bp, Artificial Sequence
  Oligonucleotide for detection of SNP TSC0032533
gggtggatggcgy

SEQ ID NO: 130178 - DNA, 13 bp, Artificial Sequence
  Oligonucleotide for detection of SNP TSC0032533
rcgccatccaccc

SEQ ID NO: 130179 - DNA, 13 bp, Artificial Sequence
  Oligonucleotide for detection of SNP TSC0032533
gggtggttggcgy

SEQ ID NO: 130180 - DNA, 13 bp, Artificial Sequence
  Oligonucleotide for detection of SNP TSC0032533
rcgccaaccaccc

SEQ ID NO: 130181 - DNA, 13 bp, Artificial Sequence
  Oligonucleotide for detection of SNP TSC0032533
gggcggacggtgy

SEQ ID NO: 130182 - DNA, 13 bp, Artificial Sequence
  Oligonucleotide for detection of SNP TSC0032533
rcaccgtccgccc

SEQ ID NO: 130183 - DNA, 13 bp, Artificial Sequence
  Oligonucleotide for detection of SNP TSC0032533
gggcggtcggtgy

SEQ ID NO: 130184 - DNA, 13 bp, Artificial Sequence
  Oligonucleotide for detection of SNP TSC0032533
rcaccgaccgccc

SEQ ID NO: 130185 - DNA, 13 bp, Artificial Sequence
  Oligonucleotide for detection of SNP TSC0032533
gggcggatggcgy

SEQ ID NO: 130186 - DNA, 13 bp, Artificial Sequence
  Oligonucleotide for detection of SNP TSC0032533
rcgccatccgccc

SEQ ID NO: 130187 - DNA, 13 bp, Artificial Sequence
  Oligonucleotide for detection of SNP TSC0032533
gggcggttggcgy

SEQ ID NO: 130188 - DNA, 13 bp, Artificial Sequence
  Oligonucleotide for detection of SNP TSC0032533
rcgccaaccgccc

SEQ ID NO: 130189 - DNA, 13 bp, Artificial Sequence
  Oligonucleotide for detection of SNP TSC0032533
gggtggacggcgy

SEQ ID NO: 130190 - DNA, 13 bp, Artificial Sequence
  Oligonucleotide for detection of SNP TSC0032533
rcgccgtccaccc

SEQ ID NO: 130191 - DNA, 13 bp, Artificial Sequence
  Oligonucleotide for detection of SNP TSC0032533
gggtggtcggcgy

SEQ ID NO: 130192 - DNA, 13 bp, Artificial Sequence
  Oligonucleotide for detection of SNP TSC0032533
rcgccgaccaccc

SEQ ID NO: 130193 - DNA, 13 bp, Artificial Sequence
  Oligonucleotide for detection of SNP TSC0032533
gggcggacggcgy

SEQ ID NO: 130194 - DNA, 13 bp, Artificial Sequence
  Oligonucleotide for detection of SNP TSC0032533
rcgccgtccgccc

SEQ ID NO: 130195 - DNA, 13 bp, Artificial Sequence
  Oligonucleotide for detection of SNP TSC0032533
gggcggtcggcgy

SEQ ID NO: 130196 - DNA, 13 bp, Artificial Sequence
  Oligonucleotide for detection of SNP TSC0032533
rcgccgaccgccc

SEQ ID NO: 130197 - DNA, 13 bp, Artificial Sequence
  Oligonucleotide for detection of SNP TSC0032533
gtgttgtttgtty

SEQ ID NO: 130198 - DNA, 13 bp, Artificial Sequence
  Oligonucleotide for detection of SNP TSC0032533
raacaaacaacac

SEQ ID NO: 130199 - DNA, 13 bp, Artificial Sequence
  Oligonucleotide for detection of SNP TSC0032533
gtgttggttgtty

SEQ ID NO: 130200 - DNA, 13 bp, Artificial Sequence
  Oligonucleotide for detection of SNP TSC0032533
raacaaccaacac

SEQ ID NO: 130201 - DNA, 13 bp, Artificial Sequence
  Oligonucleotide for detection of SNP TSC0032533
gcgttgtttgtty

SEQ ID NO: 130202 - DNA, 13 bp, Artificial Sequence
  Oligonucleotide for detection of SNP TSC0032533
raacaaacaacgc

SEQ ID NO: 130203 - DNA, 13 bp, Artificial Sequence
  Oligonucleotide for detection of SNP TSC0032533
gcgttggttgtty

SEQ ID NO: 130204 - DNA, 13 bp, Artificial Sequence
  Oligonucleotide for detection of SNP TSC0032533
raacaaccaacgc

SEQ ID NO: 130205 - DNA, 13 bp, Artificial Sequence
  Oligonucleotide for detection of SNP TSC0032533
gtgtcgtttgtty

SEQ ID NO: 130206 - DNA, 13 bp, Artificial Sequence
  Oligonucleotide for detection of SNP TSC0032533
raacaaacgacac

SEQ ID NO: 130207 - DNA, 13 bp, Artificial Sequence
  Oligonucleotide for detection of SNP TSC0032533
gtgtcggttgtty

SEQ ID NO: 130208 - DNA, 13 bp, Artificial Sequence
  Oligonucleotide for detection of SNP TSC0032533
raacaaccgacac

SEQ ID NO: 130209 - DNA, 13 bp, Artificial Sequence
  Oligonucleotide for detection of SNP TSC0032533
gtgttgttcgtty

SEQ ID NO: 130210 - DNA, 13 bp, Artificial Sequence
  Oligonucleotide for detection of SNP TSC0032533
raacgaacaacac

SEQ ID NO: 130211 - DNA, 13 bp, Artificial Sequence
  Oligonucleotide for detection of SNP TSC0032533
gtgttggtcgtty

SEQ ID NO: 130212 - DNA, 13 bp, Artificial Sequence
  Oligonucleotide for detection of SNP TSC0032533
raacgaccaacac

SEQ ID NO: 130213 - DNA, 13 bp, Artificial Sequence
  Oligonucleotide for detection of SNP TSC0032533
gcgtcgtttgtty

SEQ ID NO: 130214 - DNA, 13 bp, Artificial Sequence
  Oligonucleotide for detection of SNP TSC0032533
raacaaacgacgc

SEQ ID NO: 130215 - DNA, 13 bp, Artificial Sequence
  Oligonucleotide for detection of SNP TSC0032533
gcgtcggttgtty

SEQ ID NO: 130216 - DNA, 13 bp, Artificial Sequence
  Oligonucleotide for detection of SNP TSC0032533
raacaaccgacgc

SEQ ID NO: 130217 - DNA, 13 bp, Artificial Sequence
  Oligonucleotide for detection of SNP TSC0032533
gcgttgttcgtty

SEQ ID NO: 130218 - DNA, 13 bp, Artificial Sequence
  Oligonucleotide for detection of SNP TSC0032533
raacgaacaacgc

SEQ ID NO: 130219 - DNA, 13 bp, Artificial Sequence
  Oligonucleotide for detection of SNP TSC0032533
gcgttggtcgtty

SEQ ID NO: 130220 - DNA, 13 bp, Artificial Sequence
  Oligonucleotide for detection of SNP TSC0032533
raacgaccaacgc

SEQ ID NO: 130221 - DNA, 13 bp, Artificial Sequence
  Oligonucleotide for detection of SNP TSC0032533
gtgtcgttcgtty

SEQ ID NO: 130222 - DNA, 13 bp, Artificial Sequence
  Oligonucleotide for detection of SNP TSC0032533
raacgaacgacac

SEQ ID NO: 130223 - DNA, 13 bp, Artificial Sequence
  Oligonucleotide for detection of SNP TSC0032533
gtgtcggtcgtty

SEQ ID NO: 130224 - DNA, 13 bp, Artificial Sequence
  Oligonucleotide for detection of SNP TSC0032533
raacgaccgacac

SEQ ID NO: 130225 - DNA, 13 bp, Artificial Sequence
  Oligonucleotide for detection of SNP TSC0032533
gcgtcgttcgtty

SEQ ID NO: 130226 - DNA, 13 bp, Artificial Sequence
  Oligonucleotide for detection of SNP TSC0032533
raacgaacgacgc

SEQ ID NO: 130227 - DNA, 13 bp, Artificial Sequence
  Oligonucleotide for detection of SNP TSC0032533
gcgtcggtcgtty

SEQ ID NO: 130228 - DNA, 13 bp, Artificial Sequence
  Oligonucleotide for detection of SNP TSC0032533
raacgaccgacgc

SEQ ID NO: 130229 - DNA, 13 bp, Artificial Sequence
  Oligonucleotide for detection of SNP TSC0032535
tgtgtaattgggt

SEQ ID NO: 130230 - DNA, 13 bp, Artificial Sequence
  Oligonucleotide for detection of SNP TSC0032535
acccaattacaca

SEQ ID NO: 130231 - DNA, 13 bp, Artificial Sequence
  Oligonucleotide for detection of SNP TSC0032535
tgtgtatttgggt

SEQ ID NO: 130232 - DNA, 13 bp, Artificial Sequence
  Oligonucleotide for detection of SNP TSC0032535
acccaaatacaca

SEQ ID NO: 130233 - DNA, 13 bp, Artificial Sequence
  Oligonucleotide for detection of SNP TSC0032535
atttaattgtata

SEQ ID NO: 130234 - DNA, 13 bp, Artificial Sequence
  Oligonucleotide for detection of SNP TSC0032535
tatacaattaaat

SEQ ID NO: 130235 - DNA, 13 bp, Artificial Sequence
  Oligonucleotide for detection of SNP TSC0032535
atttaagtgtata

SEQ ID NO: 130236 - DNA, 13 bp, Artificial Sequence
  Oligonucleotide for detection of SNP TSC0032535
tatacacttaaat

SEQ ID NO: 130237 - DNA, 13 bp, Artificial Sequence
  Oligonucleotide for detection of SNP TSC0032536
gtttggggggtgg

SEQ ID NO: 130238 - DNA, 13 bp, Artificial Sequence
  Oligonucleotide for detection of SNP TSC0032536
ccaccccccaaac

SEQ ID NO: 130239 - DNA, 13 bp, Artificial Sequence
  Oligonucleotide for detection of SNP TSC0032536
gtttggtgggtgg

SEQ ID NO: 130240 - DNA, 13 bp, Artificial Sequence
  Oligonucleotide for detection of SNP TSC0032536
ccacccaccaaac

SEQ ID NO: 130241 - DNA, 13 bp, Artificial Sequence
  Oligonucleotide for detection of SNP TSC0032536
gtttggggggcgg

SEQ ID NO: 130242 - DNA, 13 bp, Artificial Sequence
  Oligonucleotide for detection of SNP TSC0032536
ccgccccccaaac

SEQ ID NO: 130243 - DNA, 13 bp, Artificial Sequence
  Oligonucleotide for detection of SNP TSC0032536
gtttggtgggcgg

SEQ ID NO: 130244 - DNA, 13 bp, Artificial Sequence
  Oligonucleotide for detection of SNP TSC0032536
ccgcccaccaaac

SEQ ID NO: 130245 - DNA, 13 bp, Artificial Sequence
  Oligonucleotide for detection of SNP TSC0032536
ttgtttattaggy

SEQ ID NO: 130246 - DNA, 13 bp, Artificial Sequence
  Oligonucleotide for detection of SNP TSC0032536
rcctaataaacaa

SEQ ID NO: 130247 - DNA, 13 bp, Artificial Sequence
  Oligonucleotide for detection of SNP TSC0032536
tcgttttttaggy

SEQ ID NO: 130248 - DNA, 13 bp, Artificial Sequence
  Oligonucleotide for detection of SNP TSC0032536
rcctaaaaaacga

SEQ ID NO: 130249 - DNA, 13 bp, Artificial Sequence
  Oligonucleotide for detection of SNP TSC0032536
tcgtttattaggy

SEQ ID NO: 130250 - DNA, 13 bp, Artificial Sequence
  Oligonucleotide for detection of SNP TSC0032536
rcctaataaacga

SEQ ID NO: 130251 - DNA, 13 bp, Artificial Sequence
  Oligonucleotide for detection of SNP TSC0032538
aggataggatatt

SEQ ID NO: 130252 - DNA, 13 bp, Artificial Sequence
  Oligonucleotide for detection of SNP TSC0032538
aatatcctatcct

SEQ ID NO: 130253 - DNA, 13 bp, Artificial Sequence
  Oligonucleotide for detection of SNP TSC0032538
aggatatgatatt

SEQ ID NO: 130254 - DNA, 13 bp, Artificial Sequence
  Oligonucleotide for detection of SNP TSC0032538
aatatcatatcct

SEQ ID NO: 130255 - DNA, 13 bp, Artificial Sequence
  Oligonucleotide for detection of SNP TSC0032538
agtgttttgtttt

SEQ ID NO: 130256 - DNA, 13 bp, Artificial Sequence
  Oligonucleotide for detection of SNP TSC0032538
aaaacaaaacact

SEQ ID NO: 130257 - DNA, 13 bp, Artificial Sequence
  Oligonucleotide for detection of SNP TSC0032538
agtgttatgtttt

SEQ ID NO: 130258 - DNA, 13 bp, Artificial Sequence
  Oligonucleotide for detection of SNP TSC0032538
aaaacataacact

SEQ ID NO: 130259 - DNA, 13 bp, Artificial Sequence
  Oligonucleotide for detection of SNP TSC0032539
tgaataagggagy

SEQ ID NO: 130260 - DNA, 13 bp, Artificial Sequence
  Oligonucleotide for detection of SNP TSC0032539
rctcccttattca

SEQ ID NO: 130261 - DNA, 13 bp, Artificial Sequence
  Oligonucleotide for detection of SNP TSC0032539
tgaataggggagy

SEQ ID NO: 130262 - DNA, 13 bp, Artificial Sequence
  Oligonucleotide for detection of SNP TSC0032539
rctcccctattca

SEQ ID NO: 130263 - DNA, 13 bp, Artificial Sequence
  Oligonucleotide for detection of SNP TSC0032541
tgagatattgttt

SEQ ID NO: 130264 - DNA, 13 bp, Artificial Sequence
  Oligonucleotide for detection of SNP TSC0032541
aaacaatatctca

SEQ ID NO: 130265 - DNA, 13 bp, Artificial Sequence
  Oligonucleotide for detection of SNP TSC0032541
tgagattttgttt

SEQ ID NO: 130266 - DNA, 13 bp, Artificial Sequence
  Oligonucleotide for detection of SNP TSC0032541
aaacaaaatctca

SEQ ID NO: 130267 - DNA, 13 bp, Artificial Sequence
  Oligonucleotide for detection of SNP TSC0032541
cgagatattgttt

SEQ ID NO: 130268 - DNA, 13 bp, Artificial Sequence
  Oligonucleotide for detection of SNP TSC0032541
aaacaatatctcg

SEQ ID NO: 130269 - DNA, 13 bp, Artificial Sequence
  Oligonucleotide for detection of SNP TSC0032541
cgagattttgttt

SEQ ID NO: 130270 - DNA, 13 bp, Artificial Sequence
  Oligonucleotide for detection of SNP TSC0032541
aaacaaaatctcg

SEQ ID NO: 130271 - DNA, 13 bp, Artificial Sequence
  Oligonucleotide for detection of SNP TSC0032541
tgagatatcgttt

SEQ ID NO: 130272 - DNA, 13 bp, Artificial Sequence
  Oligonucleotide for detection of SNP TSC0032541
aaacgatatctca

SEQ ID NO: 130273 - DNA, 13 bp, Artificial Sequence
  Oligonucleotide for detection of SNP TSC0032541
tgagatttcgttt

SEQ ID NO: 130274 - DNA, 13 bp, Artificial Sequence
  Oligonucleotide for detection of SNP TSC0032541
aaacgaaatctca

SEQ ID NO: 130275 - DNA, 13 bp, Artificial Sequence
  Oligonucleotide for detection of SNP TSC0032541
cgagatatcgttt

SEQ ID NO: 130276 - DNA, 13 bp, Artificial Sequence
  Oligonucleotide for detection of SNP TSC0032541
aaacgatatctcg

SEQ ID NO: 130277 - DNA, 13 bp, Artificial Sequence
  Oligonucleotide for detection of SNP TSC0032541
cgagatttcgttt

SEQ ID NO: 130278 - DNA, 13 bp, Artificial Sequence
  Oligonucleotide for detection of SNP TSC0032541
aaacgaaatctcg

SEQ ID NO: 130279 - DNA, 13 bp, Artificial Sequence
  Oligonucleotide for detection of SNP TSC0032541
agatggtgttttg

SEQ ID NO: 130280 - DNA, 13 bp, Artificial Sequence
  Oligonucleotide for detection of SNP TSC0032541
caaaacaccatct

SEQ ID NO: 130281 - DNA, 13 bp, Artificial Sequence
  Oligonucleotide for detection of SNP TSC0032541
agatggagttttg

SEQ ID NO: 130282 - DNA, 13 bp, Artificial Sequence
  Oligonucleotide for detection of SNP TSC0032541
caaaactccatct

SEQ ID NO: 130283 - DNA, 13 bp, Artificial Sequence
  Oligonucleotide for detection of SNP TSC0032541
agacggtgttttg

SEQ ID NO: 130284 - DNA, 13 bp, Artificial Sequence
  Oligonucleotide for detection of SNP TSC0032541
caaaacaccgtct

SEQ ID NO: 130285 - DNA, 13 bp, Artificial Sequence
  Oligonucleotide for detection of SNP TSC0032541
agacggagttttg

SEQ ID NO: 130286 - DNA, 13 bp, Artificial Sequence
  Oligonucleotide for detection of SNP TSC0032541
caaaactccgtct

SEQ ID NO: 130287 - DNA, 13 bp, Artificial Sequence
  Oligonucleotide for detection of SNP TSC0032541
agatggtgtttcg

SEQ ID NO: 130288 - DNA, 13 bp, Artificial Sequence
  Oligonucleotide for detection of SNP TSC0032541
cgaaacaccatct

SEQ ID NO: 130289 - DNA, 13 bp, Artificial Sequence
  Oligonucleotide for detection of SNP TSC0032541
agatggagtttcg

SEQ ID NO: 130290 - DNA, 13 bp, Artificial Sequence
  Oligonucleotide for detection of SNP TSC0032541
cgaaactccatct

SEQ ID NO: 130291 - DNA, 13 bp, Artificial Sequence
  Oligonucleotide for detection of SNP TSC0032541
agacggtgtttcg

SEQ ID NO: 130292 - DNA, 13 bp, Artificial Sequence
  Oligonucleotide for detection of SNP TSC0032541
cgaaacaccgtct

SEQ ID NO: 130293 - DNA, 13 bp, Artificial Sequence
  Oligonucleotide for detection of SNP TSC0032541
agacggagtttcg

SEQ ID NO: 130294 - DNA, 13 bp, Artificial Sequence
  Oligonucleotide for detection of SNP TSC0032541
cgaaactccgtct

SEQ ID NO: 130295 - DNA, 13 bp, Artificial Sequence
  Oligonucleotide for detection of SNP TSC0032542
tgttttatgattt

SEQ ID NO: 130296 - DNA, 13 bp, Artificial Sequence
  Oligonucleotide for detection of SNP TSC0032542
aaatcataaaaca

SEQ ID NO: 130297 - DNA, 13 bp, Artificial Sequence
  Oligonucleotide for detection of SNP TSC0032544
ttgttgatttggy

SEQ ID NO: 130298 - DNA, 13 bp, Artificial Sequence
  Oligonucleotide for detection of SNP TSC0032544
rccaaatcaacaa

SEQ ID NO: 130299 - DNA, 13 bp, Artificial Sequence
  Oligonucleotide for detection of SNP TSC0032544
ttgttgttttggy

SEQ ID NO: 130300 - DNA, 13 bp, Artificial Sequence
  Oligonucleotide for detection of SNP TSC0032544
rccaaaacaacaa

SEQ ID NO: 130301 - DNA, 13 bp, Artificial Sequence
  Oligonucleotide for detection of SNP TSC0032544
ttgttgattcggy

SEQ ID NO: 130302 - DNA, 13 bp, Artificial Sequence
  Oligonucleotide for detection of SNP TSC0032544
rccgaatcaacaa

SEQ ID NO: 130303 - DNA, 13 bp, Artificial Sequence
  Oligonucleotide for detection of SNP TSC0032544
ttgttgtttcggy

SEQ ID NO: 130304 - DNA, 13 bp, Artificial Sequence
  Oligonucleotide for detection of SNP TSC0032544
rccgaaacaacaa

SEQ ID NO: 130305 - DNA, 13 bp, Artificial Sequence
  Oligonucleotide for detection of SNP TSC0032544
gttgagttagtag

SEQ ID NO: 130306 - DNA, 13 bp, Artificial Sequence
  Oligonucleotide for detection of SNP TSC0032544
ctactaactcaac

SEQ ID NO: 130307 - DNA, 13 bp, Artificial Sequence
  Oligonucleotide for detection of SNP TSC0032544
gttgagatagtag

SEQ ID NO: 130308 - DNA, 13 bp, Artificial Sequence
  Oligonucleotide for detection of SNP TSC0032544
ctactatctcaac

SEQ ID NO: 130309 - DNA, 13 bp, Artificial Sequence
  Oligonucleotide for detection of SNP TSC0032544
gtcgagttagtag

SEQ ID NO: 130310 - DNA, 13 bp, Artificial Sequence
  Oligonucleotide for detection of SNP TSC0032544
ctactaactcgac

SEQ ID NO: 130311 - DNA, 13 bp, Artificial Sequence
  Oligonucleotide for detection of SNP TSC0032544
gtcgagatagtag

SEQ ID NO: 130312 - DNA, 13 bp, Artificial Sequence
  Oligonucleotide for detection of SNP TSC0032544
ctactatctcgac

SEQ ID NO: 130313 - DNA, 13 bp, Artificial Sequence
  Oligonucleotide for detection of SNP TSC0032545
ttgtgtatatagt

SEQ ID NO: 130314 - DNA, 13 bp, Artificial Sequence
  Oligonucleotide for detection of SNP TSC0032545
actatatacacaa

SEQ ID NO: 130315 - DNA, 13 bp, Artificial Sequence
  Oligonucleotide for detection of SNP TSC0032545
ttgtgtgtatagt

SEQ ID NO: 130316 - DNA, 13 bp, Artificial Sequence
  Oligonucleotide for detection of SNP TSC0032545
actatacacacaa

SEQ ID NO: 130317 - DNA, 13 bp, Artificial Sequence
  Oligonucleotide for detection of SNP TSC0032546
agttaagaaaata

SEQ ID NO: 130318 - DNA, 13 bp, Artificial Sequence
  Oligonucleotide for detection of SNP TSC0032546
tattttcttaact

SEQ ID NO: 130319 - DNA, 13 bp, Artificial Sequence
  Oligonucleotide for detection of SNP TSC0032546
agttaaaaaaata

SEQ ID NO: 130320 - DNA, 13 bp, Artificial Sequence
  Oligonucleotide for detection of SNP TSC0032546
tatttttttaact

SEQ ID NO: 130321 - DNA, 13 bp, Artificial Sequence
  Oligonucleotide for detection of SNP TSC0032547
tttatgagtatta

SEQ ID NO: 130322 - DNA, 13 bp, Artificial Sequence
  Oligonucleotide for detection of SNP TSC0032547
taatactcataaa

SEQ ID NO: 130323 - DNA, 13 bp, Artificial Sequence
  Oligonucleotide for detection of SNP TSC0032547
tttatgtgtatta

SEQ ID NO: 130324 - DNA, 13 bp, Artificial Sequence
  Oligonucleotide for detection of SNP TSC0032547
taatacacataaa

SEQ ID NO: 130325 - DNA, 13 bp, Artificial Sequence
  Oligonucleotide for detection of SNP TSC0032547
tttatgcgtatta

SEQ ID NO: 130326 - DNA, 13 bp, Artificial Sequence
  Oligonucleotide for detection of SNP TSC0032547
taatacgcataaa

SEQ ID NO: 130327 - DNA, 13 bp, Artificial Sequence
  Oligonucleotide for detection of SNP TSC0032547
tggtatttataaa

SEQ ID NO: 130328 - DNA, 13 bp, Artificial Sequence
  Oligonucleotide for detection of SNP TSC0032547
tttataaatacca

SEQ ID NO: 130329 - DNA, 13 bp, Artificial Sequence
  Oligonucleotide for detection of SNP TSC0032547
tggtatgtataaa

SEQ ID NO: 130330 - DNA, 13 bp, Artificial Sequence
  Oligonucleotide for detection of SNP TSC0032547
tttatacatacca

SEQ ID NO: 130331 - DNA, 13 bp, Artificial Sequence
  Oligonucleotide for detection of SNP TSC0032547
tggtacgtataaa

SEQ ID NO: 130332 - DNA, 13 bp, Artificial Sequence
  Oligonucleotide for detection of SNP TSC0032547
tttatacgtacca

SEQ ID NO: 130333 - DNA, 13 bp, Artificial Sequence
  Oligonucleotide for detection of SNP TSC0032548
ttatttgttatat

SEQ ID NO: 130334 - DNA, 13 bp, Artificial Sequence
  Oligonucleotide for detection of SNP TSC0032548
atataacaaataa

SEQ ID NO: 130335 - DNA, 13 bp, Artificial Sequence
  Oligonucleotide for detection of SNP TSC0032549
gtggtttgattta

SEQ ID NO: 130336 - DNA, 13 bp, Artificial Sequence
  Oligonucleotide for detection of SNP TSC0032549
taaatcaaaccac

SEQ ID NO: 130337 - DNA, 13 bp, Artificial Sequence
  Oligonucleotide for detection of SNP TSC0032549
gtggttcgattta

SEQ ID NO: 130338 - DNA, 13 bp, Artificial Sequence
  Oligonucleotide for detection of SNP TSC0032549
taaatcgaaccac

SEQ ID NO: 130339 - DNA, 13 bp, Artificial Sequence
  Oligonucleotide for detection of SNP TSC0032549
taggttgagttay

SEQ ID NO: 130340 - DNA, 13 bp, Artificial Sequence
  Oligonucleotide for detection of SNP TSC0032549
rtaactcaaccta

SEQ ID NO: 130341 - DNA, 13 bp, Artificial Sequence
  Oligonucleotide for detection of SNP TSC0032549
taggttaagttay

SEQ ID NO: 130342 - DNA, 13 bp, Artificial Sequence
  Oligonucleotide for detection of SNP TSC0032549
rtaacttaaccta

SEQ ID NO: 130343 - DNA, 13 bp, Artificial Sequence
  Oligonucleotide for detection of SNP TSC0032549
taggtcgagttay

SEQ ID NO: 130344 - DNA, 13 bp, Artificial Sequence
  Oligonucleotide for detection of SNP TSC0032549
rtaactcgaccta

SEQ ID NO: 130345 - DNA, 13 bp, Artificial Sequence
  Oligonucleotide for detection of SNP TSC0032550
agggggaaatata

SEQ ID NO: 130346 - DNA, 13 bp, Artificial Sequence
  Oligonucleotide for detection of SNP TSC0032550
tatatttccccct

SEQ ID NO: 130347 - DNA, 13 bp, Artificial Sequence
  Oligonucleotide for detection of SNP TSC0032550
aggggggaatata

SEQ ID NO: 130348 - DNA, 13 bp, Artificial Sequence
  Oligonucleotide for detection of SNP TSC0032550
tatattcccccct

SEQ ID NO: 130349 - DNA, 13 bp, Artificial Sequence
  Oligonucleotide for detection of SNP TSC0032551
ggagaagagtgty

SEQ ID NO: 130350 - DNA, 13 bp, Artificial Sequence
  Oligonucleotide for detection of SNP TSC0032551
racactcttctcc

SEQ ID NO: 130351 - DNA, 13 bp, Artificial Sequence
  Oligonucleotide for detection of SNP TSC0032551
ggagaaaagtgty

SEQ ID NO: 130352 - DNA, 13 bp, Artificial Sequence
  Oligonucleotide for detection of SNP TSC0032551
racacttttctcc

SEQ ID NO: 130353 - DNA, 13 bp, Artificial Sequence
  Oligonucleotide for detection of SNP TSC0032553
gaatggaagatay

SEQ ID NO: 130354 - DNA, 13 bp, Artificial Sequence
  Oligonucleotide for detection of SNP TSC0032553
rtatcttccattc

SEQ ID NO: 130355 - DNA, 13 bp, Artificial Sequence
  Oligonucleotide for detection of SNP TSC0032553
gaatgggagatay

SEQ ID NO: 130356 - DNA, 13 bp, Artificial Sequence
  Oligonucleotide for detection of SNP TSC0032553
rtatctcccattc

SEQ ID NO: 130357 - DNA, 13 bp, Artificial Sequence
  Oligonucleotide for detection of SNP TSC0032554
ttaatgagttaty

SEQ ID NO: 130358 - DNA, 13 bp, Artificial Sequence
  Oligonucleotide for detection of SNP TSC0032554
rataactcattaa

SEQ ID NO: 130359 - DNA, 13 bp, Artificial Sequence
  Oligonucleotide for detection of SNP TSC0032554
ttaatgggttaty

SEQ ID NO: 130360 - DNA, 13 bp, Artificial Sequence
  Oligonucleotide for detection of SNP TSC0032554
rataacccattaa

SEQ ID NO: 130361 - DNA, 13 bp, Artificial Sequence
  Oligonucleotide for detection of SNP TSC0032555
aattgggataatt

SEQ ID NO: 130362 - DNA, 13 bp, Artificial Sequence
  Oligonucleotide for detection of SNP TSC0032555
aattatcccaatt

SEQ ID NO: 130363 - DNA, 13 bp, Artificial Sequence
  Oligonucleotide for detection of SNP TSC0032555
aattggaataatt

SEQ ID NO: 130364 - DNA, 13 bp, Artificial Sequence
  Oligonucleotide for detection of SNP TSC0032555
aattattccaatt

SEQ ID NO: 130365 - DNA, 13 bp, Artificial Sequence
  Oligonucleotide for detection of SNP TSC0032556
tttggaatttttg

SEQ ID NO: 130366 - DNA, 13 bp, Artificial Sequence
  Oligonucleotide for detection of SNP TSC0032556
caaaaattccaaa

SEQ ID NO: 130367 - DNA, 13 bp, Artificial Sequence
  Oligonucleotide for detection of SNP TSC0032556
tttggattttttg

SEQ ID NO: 130368 - DNA, 13 bp, Artificial Sequence
  Oligonucleotide for detection of SNP TSC0032556
caaaaaatccaaa

SEQ ID NO: 130369 - DNA, 13 bp, Artificial Sequence
  Oligonucleotide for detection of SNP TSC0032556
tagagattttaaa

SEQ ID NO: 130370 - DNA, 13 bp, Artificial Sequence
  Oligonucleotide for detection of SNP TSC0032556
tttaaaatctcta

SEQ ID NO: 130371 - DNA, 13 bp, Artificial Sequence
  Oligonucleotide for detection of SNP TSC0032556
tagagaatttaaa

SEQ ID NO: 130372 - DNA, 13 bp, Artificial Sequence
  Oligonucleotide for detection of SNP TSC0032556
tttaaattctcta

SEQ ID NO: 130373 - DNA, 13 bp, Artificial Sequence
  Oligonucleotide for detection of SNP TSC0032557
atttttatttttg

SEQ ID NO: 130374 - DNA, 13 bp, Artificial Sequence
  Oligonucleotide for detection of SNP TSC0032557
caaaaataaaaat

SEQ ID NO: 130375 - DNA, 13 bp, Artificial Sequence
  Oligonucleotide for detection of SNP TSC0032559
gtgtatttttata

SEQ ID NO: 130376 - DNA, 13 bp, Artificial Sequence
  Oligonucleotide for detection of SNP TSC0032559
tataaaaatacac

SEQ ID NO: 130377 - DNA, 13 bp, Artificial Sequence
  Oligonucleotide for detection of SNP TSC0032559
gtgtatgtttata

SEQ ID NO: 130378 - DNA, 13 bp, Artificial Sequence
  Oligonucleotide for detection of SNP TSC0032559
tataaacatacac

SEQ ID NO: 130379 - DNA, 13 bp, Artificial Sequence
  Oligonucleotide for detection of SNP TSC0032559
gtgtacgtttata

SEQ ID NO: 130380 - DNA, 13 bp, Artificial Sequence
  Oligonucleotide for detection of SNP TSC0032559
tataaacgtacac

SEQ ID NO: 130381 - DNA, 13 bp, Artificial Sequence
  Oligonucleotide for detection of SNP TSC0032559
tatgagggtgtay

SEQ ID NO: 130382 - DNA, 13 bp, Artificial Sequence
  Oligonucleotide for detection of SNP TSC0032559
rtacaccctcata

SEQ ID NO: 130383 - DNA, 13 bp, Artificial Sequence
  Oligonucleotide for detection of SNP TSC0032559
tatgagtgtgtay

SEQ ID NO: 130384 - DNA, 13 bp, Artificial Sequence
  Oligonucleotide for detection of SNP TSC0032559
rtacacactcata

SEQ ID NO: 130385 - DNA, 13 bp, Artificial Sequence
  Oligonucleotide for detection of SNP TSC0032559
tatgagcgtgtay

SEQ ID NO: 130386 - DNA, 13 bp, Artificial Sequence
  Oligonucleotide for detection of SNP TSC0032559
rtacacgctcata

SEQ ID NO: 130387 - DNA, 13 bp, Artificial Sequence
  Oligonucleotide for detection of SNP TSC0032563
ttattgaagggat

SEQ ID NO: 130388 - DNA, 13 bp, Artificial Sequence
  Oligonucleotide for detection of SNP TSC0032563
atcccttcaataa

SEQ ID NO: 130389 - DNA, 13 bp, Artificial Sequence
  Oligonucleotide for detection of SNP TSC0032563
ttattgtagggat

SEQ ID NO: 130390 - DNA, 13 bp, Artificial Sequence
  Oligonucleotide for detection of SNP TSC0032563
atccctacaataa

SEQ ID NO: 130391 - DNA, 13 bp, Artificial Sequence
  Oligonucleotide for detection of SNP TSC0032563
atttttttaataa

SEQ ID NO: 130392 - DNA, 13 bp, Artificial Sequence
  Oligonucleotide for detection of SNP TSC0032563
ttattaaaaaaat

SEQ ID NO: 130393 - DNA, 13 bp, Artificial Sequence
  Oligonucleotide for detection of SNP TSC0032564
agatttatttgta

SEQ ID NO: 130394 - DNA, 13 bp, Artificial Sequence
  Oligonucleotide for detection of SNP TSC0032564
tacaaataaatct

SEQ ID NO: 130395 - DNA, 13 bp, Artificial Sequence
  Oligonucleotide for detection of SNP TSC0032564
agatttgtttgta

SEQ ID NO: 130396 - DNA, 13 bp, Artificial Sequence
  Oligonucleotide for detection of SNP TSC0032564
tacaaacaaatct

SEQ ID NO: 130397 - DNA, 13 bp, Artificial Sequence
  Oligonucleotide for detection of SNP TSC0032564
agattcgtttgta

SEQ ID NO: 130398 - DNA, 13 bp, Artificial Sequence
  Oligonucleotide for detection of SNP TSC0032564
tacaaacgaatct

SEQ ID NO: 130399 - DNA, 13 bp, Artificial Sequence
  Oligonucleotide for detection of SNP TSC0032564
tgtaagtggattt

SEQ ID NO: 130400 - DNA, 13 bp, Artificial Sequence
  Oligonucleotide for detection of SNP TSC0032564
aaatccacttaca

SEQ ID NO: 130401 - DNA, 13 bp, Artificial Sequence
  Oligonucleotide for detection of SNP TSC0032564
tgtaagcggattt

SEQ ID NO: 130402 - DNA, 13 bp, Artificial Sequence
  Oligonucleotide for detection of SNP TSC0032564
aaatccgcttaca

SEQ ID NO: 130403 - DNA, 13 bp, Artificial Sequence
  Oligonucleotide for detection of SNP TSC0032568
agagatattaagy

SEQ ID NO: 130404 - DNA, 13 bp, Artificial Sequence
  Oligonucleotide for detection of SNP TSC0032568
rcttaatatctct

SEQ ID NO: 130405 - DNA, 13 bp, Artificial Sequence
  Oligonucleotide for detection of SNP TSC0032568
agagattttaagy

SEQ ID NO: 130406 - DNA, 13 bp, Artificial Sequence
  Oligonucleotide for detection of SNP TSC0032568
rcttaaaatctct

SEQ ID NO: 130407 - DNA, 13 bp, Artificial Sequence
  Oligonucleotide for detection of SNP TSC0032568
gtttggagttttt

SEQ ID NO: 130408 - DNA, 13 bp, Artificial Sequence
  Oligonucleotide for detection of SNP TSC0032568
aaaaactccaaac

SEQ ID NO: 130409 - DNA, 13 bp, Artificial Sequence
  Oligonucleotide for detection of SNP TSC0032569
agggaatgtttga

SEQ ID NO: 130410 - DNA, 13 bp, Artificial Sequence
  Oligonucleotide for detection of SNP TSC0032569
tcaaacattccct

SEQ ID NO: 130411 - DNA, 13 bp, Artificial Sequence
  Oligonucleotide for detection of SNP TSC0032569
agggaacgtttga

SEQ ID NO: 130412 - DNA, 13 bp, Artificial Sequence
  Oligonucleotide for detection of SNP TSC0032569
tcaaacgttccct

SEQ ID NO: 130413 - DNA, 13 bp, Artificial Sequence
  Oligonucleotide for detection of SNP TSC0032570
tgagttgttgttt

SEQ ID NO: 130414 - DNA, 13 bp, Artificial Sequence
  Oligonucleotide for detection of SNP TSC0032570
aaacaacaactca

SEQ ID NO: 130415 - DNA, 13 bp, Artificial Sequence
  Oligonucleotide for detection of SNP TSC0032570
tgagtttttgttt

SEQ ID NO: 130416 - DNA, 13 bp, Artificial Sequence
  Oligonucleotide for detection of SNP TSC0032570
aaacaaaaactca

SEQ ID NO: 130417 - DNA, 13 bp, Artificial Sequence
  Oligonucleotide for detection of SNP TSC0032570
tgagtcgttgttt

SEQ ID NO: 130418 - DNA, 13 bp, Artificial Sequence
  Oligonucleotide for detection of SNP TSC0032570
aaacaacgactca

SEQ ID NO: 130419 - DNA, 13 bp, Artificial Sequence
  Oligonucleotide for detection of SNP TSC0032570
aggtaatgattta

SEQ ID NO: 130420 - DNA, 13 bp, Artificial Sequence
  Oligonucleotide for detection of SNP TSC0032570
taaatcattacct

SEQ ID NO: 130421 - DNA, 13 bp, Artificial Sequence
  Oligonucleotide for detection of SNP TSC0032570
aggtaaagattta

SEQ ID NO: 130422 - DNA, 13 bp, Artificial Sequence
  Oligonucleotide for detection of SNP TSC0032570
taaatctttacct

SEQ ID NO: 130423 - DNA, 13 bp, Artificial Sequence
  Oligonucleotide for detection of SNP TSC0032570
aggtaacgattta

SEQ ID NO: 130424 - DNA, 13 bp, Artificial Sequence
  Oligonucleotide for detection of SNP TSC0032570
taaatcgttacct

SEQ ID NO: 130425 - DNA, 13 bp, Artificial Sequence
  Oligonucleotide for detection of SNP TSC0032571
gggaggagtagtt

SEQ ID NO: 130426 - DNA, 13 bp, Artificial Sequence
  Oligonucleotide for detection of SNP TSC0032571
aactactcctccc

SEQ ID NO: 130427 - DNA, 13 bp, Artificial Sequence
  Oligonucleotide for detection of SNP TSC0032571
gggaggggtagtt

SEQ ID NO: 130428 - DNA, 13 bp, Artificial Sequence
  Oligonucleotide for detection of SNP TSC0032571
aactacccctccc

SEQ ID NO: 130429 - DNA, 13 bp, Artificial Sequence
  Oligonucleotide for detection of SNP TSC0032572
gtaataaaaagag

SEQ ID NO: 130430 - DNA, 13 bp, Artificial Sequence
  Oligonucleotide for detection of SNP TSC0032572
ctctttttattac

SEQ ID NO: 130431 - DNA, 13 bp, Artificial Sequence
  Oligonucleotide for detection of SNP TSC0032572
gtaatataaagag

SEQ ID NO: 130432 - DNA, 13 bp, Artificial Sequence
  Oligonucleotide for detection of SNP TSC0032572
ctctttatattac

SEQ ID NO: 130433 - DNA, 13 bp, Artificial Sequence
  Oligonucleotide for detection of SNP TSC0032572
ttttttttgttay

SEQ ID NO: 130434 - DNA, 13 bp, Artificial Sequence
  Oligonucleotide for detection of SNP TSC0032572
rtaacaaaaaaaa

SEQ ID NO: 130435 - DNA, 13 bp, Artificial Sequence
  Oligonucleotide for detection of SNP TSC0032576
aaataaaaaaata

SEQ ID NO: 130436 - DNA, 13 bp, Artificial Sequence
  Oligonucleotide for detection of SNP TSC0032576
tatttttttattt

SEQ ID NO: 130437 - DNA, 13 bp, Artificial Sequence
  Oligonucleotide for detection of SNP TSC0032576
aaataataaaata

SEQ ID NO: 130438 - DNA, 13 bp, Artificial Sequence
  Oligonucleotide for detection of SNP TSC0032576
tattttattattt

SEQ ID NO: 130439 - DNA, 13 bp, Artificial Sequence
  Oligonucleotide for detection of SNP TSC0032578
ttatagggattta

SEQ ID NO: 130440 - DNA, 13 bp, Artificial Sequence
  Oligonucleotide for detection of SNP TSC0032578
taaatccctataa

SEQ ID NO: 130441 - DNA, 13 bp, Artificial Sequence
  Oligonucleotide for detection of SNP TSC0032578
taagtttttgtga

SEQ ID NO: 130442 - DNA, 13 bp, Artificial Sequence
  Oligonucleotide for detection of SNP TSC0032578
tcacaaaaactta

SEQ ID NO: 130443 - DNA, 13 bp, Artificial Sequence
  Oligonucleotide for detection of SNP TSC0032578
taagttattgtga

SEQ ID NO: 130444 - DNA, 13 bp, Artificial Sequence
  Oligonucleotide for detection of SNP TSC0032578
tcacaataactta

SEQ ID NO: 130445 - DNA, 13 bp, Artificial Sequence
  Oligonucleotide for detection of SNP TSC0032581
tggataatttaga

SEQ ID NO: 130446 - DNA, 13 bp, Artificial Sequence
  Oligonucleotide for detection of SNP TSC0032581
tctaaattatcca

SEQ ID NO: 130447 - DNA, 13 bp, Artificial Sequence
  Oligonucleotide for detection of SNP TSC0032581
tggatattttaga

SEQ ID NO: 130448 - DNA, 13 bp, Artificial Sequence
  Oligonucleotide for detection of SNP TSC0032581
tctaaaatatcca

SEQ ID NO: 130449 - DNA, 13 bp, Artificial Sequence
  Oligonucleotide for detection of SNP TSC0032581
tttaaattattta

SEQ ID NO: 130450 - DNA, 13 bp, Artificial Sequence
  Oligonucleotide for detection of SNP TSC0032581
taaataatttaaa

SEQ ID NO: 130451 - DNA, 13 bp, Artificial Sequence
  Oligonucleotide for detection of SNP TSC0032581
tttaaagtattta

SEQ ID NO: 130452 - DNA, 13 bp, Artificial Sequence
  Oligonucleotide for detection of SNP TSC0032581
taaatactttaaa

SEQ ID NO: 130453 - DNA, 13 bp, Artificial Sequence
  Oligonucleotide for detection of SNP TSC0032582
tatgtaaaatgag

SEQ ID NO: 130454 - DNA, 13 bp, Artificial Sequence
  Oligonucleotide for detection of SNP TSC0032582
ctcattttacata

SEQ ID NO: 130455 - DNA, 13 bp, Artificial Sequence
  Oligonucleotide for detection of SNP TSC0032582
tatgtataatgag

SEQ ID NO: 130456 - DNA, 13 bp, Artificial Sequence
  Oligonucleotide for detection of SNP TSC0032582
ctcattatacata

SEQ ID NO: 130457 - DNA, 13 bp, Artificial Sequence
  Oligonucleotide for detection of SNP TSC0032582
tttattttatata

SEQ ID NO: 130458 - DNA, 13 bp, Artificial Sequence
  Oligonucleotide for detection of SNP TSC0032582
tatataaaataaa

SEQ ID NO: 130459 - DNA, 13 bp, Artificial Sequence
  Oligonucleotide for detection of SNP TSC0032585
ttttagtgtatgg

SEQ ID NO: 130460 - DNA, 13 bp, Artificial Sequence
  Oligonucleotide for detection of SNP TSC0032585
ccatacactaaaa

SEQ ID NO: 130461 - DNA, 13 bp, Artificial Sequence
  Oligonucleotide for detection of SNP TSC0032585
ttttagcgtatgg

SEQ ID NO: 130462 - DNA, 13 bp, Artificial Sequence
  Oligonucleotide for detection of SNP TSC0032585
ccatacgctaaaa

SEQ ID NO: 130463 - DNA, 13 bp, Artificial Sequence
  Oligonucleotide for detection of SNP TSC0032585
ttatgtgttgaaa

SEQ ID NO: 130464 - DNA, 13 bp, Artificial Sequence
  Oligonucleotide for detection of SNP TSC0032585
tttcaacacataa

SEQ ID NO: 130465 - DNA, 13 bp, Artificial Sequence
  Oligonucleotide for detection of SNP TSC0032585
ttatgtattgaaa

SEQ ID NO: 130466 - DNA, 13 bp, Artificial Sequence
  Oligonucleotide for detection of SNP TSC0032585
tttcaatacataa

SEQ ID NO: 130467 - DNA, 13 bp, Artificial Sequence
  Oligonucleotide for detection of SNP TSC0032585
ttatgcgttgaaa

SEQ ID NO: 130468 - DNA, 13 bp, Artificial Sequence
  Oligonucleotide for detection of SNP TSC0032585
tttcaacgcataa

SEQ ID NO: 130469 - DNA, 13 bp, Artificial Sequence
  Oligonucleotide for detection of SNP TSC0032586
gtagtgattttta

SEQ ID NO: 130470 - DNA, 13 bp, Artificial Sequence
  Oligonucleotide for detection of SNP TSC0032586
taaaaatcactac

SEQ ID NO: 130471 - DNA, 13 bp, Artificial Sequence
  Oligonucleotide for detection of SNP TSC0032586
gtagtgtttttta

SEQ ID NO: 130472 - DNA, 13 bp, Artificial Sequence
  Oligonucleotide for detection of SNP TSC0032586
taaaaaacactac

SEQ ID NO: 130473 - DNA, 13 bp, Artificial Sequence
  Oligonucleotide for detection of SNP TSC0032586
tgggagttattgy

SEQ ID NO: 130474 - DNA, 13 bp, Artificial Sequence
  Oligonucleotide for detection of SNP TSC0032586
rcaataactccca

SEQ ID NO: 130475 - DNA, 13 bp, Artificial Sequence
  Oligonucleotide for detection of SNP TSC0032586
tgggaggtattgy

SEQ ID NO: 130476 - DNA, 13 bp, Artificial Sequence
  Oligonucleotide for detection of SNP TSC0032586
rcaatacctccca

SEQ ID NO: 130477 - DNA, 13 bp, Artificial Sequence
  Oligonucleotide for detection of SNP TSC0032588
ttaattatatgtt

SEQ ID NO: 130478 - DNA, 13 bp, Artificial Sequence
  Oligonucleotide for detection of SNP TSC0032588
aacatataattaa

SEQ ID NO: 130479 - DNA, 13 bp, Artificial Sequence
  Oligonucleotide for detection of SNP TSC0032588
ttaattgtatgtt

SEQ ID NO: 130480 - DNA, 13 bp, Artificial Sequence
  Oligonucleotide for detection of SNP TSC0032588
aacatacaattaa

SEQ ID NO: 130481 - DNA, 13 bp, Artificial Sequence
  Oligonucleotide for detection of SNP TSC0032588
ttaatcgtatgtt

SEQ ID NO: 130482 - DNA, 13 bp, Artificial Sequence
  Oligonucleotide for detection of SNP TSC0032588
aacatacgattaa

SEQ ID NO: 130483 - DNA, 13 bp, Artificial Sequence
  Oligonucleotide for detection of SNP TSC0032588
aatatgtggttga

SEQ ID NO: 130484 - DNA, 13 bp, Artificial Sequence
  Oligonucleotide for detection of SNP TSC0032588
tcaaccacatatt

SEQ ID NO: 130485 - DNA, 13 bp, Artificial Sequence
  Oligonucleotide for detection of SNP TSC0032588
aatatgcggttga

SEQ ID NO: 130486 - DNA, 13 bp, Artificial Sequence
  Oligonucleotide for detection of SNP TSC0032588
tcaaccgcatatt

SEQ ID NO: 130487 - DNA, 13 bp, Artificial Sequence
  Oligonucleotide for detection of SNP TSC0032589
aaggttataatgt

SEQ ID NO: 130488 - DNA, 13 bp, Artificial Sequence
  Oligonucleotide for detection of SNP TSC0032589
acattataacctt

SEQ ID NO: 130489 - DNA, 13 bp, Artificial Sequence
  Oligonucleotide for detection of SNP TSC0032589
aaggttgtaatgt

SEQ ID NO: 130490 - DNA, 13 bp, Artificial Sequence
  Oligonucleotide for detection of SNP TSC0032589
acattacaacctt

SEQ ID NO: 130491 - DNA, 13 bp, Artificial Sequence
  Oligonucleotide for detection of SNP TSC0032595
aaatataatatat

SEQ ID NO: 130492 - DNA, 13 bp, Artificial Sequence
  Oligonucleotide for detection of SNP TSC0032595
atatattatattt

SEQ ID NO: 130493 - DNA, 13 bp, Artificial Sequence
  Oligonucleotide for detection of SNP TSC0032595
aaatatgatatat

SEQ ID NO: 130494 - DNA, 13 bp, Artificial Sequence
  Oligonucleotide for detection of SNP TSC0032595
atatatcatattt

SEQ ID NO: 130495 - DNA, 13 bp, Artificial Sequence
  Oligonucleotide for detection of SNP TSC0032597
ttagggtaggttg

SEQ ID NO: 130496 - DNA, 13 bp, Artificial Sequence
  Oligonucleotide for detection of SNP TSC0032597
caacctaccctaa

SEQ ID NO: 130497 - DNA, 13 bp, Artificial Sequence
  Oligonucleotide for detection of SNP TSC0032597
ttaggggaggttg

SEQ ID NO: 130498 - DNA, 13 bp, Artificial Sequence
  Oligonucleotide for detection of SNP TSC0032597
caacctcccctaa

SEQ ID NO: 130499 - DNA, 13 bp, Artificial Sequence
  Oligonucleotide for detection of SNP TSC0032597
tagtttgttttgg

SEQ ID NO: 130500 - DNA, 13 bp, Artificial Sequence
  Oligonucleotide for detection of SNP TSC0032597
ccaaaacaaacta

SEQ ID NO: 130501 - DNA, 13 bp, Artificial Sequence
  Oligonucleotide for detection of SNP TSC0032597
tagttttttttgg

SEQ ID NO: 130502 - DNA, 13 bp, Artificial Sequence
  Oligonucleotide for detection of SNP TSC0032597
ccaaaaaaaacta

SEQ ID NO: 130503 - DNA, 13 bp, Artificial Sequence
  Oligonucleotide for detection of SNP TSC0032598
ttgttttgataty

SEQ ID NO: 130504 - DNA, 13 bp, Artificial Sequence
  Oligonucleotide for detection of SNP TSC0032598
ratatcaaaacaa

SEQ ID NO: 130505 - DNA, 13 bp, Artificial Sequence
  Oligonucleotide for detection of SNP TSC0032598
ttgtttcgataty

SEQ ID NO: 130506 - DNA, 13 bp, Artificial Sequence
  Oligonucleotide for detection of SNP TSC0032598
ratatcgaaacaa

SEQ ID NO: 130507 - DNA, 13 bp, Artificial Sequence
  Oligonucleotide for detection of SNP TSC0032598
gatgttggggtag

SEQ ID NO: 130508 - DNA, 13 bp, Artificial Sequence
  Oligonucleotide for detection of SNP TSC0032598
ctaccccaacatc

SEQ ID NO: 130509 - DNA, 13 bp, Artificial Sequence
  Oligonucleotide for detection of SNP TSC0032598
gatgttagggtag

SEQ ID NO: 130510 - DNA, 13 bp, Artificial Sequence
  Oligonucleotide for detection of SNP TSC0032598
ctaccctaacatc

SEQ ID NO: 130511 - DNA, 13 bp, Artificial Sequence
  Oligonucleotide for detection of SNP TSC0032598
gatgtcggggtag

SEQ ID NO: 130512 - DNA, 13 bp, Artificial Sequence
  Oligonucleotide for detection of SNP TSC0032598
ctaccccgacatc

SEQ ID NO: 130513 - DNA, 13 bp, Artificial Sequence
  Oligonucleotide for detection of SNP TSC0032599
agggagaagaagg

SEQ ID NO: 130514 - DNA, 13 bp, Artificial Sequence
  Oligonucleotide for detection of SNP TSC0032599
ccttcttctccct

SEQ ID NO: 130515 - DNA, 13 bp, Artificial Sequence
  Oligonucleotide for detection of SNP TSC0032599
agggaggagaagg

SEQ ID NO: 130516 - DNA, 13 bp, Artificial Sequence
  Oligonucleotide for detection of SNP TSC0032599
ccttctcctccct

SEQ ID NO: 130517 - DNA, 13 bp, Artificial Sequence
  Oligonucleotide for detection of SNP TSC0032600
agtattattatgg

SEQ ID NO: 130518 - DNA, 13 bp, Artificial Sequence
  Oligonucleotide for detection of SNP TSC0032600
ccataataatact

SEQ ID NO: 130519 - DNA, 13 bp, Artificial Sequence
  Oligonucleotide for detection of SNP TSC0032600
agtattgttatgg

SEQ ID NO: 130520 - DNA, 13 bp, Artificial Sequence
  Oligonucleotide for detection of SNP TSC0032600
ccataacaatact

SEQ ID NO: 130521 - DNA, 13 bp, Artificial Sequence
  Oligonucleotide for detection of SNP TSC0032600
agtattattacgg

SEQ ID NO: 130522 - DNA, 13 bp, Artificial Sequence
  Oligonucleotide for detection of SNP TSC0032600
ccgtaataatact

SEQ ID NO: 130523 - DNA, 13 bp, Artificial Sequence
  Oligonucleotide for detection of SNP TSC0032600
agtatcgttatgg

SEQ ID NO: 130524 - DNA, 13 bp, Artificial Sequence
  Oligonucleotide for detection of SNP TSC0032600
ccataacgatact

SEQ ID NO: 130525 - DNA, 13 bp, Artificial Sequence
  Oligonucleotide for detection of SNP TSC0032600
agtattgttacgg

SEQ ID NO: 130526 - DNA, 13 bp, Artificial Sequence
  Oligonucleotide for detection of SNP TSC0032600
ccgtaacaatact

SEQ ID NO: 130527 - DNA, 13 bp, Artificial Sequence
  Oligonucleotide for detection of SNP TSC0032600
agtatcgttacgg

SEQ ID NO: 130528 - DNA, 13 bp, Artificial Sequence
  Oligonucleotide for detection of SNP TSC0032600
ccgtaacgatact

SEQ ID NO: 130529 - DNA, 13 bp, Artificial Sequence
  Oligonucleotide for detection of SNP TSC0032600
ttgtgatggtgtt

SEQ ID NO: 130530 - DNA, 13 bp, Artificial Sequence
  Oligonucleotide for detection of SNP TSC0032600
aacaccatcacaa

SEQ ID NO: 130531 - DNA, 13 bp, Artificial Sequence
  Oligonucleotide for detection of SNP TSC0032600
tcgtgatggtgtt

SEQ ID NO: 130532 - DNA, 13 bp, Artificial Sequence
  Oligonucleotide for detection of SNP TSC0032600
aacaccatcacga

SEQ ID NO: 130533 - DNA, 13 bp, Artificial Sequence
  Oligonucleotide for detection of SNP TSC0032600
ttgtgacggtgtt

SEQ ID NO: 130534 - DNA, 13 bp, Artificial Sequence
  Oligonucleotide for detection of SNP TSC0032600
aacaccgtcacaa

SEQ ID NO: 130535 - DNA, 13 bp, Artificial Sequence
  Oligonucleotide for detection of SNP TSC0032600
tcgtgacggtgtt

SEQ ID NO: 130536 - DNA, 13 bp, Artificial Sequence
  Oligonucleotide for detection of SNP TSC0032600
aacaccgtcacga

SEQ ID NO: 130537 - DNA, 13 bp, Artificial Sequence
  Oligonucleotide for detection of SNP TSC0032603
aggtgataaatgy

SEQ ID NO: 130538 - DNA, 13 bp, Artificial Sequence
  Oligonucleotide for detection of SNP TSC0032603
rcatttatcacct

SEQ ID NO: 130539 - DNA, 13 bp, Artificial Sequence
  Oligonucleotide for detection of SNP TSC0032603
aggtgaaaaatgy

SEQ ID NO: 130540 - DNA, 13 bp, Artificial Sequence
  Oligonucleotide for detection of SNP TSC0032603
rcatttttcacct

SEQ ID NO: 130541 - DNA, 13 bp, Artificial Sequence
  Oligonucleotide for detection of SNP TSC0032607
ttattgaaagagy

SEQ ID NO: 130542 - DNA, 13 bp, Artificial Sequence
  Oligonucleotide for detection of SNP TSC0032607
rctctttcaataa

SEQ ID NO: 130543 - DNA, 13 bp, Artificial Sequence
  Oligonucleotide for detection of SNP TSC0032607
ttattgtaagagy

SEQ ID NO: 130544 - DNA, 13 bp, Artificial Sequence
  Oligonucleotide for detection of SNP TSC0032607
rctcttacaataa

SEQ ID NO: 130545 - DNA, 13 bp, Artificial Sequence
  Oligonucleotide for detection of SNP TSC0032607
gtttttttagtaa

SEQ ID NO: 130546 - DNA, 13 bp, Artificial Sequence
  Oligonucleotide for detection of SNP TSC0032607
ttactaaaaaaac

SEQ ID NO: 130547 - DNA, 13 bp, Artificial Sequence
  Oligonucleotide for detection of SNP TSC0032608
tgaaagagtatat

SEQ ID NO: 130548 - DNA, 13 bp, Artificial Sequence
  Oligonucleotide for detection of SNP TSC0032608
atatactctttca

SEQ ID NO: 130549 - DNA, 13 bp, Artificial Sequence
  Oligonucleotide for detection of SNP TSC0032608
tgaaagtgtatat

SEQ ID NO: 130550 - DNA, 13 bp, Artificial Sequence
  Oligonucleotide for detection of SNP TSC0032608
atatacactttca

SEQ ID NO: 130551 - DNA, 13 bp, Artificial Sequence
  Oligonucleotide for detection of SNP TSC0032608
tgaaagcgtatat

SEQ ID NO: 130552 - DNA, 13 bp, Artificial Sequence
  Oligonucleotide for detection of SNP TSC0032608
atatacgctttca

SEQ ID NO: 130553 - DNA, 13 bp, Artificial Sequence
  Oligonucleotide for detection of SNP TSC0032608
atgtgttttttta

SEQ ID NO: 130554 - DNA, 13 bp, Artificial Sequence
  Oligonucleotide for detection of SNP TSC0032608
taaaaaaacacat

SEQ ID NO: 130555 - DNA, 13 bp, Artificial Sequence
  Oligonucleotide for detection of SNP TSC0032608
atgtgtgttttta

SEQ ID NO: 130556 - DNA, 13 bp, Artificial Sequence
  Oligonucleotide for detection of SNP TSC0032608
taaaaacacacat

SEQ ID NO: 130557 - DNA, 13 bp, Artificial Sequence
  Oligonucleotide for detection of SNP TSC0032608
atgtgcgttttta

SEQ ID NO: 130558 - DNA, 13 bp, Artificial Sequence
  Oligonucleotide for detection of SNP TSC0032608
taaaaacgcacat

SEQ ID NO: 130559 - DNA, 13 bp, Artificial Sequence
  Oligonucleotide for detection of SNP TSC0032609
agtatatgaggtt

SEQ ID NO: 130560 - DNA, 13 bp, Artificial Sequence
  Oligonucleotide for detection of SNP TSC0032609
aacctcatatact

SEQ ID NO: 130561 - DNA, 13 bp, Artificial Sequence
  Oligonucleotide for detection of SNP TSC0032609
agtatacgaggtt

SEQ ID NO: 130562 - DNA, 13 bp, Artificial Sequence
  Oligonucleotide for detection of SNP TSC0032609
aacctcgtatact

SEQ ID NO: 130563 - DNA, 13 bp, Artificial Sequence
  Oligonucleotide for detection of SNP TSC0032609
agttttgtgtgtt

SEQ ID NO: 130564 - DNA, 13 bp, Artificial Sequence
  Oligonucleotide for detection of SNP TSC0032609
aacacacaaaact

SEQ ID NO: 130565 - DNA, 13 bp, Artificial Sequence
  Oligonucleotide for detection of SNP TSC0032609
agttttatgtgtt

SEQ ID NO: 130566 - DNA, 13 bp, Artificial Sequence
  Oligonucleotide for detection of SNP TSC0032609
aacacataaaact

SEQ ID NO: 130567 - DNA, 13 bp, Artificial Sequence
  Oligonucleotide for detection of SNP TSC0032609
agtttcgtgtgtt

SEQ ID NO: 130568 - DNA, 13 bp, Artificial Sequence
  Oligonucleotide for detection of SNP TSC0032609
aacacacgaaact

SEQ ID NO: 130569 - DNA, 13 bp, Artificial Sequence
  Oligonucleotide for detection of SNP TSC0032610
gtaataatagttt

SEQ ID NO: 130570 - DNA, 13 bp, Artificial Sequence
  Oligonucleotide for detection of SNP TSC0032610
aaactattattac

SEQ ID NO: 130571 - DNA, 13 bp, Artificial Sequence
  Oligonucleotide for detection of SNP TSC0032610
gtaatattagttt

SEQ ID NO: 130572 - DNA, 13 bp, Artificial Sequence
  Oligonucleotide for detection of SNP TSC0032610
aaactaatattac

SEQ ID NO: 130573 - DNA, 13 bp, Artificial Sequence
  Oligonucleotide for detection of SNP TSC0032610
aggttgttattgy

SEQ ID NO: 130574 - DNA, 13 bp, Artificial Sequence
  Oligonucleotide for detection of SNP TSC0032610
rcaataacaacct

SEQ ID NO: 130575 - DNA, 13 bp, Artificial Sequence
  Oligonucleotide for detection of SNP TSC0032610
aggttggtattgy

SEQ ID NO: 130576 - DNA, 13 bp, Artificial Sequence
  Oligonucleotide for detection of SNP TSC0032610
rcaataccaacct

SEQ ID NO: 130577 - DNA, 13 bp, Artificial Sequence
  Oligonucleotide for detection of SNP TSC0032611
tatgagaattatt

SEQ ID NO: 130578 - DNA, 13 bp, Artificial Sequence
  Oligonucleotide for detection of SNP TSC0032611
aataattctcata

SEQ ID NO: 130579 - DNA, 13 bp, Artificial Sequence
  Oligonucleotide for detection of SNP TSC0032611
tatgagtattatt

SEQ ID NO: 130580 - DNA, 13 bp, Artificial Sequence
  Oligonucleotide for detection of SNP TSC0032611
aataatactcata

SEQ ID NO: 130581 - DNA, 13 bp, Artificial Sequence
  Oligonucleotide for detection of SNP TSC0032611
agtgatttttatg

SEQ ID NO: 130582 - DNA, 13 bp, Artificial Sequence
  Oligonucleotide for detection of SNP TSC0032611
cataaaaatcact

SEQ ID NO: 130583 - DNA, 13 bp, Artificial Sequence
  Oligonucleotide for detection of SNP TSC0032611
agtgatatttatg

SEQ ID NO: 130584 - DNA, 13 bp, Artificial Sequence
  Oligonucleotide for detection of SNP TSC0032611
cataaatatcact

SEQ ID NO: 130585 - DNA, 13 bp, Artificial Sequence
  Oligonucleotide for detection of SNP TSC0032614
gatttagtttttt

SEQ ID NO: 130586 - DNA, 13 bp, Artificial Sequence
  Oligonucleotide for detection of SNP TSC0032614
aaaaaactaaatc

SEQ ID NO: 130587 - DNA, 13 bp, Artificial Sequence
  Oligonucleotide for detection of SNP TSC0032615
gaaagtgtgtaay

SEQ ID NO: 130588 - DNA, 13 bp, Artificial Sequence
  Oligonucleotide for detection of SNP TSC0032615
rttacacactttc

SEQ ID NO: 130589 - DNA, 13 bp, Artificial Sequence
  Oligonucleotide for detection of SNP TSC0032615
gaaagtatgtaay

SEQ ID NO: 130590 - DNA, 13 bp, Artificial Sequence
  Oligonucleotide for detection of SNP TSC0032615
rttacatactttc

SEQ ID NO: 130591 - DNA, 13 bp, Artificial Sequence
  Oligonucleotide for detection of SNP TSC0032615
gaaagcgtgtaay

SEQ ID NO: 130592 - DNA, 13 bp, Artificial Sequence
  Oligonucleotide for detection of SNP TSC0032615
rttacacgctttc

SEQ ID NO: 130593 - DNA, 13 bp, Artificial Sequence
  Oligonucleotide for detection of SNP TSC0032616
ataaggtgtatag

SEQ ID NO: 130594 - DNA, 13 bp, Artificial Sequence
  Oligonucleotide for detection of SNP TSC0032616
ctatacaccttat

SEQ ID NO: 130595 - DNA, 13 bp, Artificial Sequence
  Oligonucleotide for detection of SNP TSC0032616
ataaggcgtatag

SEQ ID NO: 130596 - DNA, 13 bp, Artificial Sequence
  Oligonucleotide for detection of SNP TSC0032616
ctatacgccttat

SEQ ID NO: 130597 - DNA, 13 bp, Artificial Sequence
  Oligonucleotide for detection of SNP TSC0032616
ttgtgtgttttat

SEQ ID NO: 130598 - DNA, 13 bp, Artificial Sequence
  Oligonucleotide for detection of SNP TSC0032616
ataaaacacacaa

SEQ ID NO: 130599 - DNA, 13 bp, Artificial Sequence
  Oligonucleotide for detection of SNP TSC0032616
ttgtgtattttat

SEQ ID NO: 130600 - DNA, 13 bp, Artificial Sequence
  Oligonucleotide for detection of SNP TSC0032616
ataaaatacacaa

SEQ ID NO: 130601 - DNA, 13 bp, Artificial Sequence
  Oligonucleotide for detection of SNP TSC0032616
ttgtgcgttttat

SEQ ID NO: 130602 - DNA, 13 bp, Artificial Sequence
  Oligonucleotide for detection of SNP TSC0032616
ataaaacgcacaa

SEQ ID NO: 130603 - DNA, 13 bp, Artificial Sequence
  Oligonucleotide for detection of SNP TSC0032617
gttttagtatgtt

SEQ ID NO: 130604 - DNA, 13 bp, Artificial Sequence
  Oligonucleotide for detection of SNP TSC0032617
aacatactaaaac

SEQ ID NO: 130605 - DNA, 13 bp, Artificial Sequence
  Oligonucleotide for detection of SNP TSC0032619
tttgtagttaaty

SEQ ID NO: 130606 - DNA, 13 bp, Artificial Sequence
  Oligonucleotide for detection of SNP TSC0032619
rattaactacaaa

SEQ ID NO: 130607 - DNA, 13 bp, Artificial Sequence
  Oligonucleotide for detection of SNP TSC0032619
tttgtaattaaty

SEQ ID NO: 130608 - DNA, 13 bp, Artificial Sequence
  Oligonucleotide for detection of SNP TSC0032619
rattaattacaaa

SEQ ID NO: 130609 - DNA, 13 bp, Artificial Sequence
  Oligonucleotide for detection of SNP TSC0032620
gtttgtgtttggy

SEQ ID NO: 130610 - DNA, 13 bp, Artificial Sequence
  Oligonucleotide for detection of SNP TSC0032620
rccaaacacaaac

SEQ ID NO: 130611 - DNA, 13 bp, Artificial Sequence
  Oligonucleotide for detection of SNP TSC0032620
gtttgtttttggy

SEQ ID NO: 130612 - DNA, 13 bp, Artificial Sequence
  Oligonucleotide for detection of SNP TSC0032620
rccaaaaacaaac

SEQ ID NO: 130613 - DNA, 13 bp, Artificial Sequence
  Oligonucleotide for detection of SNP TSC0032620
gtttgcgtttggy

SEQ ID NO: 130614 - DNA, 13 bp, Artificial Sequence
  Oligonucleotide for detection of SNP TSC0032620
rccaaacgcaaac

SEQ ID NO: 130615 - DNA, 13 bp, Artificial Sequence
  Oligonucleotide for detection of SNP TSC0032620
gttaggtgtaagy

SEQ ID NO: 130616 - DNA, 13 bp, Artificial Sequence
  Oligonucleotide for detection of SNP TSC0032620
rcttacacctaac

SEQ ID NO: 130617 - DNA, 13 bp, Artificial Sequence
  Oligonucleotide for detection of SNP TSC0032620
gttaggagtaagy

SEQ ID NO: 130618 - DNA, 13 bp, Artificial Sequence
  Oligonucleotide for detection of SNP TSC0032620
rcttactcctaac

SEQ ID NO: 130619 - DNA, 13 bp, Artificial Sequence
  Oligonucleotide for detection of SNP TSC0032620
gttaggcgtaagy

SEQ ID NO: 130620 - DNA, 13 bp, Artificial Sequence
  Oligonucleotide for detection of SNP TSC0032620
rcttacgcctaac

SEQ ID NO: 130621 - DNA, 13 bp, Artificial Sequence
  Oligonucleotide for detection of SNP TSC0032622
tttgttatgggtt

SEQ ID NO: 130622 - DNA, 13 bp, Artificial Sequence
  Oligonucleotide for detection of SNP TSC0032622
aacccataacaaa

SEQ ID NO: 130623 - DNA, 13 bp, Artificial Sequence
  Oligonucleotide for detection of SNP TSC0032622
tttgttgtgggtt

SEQ ID NO: 130624 - DNA, 13 bp, Artificial Sequence
  Oligonucleotide for detection of SNP TSC0032622
aacccacaacaaa

SEQ ID NO: 130625 - DNA, 13 bp, Artificial Sequence
  Oligonucleotide for detection of SNP TSC0032622
ttcgttatgggtt

SEQ ID NO: 130626 - DNA, 13 bp, Artificial Sequence
  Oligonucleotide for detection of SNP TSC0032622
aacccataacgaa

SEQ ID NO: 130627 - DNA, 13 bp, Artificial Sequence
  Oligonucleotide for detection of SNP TSC0032622
ttcgttgtgggtt

SEQ ID NO: 130628 - DNA, 13 bp, Artificial Sequence
  Oligonucleotide for detection of SNP TSC0032622
aacccacaacgaa

SEQ ID NO: 130629 - DNA, 13 bp, Artificial Sequence
  Oligonucleotide for detection of SNP TSC0032622
tttgtcgtgggtt

SEQ ID NO: 130630 - DNA, 13 bp, Artificial Sequence
  Oligonucleotide for detection of SNP TSC0032622
aacccacgacaaa

SEQ ID NO: 130631 - DNA, 13 bp, Artificial Sequence
  Oligonucleotide for detection of SNP TSC0032622
ttcgtcgtgggtt

SEQ ID NO: 130632 - DNA, 13 bp, Artificial Sequence
  Oligonucleotide for detection of SNP TSC0032622
aacccacgacgaa

SEQ ID NO: 130633 - DNA, 13 bp, Artificial Sequence
  Oligonucleotide for detection of SNP TSC0032622
aatttatggtggg

SEQ ID NO: 130634 - DNA, 13 bp, Artificial Sequence
  Oligonucleotide for detection of SNP TSC0032622
cccaccataaatt

SEQ ID NO: 130635 - DNA, 13 bp, Artificial Sequence
  Oligonucleotide for detection of SNP TSC0032622
aatttatggcggg

SEQ ID NO: 130636 - DNA, 13 bp, Artificial Sequence
  Oligonucleotide for detection of SNP TSC0032622
cccgccataaatt

SEQ ID NO: 130637 - DNA, 13 bp, Artificial Sequence
  Oligonucleotide for detection of SNP TSC0032622
aatttacggtggg

SEQ ID NO: 130638 - DNA, 13 bp, Artificial Sequence
  Oligonucleotide for detection of SNP TSC0032622
cccaccgtaaatt

SEQ ID NO: 130639 - DNA, 13 bp, Artificial Sequence
  Oligonucleotide for detection of SNP TSC0032622
aatttacggcggg

SEQ ID NO: 130640 - DNA, 13 bp, Artificial Sequence
  Oligonucleotide for detection of SNP TSC0032622
cccgccgtaaatt

SEQ ID NO: 130641 - DNA, 13 bp, Artificial Sequence
  Oligonucleotide for detection of SNP TSC0032623
ggtaaggtatttt

SEQ ID NO: 130642 - DNA, 13 bp, Artificial Sequence
  Oligonucleotide for detection of SNP TSC0032623
aaaataccttacc

SEQ ID NO: 130643 - DNA, 13 bp, Artificial Sequence
  Oligonucleotide for detection of SNP TSC0032623
ggtaagatatttt

SEQ ID NO: 130644 - DNA, 13 bp, Artificial Sequence
  Oligonucleotide for detection of SNP TSC0032623
aaaatatcttacc

SEQ ID NO: 130645 - DNA, 13 bp, Artificial Sequence
  Oligonucleotide for detection of SNP TSC0032624
ttggtaatttgga

SEQ ID NO: 130646 - DNA, 13 bp, Artificial Sequence
  Oligonucleotide for detection of SNP TSC0032624
tccaaattaccaa

SEQ ID NO: 130647 - DNA, 13 bp, Artificial Sequence
  Oligonucleotide for detection of SNP TSC0032624
ttggtattttgga

SEQ ID NO: 130648 - DNA, 13 bp, Artificial Sequence
  Oligonucleotide for detection of SNP TSC0032624
tccaaaataccaa

SEQ ID NO: 130649 - DNA, 13 bp, Artificial Sequence
  Oligonucleotide for detection of SNP TSC0032624
tttaggttgttag

SEQ ID NO: 130650 - DNA, 13 bp, Artificial Sequence
  Oligonucleotide for detection of SNP TSC0032624
ctaacaacctaaa

SEQ ID NO: 130651 - DNA, 13 bp, Artificial Sequence
  Oligonucleotide for detection of SNP TSC0032624
tttaggatgttag

SEQ ID NO: 130652 - DNA, 13 bp, Artificial Sequence
  Oligonucleotide for detection of SNP TSC0032624
ctaacatcctaaa

SEQ ID NO: 130653 - DNA, 13 bp, Artificial Sequence
  Oligonucleotide for detection of SNP TSC0032625
tgttttatttgta

SEQ ID NO: 130654 - DNA, 13 bp, Artificial Sequence
  Oligonucleotide for detection of SNP TSC0032625
tacaaataaaaca

SEQ ID NO: 130655 - DNA, 13 bp, Artificial Sequence
  Oligonucleotide for detection of SNP TSC0032625
tgttttgtttgta

SEQ ID NO: 130656 - DNA, 13 bp, Artificial Sequence
  Oligonucleotide for detection of SNP TSC0032625
tacaaacaaaaca

SEQ ID NO: 130657 - DNA, 13 bp, Artificial Sequence
  Oligonucleotide for detection of SNP TSC0032625
tgtttcgtttgta

SEQ ID NO: 130658 - DNA, 13 bp, Artificial Sequence
  Oligonucleotide for detection of SNP TSC0032625
tacaaacgaaaca

SEQ ID NO: 130659 - DNA, 13 bp, Artificial Sequence
  Oligonucleotide for detection of SNP TSC0032625
tataaatggagta

SEQ ID NO: 130660 - DNA, 13 bp, Artificial Sequence
  Oligonucleotide for detection of SNP TSC0032625
tactccatttata

SEQ ID NO: 130661 - DNA, 13 bp, Artificial Sequence
  Oligonucleotide for detection of SNP TSC0032625
tataaacggagta

SEQ ID NO: 130662 - DNA, 13 bp, Artificial Sequence
  Oligonucleotide for detection of SNP TSC0032625
tactccgtttata

SEQ ID NO: 130663 - DNA, 13 bp, Artificial Sequence
  Oligonucleotide for detection of SNP TSC0032626
ttagttattggta

SEQ ID NO: 130664 - DNA, 13 bp, Artificial Sequence
  Oligonucleotide for detection of SNP TSC0032626
taccaataactaa

SEQ ID NO: 130665 - DNA, 13 bp, Artificial Sequence
  Oligonucleotide for detection of SNP TSC0032626
ttagtttttggta

SEQ ID NO: 130666 - DNA, 13 bp, Artificial Sequence
  Oligonucleotide for detection of SNP TSC0032626
taccaaaaactaa

SEQ ID NO: 130667 - DNA, 13 bp, Artificial Sequence
  Oligonucleotide for detection of SNP TSC0032626
ttagttatcggta

SEQ ID NO: 130668 - DNA, 13 bp, Artificial Sequence
  Oligonucleotide for detection of SNP TSC0032626
taccgataactaa

SEQ ID NO: 130669 - DNA, 13 bp, Artificial Sequence
  Oligonucleotide for detection of SNP TSC0032626
ttagttttcggta

SEQ ID NO: 130670 - DNA, 13 bp, Artificial Sequence
  Oligonucleotide for detection of SNP TSC0032626
taccgaaaactaa

SEQ ID NO: 130671 - DNA, 13 bp, Artificial Sequence
  Oligonucleotide for detection of SNP TSC0032626
tgttggtggttgg

SEQ ID NO: 130672 - DNA, 13 bp, Artificial Sequence
  Oligonucleotide for detection of SNP TSC0032626
ccaaccaccaaca

SEQ ID NO: 130673 - DNA, 13 bp, Artificial Sequence
  Oligonucleotide for detection of SNP TSC0032626
tgttgggggttgg

SEQ ID NO: 130674 - DNA, 13 bp, Artificial Sequence
  Oligonucleotide for detection of SNP TSC0032626
ccaacccccaaca

SEQ ID NO: 130675 - DNA, 13 bp, Artificial Sequence
  Oligonucleotide for detection of SNP TSC0032626
tgtcggtggttgg

SEQ ID NO: 130676 - DNA, 13 bp, Artificial Sequence
  Oligonucleotide for detection of SNP TSC0032626
ccaaccaccgaca

SEQ ID NO: 130677 - DNA, 13 bp, Artificial Sequence
  Oligonucleotide for detection of SNP TSC0032626
tgtcgggggttgg

SEQ ID NO: 130678 - DNA, 13 bp, Artificial Sequence
  Oligonucleotide for detection of SNP TSC0032626
ccaacccccgaca

SEQ ID NO: 130679 - DNA, 13 bp, Artificial Sequence
  Oligonucleotide for detection of SNP TSC0032628
tatttagtagttg

SEQ ID NO: 130680 - DNA, 13 bp, Artificial Sequence
  Oligonucleotide for detection of SNP TSC0032628
caactactaaata

SEQ ID NO: 130681 - DNA, 13 bp, Artificial Sequence
  Oligonucleotide for detection of SNP TSC0032628
tatttaatagttg

SEQ ID NO: 130682 - DNA, 13 bp, Artificial Sequence
  Oligonucleotide for detection of SNP TSC0032628
caactattaaata

SEQ ID NO: 130683 - DNA, 13 bp, Artificial Sequence
  Oligonucleotide for detection of SNP TSC0032631
gtagaaaggttty

SEQ ID NO: 130684 - DNA, 13 bp, Artificial Sequence
  Oligonucleotide for detection of SNP TSC0032631
raaacctttctac

SEQ ID NO: 130685 - DNA, 13 bp, Artificial Sequence
  Oligonucleotide for detection of SNP TSC0032631
gtagaatggttty

SEQ ID NO: 130686 - DNA, 13 bp, Artificial Sequence
  Oligonucleotide for detection of SNP TSC0032631
raaaccattctac

SEQ ID NO: 130687 - DNA, 13 bp, Artificial Sequence
  Oligonucleotide for detection of SNP TSC0032631
gagatttttttay

SEQ ID NO: 130688 - DNA, 13 bp, Artificial Sequence
  Oligonucleotide for detection of SNP TSC0032631
rtaaaaaaatctc

SEQ ID NO: 130689 - DNA, 13 bp, Artificial Sequence
  Oligonucleotide for detection of SNP TSC0032631
gagattattttay

SEQ ID NO: 130690 - DNA, 13 bp, Artificial Sequence
  Oligonucleotide for detection of SNP TSC0032631
rtaaaataatctc

SEQ ID NO: 130691 - DNA, 13 bp, Artificial Sequence
  Oligonucleotide for detection of SNP TSC0032632
ttataaggttaag

SEQ ID NO: 130692 - DNA, 13 bp, Artificial Sequence
  Oligonucleotide for detection of SNP TSC0032632
cttaaccttataa

SEQ ID NO: 130693 - DNA, 13 bp, Artificial Sequence
  Oligonucleotide for detection of SNP TSC0032632
ttataaagttaag

SEQ ID NO: 130694 - DNA, 13 bp, Artificial Sequence
  Oligonucleotide for detection of SNP TSC0032632
cttaactttataa

SEQ ID NO: 130695 - DNA, 13 bp, Artificial Sequence
  Oligonucleotide for detection of SNP TSC0032633
gtgtaggggttta

SEQ ID NO: 130696 - DNA, 13 bp, Artificial Sequence
  Oligonucleotide for detection of SNP TSC0032633
taaacccctacac

SEQ ID NO: 130697 - DNA, 13 bp, Artificial Sequence
  Oligonucleotide for detection of SNP TSC0032633
gtgtagtggttta

SEQ ID NO: 130698 - DNA, 13 bp, Artificial Sequence
  Oligonucleotide for detection of SNP TSC0032633
taaaccactacac

SEQ ID NO: 130699 - DNA, 13 bp, Artificial Sequence
  Oligonucleotide for detection of SNP TSC0032633
gcgtaggggttta

SEQ ID NO: 130700 - DNA, 13 bp, Artificial Sequence
  Oligonucleotide for detection of SNP TSC0032633
taaacccctacgc

SEQ ID NO: 130701 - DNA, 13 bp, Artificial Sequence
  Oligonucleotide for detection of SNP TSC0032633
gcgtagtggttta

SEQ ID NO: 130702 - DNA, 13 bp, Artificial Sequence
  Oligonucleotide for detection of SNP TSC0032633
taaaccactacgc

SEQ ID NO: 130703 - DNA, 13 bp, Artificial Sequence
  Oligonucleotide for detection of SNP TSC0032636
gttttgaggaaga

SEQ ID NO: 130704 - DNA, 13 bp, Artificial Sequence
  Oligonucleotide for detection of SNP TSC0032636
tcttcctcaaaac

SEQ ID NO: 130705 - DNA, 13 bp, Artificial Sequence
  Oligonucleotide for detection of SNP TSC0032636
gttttgtggaaga

SEQ ID NO: 130706 - DNA, 13 bp, Artificial Sequence
  Oligonucleotide for detection of SNP TSC0032636
tcttccacaaaac

SEQ ID NO: 130707 - DNA, 13 bp, Artificial Sequence
  Oligonucleotide for detection of SNP TSC0032636
ttttttttaaaay

SEQ ID NO: 130708 - DNA, 13 bp, Artificial Sequence
  Oligonucleotide for detection of SNP TSC0032636
rttttaaaaaaaa

SEQ ID NO: 130709 - DNA, 13 bp, Artificial Sequence
  Oligonucleotide for detection of SNP TSC0032636
ttttttataaaay

SEQ ID NO: 130710 - DNA, 13 bp, Artificial Sequence
  Oligonucleotide for detection of SNP TSC0032636
rttttataaaaaa

SEQ ID NO: 130711 - DNA, 13 bp, Artificial Sequence
  Oligonucleotide for detection of SNP TSC0032637
agggatgtttaga

SEQ ID NO: 130712 - DNA, 13 bp, Artificial Sequence
  Oligonucleotide for detection of SNP TSC0032637
tctaaacatccct

SEQ ID NO: 130713 - DNA, 13 bp, Artificial Sequence
  Oligonucleotide for detection of SNP TSC0032637
agggatatttaga

SEQ ID NO: 130714 - DNA, 13 bp, Artificial Sequence
  Oligonucleotide for detection of SNP TSC0032637
tctaaatatccct

SEQ ID NO: 130715 - DNA, 13 bp, Artificial Sequence
  Oligonucleotide for detection of SNP TSC0032637
agggacgtttaga

SEQ ID NO: 130716 - DNA, 13 bp, Artificial Sequence
  Oligonucleotide for detection of SNP TSC0032637
tctaaacgtccct

SEQ ID NO: 130717 - DNA, 13 bp, Artificial Sequence
  Oligonucleotide for detection of SNP TSC0032638
agttaggaggttg

SEQ ID NO: 130718 - DNA, 13 bp, Artificial Sequence
  Oligonucleotide for detection of SNP TSC0032638
caacctcctaact

SEQ ID NO: 130719 - DNA, 13 bp, Artificial Sequence
  Oligonucleotide for detection of SNP TSC0032638
agttagaaggttg

SEQ ID NO: 130720 - DNA, 13 bp, Artificial Sequence
  Oligonucleotide for detection of SNP TSC0032638
caaccttctaact

SEQ ID NO: 130721 - DNA, 13 bp, Artificial Sequence
  Oligonucleotide for detection of SNP TSC0032638
agttaggaggtcg

SEQ ID NO: 130722 - DNA, 13 bp, Artificial Sequence
  Oligonucleotide for detection of SNP TSC0032638
cgacctcctaact

SEQ ID NO: 130723 - DNA, 13 bp, Artificial Sequence
  Oligonucleotide for detection of SNP TSC0032638
agttagaaggtcg

SEQ ID NO: 130724 - DNA, 13 bp, Artificial Sequence
  Oligonucleotide for detection of SNP TSC0032638
cgaccttctaact

SEQ ID NO: 130725 - DNA, 13 bp, Artificial Sequence
  Oligonucleotide for detection of SNP TSC0032639
agggagttaggag

SEQ ID NO: 130726 - DNA, 13 bp, Artificial Sequence
  Oligonucleotide for detection of SNP TSC0032639
ctcctaactccct

SEQ ID NO: 130727 - DNA, 13 bp, Artificial Sequence
  Oligonucleotide for detection of SNP TSC0032639
agggagataggag

SEQ ID NO: 130728 - DNA, 13 bp, Artificial Sequence
  Oligonucleotide for detection of SNP TSC0032639
ctcctatctccct

SEQ ID NO: 130729 - DNA, 13 bp, Artificial Sequence
  Oligonucleotide for detection of SNP TSC0032640
ttttttaaatata

SEQ ID NO: 130730 - DNA, 13 bp, Artificial Sequence
  Oligonucleotide for detection of SNP TSC0032640
tatatttaaaaaa

SEQ ID NO: 130731 - DNA, 13 bp, Artificial Sequence
  Oligonucleotide for detection of SNP TSC0032640
tttttttaatata

SEQ ID NO: 130732 - DNA, 13 bp, Artificial Sequence
  Oligonucleotide for detection of SNP TSC0032640
tatattaaaaaaa

SEQ ID NO: 130733 - DNA, 13 bp, Artificial Sequence
  Oligonucleotide for detection of SNP TSC0032640
tgtgtttaggagg

SEQ ID NO: 130734 - DNA, 13 bp, Artificial Sequence
  Oligonucleotide for detection of SNP TSC0032640
cctcctaaacaca

SEQ ID NO: 130735 - DNA, 13 bp, Artificial Sequence
  Oligonucleotide for detection of SNP TSC0032640
tgtgttgaggagg

SEQ ID NO: 130736 - DNA, 13 bp, Artificial Sequence
  Oligonucleotide for detection of SNP TSC0032640
cctcctcaacaca

SEQ ID NO: 130737 - DNA, 13 bp, Artificial Sequence
  Oligonucleotide for detection of SNP TSC0032642
ttgtaagtttagy

SEQ ID NO: 130738 - DNA, 13 bp, Artificial Sequence
  Oligonucleotide for detection of SNP TSC0032642
rctaaacttacaa

SEQ ID NO: 130739 - DNA, 13 bp, Artificial Sequence
  Oligonucleotide for detection of SNP TSC0032646
gggggggtttagt

SEQ ID NO: 130740 - DNA, 13 bp, Artificial Sequence
  Oligonucleotide for detection of SNP TSC0032646
actaaaccccccc

SEQ ID NO: 130741 - DNA, 13 bp, Artificial Sequence
  Oligonucleotide for detection of SNP TSC0032646
ggggggatttagt

SEQ ID NO: 130742 - DNA, 13 bp, Artificial Sequence
  Oligonucleotide for detection of SNP TSC0032646
actaaatcccccc

SEQ ID NO: 130743 - DNA, 13 bp, Artificial Sequence
  Oligonucleotide for detection of SNP TSC0032647
gagttgagtttag

SEQ ID NO: 130744 - DNA, 13 bp, Artificial Sequence
  Oligonucleotide for detection of SNP TSC0032647
ctaaactcaactc

SEQ ID NO: 130745 - DNA, 13 bp, Artificial Sequence
  Oligonucleotide for detection of SNP TSC0032647
gagttgggtttag

SEQ ID NO: 130746 - DNA, 13 bp, Artificial Sequence
  Oligonucleotide for detection of SNP TSC0032647
ctaaacccaactc

SEQ ID NO: 130747 - DNA, 13 bp, Artificial Sequence
  Oligonucleotide for detection of SNP TSC0032648
ataaaggtttttt

SEQ ID NO: 130748 - DNA, 13 bp, Artificial Sequence
  Oligonucleotide for detection of SNP TSC0032648
aaaaaacctttat

SEQ ID NO: 130749 - DNA, 13 bp, Artificial Sequence
  Oligonucleotide for detection of SNP TSC0032649
gtgaggtgtgaty

SEQ ID NO: 130750 - DNA, 13 bp, Artificial Sequence
  Oligonucleotide for detection of SNP TSC0032649
ratcacacctcac

SEQ ID NO: 130751 - DNA, 13 bp, Artificial Sequence
  Oligonucleotide for detection of SNP TSC0032649
gtgaggggtgaty

SEQ ID NO: 130752 - DNA, 13 bp, Artificial Sequence
  Oligonucleotide for detection of SNP TSC0032649
ratcacccctcac

SEQ ID NO: 130753 - DNA, 13 bp, Artificial Sequence
  Oligonucleotide for detection of SNP TSC0032649
gcgaggtgtgaty

SEQ ID NO: 130754 - DNA, 13 bp, Artificial Sequence
  Oligonucleotide for detection of SNP TSC0032649
ratcacacctcgc

SEQ ID NO: 130755 - DNA, 13 bp, Artificial Sequence
  Oligonucleotide for detection of SNP TSC0032649
gcgaggggtgaty

SEQ ID NO: 130756 - DNA, 13 bp, Artificial Sequence
  Oligonucleotide for detection of SNP TSC0032649
ratcacccctcgc

SEQ ID NO: 130757 - DNA, 13 bp, Artificial Sequence
  Oligonucleotide for detection of SNP TSC0032649
gtgaggcgtgaty

SEQ ID NO: 130758 - DNA, 13 bp, Artificial Sequence
  Oligonucleotide for detection of SNP TSC0032649
ratcacgcctcac

SEQ ID NO: 130759 - DNA, 13 bp, Artificial Sequence
  Oligonucleotide for detection of SNP TSC0032649
gtgaggggcgaty

SEQ ID NO: 130760 - DNA, 13 bp, Artificial Sequence
  Oligonucleotide for detection of SNP TSC0032649
ratcgcccctcac

SEQ ID NO: 130761 - DNA, 13 bp, Artificial Sequence
  Oligonucleotide for detection of SNP TSC0032649
gtgaggtgcgaty

SEQ ID NO: 130762 - DNA, 13 bp, Artificial Sequence
  Oligonucleotide for detection of SNP TSC0032649
ratcgcacctcac

SEQ ID NO: 130763 - DNA, 13 bp, Artificial Sequence
  Oligonucleotide for detection of SNP TSC0032649
gcgaggggcgaty

SEQ ID NO: 130764 - DNA, 13 bp, Artificial Sequence
  Oligonucleotide for detection of SNP TSC0032649
ratcgcccctcgc

SEQ ID NO: 130765 - DNA, 13 bp, Artificial Sequence
  Oligonucleotide for detection of SNP TSC0032649
gcgaggcgtgaty

SEQ ID NO: 130766 - DNA, 13 bp, Artificial Sequence
  Oligonucleotide for detection of SNP TSC0032649
ratcacgcctcgc

SEQ ID NO: 130767 - DNA, 13 bp, Artificial Sequence
  Oligonucleotide for detection of SNP TSC0032649
gcgaggtgcgaty

SEQ ID NO: 130768 - DNA, 13 bp, Artificial Sequence
  Oligonucleotide for detection of SNP TSC0032649
ratcgcacctcgc

SEQ ID NO: 130769 - DNA, 13 bp, Artificial Sequence
  Oligonucleotide for detection of SNP TSC0032649
gtgaggcgcgaty

SEQ ID NO: 130770 - DNA, 13 bp, Artificial Sequence
  Oligonucleotide for detection of SNP TSC0032649
ratcgcgcctcac

SEQ ID NO: 130771 - DNA, 13 bp, Artificial Sequence
  Oligonucleotide for detection of SNP TSC0032649
gcgaggcgcgaty

SEQ ID NO: 130772 - DNA, 13 bp, Artificial Sequence
  Oligonucleotide for detection of SNP TSC0032649
ratcgcgcctcgc

SEQ ID NO: 130773 - DNA, 13 bp, Artificial Sequence
  Oligonucleotide for detection of SNP TSC0032649
ggttgttttttgy

SEQ ID NO: 130774 - DNA, 13 bp, Artificial Sequence
  Oligonucleotide for detection of SNP TSC0032649
rcaaaaaacaacc

SEQ ID NO: 130775 - DNA, 13 bp, Artificial Sequence
  Oligonucleotide for detection of SNP TSC0032649
ggtcgtgttttgy

SEQ ID NO: 130776 - DNA, 13 bp, Artificial Sequence
  Oligonucleotide for detection of SNP TSC0032649
rcaaaacacgacc

SEQ ID NO: 130777 - DNA, 13 bp, Artificial Sequence
  Oligonucleotide for detection of SNP TSC0032649
ggtcgttttttgy

SEQ ID NO: 130778 - DNA, 13 bp, Artificial Sequence
  Oligonucleotide for detection of SNP TSC0032649
rcaaaaaacgacc

SEQ ID NO: 130779 - DNA, 13 bp, Artificial Sequence
  Oligonucleotide for detection of SNP TSC0032649
ggttgtttttcgy

SEQ ID NO: 130780 - DNA, 13 bp, Artificial Sequence
  Oligonucleotide for detection of SNP TSC0032649
rcgaaaaacaacc

SEQ ID NO: 130781 - DNA, 13 bp, Artificial Sequence
  Oligonucleotide for detection of SNP TSC0032649
ggttgtgtttcgy

SEQ ID NO: 130782 - DNA, 13 bp, Artificial Sequence
  Oligonucleotide for detection of SNP TSC0032649
rcgaaacacaacc

SEQ ID NO: 130783 - DNA, 13 bp, Artificial Sequence
  Oligonucleotide for detection of SNP TSC0032649
ggtcgtttttcgy

SEQ ID NO: 130784 - DNA, 13 bp, Artificial Sequence
  Oligonucleotide for detection of SNP TSC0032649
rcgaaaaacgacc

SEQ ID NO: 130785 - DNA, 13 bp, Artificial Sequence
  Oligonucleotide for detection of SNP TSC0032649
ggtcgcgttttgy

SEQ ID NO: 130786 - DNA, 13 bp, Artificial Sequence
  Oligonucleotide for detection of SNP TSC0032649
rcaaaacgcgacc

SEQ ID NO: 130787 - DNA, 13 bp, Artificial Sequence
  Oligonucleotide for detection of SNP TSC0032649
ggtcgtgtttcgy

SEQ ID NO: 130788 - DNA, 13 bp, Artificial Sequence
  Oligonucleotide for detection of SNP TSC0032649
rcgaaacacgacc

SEQ ID NO: 130789 - DNA, 13 bp, Artificial Sequence
  Oligonucleotide for detection of SNP TSC0032649
ggttgcgtttcgy

SEQ ID NO: 130790 - DNA, 13 bp, Artificial Sequence
  Oligonucleotide for detection of SNP TSC0032649
rcgaaacgcaacc

SEQ ID NO: 130791 - DNA, 13 bp, Artificial Sequence
  Oligonucleotide for detection of SNP TSC0032649
ggtcgcgtttcgy

SEQ ID NO: 130792 - DNA, 13 bp, Artificial Sequence
  Oligonucleotide for detection of SNP TSC0032649
rcgaaacgcgacc

SEQ ID NO: 130793 - DNA, 13 bp, Artificial Sequence
  Oligonucleotide for detection of SNP TSC0032652
agattaaagattt

SEQ ID NO: 130794 - DNA, 13 bp, Artificial Sequence
  Oligonucleotide for detection of SNP TSC0032652
aaatctttaatct

SEQ ID NO: 130795 - DNA, 13 bp, Artificial Sequence
  Oligonucleotide for detection of SNP TSC0032652
agattagagattt

SEQ ID NO: 130796 - DNA, 13 bp, Artificial Sequence
  Oligonucleotide for detection of SNP TSC0032652
aaatctctaatct

SEQ ID NO: 130797 - DNA, 13 bp, Artificial Sequence
  Oligonucleotide for detection of SNP TSC0032653
tgtaatatatagt

SEQ ID NO: 130798 - DNA, 13 bp, Artificial Sequence
  Oligonucleotide for detection of SNP TSC0032653
actatatattaca

SEQ ID NO: 130799 - DNA, 13 bp, Artificial Sequence
  Oligonucleotide for detection of SNP TSC0032653
tgtaatgtatagt

SEQ ID NO: 130800 - DNA, 13 bp, Artificial Sequence
  Oligonucleotide for detection of SNP TSC0032653
actatacattaca

SEQ ID NO: 130801 - DNA, 13 bp, Artificial Sequence
  Oligonucleotide for detection of SNP TSC0032653
cgtaatatatagt

SEQ ID NO: 130802 - DNA, 13 bp, Artificial Sequence
  Oligonucleotide for detection of SNP TSC0032653
actatatattacg

SEQ ID NO: 130803 - DNA, 13 bp, Artificial Sequence
  Oligonucleotide for detection of SNP TSC0032653
cgtaatgtatagt

SEQ ID NO: 130804 - DNA, 13 bp, Artificial Sequence
  Oligonucleotide for detection of SNP TSC0032653
actatacattacg

SEQ ID NO: 130805 - DNA, 13 bp, Artificial Sequence
  Oligonucleotide for detection of SNP TSC0032653
tgtaacgtatagt

SEQ ID NO: 130806 - DNA, 13 bp, Artificial Sequence
  Oligonucleotide for detection of SNP TSC0032653
actatacgttaca

SEQ ID NO: 130807 - DNA, 13 bp, Artificial Sequence
  Oligonucleotide for detection of SNP TSC0032653
cgtaacgtatagt

SEQ ID NO: 130808 - DNA, 13 bp, Artificial Sequence
  Oligonucleotide for detection of SNP TSC0032653
actatacgttacg

SEQ ID NO: 130809 - DNA, 13 bp, Artificial Sequence
  Oligonucleotide for detection of SNP TSC0032653
attatgtgttatg

SEQ ID NO: 130810 - DNA, 13 bp, Artificial Sequence
  Oligonucleotide for detection of SNP TSC0032653
cataacacataat

SEQ ID NO: 130811 - DNA, 13 bp, Artificial Sequence
  Oligonucleotide for detection of SNP TSC0032653
attatgtgttacg

SEQ ID NO: 130812 - DNA, 13 bp, Artificial Sequence
  Oligonucleotide for detection of SNP TSC0032653
cgtaacacataat

SEQ ID NO: 130813 - DNA, 13 bp, Artificial Sequence
  Oligonucleotide for detection of SNP TSC0032653
attatgcgttatg

SEQ ID NO: 130814 - DNA, 13 bp, Artificial Sequence
  Oligonucleotide for detection of SNP TSC0032653
cataacgcataat

SEQ ID NO: 130815 - DNA, 13 bp, Artificial Sequence
  Oligonucleotide for detection of SNP TSC0032653
attatgcgttacg

SEQ ID NO: 130816 - DNA, 13 bp, Artificial Sequence
  Oligonucleotide for detection of SNP TSC0032653
cgtaacgcataat

SEQ ID NO: 130817 - DNA, 13 bp, Artificial Sequence
  Oligonucleotide for detection of SNP TSC0032654
atatttatgtatt

SEQ ID NO: 130818 - DNA, 13 bp, Artificial Sequence
  Oligonucleotide for detection of SNP TSC0032654
aatacataaatat

SEQ ID NO: 130819 - DNA, 13 bp, Artificial Sequence
  Oligonucleotide for detection of SNP TSC0032654
atatttgtgtatt

SEQ ID NO: 130820 - DNA, 13 bp, Artificial Sequence
  Oligonucleotide for detection of SNP TSC0032654
aatacacaaatat

SEQ ID NO: 130821 - DNA, 13 bp, Artificial Sequence
  Oligonucleotide for detection of SNP TSC0032655
gagtgggtttgtg

SEQ ID NO: 130822 - DNA, 13 bp, Artificial Sequence
  Oligonucleotide for detection of SNP TSC0032655
cacaaacccactc

SEQ ID NO: 130823 - DNA, 13 bp, Artificial Sequence
  Oligonucleotide for detection of SNP TSC0032655
gagtggatttgtg

SEQ ID NO: 130824 - DNA, 13 bp, Artificial Sequence
  Oligonucleotide for detection of SNP TSC0032655
cacaaatccactc

SEQ ID NO: 130825 - DNA, 13 bp, Artificial Sequence
  Oligonucleotide for detection of SNP TSC0032658
aataaaagttttg

SEQ ID NO: 130826 - DNA, 13 bp, Artificial Sequence
  Oligonucleotide for detection of SNP TSC0032658
caaaacttttatt

SEQ ID NO: 130827 - DNA, 13 bp, Artificial Sequence
  Oligonucleotide for detection of SNP TSC0032658
aataaatgttttg

SEQ ID NO: 130828 - DNA, 13 bp, Artificial Sequence
  Oligonucleotide for detection of SNP TSC0032658
caaaacatttatt

SEQ ID NO: 130829 - DNA, 13 bp, Artificial Sequence
  Oligonucleotide for detection of SNP TSC0032658
taaaatttttgtt

SEQ ID NO: 130830 - DNA, 13 bp, Artificial Sequence
  Oligonucleotide for detection of SNP TSC0032658
aacaaaaatttta

SEQ ID NO: 130831 - DNA, 13 bp, Artificial Sequence
  Oligonucleotide for detection of SNP TSC0032658
taaaatatttgtt

SEQ ID NO: 130832 - DNA, 13 bp, Artificial Sequence
  Oligonucleotide for detection of SNP TSC0032658
aacaaatatttta

SEQ ID NO: 130833 - DNA, 13 bp, Artificial Sequence
  Oligonucleotide for detection of SNP TSC0032659
ttaagaggggtag

SEQ ID NO: 130834 - DNA, 13 bp, Artificial Sequence
  Oligonucleotide for detection of SNP TSC0032659
ctacccctcttaa

SEQ ID NO: 130835 - DNA, 13 bp, Artificial Sequence
  Oligonucleotide for detection of SNP TSC0032659
ttaagatgggtag

SEQ ID NO: 130836 - DNA, 13 bp, Artificial Sequence
  Oligonucleotide for detection of SNP TSC0032659
ctacccatcttaa

SEQ ID NO: 130837 - DNA, 13 bp, Artificial Sequence
  Oligonucleotide for detection of SNP TSC0032659
ttaagacgggtag

SEQ ID NO: 130838 - DNA, 13 bp, Artificial Sequence
  Oligonucleotide for detection of SNP TSC0032659
ctacccgtcttaa

SEQ ID NO: 130839 - DNA, 13 bp, Artificial Sequence
  Oligonucleotide for detection of SNP TSC0032660
atgtttatagaty

SEQ ID NO: 130840 - DNA, 13 bp, Artificial Sequence
  Oligonucleotide for detection of SNP TSC0032660
ratctataaacat

SEQ ID NO: 130841 - DNA, 13 bp, Artificial Sequence
  Oligonucleotide for detection of SNP TSC0032660
atgtttttagaty

SEQ ID NO: 130842 - DNA, 13 bp, Artificial Sequence
  Oligonucleotide for detection of SNP TSC0032660
ratctaaaaacat

SEQ ID NO: 130843 - DNA, 13 bp, Artificial Sequence
  Oligonucleotide for detection of SNP TSC0032660
ggtttgtagatat

SEQ ID NO: 130844 - DNA, 13 bp, Artificial Sequence
  Oligonucleotide for detection of SNP TSC0032660
atatctacaaacc

SEQ ID NO: 130845 - DNA, 13 bp, Artificial Sequence
  Oligonucleotide for detection of SNP TSC0032660
ggtttggagatat

SEQ ID NO: 130846 - DNA, 13 bp, Artificial Sequence
  Oligonucleotide for detection of SNP TSC0032660
atatctccaaacc

SEQ ID NO: 130847 - DNA, 13 bp, Artificial Sequence
  Oligonucleotide for detection of SNP TSC0032661
gggtgtgaataty

SEQ ID NO: 130848 - DNA, 13 bp, Artificial Sequence
  Oligonucleotide for detection of SNP TSC0032661
ratattcacaccc

SEQ ID NO: 130849 - DNA, 13 bp, Artificial Sequence
  Oligonucleotide for detection of SNP TSC0032661
gggtgtaaataty

SEQ ID NO: 130850 - DNA, 13 bp, Artificial Sequence
  Oligonucleotide for detection of SNP TSC0032661
ratatttacaccc

SEQ ID NO: 130851 - DNA, 13 bp, Artificial Sequence
  Oligonucleotide for detection of SNP TSC0032663
ttgtttgaaatta

SEQ ID NO: 130852 - DNA, 13 bp, Artificial Sequence
  Oligonucleotide for detection of SNP TSC0032663
taatttcaaacaa

SEQ ID NO: 130853 - DNA, 13 bp, Artificial Sequence
  Oligonucleotide for detection of SNP TSC0032663
ttgtttaaaatta

SEQ ID NO: 130854 - DNA, 13 bp, Artificial Sequence
  Oligonucleotide for detection of SNP TSC0032663
taattttaaacaa

SEQ ID NO: 130855 - DNA, 13 bp, Artificial Sequence
  Oligonucleotide for detection of SNP TSC0032666
tttgttggtggty

SEQ ID NO: 130856 - DNA, 13 bp, Artificial Sequence
  Oligonucleotide for detection of SNP TSC0032666
raccaccaacaaa

SEQ ID NO: 130857 - DNA, 13 bp, Artificial Sequence
  Oligonucleotide for detection of SNP TSC0032666
tttgtttgtggty

SEQ ID NO: 130858 - DNA, 13 bp, Artificial Sequence
  Oligonucleotide for detection of SNP TSC0032666
raccacaaacaaa

SEQ ID NO: 130859 - DNA, 13 bp, Artificial Sequence
  Oligonucleotide for detection of SNP TSC0032666
tttgtcggtggty

SEQ ID NO: 130860 - DNA, 13 bp, Artificial Sequence
  Oligonucleotide for detection of SNP TSC0032666
raccaccgacaaa

SEQ ID NO: 130861 - DNA, 13 bp, Artificial Sequence
  Oligonucleotide for detection of SNP TSC0032666
tttgtttgcggty

SEQ ID NO: 130862 - DNA, 13 bp, Artificial Sequence
  Oligonucleotide for detection of SNP TSC0032666
raccgcaaacaaa

SEQ ID NO: 130863 - DNA, 13 bp, Artificial Sequence
  Oligonucleotide for detection of SNP TSC0032666
tttgttggcggty

SEQ ID NO: 130864 - DNA, 13 bp, Artificial Sequence
  Oligonucleotide for detection of SNP TSC0032666
raccgccaacaaa

SEQ ID NO: 130865 - DNA, 13 bp, Artificial Sequence
  Oligonucleotide for detection of SNP TSC0032666
tttgtcggcggty

SEQ ID NO: 130866 - DNA, 13 bp, Artificial Sequence
  Oligonucleotide for detection of SNP TSC0032666
raccgccgacaaa

SEQ ID NO: 130867 - DNA, 13 bp, Artificial Sequence
  Oligonucleotide for detection of SNP TSC0032666
ggttgttggtagg

SEQ ID NO: 130868 - DNA, 13 bp, Artificial Sequence
  Oligonucleotide for detection of SNP TSC0032666
cctaccaacaacc

SEQ ID NO: 130869 - DNA, 13 bp, Artificial Sequence
  Oligonucleotide for detection of SNP TSC0032666
ggttgtaggtagg

SEQ ID NO: 130870 - DNA, 13 bp, Artificial Sequence
  Oligonucleotide for detection of SNP TSC0032666
cctacctacaacc

SEQ ID NO: 130871 - DNA, 13 bp, Artificial Sequence
  Oligonucleotide for detection of SNP TSC0032666
ggtcgttggtagg

SEQ ID NO: 130872 - DNA, 13 bp, Artificial Sequence
  Oligonucleotide for detection of SNP TSC0032666
cctaccaacgacc

SEQ ID NO: 130873 - DNA, 13 bp, Artificial Sequence
  Oligonucleotide for detection of SNP TSC0032666
ggtcgtaggtagg

SEQ ID NO: 130874 - DNA, 13 bp, Artificial Sequence
  Oligonucleotide for detection of SNP TSC0032666
cctacctacgacc

SEQ ID NO: 130875 - DNA, 13 bp, Artificial Sequence
  Oligonucleotide for detection of SNP TSC0032666
ggttgtcggtagg

SEQ ID NO: 130876 - DNA, 13 bp, Artificial Sequence
  Oligonucleotide for detection of SNP TSC0032666
cctaccgacaacc

SEQ ID NO: 130877 - DNA, 13 bp, Artificial Sequence
  Oligonucleotide for detection of SNP TSC0032666
ggtcgtcggtagg

SEQ ID NO: 130878 - DNA, 13 bp, Artificial Sequence
  Oligonucleotide for detection of SNP TSC0032666
cctaccgacgacc

SEQ ID NO: 130879 - DNA, 13 bp, Artificial Sequence
  Oligonucleotide for detection of SNP TSC0032668
tttgggtataaaa

SEQ ID NO: 130880 - DNA, 13 bp, Artificial Sequence
  Oligonucleotide for detection of SNP TSC0032668
ttttatacccaaa

SEQ ID NO: 130881 - DNA, 13 bp, Artificial Sequence
  Oligonucleotide for detection of SNP TSC0032668
tttggggataaaa

SEQ ID NO: 130882 - DNA, 13 bp, Artificial Sequence
  Oligonucleotide for detection of SNP TSC0032668
ttttatccccaaa

SEQ ID NO: 130883 - DNA, 13 bp, Artificial Sequence
  Oligonucleotide for detection of SNP TSC0032669
tgtaaggttttat

SEQ ID NO: 130884 - DNA, 13 bp, Artificial Sequence
  Oligonucleotide for detection of SNP TSC0032669
ataaaaccttaca

SEQ ID NO: 130885 - DNA, 13 bp, Artificial Sequence
  Oligonucleotide for detection of SNP TSC0032669
tgtaagattttat

SEQ ID NO: 130886 - DNA, 13 bp, Artificial Sequence
  Oligonucleotide for detection of SNP TSC0032669
ataaaatcttaca

SEQ ID NO: 130887 - DNA, 13 bp, Artificial Sequence
  Oligonucleotide for detection of SNP TSC0032670
tgagagaaataaa

SEQ ID NO: 130888 - DNA, 13 bp, Artificial Sequence
  Oligonucleotide for detection of SNP TSC0032670
tttatttctctca

SEQ ID NO: 130889 - DNA, 13 bp, Artificial Sequence
  Oligonucleotide for detection of SNP TSC0032670
tgagaggaataaa

SEQ ID NO: 130890 - DNA, 13 bp, Artificial Sequence
  Oligonucleotide for detection of SNP TSC0032670
tttattcctctca

SEQ ID NO: 130891 - DNA, 13 bp, Artificial Sequence
  Oligonucleotide for detection of SNP TSC0032671
gtgatttgtttay

SEQ ID NO: 130892 - DNA, 13 bp, Artificial Sequence
  Oligonucleotide for detection of SNP TSC0032671
rtaaacaaatcac

SEQ ID NO: 130893 - DNA, 13 bp, Artificial Sequence
  Oligonucleotide for detection of SNP TSC0032671
gtgattcgtttay

SEQ ID NO: 130894 - DNA, 13 bp, Artificial Sequence
  Oligonucleotide for detection of SNP TSC0032671
rtaaacgaatcac

SEQ ID NO: 130895 - DNA, 13 bp, Artificial Sequence
  Oligonucleotide for detection of SNP TSC0032671
gtgggtgaattay

SEQ ID NO: 130896 - DNA, 13 bp, Artificial Sequence
  Oligonucleotide for detection of SNP TSC0032671
rtaattcacccac

SEQ ID NO: 130897 - DNA, 13 bp, Artificial Sequence
  Oligonucleotide for detection of SNP TSC0032671
gtgggtaaattay

SEQ ID NO: 130898 - DNA, 13 bp, Artificial Sequence
  Oligonucleotide for detection of SNP TSC0032671
rtaatttacccac

SEQ ID NO: 130899 - DNA, 13 bp, Artificial Sequence
  Oligonucleotide for detection of SNP TSC0032671
gtgggcgaattay

SEQ ID NO: 130900 - DNA, 13 bp, Artificial Sequence
  Oligonucleotide for detection of SNP TSC0032671
rtaattcgcccac

SEQ ID NO: 130901 - DNA, 13 bp, Artificial Sequence
  Oligonucleotide for detection of SNP TSC0032673
gttagtgagttty

SEQ ID NO: 130902 - DNA, 13 bp, Artificial Sequence
  Oligonucleotide for detection of SNP TSC0032673
raaactcactaac

SEQ ID NO: 130903 - DNA, 13 bp, Artificial Sequence
  Oligonucleotide for detection of SNP TSC0032673
gttagtaagttty

SEQ ID NO: 130904 - DNA, 13 bp, Artificial Sequence
  Oligonucleotide for detection of SNP TSC0032673
raaacttactaac

SEQ ID NO: 130905 - DNA, 13 bp, Artificial Sequence
  Oligonucleotide for detection of SNP TSC0032674
aatattagtaagy

SEQ ID NO: 130906 - DNA, 13 bp, Artificial Sequence
  Oligonucleotide for detection of SNP TSC0032674
rcttactaatatt

SEQ ID NO: 130907 - DNA, 13 bp, Artificial Sequence
  Oligonucleotide for detection of SNP TSC0032674
aatattggtaagy

SEQ ID NO: 130908 - DNA, 13 bp, Artificial Sequence
  Oligonucleotide for detection of SNP TSC0032674
rcttaccaatatt

SEQ ID NO: 130909 - DNA, 13 bp, Artificial Sequence
  Oligonucleotide for detection of SNP TSC0032675
aaagttagttgga

SEQ ID NO: 130910 - DNA, 13 bp, Artificial Sequence
  Oligonucleotide for detection of SNP TSC0032675
tccaactaacttt

SEQ ID NO: 130911 - DNA, 13 bp, Artificial Sequence
  Oligonucleotide for detection of SNP TSC0032675
aaagttggttgga

SEQ ID NO: 130912 - DNA, 13 bp, Artificial Sequence
  Oligonucleotide for detection of SNP TSC0032675
tccaaccaacttt

SEQ ID NO: 130913 - DNA, 13 bp, Artificial Sequence
  Oligonucleotide for detection of SNP TSC0032676
tataattgatagg

SEQ ID NO: 130914 - DNA, 13 bp, Artificial Sequence
  Oligonucleotide for detection of SNP TSC0032676
cctatcaattata

SEQ ID NO: 130915 - DNA, 13 bp, Artificial Sequence
  Oligonucleotide for detection of SNP TSC0032676
tataatcgatagg

SEQ ID NO: 130916 - DNA, 13 bp, Artificial Sequence
  Oligonucleotide for detection of SNP TSC0032676
cctatcgattata

SEQ ID NO: 130917 - DNA, 13 bp, Artificial Sequence
  Oligonucleotide for detection of SNP TSC0032676
tttgttggttata

SEQ ID NO: 130918 - DNA, 13 bp, Artificial Sequence
  Oligonucleotide for detection of SNP TSC0032676
tataaccaacaaa

SEQ ID NO: 130919 - DNA, 13 bp, Artificial Sequence
  Oligonucleotide for detection of SNP TSC0032676
tttgttagttata

SEQ ID NO: 130920 - DNA, 13 bp, Artificial Sequence
  Oligonucleotide for detection of SNP TSC0032676
tataactaacaaa

SEQ ID NO: 130921 - DNA, 13 bp, Artificial Sequence
  Oligonucleotide for detection of SNP TSC0032676
tttgtcggttata

SEQ ID NO: 130922 - DNA, 13 bp, Artificial Sequence
  Oligonucleotide for detection of SNP TSC0032676
tataaccgacaaa

SEQ ID NO: 130923 - DNA, 13 bp, Artificial Sequence
  Oligonucleotide for detection of SNP TSC0032677
gagtagagaggag

SEQ ID NO: 130924 - DNA, 13 bp, Artificial Sequence
  Oligonucleotide for detection of SNP TSC0032677
ctcctctctactc

SEQ ID NO: 130925 - DNA, 13 bp, Artificial Sequence
  Oligonucleotide for detection of SNP TSC0032677
gagtagggaggag

SEQ ID NO: 130926 - DNA, 13 bp, Artificial Sequence
  Oligonucleotide for detection of SNP TSC0032677
ctcctccctactc

SEQ ID NO: 130927 - DNA, 13 bp, Artificial Sequence
  Oligonucleotide for detection of SNP TSC0032680
ggtggtaattgag

SEQ ID NO: 130928 - DNA, 13 bp, Artificial Sequence
  Oligonucleotide for detection of SNP TSC0032680
ctcaattaccacc

SEQ ID NO: 130929 - DNA, 13 bp, Artificial Sequence
  Oligonucleotide for detection of SNP TSC0032680
ggtggtgattgag

SEQ ID NO: 130930 - DNA, 13 bp, Artificial Sequence
  Oligonucleotide for detection of SNP TSC0032680
ctcaatcaccacc

SEQ ID NO: 130931 - DNA, 13 bp, Artificial Sequence
  Oligonucleotide for detection of SNP TSC0032680
ggtggcgattgag

SEQ ID NO: 130932 - DNA, 13 bp, Artificial Sequence
  Oligonucleotide for detection of SNP TSC0032680
ctcaatcgccacc

SEQ ID NO: 130933 - DNA, 13 bp, Artificial Sequence
  Oligonucleotide for detection of SNP TSC0032681
gataagtgatgag

SEQ ID NO: 130934 - DNA, 13 bp, Artificial Sequence
  Oligonucleotide for detection of SNP TSC0032681
ctcatcacttatc

SEQ ID NO: 130935 - DNA, 13 bp, Artificial Sequence
  Oligonucleotide for detection of SNP TSC0032681
gataagcgatgag

SEQ ID NO: 130936 - DNA, 13 bp, Artificial Sequence
  Oligonucleotide for detection of SNP TSC0032681
ctcatcgcttatc

SEQ ID NO: 130937 - DNA, 13 bp, Artificial Sequence
  Oligonucleotide for detection of SNP TSC0032681
gataagtgacgag

SEQ ID NO: 130938 - DNA, 13 bp, Artificial Sequence
  Oligonucleotide for detection of SNP TSC0032681
ctcgtcacttatc

SEQ ID NO: 130939 - DNA, 13 bp, Artificial Sequence
  Oligonucleotide for detection of SNP TSC0032681
gataagcgacgag

SEQ ID NO: 130940 - DNA, 13 bp, Artificial Sequence
  Oligonucleotide for detection of SNP TSC0032681
ctcgtcgcttatc

SEQ ID NO: 130941 - DNA, 13 bp, Artificial Sequence
  Oligonucleotide for detection of SNP TSC0032681
tttgttatttaty

SEQ ID NO: 130942 - DNA, 13 bp, Artificial Sequence
  Oligonucleotide for detection of SNP TSC0032681
rataaataacaaa

SEQ ID NO: 130943 - DNA, 13 bp, Artificial Sequence
  Oligonucleotide for detection of SNP TSC0032681
ttcgttgtttaty

SEQ ID NO: 130944 - DNA, 13 bp, Artificial Sequence
  Oligonucleotide for detection of SNP TSC0032681
rataaacaacgaa

SEQ ID NO: 130945 - DNA, 13 bp, Artificial Sequence
  Oligonucleotide for detection of SNP TSC0032681
ttcgttatttaty

SEQ ID NO: 130946 - DNA, 13 bp, Artificial Sequence
  Oligonucleotide for detection of SNP TSC0032681
rataaataacgaa

SEQ ID NO: 130947 - DNA, 13 bp, Artificial Sequence
  Oligonucleotide for detection of SNP TSC0032681
ttcgtcgtttaty

SEQ ID NO: 130948 - DNA, 13 bp, Artificial Sequence
  Oligonucleotide for detection of SNP TSC0032681
rataaacgacgaa

SEQ ID NO: 130949 - DNA, 13 bp, Artificial Sequence
  Oligonucleotide for detection of SNP TSC0032682
attattattatat

SEQ ID NO: 130950 - DNA, 13 bp, Artificial Sequence
  Oligonucleotide for detection of SNP TSC0032682
atataataataat

SEQ ID NO: 130951 - DNA, 13 bp, Artificial Sequence
  Oligonucleotide for detection of SNP TSC0032682
attattgttatat

SEQ ID NO: 130952 - DNA, 13 bp, Artificial Sequence
  Oligonucleotide for detection of SNP TSC0032682
atataacaataat

SEQ ID NO: 130953 - DNA, 13 bp, Artificial Sequence
  Oligonucleotide for detection of SNP TSC0032688
aaaaaaggggggg

SEQ ID NO: 130954 - DNA, 13 bp, Artificial Sequence
  Oligonucleotide for detection of SNP TSC0032688
ccccccctttttt

SEQ ID NO: 130955 - DNA, 13 bp, Artificial Sequence
  Oligonucleotide for detection of SNP TSC0032688
aaaaaaagggggg

SEQ ID NO: 130956 - DNA, 13 bp, Artificial Sequence
  Oligonucleotide for detection of SNP TSC0032688
ccccccttttttt

SEQ ID NO: 130957 - DNA, 13 bp, Artificial Sequence
  Oligonucleotide for detection of SNP TSC0032690
agatagaattgay

SEQ ID NO: 130958 - DNA, 13 bp, Artificial Sequence
  Oligonucleotide for detection of SNP TSC0032690
rtcaattctatct

SEQ ID NO: 130959 - DNA, 13 bp, Artificial Sequence
  Oligonucleotide for detection of SNP TSC0032690
agatagtattgay

SEQ ID NO: 130960 - DNA, 13 bp, Artificial Sequence
  Oligonucleotide for detection of SNP TSC0032690
rtcaatactatct

SEQ ID NO: 130961 - DNA, 13 bp, Artificial Sequence
  Oligonucleotide for detection of SNP TSC0032690
gttaattttattt

SEQ ID NO: 130962 - DNA, 13 bp, Artificial Sequence
  Oligonucleotide for detection of SNP TSC0032690
aaataaaattaac

SEQ ID NO: 130963 - DNA, 13 bp, Artificial Sequence
  Oligonucleotide for detection of SNP TSC0032690
gttaatgttattt

SEQ ID NO: 130964 - DNA, 13 bp, Artificial Sequence
  Oligonucleotide for detection of SNP TSC0032690
aaataacattaac

SEQ ID NO: 130965 - DNA, 13 bp, Artificial Sequence
  Oligonucleotide for detection of SNP TSC0032691
ttttaagatgtgy

SEQ ID NO: 130966 - DNA, 13 bp, Artificial Sequence
  Oligonucleotide for detection of SNP TSC0032691
rcacatcttaaaa

SEQ ID NO: 130967 - DNA, 13 bp, Artificial Sequence
  Oligonucleotide for detection of SNP TSC0032691
ttttaaaatgtgy

SEQ ID NO: 130968 - DNA, 13 bp, Artificial Sequence
  Oligonucleotide for detection of SNP TSC0032691
rcacattttaaaa

SEQ ID NO: 130969 - DNA, 13 bp, Artificial Sequence
  Oligonucleotide for detection of SNP TSC0032692
agttattggtttt

SEQ ID NO: 130970 - DNA, 13 bp, Artificial Sequence
  Oligonucleotide for detection of SNP TSC0032692
aaaaccaataact

SEQ ID NO: 130971 - DNA, 13 bp, Artificial Sequence
  Oligonucleotide for detection of SNP TSC0032692
agttatcggtttt

SEQ ID NO: 130972 - DNA, 13 bp, Artificial Sequence
  Oligonucleotide for detection of SNP TSC0032692
aaaaccgataact

SEQ ID NO: 130973 - DNA, 13 bp, Artificial Sequence
  Oligonucleotide for detection of SNP TSC0032692
aaggttggtgatt

SEQ ID NO: 130974 - DNA, 13 bp, Artificial Sequence
  Oligonucleotide for detection of SNP TSC0032692
aatcaccaacctt

SEQ ID NO: 130975 - DNA, 13 bp, Artificial Sequence
  Oligonucleotide for detection of SNP TSC0032692
aaggttagtgatt

SEQ ID NO: 130976 - DNA, 13 bp, Artificial Sequence
  Oligonucleotide for detection of SNP TSC0032692
aatcactaacctt

SEQ ID NO: 130977 - DNA, 13 bp, Artificial Sequence
  Oligonucleotide for detection of SNP TSC0032692
aaggtcggtgatt

SEQ ID NO: 130978 - DNA, 13 bp, Artificial Sequence
  Oligonucleotide for detection of SNP TSC0032692
aatcaccgacctt

SEQ ID NO: 130979 - DNA, 13 bp, Artificial Sequence
  Oligonucleotide for detection of SNP TSC0032693
gttggggagagag

SEQ ID NO: 130980 - DNA, 13 bp, Artificial Sequence
  Oligonucleotide for detection of SNP TSC0032693
ctctctccccaac

SEQ ID NO: 130981 - DNA, 13 bp, Artificial Sequence
  Oligonucleotide for detection of SNP TSC0032693
gttgggaagagag

SEQ ID NO: 130982 - DNA, 13 bp, Artificial Sequence
  Oligonucleotide for detection of SNP TSC0032693
ctctcttcccaac

SEQ ID NO: 130983 - DNA, 13 bp, Artificial Sequence
  Oligonucleotide for detection of SNP TSC0032693
gtcggggagagag

SEQ ID NO: 130984 - DNA, 13 bp, Artificial Sequence
  Oligonucleotide for detection of SNP TSC0032693
ctctctccccgac

SEQ ID NO: 130985 - DNA, 13 bp, Artificial Sequence
  Oligonucleotide for detection of SNP TSC0032693
gtcgggaagagag

SEQ ID NO: 130986 - DNA, 13 bp, Artificial Sequence
  Oligonucleotide for detection of SNP TSC0032693
ctctcttcccgac

SEQ ID NO: 130987 - DNA, 13 bp, Artificial Sequence
  Oligonucleotide for detection of SNP TSC0032694
tttgttaagtggg

SEQ ID NO: 130988 - DNA, 13 bp, Artificial Sequence
  Oligonucleotide for detection of SNP TSC0032694
cccacttaacaaa

SEQ ID NO: 130989 - DNA, 13 bp, Artificial Sequence
  Oligonucleotide for detection of SNP TSC0032694
tttgttgagtggg

SEQ ID NO: 130990 - DNA, 13 bp, Artificial Sequence
  Oligonucleotide for detection of SNP TSC0032694
cccactcaacaaa

SEQ ID NO: 130991 - DNA, 13 bp, Artificial Sequence
  Oligonucleotide for detection of SNP TSC0032694
tttgtcgagtggg

SEQ ID NO: 130992 - DNA, 13 bp, Artificial Sequence
  Oligonucleotide for detection of SNP TSC0032694
cccactcgacaaa

SEQ ID NO: 130993 - DNA, 13 bp, Artificial Sequence
  Oligonucleotide for detection of SNP TSC0032694
tttatttggtaga

SEQ ID NO: 130994 - DNA, 13 bp, Artificial Sequence
  Oligonucleotide for detection of SNP TSC0032694
tctaccaaataaa

SEQ ID NO: 130995 - DNA, 13 bp, Artificial Sequence
  Oligonucleotide for detection of SNP TSC0032694
tttattcggtaga

SEQ ID NO: 130996 - DNA, 13 bp, Artificial Sequence
  Oligonucleotide for detection of SNP TSC0032694
tctaccgaataaa

SEQ ID NO: 130997 - DNA, 13 bp, Artificial Sequence
  Oligonucleotide for detection of SNP TSC0032695
attattaatatta

SEQ ID NO: 130998 - DNA, 13 bp, Artificial Sequence
  Oligonucleotide for detection of SNP TSC0032695
taatattaataat

SEQ ID NO: 130999 - DNA, 13 bp, Artificial Sequence
  Oligonucleotide for detection of SNP TSC0032695
attatttatatta

SEQ ID NO: 131000 - DNA, 13 bp, Artificial Sequence
  Oligonucleotide for detection of SNP TSC0032695
taatataaataat

SEQ ID NO: 131001 - DNA, 13 bp, Artificial Sequence
  Oligonucleotide for detection of SNP TSC0032695
taatattggtgat

SEQ ID NO: 131002 - DNA, 13 bp, Artificial Sequence
  Oligonucleotide for detection of SNP TSC0032695
atcaccaatatta

SEQ ID NO: 131003 - DNA, 13 bp, Artificial Sequence
  Oligonucleotide for detection of SNP TSC0032695
taatataggtgat

SEQ ID NO: 131004 - DNA, 13 bp, Artificial Sequence
  Oligonucleotide for detection of SNP TSC0032695
atcacctatatta

SEQ ID NO: 131005 - DNA, 13 bp, Artificial Sequence
  Oligonucleotide for detection of SNP TSC0032696
agagggagaggaa

SEQ ID NO: 131006 - DNA, 13 bp, Artificial Sequence
  Oligonucleotide for detection of SNP TSC0032696
ttcctctccctct

SEQ ID NO: 131007 - DNA, 13 bp, Artificial Sequence
  Oligonucleotide for detection of SNP TSC0032696
agagggggaggaa

SEQ ID NO: 131008 - DNA, 13 bp, Artificial Sequence
  Oligonucleotide for detection of SNP TSC0032696
ttcctccccctct

SEQ ID NO: 131009 - DNA, 13 bp, Artificial Sequence
  Oligonucleotide for detection of SNP TSC0032697
tggttttttaggy

SEQ ID NO: 131010 - DNA, 13 bp, Artificial Sequence
  Oligonucleotide for detection of SNP TSC0032697
rcctaaaaaacca

SEQ ID NO: 131011 - DNA, 13 bp, Artificial Sequence
  Oligonucleotide for detection of SNP TSC0032697
tggtttgttaggy

SEQ ID NO: 131012 - DNA, 13 bp, Artificial Sequence
  Oligonucleotide for detection of SNP TSC0032697
rcctaacaaacca

SEQ ID NO: 131013 - DNA, 13 bp, Artificial Sequence
  Oligonucleotide for detection of SNP TSC0032697
cggttttttaggy

SEQ ID NO: 131014 - DNA, 13 bp, Artificial Sequence
  Oligonucleotide for detection of SNP TSC0032697
rcctaaaaaaccg

SEQ ID NO: 131015 - DNA, 13 bp, Artificial Sequence
  Oligonucleotide for detection of SNP TSC0032697
cggtttgttaggy

SEQ ID NO: 131016 - DNA, 13 bp, Artificial Sequence
  Oligonucleotide for detection of SNP TSC0032697
rcctaacaaaccg

SEQ ID NO: 131017 - DNA, 13 bp, Artificial Sequence
  Oligonucleotide for detection of SNP TSC0032697
gtttgggaagttg

SEQ ID NO: 131018 - DNA, 13 bp, Artificial Sequence
  Oligonucleotide for detection of SNP TSC0032697
caacttcccaaac

SEQ ID NO: 131019 - DNA, 13 bp, Artificial Sequence
  Oligonucleotide for detection of SNP TSC0032697
gtttggtaagttg

SEQ ID NO: 131020 - DNA, 13 bp, Artificial Sequence
  Oligonucleotide for detection of SNP TSC0032697
caacttaccaaac

SEQ ID NO: 131021 - DNA, 13 bp, Artificial Sequence
  Oligonucleotide for detection of SNP TSC0032697
gtttgggaagtcg

SEQ ID NO: 131022 - DNA, 13 bp, Artificial Sequence
  Oligonucleotide for detection of SNP TSC0032697
cgacttcccaaac

SEQ ID NO: 131023 - DNA, 13 bp, Artificial Sequence
  Oligonucleotide for detection of SNP TSC0032697
gtttggtaagtcg

SEQ ID NO: 131024 - DNA, 13 bp, Artificial Sequence
  Oligonucleotide for detection of SNP TSC0032697
cgacttaccaaac

SEQ ID NO: 131025 - DNA, 13 bp, Artificial Sequence
  Oligonucleotide for detection of SNP TSC0032698
aaataaagataat

SEQ ID NO: 131026 - DNA, 13 bp, Artificial Sequence
  Oligonucleotide for detection of SNP TSC0032698
attatctttattt

SEQ ID NO: 131027 - DNA, 13 bp, Artificial Sequence
  Oligonucleotide for detection of SNP TSC0032698
aaataaggataat

SEQ ID NO: 131028 - DNA, 13 bp, Artificial Sequence
  Oligonucleotide for detection of SNP TSC0032698
attatccttattt

SEQ ID NO: 131029 - DNA, 13 bp, Artificial Sequence
  Oligonucleotide for detection of SNP TSC0032705
agttttagtatty

SEQ ID NO: 131030 - DNA, 13 bp, Artificial Sequence
  Oligonucleotide for detection of SNP TSC0032705
raatactaaaact

SEQ ID NO: 131031 - DNA, 13 bp, Artificial Sequence
  Oligonucleotide for detection of SNP TSC0032705
agttttggtatty

SEQ ID NO: 131032 - DNA, 13 bp, Artificial Sequence
  Oligonucleotide for detection of SNP TSC0032705
raataccaaaact

SEQ ID NO: 131033 - DNA, 13 bp, Artificial Sequence
  Oligonucleotide for detection of SNP TSC0032705
agtttcggtatty

SEQ ID NO: 131034 - DNA, 13 bp, Artificial Sequence
  Oligonucleotide for detection of SNP TSC0032705
raataccgaaact

SEQ ID NO: 131035 - DNA, 13 bp, Artificial Sequence
  Oligonucleotide for detection of SNP TSC0032705
ggatattgaaatt

SEQ ID NO: 131036 - DNA, 13 bp, Artificial Sequence
  Oligonucleotide for detection of SNP TSC0032705
aatttcaatatcc

SEQ ID NO: 131037 - DNA, 13 bp, Artificial Sequence
  Oligonucleotide for detection of SNP TSC0032705
ggatatcgaaatt

SEQ ID NO: 131038 - DNA, 13 bp, Artificial Sequence
  Oligonucleotide for detection of SNP TSC0032705
aatttcgatatcc

SEQ ID NO: 131039 - DNA, 13 bp, Artificial Sequence
  Oligonucleotide for detection of SNP TSC0032707
tttttaaaattag

SEQ ID NO: 131040 - DNA, 13 bp, Artificial Sequence
  Oligonucleotide for detection of SNP TSC0032707
ctaattttaaaaa

SEQ ID NO: 131041 - DNA, 13 bp, Artificial Sequence
  Oligonucleotide for detection of SNP TSC0032707
tttttagaattag

SEQ ID NO: 131042 - DNA, 13 bp, Artificial Sequence
  Oligonucleotide for detection of SNP TSC0032707
ctaattctaaaaa

SEQ ID NO: 131043 - DNA, 13 bp, Artificial Sequence
  Oligonucleotide for detection of SNP TSC0032708
gaaaggtgtttag

SEQ ID NO: 131044 - DNA, 13 bp, Artificial Sequence
  Oligonucleotide for detection of SNP TSC0032708
ctaaacacctttc

SEQ ID NO: 131045 - DNA, 13 bp, Artificial Sequence
  Oligonucleotide for detection of SNP TSC0032708
gaaaggggtttag

SEQ ID NO: 131046 - DNA, 13 bp, Artificial Sequence
  Oligonucleotide for detection of SNP TSC0032708
ctaaacccctttc

SEQ ID NO: 131047 - DNA, 13 bp, Artificial Sequence
  Oligonucleotide for detection of SNP TSC0032709
gtttgatggtttg

SEQ ID NO: 131048 - DNA, 13 bp, Artificial Sequence
  Oligonucleotide for detection of SNP TSC0032709
caaaccatcaaac

SEQ ID NO: 131049 - DNA, 13 bp, Artificial Sequence
  Oligonucleotide for detection of SNP TSC0032709
gtttgacggtttg

SEQ ID NO: 131050 - DNA, 13 bp, Artificial Sequence
  Oligonucleotide for detection of SNP TSC0032709
caaaccgtcaaac

SEQ ID NO: 131051 - DNA, 13 bp, Artificial Sequence
  Oligonucleotide for detection of SNP TSC0032709
taagttgttaggy

SEQ ID NO: 131052 - DNA, 13 bp, Artificial Sequence
  Oligonucleotide for detection of SNP TSC0032709
rcctaacaactta

SEQ ID NO: 131053 - DNA, 13 bp, Artificial Sequence
  Oligonucleotide for detection of SNP TSC0032709
taagttattaggy

SEQ ID NO: 131054 - DNA, 13 bp, Artificial Sequence
  Oligonucleotide for detection of SNP TSC0032709
rcctaataactta

SEQ ID NO: 131055 - DNA, 13 bp, Artificial Sequence
  Oligonucleotide for detection of SNP TSC0032709
taagtcgttaggy

SEQ ID NO: 131056 - DNA, 13 bp, Artificial Sequence
  Oligonucleotide for detection of SNP TSC0032709
rcctaacgactta

SEQ ID NO: 131057 - DNA, 13 bp, Artificial Sequence
  Oligonucleotide for detection of SNP TSC0032710
ttttttgttgatg

SEQ ID NO: 131058 - DNA, 13 bp, Artificial Sequence
  Oligonucleotide for detection of SNP TSC0032710
catcaacaaaaaa

SEQ ID NO: 131059 - DNA, 13 bp, Artificial Sequence
  Oligonucleotide for detection of SNP TSC0032710
tttttttttgatg

SEQ ID NO: 131060 - DNA, 13 bp, Artificial Sequence
  Oligonucleotide for detection of SNP TSC0032710
catcaaaaaaaaa

SEQ ID NO: 131061 - DNA, 13 bp, Artificial Sequence
  Oligonucleotide for detection of SNP TSC0032710
tttttcgttgatg

SEQ ID NO: 131062 - DNA, 13 bp, Artificial Sequence
  Oligonucleotide for detection of SNP TSC0032710
catcaacgaaaaa

SEQ ID NO: 131063 - DNA, 13 bp, Artificial Sequence
  Oligonucleotide for detection of SNP TSC0032710
tattagtgagaag

SEQ ID NO: 131064 - DNA, 13 bp, Artificial Sequence
  Oligonucleotide for detection of SNP TSC0032710
cttctcactaata

SEQ ID NO: 131065 - DNA, 13 bp, Artificial Sequence
  Oligonucleotide for detection of SNP TSC0032710
tattagagagaag

SEQ ID NO: 131066 - DNA, 13 bp, Artificial Sequence
  Oligonucleotide for detection of SNP TSC0032710
cttctctctaata

SEQ ID NO: 131067 - DNA, 13 bp, Artificial Sequence
  Oligonucleotide for detection of SNP TSC0032710
tattagcgagaag

SEQ ID NO: 131068 - DNA, 13 bp, Artificial Sequence
  Oligonucleotide for detection of SNP TSC0032710
cttctcgctaata

SEQ ID NO: 131069 - DNA, 13 bp, Artificial Sequence
  Oligonucleotide for detection of SNP TSC0032711
ataagtttgttay

SEQ ID NO: 131070 - DNA, 13 bp, Artificial Sequence
  Oligonucleotide for detection of SNP TSC0032711
rtaacaaacttat

SEQ ID NO: 131071 - DNA, 13 bp, Artificial Sequence
  Oligonucleotide for detection of SNP TSC0032711
ataagtgtgttay

SEQ ID NO: 131072 - DNA, 13 bp, Artificial Sequence
  Oligonucleotide for detection of SNP TSC0032711
rtaacacacttat

SEQ ID NO: 131073 - DNA, 13 bp, Artificial Sequence
  Oligonucleotide for detection of SNP TSC0032711
gtggtagatttgt

SEQ ID NO: 131074 - DNA, 13 bp, Artificial Sequence
  Oligonucleotide for detection of SNP TSC0032711
acaaatctaccac

SEQ ID NO: 131075 - DNA, 13 bp, Artificial Sequence
  Oligonucleotide for detection of SNP TSC0032711
gtggtatatttgt

SEQ ID NO: 131076 - DNA, 13 bp, Artificial Sequence
  Oligonucleotide for detection of SNP TSC0032711
acaaatataccac

SEQ ID NO: 131077 - DNA, 13 bp, Artificial Sequence
  Oligonucleotide for detection of SNP TSC0032713
tgattggggttgy

SEQ ID NO: 131078 - DNA, 13 bp, Artificial Sequence
  Oligonucleotide for detection of SNP TSC0032713
rcaaccccaatca

SEQ ID NO: 131079 - DNA, 13 bp, Artificial Sequence
  Oligonucleotide for detection of SNP TSC0032713
tgattgaggttgy

SEQ ID NO: 131080 - DNA, 13 bp, Artificial Sequence
  Oligonucleotide for detection of SNP TSC0032713
rcaacctcaatca

SEQ ID NO: 131081 - DNA, 13 bp, Artificial Sequence
  Oligonucleotide for detection of SNP TSC0032713
cgattggggttgy

SEQ ID NO: 131082 - DNA, 13 bp, Artificial Sequence
  Oligonucleotide for detection of SNP TSC0032713
rcaaccccaatcg

SEQ ID NO: 131083 - DNA, 13 bp, Artificial Sequence
  Oligonucleotide for detection of SNP TSC0032713
cgattgaggttgy

SEQ ID NO: 131084 - DNA, 13 bp, Artificial Sequence
  Oligonucleotide for detection of SNP TSC0032713
rcaacctcaatcg

SEQ ID NO: 131085 - DNA, 13 bp, Artificial Sequence
  Oligonucleotide for detection of SNP TSC0032713
tgattggggtcgy

SEQ ID NO: 131086 - DNA, 13 bp, Artificial Sequence
  Oligonucleotide for detection of SNP TSC0032713
rcgaccccaatca

SEQ ID NO: 131087 - DNA, 13 bp, Artificial Sequence
  Oligonucleotide for detection of SNP TSC0032713
tgattgaggtcgy

SEQ ID NO: 131088 - DNA, 13 bp, Artificial Sequence
  Oligonucleotide for detection of SNP TSC0032713
rcgacctcaatca

SEQ ID NO: 131089 - DNA, 13 bp, Artificial Sequence
  Oligonucleotide for detection of SNP TSC0032713
cgattggggtcgy

SEQ ID NO: 131090 - DNA, 13 bp, Artificial Sequence
  Oligonucleotide for detection of SNP TSC0032713
rcgaccccaatcg

SEQ ID NO: 131091 - DNA, 13 bp, Artificial Sequence
  Oligonucleotide for detection of SNP TSC0032713
cgattgaggtcgy

SEQ ID NO: 131092 - DNA, 13 bp, Artificial Sequence
  Oligonucleotide for detection of SNP TSC0032713
rcgacctcaatcg

SEQ ID NO: 131093 - DNA, 13 bp, Artificial Sequence
  Oligonucleotide for detection of SNP TSC0032714
attggttgggtgy

SEQ ID NO: 131094 - DNA, 13 bp, Artificial Sequence
  Oligonucleotide for detection of SNP TSC0032714
rcacccaaccaat

SEQ ID NO: 131095 - DNA, 13 bp, Artificial Sequence
  Oligonucleotide for detection of SNP TSC0032714
atcggttgggtgy

SEQ ID NO: 131096 - DNA, 13 bp, Artificial Sequence
  Oligonucleotide for detection of SNP TSC0032714
rcacccaaccgat

SEQ ID NO: 131097 - DNA, 13 bp, Artificial Sequence
  Oligonucleotide for detection of SNP TSC0032714
attggtcgggtgy

SEQ ID NO: 131098 - DNA, 13 bp, Artificial Sequence
  Oligonucleotide for detection of SNP TSC0032714
rcacccgaccaat

SEQ ID NO: 131099 - DNA, 13 bp, Artificial Sequence
  Oligonucleotide for detection of SNP TSC0032714
attggttgggcgy

SEQ ID NO: 131100 - DNA, 13 bp, Artificial Sequence
  Oligonucleotide for detection of SNP TSC0032714
rcgcccaaccaat

SEQ ID NO: 131101 - DNA, 13 bp, Artificial Sequence
  Oligonucleotide for detection of SNP TSC0032714
atcggttgggcgy

SEQ ID NO: 131102 - DNA, 13 bp, Artificial Sequence
  Oligonucleotide for detection of SNP TSC0032714
rcgcccaaccgat

SEQ ID NO: 131103 - DNA, 13 bp, Artificial Sequence
  Oligonucleotide for detection of SNP TSC0032714
atcggtcgggtgy

SEQ ID NO: 131104 - DNA, 13 bp, Artificial Sequence
  Oligonucleotide for detection of SNP TSC0032714
rcacccgaccgat

SEQ ID NO: 131105 - DNA, 13 bp, Artificial Sequence
  Oligonucleotide for detection of SNP TSC0032714
attggtcgggcgy

SEQ ID NO: 131106 - DNA, 13 bp, Artificial Sequence
  Oligonucleotide for detection of SNP TSC0032714
rcgcccgaccaat

SEQ ID NO: 131107 - DNA, 13 bp, Artificial Sequence
  Oligonucleotide for detection of SNP TSC0032714
atcggtcgggcgy

SEQ ID NO: 131108 - DNA, 13 bp, Artificial Sequence
  Oligonucleotide for detection of SNP TSC0032714
rcgcccgaccgat

SEQ ID NO: 131109 - DNA, 13 bp, Artificial Sequence
  Oligonucleotide for detection of SNP TSC0032714
gtgtttggttgat

SEQ ID NO: 131110 - DNA, 13 bp, Artificial Sequence
  Oligonucleotide for detection of SNP TSC0032714
atcaaccaaacac

SEQ ID NO: 131111 - DNA, 13 bp, Artificial Sequence
  Oligonucleotide for detection of SNP TSC0032714
gtgtttagttgat

SEQ ID NO: 131112 - DNA, 13 bp, Artificial Sequence
  Oligonucleotide for detection of SNP TSC0032714
atcaactaaacac

SEQ ID NO: 131113 - DNA, 13 bp, Artificial Sequence
  Oligonucleotide for detection of SNP TSC0032714
gcgtttggttgat

SEQ ID NO: 131114 - DNA, 13 bp, Artificial Sequence
  Oligonucleotide for detection of SNP TSC0032714
atcaaccaaacgc

SEQ ID NO: 131115 - DNA, 13 bp, Artificial Sequence
  Oligonucleotide for detection of SNP TSC0032714
gcgtttagttgat

SEQ ID NO: 131116 - DNA, 13 bp, Artificial Sequence
  Oligonucleotide for detection of SNP TSC0032714
atcaactaaacgc

SEQ ID NO: 131117 - DNA, 13 bp, Artificial Sequence
  Oligonucleotide for detection of SNP TSC0032714
gtgttcggttgat

SEQ ID NO: 131118 - DNA, 13 bp, Artificial Sequence
  Oligonucleotide for detection of SNP TSC0032714
atcaaccgaacac

SEQ ID NO: 131119 - DNA, 13 bp, Artificial Sequence
  Oligonucleotide for detection of SNP TSC0032714
gtgtttagtcgat

SEQ ID NO: 131120 - DNA, 13 bp, Artificial Sequence
  Oligonucleotide for detection of SNP TSC0032714
atcgactaaacac

SEQ ID NO: 131121 - DNA, 13 bp, Artificial Sequence
  Oligonucleotide for detection of SNP TSC0032714
gtgtttggtcgat

SEQ ID NO: 131122 - DNA, 13 bp, Artificial Sequence
  Oligonucleotide for detection of SNP TSC0032714
atcgaccaaacac

SEQ ID NO: 131123 - DNA, 13 bp, Artificial Sequence
  Oligonucleotide for detection of SNP TSC0032714
gcgtttagtcgat

SEQ ID NO: 131124 - DNA, 13 bp, Artificial Sequence
  Oligonucleotide for detection of SNP TSC0032714
atcgactaaacgc

SEQ ID NO: 131125 - DNA, 13 bp, Artificial Sequence
  Oligonucleotide for detection of SNP TSC0032714
gcgttcggttgat

SEQ ID NO: 131126 - DNA, 13 bp, Artificial Sequence
  Oligonucleotide for detection of SNP TSC0032714
atcaaccgaacgc

SEQ ID NO: 131127 - DNA, 13 bp, Artificial Sequence
  Oligonucleotide for detection of SNP TSC0032714
gcgtttggtcgat

SEQ ID NO: 131128 - DNA, 13 bp, Artificial Sequence
  Oligonucleotide for detection of SNP TSC0032714
atcgaccaaacgc

SEQ ID NO: 131129 - DNA, 13 bp, Artificial Sequence
  Oligonucleotide for detection of SNP TSC0032714
gtgttcggtcgat

SEQ ID NO: 131130 - DNA, 13 bp, Artificial Sequence
  Oligonucleotide for detection of SNP TSC0032714
atcgaccgaacac

SEQ ID NO: 131131 - DNA, 13 bp, Artificial Sequence
  Oligonucleotide for detection of SNP TSC0032714
gcgttcggtcgat

SEQ ID NO: 131132 - DNA, 13 bp, Artificial Sequence
  Oligonucleotide for detection of SNP TSC0032714
atcgaccgaacgc

SEQ ID NO: 131133 - DNA, 13 bp, Artificial Sequence
  Oligonucleotide for detection of SNP TSC0032715
gttgggtgcggtg

SEQ ID NO: 131134 - DNA, 13 bp, Artificial Sequence
  Oligonucleotide for detection of SNP TSC0032715
caccgcacccaac

SEQ ID NO: 131135 - DNA, 13 bp, Artificial Sequence
  Oligonucleotide for detection of SNP TSC0032715
gtcgggtgcggtg

SEQ ID NO: 131136 - DNA, 13 bp, Artificial Sequence
  Oligonucleotide for detection of SNP TSC0032715
caccgcacccgac

SEQ ID NO: 131137 - DNA, 13 bp, Artificial Sequence
  Oligonucleotide for detection of SNP TSC0032715
gttgggcgcggtg

SEQ ID NO: 131138 - DNA, 13 bp, Artificial Sequence
  Oligonucleotide for detection of SNP TSC0032715
caccgcgcccaac

SEQ ID NO: 131139 - DNA, 13 bp, Artificial Sequence
  Oligonucleotide for detection of SNP TSC0032715
gtcgggcgcggtg

SEQ ID NO: 131140 - DNA, 13 bp, Artificial Sequence
  Oligonucleotide for detection of SNP TSC0032715
caccgcgcccgac

SEQ ID NO: 131141 - DNA, 13 bp, Artificial Sequence
  Oligonucleotide for detection of SNP TSC0032715
tatcgtgtttggy

SEQ ID NO: 131142 - DNA, 13 bp, Artificial Sequence
  Oligonucleotide for detection of SNP TSC0032715
rccaaacacgata

SEQ ID NO: 131143 - DNA, 13 bp, Artificial Sequence
  Oligonucleotide for detection of SNP TSC0032715
tatcgtatttggy

SEQ ID NO: 131144 - DNA, 13 bp, Artificial Sequence
  Oligonucleotide for detection of SNP TSC0032715
rccaaatacgata

SEQ ID NO: 131145 - DNA, 13 bp, Artificial Sequence
  Oligonucleotide for detection of SNP TSC0032715
tatcgtattcggy

SEQ ID NO: 131146 - DNA, 13 bp, Artificial Sequence
  Oligonucleotide for detection of SNP TSC0032715
rccgaatacgata

SEQ ID NO: 131147 - DNA, 13 bp, Artificial Sequence
  Oligonucleotide for detection of SNP TSC0032715
tatcgcgtttggy

SEQ ID NO: 131148 - DNA, 13 bp, Artificial Sequence
  Oligonucleotide for detection of SNP TSC0032715
rccaaacgcgata

SEQ ID NO: 131149 - DNA, 13 bp, Artificial Sequence
  Oligonucleotide for detection of SNP TSC0032715
tatcgtgttcggy

SEQ ID NO: 131150 - DNA, 13 bp, Artificial Sequence
  Oligonucleotide for detection of SNP TSC0032715
rccgaacacgata

SEQ ID NO: 131151 - DNA, 13 bp, Artificial Sequence
  Oligonucleotide for detection of SNP TSC0032715
tatcgcgttcggy

SEQ ID NO: 131152 - DNA, 13 bp, Artificial Sequence
  Oligonucleotide for detection of SNP TSC0032715
rccgaacgcgata

SEQ ID NO: 131153 - DNA, 13 bp, Artificial Sequence
  Oligonucleotide for detection of SNP TSC0032716
ttatttaggaggt

SEQ ID NO: 131154 - DNA, 13 bp, Artificial Sequence
  Oligonucleotide for detection of SNP TSC0032716
acctcctaaataa

SEQ ID NO: 131155 - DNA, 13 bp, Artificial Sequence
  Oligonucleotide for detection of SNP TSC0032716
ttatttgggaggt

SEQ ID NO: 131156 - DNA, 13 bp, Artificial Sequence
  Oligonucleotide for detection of SNP TSC0032716
acctcccaaataa

SEQ ID NO: 131157 - DNA, 13 bp, Artificial Sequence
  Oligonucleotide for detection of SNP TSC0032716
ttattcgggaggt

SEQ ID NO: 131158 - DNA, 13 bp, Artificial Sequence
  Oligonucleotide for detection of SNP TSC0032716
acctcccgaataa

SEQ ID NO: 131159 - DNA, 13 bp, Artificial Sequence
  Oligonucleotide for detection of SNP TSC0032716
attttttgagtag

SEQ ID NO: 131160 - DNA, 13 bp, Artificial Sequence
  Oligonucleotide for detection of SNP TSC0032716
ctactcaaaaaat

SEQ ID NO: 131161 - DNA, 13 bp, Artificial Sequence
  Oligonucleotide for detection of SNP TSC0032716
atttttcgagtag

SEQ ID NO: 131162 - DNA, 13 bp, Artificial Sequence
  Oligonucleotide for detection of SNP TSC0032716
ctactcgaaaaat

SEQ ID NO: 131163 - DNA, 13 bp, Artificial Sequence
  Oligonucleotide for detection of SNP TSC0032719
aataatgtgtaty

SEQ ID NO: 131164 - DNA, 13 bp, Artificial Sequence
  Oligonucleotide for detection of SNP TSC0032719
ratacacattatt

SEQ ID NO: 131165 - DNA, 13 bp, Artificial Sequence
  Oligonucleotide for detection of SNP TSC0032719
aataatttgtaty

SEQ ID NO: 131166 - DNA, 13 bp, Artificial Sequence
  Oligonucleotide for detection of SNP TSC0032719
ratacaaattatt

SEQ ID NO: 131167 - DNA, 13 bp, Artificial Sequence
  Oligonucleotide for detection of SNP TSC0032719
gatatatattatt

SEQ ID NO: 131168 - DNA, 13 bp, Artificial Sequence
  Oligonucleotide for detection of SNP TSC0032719
aataatatatatc

SEQ ID NO: 131169 - DNA, 13 bp, Artificial Sequence
  Oligonucleotide for detection of SNP TSC0032719
gatataaattatt

SEQ ID NO: 131170 - DNA, 13 bp, Artificial Sequence
  Oligonucleotide for detection of SNP TSC0032719
aataatttatatc

SEQ ID NO: 131171 - DNA, 13 bp, Artificial Sequence
  Oligonucleotide for detection of SNP TSC0032720
tttaatatgtgtg

SEQ ID NO: 131172 - DNA, 13 bp, Artificial Sequence
  Oligonucleotide for detection of SNP TSC0032720
cacacatattaaa

SEQ ID NO: 131173 - DNA, 13 bp, Artificial Sequence
  Oligonucleotide for detection of SNP TSC0032720
tttaatgtgtgtg

SEQ ID NO: 131174 - DNA, 13 bp, Artificial Sequence
  Oligonucleotide for detection of SNP TSC0032720
cacacacattaaa

SEQ ID NO: 131175 - DNA, 13 bp, Artificial Sequence
  Oligonucleotide for detection of SNP TSC0032722
aatagtatgtgtt

SEQ ID NO: 131176 - DNA, 13 bp, Artificial Sequence
  Oligonucleotide for detection of SNP TSC0032722
aacacatactatt

SEQ ID NO: 131177 - DNA, 13 bp, Artificial Sequence
  Oligonucleotide for detection of SNP TSC0032722
aatagtgtgtgtt

SEQ ID NO: 131178 - DNA, 13 bp, Artificial Sequence
  Oligonucleotide for detection of SNP TSC0032722
aacacacactatt

SEQ ID NO: 131179 - DNA, 13 bp, Artificial Sequence
  Oligonucleotide for detection of SNP TSC0032726
tagtgtgtatagy

SEQ ID NO: 131180 - DNA, 13 bp, Artificial Sequence
  Oligonucleotide for detection of SNP TSC0032726
rctatacacacta

SEQ ID NO: 131181 - DNA, 13 bp, Artificial Sequence
  Oligonucleotide for detection of SNP TSC0032726
tagtgtatatagy

SEQ ID NO: 131182 - DNA, 13 bp, Artificial Sequence
  Oligonucleotide for detection of SNP TSC0032726
rctatatacacta

SEQ ID NO: 131183 - DNA, 13 bp, Artificial Sequence
  Oligonucleotide for detection of SNP TSC0032727
gggaaaagagtag

SEQ ID NO: 131184 - DNA, 13 bp, Artificial Sequence
  Oligonucleotide for detection of SNP TSC0032727
ctactcttttccc

SEQ ID NO: 131185 - DNA, 13 bp, Artificial Sequence
  Oligonucleotide for detection of SNP TSC0032727
gggaaaggagtag

SEQ ID NO: 131186 - DNA, 13 bp, Artificial Sequence
  Oligonucleotide for detection of SNP TSC0032727
ctactcctttccc

SEQ ID NO: 131187 - DNA, 13 bp, Artificial Sequence
  Oligonucleotide for detection of SNP TSC0032730
tgtaatgttagta

SEQ ID NO: 131188 - DNA, 13 bp, Artificial Sequence
  Oligonucleotide for detection of SNP TSC0032730
tactaacattaca

SEQ ID NO: 131189 - DNA, 13 bp, Artificial Sequence
  Oligonucleotide for detection of SNP TSC0032734
ttaatatggaggt

SEQ ID NO: 131190 - DNA, 13 bp, Artificial Sequence
  Oligonucleotide for detection of SNP TSC0032734
acctccatattaa

SEQ ID NO: 131191 - DNA, 13 bp, Artificial Sequence
  Oligonucleotide for detection of SNP TSC0032734
ttaatacggaggt

SEQ ID NO: 131192 - DNA, 13 bp, Artificial Sequence
  Oligonucleotide for detection of SNP TSC0032734
acctccgtattaa

SEQ ID NO: 131193 - DNA, 13 bp, Artificial Sequence
  Oligonucleotide for detection of SNP TSC0032734
atttttgtgttgg

SEQ ID NO: 131194 - DNA, 13 bp, Artificial Sequence
  Oligonucleotide for detection of SNP TSC0032734
ccaacacaaaaat

SEQ ID NO: 131195 - DNA, 13 bp, Artificial Sequence
  Oligonucleotide for detection of SNP TSC0032734
atttttatgttgg

SEQ ID NO: 131196 - DNA, 13 bp, Artificial Sequence
  Oligonucleotide for detection of SNP TSC0032734
ccaacataaaaat

SEQ ID NO: 131197 - DNA, 13 bp, Artificial Sequence
  Oligonucleotide for detection of SNP TSC0032734
attttcgtgttgg

SEQ ID NO: 131198 - DNA, 13 bp, Artificial Sequence
  Oligonucleotide for detection of SNP TSC0032734
ccaacacgaaaat

SEQ ID NO: 131199 - DNA, 13 bp, Artificial Sequence
  Oligonucleotide for detection of SNP TSC0032735
ttattaaaattat

SEQ ID NO: 131200 - DNA, 13 bp, Artificial Sequence
  Oligonucleotide for detection of SNP TSC0032735
ataattttaataa

SEQ ID NO: 131201 - DNA, 13 bp, Artificial Sequence
  Oligonucleotide for detection of SNP TSC0032735
ttattataattat

SEQ ID NO: 131202 - DNA, 13 bp, Artificial Sequence
  Oligonucleotide for detection of SNP TSC0032735
ataattataataa

SEQ ID NO: 131203 - DNA, 13 bp, Artificial Sequence
  Oligonucleotide for detection of SNP TSC0032735
ataattttgataa

SEQ ID NO: 131204 - DNA, 13 bp, Artificial Sequence
  Oligonucleotide for detection of SNP TSC0032735
ttatcaaaattat

SEQ ID NO: 131205 - DNA, 13 bp, Artificial Sequence
  Oligonucleotide for detection of SNP TSC0032735
ataattgtgataa

SEQ ID NO: 131206 - DNA, 13 bp, Artificial Sequence
  Oligonucleotide for detection of SNP TSC0032735
ttatcacaattat

SEQ ID NO: 131207 - DNA, 13 bp, Artificial Sequence
  Oligonucleotide for detection of SNP TSC0032737
ggtaaagggtgat

SEQ ID NO: 131208 - DNA, 13 bp, Artificial Sequence
  Oligonucleotide for detection of SNP TSC0032737
atcaccctttacc

SEQ ID NO: 131209 - DNA, 13 bp, Artificial Sequence
  Oligonucleotide for detection of SNP TSC0032737
ggtaaaaggtgat

SEQ ID NO: 131210 - DNA, 13 bp, Artificial Sequence
  Oligonucleotide for detection of SNP TSC0032737
atcaccttttacc

SEQ ID NO: 131211 - DNA, 13 bp, Artificial Sequence
  Oligonucleotide for detection of SNP TSC0032737
ggtaaagggcgat

SEQ ID NO: 131212 - DNA, 13 bp, Artificial Sequence
  Oligonucleotide for detection of SNP TSC0032737
atcgccctttacc

SEQ ID NO: 131213 - DNA, 13 bp, Artificial Sequence
  Oligonucleotide for detection of SNP TSC0032737
ggtaaaaggcgat

SEQ ID NO: 131214 - DNA, 13 bp, Artificial Sequence
  Oligonucleotide for detection of SNP TSC0032737
atcgccttttacc

SEQ ID NO: 131215 - DNA, 13 bp, Artificial Sequence
  Oligonucleotide for detection of SNP TSC0032741
aatatgaatagag

SEQ ID NO: 131216 - DNA, 13 bp, Artificial Sequence
  Oligonucleotide for detection of SNP TSC0032741
ctctattcatatt

SEQ ID NO: 131217 - DNA, 13 bp, Artificial Sequence
  Oligonucleotide for detection of SNP TSC0032741
aatatgtatagag

SEQ ID NO: 131218 - DNA, 13 bp, Artificial Sequence
  Oligonucleotide for detection of SNP TSC0032741
ctctatacatatt

SEQ ID NO: 131219 - DNA, 13 bp, Artificial Sequence
  Oligonucleotide for detection of SNP TSC0032741
ttttatttatatt

SEQ ID NO: 131220 - DNA, 13 bp, Artificial Sequence
  Oligonucleotide for detection of SNP TSC0032741
aatataaataaaa

SEQ ID NO: 131221 - DNA, 13 bp, Artificial Sequence
  Oligonucleotide for detection of SNP TSC0032742
ttatttgttggta

SEQ ID NO: 131222 - DNA, 13 bp, Artificial Sequence
  Oligonucleotide for detection of SNP TSC0032742
taccaacaaataa

SEQ ID NO: 131223 - DNA, 13 bp, Artificial Sequence
  Oligonucleotide for detection of SNP TSC0032742
ttatttattggta

SEQ ID NO: 131224 - DNA, 13 bp, Artificial Sequence
  Oligonucleotide for detection of SNP TSC0032742
taccaataaataa

SEQ ID NO: 131225 - DNA, 13 bp, Artificial Sequence
  Oligonucleotide for detection of SNP TSC0032743
attagaaaatgtt

SEQ ID NO: 131226 - DNA, 13 bp, Artificial Sequence
  Oligonucleotide for detection of SNP TSC0032743
aacattttctaat

SEQ ID NO: 131227 - DNA, 13 bp, Artificial Sequence
  Oligonucleotide for detection of SNP TSC0032743
attagagaatgtt

SEQ ID NO: 131228 - DNA, 13 bp, Artificial Sequence
  Oligonucleotide for detection of SNP TSC0032743
aacattctctaat

SEQ ID NO: 131229 - DNA, 13 bp, Artificial Sequence
  Oligonucleotide for detection of SNP TSC0032744
ttataggttttay

SEQ ID NO: 131230 - DNA, 13 bp, Artificial Sequence
  Oligonucleotide for detection of SNP TSC0032744
rtaaaacctataa

SEQ ID NO: 131231 - DNA, 13 bp, Artificial Sequence
  Oligonucleotide for detection of SNP TSC0032744
gtgaagtttataa

SEQ ID NO: 131232 - DNA, 13 bp, Artificial Sequence
  Oligonucleotide for detection of SNP TSC0032744
ttataaacttcac

SEQ ID NO: 131233 - DNA, 13 bp, Artificial Sequence
  Oligonucleotide for detection of SNP TSC0032744
gtgaagattataa

SEQ ID NO: 131234 - DNA, 13 bp, Artificial Sequence
  Oligonucleotide for detection of SNP TSC0032744
ttataatcttcac

SEQ ID NO: 131235 - DNA, 13 bp, Artificial Sequence
  Oligonucleotide for detection of SNP TSC0032745
atagaataaaggg

SEQ ID NO: 131236 - DNA, 13 bp, Artificial Sequence
  Oligonucleotide for detection of SNP TSC0032745
ccctttattctat

SEQ ID NO: 131237 - DNA, 13 bp, Artificial Sequence
  Oligonucleotide for detection of SNP TSC0032745
atagaagaaaggg

SEQ ID NO: 131238 - DNA, 13 bp, Artificial Sequence
  Oligonucleotide for detection of SNP TSC0032745
ccctttcttctat

SEQ ID NO: 131239 - DNA, 13 bp, Artificial Sequence
  Oligonucleotide for detection of SNP TSC0032746
aaggtgagtatgg

SEQ ID NO: 131240 - DNA, 13 bp, Artificial Sequence
  Oligonucleotide for detection of SNP TSC0032746
ccatactcacctt

SEQ ID NO: 131241 - DNA, 13 bp, Artificial Sequence
  Oligonucleotide for detection of SNP TSC0032746
aaggtgggtatgg

SEQ ID NO: 131242 - DNA, 13 bp, Artificial Sequence
  Oligonucleotide for detection of SNP TSC0032746
ccatacccacctt

SEQ ID NO: 131243 - DNA, 13 bp, Artificial Sequence
  Oligonucleotide for detection of SNP TSC0032746
aaggtgagtacgg

SEQ ID NO: 131244 - DNA, 13 bp, Artificial Sequence
  Oligonucleotide for detection of SNP TSC0032746
ccgtactcacctt

SEQ ID NO: 131245 - DNA, 13 bp, Artificial Sequence
  Oligonucleotide for detection of SNP TSC0032746
aaggtgggtacgg

SEQ ID NO: 131246 - DNA, 13 bp, Artificial Sequence
  Oligonucleotide for detection of SNP TSC0032746
ccgtacccacctt

SEQ ID NO: 131247 - DNA, 13 bp, Artificial Sequence
  Oligonucleotide for detection of SNP TSC0032749
tttttgggtaaty

SEQ ID NO: 131248 - DNA, 13 bp, Artificial Sequence
  Oligonucleotide for detection of SNP TSC0032749
rattacccaaaaa

SEQ ID NO: 131249 - DNA, 13 bp, Artificial Sequence
  Oligonucleotide for detection of SNP TSC0032749
tttttgagtaaty

SEQ ID NO: 131250 - DNA, 13 bp, Artificial Sequence
  Oligonucleotide for detection of SNP TSC0032749
rattactcaaaaa

SEQ ID NO: 131251 - DNA, 13 bp, Artificial Sequence
  Oligonucleotide for detection of SNP TSC0032754
ttttagatttaay

SEQ ID NO: 131252 - DNA, 13 bp, Artificial Sequence
  Oligonucleotide for detection of SNP TSC0032754
rttaaatctaaaa

SEQ ID NO: 131253 - DNA, 13 bp, Artificial Sequence
  Oligonucleotide for detection of SNP TSC0032754
ttttagttttaay

SEQ ID NO: 131254 - DNA, 13 bp, Artificial Sequence
  Oligonucleotide for detection of SNP TSC0032754
rttaaaactaaaa

SEQ ID NO: 131255 - DNA, 13 bp, Artificial Sequence
  Oligonucleotide for detection of SNP TSC0032754
gttgaatttggag

SEQ ID NO: 131256 - DNA, 13 bp, Artificial Sequence
  Oligonucleotide for detection of SNP TSC0032754
ctccaaattcaac

SEQ ID NO: 131257 - DNA, 13 bp, Artificial Sequence
  Oligonucleotide for detection of SNP TSC0032754
gttgaagttggag

SEQ ID NO: 131258 - DNA, 13 bp, Artificial Sequence
  Oligonucleotide for detection of SNP TSC0032754
ctccaacttcaac

SEQ ID NO: 131259 - DNA, 13 bp, Artificial Sequence
  Oligonucleotide for detection of SNP TSC0032755
tgttttattttcg

SEQ ID NO: 131260 - DNA, 13 bp, Artificial Sequence
  Oligonucleotide for detection of SNP TSC0032755
cgaaaataaaaca

SEQ ID NO: 131261 - DNA, 13 bp, Artificial Sequence
  Oligonucleotide for detection of SNP TSC0032755
tgtttcgtttttg

SEQ ID NO: 131262 - DNA, 13 bp, Artificial Sequence
  Oligonucleotide for detection of SNP TSC0032755
caaaaacgaaaca

SEQ ID NO: 131263 - DNA, 13 bp, Artificial Sequence
  Oligonucleotide for detection of SNP TSC0032755
tgttttgttttcg

SEQ ID NO: 131264 - DNA, 13 bp, Artificial Sequence
  Oligonucleotide for detection of SNP TSC0032755
cgaaaacaaaaca

SEQ ID NO: 131265 - DNA, 13 bp, Artificial Sequence
  Oligonucleotide for detection of SNP TSC0032755
tgtttcgttttcg

SEQ ID NO: 131266 - DNA, 13 bp, Artificial Sequence
  Oligonucleotide for detection of SNP TSC0032755
cgaaaacgaaaca

SEQ ID NO: 131267 - DNA, 13 bp, Artificial Sequence
  Oligonucleotide for detection of SNP TSC0032755
tgagagtgggata

SEQ ID NO: 131268 - DNA, 13 bp, Artificial Sequence
  Oligonucleotide for detection of SNP TSC0032755
tatcccactctca

SEQ ID NO: 131269 - DNA, 13 bp, Artificial Sequence
  Oligonucleotide for detection of SNP TSC0032755
cgagagtgggata

SEQ ID NO: 131270 - DNA, 13 bp, Artificial Sequence
  Oligonucleotide for detection of SNP TSC0032755
tatcccactctcg

SEQ ID NO: 131271 - DNA, 13 bp, Artificial Sequence
  Oligonucleotide for detection of SNP TSC0032755
tgagagcgggata

SEQ ID NO: 131272 - DNA, 13 bp, Artificial Sequence
  Oligonucleotide for detection of SNP TSC0032755
tatcccgctctca

SEQ ID NO: 131273 - DNA, 13 bp, Artificial Sequence
  Oligonucleotide for detection of SNP TSC0032755
cgagagcgggata

SEQ ID NO: 131274 - DNA, 13 bp, Artificial Sequence
  Oligonucleotide for detection of SNP TSC0032755
tatcccgctctcg

SEQ ID NO: 131275 - DNA, 13 bp, Artificial Sequence
  Oligonucleotide for detection of SNP TSC0032758
ggttggattgagy

SEQ ID NO: 131276 - DNA, 13 bp, Artificial Sequence
  Oligonucleotide for detection of SNP TSC0032758
rctcaatccaacc

SEQ ID NO: 131277 - DNA, 13 bp, Artificial Sequence
  Oligonucleotide for detection of SNP TSC0032758
ggttgggttgagy

SEQ ID NO: 131278 - DNA, 13 bp, Artificial Sequence
  Oligonucleotide for detection of SNP TSC0032758
rctcaacccaacc

SEQ ID NO: 131279 - DNA, 13 bp, Artificial Sequence
  Oligonucleotide for detection of SNP TSC0032758
ggttggatcgagy

SEQ ID NO: 131280 - DNA, 13 bp, Artificial Sequence
  Oligonucleotide for detection of SNP TSC0032758
rctcgatccaacc

SEQ ID NO: 131281 - DNA, 13 bp, Artificial Sequence
  Oligonucleotide for detection of SNP TSC0032758
ggttgggtcgagy

SEQ ID NO: 131282 - DNA, 13 bp, Artificial Sequence
  Oligonucleotide for detection of SNP TSC0032758
rctcgacccaacc

SEQ ID NO: 131283 - DNA, 13 bp, Artificial Sequence
  Oligonucleotide for detection of SNP TSC0032760
atatatgtatttg

SEQ ID NO: 131284 - DNA, 13 bp, Artificial Sequence
  Oligonucleotide for detection of SNP TSC0032760
caaatacatatat

SEQ ID NO: 131285 - DNA, 13 bp, Artificial Sequence
  Oligonucleotide for detection of SNP TSC0032760
atatatatatttg

SEQ ID NO: 131286 - DNA, 13 bp, Artificial Sequence
  Oligonucleotide for detection of SNP TSC0032760
caaatatatatat

SEQ ID NO: 131287 - DNA, 13 bp, Artificial Sequence
  Oligonucleotide for detection of SNP TSC0032765
ggagaatggaggt

SEQ ID NO: 131288 - DNA, 13 bp, Artificial Sequence
  Oligonucleotide for detection of SNP TSC0032765
acctccattctcc

SEQ ID NO: 131289 - DNA, 13 bp, Artificial Sequence
  Oligonucleotide for detection of SNP TSC0032765
ggagaacggaggt

SEQ ID NO: 131290 - DNA, 13 bp, Artificial Sequence
  Oligonucleotide for detection of SNP TSC0032765
acctccgttctcc

SEQ ID NO: 131291 - DNA, 13 bp, Artificial Sequence
  Oligonucleotide for detection of SNP TSC0032767
ataaatattatgt

SEQ ID NO: 131292 - DNA, 13 bp, Artificial Sequence
  Oligonucleotide for detection of SNP TSC0032767
acataatatttat

SEQ ID NO: 131293 - DNA, 13 bp, Artificial Sequence
  Oligonucleotide for detection of SNP TSC0032767
ataaatgttatgt

SEQ ID NO: 131294 - DNA, 13 bp, Artificial Sequence
  Oligonucleotide for detection of SNP TSC0032767
acataacatttat

SEQ ID NO: 131295 - DNA, 13 bp, Artificial Sequence
  Oligonucleotide for detection of SNP TSC0032768
aatatggttggty

SEQ ID NO: 131296 - DNA, 13 bp, Artificial Sequence
  Oligonucleotide for detection of SNP TSC0032768
raccaaccatatt

SEQ ID NO: 131297 - DNA, 13 bp, Artificial Sequence
  Oligonucleotide for detection of SNP TSC0032768
aatatgattggty

SEQ ID NO: 131298 - DNA, 13 bp, Artificial Sequence
  Oligonucleotide for detection of SNP TSC0032768
raccaatcatatt

SEQ ID NO: 131299 - DNA, 13 bp, Artificial Sequence
  Oligonucleotide for detection of SNP TSC0032768
aatatggtcggty

SEQ ID NO: 131300 - DNA, 13 bp, Artificial Sequence
  Oligonucleotide for detection of SNP TSC0032768
raccgaccatatt

SEQ ID NO: 131301 - DNA, 13 bp, Artificial Sequence
  Oligonucleotide for detection of SNP TSC0032768
aatatgatcggty

SEQ ID NO: 131302 - DNA, 13 bp, Artificial Sequence
  Oligonucleotide for detection of SNP TSC0032768
raccgatcatatt

SEQ ID NO: 131303 - DNA, 13 bp, Artificial Sequence
  Oligonucleotide for detection of SNP TSC0032770
tataagggtagty

SEQ ID NO: 131304 - DNA, 13 bp, Artificial Sequence
  Oligonucleotide for detection of SNP TSC0032770
ractacccttata

SEQ ID NO: 131305 - DNA, 13 bp, Artificial Sequence
  Oligonucleotide for detection of SNP TSC0032770
tataagagtagty

SEQ ID NO: 131306 - DNA, 13 bp, Artificial Sequence
  Oligonucleotide for detection of SNP TSC0032770
ractactcttata

SEQ ID NO: 131307 - DNA, 13 bp, Artificial Sequence
  Oligonucleotide for detection of SNP TSC0032772
ttagtagaatgtt

SEQ ID NO: 131308 - DNA, 13 bp, Artificial Sequence
  Oligonucleotide for detection of SNP TSC0032772
aacattctactaa

SEQ ID NO: 131309 - DNA, 13 bp, Artificial Sequence
  Oligonucleotide for detection of SNP TSC0032773
tatatagtgttta

SEQ ID NO: 131310 - DNA, 13 bp, Artificial Sequence
  Oligonucleotide for detection of SNP TSC0032773
taaacactatata

SEQ ID NO: 131311 - DNA, 13 bp, Artificial Sequence
  Oligonucleotide for detection of SNP TSC0032773
tatataatgttta

SEQ ID NO: 131312 - DNA, 13 bp, Artificial Sequence
  Oligonucleotide for detection of SNP TSC0032773
taaacattatata

SEQ ID NO: 131313 - DNA, 13 bp, Artificial Sequence
  Oligonucleotide for detection of SNP TSC0032774
ggtattatgtgga

SEQ ID NO: 131314 - DNA, 13 bp, Artificial Sequence
  Oligonucleotide for detection of SNP TSC0032774
tccacataatacc

SEQ ID NO: 131315 - DNA, 13 bp, Artificial Sequence
  Oligonucleotide for detection of SNP TSC0032774
ggtattgtgtgga

SEQ ID NO: 131316 - DNA, 13 bp, Artificial Sequence
  Oligonucleotide for detection of SNP TSC0032774
tccacacaatacc

SEQ ID NO: 131317 - DNA, 13 bp, Artificial Sequence
  Oligonucleotide for detection of SNP TSC0032776
ttagtaatatgtt

SEQ ID NO: 131318 - DNA, 13 bp, Artificial Sequence
  Oligonucleotide for detection of SNP TSC0032776
aacatattactaa

SEQ ID NO: 131319 - DNA, 13 bp, Artificial Sequence
  Oligonucleotide for detection of SNP TSC0032776
ttagtagtatgtt

SEQ ID NO: 131320 - DNA, 13 bp, Artificial Sequence
  Oligonucleotide for detection of SNP TSC0032776
aacatactactaa

SEQ ID NO: 131321 - DNA, 13 bp, Artificial Sequence
  Oligonucleotide for detection of SNP TSC0032777
taagagatagtty

SEQ ID NO: 131322 - DNA, 13 bp, Artificial Sequence
  Oligonucleotide for detection of SNP TSC0032777
raactatctctta

SEQ ID NO: 131323 - DNA, 13 bp, Artificial Sequence
  Oligonucleotide for detection of SNP TSC0032777
taagagttagtty

SEQ ID NO: 131324 - DNA, 13 bp, Artificial Sequence
  Oligonucleotide for detection of SNP TSC0032777
raactaactctta

SEQ ID NO: 131325 - DNA, 13 bp, Artificial Sequence
  Oligonucleotide for detection of SNP TSC0032777
gagttgttttttg

SEQ ID NO: 131326 - DNA, 13 bp, Artificial Sequence
  Oligonucleotide for detection of SNP TSC0032777
caaaaaacaactc

SEQ ID NO: 131327 - DNA, 13 bp, Artificial Sequence
  Oligonucleotide for detection of SNP TSC0032777
gagttgatttttg

SEQ ID NO: 131328 - DNA, 13 bp, Artificial Sequence
  Oligonucleotide for detection of SNP TSC0032777
caaaaatcaactc

SEQ ID NO: 131329 - DNA, 13 bp, Artificial Sequence
  Oligonucleotide for detection of SNP TSC0032778
agttatgttgagy

SEQ ID NO: 131330 - DNA, 13 bp, Artificial Sequence
  Oligonucleotide for detection of SNP TSC0032778
rctcaacataact

SEQ ID NO: 131331 - DNA, 13 bp, Artificial Sequence
  Oligonucleotide for detection of SNP TSC0032778
agttatattgagy

SEQ ID NO: 131332 - DNA, 13 bp, Artificial Sequence
  Oligonucleotide for detection of SNP TSC0032778
rctcaatataact

SEQ ID NO: 131333 - DNA, 13 bp, Artificial Sequence
  Oligonucleotide for detection of SNP TSC0032780
gatagggttttgy

SEQ ID NO: 131334 - DNA, 13 bp, Artificial Sequence
  Oligonucleotide for detection of SNP TSC0032780
rcaaaaccctatc

SEQ ID NO: 131335 - DNA, 13 bp, Artificial Sequence
  Oligonucleotide for detection of SNP TSC0032780
gataggtttttgy

SEQ ID NO: 131336 - DNA, 13 bp, Artificial Sequence
  Oligonucleotide for detection of SNP TSC0032780
rcaaaaacctatc

SEQ ID NO: 131337 - DNA, 13 bp, Artificial Sequence
  Oligonucleotide for detection of SNP TSC0032780
gtaagattttgty

SEQ ID NO: 131338 - DNA, 13 bp, Artificial Sequence
  Oligonucleotide for detection of SNP TSC0032780
racaaaatcttac

SEQ ID NO: 131339 - DNA, 13 bp, Artificial Sequence
  Oligonucleotide for detection of SNP TSC0032780
gtaagaatttgty

SEQ ID NO: 131340 - DNA, 13 bp, Artificial Sequence
  Oligonucleotide for detection of SNP TSC0032780
racaaattcttac

SEQ ID NO: 131341 - DNA, 13 bp, Artificial Sequence
  Oligonucleotide for detection of SNP TSC0032782
aaatgtattttta

SEQ ID NO: 131342 - DNA, 13 bp, Artificial Sequence
  Oligonucleotide for detection of SNP TSC0032782
taaaaatacattt

SEQ ID NO: 131343 - DNA, 13 bp, Artificial Sequence
  Oligonucleotide for detection of SNP TSC0032782
aaatgtgttttta

SEQ ID NO: 131344 - DNA, 13 bp, Artificial Sequence
  Oligonucleotide for detection of SNP TSC0032782
taaaaacacattt

SEQ ID NO: 131345 - DNA, 13 bp, Artificial Sequence
  Oligonucleotide for detection of SNP TSC0032782
aaatgcgttttta

SEQ ID NO: 131346 - DNA, 13 bp, Artificial Sequence
  Oligonucleotide for detection of SNP TSC0032782
taaaaacgcattt

SEQ ID NO: 131347 - DNA, 13 bp, Artificial Sequence
  Oligonucleotide for detection of SNP TSC0032782
taaaaatgtattt

SEQ ID NO: 131348 - DNA, 13 bp, Artificial Sequence
  Oligonucleotide for detection of SNP TSC0032782
aaatacattttta

SEQ ID NO: 131349 - DNA, 13 bp, Artificial Sequence
  Oligonucleotide for detection of SNP TSC0032782
taaaaacgtattt

SEQ ID NO: 131350 - DNA, 13 bp, Artificial Sequence
  Oligonucleotide for detection of SNP TSC0032782
aaatacgttttta

SEQ ID NO: 131351 - DNA, 13 bp, Artificial Sequence
  Oligonucleotide for detection of SNP TSC0032783
tgaagaagaagga

SEQ ID NO: 131352 - DNA, 13 bp, Artificial Sequence
  Oligonucleotide for detection of SNP TSC0032783
tccttcttcttca

SEQ ID NO: 131353 - DNA, 13 bp, Artificial Sequence
  Oligonucleotide for detection of SNP TSC0032783
tgaagaggaagga

SEQ ID NO: 131354 - DNA, 13 bp, Artificial Sequence
  Oligonucleotide for detection of SNP TSC0032783
tccttcctcttca

SEQ ID NO: 131355 - DNA, 13 bp, Artificial Sequence
  Oligonucleotide for detection of SNP TSC0032785
gtttgggtgttgy

SEQ ID NO: 131356 - DNA, 13 bp, Artificial Sequence
  Oligonucleotide for detection of SNP TSC0032785
rcaacacccaaac

SEQ ID NO: 131357 - DNA, 13 bp, Artificial Sequence
  Oligonucleotide for detection of SNP TSC0032785
gtttggatgttgy

SEQ ID NO: 131358 - DNA, 13 bp, Artificial Sequence
  Oligonucleotide for detection of SNP TSC0032785
rcaacatccaaac

SEQ ID NO: 131359 - DNA, 13 bp, Artificial Sequence
  Oligonucleotide for detection of SNP TSC0032788
ttaaatattatga

SEQ ID NO: 131360 - DNA, 13 bp, Artificial Sequence
  Oligonucleotide for detection of SNP TSC0032788
tcataatatttaa

SEQ ID NO: 131361 - DNA, 13 bp, Artificial Sequence
  Oligonucleotide for detection of SNP TSC0032788
ttaaattttatga

SEQ ID NO: 131362 - DNA, 13 bp, Artificial Sequence
  Oligonucleotide for detection of SNP TSC0032788
tcataaaatttaa

SEQ ID NO: 131363 - DNA, 13 bp, Artificial Sequence
  Oligonucleotide for detection of SNP TSC0032788
ttataatgtttaa

SEQ ID NO: 131364 - DNA, 13 bp, Artificial Sequence
  Oligonucleotide for detection of SNP TSC0032788
ttaaacattataa

SEQ ID NO: 131365 - DNA, 13 bp, Artificial Sequence
  Oligonucleotide for detection of SNP TSC0032788
ttataaagtttaa

SEQ ID NO: 131366 - DNA, 13 bp, Artificial Sequence
  Oligonucleotide for detection of SNP TSC0032788
ttaaactttataa

SEQ ID NO: 131367 - DNA, 13 bp, Artificial Sequence
  Oligonucleotide for detection of SNP TSC0032791
taatttatagaga

SEQ ID NO: 131368 - DNA, 13 bp, Artificial Sequence
  Oligonucleotide for detection of SNP TSC0032791
tctctataaatta

SEQ ID NO: 131369 - DNA, 13 bp, Artificial Sequence
  Oligonucleotide for detection of SNP TSC0032791
taatttgtagaga

SEQ ID NO: 131370 - DNA, 13 bp, Artificial Sequence
  Oligonucleotide for detection of SNP TSC0032791
tctctacaaatta

SEQ ID NO: 131371 - DNA, 13 bp, Artificial Sequence
  Oligonucleotide for detection of SNP TSC0032791
taattcgtagaga

SEQ ID NO: 131372 - DNA, 13 bp, Artificial Sequence
  Oligonucleotide for detection of SNP TSC0032791
tctctacgaatta

SEQ ID NO: 131373 - DNA, 13 bp, Artificial Sequence
  Oligonucleotide for detection of SNP TSC0032791
tttttgcgggtta

SEQ ID NO: 131374 - DNA, 13 bp, Artificial Sequence
  Oligonucleotide for detection of SNP TSC0032791
taacccgcaaaaa

SEQ ID NO: 131375 - DNA, 13 bp, Artificial Sequence
  Oligonucleotide for detection of SNP TSC0032794
gtgagttgaatta

SEQ ID NO: 131376 - DNA, 13 bp, Artificial Sequence
  Oligonucleotide for detection of SNP TSC0032794
taattcaactcac

SEQ ID NO: 131377 - DNA, 13 bp, Artificial Sequence
  Oligonucleotide for detection of SNP TSC0032794
gtgagtcgaatta

SEQ ID NO: 131378 - DNA, 13 bp, Artificial Sequence
  Oligonucleotide for detection of SNP TSC0032794
taattcgactcac

SEQ ID NO: 131379 - DNA, 13 bp, Artificial Sequence
  Oligonucleotide for detection of SNP TSC0032794
tggtttggtttay

SEQ ID NO: 131380 - DNA, 13 bp, Artificial Sequence
  Oligonucleotide for detection of SNP TSC0032794
rtaaaccaaacca

SEQ ID NO: 131381 - DNA, 13 bp, Artificial Sequence
  Oligonucleotide for detection of SNP TSC0032794
tggtttagtttay

SEQ ID NO: 131382 - DNA, 13 bp, Artificial Sequence
  Oligonucleotide for detection of SNP TSC0032794
rtaaactaaacca

SEQ ID NO: 131383 - DNA, 13 bp, Artificial Sequence
  Oligonucleotide for detection of SNP TSC0032794
tggttcggtttay

SEQ ID NO: 131384 - DNA, 13 bp, Artificial Sequence
  Oligonucleotide for detection of SNP TSC0032794
rtaaaccgaacca

SEQ ID NO: 131385 - DNA, 13 bp, Artificial Sequence
  Oligonucleotide for detection of SNP TSC0032796
aaaaatatttttt

SEQ ID NO: 131386 - DNA, 13 bp, Artificial Sequence
  Oligonucleotide for detection of SNP TSC0032796
aaaaaatattttt

SEQ ID NO: 131387 - DNA, 13 bp, Artificial Sequence
  Oligonucleotide for detection of SNP TSC0032796
aaaaatgtttttt

SEQ ID NO: 131388 - DNA, 13 bp, Artificial Sequence
  Oligonucleotide for detection of SNP TSC0032796
aaaaaacattttt

SEQ ID NO: 131389 - DNA, 13 bp, Artificial Sequence
  Oligonucleotide for detection of SNP TSC0032797
atagtagtaatag

SEQ ID NO: 131390 - DNA, 13 bp, Artificial Sequence
  Oligonucleotide for detection of SNP TSC0032797
ctattactactat

SEQ ID NO: 131391 - DNA, 13 bp, Artificial Sequence
  Oligonucleotide for detection of SNP TSC0032797
atagtaataatag

SEQ ID NO: 131392 - DNA, 13 bp, Artificial Sequence
  Oligonucleotide for detection of SNP TSC0032797
ctattattactat

SEQ ID NO: 131393 - DNA, 13 bp, Artificial Sequence
  Oligonucleotide for detection of SNP TSC0032798
gatttatggaagg

SEQ ID NO: 131394 - DNA, 13 bp, Artificial Sequence
  Oligonucleotide for detection of SNP TSC0032798
ccttccataaatc

SEQ ID NO: 131395 - DNA, 13 bp, Artificial Sequence
  Oligonucleotide for detection of SNP TSC0032798
gatttagggaagg

SEQ ID NO: 131396 - DNA, 13 bp, Artificial Sequence
  Oligonucleotide for detection of SNP TSC0032798
ccttccctaaatc

SEQ ID NO: 131397 - DNA, 13 bp, Artificial Sequence
  Oligonucleotide for detection of SNP TSC0032798
gatttacggaagg

SEQ ID NO: 131398 - DNA, 13 bp, Artificial Sequence
  Oligonucleotide for detection of SNP TSC0032798
ccttccgtaaatc

SEQ ID NO: 131399 - DNA, 13 bp, Artificial Sequence
  Oligonucleotide for detection of SNP TSC0032798
ttttttgtgggty

SEQ ID NO: 131400 - DNA, 13 bp, Artificial Sequence
  Oligonucleotide for detection of SNP TSC0032798
racccacaaaaaa

SEQ ID NO: 131401 - DNA, 13 bp, Artificial Sequence
  Oligonucleotide for detection of SNP TSC0032798
ttttttttgggty

SEQ ID NO: 131402 - DNA, 13 bp, Artificial Sequence
  Oligonucleotide for detection of SNP TSC0032798
racccaaaaaaaa

SEQ ID NO: 131403 - DNA, 13 bp, Artificial Sequence
  Oligonucleotide for detection of SNP TSC0032798
tttttcgtgggty

SEQ ID NO: 131404 - DNA, 13 bp, Artificial Sequence
  Oligonucleotide for detection of SNP TSC0032798
racccacgaaaaa

SEQ ID NO: 131405 - DNA, 13 bp, Artificial Sequence
  Oligonucleotide for detection of SNP TSC0032800
tgttttgtaggay

SEQ ID NO: 131406 - DNA, 13 bp, Artificial Sequence
  Oligonucleotide for detection of SNP TSC0032800
rtcctacaaaaca

SEQ ID NO: 131407 - DNA, 13 bp, Artificial Sequence
  Oligonucleotide for detection of SNP TSC0032800
tgttttataggay

SEQ ID NO: 131408 - DNA, 13 bp, Artificial Sequence
  Oligonucleotide for detection of SNP TSC0032800
rtcctataaaaca

SEQ ID NO: 131409 - DNA, 13 bp, Artificial Sequence
  Oligonucleotide for detection of SNP TSC0032801
ttttgtaagataa

SEQ ID NO: 131410 - DNA, 13 bp, Artificial Sequence
  Oligonucleotide for detection of SNP TSC0032801
ttatcttacaaaa

SEQ ID NO: 131411 - DNA, 13 bp, Artificial Sequence
  Oligonucleotide for detection of SNP TSC0032801
ttttgtgagataa

SEQ ID NO: 131412 - DNA, 13 bp, Artificial Sequence
  Oligonucleotide for detection of SNP TSC0032801
ttatctcacaaaa

SEQ ID NO: 131413 - DNA, 13 bp, Artificial Sequence
  Oligonucleotide for detection of SNP TSC0032801
ttttgcgagataa

SEQ ID NO: 131414 - DNA, 13 bp, Artificial Sequence
  Oligonucleotide for detection of SNP TSC0032801
ttatctcgcaaaa

SEQ ID NO: 131415 - DNA, 13 bp, Artificial Sequence
  Oligonucleotide for detection of SNP TSC0032801
ttgttttgtagga

SEQ ID NO: 131416 - DNA, 13 bp, Artificial Sequence
  Oligonucleotide for detection of SNP TSC0032801
tcctacaaaacaa

SEQ ID NO: 131417 - DNA, 13 bp, Artificial Sequence
  Oligonucleotide for detection of SNP TSC0032801
ttgtttcgtagga

SEQ ID NO: 131418 - DNA, 13 bp, Artificial Sequence
  Oligonucleotide for detection of SNP TSC0032801
tcctacgaaacaa

SEQ ID NO: 131419 - DNA, 13 bp, Artificial Sequence
  Oligonucleotide for detection of SNP TSC0032802
agataatgtgagg

SEQ ID NO: 131420 - DNA, 13 bp, Artificial Sequence
  Oligonucleotide for detection of SNP TSC0032802
cctcacattatct

SEQ ID NO: 131421 - DNA, 13 bp, Artificial Sequence
  Oligonucleotide for detection of SNP TSC0032802
agataacgtgagg

SEQ ID NO: 131422 - DNA, 13 bp, Artificial Sequence
  Oligonucleotide for detection of SNP TSC0032802
cctcacgttatct

SEQ ID NO: 131423 - DNA, 13 bp, Artificial Sequence
  Oligonucleotide for detection of SNP TSC0032802
agataatgcgagg

SEQ ID NO: 131424 - DNA, 13 bp, Artificial Sequence
  Oligonucleotide for detection of SNP TSC0032802
cctcgcattatct

SEQ ID NO: 131425 - DNA, 13 bp, Artificial Sequence
  Oligonucleotide for detection of SNP TSC0032802
agataacgcgagg

SEQ ID NO: 131426 - DNA, 13 bp, Artificial Sequence
  Oligonucleotide for detection of SNP TSC0032802
cctcgcgttatct

SEQ ID NO: 131427 - DNA, 13 bp, Artificial Sequence
  Oligonucleotide for detection of SNP TSC0032802
tttcgtgttgttt

SEQ ID NO: 131428 - DNA, 13 bp, Artificial Sequence
  Oligonucleotide for detection of SNP TSC0032802
aaacaacacgaaa

SEQ ID NO: 131429 - DNA, 13 bp, Artificial Sequence
  Oligonucleotide for detection of SNP TSC0032802
tttcgtattgttt

SEQ ID NO: 131430 - DNA, 13 bp, Artificial Sequence
  Oligonucleotide for detection of SNP TSC0032802
aaacaatacgaaa

SEQ ID NO: 131431 - DNA, 13 bp, Artificial Sequence
  Oligonucleotide for detection of SNP TSC0032802
tttcgcgttgttt

SEQ ID NO: 131432 - DNA, 13 bp, Artificial Sequence
  Oligonucleotide for detection of SNP TSC0032802
aaacaacgcgaaa

SEQ ID NO: 131433 - DNA, 13 bp, Artificial Sequence
  Oligonucleotide for detection of SNP TSC0032807
atgttggattttt

SEQ ID NO: 131434 - DNA, 13 bp, Artificial Sequence
  Oligonucleotide for detection of SNP TSC0032807
aaaaatccaacat

SEQ ID NO: 131435 - DNA, 13 bp, Artificial Sequence
  Oligonucleotide for detection of SNP TSC0032807
atgttgaattttt

SEQ ID NO: 131436 - DNA, 13 bp, Artificial Sequence
  Oligonucleotide for detection of SNP TSC0032807
aaaaattcaacat

SEQ ID NO: 131437 - DNA, 13 bp, Artificial Sequence
  Oligonucleotide for detection of SNP TSC0032807
acgttggattttt

SEQ ID NO: 131438 - DNA, 13 bp, Artificial Sequence
  Oligonucleotide for detection of SNP TSC0032807
aaaaatccaacgt

SEQ ID NO: 131439 - DNA, 13 bp, Artificial Sequence
  Oligonucleotide for detection of SNP TSC0032807
acgttgaattttt

SEQ ID NO: 131440 - DNA, 13 bp, Artificial Sequence
  Oligonucleotide for detection of SNP TSC0032807
aaaaattcaacgt

SEQ ID NO: 131441 - DNA, 13 bp, Artificial Sequence
  Oligonucleotide for detection of SNP TSC0032808
gttgttgttttta

SEQ ID NO: 131442 - DNA, 13 bp, Artificial Sequence
  Oligonucleotide for detection of SNP TSC0032808
taaaaacaacaac

SEQ ID NO: 131443 - DNA, 13 bp, Artificial Sequence
  Oligonucleotide for detection of SNP TSC0032808
gtcgttattttta

SEQ ID NO: 131444 - DNA, 13 bp, Artificial Sequence
  Oligonucleotide for detection of SNP TSC0032808
taaaaataacgac

SEQ ID NO: 131445 - DNA, 13 bp, Artificial Sequence
  Oligonucleotide for detection of SNP TSC0032808
gtcgttgttttta

SEQ ID NO: 131446 - DNA, 13 bp, Artificial Sequence
  Oligonucleotide for detection of SNP TSC0032808
taaaaacaacgac

SEQ ID NO: 131447 - DNA, 13 bp, Artificial Sequence
  Oligonucleotide for detection of SNP TSC0032808
gttgtcgttttta

SEQ ID NO: 131448 - DNA, 13 bp, Artificial Sequence
  Oligonucleotide for detection of SNP TSC0032808
taaaaacgacaac

SEQ ID NO: 131449 - DNA, 13 bp, Artificial Sequence
  Oligonucleotide for detection of SNP TSC0032808
gtcgtcgttttta

SEQ ID NO: 131450 - DNA, 13 bp, Artificial Sequence
  Oligonucleotide for detection of SNP TSC0032808
taaaaacgacgac

SEQ ID NO: 131451 - DNA, 13 bp, Artificial Sequence
  Oligonucleotide for detection of SNP TSC0032808
tgagggtggtggy

SEQ ID NO: 131452 - DNA, 13 bp, Artificial Sequence
  Oligonucleotide for detection of SNP TSC0032808
rccaccaccctca

SEQ ID NO: 131453 - DNA, 13 bp, Artificial Sequence
  Oligonucleotide for detection of SNP TSC0032808
tgagggtggcggy

SEQ ID NO: 131454 - DNA, 13 bp, Artificial Sequence
  Oligonucleotide for detection of SNP TSC0032808
rccgccaccctca

SEQ ID NO: 131455 - DNA, 13 bp, Artificial Sequence
  Oligonucleotide for detection of SNP TSC0032808
tgagggcggtggy

SEQ ID NO: 131456 - DNA, 13 bp, Artificial Sequence
  Oligonucleotide for detection of SNP TSC0032808
rccaccgccctca

SEQ ID NO: 131457 - DNA, 13 bp, Artificial Sequence
  Oligonucleotide for detection of SNP TSC0032808
tgagggcggcggy

SEQ ID NO: 131458 - DNA, 13 bp, Artificial Sequence
  Oligonucleotide for detection of SNP TSC0032808
rccgccgccctca

SEQ ID NO: 131459 - DNA, 13 bp, Artificial Sequence
  Oligonucleotide for detection of SNP TSC0032809
ttttaggttaaty

SEQ ID NO: 131460 - DNA, 13 bp, Artificial Sequence
  Oligonucleotide for detection of SNP TSC0032809
rattaacctaaaa

SEQ ID NO: 131461 - DNA, 13 bp, Artificial Sequence
  Oligonucleotide for detection of SNP TSC0032809
ttttagattaaty

SEQ ID NO: 131462 - DNA, 13 bp, Artificial Sequence
  Oligonucleotide for detection of SNP TSC0032809
rattaatctaaaa

SEQ ID NO: 131463 - DNA, 13 bp, Artificial Sequence
  Oligonucleotide for detection of SNP TSC0032813
ttataagttaaay

SEQ ID NO: 131464 - DNA, 13 bp, Artificial Sequence
  Oligonucleotide for detection of SNP TSC0032813
rtttaacttataa

SEQ ID NO: 131465 - DNA, 13 bp, Artificial Sequence
  Oligonucleotide for detection of SNP TSC0032813
ttataaattaaay

SEQ ID NO: 131466 - DNA, 13 bp, Artificial Sequence
  Oligonucleotide for detection of SNP TSC0032813
rtttaatttataa

SEQ ID NO: 131467 - DNA, 13 bp, Artificial Sequence
  Oligonucleotide for detection of SNP TSC0032814
gaaaggaaatgtt

SEQ ID NO: 131468 - DNA, 13 bp, Artificial Sequence
  Oligonucleotide for detection of SNP TSC0032814
aacatttcctttc

SEQ ID NO: 131469 - DNA, 13 bp, Artificial Sequence
  Oligonucleotide for detection of SNP TSC0032814
gaaaggtaatgtt

SEQ ID NO: 131470 - DNA, 13 bp, Artificial Sequence
  Oligonucleotide for detection of SNP TSC0032814
aacattacctttc

SEQ ID NO: 131471 - DNA, 13 bp, Artificial Sequence
  Oligonucleotide for detection of SNP TSC0032814
gaaaggaaacgtt

SEQ ID NO: 131472 - DNA, 13 bp, Artificial Sequence
  Oligonucleotide for detection of SNP TSC0032814
aacgtttcctttc

SEQ ID NO: 131473 - DNA, 13 bp, Artificial Sequence
  Oligonucleotide for detection of SNP TSC0032814
gaaaggtaacgtt

SEQ ID NO: 131474 - DNA, 13 bp, Artificial Sequence
  Oligonucleotide for detection of SNP TSC0032814
aacgttacctttc

SEQ ID NO: 131475 - DNA, 13 bp, Artificial Sequence
  Oligonucleotide for detection of SNP TSC0032814
aatgtttttttty

SEQ ID NO: 131476 - DNA, 13 bp, Artificial Sequence
  Oligonucleotide for detection of SNP TSC0032814
raaaaaaaacatt

SEQ ID NO: 131477 - DNA, 13 bp, Artificial Sequence
  Oligonucleotide for detection of SNP TSC0032814
aacgtttttttty

SEQ ID NO: 131478 - DNA, 13 bp, Artificial Sequence
  Oligonucleotide for detection of SNP TSC0032814
raaaaaaaacgtt

SEQ ID NO: 131479 - DNA, 13 bp, Artificial Sequence
  Oligonucleotide for detection of SNP TSC0032814
aacgttgttttty

SEQ ID NO: 131480 - DNA, 13 bp, Artificial Sequence
  Oligonucleotide for detection of SNP TSC0032814
raaaaacaacgtt

SEQ ID NO: 131481 - DNA, 13 bp, Artificial Sequence
  Oligonucleotide for detection of SNP TSC0032815
tgaagagaaaaay

SEQ ID NO: 131482 - DNA, 13 bp, Artificial Sequence
  Oligonucleotide for detection of SNP TSC0032815
rtttttctcttca

SEQ ID NO: 131483 - DNA, 13 bp, Artificial Sequence
  Oligonucleotide for detection of SNP TSC0032815
tgaagataaaaay

SEQ ID NO: 131484 - DNA, 13 bp, Artificial Sequence
  Oligonucleotide for detection of SNP TSC0032815
rtttttatcttca

SEQ ID NO: 131485 - DNA, 13 bp, Artificial Sequence
  Oligonucleotide for detection of SNP TSC0032817
ggtttatggttat

SEQ ID NO: 131486 - DNA, 13 bp, Artificial Sequence
  Oligonucleotide for detection of SNP TSC0032817
ataaccataaacc

SEQ ID NO: 131487 - DNA, 13 bp, Artificial Sequence
  Oligonucleotide for detection of SNP TSC0032817
ggtttacggttat

SEQ ID NO: 131488 - DNA, 13 bp, Artificial Sequence
  Oligonucleotide for detection of SNP TSC0032817
ataaccgtaaacc

SEQ ID NO: 131489 - DNA, 13 bp, Artificial Sequence
  Oligonucleotide for detection of SNP TSC0032817
atggttgtggaty

SEQ ID NO: 131490 - DNA, 13 bp, Artificial Sequence
  Oligonucleotide for detection of SNP TSC0032817
ratccacaaccat

SEQ ID NO: 131491 - DNA, 13 bp, Artificial Sequence
  Oligonucleotide for detection of SNP TSC0032817
atggttatggaty

SEQ ID NO: 131492 - DNA, 13 bp, Artificial Sequence
  Oligonucleotide for detection of SNP TSC0032817
ratccataaccat

SEQ ID NO: 131493 - DNA, 13 bp, Artificial Sequence
  Oligonucleotide for detection of SNP TSC0032817
atggtcgtggaty

SEQ ID NO: 131494 - DNA, 13 bp, Artificial Sequence
  Oligonucleotide for detection of SNP TSC0032817
ratccacgaccat

SEQ ID NO: 131495 - DNA, 13 bp, Artificial Sequence
  Oligonucleotide for detection of SNP TSC0032818
attttagaaaagy

SEQ ID NO: 131496 - DNA, 13 bp, Artificial Sequence
  Oligonucleotide for detection of SNP TSC0032818
rcttttctaaaat

SEQ ID NO: 131497 - DNA, 13 bp, Artificial Sequence
  Oligonucleotide for detection of SNP TSC0032819
tatttgggtttta

SEQ ID NO: 131498 - DNA, 13 bp, Artificial Sequence
  Oligonucleotide for detection of SNP TSC0032819
taaaacccaaata

SEQ ID NO: 131499 - DNA, 13 bp, Artificial Sequence
  Oligonucleotide for detection of SNP TSC0032819
tatttgagtttta

SEQ ID NO: 131500 - DNA, 13 bp, Artificial Sequence
  Oligonucleotide for detection of SNP TSC0032819
taaaactcaaata

SEQ ID NO: 131501 - DNA, 13 bp, Artificial Sequence
  Oligonucleotide for detection of SNP TSC0032822
agtgataaggtgy

SEQ ID NO: 131502 - DNA, 13 bp, Artificial Sequence
  Oligonucleotide for detection of SNP TSC0032822
rcaccttatcact

SEQ ID NO: 131503 - DNA, 13 bp, Artificial Sequence
  Oligonucleotide for detection of SNP TSC0032822
agtgatgaggtgy

SEQ ID NO: 131504 - DNA, 13 bp, Artificial Sequence
  Oligonucleotide for detection of SNP TSC0032822
rcacctcatcact

SEQ ID NO: 131505 - DNA, 13 bp, Artificial Sequence
  Oligonucleotide for detection of SNP TSC0032822
agtgacgaggtgy

SEQ ID NO: 131506 - DNA, 13 bp, Artificial Sequence
  Oligonucleotide for detection of SNP TSC0032822
rcacctcgtcact

SEQ ID NO: 131507 - DNA, 13 bp, Artificial Sequence
  Oligonucleotide for detection of SNP TSC0032822
gtattttgttatt

SEQ ID NO: 131508 - DNA, 13 bp, Artificial Sequence
  Oligonucleotide for detection of SNP TSC0032822
aataacaaaatac

SEQ ID NO: 131509 - DNA, 13 bp, Artificial Sequence
  Oligonucleotide for detection of SNP TSC0032822
gtatttcgttatt

SEQ ID NO: 131510 - DNA, 13 bp, Artificial Sequence
  Oligonucleotide for detection of SNP TSC0032822
aataacgaaatac

SEQ ID NO: 131511 - DNA, 13 bp, Artificial Sequence
  Oligonucleotide for detection of SNP TSC0032823
gtaaatggtaaay

SEQ ID NO: 131512 - DNA, 13 bp, Artificial Sequence
  Oligonucleotide for detection of SNP TSC0032823
rtttaccatttac

SEQ ID NO: 131513 - DNA, 13 bp, Artificial Sequence
  Oligonucleotide for detection of SNP TSC0032823
gtaaatagtaaay

SEQ ID NO: 131514 - DNA, 13 bp, Artificial Sequence
  Oligonucleotide for detection of SNP TSC0032823
rtttactatttac

SEQ ID NO: 131515 - DNA, 13 bp, Artificial Sequence
  Oligonucleotide for detection of SNP TSC0032829
ataataatagtgg

SEQ ID NO: 131516 - DNA, 13 bp, Artificial Sequence
  Oligonucleotide for detection of SNP TSC0032829
ccactattattat

SEQ ID NO: 131517 - DNA, 13 bp, Artificial Sequence
  Oligonucleotide for detection of SNP TSC0032829
ataatagtagtgg

SEQ ID NO: 131518 - DNA, 13 bp, Artificial Sequence
  Oligonucleotide for detection of SNP TSC0032829
ccactactattat

SEQ ID NO: 131519 - DNA, 13 bp, Artificial Sequence
  Oligonucleotide for detection of SNP TSC0032834
ggatttgtagttt

SEQ ID NO: 131520 - DNA, 13 bp, Artificial Sequence
  Oligonucleotide for detection of SNP TSC0032834
aaactacaaatcc

SEQ ID NO: 131521 - DNA, 13 bp, Artificial Sequence
  Oligonucleotide for detection of SNP TSC0032834
ggatttatagttt

SEQ ID NO: 131522 - DNA, 13 bp, Artificial Sequence
  Oligonucleotide for detection of SNP TSC0032834
aaactataaatcc

SEQ ID NO: 131523 - DNA, 13 bp, Artificial Sequence
  Oligonucleotide for detection of SNP TSC0032835
atttagataggaa

SEQ ID NO: 131524 - DNA, 13 bp, Artificial Sequence
  Oligonucleotide for detection of SNP TSC0032835
ttcctatctaaat

SEQ ID NO: 131525 - DNA, 13 bp, Artificial Sequence
  Oligonucleotide for detection of SNP TSC0032835
tttttatttggat

SEQ ID NO: 131526 - DNA, 13 bp, Artificial Sequence
  Oligonucleotide for detection of SNP TSC0032835
atccaaataaaaa

SEQ ID NO: 131527 - DNA, 13 bp, Artificial Sequence
  Oligonucleotide for detection of SNP TSC0032835
tttttaattggat

SEQ ID NO: 131528 - DNA, 13 bp, Artificial Sequence
  Oligonucleotide for detection of SNP TSC0032835
atccaattaaaaa

SEQ ID NO: 131529 - DNA, 13 bp, Artificial Sequence
  Oligonucleotide for detection of SNP TSC0032836
agattgagtaaat

SEQ ID NO: 131530 - DNA, 13 bp, Artificial Sequence
  Oligonucleotide for detection of SNP TSC0032836
atttactcaatct

SEQ ID NO: 131531 - DNA, 13 bp, Artificial Sequence
  Oligonucleotide for detection of SNP TSC0032836
agattgggtaaat

SEQ ID NO: 131532 - DNA, 13 bp, Artificial Sequence
  Oligonucleotide for detection of SNP TSC0032836
atttacccaatct

SEQ ID NO: 131533 - DNA, 13 bp, Artificial Sequence
  Oligonucleotide for detection of SNP TSC0032839
ttggttgtgttgg

SEQ ID NO: 131534 - DNA, 13 bp, Artificial Sequence
  Oligonucleotide for detection of SNP TSC0032839
ccaacacaaccaa

SEQ ID NO: 131535 - DNA, 13 bp, Artificial Sequence
  Oligonucleotide for detection of SNP TSC0032839
ttggttatgttgg

SEQ ID NO: 131536 - DNA, 13 bp, Artificial Sequence
  Oligonucleotide for detection of SNP TSC0032839
ccaacataaccaa

SEQ ID NO: 131537 - DNA, 13 bp, Artificial Sequence
  Oligonucleotide for detection of SNP TSC0032840
gagttttgagaat

SEQ ID NO: 131538 - DNA, 13 bp, Artificial Sequence
  Oligonucleotide for detection of SNP TSC0032840
attctcaaaactc

SEQ ID NO: 131539 - DNA, 13 bp, Artificial Sequence
  Oligonucleotide for detection of SNP TSC0032840
gagtttagagaat

SEQ ID NO: 131540 - DNA, 13 bp, Artificial Sequence
  Oligonucleotide for detection of SNP TSC0032840
attctctaaactc

SEQ ID NO: 131541 - DNA, 13 bp, Artificial Sequence
  Oligonucleotide for detection of SNP TSC0032841
atttttgtatttg

SEQ ID NO: 131542 - DNA, 13 bp, Artificial Sequence
  Oligonucleotide for detection of SNP TSC0032841
caaatacaaaaat

SEQ ID NO: 131543 - DNA, 13 bp, Artificial Sequence
  Oligonucleotide for detection of SNP TSC0032841
atttttatatttg

SEQ ID NO: 131544 - DNA, 13 bp, Artificial Sequence
  Oligonucleotide for detection of SNP TSC0032841
caaatataaaaat

SEQ ID NO: 131545 - DNA, 13 bp, Artificial Sequence
  Oligonucleotide for detection of SNP TSC0032842
gtgagtggagagy

SEQ ID NO: 131546 - DNA, 13 bp, Artificial Sequence
  Oligonucleotide for detection of SNP TSC0032842
rctctccactcac

SEQ ID NO: 131547 - DNA, 13 bp, Artificial Sequence
  Oligonucleotide for detection of SNP TSC0032842
gtgagttgagagy

SEQ ID NO: 131548 - DNA, 13 bp, Artificial Sequence
  Oligonucleotide for detection of SNP TSC0032842
rctctcaactcac

SEQ ID NO: 131549 - DNA, 13 bp, Artificial Sequence
  Oligonucleotide for detection of SNP TSC0032842
gttttttatttay

SEQ ID NO: 131550 - DNA, 13 bp, Artificial Sequence
  Oligonucleotide for detection of SNP TSC0032842
rtaaataaaaaac

SEQ ID NO: 131551 - DNA, 13 bp, Artificial Sequence
  Oligonucleotide for detection of SNP TSC0032842
gtttttaatttay

SEQ ID NO: 131552 - DNA, 13 bp, Artificial Sequence
  Oligonucleotide for detection of SNP TSC0032842
rtaaattaaaaac

SEQ ID NO: 131553 - DNA, 13 bp, Artificial Sequence
  Oligonucleotide for detection of SNP TSC0032843
ttgtggagttaty

SEQ ID NO: 131554 - DNA, 13 bp, Artificial Sequence
  Oligonucleotide for detection of SNP TSC0032843
rataactccacaa

SEQ ID NO: 131555 - DNA, 13 bp, Artificial Sequence
  Oligonucleotide for detection of SNP TSC0032843
ttgtggggttaty

SEQ ID NO: 131556 - DNA, 13 bp, Artificial Sequence
  Oligonucleotide for detection of SNP TSC0032843
rataaccccacaa

SEQ ID NO: 131557 - DNA, 13 bp, Artificial Sequence
  Oligonucleotide for detection of SNP TSC0032843
ttgcggagttaty

SEQ ID NO: 131558 - DNA, 13 bp, Artificial Sequence
  Oligonucleotide for detection of SNP TSC0032843
rataactccgcaa

SEQ ID NO: 131559 - DNA, 13 bp, Artificial Sequence
  Oligonucleotide for detection of SNP TSC0032843
ttgcggggttaty

SEQ ID NO: 131560 - DNA, 13 bp, Artificial Sequence
  Oligonucleotide for detection of SNP TSC0032843
rataaccccgcaa

SEQ ID NO: 131561 - DNA, 13 bp, Artificial Sequence
  Oligonucleotide for detection of SNP TSC0032844
attttgtggtaag

SEQ ID NO: 131562 - DNA, 13 bp, Artificial Sequence
  Oligonucleotide for detection of SNP TSC0032844
cttaccacaaaat

SEQ ID NO: 131563 - DNA, 13 bp, Artificial Sequence
  Oligonucleotide for detection of SNP TSC0032844
attttgcggtaag

SEQ ID NO: 131564 - DNA, 13 bp, Artificial Sequence
  Oligonucleotide for detection of SNP TSC0032844
cttaccgcaaaat

SEQ ID NO: 131565 - DNA, 13 bp, Artificial Sequence
  Oligonucleotide for detection of SNP TSC0032844
tttgttgtagagt

SEQ ID NO: 131566 - DNA, 13 bp, Artificial Sequence
  Oligonucleotide for detection of SNP TSC0032844
actctacaacaaa

SEQ ID NO: 131567 - DNA, 13 bp, Artificial Sequence
  Oligonucleotide for detection of SNP TSC0032844
tttgttatagagt

SEQ ID NO: 131568 - DNA, 13 bp, Artificial Sequence
  Oligonucleotide for detection of SNP TSC0032844
actctataacaaa

SEQ ID NO: 131569 - DNA, 13 bp, Artificial Sequence
  Oligonucleotide for detection of SNP TSC0032844
tttgtcgtagagt

SEQ ID NO: 131570 - DNA, 13 bp, Artificial Sequence
  Oligonucleotide for detection of SNP TSC0032844
actctacgacaaa

SEQ ID NO: 131571 - DNA, 13 bp, Artificial Sequence
  Oligonucleotide for detection of SNP TSC0032845
ttattgtgggaaa

SEQ ID NO: 131572 - DNA, 13 bp, Artificial Sequence
  Oligonucleotide for detection of SNP TSC0032845
tttcccacaataa

SEQ ID NO: 131573 - DNA, 13 bp, Artificial Sequence
  Oligonucleotide for detection of SNP TSC0032845
ttattgggggaaa

SEQ ID NO: 131574 - DNA, 13 bp, Artificial Sequence
  Oligonucleotide for detection of SNP TSC0032845
tttcccccaataa

SEQ ID NO: 131575 - DNA, 13 bp, Artificial Sequence
  Oligonucleotide for detection of SNP TSC0032846
ttgttgggatggg

SEQ ID NO: 131576 - DNA, 13 bp, Artificial Sequence
  Oligonucleotide for detection of SNP TSC0032846
cccatcccaacaa

SEQ ID NO: 131577 - DNA, 13 bp, Artificial Sequence
  Oligonucleotide for detection of SNP TSC0032846
ttgttgtgatggg

SEQ ID NO: 131578 - DNA, 13 bp, Artificial Sequence
  Oligonucleotide for detection of SNP TSC0032846
cccatcacaacaa

SEQ ID NO: 131579 - DNA, 13 bp, Artificial Sequence
  Oligonucleotide for detection of SNP TSC0032846
tttattttagtaa

SEQ ID NO: 131580 - DNA, 13 bp, Artificial Sequence
  Oligonucleotide for detection of SNP TSC0032846
ttactaaaataaa

SEQ ID NO: 131581 - DNA, 13 bp, Artificial Sequence
  Oligonucleotide for detection of SNP TSC0032847
tgtggtattttty

SEQ ID NO: 131582 - DNA, 13 bp, Artificial Sequence
  Oligonucleotide for detection of SNP TSC0032847
raaaaataccaca

SEQ ID NO: 131583 - DNA, 13 bp, Artificial Sequence
  Oligonucleotide for detection of SNP TSC0032847
tgtggtgttttty

SEQ ID NO: 131584 - DNA, 13 bp, Artificial Sequence
  Oligonucleotide for detection of SNP TSC0032847
raaaaacaccaca

SEQ ID NO: 131585 - DNA, 13 bp, Artificial Sequence
  Oligonucleotide for detection of SNP TSC0032847
tgcggtattttty

SEQ ID NO: 131586 - DNA, 13 bp, Artificial Sequence
  Oligonucleotide for detection of SNP TSC0032847
raaaaataccgca

SEQ ID NO: 131587 - DNA, 13 bp, Artificial Sequence
  Oligonucleotide for detection of SNP TSC0032847
tgcggtgttttty

SEQ ID NO: 131588 - DNA, 13 bp, Artificial Sequence
  Oligonucleotide for detection of SNP TSC0032847
raaaaacaccgca

SEQ ID NO: 131589 - DNA, 13 bp, Artificial Sequence
  Oligonucleotide for detection of SNP TSC0032847
tgtggcgttttty

SEQ ID NO: 131590 - DNA, 13 bp, Artificial Sequence
  Oligonucleotide for detection of SNP TSC0032847
raaaaacgccaca

SEQ ID NO: 131591 - DNA, 13 bp, Artificial Sequence
  Oligonucleotide for detection of SNP TSC0032847
tgcggcgttttty

SEQ ID NO: 131592 - DNA, 13 bp, Artificial Sequence
  Oligonucleotide for detection of SNP TSC0032847
raaaaacgccgca

SEQ ID NO: 131593 - DNA, 13 bp, Artificial Sequence
  Oligonucleotide for detection of SNP TSC0032847
gggaagtgttgta

SEQ ID NO: 131594 - DNA, 13 bp, Artificial Sequence
  Oligonucleotide for detection of SNP TSC0032847
tacaacacttccc

SEQ ID NO: 131595 - DNA, 13 bp, Artificial Sequence
  Oligonucleotide for detection of SNP TSC0032847
gggaagtgtcgta

SEQ ID NO: 131596 - DNA, 13 bp, Artificial Sequence
  Oligonucleotide for detection of SNP TSC0032847
tacgacacttccc

SEQ ID NO: 131597 - DNA, 13 bp, Artificial Sequence
  Oligonucleotide for detection of SNP TSC0032847
gggaagcgttgta

SEQ ID NO: 131598 - DNA, 13 bp, Artificial Sequence
  Oligonucleotide for detection of SNP TSC0032847
tacaacgcttccc

SEQ ID NO: 131599 - DNA, 13 bp, Artificial Sequence
  Oligonucleotide for detection of SNP TSC0032847
gggaagcgtcgta

SEQ ID NO: 131600 - DNA, 13 bp, Artificial Sequence
  Oligonucleotide for detection of SNP TSC0032847
tacgacgcttccc

SEQ ID NO: 131601 - DNA, 13 bp, Artificial Sequence
  Oligonucleotide for detection of SNP TSC0032848
atgttggagtagg

SEQ ID NO: 131602 - DNA, 13 bp, Artificial Sequence
  Oligonucleotide for detection of SNP TSC0032848
cctactccaacat

SEQ ID NO: 131603 - DNA, 13 bp, Artificial Sequence
  Oligonucleotide for detection of SNP TSC0032848
atgttgtagtagg

SEQ ID NO: 131604 - DNA, 13 bp, Artificial Sequence
  Oligonucleotide for detection of SNP TSC0032848
cctactacaacat

SEQ ID NO: 131605 - DNA, 13 bp, Artificial Sequence
  Oligonucleotide for detection of SNP TSC0032848
tttgttttaatat

SEQ ID NO: 131606 - DNA, 13 bp, Artificial Sequence
  Oligonucleotide for detection of SNP TSC0032848
atattaaaacaaa

SEQ ID NO: 131607 - DNA, 13 bp, Artificial Sequence
  Oligonucleotide for detection of SNP TSC0032848
tttgttataatat

SEQ ID NO: 131608 - DNA, 13 bp, Artificial Sequence
  Oligonucleotide for detection of SNP TSC0032848
atattataacaaa

SEQ ID NO: 131609 - DNA, 13 bp, Artificial Sequence
  Oligonucleotide for detection of SNP TSC0032850
ttgtgtatatatt

SEQ ID NO: 131610 - DNA, 13 bp, Artificial Sequence
  Oligonucleotide for detection of SNP TSC0032850
aatatatacacaa

SEQ ID NO: 131611 - DNA, 13 bp, Artificial Sequence
  Oligonucleotide for detection of SNP TSC0032850
ttgtgtttatatt

SEQ ID NO: 131612 - DNA, 13 bp, Artificial Sequence
  Oligonucleotide for detection of SNP TSC0032850
aatataaacacaa

SEQ ID NO: 131613 - DNA, 13 bp, Artificial Sequence
  Oligonucleotide for detection of SNP TSC0032850
aatatgtatataa

SEQ ID NO: 131614 - DNA, 13 bp, Artificial Sequence
  Oligonucleotide for detection of SNP TSC0032850
ttatatacatatt

SEQ ID NO: 131615 - DNA, 13 bp, Artificial Sequence
  Oligonucleotide for detection of SNP TSC0032850
aatatgaatataa

SEQ ID NO: 131616 - DNA, 13 bp, Artificial Sequence
  Oligonucleotide for detection of SNP TSC0032850
ttatattcatatt

SEQ ID NO: 131617 - DNA, 13 bp, Artificial Sequence
  Oligonucleotide for detection of SNP TSC0032853
aattgtagggaga

SEQ ID NO: 131618 - DNA, 13 bp, Artificial Sequence
  Oligonucleotide for detection of SNP TSC0032853
tctccctacaatt

SEQ ID NO: 131619 - DNA, 13 bp, Artificial Sequence
  Oligonucleotide for detection of SNP TSC0032853
aattgttgggaga

SEQ ID NO: 131620 - DNA, 13 bp, Artificial Sequence
  Oligonucleotide for detection of SNP TSC0032853
tctcccaacaatt

SEQ ID NO: 131621 - DNA, 13 bp, Artificial Sequence
  Oligonucleotide for detection of SNP TSC0032853
aattgtcgggaga

SEQ ID NO: 131622 - DNA, 13 bp, Artificial Sequence
  Oligonucleotide for detection of SNP TSC0032853
tctcccgacaatt

SEQ ID NO: 131623 - DNA, 13 bp, Artificial Sequence
  Oligonucleotide for detection of SNP TSC0032853
ttttttgataatt

SEQ ID NO: 131624 - DNA, 13 bp, Artificial Sequence
  Oligonucleotide for detection of SNP TSC0032853
aattatcaaaaaa

SEQ ID NO: 131625 - DNA, 13 bp, Artificial Sequence
  Oligonucleotide for detection of SNP TSC0032853
tttttcgataatt

SEQ ID NO: 131626 - DNA, 13 bp, Artificial Sequence
  Oligonucleotide for detection of SNP TSC0032853
aattatcgaaaaa

SEQ ID NO: 131627 - DNA, 13 bp, Artificial Sequence
  Oligonucleotide for detection of SNP TSC0032854
gggaatagtaaaa

SEQ ID NO: 131628 - DNA, 13 bp, Artificial Sequence
  Oligonucleotide for detection of SNP TSC0032854
ttttactattccc

SEQ ID NO: 131629 - DNA, 13 bp, Artificial Sequence
  Oligonucleotide for detection of SNP TSC0032854
gggaatggtaaaa

SEQ ID NO: 131630 - DNA, 13 bp, Artificial Sequence
  Oligonucleotide for detection of SNP TSC0032854
ttttaccattccc

SEQ ID NO: 131631 - DNA, 13 bp, Artificial Sequence
  Oligonucleotide for detection of SNP TSC0032854
gggaacggtaaaa

SEQ ID NO: 131632 - DNA, 13 bp, Artificial Sequence
  Oligonucleotide for detection of SNP TSC0032854
ttttaccgttccc

SEQ ID NO: 131633 - DNA, 13 bp, Artificial Sequence
  Oligonucleotide for detection of SNP TSC0032855
ttgttataaagaa

SEQ ID NO: 131634 - DNA, 13 bp, Artificial Sequence
  Oligonucleotide for detection of SNP TSC0032855
ttctttataacaa

SEQ ID NO: 131635 - DNA, 13 bp, Artificial Sequence
  Oligonucleotide for detection of SNP TSC0032855
ttttttttggtag

SEQ ID NO: 131636 - DNA, 13 bp, Artificial Sequence
  Oligonucleotide for detection of SNP TSC0032855
ctaccaaaaaaaa

SEQ ID NO: 131637 - DNA, 13 bp, Artificial Sequence
  Oligonucleotide for detection of SNP TSC0032855
ttttttatggtag

SEQ ID NO: 131638 - DNA, 13 bp, Artificial Sequence
  Oligonucleotide for detection of SNP TSC0032855
ctaccataaaaaa

SEQ ID NO: 131639 - DNA, 13 bp, Artificial Sequence
  Oligonucleotide for detection of SNP TSC0032856
tgttagaaagaag

SEQ ID NO: 131640 - DNA, 13 bp, Artificial Sequence
  Oligonucleotide for detection of SNP TSC0032856
cttctttctaaca

SEQ ID NO: 131641 - DNA, 13 bp, Artificial Sequence
  Oligonucleotide for detection of SNP TSC0032856
tgttaggaagaag

SEQ ID NO: 131642 - DNA, 13 bp, Artificial Sequence
  Oligonucleotide for detection of SNP TSC0032856
cttcttcctaaca

SEQ ID NO: 131643 - DNA, 13 bp, Artificial Sequence
  Oligonucleotide for detection of SNP TSC0032857
tttatagttttty

SEQ ID NO: 131644 - DNA, 13 bp, Artificial Sequence
  Oligonucleotide for detection of SNP TSC0032857
raaaaactataaa

SEQ ID NO: 131645 - DNA, 13 bp, Artificial Sequence
  Oligonucleotide for detection of SNP TSC0032857
tttataattttty

SEQ ID NO: 131646 - DNA, 13 bp, Artificial Sequence
  Oligonucleotide for detection of SNP TSC0032857
raaaaattataaa

SEQ ID NO: 131647 - DNA, 13 bp, Artificial Sequence
  Oligonucleotide for detection of SNP TSC0032859
ttaataatagtta

SEQ ID NO: 131648 - DNA, 13 bp, Artificial Sequence
  Oligonucleotide for detection of SNP TSC0032859
taactattattaa

SEQ ID NO: 131649 - DNA, 13 bp, Artificial Sequence
  Oligonucleotide for detection of SNP TSC0032859
ttaatattagtta

SEQ ID NO: 131650 - DNA, 13 bp, Artificial Sequence
  Oligonucleotide for detection of SNP TSC0032859
taactaatattaa

SEQ ID NO: 131651 - DNA, 13 bp, Artificial Sequence
  Oligonucleotide for detection of SNP TSC0032859
taattgttgttaa

SEQ ID NO: 131652 - DNA, 13 bp, Artificial Sequence
  Oligonucleotide for detection of SNP TSC0032859
ttaacaacaatta

SEQ ID NO: 131653 - DNA, 13 bp, Artificial Sequence
  Oligonucleotide for detection of SNP TSC0032859
taattgatgttaa

SEQ ID NO: 131654 - DNA, 13 bp, Artificial Sequence
  Oligonucleotide for detection of SNP TSC0032859
ttaacatcaatta

SEQ ID NO: 131655 - DNA, 13 bp, Artificial Sequence
  Oligonucleotide for detection of SNP TSC0032860
gtttgtagaatag

SEQ ID NO: 131656 - DNA, 13 bp, Artificial Sequence
  Oligonucleotide for detection of SNP TSC0032860
ctattctacaaac

SEQ ID NO: 131657 - DNA, 13 bp, Artificial Sequence
  Oligonucleotide for detection of SNP TSC0032860
gtttgttgaatag

SEQ ID NO: 131658 - DNA, 13 bp, Artificial Sequence
  Oligonucleotide for detection of SNP TSC0032860
ctattcaacaaac

SEQ ID NO: 131659 - DNA, 13 bp, Artificial Sequence
  Oligonucleotide for detection of SNP TSC0032860
ttgttttataagy

SEQ ID NO: 131660 - DNA, 13 bp, Artificial Sequence
  Oligonucleotide for detection of SNP TSC0032860
rcttataaaacaa

SEQ ID NO: 131661 - DNA, 13 bp, Artificial Sequence
  Oligonucleotide for detection of SNP TSC0032860
ttgtttaataagy

SEQ ID NO: 131662 - DNA, 13 bp, Artificial Sequence
  Oligonucleotide for detection of SNP TSC0032860
rcttattaaacaa

SEQ ID NO: 131663 - DNA, 13 bp, Artificial Sequence
  Oligonucleotide for detection of SNP TSC0032861
ttttttataatcg

SEQ ID NO: 131664 - DNA, 13 bp, Artificial Sequence
  Oligonucleotide for detection of SNP TSC0032861
cgattataaaaaa

SEQ ID NO: 131665 - DNA, 13 bp, Artificial Sequence
  Oligonucleotide for detection of SNP TSC0032861
tggttgtggaagg

SEQ ID NO: 131666 - DNA, 13 bp, Artificial Sequence
  Oligonucleotide for detection of SNP TSC0032861
ccttccacaacca

SEQ ID NO: 131667 - DNA, 13 bp, Artificial Sequence
  Oligonucleotide for detection of SNP TSC0032861
tggttggggaagg

SEQ ID NO: 131668 - DNA, 13 bp, Artificial Sequence
  Oligonucleotide for detection of SNP TSC0032861
ccttccccaacca

SEQ ID NO: 131669 - DNA, 13 bp, Artificial Sequence
  Oligonucleotide for detection of SNP TSC0032861
cggttgtggaagg

SEQ ID NO: 131670 - DNA, 13 bp, Artificial Sequence
  Oligonucleotide for detection of SNP TSC0032861
ccttccacaaccg

SEQ ID NO: 131671 - DNA, 13 bp, Artificial Sequence
  Oligonucleotide for detection of SNP TSC0032861
cggttggggaagg

SEQ ID NO: 131672 - DNA, 13 bp, Artificial Sequence
  Oligonucleotide for detection of SNP TSC0032861
ccttccccaaccg

SEQ ID NO: 131673 - DNA, 13 bp, Artificial Sequence
  Oligonucleotide for detection of SNP TSC0032863
ggtttgattaagy

SEQ ID NO: 131674 - DNA, 13 bp, Artificial Sequence
  Oligonucleotide for detection of SNP TSC0032863
rcttaatcaaacc

SEQ ID NO: 131675 - DNA, 13 bp, Artificial Sequence
  Oligonucleotide for detection of SNP TSC0032863
ggtttggttaagy

SEQ ID NO: 131676 - DNA, 13 bp, Artificial Sequence
  Oligonucleotide for detection of SNP TSC0032863
rcttaaccaaacc

SEQ ID NO: 131677 - DNA, 13 bp, Artificial Sequence
  Oligonucleotide for detection of SNP TSC0032864
ttttttatattay

SEQ ID NO: 131678 - DNA, 13 bp, Artificial Sequence
  Oligonucleotide for detection of SNP TSC0032864
rtaatataaaaaa

SEQ ID NO: 131679 - DNA, 13 bp, Artificial Sequence
  Oligonucleotide for detection of SNP TSC0032864
ttttttgtattay

SEQ ID NO: 131680 - DNA, 13 bp, Artificial Sequence
  Oligonucleotide for detection of SNP TSC0032864
rtaatacaaaaaa

SEQ ID NO: 131681 - DNA, 13 bp, Artificial Sequence
  Oligonucleotide for detection of SNP TSC0032865
gagaagagaggga

SEQ ID NO: 131682 - DNA, 13 bp, Artificial Sequence
  Oligonucleotide for detection of SNP TSC0032865
tccctctcttctc

SEQ ID NO: 131683 - DNA, 13 bp, Artificial Sequence
  Oligonucleotide for detection of SNP TSC0032865
gagaagtgaggga

SEQ ID NO: 131684 - DNA, 13 bp, Artificial Sequence
  Oligonucleotide for detection of SNP TSC0032865
tccctcacttctc

SEQ ID NO: 131685 - DNA, 13 bp, Artificial Sequence
  Oligonucleotide for detection of SNP TSC0032867
aatggtgtaattt

SEQ ID NO: 131686 - DNA, 13 bp, Artificial Sequence
  Oligonucleotide for detection of SNP TSC0032867
aaattacaccatt

SEQ ID NO: 131687 - DNA, 13 bp, Artificial Sequence
  Oligonucleotide for detection of SNP TSC0032867
aatggtataattt

SEQ ID NO: 131688 - DNA, 13 bp, Artificial Sequence
  Oligonucleotide for detection of SNP TSC0032867
aaattataccatt

SEQ ID NO: 131689 - DNA, 13 bp, Artificial Sequence
  Oligonucleotide for detection of SNP TSC0032867
aatggcgtaattt

SEQ ID NO: 131690 - DNA, 13 bp, Artificial Sequence
  Oligonucleotide for detection of SNP TSC0032867
aaattacgccatt

SEQ ID NO: 131691 - DNA, 13 bp, Artificial Sequence
  Oligonucleotide for detection of SNP TSC0032868
tgtgtgtgtggaa

SEQ ID NO: 131692 - DNA, 13 bp, Artificial Sequence
  Oligonucleotide for detection of SNP TSC0032868
ttccacacacaca

SEQ ID NO: 131693 - DNA, 13 bp, Artificial Sequence
  Oligonucleotide for detection of SNP TSC0032868
tgtgtgcgtggaa

SEQ ID NO: 131694 - DNA, 13 bp, Artificial Sequence
  Oligonucleotide for detection of SNP TSC0032868
ttccacgcacaca

SEQ ID NO: 131695 - DNA, 13 bp, Artificial Sequence
  Oligonucleotide for detection of SNP TSC0032868
ttttacgtatata

SEQ ID NO: 131696 - DNA, 13 bp, Artificial Sequence
  Oligonucleotide for detection of SNP TSC0032868
tatatacgtaaaa

SEQ ID NO: 131697 - DNA, 13 bp, Artificial Sequence
  Oligonucleotide for detection of SNP TSC0032872
taaaatatataaa

SEQ ID NO: 131698 - DNA, 13 bp, Artificial Sequence
  Oligonucleotide for detection of SNP TSC0032872
tttatatatttta

SEQ ID NO: 131699 - DNA, 13 bp, Artificial Sequence
  Oligonucleotide for detection of SNP TSC0032872
taaaatgtataaa

SEQ ID NO: 131700 - DNA, 13 bp, Artificial Sequence
  Oligonucleotide for detection of SNP TSC0032872
tttatacatttta

SEQ ID NO: 131701 - DNA, 13 bp, Artificial Sequence
  Oligonucleotide for detection of SNP TSC0032873
gtaattgaattat

SEQ ID NO: 131702 - DNA, 13 bp, Artificial Sequence
  Oligonucleotide for detection of SNP TSC0032873
ataattcaattac

SEQ ID NO: 131703 - DNA, 13 bp, Artificial Sequence
  Oligonucleotide for detection of SNP TSC0032873
gtaatttaattat

SEQ ID NO: 131704 - DNA, 13 bp, Artificial Sequence
  Oligonucleotide for detection of SNP TSC0032873
ataattaaattac

SEQ ID NO: 131705 - DNA, 13 bp, Artificial Sequence
  Oligonucleotide for detection of SNP TSC0032873
atgatttaattay

SEQ ID NO: 131706 - DNA, 13 bp, Artificial Sequence
  Oligonucleotide for detection of SNP TSC0032873
rtaattaaatcat

SEQ ID NO: 131707 - DNA, 13 bp, Artificial Sequence
  Oligonucleotide for detection of SNP TSC0032873
atgattaaattay

SEQ ID NO: 131708 - DNA, 13 bp, Artificial Sequence
  Oligonucleotide for detection of SNP TSC0032873
rtaatttaatcat

SEQ ID NO: 131709 - DNA, 13 bp, Artificial Sequence
  Oligonucleotide for detection of SNP TSC0032874
attgtattttggy

SEQ ID NO: 131710 - DNA, 13 bp, Artificial Sequence
  Oligonucleotide for detection of SNP TSC0032874
rccaaaatacaat

SEQ ID NO: 131711 - DNA, 13 bp, Artificial Sequence
  Oligonucleotide for detection of SNP TSC0032874
attgtagtttggy

SEQ ID NO: 131712 - DNA, 13 bp, Artificial Sequence
  Oligonucleotide for detection of SNP TSC0032874
rccaaactacaat

SEQ ID NO: 131713 - DNA, 13 bp, Artificial Sequence
  Oligonucleotide for detection of SNP TSC0032874
gttagagtgtagt

SEQ ID NO: 131714 - DNA, 13 bp, Artificial Sequence
  Oligonucleotide for detection of SNP TSC0032874
actacactctaac

SEQ ID NO: 131715 - DNA, 13 bp, Artificial Sequence
  Oligonucleotide for detection of SNP TSC0032874
gttagattgtagt

SEQ ID NO: 131716 - DNA, 13 bp, Artificial Sequence
  Oligonucleotide for detection of SNP TSC0032874
actacaatctaac

SEQ ID NO: 131717 - DNA, 13 bp, Artificial Sequence
  Oligonucleotide for detection of SNP TSC0032876
taaattgtgtgty

SEQ ID NO: 131718 - DNA, 13 bp, Artificial Sequence
  Oligonucleotide for detection of SNP TSC0032876
racacacaattta

SEQ ID NO: 131719 - DNA, 13 bp, Artificial Sequence
  Oligonucleotide for detection of SNP TSC0032876
taaattatgtgty

SEQ ID NO: 131720 - DNA, 13 bp, Artificial Sequence
  Oligonucleotide for detection of SNP TSC0032876
racacataattta

SEQ ID NO: 131721 - DNA, 13 bp, Artificial Sequence
  Oligonucleotide for detection of SNP TSC0032876
taaattgcgtgty

SEQ ID NO: 131722 - DNA, 13 bp, Artificial Sequence
  Oligonucleotide for detection of SNP TSC0032876
racacgcaattta

SEQ ID NO: 131723 - DNA, 13 bp, Artificial Sequence
  Oligonucleotide for detection of SNP TSC0032876
taaattacgtgty

SEQ ID NO: 131724 - DNA, 13 bp, Artificial Sequence
  Oligonucleotide for detection of SNP TSC0032876
racacgtaattta

SEQ ID NO: 131725 - DNA, 13 bp, Artificial Sequence
  Oligonucleotide for detection of SNP TSC0032878
tagttaggttata

SEQ ID NO: 131726 - DNA, 13 bp, Artificial Sequence
  Oligonucleotide for detection of SNP TSC0032878
tataacctaacta

SEQ ID NO: 131727 - DNA, 13 bp, Artificial Sequence
  Oligonucleotide for detection of SNP TSC0032878
tagttaagttata

SEQ ID NO: 131728 - DNA, 13 bp, Artificial Sequence
  Oligonucleotide for detection of SNP TSC0032878
tataacttaacta

SEQ ID NO: 131729 - DNA, 13 bp, Artificial Sequence
  Oligonucleotide for detection of SNP TSC0032879
taatttgtatttt

SEQ ID NO: 131730 - DNA, 13 bp, Artificial Sequence
  Oligonucleotide for detection of SNP TSC0032879
aaaatacaaatta

SEQ ID NO: 131731 - DNA, 13 bp, Artificial Sequence
  Oligonucleotide for detection of SNP TSC0032879
taatttatatttt

SEQ ID NO: 131732 - DNA, 13 bp, Artificial Sequence
  Oligonucleotide for detection of SNP TSC0032879
aaaatataaatta

SEQ ID NO: 131733 - DNA, 13 bp, Artificial Sequence
  Oligonucleotide for detection of SNP TSC0032881
atatatataaagg

SEQ ID NO: 131734 - DNA, 13 bp, Artificial Sequence
  Oligonucleotide for detection of SNP TSC0032881
cctttatatatat

SEQ ID NO: 131735 - DNA, 13 bp, Artificial Sequence
  Oligonucleotide for detection of SNP TSC0032881
atatatgtaaagg

SEQ ID NO: 131736 - DNA, 13 bp, Artificial Sequence
  Oligonucleotide for detection of SNP TSC0032881
cctttacatatat

SEQ ID NO: 131737 - DNA, 13 bp, Artificial Sequence
  Oligonucleotide for detection of SNP TSC0032883
gtttgagtgatgg

SEQ ID NO: 131738 - DNA, 13 bp, Artificial Sequence
  Oligonucleotide for detection of SNP TSC0032883
ccatcactcaaac

SEQ ID NO: 131739 - DNA, 13 bp, Artificial Sequence
  Oligonucleotide for detection of SNP TSC0032883
gtttgaatgatgg

SEQ ID NO: 131740 - DNA, 13 bp, Artificial Sequence
  Oligonucleotide for detection of SNP TSC0032883
ccatcattcaaac

SEQ ID NO: 131741 - DNA, 13 bp, Artificial Sequence
  Oligonucleotide for detection of SNP TSC0032886
atgagtaatttat

SEQ ID NO: 131742 - DNA, 13 bp, Artificial Sequence
  Oligonucleotide for detection of SNP TSC0032886
ataaattactcat

SEQ ID NO: 131743 - DNA, 13 bp, Artificial Sequence
  Oligonucleotide for detection of SNP TSC0032886
atgagtgatttat

SEQ ID NO: 131744 - DNA, 13 bp, Artificial Sequence
  Oligonucleotide for detection of SNP TSC0032886
ataaatcactcat

SEQ ID NO: 131745 - DNA, 13 bp, Artificial Sequence
  Oligonucleotide for detection of SNP TSC0032890
taagttatattay

SEQ ID NO: 131746 - DNA, 13 bp, Artificial Sequence
  Oligonucleotide for detection of SNP TSC0032890
rtaatataactta

SEQ ID NO: 131747 - DNA, 13 bp, Artificial Sequence
  Oligonucleotide for detection of SNP TSC0032890
taagttttattay

SEQ ID NO: 131748 - DNA, 13 bp, Artificial Sequence
  Oligonucleotide for detection of SNP TSC0032890
rtaataaaactta

SEQ ID NO: 131749 - DNA, 13 bp, Artificial Sequence
  Oligonucleotide for detection of SNP TSC0032890
gtggtgtggtttg

SEQ ID NO: 131750 - DNA, 13 bp, Artificial Sequence
  Oligonucleotide for detection of SNP TSC0032890
caaaccacaccac

SEQ ID NO: 131751 - DNA, 13 bp, Artificial Sequence
  Oligonucleotide for detection of SNP TSC0032890
gtggtggggtttg

SEQ ID NO: 131752 - DNA, 13 bp, Artificial Sequence
  Oligonucleotide for detection of SNP TSC0032890
caaaccccaccac

SEQ ID NO: 131753 - DNA, 13 bp, Artificial Sequence
  Oligonucleotide for detection of SNP TSC0032892
gggaatattttay

SEQ ID NO: 131754 - DNA, 13 bp, Artificial Sequence
  Oligonucleotide for detection of SNP TSC0032892
rtaaaatattccc

SEQ ID NO: 131755 - DNA, 13 bp, Artificial Sequence
  Oligonucleotide for detection of SNP TSC0032892
gggaatgttttay

SEQ ID NO: 131756 - DNA, 13 bp, Artificial Sequence
  Oligonucleotide for detection of SNP TSC0032892
rtaaaacattccc

SEQ ID NO: 131757 - DNA, 13 bp, Artificial Sequence
  Oligonucleotide for detection of SNP TSC0032893
ttaaatgtttata

SEQ ID NO: 131758 - DNA, 13 bp, Artificial Sequence
  Oligonucleotide for detection of SNP TSC0032893
tataaacatttaa

SEQ ID NO: 131759 - DNA, 13 bp, Artificial Sequence
  Oligonucleotide for detection of SNP TSC0032893
ttaaatttttata

SEQ ID NO: 131760 - DNA, 13 bp, Artificial Sequence
  Oligonucleotide for detection of SNP TSC0032893
tataaaaatttaa

SEQ ID NO: 131761 - DNA, 13 bp, Artificial Sequence
  Oligonucleotide for detection of SNP TSC0032893
tatgaatatttgg

SEQ ID NO: 131762 - DNA, 13 bp, Artificial Sequence
  Oligonucleotide for detection of SNP TSC0032893
ccaaatattcata

SEQ ID NO: 131763 - DNA, 13 bp, Artificial Sequence
  Oligonucleotide for detection of SNP TSC0032893
tatgaaaatttgg

SEQ ID NO: 131764 - DNA, 13 bp, Artificial Sequence
  Oligonucleotide for detection of SNP TSC0032893
ccaaattttcata

SEQ ID NO: 131765 - DNA, 13 bp, Artificial Sequence
  Oligonucleotide for detection of SNP TSC0032894
tataaaaagtatt

SEQ ID NO: 131766 - DNA, 13 bp, Artificial Sequence
  Oligonucleotide for detection of SNP TSC0032894
aatactttttata

SEQ ID NO: 131767 - DNA, 13 bp, Artificial Sequence
  Oligonucleotide for detection of SNP TSC0032894
tataaagagtatt

SEQ ID NO: 131768 - DNA, 13 bp, Artificial Sequence
  Oligonucleotide for detection of SNP TSC0032894
aatactctttata

SEQ ID NO: 131769 - DNA, 13 bp, Artificial Sequence
  Oligonucleotide for detection of SNP TSC0032895
ttgggaaaataga

SEQ ID NO: 131770 - DNA, 13 bp, Artificial Sequence
  Oligonucleotide for detection of SNP TSC0032895
tctattttcccaa

SEQ ID NO: 131771 - DNA, 13 bp, Artificial Sequence
  Oligonucleotide for detection of SNP TSC0032895
ttgggataataga

SEQ ID NO: 131772 - DNA, 13 bp, Artificial Sequence
  Oligonucleotide for detection of SNP TSC0032895
tctattatcccaa

SEQ ID NO: 131773 - DNA, 13 bp, Artificial Sequence
  Oligonucleotide for detection of SNP TSC0032895
tttgtttttttag

SEQ ID NO: 131774 - DNA, 13 bp, Artificial Sequence
  Oligonucleotide for detection of SNP TSC0032895
ctaaaaaaacaaa

SEQ ID NO: 131775 - DNA, 13 bp, Artificial Sequence
  Oligonucleotide for detection of SNP TSC0032896
taagtttattagg

SEQ ID NO: 131776 - DNA, 13 bp, Artificial Sequence
  Oligonucleotide for detection of SNP TSC0032896
cctaataaactta

SEQ ID NO: 131777 - DNA, 13 bp, Artificial Sequence
  Oligonucleotide for detection of SNP TSC0032896
taagttgattagg

SEQ ID NO: 131778 - DNA, 13 bp, Artificial Sequence
  Oligonucleotide for detection of SNP TSC0032896
cctaatcaactta

SEQ ID NO: 131779 - DNA, 13 bp, Artificial Sequence
  Oligonucleotide for detection of SNP TSC0032896
taagtcgattagg

SEQ ID NO: 131780 - DNA, 13 bp, Artificial Sequence
  Oligonucleotide for detection of SNP TSC0032896
cctaatcgactta

SEQ ID NO: 131781 - DNA, 13 bp, Artificial Sequence
  Oligonucleotide for detection of SNP TSC0032896
tttgatgggtttg

SEQ ID NO: 131782 - DNA, 13 bp, Artificial Sequence
  Oligonucleotide for detection of SNP TSC0032896
caaacccatcaaa

SEQ ID NO: 131783 - DNA, 13 bp, Artificial Sequence
  Oligonucleotide for detection of SNP TSC0032896
tttgattggtttg

SEQ ID NO: 131784 - DNA, 13 bp, Artificial Sequence
  Oligonucleotide for detection of SNP TSC0032896
caaaccaatcaaa

SEQ ID NO: 131785 - DNA, 13 bp, Artificial Sequence
  Oligonucleotide for detection of SNP TSC0032896
tttgatcggtttg

SEQ ID NO: 131786 - DNA, 13 bp, Artificial Sequence
  Oligonucleotide for detection of SNP TSC0032896
caaaccgatcaaa

SEQ ID NO: 131787 - DNA, 13 bp, Artificial Sequence
  Oligonucleotide for detection of SNP TSC0032897
tatgaggtggaga

SEQ ID NO: 131788 - DNA, 13 bp, Artificial Sequence
  Oligonucleotide for detection of SNP TSC0032897
tctccacctcata

SEQ ID NO: 131789 - DNA, 13 bp, Artificial Sequence
  Oligonucleotide for detection of SNP TSC0032897
tatgagatggaga

SEQ ID NO: 131790 - DNA, 13 bp, Artificial Sequence
  Oligonucleotide for detection of SNP TSC0032897
tctccatctcata

SEQ ID NO: 131791 - DNA, 13 bp, Artificial Sequence
  Oligonucleotide for detection of SNP TSC0032899
agaattgaaagaa

SEQ ID NO: 131792 - DNA, 13 bp, Artificial Sequence
  Oligonucleotide for detection of SNP TSC0032899
ttctttcaattct

SEQ ID NO: 131793 - DNA, 13 bp, Artificial Sequence
  Oligonucleotide for detection of SNP TSC0032899
agaattaaaagaa

SEQ ID NO: 131794 - DNA, 13 bp, Artificial Sequence
  Oligonucleotide for detection of SNP TSC0032899
ttcttttaattct

SEQ ID NO: 131795 - DNA, 13 bp, Artificial Sequence
  Oligonucleotide for detection of SNP TSC0032899
agaatcgaaagaa

SEQ ID NO: 131796 - DNA, 13 bp, Artificial Sequence
  Oligonucleotide for detection of SNP TSC0032899
ttctttcgattct

SEQ ID NO: 131797 - DNA, 13 bp, Artificial Sequence
  Oligonucleotide for detection of SNP TSC0032900
ggaggaaaggggy

SEQ ID NO: 131798 - DNA, 13 bp, Artificial Sequence
  Oligonucleotide for detection of SNP TSC0032900
rcccctttcctcc

SEQ ID NO: 131799 - DNA, 13 bp, Artificial Sequence
  Oligonucleotide for detection of SNP TSC0032900
ggaggagaggggy

SEQ ID NO: 131800 - DNA, 13 bp, Artificial Sequence
  Oligonucleotide for detection of SNP TSC0032900
rcccctctcctcc

SEQ ID NO: 131801 - DNA, 13 bp, Artificial Sequence
  Oligonucleotide for detection of SNP TSC0032906
ttttttgaaatay

SEQ ID NO: 131802 - DNA, 13 bp, Artificial Sequence
  Oligonucleotide for detection of SNP TSC0032906
rtatttcaaaaaa

SEQ ID NO: 131803 - DNA, 13 bp, Artificial Sequence
  Oligonucleotide for detection of SNP TSC0032906
ttttttaaaatay

SEQ ID NO: 131804 - DNA, 13 bp, Artificial Sequence
  Oligonucleotide for detection of SNP TSC0032906
rtattttaaaaaa

SEQ ID NO: 131805 - DNA, 13 bp, Artificial Sequence
  Oligonucleotide for detection of SNP TSC0032906
tttttcgaaatay

SEQ ID NO: 131806 - DNA, 13 bp, Artificial Sequence
  Oligonucleotide for detection of SNP TSC0032906
rtatttcgaaaaa

SEQ ID NO: 131807 - DNA, 13 bp, Artificial Sequence
  Oligonucleotide for detection of SNP TSC0032908
gtggggtgtttta

SEQ ID NO: 131808 - DNA, 13 bp, Artificial Sequence
  Oligonucleotide for detection of SNP TSC0032908
taaaacaccccac

SEQ ID NO: 131809 - DNA, 13 bp, Artificial Sequence
  Oligonucleotide for detection of SNP TSC0032908
gtggggcgtttta

SEQ ID NO: 131810 - DNA, 13 bp, Artificial Sequence
  Oligonucleotide for detection of SNP TSC0032908
taaaacgccccac

SEQ ID NO: 131811 - DNA, 13 bp, Artificial Sequence
  Oligonucleotide for detection of SNP TSC0032908
tgggatgttttay

SEQ ID NO: 131812 - DNA, 13 bp, Artificial Sequence
  Oligonucleotide for detection of SNP TSC0032908
rtaaaacatccca

SEQ ID NO: 131813 - DNA, 13 bp, Artificial Sequence
  Oligonucleotide for detection of SNP TSC0032908
tgggatattttay

SEQ ID NO: 131814 - DNA, 13 bp, Artificial Sequence
  Oligonucleotide for detection of SNP TSC0032908
rtaaaatatccca

SEQ ID NO: 131815 - DNA, 13 bp, Artificial Sequence
  Oligonucleotide for detection of SNP TSC0032908
tgggacgttttay

SEQ ID NO: 131816 - DNA, 13 bp, Artificial Sequence
  Oligonucleotide for detection of SNP TSC0032908
rtaaaacgtccca

SEQ ID NO: 131817 - DNA, 13 bp, Artificial Sequence
  Oligonucleotide for detection of SNP TSC0032909
agagaggggggta

SEQ ID NO: 131818 - DNA, 13 bp, Artificial Sequence
  Oligonucleotide for detection of SNP TSC0032909
tacccccctctct

SEQ ID NO: 131819 - DNA, 13 bp, Artificial Sequence
  Oligonucleotide for detection of SNP TSC0032909
agagagaggggta

SEQ ID NO: 131820 - DNA, 13 bp, Artificial Sequence
  Oligonucleotide for detection of SNP TSC0032909
tacccctctctct

SEQ ID NO: 131821 - DNA, 13 bp, Artificial Sequence
  Oligonucleotide for detection of SNP TSC0032911
tttagttttatty

SEQ ID NO: 131822 - DNA, 13 bp, Artificial Sequence
  Oligonucleotide for detection of SNP TSC0032911
raataaaactaaa

SEQ ID NO: 131823 - DNA, 13 bp, Artificial Sequence
  Oligonucleotide for detection of SNP TSC0032911
tttagtgttatty

SEQ ID NO: 131824 - DNA, 13 bp, Artificial Sequence
  Oligonucleotide for detection of SNP TSC0032911
raataacactaaa

SEQ ID NO: 131825 - DNA, 13 bp, Artificial Sequence
  Oligonucleotide for detection of SNP TSC0032911
tttagcgttatty

SEQ ID NO: 131826 - DNA, 13 bp, Artificial Sequence
  Oligonucleotide for detection of SNP TSC0032911
raataacgctaaa

SEQ ID NO: 131827 - DNA, 13 bp, Artificial Sequence
  Oligonucleotide for detection of SNP TSC0032911
ggatgaggttgaa

SEQ ID NO: 131828 - DNA, 13 bp, Artificial Sequence
  Oligonucleotide for detection of SNP TSC0032911
ttcaacctcatcc

SEQ ID NO: 131829 - DNA, 13 bp, Artificial Sequence
  Oligonucleotide for detection of SNP TSC0032911
ggatgatgttgaa

SEQ ID NO: 131830 - DNA, 13 bp, Artificial Sequence
  Oligonucleotide for detection of SNP TSC0032911
ttcaacatcatcc

SEQ ID NO: 131831 - DNA, 13 bp, Artificial Sequence
  Oligonucleotide for detection of SNP TSC0032911
ggatgacgttgaa

SEQ ID NO: 131832 - DNA, 13 bp, Artificial Sequence
  Oligonucleotide for detection of SNP TSC0032911
ttcaacgtcatcc

SEQ ID NO: 131833 - DNA, 13 bp, Artificial Sequence
  Oligonucleotide for detection of SNP TSC0032912
tttttaatttgtg

SEQ ID NO: 131834 - DNA, 13 bp, Artificial Sequence
  Oligonucleotide for detection of SNP TSC0032912
cacaaattaaaaa

SEQ ID NO: 131835 - DNA, 13 bp, Artificial Sequence
  Oligonucleotide for detection of SNP TSC0032912
tttttagtttgtg

SEQ ID NO: 131836 - DNA, 13 bp, Artificial Sequence
  Oligonucleotide for detection of SNP TSC0032912
cacaaactaaaaa

SEQ ID NO: 131837 - DNA, 13 bp, Artificial Sequence
  Oligonucleotide for detection of SNP TSC0032913
tttagggttatag

SEQ ID NO: 131838 - DNA, 13 bp, Artificial Sequence
  Oligonucleotide for detection of SNP TSC0032913
ctataaccctaaa

SEQ ID NO: 131839 - DNA, 13 bp, Artificial Sequence
  Oligonucleotide for detection of SNP TSC0032913
tttaggattatag

SEQ ID NO: 131840 - DNA, 13 bp, Artificial Sequence
  Oligonucleotide for detection of SNP TSC0032913
ctataatcctaaa

SEQ ID NO: 131841 - DNA, 13 bp, Artificial Sequence
  Oligonucleotide for detection of SNP TSC0032914
tatataaagaaay

SEQ ID NO: 131842 - DNA, 13 bp, Artificial Sequence
  Oligonucleotide for detection of SNP TSC0032914
rtttctttatata

SEQ ID NO: 131843 - DNA, 13 bp, Artificial Sequence
  Oligonucleotide for detection of SNP TSC0032914
tatatagagaaay

SEQ ID NO: 131844 - DNA, 13 bp, Artificial Sequence
  Oligonucleotide for detection of SNP TSC0032914
rtttctctatata

SEQ ID NO: 131845 - DNA, 13 bp, Artificial Sequence
  Oligonucleotide for detection of SNP TSC0032915
aaagttgggaaag

SEQ ID NO: 131846 - DNA, 13 bp, Artificial Sequence
  Oligonucleotide for detection of SNP TSC0032915
ctttcccaacttt

SEQ ID NO: 131847 - DNA, 13 bp, Artificial Sequence
  Oligonucleotide for detection of SNP TSC0032915
aaagttaggaaag

SEQ ID NO: 131848 - DNA, 13 bp, Artificial Sequence
  Oligonucleotide for detection of SNP TSC0032915
ctttcctaacttt

SEQ ID NO: 131849 - DNA, 13 bp, Artificial Sequence
  Oligonucleotide for detection of SNP TSC0032916
atgtaagaaaagy

SEQ ID NO: 131850 - DNA, 13 bp, Artificial Sequence
  Oligonucleotide for detection of SNP TSC0032916
rcttttcttacat

SEQ ID NO: 131851 - DNA, 13 bp, Artificial Sequence
  Oligonucleotide for detection of SNP TSC0032916
atgtaaaaaaagy

SEQ ID NO: 131852 - DNA, 13 bp, Artificial Sequence
  Oligonucleotide for detection of SNP TSC0032916
rctttttttacat

SEQ ID NO: 131853 - DNA, 13 bp, Artificial Sequence
  Oligonucleotide for detection of SNP TSC0032921
agttttattttgy

SEQ ID NO: 131854 - DNA, 13 bp, Artificial Sequence
  Oligonucleotide for detection of SNP TSC0032921
rcaaaataaaact

SEQ ID NO: 131855 - DNA, 13 bp, Artificial Sequence
  Oligonucleotide for detection of SNP TSC0032921
agttttgttttgy

SEQ ID NO: 131856 - DNA, 13 bp, Artificial Sequence
  Oligonucleotide for detection of SNP TSC0032921
rcaaaacaaaact

SEQ ID NO: 131857 - DNA, 13 bp, Artificial Sequence
  Oligonucleotide for detection of SNP TSC0032922
tgttttgaatttt

SEQ ID NO: 131858 - DNA, 13 bp, Artificial Sequence
  Oligonucleotide for detection of SNP TSC0032922
aaaattcaaaaca

SEQ ID NO: 131859 - DNA, 13 bp, Artificial Sequence
  Oligonucleotide for detection of SNP TSC0032922
tgttttaaatttt

SEQ ID NO: 131860 - DNA, 13 bp, Artificial Sequence
  Oligonucleotide for detection of SNP TSC0032922
aaaatttaaaaca

SEQ ID NO: 131861 - DNA, 13 bp, Artificial Sequence
  Oligonucleotide for detection of SNP TSC0032923
aaataattgtaga

SEQ ID NO: 131862 - DNA, 13 bp, Artificial Sequence
  Oligonucleotide for detection of SNP TSC0032923
tctacaattattt

SEQ ID NO: 131863 - DNA, 13 bp, Artificial Sequence
  Oligonucleotide for detection of SNP TSC0032923
aaataaatgtaga

SEQ ID NO: 131864 - DNA, 13 bp, Artificial Sequence
  Oligonucleotide for detection of SNP TSC0032923
tctacatttattt

SEQ ID NO: 131865 - DNA, 13 bp, Artificial Sequence
  Oligonucleotide for detection of SNP TSC0032924
tttttaagaatag

SEQ ID NO: 131866 - DNA, 13 bp, Artificial Sequence
  Oligonucleotide for detection of SNP TSC0032924
ctattcttaaaaa

SEQ ID NO: 131867 - DNA, 13 bp, Artificial Sequence
  Oligonucleotide for detection of SNP TSC0032924
tttttatgaatag

SEQ ID NO: 131868 - DNA, 13 bp, Artificial Sequence
  Oligonucleotide for detection of SNP TSC0032924
ctattcataaaaa

SEQ ID NO: 131869 - DNA, 13 bp, Artificial Sequence
  Oligonucleotide for detection of SNP TSC0032924
tttttacgaatag

SEQ ID NO: 131870 - DNA, 13 bp, Artificial Sequence
  Oligonucleotide for detection of SNP TSC0032924
ctattcgtaaaaa

SEQ ID NO: 131871 - DNA, 13 bp, Artificial Sequence
  Oligonucleotide for detection of SNP TSC0032924
ttatttttaaaag

SEQ ID NO: 131872 - DNA, 13 bp, Artificial Sequence
  Oligonucleotide for detection of SNP TSC0032924
cttttaaaaataa

SEQ ID NO: 131873 - DNA, 13 bp, Artificial Sequence
  Oligonucleotide for detection of SNP TSC0032924
ttatttgtaaaag

SEQ ID NO: 131874 - DNA, 13 bp, Artificial Sequence
  Oligonucleotide for detection of SNP TSC0032924
cttttacaaataa

SEQ ID NO: 131875 - DNA, 13 bp, Artificial Sequence
  Oligonucleotide for detection of SNP TSC0032924
ttattcgtaaaag

SEQ ID NO: 131876 - DNA, 13 bp, Artificial Sequence
  Oligonucleotide for detection of SNP TSC0032924
cttttacgaataa

SEQ ID NO: 131877 - DNA, 13 bp, Artificial Sequence
  Oligonucleotide for detection of SNP TSC0032925
atgttaagtgtga

SEQ ID NO: 131878 - DNA, 13 bp, Artificial Sequence
  Oligonucleotide for detection of SNP TSC0032925
tcacacttaacat

SEQ ID NO: 131879 - DNA, 13 bp, Artificial Sequence
  Oligonucleotide for detection of SNP TSC0032925
atgttaggtgtga

SEQ ID NO: 131880 - DNA, 13 bp, Artificial Sequence
  Oligonucleotide for detection of SNP TSC0032925
tcacacctaacat

SEQ ID NO: 131881 - DNA, 13 bp, Artificial Sequence
  Oligonucleotide for detection of SNP TSC0032929
aggaaggtgagay

SEQ ID NO: 131882 - DNA, 13 bp, Artificial Sequence
  Oligonucleotide for detection of SNP TSC0032929
rtctcaccttcct

SEQ ID NO: 131883 - DNA, 13 bp, Artificial Sequence
  Oligonucleotide for detection of SNP TSC0032929
aggaagatgagay

SEQ ID NO: 131884 - DNA, 13 bp, Artificial Sequence
  Oligonucleotide for detection of SNP TSC0032929
rtctcatcttcct

SEQ ID NO: 131885 - DNA, 13 bp, Artificial Sequence
  Oligonucleotide for detection of SNP TSC0032929
aggaaggcgagay

SEQ ID NO: 131886 - DNA, 13 bp, Artificial Sequence
  Oligonucleotide for detection of SNP TSC0032929
rtctcgccttcct

SEQ ID NO: 131887 - DNA, 13 bp, Artificial Sequence
  Oligonucleotide for detection of SNP TSC0032929
aggaagacgagay

SEQ ID NO: 131888 - DNA, 13 bp, Artificial Sequence
  Oligonucleotide for detection of SNP TSC0032929
rtctcgtcttcct

SEQ ID NO: 131889 - DNA, 13 bp, Artificial Sequence
  Oligonucleotide for detection of SNP TSC0032930
tttgaataatttt

SEQ ID NO: 131890 - DNA, 13 bp, Artificial Sequence
  Oligonucleotide for detection of SNP TSC0032930
aaaattattcaaa

SEQ ID NO: 131891 - DNA, 13 bp, Artificial Sequence
  Oligonucleotide for detection of SNP TSC0032930
tttgaagaatttt

SEQ ID NO: 131892 - DNA, 13 bp, Artificial Sequence
  Oligonucleotide for detection of SNP TSC0032930
aaaattcttcaaa

SEQ ID NO: 131893 - DNA, 13 bp, Artificial Sequence
  Oligonucleotide for detection of SNP TSC0032930
ttcgaataatttt

SEQ ID NO: 131894 - DNA, 13 bp, Artificial Sequence
  Oligonucleotide for detection of SNP TSC0032930
aaaattattcgaa

SEQ ID NO: 131895 - DNA, 13 bp, Artificial Sequence
  Oligonucleotide for detection of SNP TSC0032930
ttcgaagaatttt

SEQ ID NO: 131896 - DNA, 13 bp, Artificial Sequence
  Oligonucleotide for detection of SNP TSC0032930
aaaattcttcgaa

SEQ ID NO: 131897 - DNA, 13 bp, Artificial Sequence
  Oligonucleotide for detection of SNP TSC0032930
aaaattgtttggg

SEQ ID NO: 131898 - DNA, 13 bp, Artificial Sequence
  Oligonucleotide for detection of SNP TSC0032930
cccaaacaatttt

SEQ ID NO: 131899 - DNA, 13 bp, Artificial Sequence
  Oligonucleotide for detection of SNP TSC0032930
aaaattttttggg

SEQ ID NO: 131900 - DNA, 13 bp, Artificial Sequence
  Oligonucleotide for detection of SNP TSC0032930
cccaaaaaatttt

SEQ ID NO: 131901 - DNA, 13 bp, Artificial Sequence
  Oligonucleotide for detection of SNP TSC0032930
aaaattgttcggg

SEQ ID NO: 131902 - DNA, 13 bp, Artificial Sequence
  Oligonucleotide for detection of SNP TSC0032930
cccgaacaatttt

SEQ ID NO: 131903 - DNA, 13 bp, Artificial Sequence
  Oligonucleotide for detection of SNP TSC0032930
aaaatttttcggg

SEQ ID NO: 131904 - DNA, 13 bp, Artificial Sequence
  Oligonucleotide for detection of SNP TSC0032930
cccgaaaaatttt

SEQ ID NO: 131905 - DNA, 13 bp, Artificial Sequence
  Oligonucleotide for detection of SNP TSC0032931
tattaagttaata

SEQ ID NO: 131906 - DNA, 13 bp, Artificial Sequence
  Oligonucleotide for detection of SNP TSC0032931
tattaacttaata

SEQ ID NO: 131907 - DNA, 13 bp, Artificial Sequence
  Oligonucleotide for detection of SNP TSC0032931
tattaatttaata

SEQ ID NO: 131908 - DNA, 13 bp, Artificial Sequence
  Oligonucleotide for detection of SNP TSC0032931
tattaaattaata

SEQ ID NO: 131909 - DNA, 13 bp, Artificial Sequence
  Oligonucleotide for detection of SNP TSC0032931
tattagtttggtg

SEQ ID NO: 131910 - DNA, 13 bp, Artificial Sequence
  Oligonucleotide for detection of SNP TSC0032931
caccaaactaata

SEQ ID NO: 131911 - DNA, 13 bp, Artificial Sequence
  Oligonucleotide for detection of SNP TSC0032931
tattagattggtg

SEQ ID NO: 131912 - DNA, 13 bp, Artificial Sequence
  Oligonucleotide for detection of SNP TSC0032931
caccaatctaata

SEQ ID NO: 131913 - DNA, 13 bp, Artificial Sequence
  Oligonucleotide for detection of SNP TSC0032933
taaaatttaaaaa

SEQ ID NO: 131914 - DNA, 13 bp, Artificial Sequence
  Oligonucleotide for detection of SNP TSC0032933
tttttaaatttta

SEQ ID NO: 131915 - DNA, 13 bp, Artificial Sequence
  Oligonucleotide for detection of SNP TSC0032934
attgaggtattat

SEQ ID NO: 131916 - DNA, 13 bp, Artificial Sequence
  Oligonucleotide for detection of SNP TSC0032934
ataatacctcaat

SEQ ID NO: 131917 - DNA, 13 bp, Artificial Sequence
  Oligonucleotide for detection of SNP TSC0032934
attgagatattat

SEQ ID NO: 131918 - DNA, 13 bp, Artificial Sequence
  Oligonucleotide for detection of SNP TSC0032934
ataatatctcaat

SEQ ID NO: 131919 - DNA, 13 bp, Artificial Sequence
  Oligonucleotide for detection of SNP TSC0032936
atttttagaaatt

SEQ ID NO: 131920 - DNA, 13 bp, Artificial Sequence
  Oligonucleotide for detection of SNP TSC0032936
aatttctaaaaat

SEQ ID NO: 131921 - DNA, 13 bp, Artificial Sequence
  Oligonucleotide for detection of SNP TSC0032936
atttttggaaatt

SEQ ID NO: 131922 - DNA, 13 bp, Artificial Sequence
  Oligonucleotide for detection of SNP TSC0032936
aatttccaaaaat

SEQ ID NO: 131923 - DNA, 13 bp, Artificial Sequence
  Oligonucleotide for detection of SNP TSC0032936
attttcggaaatt

SEQ ID NO: 131924 - DNA, 13 bp, Artificial Sequence
  Oligonucleotide for detection of SNP TSC0032936
aatttccgaaaat

SEQ ID NO: 131925 - DNA, 13 bp, Artificial Sequence
  Oligonucleotide for detection of SNP TSC0032936
agtttttggggat

SEQ ID NO: 131926 - DNA, 13 bp, Artificial Sequence
  Oligonucleotide for detection of SNP TSC0032936
atccccaaaaact

SEQ ID NO: 131927 - DNA, 13 bp, Artificial Sequence
  Oligonucleotide for detection of SNP TSC0032936
agttttcggggat

SEQ ID NO: 131928 - DNA, 13 bp, Artificial Sequence
  Oligonucleotide for detection of SNP TSC0032936
atccccgaaaact

SEQ ID NO: 131929 - DNA, 13 bp, Artificial Sequence
  Oligonucleotide for detection of SNP TSC0032937
atagaagtgattt

SEQ ID NO: 131930 - DNA, 13 bp, Artificial Sequence
  Oligonucleotide for detection of SNP TSC0032937
aaatcacttctat

SEQ ID NO: 131931 - DNA, 13 bp, Artificial Sequence
  Oligonucleotide for detection of SNP TSC0032937
atagaaatgattt

SEQ ID NO: 131932 - DNA, 13 bp, Artificial Sequence
  Oligonucleotide for detection of SNP TSC0032937
aaatcatttctat

SEQ ID NO: 131933 - DNA, 13 bp, Artificial Sequence
  Oligonucleotide for detection of SNP TSC0032938
taatgtaaaatty

SEQ ID NO: 131934 - DNA, 13 bp, Artificial Sequence
  Oligonucleotide for detection of SNP TSC0032938
raattttacatta

SEQ ID NO: 131935 - DNA, 13 bp, Artificial Sequence
  Oligonucleotide for detection of SNP TSC0032938
taatgtgaaatty

SEQ ID NO: 131936 - DNA, 13 bp, Artificial Sequence
  Oligonucleotide for detection of SNP TSC0032938
raatttcacatta

SEQ ID NO: 131937 - DNA, 13 bp, Artificial Sequence
  Oligonucleotide for detection of SNP TSC0032938
taacgtaaaatty

SEQ ID NO: 131938 - DNA, 13 bp, Artificial Sequence
  Oligonucleotide for detection of SNP TSC0032938
raattttacgtta

SEQ ID NO: 131939 - DNA, 13 bp, Artificial Sequence
  Oligonucleotide for detection of SNP TSC0032938
taacgtgaaatty

SEQ ID NO: 131940 - DNA, 13 bp, Artificial Sequence
  Oligonucleotide for detection of SNP TSC0032938
raatttcacgtta

SEQ ID NO: 131941 - DNA, 13 bp, Artificial Sequence
  Oligonucleotide for detection of SNP TSC0032938
taatgcgaaatty

SEQ ID NO: 131942 - DNA, 13 bp, Artificial Sequence
  Oligonucleotide for detection of SNP TSC0032938
raatttcgcatta

SEQ ID NO: 131943 - DNA, 13 bp, Artificial Sequence
  Oligonucleotide for detection of SNP TSC0032938
taacgcgaaatty

SEQ ID NO: 131944 - DNA, 13 bp, Artificial Sequence
  Oligonucleotide for detection of SNP TSC0032938
raatttcgcgtta

SEQ ID NO: 131945 - DNA, 13 bp, Artificial Sequence
  Oligonucleotide for detection of SNP TSC0032938
gggttttgtgtta

SEQ ID NO: 131946 - DNA, 13 bp, Artificial Sequence
  Oligonucleotide for detection of SNP TSC0032938
taacacaaaaccc

SEQ ID NO: 131947 - DNA, 13 bp, Artificial Sequence
  Oligonucleotide for detection of SNP TSC0032938
gggttttgcgtta

SEQ ID NO: 131948 - DNA, 13 bp, Artificial Sequence
  Oligonucleotide for detection of SNP TSC0032938
taacgcaaaaccc

SEQ ID NO: 131949 - DNA, 13 bp, Artificial Sequence
  Oligonucleotide for detection of SNP TSC0032938
gggtttcgtgtta

SEQ ID NO: 131950 - DNA, 13 bp, Artificial Sequence
  Oligonucleotide for detection of SNP TSC0032938
taacacgaaaccc

SEQ ID NO: 131951 - DNA, 13 bp, Artificial Sequence
  Oligonucleotide for detection of SNP TSC0032938
gggtttcgcgtta

SEQ ID NO: 131952 - DNA, 13 bp, Artificial Sequence
  Oligonucleotide for detection of SNP TSC0032938
taacgcgaaaccc

SEQ ID NO: 131953 - DNA, 13 bp, Artificial Sequence
  Oligonucleotide for detection of SNP TSC0032939
atgggtgagaaga

SEQ ID NO: 131954 - DNA, 13 bp, Artificial Sequence
  Oligonucleotide for detection of SNP TSC0032939
tcttctcacccat

SEQ ID NO: 131955 - DNA, 13 bp, Artificial Sequence
  Oligonucleotide for detection of SNP TSC0032939
atgggtaagaaga

SEQ ID NO: 131956 - DNA, 13 bp, Artificial Sequence
  Oligonucleotide for detection of SNP TSC0032939
tcttcttacccat

SEQ ID NO: 131957 - DNA, 13 bp, Artificial Sequence
  Oligonucleotide for detection of SNP TSC0032939
atgggcgagaaga

SEQ ID NO: 131958 - DNA, 13 bp, Artificial Sequence
  Oligonucleotide for detection of SNP TSC0032939
tcttctcgcccat

SEQ ID NO: 131959 - DNA, 13 bp, Artificial Sequence
  Oligonucleotide for detection of SNP TSC0032940
tgtagggagatag

SEQ ID NO: 131960 - DNA, 13 bp, Artificial Sequence
  Oligonucleotide for detection of SNP TSC0032940
ctatctccctaca

SEQ ID NO: 131961 - DNA, 13 bp, Artificial Sequence
  Oligonucleotide for detection of SNP TSC0032940
tgtaggaagatag

SEQ ID NO: 131962 - DNA, 13 bp, Artificial Sequence
  Oligonucleotide for detection of SNP TSC0032940
ctatcttcctaca

SEQ ID NO: 131963 - DNA, 13 bp, Artificial Sequence
  Oligonucleotide for detection of SNP TSC0032941
ggaaggtgtgggg

SEQ ID NO: 131964 - DNA, 13 bp, Artificial Sequence
  Oligonucleotide for detection of SNP TSC0032941
ccccacaccttcc

SEQ ID NO: 131965 - DNA, 13 bp, Artificial Sequence
  Oligonucleotide for detection of SNP TSC0032941
ggaaggcgtgggg

SEQ ID NO: 131966 - DNA, 13 bp, Artificial Sequence
  Oligonucleotide for detection of SNP TSC0032941
ccccacgccttcc

SEQ ID NO: 131967 - DNA, 13 bp, Artificial Sequence
  Oligonucleotide for detection of SNP TSC0032942
tttaaaataaagg

SEQ ID NO: 131968 - DNA, 13 bp, Artificial Sequence
  Oligonucleotide for detection of SNP TSC0032942
cctttattttaaa

SEQ ID NO: 131969 - DNA, 13 bp, Artificial Sequence
  Oligonucleotide for detection of SNP TSC0032942
tttaaattaaagg

SEQ ID NO: 131970 - DNA, 13 bp, Artificial Sequence
  Oligonucleotide for detection of SNP TSC0032942
cctttaatttaaa

SEQ ID NO: 131971 - DNA, 13 bp, Artificial Sequence
  Oligonucleotide for detection of SNP TSC0032943
tttgagtggtgga

SEQ ID NO: 131972 - DNA, 13 bp, Artificial Sequence
  Oligonucleotide for detection of SNP TSC0032943
tccaccactcaaa

SEQ ID NO: 131973 - DNA, 13 bp, Artificial Sequence
  Oligonucleotide for detection of SNP TSC0032943
tttgagcggtgga

SEQ ID NO: 131974 - DNA, 13 bp, Artificial Sequence
  Oligonucleotide for detection of SNP TSC0032943
tccaccgctcaaa

SEQ ID NO: 131975 - DNA, 13 bp, Artificial Sequence
  Oligonucleotide for detection of SNP TSC0032943
tttattatttaaa

SEQ ID NO: 131976 - DNA, 13 bp, Artificial Sequence
  Oligonucleotide for detection of SNP TSC0032943
tttaaataataaa

SEQ ID NO: 131977 - DNA, 13 bp, Artificial Sequence
  Oligonucleotide for detection of SNP TSC0032944
gggttggtttgga

SEQ ID NO: 131978 - DNA, 13 bp, Artificial Sequence
  Oligonucleotide for detection of SNP TSC0032944
tccaaaccaaccc

SEQ ID NO: 131979 - DNA, 13 bp, Artificial Sequence
  Oligonucleotide for detection of SNP TSC0032944
gggttgatttgga

SEQ ID NO: 131980 - DNA, 13 bp, Artificial Sequence
  Oligonucleotide for detection of SNP TSC0032944
tccaaatcaaccc

SEQ ID NO: 131981 - DNA, 13 bp, Artificial Sequence
  Oligonucleotide for detection of SNP TSC0032944
gggttggttcgga

SEQ ID NO: 131982 - DNA, 13 bp, Artificial Sequence
  Oligonucleotide for detection of SNP TSC0032944
tccgaaccaaccc

SEQ ID NO: 131983 - DNA, 13 bp, Artificial Sequence
  Oligonucleotide for detection of SNP TSC0032944
gggttgattcgga

SEQ ID NO: 131984 - DNA, 13 bp, Artificial Sequence
  Oligonucleotide for detection of SNP TSC0032944
tccgaatcaaccc

SEQ ID NO: 131985 - DNA, 13 bp, Artificial Sequence
  Oligonucleotide for detection of SNP TSC0032946
ttttttgaatata

SEQ ID NO: 131986 - DNA, 13 bp, Artificial Sequence
  Oligonucleotide for detection of SNP TSC0032946
tatattcaaaaaa

SEQ ID NO: 131987 - DNA, 13 bp, Artificial Sequence
  Oligonucleotide for detection of SNP TSC0032946
tttttcgaatata

SEQ ID NO: 131988 - DNA, 13 bp, Artificial Sequence
  Oligonucleotide for detection of SNP TSC0032946
tatattcgaaaaa

SEQ ID NO: 131989 - DNA, 13 bp, Artificial Sequence
  Oligonucleotide for detection of SNP TSC0032946
tgtgtttgagaag

SEQ ID NO: 131990 - DNA, 13 bp, Artificial Sequence
  Oligonucleotide for detection of SNP TSC0032946
cttctcaaacaca

SEQ ID NO: 131991 - DNA, 13 bp, Artificial Sequence
  Oligonucleotide for detection of SNP TSC0032946
tgtgttcgagaag

SEQ ID NO: 131992 - DNA, 13 bp, Artificial Sequence
  Oligonucleotide for detection of SNP TSC0032946
cttctcgaacaca

SEQ ID NO: 131993 - DNA, 13 bp, Artificial Sequence
  Oligonucleotide for detection of SNP TSC0032947
tatttgaagtgaa

SEQ ID NO: 131994 - DNA, 13 bp, Artificial Sequence
  Oligonucleotide for detection of SNP TSC0032947
ttcacttcaaata

SEQ ID NO: 131995 - DNA, 13 bp, Artificial Sequence
  Oligonucleotide for detection of SNP TSC0032947
tatttggagtgaa

SEQ ID NO: 131996 - DNA, 13 bp, Artificial Sequence
  Oligonucleotide for detection of SNP TSC0032947
ttcactccaaata

SEQ ID NO: 131997 - DNA, 13 bp, Artificial Sequence
  Oligonucleotide for detection of SNP TSC0032948
gtttagaaaagtt

SEQ ID NO: 131998 - DNA, 13 bp, Artificial Sequence
  Oligonucleotide for detection of SNP TSC0032948
aacttttctaaac

SEQ ID NO: 131999 - DNA, 13 bp, Artificial Sequence
  Oligonucleotide for detection of SNP TSC0032948
gtttaggaaagtt

SEQ ID NO: 132000 - DNA, 13 bp, Artificial Sequence
  Oligonucleotide for detection of SNP TSC0032948
aactttcctaaac

SEQ ID NO: 132001 - DNA, 13 bp, Artificial Sequence
  Oligonucleotide for detection of SNP TSC0032949
atattaagaaatt

SEQ ID NO: 132002 - DNA, 13 bp, Artificial Sequence
  Oligonucleotide for detection of SNP TSC0032949
aatttcttaatat

SEQ ID NO: 132003 - DNA, 13 bp, Artificial Sequence
  Oligonucleotide for detection of SNP TSC0032949
atattatgaaatt

SEQ ID NO: 132004 - DNA, 13 bp, Artificial Sequence
  Oligonucleotide for detection of SNP TSC0032949
aatttcataatat

SEQ ID NO: 132005 - DNA, 13 bp, Artificial Sequence
  Oligonucleotide for detection of SNP TSC0032949
atattacgaaatt

SEQ ID NO: 132006 - DNA, 13 bp, Artificial Sequence
  Oligonucleotide for detection of SNP TSC0032949
aatttcgtaatat

SEQ ID NO: 132007 - DNA, 13 bp, Artificial Sequence
  Oligonucleotide for detection of SNP TSC0032949
aattttttggtat

SEQ ID NO: 132008 - DNA, 13 bp, Artificial Sequence
  Oligonucleotide for detection of SNP TSC0032949
ataccaaaaaatt

SEQ ID NO: 132009 - DNA, 13 bp, Artificial Sequence
  Oligonucleotide for detection of SNP TSC0032949
aattttgtggtat

SEQ ID NO: 132010 - DNA, 13 bp, Artificial Sequence
  Oligonucleotide for detection of SNP TSC0032949
ataccacaaaatt

SEQ ID NO: 132011 - DNA, 13 bp, Artificial Sequence
  Oligonucleotide for detection of SNP TSC0032949
aatttcgtggtat

SEQ ID NO: 132012 - DNA, 13 bp, Artificial Sequence
  Oligonucleotide for detection of SNP TSC0032949
ataccacgaaatt

SEQ ID NO: 132013 - DNA, 13 bp, Artificial Sequence
  Oligonucleotide for detection of SNP TSC0032950
agttatattggta

SEQ ID NO: 132014 - DNA, 13 bp, Artificial Sequence
  Oligonucleotide for detection of SNP TSC0032950
taccaatataact

SEQ ID NO: 132015 - DNA, 13 bp, Artificial Sequence
  Oligonucleotide for detection of SNP TSC0032950
agttatgttggta

SEQ ID NO: 132016 - DNA, 13 bp, Artificial Sequence
  Oligonucleotide for detection of SNP TSC0032950
taccaacataact

SEQ ID NO: 132017 - DNA, 13 bp, Artificial Sequence
  Oligonucleotide for detection of SNP TSC0032951
tagaaatgttttg

SEQ ID NO: 132018 - DNA, 13 bp, Artificial Sequence
  Oligonucleotide for detection of SNP TSC0032951
caaaacatttcta

SEQ ID NO: 132019 - DNA, 13 bp, Artificial Sequence
  Oligonucleotide for detection of SNP TSC0032951
tagaaacgttttg

SEQ ID NO: 132020 - DNA, 13 bp, Artificial Sequence
  Oligonucleotide for detection of SNP TSC0032951
caaaacgtttcta

SEQ ID NO: 132021 - DNA, 13 bp, Artificial Sequence
  Oligonucleotide for detection of SNP TSC0032951
tagaatgttttta

SEQ ID NO: 132022 - DNA, 13 bp, Artificial Sequence
  Oligonucleotide for detection of SNP TSC0032951
taaaaacattcta

SEQ ID NO: 132023 - DNA, 13 bp, Artificial Sequence
  Oligonucleotide for detection of SNP TSC0032951
tagaatattttta

SEQ ID NO: 132024 - DNA, 13 bp, Artificial Sequence
  Oligonucleotide for detection of SNP TSC0032951
taaaaatattcta

SEQ ID NO: 132025 - DNA, 13 bp, Artificial Sequence
  Oligonucleotide for detection of SNP TSC0032951
tagaacgttttta

SEQ ID NO: 132026 - DNA, 13 bp, Artificial Sequence
  Oligonucleotide for detection of SNP TSC0032951
taaaaacgttcta

SEQ ID NO: 132027 - DNA, 13 bp, Artificial Sequence
  Oligonucleotide for detection of SNP TSC0032952
agggggaaggaty

SEQ ID NO: 132028 - DNA, 13 bp, Artificial Sequence
  Oligonucleotide for detection of SNP TSC0032952
ratccttccccct

SEQ ID NO: 132029 - DNA, 13 bp, Artificial Sequence
  Oligonucleotide for detection of SNP TSC0032952
aggggggaggaty

SEQ ID NO: 132030 - DNA, 13 bp, Artificial Sequence
  Oligonucleotide for detection of SNP TSC0032952
ratcctcccccct

SEQ ID NO: 132031 - DNA, 13 bp, Artificial Sequence
  Oligonucleotide for detection of SNP TSC0032953
gattagggtttaa

SEQ ID NO: 132032 - DNA, 13 bp, Artificial Sequence
  Oligonucleotide for detection of SNP TSC0032953
ttaaaccctaatc

SEQ ID NO: 132033 - DNA, 13 bp, Artificial Sequence
  Oligonucleotide for detection of SNP TSC0032953
gattagagtttaa

SEQ ID NO: 132034 - DNA, 13 bp, Artificial Sequence
  Oligonucleotide for detection of SNP TSC0032953
ttaaactctaatc

SEQ ID NO: 132035 - DNA, 13 bp, Artificial Sequence
  Oligonucleotide for detection of SNP TSC0032957
tttggtttaatty

SEQ ID NO: 132036 - DNA, 13 bp, Artificial Sequence
  Oligonucleotide for detection of SNP TSC0032957
raattaaaccaaa

SEQ ID NO: 132037 - DNA, 13 bp, Artificial Sequence
  Oligonucleotide for detection of SNP TSC0032957
ttcggtataatty

SEQ ID NO: 132038 - DNA, 13 bp, Artificial Sequence
  Oligonucleotide for detection of SNP TSC0032957
raattataccgaa

SEQ ID NO: 132039 - DNA, 13 bp, Artificial Sequence
  Oligonucleotide for detection of SNP TSC0032957
ttcggtttaatty

SEQ ID NO: 132040 - DNA, 13 bp, Artificial Sequence
  Oligonucleotide for detection of SNP TSC0032957
raattaaaccgaa

SEQ ID NO: 132041 - DNA, 13 bp, Artificial Sequence
  Oligonucleotide for detection of SNP TSC0032957
gagttgtgttggg

SEQ ID NO: 132042 - DNA, 13 bp, Artificial Sequence
  Oligonucleotide for detection of SNP TSC0032957
cccaacacaactc

SEQ ID NO: 132043 - DNA, 13 bp, Artificial Sequence
  Oligonucleotide for detection of SNP TSC0032957
gagttgggttggg

SEQ ID NO: 132044 - DNA, 13 bp, Artificial Sequence
  Oligonucleotide for detection of SNP TSC0032957
cccaacccaactc

SEQ ID NO: 132045 - DNA, 13 bp, Artificial Sequence
  Oligonucleotide for detection of SNP TSC0032957
gagttgtgtcggg

SEQ ID NO: 132046 - DNA, 13 bp, Artificial Sequence
  Oligonucleotide for detection of SNP TSC0032957
cccgacacaactc

SEQ ID NO: 132047 - DNA, 13 bp, Artificial Sequence
  Oligonucleotide for detection of SNP TSC0032957
gagttgggtcggg

SEQ ID NO: 132048 - DNA, 13 bp, Artificial Sequence
  Oligonucleotide for detection of SNP TSC0032957
cccgacccaactc

SEQ ID NO: 132049 - DNA, 13 bp, Artificial Sequence
  Oligonucleotide for detection of SNP TSC0032958
ggtgttgattgag

SEQ ID NO: 132050 - DNA, 13 bp, Artificial Sequence
  Oligonucleotide for detection of SNP TSC0032958
ctcaatcaacacc

SEQ ID NO: 132051 - DNA, 13 bp, Artificial Sequence
  Oligonucleotide for detection of SNP TSC0032958
ggtgttaattgag

SEQ ID NO: 132052 - DNA, 13 bp, Artificial Sequence
  Oligonucleotide for detection of SNP TSC0032958
ctcaattaacacc

SEQ ID NO: 132053 - DNA, 13 bp, Artificial Sequence
  Oligonucleotide for detection of SNP TSC0032958
ggtgttgatcgag

SEQ ID NO: 132054 - DNA, 13 bp, Artificial Sequence
  Oligonucleotide for detection of SNP TSC0032958
ctcgatcaacacc

SEQ ID NO: 132055 - DNA, 13 bp, Artificial Sequence
  Oligonucleotide for detection of SNP TSC0032958
ggtgttaatcgag

SEQ ID NO: 132056 - DNA, 13 bp, Artificial Sequence
  Oligonucleotide for detection of SNP TSC0032958
ctcgattaacacc

SEQ ID NO: 132057 - DNA, 13 bp, Artificial Sequence
  Oligonucleotide for detection of SNP TSC0032959
atagtatatgtty

SEQ ID NO: 132058 - DNA, 13 bp, Artificial Sequence
  Oligonucleotide for detection of SNP TSC0032959
raacatatactat

SEQ ID NO: 132059 - DNA, 13 bp, Artificial Sequence
  Oligonucleotide for detection of SNP TSC0032959
atagtagatgtty

SEQ ID NO: 132060 - DNA, 13 bp, Artificial Sequence
  Oligonucleotide for detection of SNP TSC0032959
raacatctactat

SEQ ID NO: 132061 - DNA, 13 bp, Artificial Sequence
  Oligonucleotide for detection of SNP TSC0032959
gagtatgtattgt

SEQ ID NO: 132062 - DNA, 13 bp, Artificial Sequence
  Oligonucleotide for detection of SNP TSC0032959
acaatacatactc

SEQ ID NO: 132063 - DNA, 13 bp, Artificial Sequence
  Oligonucleotide for detection of SNP TSC0032959
gagtatttattgt

SEQ ID NO: 132064 - DNA, 13 bp, Artificial Sequence
  Oligonucleotide for detection of SNP TSC0032959
acaataaatactc

SEQ ID NO: 132065 - DNA, 13 bp, Artificial Sequence
  Oligonucleotide for detection of SNP TSC0032960
gtagaaagaataa

SEQ ID NO: 132066 - DNA, 13 bp, Artificial Sequence
  Oligonucleotide for detection of SNP TSC0032960
ttattctttctac

SEQ ID NO: 132067 - DNA, 13 bp, Artificial Sequence
  Oligonucleotide for detection of SNP TSC0032960
gtagaaggaataa

SEQ ID NO: 132068 - DNA, 13 bp, Artificial Sequence
  Oligonucleotide for detection of SNP TSC0032960
ttattccttctac

SEQ ID NO: 132069 - DNA, 13 bp, Artificial Sequence
  Oligonucleotide for detection of SNP TSC0032961
aagaataatttta

SEQ ID NO: 132070 - DNA, 13 bp, Artificial Sequence
  Oligonucleotide for detection of SNP TSC0032961
taaaattattctt

SEQ ID NO: 132071 - DNA, 13 bp, Artificial Sequence
  Oligonucleotide for detection of SNP TSC0032961
aagaattatttta

SEQ ID NO: 132072 - DNA, 13 bp, Artificial Sequence
  Oligonucleotide for detection of SNP TSC0032961
taaaataattctt

SEQ ID NO: 132073 - DNA, 13 bp, Artificial Sequence
  Oligonucleotide for detection of SNP TSC0032961
tgaaattattttt

SEQ ID NO: 132074 - DNA, 13 bp, Artificial Sequence
  Oligonucleotide for detection of SNP TSC0032961
aaaaataatttca

SEQ ID NO: 132075 - DNA, 13 bp, Artificial Sequence
  Oligonucleotide for detection of SNP TSC0032961
tgaaatgattttt

SEQ ID NO: 132076 - DNA, 13 bp, Artificial Sequence
  Oligonucleotide for detection of SNP TSC0032961
aaaaatcatttca

SEQ ID NO: 132077 - DNA, 13 bp, Artificial Sequence
  Oligonucleotide for detection of SNP TSC0032962
gagatgagatagg

SEQ ID NO: 132078 - DNA, 13 bp, Artificial Sequence
  Oligonucleotide for detection of SNP TSC0032962
cctatctcatctc

SEQ ID NO: 132079 - DNA, 13 bp, Artificial Sequence
  Oligonucleotide for detection of SNP TSC0032962
gagatgggatagg

SEQ ID NO: 132080 - DNA, 13 bp, Artificial Sequence
  Oligonucleotide for detection of SNP TSC0032962
cctatcccatctc

SEQ ID NO: 132081 - DNA, 13 bp, Artificial Sequence
  Oligonucleotide for detection of SNP TSC0032963
aaggtattgaaat

SEQ ID NO: 132082 - DNA, 13 bp, Artificial Sequence
  Oligonucleotide for detection of SNP TSC0032963
atttcaatacctt

SEQ ID NO: 132083 - DNA, 13 bp, Artificial Sequence
  Oligonucleotide for detection of SNP TSC0032963
aaggtaatgaaat

SEQ ID NO: 132084 - DNA, 13 bp, Artificial Sequence
  Oligonucleotide for detection of SNP TSC0032963
atttcattacctt

SEQ ID NO: 132085 - DNA, 13 bp, Artificial Sequence
  Oligonucleotide for detection of SNP TSC0032964
gatatgtggtaay

SEQ ID NO: 132086 - DNA, 13 bp, Artificial Sequence
  Oligonucleotide for detection of SNP TSC0032964
rttaccacatatc

SEQ ID NO: 132087 - DNA, 13 bp, Artificial Sequence
  Oligonucleotide for detection of SNP TSC0032964
gatatgcggtaay

SEQ ID NO: 132088 - DNA, 13 bp, Artificial Sequence
  Oligonucleotide for detection of SNP TSC0032964
rttaccgcatatc

SEQ ID NO: 132089 - DNA, 13 bp, Artificial Sequence
  Oligonucleotide for detection of SNP TSC0032964
gttgttgtataty

SEQ ID NO: 132090 - DNA, 13 bp, Artificial Sequence
  Oligonucleotide for detection of SNP TSC0032964
ratatacaacaac

SEQ ID NO: 132091 - DNA, 13 bp, Artificial Sequence
  Oligonucleotide for detection of SNP TSC0032964
gttgttatataty

SEQ ID NO: 132092 - DNA, 13 bp, Artificial Sequence
  Oligonucleotide for detection of SNP TSC0032964
ratatataacaac

SEQ ID NO: 132093 - DNA, 13 bp, Artificial Sequence
  Oligonucleotide for detection of SNP TSC0032964
gttgtcgtataty

SEQ ID NO: 132094 - DNA, 13 bp, Artificial Sequence
  Oligonucleotide for detection of SNP TSC0032964
ratatacgacaac

SEQ ID NO: 132095 - DNA, 13 bp, Artificial Sequence
  Oligonucleotide for detection of SNP TSC0032965
gtatgaagagtty

SEQ ID NO: 132096 - DNA, 13 bp, Artificial Sequence
  Oligonucleotide for detection of SNP TSC0032965
raactcttcatac

SEQ ID NO: 132097 - DNA, 13 bp, Artificial Sequence
  Oligonucleotide for detection of SNP TSC0032965
gtatgaggagtty

SEQ ID NO: 132098 - DNA, 13 bp, Artificial Sequence
  Oligonucleotide for detection of SNP TSC0032965
raactcctcatac

SEQ ID NO: 132099 - DNA, 13 bp, Artificial Sequence
  Oligonucleotide for detection of SNP TSC0032967
tttattatggtag

SEQ ID NO: 132100 - DNA, 13 bp, Artificial Sequence
  Oligonucleotide for detection of SNP TSC0032967
ctaccataataaa

SEQ ID NO: 132101 - DNA, 13 bp, Artificial Sequence
  Oligonucleotide for detection of SNP TSC0032967
tttattttggtag

SEQ ID NO: 132102 - DNA, 13 bp, Artificial Sequence
  Oligonucleotide for detection of SNP TSC0032967
ctaccaaaataaa

SEQ ID NO: 132103 - DNA, 13 bp, Artificial Sequence
  Oligonucleotide for detection of SNP TSC0032967
ttattatagtaag

SEQ ID NO: 132104 - DNA, 13 bp, Artificial Sequence
  Oligonucleotide for detection of SNP TSC0032967
cttactataataa

SEQ ID NO: 132105 - DNA, 13 bp, Artificial Sequence
  Oligonucleotide for detection of SNP TSC0032967
ttattagagtaag

SEQ ID NO: 132106 - DNA, 13 bp, Artificial Sequence
  Oligonucleotide for detection of SNP TSC0032967
cttactctaataa

SEQ ID NO: 132107 - DNA, 13 bp, Artificial Sequence
  Oligonucleotide for detection of SNP TSC0032968
gatattgttaggt

SEQ ID NO: 132108 - DNA, 13 bp, Artificial Sequence
  Oligonucleotide for detection of SNP TSC0032968
acctaacaatatc

SEQ ID NO: 132109 - DNA, 13 bp, Artificial Sequence
  Oligonucleotide for detection of SNP TSC0032968
gatattattaggt

SEQ ID NO: 132110 - DNA, 13 bp, Artificial Sequence
  Oligonucleotide for detection of SNP TSC0032968
acctaataatatc

SEQ ID NO: 132111 - DNA, 13 bp, Artificial Sequence
  Oligonucleotide for detection of SNP TSC0032971
ttgaatagagttg

SEQ ID NO: 132112 - DNA, 13 bp, Artificial Sequence
  Oligonucleotide for detection of SNP TSC0032971
caactctattcaa

SEQ ID NO: 132113 - DNA, 13 bp, Artificial Sequence
  Oligonucleotide for detection of SNP TSC0032971
ttgaatggagttg

SEQ ID NO: 132114 - DNA, 13 bp, Artificial Sequence
  Oligonucleotide for detection of SNP TSC0032971
caactccattcaa

SEQ ID NO: 132115 - DNA, 13 bp, Artificial Sequence
  Oligonucleotide for detection of SNP TSC0032971
ttgaacggagttg

SEQ ID NO: 132116 - DNA, 13 bp, Artificial Sequence
  Oligonucleotide for detection of SNP TSC0032971
caactccgttcaa

SEQ ID NO: 132117 - DNA, 13 bp, Artificial Sequence
  Oligonucleotide for detection of SNP TSC0032971
taattttgtttag

SEQ ID NO: 132118 - DNA, 13 bp, Artificial Sequence
  Oligonucleotide for detection of SNP TSC0032971
ctaaacaaaatta

SEQ ID NO: 132119 - DNA, 13 bp, Artificial Sequence
  Oligonucleotide for detection of SNP TSC0032971
taatttcgtttag

SEQ ID NO: 132120 - DNA, 13 bp, Artificial Sequence
  Oligonucleotide for detection of SNP TSC0032971
ctaaacgaaatta

SEQ ID NO: 132121 - DNA, 13 bp, Artificial Sequence
  Oligonucleotide for detection of SNP TSC0032972
tagtaagtaatag

SEQ ID NO: 132122 - DNA, 13 bp, Artificial Sequence
  Oligonucleotide for detection of SNP TSC0032972
ctattacttacta

SEQ ID NO: 132123 - DNA, 13 bp, Artificial Sequence
  Oligonucleotide for detection of SNP TSC0032972
tagtaaataatag

SEQ ID NO: 132124 - DNA, 13 bp, Artificial Sequence
  Oligonucleotide for detection of SNP TSC0032972
ctattatttacta

SEQ ID NO: 132125 - DNA, 13 bp, Artificial Sequence
  Oligonucleotide for detection of SNP TSC0032975
aaagggtgatgga

SEQ ID NO: 132126 - DNA, 13 bp, Artificial Sequence
  Oligonucleotide for detection of SNP TSC0032975
tccatcacccttt

SEQ ID NO: 132127 - DNA, 13 bp, Artificial Sequence
  Oligonucleotide for detection of SNP TSC0032975
aaagggggatgga

SEQ ID NO: 132128 - DNA, 13 bp, Artificial Sequence
  Oligonucleotide for detection of SNP TSC0032975
tccatcccccttt

SEQ ID NO: 132129 - DNA, 13 bp, Artificial Sequence
  Oligonucleotide for detection of SNP TSC0032978
tatgtgagattta

SEQ ID NO: 132130 - DNA, 13 bp, Artificial Sequence
  Oligonucleotide for detection of SNP TSC0032978
taaatctcacata

SEQ ID NO: 132131 - DNA, 13 bp, Artificial Sequence
  Oligonucleotide for detection of SNP TSC0032978
tatgtgggattta

SEQ ID NO: 132132 - DNA, 13 bp, Artificial Sequence
  Oligonucleotide for detection of SNP TSC0032978
taaatcccacata

SEQ ID NO: 132133 - DNA, 13 bp, Artificial Sequence
  Oligonucleotide for detection of SNP TSC0032978
tatgcgagattta

SEQ ID NO: 132134 - DNA, 13 bp, Artificial Sequence
  Oligonucleotide for detection of SNP TSC0032978
taaatctcgcata

SEQ ID NO: 132135 - DNA, 13 bp, Artificial Sequence
  Oligonucleotide for detection of SNP TSC0032978
tatgcgggattta

SEQ ID NO: 132136 - DNA, 13 bp, Artificial Sequence
  Oligonucleotide for detection of SNP TSC0032978
taaatcccgcata

SEQ ID NO: 132137 - DNA, 13 bp, Artificial Sequence
  Oligonucleotide for detection of SNP TSC0032979
tttttatattttg

SEQ ID NO: 132138 - DNA, 13 bp, Artificial Sequence
  Oligonucleotide for detection of SNP TSC0032979
caaaatataaaaa

SEQ ID NO: 132139 - DNA, 13 bp, Artificial Sequence
  Oligonucleotide for detection of SNP TSC0032979
tttttagattttg

SEQ ID NO: 132140 - DNA, 13 bp, Artificial Sequence
  Oligonucleotide for detection of SNP TSC0032979
caaaatctaaaaa

SEQ ID NO: 132141 - DNA, 13 bp, Artificial Sequence
  Oligonucleotide for detection of SNP TSC0032979
taaaatgtagaaa

SEQ ID NO: 132142 - DNA, 13 bp, Artificial Sequence
  Oligonucleotide for detection of SNP TSC0032979
tttctacatttta

SEQ ID NO: 132143 - DNA, 13 bp, Artificial Sequence
  Oligonucleotide for detection of SNP TSC0032979
taaaatttagaaa

SEQ ID NO: 132144 - DNA, 13 bp, Artificial Sequence
  Oligonucleotide for detection of SNP TSC0032979
tttctaaatttta

SEQ ID NO: 132145 - DNA, 13 bp, Artificial Sequence
  Oligonucleotide for detection of SNP TSC0032980
aagagagagaatg

SEQ ID NO: 132146 - DNA, 13 bp, Artificial Sequence
  Oligonucleotide for detection of SNP TSC0032980
cattctctctctt

SEQ ID NO: 132147 - DNA, 13 bp, Artificial Sequence
  Oligonucleotide for detection of SNP TSC0032980
aagagatagaatg

SEQ ID NO: 132148 - DNA, 13 bp, Artificial Sequence
  Oligonucleotide for detection of SNP TSC0032980
cattctatctctt

SEQ ID NO: 132149 - DNA, 13 bp, Artificial Sequence
  Oligonucleotide for detection of SNP TSC0032980
aagagagagaacg

SEQ ID NO: 132150 - DNA, 13 bp, Artificial Sequence
  Oligonucleotide for detection of SNP TSC0032980
cgttctctctctt

SEQ ID NO: 132151 - DNA, 13 bp, Artificial Sequence
  Oligonucleotide for detection of SNP TSC0032980
aagagatagaacg

SEQ ID NO: 132152 - DNA, 13 bp, Artificial Sequence
  Oligonucleotide for detection of SNP TSC0032980
cgttctatctctt

SEQ ID NO: 132153 - DNA, 13 bp, Artificial Sequence
  Oligonucleotide for detection of SNP TSC0032980
cgttttttttttt

SEQ ID NO: 132154 - DNA, 13 bp, Artificial Sequence
  Oligonucleotide for detection of SNP TSC0032980
aaaaaaaaaaacg

SEQ ID NO: 132155 - DNA, 13 bp, Artificial Sequence
  Oligonucleotide for detection of SNP TSC0032980
cgttttatttttt

SEQ ID NO: 132156 - DNA, 13 bp, Artificial Sequence
  Oligonucleotide for detection of SNP TSC0032980
aaaaaataaaacg

SEQ ID NO: 132157 - DNA, 13 bp, Artificial Sequence
  Oligonucleotide for detection of SNP TSC0032981
ttgatttgtttay

SEQ ID NO: 132158 - DNA, 13 bp, Artificial Sequence
  Oligonucleotide for detection of SNP TSC0032981
rtaaacaaatcaa

SEQ ID NO: 132159 - DNA, 13 bp, Artificial Sequence
  Oligonucleotide for detection of SNP TSC0032981
ttgattcgtttay

SEQ ID NO: 132160 - DNA, 13 bp, Artificial Sequence
  Oligonucleotide for detection of SNP TSC0032981
rtaaacgaatcaa

SEQ ID NO: 132161 - DNA, 13 bp, Artificial Sequence
  Oligonucleotide for detection of SNP TSC0032981
gtgggtgagttag

SEQ ID NO: 132162 - DNA, 13 bp, Artificial Sequence
  Oligonucleotide for detection of SNP TSC0032981
ctaactcacccac

SEQ ID NO: 132163 - DNA, 13 bp, Artificial Sequence
  Oligonucleotide for detection of SNP TSC0032981
gtgggtaagttag

SEQ ID NO: 132164 - DNA, 13 bp, Artificial Sequence
  Oligonucleotide for detection of SNP TSC0032981
ctaacttacccac

SEQ ID NO: 132165 - DNA, 13 bp, Artificial Sequence
  Oligonucleotide for detection of SNP TSC0032981
gtgggcgagttag

SEQ ID NO: 132166 - DNA, 13 bp, Artificial Sequence
  Oligonucleotide for detection of SNP TSC0032981
ctaactcgcccac

SEQ ID NO: 132167 - DNA, 13 bp, Artificial Sequence
  Oligonucleotide for detection of SNP TSC0032982
aatttgggtaata

SEQ ID NO: 132168 - DNA, 13 bp, Artificial Sequence
  Oligonucleotide for detection of SNP TSC0032982
tattacccaaatt

SEQ ID NO: 132169 - DNA, 13 bp, Artificial Sequence
  Oligonucleotide for detection of SNP TSC0032982
aatttgtgtaata

SEQ ID NO: 132170 - DNA, 13 bp, Artificial Sequence
  Oligonucleotide for detection of SNP TSC0032982
tattacacaaatt

SEQ ID NO: 132171 - DNA, 13 bp, Artificial Sequence
  Oligonucleotide for detection of SNP TSC0032982
tgttgtttaggtt

SEQ ID NO: 132172 - DNA, 13 bp, Artificial Sequence
  Oligonucleotide for detection of SNP TSC0032982
aacctaaacaaca

SEQ ID NO: 132173 - DNA, 13 bp, Artificial Sequence
  Oligonucleotide for detection of SNP TSC0032982
tgttgtataggtt

SEQ ID NO: 132174 - DNA, 13 bp, Artificial Sequence
  Oligonucleotide for detection of SNP TSC0032982
aacctatacaaca

SEQ ID NO: 132175 - DNA, 13 bp, Artificial Sequence
  Oligonucleotide for detection of SNP TSC0032983
tggaatttaagtt

SEQ ID NO: 132176 - DNA, 13 bp, Artificial Sequence
  Oligonucleotide for detection of SNP TSC0032983
aacttaaattcca

SEQ ID NO: 132177 - DNA, 13 bp, Artificial Sequence
  Oligonucleotide for detection of SNP TSC0032983
tggaatataagtt

SEQ ID NO: 132178 - DNA, 13 bp, Artificial Sequence
  Oligonucleotide for detection of SNP TSC0032983
aacttatattcca

SEQ ID NO: 132179 - DNA, 13 bp, Artificial Sequence
  Oligonucleotide for detection of SNP TSC0032984
tttttagatttgt

SEQ ID NO: 132180 - DNA, 13 bp, Artificial Sequence
  Oligonucleotide for detection of SNP TSC0032984
acaaatctaaaaa

SEQ ID NO: 132181 - DNA, 13 bp, Artificial Sequence
  Oligonucleotide for detection of SNP TSC0032984
tttttaaatttgt

SEQ ID NO: 132182 - DNA, 13 bp, Artificial Sequence
  Oligonucleotide for detection of SNP TSC0032984
acaaatttaaaaa

SEQ ID NO: 132183 - DNA, 13 bp, Artificial Sequence
  Oligonucleotide for detection of SNP TSC0032984
tttttagattcgt

SEQ ID NO: 132184 - DNA, 13 bp, Artificial Sequence
  Oligonucleotide for detection of SNP TSC0032984
acgaatctaaaaa

SEQ ID NO: 132185 - DNA, 13 bp, Artificial Sequence
  Oligonucleotide for detection of SNP TSC0032984
tttttaaattcgt

SEQ ID NO: 132186 - DNA, 13 bp, Artificial Sequence
  Oligonucleotide for detection of SNP TSC0032984
acgaatttaaaaa

SEQ ID NO: 132187 - DNA, 13 bp, Artificial Sequence
  Oligonucleotide for detection of SNP TSC0032985
tagtatatgatat

SEQ ID NO: 132188 - DNA, 13 bp, Artificial Sequence
  Oligonucleotide for detection of SNP TSC0032985
atatcatatacta

SEQ ID NO: 132189 - DNA, 13 bp, Artificial Sequence
  Oligonucleotide for detection of SNP TSC0032985
tagtatgtgatat

SEQ ID NO: 132190 - DNA, 13 bp, Artificial Sequence
  Oligonucleotide for detection of SNP TSC0032985
atatcacatacta

SEQ ID NO: 132191 - DNA, 13 bp, Artificial Sequence
  Oligonucleotide for detection of SNP TSC0032988
tgttaaatgaaat

SEQ ID NO: 132192 - DNA, 13 bp, Artificial Sequence
  Oligonucleotide for detection of SNP TSC0032988
atttcatttaaca

SEQ ID NO: 132193 - DNA, 13 bp, Artificial Sequence
  Oligonucleotide for detection of SNP TSC0032988
tgttaagtgaaat

SEQ ID NO: 132194 - DNA, 13 bp, Artificial Sequence
  Oligonucleotide for detection of SNP TSC0032988
atttcacttaaca

SEQ ID NO: 132195 - DNA, 13 bp, Artificial Sequence
  Oligonucleotide for detection of SNP TSC0032989
gattaggtggtgt

SEQ ID NO: 132196 - DNA, 13 bp, Artificial Sequence
  Oligonucleotide for detection of SNP TSC0032989
acaccacctaatc

SEQ ID NO: 132197 - DNA, 13 bp, Artificial Sequence
  Oligonucleotide for detection of SNP TSC0032989
gattagatggtgt

SEQ ID NO: 132198 - DNA, 13 bp, Artificial Sequence
  Oligonucleotide for detection of SNP TSC0032989
acaccatctaatc

SEQ ID NO: 132199 - DNA, 13 bp, Artificial Sequence
  Oligonucleotide for detection of SNP TSC0032991
gaattgaatttty

SEQ ID NO: 132200 - DNA, 13 bp, Artificial Sequence
  Oligonucleotide for detection of SNP TSC0032991
raaaattcaattc

SEQ ID NO: 132201 - DNA, 13 bp, Artificial Sequence
  Oligonucleotide for detection of SNP TSC0032991
gaattgtatttty

SEQ ID NO: 132202 - DNA, 13 bp, Artificial Sequence
  Oligonucleotide for detection of SNP TSC0032991
raaaatacaattc

SEQ ID NO: 132203 - DNA, 13 bp, Artificial Sequence
  Oligonucleotide for detection of SNP TSC0032991
ggagatttaatty

SEQ ID NO: 132204 - DNA, 13 bp, Artificial Sequence
  Oligonucleotide for detection of SNP TSC0032991
raattaaatctcc

SEQ ID NO: 132205 - DNA, 13 bp, Artificial Sequence
  Oligonucleotide for detection of SNP TSC0032991
ggagatataatty

SEQ ID NO: 132206 - DNA, 13 bp, Artificial Sequence
  Oligonucleotide for detection of SNP TSC0032991
raattatatctcc

SEQ ID NO: 132207 - DNA, 13 bp, Artificial Sequence
  Oligonucleotide for detection of SNP TSC0032992
tttttaaaattty

SEQ ID NO: 132208 - DNA, 13 bp, Artificial Sequence
  Oligonucleotide for detection of SNP TSC0032992
raaattttaaaaa

SEQ ID NO: 132209 - DNA, 13 bp, Artificial Sequence
  Oligonucleotide for detection of SNP TSC0032992
tttttagaattty

SEQ ID NO: 132210 - DNA, 13 bp, Artificial Sequence
  Oligonucleotide for detection of SNP TSC0032992
raaattctaaaaa

SEQ ID NO: 132211 - DNA, 13 bp, Artificial Sequence
  Oligonucleotide for detection of SNP TSC0032993
gtttttgtagagg

SEQ ID NO: 132212 - DNA, 13 bp, Artificial Sequence
  Oligonucleotide for detection of SNP TSC0032993
cctctacaaaaac

SEQ ID NO: 132213 - DNA, 13 bp, Artificial Sequence
  Oligonucleotide for detection of SNP TSC0032993
gtttttatagagg

SEQ ID NO: 132214 - DNA, 13 bp, Artificial Sequence
  Oligonucleotide for detection of SNP TSC0032993
cctctataaaaac

SEQ ID NO: 132215 - DNA, 13 bp, Artificial Sequence
  Oligonucleotide for detection of SNP TSC0032994
atattgtatttta

SEQ ID NO: 132216 - DNA, 13 bp, Artificial Sequence
  Oligonucleotide for detection of SNP TSC0032994
taaaatacaatat

SEQ ID NO: 132217 - DNA, 13 bp, Artificial Sequence
  Oligonucleotide for detection of SNP TSC0032994
atattggatttta

SEQ ID NO: 132218 - DNA, 13 bp, Artificial Sequence
  Oligonucleotide for detection of SNP TSC0032994
taaaatccaatat

SEQ ID NO: 132219 - DNA, 13 bp, Artificial Sequence
  Oligonucleotide for detection of SNP TSC0032994
tggggtgtagtgt

SEQ ID NO: 132220 - DNA, 13 bp, Artificial Sequence
  Oligonucleotide for detection of SNP TSC0032994
acactacacccca

SEQ ID NO: 132221 - DNA, 13 bp, Artificial Sequence
  Oligonucleotide for detection of SNP TSC0032994
tggggtttagtgt

SEQ ID NO: 132222 - DNA, 13 bp, Artificial Sequence
  Oligonucleotide for detection of SNP TSC0032994
acactaaacccca

SEQ ID NO: 132223 - DNA, 13 bp, Artificial Sequence
  Oligonucleotide for detection of SNP TSC0032995
tggttagtagttg

SEQ ID NO: 132224 - DNA, 13 bp, Artificial Sequence
  Oligonucleotide for detection of SNP TSC0032995
caactactaacca

SEQ ID NO: 132225 - DNA, 13 bp, Artificial Sequence
  Oligonucleotide for detection of SNP TSC0032995
tggttaatagttg

SEQ ID NO: 132226 - DNA, 13 bp, Artificial Sequence
  Oligonucleotide for detection of SNP TSC0032995
caactattaacca

SEQ ID NO: 132227 - DNA, 13 bp, Artificial Sequence
  Oligonucleotide for detection of SNP TSC0032996
gtttgggttatty

SEQ ID NO: 132228 - DNA, 13 bp, Artificial Sequence
  Oligonucleotide for detection of SNP TSC0032996
raataacccaaac

SEQ ID NO: 132229 - DNA, 13 bp, Artificial Sequence
  Oligonucleotide for detection of SNP TSC0032996
gtttggtttatty

SEQ ID NO: 132230 - DNA, 13 bp, Artificial Sequence
  Oligonucleotide for detection of SNP TSC0032996
raataaaccaaac

SEQ ID NO: 132231 - DNA, 13 bp, Artificial Sequence
  Oligonucleotide for detection of SNP TSC0032996
ggatggtttaggy

SEQ ID NO: 132232 - DNA, 13 bp, Artificial Sequence
  Oligonucleotide for detection of SNP TSC0032996
rcctaaaccatcc

SEQ ID NO: 132233 - DNA, 13 bp, Artificial Sequence
  Oligonucleotide for detection of SNP TSC0032996
ggatggattaggy

SEQ ID NO: 132234 - DNA, 13 bp, Artificial Sequence
  Oligonucleotide for detection of SNP TSC0032996
rcctaatccatcc

SEQ ID NO: 132235 - DNA, 13 bp, Artificial Sequence
  Oligonucleotide for detection of SNP TSC0032997
ttagtgtaatatt

SEQ ID NO: 132236 - DNA, 13 bp, Artificial Sequence
  Oligonucleotide for detection of SNP TSC0032997
aatattacactaa

SEQ ID NO: 132237 - DNA, 13 bp, Artificial Sequence
  Oligonucleotide for detection of SNP TSC0032997
ttagtggaatatt

SEQ ID NO: 132238 - DNA, 13 bp, Artificial Sequence
  Oligonucleotide for detection of SNP TSC0032997
aatattccactaa

SEQ ID NO: 132239 - DNA, 13 bp, Artificial Sequence
  Oligonucleotide for detection of SNP TSC0032997
aatgttgtattga

SEQ ID NO: 132240 - DNA, 13 bp, Artificial Sequence
  Oligonucleotide for detection of SNP TSC0032997
tcaatacaacatt

SEQ ID NO: 132241 - DNA, 13 bp, Artificial Sequence
  Oligonucleotide for detection of SNP TSC0032997
aatgttttattga

SEQ ID NO: 132242 - DNA, 13 bp, Artificial Sequence
  Oligonucleotide for detection of SNP TSC0032997
tcaataaaacatt

SEQ ID NO: 132243 - DNA, 13 bp, Artificial Sequence
  Oligonucleotide for detection of SNP TSC0033000
ataatgtgggggg

SEQ ID NO: 132244 - DNA, 13 bp, Artificial Sequence
  Oligonucleotide for detection of SNP TSC0033000
ccccccacattat

SEQ ID NO: 132245 - DNA, 13 bp, Artificial Sequence
  Oligonucleotide for detection of SNP TSC0033000
ataacgtgggggg

SEQ ID NO: 132246 - DNA, 13 bp, Artificial Sequence
  Oligonucleotide for detection of SNP TSC0033000
ccccccacgttat

SEQ ID NO: 132247 - DNA, 13 bp, Artificial Sequence
  Oligonucleotide for detection of SNP TSC0033000
ataatgcgggggg

SEQ ID NO: 132248 - DNA, 13 bp, Artificial Sequence
  Oligonucleotide for detection of SNP TSC0033000
ccccccgcattat

SEQ ID NO: 132249 - DNA, 13 bp, Artificial Sequence
  Oligonucleotide for detection of SNP TSC0033000
ataacgcgggggg

SEQ ID NO: 132250 - DNA, 13 bp, Artificial Sequence
  Oligonucleotide for detection of SNP TSC0033000
ccccccgcgttat

SEQ ID NO: 132251 - DNA, 13 bp, Artificial Sequence
  Oligonucleotide for detection of SNP TSC0033000
ttttttgtgttgt

SEQ ID NO: 132252 - DNA, 13 bp, Artificial Sequence
  Oligonucleotide for detection of SNP TSC0033000
acaacacaaaaaa

SEQ ID NO: 132253 - DNA, 13 bp, Artificial Sequence
  Oligonucleotide for detection of SNP TSC0033000
ttttttatgttgt

SEQ ID NO: 132254 - DNA, 13 bp, Artificial Sequence
  Oligonucleotide for detection of SNP TSC0033000
acaacataaaaaa

SEQ ID NO: 132255 - DNA, 13 bp, Artificial Sequence
  Oligonucleotide for detection of SNP TSC0033000
tttttcgtgttgt

SEQ ID NO: 132256 - DNA, 13 bp, Artificial Sequence
  Oligonucleotide for detection of SNP TSC0033000
acaacacgaaaaa

SEQ ID NO: 132257 - DNA, 13 bp, Artificial Sequence
  Oligonucleotide for detection of SNP TSC0033000
ttttttacgttgt

SEQ ID NO: 132258 - DNA, 13 bp, Artificial Sequence
  Oligonucleotide for detection of SNP TSC0033000
acaacgtaaaaaa

SEQ ID NO: 132259 - DNA, 13 bp, Artificial Sequence
  Oligonucleotide for detection of SNP TSC0033000
ttttttgcgttgt

SEQ ID NO: 132260 - DNA, 13 bp, Artificial Sequence
  Oligonucleotide for detection of SNP TSC0033000
acaacgcaaaaaa

SEQ ID NO: 132261 - DNA, 13 bp, Artificial Sequence
  Oligonucleotide for detection of SNP TSC0033000
tttttcgcgttgt

SEQ ID NO: 132262 - DNA, 13 bp, Artificial Sequence
  Oligonucleotide for detection of SNP TSC0033000
acaacgcgaaaaa

SEQ ID NO: 132263 - DNA, 13 bp, Artificial Sequence
  Oligonucleotide for detection of SNP TSC0033001
taaaataaatatg

SEQ ID NO: 132264 - DNA, 13 bp, Artificial Sequence
  Oligonucleotide for detection of SNP TSC0033001
catatttatttta

SEQ ID NO: 132265 - DNA, 13 bp, Artificial Sequence
  Oligonucleotide for detection of SNP TSC0033001
taaaatgaatatg

SEQ ID NO: 132266 - DNA, 13 bp, Artificial Sequence
  Oligonucleotide for detection of SNP TSC0033001
catattcatttta

SEQ ID NO: 132267 - DNA, 13 bp, Artificial Sequence
  Oligonucleotide for detection of SNP TSC0033003
ggagatattttta

SEQ ID NO: 132268 - DNA, 13 bp, Artificial Sequence
  Oligonucleotide for detection of SNP TSC0033003
taaaaatatctcc

SEQ ID NO: 132269 - DNA, 13 bp, Artificial Sequence
  Oligonucleotide for detection of SNP TSC0033003
ggagattttttta

SEQ ID NO: 132270 - DNA, 13 bp, Artificial Sequence
  Oligonucleotide for detection of SNP TSC0033003
taaaaaaatctcc

SEQ ID NO: 132271 - DNA, 13 bp, Artificial Sequence
  Oligonucleotide for detection of SNP TSC0033003
tggaaatgtttty

SEQ ID NO: 132272 - DNA, 13 bp, Artificial Sequence
  Oligonucleotide for detection of SNP TSC0033003
raaaacatttcca

SEQ ID NO: 132273 - DNA, 13 bp, Artificial Sequence
  Oligonucleotide for detection of SNP TSC0033003
tggaaaggtttty

SEQ ID NO: 132274 - DNA, 13 bp, Artificial Sequence
  Oligonucleotide for detection of SNP TSC0033003
raaaacctttcca

SEQ ID NO: 132275 - DNA, 13 bp, Artificial Sequence
  Oligonucleotide for detection of SNP TSC0033004
tagtttgttgtty

SEQ ID NO: 132276 - DNA, 13 bp, Artificial Sequence
  Oligonucleotide for detection of SNP TSC0033004
raacaacaaacta

SEQ ID NO: 132277 - DNA, 13 bp, Artificial Sequence
  Oligonucleotide for detection of SNP TSC0033004
tagttttttgtty

SEQ ID NO: 132278 - DNA, 13 bp, Artificial Sequence
  Oligonucleotide for detection of SNP TSC0033004
raacaaaaaacta

SEQ ID NO: 132279 - DNA, 13 bp, Artificial Sequence
  Oligonucleotide for detection of SNP TSC0033004
ggataataagttg

SEQ ID NO: 132280 - DNA, 13 bp, Artificial Sequence
  Oligonucleotide for detection of SNP TSC0033004
caacttattatcc

SEQ ID NO: 132281 - DNA, 13 bp, Artificial Sequence
  Oligonucleotide for detection of SNP TSC0033004
ggataaaaagttg

SEQ ID NO: 132282 - DNA, 13 bp, Artificial Sequence
  Oligonucleotide for detection of SNP TSC0033004
caactttttatcc

SEQ ID NO: 132283 - DNA, 13 bp, Artificial Sequence
  Oligonucleotide for detection of SNP TSC0033005
gaatataattgty

SEQ ID NO: 132284 - DNA, 13 bp, Artificial Sequence
  Oligonucleotide for detection of SNP TSC0033005
racaattatattc

SEQ ID NO: 132285 - DNA, 13 bp, Artificial Sequence
  Oligonucleotide for detection of SNP TSC0033005
gaatatgattgty

SEQ ID NO: 132286 - DNA, 13 bp, Artificial Sequence
  Oligonucleotide for detection of SNP TSC0033005
racaatcatattc

SEQ ID NO: 132287 - DNA, 13 bp, Artificial Sequence
  Oligonucleotide for detection of SNP TSC0033005
gaatacgattgty

SEQ ID NO: 132288 - DNA, 13 bp, Artificial Sequence
  Oligonucleotide for detection of SNP TSC0033005
racaatcgtattc

SEQ ID NO: 132289 - DNA, 13 bp, Artificial Sequence
  Oligonucleotide for detection of SNP TSC0033005
gatagttgtatty

SEQ ID NO: 132290 - DNA, 13 bp, Artificial Sequence
  Oligonucleotide for detection of SNP TSC0033005
raatacaactatc

SEQ ID NO: 132291 - DNA, 13 bp, Artificial Sequence
  Oligonucleotide for detection of SNP TSC0033005
gatagtcgtatty

SEQ ID NO: 132292 - DNA, 13 bp, Artificial Sequence
  Oligonucleotide for detection of SNP TSC0033005
raatacgactatc

SEQ ID NO: 132293 - DNA, 13 bp, Artificial Sequence
  Oligonucleotide for detection of SNP TSC0033006
gttgggaaaaaaa

SEQ ID NO: 132294 - DNA, 13 bp, Artificial Sequence
  Oligonucleotide for detection of SNP TSC0033006
tttttttcccaac

SEQ ID NO: 132295 - DNA, 13 bp, Artificial Sequence
  Oligonucleotide for detection of SNP TSC0033006
gttggggaaaaaa

SEQ ID NO: 132296 - DNA, 13 bp, Artificial Sequence
  Oligonucleotide for detection of SNP TSC0033006
ttttttccccaac

SEQ ID NO: 132297 - DNA, 13 bp, Artificial Sequence
  Oligonucleotide for detection of SNP TSC0033007
gaaaaaaaaagty

SEQ ID NO: 132298 - DNA, 13 bp, Artificial Sequence
  Oligonucleotide for detection of SNP TSC0033007
ractttttttttc

SEQ ID NO: 132299 - DNA, 13 bp, Artificial Sequence
  Oligonucleotide for detection of SNP TSC0033007
gaaaaagaaagty

SEQ ID NO: 132300 - DNA, 13 bp, Artificial Sequence
  Oligonucleotide for detection of SNP TSC0033007
ractttctttttc

SEQ ID NO: 132301 - DNA, 13 bp, Artificial Sequence
  Oligonucleotide for detection of SNP TSC0033010
gagtgttgtaatg

SEQ ID NO: 132302 - DNA, 13 bp, Artificial Sequence
  Oligonucleotide for detection of SNP TSC0033010
cattacaacactc

SEQ ID NO: 132303 - DNA, 13 bp, Artificial Sequence
  Oligonucleotide for detection of SNP TSC0033010
gagcgttgtaatg

SEQ ID NO: 132304 - DNA, 13 bp, Artificial Sequence
  Oligonucleotide for detection of SNP TSC0033010
cattacaacgctc

SEQ ID NO: 132305 - DNA, 13 bp, Artificial Sequence
  Oligonucleotide for detection of SNP TSC0033010
gagtgtcgtaatg

SEQ ID NO: 132306 - DNA, 13 bp, Artificial Sequence
  Oligonucleotide for detection of SNP TSC0033010
cattacgacactc

SEQ ID NO: 132307 - DNA, 13 bp, Artificial Sequence
  Oligonucleotide for detection of SNP TSC0033010
gagcgtcgtaatg

SEQ ID NO: 132308 - DNA, 13 bp, Artificial Sequence
  Oligonucleotide for detection of SNP TSC0033010
cattacgacgctc

SEQ ID NO: 132309 - DNA, 13 bp, Artificial Sequence
  Oligonucleotide for detection of SNP TSC0033010
tattgtggtgtty

SEQ ID NO: 132310 - DNA, 13 bp, Artificial Sequence
  Oligonucleotide for detection of SNP TSC0033010
raacaccacaata

SEQ ID NO: 132311 - DNA, 13 bp, Artificial Sequence
  Oligonucleotide for detection of SNP TSC0033010
tattgtagtgtty

SEQ ID NO: 132312 - DNA, 13 bp, Artificial Sequence
  Oligonucleotide for detection of SNP TSC0033010
raacactacaata

SEQ ID NO: 132313 - DNA, 13 bp, Artificial Sequence
  Oligonucleotide for detection of SNP TSC0033010
tattgcggtgtty

SEQ ID NO: 132314 - DNA, 13 bp, Artificial Sequence
  Oligonucleotide for detection of SNP TSC0033010
raacaccgcaata

SEQ ID NO: 132315 - DNA, 13 bp, Artificial Sequence
  Oligonucleotide for detection of SNP TSC0033010
tattgtagcgtty

SEQ ID NO: 132316 - DNA, 13 bp, Artificial Sequence
  Oligonucleotide for detection of SNP TSC0033010
raacgctacaata

SEQ ID NO: 132317 - DNA, 13 bp, Artificial Sequence
  Oligonucleotide for detection of SNP TSC0033010
tattgtggcgtty

SEQ ID NO: 132318 - DNA, 13 bp, Artificial Sequence
  Oligonucleotide for detection of SNP TSC0033010
raacgccacaata

SEQ ID NO: 132319 - DNA, 13 bp, Artificial Sequence
  Oligonucleotide for detection of SNP TSC0033010
tattgcggcgtty

SEQ ID NO: 132320 - DNA, 13 bp, Artificial Sequence
  Oligonucleotide for detection of SNP TSC0033010
raacgccgcaata

SEQ ID NO: 132321 - DNA, 13 bp, Artificial Sequence
  Oligonucleotide for detection of SNP TSC0033011
gtgggtggggggy

SEQ ID NO: 132322 - DNA, 13 bp, Artificial Sequence
  Oligonucleotide for detection of SNP TSC0033011
rccccccacccac

SEQ ID NO: 132323 - DNA, 13 bp, Artificial Sequence
  Oligonucleotide for detection of SNP TSC0033011
gtgggttgggggy

SEQ ID NO: 132324 - DNA, 13 bp, Artificial Sequence
  Oligonucleotide for detection of SNP TSC0033011
rcccccaacccac

SEQ ID NO: 132325 - DNA, 13 bp, Artificial Sequence
  Oligonucleotide for detection of SNP TSC0033015
agtggttggtttt

SEQ ID NO: 132326 - DNA, 13 bp, Artificial Sequence
  Oligonucleotide for detection of SNP TSC0033015
aaaaccaaccact

SEQ ID NO: 132327 - DNA, 13 bp, Artificial Sequence
  Oligonucleotide for detection of SNP TSC0033015
agcggttggtttt

SEQ ID NO: 132328 - DNA, 13 bp, Artificial Sequence
  Oligonucleotide for detection of SNP TSC0033015
aaaaccaaccgct

SEQ ID NO: 132329 - DNA, 13 bp, Artificial Sequence
  Oligonucleotide for detection of SNP TSC0033015
agtggtcggtttt

SEQ ID NO: 132330 - DNA, 13 bp, Artificial Sequence
  Oligonucleotide for detection of SNP TSC0033015
aaaaccgaccact

SEQ ID NO: 132331 - DNA, 13 bp, Artificial Sequence
  Oligonucleotide for detection of SNP TSC0033015
agcggtcggtttt

SEQ ID NO: 132332 - DNA, 13 bp, Artificial Sequence
  Oligonucleotide for detection of SNP TSC0033015
aaaaccgaccgct

SEQ ID NO: 132333 - DNA, 13 bp, Artificial Sequence
  Oligonucleotide for detection of SNP TSC0033015
agggttggttgtt

SEQ ID NO: 132334 - DNA, 13 bp, Artificial Sequence
  Oligonucleotide for detection of SNP TSC0033015
aacaaccaaccct

SEQ ID NO: 132335 - DNA, 13 bp, Artificial Sequence
  Oligonucleotide for detection of SNP TSC0033015
agggttagttgtt

SEQ ID NO: 132336 - DNA, 13 bp, Artificial Sequence
  Oligonucleotide for detection of SNP TSC0033015
aacaactaaccct

SEQ ID NO: 132337 - DNA, 13 bp, Artificial Sequence
  Oligonucleotide for detection of SNP TSC0033015
agggtcggttgtt

SEQ ID NO: 132338 - DNA, 13 bp, Artificial Sequence
  Oligonucleotide for detection of SNP TSC0033015
aacaaccgaccct

SEQ ID NO: 132339 - DNA, 13 bp, Artificial Sequence
  Oligonucleotide for detection of SNP TSC0033015
agggttagtcgtt

SEQ ID NO: 132340 - DNA, 13 bp, Artificial Sequence
  Oligonucleotide for detection of SNP TSC0033015
aacgactaaccct

SEQ ID NO: 132341 - DNA, 13 bp, Artificial Sequence
  Oligonucleotide for detection of SNP TSC0033015
agggttggtcgtt

SEQ ID NO: 132342 - DNA, 13 bp, Artificial Sequence
  Oligonucleotide for detection of SNP TSC0033015
aacgaccaaccct

SEQ ID NO: 132343 - DNA, 13 bp, Artificial Sequence
  Oligonucleotide for detection of SNP TSC0033015
agggtcggtcgtt

SEQ ID NO: 132344 - DNA, 13 bp, Artificial Sequence
  Oligonucleotide for detection of SNP TSC0033015
aacgaccgaccct

SEQ ID NO: 132345 - DNA, 13 bp, Artificial Sequence
  Oligonucleotide for detection of SNP TSC0033019
tttattattgaag

SEQ ID NO: 132346 - DNA, 13 bp, Artificial Sequence
  Oligonucleotide for detection of SNP TSC0033019
cttcaataataaa

SEQ ID NO: 132347 - DNA, 13 bp, Artificial Sequence
  Oligonucleotide for detection of SNP TSC0033019
tttattgttgaag

SEQ ID NO: 132348 - DNA, 13 bp, Artificial Sequence
  Oligonucleotide for detection of SNP TSC0033019
cttcaacaataaa

SEQ ID NO: 132349 - DNA, 13 bp, Artificial Sequence
  Oligonucleotide for detection of SNP TSC0033020
aaaaatgtatttt

SEQ ID NO: 132350 - DNA, 13 bp, Artificial Sequence
  Oligonucleotide for detection of SNP TSC0033020
aaaatacattttt

SEQ ID NO: 132351 - DNA, 13 bp, Artificial Sequence
  Oligonucleotide for detection of SNP TSC0033020
aaaaatatatttt

SEQ ID NO: 132352 - DNA, 13 bp, Artificial Sequence
  Oligonucleotide for detection of SNP TSC0033020
aaaatatattttt

SEQ ID NO: 132353 - DNA, 13 bp, Artificial Sequence
  Oligonucleotide for detection of SNP TSC0033023
agtattgatttty

SEQ ID NO: 132354 - DNA, 13 bp, Artificial Sequence
  Oligonucleotide for detection of SNP TSC0033023
raaaatcaatact

SEQ ID NO: 132355 - DNA, 13 bp, Artificial Sequence
  Oligonucleotide for detection of SNP TSC0033023
agtattaatttty

SEQ ID NO: 132356 - DNA, 13 bp, Artificial Sequence
  Oligonucleotide for detection of SNP TSC0033023
raaaattaatact

SEQ ID NO: 132357 - DNA, 13 bp, Artificial Sequence
  Oligonucleotide for detection of SNP TSC0033024
ataataagttata

SEQ ID NO: 132358 - DNA, 13 bp, Artificial Sequence
  Oligonucleotide for detection of SNP TSC0033024
tataacttattat

SEQ ID NO: 132359 - DNA, 13 bp, Artificial Sequence
  Oligonucleotide for detection of SNP TSC0033024
ataatatgttata

SEQ ID NO: 132360 - DNA, 13 bp, Artificial Sequence
  Oligonucleotide for detection of SNP TSC0033024
tataacatattat

SEQ ID NO: 132361 - DNA, 13 bp, Artificial Sequence
  Oligonucleotide for detection of SNP TSC0033024
ataatacgttata

SEQ ID NO: 132362 - DNA, 13 bp, Artificial Sequence
  Oligonucleotide for detection of SNP TSC0033024
tataacgtattat

SEQ ID NO: 132363 - DNA, 13 bp, Artificial Sequence
  Oligonucleotide for detection of SNP TSC0033024
tgtaatttgttat

SEQ ID NO: 132364 - DNA, 13 bp, Artificial Sequence
  Oligonucleotide for detection of SNP TSC0033024
ataacaaattaca

SEQ ID NO: 132365 - DNA, 13 bp, Artificial Sequence
  Oligonucleotide for detection of SNP TSC0033024
tgtaatgtgttat

SEQ ID NO: 132366 - DNA, 13 bp, Artificial Sequence
  Oligonucleotide for detection of SNP TSC0033024
ataacacattaca

SEQ ID NO: 132367 - DNA, 13 bp, Artificial Sequence
  Oligonucleotide for detection of SNP TSC0033024
tgtaacgtgttat

SEQ ID NO: 132368 - DNA, 13 bp, Artificial Sequence
  Oligonucleotide for detection of SNP TSC0033024
ataacacgttaca

SEQ ID NO: 132369 - DNA, 13 bp, Artificial Sequence
  Oligonucleotide for detection of SNP TSC0033025
ttaataaatatga

SEQ ID NO: 132370 - DNA, 13 bp, Artificial Sequence
  Oligonucleotide for detection of SNP TSC0033025
tcatatttattaa

SEQ ID NO: 132371 - DNA, 13 bp, Artificial Sequence
  Oligonucleotide for detection of SNP TSC0033025
ttaatatatatga

SEQ ID NO: 132372 - DNA, 13 bp, Artificial Sequence
  Oligonucleotide for detection of SNP TSC0033025
tcatatatattaa

SEQ ID NO: 132373 - DNA, 13 bp, Artificial Sequence
  Oligonucleotide for detection of SNP TSC0033025
ttatatttattga

SEQ ID NO: 132374 - DNA, 13 bp, Artificial Sequence
  Oligonucleotide for detection of SNP TSC0033025
tcaataaatataa

SEQ ID NO: 132375 - DNA, 13 bp, Artificial Sequence
  Oligonucleotide for detection of SNP TSC0033025
ttatatatattga

SEQ ID NO: 132376 - DNA, 13 bp, Artificial Sequence
  Oligonucleotide for detection of SNP TSC0033025
tcaatatatataa

SEQ ID NO: 132377 - DNA, 13 bp, Artificial Sequence
  Oligonucleotide for detection of SNP TSC0033027
ttttattgttggt

SEQ ID NO: 132378 - DNA, 13 bp, Artificial Sequence
  Oligonucleotide for detection of SNP TSC0033027
accaacaataaaa

SEQ ID NO: 132379 - DNA, 13 bp, Artificial Sequence
  Oligonucleotide for detection of SNP TSC0033027
ttttatggttggt

SEQ ID NO: 132380 - DNA, 13 bp, Artificial Sequence
  Oligonucleotide for detection of SNP TSC0033027
accaaccataaaa

SEQ ID NO: 132381 - DNA, 13 bp, Artificial Sequence
  Oligonucleotide for detection of SNP TSC0033027
ttttatcgttggt

SEQ ID NO: 132382 - DNA, 13 bp, Artificial Sequence
  Oligonucleotide for detection of SNP TSC0033027
accaacgataaaa

SEQ ID NO: 132383 - DNA, 13 bp, Artificial Sequence
  Oligonucleotide for detection of SNP TSC0033027
ttttacggttggt

SEQ ID NO: 132384 - DNA, 13 bp, Artificial Sequence
  Oligonucleotide for detection of SNP TSC0033027
accaaccgtaaaa

SEQ ID NO: 132385 - DNA, 13 bp, Artificial Sequence
  Oligonucleotide for detection of SNP TSC0033027
ttttattgtcggt

SEQ ID NO: 132386 - DNA, 13 bp, Artificial Sequence
  Oligonucleotide for detection of SNP TSC0033027
accgacaataaaa

SEQ ID NO: 132387 - DNA, 13 bp, Artificial Sequence
  Oligonucleotide for detection of SNP TSC0033027
ttttatggtcggt

SEQ ID NO: 132388 - DNA, 13 bp, Artificial Sequence
  Oligonucleotide for detection of SNP TSC0033027
accgaccataaaa

SEQ ID NO: 132389 - DNA, 13 bp, Artificial Sequence
  Oligonucleotide for detection of SNP TSC0033027
ttttatcgtcggt

SEQ ID NO: 132390 - DNA, 13 bp, Artificial Sequence
  Oligonucleotide for detection of SNP TSC0033027
accgacgataaaa

SEQ ID NO: 132391 - DNA, 13 bp, Artificial Sequence
  Oligonucleotide for detection of SNP TSC0033027
ttttacggtcggt

SEQ ID NO: 132392 - DNA, 13 bp, Artificial Sequence
  Oligonucleotide for detection of SNP TSC0033027
accgaccgtaaaa

SEQ ID NO: 132393 - DNA, 13 bp, Artificial Sequence
  Oligonucleotide for detection of SNP TSC0033027
attggtggtggga

SEQ ID NO: 132394 - DNA, 13 bp, Artificial Sequence
  Oligonucleotide for detection of SNP TSC0033027
tcccaccaccaat

SEQ ID NO: 132395 - DNA, 13 bp, Artificial Sequence
  Oligonucleotide for detection of SNP TSC0033027
attggttgtggga

SEQ ID NO: 132396 - DNA, 13 bp, Artificial Sequence
  Oligonucleotide for detection of SNP TSC0033027
tcccacaaccaat

SEQ ID NO: 132397 - DNA, 13 bp, Artificial Sequence
  Oligonucleotide for detection of SNP TSC0033027
atcggtggtggga

SEQ ID NO: 132398 - DNA, 13 bp, Artificial Sequence
  Oligonucleotide for detection of SNP TSC0033027
tcccaccaccgat

SEQ ID NO: 132399 - DNA, 13 bp, Artificial Sequence
  Oligonucleotide for detection of SNP TSC0033027
atcggttgtggga

SEQ ID NO: 132400 - DNA, 13 bp, Artificial Sequence
  Oligonucleotide for detection of SNP TSC0033027
tcccacaaccgat

SEQ ID NO: 132401 - DNA, 13 bp, Artificial Sequence
  Oligonucleotide for detection of SNP TSC0033027
attggcggtggga

SEQ ID NO: 132402 - DNA, 13 bp, Artificial Sequence
  Oligonucleotide for detection of SNP TSC0033027
tcccaccgccaat

SEQ ID NO: 132403 - DNA, 13 bp, Artificial Sequence
  Oligonucleotide for detection of SNP TSC0033027
attggtcgtggga

SEQ ID NO: 132404 - DNA, 13 bp, Artificial Sequence
  Oligonucleotide for detection of SNP TSC0033027
tcccacgaccaat

SEQ ID NO: 132405 - DNA, 13 bp, Artificial Sequence
  Oligonucleotide for detection of SNP TSC0033027
atcggcggtggga

SEQ ID NO: 132406 - DNA, 13 bp, Artificial Sequence
  Oligonucleotide for detection of SNP TSC0033027
tcccaccgccgat

SEQ ID NO: 132407 - DNA, 13 bp, Artificial Sequence
  Oligonucleotide for detection of SNP TSC0033027
atcggtcgtggga

SEQ ID NO: 132408 - DNA, 13 bp, Artificial Sequence
  Oligonucleotide for detection of SNP TSC0033027
tcccacgaccgat

SEQ ID NO: 132409 - DNA, 13 bp, Artificial Sequence
  Oligonucleotide for detection of SNP TSC0033031
gggggagaattay

SEQ ID NO: 132410 - DNA, 13 bp, Artificial Sequence
  Oligonucleotide for detection of SNP TSC0033031
rtaattctccccc

SEQ ID NO: 132411 - DNA, 13 bp, Artificial Sequence
  Oligonucleotide for detection of SNP TSC0033031
gggggaaaattay

SEQ ID NO: 132412 - DNA, 13 bp, Artificial Sequence
  Oligonucleotide for detection of SNP TSC0033031
rtaattttccccc

SEQ ID NO: 132413 - DNA, 13 bp, Artificial Sequence
  Oligonucleotide for detection of SNP TSC0033033
aaataatatttty

SEQ ID NO: 132414 - DNA, 13 bp, Artificial Sequence
  Oligonucleotide for detection of SNP TSC0033033
raaaatattattt

SEQ ID NO: 132415 - DNA, 13 bp, Artificial Sequence
  Oligonucleotide for detection of SNP TSC0033033
aaataagatttty

SEQ ID NO: 132416 - DNA, 13 bp, Artificial Sequence
  Oligonucleotide for detection of SNP TSC0033033
raaaatcttattt

SEQ ID NO: 132417 - DNA, 13 bp, Artificial Sequence
  Oligonucleotide for detection of SNP TSC0033033
gggagtgttattt

SEQ ID NO: 132418 - DNA, 13 bp, Artificial Sequence
  Oligonucleotide for detection of SNP TSC0033033
aaataacactccc

SEQ ID NO: 132419 - DNA, 13 bp, Artificial Sequence
  Oligonucleotide for detection of SNP TSC0033033
gggagttttattt

SEQ ID NO: 132420 - DNA, 13 bp, Artificial Sequence
  Oligonucleotide for detection of SNP TSC0033033
aaataaaactccc

SEQ ID NO: 132421 - DNA, 13 bp, Artificial Sequence
  Oligonucleotide for detection of SNP TSC0033035
attttgttaatgg

SEQ ID NO: 132422 - DNA, 13 bp, Artificial Sequence
  Oligonucleotide for detection of SNP TSC0033035
ccattaacaaaat

SEQ ID NO: 132423 - DNA, 13 bp, Artificial Sequence
  Oligonucleotide for detection of SNP TSC0033035
attttggtaatgg

SEQ ID NO: 132424 - DNA, 13 bp, Artificial Sequence
  Oligonucleotide for detection of SNP TSC0033035
ccattaccaaaat

SEQ ID NO: 132425 - DNA, 13 bp, Artificial Sequence
  Oligonucleotide for detection of SNP TSC0033035
attttgttaacgg

SEQ ID NO: 132426 - DNA, 13 bp, Artificial Sequence
  Oligonucleotide for detection of SNP TSC0033035
ccgttaacaaaat

SEQ ID NO: 132427 - DNA, 13 bp, Artificial Sequence
  Oligonucleotide for detection of SNP TSC0033035
attttggtaacgg

SEQ ID NO: 132428 - DNA, 13 bp, Artificial Sequence
  Oligonucleotide for detection of SNP TSC0033035
ccgttaccaaaat

SEQ ID NO: 132429 - DNA, 13 bp, Artificial Sequence
  Oligonucleotide for detection of SNP TSC0033035
ttgttagtaaggt

SEQ ID NO: 132430 - DNA, 13 bp, Artificial Sequence
  Oligonucleotide for detection of SNP TSC0033035
accttactaacaa

SEQ ID NO: 132431 - DNA, 13 bp, Artificial Sequence
  Oligonucleotide for detection of SNP TSC0033035
ttgttattaaggt

SEQ ID NO: 132432 - DNA, 13 bp, Artificial Sequence
  Oligonucleotide for detection of SNP TSC0033035
accttaataacaa

SEQ ID NO: 132433 - DNA, 13 bp, Artificial Sequence
  Oligonucleotide for detection of SNP TSC0033035
tcgttagtaaggt

SEQ ID NO: 132434 - DNA, 13 bp, Artificial Sequence
  Oligonucleotide for detection of SNP TSC0033035
accttactaacga

SEQ ID NO: 132435 - DNA, 13 bp, Artificial Sequence
  Oligonucleotide for detection of SNP TSC0033035
tcgttattaaggt

SEQ ID NO: 132436 - DNA, 13 bp, Artificial Sequence
  Oligonucleotide for detection of SNP TSC0033035
accttaataacga

SEQ ID NO: 132437 - DNA, 13 bp, Artificial Sequence
  Oligonucleotide for detection of SNP TSC0033036
tttagaagtttta

SEQ ID NO: 132438 - DNA, 13 bp, Artificial Sequence
  Oligonucleotide for detection of SNP TSC0033036
taaaacttctaaa

SEQ ID NO: 132439 - DNA, 13 bp, Artificial Sequence
  Oligonucleotide for detection of SNP TSC0033036
tttagaggtttta

SEQ ID NO: 132440 - DNA, 13 bp, Artificial Sequence
  Oligonucleotide for detection of SNP TSC0033036
taaaacctctaaa

SEQ ID NO: 132441 - DNA, 13 bp, Artificial Sequence
  Oligonucleotide for detection of SNP TSC0033038
tagagtaatttgg

SEQ ID NO: 132442 - DNA, 13 bp, Artificial Sequence
  Oligonucleotide for detection of SNP TSC0033038
ccaaattactcta

SEQ ID NO: 132443 - DNA, 13 bp, Artificial Sequence
  Oligonucleotide for detection of SNP TSC0033038
tagagtgatttgg

SEQ ID NO: 132444 - DNA, 13 bp, Artificial Sequence
  Oligonucleotide for detection of SNP TSC0033038
ccaaatcactcta

SEQ ID NO: 132445 - DNA, 13 bp, Artificial Sequence
  Oligonucleotide for detection of SNP TSC0033040
tgaagagattaag

SEQ ID NO: 132446 - DNA, 13 bp, Artificial Sequence
  Oligonucleotide for detection of SNP TSC0033040
cttaatctcttca

SEQ ID NO: 132447 - DNA, 13 bp, Artificial Sequence
  Oligonucleotide for detection of SNP TSC0033040
tgaagaaattaag

SEQ ID NO: 132448 - DNA, 13 bp, Artificial Sequence
  Oligonucleotide for detection of SNP TSC0033040
cttaatttcttca

SEQ ID NO: 132449 - DNA, 13 bp, Artificial Sequence
  Oligonucleotide for detection of SNP TSC0033044
gtattatgaaata

SEQ ID NO: 132450 - DNA, 13 bp, Artificial Sequence
  Oligonucleotide for detection of SNP TSC0033044
tatttcataatac

SEQ ID NO: 132451 - DNA, 13 bp, Artificial Sequence
  Oligonucleotide for detection of SNP TSC0033044
gtattacgaaata

SEQ ID NO: 132452 - DNA, 13 bp, Artificial Sequence
  Oligonucleotide for detection of SNP TSC0033044
tatttcgtaatac

SEQ ID NO: 132453 - DNA, 13 bp, Artificial Sequence
  Oligonucleotide for detection of SNP TSC0033044
tattttgtagtay

SEQ ID NO: 132454 - DNA, 13 bp, Artificial Sequence
  Oligonucleotide for detection of SNP TSC0033044
rtactacaaaata

SEQ ID NO: 132455 - DNA, 13 bp, Artificial Sequence
  Oligonucleotide for detection of SNP TSC0033044
tattttatagtay

SEQ ID NO: 132456 - DNA, 13 bp, Artificial Sequence
  Oligonucleotide for detection of SNP TSC0033044
rtactataaaata

SEQ ID NO: 132457 - DNA, 13 bp, Artificial Sequence
  Oligonucleotide for detection of SNP TSC0033044
tatttcgtagtay

SEQ ID NO: 132458 - DNA, 13 bp, Artificial Sequence
  Oligonucleotide for detection of SNP TSC0033044
rtactacgaaata

SEQ ID NO: 132459 - DNA, 13 bp, Artificial Sequence
  Oligonucleotide for detection of SNP TSC0033045
ttgttttttgggt

SEQ ID NO: 132460 - DNA, 13 bp, Artificial Sequence
  Oligonucleotide for detection of SNP TSC0033045
acccaaaaaacaa

SEQ ID NO: 132461 - DNA, 13 bp, Artificial Sequence
  Oligonucleotide for detection of SNP TSC0033045
ttgtttgttgggt

SEQ ID NO: 132462 - DNA, 13 bp, Artificial Sequence
  Oligonucleotide for detection of SNP TSC0033045
acccaacaaacaa

SEQ ID NO: 132463 - DNA, 13 bp, Artificial Sequence
  Oligonucleotide for detection of SNP TSC0033045
tcgttttttgggt

SEQ ID NO: 132464 - DNA, 13 bp, Artificial Sequence
  Oligonucleotide for detection of SNP TSC0033045
acccaaaaaacga

SEQ ID NO: 132465 - DNA, 13 bp, Artificial Sequence
  Oligonucleotide for detection of SNP TSC0033045
tcgtttgttgggt

SEQ ID NO: 132466 - DNA, 13 bp, Artificial Sequence
  Oligonucleotide for detection of SNP TSC0033045
acccaacaaacga

SEQ ID NO: 132467 - DNA, 13 bp, Artificial Sequence
  Oligonucleotide for detection of SNP TSC0033045
atttaggaggtgg

SEQ ID NO: 132468 - DNA, 13 bp, Artificial Sequence
  Oligonucleotide for detection of SNP TSC0033045
ccacctcctaaat

SEQ ID NO: 132469 - DNA, 13 bp, Artificial Sequence
  Oligonucleotide for detection of SNP TSC0033045
atttagtaggtgg

SEQ ID NO: 132470 - DNA, 13 bp, Artificial Sequence
  Oligonucleotide for detection of SNP TSC0033045
ccacctactaaat

SEQ ID NO: 132471 - DNA, 13 bp, Artificial Sequence
  Oligonucleotide for detection of SNP TSC0033045
atttaggaggcgg

SEQ ID NO: 132472 - DNA, 13 bp, Artificial Sequence
  Oligonucleotide for detection of SNP TSC0033045
ccgcctcctaaat

SEQ ID NO: 132473 - DNA, 13 bp, Artificial Sequence
  Oligonucleotide for detection of SNP TSC0033045
atttagtaggcgg

SEQ ID NO: 132474 - DNA, 13 bp, Artificial Sequence
  Oligonucleotide for detection of SNP TSC0033045
ccgcctactaaat

SEQ ID NO: 132475 - DNA, 13 bp, Artificial Sequence
  Oligonucleotide for detection of SNP TSC0033048
ttatatttgtttt

SEQ ID NO: 132476 - DNA, 13 bp, Artificial Sequence
  Oligonucleotide for detection of SNP TSC0033048
aaaacaaatataa

SEQ ID NO: 132477 - DNA, 13 bp, Artificial Sequence
  Oligonucleotide for detection of SNP TSC0033048
agggtaggtatga

SEQ ID NO: 132478 - DNA, 13 bp, Artificial Sequence
  Oligonucleotide for detection of SNP TSC0033048
tcatacctaccct

SEQ ID NO: 132479 - DNA, 13 bp, Artificial Sequence
  Oligonucleotide for detection of SNP TSC0033048
agggtatgtatga

SEQ ID NO: 132480 - DNA, 13 bp, Artificial Sequence
  Oligonucleotide for detection of SNP TSC0033048
tcatacataccct

SEQ ID NO: 132481 - DNA, 13 bp, Artificial Sequence
  Oligonucleotide for detection of SNP TSC0033048
agggtacgtatga

SEQ ID NO: 132482 - DNA, 13 bp, Artificial Sequence
  Oligonucleotide for detection of SNP TSC0033048
tcatacgtaccct

SEQ ID NO: 132483 - DNA, 13 bp, Artificial Sequence
  Oligonucleotide for detection of SNP TSC0033049
tatgatgattgta

SEQ ID NO: 132484 - DNA, 13 bp, Artificial Sequence
  Oligonucleotide for detection of SNP TSC0033049
tacaatcatcata

SEQ ID NO: 132485 - DNA, 13 bp, Artificial Sequence
  Oligonucleotide for detection of SNP TSC0033049
tatgattattgta

SEQ ID NO: 132486 - DNA, 13 bp, Artificial Sequence
  Oligonucleotide for detection of SNP TSC0033049
tacaataatcata

SEQ ID NO: 132487 - DNA, 13 bp, Artificial Sequence
  Oligonucleotide for detection of SNP TSC0033049
tataattattata

SEQ ID NO: 132488 - DNA, 13 bp, Artificial Sequence
  Oligonucleotide for detection of SNP TSC0033049
tataataattata

SEQ ID NO: 132489 - DNA, 13 bp, Artificial Sequence
  Oligonucleotide for detection of SNP TSC0033051
atgtttagaggga

SEQ ID NO: 132490 - DNA, 13 bp, Artificial Sequence
  Oligonucleotide for detection of SNP TSC0033051
tccctctaaacat

SEQ ID NO: 132491 - DNA, 13 bp, Artificial Sequence
  Oligonucleotide for detection of SNP TSC0033051
atgtttggaggga

SEQ ID NO: 132492 - DNA, 13 bp, Artificial Sequence
  Oligonucleotide for detection of SNP TSC0033051
tccctccaaacat

SEQ ID NO: 132493 - DNA, 13 bp, Artificial Sequence
  Oligonucleotide for detection of SNP TSC0033051
atgttcggaggga

SEQ ID NO: 132494 - DNA, 13 bp, Artificial Sequence
  Oligonucleotide for detection of SNP TSC0033051
tccctccgaacat

SEQ ID NO: 132495 - DNA, 13 bp, Artificial Sequence
  Oligonucleotide for detection of SNP TSC0033053
tagttatgtaaag

SEQ ID NO: 132496 - DNA, 13 bp, Artificial Sequence
  Oligonucleotide for detection of SNP TSC0033053
ctttacataacta

SEQ ID NO: 132497 - DNA, 13 bp, Artificial Sequence
  Oligonucleotide for detection of SNP TSC0033053
tagttaggtaaag

SEQ ID NO: 132498 - DNA, 13 bp, Artificial Sequence
  Oligonucleotide for detection of SNP TSC0033053
ctttacctaacta

SEQ ID NO: 132499 - DNA, 13 bp, Artificial Sequence
  Oligonucleotide for detection of SNP TSC0033053
tagttacgtaaag

SEQ ID NO: 132500 - DNA, 13 bp, Artificial Sequence
  Oligonucleotide for detection of SNP TSC0033053
ctttacgtaacta

SEQ ID NO: 132501 - DNA, 13 bp, Artificial Sequence
  Oligonucleotide for detection of SNP TSC0033053
ttttgtgtgattg

SEQ ID NO: 132502 - DNA, 13 bp, Artificial Sequence
  Oligonucleotide for detection of SNP TSC0033053
caatcacacaaaa

SEQ ID NO: 132503 - DNA, 13 bp, Artificial Sequence
  Oligonucleotide for detection of SNP TSC0033053
ttttgtttgattg

SEQ ID NO: 132504 - DNA, 13 bp, Artificial Sequence
  Oligonucleotide for detection of SNP TSC0033053
caatcaaacaaaa

SEQ ID NO: 132505 - DNA, 13 bp, Artificial Sequence
  Oligonucleotide for detection of SNP TSC0033053
ttttgcgtgattg

SEQ ID NO: 132506 - DNA, 13 bp, Artificial Sequence
  Oligonucleotide for detection of SNP TSC0033053
caatcacgcaaaa

SEQ ID NO: 132507 - DNA, 13 bp, Artificial Sequence
  Oligonucleotide for detection of SNP TSC0033054
tattaggtattty

SEQ ID NO: 132508 - DNA, 13 bp, Artificial Sequence
  Oligonucleotide for detection of SNP TSC0033054
raaatacctaata

SEQ ID NO: 132509 - DNA, 13 bp, Artificial Sequence
  Oligonucleotide for detection of SNP TSC0033054
tattagatattty

SEQ ID NO: 132510 - DNA, 13 bp, Artificial Sequence
  Oligonucleotide for detection of SNP TSC0033054
raaatatctaata

SEQ ID NO: 132511 - DNA, 13 bp, Artificial Sequence
  Oligonucleotide for detection of SNP TSC0033055
tttgtaatagatg

SEQ ID NO: 132512 - DNA, 13 bp, Artificial Sequence
  Oligonucleotide for detection of SNP TSC0033055
catctattacaaa

SEQ ID NO: 132513 - DNA, 13 bp, Artificial Sequence
  Oligonucleotide for detection of SNP TSC0033055
tttgtattagatg

SEQ ID NO: 132514 - DNA, 13 bp, Artificial Sequence
  Oligonucleotide for detection of SNP TSC0033055
catctaatacaaa

SEQ ID NO: 132515 - DNA, 13 bp, Artificial Sequence
  Oligonucleotide for detection of SNP TSC0033055
tatttgttgtagg

SEQ ID NO: 132516 - DNA, 13 bp, Artificial Sequence
  Oligonucleotide for detection of SNP TSC0033055
cctacaacaaata

SEQ ID NO: 132517 - DNA, 13 bp, Artificial Sequence
  Oligonucleotide for detection of SNP TSC0033055
tatttgatgtagg

SEQ ID NO: 132518 - DNA, 13 bp, Artificial Sequence
  Oligonucleotide for detection of SNP TSC0033055
cctacatcaaata

SEQ ID NO: 132519 - DNA, 13 bp, Artificial Sequence
  Oligonucleotide for detection of SNP TSC0033056
gttagaggtggta

SEQ ID NO: 132520 - DNA, 13 bp, Artificial Sequence
  Oligonucleotide for detection of SNP TSC0033056
taccacctctaac

SEQ ID NO: 132521 - DNA, 13 bp, Artificial Sequence
  Oligonucleotide for detection of SNP TSC0033056
tgttatttttaay

SEQ ID NO: 132522 - DNA, 13 bp, Artificial Sequence
  Oligonucleotide for detection of SNP TSC0033056
rttaaaaataaca

SEQ ID NO: 132523 - DNA, 13 bp, Artificial Sequence
  Oligonucleotide for detection of SNP TSC0033056
tgttatatttaay

SEQ ID NO: 132524 - DNA, 13 bp, Artificial Sequence
  Oligonucleotide for detection of SNP TSC0033056
rttaaatataaca

SEQ ID NO: 132525 - DNA, 13 bp, Artificial Sequence
  Oligonucleotide for detection of SNP TSC0033057
aaggtaataatta

SEQ ID NO: 132526 - DNA, 13 bp, Artificial Sequence
  Oligonucleotide for detection of SNP TSC0033057
taattattacctt

SEQ ID NO: 132527 - DNA, 13 bp, Artificial Sequence
  Oligonucleotide for detection of SNP TSC0033057
aaggtagtaatta

SEQ ID NO: 132528 - DNA, 13 bp, Artificial Sequence
  Oligonucleotide for detection of SNP TSC0033057
taattactacctt

SEQ ID NO: 132529 - DNA, 13 bp, Artificial Sequence
  Oligonucleotide for detection of SNP TSC0033058
ttgtagatgagga

SEQ ID NO: 132530 - DNA, 13 bp, Artificial Sequence
  Oligonucleotide for detection of SNP TSC0033058
tcctcatctacaa

SEQ ID NO: 132531 - DNA, 13 bp, Artificial Sequence
  Oligonucleotide for detection of SNP TSC0033058
ttgtaggtgagga

SEQ ID NO: 132532 - DNA, 13 bp, Artificial Sequence
  Oligonucleotide for detection of SNP TSC0033058
tcctcacctacaa

SEQ ID NO: 132533 - DNA, 13 bp, Artificial Sequence
  Oligonucleotide for detection of SNP TSC0033059
gagatggggaggg

SEQ ID NO: 132534 - DNA, 13 bp, Artificial Sequence
  Oligonucleotide for detection of SNP TSC0033059
ccctccccatctc

SEQ ID NO: 132535 - DNA, 13 bp, Artificial Sequence
  Oligonucleotide for detection of SNP TSC0033059
gagatgaggaggg

SEQ ID NO: 132536 - DNA, 13 bp, Artificial Sequence
  Oligonucleotide for detection of SNP TSC0033059
ccctcctcatctc

SEQ ID NO: 132537 - DNA, 13 bp, Artificial Sequence
  Oligonucleotide for detection of SNP TSC0033059
gagacggggaggg

SEQ ID NO: 132538 - DNA, 13 bp, Artificial Sequence
  Oligonucleotide for detection of SNP TSC0033059
ccctccccgtctc

SEQ ID NO: 132539 - DNA, 13 bp, Artificial Sequence
  Oligonucleotide for detection of SNP TSC0033059
gagacgaggaggg

SEQ ID NO: 132540 - DNA, 13 bp, Artificial Sequence
  Oligonucleotide for detection of SNP TSC0033059
ccctcctcgtctc

SEQ ID NO: 132541 - DNA, 13 bp, Artificial Sequence
  Oligonucleotide for detection of SNP TSC0033060
ttggttattattt

SEQ ID NO: 132542 - DNA, 13 bp, Artificial Sequence
  Oligonucleotide for detection of SNP TSC0033060
aaataataaccaa

SEQ ID NO: 132543 - DNA, 13 bp, Artificial Sequence
  Oligonucleotide for detection of SNP TSC0033060
ttggttgttattt

SEQ ID NO: 132544 - DNA, 13 bp, Artificial Sequence
  Oligonucleotide for detection of SNP TSC0033060
aaataacaaccaa

SEQ ID NO: 132545 - DNA, 13 bp, Artificial Sequence
  Oligonucleotide for detection of SNP TSC0033060
ttggtcgttattt

SEQ ID NO: 132546 - DNA, 13 bp, Artificial Sequence
  Oligonucleotide for detection of SNP TSC0033060
aaataacgaccaa

SEQ ID NO: 132547 - DNA, 13 bp, Artificial Sequence
  Oligonucleotide for detection of SNP TSC0033060
agatggtgattag

SEQ ID NO: 132548 - DNA, 13 bp, Artificial Sequence
  Oligonucleotide for detection of SNP TSC0033060
ctaatcaccatct

SEQ ID NO: 132549 - DNA, 13 bp, Artificial Sequence
  Oligonucleotide for detection of SNP TSC0033060
agatggcgattag

SEQ ID NO: 132550 - DNA, 13 bp, Artificial Sequence
  Oligonucleotide for detection of SNP TSC0033060
ctaatcgccatct

SEQ ID NO: 132551 - DNA, 13 bp, Artificial Sequence
  Oligonucleotide for detection of SNP TSC0033062
tgttttttatata

SEQ ID NO: 132552 - DNA, 13 bp, Artificial Sequence
  Oligonucleotide for detection of SNP TSC0033062
tatataaaaaaca

SEQ ID NO: 132553 - DNA, 13 bp, Artificial Sequence
  Oligonucleotide for detection of SNP TSC0033062
tgtatataaaata

SEQ ID NO: 132554 - DNA, 13 bp, Artificial Sequence
  Oligonucleotide for detection of SNP TSC0033062
tattttatataca

SEQ ID NO: 132555 - DNA, 13 bp, Artificial Sequence
  Oligonucleotide for detection of SNP TSC0033062
tgtatagaaaata

SEQ ID NO: 132556 - DNA, 13 bp, Artificial Sequence
  Oligonucleotide for detection of SNP TSC0033062
tattttctataca

SEQ ID NO: 132557 - DNA, 13 bp, Artificial Sequence
  Oligonucleotide for detection of SNP TSC0033063
atgtaaatttttt

SEQ ID NO: 132558 - DNA, 13 bp, Artificial Sequence
  Oligonucleotide for detection of SNP TSC0033063
aaaaaatttacat

SEQ ID NO: 132559 - DNA, 13 bp, Artificial Sequence
  Oligonucleotide for detection of SNP TSC0033063
atgtaagtttttt

SEQ ID NO: 132560 - DNA, 13 bp, Artificial Sequence
  Oligonucleotide for detection of SNP TSC0033063
aaaaaacttacat

SEQ ID NO: 132561 - DNA, 13 bp, Artificial Sequence
  Oligonucleotide for detection of SNP TSC0033068
gaaagaggaaagg

SEQ ID NO: 132562 - DNA, 13 bp, Artificial Sequence
  Oligonucleotide for detection of SNP TSC0033068
cctttcctctttc

SEQ ID NO: 132563 - DNA, 13 bp, Artificial Sequence
  Oligonucleotide for detection of SNP TSC0033069
ataaaaatataag

SEQ ID NO: 132564 - DNA, 13 bp, Artificial Sequence
  Oligonucleotide for detection of SNP TSC0033069
cttatatttttat

SEQ ID NO: 132565 - DNA, 13 bp, Artificial Sequence
  Oligonucleotide for detection of SNP TSC0033069
ataaaattataag

SEQ ID NO: 132566 - DNA, 13 bp, Artificial Sequence
  Oligonucleotide for detection of SNP TSC0033069
cttataattttat

SEQ ID NO: 132567 - DNA, 13 bp, Artificial Sequence
  Oligonucleotide for detection of SNP TSC0033069
tttgtatttttgt

SEQ ID NO: 132568 - DNA, 13 bp, Artificial Sequence
  Oligonucleotide for detection of SNP TSC0033069
acaaaaatacaaa

SEQ ID NO: 132569 - DNA, 13 bp, Artificial Sequence
  Oligonucleotide for detection of SNP TSC0033069
tttgtagttttgt

SEQ ID NO: 132570 - DNA, 13 bp, Artificial Sequence
  Oligonucleotide for detection of SNP TSC0033069
acaaaactacaaa

SEQ ID NO: 132571 - DNA, 13 bp, Artificial Sequence
  Oligonucleotide for detection of SNP TSC0033071
tgtttgtatttag

SEQ ID NO: 132572 - DNA, 13 bp, Artificial Sequence
  Oligonucleotide for detection of SNP TSC0033071
ctaaatacaaaca

SEQ ID NO: 132573 - DNA, 13 bp, Artificial Sequence
  Oligonucleotide for detection of SNP TSC0033071
tgtttgaatttag

SEQ ID NO: 132574 - DNA, 13 bp, Artificial Sequence
  Oligonucleotide for detection of SNP TSC0033071
ctaaattcaaaca

SEQ ID NO: 132575 - DNA, 13 bp, Artificial Sequence
  Oligonucleotide for detection of SNP TSC0033073
gtttttaaggtgg

SEQ ID NO: 132576 - DNA, 13 bp, Artificial Sequence
  Oligonucleotide for detection of SNP TSC0033073
ccaccttaaaaac

SEQ ID NO: 132577 - DNA, 13 bp, Artificial Sequence
  Oligonucleotide for detection of SNP TSC0033073
gtttttgaggtgg

SEQ ID NO: 132578 - DNA, 13 bp, Artificial Sequence
  Oligonucleotide for detection of SNP TSC0033073
ccacctcaaaaac

SEQ ID NO: 132579 - DNA, 13 bp, Artificial Sequence
  Oligonucleotide for detection of SNP TSC0033073
gttttcgaggtgg

SEQ ID NO: 132580 - DNA, 13 bp, Artificial Sequence
  Oligonucleotide for detection of SNP TSC0033073
ccacctcgaaaac

SEQ ID NO: 132581 - DNA, 13 bp, Artificial Sequence
  Oligonucleotide for detection of SNP TSC0033073
ttattttgagagy

SEQ ID NO: 132582 - DNA, 13 bp, Artificial Sequence
  Oligonucleotide for detection of SNP TSC0033073
rctctcaaaataa

SEQ ID NO: 132583 - DNA, 13 bp, Artificial Sequence
  Oligonucleotide for detection of SNP TSC0033073
ttatttcgagagy

SEQ ID NO: 132584 - DNA, 13 bp, Artificial Sequence
  Oligonucleotide for detection of SNP TSC0033073
rctctcgaaataa

SEQ ID NO: 132585 - DNA, 13 bp, Artificial Sequence
  Oligonucleotide for detection of SNP TSC0033074
ggatgagggtgga

SEQ ID NO: 132586 - DNA, 13 bp, Artificial Sequence
  Oligonucleotide for detection of SNP TSC0033074
tccaccctcatcc

SEQ ID NO: 132587 - DNA, 13 bp, Artificial Sequence
  Oligonucleotide for detection of SNP TSC0033074
ggatgaaggtgga

SEQ ID NO: 132588 - DNA, 13 bp, Artificial Sequence
  Oligonucleotide for detection of SNP TSC0033074
tccaccttcatcc

SEQ ID NO: 132589 - DNA, 13 bp, Artificial Sequence
  Oligonucleotide for detection of SNP TSC0033075
tgagtgtgggtty

SEQ ID NO: 132590 - DNA, 13 bp, Artificial Sequence
  Oligonucleotide for detection of SNP TSC0033075
raacccacactca

SEQ ID NO: 132591 - DNA, 13 bp, Artificial Sequence
  Oligonucleotide for detection of SNP TSC0033075
tgagtgcgggtty

SEQ ID NO: 132592 - DNA, 13 bp, Artificial Sequence
  Oligonucleotide for detection of SNP TSC0033075
raacccgcactca

SEQ ID NO: 132593 - DNA, 13 bp, Artificial Sequence
  Oligonucleotide for detection of SNP TSC0033075
gagtttgtattta

SEQ ID NO: 132594 - DNA, 13 bp, Artificial Sequence
  Oligonucleotide for detection of SNP TSC0033075
taaatacaaactc

SEQ ID NO: 132595 - DNA, 13 bp, Artificial Sequence
  Oligonucleotide for detection of SNP TSC0033075
gagtttatattta

SEQ ID NO: 132596 - DNA, 13 bp, Artificial Sequence
  Oligonucleotide for detection of SNP TSC0033075
taaatataaactc

SEQ ID NO: 132597 - DNA, 13 bp, Artificial Sequence
  Oligonucleotide for detection of SNP TSC0033075
gagttcgtattta

SEQ ID NO: 132598 - DNA, 13 bp, Artificial Sequence
  Oligonucleotide for detection of SNP TSC0033075
taaatacgaactc

SEQ ID NO: 132599 - DNA, 13 bp, Artificial Sequence
  Oligonucleotide for detection of SNP TSC0033078
tttgttgattttg

SEQ ID NO: 132600 - DNA, 13 bp, Artificial Sequence
  Oligonucleotide for detection of SNP TSC0033078
caaaatcaacaaa

SEQ ID NO: 132601 - DNA, 13 bp, Artificial Sequence
  Oligonucleotide for detection of SNP TSC0033078
tttgtttattttg

SEQ ID NO: 132602 - DNA, 13 bp, Artificial Sequence
  Oligonucleotide for detection of SNP TSC0033078
caaaataaacaaa

SEQ ID NO: 132603 - DNA, 13 bp, Artificial Sequence
  Oligonucleotide for detection of SNP TSC0033078
taaagttaataag

SEQ ID NO: 132604 - DNA, 13 bp, Artificial Sequence
  Oligonucleotide for detection of SNP TSC0033078
cttattaacttta

SEQ ID NO: 132605 - DNA, 13 bp, Artificial Sequence
  Oligonucleotide for detection of SNP TSC0033078
taaagtaaataag

SEQ ID NO: 132606 - DNA, 13 bp, Artificial Sequence
  Oligonucleotide for detection of SNP TSC0033078
cttatttacttta

SEQ ID NO: 132607 - DNA, 13 bp, Artificial Sequence
  Oligonucleotide for detection of SNP TSC0033080
agttaagtttttt

SEQ ID NO: 132608 - DNA, 13 bp, Artificial Sequence
  Oligonucleotide for detection of SNP TSC0033080
aaaaaacttaact

SEQ ID NO: 132609 - DNA, 13 bp, Artificial Sequence
  Oligonucleotide for detection of SNP TSC0033080
aaaaaagttaatt

SEQ ID NO: 132610 - DNA, 13 bp, Artificial Sequence
  Oligonucleotide for detection of SNP TSC0033080
aattaactttttt

SEQ ID NO: 132611 - DNA, 13 bp, Artificial Sequence
  Oligonucleotide for detection of SNP TSC0033080
aaaaaatttaatt

SEQ ID NO: 132612 - DNA, 13 bp, Artificial Sequence
  Oligonucleotide for detection of SNP TSC0033080
aattaaatttttt

SEQ ID NO: 132613 - DNA, 13 bp, Artificial Sequence
  Oligonucleotide for detection of SNP TSC0033081
ggaggtggtgggg

SEQ ID NO: 132614 - DNA, 13 bp, Artificial Sequence
  Oligonucleotide for detection of SNP TSC0033081
ccccaccacctcc

SEQ ID NO: 132615 - DNA, 13 bp, Artificial Sequence
  Oligonucleotide for detection of SNP TSC0033081
ggaggtagtgggg

SEQ ID NO: 132616 - DNA, 13 bp, Artificial Sequence
  Oligonucleotide for detection of SNP TSC0033081
ccccactacctcc

SEQ ID NO: 132617 - DNA, 13 bp, Artificial Sequence
  Oligonucleotide for detection of SNP TSC0033082
tttgaaattatay

SEQ ID NO: 132618 - DNA, 13 bp, Artificial Sequence
  Oligonucleotide for detection of SNP TSC0033082
rtataatttcaaa

SEQ ID NO: 132619 - DNA, 13 bp, Artificial Sequence
  Oligonucleotide for detection of SNP TSC0033082
tttgaagttatay

SEQ ID NO: 132620 - DNA, 13 bp, Artificial Sequence
  Oligonucleotide for detection of SNP TSC0033082
rtataacttcaaa

SEQ ID NO: 132621 - DNA, 13 bp, Artificial Sequence
  Oligonucleotide for detection of SNP TSC0033083
ttattgggagtta

SEQ ID NO: 132622 - DNA, 13 bp, Artificial Sequence
  Oligonucleotide for detection of SNP TSC0033083
taactcccaataa

SEQ ID NO: 132623 - DNA, 13 bp, Artificial Sequence
  Oligonucleotide for detection of SNP TSC0033083
ttattgtgagtta

SEQ ID NO: 132624 - DNA, 13 bp, Artificial Sequence
  Oligonucleotide for detection of SNP TSC0033083
taactcacaataa

SEQ ID NO: 132625 - DNA, 13 bp, Artificial Sequence
  Oligonucleotide for detection of SNP TSC0033083
tgatttttaataa

SEQ ID NO: 132626 - DNA, 13 bp, Artificial Sequence
  Oligonucleotide for detection of SNP TSC0033083
ttattaaaaatca

SEQ ID NO: 132627 - DNA, 13 bp, Artificial Sequence
  Oligonucleotide for detection of SNP TSC0033083
tgatttataataa

SEQ ID NO: 132628 - DNA, 13 bp, Artificial Sequence
  Oligonucleotide for detection of SNP TSC0033083
ttattataaatca

SEQ ID NO: 132629 - DNA, 13 bp, Artificial Sequence
  Oligonucleotide for detection of SNP TSC0033086
tatttatggtgga

SEQ ID NO: 132630 - DNA, 13 bp, Artificial Sequence
  Oligonucleotide for detection of SNP TSC0033086
tccaccataaata

SEQ ID NO: 132631 - DNA, 13 bp, Artificial Sequence
  Oligonucleotide for detection of SNP TSC0033086
tatttacggtgga

SEQ ID NO: 132632 - DNA, 13 bp, Artificial Sequence
  Oligonucleotide for detection of SNP TSC0033086
tccaccgtaaata

SEQ ID NO: 132633 - DNA, 13 bp, Artificial Sequence
  Oligonucleotide for detection of SNP TSC0033086
tttattgtagata

SEQ ID NO: 132634 - DNA, 13 bp, Artificial Sequence
  Oligonucleotide for detection of SNP TSC0033086
tatctacaataaa

SEQ ID NO: 132635 - DNA, 13 bp, Artificial Sequence
  Oligonucleotide for detection of SNP TSC0033086
tttattatagata

SEQ ID NO: 132636 - DNA, 13 bp, Artificial Sequence
  Oligonucleotide for detection of SNP TSC0033086
tatctataataaa

SEQ ID NO: 132637 - DNA, 13 bp, Artificial Sequence
  Oligonucleotide for detection of SNP TSC0033086
tttatcgtagata

SEQ ID NO: 132638 - DNA, 13 bp, Artificial Sequence
  Oligonucleotide for detection of SNP TSC0033086
tatctacgataaa

SEQ ID NO: 132639 - DNA, 13 bp, Artificial Sequence
  Oligonucleotide for detection of SNP TSC0033088
atgtgtatttttt

SEQ ID NO: 132640 - DNA, 13 bp, Artificial Sequence
  Oligonucleotide for detection of SNP TSC0033088
aaaaaatacacat

SEQ ID NO: 132641 - DNA, 13 bp, Artificial Sequence
  Oligonucleotide for detection of SNP TSC0033088
atgtgtgtttttt

SEQ ID NO: 132642 - DNA, 13 bp, Artificial Sequence
  Oligonucleotide for detection of SNP TSC0033088
aaaaaacacacat

SEQ ID NO: 132643 - DNA, 13 bp, Artificial Sequence
  Oligonucleotide for detection of SNP TSC0033088
acgtgtatttttt

SEQ ID NO: 132644 - DNA, 13 bp, Artificial Sequence
  Oligonucleotide for detection of SNP TSC0033088
aaaaaatacacgt

SEQ ID NO: 132645 - DNA, 13 bp, Artificial Sequence
  Oligonucleotide for detection of SNP TSC0033088
acgtgtgtttttt

SEQ ID NO: 132646 - DNA, 13 bp, Artificial Sequence
  Oligonucleotide for detection of SNP TSC0033088
aaaaaacacacgt

SEQ ID NO: 132647 - DNA, 13 bp, Artificial Sequence
  Oligonucleotide for detection of SNP TSC0033088
atgcgtatttttt

SEQ ID NO: 132648 - DNA, 13 bp, Artificial Sequence
  Oligonucleotide for detection of SNP TSC0033088
aaaaaatacgcat

SEQ ID NO: 132649 - DNA, 13 bp, Artificial Sequence
  Oligonucleotide for detection of SNP TSC0033088
atgcgtgtttttt

SEQ ID NO: 132650 - DNA, 13 bp, Artificial Sequence
  Oligonucleotide for detection of SNP TSC0033088
aaaaaacacgcat

SEQ ID NO: 132651 - DNA, 13 bp, Artificial Sequence
  Oligonucleotide for detection of SNP TSC0033088
acgcgtatttttt

SEQ ID NO: 132652 - DNA, 13 bp, Artificial Sequence
  Oligonucleotide for detection of SNP TSC0033088
aaaaaatacgcgt

SEQ ID NO: 132653 - DNA, 13 bp, Artificial Sequence
  Oligonucleotide for detection of SNP TSC0033088
atgtgcgtttttt

SEQ ID NO: 132654 - DNA, 13 bp, Artificial Sequence
  Oligonucleotide for detection of SNP TSC0033088
aaaaaacgcacat

SEQ ID NO: 132655 - DNA, 13 bp, Artificial Sequence
  Oligonucleotide for detection of SNP TSC0033088
acgcgtgtttttt

SEQ ID NO: 132656 - DNA, 13 bp, Artificial Sequence
  Oligonucleotide for detection of SNP TSC0033088
aaaaaacacgcgt

SEQ ID NO: 132657 - DNA, 13 bp, Artificial Sequence
  Oligonucleotide for detection of SNP TSC0033088
acgtgcgtttttt

SEQ ID NO: 132658 - DNA, 13 bp, Artificial Sequence
  Oligonucleotide for detection of SNP TSC0033088
aaaaaacgcacgt

SEQ ID NO: 132659 - DNA, 13 bp, Artificial Sequence
  Oligonucleotide for detection of SNP TSC0033088
atgcgcgtttttt

SEQ ID NO: 132660 - DNA, 13 bp, Artificial Sequence
  Oligonucleotide for detection of SNP TSC0033088
aaaaaacgcgcat

SEQ ID NO: 132661 - DNA, 13 bp, Artificial Sequence
  Oligonucleotide for detection of SNP TSC0033088
acgcgcgtttttt

SEQ ID NO: 132662 - DNA, 13 bp, Artificial Sequence
  Oligonucleotide for detection of SNP TSC0033088
aaaaaacgcgcgt

SEQ ID NO: 132663 - DNA, 13 bp, Artificial Sequence
  Oligonucleotide for detection of SNP TSC0033088
aggggatgtgtgt

SEQ ID NO: 132664 - DNA, 13 bp, Artificial Sequence
  Oligonucleotide for detection of SNP TSC0033088
acacacatcccct

SEQ ID NO: 132665 - DNA, 13 bp, Artificial Sequence
  Oligonucleotide for detection of SNP TSC0033088
aggggatgcgtgt

SEQ ID NO: 132666 - DNA, 13 bp, Artificial Sequence
  Oligonucleotide for detection of SNP TSC0033088
acacgcatcccct

SEQ ID NO: 132667 - DNA, 13 bp, Artificial Sequence
  Oligonucleotide for detection of SNP TSC0033088
aggggacgtgtgt

SEQ ID NO: 132668 - DNA, 13 bp, Artificial Sequence
  Oligonucleotide for detection of SNP TSC0033088
acacacgtcccct

SEQ ID NO: 132669 - DNA, 13 bp, Artificial Sequence
  Oligonucleotide for detection of SNP TSC0033088
aggggatgtgcgt

SEQ ID NO: 132670 - DNA, 13 bp, Artificial Sequence
  Oligonucleotide for detection of SNP TSC0033088
acgcacatcccct

SEQ ID NO: 132671 - DNA, 13 bp, Artificial Sequence
  Oligonucleotide for detection of SNP TSC0033088
aggggatgcgcgt

SEQ ID NO: 132672 - DNA, 13 bp, Artificial Sequence
  Oligonucleotide for detection of SNP TSC0033088
acgcgcatcccct

SEQ ID NO: 132673 - DNA, 13 bp, Artificial Sequence
  Oligonucleotide for detection of SNP TSC0033088
aggggacgcgtgt

SEQ ID NO: 132674 - DNA, 13 bp, Artificial Sequence
  Oligonucleotide for detection of SNP TSC0033088
acacgcgtcccct

SEQ ID NO: 132675 - DNA, 13 bp, Artificial Sequence
  Oligonucleotide for detection of SNP TSC0033088
aggggacgtgcgt

SEQ ID NO: 132676 - DNA, 13 bp, Artificial Sequence
  Oligonucleotide for detection of SNP TSC0033088
acgcacgtcccct

SEQ ID NO: 132677 - DNA, 13 bp, Artificial Sequence
  Oligonucleotide for detection of SNP TSC0033088
aggggacgcgcgt

SEQ ID NO: 132678 - DNA, 13 bp, Artificial Sequence
  Oligonucleotide for detection of SNP TSC0033088
acgcgcgtcccct

SEQ ID NO: 132679 - DNA, 13 bp, Artificial Sequence
  Oligonucleotide for detection of SNP TSC0033089
attttagagagag

SEQ ID NO: 132680 - DNA, 13 bp, Artificial Sequence
  Oligonucleotide for detection of SNP TSC0033089
ctctctctaaaat

SEQ ID NO: 132681 - DNA, 13 bp, Artificial Sequence
  Oligonucleotide for detection of SNP TSC0033089
attttaaagagag

SEQ ID NO: 132682 - DNA, 13 bp, Artificial Sequence
  Oligonucleotide for detection of SNP TSC0033089
ctctctttaaaat

SEQ ID NO: 132683 - DNA, 13 bp, Artificial Sequence
  Oligonucleotide for detection of SNP TSC0033095
atttggaagtttg

SEQ ID NO: 132684 - DNA, 13 bp, Artificial Sequence
  Oligonucleotide for detection of SNP TSC0033095
caaacttccaaat

SEQ ID NO: 132685 - DNA, 13 bp, Artificial Sequence
  Oligonucleotide for detection of SNP TSC0033095
atttgggagtttg

SEQ ID NO: 132686 - DNA, 13 bp, Artificial Sequence
  Oligonucleotide for detection of SNP TSC0033095
caaactcccaaat

SEQ ID NO: 132687 - DNA, 13 bp, Artificial Sequence
  Oligonucleotide for detection of SNP TSC0033096
gatatataagtty

SEQ ID NO: 132688 - DNA, 13 bp, Artificial Sequence
  Oligonucleotide for detection of SNP TSC0033096
raacttatatatc

SEQ ID NO: 132689 - DNA, 13 bp, Artificial Sequence
  Oligonucleotide for detection of SNP TSC0033096
gatatagaagtty

SEQ ID NO: 132690 - DNA, 13 bp, Artificial Sequence
  Oligonucleotide for detection of SNP TSC0033096
raacttctatatc

SEQ ID NO: 132691 - DNA, 13 bp, Artificial Sequence
  Oligonucleotide for detection of SNP TSC0033096
gggtttgtgtgty

SEQ ID NO: 132692 - DNA, 13 bp, Artificial Sequence
  Oligonucleotide for detection of SNP TSC0033096
racacacaaaccc

SEQ ID NO: 132693 - DNA, 13 bp, Artificial Sequence
  Oligonucleotide for detection of SNP TSC0033096
gggtttttgtgty

SEQ ID NO: 132694 - DNA, 13 bp, Artificial Sequence
  Oligonucleotide for detection of SNP TSC0033096
racacaaaaaccc

SEQ ID NO: 132695 - DNA, 13 bp, Artificial Sequence
  Oligonucleotide for detection of SNP TSC0033097
tagatgatggtgt

SEQ ID NO: 132696 - DNA, 13 bp, Artificial Sequence
  Oligonucleotide for detection of SNP TSC0033097
acaccatcatcta

SEQ ID NO: 132697 - DNA, 13 bp, Artificial Sequence
  Oligonucleotide for detection of SNP TSC0033097
tagatggtggtgt

SEQ ID NO: 132698 - DNA, 13 bp, Artificial Sequence
  Oligonucleotide for detection of SNP TSC0033097
acaccaccatcta

SEQ ID NO: 132699 - DNA, 13 bp, Artificial Sequence
  Oligonucleotide for detection of SNP TSC0033098
aaatagatgtgtt

SEQ ID NO: 132700 - DNA, 13 bp, Artificial Sequence
  Oligonucleotide for detection of SNP TSC0033098
aacacatctattt

SEQ ID NO: 132701 - DNA, 13 bp, Artificial Sequence
  Oligonucleotide for detection of SNP TSC0033098
aaataggtgtgtt

SEQ ID NO: 132702 - DNA, 13 bp, Artificial Sequence
  Oligonucleotide for detection of SNP TSC0033098
aacacacctattt

SEQ ID NO: 132703 - DNA, 13 bp, Artificial Sequence
  Oligonucleotide for detection of SNP TSC0033098
aaatagatgcgtt

SEQ ID NO: 132704 - DNA, 13 bp, Artificial Sequence
  Oligonucleotide for detection of SNP TSC0033098
aacgcatctattt

SEQ ID NO: 132705 - DNA, 13 bp, Artificial Sequence
  Oligonucleotide for detection of SNP TSC0033098
aaataggtgcgtt

SEQ ID NO: 132706 - DNA, 13 bp, Artificial Sequence
  Oligonucleotide for detection of SNP TSC0033098
aacgcacctattt

SEQ ID NO: 132707 - DNA, 13 bp, Artificial Sequence
  Oligonucleotide for detection of SNP TSC0033099
agaaatattgatg

SEQ ID NO: 132708 - DNA, 13 bp, Artificial Sequence
  Oligonucleotide for detection of SNP TSC0033099
catcaatatttct

SEQ ID NO: 132709 - DNA, 13 bp, Artificial Sequence
  Oligonucleotide for detection of SNP TSC0033099
agaaattttgatg

SEQ ID NO: 132710 - DNA, 13 bp, Artificial Sequence
  Oligonucleotide for detection of SNP TSC0033099
catcaaaatttct

SEQ ID NO: 132711 - DNA, 13 bp, Artificial Sequence
  Oligonucleotide for detection of SNP TSC0033099
tattagtattttt

SEQ ID NO: 132712 - DNA, 13 bp, Artificial Sequence
  Oligonucleotide for detection of SNP TSC0033099
aaaaatactaata

SEQ ID NO: 132713 - DNA, 13 bp, Artificial Sequence
  Oligonucleotide for detection of SNP TSC0033099
tattagaattttt

SEQ ID NO: 132714 - DNA, 13 bp, Artificial Sequence
  Oligonucleotide for detection of SNP TSC0033099
aaaaattctaata

SEQ ID NO: 132715 - DNA, 13 bp, Artificial Sequence
  Oligonucleotide for detection of SNP TSC0033102
gttaagattgggy

SEQ ID NO: 132716 - DNA, 13 bp, Artificial Sequence
  Oligonucleotide for detection of SNP TSC0033102
rcccaatcttaac

SEQ ID NO: 132717 - DNA, 13 bp, Artificial Sequence
  Oligonucleotide for detection of SNP TSC0033102
gttaaggttgggy

SEQ ID NO: 132718 - DNA, 13 bp, Artificial Sequence
  Oligonucleotide for detection of SNP TSC0033102
rcccaaccttaac

SEQ ID NO: 132719 - DNA, 13 bp, Artificial Sequence
  Oligonucleotide for detection of SNP TSC0033103
tttttttaagatg

SEQ ID NO: 132720 - DNA, 13 bp, Artificial Sequence
  Oligonucleotide for detection of SNP TSC0033103
catcttaaaaaaa

SEQ ID NO: 132721 - DNA, 13 bp, Artificial Sequence
  Oligonucleotide for detection of SNP TSC0033103
tattttgggaagg

SEQ ID NO: 132722 - DNA, 13 bp, Artificial Sequence
  Oligonucleotide for detection of SNP TSC0033103
ccttcccaaaata

SEQ ID NO: 132723 - DNA, 13 bp, Artificial Sequence
  Oligonucleotide for detection of SNP TSC0033103
tatttttggaagg

SEQ ID NO: 132724 - DNA, 13 bp, Artificial Sequence
  Oligonucleotide for detection of SNP TSC0033103
ccttccaaaaata

SEQ ID NO: 132725 - DNA, 13 bp, Artificial Sequence
  Oligonucleotide for detection of SNP TSC0033103
tattttcggaagg

SEQ ID NO: 132726 - DNA, 13 bp, Artificial Sequence
  Oligonucleotide for detection of SNP TSC0033103
ccttccgaaaata

SEQ ID NO: 132727 - DNA, 13 bp, Artificial Sequence
  Oligonucleotide for detection of SNP TSC0033104
gggatttgggttt

SEQ ID NO: 132728 - DNA, 13 bp, Artificial Sequence
  Oligonucleotide for detection of SNP TSC0033104
aaacccaaatccc

SEQ ID NO: 132729 - DNA, 13 bp, Artificial Sequence
  Oligonucleotide for detection of SNP TSC0033104
gggattcgggttt

SEQ ID NO: 132730 - DNA, 13 bp, Artificial Sequence
  Oligonucleotide for detection of SNP TSC0033104
aaacccgaatccc

SEQ ID NO: 132731 - DNA, 13 bp, Artificial Sequence
  Oligonucleotide for detection of SNP TSC0033104
aagtttggattty

SEQ ID NO: 132732 - DNA, 13 bp, Artificial Sequence
  Oligonucleotide for detection of SNP TSC0033104
raaatccaaactt

SEQ ID NO: 132733 - DNA, 13 bp, Artificial Sequence
  Oligonucleotide for detection of SNP TSC0033104
aagtttagattty

SEQ ID NO: 132734 - DNA, 13 bp, Artificial Sequence
  Oligonucleotide for detection of SNP TSC0033104
raaatctaaactt

SEQ ID NO: 132735 - DNA, 13 bp, Artificial Sequence
  Oligonucleotide for detection of SNP TSC0033104
aagttcggattty

SEQ ID NO: 132736 - DNA, 13 bp, Artificial Sequence
  Oligonucleotide for detection of SNP TSC0033104
raaatccgaactt

SEQ ID NO: 132737 - DNA, 13 bp, Artificial Sequence
  Oligonucleotide for detection of SNP TSC0033105
gttattattggty

SEQ ID NO: 132738 - DNA, 13 bp, Artificial Sequence
  Oligonucleotide for detection of SNP TSC0033105
raccaataataac

SEQ ID NO: 132739 - DNA, 13 bp, Artificial Sequence
  Oligonucleotide for detection of SNP TSC0033105
gttattgttggty

SEQ ID NO: 132740 - DNA, 13 bp, Artificial Sequence
  Oligonucleotide for detection of SNP TSC0033105
raccaacaataac

SEQ ID NO: 132741 - DNA, 13 bp, Artificial Sequence
  Oligonucleotide for detection of SNP TSC0033105
gttatcgttggty

SEQ ID NO: 132742 - DNA, 13 bp, Artificial Sequence
  Oligonucleotide for detection of SNP TSC0033105
raccaacgataac

SEQ ID NO: 132743 - DNA, 13 bp, Artificial Sequence
  Oligonucleotide for detection of SNP TSC0033105
ggttagtggtggy

SEQ ID NO: 132744 - DNA, 13 bp, Artificial Sequence
  Oligonucleotide for detection of SNP TSC0033105
rccaccactaacc

SEQ ID NO: 132745 - DNA, 13 bp, Artificial Sequence
  Oligonucleotide for detection of SNP TSC0033105
ggttagcggtggy

SEQ ID NO: 132746 - DNA, 13 bp, Artificial Sequence
  Oligonucleotide for detection of SNP TSC0033105
rccaccgctaacc

SEQ ID NO: 132747 - DNA, 13 bp, Artificial Sequence
  Oligonucleotide for detection of SNP TSC0033106
ttaatgaataaaa

SEQ ID NO: 132748 - DNA, 13 bp, Artificial Sequence
  Oligonucleotide for detection of SNP TSC0033106
ttttattcattaa

SEQ ID NO: 132749 - DNA, 13 bp, Artificial Sequence
  Oligonucleotide for detection of SNP TSC0033106
ttaatgtataaaa

SEQ ID NO: 132750 - DNA, 13 bp, Artificial Sequence
  Oligonucleotide for detection of SNP TSC0033106
ttttatacattaa

SEQ ID NO: 132751 - DNA, 13 bp, Artificial Sequence
  Oligonucleotide for detection of SNP TSC0033106
ttttatttattgg

SEQ ID NO: 132752 - DNA, 13 bp, Artificial Sequence
  Oligonucleotide for detection of SNP TSC0033106
ccaataaataaaa

SEQ ID NO: 132753 - DNA, 13 bp, Artificial Sequence
  Oligonucleotide for detection of SNP TSC0033106
ttttatgtattgg

SEQ ID NO: 132754 - DNA, 13 bp, Artificial Sequence
  Oligonucleotide for detection of SNP TSC0033106
ccaatacataaaa

SEQ ID NO: 132755 - DNA, 13 bp, Artificial Sequence
  Oligonucleotide for detection of SNP TSC0033107
ggtatttattttg

SEQ ID NO: 132756 - DNA, 13 bp, Artificial Sequence
  Oligonucleotide for detection of SNP TSC0033107
caaaataaatacc

SEQ ID NO: 132757 - DNA, 13 bp, Artificial Sequence
  Oligonucleotide for detection of SNP TSC0033107
ggtattgattttg

SEQ ID NO: 132758 - DNA, 13 bp, Artificial Sequence
  Oligonucleotide for detection of SNP TSC0033107
caaaatcaatacc

SEQ ID NO: 132759 - DNA, 13 bp, Artificial Sequence
  Oligonucleotide for detection of SNP TSC0033107
ggtatcgattttg

SEQ ID NO: 132760 - DNA, 13 bp, Artificial Sequence
  Oligonucleotide for detection of SNP TSC0033107
caaaatcgatacc

SEQ ID NO: 132761 - DNA, 13 bp, Artificial Sequence
  Oligonucleotide for detection of SNP TSC0033107
taagatggatgty

SEQ ID NO: 132762 - DNA, 13 bp, Artificial Sequence
  Oligonucleotide for detection of SNP TSC0033107
racatccatctta

SEQ ID NO: 132763 - DNA, 13 bp, Artificial Sequence
  Oligonucleotide for detection of SNP TSC0033107
taagattgatgty

SEQ ID NO: 132764 - DNA, 13 bp, Artificial Sequence
  Oligonucleotide for detection of SNP TSC0033107
racatcaatctta

SEQ ID NO: 132765 - DNA, 13 bp, Artificial Sequence
  Oligonucleotide for detection of SNP TSC0033107
taagatcgatgty

SEQ ID NO: 132766 - DNA, 13 bp, Artificial Sequence
  Oligonucleotide for detection of SNP TSC0033107
racatcgatctta

SEQ ID NO: 132767 - DNA, 13 bp, Artificial Sequence
  Oligonucleotide for detection of SNP TSC0033108
gagttttgtttty

SEQ ID NO: 132768 - DNA, 13 bp, Artificial Sequence
  Oligonucleotide for detection of SNP TSC0033108
raaaacaaaactc

SEQ ID NO: 132769 - DNA, 13 bp, Artificial Sequence
  Oligonucleotide for detection of SNP TSC0033108
gagtttcgtttty

SEQ ID NO: 132770 - DNA, 13 bp, Artificial Sequence
  Oligonucleotide for detection of SNP TSC0033108
raaaacgaaactc

SEQ ID NO: 132771 - DNA, 13 bp, Artificial Sequence
  Oligonucleotide for detection of SNP TSC0033108
ggaagtggggtty

SEQ ID NO: 132772 - DNA, 13 bp, Artificial Sequence
  Oligonucleotide for detection of SNP TSC0033108
raaccccacttcc

SEQ ID NO: 132773 - DNA, 13 bp, Artificial Sequence
  Oligonucleotide for detection of SNP TSC0033108
ggaagtagggtty

SEQ ID NO: 132774 - DNA, 13 bp, Artificial Sequence
  Oligonucleotide for detection of SNP TSC0033108
raaccctacttcc

SEQ ID NO: 132775 - DNA, 13 bp, Artificial Sequence
  Oligonucleotide for detection of SNP TSC0033108
ggaagcggggtty

SEQ ID NO: 132776 - DNA, 13 bp, Artificial Sequence
  Oligonucleotide for detection of SNP TSC0033108
raaccccgcttcc

SEQ ID NO: 132777 - DNA, 13 bp, Artificial Sequence
  Oligonucleotide for detection of SNP TSC0033109
ggttttaattttt

SEQ ID NO: 132778 - DNA, 13 bp, Artificial Sequence
  Oligonucleotide for detection of SNP TSC0033109
aaaaattaaaacc

SEQ ID NO: 132779 - DNA, 13 bp, Artificial Sequence
  Oligonucleotide for detection of SNP TSC0033109
ggttttgattttt

SEQ ID NO: 132780 - DNA, 13 bp, Artificial Sequence
  Oligonucleotide for detection of SNP TSC0033109
aaaaatcaaaacc

SEQ ID NO: 132781 - DNA, 13 bp, Artificial Sequence
  Oligonucleotide for detection of SNP TSC0033109
ggtttcgattttt

SEQ ID NO: 132782 - DNA, 13 bp, Artificial Sequence
  Oligonucleotide for detection of SNP TSC0033109
aaaaatcgaaacc

SEQ ID NO: 132783 - DNA, 13 bp, Artificial Sequence
  Oligonucleotide for detection of SNP TSC0033109
agagattgagaty

SEQ ID NO: 132784 - DNA, 13 bp, Artificial Sequence
  Oligonucleotide for detection of SNP TSC0033109
ratctcaatctct

SEQ ID NO: 132785 - DNA, 13 bp, Artificial Sequence
  Oligonucleotide for detection of SNP TSC0033109
agagatcgagaty

SEQ ID NO: 132786 - DNA, 13 bp, Artificial Sequence
  Oligonucleotide for detection of SNP TSC0033109
ratctcgatctct

SEQ ID NO: 132787 - DNA, 13 bp, Artificial Sequence
  Oligonucleotide for detection of SNP TSC0033112
tttagaggttatt

SEQ ID NO: 132788 - DNA, 13 bp, Artificial Sequence
  Oligonucleotide for detection of SNP TSC0033112
aataacctctaaa

SEQ ID NO: 132789 - DNA, 13 bp, Artificial Sequence
  Oligonucleotide for detection of SNP TSC0033112
tttagaagttatt

SEQ ID NO: 132790 - DNA, 13 bp, Artificial Sequence
  Oligonucleotide for detection of SNP TSC0033112
aataacttctaaa

SEQ ID NO: 132791 - DNA, 13 bp, Artificial Sequence
  Oligonucleotide for detection of SNP TSC0033116
aaggttgtttttg

SEQ ID NO: 132792 - DNA, 13 bp, Artificial Sequence
  Oligonucleotide for detection of SNP TSC0033116
caaaaacaacctt

SEQ ID NO: 132793 - DNA, 13 bp, Artificial Sequence
  Oligonucleotide for detection of SNP TSC0033116
aaggttttttttg

SEQ ID NO: 132794 - DNA, 13 bp, Artificial Sequence
  Oligonucleotide for detection of SNP TSC0033116
caaaaaaaacctt

SEQ ID NO: 132795 - DNA, 13 bp, Artificial Sequence
  Oligonucleotide for detection of SNP TSC0033116
tagagatagtttt

SEQ ID NO: 132796 - DNA, 13 bp, Artificial Sequence
  Oligonucleotide for detection of SNP TSC0033116
aaaactatctcta

SEQ ID NO: 132797 - DNA, 13 bp, Artificial Sequence
  Oligonucleotide for detection of SNP TSC0033116
tagagaaagtttt

SEQ ID NO: 132798 - DNA, 13 bp, Artificial Sequence
  Oligonucleotide for detection of SNP TSC0033116
aaaactttctcta

SEQ ID NO: 132799 - DNA, 13 bp, Artificial Sequence
  Oligonucleotide for detection of SNP TSC0033117
ttaatattttata

SEQ ID NO: 132800 - DNA, 13 bp, Artificial Sequence
  Oligonucleotide for detection of SNP TSC0033117
tataaaatattaa

SEQ ID NO: 132801 - DNA, 13 bp, Artificial Sequence
  Oligonucleotide for detection of SNP TSC0033117
ttaatagtttata

SEQ ID NO: 132802 - DNA, 13 bp, Artificial Sequence
  Oligonucleotide for detection of SNP TSC0033117
tataaactattaa

SEQ ID NO: 132803 - DNA, 13 bp, Artificial Sequence
  Oligonucleotide for detection of SNP TSC0033117
tataaagtgttaa

SEQ ID NO: 132804 - DNA, 13 bp, Artificial Sequence
  Oligonucleotide for detection of SNP TSC0033117
ttaacactttata

SEQ ID NO: 132805 - DNA, 13 bp, Artificial Sequence
  Oligonucleotide for detection of SNP TSC0033117
tataaattgttaa

SEQ ID NO: 132806 - DNA, 13 bp, Artificial Sequence
  Oligonucleotide for detection of SNP TSC0033117
ttaacaatttata

SEQ ID NO: 132807 - DNA, 13 bp, Artificial Sequence
  Oligonucleotide for detection of SNP TSC0033126
tagtaggaaggaa

SEQ ID NO: 132808 - DNA, 13 bp, Artificial Sequence
  Oligonucleotide for detection of SNP TSC0033126
ttccttcctacta

SEQ ID NO: 132809 - DNA, 13 bp, Artificial Sequence
  Oligonucleotide for detection of SNP TSC0033126
tagtagaaaggaa

SEQ ID NO: 132810 - DNA, 13 bp, Artificial Sequence
  Oligonucleotide for detection of SNP TSC0033126
ttcctttctacta

SEQ ID NO: 132811 - DNA, 13 bp, Artificial Sequence
  Oligonucleotide for detection of SNP TSC0033129
tttttaaaatttt

SEQ ID NO: 132812 - DNA, 13 bp, Artificial Sequence
  Oligonucleotide for detection of SNP TSC0033129
aaaattttaaaaa

SEQ ID NO: 132813 - DNA, 13 bp, Artificial Sequence
  Oligonucleotide for detection of SNP TSC0033130
agtagtagaatga

SEQ ID NO: 132814 - DNA, 13 bp, Artificial Sequence
  Oligonucleotide for detection of SNP TSC0033130
tcattctactact

SEQ ID NO: 132815 - DNA, 13 bp, Artificial Sequence
  Oligonucleotide for detection of SNP TSC0033130
agtagttgaatga

SEQ ID NO: 132816 - DNA, 13 bp, Artificial Sequence
  Oligonucleotide for detection of SNP TSC0033130
tcattcaactact

SEQ ID NO: 132817 - DNA, 13 bp, Artificial Sequence
  Oligonucleotide for detection of SNP TSC0033130
agtagtcgaatga

SEQ ID NO: 132818 - DNA, 13 bp, Artificial Sequence
  Oligonucleotide for detection of SNP TSC0033130
tcattcgactact

SEQ ID NO: 132819 - DNA, 13 bp, Artificial Sequence
  Oligonucleotide for detection of SNP TSC0033130
ttattttattgtt

SEQ ID NO: 132820 - DNA, 13 bp, Artificial Sequence
  Oligonucleotide for detection of SNP TSC0033130
aacaataaaataa

SEQ ID NO: 132821 - DNA, 13 bp, Artificial Sequence
  Oligonucleotide for detection of SNP TSC0033130
ttatttgattgtt

SEQ ID NO: 132822 - DNA, 13 bp, Artificial Sequence
  Oligonucleotide for detection of SNP TSC0033130
aacaatcaaataa

SEQ ID NO: 132823 - DNA, 13 bp, Artificial Sequence
  Oligonucleotide for detection of SNP TSC0033130
ttattcgattgtt

SEQ ID NO: 132824 - DNA, 13 bp, Artificial Sequence
  Oligonucleotide for detection of SNP TSC0033130
aacaatcgaataa

SEQ ID NO: 132825 - DNA, 13 bp, Artificial Sequence
  Oligonucleotide for detection of SNP TSC0033131
tgattaattttag

SEQ ID NO: 132826 - DNA, 13 bp, Artificial Sequence
  Oligonucleotide for detection of SNP TSC0033131
ctaaaattaatca

SEQ ID NO: 132827 - DNA, 13 bp, Artificial Sequence
  Oligonucleotide for detection of SNP TSC0033131
tgattagttttag

SEQ ID NO: 132828 - DNA, 13 bp, Artificial Sequence
  Oligonucleotide for detection of SNP TSC0033131
ctaaaactaatca

SEQ ID NO: 132829 - DNA, 13 bp, Artificial Sequence
  Oligonucleotide for detection of SNP TSC0033132
aatagagtgagta

SEQ ID NO: 132830 - DNA, 13 bp, Artificial Sequence
  Oligonucleotide for detection of SNP TSC0033132
tactcactctatt

SEQ ID NO: 132831 - DNA, 13 bp, Artificial Sequence
  Oligonucleotide for detection of SNP TSC0033132
aatagaatgagta

SEQ ID NO: 132832 - DNA, 13 bp, Artificial Sequence
  Oligonucleotide for detection of SNP TSC0033132
tactcattctatt

SEQ ID NO: 132833 - DNA, 13 bp, Artificial Sequence
  Oligonucleotide for detection of SNP TSC0033132
aatagagcgagta

SEQ ID NO: 132834 - DNA, 13 bp, Artificial Sequence
  Oligonucleotide for detection of SNP TSC0033132
tactcgctctatt

SEQ ID NO: 132835 - DNA, 13 bp, Artificial Sequence
  Oligonucleotide for detection of SNP TSC0033132
aatagaacgagta

SEQ ID NO: 132836 - DNA, 13 bp, Artificial Sequence
  Oligonucleotide for detection of SNP TSC0033132
tactcgttctatt

SEQ ID NO: 132837 - DNA, 13 bp, Artificial Sequence
  Oligonucleotide for detection of SNP TSC0033133
taggtaggtatgt

SEQ ID NO: 132838 - DNA, 13 bp, Artificial Sequence
  Oligonucleotide for detection of SNP TSC0033133
acatacctaccta

SEQ ID NO: 132839 - DNA, 13 bp, Artificial Sequence
  Oligonucleotide for detection of SNP TSC0033133
taggtaagtatgt

SEQ ID NO: 132840 - DNA, 13 bp, Artificial Sequence
  Oligonucleotide for detection of SNP TSC0033133
acatacttaccta

SEQ ID NO: 132841 - DNA, 13 bp, Artificial Sequence
  Oligonucleotide for detection of SNP TSC0033134
ggagggagatggg

SEQ ID NO: 132842 - DNA, 13 bp, Artificial Sequence
  Oligonucleotide for detection of SNP TSC0033134
cccatctccctcc

SEQ ID NO: 132843 - DNA, 13 bp, Artificial Sequence
  Oligonucleotide for detection of SNP TSC0033134
ggagggggatggg

SEQ ID NO: 132844 - DNA, 13 bp, Artificial Sequence
  Oligonucleotide for detection of SNP TSC0033134
cccatccccctcc

SEQ ID NO: 132845 - DNA, 13 bp, Artificial Sequence
  Oligonucleotide for detection of SNP TSC0033134
ggagggagacggg

SEQ ID NO: 132846 - DNA, 13 bp, Artificial Sequence
  Oligonucleotide for detection of SNP TSC0033134
cccgtctccctcc

SEQ ID NO: 132847 - DNA, 13 bp, Artificial Sequence
  Oligonucleotide for detection of SNP TSC0033134
ggagggggacggg

SEQ ID NO: 132848 - DNA, 13 bp, Artificial Sequence
  Oligonucleotide for detection of SNP TSC0033134
cccgtccccctcc

SEQ ID NO: 132849 - DNA, 13 bp, Artificial Sequence
  Oligonucleotide for detection of SNP TSC0033135
tgggaagtagaat

SEQ ID NO: 132850 - DNA, 13 bp, Artificial Sequence
  Oligonucleotide for detection of SNP TSC0033135
attctacttccca

SEQ ID NO: 132851 - DNA, 13 bp, Artificial Sequence
  Oligonucleotide for detection of SNP TSC0033135
tgggaattagaat

SEQ ID NO: 132852 - DNA, 13 bp, Artificial Sequence
  Oligonucleotide for detection of SNP TSC0033135
attctaattccca

SEQ ID NO: 132853 - DNA, 13 bp, Artificial Sequence
  Oligonucleotide for detection of SNP TSC0033136
agaatataggaay

SEQ ID NO: 132854 - DNA, 13 bp, Artificial Sequence
  Oligonucleotide for detection of SNP TSC0033136
rttcctatattct

SEQ ID NO: 132855 - DNA, 13 bp, Artificial Sequence
  Oligonucleotide for detection of SNP TSC0033136
agaatagaggaay

SEQ ID NO: 132856 - DNA, 13 bp, Artificial Sequence
  Oligonucleotide for detection of SNP TSC0033136
rttcctctattct

SEQ ID NO: 132857 - DNA, 13 bp, Artificial Sequence
  Oligonucleotide for detection of SNP TSC0033136
gtttttttgtttt

SEQ ID NO: 132858 - DNA, 13 bp, Artificial Sequence
  Oligonucleotide for detection of SNP TSC0033136
aaaacaaaaaaac

SEQ ID NO: 132859 - DNA, 13 bp, Artificial Sequence
  Oligonucleotide for detection of SNP TSC0033137
agaataagttttt

SEQ ID NO: 132860 - DNA, 13 bp, Artificial Sequence
  Oligonucleotide for detection of SNP TSC0033137
aaaaacttattct

SEQ ID NO: 132861 - DNA, 13 bp, Artificial Sequence
  Oligonucleotide for detection of SNP TSC0033137
agaatatgttttt

SEQ ID NO: 132862 - DNA, 13 bp, Artificial Sequence
  Oligonucleotide for detection of SNP TSC0033137
aaaaacatattct

SEQ ID NO: 132863 - DNA, 13 bp, Artificial Sequence
  Oligonucleotide for detection of SNP TSC0033137
aaaagtttatttt

SEQ ID NO: 132864 - DNA, 13 bp, Artificial Sequence
  Oligonucleotide for detection of SNP TSC0033137
aaaataaactttt

SEQ ID NO: 132865 - DNA, 13 bp, Artificial Sequence
  Oligonucleotide for detection of SNP TSC0033137
aaaagtatatttt

SEQ ID NO: 132866 - DNA, 13 bp, Artificial Sequence
  Oligonucleotide for detection of SNP TSC0033137
aaaatatactttt

SEQ ID NO: 132867 - DNA, 13 bp, Artificial Sequence
  Oligonucleotide for detection of SNP TSC0033138
gtttggagtgagt

SEQ ID NO: 132868 - DNA, 13 bp, Artificial Sequence
  Oligonucleotide for detection of SNP TSC0033138
actcactccaaac

SEQ ID NO: 132869 - DNA, 13 bp, Artificial Sequence
  Oligonucleotide for detection of SNP TSC0033138
gtttggtgtgagt

SEQ ID NO: 132870 - DNA, 13 bp, Artificial Sequence
  Oligonucleotide for detection of SNP TSC0033138
actcacaccaaac

SEQ ID NO: 132871 - DNA, 13 bp, Artificial Sequence
  Oligonucleotide for detection of SNP TSC0033138
gtttggcgtgagt

SEQ ID NO: 132872 - DNA, 13 bp, Artificial Sequence
  Oligonucleotide for detection of SNP TSC0033138
actcacgccaaac

SEQ ID NO: 132873 - DNA, 13 bp, Artificial Sequence
  Oligonucleotide for detection of SNP TSC0033138
atttattttaaay

SEQ ID NO: 132874 - DNA, 13 bp, Artificial Sequence
  Oligonucleotide for detection of SNP TSC0033138
rtttaaaataaat

SEQ ID NO: 132875 - DNA, 13 bp, Artificial Sequence
  Oligonucleotide for detection of SNP TSC0033138
atttatgttaaay

SEQ ID NO: 132876 - DNA, 13 bp, Artificial Sequence
  Oligonucleotide for detection of SNP TSC0033138
rtttaacataaat

SEQ ID NO: 132877 - DNA, 13 bp, Artificial Sequence
  Oligonucleotide for detection of SNP TSC0033138
atttacgttaaay

SEQ ID NO: 132878 - DNA, 13 bp, Artificial Sequence
  Oligonucleotide for detection of SNP TSC0033138
rtttaacgtaaat

SEQ ID NO: 132879 - DNA, 13 bp, Artificial Sequence
  Oligonucleotide for detection of SNP TSC0033140
atggttatagata

SEQ ID NO: 132880 - DNA, 13 bp, Artificial Sequence
  Oligonucleotide for detection of SNP TSC0033140
tatctataaccat

SEQ ID NO: 132881 - DNA, 13 bp, Artificial Sequence
  Oligonucleotide for detection of SNP TSC0033140
atggttgtagata

SEQ ID NO: 132882 - DNA, 13 bp, Artificial Sequence
  Oligonucleotide for detection of SNP TSC0033140
tatctacaaccat

SEQ ID NO: 132883 - DNA, 13 bp, Artificial Sequence
  Oligonucleotide for detection of SNP TSC0033140
atggtcgtagata

SEQ ID NO: 132884 - DNA, 13 bp, Artificial Sequence
  Oligonucleotide for detection of SNP TSC0033140
tatctacgaccat

SEQ ID NO: 132885 - DNA, 13 bp, Artificial Sequence
  Oligonucleotide for detection of SNP TSC0033140
tgtttatgattat

SEQ ID NO: 132886 - DNA, 13 bp, Artificial Sequence
  Oligonucleotide for detection of SNP TSC0033140
ataatcataaaca

SEQ ID NO: 132887 - DNA, 13 bp, Artificial Sequence
  Oligonucleotide for detection of SNP TSC0033140
tgtttacgattat

SEQ ID NO: 132888 - DNA, 13 bp, Artificial Sequence
  Oligonucleotide for detection of SNP TSC0033140
ataatcgtaaaca

SEQ ID NO: 132889 - DNA, 13 bp, Artificial Sequence
  Oligonucleotide for detection of SNP TSC0033141
gtatgagttaaga

SEQ ID NO: 132890 - DNA, 13 bp, Artificial Sequence
  Oligonucleotide for detection of SNP TSC0033141
tcttaactcatac

SEQ ID NO: 132891 - DNA, 13 bp, Artificial Sequence
  Oligonucleotide for detection of SNP TSC0033141
gtatgatttaaga

SEQ ID NO: 132892 - DNA, 13 bp, Artificial Sequence
  Oligonucleotide for detection of SNP TSC0033141
tcttaaatcatac

SEQ ID NO: 132893 - DNA, 13 bp, Artificial Sequence
  Oligonucleotide for detection of SNP TSC0033141
ttttaatttatay

SEQ ID NO: 132894 - DNA, 13 bp, Artificial Sequence
  Oligonucleotide for detection of SNP TSC0033141
rtataaattaaaa

SEQ ID NO: 132895 - DNA, 13 bp, Artificial Sequence
  Oligonucleotide for detection of SNP TSC0033142
ttagttaaaaaaa

SEQ ID NO: 132896 - DNA, 13 bp, Artificial Sequence
  Oligonucleotide for detection of SNP TSC0033142
tttttttaactaa

SEQ ID NO: 132897 - DNA, 13 bp, Artificial Sequence
  Oligonucleotide for detection of SNP TSC0033142
ttagtttaaaaaa

SEQ ID NO: 132898 - DNA, 13 bp, Artificial Sequence
  Oligonucleotide for detection of SNP TSC0033142
ttttttaaactaa

SEQ ID NO: 132899 - DNA, 13 bp, Artificial Sequence
  Oligonucleotide for detection of SNP TSC0033142
tttttttaattag

SEQ ID NO: 132900 - DNA, 13 bp, Artificial Sequence
  Oligonucleotide for detection of SNP TSC0033142
ctaattaaaaaaa

SEQ ID NO: 132901 - DNA, 13 bp, Artificial Sequence
  Oligonucleotide for detection of SNP TSC0033142
ttttttaaattag

SEQ ID NO: 132902 - DNA, 13 bp, Artificial Sequence
  Oligonucleotide for detection of SNP TSC0033142
ctaatttaaaaaa

SEQ ID NO: 132903 - DNA, 13 bp, Artificial Sequence
  Oligonucleotide for detection of SNP TSC0033155
ggttagtgattaa

SEQ ID NO: 132904 - DNA, 13 bp, Artificial Sequence
  Oligonucleotide for detection of SNP TSC0033155
ttaatcactaacc

SEQ ID NO: 132905 - DNA, 13 bp, Artificial Sequence
  Oligonucleotide for detection of SNP TSC0033155
ggttagcgattaa

SEQ ID NO: 132906 - DNA, 13 bp, Artificial Sequence
  Oligonucleotide for detection of SNP TSC0033155
ttaatcgctaacc

SEQ ID NO: 132907 - DNA, 13 bp, Artificial Sequence
  Oligonucleotide for detection of SNP TSC0033157
tttggtatgttty

SEQ ID NO: 132908 - DNA, 13 bp, Artificial Sequence
  Oligonucleotide for detection of SNP TSC0033157
raaacataccaaa

SEQ ID NO: 132909 - DNA, 13 bp, Artificial Sequence
  Oligonucleotide for detection of SNP TSC0033157
tttggtgtgttty

SEQ ID NO: 132910 - DNA, 13 bp, Artificial Sequence
  Oligonucleotide for detection of SNP TSC0033157
raaacacaccaaa

SEQ ID NO: 132911 - DNA, 13 bp, Artificial Sequence
  Oligonucleotide for detection of SNP TSC0033157
tttggcgtgttty

SEQ ID NO: 132912 - DNA, 13 bp, Artificial Sequence
  Oligonucleotide for detection of SNP TSC0033157
raaacacgccaaa

SEQ ID NO: 132913 - DNA, 13 bp, Artificial Sequence
  Oligonucleotide for detection of SNP TSC0033157
gaagtatgttaga

SEQ ID NO: 132914 - DNA, 13 bp, Artificial Sequence
  Oligonucleotide for detection of SNP TSC0033157
tctaacatacttc

SEQ ID NO: 132915 - DNA, 13 bp, Artificial Sequence
  Oligonucleotide for detection of SNP TSC0033157
gaagtacgttaga

SEQ ID NO: 132916 - DNA, 13 bp, Artificial Sequence
  Oligonucleotide for detection of SNP TSC0033157
tctaacgtacttc

SEQ ID NO: 132917 - DNA, 13 bp, Artificial Sequence
  Oligonucleotide for detection of SNP TSC0033164
atgagaggttaag

SEQ ID NO: 132918 - DNA, 13 bp, Artificial Sequence
  Oligonucleotide for detection of SNP TSC0033164
cttaacctctcat

SEQ ID NO: 132919 - DNA, 13 bp, Artificial Sequence
  Oligonucleotide for detection of SNP TSC0033164
atgagaagttaag

SEQ ID NO: 132920 - DNA, 13 bp, Artificial Sequence
  Oligonucleotide for detection of SNP TSC0033164
cttaacttctcat

SEQ ID NO: 132921 - DNA, 13 bp, Artificial Sequence
  Oligonucleotide for detection of SNP TSC0033166
ggggtgaggttat

SEQ ID NO: 132922 - DNA, 13 bp, Artificial Sequence
  Oligonucleotide for detection of SNP TSC0033166
ataacctcacccc

SEQ ID NO: 132923 - DNA, 13 bp, Artificial Sequence
  Oligonucleotide for detection of SNP TSC0033166
ggggtgtggttat

SEQ ID NO: 132924 - DNA, 13 bp, Artificial Sequence
  Oligonucleotide for detection of SNP TSC0033166
ataaccacacccc

SEQ ID NO: 132925 - DNA, 13 bp, Artificial Sequence
  Oligonucleotide for detection of SNP TSC0033166
ggggcgaggttat

SEQ ID NO: 132926 - DNA, 13 bp, Artificial Sequence
  Oligonucleotide for detection of SNP TSC0033166
ataacctcgcccc

SEQ ID NO: 132927 - DNA, 13 bp, Artificial Sequence
  Oligonucleotide for detection of SNP TSC0033166
ggggcgtggttat

SEQ ID NO: 132928 - DNA, 13 bp, Artificial Sequence
  Oligonucleotide for detection of SNP TSC0033166
ataaccacgcccc

SEQ ID NO: 132929 - DNA, 13 bp, Artificial Sequence
  Oligonucleotide for detection of SNP TSC0033166
atagttttgttty

SEQ ID NO: 132930 - DNA, 13 bp, Artificial Sequence
  Oligonucleotide for detection of SNP TSC0033166
raaacaaaactat

SEQ ID NO: 132931 - DNA, 13 bp, Artificial Sequence
  Oligonucleotide for detection of SNP TSC0033166
atagttatgttty

SEQ ID NO: 132932 - DNA, 13 bp, Artificial Sequence
  Oligonucleotide for detection of SNP TSC0033166
raaacataactat

SEQ ID NO: 132933 - DNA, 13 bp, Artificial Sequence
  Oligonucleotide for detection of SNP TSC0033166
atagtttcgttty

SEQ ID NO: 132934 - DNA, 13 bp, Artificial Sequence
  Oligonucleotide for detection of SNP TSC0033166
raaacgaaactat

SEQ ID NO: 132935 - DNA, 13 bp, Artificial Sequence
  Oligonucleotide for detection of SNP TSC0033166
atagttacgttty

SEQ ID NO: 132936 - DNA, 13 bp, Artificial Sequence
  Oligonucleotide for detection of SNP TSC0033166
raaacgtaactat

SEQ ID NO: 132937 - DNA, 13 bp, Artificial Sequence
  Oligonucleotide for detection of SNP TSC0033167
gttataattaggg

SEQ ID NO: 132938 - DNA, 13 bp, Artificial Sequence
  Oligonucleotide for detection of SNP TSC0033167
ccctaattataac

SEQ ID NO: 132939 - DNA, 13 bp, Artificial Sequence
  Oligonucleotide for detection of SNP TSC0033167
gttatatttaggg

SEQ ID NO: 132940 - DNA, 13 bp, Artificial Sequence
  Oligonucleotide for detection of SNP TSC0033167
ccctaaatataac

SEQ ID NO: 132941 - DNA, 13 bp, Artificial Sequence
  Oligonucleotide for detection of SNP TSC0033167
ttttaattatagy

SEQ ID NO: 132942 - DNA, 13 bp, Artificial Sequence
  Oligonucleotide for detection of SNP TSC0033167
rctataattaaaa

SEQ ID NO: 132943 - DNA, 13 bp, Artificial Sequence
  Oligonucleotide for detection of SNP TSC0033167
ttttaagtatagy

SEQ ID NO: 132944 - DNA, 13 bp, Artificial Sequence
  Oligonucleotide for detection of SNP TSC0033167
rctatacttaaaa

SEQ ID NO: 132945 - DNA, 13 bp, Artificial Sequence
  Oligonucleotide for detection of SNP TSC0033168
tttttttagggat

SEQ ID NO: 132946 - DNA, 13 bp, Artificial Sequence
  Oligonucleotide for detection of SNP TSC0033168
atccctaaaaaaa

SEQ ID NO: 132947 - DNA, 13 bp, Artificial Sequence
  Oligonucleotide for detection of SNP TSC0033168
ttttttgagggat

SEQ ID NO: 132948 - DNA, 13 bp, Artificial Sequence
  Oligonucleotide for detection of SNP TSC0033168
atccctcaaaaaa

SEQ ID NO: 132949 - DNA, 13 bp, Artificial Sequence
  Oligonucleotide for detection of SNP TSC0033169
tagtgttagatty

SEQ ID NO: 132950 - DNA, 13 bp, Artificial Sequence
  Oligonucleotide for detection of SNP TSC0033169
raatctaacacta

SEQ ID NO: 132951 - DNA, 13 bp, Artificial Sequence
  Oligonucleotide for detection of SNP TSC0033169
tagtgtgagatty

SEQ ID NO: 132952 - DNA, 13 bp, Artificial Sequence
  Oligonucleotide for detection of SNP TSC0033169
raatctcacacta

SEQ ID NO: 132953 - DNA, 13 bp, Artificial Sequence
  Oligonucleotide for detection of SNP TSC0033169
gggtttgatattg

SEQ ID NO: 132954 - DNA, 13 bp, Artificial Sequence
  Oligonucleotide for detection of SNP TSC0033169
caatatcaaaccc

SEQ ID NO: 132955 - DNA, 13 bp, Artificial Sequence
  Oligonucleotide for detection of SNP TSC0033169
gggttttatattg

SEQ ID NO: 132956 - DNA, 13 bp, Artificial Sequence
  Oligonucleotide for detection of SNP TSC0033169
caatataaaaccc

SEQ ID NO: 132957 - DNA, 13 bp, Artificial Sequence
  Oligonucleotide for detection of SNP TSC0033172
ttatttatttgag

SEQ ID NO: 132958 - DNA, 13 bp, Artificial Sequence
  Oligonucleotide for detection of SNP TSC0033172
ctcaaataaataa

SEQ ID NO: 132959 - DNA, 13 bp, Artificial Sequence
  Oligonucleotide for detection of SNP TSC0033172
ttatttgtttgag

SEQ ID NO: 132960 - DNA, 13 bp, Artificial Sequence
  Oligonucleotide for detection of SNP TSC0033172
ctcaaacaaataa

SEQ ID NO: 132961 - DNA, 13 bp, Artificial Sequence
  Oligonucleotide for detection of SNP TSC0033173
tgatgtggatgtg

SEQ ID NO: 132962 - DNA, 13 bp, Artificial Sequence
  Oligonucleotide for detection of SNP TSC0033173
cacatccacatca

SEQ ID NO: 132963 - DNA, 13 bp, Artificial Sequence
  Oligonucleotide for detection of SNP TSC0033173
tgatgtagatgtg

SEQ ID NO: 132964 - DNA, 13 bp, Artificial Sequence
  Oligonucleotide for detection of SNP TSC0033173
cacatctacatca

SEQ ID NO: 132965 - DNA, 13 bp, Artificial Sequence
  Oligonucleotide for detection of SNP TSC0033174
gttatagaggaag

SEQ ID NO: 132966 - DNA, 13 bp, Artificial Sequence
  Oligonucleotide for detection of SNP TSC0033174
cttcctctataac

SEQ ID NO: 132967 - DNA, 13 bp, Artificial Sequence
  Oligonucleotide for detection of SNP TSC0033174
gttatataggaag

SEQ ID NO: 132968 - DNA, 13 bp, Artificial Sequence
  Oligonucleotide for detection of SNP TSC0033174
cttcctatataac

SEQ ID NO: 132969 - DNA, 13 bp, Artificial Sequence
  Oligonucleotide for detection of SNP TSC0033174
ttttttttgtggy

SEQ ID NO: 132970 - DNA, 13 bp, Artificial Sequence
  Oligonucleotide for detection of SNP TSC0033174
rccacaaaaaaaa

SEQ ID NO: 132971 - DNA, 13 bp, Artificial Sequence
  Oligonucleotide for detection of SNP TSC0033174
ttttttatgtggy

SEQ ID NO: 132972 - DNA, 13 bp, Artificial Sequence
  Oligonucleotide for detection of SNP TSC0033174
rccacataaaaaa

SEQ ID NO: 132973 - DNA, 13 bp, Artificial Sequence
  Oligonucleotide for detection of SNP TSC0033175
tgaagattgagaa

SEQ ID NO: 132974 - DNA, 13 bp, Artificial Sequence
  Oligonucleotide for detection of SNP TSC0033175
ttctcaatcttca

SEQ ID NO: 132975 - DNA, 13 bp, Artificial Sequence
  Oligonucleotide for detection of SNP TSC0033175
tgaagagtgagaa

SEQ ID NO: 132976 - DNA, 13 bp, Artificial Sequence
  Oligonucleotide for detection of SNP TSC0033175
ttctcactcttca

SEQ ID NO: 132977 - DNA, 13 bp, Artificial Sequence
  Oligonucleotide for detection of SNP TSC0033176
gtggggaaaggag

SEQ ID NO: 132978 - DNA, 13 bp, Artificial Sequence
  Oligonucleotide for detection of SNP TSC0033176
ctcctttccccac

SEQ ID NO: 132979 - DNA, 13 bp, Artificial Sequence
  Oligonucleotide for detection of SNP TSC0033176
gtgggggaaggag

SEQ ID NO: 132980 - DNA, 13 bp, Artificial Sequence
  Oligonucleotide for detection of SNP TSC0033176
ctccttcccccac

SEQ ID NO: 132981 - DNA, 13 bp, Artificial Sequence
  Oligonucleotide for detection of SNP TSC0033177
ggtggaattgaga

SEQ ID NO: 132982 - DNA, 13 bp, Artificial Sequence
  Oligonucleotide for detection of SNP TSC0033177
tctcaattccacc

SEQ ID NO: 132983 - DNA, 13 bp, Artificial Sequence
  Oligonucleotide for detection of SNP TSC0033177
ggtggagttgaga

SEQ ID NO: 132984 - DNA, 13 bp, Artificial Sequence
  Oligonucleotide for detection of SNP TSC0033177
tctcaactccacc

SEQ ID NO: 132985 - DNA, 13 bp, Artificial Sequence
  Oligonucleotide for detection of SNP TSC0033178
gtggaattgagag

SEQ ID NO: 132986 - DNA, 13 bp, Artificial Sequence
  Oligonucleotide for detection of SNP TSC0033178
ctctcaattccac

SEQ ID NO: 132987 - DNA, 13 bp, Artificial Sequence
  Oligonucleotide for detection of SNP TSC0033178
gtggaagtgagag

SEQ ID NO: 132988 - DNA, 13 bp, Artificial Sequence
  Oligonucleotide for detection of SNP TSC0033178
ctctcacttccac

SEQ ID NO: 132989 - DNA, 13 bp, Artificial Sequence
  Oligonucleotide for detection of SNP TSC0033179
ttaataggaataa

SEQ ID NO: 132990 - DNA, 13 bp, Artificial Sequence
  Oligonucleotide for detection of SNP TSC0033179
ttattcctattaa

SEQ ID NO: 132991 - DNA, 13 bp, Artificial Sequence
  Oligonucleotide for detection of SNP TSC0033179
ttaatatgaataa

SEQ ID NO: 132992 - DNA, 13 bp, Artificial Sequence
  Oligonucleotide for detection of SNP TSC0033179
ttattcatattaa

SEQ ID NO: 132993 - DNA, 13 bp, Artificial Sequence
  Oligonucleotide for detection of SNP TSC0033181
atattaatagggy

SEQ ID NO: 132994 - DNA, 13 bp, Artificial Sequence
  Oligonucleotide for detection of SNP TSC0033181
rccctattaatat

SEQ ID NO: 132995 - DNA, 13 bp, Artificial Sequence
  Oligonucleotide for detection of SNP TSC0033181
atattagtagggy

SEQ ID NO: 132996 - DNA, 13 bp, Artificial Sequence
  Oligonucleotide for detection of SNP TSC0033181
rccctactaatat

SEQ ID NO: 132997 - DNA, 13 bp, Artificial Sequence
  Oligonucleotide for detection of SNP TSC0033182
tgaatatgaggga

SEQ ID NO: 132998 - DNA, 13 bp, Artificial Sequence
  Oligonucleotide for detection of SNP TSC0033182
tccctcatattca

SEQ ID NO: 132999 - DNA, 13 bp, Artificial Sequence
  Oligonucleotide for detection of SNP TSC0033182
tgaataggaggga

SEQ ID NO: 133000 - DNA, 13 bp, Artificial Sequence
  Oligonucleotide for detection of SNP TSC0033182
tccctcctattca

SEQ ID NO: 133001 - DNA, 13 bp, Artificial Sequence
  Oligonucleotide for detection of SNP TSC0033182
tgaatacgaggga

SEQ ID NO: 133002 - DNA, 13 bp, Artificial Sequence
  Oligonucleotide for detection of SNP TSC0033182
tccctcgtattca

SEQ ID NO: 133003 - DNA, 13 bp, Artificial Sequence
  Oligonucleotide for detection of SNP TSC0033182
ttttttgtattta

SEQ ID NO: 133004 - DNA, 13 bp, Artificial Sequence
  Oligonucleotide for detection of SNP TSC0033182
taaatacaaaaaa

SEQ ID NO: 133005 - DNA, 13 bp, Artificial Sequence
  Oligonucleotide for detection of SNP TSC0033182
ttttttttattta

SEQ ID NO: 133006 - DNA, 13 bp, Artificial Sequence
  Oligonucleotide for detection of SNP TSC0033182
taaataaaaaaaa

SEQ ID NO: 133007 - DNA, 13 bp, Artificial Sequence
  Oligonucleotide for detection of SNP TSC0033182
tttttcgtattta

SEQ ID NO: 133008 - DNA, 13 bp, Artificial Sequence
  Oligonucleotide for detection of SNP TSC0033182
taaatacgaaaaa

SEQ ID NO: 133009 - DNA, 13 bp, Artificial Sequence
  Oligonucleotide for detection of SNP TSC0033183
gttttatttataa

SEQ ID NO: 133010 - DNA, 13 bp, Artificial Sequence
  Oligonucleotide for detection of SNP TSC0033183
ttataaataaaac

SEQ ID NO: 133011 - DNA, 13 bp, Artificial Sequence
  Oligonucleotide for detection of SNP TSC0033183
gttttagttataa

SEQ ID NO: 133012 - DNA, 13 bp, Artificial Sequence
  Oligonucleotide for detection of SNP TSC0033183
ttataactaaaac

SEQ ID NO: 133013 - DNA, 13 bp, Artificial Sequence
  Oligonucleotide for detection of SNP TSC0033183
ttgtaggtagggy

SEQ ID NO: 133014 - DNA, 13 bp, Artificial Sequence
  Oligonucleotide for detection of SNP TSC0033183
rccctacctacaa

SEQ ID NO: 133015 - DNA, 13 bp, Artificial Sequence
  Oligonucleotide for detection of SNP TSC0033183
ttgtagttagggy

SEQ ID NO: 133016 - DNA, 13 bp, Artificial Sequence
  Oligonucleotide for detection of SNP TSC0033183
rccctaactacaa

SEQ ID NO: 133017 - DNA, 13 bp, Artificial Sequence
  Oligonucleotide for detection of SNP TSC0033184
tagaattgtttay

SEQ ID NO: 133018 - DNA, 13 bp, Artificial Sequence
  Oligonucleotide for detection of SNP TSC0033184
rtaaacaattcta

SEQ ID NO: 133019 - DNA, 13 bp, Artificial Sequence
  Oligonucleotide for detection of SNP TSC0033184
tagaatcgtttay

SEQ ID NO: 133020 - DNA, 13 bp, Artificial Sequence
  Oligonucleotide for detection of SNP TSC0033184
rtaaacgattcta

SEQ ID NO: 133021 - DNA, 13 bp, Artificial Sequence
  Oligonucleotide for detection of SNP TSC0033184
gtaaatggttttg

SEQ ID NO: 133022 - DNA, 13 bp, Artificial Sequence
  Oligonucleotide for detection of SNP TSC0033184
caaaaccatttac

SEQ ID NO: 133023 - DNA, 13 bp, Artificial Sequence
  Oligonucleotide for detection of SNP TSC0033184
gtaaatagttttg

SEQ ID NO: 133024 - DNA, 13 bp, Artificial Sequence
  Oligonucleotide for detection of SNP TSC0033184
caaaactatttac

SEQ ID NO: 133025 - DNA, 13 bp, Artificial Sequence
  Oligonucleotide for detection of SNP TSC0033184
gtaaacggttttg

SEQ ID NO: 133026 - DNA, 13 bp, Artificial Sequence
  Oligonucleotide for detection of SNP TSC0033184
caaaaccgtttac

SEQ ID NO: 133027 - DNA, 13 bp, Artificial Sequence
  Oligonucleotide for detection of SNP TSC0033187
ttaaaggtaggat

SEQ ID NO: 133028 - DNA, 13 bp, Artificial Sequence
  Oligonucleotide for detection of SNP TSC0033187
atcctacctttaa

SEQ ID NO: 133029 - DNA, 13 bp, Artificial Sequence
  Oligonucleotide for detection of SNP TSC0033187
ttaaagttaggat

SEQ ID NO: 133030 - DNA, 13 bp, Artificial Sequence
  Oligonucleotide for detection of SNP TSC0033187
atcctaactttaa

SEQ ID NO: 133031 - DNA, 13 bp, Artificial Sequence
  Oligonucleotide for detection of SNP TSC0033187
attttatttttaa

SEQ ID NO: 133032 - DNA, 13 bp, Artificial Sequence
  Oligonucleotide for detection of SNP TSC0033187
ttaaaaataaaat

SEQ ID NO: 133033 - DNA, 13 bp, Artificial Sequence
  Oligonucleotide for detection of SNP TSC0033187
attttaattttaa

SEQ ID NO: 133034 - DNA, 13 bp, Artificial Sequence
  Oligonucleotide for detection of SNP TSC0033187
ttaaaattaaaat

SEQ ID NO: 133035 - DNA, 13 bp, Artificial Sequence
  Oligonucleotide for detection of SNP TSC0033190
ttttgtgtgtaaa

SEQ ID NO: 133036 - DNA, 13 bp, Artificial Sequence
  Oligonucleotide for detection of SNP TSC0033190
tttacacacaaaa

SEQ ID NO: 133037 - DNA, 13 bp, Artificial Sequence
  Oligonucleotide for detection of SNP TSC0033190
ttttgtatgtaaa

SEQ ID NO: 133038 - DNA, 13 bp, Artificial Sequence
  Oligonucleotide for detection of SNP TSC0033190
tttacatacaaaa

SEQ ID NO: 133039 - DNA, 13 bp, Artificial Sequence
  Oligonucleotide for detection of SNP TSC0033191
ggtaggatatgtg

SEQ ID NO: 133040 - DNA, 13 bp, Artificial Sequence
  Oligonucleotide for detection of SNP TSC0033191
cacatatcctacc

SEQ ID NO: 133041 - DNA, 13 bp, Artificial Sequence
  Oligonucleotide for detection of SNP TSC0033191
ggtagggtatgtg

SEQ ID NO: 133042 - DNA, 13 bp, Artificial Sequence
  Oligonucleotide for detection of SNP TSC0033191
cacataccctacc

SEQ ID NO: 133043 - DNA, 13 bp, Artificial Sequence
  Oligonucleotide for detection of SNP TSC0033196
atgagtagtatta

SEQ ID NO: 133044 - DNA, 13 bp, Artificial Sequence
  Oligonucleotide for detection of SNP TSC0033196
taatactactcat

SEQ ID NO: 133045 - DNA, 13 bp, Artificial Sequence
  Oligonucleotide for detection of SNP TSC0033196
atgagtggtatta

SEQ ID NO: 133046 - DNA, 13 bp, Artificial Sequence
  Oligonucleotide for detection of SNP TSC0033196
taataccactcat

SEQ ID NO: 133047 - DNA, 13 bp, Artificial Sequence
  Oligonucleotide for detection of SNP TSC0033200
tagttattggaaa

SEQ ID NO: 133048 - DNA, 13 bp, Artificial Sequence
  Oligonucleotide for detection of SNP TSC0033200
tttccaataacta

SEQ ID NO: 133049 - DNA, 13 bp, Artificial Sequence
  Oligonucleotide for detection of SNP TSC0033200
tagttagtggaaa

SEQ ID NO: 133050 - DNA, 13 bp, Artificial Sequence
  Oligonucleotide for detection of SNP TSC0033200
tttccactaacta

SEQ ID NO: 133051 - DNA, 13 bp, Artificial Sequence
  Oligonucleotide for detection of SNP TSC0033200
tttttattagttg

SEQ ID NO: 133052 - DNA, 13 bp, Artificial Sequence
  Oligonucleotide for detection of SNP TSC0033200
caactaataaaaa

SEQ ID NO: 133053 - DNA, 13 bp, Artificial Sequence
  Oligonucleotide for detection of SNP TSC0033201
aaattttggattt

SEQ ID NO: 133054 - DNA, 13 bp, Artificial Sequence
  Oligonucleotide for detection of SNP TSC0033201
aaatccaaaattt

SEQ ID NO: 133055 - DNA, 13 bp, Artificial Sequence
  Oligonucleotide for detection of SNP TSC0033201
aaatttcggattt

SEQ ID NO: 133056 - DNA, 13 bp, Artificial Sequence
  Oligonucleotide for detection of SNP TSC0033201
aaatccgaaattt

SEQ ID NO: 133057 - DNA, 13 bp, Artificial Sequence
  Oligonucleotide for detection of SNP TSC0033201
aagtttgaggttt

SEQ ID NO: 133058 - DNA, 13 bp, Artificial Sequence
  Oligonucleotide for detection of SNP TSC0033201
aaacctcaaactt

SEQ ID NO: 133059 - DNA, 13 bp, Artificial Sequence
  Oligonucleotide for detection of SNP TSC0033201
aagtttaaggttt

SEQ ID NO: 133060 - DNA, 13 bp, Artificial Sequence
  Oligonucleotide for detection of SNP TSC0033201
aaaccttaaactt

SEQ ID NO: 133061 - DNA, 13 bp, Artificial Sequence
  Oligonucleotide for detection of SNP TSC0033201
aagttcgaggttt

SEQ ID NO: 133062 - DNA, 13 bp, Artificial Sequence
  Oligonucleotide for detection of SNP TSC0033201
aaacctcgaactt

SEQ ID NO: 133063 - DNA, 13 bp, Artificial Sequence
  Oligonucleotide for detection of SNP TSC0033204
ttgggagttttgt

SEQ ID NO: 133064 - DNA, 13 bp, Artificial Sequence
  Oligonucleotide for detection of SNP TSC0033204
acaaaactcccaa

SEQ ID NO: 133065 - DNA, 13 bp, Artificial Sequence
  Oligonucleotide for detection of SNP TSC0033204
ttgggaattttgt

SEQ ID NO: 133066 - DNA, 13 bp, Artificial Sequence
  Oligonucleotide for detection of SNP TSC0033204
acaaaattcccaa

SEQ ID NO: 133067 - DNA, 13 bp, Artificial Sequence
  Oligonucleotide for detection of SNP TSC0033204
tcgggagttttgt

SEQ ID NO: 133068 - DNA, 13 bp, Artificial Sequence
  Oligonucleotide for detection of SNP TSC0033204
acaaaactcccga

SEQ ID NO: 133069 - DNA, 13 bp, Artificial Sequence
  Oligonucleotide for detection of SNP TSC0033204
tcgggaattttgt

SEQ ID NO: 133070 - DNA, 13 bp, Artificial Sequence
  Oligonucleotide for detection of SNP TSC0033204
acaaaattcccga

SEQ ID NO: 133071 - DNA, 13 bp, Artificial Sequence
  Oligonucleotide for detection of SNP TSC0033205
taataggaattat

SEQ ID NO: 133072 - DNA, 13 bp, Artificial Sequence
  Oligonucleotide for detection of SNP TSC0033205
ataattcctatta

SEQ ID NO: 133073 - DNA, 13 bp, Artificial Sequence
  Oligonucleotide for detection of SNP TSC0033205
taatagtaattat

SEQ ID NO: 133074 - DNA, 13 bp, Artificial Sequence
  Oligonucleotide for detection of SNP TSC0033205
ataattactatta

SEQ ID NO: 133075 - DNA, 13 bp, Artificial Sequence
  Oligonucleotide for detection of SNP TSC0033205
atggtttttgttg

SEQ ID NO: 133076 - DNA, 13 bp, Artificial Sequence
  Oligonucleotide for detection of SNP TSC0033205
caacaaaaaccat

SEQ ID NO: 133077 - DNA, 13 bp, Artificial Sequence
  Oligonucleotide for detection of SNP TSC0033205
atggttattgttg

SEQ ID NO: 133078 - DNA, 13 bp, Artificial Sequence
  Oligonucleotide for detection of SNP TSC0033205
caacaataaccat

SEQ ID NO: 133079 - DNA, 13 bp, Artificial Sequence
  Oligonucleotide for detection of SNP TSC0033206
ttgtttggagttt

SEQ ID NO: 133080 - DNA, 13 bp, Artificial Sequence
  Oligonucleotide for detection of SNP TSC0033206
aaactccaaacaa

SEQ ID NO: 133081 - DNA, 13 bp, Artificial Sequence
  Oligonucleotide for detection of SNP TSC0033206
ttgtttagagttt

SEQ ID NO: 133082 - DNA, 13 bp, Artificial Sequence
  Oligonucleotide for detection of SNP TSC0033206
aaactctaaacaa

SEQ ID NO: 133083 - DNA, 13 bp, Artificial Sequence
  Oligonucleotide for detection of SNP TSC0033207
ggttttaagtagy

SEQ ID NO: 133084 - DNA, 13 bp, Artificial Sequence
  Oligonucleotide for detection of SNP TSC0033207
rctacttaaaacc

SEQ ID NO: 133085 - DNA, 13 bp, Artificial Sequence
  Oligonucleotide for detection of SNP TSC0033207
ggttttgagtagy

SEQ ID NO: 133086 - DNA, 13 bp, Artificial Sequence
  Oligonucleotide for detection of SNP TSC0033207
rctactcaaaacc

SEQ ID NO: 133087 - DNA, 13 bp, Artificial Sequence
  Oligonucleotide for detection of SNP TSC0033207
ggtttcgagtagy

SEQ ID NO: 133088 - DNA, 13 bp, Artificial Sequence
  Oligonucleotide for detection of SNP TSC0033207
rctactcgaaacc

SEQ ID NO: 133089 - DNA, 13 bp, Artificial Sequence
  Oligonucleotide for detection of SNP TSC0033207
gttgtttggagty

SEQ ID NO: 133090 - DNA, 13 bp, Artificial Sequence
  Oligonucleotide for detection of SNP TSC0033207
ractccaaacaac

SEQ ID NO: 133091 - DNA, 13 bp, Artificial Sequence
  Oligonucleotide for detection of SNP TSC0033207
gttgttcggagty

SEQ ID NO: 133092 - DNA, 13 bp, Artificial Sequence
  Oligonucleotide for detection of SNP TSC0033207
ractccgaacaac

SEQ ID NO: 133093 - DNA, 13 bp, Artificial Sequence
  Oligonucleotide for detection of SNP TSC0033208
tgttttgtttggy

SEQ ID NO: 133094 - DNA, 13 bp, Artificial Sequence
  Oligonucleotide for detection of SNP TSC0033208
rccaaacaaaaca

SEQ ID NO: 133095 - DNA, 13 bp, Artificial Sequence
  Oligonucleotide for detection of SNP TSC0033208
tgttttttttggy

SEQ ID NO: 133096 - DNA, 13 bp, Artificial Sequence
  Oligonucleotide for detection of SNP TSC0033208
rccaaaaaaaaca

SEQ ID NO: 133097 - DNA, 13 bp, Artificial Sequence
  Oligonucleotide for detection of SNP TSC0033208
cgttttgtttggy

SEQ ID NO: 133098 - DNA, 13 bp, Artificial Sequence
  Oligonucleotide for detection of SNP TSC0033208
rccaaacaaaacg

SEQ ID NO: 133099 - DNA, 13 bp, Artificial Sequence
  Oligonucleotide for detection of SNP TSC0033208
cgttttttttggy

SEQ ID NO: 133100 - DNA, 13 bp, Artificial Sequence
  Oligonucleotide for detection of SNP TSC0033208
rccaaaaaaaacg

SEQ ID NO: 133101 - DNA, 13 bp, Artificial Sequence
  Oligonucleotide for detection of SNP TSC0033208
gttaggtagggtg

SEQ ID NO: 133102 - DNA, 13 bp, Artificial Sequence
  Oligonucleotide for detection of SNP TSC0033208
caccctacctaac

SEQ ID NO: 133103 - DNA, 13 bp, Artificial Sequence
  Oligonucleotide for detection of SNP TSC0033208
gttaggaagggtg

SEQ ID NO: 133104 - DNA, 13 bp, Artificial Sequence
  Oligonucleotide for detection of SNP TSC0033208
cacccttcctaac

SEQ ID NO: 133105 - DNA, 13 bp, Artificial Sequence
  Oligonucleotide for detection of SNP TSC0033208
gttaggtagggcg

SEQ ID NO: 133106 - DNA, 13 bp, Artificial Sequence
  Oligonucleotide for detection of SNP TSC0033208
cgccctacctaac

SEQ ID NO: 133107 - DNA, 13 bp, Artificial Sequence
  Oligonucleotide for detection of SNP TSC0033208
gttaggaagggcg

SEQ ID NO: 133108 - DNA, 13 bp, Artificial Sequence
  Oligonucleotide for detection of SNP TSC0033208
cgcccttcctaac

SEQ ID NO: 133109 - DNA, 13 bp, Artificial Sequence
  Oligonucleotide for detection of SNP TSC0033211
gagttaattttag

SEQ ID NO: 133110 - DNA, 13 bp, Artificial Sequence
  Oligonucleotide for detection of SNP TSC0033211
ctaaaattaactc

SEQ ID NO: 133111 - DNA, 13 bp, Artificial Sequence
  Oligonucleotide for detection of SNP TSC0033211
gagttagttttag

SEQ ID NO: 133112 - DNA, 13 bp, Artificial Sequence
  Oligonucleotide for detection of SNP TSC0033211
ctaaaactaactc

SEQ ID NO: 133113 - DNA, 13 bp, Artificial Sequence
  Oligonucleotide for detection of SNP TSC0033214
ttttgtgttagta

SEQ ID NO: 133114 - DNA, 13 bp, Artificial Sequence
  Oligonucleotide for detection of SNP TSC0033214
tactaacacaaaa

SEQ ID NO: 133115 - DNA, 13 bp, Artificial Sequence
  Oligonucleotide for detection of SNP TSC0033214
ttttgtattagta

SEQ ID NO: 133116 - DNA, 13 bp, Artificial Sequence
  Oligonucleotide for detection of SNP TSC0033214
tactaatacaaaa

SEQ ID NO: 133117 - DNA, 13 bp, Artificial Sequence
  Oligonucleotide for detection of SNP TSC0033215
tagaatataggty

SEQ ID NO: 133118 - DNA, 13 bp, Artificial Sequence
  Oligonucleotide for detection of SNP TSC0033215
racctatattcta

SEQ ID NO: 133119 - DNA, 13 bp, Artificial Sequence
  Oligonucleotide for detection of SNP TSC0033216
tttaaaaaaaagy

SEQ ID NO: 133120 - DNA, 13 bp, Artificial Sequence
  Oligonucleotide for detection of SNP TSC0033216
rcttttttttaaa

SEQ ID NO: 133121 - DNA, 13 bp, Artificial Sequence
  Oligonucleotide for detection of SNP TSC0033216
tttaaataaaagy

SEQ ID NO: 133122 - DNA, 13 bp, Artificial Sequence
  Oligonucleotide for detection of SNP TSC0033216
rcttttatttaaa

SEQ ID NO: 133123 - DNA, 13 bp, Artificial Sequence
  Oligonucleotide for detection of SNP TSC0033216
gtttttttttaag

SEQ ID NO: 133124 - DNA, 13 bp, Artificial Sequence
  Oligonucleotide for detection of SNP TSC0033216
cttaaaaaaaaac

SEQ ID NO: 133125 - DNA, 13 bp, Artificial Sequence
  Oligonucleotide for detection of SNP TSC0033216
gtttttatttaag

SEQ ID NO: 133126 - DNA, 13 bp, Artificial Sequence
  Oligonucleotide for detection of SNP TSC0033216
cttaaataaaaac

SEQ ID NO: 133127 - DNA, 13 bp, Artificial Sequence
  Oligonucleotide for detection of SNP TSC0033218
ttgtattattttt

SEQ ID NO: 133128 - DNA, 13 bp, Artificial Sequence
  Oligonucleotide for detection of SNP TSC0033218
aaaaataatacaa

SEQ ID NO: 133129 - DNA, 13 bp, Artificial Sequence
  Oligonucleotide for detection of SNP TSC0033218
ttgtacgattttt

SEQ ID NO: 133130 - DNA, 13 bp, Artificial Sequence
  Oligonucleotide for detection of SNP TSC0033218
aaaaatcgtacaa

SEQ ID NO: 133131 - DNA, 13 bp, Artificial Sequence
  Oligonucleotide for detection of SNP TSC0033218
aaaaattgtatag

SEQ ID NO: 133132 - DNA, 13 bp, Artificial Sequence
  Oligonucleotide for detection of SNP TSC0033218
ctatacaattttt

SEQ ID NO: 133133 - DNA, 13 bp, Artificial Sequence
  Oligonucleotide for detection of SNP TSC0033218
aaaaatagtatag

SEQ ID NO: 133134 - DNA, 13 bp, Artificial Sequence
  Oligonucleotide for detection of SNP TSC0033218
ctatactattttt

SEQ ID NO: 133135 - DNA, 13 bp, Artificial Sequence
  Oligonucleotide for detection of SNP TSC0033218
aaaaatcgtatag

SEQ ID NO: 133136 - DNA, 13 bp, Artificial Sequence
  Oligonucleotide for detection of SNP TSC0033218
ctatacgattttt

SEQ ID NO: 133137 - DNA, 13 bp, Artificial Sequence
  Oligonucleotide for detection of SNP TSC0033221
taagaagtattag

SEQ ID NO: 133138 - DNA, 13 bp, Artificial Sequence
  Oligonucleotide for detection of SNP TSC0033221
ctaatacttctta

SEQ ID NO: 133139 - DNA, 13 bp, Artificial Sequence
  Oligonucleotide for detection of SNP TSC0033221
taagaaatattag

SEQ ID NO: 133140 - DNA, 13 bp, Artificial Sequence
  Oligonucleotide for detection of SNP TSC0033221
ctaatatttctta

SEQ ID NO: 133141 - DNA, 13 bp, Artificial Sequence
  Oligonucleotide for detection of SNP TSC0033222
tgtttatttttgy

SEQ ID NO: 133142 - DNA, 13 bp, Artificial Sequence
  Oligonucleotide for detection of SNP TSC0033222
rcaaaaataaaca

SEQ ID NO: 133143 - DNA, 13 bp, Artificial Sequence
  Oligonucleotide for detection of SNP TSC0033222
tgtttagttttgy

SEQ ID NO: 133144 - DNA, 13 bp, Artificial Sequence
  Oligonucleotide for detection of SNP TSC0033222
rcaaaactaaaca

SEQ ID NO: 133145 - DNA, 13 bp, Artificial Sequence
  Oligonucleotide for detection of SNP TSC0033222
cgtttatttttgy

SEQ ID NO: 133146 - DNA, 13 bp, Artificial Sequence
  Oligonucleotide for detection of SNP TSC0033222
rcaaaaataaacg

SEQ ID NO: 133147 - DNA, 13 bp, Artificial Sequence
  Oligonucleotide for detection of SNP TSC0033222
cgtttagttttgy

SEQ ID NO: 133148 - DNA, 13 bp, Artificial Sequence
  Oligonucleotide for detection of SNP TSC0033222
rcaaaactaaacg

SEQ ID NO: 133149 - DNA, 13 bp, Artificial Sequence
  Oligonucleotide for detection of SNP TSC0033222
gtagaggtgagtg

SEQ ID NO: 133150 - DNA, 13 bp, Artificial Sequence
  Oligonucleotide for detection of SNP TSC0033222
cactcacctctac

SEQ ID NO: 133151 - DNA, 13 bp, Artificial Sequence
  Oligonucleotide for detection of SNP TSC0033222
gtagagttgagtg

SEQ ID NO: 133152 - DNA, 13 bp, Artificial Sequence
  Oligonucleotide for detection of SNP TSC0033222
cactcaactctac

SEQ ID NO: 133153 - DNA, 13 bp, Artificial Sequence
  Oligonucleotide for detection of SNP TSC0033222
gtagaggtgagcg

SEQ ID NO: 133154 - DNA, 13 bp, Artificial Sequence
  Oligonucleotide for detection of SNP TSC0033222
cgctcacctctac

SEQ ID NO: 133155 - DNA, 13 bp, Artificial Sequence
  Oligonucleotide for detection of SNP TSC0033222
gtagagttgagcg

SEQ ID NO: 133156 - DNA, 13 bp, Artificial Sequence
  Oligonucleotide for detection of SNP TSC0033222
cgctcaactctac

SEQ ID NO: 133157 - DNA, 13 bp, Artificial Sequence
  Oligonucleotide for detection of SNP TSC0033231
atatagagtttta

SEQ ID NO: 133158 - DNA, 13 bp, Artificial Sequence
  Oligonucleotide for detection of SNP TSC0033231
taaaactctatat

SEQ ID NO: 133159 - DNA, 13 bp, Artificial Sequence
  Oligonucleotide for detection of SNP TSC0033231
atatagggtttta

SEQ ID NO: 133160 - DNA, 13 bp, Artificial Sequence
  Oligonucleotide for detection of SNP TSC0033231
taaaaccctatat

SEQ ID NO: 133161 - DNA, 13 bp, Artificial Sequence
  Oligonucleotide for detection of SNP TSC0033234
agtagttgtttty

SEQ ID NO: 133162 - DNA, 13 bp, Artificial Sequence
  Oligonucleotide for detection of SNP TSC0033234
raaaacaactact

SEQ ID NO: 133163 - DNA, 13 bp, Artificial Sequence
  Oligonucleotide for detection of SNP TSC0033234
agtagtcgtttty

SEQ ID NO: 133164 - DNA, 13 bp, Artificial Sequence
  Oligonucleotide for detection of SNP TSC0033234
raaaacgactact

SEQ ID NO: 133165 - DNA, 13 bp, Artificial Sequence
  Oligonucleotide for detection of SNP TSC0033234
gggggtggttgtt

SEQ ID NO: 133166 - DNA, 13 bp, Artificial Sequence
  Oligonucleotide for detection of SNP TSC0033234
aacaaccaccccc

SEQ ID NO: 133167 - DNA, 13 bp, Artificial Sequence
  Oligonucleotide for detection of SNP TSC0033234
gggggtagttgtt

SEQ ID NO: 133168 - DNA, 13 bp, Artificial Sequence
  Oligonucleotide for detection of SNP TSC0033234
aacaactaccccc

SEQ ID NO: 133169 - DNA, 13 bp, Artificial Sequence
  Oligonucleotide for detection of SNP TSC0033234
gggggcggttgtt

SEQ ID NO: 133170 - DNA, 13 bp, Artificial Sequence
  Oligonucleotide for detection of SNP TSC0033234
aacaaccgccccc

SEQ ID NO: 133171 - DNA, 13 bp, Artificial Sequence
  Oligonucleotide for detection of SNP TSC0033236
ttagtatagatgg

SEQ ID NO: 133172 - DNA, 13 bp, Artificial Sequence
  Oligonucleotide for detection of SNP TSC0033236
ccatctatactaa

SEQ ID NO: 133173 - DNA, 13 bp, Artificial Sequence
  Oligonucleotide for detection of SNP TSC0033236
ttagtatagacgg

SEQ ID NO: 133174 - DNA, 13 bp, Artificial Sequence
  Oligonucleotide for detection of SNP TSC0033236
ccgtctatactaa

SEQ ID NO: 133175 - DNA, 13 bp, Artificial Sequence
  Oligonucleotide for detection of SNP TSC0033236
tcgtttgtattaa

SEQ ID NO: 133176 - DNA, 13 bp, Artificial Sequence
  Oligonucleotide for detection of SNP TSC0033236
ttaatacaaacga

SEQ ID NO: 133177 - DNA, 13 bp, Artificial Sequence
  Oligonucleotide for detection of SNP TSC0033237
ttgggttgggggt

SEQ ID NO: 133178 - DNA, 13 bp, Artificial Sequence
  Oligonucleotide for detection of SNP TSC0033237
acccccaacccaa

SEQ ID NO: 133179 - DNA, 13 bp, Artificial Sequence
  Oligonucleotide for detection of SNP TSC0033237
ttgggtcgggggt

SEQ ID NO: 133180 - DNA, 13 bp, Artificial Sequence
  Oligonucleotide for detection of SNP TSC0033237
acccccgacccaa

SEQ ID NO: 133181 - DNA, 13 bp, Artificial Sequence
  Oligonucleotide for detection of SNP TSC0033237
atttttgatttaa

SEQ ID NO: 133182 - DNA, 13 bp, Artificial Sequence
  Oligonucleotide for detection of SNP TSC0033237
ttaaatcaaaaat

SEQ ID NO: 133183 - DNA, 13 bp, Artificial Sequence
  Oligonucleotide for detection of SNP TSC0033237
atttttaatttaa

SEQ ID NO: 133184 - DNA, 13 bp, Artificial Sequence
  Oligonucleotide for detection of SNP TSC0033237
ttaaattaaaaat

SEQ ID NO: 133185 - DNA, 13 bp, Artificial Sequence
  Oligonucleotide for detection of SNP TSC0033237
attttcgatttaa

SEQ ID NO: 133186 - DNA, 13 bp, Artificial Sequence
  Oligonucleotide for detection of SNP TSC0033237
ttaaatcgaaaat

SEQ ID NO: 133187 - DNA, 13 bp, Artificial Sequence
  Oligonucleotide for detection of SNP TSC0033238
agggtattggggg

SEQ ID NO: 133188 - DNA, 13 bp, Artificial Sequence
  Oligonucleotide for detection of SNP TSC0033238
cccccaataccct

SEQ ID NO: 133189 - DNA, 13 bp, Artificial Sequence
  Oligonucleotide for detection of SNP TSC0033238
agggtagtggggg

SEQ ID NO: 133190 - DNA, 13 bp, Artificial Sequence
  Oligonucleotide for detection of SNP TSC0033238
cccccactaccct

SEQ ID NO: 133191 - DNA, 13 bp, Artificial Sequence
  Oligonucleotide for detection of SNP TSC0033238
tttttattatttt

SEQ ID NO: 133192 - DNA, 13 bp, Artificial Sequence
  Oligonucleotide for detection of SNP TSC0033238
aaaataataaaaa

SEQ ID NO: 133193 - DNA, 13 bp, Artificial Sequence
  Oligonucleotide for detection of SNP TSC0033240
taggtgtggtatg

SEQ ID NO: 133194 - DNA, 13 bp, Artificial Sequence
  Oligonucleotide for detection of SNP TSC0033240
cataccacaccta

SEQ ID NO: 133195 - DNA, 13 bp, Artificial Sequence
  Oligonucleotide for detection of SNP TSC0033240
taggcgtggtatg

SEQ ID NO: 133196 - DNA, 13 bp, Artificial Sequence
  Oligonucleotide for detection of SNP TSC0033240
cataccacgccta

SEQ ID NO: 133197 - DNA, 13 bp, Artificial Sequence
  Oligonucleotide for detection of SNP TSC0033240
taggtgcggtatg

SEQ ID NO: 133198 - DNA, 13 bp, Artificial Sequence
  Oligonucleotide for detection of SNP TSC0033240
cataccgcaccta

SEQ ID NO: 133199 - DNA, 13 bp, Artificial Sequence
  Oligonucleotide for detection of SNP TSC0033240
taggtgtggtacg

SEQ ID NO: 133200 - DNA, 13 bp, Artificial Sequence
  Oligonucleotide for detection of SNP TSC0033240
cgtaccacaccta

SEQ ID NO: 133201 - DNA, 13 bp, Artificial Sequence
  Oligonucleotide for detection of SNP TSC0033240
taggcgtggtacg

SEQ ID NO: 133202 - DNA, 13 bp, Artificial Sequence
  Oligonucleotide for detection of SNP TSC0033240
cgtaccacgccta

SEQ ID NO: 133203 - DNA, 13 bp, Artificial Sequence
  Oligonucleotide for detection of SNP TSC0033240
taggcgcggtatg

SEQ ID NO: 133204 - DNA, 13 bp, Artificial Sequence
  Oligonucleotide for detection of SNP TSC0033240
cataccgcgccta

SEQ ID NO: 133205 - DNA, 13 bp, Artificial Sequence
  Oligonucleotide for detection of SNP TSC0033240
taggtgcggtacg

SEQ ID NO: 133206 - DNA, 13 bp, Artificial Sequence
  Oligonucleotide for detection of SNP TSC0033240
cgtaccgcaccta

SEQ ID NO: 133207 - DNA, 13 bp, Artificial Sequence
  Oligonucleotide for detection of SNP TSC0033240
taggcgcggtacg

SEQ ID NO: 133208 - DNA, 13 bp, Artificial Sequence
  Oligonucleotide for detection of SNP TSC0033240
cgtaccgcgccta

SEQ ID NO: 133209 - DNA, 13 bp, Artificial Sequence
  Oligonucleotide for detection of SNP TSC0033240
tgtattgtgtttg

SEQ ID NO: 133210 - DNA, 13 bp, Artificial Sequence
  Oligonucleotide for detection of SNP TSC0033240
caaacacaataca

SEQ ID NO: 133211 - DNA, 13 bp, Artificial Sequence
  Oligonucleotide for detection of SNP TSC0033240
tgtattatgtttg

SEQ ID NO: 133212 - DNA, 13 bp, Artificial Sequence
  Oligonucleotide for detection of SNP TSC0033240
caaacataataca

SEQ ID NO: 133213 - DNA, 13 bp, Artificial Sequence
  Oligonucleotide for detection of SNP TSC0033240
cgtattgtgtttg

SEQ ID NO: 133214 - DNA, 13 bp, Artificial Sequence
  Oligonucleotide for detection of SNP TSC0033240
caaacacaatacg

SEQ ID NO: 133215 - DNA, 13 bp, Artificial Sequence
  Oligonucleotide for detection of SNP TSC0033240
cgtattatgtttg

SEQ ID NO: 133216 - DNA, 13 bp, Artificial Sequence
  Oligonucleotide for detection of SNP TSC0033240
caaacataatacg

SEQ ID NO: 133217 - DNA, 13 bp, Artificial Sequence
  Oligonucleotide for detection of SNP TSC0033240
tgtatcgtgtttg

SEQ ID NO: 133218 - DNA, 13 bp, Artificial Sequence
  Oligonucleotide for detection of SNP TSC0033240
caaacacgataca

SEQ ID NO: 133219 - DNA, 13 bp, Artificial Sequence
  Oligonucleotide for detection of SNP TSC0033240
tgtattacgtttg

SEQ ID NO: 133220 - DNA, 13 bp, Artificial Sequence
  Oligonucleotide for detection of SNP TSC0033240
caaacgtaataca

SEQ ID NO: 133221 - DNA, 13 bp, Artificial Sequence
  Oligonucleotide for detection of SNP TSC0033240
tgtattgcgtttg

SEQ ID NO: 133222 - DNA, 13 bp, Artificial Sequence
  Oligonucleotide for detection of SNP TSC0033240
caaacgcaataca

SEQ ID NO: 133223 - DNA, 13 bp, Artificial Sequence
  Oligonucleotide for detection of SNP TSC0033240
cgtattacgtttg

SEQ ID NO: 133224 - DNA, 13 bp, Artificial Sequence
  Oligonucleotide for detection of SNP TSC0033240
caaacgtaatacg

SEQ ID NO: 133225 - DNA, 13 bp, Artificial Sequence
  Oligonucleotide for detection of SNP TSC0033240
cgtatcgtgtttg

SEQ ID NO: 133226 - DNA, 13 bp, Artificial Sequence
  Oligonucleotide for detection of SNP TSC0033240
caaacacgatacg

SEQ ID NO: 133227 - DNA, 13 bp, Artificial Sequence
  Oligonucleotide for detection of SNP TSC0033240
cgtattgcgtttg

SEQ ID NO: 133228 - DNA, 13 bp, Artificial Sequence
  Oligonucleotide for detection of SNP TSC0033240
caaacgcaatacg

SEQ ID NO: 133229 - DNA, 13 bp, Artificial Sequence
  Oligonucleotide for detection of SNP TSC0033240
tgtatcgcgtttg

SEQ ID NO: 133230 - DNA, 13 bp, Artificial Sequence
  Oligonucleotide for detection of SNP TSC0033240
caaacgcgataca

SEQ ID NO: 133231 - DNA, 13 bp, Artificial Sequence
  Oligonucleotide for detection of SNP TSC0033240
cgtatcgcgtttg

SEQ ID NO: 133232 - DNA, 13 bp, Artificial Sequence
  Oligonucleotide for detection of SNP TSC0033240
caaacgcgatacg

SEQ ID NO: 133233 - DNA, 13 bp, Artificial Sequence
  Oligonucleotide for detection of SNP TSC0033245
tgaatttgattag

SEQ ID NO: 133234 - DNA, 13 bp, Artificial Sequence
  Oligonucleotide for detection of SNP TSC0033245
ctaatcaaattca

SEQ ID NO: 133235 - DNA, 13 bp, Artificial Sequence
  Oligonucleotide for detection of SNP TSC0033245
tgaattcgattag

SEQ ID NO: 133236 - DNA, 13 bp, Artificial Sequence
  Oligonucleotide for detection of SNP TSC0033245
ctaatcgaattca

SEQ ID NO: 133237 - DNA, 13 bp, Artificial Sequence
  Oligonucleotide for detection of SNP TSC0033245
ttggttgggttta

SEQ ID NO: 133238 - DNA, 13 bp, Artificial Sequence
  Oligonucleotide for detection of SNP TSC0033245
taaacccaaccaa

SEQ ID NO: 133239 - DNA, 13 bp, Artificial Sequence
  Oligonucleotide for detection of SNP TSC0033245
ttggttaggttta

SEQ ID NO: 133240 - DNA, 13 bp, Artificial Sequence
  Oligonucleotide for detection of SNP TSC0033245
taaacctaaccaa

SEQ ID NO: 133241 - DNA, 13 bp, Artificial Sequence
  Oligonucleotide for detection of SNP TSC0033245
ttggtcgggttta

SEQ ID NO: 133242 - DNA, 13 bp, Artificial Sequence
  Oligonucleotide for detection of SNP TSC0033245
taaacccgaccaa

SEQ ID NO: 133243 - DNA, 13 bp, Artificial Sequence
  Oligonucleotide for detection of SNP TSC0033246
taatttagatgty

SEQ ID NO: 133244 - DNA, 13 bp, Artificial Sequence
  Oligonucleotide for detection of SNP TSC0033246
racatctaaatta

SEQ ID NO: 133245 - DNA, 13 bp, Artificial Sequence
  Oligonucleotide for detection of SNP TSC0033246
taatttggatgty

SEQ ID NO: 133246 - DNA, 13 bp, Artificial Sequence
  Oligonucleotide for detection of SNP TSC0033246
racatccaaatta

SEQ ID NO: 133247 - DNA, 13 bp, Artificial Sequence
  Oligonucleotide for detection of SNP TSC0033246
taatttagacgty

SEQ ID NO: 133248 - DNA, 13 bp, Artificial Sequence
  Oligonucleotide for detection of SNP TSC0033246
racgtctaaatta

SEQ ID NO: 133249 - DNA, 13 bp, Artificial Sequence
  Oligonucleotide for detection of SNP TSC0033246
taatttggacgty

SEQ ID NO: 133250 - DNA, 13 bp, Artificial Sequence
  Oligonucleotide for detection of SNP TSC0033246
racgtccaaatta

SEQ ID NO: 133251 - DNA, 13 bp, Artificial Sequence
  Oligonucleotide for detection of SNP TSC0033247
tttagatgtttga

SEQ ID NO: 133252 - DNA, 13 bp, Artificial Sequence
  Oligonucleotide for detection of SNP TSC0033247
tcaaacatctaaa

SEQ ID NO: 133253 - DNA, 13 bp, Artificial Sequence
  Oligonucleotide for detection of SNP TSC0033247
tttagacgtttga

SEQ ID NO: 133254 - DNA, 13 bp, Artificial Sequence
  Oligonucleotide for detection of SNP TSC0033247
tcaaacgtctaaa

SEQ ID NO: 133255 - DNA, 13 bp, Artificial Sequence
  Oligonucleotide for detection of SNP TSC0033247
ttagatgtttaag

SEQ ID NO: 133256 - DNA, 13 bp, Artificial Sequence
  Oligonucleotide for detection of SNP TSC0033247
cttaaacatctaa

SEQ ID NO: 133257 - DNA, 13 bp, Artificial Sequence
  Oligonucleotide for detection of SNP TSC0033247
ttagatatttaag

SEQ ID NO: 133258 - DNA, 13 bp, Artificial Sequence
  Oligonucleotide for detection of SNP TSC0033247
cttaaatatctaa

SEQ ID NO: 133259 - DNA, 13 bp, Artificial Sequence
  Oligonucleotide for detection of SNP TSC0033247
ttagacgtttaag

SEQ ID NO: 133260 - DNA, 13 bp, Artificial Sequence
  Oligonucleotide for detection of SNP TSC0033247
cttaaacgtctaa

SEQ ID NO: 133261 - DNA, 13 bp, Artificial Sequence
  Oligonucleotide for detection of SNP TSC0033251
tgttatattaagt

SEQ ID NO: 133262 - DNA, 13 bp, Artificial Sequence
  Oligonucleotide for detection of SNP TSC0033251
acttaatataaca

SEQ ID NO: 133263 - DNA, 13 bp, Artificial Sequence
  Oligonucleotide for detection of SNP TSC0033251
tgttatgttaagt

SEQ ID NO: 133264 - DNA, 13 bp, Artificial Sequence
  Oligonucleotide for detection of SNP TSC0033251
acttaacataaca

SEQ ID NO: 133265 - DNA, 13 bp, Artificial Sequence
  Oligonucleotide for detection of SNP TSC0033251
tgttacgttaagt

SEQ ID NO: 133266 - DNA, 13 bp, Artificial Sequence
  Oligonucleotide for detection of SNP TSC0033251
acttaacgtaaca

SEQ ID NO: 133267 - DNA, 13 bp, Artificial Sequence
  Oligonucleotide for detection of SNP TSC0033251
atttagtgtggta

SEQ ID NO: 133268 - DNA, 13 bp, Artificial Sequence
  Oligonucleotide for detection of SNP TSC0033251
taccacactaaat

SEQ ID NO: 133269 - DNA, 13 bp, Artificial Sequence
  Oligonucleotide for detection of SNP TSC0033251
atttagcgtggta

SEQ ID NO: 133270 - DNA, 13 bp, Artificial Sequence
  Oligonucleotide for detection of SNP TSC0033251
taccacgctaaat

SEQ ID NO: 133271 - DNA, 13 bp, Artificial Sequence
  Oligonucleotide for detection of SNP TSC0033252
atagatagaggty

SEQ ID NO: 133272 - DNA, 13 bp, Artificial Sequence
  Oligonucleotide for detection of SNP TSC0033252
racctctatctat

SEQ ID NO: 133273 - DNA, 13 bp, Artificial Sequence
  Oligonucleotide for detection of SNP TSC0033252
atagatggaggty

SEQ ID NO: 133274 - DNA, 13 bp, Artificial Sequence
  Oligonucleotide for detection of SNP TSC0033252
racctccatctat

SEQ ID NO: 133275 - DNA, 13 bp, Artificial Sequence
  Oligonucleotide for detection of SNP TSC0033252
atagacggaggty

SEQ ID NO: 133276 - DNA, 13 bp, Artificial Sequence
  Oligonucleotide for detection of SNP TSC0033252
racctccgtctat

SEQ ID NO: 133277 - DNA, 13 bp, Artificial Sequence
  Oligonucleotide for detection of SNP TSC0033253
tattagagatttt

SEQ ID NO: 133278 - DNA, 13 bp, Artificial Sequence
  Oligonucleotide for detection of SNP TSC0033253
aaaatctctaata

SEQ ID NO: 133279 - DNA, 13 bp, Artificial Sequence
  Oligonucleotide for detection of SNP TSC0033253
tattagggatttt

SEQ ID NO: 133280 - DNA, 13 bp, Artificial Sequence
  Oligonucleotide for detection of SNP TSC0033253
aaaatccctaata

SEQ ID NO: 133281 - DNA, 13 bp, Artificial Sequence
  Oligonucleotide for detection of SNP TSC0033254
gtttttagattaa

SEQ ID NO: 133282 - DNA, 13 bp, Artificial Sequence
  Oligonucleotide for detection of SNP TSC0033254
ttaatctaaaaac

SEQ ID NO: 133283 - DNA, 13 bp, Artificial Sequence
  Oligonucleotide for detection of SNP TSC0033254
gtttttggattaa

SEQ ID NO: 133284 - DNA, 13 bp, Artificial Sequence
  Oligonucleotide for detection of SNP TSC0033254
ttaatccaaaaac

SEQ ID NO: 133285 - DNA, 13 bp, Artificial Sequence
  Oligonucleotide for detection of SNP TSC0033254
gttttcggattaa

SEQ ID NO: 133286 - DNA, 13 bp, Artificial Sequence
  Oligonucleotide for detection of SNP TSC0033254
ttaatccgaaaac

SEQ ID NO: 133287 - DNA, 13 bp, Artificial Sequence
  Oligonucleotide for detection of SNP TSC0033254
ttgatttgagagy

SEQ ID NO: 133288 - DNA, 13 bp, Artificial Sequence
  Oligonucleotide for detection of SNP TSC0033254
rctctcaaatcaa

SEQ ID NO: 133289 - DNA, 13 bp, Artificial Sequence
  Oligonucleotide for detection of SNP TSC0033254
ttgattcgagagy

SEQ ID NO: 133290 - DNA, 13 bp, Artificial Sequence
  Oligonucleotide for detection of SNP TSC0033254
rctctcgaatcaa

SEQ ID NO: 133291 - DNA, 13 bp, Artificial Sequence
  Oligonucleotide for detection of SNP TSC0033255
tattatagaagag

SEQ ID NO: 133292 - DNA, 13 bp, Artificial Sequence
  Oligonucleotide for detection of SNP TSC0033255
ctcttctataata

SEQ ID NO: 133293 - DNA, 13 bp, Artificial Sequence
  Oligonucleotide for detection of SNP TSC0033255
tattatggaagag

SEQ ID NO: 133294 - DNA, 13 bp, Artificial Sequence
  Oligonucleotide for detection of SNP TSC0033255
ctcttccataata

SEQ ID NO: 133295 - DNA, 13 bp, Artificial Sequence
  Oligonucleotide for detection of SNP TSC0033256
gtggaaagaaaag

SEQ ID NO: 133296 - DNA, 13 bp, Artificial Sequence
  Oligonucleotide for detection of SNP TSC0033256
cttttctttccac

SEQ ID NO: 133297 - DNA, 13 bp, Artificial Sequence
  Oligonucleotide for detection of SNP TSC0033256
gtggaaggaaaag

SEQ ID NO: 133298 - DNA, 13 bp, Artificial Sequence
  Oligonucleotide for detection of SNP TSC0033256
cttttccttccac

SEQ ID NO: 133299 - DNA, 13 bp, Artificial Sequence
  Oligonucleotide for detection of SNP TSC0033257
atatgagagaaay

SEQ ID NO: 133300 - DNA, 13 bp, Artificial Sequence
  Oligonucleotide for detection of SNP TSC0033257
rtttctctcatat

SEQ ID NO: 133301 - DNA, 13 bp, Artificial Sequence
  Oligonucleotide for detection of SNP TSC0033257
atatgaaagaaay

SEQ ID NO: 133302 - DNA, 13 bp, Artificial Sequence
  Oligonucleotide for detection of SNP TSC0033257
rtttctttcatat

SEQ ID NO: 133303 - DNA, 13 bp, Artificial Sequence
  Oligonucleotide for detection of SNP TSC0033258
agtttgttgatag

SEQ ID NO: 133304 - DNA, 13 bp, Artificial Sequence
  Oligonucleotide for detection of SNP TSC0033258
ctatcaacaaact

SEQ ID NO: 133305 - DNA, 13 bp, Artificial Sequence
  Oligonucleotide for detection of SNP TSC0033258
agtttggtgatag

SEQ ID NO: 133306 - DNA, 13 bp, Artificial Sequence
  Oligonucleotide for detection of SNP TSC0033258
ctatcaccaaact

SEQ ID NO: 133307 - DNA, 13 bp, Artificial Sequence
  Oligonucleotide for detection of SNP TSC0033258
agtttgtcgatag

SEQ ID NO: 133308 - DNA, 13 bp, Artificial Sequence
  Oligonucleotide for detection of SNP TSC0033258
ctatcgacaaact

SEQ ID NO: 133309 - DNA, 13 bp, Artificial Sequence
  Oligonucleotide for detection of SNP TSC0033258
agtttggcgatag

SEQ ID NO: 133310 - DNA, 13 bp, Artificial Sequence
  Oligonucleotide for detection of SNP TSC0033258
ctatcgccaaact

SEQ ID NO: 133311 - DNA, 13 bp, Artificial Sequence
  Oligonucleotide for detection of SNP TSC0033258
ttgttggtaggtt

SEQ ID NO: 133312 - DNA, 13 bp, Artificial Sequence
  Oligonucleotide for detection of SNP TSC0033258
aacctaccaacaa

SEQ ID NO: 133313 - DNA, 13 bp, Artificial Sequence
  Oligonucleotide for detection of SNP TSC0033258
ttgttgttaggtt

SEQ ID NO: 133314 - DNA, 13 bp, Artificial Sequence
  Oligonucleotide for detection of SNP TSC0033258
aacctaacaacaa

SEQ ID NO: 133315 - DNA, 13 bp, Artificial Sequence
  Oligonucleotide for detection of SNP TSC0033258
ttgtcggtaggtt

SEQ ID NO: 133316 - DNA, 13 bp, Artificial Sequence
  Oligonucleotide for detection of SNP TSC0033258
aacctaccgacaa

SEQ ID NO: 133317 - DNA, 13 bp, Artificial Sequence
  Oligonucleotide for detection of SNP TSC0033258
ttgtcgttaggtt

SEQ ID NO: 133318 - DNA, 13 bp, Artificial Sequence
  Oligonucleotide for detection of SNP TSC0033258
aacctaacgacaa

SEQ ID NO: 133319 - DNA, 13 bp, Artificial Sequence
  Oligonucleotide for detection of SNP TSC0033259
ggagttattttty

SEQ ID NO: 133320 - DNA, 13 bp, Artificial Sequence
  Oligonucleotide for detection of SNP TSC0033259
raaaaataactcc

SEQ ID NO: 133321 - DNA, 13 bp, Artificial Sequence
  Oligonucleotide for detection of SNP TSC0033259
ggagtttttttty

SEQ ID NO: 133322 - DNA, 13 bp, Artificial Sequence
  Oligonucleotide for detection of SNP TSC0033259
raaaaaaaactcc

SEQ ID NO: 133323 - DNA, 13 bp, Artificial Sequence
  Oligonucleotide for detection of SNP TSC0033259
gaggagtggttty

SEQ ID NO: 133324 - DNA, 13 bp, Artificial Sequence
  Oligonucleotide for detection of SNP TSC0033259
raaaccactcctc

SEQ ID NO: 133325 - DNA, 13 bp, Artificial Sequence
  Oligonucleotide for detection of SNP TSC0033259
gaggagaggttty

SEQ ID NO: 133326 - DNA, 13 bp, Artificial Sequence
  Oligonucleotide for detection of SNP TSC0033259
raaacctctcctc

SEQ ID NO: 133327 - DNA, 13 bp, Artificial Sequence
  Oligonucleotide for detection of SNP TSC0033261
tttaattttttta

SEQ ID NO: 133328 - DNA, 13 bp, Artificial Sequence
  Oligonucleotide for detection of SNP TSC0033261
taaaaaaattaaa

SEQ ID NO: 133329 - DNA, 13 bp, Artificial Sequence
  Oligonucleotide for detection of SNP TSC0033261
taaaagggttgag

SEQ ID NO: 133330 - DNA, 13 bp, Artificial Sequence
  Oligonucleotide for detection of SNP TSC0033261
ctcaaccctttta

SEQ ID NO: 133331 - DNA, 13 bp, Artificial Sequence
  Oligonucleotide for detection of SNP TSC0033261
taaaagtgttgag

SEQ ID NO: 133332 - DNA, 13 bp, Artificial Sequence
  Oligonucleotide for detection of SNP TSC0033261
ctcaacactttta

SEQ ID NO: 133333 - DNA, 13 bp, Artificial Sequence
  Oligonucleotide for detection of SNP TSC0033261
taaaagcgttgag

SEQ ID NO: 133334 - DNA, 13 bp, Artificial Sequence
  Oligonucleotide for detection of SNP TSC0033261
ctcaacgctttta

SEQ ID NO: 133335 - DNA, 13 bp, Artificial Sequence
  Oligonucleotide for detection of SNP TSC0033263
tttaaggagagtt

SEQ ID NO: 133336 - DNA, 13 bp, Artificial Sequence
  Oligonucleotide for detection of SNP TSC0033263
aactctccttaaa

SEQ ID NO: 133337 - DNA, 13 bp, Artificial Sequence
  Oligonucleotide for detection of SNP TSC0033263
tttaagaagagtt

SEQ ID NO: 133338 - DNA, 13 bp, Artificial Sequence
  Oligonucleotide for detection of SNP TSC0033263
aactcttcttaaa

SEQ ID NO: 133339 - DNA, 13 bp, Artificial Sequence
  Oligonucleotide for detection of SNP TSC0033265
aagaagggttttt

SEQ ID NO: 133340 - DNA, 13 bp, Artificial Sequence
  Oligonucleotide for detection of SNP TSC0033265
aaaaacccttctt

SEQ ID NO: 133341 - DNA, 13 bp, Artificial Sequence
  Oligonucleotide for detection of SNP TSC0033265
aagaagtgttttt

SEQ ID NO: 133342 - DNA, 13 bp, Artificial Sequence
  Oligonucleotide for detection of SNP TSC0033265
aaaaacacttctt

SEQ ID NO: 133343 - DNA, 13 bp, Artificial Sequence
  Oligonucleotide for detection of SNP TSC0033265
agaaatatttttt

SEQ ID NO: 133344 - DNA, 13 bp, Artificial Sequence
  Oligonucleotide for detection of SNP TSC0033265
aaaaaatatttct

SEQ ID NO: 133345 - DNA, 13 bp, Artificial Sequence
  Oligonucleotide for detection of SNP TSC0033267
ttgattataagay

SEQ ID NO: 133346 - DNA, 13 bp, Artificial Sequence
  Oligonucleotide for detection of SNP TSC0033267
rtcttataatcaa

SEQ ID NO: 133347 - DNA, 13 bp, Artificial Sequence
  Oligonucleotide for detection of SNP TSC0033267
ttgattgtaagay

SEQ ID NO: 133348 - DNA, 13 bp, Artificial Sequence
  Oligonucleotide for detection of SNP TSC0033267
rtcttacaatcaa

SEQ ID NO: 133349 - DNA, 13 bp, Artificial Sequence
  Oligonucleotide for detection of SNP TSC0033267
ttgatcgtaagay

SEQ ID NO: 133350 - DNA, 13 bp, Artificial Sequence
  Oligonucleotide for detection of SNP TSC0033267
rtcttacgatcaa

SEQ ID NO: 133351 - DNA, 13 bp, Artificial Sequence
  Oligonucleotide for detection of SNP TSC0033267
gttttatgattag

SEQ ID NO: 133352 - DNA, 13 bp, Artificial Sequence
  Oligonucleotide for detection of SNP TSC0033267
ctaatcataaaac

SEQ ID NO: 133353 - DNA, 13 bp, Artificial Sequence
  Oligonucleotide for detection of SNP TSC0033267
gttttacgattag

SEQ ID NO: 133354 - DNA, 13 bp, Artificial Sequence
  Oligonucleotide for detection of SNP TSC0033267
ctaatcgtaaaac

SEQ ID NO: 133355 - DNA, 13 bp, Artificial Sequence
  Oligonucleotide for detection of SNP TSC0033268
agagtagttttat

SEQ ID NO: 133356 - DNA, 13 bp, Artificial Sequence
  Oligonucleotide for detection of SNP TSC0033268
ataaaactactct

SEQ ID NO: 133357 - DNA, 13 bp, Artificial Sequence
  Oligonucleotide for detection of SNP TSC0033268
agagtaattttat

SEQ ID NO: 133358 - DNA, 13 bp, Artificial Sequence
  Oligonucleotide for detection of SNP TSC0033268
ataaaattactct

SEQ ID NO: 133359 - DNA, 13 bp, Artificial Sequence
  Oligonucleotide for detection of SNP TSC0033269
ggtttgaggatgy

SEQ ID NO: 133360 - DNA, 13 bp, Artificial Sequence
  Oligonucleotide for detection of SNP TSC0033269
rcatcctcaaacc

SEQ ID NO: 133361 - DNA, 13 bp, Artificial Sequence
  Oligonucleotide for detection of SNP TSC0033269
ggtttggggatgy

SEQ ID NO: 133362 - DNA, 13 bp, Artificial Sequence
  Oligonucleotide for detection of SNP TSC0033269
rcatccccaaacc

SEQ ID NO: 133363 - DNA, 13 bp, Artificial Sequence
  Oligonucleotide for detection of SNP TSC0033269
ggttcgaggatgy

SEQ ID NO: 133364 - DNA, 13 bp, Artificial Sequence
  Oligonucleotide for detection of SNP TSC0033269
rcatcctcgaacc

SEQ ID NO: 133365 - DNA, 13 bp, Artificial Sequence
  Oligonucleotide for detection of SNP TSC0033269
ggttcggggatgy

SEQ ID NO: 133366 - DNA, 13 bp, Artificial Sequence
  Oligonucleotide for detection of SNP TSC0033269
rcatccccgaacc

SEQ ID NO: 133367 - DNA, 13 bp, Artificial Sequence
  Oligonucleotide for detection of SNP TSC0033269
ggtttgaggacgy

SEQ ID NO: 133368 - DNA, 13 bp, Artificial Sequence
  Oligonucleotide for detection of SNP TSC0033269
rcgtcctcaaacc

SEQ ID NO: 133369 - DNA, 13 bp, Artificial Sequence
  Oligonucleotide for detection of SNP TSC0033269
ggtttggggacgy

SEQ ID NO: 133370 - DNA, 13 bp, Artificial Sequence
  Oligonucleotide for detection of SNP TSC0033269
rcgtccccaaacc

SEQ ID NO: 133371 - DNA, 13 bp, Artificial Sequence
  Oligonucleotide for detection of SNP TSC0033269
ggttcgaggacgy

SEQ ID NO: 133372 - DNA, 13 bp, Artificial Sequence
  Oligonucleotide for detection of SNP TSC0033269
rcgtcctcgaacc

SEQ ID NO: 133373 - DNA, 13 bp, Artificial Sequence
  Oligonucleotide for detection of SNP TSC0033269
ggttcggggacgy

SEQ ID NO: 133374 - DNA, 13 bp, Artificial Sequence
  Oligonucleotide for detection of SNP TSC0033269
rcgtccccgaacc

SEQ ID NO: 133375 - DNA, 13 bp, Artificial Sequence
  Oligonucleotide for detection of SNP TSC0033270
tttatagaaatga

SEQ ID NO: 133376 - DNA, 13 bp, Artificial Sequence
  Oligonucleotide for detection of SNP TSC0033270
tcatttctataaa

SEQ ID NO: 133377 - DNA, 13 bp, Artificial Sequence
  Oligonucleotide for detection of SNP TSC0033270
tttataaaaatga

SEQ ID NO: 133378 - DNA, 13 bp, Artificial Sequence
  Oligonucleotide for detection of SNP TSC0033270
tcatttttataaa

SEQ ID NO: 133379 - DNA, 13 bp, Artificial Sequence
  Oligonucleotide for detection of SNP TSC0033271
tggttaaggtata

SEQ ID NO: 133380 - DNA, 13 bp, Artificial Sequence
  Oligonucleotide for detection of SNP TSC0033271
tataccttaacca

SEQ ID NO: 133381 - DNA, 13 bp, Artificial Sequence
  Oligonucleotide for detection of SNP TSC0033271
tggttatggtata

SEQ ID NO: 133382 - DNA, 13 bp, Artificial Sequence
  Oligonucleotide for detection of SNP TSC0033271
tataccataacca

SEQ ID NO: 133383 - DNA, 13 bp, Artificial Sequence
  Oligonucleotide for detection of SNP TSC0033271
tgtattttggtta

SEQ ID NO: 133384 - DNA, 13 bp, Artificial Sequence
  Oligonucleotide for detection of SNP TSC0033271
taaccaaaataca

SEQ ID NO: 133385 - DNA, 13 bp, Artificial Sequence
  Oligonucleotide for detection of SNP TSC0033271
tgtattatggtta

SEQ ID NO: 133386 - DNA, 13 bp, Artificial Sequence
  Oligonucleotide for detection of SNP TSC0033271
taaccataataca

SEQ ID NO: 133387 - DNA, 13 bp, Artificial Sequence
  Oligonucleotide for detection of SNP TSC0033272
ggttaaggtatat

SEQ ID NO: 133388 - DNA, 13 bp, Artificial Sequence
  Oligonucleotide for detection of SNP TSC0033272
atataccttaacc

SEQ ID NO: 133389 - DNA, 13 bp, Artificial Sequence
  Oligonucleotide for detection of SNP TSC0033272
ggttaatgtatat

SEQ ID NO: 133390 - DNA, 13 bp, Artificial Sequence
  Oligonucleotide for detection of SNP TSC0033272
atatacattaacc

SEQ ID NO: 133391 - DNA, 13 bp, Artificial Sequence
  Oligonucleotide for detection of SNP TSC0033272
atgtattttggty

SEQ ID NO: 133392 - DNA, 13 bp, Artificial Sequence
  Oligonucleotide for detection of SNP TSC0033272
raccaaaatacat

SEQ ID NO: 133393 - DNA, 13 bp, Artificial Sequence
  Oligonucleotide for detection of SNP TSC0033272
atgtatattggty

SEQ ID NO: 133394 - DNA, 13 bp, Artificial Sequence
  Oligonucleotide for detection of SNP TSC0033272
raccaatatacat

SEQ ID NO: 133395 - DNA, 13 bp, Artificial Sequence
  Oligonucleotide for detection of SNP TSC0033273
aattataatttgt

SEQ ID NO: 133396 - DNA, 13 bp, Artificial Sequence
  Oligonucleotide for detection of SNP TSC0033273
acaaattataatt

SEQ ID NO: 133397 - DNA, 13 bp, Artificial Sequence
  Oligonucleotide for detection of SNP TSC0033273
aattatgatttgt

SEQ ID NO: 133398 - DNA, 13 bp, Artificial Sequence
  Oligonucleotide for detection of SNP TSC0033273
acaaatcataatt

SEQ ID NO: 133399 - DNA, 13 bp, Artificial Sequence
  Oligonucleotide for detection of SNP TSC0033274
aataaaatgtaty

SEQ ID NO: 133400 - DNA, 13 bp, Artificial Sequence
  Oligonucleotide for detection of SNP TSC0033274
ratacattttatt

SEQ ID NO: 133401 - DNA, 13 bp, Artificial Sequence
  Oligonucleotide for detection of SNP TSC0033274
aataaagtgtaty

SEQ ID NO: 133402 - DNA, 13 bp, Artificial Sequence
  Oligonucleotide for detection of SNP TSC0033274
ratacactttatt

SEQ ID NO: 133403 - DNA, 13 bp, Artificial Sequence
  Oligonucleotide for detection of SNP TSC0033275
ttttttaggaatt

SEQ ID NO: 133404 - DNA, 13 bp, Artificial Sequence
  Oligonucleotide for detection of SNP TSC0033275
aattcctaaaaaa

SEQ ID NO: 133405 - DNA, 13 bp, Artificial Sequence
  Oligonucleotide for detection of SNP TSC0033275
ttttttgggaatt

SEQ ID NO: 133406 - DNA, 13 bp, Artificial Sequence
  Oligonucleotide for detection of SNP TSC0033275
aattcccaaaaaa

SEQ ID NO: 133407 - DNA, 13 bp, Artificial Sequence
  Oligonucleotide for detection of SNP TSC0033276
tttgggttttagy

SEQ ID NO: 133408 - DNA, 13 bp, Artificial Sequence
  Oligonucleotide for detection of SNP TSC0033276
rctaaaacccaaa

SEQ ID NO: 133409 - DNA, 13 bp, Artificial Sequence
  Oligonucleotide for detection of SNP TSC0033276
tttggggtttagy

SEQ ID NO: 133410 - DNA, 13 bp, Artificial Sequence
  Oligonucleotide for detection of SNP TSC0033276
rctaaaccccaaa

SEQ ID NO: 133411 - DNA, 13 bp, Artificial Sequence
  Oligonucleotide for detection of SNP TSC0033276
gttaaagtttagg

SEQ ID NO: 133412 - DNA, 13 bp, Artificial Sequence
  Oligonucleotide for detection of SNP TSC0033276
cctaaactttaac

SEQ ID NO: 133413 - DNA, 13 bp, Artificial Sequence
  Oligonucleotide for detection of SNP TSC0033276
gttaaattttagg

SEQ ID NO: 133414 - DNA, 13 bp, Artificial Sequence
  Oligonucleotide for detection of SNP TSC0033276
cctaaaatttaac

SEQ ID NO: 133415 - DNA, 13 bp, Artificial Sequence
  Oligonucleotide for detection of SNP TSC0033277
agtatagtgatty

SEQ ID NO: 133416 - DNA, 13 bp, Artificial Sequence
  Oligonucleotide for detection of SNP TSC0033277
raatcactatact

SEQ ID NO: 133417 - DNA, 13 bp, Artificial Sequence
  Oligonucleotide for detection of SNP TSC0033277
agtataatgatty

SEQ ID NO: 133418 - DNA, 13 bp, Artificial Sequence
  Oligonucleotide for detection of SNP TSC0033277
raatcattatact

SEQ ID NO: 133419 - DNA, 13 bp, Artificial Sequence
  Oligonucleotide for detection of SNP TSC0033278
aaatatggtaagt

SEQ ID NO: 133420 - DNA, 13 bp, Artificial Sequence
  Oligonucleotide for detection of SNP TSC0033278
acttaccatattt

SEQ ID NO: 133421 - DNA, 13 bp, Artificial Sequence
  Oligonucleotide for detection of SNP TSC0033278
aaatatagtaagt

SEQ ID NO: 133422 - DNA, 13 bp, Artificial Sequence
  Oligonucleotide for detection of SNP TSC0033278
acttactatattt

SEQ ID NO: 133423 - DNA, 13 bp, Artificial Sequence
  Oligonucleotide for detection of SNP TSC0033279
taagtaggtgtty

SEQ ID NO: 133424 - DNA, 13 bp, Artificial Sequence
  Oligonucleotide for detection of SNP TSC0033279
raacacctactta

SEQ ID NO: 133425 - DNA, 13 bp, Artificial Sequence
  Oligonucleotide for detection of SNP TSC0033279
taagtaagtgtty

SEQ ID NO: 133426 - DNA, 13 bp, Artificial Sequence
  Oligonucleotide for detection of SNP TSC0033279
raacacttactta

SEQ ID NO: 133427 - DNA, 13 bp, Artificial Sequence
  Oligonucleotide for detection of SNP TSC0033280
attattgttatay

SEQ ID NO: 133428 - DNA, 13 bp, Artificial Sequence
  Oligonucleotide for detection of SNP TSC0033280
rtataacaataat

SEQ ID NO: 133429 - DNA, 13 bp, Artificial Sequence
  Oligonucleotide for detection of SNP TSC0033280
attattattatay

SEQ ID NO: 133430 - DNA, 13 bp, Artificial Sequence
  Oligonucleotide for detection of SNP TSC0033280
rtataataataat

SEQ ID NO: 133431 - DNA, 13 bp, Artificial Sequence
  Oligonucleotide for detection of SNP TSC0033281
ttcgttgtatttt

SEQ ID NO: 133432 - DNA, 13 bp, Artificial Sequence
  Oligonucleotide for detection of SNP TSC0033281
aaaatacaacgaa

SEQ ID NO: 133433 - DNA, 13 bp, Artificial Sequence
  Oligonucleotide for detection of SNP TSC0033281
ttcgttttatttt

SEQ ID NO: 133434 - DNA, 13 bp, Artificial Sequence
  Oligonucleotide for detection of SNP TSC0033281
aaaataaaacgaa

SEQ ID NO: 133435 - DNA, 13 bp, Artificial Sequence
  Oligonucleotide for detection of SNP TSC0033281
agaatataatgag

SEQ ID NO: 133436 - DNA, 13 bp, Artificial Sequence
  Oligonucleotide for detection of SNP TSC0033281
ctcattatattct

SEQ ID NO: 133437 - DNA, 13 bp, Artificial Sequence
  Oligonucleotide for detection of SNP TSC0033281
agaataaaatgag

SEQ ID NO: 133438 - DNA, 13 bp, Artificial Sequence
  Oligonucleotide for detection of SNP TSC0033281
ctcattttattct

SEQ ID NO: 133439 - DNA, 13 bp, Artificial Sequence
  Oligonucleotide for detection of SNP TSC0033281
agaatataacgag

SEQ ID NO: 133440 - DNA, 13 bp, Artificial Sequence
  Oligonucleotide for detection of SNP TSC0033281
ctcgttatattct

SEQ ID NO: 133441 - DNA, 13 bp, Artificial Sequence
  Oligonucleotide for detection of SNP TSC0033281
agaataaaacgag

SEQ ID NO: 133442 - DNA, 13 bp, Artificial Sequence
  Oligonucleotide for detection of SNP TSC0033281
ctcgttttattct

SEQ ID NO: 133443 - DNA, 13 bp, Artificial Sequence
  Oligonucleotide for detection of SNP TSC0033282
ttattttggttag

SEQ ID NO: 133444 - DNA, 13 bp, Artificial Sequence
  Oligonucleotide for detection of SNP TSC0033282
ctaaccaaaataa

SEQ ID NO: 133445 - DNA, 13 bp, Artificial Sequence
  Oligonucleotide for detection of SNP TSC0033282
ttatttcggttag

SEQ ID NO: 133446 - DNA, 13 bp, Artificial Sequence
  Oligonucleotide for detection of SNP TSC0033282
ctaaccgaaataa

SEQ ID NO: 133447 - DNA, 13 bp, Artificial Sequence
  Oligonucleotide for detection of SNP TSC0033282
ttagttggagtga

SEQ ID NO: 133448 - DNA, 13 bp, Artificial Sequence
  Oligonucleotide for detection of SNP TSC0033282
tcactccaactaa

SEQ ID NO: 133449 - DNA, 13 bp, Artificial Sequence
  Oligonucleotide for detection of SNP TSC0033282
ttagttagagtga

SEQ ID NO: 133450 - DNA, 13 bp, Artificial Sequence
  Oligonucleotide for detection of SNP TSC0033282
tcactctaactaa

SEQ ID NO: 133451 - DNA, 13 bp, Artificial Sequence
  Oligonucleotide for detection of SNP TSC0033282
ttagtcggagtga

SEQ ID NO: 133452 - DNA, 13 bp, Artificial Sequence
  Oligonucleotide for detection of SNP TSC0033282
tcactccgactaa

SEQ ID NO: 133453 - DNA, 13 bp, Artificial Sequence
  Oligonucleotide for detection of SNP TSC0033284
gtttttatgtata

SEQ ID NO: 133454 - DNA, 13 bp, Artificial Sequence
  Oligonucleotide for detection of SNP TSC0033284
tatacataaaaac

SEQ ID NO: 133455 - DNA, 13 bp, Artificial Sequence
  Oligonucleotide for detection of SNP TSC0033284
gtttttttgtata

SEQ ID NO: 133456 - DNA, 13 bp, Artificial Sequence
  Oligonucleotide for detection of SNP TSC0033284
tatacaaaaaaac

SEQ ID NO: 133457 - DNA, 13 bp, Artificial Sequence
  Oligonucleotide for detection of SNP TSC0033284
tgtgtatagaggy

SEQ ID NO: 133458 - DNA, 13 bp, Artificial Sequence
  Oligonucleotide for detection of SNP TSC0033284
rcctctatacaca

SEQ ID NO: 133459 - DNA, 13 bp, Artificial Sequence
  Oligonucleotide for detection of SNP TSC0033284
tgtgtaaagaggy

SEQ ID NO: 133460 - DNA, 13 bp, Artificial Sequence
  Oligonucleotide for detection of SNP TSC0033284
rcctctttacaca

SEQ ID NO: 133461 - DNA, 13 bp, Artificial Sequence
  Oligonucleotide for detection of SNP TSC0033285
tttaggtgataga

SEQ ID NO: 133462 - DNA, 13 bp, Artificial Sequence
  Oligonucleotide for detection of SNP TSC0033285
tctatcacctaaa

SEQ ID NO: 133463 - DNA, 13 bp, Artificial Sequence
  Oligonucleotide for detection of SNP TSC0033285
tttaggcgataga

SEQ ID NO: 133464 - DNA, 13 bp, Artificial Sequence
  Oligonucleotide for detection of SNP TSC0033285
tctatcgcctaaa

SEQ ID NO: 133465 - DNA, 13 bp, Artificial Sequence
  Oligonucleotide for detection of SNP TSC0033286
ggtttatgttgta

SEQ ID NO: 133466 - DNA, 13 bp, Artificial Sequence
  Oligonucleotide for detection of SNP TSC0033286
tacaacataaacc

SEQ ID NO: 133467 - DNA, 13 bp, Artificial Sequence
  Oligonucleotide for detection of SNP TSC0033286
ggtttacgttgta

SEQ ID NO: 133468 - DNA, 13 bp, Artificial Sequence
  Oligonucleotide for detection of SNP TSC0033286
tacaacgtaaacc

SEQ ID NO: 133469 - DNA, 13 bp, Artificial Sequence
  Oligonucleotide for detection of SNP TSC0033286
tatagtgtgagty

SEQ ID NO: 133470 - DNA, 13 bp, Artificial Sequence
  Oligonucleotide for detection of SNP TSC0033286
ractcacactata

SEQ ID NO: 133471 - DNA, 13 bp, Artificial Sequence
  Oligonucleotide for detection of SNP TSC0033286
tatagtatgagty

SEQ ID NO: 133472 - DNA, 13 bp, Artificial Sequence
  Oligonucleotide for detection of SNP TSC0033286
ractcatactata

SEQ ID NO: 133473 - DNA, 13 bp, Artificial Sequence
  Oligonucleotide for detection of SNP TSC0033286
tatagcgtgagty

SEQ ID NO: 133474 - DNA, 13 bp, Artificial Sequence
  Oligonucleotide for detection of SNP TSC0033286
ractcacgctata

SEQ ID NO: 133475 - DNA, 13 bp, Artificial Sequence
  Oligonucleotide for detection of SNP TSC0033287
ttggaggtgtaay

SEQ ID NO: 133476 - DNA, 13 bp, Artificial Sequence
  Oligonucleotide for detection of SNP TSC0033287
rttacacctccaa

SEQ ID NO: 133477 - DNA, 13 bp, Artificial Sequence
  Oligonucleotide for detection of SNP TSC0033287
ttggagatgtaay

SEQ ID NO: 133478 - DNA, 13 bp, Artificial Sequence
  Oligonucleotide for detection of SNP TSC0033287
rttacatctccaa

SEQ ID NO: 133479 - DNA, 13 bp, Artificial Sequence
  Oligonucleotide for detection of SNP TSC0033289
agtgattgggatg

SEQ ID NO: 133480 - DNA, 13 bp, Artificial Sequence
  Oligonucleotide for detection of SNP TSC0033289
catcccaatcact

SEQ ID NO: 133481 - DNA, 13 bp, Artificial Sequence
  Oligonucleotide for detection of SNP TSC0033289
agtgatggggatg

SEQ ID NO: 133482 - DNA, 13 bp, Artificial Sequence
  Oligonucleotide for detection of SNP TSC0033289
catccccatcact

SEQ ID NO: 133483 - DNA, 13 bp, Artificial Sequence
  Oligonucleotide for detection of SNP TSC0033289
agcgattgggatg

SEQ ID NO: 133484 - DNA, 13 bp, Artificial Sequence
  Oligonucleotide for detection of SNP TSC0033289
catcccaatcgct

SEQ ID NO: 133485 - DNA, 13 bp, Artificial Sequence
  Oligonucleotide for detection of SNP TSC0033289
agcgatggggatg

SEQ ID NO: 133486 - DNA, 13 bp, Artificial Sequence
  Oligonucleotide for detection of SNP TSC0033289
catccccatcgct

SEQ ID NO: 133487 - DNA, 13 bp, Artificial Sequence
  Oligonucleotide for detection of SNP TSC0033289
agtgatcgggatg

SEQ ID NO: 133488 - DNA, 13 bp, Artificial Sequence
  Oligonucleotide for detection of SNP TSC0033289
catcccgatcact

SEQ ID NO: 133489 - DNA, 13 bp, Artificial Sequence
  Oligonucleotide for detection of SNP TSC0033289
agtgatggggacg

SEQ ID NO: 133490 - DNA, 13 bp, Artificial Sequence
  Oligonucleotide for detection of SNP TSC0033289
cgtccccatcact

SEQ ID NO: 133491 - DNA, 13 bp, Artificial Sequence
  Oligonucleotide for detection of SNP TSC0033289
agtgattgggacg

SEQ ID NO: 133492 - DNA, 13 bp, Artificial Sequence
  Oligonucleotide for detection of SNP TSC0033289
cgtcccaatcact

SEQ ID NO: 133493 - DNA, 13 bp, Artificial Sequence
  Oligonucleotide for detection of SNP TSC0033289
agcgatggggacg

SEQ ID NO: 133494 - DNA, 13 bp, Artificial Sequence
  Oligonucleotide for detection of SNP TSC0033289
cgtccccatcgct

SEQ ID NO: 133495 - DNA, 13 bp, Artificial Sequence
  Oligonucleotide for detection of SNP TSC0033289
agcgatcgggatg

SEQ ID NO: 133496 - DNA, 13 bp, Artificial Sequence
  Oligonucleotide for detection of SNP TSC0033289
catcccgatcgct

SEQ ID NO: 133497 - DNA, 13 bp, Artificial Sequence
  Oligonucleotide for detection of SNP TSC0033289
agcgattgggacg

SEQ ID NO: 133498 - DNA, 13 bp, Artificial Sequence
  Oligonucleotide for detection of SNP TSC0033289
cgtcccaatcgct

SEQ ID NO: 133499 - DNA, 13 bp, Artificial Sequence
  Oligonucleotide for detection of SNP TSC0033289
agtgatcgggacg

SEQ ID NO: 133500 - DNA, 13 bp, Artificial Sequence
  Oligonucleotide for detection of SNP TSC0033289
cgtcccgatcact

SEQ ID NO: 133501 - DNA, 13 bp, Artificial Sequence
  Oligonucleotide for detection of SNP TSC0033289
agcgatcgggacg

SEQ ID NO: 133502 - DNA, 13 bp, Artificial Sequence
  Oligonucleotide for detection of SNP TSC0033289
cgtcccgatcgct

SEQ ID NO: 133503 - DNA, 13 bp, Artificial Sequence
  Oligonucleotide for detection of SNP TSC0033289
tgttttgattgtt

SEQ ID NO: 133504 - DNA, 13 bp, Artificial Sequence
  Oligonucleotide for detection of SNP TSC0033289
aacaatcaaaaca

SEQ ID NO: 133505 - DNA, 13 bp, Artificial Sequence
  Oligonucleotide for detection of SNP TSC0033289
tgtttttattgtt

SEQ ID NO: 133506 - DNA, 13 bp, Artificial Sequence
  Oligonucleotide for detection of SNP TSC0033289
aacaataaaaaca

SEQ ID NO: 133507 - DNA, 13 bp, Artificial Sequence
  Oligonucleotide for detection of SNP TSC0033289
cgttttgattgtt

SEQ ID NO: 133508 - DNA, 13 bp, Artificial Sequence
  Oligonucleotide for detection of SNP TSC0033289
aacaatcaaaacg

SEQ ID NO: 133509 - DNA, 13 bp, Artificial Sequence
  Oligonucleotide for detection of SNP TSC0033289
cgtttttattgtt

SEQ ID NO: 133510 - DNA, 13 bp, Artificial Sequence
  Oligonucleotide for detection of SNP TSC0033289
aacaataaaaacg

SEQ ID NO: 133511 - DNA, 13 bp, Artificial Sequence
  Oligonucleotide for detection of SNP TSC0033289
tgtttcgattgtt

SEQ ID NO: 133512 - DNA, 13 bp, Artificial Sequence
  Oligonucleotide for detection of SNP TSC0033289
aacaatcgaaaca

SEQ ID NO: 133513 - DNA, 13 bp, Artificial Sequence
  Oligonucleotide for detection of SNP TSC0033289
tgtttttatcgtt

SEQ ID NO: 133514 - DNA, 13 bp, Artificial Sequence
  Oligonucleotide for detection of SNP TSC0033289
aacgataaaaaca

SEQ ID NO: 133515 - DNA, 13 bp, Artificial Sequence
  Oligonucleotide for detection of SNP TSC0033289
tgttttgatcgtt

SEQ ID NO: 133516 - DNA, 13 bp, Artificial Sequence
  Oligonucleotide for detection of SNP TSC0033289
aacgatcaaaaca

SEQ ID NO: 133517 - DNA, 13 bp, Artificial Sequence
  Oligonucleotide for detection of SNP TSC0033289
cgtttttatcgtt

SEQ ID NO: 133518 - DNA, 13 bp, Artificial Sequence
  Oligonucleotide for detection of SNP TSC0033289
aacgataaaaacg

SEQ ID NO: 133519 - DNA, 13 bp, Artificial Sequence
  Oligonucleotide for detection of SNP TSC0033289
cgtttcgattgtt

SEQ ID NO: 133520 - DNA, 13 bp, Artificial Sequence
  Oligonucleotide for detection of SNP TSC0033289
aacaatcgaaacg

SEQ ID NO: 133521 - DNA, 13 bp, Artificial Sequence
  Oligonucleotide for detection of SNP TSC0033289
cgttttgatcgtt

SEQ ID NO: 133522 - DNA, 13 bp, Artificial Sequence
  Oligonucleotide for detection of SNP TSC0033289
aacgatcaaaacg

SEQ ID NO: 133523 - DNA, 13 bp, Artificial Sequence
  Oligonucleotide for detection of SNP TSC0033289
tgtttcgatcgtt

SEQ ID NO: 133524 - DNA, 13 bp, Artificial Sequence
  Oligonucleotide for detection of SNP TSC0033289
aacgatcgaaaca

SEQ ID NO: 133525 - DNA, 13 bp, Artificial Sequence
  Oligonucleotide for detection of SNP TSC0033289
cgtttcgatcgtt

SEQ ID NO: 133526 - DNA, 13 bp, Artificial Sequence
  Oligonucleotide for detection of SNP TSC0033289
aacgatcgaaacg

SEQ ID NO: 133527 - DNA, 13 bp, Artificial Sequence
  Oligonucleotide for detection of SNP TSC0033295
aattttattttgt

SEQ ID NO: 133528 - DNA, 13 bp, Artificial Sequence
  Oligonucleotide for detection of SNP TSC0033295
acaaaataaaatt

SEQ ID NO: 133529 - DNA, 13 bp, Artificial Sequence
  Oligonucleotide for detection of SNP TSC0033295
atagagtgagatt

SEQ ID NO: 133530 - DNA, 13 bp, Artificial Sequence
  Oligonucleotide for detection of SNP TSC0033295
aatctcactctat

SEQ ID NO: 133531 - DNA, 13 bp, Artificial Sequence
  Oligonucleotide for detection of SNP TSC0033295
atagagcgagatt

SEQ ID NO: 133532 - DNA, 13 bp, Artificial Sequence
  Oligonucleotide for detection of SNP TSC0033295
aatctcgctctat

SEQ ID NO: 133533 - DNA, 13 bp, Artificial Sequence
  Oligonucleotide for detection of SNP TSC0033296
ttaggttgaatat

SEQ ID NO: 133534 - DNA, 13 bp, Artificial Sequence
  Oligonucleotide for detection of SNP TSC0033296
atattcaacctaa

SEQ ID NO: 133535 - DNA, 13 bp, Artificial Sequence
  Oligonucleotide for detection of SNP TSC0033296
ttaggtcgaatat

SEQ ID NO: 133536 - DNA, 13 bp, Artificial Sequence
  Oligonucleotide for detection of SNP TSC0033296
atattcgacctaa

SEQ ID NO: 133537 - DNA, 13 bp, Artificial Sequence
  Oligonucleotide for detection of SNP TSC0033296
atatttggtttgg

SEQ ID NO: 133538 - DNA, 13 bp, Artificial Sequence
  Oligonucleotide for detection of SNP TSC0033296
ccaaaccaaatat

SEQ ID NO: 133539 - DNA, 13 bp, Artificial Sequence
  Oligonucleotide for detection of SNP TSC0033296
atatttagtttgg

SEQ ID NO: 133540 - DNA, 13 bp, Artificial Sequence
  Oligonucleotide for detection of SNP TSC0033296
ccaaactaaatat

SEQ ID NO: 133541 - DNA, 13 bp, Artificial Sequence
  Oligonucleotide for detection of SNP TSC0033296
atattcggtttgg

SEQ ID NO: 133542 - DNA, 13 bp, Artificial Sequence
  Oligonucleotide for detection of SNP TSC0033296
ccaaaccgaatat

SEQ ID NO: 133543 - DNA, 13 bp, Artificial Sequence
  Oligonucleotide for detection of SNP TSC0033298
ataatagtaataa

SEQ ID NO: 133544 - DNA, 13 bp, Artificial Sequence
  Oligonucleotide for detection of SNP TSC0033298
ttattactattat

SEQ ID NO: 133545 - DNA, 13 bp, Artificial Sequence
  Oligonucleotide for detection of SNP TSC0033301
ttattagttggaa

SEQ ID NO: 133546 - DNA, 13 bp, Artificial Sequence
  Oligonucleotide for detection of SNP TSC0033301
ttccaactaataa

SEQ ID NO: 133547 - DNA, 13 bp, Artificial Sequence
  Oligonucleotide for detection of SNP TSC0033301
ttattaattggaa

SEQ ID NO: 133548 - DNA, 13 bp, Artificial Sequence
  Oligonucleotide for detection of SNP TSC0033301
ttccaattaataa

SEQ ID NO: 133549 - DNA, 13 bp, Artificial Sequence
  Oligonucleotide for detection of SNP TSC0033302
aaatttagtatat

SEQ ID NO: 133550 - DNA, 13 bp, Artificial Sequence
  Oligonucleotide for detection of SNP TSC0033302
atatactaaattt

SEQ ID NO: 133551 - DNA, 13 bp, Artificial Sequence
  Oligonucleotide for detection of SNP TSC0033302
aaattttgtatat

SEQ ID NO: 133552 - DNA, 13 bp, Artificial Sequence
  Oligonucleotide for detection of SNP TSC0033302
atatacaaaattt

SEQ ID NO: 133553 - DNA, 13 bp, Artificial Sequence
  Oligonucleotide for detection of SNP TSC0033302
atgtattgagttt

SEQ ID NO: 133554 - DNA, 13 bp, Artificial Sequence
  Oligonucleotide for detection of SNP TSC0033302
aaactcaatacat

SEQ ID NO: 133555 - DNA, 13 bp, Artificial Sequence
  Oligonucleotide for detection of SNP TSC0033302
atgtatagagttt

SEQ ID NO: 133556 - DNA, 13 bp, Artificial Sequence
  Oligonucleotide for detection of SNP TSC0033302
aaactctatacat

SEQ ID NO: 133557 - DNA, 13 bp, Artificial Sequence
  Oligonucleotide for detection of SNP TSC0033309
gagatttgaaaaa

SEQ ID NO: 133558 - DNA, 13 bp, Artificial Sequence
  Oligonucleotide for detection of SNP TSC0033309
tttttcaaatctc

SEQ ID NO: 133559 - DNA, 13 bp, Artificial Sequence
  Oligonucleotide for detection of SNP TSC0033309
gagattcgaaaaa

SEQ ID NO: 133560 - DNA, 13 bp, Artificial Sequence
  Oligonucleotide for detection of SNP TSC0033309
tttttcgaatctc

SEQ ID NO: 133561 - DNA, 13 bp, Artificial Sequence
  Oligonucleotide for detection of SNP TSC0033311
ggatgaggatttg

SEQ ID NO: 133562 - DNA, 13 bp, Artificial Sequence
  Oligonucleotide for detection of SNP TSC0033311
caaatcctcatcc

SEQ ID NO: 133563 - DNA, 13 bp, Artificial Sequence
  Oligonucleotide for detection of SNP TSC0033311
ggatgaagatttg

SEQ ID NO: 133564 - DNA, 13 bp, Artificial Sequence
  Oligonucleotide for detection of SNP TSC0033311
caaatcttcatcc

SEQ ID NO: 133565 - DNA, 13 bp, Artificial Sequence
  Oligonucleotide for detection of SNP TSC0033312
tatgaggaagata

SEQ ID NO: 133566 - DNA, 13 bp, Artificial Sequence
  Oligonucleotide for detection of SNP TSC0033312
tatcttcctcata

SEQ ID NO: 133567 - DNA, 13 bp, Artificial Sequence
  Oligonucleotide for detection of SNP TSC0033312
tatgagaaagata

SEQ ID NO: 133568 - DNA, 13 bp, Artificial Sequence
  Oligonucleotide for detection of SNP TSC0033312
tatctttctcata

SEQ ID NO: 133569 - DNA, 13 bp, Artificial Sequence
  Oligonucleotide for detection of SNP TSC0033313
ttatgaggaagay

SEQ ID NO: 133570 - DNA, 13 bp, Artificial Sequence
  Oligonucleotide for detection of SNP TSC0033313
rtcttcctcataa

SEQ ID NO: 133571 - DNA, 13 bp, Artificial Sequence
  Oligonucleotide for detection of SNP TSC0033313
ttatgaagaagay

SEQ ID NO: 133572 - DNA, 13 bp, Artificial Sequence
  Oligonucleotide for detection of SNP TSC0033313
rtcttcttcataa

SEQ ID NO: 133573 - DNA, 13 bp, Artificial Sequence
  Oligonucleotide for detection of SNP TSC0033314
tagtttgatagtt

SEQ ID NO: 133574 - DNA, 13 bp, Artificial Sequence
  Oligonucleotide for detection of SNP TSC0033314
aactatcaaacta

SEQ ID NO: 133575 - DNA, 13 bp, Artificial Sequence
  Oligonucleotide for detection of SNP TSC0033314
tagtttaatagtt

SEQ ID NO: 133576 - DNA, 13 bp, Artificial Sequence
  Oligonucleotide for detection of SNP TSC0033314
aactattaaacta

SEQ ID NO: 133577 - DNA, 13 bp, Artificial Sequence
  Oligonucleotide for detection of SNP TSC0033315
tagtttttttaga

SEQ ID NO: 133578 - DNA, 13 bp, Artificial Sequence
  Oligonucleotide for detection of SNP TSC0033315
tctaaaaaaacta

SEQ ID NO: 133579 - DNA, 13 bp, Artificial Sequence
  Oligonucleotide for detection of SNP TSC0033315
tagtttgtttaga

SEQ ID NO: 133580 - DNA, 13 bp, Artificial Sequence
  Oligonucleotide for detection of SNP TSC0033315
tctaaacaaacta

SEQ ID NO: 133581 - DNA, 13 bp, Artificial Sequence
  Oligonucleotide for detection of SNP TSC0033315
tagttcgtttaga

SEQ ID NO: 133582 - DNA, 13 bp, Artificial Sequence
  Oligonucleotide for detection of SNP TSC0033315
tctaaacgaacta

SEQ ID NO: 133583 - DNA, 13 bp, Artificial Sequence
  Oligonucleotide for detection of SNP TSC0033315
tttgaaggagttg

SEQ ID NO: 133584 - DNA, 13 bp, Artificial Sequence
  Oligonucleotide for detection of SNP TSC0033315
caactccttcaaa

SEQ ID NO: 133585 - DNA, 13 bp, Artificial Sequence
  Oligonucleotide for detection of SNP TSC0033315
tttgaatgagttg

SEQ ID NO: 133586 - DNA, 13 bp, Artificial Sequence
  Oligonucleotide for detection of SNP TSC0033315
caactcattcaaa

SEQ ID NO: 133587 - DNA, 13 bp, Artificial Sequence
  Oligonucleotide for detection of SNP TSC0033315
tttgaacgagttg

SEQ ID NO: 133588 - DNA, 13 bp, Artificial Sequence
  Oligonucleotide for detection of SNP TSC0033315
caactcgttcaaa

SEQ ID NO: 133589 - DNA, 13 bp, Artificial Sequence
  Oligonucleotide for detection of SNP TSC0033316
ttgggggataaty

SEQ ID NO: 133590 - DNA, 13 bp, Artificial Sequence
  Oligonucleotide for detection of SNP TSC0033316
rattatcccccaa

SEQ ID NO: 133591 - DNA, 13 bp, Artificial Sequence
  Oligonucleotide for detection of SNP TSC0033316
ttggggtataaty

SEQ ID NO: 133592 - DNA, 13 bp, Artificial Sequence
  Oligonucleotide for detection of SNP TSC0033316
rattataccccaa

SEQ ID NO: 133593 - DNA, 13 bp, Artificial Sequence
  Oligonucleotide for detection of SNP TSC0033316
gattattttttaa

SEQ ID NO: 133594 - DNA, 13 bp, Artificial Sequence
  Oligonucleotide for detection of SNP TSC0033316
ttaaaaaataatc

SEQ ID NO: 133595 - DNA, 13 bp, Artificial Sequence
  Oligonucleotide for detection of SNP TSC0033316
gattatattttaa

SEQ ID NO: 133596 - DNA, 13 bp, Artificial Sequence
  Oligonucleotide for detection of SNP TSC0033316
ttaaaatataatc

SEQ ID NO: 133597 - DNA, 13 bp, Artificial Sequence
  Oligonucleotide for detection of SNP TSC0033317
gaggaagaaaatt

SEQ ID NO: 133598 - DNA, 13 bp, Artificial Sequence
  Oligonucleotide for detection of SNP TSC0033317
aattttcttcctc

SEQ ID NO: 133599 - DNA, 13 bp, Artificial Sequence
  Oligonucleotide for detection of SNP TSC0033317
gaggaaaaaaatt

SEQ ID NO: 133600 - DNA, 13 bp, Artificial Sequence
  Oligonucleotide for detection of SNP TSC0033317
aatttttttcctc

SEQ ID NO: 133601 - DNA, 13 bp, Artificial Sequence
  Oligonucleotide for detection of SNP TSC0033318
ttgtatatttagt

SEQ ID NO: 133602 - DNA, 13 bp, Artificial Sequence
  Oligonucleotide for detection of SNP TSC0033318
actaaatatacaa

SEQ ID NO: 133603 - DNA, 13 bp, Artificial Sequence
  Oligonucleotide for detection of SNP TSC0033319
ggaggtagagttt

SEQ ID NO: 133604 - DNA, 13 bp, Artificial Sequence
  Oligonucleotide for detection of SNP TSC0033319
aaactctacctcc

SEQ ID NO: 133605 - DNA, 13 bp, Artificial Sequence
  Oligonucleotide for detection of SNP TSC0033319
ggaggtggagttt

SEQ ID NO: 133606 - DNA, 13 bp, Artificial Sequence
  Oligonucleotide for detection of SNP TSC0033319
aaactccacctcc

SEQ ID NO: 133607 - DNA, 13 bp, Artificial Sequence
  Oligonucleotide for detection of SNP TSC0033319
ggaggcggagttt

SEQ ID NO: 133608 - DNA, 13 bp, Artificial Sequence
  Oligonucleotide for detection of SNP TSC0033319
aaactccgcctcc

SEQ ID NO: 133609 - DNA, 13 bp, Artificial Sequence
  Oligonucleotide for detection of SNP TSC0033319
aagtttcgtttty

SEQ ID NO: 133610 - DNA, 13 bp, Artificial Sequence
  Oligonucleotide for detection of SNP TSC0033319
raaaacgaaactt

SEQ ID NO: 133611 - DNA, 13 bp, Artificial Sequence
  Oligonucleotide for detection of SNP TSC0033320
ttttggatagttg

SEQ ID NO: 133612 - DNA, 13 bp, Artificial Sequence
  Oligonucleotide for detection of SNP TSC0033320
caactatccaaaa

SEQ ID NO: 133613 - DNA, 13 bp, Artificial Sequence
  Oligonucleotide for detection of SNP TSC0033320
ttttgggtagttg

SEQ ID NO: 133614 - DNA, 13 bp, Artificial Sequence
  Oligonucleotide for detection of SNP TSC0033320
caactacccaaaa

SEQ ID NO: 133615 - DNA, 13 bp, Artificial Sequence
  Oligonucleotide for detection of SNP TSC0033321
gttttttgttaty

SEQ ID NO: 133616 - DNA, 13 bp, Artificial Sequence
  Oligonucleotide for detection of SNP TSC0033321
rataacaaaaaac

SEQ ID NO: 133617 - DNA, 13 bp, Artificial Sequence
  Oligonucleotide for detection of SNP TSC0033321
gtttttcgttaty

SEQ ID NO: 133618 - DNA, 13 bp, Artificial Sequence
  Oligonucleotide for detection of SNP TSC0033321
rataacgaaaaac

SEQ ID NO: 133619 - DNA, 13 bp, Artificial Sequence
  Oligonucleotide for detection of SNP TSC0033321
ggtggtgggaggy

SEQ ID NO: 133620 - DNA, 13 bp, Artificial Sequence
  Oligonucleotide for detection of SNP TSC0033321
rcctcccaccacc

SEQ ID NO: 133621 - DNA, 13 bp, Artificial Sequence
  Oligonucleotide for detection of SNP TSC0033321
ggtggtaggaggy

SEQ ID NO: 133622 - DNA, 13 bp, Artificial Sequence
  Oligonucleotide for detection of SNP TSC0033321
rcctcctaccacc

SEQ ID NO: 133623 - DNA, 13 bp, Artificial Sequence
  Oligonucleotide for detection of SNP TSC0033321
ggtggcgggaggy

SEQ ID NO: 133624 - DNA, 13 bp, Artificial Sequence
  Oligonucleotide for detection of SNP TSC0033321
rcctcccgccacc

SEQ ID NO: 133625 - DNA, 13 bp, Artificial Sequence
  Oligonucleotide for detection of SNP TSC0033322
ttgtttagcggta

SEQ ID NO: 133626 - DNA, 13 bp, Artificial Sequence
  Oligonucleotide for detection of SNP TSC0033322
taccgctaaacaa

SEQ ID NO: 133627 - DNA, 13 bp, Artificial Sequence
  Oligonucleotide for detection of SNP TSC0033322
ttgtttggcggta

SEQ ID NO: 133628 - DNA, 13 bp, Artificial Sequence
  Oligonucleotide for detection of SNP TSC0033322
taccgccaaacaa

SEQ ID NO: 133629 - DNA, 13 bp, Artificial Sequence
  Oligonucleotide for detection of SNP TSC0033322
ttgttcggcggta

SEQ ID NO: 133630 - DNA, 13 bp, Artificial Sequence
  Oligonucleotide for detection of SNP TSC0033322
taccgccgaacaa

SEQ ID NO: 133631 - DNA, 13 bp, Artificial Sequence
  Oligonucleotide for detection of SNP TSC0033322
tgttgttgaatag

SEQ ID NO: 133632 - DNA, 13 bp, Artificial Sequence
  Oligonucleotide for detection of SNP TSC0033322
ctattcaacaaca

SEQ ID NO: 133633 - DNA, 13 bp, Artificial Sequence
  Oligonucleotide for detection of SNP TSC0033322
tgtcgttgaatag

SEQ ID NO: 133634 - DNA, 13 bp, Artificial Sequence
  Oligonucleotide for detection of SNP TSC0033322
ctattcaacgaca

SEQ ID NO: 133635 - DNA, 13 bp, Artificial Sequence
  Oligonucleotide for detection of SNP TSC0033322
tgttgtcgaatag

SEQ ID NO: 133636 - DNA, 13 bp, Artificial Sequence
  Oligonucleotide for detection of SNP TSC0033322
ctattcgacaaca

SEQ ID NO: 133637 - DNA, 13 bp, Artificial Sequence
  Oligonucleotide for detection of SNP TSC0033322
tgtcgtcgaatag

SEQ ID NO: 133638 - DNA, 13 bp, Artificial Sequence
  Oligonucleotide for detection of SNP TSC0033322
ctattcgacgaca

SEQ ID NO: 133639 - DNA, 13 bp, Artificial Sequence
  Oligonucleotide for detection of SNP TSC0033323
tttcggtgtttag

SEQ ID NO: 133640 - DNA, 13 bp, Artificial Sequence
  Oligonucleotide for detection of SNP TSC0033323
ctaaacaccgaaa

SEQ ID NO: 133641 - DNA, 13 bp, Artificial Sequence
  Oligonucleotide for detection of SNP TSC0033323
tttcggggtttag

SEQ ID NO: 133642 - DNA, 13 bp, Artificial Sequence
  Oligonucleotide for detection of SNP TSC0033323
ctaaaccccgaaa

SEQ ID NO: 133643 - DNA, 13 bp, Artificial Sequence
  Oligonucleotide for detection of SNP TSC0033323
tttcggcgtttag

SEQ ID NO: 133644 - DNA, 13 bp, Artificial Sequence
  Oligonucleotide for detection of SNP TSC0033323
ctaaacgccgaaa

SEQ ID NO: 133645 - DNA, 13 bp, Artificial Sequence
  Oligonucleotide for detection of SNP TSC0033323
ttgagtgttgaga

SEQ ID NO: 133646 - DNA, 13 bp, Artificial Sequence
  Oligonucleotide for detection of SNP TSC0033323
tctcaacactcaa

SEQ ID NO: 133647 - DNA, 13 bp, Artificial Sequence
  Oligonucleotide for detection of SNP TSC0033323
ttgagcgttgaga

SEQ ID NO: 133648 - DNA, 13 bp, Artificial Sequence
  Oligonucleotide for detection of SNP TSC0033323
tctcaacgctcaa

SEQ ID NO: 133649 - DNA, 13 bp, Artificial Sequence
  Oligonucleotide for detection of SNP TSC0033323
ttgagtttcgaga

SEQ ID NO: 133650 - DNA, 13 bp, Artificial Sequence
  Oligonucleotide for detection of SNP TSC0033323
tctcgaaactcaa

SEQ ID NO: 133651 - DNA, 13 bp, Artificial Sequence
  Oligonucleotide for detection of SNP TSC0033323
ttgagtgtcgaga

SEQ ID NO: 133652 - DNA, 13 bp, Artificial Sequence
  Oligonucleotide for detection of SNP TSC0033323
tctcgacactcaa

SEQ ID NO: 133653 - DNA, 13 bp, Artificial Sequence
  Oligonucleotide for detection of SNP TSC0033323
ttgagcgtcgaga

SEQ ID NO: 133654 - DNA, 13 bp, Artificial Sequence
  Oligonucleotide for detection of SNP TSC0033323
tctcgacgctcaa

SEQ ID NO: 133655 - DNA, 13 bp, Artificial Sequence
  Oligonucleotide for detection of SNP TSC0033326
tttattatagtga

SEQ ID NO: 133656 - DNA, 13 bp, Artificial Sequence
  Oligonucleotide for detection of SNP TSC0033326
tcactataataaa

SEQ ID NO: 133657 - DNA, 13 bp, Artificial Sequence
  Oligonucleotide for detection of SNP TSC0033326
tttattgtagtga

SEQ ID NO: 133658 - DNA, 13 bp, Artificial Sequence
  Oligonucleotide for detection of SNP TSC0033326
tcactacaataaa

SEQ ID NO: 133659 - DNA, 13 bp, Artificial Sequence
  Oligonucleotide for detection of SNP TSC0033326
tttatcgtagtga

SEQ ID NO: 133660 - DNA, 13 bp, Artificial Sequence
  Oligonucleotide for detection of SNP TSC0033326
tcactacgataaa

SEQ ID NO: 133661 - DNA, 13 bp, Artificial Sequence
  Oligonucleotide for detection of SNP TSC0033326
ttattatgatgag

SEQ ID NO: 133662 - DNA, 13 bp, Artificial Sequence
  Oligonucleotide for detection of SNP TSC0033326
ctcatcataataa

SEQ ID NO: 133663 - DNA, 13 bp, Artificial Sequence
  Oligonucleotide for detection of SNP TSC0033326
ttattacgatgag

SEQ ID NO: 133664 - DNA, 13 bp, Artificial Sequence
  Oligonucleotide for detection of SNP TSC0033326
ctcatcgtaataa

SEQ ID NO: 133665 - DNA, 13 bp, Artificial Sequence
  Oligonucleotide for detection of SNP TSC0033327
attaattagttta

SEQ ID NO: 133666 - DNA, 13 bp, Artificial Sequence
  Oligonucleotide for detection of SNP TSC0033327
taaactaattaat

SEQ ID NO: 133667 - DNA, 13 bp, Artificial Sequence
  Oligonucleotide for detection of SNP TSC0033327
attaatgagttta

SEQ ID NO: 133668 - DNA, 13 bp, Artificial Sequence
  Oligonucleotide for detection of SNP TSC0033327
taaactcattaat

SEQ ID NO: 133669 - DNA, 13 bp, Artificial Sequence
  Oligonucleotide for detection of SNP TSC0033327
taagttgattaat

SEQ ID NO: 133670 - DNA, 13 bp, Artificial Sequence
  Oligonucleotide for detection of SNP TSC0033327
attaatcaactta

SEQ ID NO: 133671 - DNA, 13 bp, Artificial Sequence
  Oligonucleotide for detection of SNP TSC0033327
taagtttattaat

SEQ ID NO: 133672 - DNA, 13 bp, Artificial Sequence
  Oligonucleotide for detection of SNP TSC0033327
attaataaactta

SEQ ID NO: 133673 - DNA, 13 bp, Artificial Sequence
  Oligonucleotide for detection of SNP TSC0033328
tgttatatggtta

SEQ ID NO: 133674 - DNA, 13 bp, Artificial Sequence
  Oligonucleotide for detection of SNP TSC0033328
taaccatataaca

SEQ ID NO: 133675 - DNA, 13 bp, Artificial Sequence
  Oligonucleotide for detection of SNP TSC0033328
tgttatgtggtta

SEQ ID NO: 133676 - DNA, 13 bp, Artificial Sequence
  Oligonucleotide for detection of SNP TSC0033328
taaccacataaca

SEQ ID NO: 133677 - DNA, 13 bp, Artificial Sequence
  Oligonucleotide for detection of SNP TSC0033328
tgttacgtggtta

SEQ ID NO: 133678 - DNA, 13 bp, Artificial Sequence
  Oligonucleotide for detection of SNP TSC0033328
taaccacgtaaca

SEQ ID NO: 133679 - DNA, 13 bp, Artificial Sequence
  Oligonucleotide for detection of SNP TSC0033328
taattatgtaata

SEQ ID NO: 133680 - DNA, 13 bp, Artificial Sequence
  Oligonucleotide for detection of SNP TSC0033328
tattacataatta

SEQ ID NO: 133681 - DNA, 13 bp, Artificial Sequence
  Oligonucleotide for detection of SNP TSC0033328
taattacgtaata

SEQ ID NO: 133682 - DNA, 13 bp, Artificial Sequence
  Oligonucleotide for detection of SNP TSC0033328
tattacgtaatta

SEQ ID NO: 133683 - DNA, 13 bp, Artificial Sequence
  Oligonucleotide for detection of SNP TSC0033329
tgatttatttggy

SEQ ID NO: 133684 - DNA, 13 bp, Artificial Sequence
  Oligonucleotide for detection of SNP TSC0033329
rccaaataaatca

SEQ ID NO: 133685 - DNA, 13 bp, Artificial Sequence
  Oligonucleotide for detection of SNP TSC0033329
tgatttttttggy

SEQ ID NO: 133686 - DNA, 13 bp, Artificial Sequence
  Oligonucleotide for detection of SNP TSC0033329
rccaaaaaaatca

SEQ ID NO: 133687 - DNA, 13 bp, Artificial Sequence
  Oligonucleotide for detection of SNP TSC0033329
cgatttatttggy

SEQ ID NO: 133688 - DNA, 13 bp, Artificial Sequence
  Oligonucleotide for detection of SNP TSC0033329
rccaaataaatcg

SEQ ID NO: 133689 - DNA, 13 bp, Artificial Sequence
  Oligonucleotide for detection of SNP TSC0033329
cgatttttttggy

SEQ ID NO: 133690 - DNA, 13 bp, Artificial Sequence
  Oligonucleotide for detection of SNP TSC0033329
rccaaaaaaatcg

SEQ ID NO: 133691 - DNA, 13 bp, Artificial Sequence
  Oligonucleotide for detection of SNP TSC0033329
gttaaatgaattg

SEQ ID NO: 133692 - DNA, 13 bp, Artificial Sequence
  Oligonucleotide for detection of SNP TSC0033329
caattcatttaac

SEQ ID NO: 133693 - DNA, 13 bp, Artificial Sequence
  Oligonucleotide for detection of SNP TSC0033329
gttaaaggaattg

SEQ ID NO: 133694 - DNA, 13 bp, Artificial Sequence
  Oligonucleotide for detection of SNP TSC0033329
caattcctttaac

SEQ ID NO: 133695 - DNA, 13 bp, Artificial Sequence
  Oligonucleotide for detection of SNP TSC0033329
gttaaatgaatcg

SEQ ID NO: 133696 - DNA, 13 bp, Artificial Sequence
  Oligonucleotide for detection of SNP TSC0033329
cgattcatttaac

SEQ ID NO: 133697 - DNA, 13 bp, Artificial Sequence
  Oligonucleotide for detection of SNP TSC0033329
gttaaaggaatcg

SEQ ID NO: 133698 - DNA, 13 bp, Artificial Sequence
  Oligonucleotide for detection of SNP TSC0033329
cgattcctttaac

SEQ ID NO: 133699 - DNA, 13 bp, Artificial Sequence
  Oligonucleotide for detection of SNP TSC0033330
tgttagattaaty

SEQ ID NO: 133700 - DNA, 13 bp, Artificial Sequence
  Oligonucleotide for detection of SNP TSC0033330
rattaatctaaca

SEQ ID NO: 133701 - DNA, 13 bp, Artificial Sequence
  Oligonucleotide for detection of SNP TSC0033330
tgttagtttaaty

SEQ ID NO: 133702 - DNA, 13 bp, Artificial Sequence
  Oligonucleotide for detection of SNP TSC0033330
rattaaactaaca

SEQ ID NO: 133703 - DNA, 13 bp, Artificial Sequence
  Oligonucleotide for detection of SNP TSC0033330
gattaatttagta

SEQ ID NO: 133704 - DNA, 13 bp, Artificial Sequence
  Oligonucleotide for detection of SNP TSC0033330
tactaaattaatc

SEQ ID NO: 133705 - DNA, 13 bp, Artificial Sequence
  Oligonucleotide for detection of SNP TSC0033330
gattaaattagta

SEQ ID NO: 133706 - DNA, 13 bp, Artificial Sequence
  Oligonucleotide for detection of SNP TSC0033330
tactaatttaatc

SEQ ID NO: 133707 - DNA, 13 bp, Artificial Sequence
  Oligonucleotide for detection of SNP TSC0033331
taatttttttaaa

SEQ ID NO: 133708 - DNA, 13 bp, Artificial Sequence
  Oligonucleotide for detection of SNP TSC0033331
tttaaaaaaatta

SEQ ID NO: 133709 - DNA, 13 bp, Artificial Sequence
  Oligonucleotide for detection of SNP TSC0033331
taatttgtttaaa

SEQ ID NO: 133710 - DNA, 13 bp, Artificial Sequence
  Oligonucleotide for detection of SNP TSC0033331
tttaaacaaatta

SEQ ID NO: 133711 - DNA, 13 bp, Artificial Sequence
  Oligonucleotide for detection of SNP TSC0033331
tttaaggagatta

SEQ ID NO: 133712 - DNA, 13 bp, Artificial Sequence
  Oligonucleotide for detection of SNP TSC0033331
taatctccttaaa

SEQ ID NO: 133713 - DNA, 13 bp, Artificial Sequence
  Oligonucleotide for detection of SNP TSC0033331
tttaagtagatta

SEQ ID NO: 133714 - DNA, 13 bp, Artificial Sequence
  Oligonucleotide for detection of SNP TSC0033331
taatctacttaaa

SEQ ID NO: 133715 - DNA, 13 bp, Artificial Sequence
  Oligonucleotide for detection of SNP TSC0033333
aaaattaaagata

SEQ ID NO: 133716 - DNA, 13 bp, Artificial Sequence
  Oligonucleotide for detection of SNP TSC0033333
tatctttaatttt

SEQ ID NO: 133717 - DNA, 13 bp, Artificial Sequence
  Oligonucleotide for detection of SNP TSC0033333
aaaattgaagata

SEQ ID NO: 133718 - DNA, 13 bp, Artificial Sequence
  Oligonucleotide for detection of SNP TSC0033333
tatcttcaatttt

SEQ ID NO: 133719 - DNA, 13 bp, Artificial Sequence
  Oligonucleotide for detection of SNP TSC0033333
aaaatcgaagata

SEQ ID NO: 133720 - DNA, 13 bp, Artificial Sequence
  Oligonucleotide for detection of SNP TSC0033333
tatcttcgatttt

SEQ ID NO: 133721 - DNA, 13 bp, Artificial Sequence
  Oligonucleotide for detection of SNP TSC0033334
agttatgttttty

SEQ ID NO: 133722 - DNA, 13 bp, Artificial Sequence
  Oligonucleotide for detection of SNP TSC0033334
raaaaacataact

SEQ ID NO: 133723 - DNA, 13 bp, Artificial Sequence
  Oligonucleotide for detection of SNP TSC0033334
agttattttttty

SEQ ID NO: 133724 - DNA, 13 bp, Artificial Sequence
  Oligonucleotide for detection of SNP TSC0033334
raaaaaaataact

SEQ ID NO: 133725 - DNA, 13 bp, Artificial Sequence
  Oligonucleotide for detection of SNP TSC0033334
gaggagtatgatt

SEQ ID NO: 133726 - DNA, 13 bp, Artificial Sequence
  Oligonucleotide for detection of SNP TSC0033334
aatcatactcctc

SEQ ID NO: 133727 - DNA, 13 bp, Artificial Sequence
  Oligonucleotide for detection of SNP TSC0033334
gaggaggatgatt

SEQ ID NO: 133728 - DNA, 13 bp, Artificial Sequence
  Oligonucleotide for detection of SNP TSC0033334
aatcatcctcctc

SEQ ID NO: 133729 - DNA, 13 bp, Artificial Sequence
  Oligonucleotide for detection of SNP TSC0033339
tgaaagtgttggg

SEQ ID NO: 133730 - DNA, 13 bp, Artificial Sequence
  Oligonucleotide for detection of SNP TSC0033339
cccaacactttca

SEQ ID NO: 133731 - DNA, 13 bp, Artificial Sequence
  Oligonucleotide for detection of SNP TSC0033339
tgaaagggttggg

SEQ ID NO: 133732 - DNA, 13 bp, Artificial Sequence
  Oligonucleotide for detection of SNP TSC0033339
cccaaccctttca

SEQ ID NO: 133733 - DNA, 13 bp, Artificial Sequence
  Oligonucleotide for detection of SNP TSC0033339
cgaaagtgttggg

SEQ ID NO: 133734 - DNA, 13 bp, Artificial Sequence
  Oligonucleotide for detection of SNP TSC0033339
cccaacactttcg

SEQ ID NO: 133735 - DNA, 13 bp, Artificial Sequence
  Oligonucleotide for detection of SNP TSC0033339
cgaaagggttggg

SEQ ID NO: 133736 - DNA, 13 bp, Artificial Sequence
  Oligonucleotide for detection of SNP TSC0033339
cccaaccctttcg

SEQ ID NO: 133737 - DNA, 13 bp, Artificial Sequence
  Oligonucleotide for detection of SNP TSC0033339
tgaaagcgttggg

SEQ ID NO: 133738 - DNA, 13 bp, Artificial Sequence
  Oligonucleotide for detection of SNP TSC0033339
cccaacgctttca

SEQ ID NO: 133739 - DNA, 13 bp, Artificial Sequence
  Oligonucleotide for detection of SNP TSC0033339
cgaaagcgttggg

SEQ ID NO: 133740 - DNA, 13 bp, Artificial Sequence
  Oligonucleotide for detection of SNP TSC0033339
cccaacgctttcg

SEQ ID NO: 133741 - DNA, 13 bp, Artificial Sequence
  Oligonucleotide for detection of SNP TSC0033339
tttagtgtttttg

SEQ ID NO: 133742 - DNA, 13 bp, Artificial Sequence
  Oligonucleotide for detection of SNP TSC0033339
caaaaacactaaa

SEQ ID NO: 133743 - DNA, 13 bp, Artificial Sequence
  Oligonucleotide for detection of SNP TSC0033339
tttagcgtttttg

SEQ ID NO: 133744 - DNA, 13 bp, Artificial Sequence
  Oligonucleotide for detection of SNP TSC0033339
caaaaacgctaaa

SEQ ID NO: 133745 - DNA, 13 bp, Artificial Sequence
  Oligonucleotide for detection of SNP TSC0033339
tttagttttttcg

SEQ ID NO: 133746 - DNA, 13 bp, Artificial Sequence
  Oligonucleotide for detection of SNP TSC0033339
cgaaaaaactaaa

SEQ ID NO: 133747 - DNA, 13 bp, Artificial Sequence
  Oligonucleotide for detection of SNP TSC0033339
tttagtgttttcg

SEQ ID NO: 133748 - DNA, 13 bp, Artificial Sequence
  Oligonucleotide for detection of SNP TSC0033339
cgaaaacactaaa

SEQ ID NO: 133749 - DNA, 13 bp, Artificial Sequence
  Oligonucleotide for detection of SNP TSC0033339
tttagcgttttcg

SEQ ID NO: 133750 - DNA, 13 bp, Artificial Sequence
  Oligonucleotide for detection of SNP TSC0033339
cgaaaacgctaaa

SEQ ID NO: 133751 - DNA, 13 bp, Artificial Sequence
  Oligonucleotide for detection of SNP TSC0033341
atatgaagtgtgy

SEQ ID NO: 133752 - DNA, 13 bp, Artificial Sequence
  Oligonucleotide for detection of SNP TSC0033341
rcacacttcatat

SEQ ID NO: 133753 - DNA, 13 bp, Artificial Sequence
  Oligonucleotide for detection of SNP TSC0033341
atatgaggtgtgy

SEQ ID NO: 133754 - DNA, 13 bp, Artificial Sequence
  Oligonucleotide for detection of SNP TSC0033341
rcacacctcatat

SEQ ID NO: 133755 - DNA, 13 bp, Artificial Sequence
  Oligonucleotide for detection of SNP TSC0033342
ttttttatgggay

SEQ ID NO: 133756 - DNA, 13 bp, Artificial Sequence
  Oligonucleotide for detection of SNP TSC0033342
rtcccataaaaaa

SEQ ID NO: 133757 - DNA, 13 bp, Artificial Sequence
  Oligonucleotide for detection of SNP TSC0033342
ttttttgtgggay

SEQ ID NO: 133758 - DNA, 13 bp, Artificial Sequence
  Oligonucleotide for detection of SNP TSC0033342
rtcccacaaaaaa

SEQ ID NO: 133759 - DNA, 13 bp, Artificial Sequence
  Oligonucleotide for detection of SNP TSC0033342
tttttcgtgggay

SEQ ID NO: 133760 - DNA, 13 bp, Artificial Sequence
  Oligonucleotide for detection of SNP TSC0033342
rtcccacgaaaaa

SEQ ID NO: 133761 - DNA, 13 bp, Artificial Sequence
  Oligonucleotide for detection of SNP TSC0033342
gttttatggggaa

SEQ ID NO: 133762 - DNA, 13 bp, Artificial Sequence
  Oligonucleotide for detection of SNP TSC0033342
ttccccataaaac

SEQ ID NO: 133763 - DNA, 13 bp, Artificial Sequence
  Oligonucleotide for detection of SNP TSC0033342
gttttacggggaa

SEQ ID NO: 133764 - DNA, 13 bp, Artificial Sequence
  Oligonucleotide for detection of SNP TSC0033342
ttccccgtaaaac

SEQ ID NO: 133765 - DNA, 13 bp, Artificial Sequence
  Oligonucleotide for detection of SNP TSC0033344
tattgtaatgaag

SEQ ID NO: 133766 - DNA, 13 bp, Artificial Sequence
  Oligonucleotide for detection of SNP TSC0033344
cttcattacaata

SEQ ID NO: 133767 - DNA, 13 bp, Artificial Sequence
  Oligonucleotide for detection of SNP TSC0033344
tattgttatgaag

SEQ ID NO: 133768 - DNA, 13 bp, Artificial Sequence
  Oligonucleotide for detection of SNP TSC0033344
cttcataacaata

SEQ ID NO: 133769 - DNA, 13 bp, Artificial Sequence
  Oligonucleotide for detection of SNP TSC0033344
ttttattgtaatg

SEQ ID NO: 133770 - DNA, 13 bp, Artificial Sequence
  Oligonucleotide for detection of SNP TSC0033344
cattacaataaaa

SEQ ID NO: 133771 - DNA, 13 bp, Artificial Sequence
  Oligonucleotide for detection of SNP TSC0033347
agtggtatgattt

SEQ ID NO: 133772 - DNA, 13 bp, Artificial Sequence
  Oligonucleotide for detection of SNP TSC0033347
aaatcataccact

SEQ ID NO: 133773 - DNA, 13 bp, Artificial Sequence
  Oligonucleotide for detection of SNP TSC0033347
agtggtacgattt

SEQ ID NO: 133774 - DNA, 13 bp, Artificial Sequence
  Oligonucleotide for detection of SNP TSC0033347
aaatcgtaccact

SEQ ID NO: 133775 - DNA, 13 bp, Artificial Sequence
  Oligonucleotide for detection of SNP TSC0033347
agtggtgcgattt

SEQ ID NO: 133776 - DNA, 13 bp, Artificial Sequence
  Oligonucleotide for detection of SNP TSC0033347
aaatcgcaccact

SEQ ID NO: 133777 - DNA, 13 bp, Artificial Sequence
  Oligonucleotide for detection of SNP TSC0033347
agtggcgcgattt

SEQ ID NO: 133778 - DNA, 13 bp, Artificial Sequence
  Oligonucleotide for detection of SNP TSC0033347
aaatcgcgccact

SEQ ID NO: 133779 - DNA, 13 bp, Artificial Sequence
  Oligonucleotide for detection of SNP TSC0033348
aaatttggggggt

SEQ ID NO: 133780 - DNA, 13 bp, Artificial Sequence
  Oligonucleotide for detection of SNP TSC0033348
accccccaaattt

SEQ ID NO: 133781 - DNA, 13 bp, Artificial Sequence
  Oligonucleotide for detection of SNP TSC0033348
aaattttgggggt

SEQ ID NO: 133782 - DNA, 13 bp, Artificial Sequence
  Oligonucleotide for detection of SNP TSC0033348
acccccaaaattt

SEQ ID NO: 133783 - DNA, 13 bp, Artificial Sequence
  Oligonucleotide for detection of SNP TSC0033352
tttattatgttat

SEQ ID NO: 133784 - DNA, 13 bp, Artificial Sequence
  Oligonucleotide for detection of SNP TSC0033352
ataacataataaa

SEQ ID NO: 133785 - DNA, 13 bp, Artificial Sequence
  Oligonucleotide for detection of SNP TSC0033352
tttattttgttat

SEQ ID NO: 133786 - DNA, 13 bp, Artificial Sequence
  Oligonucleotide for detection of SNP TSC0033352
ataacaaaataaa

SEQ ID NO: 133787 - DNA, 13 bp, Artificial Sequence
  Oligonucleotide for detection of SNP TSC0033352
atggtatgatgga

SEQ ID NO: 133788 - DNA, 13 bp, Artificial Sequence
  Oligonucleotide for detection of SNP TSC0033352
tccatcataccat

SEQ ID NO: 133789 - DNA, 13 bp, Artificial Sequence
  Oligonucleotide for detection of SNP TSC0033352
atggtaggatgga

SEQ ID NO: 133790 - DNA, 13 bp, Artificial Sequence
  Oligonucleotide for detection of SNP TSC0033352
tccatcctaccat

SEQ ID NO: 133791 - DNA, 13 bp, Artificial Sequence
  Oligonucleotide for detection of SNP TSC0033353
gagttttggagtt

SEQ ID NO: 133792 - DNA, 13 bp, Artificial Sequence
  Oligonucleotide for detection of SNP TSC0033353
aactccaaaactc

SEQ ID NO: 133793 - DNA, 13 bp, Artificial Sequence
  Oligonucleotide for detection of SNP TSC0033353
gagtttcggagtt

SEQ ID NO: 133794 - DNA, 13 bp, Artificial Sequence
  Oligonucleotide for detection of SNP TSC0033353
aactccgaaactc

SEQ ID NO: 133795 - DNA, 13 bp, Artificial Sequence
  Oligonucleotide for detection of SNP TSC0033353
aattttggggtty

SEQ ID NO: 133796 - DNA, 13 bp, Artificial Sequence
  Oligonucleotide for detection of SNP TSC0033353
raaccccaaaatt

SEQ ID NO: 133797 - DNA, 13 bp, Artificial Sequence
  Oligonucleotide for detection of SNP TSC0033353
aattttagggtty

SEQ ID NO: 133798 - DNA, 13 bp, Artificial Sequence
  Oligonucleotide for detection of SNP TSC0033353
raaccctaaaatt

SEQ ID NO: 133799 - DNA, 13 bp, Artificial Sequence
  Oligonucleotide for detection of SNP TSC0033353
aatttcggggtty

SEQ ID NO: 133800 - DNA, 13 bp, Artificial Sequence
  Oligonucleotide for detection of SNP TSC0033353
raaccccgaaatt

SEQ ID NO: 133801 - DNA, 13 bp, Artificial Sequence
  Oligonucleotide for detection of SNP TSC0033354
agatagagttttg

SEQ ID NO: 133802 - DNA, 13 bp, Artificial Sequence
  Oligonucleotide for detection of SNP TSC0033354
caaaactctatct

SEQ ID NO: 133803 - DNA, 13 bp, Artificial Sequence
  Oligonucleotide for detection of SNP TSC0033363
atttttggaaaay

SEQ ID NO: 133804 - DNA, 13 bp, Artificial Sequence
  Oligonucleotide for detection of SNP TSC0033363
rttttccaaaaat

SEQ ID NO: 133805 - DNA, 13 bp, Artificial Sequence
  Oligonucleotide for detection of SNP TSC0033363
attttttgaaaay

SEQ ID NO: 133806 - DNA, 13 bp, Artificial Sequence
  Oligonucleotide for detection of SNP TSC0033363
rttttcaaaaaat

SEQ ID NO: 133807 - DNA, 13 bp, Artificial Sequence
  Oligonucleotide for detection of SNP TSC0033366
tgggtgaattatt

SEQ ID NO: 133808 - DNA, 13 bp, Artificial Sequence
  Oligonucleotide for detection of SNP TSC0033366
aataattcaccca

SEQ ID NO: 133809 - DNA, 13 bp, Artificial Sequence
  Oligonucleotide for detection of SNP TSC0033366
tgggtggattatt

SEQ ID NO: 133810 - DNA, 13 bp, Artificial Sequence
  Oligonucleotide for detection of SNP TSC0033366
aataatccaccca

SEQ ID NO: 133811 - DNA, 13 bp, Artificial Sequence
  Oligonucleotide for detection of SNP TSC0033366
cgggtgaattatt

SEQ ID NO: 133812 - DNA, 13 bp, Artificial Sequence
  Oligonucleotide for detection of SNP TSC0033366
aataattcacccg

SEQ ID NO: 133813 - DNA, 13 bp, Artificial Sequence
  Oligonucleotide for detection of SNP TSC0033366
cgggtggattatt

SEQ ID NO: 133814 - DNA, 13 bp, Artificial Sequence
  Oligonucleotide for detection of SNP TSC0033366
aataatccacccg

SEQ ID NO: 133815 - DNA, 13 bp, Artificial Sequence
  Oligonucleotide for detection of SNP TSC0033367
taggttaagaaga

SEQ ID NO: 133816 - DNA, 13 bp, Artificial Sequence
  Oligonucleotide for detection of SNP TSC0033367
tcttcttaaccta

SEQ ID NO: 133817 - DNA, 13 bp, Artificial Sequence
  Oligonucleotide for detection of SNP TSC0033367
taggttgagaaga

SEQ ID NO: 133818 - DNA, 13 bp, Artificial Sequence
  Oligonucleotide for detection of SNP TSC0033367
tcttctcaaccta

SEQ ID NO: 133819 - DNA, 13 bp, Artificial Sequence
  Oligonucleotide for detection of SNP TSC0033369
gttattaatttta

SEQ ID NO: 133820 - DNA, 13 bp, Artificial Sequence
  Oligonucleotide for detection of SNP TSC0033369
taaaattaataac

SEQ ID NO: 133821 - DNA, 13 bp, Artificial Sequence
  Oligonucleotide for detection of SNP TSC0033369
gttatttatttta

SEQ ID NO: 133822 - DNA, 13 bp, Artificial Sequence
  Oligonucleotide for detection of SNP TSC0033369
taaaataaataac

SEQ ID NO: 133823 - DNA, 13 bp, Artificial Sequence
  Oligonucleotide for detection of SNP TSC0033369
tggggttaatggy

SEQ ID NO: 133824 - DNA, 13 bp, Artificial Sequence
  Oligonucleotide for detection of SNP TSC0033369
rccattaacccca

SEQ ID NO: 133825 - DNA, 13 bp, Artificial Sequence
  Oligonucleotide for detection of SNP TSC0033369
tggggtgaatggy

SEQ ID NO: 133826 - DNA, 13 bp, Artificial Sequence
  Oligonucleotide for detection of SNP TSC0033369
rccattcacccca

SEQ ID NO: 133827 - DNA, 13 bp, Artificial Sequence
  Oligonucleotide for detection of SNP TSC0033370
gaggttatgagat

SEQ ID NO: 133828 - DNA, 13 bp, Artificial Sequence
  Oligonucleotide for detection of SNP TSC0033370
atctcataacctc

SEQ ID NO: 133829 - DNA, 13 bp, Artificial Sequence
  Oligonucleotide for detection of SNP TSC0033370
gaggttgtgagat

SEQ ID NO: 133830 - DNA, 13 bp, Artificial Sequence
  Oligonucleotide for detection of SNP TSC0033370
atctcacaacctc

SEQ ID NO: 133831 - DNA, 13 bp, Artificial Sequence
  Oligonucleotide for detection of SNP TSC0033372
attttatgtgtaa

SEQ ID NO: 133832 - DNA, 13 bp, Artificial Sequence
  Oligonucleotide for detection of SNP TSC0033372
ttacacataaaat

SEQ ID NO: 133833 - DNA, 13 bp, Artificial Sequence
  Oligonucleotide for detection of SNP TSC0033372
attttacgtgtaa

SEQ ID NO: 133834 - DNA, 13 bp, Artificial Sequence
  Oligonucleotide for detection of SNP TSC0033372
ttacacgtaaaat

SEQ ID NO: 133835 - DNA, 13 bp, Artificial Sequence
  Oligonucleotide for detection of SNP TSC0033372
ttgtatgtaaaat

SEQ ID NO: 133836 - DNA, 13 bp, Artificial Sequence
  Oligonucleotide for detection of SNP TSC0033372
attttacatacaa

SEQ ID NO: 133837 - DNA, 13 bp, Artificial Sequence
  Oligonucleotide for detection of SNP TSC0033372
ttgtatataaaat

SEQ ID NO: 133838 - DNA, 13 bp, Artificial Sequence
  Oligonucleotide for detection of SNP TSC0033372
attttatatacaa

SEQ ID NO: 133839 - DNA, 13 bp, Artificial Sequence
  Oligonucleotide for detection of SNP TSC0033372
ttgtacgtaaaat

SEQ ID NO: 133840 - DNA, 13 bp, Artificial Sequence
  Oligonucleotide for detection of SNP TSC0033372
attttacgtacaa

SEQ ID NO: 133841 - DNA, 13 bp, Artificial Sequence
  Oligonucleotide for detection of SNP TSC0033373
aattttagttaga

SEQ ID NO: 133842 - DNA, 13 bp, Artificial Sequence
  Oligonucleotide for detection of SNP TSC0033373
tctaactaaaatt

SEQ ID NO: 133843 - DNA, 13 bp, Artificial Sequence
  Oligonucleotide for detection of SNP TSC0033373
aattttggttaga

SEQ ID NO: 133844 - DNA, 13 bp, Artificial Sequence
  Oligonucleotide for detection of SNP TSC0033373
tctaaccaaaatt

SEQ ID NO: 133845 - DNA, 13 bp, Artificial Sequence
  Oligonucleotide for detection of SNP TSC0033373
aatttcggttaga

SEQ ID NO: 133846 - DNA, 13 bp, Artificial Sequence
  Oligonucleotide for detection of SNP TSC0033373
tctaaccgaaatt

SEQ ID NO: 133847 - DNA, 13 bp, Artificial Sequence
  Oligonucleotide for detection of SNP TSC0033373
tttgattggaatt

SEQ ID NO: 133848 - DNA, 13 bp, Artificial Sequence
  Oligonucleotide for detection of SNP TSC0033373
aattccaatcaaa

SEQ ID NO: 133849 - DNA, 13 bp, Artificial Sequence
  Oligonucleotide for detection of SNP TSC0033373
tttgatcggaatt

SEQ ID NO: 133850 - DNA, 13 bp, Artificial Sequence
  Oligonucleotide for detection of SNP TSC0033373
aattccgatcaaa

SEQ ID NO: 133851 - DNA, 13 bp, Artificial Sequence
  Oligonucleotide for detection of SNP TSC0033374
gatattatttatt

SEQ ID NO: 133852 - DNA, 13 bp, Artificial Sequence
  Oligonucleotide for detection of SNP TSC0033374
aataaataatatc

SEQ ID NO: 133853 - DNA, 13 bp, Artificial Sequence
  Oligonucleotide for detection of SNP TSC0033374
gatattgtttatt

SEQ ID NO: 133854 - DNA, 13 bp, Artificial Sequence
  Oligonucleotide for detection of SNP TSC0033374
aataaacaatatc

SEQ ID NO: 133855 - DNA, 13 bp, Artificial Sequence
  Oligonucleotide for detection of SNP TSC0033376
agatggagtttta

SEQ ID NO: 133856 - DNA, 13 bp, Artificial Sequence
  Oligonucleotide for detection of SNP TSC0033376
taaaactccatct

SEQ ID NO: 133857 - DNA, 13 bp, Artificial Sequence
  Oligonucleotide for detection of SNP TSC0033377
ttgtttattttta

SEQ ID NO: 133858 - DNA, 13 bp, Artificial Sequence
  Oligonucleotide for detection of SNP TSC0033377
taaaaataaacaa

SEQ ID NO: 133859 - DNA, 13 bp, Artificial Sequence
  Oligonucleotide for detection of SNP TSC0033377
tggagatgagtag

SEQ ID NO: 133860 - DNA, 13 bp, Artificial Sequence
  Oligonucleotide for detection of SNP TSC0033377
ctactcatctcca

SEQ ID NO: 133861 - DNA, 13 bp, Artificial Sequence
  Oligonucleotide for detection of SNP TSC0033377
tggagacgagtag

SEQ ID NO: 133862 - DNA, 13 bp, Artificial Sequence
  Oligonucleotide for detection of SNP TSC0033377
ctactcgtctcca

SEQ ID NO: 133863 - DNA, 13 bp, Artificial Sequence
  Oligonucleotide for detection of SNP TSC0033379
atgttatagaggg

SEQ ID NO: 133864 - DNA, 13 bp, Artificial Sequence
  Oligonucleotide for detection of SNP TSC0033379
ccctctataacat

SEQ ID NO: 133865 - DNA, 13 bp, Artificial Sequence
  Oligonucleotide for detection of SNP TSC0033379
atgttagagaggg

SEQ ID NO: 133866 - DNA, 13 bp, Artificial Sequence
  Oligonucleotide for detection of SNP TSC0033379
ccctctctaacat

SEQ ID NO: 133867 - DNA, 13 bp, Artificial Sequence
  Oligonucleotide for detection of SNP TSC0033379
ttttttgtagtat

SEQ ID NO: 133868 - DNA, 13 bp, Artificial Sequence
  Oligonucleotide for detection of SNP TSC0033379
atactacaaaaaa

SEQ ID NO: 133869 - DNA, 13 bp, Artificial Sequence
  Oligonucleotide for detection of SNP TSC0033379
ttttttttagtat

SEQ ID NO: 133870 - DNA, 13 bp, Artificial Sequence
  Oligonucleotide for detection of SNP TSC0033379
atactaaaaaaaa

SEQ ID NO: 133871 - DNA, 13 bp, Artificial Sequence
  Oligonucleotide for detection of SNP TSC0033380
tatataaatttat

SEQ ID NO: 133872 - DNA, 13 bp, Artificial Sequence
  Oligonucleotide for detection of SNP TSC0033380
ataaatttatata

SEQ ID NO: 133873 - DNA, 13 bp, Artificial Sequence
  Oligonucleotide for detection of SNP TSC0033380
atagatttgtgta

SEQ ID NO: 133874 - DNA, 13 bp, Artificial Sequence
  Oligonucleotide for detection of SNP TSC0033380
tacacaaatctat

SEQ ID NO: 133875 - DNA, 13 bp, Artificial Sequence
  Oligonucleotide for detection of SNP TSC0033380
atagatgtgtgta

SEQ ID NO: 133876 - DNA, 13 bp, Artificial Sequence
  Oligonucleotide for detection of SNP TSC0033380
tacacacatctat

SEQ ID NO: 133877 - DNA, 13 bp, Artificial Sequence
  Oligonucleotide for detection of SNP TSC0033381
taattagtaaagt

SEQ ID NO: 133878 - DNA, 13 bp, Artificial Sequence
  Oligonucleotide for detection of SNP TSC0033381
actttactaatta

SEQ ID NO: 133879 - DNA, 13 bp, Artificial Sequence
  Oligonucleotide for detection of SNP TSC0033381
taattaataaagt

SEQ ID NO: 133880 - DNA, 13 bp, Artificial Sequence
  Oligonucleotide for detection of SNP TSC0033381
actttattaatta

SEQ ID NO: 133881 - DNA, 13 bp, Artificial Sequence
  Oligonucleotide for detection of SNP TSC0033383
aaaatttggataa

SEQ ID NO: 133882 - DNA, 13 bp, Artificial Sequence
  Oligonucleotide for detection of SNP TSC0033383
ttatccaaatttt

SEQ ID NO: 133883 - DNA, 13 bp, Artificial Sequence
  Oligonucleotide for detection of SNP TSC0033383
aaaattcggataa

SEQ ID NO: 133884 - DNA, 13 bp, Artificial Sequence
  Oligonucleotide for detection of SNP TSC0033383
ttatccgaatttt

SEQ ID NO: 133885 - DNA, 13 bp, Artificial Sequence
  Oligonucleotide for detection of SNP TSC0033383
ttgtttgggtttt

SEQ ID NO: 133886 - DNA, 13 bp, Artificial Sequence
  Oligonucleotide for detection of SNP TSC0033383
aaaacccaaacaa

SEQ ID NO: 133887 - DNA, 13 bp, Artificial Sequence
  Oligonucleotide for detection of SNP TSC0033383
ttgtttaggtttt

SEQ ID NO: 133888 - DNA, 13 bp, Artificial Sequence
  Oligonucleotide for detection of SNP TSC0033383
aaaacctaaacaa

SEQ ID NO: 133889 - DNA, 13 bp, Artificial Sequence
  Oligonucleotide for detection of SNP TSC0033383
ttgttcgggtttt

SEQ ID NO: 133890 - DNA, 13 bp, Artificial Sequence
  Oligonucleotide for detection of SNP TSC0033383
aaaacccgaacaa

SEQ ID NO: 133891 - DNA, 13 bp, Artificial Sequence
  Oligonucleotide for detection of SNP TSC0033390
agagaaattttty

SEQ ID NO: 133892 - DNA, 13 bp, Artificial Sequence
  Oligonucleotide for detection of SNP TSC0033390
raaaaatttctct

SEQ ID NO: 133893 - DNA, 13 bp, Artificial Sequence
  Oligonucleotide for detection of SNP TSC0033390
agagaatttttty

SEQ ID NO: 133894 - DNA, 13 bp, Artificial Sequence
  Oligonucleotide for detection of SNP TSC0033390
raaaaaattctct

SEQ ID NO: 133895 - DNA, 13 bp, Artificial Sequence
  Oligonucleotide for detection of SNP TSC0033390
gaggggttttttt

SEQ ID NO: 133896 - DNA, 13 bp, Artificial Sequence
  Oligonucleotide for detection of SNP TSC0033390
aaaaaaacccctc

SEQ ID NO: 133897 - DNA, 13 bp, Artificial Sequence
  Oligonucleotide for detection of SNP TSC0033390
gagggggtttttt

SEQ ID NO: 133898 - DNA, 13 bp, Artificial Sequence
  Oligonucleotide for detection of SNP TSC0033390
aaaaaaccccctc

SEQ ID NO: 133899 - DNA, 13 bp, Artificial Sequence
  Oligonucleotide for detection of SNP TSC0033391
ttttttaggaaay

SEQ ID NO: 133900 - DNA, 13 bp, Artificial Sequence
  Oligonucleotide for detection of SNP TSC0033391
rtttcctaaaaaa

SEQ ID NO: 133901 - DNA, 13 bp, Artificial Sequence
  Oligonucleotide for detection of SNP TSC0033391
ttttttgggaaay

SEQ ID NO: 133902 - DNA, 13 bp, Artificial Sequence
  Oligonucleotide for detection of SNP TSC0033391
rtttcccaaaaaa

SEQ ID NO: 133903 - DNA, 13 bp, Artificial Sequence
  Oligonucleotide for detection of SNP TSC0033391
tttttcgggaaay

SEQ ID NO: 133904 - DNA, 13 bp, Artificial Sequence
  Oligonucleotide for detection of SNP TSC0033391
rtttcccgaaaaa

SEQ ID NO: 133905 - DNA, 13 bp, Artificial Sequence
  Oligonucleotide for detection of SNP TSC0033391
gttttttgggaag

SEQ ID NO: 133906 - DNA, 13 bp, Artificial Sequence
  Oligonucleotide for detection of SNP TSC0033391
cttcccaaaaaac

SEQ ID NO: 133907 - DNA, 13 bp, Artificial Sequence
  Oligonucleotide for detection of SNP TSC0033391
gtttttcgggaag

SEQ ID NO: 133908 - DNA, 13 bp, Artificial Sequence
  Oligonucleotide for detection of SNP TSC0033391
cttcccgaaaaac

SEQ ID NO: 133909 - DNA, 13 bp, Artificial Sequence
  Oligonucleotide for detection of SNP TSC0033392
tagtttagggtat

SEQ ID NO: 133910 - DNA, 13 bp, Artificial Sequence
  Oligonucleotide for detection of SNP TSC0033392
ataccctaaacta

SEQ ID NO: 133911 - DNA, 13 bp, Artificial Sequence
  Oligonucleotide for detection of SNP TSC0033392
tagtttggggtat

SEQ ID NO: 133912 - DNA, 13 bp, Artificial Sequence
  Oligonucleotide for detection of SNP TSC0033392
ataccccaaacta

SEQ ID NO: 133913 - DNA, 13 bp, Artificial Sequence
  Oligonucleotide for detection of SNP TSC0033392
tagttcggggtat

SEQ ID NO: 133914 - DNA, 13 bp, Artificial Sequence
  Oligonucleotide for detection of SNP TSC0033392
ataccccgaacta

SEQ ID NO: 133915 - DNA, 13 bp, Artificial Sequence
  Oligonucleotide for detection of SNP TSC0033393
ttaaatgatatta

SEQ ID NO: 133916 - DNA, 13 bp, Artificial Sequence
  Oligonucleotide for detection of SNP TSC0033393
taatatcatttaa

SEQ ID NO: 133917 - DNA, 13 bp, Artificial Sequence
  Oligonucleotide for detection of SNP TSC0033393
ttaaattatatta

SEQ ID NO: 133918 - DNA, 13 bp, Artificial Sequence
  Oligonucleotide for detection of SNP TSC0033393
taatataatttaa

SEQ ID NO: 133919 - DNA, 13 bp, Artificial Sequence
  Oligonucleotide for detection of SNP TSC0033393
tgatattatttgg

SEQ ID NO: 133920 - DNA, 13 bp, Artificial Sequence
  Oligonucleotide for detection of SNP TSC0033393
ccaaataatatca

SEQ ID NO: 133921 - DNA, 13 bp, Artificial Sequence
  Oligonucleotide for detection of SNP TSC0033393
tgatataatttgg

SEQ ID NO: 133922 - DNA, 13 bp, Artificial Sequence
  Oligonucleotide for detection of SNP TSC0033393
ccaaattatatca

SEQ ID NO: 133923 - DNA, 13 bp, Artificial Sequence
  Oligonucleotide for detection of SNP TSC0033394
aaaaataggaagt

SEQ ID NO: 133924 - DNA, 13 bp, Artificial Sequence
  Oligonucleotide for detection of SNP TSC0033394
acttcctattttt

SEQ ID NO: 133925 - DNA, 13 bp, Artificial Sequence
  Oligonucleotide for detection of SNP TSC0033394
aaaaattggaagt

SEQ ID NO: 133926 - DNA, 13 bp, Artificial Sequence
  Oligonucleotide for detection of SNP TSC0033394
acttccaattttt

SEQ ID NO: 133927 - DNA, 13 bp, Artificial Sequence
  Oligonucleotide for detection of SNP TSC0033395
gtatttgtatggy

SEQ ID NO: 133928 - DNA, 13 bp, Artificial Sequence
  Oligonucleotide for detection of SNP TSC0033395
rccatacaaatac

SEQ ID NO: 133929 - DNA, 13 bp, Artificial Sequence
  Oligonucleotide for detection of SNP TSC0033395
gtatttttatggy

SEQ ID NO: 133930 - DNA, 13 bp, Artificial Sequence
  Oligonucleotide for detection of SNP TSC0033395
rccataaaaatac

SEQ ID NO: 133931 - DNA, 13 bp, Artificial Sequence
  Oligonucleotide for detection of SNP TSC0033395
gttatataaatgy

SEQ ID NO: 133932 - DNA, 13 bp, Artificial Sequence
  Oligonucleotide for detection of SNP TSC0033395
rcatttatataac

SEQ ID NO: 133933 - DNA, 13 bp, Artificial Sequence
  Oligonucleotide for detection of SNP TSC0033395
gttataaaaatgy

SEQ ID NO: 133934 - DNA, 13 bp, Artificial Sequence
  Oligonucleotide for detection of SNP TSC0033395
rcatttttataac

SEQ ID NO: 133935 - DNA, 13 bp, Artificial Sequence
  Oligonucleotide for detection of SNP TSC0033397
tttttggtggtty

SEQ ID NO: 133936 - DNA, 13 bp, Artificial Sequence
  Oligonucleotide for detection of SNP TSC0033397
raaccaccaaaaa

SEQ ID NO: 133937 - DNA, 13 bp, Artificial Sequence
  Oligonucleotide for detection of SNP TSC0033397
tttttgatggtty

SEQ ID NO: 133938 - DNA, 13 bp, Artificial Sequence
  Oligonucleotide for detection of SNP TSC0033397
raaccatcaaaaa

SEQ ID NO: 133939 - DNA, 13 bp, Artificial Sequence
  Oligonucleotide for detection of SNP TSC0033397
ttttcggtggtty

SEQ ID NO: 133940 - DNA, 13 bp, Artificial Sequence
  Oligonucleotide for detection of SNP TSC0033397
raaccaccgaaaa

SEQ ID NO: 133941 - DNA, 13 bp, Artificial Sequence
  Oligonucleotide for detection of SNP TSC0033397
ttttcgatggtty

SEQ ID NO: 133942 - DNA, 13 bp, Artificial Sequence
  Oligonucleotide for detection of SNP TSC0033397
raaccatcgaaaa

SEQ ID NO: 133943 - DNA, 13 bp, Artificial Sequence
  Oligonucleotide for detection of SNP TSC0033400
ttatggtagttag

SEQ ID NO: 133944 - DNA, 13 bp, Artificial Sequence
  Oligonucleotide for detection of SNP TSC0033400
ctaactaccataa

SEQ ID NO: 133945 - DNA, 13 bp, Artificial Sequence
  Oligonucleotide for detection of SNP TSC0033400
ttatgggagttag

SEQ ID NO: 133946 - DNA, 13 bp, Artificial Sequence
  Oligonucleotide for detection of SNP TSC0033400
ctaactcccataa

SEQ ID NO: 133947 - DNA, 13 bp, Artificial Sequence
  Oligonucleotide for detection of SNP TSC0033400
ttgattgttatga

SEQ ID NO: 133948 - DNA, 13 bp, Artificial Sequence
  Oligonucleotide for detection of SNP TSC0033400
tcataacaatcaa

SEQ ID NO: 133949 - DNA, 13 bp, Artificial Sequence
  Oligonucleotide for detection of SNP TSC0033400
ttgatttttatga

SEQ ID NO: 133950 - DNA, 13 bp, Artificial Sequence
  Oligonucleotide for detection of SNP TSC0033400
tcataaaaatcaa

SEQ ID NO: 133951 - DNA, 13 bp, Artificial Sequence
  Oligonucleotide for detection of SNP TSC0033401
aattagaaatgty

SEQ ID NO: 133952 - DNA, 13 bp, Artificial Sequence
  Oligonucleotide for detection of SNP TSC0033401
racatttctaatt

SEQ ID NO: 133953 - DNA, 13 bp, Artificial Sequence
  Oligonucleotide for detection of SNP TSC0033401
aattaggaatgty

SEQ ID NO: 133954 - DNA, 13 bp, Artificial Sequence
  Oligonucleotide for detection of SNP TSC0033401
racattcctaatt

SEQ ID NO: 133955 - DNA, 13 bp, Artificial Sequence
  Oligonucleotide for detection of SNP TSC0033403
tttgggatagggt

SEQ ID NO: 133956 - DNA, 13 bp, Artificial Sequence
  Oligonucleotide for detection of SNP TSC0033403
accctatcccaaa

SEQ ID NO: 133957 - DNA, 13 bp, Artificial Sequence
  Oligonucleotide for detection of SNP TSC0033403
tttggggtagggt

SEQ ID NO: 133958 - DNA, 13 bp, Artificial Sequence
  Oligonucleotide for detection of SNP TSC0033403
accctaccccaaa

SEQ ID NO: 133959 - DNA, 13 bp, Artificial Sequence
  Oligonucleotide for detection of SNP TSC0033405
atttagattttty

SEQ ID NO: 133960 - DNA, 13 bp, Artificial Sequence
  Oligonucleotide for detection of SNP TSC0033405
raaaaatctaaat

SEQ ID NO: 133961 - DNA, 13 bp, Artificial Sequence
  Oligonucleotide for detection of SNP TSC0033406
tatatagttttaa

SEQ ID NO: 133962 - DNA, 13 bp, Artificial Sequence
  Oligonucleotide for detection of SNP TSC0033406
ttaaaactatata

SEQ ID NO: 133963 - DNA, 13 bp, Artificial Sequence
  Oligonucleotide for detection of SNP TSC0033407
tattaatggggty

SEQ ID NO: 133964 - DNA, 13 bp, Artificial Sequence
  Oligonucleotide for detection of SNP TSC0033407
raccccattaata

SEQ ID NO: 133965 - DNA, 13 bp, Artificial Sequence
  Oligonucleotide for detection of SNP TSC0033407
tattaacggggty

SEQ ID NO: 133966 - DNA, 13 bp, Artificial Sequence
  Oligonucleotide for detection of SNP TSC0033407
raccccgttaata

SEQ ID NO: 133967 - DNA, 13 bp, Artificial Sequence
  Oligonucleotide for detection of SNP TSC0033408
tagttggtaaata

SEQ ID NO: 133968 - DNA, 13 bp, Artificial Sequence
  Oligonucleotide for detection of SNP TSC0033408
tatttaccaacta

SEQ ID NO: 133969 - DNA, 13 bp, Artificial Sequence
  Oligonucleotide for detection of SNP TSC0033408
tagttgttaaata

SEQ ID NO: 133970 - DNA, 13 bp, Artificial Sequence
  Oligonucleotide for detection of SNP TSC0033408
tatttaacaacta

SEQ ID NO: 133971 - DNA, 13 bp, Artificial Sequence
  Oligonucleotide for detection of SNP TSC0033408
tgtttattagtta

SEQ ID NO: 133972 - DNA, 13 bp, Artificial Sequence
  Oligonucleotide for detection of SNP TSC0033408
taactaataaaca

SEQ ID NO: 133973 - DNA, 13 bp, Artificial Sequence
  Oligonucleotide for detection of SNP TSC0033408
tgtttaatagtta

SEQ ID NO: 133974 - DNA, 13 bp, Artificial Sequence
  Oligonucleotide for detection of SNP TSC0033408
taactattaaaca

SEQ ID NO: 133975 - DNA, 13 bp, Artificial Sequence
  Oligonucleotide for detection of SNP TSC0033409
tatatttaaatgg

SEQ ID NO: 133976 - DNA, 13 bp, Artificial Sequence
  Oligonucleotide for detection of SNP TSC0033409
ccatttaaatata

SEQ ID NO: 133977 - DNA, 13 bp, Artificial Sequence
  Oligonucleotide for detection of SNP TSC0033409
tatattgaaatgg

SEQ ID NO: 133978 - DNA, 13 bp, Artificial Sequence
  Oligonucleotide for detection of SNP TSC0033409
ccatttcaatata

SEQ ID NO: 133979 - DNA, 13 bp, Artificial Sequence
  Oligonucleotide for detection of SNP TSC0033409
tatatttaaacgg

SEQ ID NO: 133980 - DNA, 13 bp, Artificial Sequence
  Oligonucleotide for detection of SNP TSC0033409
ccgtttaaatata

SEQ ID NO: 133981 - DNA, 13 bp, Artificial Sequence
  Oligonucleotide for detection of SNP TSC0033409
tatattgaaacgg

SEQ ID NO: 133982 - DNA, 13 bp, Artificial Sequence
  Oligonucleotide for detection of SNP TSC0033409
ccgtttcaatata

SEQ ID NO: 133983 - DNA, 13 bp, Artificial Sequence
  Oligonucleotide for detection of SNP TSC0033409
ttgtttgagtatg

SEQ ID NO: 133984 - DNA, 13 bp, Artificial Sequence
  Oligonucleotide for detection of SNP TSC0033409
catactcaaacaa

SEQ ID NO: 133985 - DNA, 13 bp, Artificial Sequence
  Oligonucleotide for detection of SNP TSC0033409
ttgttttagtatg

SEQ ID NO: 133986 - DNA, 13 bp, Artificial Sequence
  Oligonucleotide for detection of SNP TSC0033409
catactaaaacaa

SEQ ID NO: 133987 - DNA, 13 bp, Artificial Sequence
  Oligonucleotide for detection of SNP TSC0033409
tcgtttgagtatg

SEQ ID NO: 133988 - DNA, 13 bp, Artificial Sequence
  Oligonucleotide for detection of SNP TSC0033409
catactcaaacga

SEQ ID NO: 133989 - DNA, 13 bp, Artificial Sequence
  Oligonucleotide for detection of SNP TSC0033409
tcgttttagtatg

SEQ ID NO: 133990 - DNA, 13 bp, Artificial Sequence
  Oligonucleotide for detection of SNP TSC0033409
catactaaaacga

SEQ ID NO: 133991 - DNA, 13 bp, Artificial Sequence
  Oligonucleotide for detection of SNP TSC0033412
gagtttggttata

SEQ ID NO: 133992 - DNA, 13 bp, Artificial Sequence
  Oligonucleotide for detection of SNP TSC0033412
tataaccaaactc

SEQ ID NO: 133993 - DNA, 13 bp, Artificial Sequence
  Oligonucleotide for detection of SNP TSC0033412
gagttttgttata

SEQ ID NO: 133994 - DNA, 13 bp, Artificial Sequence
  Oligonucleotide for detection of SNP TSC0033412
tataacaaaactc

SEQ ID NO: 133995 - DNA, 13 bp, Artificial Sequence
  Oligonucleotide for detection of SNP TSC0033412
tatagttagatty

SEQ ID NO: 133996 - DNA, 13 bp, Artificial Sequence
  Oligonucleotide for detection of SNP TSC0033412
raatctaactata

SEQ ID NO: 133997 - DNA, 13 bp, Artificial Sequence
  Oligonucleotide for detection of SNP TSC0033412
tatagtaagatty

SEQ ID NO: 133998 - DNA, 13 bp, Artificial Sequence
  Oligonucleotide for detection of SNP TSC0033412
raatcttactata

SEQ ID NO: 133999 - DNA, 13 bp, Artificial Sequence
  Oligonucleotide for detection of SNP TSC0033416
tattaatgtttay

SEQ ID NO: 134000 - DNA, 13 bp, Artificial Sequence
  Oligonucleotide for detection of SNP TSC0033416
rtaaacattaata

SEQ ID NO: 134001 - DNA, 13 bp, Artificial Sequence
  Oligonucleotide for detection of SNP TSC0033416
tattaacgtttay

SEQ ID NO: 134002 - DNA, 13 bp, Artificial Sequence
  Oligonucleotide for detection of SNP TSC0033416
rtaaacgttaata

SEQ ID NO: 134003 - DNA, 13 bp, Artificial Sequence
  Oligonucleotide for detection of SNP TSC0033416
gtagatgttaatg

SEQ ID NO: 134004 - DNA, 13 bp, Artificial Sequence
  Oligonucleotide for detection of SNP TSC0033416
cattaacatctac

SEQ ID NO: 134005 - DNA, 13 bp, Artificial Sequence
  Oligonucleotide for detection of SNP TSC0033416
gtagatattaatg

SEQ ID NO: 134006 - DNA, 13 bp, Artificial Sequence
  Oligonucleotide for detection of SNP TSC0033416
cattaatatctac

SEQ ID NO: 134007 - DNA, 13 bp, Artificial Sequence
  Oligonucleotide for detection of SNP TSC0033416
gtagacgttaatg

SEQ ID NO: 134008 - DNA, 13 bp, Artificial Sequence
  Oligonucleotide for detection of SNP TSC0033416
cattaacgtctac

SEQ ID NO: 134009 - DNA, 13 bp, Artificial Sequence
  Oligonucleotide for detection of SNP TSC0033418
aggtaaagttaaa

SEQ ID NO: 134010 - DNA, 13 bp, Artificial Sequence
  Oligonucleotide for detection of SNP TSC0033418
tttaactttacct

SEQ ID NO: 134011 - DNA, 13 bp, Artificial Sequence
  Oligonucleotide for detection of SNP TSC0033418
aggtaatgttaaa

SEQ ID NO: 134012 - DNA, 13 bp, Artificial Sequence
  Oligonucleotide for detection of SNP TSC0033418
tttaacattacct

SEQ ID NO: 134013 - DNA, 13 bp, Artificial Sequence
  Oligonucleotide for detection of SNP TSC0033418
tttggttttattt

SEQ ID NO: 134014 - DNA, 13 bp, Artificial Sequence
  Oligonucleotide for detection of SNP TSC0033418
aaataaaaccaaa

SEQ ID NO: 134015 - DNA, 13 bp, Artificial Sequence
  Oligonucleotide for detection of SNP TSC0033418
tttggtattattt

SEQ ID NO: 134016 - DNA, 13 bp, Artificial Sequence
  Oligonucleotide for detection of SNP TSC0033418
aaataataccaaa

SEQ ID NO: 134017 - DNA, 13 bp, Artificial Sequence
  Oligonucleotide for detection of SNP TSC0033419
tggaatgttttaa

SEQ ID NO: 134018 - DNA, 13 bp, Artificial Sequence
  Oligonucleotide for detection of SNP TSC0033419
ttaaaacattcca

SEQ ID NO: 134019 - DNA, 13 bp, Artificial Sequence
  Oligonucleotide for detection of SNP TSC0033419
tggaatattttaa

SEQ ID NO: 134020 - DNA, 13 bp, Artificial Sequence
  Oligonucleotide for detection of SNP TSC0033419
ttaaaatattcca

SEQ ID NO: 134021 - DNA, 13 bp, Artificial Sequence
  Oligonucleotide for detection of SNP TSC0033419
tggaacgttttaa

SEQ ID NO: 134022 - DNA, 13 bp, Artificial Sequence
  Oligonucleotide for detection of SNP TSC0033419
ttaaaacgttcca

SEQ ID NO: 134023 - DNA, 13 bp, Artificial Sequence
  Oligonucleotide for detection of SNP TSC0033420
gagaatagggtta

SEQ ID NO: 134024 - DNA, 13 bp, Artificial Sequence
  Oligonucleotide for detection of SNP TSC0033420
taaccctattctc

SEQ ID NO: 134025 - DNA, 13 bp, Artificial Sequence
  Oligonucleotide for detection of SNP TSC0033420
gagaatggggtta

SEQ ID NO: 134026 - DNA, 13 bp, Artificial Sequence
  Oligonucleotide for detection of SNP TSC0033420
taaccccattctc

SEQ ID NO: 134027 - DNA, 13 bp, Artificial Sequence
  Oligonucleotide for detection of SNP TSC0033420
gagaacggggtta

SEQ ID NO: 134028 - DNA, 13 bp, Artificial Sequence
  Oligonucleotide for detection of SNP TSC0033420
taaccccgttctc

SEQ ID NO: 134029 - DNA, 13 bp, Artificial Sequence
  Oligonucleotide for detection of SNP TSC0033421
ggagttgagagta

SEQ ID NO: 134030 - DNA, 13 bp, Artificial Sequence
  Oligonucleotide for detection of SNP TSC0033421
tactctcaactcc

SEQ ID NO: 134031 - DNA, 13 bp, Artificial Sequence
  Oligonucleotide for detection of SNP TSC0033421
ggagttaagagta

SEQ ID NO: 134032 - DNA, 13 bp, Artificial Sequence
  Oligonucleotide for detection of SNP TSC0033421
tactcttaactcc

SEQ ID NO: 134033 - DNA, 13 bp, Artificial Sequence
  Oligonucleotide for detection of SNP TSC0033421
ggagtcgagagta

SEQ ID NO: 134034 - DNA, 13 bp, Artificial Sequence
  Oligonucleotide for detection of SNP TSC0033421
tactctcgactcc

SEQ ID NO: 134035 - DNA, 13 bp, Artificial Sequence
  Oligonucleotide for detection of SNP TSC0033422
tatgattggtgty

SEQ ID NO: 134036 - DNA, 13 bp, Artificial Sequence
  Oligonucleotide for detection of SNP TSC0033422
racaccaatcata

SEQ ID NO: 134037 - DNA, 13 bp, Artificial Sequence
  Oligonucleotide for detection of SNP TSC0033422
tatgatcggtgty

SEQ ID NO: 134038 - DNA, 13 bp, Artificial Sequence
  Oligonucleotide for detection of SNP TSC0033422
racaccgatcata

SEQ ID NO: 134039 - DNA, 13 bp, Artificial Sequence
  Oligonucleotide for detection of SNP TSC0033422
gatattggttatg

SEQ ID NO: 134040 - DNA, 13 bp, Artificial Sequence
  Oligonucleotide for detection of SNP TSC0033422
cataaccaatatc

SEQ ID NO: 134041 - DNA, 13 bp, Artificial Sequence
  Oligonucleotide for detection of SNP TSC0033422
gatattagttatg

SEQ ID NO: 134042 - DNA, 13 bp, Artificial Sequence
  Oligonucleotide for detection of SNP TSC0033422
cataactaatatc

SEQ ID NO: 134043 - DNA, 13 bp, Artificial Sequence
  Oligonucleotide for detection of SNP TSC0033422
gatatcggttatg

SEQ ID NO: 134044 - DNA, 13 bp, Artificial Sequence
  Oligonucleotide for detection of SNP TSC0033422
cataaccgatatc

SEQ ID NO: 134045 - DNA, 13 bp, Artificial Sequence
  Oligonucleotide for detection of SNP TSC0033423
tataggtatttag

SEQ ID NO: 134046 - DNA, 13 bp, Artificial Sequence
  Oligonucleotide for detection of SNP TSC0033423
ctaaatacctata

SEQ ID NO: 134047 - DNA, 13 bp, Artificial Sequence
  Oligonucleotide for detection of SNP TSC0033423
tatagggatttag

SEQ ID NO: 134048 - DNA, 13 bp, Artificial Sequence
  Oligonucleotide for detection of SNP TSC0033423
ctaaatccctata

SEQ ID NO: 134049 - DNA, 13 bp, Artificial Sequence
  Oligonucleotide for detection of SNP TSC0033423
ttgggtgtttgta

SEQ ID NO: 134050 - DNA, 13 bp, Artificial Sequence
  Oligonucleotide for detection of SNP TSC0033423
tacaaacacccaa

SEQ ID NO: 134051 - DNA, 13 bp, Artificial Sequence
  Oligonucleotide for detection of SNP TSC0033423
ttgggtttttgta

SEQ ID NO: 134052 - DNA, 13 bp, Artificial Sequence
  Oligonucleotide for detection of SNP TSC0033423
tacaaaaacccaa

SEQ ID NO: 134053 - DNA, 13 bp, Artificial Sequence
  Oligonucleotide for detection of SNP TSC0033424
tagtgatttggta

SEQ ID NO: 134054 - DNA, 13 bp, Artificial Sequence
  Oligonucleotide for detection of SNP TSC0033424
taccaaatcacta

SEQ ID NO: 134055 - DNA, 13 bp, Artificial Sequence
  Oligonucleotide for detection of SNP TSC0033424
tagtgagttggta

SEQ ID NO: 134056 - DNA, 13 bp, Artificial Sequence
  Oligonucleotide for detection of SNP TSC0033424
taccaactcacta

SEQ ID NO: 134057 - DNA, 13 bp, Artificial Sequence
  Oligonucleotide for detection of SNP TSC0033424
tgttaggttattg

SEQ ID NO: 134058 - DNA, 13 bp, Artificial Sequence
  Oligonucleotide for detection of SNP TSC0033424
caataacctaaca

SEQ ID NO: 134059 - DNA, 13 bp, Artificial Sequence
  Oligonucleotide for detection of SNP TSC0033424
tgttagtttattg

SEQ ID NO: 134060 - DNA, 13 bp, Artificial Sequence
  Oligonucleotide for detection of SNP TSC0033424
caataaactaaca

SEQ ID NO: 134061 - DNA, 13 bp, Artificial Sequence
  Oligonucleotide for detection of SNP TSC0033425
ttttttaaggtag

SEQ ID NO: 134062 - DNA, 13 bp, Artificial Sequence
  Oligonucleotide for detection of SNP TSC0033425
ctaccttaaaaaa

SEQ ID NO: 134063 - DNA, 13 bp, Artificial Sequence
  Oligonucleotide for detection of SNP TSC0033425
ttttttgaggtag

SEQ ID NO: 134064 - DNA, 13 bp, Artificial Sequence
  Oligonucleotide for detection of SNP TSC0033425
ctacctcaaaaaa

SEQ ID NO: 134065 - DNA, 13 bp, Artificial Sequence
  Oligonucleotide for detection of SNP TSC0033426
taggggtaatggg

SEQ ID NO: 134066 - DNA, 13 bp, Artificial Sequence
  Oligonucleotide for detection of SNP TSC0033426
cccattaccccta

SEQ ID NO: 134067 - DNA, 13 bp, Artificial Sequence
  Oligonucleotide for detection of SNP TSC0033426
taggggaaatggg

SEQ ID NO: 134068 - DNA, 13 bp, Artificial Sequence
  Oligonucleotide for detection of SNP TSC0033426
cccatttccccta

SEQ ID NO: 134069 - DNA, 13 bp, Artificial Sequence
  Oligonucleotide for detection of SNP TSC0033428
ttttttaaagtty

SEQ ID NO: 134070 - DNA, 13 bp, Artificial Sequence
  Oligonucleotide for detection of SNP TSC0033428
raactttaaaaaa

SEQ ID NO: 134071 - DNA, 13 bp, Artificial Sequence
  Oligonucleotide for detection of SNP TSC0033428
ttttttgaagtty

SEQ ID NO: 134072 - DNA, 13 bp, Artificial Sequence
  Oligonucleotide for detection of SNP TSC0033428
raacttcaaaaaa

SEQ ID NO: 134073 - DNA, 13 bp, Artificial Sequence
  Oligonucleotide for detection of SNP TSC0033430
gattataaaattg

SEQ ID NO: 134074 - DNA, 13 bp, Artificial Sequence
  Oligonucleotide for detection of SNP TSC0033430
caattttataatc

SEQ ID NO: 134075 - DNA, 13 bp, Artificial Sequence
  Oligonucleotide for detection of SNP TSC0033430
gattatgaaattg

SEQ ID NO: 134076 - DNA, 13 bp, Artificial Sequence
  Oligonucleotide for detection of SNP TSC0033430
caatttcataatc

SEQ ID NO: 134077 - DNA, 13 bp, Artificial Sequence
  Oligonucleotide for detection of SNP TSC0033430
gattacgaaattg

SEQ ID NO: 134078 - DNA, 13 bp, Artificial Sequence
  Oligonucleotide for detection of SNP TSC0033430
caatttcgtaatc

SEQ ID NO: 134079 - DNA, 13 bp, Artificial Sequence
  Oligonucleotide for detection of SNP TSC0033430
tagttttgtaaty

SEQ ID NO: 134080 - DNA, 13 bp, Artificial Sequence
  Oligonucleotide for detection of SNP TSC0033430
rattacaaaacta

SEQ ID NO: 134081 - DNA, 13 bp, Artificial Sequence
  Oligonucleotide for detection of SNP TSC0033430
tagtttcgtaaty

SEQ ID NO: 134082 - DNA, 13 bp, Artificial Sequence
  Oligonucleotide for detection of SNP TSC0033430
rattacgaaacta

SEQ ID NO: 134083 - DNA, 13 bp, Artificial Sequence
  Oligonucleotide for detection of SNP TSC0033431
gagatagagaggg

SEQ ID NO: 134084 - DNA, 13 bp, Artificial Sequence
  Oligonucleotide for detection of SNP TSC0033431
ccctctctatctc

SEQ ID NO: 134085 - DNA, 13 bp, Artificial Sequence
  Oligonucleotide for detection of SNP TSC0033431
gagatatagaggg

SEQ ID NO: 134086 - DNA, 13 bp, Artificial Sequence
  Oligonucleotide for detection of SNP TSC0033431
ccctctatatctc

SEQ ID NO: 134087 - DNA, 13 bp, Artificial Sequence
  Oligonucleotide for detection of SNP TSC0033432
gaagaatgaagtt

SEQ ID NO: 134088 - DNA, 13 bp, Artificial Sequence
  Oligonucleotide for detection of SNP TSC0033432
aacttcattcttc

SEQ ID NO: 134089 - DNA, 13 bp, Artificial Sequence
  Oligonucleotide for detection of SNP TSC0033432
gaagaacgaagtt

SEQ ID NO: 134090 - DNA, 13 bp, Artificial Sequence
  Oligonucleotide for detection of SNP TSC0033432
aacttcgttcttc

SEQ ID NO: 134091 - DNA, 13 bp, Artificial Sequence
  Oligonucleotide for detection of SNP TSC0033433
ggaatagggagag

SEQ ID NO: 134092 - DNA, 13 bp, Artificial Sequence
  Oligonucleotide for detection of SNP TSC0033433
ctctccctattcc

SEQ ID NO: 134093 - DNA, 13 bp, Artificial Sequence
  Oligonucleotide for detection of SNP TSC0033433
ggaatatggagag

SEQ ID NO: 134094 - DNA, 13 bp, Artificial Sequence
  Oligonucleotide for detection of SNP TSC0033433
ctctccatattcc

SEQ ID NO: 134095 - DNA, 13 bp, Artificial Sequence
  Oligonucleotide for detection of SNP TSC0033433
ggaatacggagag

SEQ ID NO: 134096 - DNA, 13 bp, Artificial Sequence
  Oligonucleotide for detection of SNP TSC0033433
ctctccgtattcc

SEQ ID NO: 134097 - DNA, 13 bp, Artificial Sequence
  Oligonucleotide for detection of SNP TSC0033434
tatttcgtttaaa

SEQ ID NO: 134098 - DNA, 13 bp, Artificial Sequence
  Oligonucleotide for detection of SNP TSC0033434
tttaaacgaaata

SEQ ID NO: 134099 - DNA, 13 bp, Artificial Sequence
  Oligonucleotide for detection of SNP TSC0033434
tttgggtggggtg

SEQ ID NO: 134100 - DNA, 13 bp, Artificial Sequence
  Oligonucleotide for detection of SNP TSC0033434
caccccacccaaa

SEQ ID NO: 134101 - DNA, 13 bp, Artificial Sequence
  Oligonucleotide for detection of SNP TSC0033434
tttgggcggggtg

SEQ ID NO: 134102 - DNA, 13 bp, Artificial Sequence
  Oligonucleotide for detection of SNP TSC0033434
caccccgcccaaa

SEQ ID NO: 134103 - DNA, 13 bp, Artificial Sequence
  Oligonucleotide for detection of SNP TSC0033436
attaataaaaaaa

SEQ ID NO: 134104 - DNA, 13 bp, Artificial Sequence
  Oligonucleotide for detection of SNP TSC0033436
tttttttattaat

SEQ ID NO: 134105 - DNA, 13 bp, Artificial Sequence
  Oligonucleotide for detection of SNP TSC0033436
attaattaaaaaa

SEQ ID NO: 134106 - DNA, 13 bp, Artificial Sequence
  Oligonucleotide for detection of SNP TSC0033436
ttttttaattaat

SEQ ID NO: 134107 - DNA, 13 bp, Artificial Sequence
  Oligonucleotide for detection of SNP TSC0033437
tatgtgaatgttt

SEQ ID NO: 134108 - DNA, 13 bp, Artificial Sequence
  Oligonucleotide for detection of SNP TSC0033437
aaacattcacata

SEQ ID NO: 134109 - DNA, 13 bp, Artificial Sequence
  Oligonucleotide for detection of SNP TSC0033437
tatgtgtatgttt

SEQ ID NO: 134110 - DNA, 13 bp, Artificial Sequence
  Oligonucleotide for detection of SNP TSC0033437
aaacatacacata

SEQ ID NO: 134111 - DNA, 13 bp, Artificial Sequence
  Oligonucleotide for detection of SNP TSC0033437
aagtatttatata

SEQ ID NO: 134112 - DNA, 13 bp, Artificial Sequence
  Oligonucleotide for detection of SNP TSC0033437
tatataaatactt

SEQ ID NO: 134113 - DNA, 13 bp, Artificial Sequence
  Oligonucleotide for detection of SNP TSC0033437
aagtatatatata

SEQ ID NO: 134114 - DNA, 13 bp, Artificial Sequence
  Oligonucleotide for detection of SNP TSC0033437
tatatatatactt

SEQ ID NO: 134115 - DNA, 13 bp, Artificial Sequence
  Oligonucleotide for detection of SNP TSC0033438
aaaaaagagtgta

SEQ ID NO: 134116 - DNA, 13 bp, Artificial Sequence
  Oligonucleotide for detection of SNP TSC0033438
tacactctttttt

SEQ ID NO: 134117 - DNA, 13 bp, Artificial Sequence
  Oligonucleotide for detection of SNP TSC0033438
aaaaaaaagtgta

SEQ ID NO: 134118 - DNA, 13 bp, Artificial Sequence
  Oligonucleotide for detection of SNP TSC0033438
tacactttttttt

SEQ ID NO: 134119 - DNA, 13 bp, Artificial Sequence
  Oligonucleotide for detection of SNP TSC0033439
aaaggaatttttg

SEQ ID NO: 134120 - DNA, 13 bp, Artificial Sequence
  Oligonucleotide for detection of SNP TSC0033439
caaaaattccttt

SEQ ID NO: 134121 - DNA, 13 bp, Artificial Sequence
  Oligonucleotide for detection of SNP TSC0033439
aaaggattttttg

SEQ ID NO: 134122 - DNA, 13 bp, Artificial Sequence
  Oligonucleotide for detection of SNP TSC0033439
caaaaaatccttt

SEQ ID NO: 134123 - DNA, 13 bp, Artificial Sequence
  Oligonucleotide for detection of SNP TSC0033439
tagaaattttttt

SEQ ID NO: 134124 - DNA, 13 bp, Artificial Sequence
  Oligonucleotide for detection of SNP TSC0033439
aaaaaaatttcta

SEQ ID NO: 134125 - DNA, 13 bp, Artificial Sequence
  Oligonucleotide for detection of SNP TSC0033439
tagaaagtttttt

SEQ ID NO: 134126 - DNA, 13 bp, Artificial Sequence
  Oligonucleotide for detection of SNP TSC0033439
aaaaaactttcta

SEQ ID NO: 134127 - DNA, 13 bp, Artificial Sequence
  Oligonucleotide for detection of SNP TSC0033440
tgaatagaggagg

SEQ ID NO: 134128 - DNA, 13 bp, Artificial Sequence
  Oligonucleotide for detection of SNP TSC0033440
cctcctctattca

SEQ ID NO: 134129 - DNA, 13 bp, Artificial Sequence
  Oligonucleotide for detection of SNP TSC0033440
tgaatataggagg

SEQ ID NO: 134130 - DNA, 13 bp, Artificial Sequence
  Oligonucleotide for detection of SNP TSC0033440
cctcctatattca

SEQ ID NO: 134131 - DNA, 13 bp, Artificial Sequence
  Oligonucleotide for detection of SNP TSC0033441
tttgttatgttty

SEQ ID NO: 134132 - DNA, 13 bp, Artificial Sequence
  Oligonucleotide for detection of SNP TSC0033441
raaacataacaaa

SEQ ID NO: 134133 - DNA, 13 bp, Artificial Sequence
  Oligonucleotide for detection of SNP TSC0033441
tttgttgtgttty

SEQ ID NO: 134134 - DNA, 13 bp, Artificial Sequence
  Oligonucleotide for detection of SNP TSC0033441
raaacacaacaaa

SEQ ID NO: 134135 - DNA, 13 bp, Artificial Sequence
  Oligonucleotide for detection of SNP TSC0033441
ttcgttatgttty

SEQ ID NO: 134136 - DNA, 13 bp, Artificial Sequence
  Oligonucleotide for detection of SNP TSC0033441
raaacataacgaa

SEQ ID NO: 134137 - DNA, 13 bp, Artificial Sequence
  Oligonucleotide for detection of SNP TSC0033441
ttcgttgtgttty

SEQ ID NO: 134138 - DNA, 13 bp, Artificial Sequence
  Oligonucleotide for detection of SNP TSC0033441
raaacacaacgaa

SEQ ID NO: 134139 - DNA, 13 bp, Artificial Sequence
  Oligonucleotide for detection of SNP TSC0033442
tagtaagttgttg

SEQ ID NO: 134140 - DNA, 13 bp, Artificial Sequence
  Oligonucleotide for detection of SNP TSC0033442
caacaacttacta

SEQ ID NO: 134141 - DNA, 13 bp, Artificial Sequence
  Oligonucleotide for detection of SNP TSC0033442
tagtaatttgttg

SEQ ID NO: 134142 - DNA, 13 bp, Artificial Sequence
  Oligonucleotide for detection of SNP TSC0033442
caacaaattacta

SEQ ID NO: 134143 - DNA, 13 bp, Artificial Sequence
  Oligonucleotide for detection of SNP TSC0033442
taataatttgtta

SEQ ID NO: 134144 - DNA, 13 bp, Artificial Sequence
  Oligonucleotide for detection of SNP TSC0033442
taacaaattatta

SEQ ID NO: 134145 - DNA, 13 bp, Artificial Sequence
  Oligonucleotide for detection of SNP TSC0033442
taataaattgtta

SEQ ID NO: 134146 - DNA, 13 bp, Artificial Sequence
  Oligonucleotide for detection of SNP TSC0033442
taacaatttatta

SEQ ID NO: 134147 - DNA, 13 bp, Artificial Sequence
  Oligonucleotide for detection of SNP TSC0033443
ggagagaggagat

SEQ ID NO: 134148 - DNA, 13 bp, Artificial Sequence
  Oligonucleotide for detection of SNP TSC0033443
atctcctctctcc

SEQ ID NO: 134149 - DNA, 13 bp, Artificial Sequence
  Oligonucleotide for detection of SNP TSC0033443
ggagaggggagat

SEQ ID NO: 134150 - DNA, 13 bp, Artificial Sequence
  Oligonucleotide for detection of SNP TSC0033443
atctcccctctcc

SEQ ID NO: 134151 - DNA, 13 bp, Artificial Sequence
  Oligonucleotide for detection of SNP TSC0033444
aataatatatttg

SEQ ID NO: 134152 - DNA, 13 bp, Artificial Sequence
  Oligonucleotide for detection of SNP TSC0033444
caaatatattatt

SEQ ID NO: 134153 - DNA, 13 bp, Artificial Sequence
  Oligonucleotide for detection of SNP TSC0033444
aataatgtatttg

SEQ ID NO: 134154 - DNA, 13 bp, Artificial Sequence
  Oligonucleotide for detection of SNP TSC0033444
caaatacattatt

SEQ ID NO: 134155 - DNA, 13 bp, Artificial Sequence
  Oligonucleotide for detection of SNP TSC0033444
aataacgtatttg

SEQ ID NO: 134156 - DNA, 13 bp, Artificial Sequence
  Oligonucleotide for detection of SNP TSC0033444
caaatacgttatt

SEQ ID NO: 134157 - DNA, 13 bp, Artificial Sequence
  Oligonucleotide for detection of SNP TSC0033444
taaatatgttatt

SEQ ID NO: 134158 - DNA, 13 bp, Artificial Sequence
  Oligonucleotide for detection of SNP TSC0033444
aataacatattta

SEQ ID NO: 134159 - DNA, 13 bp, Artificial Sequence
  Oligonucleotide for detection of SNP TSC0033446
attttgttttatt

SEQ ID NO: 134160 - DNA, 13 bp, Artificial Sequence
  Oligonucleotide for detection of SNP TSC0033446
aataaaacaaaat

SEQ ID NO: 134161 - DNA, 13 bp, Artificial Sequence
  Oligonucleotide for detection of SNP TSC0033446
atttcggtttatt

SEQ ID NO: 134162 - DNA, 13 bp, Artificial Sequence
  Oligonucleotide for detection of SNP TSC0033446
aataaaccgaaat

SEQ ID NO: 134163 - DNA, 13 bp, Artificial Sequence
  Oligonucleotide for detection of SNP TSC0033446
atttcgttttatt

SEQ ID NO: 134164 - DNA, 13 bp, Artificial Sequence
  Oligonucleotide for detection of SNP TSC0033446
aataaaacgaaat

SEQ ID NO: 134165 - DNA, 13 bp, Artificial Sequence
  Oligonucleotide for detection of SNP TSC0033446
agtgagttgagat

SEQ ID NO: 134166 - DNA, 13 bp, Artificial Sequence
  Oligonucleotide for detection of SNP TSC0033446
atctcaactcact

SEQ ID NO: 134167 - DNA, 13 bp, Artificial Sequence
  Oligonucleotide for detection of SNP TSC0033446
agtgagatgagat

SEQ ID NO: 134168 - DNA, 13 bp, Artificial Sequence
  Oligonucleotide for detection of SNP TSC0033446
atctcatctcact

SEQ ID NO: 134169 - DNA, 13 bp, Artificial Sequence
  Oligonucleotide for detection of SNP TSC0033446
agtgagtcgagat

SEQ ID NO: 134170 - DNA, 13 bp, Artificial Sequence
  Oligonucleotide for detection of SNP TSC0033446
atctcgactcact

SEQ ID NO: 134171 - DNA, 13 bp, Artificial Sequence
  Oligonucleotide for detection of SNP TSC0033446
agtgagacgagat

SEQ ID NO: 134172 - DNA, 13 bp, Artificial Sequence
  Oligonucleotide for detection of SNP TSC0033446
atctcgtctcact

SEQ ID NO: 134173 - DNA, 13 bp, Artificial Sequence
  Oligonucleotide for detection of SNP TSC0033447
gagattaaattaa

SEQ ID NO: 134174 - DNA, 13 bp, Artificial Sequence
  Oligonucleotide for detection of SNP TSC0033447
ttaatttaatctc

SEQ ID NO: 134175 - DNA, 13 bp, Artificial Sequence
  Oligonucleotide for detection of SNP TSC0033447
gagatttaattaa

SEQ ID NO: 134176 - DNA, 13 bp, Artificial Sequence
  Oligonucleotide for detection of SNP TSC0033447
ttaattaaatctc

SEQ ID NO: 134177 - DNA, 13 bp, Artificial Sequence
  Oligonucleotide for detection of SNP TSC0033447
ttgatttagttty

SEQ ID NO: 134178 - DNA, 13 bp, Artificial Sequence
  Oligonucleotide for detection of SNP TSC0033447
raaactaaatcaa

SEQ ID NO: 134179 - DNA, 13 bp, Artificial Sequence
  Oligonucleotide for detection of SNP TSC0033447
ttgattgagttty

SEQ ID NO: 134180 - DNA, 13 bp, Artificial Sequence
  Oligonucleotide for detection of SNP TSC0033447
raaactcaatcaa

SEQ ID NO: 134181 - DNA, 13 bp, Artificial Sequence
  Oligonucleotide for detection of SNP TSC0033449
gagagagggaggg

SEQ ID NO: 134182 - DNA, 13 bp, Artificial Sequence
  Oligonucleotide for detection of SNP TSC0033449
ccctccctctctc

SEQ ID NO: 134183 - DNA, 13 bp, Artificial Sequence
  Oligonucleotide for detection of SNP TSC0033449
gagagaaggaggg

SEQ ID NO: 134184 - DNA, 13 bp, Artificial Sequence
  Oligonucleotide for detection of SNP TSC0033449
ccctccttctctc

SEQ ID NO: 134185 - DNA, 13 bp, Artificial Sequence
  Oligonucleotide for detection of SNP TSC0033450
gggtggagggtgy

SEQ ID NO: 134186 - DNA, 13 bp, Artificial Sequence
  Oligonucleotide for detection of SNP TSC0033450
rcaccctccaccc

SEQ ID NO: 134187 - DNA, 13 bp, Artificial Sequence
  Oligonucleotide for detection of SNP TSC0033450
gggtggggggtgy

SEQ ID NO: 134188 - DNA, 13 bp, Artificial Sequence
  Oligonucleotide for detection of SNP TSC0033450
rcaccccccaccc

SEQ ID NO: 134189 - DNA, 13 bp, Artificial Sequence
  Oligonucleotide for detection of SNP TSC0033450
gggtggagggcgy

SEQ ID NO: 134190 - DNA, 13 bp, Artificial Sequence
  Oligonucleotide for detection of SNP TSC0033450
rcgccctccaccc

SEQ ID NO: 134191 - DNA, 13 bp, Artificial Sequence
  Oligonucleotide for detection of SNP TSC0033450
gggtggggggcgy

SEQ ID NO: 134192 - DNA, 13 bp, Artificial Sequence
  Oligonucleotide for detection of SNP TSC0033450
rcgccccccaccc

SEQ ID NO: 134193 - DNA, 13 bp, Artificial Sequence
  Oligonucleotide for detection of SNP TSC0033454
aattattgagttt

SEQ ID NO: 134194 - DNA, 13 bp, Artificial Sequence
  Oligonucleotide for detection of SNP TSC0033454
aaactcaataatt

SEQ ID NO: 134195 - DNA, 13 bp, Artificial Sequence
  Oligonucleotide for detection of SNP TSC0033454
aattatcgagttt

SEQ ID NO: 134196 - DNA, 13 bp, Artificial Sequence
  Oligonucleotide for detection of SNP TSC0033454
aaactcgataatt

SEQ ID NO: 134197 - DNA, 13 bp, Artificial Sequence
  Oligonucleotide for detection of SNP TSC0033454
aggtttggtaatt

SEQ ID NO: 134198 - DNA, 13 bp, Artificial Sequence
  Oligonucleotide for detection of SNP TSC0033454
aattaccaaacct

SEQ ID NO: 134199 - DNA, 13 bp, Artificial Sequence
  Oligonucleotide for detection of SNP TSC0033454
aggtttagtaatt

SEQ ID NO: 134200 - DNA, 13 bp, Artificial Sequence
  Oligonucleotide for detection of SNP TSC0033454
aattactaaacct

SEQ ID NO: 134201 - DNA, 13 bp, Artificial Sequence
  Oligonucleotide for detection of SNP TSC0033454
aggttcggtaatt

SEQ ID NO: 134202 - DNA, 13 bp, Artificial Sequence
  Oligonucleotide for detection of SNP TSC0033454
aattaccgaacct

SEQ ID NO: 134203 - DNA, 13 bp, Artificial Sequence
  Oligonucleotide for detection of SNP TSC0033455
tatatgaggatag

SEQ ID NO: 134204 - DNA, 13 bp, Artificial Sequence
  Oligonucleotide for detection of SNP TSC0033455
ctatcctcatata

SEQ ID NO: 134205 - DNA, 13 bp, Artificial Sequence
  Oligonucleotide for detection of SNP TSC0033455
tatatgtggatag

SEQ ID NO: 134206 - DNA, 13 bp, Artificial Sequence
  Oligonucleotide for detection of SNP TSC0033455
ctatccacatata

SEQ ID NO: 134207 - DNA, 13 bp, Artificial Sequence
  Oligonucleotide for detection of SNP TSC0033455
ttgtttttatata

SEQ ID NO: 134208 - DNA, 13 bp, Artificial Sequence
  Oligonucleotide for detection of SNP TSC0033455
tatataaaaacaa

SEQ ID NO: 134209 - DNA, 13 bp, Artificial Sequence
  Oligonucleotide for detection of SNP TSC0033456
ggataagagataa

SEQ ID NO: 134210 - DNA, 13 bp, Artificial Sequence
  Oligonucleotide for detection of SNP TSC0033456
ttatctcttatcc

SEQ ID NO: 134211 - DNA, 13 bp, Artificial Sequence
  Oligonucleotide for detection of SNP TSC0033456
ggataaaagataa

SEQ ID NO: 134212 - DNA, 13 bp, Artificial Sequence
  Oligonucleotide for detection of SNP TSC0033456
ttatcttttatcc

SEQ ID NO: 134213 - DNA, 13 bp, Artificial Sequence
  Oligonucleotide for detection of SNP TSC0033457
aaaaaaaataagy

SEQ ID NO: 134214 - DNA, 13 bp, Artificial Sequence
  Oligonucleotide for detection of SNP TSC0033457
rcttatttttttt

SEQ ID NO: 134215 - DNA, 13 bp, Artificial Sequence
  Oligonucleotide for detection of SNP TSC0033457
aaaaaagataagy

SEQ ID NO: 134216 - DNA, 13 bp, Artificial Sequence
  Oligonucleotide for detection of SNP TSC0033457
rcttatctttttt

SEQ ID NO: 134217 - DNA, 13 bp, Artificial Sequence
  Oligonucleotide for detection of SNP TSC0033458
ttttgtttgttag

SEQ ID NO: 134218 - DNA, 13 bp, Artificial Sequence
  Oligonucleotide for detection of SNP TSC0033458
ctaacaaacaaaa

SEQ ID NO: 134219 - DNA, 13 bp, Artificial Sequence
  Oligonucleotide for detection of SNP TSC0033458
ttttgtgtgttag

SEQ ID NO: 134220 - DNA, 13 bp, Artificial Sequence
  Oligonucleotide for detection of SNP TSC0033458
ctaacacacaaaa

SEQ ID NO: 134221 - DNA, 13 bp, Artificial Sequence
  Oligonucleotide for detection of SNP TSC0033458
ttggtagataagg

SEQ ID NO: 134222 - DNA, 13 bp, Artificial Sequence
  Oligonucleotide for detection of SNP TSC0033458
ccttatctaccaa

SEQ ID NO: 134223 - DNA, 13 bp, Artificial Sequence
  Oligonucleotide for detection of SNP TSC0033458
ttggtatataagg

SEQ ID NO: 134224 - DNA, 13 bp, Artificial Sequence
  Oligonucleotide for detection of SNP TSC0033458
ccttatataccaa

SEQ ID NO: 134225 - DNA, 13 bp, Artificial Sequence
  Oligonucleotide for detection of SNP TSC0033459
gattatataaggg

SEQ ID NO: 134226 - DNA, 13 bp, Artificial Sequence
  Oligonucleotide for detection of SNP TSC0033459
cccttatataatc

SEQ ID NO: 134227 - DNA, 13 bp, Artificial Sequence
  Oligonucleotide for detection of SNP TSC0033459
gattatgtaaggg

SEQ ID NO: 134228 - DNA, 13 bp, Artificial Sequence
  Oligonucleotide for detection of SNP TSC0033459
cccttacataatc

SEQ ID NO: 134229 - DNA, 13 bp, Artificial Sequence
  Oligonucleotide for detection of SNP TSC0033459
gattacgtaaggg

SEQ ID NO: 134230 - DNA, 13 bp, Artificial Sequence
  Oligonucleotide for detection of SNP TSC0033459
cccttacgtaatc

SEQ ID NO: 134231 - DNA, 13 bp, Artificial Sequence
  Oligonucleotide for detection of SNP TSC0033459
tttttgtgtgaty

SEQ ID NO: 134232 - DNA, 13 bp, Artificial Sequence
  Oligonucleotide for detection of SNP TSC0033459
ratcacacaaaaa

SEQ ID NO: 134233 - DNA, 13 bp, Artificial Sequence
  Oligonucleotide for detection of SNP TSC0033459
tttttgcgtgaty

SEQ ID NO: 134234 - DNA, 13 bp, Artificial Sequence
  Oligonucleotide for detection of SNP TSC0033459
ratcacgcaaaaa

SEQ ID NO: 134235 - DNA, 13 bp, Artificial Sequence
  Oligonucleotide for detection of SNP TSC0033461
tagtattatttat

SEQ ID NO: 134236 - DNA, 13 bp, Artificial Sequence
  Oligonucleotide for detection of SNP TSC0033461
ataaataatacta

SEQ ID NO: 134237 - DNA, 13 bp, Artificial Sequence
  Oligonucleotide for detection of SNP TSC0033461
tagtatgatttat

SEQ ID NO: 134238 - DNA, 13 bp, Artificial Sequence
  Oligonucleotide for detection of SNP TSC0033461
ataaatcatacta

SEQ ID NO: 134239 - DNA, 13 bp, Artificial Sequence
  Oligonucleotide for detection of SNP TSC0033461
tagtacgatttat

SEQ ID NO: 134240 - DNA, 13 bp, Artificial Sequence
  Oligonucleotide for detection of SNP TSC0033461
ataaatcgtacta

SEQ ID NO: 134241 - DNA, 13 bp, Artificial Sequence
  Oligonucleotide for detection of SNP TSC0033461
ataaatggtgttg

SEQ ID NO: 134242 - DNA, 13 bp, Artificial Sequence
  Oligonucleotide for detection of SNP TSC0033461
caacaccatttat

SEQ ID NO: 134243 - DNA, 13 bp, Artificial Sequence
  Oligonucleotide for detection of SNP TSC0033461
ataaattgtgttg

SEQ ID NO: 134244 - DNA, 13 bp, Artificial Sequence
  Oligonucleotide for detection of SNP TSC0033461
caacacaatttat

SEQ ID NO: 134245 - DNA, 13 bp, Artificial Sequence
  Oligonucleotide for detection of SNP TSC0033461
ataaatcgtgttg

SEQ ID NO: 134246 - DNA, 13 bp, Artificial Sequence
  Oligonucleotide for detection of SNP TSC0033461
caacacgatttat

SEQ ID NO: 134247 - DNA, 13 bp, Artificial Sequence
  Oligonucleotide for detection of SNP TSC0033462
tattttgaagtty

SEQ ID NO: 134248 - DNA, 13 bp, Artificial Sequence
  Oligonucleotide for detection of SNP TSC0033462
raacttcaaaata

SEQ ID NO: 134249 - DNA, 13 bp, Artificial Sequence
  Oligonucleotide for detection of SNP TSC0033462
tattttaaagtty

SEQ ID NO: 134250 - DNA, 13 bp, Artificial Sequence
  Oligonucleotide for detection of SNP TSC0033462
raactttaaaata

SEQ ID NO: 134251 - DNA, 13 bp, Artificial Sequence
  Oligonucleotide for detection of SNP TSC0033463
ttggtgatgagtt

SEQ ID NO: 134252 - DNA, 13 bp, Artificial Sequence
  Oligonucleotide for detection of SNP TSC0033463
aactcatcaccaa

SEQ ID NO: 134253 - DNA, 13 bp, Artificial Sequence
  Oligonucleotide for detection of SNP TSC0033463
ttggtggtgagtt

SEQ ID NO: 134254 - DNA, 13 bp, Artificial Sequence
  Oligonucleotide for detection of SNP TSC0033463
aactcaccaccaa

SEQ ID NO: 134255 - DNA, 13 bp, Artificial Sequence
  Oligonucleotide for detection of SNP TSC0033464
tggaagttgaagt

SEQ ID NO: 134256 - DNA, 13 bp, Artificial Sequence
  Oligonucleotide for detection of SNP TSC0033464
acttcaacttcca

SEQ ID NO: 134257 - DNA, 13 bp, Artificial Sequence
  Oligonucleotide for detection of SNP TSC0033464
tggaaggtgaagt

SEQ ID NO: 134258 - DNA, 13 bp, Artificial Sequence
  Oligonucleotide for detection of SNP TSC0033464
acttcaccttcca

SEQ ID NO: 134259 - DNA, 13 bp, Artificial Sequence
  Oligonucleotide for detection of SNP TSC0033465
agaaaagaagttg

SEQ ID NO: 134260 - DNA, 13 bp, Artificial Sequence
  Oligonucleotide for detection of SNP TSC0033465
caacttcttttct

SEQ ID NO: 134261 - DNA, 13 bp, Artificial Sequence
  Oligonucleotide for detection of SNP TSC0033465
agaaaaaaagttg

SEQ ID NO: 134262 - DNA, 13 bp, Artificial Sequence
  Oligonucleotide for detection of SNP TSC0033465
caactttttttct

SEQ ID NO: 134263 - DNA, 13 bp, Artificial Sequence
  Oligonucleotide for detection of SNP TSC0033466
aaatattgtatgt

SEQ ID NO: 134264 - DNA, 13 bp, Artificial Sequence
  Oligonucleotide for detection of SNP TSC0033466
acatacaatattt

SEQ ID NO: 134265 - DNA, 13 bp, Artificial Sequence
  Oligonucleotide for detection of SNP TSC0033466
aaatatcgtatgt

SEQ ID NO: 134266 - DNA, 13 bp, Artificial Sequence
  Oligonucleotide for detection of SNP TSC0033466
acatacgatattt

SEQ ID NO: 134267 - DNA, 13 bp, Artificial Sequence
  Oligonucleotide for detection of SNP TSC0033466
atatgtgatattt

SEQ ID NO: 134268 - DNA, 13 bp, Artificial Sequence
  Oligonucleotide for detection of SNP TSC0033466
aaatatcacatat

SEQ ID NO: 134269 - DNA, 13 bp, Artificial Sequence
  Oligonucleotide for detection of SNP TSC0033466
atatgtaatattt

SEQ ID NO: 134270 - DNA, 13 bp, Artificial Sequence
  Oligonucleotide for detection of SNP TSC0033466
aaatattacatat

SEQ ID NO: 134271 - DNA, 13 bp, Artificial Sequence
  Oligonucleotide for detection of SNP TSC0033466
atatgcgatattt

SEQ ID NO: 134272 - DNA, 13 bp, Artificial Sequence
  Oligonucleotide for detection of SNP TSC0033466
aaatatcgcatat

SEQ ID NO: 134273 - DNA, 13 bp, Artificial Sequence
  Oligonucleotide for detection of SNP TSC0033467
tttgttgttgaat

SEQ ID NO: 134274 - DNA, 13 bp, Artificial Sequence
  Oligonucleotide for detection of SNP TSC0033467
attcaacaacaaa

SEQ ID NO: 134275 - DNA, 13 bp, Artificial Sequence
  Oligonucleotide for detection of SNP TSC0033467
tttgttattgaat

SEQ ID NO: 134276 - DNA, 13 bp, Artificial Sequence
  Oligonucleotide for detection of SNP TSC0033467
attcaataacaaa

SEQ ID NO: 134277 - DNA, 13 bp, Artificial Sequence
  Oligonucleotide for detection of SNP TSC0033467
tttgttgtcgaat

SEQ ID NO: 134278 - DNA, 13 bp, Artificial Sequence
  Oligonucleotide for detection of SNP TSC0033467
attcgacaacaaa

SEQ ID NO: 134279 - DNA, 13 bp, Artificial Sequence
  Oligonucleotide for detection of SNP TSC0033467
tttgttatcgaat

SEQ ID NO: 134280 - DNA, 13 bp, Artificial Sequence
  Oligonucleotide for detection of SNP TSC0033467
attcgataacaaa

SEQ ID NO: 134281 - DNA, 13 bp, Artificial Sequence
  Oligonucleotide for detection of SNP TSC0033468
ttagagggttggg

SEQ ID NO: 134282 - DNA, 13 bp, Artificial Sequence
  Oligonucleotide for detection of SNP TSC0033468
cccaaccctctaa

SEQ ID NO: 134283 - DNA, 13 bp, Artificial Sequence
  Oligonucleotide for detection of SNP TSC0033468
ttagagagttggg

SEQ ID NO: 134284 - DNA, 13 bp, Artificial Sequence
  Oligonucleotide for detection of SNP TSC0033468
cccaactctctaa

SEQ ID NO: 134285 - DNA, 13 bp, Artificial Sequence
  Oligonucleotide for detection of SNP TSC0033469
tgaattatgtttt

SEQ ID NO: 134286 - DNA, 13 bp, Artificial Sequence
  Oligonucleotide for detection of SNP TSC0033469
aaaacataattca

SEQ ID NO: 134287 - DNA, 13 bp, Artificial Sequence
  Oligonucleotide for detection of SNP TSC0033469
tgaattttgtttt

SEQ ID NO: 134288 - DNA, 13 bp, Artificial Sequence
  Oligonucleotide for detection of SNP TSC0033469
aaaacaaaattca

SEQ ID NO: 134289 - DNA, 13 bp, Artificial Sequence
  Oligonucleotide for detection of SNP TSC0033469
aaagtatgattta

SEQ ID NO: 134290 - DNA, 13 bp, Artificial Sequence
  Oligonucleotide for detection of SNP TSC0033469
taaatcatacttt

SEQ ID NO: 134291 - DNA, 13 bp, Artificial Sequence
  Oligonucleotide for detection of SNP TSC0033469
aaagtaggattta

SEQ ID NO: 134292 - DNA, 13 bp, Artificial Sequence
  Oligonucleotide for detection of SNP TSC0033469
taaatcctacttt

SEQ ID NO: 134293 - DNA, 13 bp, Artificial Sequence
  Oligonucleotide for detection of SNP TSC0033470
tttaagtgtttag

SEQ ID NO: 134294 - DNA, 13 bp, Artificial Sequence
  Oligonucleotide for detection of SNP TSC0033470
ctaaacacttaaa

SEQ ID NO: 134295 - DNA, 13 bp, Artificial Sequence
  Oligonucleotide for detection of SNP TSC0033470
tttaagcgtttag

SEQ ID NO: 134296 - DNA, 13 bp, Artificial Sequence
  Oligonucleotide for detection of SNP TSC0033470
ctaaacgcttaaa

SEQ ID NO: 134297 - DNA, 13 bp, Artificial Sequence
  Oligonucleotide for detection of SNP TSC0033470
ttgggtgtttgaa

SEQ ID NO: 134298 - DNA, 13 bp, Artificial Sequence
  Oligonucleotide for detection of SNP TSC0033470
ttcaaacacccaa

SEQ ID NO: 134299 - DNA, 13 bp, Artificial Sequence
  Oligonucleotide for detection of SNP TSC0033470
ttgggtatttgaa

SEQ ID NO: 134300 - DNA, 13 bp, Artificial Sequence
  Oligonucleotide for detection of SNP TSC0033470
ttcaaatacccaa

SEQ ID NO: 134301 - DNA, 13 bp, Artificial Sequence
  Oligonucleotide for detection of SNP TSC0033470
ttgggcgtttgaa

SEQ ID NO: 134302 - DNA, 13 bp, Artificial Sequence
  Oligonucleotide for detection of SNP TSC0033470
ttcaaacgcccaa

SEQ ID NO: 134303 - DNA, 13 bp, Artificial Sequence
  Oligonucleotide for detection of SNP TSC0033471
atttatgttgttg

SEQ ID NO: 134304 - DNA, 13 bp, Artificial Sequence
  Oligonucleotide for detection of SNP TSC0033471
caacaacataaat

SEQ ID NO: 134305 - DNA, 13 bp, Artificial Sequence
  Oligonucleotide for detection of SNP TSC0033471
atttatattgttg

SEQ ID NO: 134306 - DNA, 13 bp, Artificial Sequence
  Oligonucleotide for detection of SNP TSC0033471
caacaatataaat

SEQ ID NO: 134307 - DNA, 13 bp, Artificial Sequence
  Oligonucleotide for detection of SNP TSC0033476
aaggtgttatatg

SEQ ID NO: 134308 - DNA, 13 bp, Artificial Sequence
  Oligonucleotide for detection of SNP TSC0033476
catataacacctt

SEQ ID NO: 134309 - DNA, 13 bp, Artificial Sequence
  Oligonucleotide for detection of SNP TSC0033476
aaggtggtatatg

SEQ ID NO: 134310 - DNA, 13 bp, Artificial Sequence
  Oligonucleotide for detection of SNP TSC0033476
catataccacctt

SEQ ID NO: 134311 - DNA, 13 bp, Artificial Sequence
  Oligonucleotide for detection of SNP TSC0033476
tatatggtatttt

SEQ ID NO: 134312 - DNA, 13 bp, Artificial Sequence
  Oligonucleotide for detection of SNP TSC0033476
aaaataccatata

SEQ ID NO: 134313 - DNA, 13 bp, Artificial Sequence
  Oligonucleotide for detection of SNP TSC0033479
ttgaaaaattata

SEQ ID NO: 134314 - DNA, 13 bp, Artificial Sequence
  Oligonucleotide for detection of SNP TSC0033479
tataatttttcaa

SEQ ID NO: 134315 - DNA, 13 bp, Artificial Sequence
  Oligonucleotide for detection of SNP TSC0033479
ttgaaatattata

SEQ ID NO: 134316 - DNA, 13 bp, Artificial Sequence
  Oligonucleotide for detection of SNP TSC0033479
tataatatttcaa

SEQ ID NO: 134317 - DNA, 13 bp, Artificial Sequence
  Oligonucleotide for detection of SNP TSC0033479
tataattttttag

SEQ ID NO: 134318 - DNA, 13 bp, Artificial Sequence
  Oligonucleotide for detection of SNP TSC0033479
ctaaaaaattata

SEQ ID NO: 134319 - DNA, 13 bp, Artificial Sequence
  Oligonucleotide for detection of SNP TSC0033479
tataatattttag

SEQ ID NO: 134320 - DNA, 13 bp, Artificial Sequence
  Oligonucleotide for detection of SNP TSC0033479
ctaaaatattata

SEQ ID NO: 134321 - DNA, 13 bp, Artificial Sequence
  Oligonucleotide for detection of SNP TSC0033481
gtgagtagtttta

SEQ ID NO: 134322 - DNA, 13 bp, Artificial Sequence
  Oligonucleotide for detection of SNP TSC0033481
taaaactactcac

SEQ ID NO: 134323 - DNA, 13 bp, Artificial Sequence
  Oligonucleotide for detection of SNP TSC0033481
gtgagtggtttta

SEQ ID NO: 134324 - DNA, 13 bp, Artificial Sequence
  Oligonucleotide for detection of SNP TSC0033481
taaaaccactcac

SEQ ID NO: 134325 - DNA, 13 bp, Artificial Sequence
  Oligonucleotide for detection of SNP TSC0033481
gtgagcggtttta

SEQ ID NO: 134326 - DNA, 13 bp, Artificial Sequence
  Oligonucleotide for detection of SNP TSC0033481
taaaaccgctcac

SEQ ID NO: 134327 - DNA, 13 bp, Artificial Sequence
  Oligonucleotide for detection of SNP TSC0033481
taaaattgtttay

SEQ ID NO: 134328 - DNA, 13 bp, Artificial Sequence
  Oligonucleotide for detection of SNP TSC0033481
rtaaacaatttta

SEQ ID NO: 134329 - DNA, 13 bp, Artificial Sequence
  Oligonucleotide for detection of SNP TSC0033481
taaaatcgtttay

SEQ ID NO: 134330 - DNA, 13 bp, Artificial Sequence
  Oligonucleotide for detection of SNP TSC0033481
rtaaacgatttta

SEQ ID NO: 134331 - DNA, 13 bp, Artificial Sequence
  Oligonucleotide for detection of SNP TSC0033482
taaaaagttattg

SEQ ID NO: 134332 - DNA, 13 bp, Artificial Sequence
  Oligonucleotide for detection of SNP TSC0033482
caataacttttta

SEQ ID NO: 134333 - DNA, 13 bp, Artificial Sequence
  Oligonucleotide for detection of SNP TSC0033482
taaaaaattattg

SEQ ID NO: 134334 - DNA, 13 bp, Artificial Sequence
  Oligonucleotide for detection of SNP TSC0033482
caataatttttta

SEQ ID NO: 134335 - DNA, 13 bp, Artificial Sequence
  Oligonucleotide for detection of SNP TSC0033483
tttatagttattt

SEQ ID NO: 134336 - DNA, 13 bp, Artificial Sequence
  Oligonucleotide for detection of SNP TSC0033483
aaataactataaa

SEQ ID NO: 134337 - DNA, 13 bp, Artificial Sequence
  Oligonucleotide for detection of SNP TSC0033483
tttataattattt

SEQ ID NO: 134338 - DNA, 13 bp, Artificial Sequence
  Oligonucleotide for detection of SNP TSC0033483
aaataattataaa

SEQ ID NO: 134339 - DNA, 13 bp, Artificial Sequence
  Oligonucleotide for detection of SNP TSC0033484
aagatatgaaaaa

SEQ ID NO: 134340 - DNA, 13 bp, Artificial Sequence
  Oligonucleotide for detection of SNP TSC0033484
tttttcatatctt

SEQ ID NO: 134341 - DNA, 13 bp, Artificial Sequence
  Oligonucleotide for detection of SNP TSC0033484
aagatacgaaaaa

SEQ ID NO: 134342 - DNA, 13 bp, Artificial Sequence
  Oligonucleotide for detection of SNP TSC0033484
tttttcgtatctt

SEQ ID NO: 134343 - DNA, 13 bp, Artificial Sequence
  Oligonucleotide for detection of SNP TSC0033485
aaaataggttgtg

SEQ ID NO: 134344 - DNA, 13 bp, Artificial Sequence
  Oligonucleotide for detection of SNP TSC0033485
cacaacctatttt

SEQ ID NO: 134345 - DNA, 13 bp, Artificial Sequence
  Oligonucleotide for detection of SNP TSC0033485
aaaataagttgtg

SEQ ID NO: 134346 - DNA, 13 bp, Artificial Sequence
  Oligonucleotide for detection of SNP TSC0033485
cacaacttatttt

SEQ ID NO: 134347 - DNA, 13 bp, Artificial Sequence
  Oligonucleotide for detection of SNP TSC0033486
tttaaagtatgta

SEQ ID NO: 134348 - DNA, 13 bp, Artificial Sequence
  Oligonucleotide for detection of SNP TSC0033486
tacatactttaaa

SEQ ID NO: 134349 - DNA, 13 bp, Artificial Sequence
  Oligonucleotide for detection of SNP TSC0033486
tttaaattatgta

SEQ ID NO: 134350 - DNA, 13 bp, Artificial Sequence
  Oligonucleotide for detection of SNP TSC0033486
tacataatttaaa

SEQ ID NO: 134351 - DNA, 13 bp, Artificial Sequence
  Oligonucleotide for detection of SNP TSC0033486
tatatattttaag

SEQ ID NO: 134352 - DNA, 13 bp, Artificial Sequence
  Oligonucleotide for detection of SNP TSC0033486
cttaaaatatata

SEQ ID NO: 134353 - DNA, 13 bp, Artificial Sequence
  Oligonucleotide for detection of SNP TSC0033486
tatataatttaag

SEQ ID NO: 134354 - DNA, 13 bp, Artificial Sequence
  Oligonucleotide for detection of SNP TSC0033486
cttaaattatata

SEQ ID NO: 134355 - DNA, 13 bp, Artificial Sequence
  Oligonucleotide for detection of SNP TSC0033487
attaataatgata

SEQ ID NO: 134356 - DNA, 13 bp, Artificial Sequence
  Oligonucleotide for detection of SNP TSC0033487
tatcattattaat

SEQ ID NO: 134357 - DNA, 13 bp, Artificial Sequence
  Oligonucleotide for detection of SNP TSC0033487
attaattatgata

SEQ ID NO: 134358 - DNA, 13 bp, Artificial Sequence
  Oligonucleotide for detection of SNP TSC0033487
tatcataattaat

SEQ ID NO: 134359 - DNA, 13 bp, Artificial Sequence
  Oligonucleotide for detection of SNP TSC0033487
tattattgttaat

SEQ ID NO: 134360 - DNA, 13 bp, Artificial Sequence
  Oligonucleotide for detection of SNP TSC0033487
attaacaataata

SEQ ID NO: 134361 - DNA, 13 bp, Artificial Sequence
  Oligonucleotide for detection of SNP TSC0033487
tattatggttaat

SEQ ID NO: 134362 - DNA, 13 bp, Artificial Sequence
  Oligonucleotide for detection of SNP TSC0033487
attaaccataata

SEQ ID NO: 134363 - DNA, 13 bp, Artificial Sequence
  Oligonucleotide for detection of SNP TSC0033490
tttattgaaggaa

SEQ ID NO: 134364 - DNA, 13 bp, Artificial Sequence
  Oligonucleotide for detection of SNP TSC0033490
ttccttcaataaa

SEQ ID NO: 134365 - DNA, 13 bp, Artificial Sequence
  Oligonucleotide for detection of SNP TSC0033490
tttattaaaggaa

SEQ ID NO: 134366 - DNA, 13 bp, Artificial Sequence
  Oligonucleotide for detection of SNP TSC0033490
ttcctttaataaa

SEQ ID NO: 134367 - DNA, 13 bp, Artificial Sequence
  Oligonucleotide for detection of SNP TSC0033490
tttatcgaaggaa

SEQ ID NO: 134368 - DNA, 13 bp, Artificial Sequence
  Oligonucleotide for detection of SNP TSC0033490
ttccttcgataaa

SEQ ID NO: 134369 - DNA, 13 bp, Artificial Sequence
  Oligonucleotide for detection of SNP TSC0033491
tgttagtgttgtg

SEQ ID NO: 134370 - DNA, 13 bp, Artificial Sequence
  Oligonucleotide for detection of SNP TSC0033491
cacaacactaaca

SEQ ID NO: 134371 - DNA, 13 bp, Artificial Sequence
  Oligonucleotide for detection of SNP TSC0033491
tgttagcgttgtg

SEQ ID NO: 134372 - DNA, 13 bp, Artificial Sequence
  Oligonucleotide for detection of SNP TSC0033491
cacaacgctaaca

SEQ ID NO: 134373 - DNA, 13 bp, Artificial Sequence
  Oligonucleotide for detection of SNP TSC0033491
tatagtgttggta

SEQ ID NO: 134374 - DNA, 13 bp, Artificial Sequence
  Oligonucleotide for detection of SNP TSC0033491
taccaacactata

SEQ ID NO: 134375 - DNA, 13 bp, Artificial Sequence
  Oligonucleotide for detection of SNP TSC0033491
tatagtattggta

SEQ ID NO: 134376 - DNA, 13 bp, Artificial Sequence
  Oligonucleotide for detection of SNP TSC0033491
taccaatactata

SEQ ID NO: 134377 - DNA, 13 bp, Artificial Sequence
  Oligonucleotide for detection of SNP TSC0033491
tatagcgttggta

SEQ ID NO: 134378 - DNA, 13 bp, Artificial Sequence
  Oligonucleotide for detection of SNP TSC0033491
taccaacgctata

SEQ ID NO: 134379 - DNA, 13 bp, Artificial Sequence
  Oligonucleotide for detection of SNP TSC0033492
ttttaaattgtga

SEQ ID NO: 134380 - DNA, 13 bp, Artificial Sequence
  Oligonucleotide for detection of SNP TSC0033492
tcacaatttaaaa

SEQ ID NO: 134381 - DNA, 13 bp, Artificial Sequence
  Oligonucleotide for detection of SNP TSC0033492
ttttaatttgtga

SEQ ID NO: 134382 - DNA, 13 bp, Artificial Sequence
  Oligonucleotide for detection of SNP TSC0033492
tcacaaattaaaa

SEQ ID NO: 134383 - DNA, 13 bp, Artificial Sequence
  Oligonucleotide for detection of SNP TSC0033492
ttataatttgaga

SEQ ID NO: 134384 - DNA, 13 bp, Artificial Sequence
  Oligonucleotide for detection of SNP TSC0033492
tctcaaattataa

SEQ ID NO: 134385 - DNA, 13 bp, Artificial Sequence
  Oligonucleotide for detection of SNP TSC0033492
ttataaattgaga

SEQ ID NO: 134386 - DNA, 13 bp, Artificial Sequence
  Oligonucleotide for detection of SNP TSC0033492
tctcaatttataa

SEQ ID NO: 134387 - DNA, 13 bp, Artificial Sequence
  Oligonucleotide for detection of SNP TSC0033496
tttaaggatttay

SEQ ID NO: 134388 - DNA, 13 bp, Artificial Sequence
  Oligonucleotide for detection of SNP TSC0033496
rtaaatccttaaa

SEQ ID NO: 134389 - DNA, 13 bp, Artificial Sequence
  Oligonucleotide for detection of SNP TSC0033496
tttaagaatttay

SEQ ID NO: 134390 - DNA, 13 bp, Artificial Sequence
  Oligonucleotide for detection of SNP TSC0033496
rtaaattcttaaa

SEQ ID NO: 134391 - DNA, 13 bp, Artificial Sequence
  Oligonucleotide for detection of SNP TSC0033498
ataaaaggaaagt

SEQ ID NO: 134392 - DNA, 13 bp, Artificial Sequence
  Oligonucleotide for detection of SNP TSC0033498
actttccttttat

SEQ ID NO: 134393 - DNA, 13 bp, Artificial Sequence
  Oligonucleotide for detection of SNP TSC0033498
ataaaaagaaagt

SEQ ID NO: 134394 - DNA, 13 bp, Artificial Sequence
  Oligonucleotide for detection of SNP TSC0033498
actttctttttat

SEQ ID NO: 134395 - DNA, 13 bp, Artificial Sequence
  Oligonucleotide for detection of SNP TSC0033500
agaatagagaata

SEQ ID NO: 134396 - DNA, 13 bp, Artificial Sequence
  Oligonucleotide for detection of SNP TSC0033500
tattctctattct

SEQ ID NO: 134397 - DNA, 13 bp, Artificial Sequence
  Oligonucleotide for detection of SNP TSC0033500
agaatatagaata

SEQ ID NO: 134398 - DNA, 13 bp, Artificial Sequence
  Oligonucleotide for detection of SNP TSC0033500
tattctatattct

SEQ ID NO: 134399 - DNA, 13 bp, Artificial Sequence
  Oligonucleotide for detection of SNP TSC0033501
gaggtgtggttgt

SEQ ID NO: 134400 - DNA, 13 bp, Artificial Sequence
  Oligonucleotide for detection of SNP TSC0033501
acaaccacacctc

SEQ ID NO: 134401 - DNA, 13 bp, Artificial Sequence
  Oligonucleotide for detection of SNP TSC0033501
gaggtgcggttgt

SEQ ID NO: 134402 - DNA, 13 bp, Artificial Sequence
  Oligonucleotide for detection of SNP TSC0033501
acaaccgcacctc

SEQ ID NO: 134403 - DNA, 13 bp, Artificial Sequence
  Oligonucleotide for detection of SNP TSC0033501
ataattgtattty

SEQ ID NO: 134404 - DNA, 13 bp, Artificial Sequence
  Oligonucleotide for detection of SNP TSC0033501
raaatacaattat

SEQ ID NO: 134405 - DNA, 13 bp, Artificial Sequence
  Oligonucleotide for detection of SNP TSC0033501
ataattatattty

SEQ ID NO: 134406 - DNA, 13 bp, Artificial Sequence
  Oligonucleotide for detection of SNP TSC0033501
raaatataattat

SEQ ID NO: 134407 - DNA, 13 bp, Artificial Sequence
  Oligonucleotide for detection of SNP TSC0033501
ataatcgtattty

SEQ ID NO: 134408 - DNA, 13 bp, Artificial Sequence
  Oligonucleotide for detection of SNP TSC0033501
raaatacgattat

SEQ ID NO: 134409 - DNA, 13 bp, Artificial Sequence
  Oligonucleotide for detection of SNP TSC0033502
aggtttgtgtgty

SEQ ID NO: 134410 - DNA, 13 bp, Artificial Sequence
  Oligonucleotide for detection of SNP TSC0033502
racacacaaacct

SEQ ID NO: 134411 - DNA, 13 bp, Artificial Sequence
  Oligonucleotide for detection of SNP TSC0033502
aggtttatgtgty

SEQ ID NO: 134412 - DNA, 13 bp, Artificial Sequence
  Oligonucleotide for detection of SNP TSC0033502
racacataaacct

SEQ ID NO: 134413 - DNA, 13 bp, Artificial Sequence
  Oligonucleotide for detection of SNP TSC0033503
agggttgttatag

SEQ ID NO: 134414 - DNA, 13 bp, Artificial Sequence
  Oligonucleotide for detection of SNP TSC0033503
ctataacaaccct

SEQ ID NO: 134415 - DNA, 13 bp, Artificial Sequence
  Oligonucleotide for detection of SNP TSC0033503
ttgtaggagtttt

SEQ ID NO: 134416 - DNA, 13 bp, Artificial Sequence
  Oligonucleotide for detection of SNP TSC0033503
aaaactcctacaa

SEQ ID NO: 134417 - DNA, 13 bp, Artificial Sequence
  Oligonucleotide for detection of SNP TSC0033503
ttgtagtagtttt

SEQ ID NO: 134418 - DNA, 13 bp, Artificial Sequence
  Oligonucleotide for detection of SNP TSC0033503
aaaactactacaa

SEQ ID NO: 134419 - DNA, 13 bp, Artificial Sequence
  Oligonucleotide for detection of SNP TSC0033507
gtgtatttttttt

SEQ ID NO: 134420 - DNA, 13 bp, Artificial Sequence
  Oligonucleotide for detection of SNP TSC0033507
aaaaaaaatacac

SEQ ID NO: 134421 - DNA, 13 bp, Artificial Sequence
  Oligonucleotide for detection of SNP TSC0033507
gtgtatgtttttt

SEQ ID NO: 134422 - DNA, 13 bp, Artificial Sequence
  Oligonucleotide for detection of SNP TSC0033507
aaaaaacatacac

SEQ ID NO: 134423 - DNA, 13 bp, Artificial Sequence
  Oligonucleotide for detection of SNP TSC0033507
gtgtacgtttttt

SEQ ID NO: 134424 - DNA, 13 bp, Artificial Sequence
  Oligonucleotide for detection of SNP TSC0033507
aaaaaacgtacac

SEQ ID NO: 134425 - DNA, 13 bp, Artificial Sequence
  Oligonucleotide for detection of SNP TSC0033507
agaaagggtatay

SEQ ID NO: 134426 - DNA, 13 bp, Artificial Sequence
  Oligonucleotide for detection of SNP TSC0033507
rtataccctttct

SEQ ID NO: 134427 - DNA, 13 bp, Artificial Sequence
  Oligonucleotide for detection of SNP TSC0033507
agaaagtgtatay

SEQ ID NO: 134428 - DNA, 13 bp, Artificial Sequence
  Oligonucleotide for detection of SNP TSC0033507
rtatacactttct

SEQ ID NO: 134429 - DNA, 13 bp, Artificial Sequence
  Oligonucleotide for detection of SNP TSC0033507
agaaagcgtatay

SEQ ID NO: 134430 - DNA, 13 bp, Artificial Sequence
  Oligonucleotide for detection of SNP TSC0033507
rtatacgctttct

SEQ ID NO: 134431 - DNA, 13 bp, Artificial Sequence
  Oligonucleotide for detection of SNP TSC0033508
tttataaatttag

SEQ ID NO: 134432 - DNA, 13 bp, Artificial Sequence
  Oligonucleotide for detection of SNP TSC0033508
ctaaatttataaa

SEQ ID NO: 134433 - DNA, 13 bp, Artificial Sequence
  Oligonucleotide for detection of SNP TSC0033508
tttatatatttag

SEQ ID NO: 134434 - DNA, 13 bp, Artificial Sequence
  Oligonucleotide for detection of SNP TSC0033508
ctaaatatataaa

SEQ ID NO: 134435 - DNA, 13 bp, Artificial Sequence
  Oligonucleotide for detection of SNP TSC0033508
ttaaatttgtagg

SEQ ID NO: 134436 - DNA, 13 bp, Artificial Sequence
  Oligonucleotide for detection of SNP TSC0033508
cctacaaatttaa

SEQ ID NO: 134437 - DNA, 13 bp, Artificial Sequence
  Oligonucleotide for detection of SNP TSC0033508
ttaaatatgtagg

SEQ ID NO: 134438 - DNA, 13 bp, Artificial Sequence
  Oligonucleotide for detection of SNP TSC0033508
cctacatatttaa

SEQ ID NO: 134439 - DNA, 13 bp, Artificial Sequence
  Oligonucleotide for detection of SNP TSC0033509
aaaaaggggagag

SEQ ID NO: 134440 - DNA, 13 bp, Artificial Sequence
  Oligonucleotide for detection of SNP TSC0033509
ctctccccttttt

SEQ ID NO: 134441 - DNA, 13 bp, Artificial Sequence
  Oligonucleotide for detection of SNP TSC0033509
aaaaagaggagag

SEQ ID NO: 134442 - DNA, 13 bp, Artificial Sequence
  Oligonucleotide for detection of SNP TSC0033509
ctctcctcttttt

SEQ ID NO: 134443 - DNA, 13 bp, Artificial Sequence
  Oligonucleotide for detection of SNP TSC0033510
gataaagataaty

SEQ ID NO: 134444 - DNA, 13 bp, Artificial Sequence
  Oligonucleotide for detection of SNP TSC0033510
rattatctttatc

SEQ ID NO: 134445 - DNA, 13 bp, Artificial Sequence
  Oligonucleotide for detection of SNP TSC0033510
gataaatataaty

SEQ ID NO: 134446 - DNA, 13 bp, Artificial Sequence
  Oligonucleotide for detection of SNP TSC0033510
rattatatttatc

SEQ ID NO: 134447 - DNA, 13 bp, Artificial Sequence
  Oligonucleotide for detection of SNP TSC0033510
gattgtttttgty

SEQ ID NO: 134448 - DNA, 13 bp, Artificial Sequence
  Oligonucleotide for detection of SNP TSC0033510
racaaaaacaatc

SEQ ID NO: 134449 - DNA, 13 bp, Artificial Sequence
  Oligonucleotide for detection of SNP TSC0033510
gattgtatttgty

SEQ ID NO: 134450 - DNA, 13 bp, Artificial Sequence
  Oligonucleotide for detection of SNP TSC0033510
racaaatacaatc

SEQ ID NO: 134451 - DNA, 13 bp, Artificial Sequence
  Oligonucleotide for detection of SNP TSC0033512
gatttggtggagg

SEQ ID NO: 134452 - DNA, 13 bp, Artificial Sequence
  Oligonucleotide for detection of SNP TSC0033512
cctccaccaaatc

SEQ ID NO: 134453 - DNA, 13 bp, Artificial Sequence
  Oligonucleotide for detection of SNP TSC0033512
gatttgatggagg

SEQ ID NO: 134454 - DNA, 13 bp, Artificial Sequence
  Oligonucleotide for detection of SNP TSC0033512
cctccatcaaatc

SEQ ID NO: 134455 - DNA, 13 bp, Artificial Sequence
  Oligonucleotide for detection of SNP TSC0033512
gattcggtggagg

SEQ ID NO: 134456 - DNA, 13 bp, Artificial Sequence
  Oligonucleotide for detection of SNP TSC0033512
cctccaccgaatc

SEQ ID NO: 134457 - DNA, 13 bp, Artificial Sequence
  Oligonucleotide for detection of SNP TSC0033512
gattcgatggagg

SEQ ID NO: 134458 - DNA, 13 bp, Artificial Sequence
  Oligonucleotide for detection of SNP TSC0033512
cctccatcgaatc

SEQ ID NO: 134459 - DNA, 13 bp, Artificial Sequence
  Oligonucleotide for detection of SNP TSC0033512
gatttggcggagg

SEQ ID NO: 134460 - DNA, 13 bp, Artificial Sequence
  Oligonucleotide for detection of SNP TSC0033512
cctccgccaaatc

SEQ ID NO: 134461 - DNA, 13 bp, Artificial Sequence
  Oligonucleotide for detection of SNP TSC0033512
gatttgacggagg

SEQ ID NO: 134462 - DNA, 13 bp, Artificial Sequence
  Oligonucleotide for detection of SNP TSC0033512
cctccgtcaaatc

SEQ ID NO: 134463 - DNA, 13 bp, Artificial Sequence
  Oligonucleotide for detection of SNP TSC0033512
gattcggcggagg

SEQ ID NO: 134464 - DNA, 13 bp, Artificial Sequence
  Oligonucleotide for detection of SNP TSC0033512
cctccgccgaatc

SEQ ID NO: 134465 - DNA, 13 bp, Artificial Sequence
  Oligonucleotide for detection of SNP TSC0033512
gattcgacggagg

SEQ ID NO: 134466 - DNA, 13 bp, Artificial Sequence
  Oligonucleotide for detection of SNP TSC0033512
cctccgtcgaatc

SEQ ID NO: 134467 - DNA, 13 bp, Artificial Sequence
  Oligonucleotide for detection of SNP TSC0033513
ttggaagtagtat

SEQ ID NO: 134468 - DNA, 13 bp, Artificial Sequence
  Oligonucleotide for detection of SNP TSC0033513
atactacttccaa

SEQ ID NO: 134469 - DNA, 13 bp, Artificial Sequence
  Oligonucleotide for detection of SNP TSC0033513
ttggaaatagtat

SEQ ID NO: 134470 - DNA, 13 bp, Artificial Sequence
  Oligonucleotide for detection of SNP TSC0033513
atactatttccaa

SEQ ID NO: 134471 - DNA, 13 bp, Artificial Sequence
  Oligonucleotide for detection of SNP TSC0033514
atttgggtatata

SEQ ID NO: 134472 - DNA, 13 bp, Artificial Sequence
  Oligonucleotide for detection of SNP TSC0033514
tatatacccaaat

SEQ ID NO: 134473 - DNA, 13 bp, Artificial Sequence
  Oligonucleotide for detection of SNP TSC0033514
atttggttatata

SEQ ID NO: 134474 - DNA, 13 bp, Artificial Sequence
  Oligonucleotide for detection of SNP TSC0033514
tatataaccaaat

SEQ ID NO: 134475 - DNA, 13 bp, Artificial Sequence
  Oligonucleotide for detection of SNP TSC0033514
attcgggtatata

SEQ ID NO: 134476 - DNA, 13 bp, Artificial Sequence
  Oligonucleotide for detection of SNP TSC0033514
tatatacccgaat

SEQ ID NO: 134477 - DNA, 13 bp, Artificial Sequence
  Oligonucleotide for detection of SNP TSC0033514
attcggttatata

SEQ ID NO: 134478 - DNA, 13 bp, Artificial Sequence
  Oligonucleotide for detection of SNP TSC0033514
tatataaccgaat

SEQ ID NO: 134479 - DNA, 13 bp, Artificial Sequence
  Oligonucleotide for detection of SNP TSC0033514
tgtgtgtttgagt

SEQ ID NO: 134480 - DNA, 13 bp, Artificial Sequence
  Oligonucleotide for detection of SNP TSC0033514
actcaaacacaca

SEQ ID NO: 134481 - DNA, 13 bp, Artificial Sequence
  Oligonucleotide for detection of SNP TSC0033514
tgtgtgattgagt

SEQ ID NO: 134482 - DNA, 13 bp, Artificial Sequence
  Oligonucleotide for detection of SNP TSC0033514
actcaatcacaca

SEQ ID NO: 134483 - DNA, 13 bp, Artificial Sequence
  Oligonucleotide for detection of SNP TSC0033514
tgtgtgttcgagt

SEQ ID NO: 134484 - DNA, 13 bp, Artificial Sequence
  Oligonucleotide for detection of SNP TSC0033514
actcgaacacaca

SEQ ID NO: 134485 - DNA, 13 bp, Artificial Sequence
  Oligonucleotide for detection of SNP TSC0033514
tgtgtgatcgagt

SEQ ID NO: 134486 - DNA, 13 bp, Artificial Sequence
  Oligonucleotide for detection of SNP TSC0033514
actcgatcacaca

SEQ ID NO: 134487 - DNA, 13 bp, Artificial Sequence
  Oligonucleotide for detection of SNP TSC0033516
gtattagttattg

SEQ ID NO: 134488 - DNA, 13 bp, Artificial Sequence
  Oligonucleotide for detection of SNP TSC0033516
caataactaatac

SEQ ID NO: 134489 - DNA, 13 bp, Artificial Sequence
  Oligonucleotide for detection of SNP TSC0033516
gtattatttattg

SEQ ID NO: 134490 - DNA, 13 bp, Artificial Sequence
  Oligonucleotide for detection of SNP TSC0033516
caataaataatac

SEQ ID NO: 134491 - DNA, 13 bp, Artificial Sequence
  Oligonucleotide for detection of SNP TSC0033516
tagtgattaatgy

SEQ ID NO: 134492 - DNA, 13 bp, Artificial Sequence
  Oligonucleotide for detection of SNP TSC0033516
rcattaatcacta

SEQ ID NO: 134493 - DNA, 13 bp, Artificial Sequence
  Oligonucleotide for detection of SNP TSC0033516
tagtgaataatgy

SEQ ID NO: 134494 - DNA, 13 bp, Artificial Sequence
  Oligonucleotide for detection of SNP TSC0033516
rcattattcacta

SEQ ID NO: 134495 - DNA, 13 bp, Artificial Sequence
  Oligonucleotide for detection of SNP TSC0033517
gttagtatataat

SEQ ID NO: 134496 - DNA, 13 bp, Artificial Sequence
  Oligonucleotide for detection of SNP TSC0033517
attatatactaac

SEQ ID NO: 134497 - DNA, 13 bp, Artificial Sequence
  Oligonucleotide for detection of SNP TSC0033517
gttagtgtataat

SEQ ID NO: 134498 - DNA, 13 bp, Artificial Sequence
  Oligonucleotide for detection of SNP TSC0033517
attatacactaac

SEQ ID NO: 134499 - DNA, 13 bp, Artificial Sequence
  Oligonucleotide for detection of SNP TSC0033518
tagtatataataa

SEQ ID NO: 134500 - DNA, 13 bp, Artificial Sequence
  Oligonucleotide for detection of SNP TSC0033518
ttattatatacta

SEQ ID NO: 134501 - DNA, 13 bp, Artificial Sequence
  Oligonucleotide for detection of SNP TSC0033518
tagtatgtaataa

SEQ ID NO: 134502 - DNA, 13 bp, Artificial Sequence
  Oligonucleotide for detection of SNP TSC0033518
ttattacatacta

SEQ ID NO: 134503 - DNA, 13 bp, Artificial Sequence
  Oligonucleotide for detection of SNP TSC0033518
tagtacgtaataa

SEQ ID NO: 134504 - DNA, 13 bp, Artificial Sequence
  Oligonucleotide for detection of SNP TSC0033518
ttattacgtacta

SEQ ID NO: 134505 - DNA, 13 bp, Artificial Sequence
  Oligonucleotide for detection of SNP TSC0033518
ttattatgtattg

SEQ ID NO: 134506 - DNA, 13 bp, Artificial Sequence
  Oligonucleotide for detection of SNP TSC0033518
caatacataataa

SEQ ID NO: 134507 - DNA, 13 bp, Artificial Sequence
  Oligonucleotide for detection of SNP TSC0033518
ttattacgtattg

SEQ ID NO: 134508 - DNA, 13 bp, Artificial Sequence
  Oligonucleotide for detection of SNP TSC0033518
caatacgtaataa

SEQ ID NO: 134509 - DNA, 13 bp, Artificial Sequence
  Oligonucleotide for detection of SNP TSC0033519
taattaagaaaty

SEQ ID NO: 134510 - DNA, 13 bp, Artificial Sequence
  Oligonucleotide for detection of SNP TSC0033519
ratttcttaatta

SEQ ID NO: 134511 - DNA, 13 bp, Artificial Sequence
  Oligonucleotide for detection of SNP TSC0033519
taattatgaaaty

SEQ ID NO: 134512 - DNA, 13 bp, Artificial Sequence
  Oligonucleotide for detection of SNP TSC0033519
ratttcataatta

SEQ ID NO: 134513 - DNA, 13 bp, Artificial Sequence
  Oligonucleotide for detection of SNP TSC0033519
gattttttagtta

SEQ ID NO: 134514 - DNA, 13 bp, Artificial Sequence
  Oligonucleotide for detection of SNP TSC0033519
taactaaaaaatc

SEQ ID NO: 134515 - DNA, 13 bp, Artificial Sequence
  Oligonucleotide for detection of SNP TSC0033519
gattttatagtta

SEQ ID NO: 134516 - DNA, 13 bp, Artificial Sequence
  Oligonucleotide for detection of SNP TSC0033519
taactataaaatc

SEQ ID NO: 134517 - DNA, 13 bp, Artificial Sequence
  Oligonucleotide for detection of SNP TSC0033524
tgggtggtatagt

SEQ ID NO: 134518 - DNA, 13 bp, Artificial Sequence
  Oligonucleotide for detection of SNP TSC0033524
actataccaccca

SEQ ID NO: 134519 - DNA, 13 bp, Artificial Sequence
  Oligonucleotide for detection of SNP TSC0033524
tgggtgatatagt

SEQ ID NO: 134520 - DNA, 13 bp, Artificial Sequence
  Oligonucleotide for detection of SNP TSC0033524
actatatcaccca

SEQ ID NO: 134521 - DNA, 13 bp, Artificial Sequence
  Oligonucleotide for detection of SNP TSC0033526
ttggttttttttt

SEQ ID NO: 134522 - DNA, 13 bp, Artificial Sequence
  Oligonucleotide for detection of SNP TSC0033526
aaaaaaaaaccaa

SEQ ID NO: 134523 - DNA, 13 bp, Artificial Sequence
  Oligonucleotide for detection of SNP TSC0033526
ttggttgtttttt

SEQ ID NO: 134524 - DNA, 13 bp, Artificial Sequence
  Oligonucleotide for detection of SNP TSC0033526
aaaaaacaaccaa

SEQ ID NO: 134525 - DNA, 13 bp, Artificial Sequence
  Oligonucleotide for detection of SNP TSC0033527
gaaggagggtatt

SEQ ID NO: 134526 - DNA, 13 bp, Artificial Sequence
  Oligonucleotide for detection of SNP TSC0033527
aataccctccttc

SEQ ID NO: 134527 - DNA, 13 bp, Artificial Sequence
  Oligonucleotide for detection of SNP TSC0033527
gaaggaaggtatt

SEQ ID NO: 134528 - DNA, 13 bp, Artificial Sequence
  Oligonucleotide for detection of SNP TSC0033527
aataccttccttc

SEQ ID NO: 134529 - DNA, 13 bp, Artificial Sequence
  Oligonucleotide for detection of SNP TSC0033528
gttgaaattatga

SEQ ID NO: 134530 - DNA, 13 bp, Artificial Sequence
  Oligonucleotide for detection of SNP TSC0033528
tcataatttcaac

SEQ ID NO: 134531 - DNA, 13 bp, Artificial Sequence
  Oligonucleotide for detection of SNP TSC0033528
gttgaatttatga

SEQ ID NO: 134532 - DNA, 13 bp, Artificial Sequence
  Oligonucleotide for detection of SNP TSC0033528
tcataaattcaac

SEQ ID NO: 134533 - DNA, 13 bp, Artificial Sequence
  Oligonucleotide for detection of SNP TSC0033528
ttatagttttaay

SEQ ID NO: 134534 - DNA, 13 bp, Artificial Sequence
  Oligonucleotide for detection of SNP TSC0033528
rttaaaactataa

SEQ ID NO: 134535 - DNA, 13 bp, Artificial Sequence
  Oligonucleotide for detection of SNP TSC0033528
ttatagatttaay

SEQ ID NO: 134536 - DNA, 13 bp, Artificial Sequence
  Oligonucleotide for detection of SNP TSC0033528
rttaaatctataa

SEQ ID NO: 134537 - DNA, 13 bp, Artificial Sequence
  Oligonucleotide for detection of SNP TSC0033529
aaggggtattagg

SEQ ID NO: 134538 - DNA, 13 bp, Artificial Sequence
  Oligonucleotide for detection of SNP TSC0033529
cctaatacccctt

SEQ ID NO: 134539 - DNA, 13 bp, Artificial Sequence
  Oligonucleotide for detection of SNP TSC0033529
aagggggattagg

SEQ ID NO: 134540 - DNA, 13 bp, Artificial Sequence
  Oligonucleotide for detection of SNP TSC0033529
cctaatccccctt

SEQ ID NO: 134541 - DNA, 13 bp, Artificial Sequence
  Oligonucleotide for detection of SNP TSC0033530
tgaaggtgaatay

SEQ ID NO: 134542 - DNA, 13 bp, Artificial Sequence
  Oligonucleotide for detection of SNP TSC0033530
rtattcaccttca

SEQ ID NO: 134543 - DNA, 13 bp, Artificial Sequence
  Oligonucleotide for detection of SNP TSC0033530
tgaaggcgaatay

SEQ ID NO: 134544 - DNA, 13 bp, Artificial Sequence
  Oligonucleotide for detection of SNP TSC0033530
rtattcgccttca

SEQ ID NO: 134545 - DNA, 13 bp, Artificial Sequence
  Oligonucleotide for detection of SNP TSC0033530
gtgtttgttttta

SEQ ID NO: 134546 - DNA, 13 bp, Artificial Sequence
  Oligonucleotide for detection of SNP TSC0033530
taaaaacaaacac

SEQ ID NO: 134547 - DNA, 13 bp, Artificial Sequence
  Oligonucleotide for detection of SNP TSC0033530
gtgtttattttta

SEQ ID NO: 134548 - DNA, 13 bp, Artificial Sequence
  Oligonucleotide for detection of SNP TSC0033530
taaaaataaacac

SEQ ID NO: 134549 - DNA, 13 bp, Artificial Sequence
  Oligonucleotide for detection of SNP TSC0033530
gtgttcgttttta

SEQ ID NO: 134550 - DNA, 13 bp, Artificial Sequence
  Oligonucleotide for detection of SNP TSC0033530
taaaaacgaacac

SEQ ID NO: 134551 - DNA, 13 bp, Artificial Sequence
  Oligonucleotide for detection of SNP TSC0033532
ttttttgaaagtt

SEQ ID NO: 134552 - DNA, 13 bp, Artificial Sequence
  Oligonucleotide for detection of SNP TSC0033532
aactttcaaaaaa

SEQ ID NO: 134553 - DNA, 13 bp, Artificial Sequence
  Oligonucleotide for detection of SNP TSC0033532
ttttttaaaagtt

SEQ ID NO: 134554 - DNA, 13 bp, Artificial Sequence
  Oligonucleotide for detection of SNP TSC0033532
aacttttaaaaaa

SEQ ID NO: 134555 - DNA, 13 bp, Artificial Sequence
  Oligonucleotide for detection of SNP TSC0033533
taagggatgtgtt

SEQ ID NO: 134556 - DNA, 13 bp, Artificial Sequence
  Oligonucleotide for detection of SNP TSC0033533
aacacatccctta

SEQ ID NO: 134557 - DNA, 13 bp, Artificial Sequence
  Oligonucleotide for detection of SNP TSC0033533
taagggttgtgtt

SEQ ID NO: 134558 - DNA, 13 bp, Artificial Sequence
  Oligonucleotide for detection of SNP TSC0033533
aacacaaccctta

SEQ ID NO: 134559 - DNA, 13 bp, Artificial Sequence
  Oligonucleotide for detection of SNP TSC0033533
agtatattttttg

SEQ ID NO: 134560 - DNA, 13 bp, Artificial Sequence
  Oligonucleotide for detection of SNP TSC0033533
caaaaaatatact

SEQ ID NO: 134561 - DNA, 13 bp, Artificial Sequence
  Oligonucleotide for detection of SNP TSC0033533
agtataatttttg

SEQ ID NO: 134562 - DNA, 13 bp, Artificial Sequence
  Oligonucleotide for detection of SNP TSC0033533
caaaaattatact

SEQ ID NO: 134563 - DNA, 13 bp, Artificial Sequence
  Oligonucleotide for detection of SNP TSC0033536
taataaatattty

SEQ ID NO: 134564 - DNA, 13 bp, Artificial Sequence
  Oligonucleotide for detection of SNP TSC0033536
raaatatttatta

SEQ ID NO: 134565 - DNA, 13 bp, Artificial Sequence
  Oligonucleotide for detection of SNP TSC0033536
taataagtattty

SEQ ID NO: 134566 - DNA, 13 bp, Artificial Sequence
  Oligonucleotide for detection of SNP TSC0033536
raaatacttatta

SEQ ID NO: 134567 - DNA, 13 bp, Artificial Sequence
  Oligonucleotide for detection of SNP TSC0033537
tagtaagttaaga

SEQ ID NO: 134568 - DNA, 13 bp, Artificial Sequence
  Oligonucleotide for detection of SNP TSC0033537
tcttaacttacta

SEQ ID NO: 134569 - DNA, 13 bp, Artificial Sequence
  Oligonucleotide for detection of SNP TSC0033537
tagtaaattaaga

SEQ ID NO: 134570 - DNA, 13 bp, Artificial Sequence
  Oligonucleotide for detection of SNP TSC0033537
tcttaatttacta

SEQ ID NO: 134571 - DNA, 13 bp, Artificial Sequence
  Oligonucleotide for detection of SNP TSC0033538
ttttagagagttt

SEQ ID NO: 134572 - DNA, 13 bp, Artificial Sequence
  Oligonucleotide for detection of SNP TSC0033538
aaactctctaaaa

SEQ ID NO: 134573 - DNA, 13 bp, Artificial Sequence
  Oligonucleotide for detection of SNP TSC0033538
ttttagtgagttt

SEQ ID NO: 134574 - DNA, 13 bp, Artificial Sequence
  Oligonucleotide for detection of SNP TSC0033538
aaactcactaaaa

SEQ ID NO: 134575 - DNA, 13 bp, Artificial Sequence
  Oligonucleotide for detection of SNP TSC0033538
aggttttttgaga

SEQ ID NO: 134576 - DNA, 13 bp, Artificial Sequence
  Oligonucleotide for detection of SNP TSC0033538
tctcaaaaaacct

SEQ ID NO: 134577 - DNA, 13 bp, Artificial Sequence
  Oligonucleotide for detection of SNP TSC0033538
aggtttattgaga

SEQ ID NO: 134578 - DNA, 13 bp, Artificial Sequence
  Oligonucleotide for detection of SNP TSC0033538
tctcaataaacct

SEQ ID NO: 134579 - DNA, 13 bp, Artificial Sequence
  Oligonucleotide for detection of SNP TSC0033539
ttttaaaaaagay

SEQ ID NO: 134580 - DNA, 13 bp, Artificial Sequence
  Oligonucleotide for detection of SNP TSC0033539
rtcttttttaaaa

SEQ ID NO: 134581 - DNA, 13 bp, Artificial Sequence
  Oligonucleotide for detection of SNP TSC0033539
ttttaataaagay

SEQ ID NO: 134582 - DNA, 13 bp, Artificial Sequence
  Oligonucleotide for detection of SNP TSC0033539
rtctttattaaaa

SEQ ID NO: 134583 - DNA, 13 bp, Artificial Sequence
  Oligonucleotide for detection of SNP TSC0033540
tatatatttagat

SEQ ID NO: 134584 - DNA, 13 bp, Artificial Sequence
  Oligonucleotide for detection of SNP TSC0033540
atctaaatatata

SEQ ID NO: 134585 - DNA, 13 bp, Artificial Sequence
  Oligonucleotide for detection of SNP TSC0033540
tatatagttagat

SEQ ID NO: 134586 - DNA, 13 bp, Artificial Sequence
  Oligonucleotide for detection of SNP TSC0033540
atctaactatata

SEQ ID NO: 134587 - DNA, 13 bp, Artificial Sequence
  Oligonucleotide for detection of SNP TSC0033540
atttgggtgtgtg

SEQ ID NO: 134588 - DNA, 13 bp, Artificial Sequence
  Oligonucleotide for detection of SNP TSC0033540
cacacacccaaat

SEQ ID NO: 134589 - DNA, 13 bp, Artificial Sequence
  Oligonucleotide for detection of SNP TSC0033540
atttggttgtgtg

SEQ ID NO: 134590 - DNA, 13 bp, Artificial Sequence
  Oligonucleotide for detection of SNP TSC0033540
cacacaaccaaat

SEQ ID NO: 134591 - DNA, 13 bp, Artificial Sequence
  Oligonucleotide for detection of SNP TSC0033541
ttgtagggaatta

SEQ ID NO: 134592 - DNA, 13 bp, Artificial Sequence
  Oligonucleotide for detection of SNP TSC0033541
taattccctacaa

SEQ ID NO: 134593 - DNA, 13 bp, Artificial Sequence
  Oligonucleotide for detection of SNP TSC0033541
ttgtagtgaatta

SEQ ID NO: 134594 - DNA, 13 bp, Artificial Sequence
  Oligonucleotide for detection of SNP TSC0033541
taattcactacaa

SEQ ID NO: 134595 - DNA, 13 bp, Artificial Sequence
  Oligonucleotide for detection of SNP TSC0033541
tggttttttgtaa

SEQ ID NO: 134596 - DNA, 13 bp, Artificial Sequence
  Oligonucleotide for detection of SNP TSC0033541
ttacaaaaaacca

SEQ ID NO: 134597 - DNA, 13 bp, Artificial Sequence
  Oligonucleotide for detection of SNP TSC0033545
ataagatgaatay

SEQ ID NO: 134598 - DNA, 13 bp, Artificial Sequence
  Oligonucleotide for detection of SNP TSC0033545
rtattcatcttat

SEQ ID NO: 134599 - DNA, 13 bp, Artificial Sequence
  Oligonucleotide for detection of SNP TSC0033545
ataagacgaatay

SEQ ID NO: 134600 - DNA, 13 bp, Artificial Sequence
  Oligonucleotide for detection of SNP TSC0033545
rtattcgtcttat

SEQ ID NO: 134601 - DNA, 13 bp, Artificial Sequence
  Oligonucleotide for detection of SNP TSC0033546
tttttgaaaattt

SEQ ID NO: 134602 - DNA, 13 bp, Artificial Sequence
  Oligonucleotide for detection of SNP TSC0033546
aaattttcaaaaa

SEQ ID NO: 134603 - DNA, 13 bp, Artificial Sequence
  Oligonucleotide for detection of SNP TSC0033546
tttttggaaattt

SEQ ID NO: 134604 - DNA, 13 bp, Artificial Sequence
  Oligonucleotide for detection of SNP TSC0033546
aaatttccaaaaa

SEQ ID NO: 134605 - DNA, 13 bp, Artificial Sequence
  Oligonucleotide for detection of SNP TSC0033550
gttgggattttga

SEQ ID NO: 134606 - DNA, 13 bp, Artificial Sequence
  Oligonucleotide for detection of SNP TSC0033550
tcaaaatcccaac

SEQ ID NO: 134607 - DNA, 13 bp, Artificial Sequence
  Oligonucleotide for detection of SNP TSC0033550
gttgggtttttga

SEQ ID NO: 134608 - DNA, 13 bp, Artificial Sequence
  Oligonucleotide for detection of SNP TSC0033550
tcaaaaacccaac

SEQ ID NO: 134609 - DNA, 13 bp, Artificial Sequence
  Oligonucleotide for detection of SNP TSC0033550
gttgggatttcga

SEQ ID NO: 134610 - DNA, 13 bp, Artificial Sequence
  Oligonucleotide for detection of SNP TSC0033550
tcgaaatcccaac

SEQ ID NO: 134611 - DNA, 13 bp, Artificial Sequence
  Oligonucleotide for detection of SNP TSC0033550
gttgggttttcga

SEQ ID NO: 134612 - DNA, 13 bp, Artificial Sequence
  Oligonucleotide for detection of SNP TSC0033550
tcgaaaacccaac

SEQ ID NO: 134613 - DNA, 13 bp, Artificial Sequence
  Oligonucleotide for detection of SNP TSC0033550
ttgaaattttagy

SEQ ID NO: 134614 - DNA, 13 bp, Artificial Sequence
  Oligonucleotide for detection of SNP TSC0033550
rctaaaatttcaa

SEQ ID NO: 134615 - DNA, 13 bp, Artificial Sequence
  Oligonucleotide for detection of SNP TSC0033550
ttgaaaatttagy

SEQ ID NO: 134616 - DNA, 13 bp, Artificial Sequence
  Oligonucleotide for detection of SNP TSC0033550
rctaaattttcaa

SEQ ID NO: 134617 - DNA, 13 bp, Artificial Sequence
  Oligonucleotide for detection of SNP TSC0033550
tcgaaattttagy

SEQ ID NO: 134618 - DNA, 13 bp, Artificial Sequence
  Oligonucleotide for detection of SNP TSC0033550
rctaaaatttcga

SEQ ID NO: 134619 - DNA, 13 bp, Artificial Sequence
  Oligonucleotide for detection of SNP TSC0033550
tcgaaaatttagy

SEQ ID NO: 134620 - DNA, 13 bp, Artificial Sequence
  Oligonucleotide for detection of SNP TSC0033550
rctaaattttcga

SEQ ID NO: 134621 - DNA, 13 bp, Artificial Sequence
  Oligonucleotide for detection of SNP TSC0033551
aatgttatatgga

SEQ ID NO: 134622 - DNA, 13 bp, Artificial Sequence
  Oligonucleotide for detection of SNP TSC0033551
tccatataacatt

SEQ ID NO: 134623 - DNA, 13 bp, Artificial Sequence
  Oligonucleotide for detection of SNP TSC0033551
aatgttgtatgga

SEQ ID NO: 134624 - DNA, 13 bp, Artificial Sequence
  Oligonucleotide for detection of SNP TSC0033551
tccatacaacatt

SEQ ID NO: 134625 - DNA, 13 bp, Artificial Sequence
  Oligonucleotide for detection of SNP TSC0033551
aatgtcgtatgga

SEQ ID NO: 134626 - DNA, 13 bp, Artificial Sequence
  Oligonucleotide for detection of SNP TSC0033551
tccatacgacatt

SEQ ID NO: 134627 - DNA, 13 bp, Artificial Sequence
  Oligonucleotide for detection of SNP TSC0033551
tttatgtggtatt

SEQ ID NO: 134628 - DNA, 13 bp, Artificial Sequence
  Oligonucleotide for detection of SNP TSC0033551
aataccacataaa

SEQ ID NO: 134629 - DNA, 13 bp, Artificial Sequence
  Oligonucleotide for detection of SNP TSC0033551
tttatgcggtatt

SEQ ID NO: 134630 - DNA, 13 bp, Artificial Sequence
  Oligonucleotide for detection of SNP TSC0033551
aataccgcataaa

SEQ ID NO: 134631 - DNA, 13 bp, Artificial Sequence
  Oligonucleotide for detection of SNP TSC0033553
gggtatagtggtg

SEQ ID NO: 134632 - DNA, 13 bp, Artificial Sequence
  Oligonucleotide for detection of SNP TSC0033553
caccactataccc

SEQ ID NO: 134633 - DNA, 13 bp, Artificial Sequence
  Oligonucleotide for detection of SNP TSC0033553
gggtatggtggtg

SEQ ID NO: 134634 - DNA, 13 bp, Artificial Sequence
  Oligonucleotide for detection of SNP TSC0033553
caccaccataccc

SEQ ID NO: 134635 - DNA, 13 bp, Artificial Sequence
  Oligonucleotide for detection of SNP TSC0033553
gggtatagtggcg

SEQ ID NO: 134636 - DNA, 13 bp, Artificial Sequence
  Oligonucleotide for detection of SNP TSC0033553
cgccactataccc

SEQ ID NO: 134637 - DNA, 13 bp, Artificial Sequence
  Oligonucleotide for detection of SNP TSC0033553
gggtacggtggtg

SEQ ID NO: 134638 - DNA, 13 bp, Artificial Sequence
  Oligonucleotide for detection of SNP TSC0033553
caccaccgtaccc

SEQ ID NO: 134639 - DNA, 13 bp, Artificial Sequence
  Oligonucleotide for detection of SNP TSC0033553
gggtatggtggcg

SEQ ID NO: 134640 - DNA, 13 bp, Artificial Sequence
  Oligonucleotide for detection of SNP TSC0033553
cgccaccataccc

SEQ ID NO: 134641 - DNA, 13 bp, Artificial Sequence
  Oligonucleotide for detection of SNP TSC0033553
gggtacggtggcg

SEQ ID NO: 134642 - DNA, 13 bp, Artificial Sequence
  Oligonucleotide for detection of SNP TSC0033553
cgccaccgtaccc

SEQ ID NO: 134643 - DNA, 13 bp, Artificial Sequence
  Oligonucleotide for detection of SNP TSC0033557
ggtggaattggta

SEQ ID NO: 134644 - DNA, 13 bp, Artificial Sequence
  Oligonucleotide for detection of SNP TSC0033557
taccaattccacc

SEQ ID NO: 134645 - DNA, 13 bp, Artificial Sequence
  Oligonucleotide for detection of SNP TSC0033557
ggtggagttggta

SEQ ID NO: 134646 - DNA, 13 bp, Artificial Sequence
  Oligonucleotide for detection of SNP TSC0033557
taccaactccacc

SEQ ID NO: 134647 - DNA, 13 bp, Artificial Sequence
  Oligonucleotide for detection of SNP TSC0033557
ggcggaattggta

SEQ ID NO: 134648 - DNA, 13 bp, Artificial Sequence
  Oligonucleotide for detection of SNP TSC0033557
taccaattccgcc

SEQ ID NO: 134649 - DNA, 13 bp, Artificial Sequence
  Oligonucleotide for detection of SNP TSC0033557
ggcggagttggta

SEQ ID NO: 134650 - DNA, 13 bp, Artificial Sequence
  Oligonucleotide for detection of SNP TSC0033557
taccaactccgcc

SEQ ID NO: 134651 - DNA, 13 bp, Artificial Sequence
  Oligonucleotide for detection of SNP TSC0033565
ggattggaatagt

SEQ ID NO: 134652 - DNA, 13 bp, Artificial Sequence
  Oligonucleotide for detection of SNP TSC0033565
actattccaatcc

SEQ ID NO: 134653 - DNA, 13 bp, Artificial Sequence
  Oligonucleotide for detection of SNP TSC0033565
ggattgaaatagt

SEQ ID NO: 134654 - DNA, 13 bp, Artificial Sequence
  Oligonucleotide for detection of SNP TSC0033565
actatttcaatcc

SEQ ID NO: 134655 - DNA, 13 bp, Artificial Sequence
  Oligonucleotide for detection of SNP TSC0033566
tagtggggattgg

SEQ ID NO: 134656 - DNA, 13 bp, Artificial Sequence
  Oligonucleotide for detection of SNP TSC0033566
ccaatccccacta

SEQ ID NO: 134657 - DNA, 13 bp, Artificial Sequence
  Oligonucleotide for detection of SNP TSC0033566
tagtggagattgg

SEQ ID NO: 134658 - DNA, 13 bp, Artificial Sequence
  Oligonucleotide for detection of SNP TSC0033566
ccaatctccacta

SEQ ID NO: 134659 - DNA, 13 bp, Artificial Sequence
  Oligonucleotide for detection of SNP TSC0033567
tttaagagatttg

SEQ ID NO: 134660 - DNA, 13 bp, Artificial Sequence
  Oligonucleotide for detection of SNP TSC0033567
caaatctcttaaa

SEQ ID NO: 134661 - DNA, 13 bp, Artificial Sequence
  Oligonucleotide for detection of SNP TSC0033567
tttaagtgatttg

SEQ ID NO: 134662 - DNA, 13 bp, Artificial Sequence
  Oligonucleotide for detection of SNP TSC0033567
caaatcacttaaa

SEQ ID NO: 134663 - DNA, 13 bp, Artificial Sequence
  Oligonucleotide for detection of SNP TSC0033568
atttttggataay

SEQ ID NO: 134664 - DNA, 13 bp, Artificial Sequence
  Oligonucleotide for detection of SNP TSC0033568
rttatccaaaaat

SEQ ID NO: 134665 - DNA, 13 bp, Artificial Sequence
  Oligonucleotide for detection of SNP TSC0033568
attttttgataay

SEQ ID NO: 134666 - DNA, 13 bp, Artificial Sequence
  Oligonucleotide for detection of SNP TSC0033568
rttatcaaaaaat

SEQ ID NO: 134667 - DNA, 13 bp, Artificial Sequence
  Oligonucleotide for detection of SNP TSC0033568
atttttcgataay

SEQ ID NO: 134668 - DNA, 13 bp, Artificial Sequence
  Oligonucleotide for detection of SNP TSC0033568
rttatcgaaaaat

SEQ ID NO: 134669 - DNA, 13 bp, Artificial Sequence
  Oligonucleotide for detection of SNP TSC0033568
gttatttaaaagt

SEQ ID NO: 134670 - DNA, 13 bp, Artificial Sequence
  Oligonucleotide for detection of SNP TSC0033568
acttttaaataac

SEQ ID NO: 134671 - DNA, 13 bp, Artificial Sequence
  Oligonucleotide for detection of SNP TSC0033568
gttattgaaaagt

SEQ ID NO: 134672 - DNA, 13 bp, Artificial Sequence
  Oligonucleotide for detection of SNP TSC0033568
acttttcaataac

SEQ ID NO: 134673 - DNA, 13 bp, Artificial Sequence
  Oligonucleotide for detection of SNP TSC0033568
gttatcgaaaagt

SEQ ID NO: 134674 - DNA, 13 bp, Artificial Sequence
  Oligonucleotide for detection of SNP TSC0033568
acttttcgataac

SEQ ID NO: 134675 - DNA, 13 bp, Artificial Sequence
  Oligonucleotide for detection of SNP TSC0033569
ataaatttataty

SEQ ID NO: 134676 - DNA, 13 bp, Artificial Sequence
  Oligonucleotide for detection of SNP TSC0033569
ratataaatttat

SEQ ID NO: 134677 - DNA, 13 bp, Artificial Sequence
  Oligonucleotide for detection of SNP TSC0033569
ataaatgtataty

SEQ ID NO: 134678 - DNA, 13 bp, Artificial Sequence
  Oligonucleotide for detection of SNP TSC0033569
ratatacatttat

SEQ ID NO: 134679 - DNA, 13 bp, Artificial Sequence
  Oligonucleotide for detection of SNP TSC0033569
ggtgtagatttgt

SEQ ID NO: 134680 - DNA, 13 bp, Artificial Sequence
  Oligonucleotide for detection of SNP TSC0033569
acaaatctacacc

SEQ ID NO: 134681 - DNA, 13 bp, Artificial Sequence
  Oligonucleotide for detection of SNP TSC0033569
ggtgtatatttgt

SEQ ID NO: 134682 - DNA, 13 bp, Artificial Sequence
  Oligonucleotide for detection of SNP TSC0033569
acaaatatacacc

SEQ ID NO: 134683 - DNA, 13 bp, Artificial Sequence
  Oligonucleotide for detection of SNP TSC0033571
gtattaggtattg

SEQ ID NO: 134684 - DNA, 13 bp, Artificial Sequence
  Oligonucleotide for detection of SNP TSC0033571
caatacctaatac

SEQ ID NO: 134685 - DNA, 13 bp, Artificial Sequence
  Oligonucleotide for detection of SNP TSC0033571
gtattaagtattg

SEQ ID NO: 134686 - DNA, 13 bp, Artificial Sequence
  Oligonucleotide for detection of SNP TSC0033571
caatacttaatac

SEQ ID NO: 134687 - DNA, 13 bp, Artificial Sequence
  Oligonucleotide for detection of SNP TSC0033572
agaagggttttta

SEQ ID NO: 134688 - DNA, 13 bp, Artificial Sequence
  Oligonucleotide for detection of SNP TSC0033572
taaaaacccttct

SEQ ID NO: 134689 - DNA, 13 bp, Artificial Sequence
  Oligonucleotide for detection of SNP TSC0033572
agaaggattttta

SEQ ID NO: 134690 - DNA, 13 bp, Artificial Sequence
  Oligonucleotide for detection of SNP TSC0033572
taaaaatccttct

SEQ ID NO: 134691 - DNA, 13 bp, Artificial Sequence
  Oligonucleotide for detection of SNP TSC0033575
aaaaatattaaag

SEQ ID NO: 134692 - DNA, 13 bp, Artificial Sequence
  Oligonucleotide for detection of SNP TSC0033575
ctttaatattttt

SEQ ID NO: 134693 - DNA, 13 bp, Artificial Sequence
  Oligonucleotide for detection of SNP TSC0033575
aaaaatgttaaag

SEQ ID NO: 134694 - DNA, 13 bp, Artificial Sequence
  Oligonucleotide for detection of SNP TSC0033575
ctttaacattttt

SEQ ID NO: 134695 - DNA, 13 bp, Artificial Sequence
  Oligonucleotide for detection of SNP TSC0033579
aatgaatgaaaga

SEQ ID NO: 134696 - DNA, 13 bp, Artificial Sequence
  Oligonucleotide for detection of SNP TSC0033579
tctttcattcatt

SEQ ID NO: 134697 - DNA, 13 bp, Artificial Sequence
  Oligonucleotide for detection of SNP TSC0033579
aatgaaagaaaga

SEQ ID NO: 134698 - DNA, 13 bp, Artificial Sequence
  Oligonucleotide for detection of SNP TSC0033579
tctttctttcatt

SEQ ID NO: 134699 - DNA, 13 bp, Artificial Sequence
  Oligonucleotide for detection of SNP TSC0033579
aacgaatgaaaga

SEQ ID NO: 134700 - DNA, 13 bp, Artificial Sequence
  Oligonucleotide for detection of SNP TSC0033579
tctttcattcgtt

SEQ ID NO: 134701 - DNA, 13 bp, Artificial Sequence
  Oligonucleotide for detection of SNP TSC0033579
aacgaaagaaaga

SEQ ID NO: 134702 - DNA, 13 bp, Artificial Sequence
  Oligonucleotide for detection of SNP TSC0033579
tctttctttcgtt

SEQ ID NO: 134703 - DNA, 13 bp, Artificial Sequence
  Oligonucleotide for detection of SNP TSC0033579
aatgaacgaaaga

SEQ ID NO: 134704 - DNA, 13 bp, Artificial Sequence
  Oligonucleotide for detection of SNP TSC0033579
tctttcgttcatt

SEQ ID NO: 134705 - DNA, 13 bp, Artificial Sequence
  Oligonucleotide for detection of SNP TSC0033579
aacgaacgaaaga

SEQ ID NO: 134706 - DNA, 13 bp, Artificial Sequence
  Oligonucleotide for detection of SNP TSC0033579
tctttcgttcgtt

SEQ ID NO: 134707 - DNA, 13 bp, Artificial Sequence
  Oligonucleotide for detection of SNP TSC0033580
tcgtttgtttgtt

SEQ ID NO: 134708 - DNA, 13 bp, Artificial Sequence
  Oligonucleotide for detection of SNP TSC0033580
aacaaacaaacga

SEQ ID NO: 134709 - DNA, 13 bp, Artificial Sequence
  Oligonucleotide for detection of SNP TSC0033580
tcgtttttttgtt

SEQ ID NO: 134710 - DNA, 13 bp, Artificial Sequence
  Oligonucleotide for detection of SNP TSC0033580
aacaaaaaaacga

SEQ ID NO: 134711 - DNA, 13 bp, Artificial Sequence
  Oligonucleotide for detection of SNP TSC0033580
ttgttttttcgtt

SEQ ID NO: 134712 - DNA, 13 bp, Artificial Sequence
  Oligonucleotide for detection of SNP TSC0033580
aacgaaaaaacaa

SEQ ID NO: 134713 - DNA, 13 bp, Artificial Sequence
  Oligonucleotide for detection of SNP TSC0033580
ttgtttgttcgtt

SEQ ID NO: 134714 - DNA, 13 bp, Artificial Sequence
  Oligonucleotide for detection of SNP TSC0033580
aacgaacaaacaa

SEQ ID NO: 134715 - DNA, 13 bp, Artificial Sequence
  Oligonucleotide for detection of SNP TSC0033580
tcgttttttcgtt

SEQ ID NO: 134716 - DNA, 13 bp, Artificial Sequence
  Oligonucleotide for detection of SNP TSC0033580
aacgaaaaaacga

SEQ ID NO: 134717 - DNA, 13 bp, Artificial Sequence
  Oligonucleotide for detection of SNP TSC0033580
tcgttcgtttgtt

SEQ ID NO: 134718 - DNA, 13 bp, Artificial Sequence
  Oligonucleotide for detection of SNP TSC0033580
aacaaacgaacga

SEQ ID NO: 134719 - DNA, 13 bp, Artificial Sequence
  Oligonucleotide for detection of SNP TSC0033580
tcgtttgttcgtt

SEQ ID NO: 134720 - DNA, 13 bp, Artificial Sequence
  Oligonucleotide for detection of SNP TSC0033580
aacgaacaaacga

SEQ ID NO: 134721 - DNA, 13 bp, Artificial Sequence
  Oligonucleotide for detection of SNP TSC0033580
ttgttcgttcgtt

SEQ ID NO: 134722 - DNA, 13 bp, Artificial Sequence
  Oligonucleotide for detection of SNP TSC0033580
aacgaacgaacaa

SEQ ID NO: 134723 - DNA, 13 bp, Artificial Sequence
  Oligonucleotide for detection of SNP TSC0033580
tcgttcgttcgtt

SEQ ID NO: 134724 - DNA, 13 bp, Artificial Sequence
  Oligonucleotide for detection of SNP TSC0033580
aacgaacgaacga

SEQ ID NO: 134725 - DNA, 13 bp, Artificial Sequence
  Oligonucleotide for detection of SNP TSC0033580
aatgaatgaatga

SEQ ID NO: 134726 - DNA, 13 bp, Artificial Sequence
  Oligonucleotide for detection of SNP TSC0033580
tcattcattcatt

SEQ ID NO: 134727 - DNA, 13 bp, Artificial Sequence
  Oligonucleotide for detection of SNP TSC0033580
aatgaaagaatga

SEQ ID NO: 134728 - DNA, 13 bp, Artificial Sequence
  Oligonucleotide for detection of SNP TSC0033580
tcattctttcatt

SEQ ID NO: 134729 - DNA, 13 bp, Artificial Sequence
  Oligonucleotide for detection of SNP TSC0033580
aacgaatgaatga

SEQ ID NO: 134730 - DNA, 13 bp, Artificial Sequence
  Oligonucleotide for detection of SNP TSC0033580
tcattcattcgtt

SEQ ID NO: 134731 - DNA, 13 bp, Artificial Sequence
  Oligonucleotide for detection of SNP TSC0033580
aacgaaagaatga

SEQ ID NO: 134732 - DNA, 13 bp, Artificial Sequence
  Oligonucleotide for detection of SNP TSC0033580
tcattctttcgtt

SEQ ID NO: 134733 - DNA, 13 bp, Artificial Sequence
  Oligonucleotide for detection of SNP TSC0033580
aatgaacgaatga

SEQ ID NO: 134734 - DNA, 13 bp, Artificial Sequence
  Oligonucleotide for detection of SNP TSC0033580
tcattcgttcatt

SEQ ID NO: 134735 - DNA, 13 bp, Artificial Sequence
  Oligonucleotide for detection of SNP TSC0033580
aatgaaagaacga

SEQ ID NO: 134736 - DNA, 13 bp, Artificial Sequence
  Oligonucleotide for detection of SNP TSC0033580
tcgttctttcatt

SEQ ID NO: 134737 - DNA, 13 bp, Artificial Sequence
  Oligonucleotide for detection of SNP TSC0033580
aatgaatgaacga

SEQ ID NO: 134738 - DNA, 13 bp, Artificial Sequence
  Oligonucleotide for detection of SNP TSC0033580
tcgttcattcatt

SEQ ID NO: 134739 - DNA, 13 bp, Artificial Sequence
  Oligonucleotide for detection of SNP TSC0033580
aacgaaagaacga

SEQ ID NO: 134740 - DNA, 13 bp, Artificial Sequence
  Oligonucleotide for detection of SNP TSC0033580
tcgttctttcgtt

SEQ ID NO: 134741 - DNA, 13 bp, Artificial Sequence
  Oligonucleotide for detection of SNP TSC0033580
aacgaacgaatga

SEQ ID NO: 134742 - DNA, 13 bp, Artificial Sequence
  Oligonucleotide for detection of SNP TSC0033580
tcattcgttcgtt

SEQ ID NO: 134743 - DNA, 13 bp, Artificial Sequence
  Oligonucleotide for detection of SNP TSC0033580
aacgaatgaacga

SEQ ID NO: 134744 - DNA, 13 bp, Artificial Sequence
  Oligonucleotide for detection of SNP TSC0033580
tcgttcattcgtt

SEQ ID NO: 134745 - DNA, 13 bp, Artificial Sequence
  Oligonucleotide for detection of SNP TSC0033580
aatgaacgaacga

SEQ ID NO: 134746 - DNA, 13 bp, Artificial Sequence
  Oligonucleotide for detection of SNP TSC0033580
tcgttcgttcatt

SEQ ID NO: 134747 - DNA, 13 bp, Artificial Sequence
  Oligonucleotide for detection of SNP TSC0033582
ttttagggttttg

SEQ ID NO: 134748 - DNA, 13 bp, Artificial Sequence
  Oligonucleotide for detection of SNP TSC0033582
caaaaccctaaaa

SEQ ID NO: 134749 - DNA, 13 bp, Artificial Sequence
  Oligonucleotide for detection of SNP TSC0033582
ttttagtgttttg

SEQ ID NO: 134750 - DNA, 13 bp, Artificial Sequence
  Oligonucleotide for detection of SNP TSC0033582
caaaacactaaaa

SEQ ID NO: 134751 - DNA, 13 bp, Artificial Sequence
  Oligonucleotide for detection of SNP TSC0033582
ttttagggtttcg

SEQ ID NO: 134752 - DNA, 13 bp, Artificial Sequence
  Oligonucleotide for detection of SNP TSC0033582
cgaaaccctaaaa

SEQ ID NO: 134753 - DNA, 13 bp, Artificial Sequence
  Oligonucleotide for detection of SNP TSC0033582
ttttagtgtttcg

SEQ ID NO: 134754 - DNA, 13 bp, Artificial Sequence
  Oligonucleotide for detection of SNP TSC0033582
cgaaacactaaaa

SEQ ID NO: 134755 - DNA, 13 bp, Artificial Sequence
  Oligonucleotide for detection of SNP TSC0033582
tgggattttgaga

SEQ ID NO: 134756 - DNA, 13 bp, Artificial Sequence
  Oligonucleotide for detection of SNP TSC0033582
tctcaaaatccca

SEQ ID NO: 134757 - DNA, 13 bp, Artificial Sequence
  Oligonucleotide for detection of SNP TSC0033582
tgggatattgaga

SEQ ID NO: 134758 - DNA, 13 bp, Artificial Sequence
  Oligonucleotide for detection of SNP TSC0033582
tctcaatatccca

SEQ ID NO: 134759 - DNA, 13 bp, Artificial Sequence
  Oligonucleotide for detection of SNP TSC0033582
cgggattttgaga

SEQ ID NO: 134760 - DNA, 13 bp, Artificial Sequence
  Oligonucleotide for detection of SNP TSC0033582
tctcaaaatcccg

SEQ ID NO: 134761 - DNA, 13 bp, Artificial Sequence
  Oligonucleotide for detection of SNP TSC0033582
cgggatattgaga

SEQ ID NO: 134762 - DNA, 13 bp, Artificial Sequence
  Oligonucleotide for detection of SNP TSC0033582
tctcaatatcccg

SEQ ID NO: 134763 - DNA, 13 bp, Artificial Sequence
  Oligonucleotide for detection of SNP TSC0033583
taagagtaagttt

SEQ ID NO: 134764 - DNA, 13 bp, Artificial Sequence
  Oligonucleotide for detection of SNP TSC0033583
aaacttactctta

SEQ ID NO: 134765 - DNA, 13 bp, Artificial Sequence
  Oligonucleotide for detection of SNP TSC0033583
taagaggaagttt

SEQ ID NO: 134766 - DNA, 13 bp, Artificial Sequence
  Oligonucleotide for detection of SNP TSC0033583
aaacttcctctta

SEQ ID NO: 134767 - DNA, 13 bp, Artificial Sequence
  Oligonucleotide for detection of SNP TSC0033583
aagtttgtttttg

SEQ ID NO: 134768 - DNA, 13 bp, Artificial Sequence
  Oligonucleotide for detection of SNP TSC0033583
caaaaacaaactt

SEQ ID NO: 134769 - DNA, 13 bp, Artificial Sequence
  Oligonucleotide for detection of SNP TSC0033583
aagtttttttttg

SEQ ID NO: 134770 - DNA, 13 bp, Artificial Sequence
  Oligonucleotide for detection of SNP TSC0033583
caaaaaaaaactt

SEQ ID NO: 134771 - DNA, 13 bp, Artificial Sequence
  Oligonucleotide for detection of SNP TSC0033584
ttaaatatatgtg

SEQ ID NO: 134772 - DNA, 13 bp, Artificial Sequence
  Oligonucleotide for detection of SNP TSC0033584
cacatatatttaa

SEQ ID NO: 134773 - DNA, 13 bp, Artificial Sequence
  Oligonucleotide for detection of SNP TSC0033584
ttaaatgtatgtg

SEQ ID NO: 134774 - DNA, 13 bp, Artificial Sequence
  Oligonucleotide for detection of SNP TSC0033584
cacatacatttaa

SEQ ID NO: 134775 - DNA, 13 bp, Artificial Sequence
  Oligonucleotide for detection of SNP TSC0033585
aaatatatgtgtg

SEQ ID NO: 134776 - DNA, 13 bp, Artificial Sequence
  Oligonucleotide for detection of SNP TSC0033585
cacacatatattt

SEQ ID NO: 134777 - DNA, 13 bp, Artificial Sequence
  Oligonucleotide for detection of SNP TSC0033585
aaatatgtgtgtg

SEQ ID NO: 134778 - DNA, 13 bp, Artificial Sequence
  Oligonucleotide for detection of SNP TSC0033585
cacacacatattt

SEQ ID NO: 134779 - DNA, 13 bp, Artificial Sequence
  Oligonucleotide for detection of SNP TSC0033586
gagaaagtgtgta

SEQ ID NO: 134780 - DNA, 13 bp, Artificial Sequence
  Oligonucleotide for detection of SNP TSC0033586
tacacactttctc

SEQ ID NO: 134781 - DNA, 13 bp, Artificial Sequence
  Oligonucleotide for detection of SNP TSC0033586
gagaaaatgtgta

SEQ ID NO: 134782 - DNA, 13 bp, Artificial Sequence
  Oligonucleotide for detection of SNP TSC0033586
tacacattttctc

SEQ ID NO: 134783 - DNA, 13 bp, Artificial Sequence
  Oligonucleotide for detection of SNP TSC0033586
gagaaagtgcgta

SEQ ID NO: 134784 - DNA, 13 bp, Artificial Sequence
  Oligonucleotide for detection of SNP TSC0033586
tacgcactttctc

SEQ ID NO: 134785 - DNA, 13 bp, Artificial Sequence
  Oligonucleotide for detection of SNP TSC0033586
gagaaaatgcgta

SEQ ID NO: 134786 - DNA, 13 bp, Artificial Sequence
  Oligonucleotide for detection of SNP TSC0033586
tacgcattttctc

SEQ ID NO: 134787 - DNA, 13 bp, Artificial Sequence
  Oligonucleotide for detection of SNP TSC0033590
agtatatagggga

SEQ ID NO: 134788 - DNA, 13 bp, Artificial Sequence
  Oligonucleotide for detection of SNP TSC0033590
tcccctatatact

SEQ ID NO: 134789 - DNA, 13 bp, Artificial Sequence
  Oligonucleotide for detection of SNP TSC0033590
agtatagagggga

SEQ ID NO: 134790 - DNA, 13 bp, Artificial Sequence
  Oligonucleotide for detection of SNP TSC0033590
tcccctctatact

SEQ ID NO: 134791 - DNA, 13 bp, Artificial Sequence
  Oligonucleotide for detection of SNP TSC0033593
ataggggatagay

SEQ ID NO: 134792 - DNA, 13 bp, Artificial Sequence
  Oligonucleotide for detection of SNP TSC0033593
rtctatcccctat

SEQ ID NO: 134793 - DNA, 13 bp, Artificial Sequence
  Oligonucleotide for detection of SNP TSC0033593
atagggtatagay

SEQ ID NO: 134794 - DNA, 13 bp, Artificial Sequence
  Oligonucleotide for detection of SNP TSC0033593
rtctataccctat

SEQ ID NO: 134795 - DNA, 13 bp, Artificial Sequence
  Oligonucleotide for detection of SNP TSC0033593
gtttgttttttgt

SEQ ID NO: 134796 - DNA, 13 bp, Artificial Sequence
  Oligonucleotide for detection of SNP TSC0033593
acaaaaaacaaac

SEQ ID NO: 134797 - DNA, 13 bp, Artificial Sequence
  Oligonucleotide for detection of SNP TSC0033593
gtttgtattttgt

SEQ ID NO: 134798 - DNA, 13 bp, Artificial Sequence
  Oligonucleotide for detection of SNP TSC0033593
acaaaatacaaac

SEQ ID NO: 134799 - DNA, 13 bp, Artificial Sequence
  Oligonucleotide for detection of SNP TSC0033594
gtattttgtagtt

SEQ ID NO: 134800 - DNA, 13 bp, Artificial Sequence
  Oligonucleotide for detection of SNP TSC0033594
aactacaaaatac

SEQ ID NO: 134801 - DNA, 13 bp, Artificial Sequence
  Oligonucleotide for detection of SNP TSC0033594
gtatttcgtagtt

SEQ ID NO: 134802 - DNA, 13 bp, Artificial Sequence
  Oligonucleotide for detection of SNP TSC0033594
aactacgaaatac

SEQ ID NO: 134803 - DNA, 13 bp, Artificial Sequence
  Oligonucleotide for detection of SNP TSC0033594
agttatggaatgy

SEQ ID NO: 134804 - DNA, 13 bp, Artificial Sequence
  Oligonucleotide for detection of SNP TSC0033594
rcattccataact

SEQ ID NO: 134805 - DNA, 13 bp, Artificial Sequence
  Oligonucleotide for detection of SNP TSC0033594
agttatagaatgy

SEQ ID NO: 134806 - DNA, 13 bp, Artificial Sequence
  Oligonucleotide for detection of SNP TSC0033594
rcattctataact

SEQ ID NO: 134807 - DNA, 13 bp, Artificial Sequence
  Oligonucleotide for detection of SNP TSC0033594
agttacggaatgy

SEQ ID NO: 134808 - DNA, 13 bp, Artificial Sequence
  Oligonucleotide for detection of SNP TSC0033594
rcattccgtaact

SEQ ID NO: 134809 - DNA, 13 bp, Artificial Sequence
  Oligonucleotide for detection of SNP TSC0033595
aaattaatgatag

SEQ ID NO: 134810 - DNA, 13 bp, Artificial Sequence
  Oligonucleotide for detection of SNP TSC0033595
ctatcattaattt

SEQ ID NO: 134811 - DNA, 13 bp, Artificial Sequence
  Oligonucleotide for detection of SNP TSC0033596
tgtataatgttty

SEQ ID NO: 134812 - DNA, 13 bp, Artificial Sequence
  Oligonucleotide for detection of SNP TSC0033596
raaacattataca

SEQ ID NO: 134813 - DNA, 13 bp, Artificial Sequence
  Oligonucleotide for detection of SNP TSC0033596
tgtatagtgttty

SEQ ID NO: 134814 - DNA, 13 bp, Artificial Sequence
  Oligonucleotide for detection of SNP TSC0033596
raaacactataca

SEQ ID NO: 134815 - DNA, 13 bp, Artificial Sequence
  Oligonucleotide for detection of SNP TSC0033600
tgagatagtgttt

SEQ ID NO: 134816 - DNA, 13 bp, Artificial Sequence
  Oligonucleotide for detection of SNP TSC0033600
aaacactatctca

SEQ ID NO: 134817 - DNA, 13 bp, Artificial Sequence
  Oligonucleotide for detection of SNP TSC0033600
tgagatggtgttt

SEQ ID NO: 134818 - DNA, 13 bp, Artificial Sequence
  Oligonucleotide for detection of SNP TSC0033600
aaacaccatctca

SEQ ID NO: 134819 - DNA, 13 bp, Artificial Sequence
  Oligonucleotide for detection of SNP TSC0033600
tgagatagcgttt

SEQ ID NO: 134820 - DNA, 13 bp, Artificial Sequence
  Oligonucleotide for detection of SNP TSC0033600
aaacgctatctca

SEQ ID NO: 134821 - DNA, 13 bp, Artificial Sequence
  Oligonucleotide for detection of SNP TSC0033600
tgagacggtgttt

SEQ ID NO: 134822 - DNA, 13 bp, Artificial Sequence
  Oligonucleotide for detection of SNP TSC0033600
aaacaccgtctca

SEQ ID NO: 134823 - DNA, 13 bp, Artificial Sequence
  Oligonucleotide for detection of SNP TSC0033600
tgagatggcgttt

SEQ ID NO: 134824 - DNA, 13 bp, Artificial Sequence
  Oligonucleotide for detection of SNP TSC0033600
aaacgccatctca

SEQ ID NO: 134825 - DNA, 13 bp, Artificial Sequence
  Oligonucleotide for detection of SNP TSC0033600
tgagacggcgttt

SEQ ID NO: 134826 - DNA, 13 bp, Artificial Sequence
  Oligonucleotide for detection of SNP TSC0033600
aaacgccgtctca

SEQ ID NO: 134827 - DNA, 13 bp, Artificial Sequence
  Oligonucleotide for detection of SNP TSC0033600
agatgttgtttta

SEQ ID NO: 134828 - DNA, 13 bp, Artificial Sequence
  Oligonucleotide for detection of SNP TSC0033600
taaaacaacatct

SEQ ID NO: 134829 - DNA, 13 bp, Artificial Sequence
  Oligonucleotide for detection of SNP TSC0033600
agacgttgtttta

SEQ ID NO: 134830 - DNA, 13 bp, Artificial Sequence
  Oligonucleotide for detection of SNP TSC0033600
taaaacaacgtct

SEQ ID NO: 134831 - DNA, 13 bp, Artificial Sequence
  Oligonucleotide for detection of SNP TSC0033600
agatgtcgtttta

SEQ ID NO: 134832 - DNA, 13 bp, Artificial Sequence
  Oligonucleotide for detection of SNP TSC0033600
taaaacgacatct

SEQ ID NO: 134833 - DNA, 13 bp, Artificial Sequence
  Oligonucleotide for detection of SNP TSC0033600
agacgtcgtttta

SEQ ID NO: 134834 - DNA, 13 bp, Artificial Sequence
  Oligonucleotide for detection of SNP TSC0033600
taaaacgacgtct

SEQ ID NO: 134835 - DNA, 13 bp, Artificial Sequence
  Oligonucleotide for detection of SNP TSC0033602
attttgtgttttg

SEQ ID NO: 134836 - DNA, 13 bp, Artificial Sequence
  Oligonucleotide for detection of SNP TSC0033602
caaaacacaaaat

SEQ ID NO: 134837 - DNA, 13 bp, Artificial Sequence
  Oligonucleotide for detection of SNP TSC0033602
attttgcgttttg

SEQ ID NO: 134838 - DNA, 13 bp, Artificial Sequence
  Oligonucleotide for detection of SNP TSC0033602
caaaacgcaaaat

SEQ ID NO: 134839 - DNA, 13 bp, Artificial Sequence
  Oligonucleotide for detection of SNP TSC0033602
taaaatgtagagt

SEQ ID NO: 134840 - DNA, 13 bp, Artificial Sequence
  Oligonucleotide for detection of SNP TSC0033602
actctacatttta

SEQ ID NO: 134841 - DNA, 13 bp, Artificial Sequence
  Oligonucleotide for detection of SNP TSC0033602
taaaatatagagt

SEQ ID NO: 134842 - DNA, 13 bp, Artificial Sequence
  Oligonucleotide for detection of SNP TSC0033602
actctatatttta

SEQ ID NO: 134843 - DNA, 13 bp, Artificial Sequence
  Oligonucleotide for detection of SNP TSC0033602
taaaacgtagagt

SEQ ID NO: 134844 - DNA, 13 bp, Artificial Sequence
  Oligonucleotide for detection of SNP TSC0033602
actctacgtttta

SEQ ID NO: 134845 - DNA, 13 bp, Artificial Sequence
  Oligonucleotide for detection of SNP TSC0033603
gtatgtgtttgty

SEQ ID NO: 134846 - DNA, 13 bp, Artificial Sequence
  Oligonucleotide for detection of SNP TSC0033603
racaaacacatac

SEQ ID NO: 134847 - DNA, 13 bp, Artificial Sequence
  Oligonucleotide for detection of SNP TSC0033603
gtatgtatttgty

SEQ ID NO: 134848 - DNA, 13 bp, Artificial Sequence
  Oligonucleotide for detection of SNP TSC0033603
racaaatacatac

SEQ ID NO: 134849 - DNA, 13 bp, Artificial Sequence
  Oligonucleotide for detection of SNP TSC0033603
gtacgtgtttgty

SEQ ID NO: 134850 - DNA, 13 bp, Artificial Sequence
  Oligonucleotide for detection of SNP TSC0033603
racaaacacgtac

SEQ ID NO: 134851 - DNA, 13 bp, Artificial Sequence
  Oligonucleotide for detection of SNP TSC0033603
gtacgtatttgty

SEQ ID NO: 134852 - DNA, 13 bp, Artificial Sequence
  Oligonucleotide for detection of SNP TSC0033603
racaaatacgtac

SEQ ID NO: 134853 - DNA, 13 bp, Artificial Sequence
  Oligonucleotide for detection of SNP TSC0033605
tggaagagaggtt

SEQ ID NO: 134854 - DNA, 13 bp, Artificial Sequence
  Oligonucleotide for detection of SNP TSC0033605
aacctctcttcca

SEQ ID NO: 134855 - DNA, 13 bp, Artificial Sequence
  Oligonucleotide for detection of SNP TSC0033605
tggaagggaggtt

SEQ ID NO: 134856 - DNA, 13 bp, Artificial Sequence
  Oligonucleotide for detection of SNP TSC0033605
aacctcccttcca

SEQ ID NO: 134857 - DNA, 13 bp, Artificial Sequence
  Oligonucleotide for detection of SNP TSC0033606
agaaatattttat

SEQ ID NO: 134858 - DNA, 13 bp, Artificial Sequence
  Oligonucleotide for detection of SNP TSC0033606
ataaaatatttct

SEQ ID NO: 134859 - DNA, 13 bp, Artificial Sequence
  Oligonucleotide for detection of SNP TSC0033606
agaaatgttttat

SEQ ID NO: 134860 - DNA, 13 bp, Artificial Sequence
  Oligonucleotide for detection of SNP TSC0033606
ataaaacatttct

SEQ ID NO: 134861 - DNA, 13 bp, Artificial Sequence
  Oligonucleotide for detection of SNP TSC0033608
ttgaattgtggtt

SEQ ID NO: 134862 - DNA, 13 bp, Artificial Sequence
  Oligonucleotide for detection of SNP TSC0033608
aaccacaattcaa

SEQ ID NO: 134863 - DNA, 13 bp, Artificial Sequence
  Oligonucleotide for detection of SNP TSC0033608
ttgaatcgtggtt

SEQ ID NO: 134864 - DNA, 13 bp, Artificial Sequence
  Oligonucleotide for detection of SNP TSC0033608
aaccacgattcaa

SEQ ID NO: 134865 - DNA, 13 bp, Artificial Sequence
  Oligonucleotide for detection of SNP TSC0033608
agttatgatttag

SEQ ID NO: 134866 - DNA, 13 bp, Artificial Sequence
  Oligonucleotide for detection of SNP TSC0033608
ctaaatcataact

SEQ ID NO: 134867 - DNA, 13 bp, Artificial Sequence
  Oligonucleotide for detection of SNP TSC0033608
agttataatttag

SEQ ID NO: 134868 - DNA, 13 bp, Artificial Sequence
  Oligonucleotide for detection of SNP TSC0033608
ctaaattataact

SEQ ID NO: 134869 - DNA, 13 bp, Artificial Sequence
  Oligonucleotide for detection of SNP TSC0033608
agttacgatttag

SEQ ID NO: 134870 - DNA, 13 bp, Artificial Sequence
  Oligonucleotide for detection of SNP TSC0033608
ctaaatcgtaact

SEQ ID NO: 134871 - DNA, 13 bp, Artificial Sequence
  Oligonucleotide for detection of SNP TSC0033610
gaatatgatgatg

SEQ ID NO: 134872 - DNA, 13 bp, Artificial Sequence
  Oligonucleotide for detection of SNP TSC0033610
catcatcatattc

SEQ ID NO: 134873 - DNA, 13 bp, Artificial Sequence
  Oligonucleotide for detection of SNP TSC0033610
gaatataatgatg

SEQ ID NO: 134874 - DNA, 13 bp, Artificial Sequence
  Oligonucleotide for detection of SNP TSC0033610
catcattatattc

SEQ ID NO: 134875 - DNA, 13 bp, Artificial Sequence
  Oligonucleotide for detection of SNP TSC0033611
tggaggggtataa

SEQ ID NO: 134876 - DNA, 13 bp, Artificial Sequence
  Oligonucleotide for detection of SNP TSC0033611
ttatacccctcca

SEQ ID NO: 134877 - DNA, 13 bp, Artificial Sequence
  Oligonucleotide for detection of SNP TSC0033611
tggaggagtataa

SEQ ID NO: 134878 - DNA, 13 bp, Artificial Sequence
  Oligonucleotide for detection of SNP TSC0033611
ttatactcctcca

SEQ ID NO: 134879 - DNA, 13 bp, Artificial Sequence
  Oligonucleotide for detection of SNP TSC0033611
cggaggggtataa

SEQ ID NO: 134880 - DNA, 13 bp, Artificial Sequence
  Oligonucleotide for detection of SNP TSC0033611
ttatacccctccg

SEQ ID NO: 134881 - DNA, 13 bp, Artificial Sequence
  Oligonucleotide for detection of SNP TSC0033611
cggaggagtataa

SEQ ID NO: 134882 - DNA, 13 bp, Artificial Sequence
  Oligonucleotide for detection of SNP TSC0033611
ttatactcctccg

SEQ ID NO: 134883 - DNA, 13 bp, Artificial Sequence
  Oligonucleotide for detection of SNP TSC0033614
aaaggggttttga

SEQ ID NO: 134884 - DNA, 13 bp, Artificial Sequence
  Oligonucleotide for detection of SNP TSC0033614
tcaaaaccccttt

SEQ ID NO: 134885 - DNA, 13 bp, Artificial Sequence
  Oligonucleotide for detection of SNP TSC0033614
aaagggtttttga

SEQ ID NO: 134886 - DNA, 13 bp, Artificial Sequence
  Oligonucleotide for detection of SNP TSC0033614
tcaaaaacccttt

SEQ ID NO: 134887 - DNA, 13 bp, Artificial Sequence
  Oligonucleotide for detection of SNP TSC0033614
ttagggttttttt

SEQ ID NO: 134888 - DNA, 13 bp, Artificial Sequence
  Oligonucleotide for detection of SNP TSC0033614
aaaaaaaccctaa

SEQ ID NO: 134889 - DNA, 13 bp, Artificial Sequence
  Oligonucleotide for detection of SNP TSC0033614
ttagggatttttt

SEQ ID NO: 134890 - DNA, 13 bp, Artificial Sequence
  Oligonucleotide for detection of SNP TSC0033614
aaaaaatccctaa

SEQ ID NO: 134891 - DNA, 13 bp, Artificial Sequence
  Oligonucleotide for detection of SNP TSC0033618
ttttttgttgtag

SEQ ID NO: 134892 - DNA, 13 bp, Artificial Sequence
  Oligonucleotide for detection of SNP TSC0033618
ctacaacaaaaaa

SEQ ID NO: 134893 - DNA, 13 bp, Artificial Sequence
  Oligonucleotide for detection of SNP TSC0033618
tttttcgttgtag

SEQ ID NO: 134894 - DNA, 13 bp, Artificial Sequence
  Oligonucleotide for detection of SNP TSC0033618
ctacaacgaaaaa

SEQ ID NO: 134895 - DNA, 13 bp, Artificial Sequence
  Oligonucleotide for detection of SNP TSC0033618
ttgtaggggggag

SEQ ID NO: 134896 - DNA, 13 bp, Artificial Sequence
  Oligonucleotide for detection of SNP TSC0033618
ctcccccctacaa

SEQ ID NO: 134897 - DNA, 13 bp, Artificial Sequence
  Oligonucleotide for detection of SNP TSC0033618
ttgtagtggggag

SEQ ID NO: 134898 - DNA, 13 bp, Artificial Sequence
  Oligonucleotide for detection of SNP TSC0033618
ctccccactacaa

SEQ ID NO: 134899 - DNA, 13 bp, Artificial Sequence
  Oligonucleotide for detection of SNP TSC0033618
ttgtagcggggag

SEQ ID NO: 134900 - DNA, 13 bp, Artificial Sequence
  Oligonucleotide for detection of SNP TSC0033618
ctccccgctacaa

SEQ ID NO: 134901 - DNA, 13 bp, Artificial Sequence
  Oligonucleotide for detection of SNP TSC0033622
taataatgtatag

SEQ ID NO: 134902 - DNA, 13 bp, Artificial Sequence
  Oligonucleotide for detection of SNP TSC0033622
ctatacattatta

SEQ ID NO: 134903 - DNA, 13 bp, Artificial Sequence
  Oligonucleotide for detection of SNP TSC0033622
taataacgtatag

SEQ ID NO: 134904 - DNA, 13 bp, Artificial Sequence
  Oligonucleotide for detection of SNP TSC0033622
ctatacgttatta

SEQ ID NO: 134905 - DNA, 13 bp, Artificial Sequence
  Oligonucleotide for detection of SNP TSC0033622
ttgtatgttatta

SEQ ID NO: 134906 - DNA, 13 bp, Artificial Sequence
  Oligonucleotide for detection of SNP TSC0033622
taataacatacaa

SEQ ID NO: 134907 - DNA, 13 bp, Artificial Sequence
  Oligonucleotide for detection of SNP TSC0033622
ttgtatattatta

SEQ ID NO: 134908 - DNA, 13 bp, Artificial Sequence
  Oligonucleotide for detection of SNP TSC0033622
taataatatacaa

SEQ ID NO: 134909 - DNA, 13 bp, Artificial Sequence
  Oligonucleotide for detection of SNP TSC0033622
ttgtacgttatta

SEQ ID NO: 134910 - DNA, 13 bp, Artificial Sequence
  Oligonucleotide for detection of SNP TSC0033622
taataacgtacaa

SEQ ID NO: 134911 - DNA, 13 bp, Artificial Sequence
  Oligonucleotide for detection of SNP TSC0033625
tattttagtatag

SEQ ID NO: 134912 - DNA, 13 bp, Artificial Sequence
  Oligonucleotide for detection of SNP TSC0033625
ctatactaaaata

SEQ ID NO: 134913 - DNA, 13 bp, Artificial Sequence
  Oligonucleotide for detection of SNP TSC0033625
tattttggtatag

SEQ ID NO: 134914 - DNA, 13 bp, Artificial Sequence
  Oligonucleotide for detection of SNP TSC0033625
ctataccaaaata

SEQ ID NO: 134915 - DNA, 13 bp, Artificial Sequence
  Oligonucleotide for detection of SNP TSC0033625
tatttcggtatag

SEQ ID NO: 134916 - DNA, 13 bp, Artificial Sequence
  Oligonucleotide for detection of SNP TSC0033625
ctataccgaaata

SEQ ID NO: 134917 - DNA, 13 bp, Artificial Sequence
  Oligonucleotide for detection of SNP TSC0033625
ttgtattgaaatg

SEQ ID NO: 134918 - DNA, 13 bp, Artificial Sequence
  Oligonucleotide for detection of SNP TSC0033625
catttcaatacaa

SEQ ID NO: 134919 - DNA, 13 bp, Artificial Sequence
  Oligonucleotide for detection of SNP TSC0033625
ttgtatcgaaatg

SEQ ID NO: 134920 - DNA, 13 bp, Artificial Sequence
  Oligonucleotide for detection of SNP TSC0033625
catttcgatacaa

SEQ ID NO: 134921 - DNA, 13 bp, Artificial Sequence
  Oligonucleotide for detection of SNP TSC0033626
atttttttttaty

SEQ ID NO: 134922 - DNA, 13 bp, Artificial Sequence
  Oligonucleotide for detection of SNP TSC0033626
rataaaaaaaaat

SEQ ID NO: 134923 - DNA, 13 bp, Artificial Sequence
  Oligonucleotide for detection of SNP TSC0033626
atttttgtttaty

SEQ ID NO: 134924 - DNA, 13 bp, Artificial Sequence
  Oligonucleotide for detection of SNP TSC0033626
rataaacaaaaat

SEQ ID NO: 134925 - DNA, 13 bp, Artificial Sequence
  Oligonucleotide for detection of SNP TSC0033626
ggtagagagaggt

SEQ ID NO: 134926 - DNA, 13 bp, Artificial Sequence
  Oligonucleotide for detection of SNP TSC0033626
acctctctctacc

SEQ ID NO: 134927 - DNA, 13 bp, Artificial Sequence
  Oligonucleotide for detection of SNP TSC0033626
ggtagatagaggt

SEQ ID NO: 134928 - DNA, 13 bp, Artificial Sequence
  Oligonucleotide for detection of SNP TSC0033626
acctctatctacc

SEQ ID NO: 134929 - DNA, 13 bp, Artificial Sequence
  Oligonucleotide for detection of SNP TSC0033627
gtaataataagtt

SEQ ID NO: 134930 - DNA, 13 bp, Artificial Sequence
  Oligonucleotide for detection of SNP TSC0033627
aacttattattac

SEQ ID NO: 134931 - DNA, 13 bp, Artificial Sequence
  Oligonucleotide for detection of SNP TSC0033627
gtaatagtaagtt

SEQ ID NO: 134932 - DNA, 13 bp, Artificial Sequence
  Oligonucleotide for detection of SNP TSC0033627
aacttactattac

SEQ ID NO: 134933 - DNA, 13 bp, Artificial Sequence
  Oligonucleotide for detection of SNP TSC0033637
tattttagagtgg

SEQ ID NO: 134934 - DNA, 13 bp, Artificial Sequence
  Oligonucleotide for detection of SNP TSC0033637
ccactctaaaata

SEQ ID NO: 134935 - DNA, 13 bp, Artificial Sequence
  Oligonucleotide for detection of SNP TSC0033637
tattttggagtgg

SEQ ID NO: 134936 - DNA, 13 bp, Artificial Sequence
  Oligonucleotide for detection of SNP TSC0033637
ccactccaaaata

SEQ ID NO: 134937 - DNA, 13 bp, Artificial Sequence
  Oligonucleotide for detection of SNP TSC0033637
tattttagagcgg

SEQ ID NO: 134938 - DNA, 13 bp, Artificial Sequence
  Oligonucleotide for detection of SNP TSC0033637
ccgctctaaaata

SEQ ID NO: 134939 - DNA, 13 bp, Artificial Sequence
  Oligonucleotide for detection of SNP TSC0033637
tatttcggagtgg

SEQ ID NO: 134940 - DNA, 13 bp, Artificial Sequence
  Oligonucleotide for detection of SNP TSC0033637
ccactccgaaata

SEQ ID NO: 134941 - DNA, 13 bp, Artificial Sequence
  Oligonucleotide for detection of SNP TSC0033637
tattttggagcgg

SEQ ID NO: 134942 - DNA, 13 bp, Artificial Sequence
  Oligonucleotide for detection of SNP TSC0033637
ccgctccaaaata

SEQ ID NO: 134943 - DNA, 13 bp, Artificial Sequence
  Oligonucleotide for detection of SNP TSC0033637
tatttcggagcgg

SEQ ID NO: 134944 - DNA, 13 bp, Artificial Sequence
  Oligonucleotide for detection of SNP TSC0033637
ccgctccgaaata

SEQ ID NO: 134945 - DNA, 13 bp, Artificial Sequence
  Oligonucleotide for detection of SNP TSC0033637
ttgttttgggata

SEQ ID NO: 134946 - DNA, 13 bp, Artificial Sequence
  Oligonucleotide for detection of SNP TSC0033637
tatcccaaaacaa

SEQ ID NO: 134947 - DNA, 13 bp, Artificial Sequence
  Oligonucleotide for detection of SNP TSC0033637
tcgttttgggata

SEQ ID NO: 134948 - DNA, 13 bp, Artificial Sequence
  Oligonucleotide for detection of SNP TSC0033637
tatcccaaaacga

SEQ ID NO: 134949 - DNA, 13 bp, Artificial Sequence
  Oligonucleotide for detection of SNP TSC0033637
ttgtttcgggata

SEQ ID NO: 134950 - DNA, 13 bp, Artificial Sequence
  Oligonucleotide for detection of SNP TSC0033637
tatcccgaaacaa

SEQ ID NO: 134951 - DNA, 13 bp, Artificial Sequence
  Oligonucleotide for detection of SNP TSC0033637
tcgtttcgggata

SEQ ID NO: 134952 - DNA, 13 bp, Artificial Sequence
  Oligonucleotide for detection of SNP TSC0033637
tatcccgaaacga

SEQ ID NO: 134953 - DNA, 13 bp, Artificial Sequence
  Oligonucleotide for detection of SNP TSC0033638
agaatgatatgtt

SEQ ID NO: 134954 - DNA, 13 bp, Artificial Sequence
  Oligonucleotide for detection of SNP TSC0033638
aacatatcattct

SEQ ID NO: 134955 - DNA, 13 bp, Artificial Sequence
  Oligonucleotide for detection of SNP TSC0033638
agaatggtatgtt

SEQ ID NO: 134956 - DNA, 13 bp, Artificial Sequence
  Oligonucleotide for detection of SNP TSC0033638
aacataccattct

SEQ ID NO: 134957 - DNA, 13 bp, Artificial Sequence
  Oligonucleotide for detection of SNP TSC0033639
ttgaagtgagaat

SEQ ID NO: 134958 - DNA, 13 bp, Artificial Sequence
  Oligonucleotide for detection of SNP TSC0033639
attctcacttcaa

SEQ ID NO: 134959 - DNA, 13 bp, Artificial Sequence
  Oligonucleotide for detection of SNP TSC0033639
ttgaagcgagaat

SEQ ID NO: 134960 - DNA, 13 bp, Artificial Sequence
  Oligonucleotide for detection of SNP TSC0033639
attctcgcttcaa

SEQ ID NO: 134961 - DNA, 13 bp, Artificial Sequence
  Oligonucleotide for detection of SNP TSC0033639
atttttgttttag

SEQ ID NO: 134962 - DNA, 13 bp, Artificial Sequence
  Oligonucleotide for detection of SNP TSC0033639
ctaaaacaaaaat

SEQ ID NO: 134963 - DNA, 13 bp, Artificial Sequence
  Oligonucleotide for detection of SNP TSC0033639
attttcgttttag

SEQ ID NO: 134964 - DNA, 13 bp, Artificial Sequence
  Oligonucleotide for detection of SNP TSC0033639
ctaaaacgaaaat

SEQ ID NO: 134965 - DNA, 13 bp, Artificial Sequence
  Oligonucleotide for detection of SNP TSC0033641
gttttgggtagga

SEQ ID NO: 134966 - DNA, 13 bp, Artificial Sequence
  Oligonucleotide for detection of SNP TSC0033641
tcctacccaaaac

SEQ ID NO: 134967 - DNA, 13 bp, Artificial Sequence
  Oligonucleotide for detection of SNP TSC0033642
tgaattatttgaa

SEQ ID NO: 134968 - DNA, 13 bp, Artificial Sequence
  Oligonucleotide for detection of SNP TSC0033642
ttcaaataattca

SEQ ID NO: 134969 - DNA, 13 bp, Artificial Sequence
  Oligonucleotide for detection of SNP TSC0033642
tgaattgtttgaa

SEQ ID NO: 134970 - DNA, 13 bp, Artificial Sequence
  Oligonucleotide for detection of SNP TSC0033642
ttcaaacaattca

SEQ ID NO: 134971 - DNA, 13 bp, Artificial Sequence
  Oligonucleotide for detection of SNP TSC0033642
tgaatcgtttgaa

SEQ ID NO: 134972 - DNA, 13 bp, Artificial Sequence
  Oligonucleotide for detection of SNP TSC0033642
ttcaaacgattca

SEQ ID NO: 134973 - DNA, 13 bp, Artificial Sequence
  Oligonucleotide for detection of SNP TSC0033642
tttaggtgattta

SEQ ID NO: 134974 - DNA, 13 bp, Artificial Sequence
  Oligonucleotide for detection of SNP TSC0033642
taaatcacctaaa

SEQ ID NO: 134975 - DNA, 13 bp, Artificial Sequence
  Oligonucleotide for detection of SNP TSC0033642
tttaggcgattta

SEQ ID NO: 134976 - DNA, 13 bp, Artificial Sequence
  Oligonucleotide for detection of SNP TSC0033642
taaatcgcctaaa

SEQ ID NO: 134977 - DNA, 13 bp, Artificial Sequence
  Oligonucleotide for detection of SNP TSC0033643
taaggaattagag

SEQ ID NO: 134978 - DNA, 13 bp, Artificial Sequence
  Oligonucleotide for detection of SNP TSC0033643
ctctaattcctta

SEQ ID NO: 134979 - DNA, 13 bp, Artificial Sequence
  Oligonucleotide for detection of SNP TSC0033643
taaggagttagag

SEQ ID NO: 134980 - DNA, 13 bp, Artificial Sequence
  Oligonucleotide for detection of SNP TSC0033643
ctctaactcctta

SEQ ID NO: 134981 - DNA, 13 bp, Artificial Sequence
  Oligonucleotide for detection of SNP TSC0033648
atttatggtaaga

SEQ ID NO: 134982 - DNA, 13 bp, Artificial Sequence
  Oligonucleotide for detection of SNP TSC0033648
tcttaccataaat

SEQ ID NO: 134983 - DNA, 13 bp, Artificial Sequence
  Oligonucleotide for detection of SNP TSC0033648
atttatagtaaga

SEQ ID NO: 134984 - DNA, 13 bp, Artificial Sequence
  Oligonucleotide for detection of SNP TSC0033648
tcttactataaat

SEQ ID NO: 134985 - DNA, 13 bp, Artificial Sequence
  Oligonucleotide for detection of SNP TSC0033649
tatgtaaattttg

SEQ ID NO: 134986 - DNA, 13 bp, Artificial Sequence
  Oligonucleotide for detection of SNP TSC0033649
caaaatttacata

SEQ ID NO: 134987 - DNA, 13 bp, Artificial Sequence
  Oligonucleotide for detection of SNP TSC0033649
tatgtagattttg

SEQ ID NO: 134988 - DNA, 13 bp, Artificial Sequence
  Oligonucleotide for detection of SNP TSC0033649
caaaatctacata

SEQ ID NO: 134989 - DNA, 13 bp, Artificial Sequence
  Oligonucleotide for detection of SNP TSC0033650
ttgattgtaaatg

SEQ ID NO: 134990 - DNA, 13 bp, Artificial Sequence
  Oligonucleotide for detection of SNP TSC0033650
catttacaatcaa

SEQ ID NO: 134991 - DNA, 13 bp, Artificial Sequence
  Oligonucleotide for detection of SNP TSC0033650
ttgattttaaatg

SEQ ID NO: 134992 - DNA, 13 bp, Artificial Sequence
  Oligonucleotide for detection of SNP TSC0033650
catttaaaatcaa

SEQ ID NO: 134993 - DNA, 13 bp, Artificial Sequence
  Oligonucleotide for detection of SNP TSC0033650
tatttatagttaa

SEQ ID NO: 134994 - DNA, 13 bp, Artificial Sequence
  Oligonucleotide for detection of SNP TSC0033650
ttaactataaata

SEQ ID NO: 134995 - DNA, 13 bp, Artificial Sequence
  Oligonucleotide for detection of SNP TSC0033650
tatttaaagttaa

SEQ ID NO: 134996 - DNA, 13 bp, Artificial Sequence
  Oligonucleotide for detection of SNP TSC0033650
ttaactttaaata

SEQ ID NO: 134997 - DNA, 13 bp, Artificial Sequence
  Oligonucleotide for detection of SNP TSC0033651
tagtataaatttt

SEQ ID NO: 134998 - DNA, 13 bp, Artificial Sequence
  Oligonucleotide for detection of SNP TSC0033651
aaaatttatacta

SEQ ID NO: 134999 - DNA, 13 bp, Artificial Sequence
  Oligonucleotide for detection of SNP TSC0033651
tagtattaatttt

SEQ ID NO: 135000 - DNA, 13 bp, Artificial Sequence
  Oligonucleotide for detection of SNP TSC0033651
aaaattaatacta

SEQ ID NO: 135001 - DNA, 13 bp, Artificial Sequence
  Oligonucleotide for detection of SNP TSC0033651
agaatttatattg

SEQ ID NO: 135002 - DNA, 13 bp, Artificial Sequence
  Oligonucleotide for detection of SNP TSC0033651
caatataaattct

SEQ ID NO: 135003 - DNA, 13 bp, Artificial Sequence
  Oligonucleotide for detection of SNP TSC0033651
agaattaatattg

SEQ ID NO: 135004 - DNA, 13 bp, Artificial Sequence
  Oligonucleotide for detection of SNP TSC0033651
caatattaattct

SEQ ID NO: 135005 - DNA, 13 bp, Artificial Sequence
  Oligonucleotide for detection of SNP TSC0033652
tggaaagttattt

SEQ ID NO: 135006 - DNA, 13 bp, Artificial Sequence
  Oligonucleotide for detection of SNP TSC0033652
aaataactttcca

SEQ ID NO: 135007 - DNA, 13 bp, Artificial Sequence
  Oligonucleotide for detection of SNP TSC0033652
tggaaaattattt

SEQ ID NO: 135008 - DNA, 13 bp, Artificial Sequence
  Oligonucleotide for detection of SNP TSC0033652
aaataattttcca

SEQ ID NO: 135009 - DNA, 13 bp, Artificial Sequence
  Oligonucleotide for detection of SNP TSC0033658
tttagttgggaga

SEQ ID NO: 135010 - DNA, 13 bp, Artificial Sequence
  Oligonucleotide for detection of SNP TSC0033658
tctcccaactaaa

SEQ ID NO: 135011 - DNA, 13 bp, Artificial Sequence
  Oligonucleotide for detection of SNP TSC0033658
tttagtcgggaga

SEQ ID NO: 135012 - DNA, 13 bp, Artificial Sequence
  Oligonucleotide for detection of SNP TSC0033658
tctcccgactaaa

SEQ ID NO: 135013 - DNA, 13 bp, Artificial Sequence
  Oligonucleotide for detection of SNP TSC0033659
tttgagtgtttty

SEQ ID NO: 135014 - DNA, 13 bp, Artificial Sequence
  Oligonucleotide for detection of SNP TSC0033659
raaaacactcaaa

SEQ ID NO: 135015 - DNA, 13 bp, Artificial Sequence
  Oligonucleotide for detection of SNP TSC0033659
tttgagcgtttty

SEQ ID NO: 135016 - DNA, 13 bp, Artificial Sequence
  Oligonucleotide for detection of SNP TSC0033659
raaaacgctcaaa

SEQ ID NO: 135017 - DNA, 13 bp, Artificial Sequence
  Oligonucleotide for detection of SNP TSC0033659
ggaaatgtttaaa

SEQ ID NO: 135018 - DNA, 13 bp, Artificial Sequence
  Oligonucleotide for detection of SNP TSC0033659
tttaaacatttcc

SEQ ID NO: 135019 - DNA, 13 bp, Artificial Sequence
  Oligonucleotide for detection of SNP TSC0033659
ggaaatatttaaa

SEQ ID NO: 135020 - DNA, 13 bp, Artificial Sequence
  Oligonucleotide for detection of SNP TSC0033659
tttaaatatttcc

SEQ ID NO: 135021 - DNA, 13 bp, Artificial Sequence
  Oligonucleotide for detection of SNP TSC0033659
ggaaacgtttaaa

SEQ ID NO: 135022 - DNA, 13 bp, Artificial Sequence
  Oligonucleotide for detection of SNP TSC0033659
tttaaacgtttcc

SEQ ID NO: 135023 - DNA, 13 bp, Artificial Sequence
  Oligonucleotide for detection of SNP TSC0033662
aaaaatgtgtggt

SEQ ID NO: 135024 - DNA, 13 bp, Artificial Sequence
  Oligonucleotide for detection of SNP TSC0033662
accacacattttt

SEQ ID NO: 135025 - DNA, 13 bp, Artificial Sequence
  Oligonucleotide for detection of SNP TSC0033662
aaaaatatgtggt

SEQ ID NO: 135026 - DNA, 13 bp, Artificial Sequence
  Oligonucleotide for detection of SNP TSC0033662
accacatattttt

SEQ ID NO: 135027 - DNA, 13 bp, Artificial Sequence
  Oligonucleotide for detection of SNP TSC0033663
agatattgagtty

SEQ ID NO: 135028 - DNA, 13 bp, Artificial Sequence
  Oligonucleotide for detection of SNP TSC0033663
raactcaatatct

SEQ ID NO: 135029 - DNA, 13 bp, Artificial Sequence
  Oligonucleotide for detection of SNP TSC0033663
agatatcgagtty

SEQ ID NO: 135030 - DNA, 13 bp, Artificial Sequence
  Oligonucleotide for detection of SNP TSC0033663
raactcgatatct

SEQ ID NO: 135031 - DNA, 13 bp, Artificial Sequence
  Oligonucleotide for detection of SNP TSC0033663
gggtttgatattt

SEQ ID NO: 135032 - DNA, 13 bp, Artificial Sequence
  Oligonucleotide for detection of SNP TSC0033663
aaatatcaaaccc

SEQ ID NO: 135033 - DNA, 13 bp, Artificial Sequence
  Oligonucleotide for detection of SNP TSC0033663
gggtttaatattt

SEQ ID NO: 135034 - DNA, 13 bp, Artificial Sequence
  Oligonucleotide for detection of SNP TSC0033663
aaatattaaaccc

SEQ ID NO: 135035 - DNA, 13 bp, Artificial Sequence
  Oligonucleotide for detection of SNP TSC0033663
gggttcgatattt

SEQ ID NO: 135036 - DNA, 13 bp, Artificial Sequence
  Oligonucleotide for detection of SNP TSC0033663
aaatatcgaaccc

SEQ ID NO: 135037 - DNA, 13 bp, Artificial Sequence
  Oligonucleotide for detection of SNP TSC0033664
gatataattgata

SEQ ID NO: 135038 - DNA, 13 bp, Artificial Sequence
  Oligonucleotide for detection of SNP TSC0033664
tatcaattatatc

SEQ ID NO: 135039 - DNA, 13 bp, Artificial Sequence
  Oligonucleotide for detection of SNP TSC0033664
gatatagttgata

SEQ ID NO: 135040 - DNA, 13 bp, Artificial Sequence
  Oligonucleotide for detection of SNP TSC0033664
tatcaactatatc

SEQ ID NO: 135041 - DNA, 13 bp, Artificial Sequence
  Oligonucleotide for detection of SNP TSC0033667
ttaatttgaaggt

SEQ ID NO: 135042 - DNA, 13 bp, Artificial Sequence
  Oligonucleotide for detection of SNP TSC0033667
accttcaaattaa

SEQ ID NO: 135043 - DNA, 13 bp, Artificial Sequence
  Oligonucleotide for detection of SNP TSC0033667
ttaattcgaaggt

SEQ ID NO: 135044 - DNA, 13 bp, Artificial Sequence
  Oligonucleotide for detection of SNP TSC0033667
accttcgaattaa

SEQ ID NO: 135045 - DNA, 13 bp, Artificial Sequence
  Oligonucleotide for detection of SNP TSC0033667
atttttgaattga

SEQ ID NO: 135046 - DNA, 13 bp, Artificial Sequence
  Oligonucleotide for detection of SNP TSC0033667
tcaattcaaaaat

SEQ ID NO: 135047 - DNA, 13 bp, Artificial Sequence
  Oligonucleotide for detection of SNP TSC0033667
atttttaaattga

SEQ ID NO: 135048 - DNA, 13 bp, Artificial Sequence
  Oligonucleotide for detection of SNP TSC0033667
tcaatttaaaaat

SEQ ID NO: 135049 - DNA, 13 bp, Artificial Sequence
  Oligonucleotide for detection of SNP TSC0033667
attttcgaattga

SEQ ID NO: 135050 - DNA, 13 bp, Artificial Sequence
  Oligonucleotide for detection of SNP TSC0033667
tcaattcgaaaat

SEQ ID NO: 135051 - DNA, 13 bp, Artificial Sequence
  Oligonucleotide for detection of SNP TSC0033670
attatagatgtgy

SEQ ID NO: 135052 - DNA, 13 bp, Artificial Sequence
  Oligonucleotide for detection of SNP TSC0033670
rcacatctataat

SEQ ID NO: 135053 - DNA, 13 bp, Artificial Sequence
  Oligonucleotide for detection of SNP TSC0033670
attataaatgtgy

SEQ ID NO: 135054 - DNA, 13 bp, Artificial Sequence
  Oligonucleotide for detection of SNP TSC0033670
rcacatttataat

SEQ ID NO: 135055 - DNA, 13 bp, Artificial Sequence
  Oligonucleotide for detection of SNP TSC0033671
ttagattgttggg

SEQ ID NO: 135056 - DNA, 13 bp, Artificial Sequence
  Oligonucleotide for detection of SNP TSC0033671
cccaacaatctaa

SEQ ID NO: 135057 - DNA, 13 bp, Artificial Sequence
  Oligonucleotide for detection of SNP TSC0033671
ttagatcgttggg

SEQ ID NO: 135058 - DNA, 13 bp, Artificial Sequence
  Oligonucleotide for detection of SNP TSC0033671
cccaacgatctaa

SEQ ID NO: 135059 - DNA, 13 bp, Artificial Sequence
  Oligonucleotide for detection of SNP TSC0033671
ttagattgtcggg

SEQ ID NO: 135060 - DNA, 13 bp, Artificial Sequence
  Oligonucleotide for detection of SNP TSC0033671
cccgacaatctaa

SEQ ID NO: 135061 - DNA, 13 bp, Artificial Sequence
  Oligonucleotide for detection of SNP TSC0033671
ttagatcgtcggg

SEQ ID NO: 135062 - DNA, 13 bp, Artificial Sequence
  Oligonucleotide for detection of SNP TSC0033671
cccgacgatctaa

SEQ ID NO: 135063 - DNA, 13 bp, Artificial Sequence
  Oligonucleotide for detection of SNP TSC0033671
tttgatggtttaa

SEQ ID NO: 135064 - DNA, 13 bp, Artificial Sequence
  Oligonucleotide for detection of SNP TSC0033671
ttaaaccatcaaa

SEQ ID NO: 135065 - DNA, 13 bp, Artificial Sequence
  Oligonucleotide for detection of SNP TSC0033671
tttgatagtttaa

SEQ ID NO: 135066 - DNA, 13 bp, Artificial Sequence
  Oligonucleotide for detection of SNP TSC0033671
ttaaactatcaaa

SEQ ID NO: 135067 - DNA, 13 bp, Artificial Sequence
  Oligonucleotide for detection of SNP TSC0033671
ttcgatggtttaa

SEQ ID NO: 135068 - DNA, 13 bp, Artificial Sequence
  Oligonucleotide for detection of SNP TSC0033671
ttaaaccatcgaa

SEQ ID NO: 135069 - DNA, 13 bp, Artificial Sequence
  Oligonucleotide for detection of SNP TSC0033671
ttcgatagtttaa

SEQ ID NO: 135070 - DNA, 13 bp, Artificial Sequence
  Oligonucleotide for detection of SNP TSC0033671
ttaaactatcgaa

SEQ ID NO: 135071 - DNA, 13 bp, Artificial Sequence
  Oligonucleotide for detection of SNP TSC0033671
tttgacggtttaa

SEQ ID NO: 135072 - DNA, 13 bp, Artificial Sequence
  Oligonucleotide for detection of SNP TSC0033671
ttaaaccgtcaaa

SEQ ID NO: 135073 - DNA, 13 bp, Artificial Sequence
  Oligonucleotide for detection of SNP TSC0033671
ttcgacggtttaa

SEQ ID NO: 135074 - DNA, 13 bp, Artificial Sequence
  Oligonucleotide for detection of SNP TSC0033671
ttaaaccgtcgaa

SEQ ID NO: 135075 - DNA, 13 bp, Artificial Sequence
  Oligonucleotide for detection of SNP TSC0033673
ttataggtgtgtg

SEQ ID NO: 135076 - DNA, 13 bp, Artificial Sequence
  Oligonucleotide for detection of SNP TSC0033673
cacacacctataa

SEQ ID NO: 135077 - DNA, 13 bp, Artificial Sequence
  Oligonucleotide for detection of SNP TSC0033673
ttatagatgtgtg

SEQ ID NO: 135078 - DNA, 13 bp, Artificial Sequence
  Oligonucleotide for detection of SNP TSC0033673
cacacatctataa

SEQ ID NO: 135079 - DNA, 13 bp, Artificial Sequence
  Oligonucleotide for detection of SNP TSC0033675
aagtggaattatt

SEQ ID NO: 135080 - DNA, 13 bp, Artificial Sequence
  Oligonucleotide for detection of SNP TSC0033675
aataattccactt

SEQ ID NO: 135081 - DNA, 13 bp, Artificial Sequence
  Oligonucleotide for detection of SNP TSC0033675
aagtgggattatt

SEQ ID NO: 135082 - DNA, 13 bp, Artificial Sequence
  Oligonucleotide for detection of SNP TSC0033675
aataatcccactt

SEQ ID NO: 135083 - DNA, 13 bp, Artificial Sequence
  Oligonucleotide for detection of SNP TSC0033676
ttatgtaaagaaa

SEQ ID NO: 135084 - DNA, 13 bp, Artificial Sequence
  Oligonucleotide for detection of SNP TSC0033676
tttctttacataa

SEQ ID NO: 135085 - DNA, 13 bp, Artificial Sequence
  Oligonucleotide for detection of SNP TSC0033676
ttatgtgaagaaa

SEQ ID NO: 135086 - DNA, 13 bp, Artificial Sequence
  Oligonucleotide for detection of SNP TSC0033676
tttcttcacataa

SEQ ID NO: 135087 - DNA, 13 bp, Artificial Sequence
  Oligonucleotide for detection of SNP TSC0033676
ttatgcgaagaaa

SEQ ID NO: 135088 - DNA, 13 bp, Artificial Sequence
  Oligonucleotide for detection of SNP TSC0033676
tttcttcgcataa

SEQ ID NO: 135089 - DNA, 13 bp, Artificial Sequence
  Oligonucleotide for detection of SNP TSC0033676
tttttttgtatga

SEQ ID NO: 135090 - DNA, 13 bp, Artificial Sequence
  Oligonucleotide for detection of SNP TSC0033676
tcatacaaaaaaa

SEQ ID NO: 135091 - DNA, 13 bp, Artificial Sequence
  Oligonucleotide for detection of SNP TSC0033676
ttttttcgtatga

SEQ ID NO: 135092 - DNA, 13 bp, Artificial Sequence
  Oligonucleotide for detection of SNP TSC0033676
tcatacgaaaaaa

SEQ ID NO: 135093 - DNA, 13 bp, Artificial Sequence
  Oligonucleotide for detection of SNP TSC0033677
aggaaagtttgaa

SEQ ID NO: 135094 - DNA, 13 bp, Artificial Sequence
  Oligonucleotide for detection of SNP TSC0033677
ttcaaactttcct

SEQ ID NO: 135095 - DNA, 13 bp, Artificial Sequence
  Oligonucleotide for detection of SNP TSC0033677
aggaaaatttgaa

SEQ ID NO: 135096 - DNA, 13 bp, Artificial Sequence
  Oligonucleotide for detection of SNP TSC0033677
ttcaaattttcct

SEQ ID NO: 135097 - DNA, 13 bp, Artificial Sequence
  Oligonucleotide for detection of SNP TSC0033679
tttggtaataaat

SEQ ID NO: 135098 - DNA, 13 bp, Artificial Sequence
  Oligonucleotide for detection of SNP TSC0033679
atttattaccaaa

SEQ ID NO: 135099 - DNA, 13 bp, Artificial Sequence
  Oligonucleotide for detection of SNP TSC0033679
tttggtgataaat

SEQ ID NO: 135100 - DNA, 13 bp, Artificial Sequence
  Oligonucleotide for detection of SNP TSC0033679
atttatcaccaaa

SEQ ID NO: 135101 - DNA, 13 bp, Artificial Sequence
  Oligonucleotide for detection of SNP TSC0033679
tttggcgataaat

SEQ ID NO: 135102 - DNA, 13 bp, Artificial Sequence
  Oligonucleotide for detection of SNP TSC0033679
atttatcgccaaa

SEQ ID NO: 135103 - DNA, 13 bp, Artificial Sequence
  Oligonucleotide for detection of SNP TSC0033679
atttgttgttaga

SEQ ID NO: 135104 - DNA, 13 bp, Artificial Sequence
  Oligonucleotide for detection of SNP TSC0033679
tctaacaacaaat

SEQ ID NO: 135105 - DNA, 13 bp, Artificial Sequence
  Oligonucleotide for detection of SNP TSC0033679
atttgtcgttaga

SEQ ID NO: 135106 - DNA, 13 bp, Artificial Sequence
  Oligonucleotide for detection of SNP TSC0033679
tctaacgacaaat

SEQ ID NO: 135107 - DNA, 13 bp, Artificial Sequence
  Oligonucleotide for detection of SNP TSC0033680
attatgaaattag

SEQ ID NO: 135108 - DNA, 13 bp, Artificial Sequence
  Oligonucleotide for detection of SNP TSC0033680
ctaatttcataat

SEQ ID NO: 135109 - DNA, 13 bp, Artificial Sequence
  Oligonucleotide for detection of SNP TSC0033680
attatgtaattag

SEQ ID NO: 135110 - DNA, 13 bp, Artificial Sequence
  Oligonucleotide for detection of SNP TSC0033680
ctaattacataat

SEQ ID NO: 135111 - DNA, 13 bp, Artificial Sequence
  Oligonucleotide for detection of SNP TSC0033680
ttagttttatgat

SEQ ID NO: 135112 - DNA, 13 bp, Artificial Sequence
  Oligonucleotide for detection of SNP TSC0033680
atcataaaactaa

SEQ ID NO: 135113 - DNA, 13 bp, Artificial Sequence
  Oligonucleotide for detection of SNP TSC0033680
ttagttgtatgat

SEQ ID NO: 135114 - DNA, 13 bp, Artificial Sequence
  Oligonucleotide for detection of SNP TSC0033680
atcatacaactaa

SEQ ID NO: 135115 - DNA, 13 bp, Artificial Sequence
  Oligonucleotide for detection of SNP TSC0033681
tgaaagatgagtg

SEQ ID NO: 135116 - DNA, 13 bp, Artificial Sequence
  Oligonucleotide for detection of SNP TSC0033681
cactcatctttca

SEQ ID NO: 135117 - DNA, 13 bp, Artificial Sequence
  Oligonucleotide for detection of SNP TSC0033681
tgaaaggtgagtg

SEQ ID NO: 135118 - DNA, 13 bp, Artificial Sequence
  Oligonucleotide for detection of SNP TSC0033681
cactcacctttca

SEQ ID NO: 135119 - DNA, 13 bp, Artificial Sequence
  Oligonucleotide for detection of SNP TSC0033682
agaagagtagagg

SEQ ID NO: 135120 - DNA, 13 bp, Artificial Sequence
  Oligonucleotide for detection of SNP TSC0033682
cctctactcttct

SEQ ID NO: 135121 - DNA, 13 bp, Artificial Sequence
  Oligonucleotide for detection of SNP TSC0033682
agaagaatagagg

SEQ ID NO: 135122 - DNA, 13 bp, Artificial Sequence
  Oligonucleotide for detection of SNP TSC0033682
cctctattcttct

SEQ ID NO: 135123 - DNA, 13 bp, Artificial Sequence
  Oligonucleotide for detection of SNP TSC0033685
tttagttttaagy

SEQ ID NO: 135124 - DNA, 13 bp, Artificial Sequence
  Oligonucleotide for detection of SNP TSC0033685
rcttaaaactaaa

SEQ ID NO: 135125 - DNA, 13 bp, Artificial Sequence
  Oligonucleotide for detection of SNP TSC0033685
tttagtattaagy

SEQ ID NO: 135126 - DNA, 13 bp, Artificial Sequence
  Oligonucleotide for detection of SNP TSC0033685
rcttaatactaaa

SEQ ID NO: 135127 - DNA, 13 bp, Artificial Sequence
  Oligonucleotide for detection of SNP TSC0033685
gtttggggttgga

SEQ ID NO: 135128 - DNA, 13 bp, Artificial Sequence
  Oligonucleotide for detection of SNP TSC0033685
tccaaccccaaac

SEQ ID NO: 135129 - DNA, 13 bp, Artificial Sequence
  Oligonucleotide for detection of SNP TSC0033685
gtttggtgttgga

SEQ ID NO: 135130 - DNA, 13 bp, Artificial Sequence
  Oligonucleotide for detection of SNP TSC0033685
tccaacaccaaac

SEQ ID NO: 135131 - DNA, 13 bp, Artificial Sequence
  Oligonucleotide for detection of SNP TSC0033686
tttgttattttgy

SEQ ID NO: 135132 - DNA, 13 bp, Artificial Sequence
  Oligonucleotide for detection of SNP TSC0033686
rcaaaataacaaa

SEQ ID NO: 135133 - DNA, 13 bp, Artificial Sequence
  Oligonucleotide for detection of SNP TSC0033686
gtaggatgataga

SEQ ID NO: 135134 - DNA, 13 bp, Artificial Sequence
  Oligonucleotide for detection of SNP TSC0033686
tctatcatcctac

SEQ ID NO: 135135 - DNA, 13 bp, Artificial Sequence
  Oligonucleotide for detection of SNP TSC0033686
gtaggacgataga

SEQ ID NO: 135136 - DNA, 13 bp, Artificial Sequence
  Oligonucleotide for detection of SNP TSC0033686
tctatcgtcctac

SEQ ID NO: 135137 - DNA, 13 bp, Artificial Sequence
  Oligonucleotide for detection of SNP TSC0033688
tgtgttatggtat

SEQ ID NO: 135138 - DNA, 13 bp, Artificial Sequence
  Oligonucleotide for detection of SNP TSC0033688
ataccataacaca

SEQ ID NO: 135139 - DNA, 13 bp, Artificial Sequence
  Oligonucleotide for detection of SNP TSC0033688
tgtgttgtggtat

SEQ ID NO: 135140 - DNA, 13 bp, Artificial Sequence
  Oligonucleotide for detection of SNP TSC0033688
ataccacaacaca

SEQ ID NO: 135141 - DNA, 13 bp, Artificial Sequence
  Oligonucleotide for detection of SNP TSC0033688
tgtgtcgtggtat

SEQ ID NO: 135142 - DNA, 13 bp, Artificial Sequence
  Oligonucleotide for detection of SNP TSC0033688
ataccacgacaca

SEQ ID NO: 135143 - DNA, 13 bp, Artificial Sequence
  Oligonucleotide for detection of SNP TSC0033688
atattatggtata

SEQ ID NO: 135144 - DNA, 13 bp, Artificial Sequence
  Oligonucleotide for detection of SNP TSC0033688
tataccataatat

SEQ ID NO: 135145 - DNA, 13 bp, Artificial Sequence
  Oligonucleotide for detection of SNP TSC0033688
atattacggtata

SEQ ID NO: 135146 - DNA, 13 bp, Artificial Sequence
  Oligonucleotide for detection of SNP TSC0033688
tataccgtaatat

SEQ ID NO: 135147 - DNA, 13 bp, Artificial Sequence
  Oligonucleotide for detection of SNP TSC0033690
gtgagggtggtta

SEQ ID NO: 135148 - DNA, 13 bp, Artificial Sequence
  Oligonucleotide for detection of SNP TSC0033690
taaccaccctcac

SEQ ID NO: 135149 - DNA, 13 bp, Artificial Sequence
  Oligonucleotide for detection of SNP TSC0033690
gtgaggatggtta

SEQ ID NO: 135150 - DNA, 13 bp, Artificial Sequence
  Oligonucleotide for detection of SNP TSC0033690
taaccatcctcac

SEQ ID NO: 135151 - DNA, 13 bp, Artificial Sequence
  Oligonucleotide for detection of SNP TSC0033691
tttttattattta

SEQ ID NO: 135152 - DNA, 13 bp, Artificial Sequence
  Oligonucleotide for detection of SNP TSC0033691
taaataataaaaa

SEQ ID NO: 135153 - DNA, 13 bp, Artificial Sequence
  Oligonucleotide for detection of SNP TSC0033691
tgggtattgggaa

SEQ ID NO: 135154 - DNA, 13 bp, Artificial Sequence
  Oligonucleotide for detection of SNP TSC0033691
ttcccaataccca

SEQ ID NO: 135155 - DNA, 13 bp, Artificial Sequence
  Oligonucleotide for detection of SNP TSC0033691
tgggtagtgggaa

SEQ ID NO: 135156 - DNA, 13 bp, Artificial Sequence
  Oligonucleotide for detection of SNP TSC0033691
ttcccactaccca

SEQ ID NO: 135157 - DNA, 13 bp, Artificial Sequence
  Oligonucleotide for detection of SNP TSC0033692
ttagagttggaat

SEQ ID NO: 135158 - DNA, 13 bp, Artificial Sequence
  Oligonucleotide for detection of SNP TSC0033692
attccaactctaa

SEQ ID NO: 135159 - DNA, 13 bp, Artificial Sequence
  Oligonucleotide for detection of SNP TSC0033692
ttagagatggaat

SEQ ID NO: 135160 - DNA, 13 bp, Artificial Sequence
  Oligonucleotide for detection of SNP TSC0033692
attccatctctaa

SEQ ID NO: 135161 - DNA, 13 bp, Artificial Sequence
  Oligonucleotide for detection of SNP TSC0033693
gtggttagggagg

SEQ ID NO: 135162 - DNA, 13 bp, Artificial Sequence
  Oligonucleotide for detection of SNP TSC0033693
cctccctaaccac

SEQ ID NO: 135163 - DNA, 13 bp, Artificial Sequence
  Oligonucleotide for detection of SNP TSC0033693
gtggttggggagg

SEQ ID NO: 135164 - DNA, 13 bp, Artificial Sequence
  Oligonucleotide for detection of SNP TSC0033693
cctccccaaccac

SEQ ID NO: 135165 - DNA, 13 bp, Artificial Sequence
  Oligonucleotide for detection of SNP TSC0033693
gtggtcggggagg

SEQ ID NO: 135166 - DNA, 13 bp, Artificial Sequence
  Oligonucleotide for detection of SNP TSC0033693
cctccccgaccac

SEQ ID NO: 135167 - DNA, 13 bp, Artificial Sequence
  Oligonucleotide for detection of SNP TSC0033693
tttttttgattay

SEQ ID NO: 135168 - DNA, 13 bp, Artificial Sequence
  Oligonucleotide for detection of SNP TSC0033693
rtaatcaaaaaaa

SEQ ID NO: 135169 - DNA, 13 bp, Artificial Sequence
  Oligonucleotide for detection of SNP TSC0033693
ttttttcgattay

SEQ ID NO: 135170 - DNA, 13 bp, Artificial Sequence
  Oligonucleotide for detection of SNP TSC0033693
rtaatcgaaaaaa

SEQ ID NO: 135171 - DNA, 13 bp, Artificial Sequence
  Oligonucleotide for detection of SNP TSC0033698
gtttaaggggtat

SEQ ID NO: 135172 - DNA, 13 bp, Artificial Sequence
  Oligonucleotide for detection of SNP TSC0033698
ataccccttaaac

SEQ ID NO: 135173 - DNA, 13 bp, Artificial Sequence
  Oligonucleotide for detection of SNP TSC0033698
gtttaaagggtat

SEQ ID NO: 135174 - DNA, 13 bp, Artificial Sequence
  Oligonucleotide for detection of SNP TSC0033698
ataccctttaaac

SEQ ID NO: 135175 - DNA, 13 bp, Artificial Sequence
  Oligonucleotide for detection of SNP TSC0033707
tgttgggaagaga

SEQ ID NO: 135176 - DNA, 13 bp, Artificial Sequence
  Oligonucleotide for detection of SNP TSC0033707
tctcttcccaaca

SEQ ID NO: 135177 - DNA, 13 bp, Artificial Sequence
  Oligonucleotide for detection of SNP TSC0033707
tgttggaaagaga

SEQ ID NO: 135178 - DNA, 13 bp, Artificial Sequence
  Oligonucleotide for detection of SNP TSC0033707
tctctttccaaca

SEQ ID NO: 135179 - DNA, 13 bp, Artificial Sequence
  Oligonucleotide for detection of SNP TSC0033708
gaaagtaaaaaat

SEQ ID NO: 135180 - DNA, 13 bp, Artificial Sequence
  Oligonucleotide for detection of SNP TSC0033708
attttttactttc

SEQ ID NO: 135181 - DNA, 13 bp, Artificial Sequence
  Oligonucleotide for detection of SNP TSC0033708
gaaagttaaaaat

SEQ ID NO: 135182 - DNA, 13 bp, Artificial Sequence
  Oligonucleotide for detection of SNP TSC0033708
atttttaactttc

SEQ ID NO: 135183 - DNA, 13 bp, Artificial Sequence
  Oligonucleotide for detection of SNP TSC0033712
tttaatttaaata

SEQ ID NO: 135184 - DNA, 13 bp, Artificial Sequence
  Oligonucleotide for detection of SNP TSC0033712
tatttaaattaaa

SEQ ID NO: 135185 - DNA, 13 bp, Artificial Sequence
  Oligonucleotide for detection of SNP TSC0033712
tttaatgtaaata

SEQ ID NO: 135186 - DNA, 13 bp, Artificial Sequence
  Oligonucleotide for detection of SNP TSC0033712
tatttacattaaa

SEQ ID NO: 135187 - DNA, 13 bp, Artificial Sequence
  Oligonucleotide for detection of SNP TSC0033712
tttaacgtaaata

SEQ ID NO: 135188 - DNA, 13 bp, Artificial Sequence
  Oligonucleotide for detection of SNP TSC0033712
tatttacgttaaa

SEQ ID NO: 135189 - DNA, 13 bp, Artificial Sequence
  Oligonucleotide for detection of SNP TSC0033712
tatttgggttggg

SEQ ID NO: 135190 - DNA, 13 bp, Artificial Sequence
  Oligonucleotide for detection of SNP TSC0033712
cccaacccaaata

SEQ ID NO: 135191 - DNA, 13 bp, Artificial Sequence
  Oligonucleotide for detection of SNP TSC0033712
tatttgtgttggg

SEQ ID NO: 135192 - DNA, 13 bp, Artificial Sequence
  Oligonucleotide for detection of SNP TSC0033712
cccaacacaaata

SEQ ID NO: 135193 - DNA, 13 bp, Artificial Sequence
  Oligonucleotide for detection of SNP TSC0033712
tatttgcgttggg

SEQ ID NO: 135194 - DNA, 13 bp, Artificial Sequence
  Oligonucleotide for detection of SNP TSC0033712
cccaacgcaaata

SEQ ID NO: 135195 - DNA, 13 bp, Artificial Sequence
  Oligonucleotide for detection of SNP TSC0033713
tttagagtattta

SEQ ID NO: 135196 - DNA, 13 bp, Artificial Sequence
  Oligonucleotide for detection of SNP TSC0033713
taaatactctaaa

SEQ ID NO: 135197 - DNA, 13 bp, Artificial Sequence
  Oligonucleotide for detection of SNP TSC0033713
tttagaatattta

SEQ ID NO: 135198 - DNA, 13 bp, Artificial Sequence
  Oligonucleotide for detection of SNP TSC0033713
taaatattctaaa

SEQ ID NO: 135199 - DNA, 13 bp, Artificial Sequence
  Oligonucleotide for detection of SNP TSC0033715
gttatttgtgagg

SEQ ID NO: 135200 - DNA, 13 bp, Artificial Sequence
  Oligonucleotide for detection of SNP TSC0033715
cctcacaaataac

SEQ ID NO: 135201 - DNA, 13 bp, Artificial Sequence
  Oligonucleotide for detection of SNP TSC0033715
gttattcgtgagg

SEQ ID NO: 135202 - DNA, 13 bp, Artificial Sequence
  Oligonucleotide for detection of SNP TSC0033715
cctcacgaataac

SEQ ID NO: 135203 - DNA, 13 bp, Artificial Sequence
  Oligonucleotide for detection of SNP TSC0033715
ttttatgggtgay

SEQ ID NO: 135204 - DNA, 13 bp, Artificial Sequence
  Oligonucleotide for detection of SNP TSC0033715
rtcacccataaaa

SEQ ID NO: 135205 - DNA, 13 bp, Artificial Sequence
  Oligonucleotide for detection of SNP TSC0033715
ttttataggtgay

SEQ ID NO: 135206 - DNA, 13 bp, Artificial Sequence
  Oligonucleotide for detection of SNP TSC0033715
rtcacctataaaa

SEQ ID NO: 135207 - DNA, 13 bp, Artificial Sequence
  Oligonucleotide for detection of SNP TSC0033715
ttttacgggtgay

SEQ ID NO: 135208 - DNA, 13 bp, Artificial Sequence
  Oligonucleotide for detection of SNP TSC0033715
rtcacccgtaaaa

SEQ ID NO: 135209 - DNA, 13 bp, Artificial Sequence
  Oligonucleotide for detection of SNP TSC0033717
ggatatataggta

SEQ ID NO: 135210 - DNA, 13 bp, Artificial Sequence
  Oligonucleotide for detection of SNP TSC0033717
tacctatatatcc

SEQ ID NO: 135211 - DNA, 13 bp, Artificial Sequence
  Oligonucleotide for detection of SNP TSC0033717
ggatatgtaggta

SEQ ID NO: 135212 - DNA, 13 bp, Artificial Sequence
  Oligonucleotide for detection of SNP TSC0033717
tacctacatatcc

SEQ ID NO: 135213 - DNA, 13 bp, Artificial Sequence
  Oligonucleotide for detection of SNP TSC0033725
gttgtatgaaaat

SEQ ID NO: 135214 - DNA, 13 bp, Artificial Sequence
  Oligonucleotide for detection of SNP TSC0033725
attttcatacaac

SEQ ID NO: 135215 - DNA, 13 bp, Artificial Sequence
  Oligonucleotide for detection of SNP TSC0033725
gttgtacgaaaat

SEQ ID NO: 135216 - DNA, 13 bp, Artificial Sequence
  Oligonucleotide for detection of SNP TSC0033725
attttcgtacaac

SEQ ID NO: 135217 - DNA, 13 bp, Artificial Sequence
  Oligonucleotide for detection of SNP TSC0033725
atttttatgtagy

SEQ ID NO: 135218 - DNA, 13 bp, Artificial Sequence
  Oligonucleotide for detection of SNP TSC0033725
rctacataaaaat

SEQ ID NO: 135219 - DNA, 13 bp, Artificial Sequence
  Oligonucleotide for detection of SNP TSC0033725
attttcgtgtagy

SEQ ID NO: 135220 - DNA, 13 bp, Artificial Sequence
  Oligonucleotide for detection of SNP TSC0033725
rctacacgaaaat

SEQ ID NO: 135221 - DNA, 13 bp, Artificial Sequence
  Oligonucleotide for detection of SNP TSC0033729
tttataagtagtg

SEQ ID NO: 135222 - DNA, 13 bp, Artificial Sequence
  Oligonucleotide for detection of SNP TSC0033729
cactacttataaa

SEQ ID NO: 135223 - DNA, 13 bp, Artificial Sequence
  Oligonucleotide for detection of SNP TSC0033729
tttataggtagtg

SEQ ID NO: 135224 - DNA, 13 bp, Artificial Sequence
  Oligonucleotide for detection of SNP TSC0033729
cactacctataaa

SEQ ID NO: 135225 - DNA, 13 bp, Artificial Sequence
  Oligonucleotide for detection of SNP TSC0033730
aaagaaggaaatg

SEQ ID NO: 135226 - DNA, 13 bp, Artificial Sequence
  Oligonucleotide for detection of SNP TSC0033730
catttccttcttt

SEQ ID NO: 135227 - DNA, 13 bp, Artificial Sequence
  Oligonucleotide for detection of SNP TSC0033730
aaagaatgaaatg

SEQ ID NO: 135228 - DNA, 13 bp, Artificial Sequence
  Oligonucleotide for detection of SNP TSC0033730
catttcattcttt

SEQ ID NO: 135229 - DNA, 13 bp, Artificial Sequence
  Oligonucleotide for detection of SNP TSC0033731
agaattagtaata

SEQ ID NO: 135230 - DNA, 13 bp, Artificial Sequence
  Oligonucleotide for detection of SNP TSC0033731
tattactaattct

SEQ ID NO: 135231 - DNA, 13 bp, Artificial Sequence
  Oligonucleotide for detection of SNP TSC0033731
agaattggtaata

SEQ ID NO: 135232 - DNA, 13 bp, Artificial Sequence
  Oligonucleotide for detection of SNP TSC0033731
tattaccaattct

SEQ ID NO: 135233 - DNA, 13 bp, Artificial Sequence
  Oligonucleotide for detection of SNP TSC0033734
tgtattagttata

SEQ ID NO: 135234 - DNA, 13 bp, Artificial Sequence
  Oligonucleotide for detection of SNP TSC0033734
tataactaataca

SEQ ID NO: 135235 - DNA, 13 bp, Artificial Sequence
  Oligonucleotide for detection of SNP TSC0033734
tgtattggttata

SEQ ID NO: 135236 - DNA, 13 bp, Artificial Sequence
  Oligonucleotide for detection of SNP TSC0033734
tataaccaataca

SEQ ID NO: 135237 - DNA, 13 bp, Artificial Sequence
  Oligonucleotide for detection of SNP TSC0033734
tgtatcggttata

SEQ ID NO: 135238 - DNA, 13 bp, Artificial Sequence
  Oligonucleotide for detection of SNP TSC0033734
tataaccgataca

SEQ ID NO: 135239 - DNA, 13 bp, Artificial Sequence
  Oligonucleotide for detection of SNP TSC0033734
tatggttggtata

SEQ ID NO: 135240 - DNA, 13 bp, Artificial Sequence
  Oligonucleotide for detection of SNP TSC0033734
tataccaaccata

SEQ ID NO: 135241 - DNA, 13 bp, Artificial Sequence
  Oligonucleotide for detection of SNP TSC0033734
tatggtcggtata

SEQ ID NO: 135242 - DNA, 13 bp, Artificial Sequence
  Oligonucleotide for detection of SNP TSC0033734
tataccgaccata

SEQ ID NO: 135243 - DNA, 13 bp, Artificial Sequence
  Oligonucleotide for detection of SNP TSC0033735
tatagtagttaty

SEQ ID NO: 135244 - DNA, 13 bp, Artificial Sequence
  Oligonucleotide for detection of SNP TSC0033735
rataactactata

SEQ ID NO: 135245 - DNA, 13 bp, Artificial Sequence
  Oligonucleotide for detection of SNP TSC0033735
tatagtggttaty

SEQ ID NO: 135246 - DNA, 13 bp, Artificial Sequence
  Oligonucleotide for detection of SNP TSC0033735
rataaccactata

SEQ ID NO: 135247 - DNA, 13 bp, Artificial Sequence
  Oligonucleotide for detection of SNP TSC0033736
ggtagtgttttta

SEQ ID NO: 135248 - DNA, 13 bp, Artificial Sequence
  Oligonucleotide for detection of SNP TSC0033736
taaaaacactacc

SEQ ID NO: 135249 - DNA, 13 bp, Artificial Sequence
  Oligonucleotide for detection of SNP TSC0033736
ggtagtattttta

SEQ ID NO: 135250 - DNA, 13 bp, Artificial Sequence
  Oligonucleotide for detection of SNP TSC0033736
taaaaatactacc

SEQ ID NO: 135251 - DNA, 13 bp, Artificial Sequence
  Oligonucleotide for detection of SNP TSC0033737
ttgtgaataaaaa

SEQ ID NO: 135252 - DNA, 13 bp, Artificial Sequence
  Oligonucleotide for detection of SNP TSC0033737
tttttattcacaa

SEQ ID NO: 135253 - DNA, 13 bp, Artificial Sequence
  Oligonucleotide for detection of SNP TSC0033737
ttgtgattaaaaa

SEQ ID NO: 135254 - DNA, 13 bp, Artificial Sequence
  Oligonucleotide for detection of SNP TSC0033737
tttttaatcacaa

SEQ ID NO: 135255 - DNA, 13 bp, Artificial Sequence
  Oligonucleotide for detection of SNP TSC0033737
tttttgattatag

SEQ ID NO: 135256 - DNA, 13 bp, Artificial Sequence
  Oligonucleotide for detection of SNP TSC0033737
ctataatcaaaaa

SEQ ID NO: 135257 - DNA, 13 bp, Artificial Sequence
  Oligonucleotide for detection of SNP TSC0033738
gtaggaagtttta

SEQ ID NO: 135258 - DNA, 13 bp, Artificial Sequence
  Oligonucleotide for detection of SNP TSC0033738
taaaacttcctac

SEQ ID NO: 135259 - DNA, 13 bp, Artificial Sequence
  Oligonucleotide for detection of SNP TSC0033738
gtaggaggtttta

SEQ ID NO: 135260 - DNA, 13 bp, Artificial Sequence
  Oligonucleotide for detection of SNP TSC0033738
taaaacctcctac

SEQ ID NO: 135261 - DNA, 13 bp, Artificial Sequence
  Oligonucleotide for detection of SNP TSC0033739
taatttaattatg

SEQ ID NO: 135262 - DNA, 13 bp, Artificial Sequence
  Oligonucleotide for detection of SNP TSC0033739
cataattaaatta

SEQ ID NO: 135263 - DNA, 13 bp, Artificial Sequence
  Oligonucleotide for detection of SNP TSC0033739
taattttattatg

SEQ ID NO: 135264 - DNA, 13 bp, Artificial Sequence
  Oligonucleotide for detection of SNP TSC0033739
cataataaaatta

SEQ ID NO: 135265 - DNA, 13 bp, Artificial Sequence
  Oligonucleotide for detection of SNP TSC0033739
tatagttaaatta

SEQ ID NO: 135266 - DNA, 13 bp, Artificial Sequence
  Oligonucleotide for detection of SNP TSC0033739
taatttaactata

SEQ ID NO: 135267 - DNA, 13 bp, Artificial Sequence
  Oligonucleotide for detection of SNP TSC0033739
tatagtaaaatta

SEQ ID NO: 135268 - DNA, 13 bp, Artificial Sequence
  Oligonucleotide for detection of SNP TSC0033739
taattttactata

SEQ ID NO: 135269 - DNA, 13 bp, Artificial Sequence
  Oligonucleotide for detection of SNP TSC0033745
gagttggaggtta

SEQ ID NO: 135270 - DNA, 13 bp, Artificial Sequence
  Oligonucleotide for detection of SNP TSC0033745
taacctccaactc

SEQ ID NO: 135271 - DNA, 13 bp, Artificial Sequence
  Oligonucleotide for detection of SNP TSC0033745
gagttgaaggtta

SEQ ID NO: 135272 - DNA, 13 bp, Artificial Sequence
  Oligonucleotide for detection of SNP TSC0033745
taaccttcaactc

SEQ ID NO: 135273 - DNA, 13 bp, Artificial Sequence
  Oligonucleotide for detection of SNP TSC0033746
taaaaaattttty

SEQ ID NO: 135274 - DNA, 13 bp, Artificial Sequence
  Oligonucleotide for detection of SNP TSC0033746
raaaaatttttta

SEQ ID NO: 135275 - DNA, 13 bp, Artificial Sequence
  Oligonucleotide for detection of SNP TSC0033746
taaaaagttttty

SEQ ID NO: 135276 - DNA, 13 bp, Artificial Sequence
  Oligonucleotide for detection of SNP TSC0033746
raaaaacttttta

SEQ ID NO: 135277 - DNA, 13 bp, Artificial Sequence
  Oligonucleotide for detection of SNP TSC0033747
taataggagaaga

SEQ ID NO: 135278 - DNA, 13 bp, Artificial Sequence
  Oligonucleotide for detection of SNP TSC0033747
tcttctcctatta

SEQ ID NO: 135279 - DNA, 13 bp, Artificial Sequence
  Oligonucleotide for detection of SNP TSC0033747
taatagtagaaga

SEQ ID NO: 135280 - DNA, 13 bp, Artificial Sequence
  Oligonucleotide for detection of SNP TSC0033747
tcttctactatta

SEQ ID NO: 135281 - DNA, 13 bp, Artificial Sequence
  Oligonucleotide for detection of SNP TSC0033749
atttttaggttta

SEQ ID NO: 135282 - DNA, 13 bp, Artificial Sequence
  Oligonucleotide for detection of SNP TSC0033749
taaacctaaaaat

SEQ ID NO: 135283 - DNA, 13 bp, Artificial Sequence
  Oligonucleotide for detection of SNP TSC0033749
tgaatttgggggt

SEQ ID NO: 135284 - DNA, 13 bp, Artificial Sequence
  Oligonucleotide for detection of SNP TSC0033749
acccccaaattca

SEQ ID NO: 135285 - DNA, 13 bp, Artificial Sequence
  Oligonucleotide for detection of SNP TSC0033749
tgaattcgggggt

SEQ ID NO: 135286 - DNA, 13 bp, Artificial Sequence
  Oligonucleotide for detection of SNP TSC0033749
acccccgaattca

SEQ ID NO: 135287 - DNA, 13 bp, Artificial Sequence
  Oligonucleotide for detection of SNP TSC0033752
ggagtaaatttty

SEQ ID NO: 135288 - DNA, 13 bp, Artificial Sequence
  Oligonucleotide for detection of SNP TSC0033752
raaaatttactcc

SEQ ID NO: 135289 - DNA, 13 bp, Artificial Sequence
  Oligonucleotide for detection of SNP TSC0033752
ggagtatatttty

SEQ ID NO: 135290 - DNA, 13 bp, Artificial Sequence
  Oligonucleotide for detection of SNP TSC0033752
raaaatatactcc

SEQ ID NO: 135291 - DNA, 13 bp, Artificial Sequence
  Oligonucleotide for detection of SNP TSC0033752
gaaaatttattty

SEQ ID NO: 135292 - DNA, 13 bp, Artificial Sequence
  Oligonucleotide for detection of SNP TSC0033752
raaataaattttc

SEQ ID NO: 135293 - DNA, 13 bp, Artificial Sequence
  Oligonucleotide for detection of SNP TSC0033752
gaaaatgtattty

SEQ ID NO: 135294 - DNA, 13 bp, Artificial Sequence
  Oligonucleotide for detection of SNP TSC0033752
raaatacattttc

SEQ ID NO: 135295 - DNA, 13 bp, Artificial Sequence
  Oligonucleotide for detection of SNP TSC0033753
tttagtttttgat

SEQ ID NO: 135296 - DNA, 13 bp, Artificial Sequence
  Oligonucleotide for detection of SNP TSC0033753
atcaaaaactaaa

SEQ ID NO: 135297 - DNA, 13 bp, Artificial Sequence
  Oligonucleotide for detection of SNP TSC0033753
tttagtgtttgat

SEQ ID NO: 135298 - DNA, 13 bp, Artificial Sequence
  Oligonucleotide for detection of SNP TSC0033753
atcaaacactaaa

SEQ ID NO: 135299 - DNA, 13 bp, Artificial Sequence
  Oligonucleotide for detection of SNP TSC0033753
attagagattggg

SEQ ID NO: 135300 - DNA, 13 bp, Artificial Sequence
  Oligonucleotide for detection of SNP TSC0033753
cccaatctctaat

SEQ ID NO: 135301 - DNA, 13 bp, Artificial Sequence
  Oligonucleotide for detection of SNP TSC0033753
attagatattggg

SEQ ID NO: 135302 - DNA, 13 bp, Artificial Sequence
  Oligonucleotide for detection of SNP TSC0033753
cccaatatctaat

SEQ ID NO: 135303 - DNA, 13 bp, Artificial Sequence
  Oligonucleotide for detection of SNP TSC0033754
atttatttttttt

SEQ ID NO: 135304 - DNA, 13 bp, Artificial Sequence
  Oligonucleotide for detection of SNP TSC0033754
aaaaaaaataaat

SEQ ID NO: 135305 - DNA, 13 bp, Artificial Sequence
  Oligonucleotide for detection of SNP TSC0033754
aaggaatgtgagt

SEQ ID NO: 135306 - DNA, 13 bp, Artificial Sequence
  Oligonucleotide for detection of SNP TSC0033754
actcacattcctt

SEQ ID NO: 135307 - DNA, 13 bp, Artificial Sequence
  Oligonucleotide for detection of SNP TSC0033754
aaggaaagtgagt

SEQ ID NO: 135308 - DNA, 13 bp, Artificial Sequence
  Oligonucleotide for detection of SNP TSC0033754
actcactttcctt

SEQ ID NO: 135309 - DNA, 13 bp, Artificial Sequence
  Oligonucleotide for detection of SNP TSC0033754
aaggaacgtgagt

SEQ ID NO: 135310 - DNA, 13 bp, Artificial Sequence
  Oligonucleotide for detection of SNP TSC0033754
actcacgttcctt

SEQ ID NO: 135311 - DNA, 13 bp, Artificial Sequence
  Oligonucleotide for detection of SNP TSC0033756
atgaaatgtgtaa

SEQ ID NO: 135312 - DNA, 13 bp, Artificial Sequence
  Oligonucleotide for detection of SNP TSC0033756
ttacacatttcat

SEQ ID NO: 135313 - DNA, 13 bp, Artificial Sequence
  Oligonucleotide for detection of SNP TSC0033756
atgaaacgtgtaa

SEQ ID NO: 135314 - DNA, 13 bp, Artificial Sequence
  Oligonucleotide for detection of SNP TSC0033756
ttacacgtttcat

SEQ ID NO: 135315 - DNA, 13 bp, Artificial Sequence
  Oligonucleotide for detection of SNP TSC0033756
ttatatgttttat

SEQ ID NO: 135316 - DNA, 13 bp, Artificial Sequence
  Oligonucleotide for detection of SNP TSC0033756
ataaaacatataa

SEQ ID NO: 135317 - DNA, 13 bp, Artificial Sequence
  Oligonucleotide for detection of SNP TSC0033756
ttatacgttttat

SEQ ID NO: 135318 - DNA, 13 bp, Artificial Sequence
  Oligonucleotide for detection of SNP TSC0033756
ataaaacgtataa

SEQ ID NO: 135319 - DNA, 13 bp, Artificial Sequence
  Oligonucleotide for detection of SNP TSC0033757
ttgtagttagtag

SEQ ID NO: 135320 - DNA, 13 bp, Artificial Sequence
  Oligonucleotide for detection of SNP TSC0033757
ctactaactacaa

SEQ ID NO: 135321 - DNA, 13 bp, Artificial Sequence
  Oligonucleotide for detection of SNP TSC0033757
ttgtaggtagtag

SEQ ID NO: 135322 - DNA, 13 bp, Artificial Sequence
  Oligonucleotide for detection of SNP TSC0033757
ctactacctacaa

SEQ ID NO: 135323 - DNA, 13 bp, Artificial Sequence
  Oligonucleotide for detection of SNP TSC0033757
ttgttggttgtag

SEQ ID NO: 135324 - DNA, 13 bp, Artificial Sequence
  Oligonucleotide for detection of SNP TSC0033757
ctacaaccaacaa

SEQ ID NO: 135325 - DNA, 13 bp, Artificial Sequence
  Oligonucleotide for detection of SNP TSC0033757
ttgttgtttgtag

SEQ ID NO: 135326 - DNA, 13 bp, Artificial Sequence
  Oligonucleotide for detection of SNP TSC0033757
ctacaaacaacaa

SEQ ID NO: 135327 - DNA, 13 bp, Artificial Sequence
  Oligonucleotide for detection of SNP TSC0033759
ttttatgatgaga

SEQ ID NO: 135328 - DNA, 13 bp, Artificial Sequence
  Oligonucleotide for detection of SNP TSC0033759
tctcatcataaaa

SEQ ID NO: 135329 - DNA, 13 bp, Artificial Sequence
  Oligonucleotide for detection of SNP TSC0033759
ttttataatgaga

SEQ ID NO: 135330 - DNA, 13 bp, Artificial Sequence
  Oligonucleotide for detection of SNP TSC0033759
tctcattataaaa

SEQ ID NO: 135331 - DNA, 13 bp, Artificial Sequence
  Oligonucleotide for detection of SNP TSC0033761
gtagtgataatag

SEQ ID NO: 135332 - DNA, 13 bp, Artificial Sequence
  Oligonucleotide for detection of SNP TSC0033761
ctattatcactac

SEQ ID NO: 135333 - DNA, 13 bp, Artificial Sequence
  Oligonucleotide for detection of SNP TSC0033761
gtagtggtaatag

SEQ ID NO: 135334 - DNA, 13 bp, Artificial Sequence
  Oligonucleotide for detection of SNP TSC0033761
ctattaccactac

SEQ ID NO: 135335 - DNA, 13 bp, Artificial Sequence
  Oligonucleotide for detection of SNP TSC0033765
agagacggagttt

SEQ ID NO: 135336 - DNA, 13 bp, Artificial Sequence
  Oligonucleotide for detection of SNP TSC0033765
aaactccgtctct

SEQ ID NO: 135337 - DNA, 13 bp, Artificial Sequence
  Oligonucleotide for detection of SNP TSC0033767
tttttagaaatag

SEQ ID NO: 135338 - DNA, 13 bp, Artificial Sequence
  Oligonucleotide for detection of SNP TSC0033767
ctatttctaaaaa

SEQ ID NO: 135339 - DNA, 13 bp, Artificial Sequence
  Oligonucleotide for detection of SNP TSC0033767
tttttaaaaatag

SEQ ID NO: 135340 - DNA, 13 bp, Artificial Sequence
  Oligonucleotide for detection of SNP TSC0033767
ctatttttaaaaa

SEQ ID NO: 135341 - DNA, 13 bp, Artificial Sequence
  Oligonucleotide for detection of SNP TSC0033770
ttttaggttgtga

SEQ ID NO: 135342 - DNA, 13 bp, Artificial Sequence
  Oligonucleotide for detection of SNP TSC0033770
tcacaacctaaaa

SEQ ID NO: 135343 - DNA, 13 bp, Artificial Sequence
  Oligonucleotide for detection of SNP TSC0033770
ttttaggtcgtga

SEQ ID NO: 135344 - DNA, 13 bp, Artificial Sequence
  Oligonucleotide for detection of SNP TSC0033770
tcacgacctaaaa

SEQ ID NO: 135345 - DNA, 13 bp, Artificial Sequence
  Oligonucleotide for detection of SNP TSC0033772
tggttggtggggt

SEQ ID NO: 135346 - DNA, 13 bp, Artificial Sequence
  Oligonucleotide for detection of SNP TSC0033772
accccaccaacca

SEQ ID NO: 135347 - DNA, 13 bp, Artificial Sequence
  Oligonucleotide for detection of SNP TSC0033772
tggttgatggggt

SEQ ID NO: 135348 - DNA, 13 bp, Artificial Sequence
  Oligonucleotide for detection of SNP TSC0033772
accccatcaacca

SEQ ID NO: 135349 - DNA, 13 bp, Artificial Sequence
  Oligonucleotide for detection of SNP TSC0033772
cggttggtggggt

SEQ ID NO: 135350 - DNA, 13 bp, Artificial Sequence
  Oligonucleotide for detection of SNP TSC0033772
accccaccaaccg

SEQ ID NO: 135351 - DNA, 13 bp, Artificial Sequence
  Oligonucleotide for detection of SNP TSC0033772
cggttgatggggt

SEQ ID NO: 135352 - DNA, 13 bp, Artificial Sequence
  Oligonucleotide for detection of SNP TSC0033772
accccatcaaccg

SEQ ID NO: 135353 - DNA, 13 bp, Artificial Sequence
  Oligonucleotide for detection of SNP TSC0033772
tggttggcggggt

SEQ ID NO: 135354 - DNA, 13 bp, Artificial Sequence
  Oligonucleotide for detection of SNP TSC0033772
accccgccaacca

SEQ ID NO: 135355 - DNA, 13 bp, Artificial Sequence
  Oligonucleotide for detection of SNP TSC0033772
tggttgacggggt

SEQ ID NO: 135356 - DNA, 13 bp, Artificial Sequence
  Oligonucleotide for detection of SNP TSC0033772
accccgtcaacca

SEQ ID NO: 135357 - DNA, 13 bp, Artificial Sequence
  Oligonucleotide for detection of SNP TSC0033772
cggttggcggggt

SEQ ID NO: 135358 - DNA, 13 bp, Artificial Sequence
  Oligonucleotide for detection of SNP TSC0033772
accccgccaaccg

SEQ ID NO: 135359 - DNA, 13 bp, Artificial Sequence
  Oligonucleotide for detection of SNP TSC0033772
cggttgacggggt

SEQ ID NO: 135360 - DNA, 13 bp, Artificial Sequence
  Oligonucleotide for detection of SNP TSC0033772
accccgtcaaccg

SEQ ID NO: 135361 - DNA, 13 bp, Artificial Sequence
  Oligonucleotide for detection of SNP TSC0033773
attgttggaggty

SEQ ID NO: 135362 - DNA, 13 bp, Artificial Sequence
  Oligonucleotide for detection of SNP TSC0033773
racctccaacaat

SEQ ID NO: 135363 - DNA, 13 bp, Artificial Sequence
  Oligonucleotide for detection of SNP TSC0033773
attgtttgaggty

SEQ ID NO: 135364 - DNA, 13 bp, Artificial Sequence
  Oligonucleotide for detection of SNP TSC0033773
racctcaaacaat

SEQ ID NO: 135365 - DNA, 13 bp, Artificial Sequence
  Oligonucleotide for detection of SNP TSC0033773
ggtttttagtaat

SEQ ID NO: 135366 - DNA, 13 bp, Artificial Sequence
  Oligonucleotide for detection of SNP TSC0033773
attactaaaaacc

SEQ ID NO: 135367 - DNA, 13 bp, Artificial Sequence
  Oligonucleotide for detection of SNP TSC0033773
ggttttaagtaat

SEQ ID NO: 135368 - DNA, 13 bp, Artificial Sequence
  Oligonucleotide for detection of SNP TSC0033773
attacttaaaacc

SEQ ID NO: 135369 - DNA, 13 bp, Artificial Sequence
  Oligonucleotide for detection of SNP TSC0033776
ttgtgaagtttty

SEQ ID NO: 135370 - DNA, 13 bp, Artificial Sequence
  Oligonucleotide for detection of SNP TSC0033776
raaaacttcacaa

SEQ ID NO: 135371 - DNA, 13 bp, Artificial Sequence
  Oligonucleotide for detection of SNP TSC0033776
ttgtgaggtttty

SEQ ID NO: 135372 - DNA, 13 bp, Artificial Sequence
  Oligonucleotide for detection of SNP TSC0033776
raaaacctcacaa

SEQ ID NO: 135373 - DNA, 13 bp, Artificial Sequence
  Oligonucleotide for detection of SNP TSC0033777
gtattaatatggt

SEQ ID NO: 135374 - DNA, 13 bp, Artificial Sequence
  Oligonucleotide for detection of SNP TSC0033777
accatattaatac

SEQ ID NO: 135375 - DNA, 13 bp, Artificial Sequence
  Oligonucleotide for detection of SNP TSC0033777
gtattagtatggt

SEQ ID NO: 135376 - DNA, 13 bp, Artificial Sequence
  Oligonucleotide for detection of SNP TSC0033777
accatactaatac

SEQ ID NO: 135377 - DNA, 13 bp, Artificial Sequence
  Oligonucleotide for detection of SNP TSC0033782
gtttttataaagg

SEQ ID NO: 135378 - DNA, 13 bp, Artificial Sequence
  Oligonucleotide for detection of SNP TSC0033782
cctttataaaaac

SEQ ID NO: 135379 - DNA, 13 bp, Artificial Sequence
  Oligonucleotide for detection of SNP TSC0033782
gtttttgtaaagg

SEQ ID NO: 135380 - DNA, 13 bp, Artificial Sequence
  Oligonucleotide for detection of SNP TSC0033782
cctttacaaaaac

SEQ ID NO: 135381 - DNA, 13 bp, Artificial Sequence
  Oligonucleotide for detection of SNP TSC0033784
attgatatataty

SEQ ID NO: 135382 - DNA, 13 bp, Artificial Sequence
  Oligonucleotide for detection of SNP TSC0033784
ratatatatcaat

SEQ ID NO: 135383 - DNA, 13 bp, Artificial Sequence
  Oligonucleotide for detection of SNP TSC0033784
attgatttataty

SEQ ID NO: 135384 - DNA, 13 bp, Artificial Sequence
  Oligonucleotide for detection of SNP TSC0033784
ratataaatcaat

SEQ ID NO: 135385 - DNA, 13 bp, Artificial Sequence
  Oligonucleotide for detection of SNP TSC0033784
gatatatattaat

SEQ ID NO: 135386 - DNA, 13 bp, Artificial Sequence
  Oligonucleotide for detection of SNP TSC0033784
attaatatatatc

SEQ ID NO: 135387 - DNA, 13 bp, Artificial Sequence
  Oligonucleotide for detection of SNP TSC0033784
gatatagattaat

SEQ ID NO: 135388 - DNA, 13 bp, Artificial Sequence
  Oligonucleotide for detection of SNP TSC0033784
attaatctatatc

SEQ ID NO: 135389 - DNA, 13 bp, Artificial Sequence
  Oligonucleotide for detection of SNP TSC0033786
gagatagaggttg

SEQ ID NO: 135390 - DNA, 13 bp, Artificial Sequence
  Oligonucleotide for detection of SNP TSC0033786
caacctctatctc

SEQ ID NO: 135391 - DNA, 13 bp, Artificial Sequence
  Oligonucleotide for detection of SNP TSC0033786
gagataaaggttg

SEQ ID NO: 135392 - DNA, 13 bp, Artificial Sequence
  Oligonucleotide for detection of SNP TSC0033786
caacctttatctc

SEQ ID NO: 135393 - DNA, 13 bp, Artificial Sequence
  Oligonucleotide for detection of SNP TSC0033787
tgttgatgattgg

SEQ ID NO: 135394 - DNA, 13 bp, Artificial Sequence
  Oligonucleotide for detection of SNP TSC0033787
ccaatcatcaaca

SEQ ID NO: 135395 - DNA, 13 bp, Artificial Sequence
  Oligonucleotide for detection of SNP TSC0033787
tgttgacgattgg

SEQ ID NO: 135396 - DNA, 13 bp, Artificial Sequence
  Oligonucleotide for detection of SNP TSC0033787
ccaatcgtcaaca

SEQ ID NO: 135397 - DNA, 13 bp, Artificial Sequence
  Oligonucleotide for detection of SNP TSC0033787
ttaattgttagta

SEQ ID NO: 135398 - DNA, 13 bp, Artificial Sequence
  Oligonucleotide for detection of SNP TSC0033787
tactaacaattaa

SEQ ID NO: 135399 - DNA, 13 bp, Artificial Sequence
  Oligonucleotide for detection of SNP TSC0033787
ttaattattagta

SEQ ID NO: 135400 - DNA, 13 bp, Artificial Sequence
  Oligonucleotide for detection of SNP TSC0033787
tactaataattaa

SEQ ID NO: 135401 - DNA, 13 bp, Artificial Sequence
  Oligonucleotide for detection of SNP TSC0033787
ttaatcgttagta

SEQ ID NO: 135402 - DNA, 13 bp, Artificial Sequence
  Oligonucleotide for detection of SNP TSC0033787
tactaacgattaa

SEQ ID NO: 135403 - DNA, 13 bp, Artificial Sequence
  Oligonucleotide for detection of SNP TSC0033789
gaggttgaagtgg

SEQ ID NO: 135404 - DNA, 13 bp, Artificial Sequence
  Oligonucleotide for detection of SNP TSC0033789
ccacttcaacctc

SEQ ID NO: 135405 - DNA, 13 bp, Artificial Sequence
  Oligonucleotide for detection of SNP TSC0033789
gaggttaaagtgg

SEQ ID NO: 135406 - DNA, 13 bp, Artificial Sequence
  Oligonucleotide for detection of SNP TSC0033789
ccactttaacctc

SEQ ID NO: 135407 - DNA, 13 bp, Artificial Sequence
  Oligonucleotide for detection of SNP TSC0033790
gtttaaggtttag

SEQ ID NO: 135408 - DNA, 13 bp, Artificial Sequence
  Oligonucleotide for detection of SNP TSC0033790
ctaaaccttaaac

SEQ ID NO: 135409 - DNA, 13 bp, Artificial Sequence
  Oligonucleotide for detection of SNP TSC0033790
gtttaaagtttag

SEQ ID NO: 135410 - DNA, 13 bp, Artificial Sequence
  Oligonucleotide for detection of SNP TSC0033790
ctaaactttaaac

SEQ ID NO: 135411 - DNA, 13 bp, Artificial Sequence
  Oligonucleotide for detection of SNP TSC0033791
gagtttggaaagg

SEQ ID NO: 135412 - DNA, 13 bp, Artificial Sequence
  Oligonucleotide for detection of SNP TSC0033791
cctttccaaactc

SEQ ID NO: 135413 - DNA, 13 bp, Artificial Sequence
  Oligonucleotide for detection of SNP TSC0033791
gagtttagaaagg

SEQ ID NO: 135414 - DNA, 13 bp, Artificial Sequence
  Oligonucleotide for detection of SNP TSC0033791
cctttctaaactc

SEQ ID NO: 135415 - DNA, 13 bp, Artificial Sequence
  Oligonucleotide for detection of SNP TSC0033792
atataaattattt

SEQ ID NO: 135416 - DNA, 13 bp, Artificial Sequence
  Oligonucleotide for detection of SNP TSC0033792
aaataatttatat

SEQ ID NO: 135417 - DNA, 13 bp, Artificial Sequence
  Oligonucleotide for detection of SNP TSC0033792
atataagttattt

SEQ ID NO: 135418 - DNA, 13 bp, Artificial Sequence
  Oligonucleotide for detection of SNP TSC0033792
aaataacttatat

SEQ ID NO: 135419 - DNA, 13 bp, Artificial Sequence
  Oligonucleotide for detection of SNP TSC0033793
atatatgtgtata

SEQ ID NO: 135420 - DNA, 13 bp, Artificial Sequence
  Oligonucleotide for detection of SNP TSC0033793
tatacacatatat

SEQ ID NO: 135421 - DNA, 13 bp, Artificial Sequence
  Oligonucleotide for detection of SNP TSC0033793
atatatttgtata

SEQ ID NO: 135422 - DNA, 13 bp, Artificial Sequence
  Oligonucleotide for detection of SNP TSC0033793
tatacaaatatat

SEQ ID NO: 135423 - DNA, 13 bp, Artificial Sequence
  Oligonucleotide for detection of SNP TSC0033794
atatgtgttatat

SEQ ID NO: 135424 - DNA, 13 bp, Artificial Sequence
  Oligonucleotide for detection of SNP TSC0033794
atataacacatat

SEQ ID NO: 135425 - DNA, 13 bp, Artificial Sequence
  Oligonucleotide for detection of SNP TSC0033794
atatgtattatat

SEQ ID NO: 135426 - DNA, 13 bp, Artificial Sequence
  Oligonucleotide for detection of SNP TSC0033794
atataatacatat

SEQ ID NO: 135427 - DNA, 13 bp, Artificial Sequence
  Oligonucleotide for detection of SNP TSC0033796
attaggaaggaaa

SEQ ID NO: 135428 - DNA, 13 bp, Artificial Sequence
  Oligonucleotide for detection of SNP TSC0033796
tttccttcctaat

SEQ ID NO: 135429 - DNA, 13 bp, Artificial Sequence
  Oligonucleotide for detection of SNP TSC0033796
attagggaggaaa

SEQ ID NO: 135430 - DNA, 13 bp, Artificial Sequence
  Oligonucleotide for detection of SNP TSC0033796
tttcctccctaat

SEQ ID NO: 135431 - DNA, 13 bp, Artificial Sequence
  Oligonucleotide for detection of SNP TSC0033799
tttaataatgata

SEQ ID NO: 135432 - DNA, 13 bp, Artificial Sequence
  Oligonucleotide for detection of SNP TSC0033799
tatcattattaaa

SEQ ID NO: 135433 - DNA, 13 bp, Artificial Sequence
  Oligonucleotide for detection of SNP TSC0033799
tttaatgatgata

SEQ ID NO: 135434 - DNA, 13 bp, Artificial Sequence
  Oligonucleotide for detection of SNP TSC0033799
tatcatcattaaa

SEQ ID NO: 135435 - DNA, 13 bp, Artificial Sequence
  Oligonucleotide for detection of SNP TSC0033800
gcggtgatttatg

SEQ ID NO: 135436 - DNA, 13 bp, Artificial Sequence
  Oligonucleotide for detection of SNP TSC0033800
cataaatcaccgc

SEQ ID NO: 135437 - DNA, 13 bp, Artificial Sequence
  Oligonucleotide for detection of SNP TSC0033800
gcggtggtttatg

SEQ ID NO: 135438 - DNA, 13 bp, Artificial Sequence
  Oligonucleotide for detection of SNP TSC0033800
cataaaccaccgc

SEQ ID NO: 135439 - DNA, 13 bp, Artificial Sequence
  Oligonucleotide for detection of SNP TSC0033814
gagaaggtggaaa

SEQ ID NO: 135440 - DNA, 13 bp, Artificial Sequence
  Oligonucleotide for detection of SNP TSC0033814
tttccaccttctc

SEQ ID NO: 135441 - DNA, 13 bp, Artificial Sequence
  Oligonucleotide for detection of SNP TSC0033814
gagaagatggaaa

SEQ ID NO: 135442 - DNA, 13 bp, Artificial Sequence
  Oligonucleotide for detection of SNP TSC0033814
tttccatcttctc

SEQ ID NO: 135443 - DNA, 13 bp, Artificial Sequence
  Oligonucleotide for detection of SNP TSC0033815
agaaatatatagy

SEQ ID NO: 135444 - DNA, 13 bp, Artificial Sequence
  Oligonucleotide for detection of SNP TSC0033815
rctatatatttct

SEQ ID NO: 135445 - DNA, 13 bp, Artificial Sequence
  Oligonucleotide for detection of SNP TSC0033815
agaaatttatagy

SEQ ID NO: 135446 - DNA, 13 bp, Artificial Sequence
  Oligonucleotide for detection of SNP TSC0033815
rctataaatttct

SEQ ID NO: 135447 - DNA, 13 bp, Artificial Sequence
  Oligonucleotide for detection of SNP TSC0033815
gttatatattttt

SEQ ID NO: 135448 - DNA, 13 bp, Artificial Sequence
  Oligonucleotide for detection of SNP TSC0033815
aaaaatatataac

SEQ ID NO: 135449 - DNA, 13 bp, Artificial Sequence
  Oligonucleotide for detection of SNP TSC0033815
gttatagattttt

SEQ ID NO: 135450 - DNA, 13 bp, Artificial Sequence
  Oligonucleotide for detection of SNP TSC0033815
aaaaatctataac

SEQ ID NO: 135451 - DNA, 13 bp, Artificial Sequence
  Oligonucleotide for detection of SNP TSC0033816
aaatgaaggagaa

SEQ ID NO: 135452 - DNA, 13 bp, Artificial Sequence
  Oligonucleotide for detection of SNP TSC0033816
ttctccttcattt

SEQ ID NO: 135453 - DNA, 13 bp, Artificial Sequence
  Oligonucleotide for detection of SNP TSC0033816
aaatgagggagaa

SEQ ID NO: 135454 - DNA, 13 bp, Artificial Sequence
  Oligonucleotide for detection of SNP TSC0033816
ttctccctcattt

SEQ ID NO: 135455 - DNA, 13 bp, Artificial Sequence
  Oligonucleotide for detection of SNP TSC0033817
tatttaagaagtg

SEQ ID NO: 135456 - DNA, 13 bp, Artificial Sequence
  Oligonucleotide for detection of SNP TSC0033817
cacttcttaaata

SEQ ID NO: 135457 - DNA, 13 bp, Artificial Sequence
  Oligonucleotide for detection of SNP TSC0033817
tatttaggaagtg

SEQ ID NO: 135458 - DNA, 13 bp, Artificial Sequence
  Oligonucleotide for detection of SNP TSC0033817
cacttcctaaata

SEQ ID NO: 135459 - DNA, 13 bp, Artificial Sequence
  Oligonucleotide for detection of SNP TSC0033818
attggtaggttgy

SEQ ID NO: 135460 - DNA, 13 bp, Artificial Sequence
  Oligonucleotide for detection of SNP TSC0033818
rcaacctaccaat

SEQ ID NO: 135461 - DNA, 13 bp, Artificial Sequence
  Oligonucleotide for detection of SNP TSC0033818
attggtgggttgy

SEQ ID NO: 135462 - DNA, 13 bp, Artificial Sequence
  Oligonucleotide for detection of SNP TSC0033818
rcaacccaccaat

SEQ ID NO: 135463 - DNA, 13 bp, Artificial Sequence
  Oligonucleotide for detection of SNP TSC0033818
attggcgggttgy

SEQ ID NO: 135464 - DNA, 13 bp, Artificial Sequence
  Oligonucleotide for detection of SNP TSC0033818
rcaacccgccaat

SEQ ID NO: 135465 - DNA, 13 bp, Artificial Sequence
  Oligonucleotide for detection of SNP TSC0033818
gtaatttgttagt

SEQ ID NO: 135466 - DNA, 13 bp, Artificial Sequence
  Oligonucleotide for detection of SNP TSC0033818
actaacaaattac

SEQ ID NO: 135467 - DNA, 13 bp, Artificial Sequence
  Oligonucleotide for detection of SNP TSC0033818
gtaattcgttagt

SEQ ID NO: 135468 - DNA, 13 bp, Artificial Sequence
  Oligonucleotide for detection of SNP TSC0033818
actaacgaattac

SEQ ID NO: 135469 - DNA, 13 bp, Artificial Sequence
  Oligonucleotide for detection of SNP TSC0033819
agattgggagtga

SEQ ID NO: 135470 - DNA, 13 bp, Artificial Sequence
  Oligonucleotide for detection of SNP TSC0033819
tcactcccaatct

SEQ ID NO: 135471 - DNA, 13 bp, Artificial Sequence
  Oligonucleotide for detection of SNP TSC0033819
agattgagagtga

SEQ ID NO: 135472 - DNA, 13 bp, Artificial Sequence
  Oligonucleotide for detection of SNP TSC0033819
tcactctcaatct

SEQ ID NO: 135473 - DNA, 13 bp, Artificial Sequence
  Oligonucleotide for detection of SNP TSC0033820
tttgttggtttgg

SEQ ID NO: 135474 - DNA, 13 bp, Artificial Sequence
  Oligonucleotide for detection of SNP TSC0033820
ccaaaccaacaaa

SEQ ID NO: 135475 - DNA, 13 bp, Artificial Sequence
  Oligonucleotide for detection of SNP TSC0033820
tttgttagtttgg

SEQ ID NO: 135476 - DNA, 13 bp, Artificial Sequence
  Oligonucleotide for detection of SNP TSC0033820
ccaaactaacaaa

SEQ ID NO: 135477 - DNA, 13 bp, Artificial Sequence
  Oligonucleotide for detection of SNP TSC0033820
ttcgttggtttgg

SEQ ID NO: 135478 - DNA, 13 bp, Artificial Sequence
  Oligonucleotide for detection of SNP TSC0033820
ccaaaccaacgaa

SEQ ID NO: 135479 - DNA, 13 bp, Artificial Sequence
  Oligonucleotide for detection of SNP TSC0033820
ttcgttagtttgg

SEQ ID NO: 135480 - DNA, 13 bp, Artificial Sequence
  Oligonucleotide for detection of SNP TSC0033820
ccaaactaacgaa

SEQ ID NO: 135481 - DNA, 13 bp, Artificial Sequence
  Oligonucleotide for detection of SNP TSC0033821
attttaattaata

SEQ ID NO: 135482 - DNA, 13 bp, Artificial Sequence
  Oligonucleotide for detection of SNP TSC0033821
tattaattaaaat

SEQ ID NO: 135483 - DNA, 13 bp, Artificial Sequence
  Oligonucleotide for detection of SNP TSC0033821
attttagttaata

SEQ ID NO: 135484 - DNA, 13 bp, Artificial Sequence
  Oligonucleotide for detection of SNP TSC0033821
tattaactaaaat

SEQ ID NO: 135485 - DNA, 13 bp, Artificial Sequence
  Oligonucleotide for detection of SNP TSC0033822
ttgtgtgataaag

SEQ ID NO: 135486 - DNA, 13 bp, Artificial Sequence
  Oligonucleotide for detection of SNP TSC0033822
ctttatcacacaa

SEQ ID NO: 135487 - DNA, 13 bp, Artificial Sequence
  Oligonucleotide for detection of SNP TSC0033822
ttgtgtaataaag

SEQ ID NO: 135488 - DNA, 13 bp, Artificial Sequence
  Oligonucleotide for detection of SNP TSC0033822
ctttattacacaa

SEQ ID NO: 135489 - DNA, 13 bp, Artificial Sequence
  Oligonucleotide for detection of SNP TSC0033822
tcgtgtgataaag

SEQ ID NO: 135490 - DNA, 13 bp, Artificial Sequence
  Oligonucleotide for detection of SNP TSC0033822
ctttatcacacga

SEQ ID NO: 135491 - DNA, 13 bp, Artificial Sequence
  Oligonucleotide for detection of SNP TSC0033822
tcgtgtaataaag

SEQ ID NO: 135492 - DNA, 13 bp, Artificial Sequence
  Oligonucleotide for detection of SNP TSC0033822
ctttattacacga

SEQ ID NO: 135493 - DNA, 13 bp, Artificial Sequence
  Oligonucleotide for detection of SNP TSC0033822
ttgcgtgataaag

SEQ ID NO: 135494 - DNA, 13 bp, Artificial Sequence
  Oligonucleotide for detection of SNP TSC0033822
ctttatcacgcaa

SEQ ID NO: 135495 - DNA, 13 bp, Artificial Sequence
  Oligonucleotide for detection of SNP TSC0033822
ttgcgtaataaag

SEQ ID NO: 135496 - DNA, 13 bp, Artificial Sequence
  Oligonucleotide for detection of SNP TSC0033822
ctttattacgcaa

SEQ ID NO: 135497 - DNA, 13 bp, Artificial Sequence
  Oligonucleotide for detection of SNP TSC0033822
tcgcgtgataaag

SEQ ID NO: 135498 - DNA, 13 bp, Artificial Sequence
  Oligonucleotide for detection of SNP TSC0033822
ctttatcacgcga

SEQ ID NO: 135499 - DNA, 13 bp, Artificial Sequence
  Oligonucleotide for detection of SNP TSC0033822
tcgcgtaataaag

SEQ ID NO: 135500 - DNA, 13 bp, Artificial Sequence
  Oligonucleotide for detection of SNP TSC0033822
ctttattacgcga

SEQ ID NO: 135501 - DNA, 13 bp, Artificial Sequence
  Oligonucleotide for detection of SNP TSC0033823
tttatttgattaa

SEQ ID NO: 135502 - DNA, 13 bp, Artificial Sequence
  Oligonucleotide for detection of SNP TSC0033823
ttaatcaaataaa

SEQ ID NO: 135503 - DNA, 13 bp, Artificial Sequence
  Oligonucleotide for detection of SNP TSC0033823
tttattcgattaa

SEQ ID NO: 135504 - DNA, 13 bp, Artificial Sequence
  Oligonucleotide for detection of SNP TSC0033823
ttaatcgaataaa

SEQ ID NO: 135505 - DNA, 13 bp, Artificial Sequence
  Oligonucleotide for detection of SNP TSC0033823
ttggttggatgag

SEQ ID NO: 135506 - DNA, 13 bp, Artificial Sequence
  Oligonucleotide for detection of SNP TSC0033823
ctcatccaaccaa

SEQ ID NO: 135507 - DNA, 13 bp, Artificial Sequence
  Oligonucleotide for detection of SNP TSC0033823
ttggttagatgag

SEQ ID NO: 135508 - DNA, 13 bp, Artificial Sequence
  Oligonucleotide for detection of SNP TSC0033823
ctcatctaaccaa

SEQ ID NO: 135509 - DNA, 13 bp, Artificial Sequence
  Oligonucleotide for detection of SNP TSC0033823
ttggtcggatgag

SEQ ID NO: 135510 - DNA, 13 bp, Artificial Sequence
  Oligonucleotide for detection of SNP TSC0033823
ctcatccgaccaa

SEQ ID NO: 135511 - DNA, 13 bp, Artificial Sequence
  Oligonucleotide for detection of SNP TSC0033826
atgtatgaagtaa

SEQ ID NO: 135512 - DNA, 13 bp, Artificial Sequence
  Oligonucleotide for detection of SNP TSC0033826
ttacttcatacat

SEQ ID NO: 135513 - DNA, 13 bp, Artificial Sequence
  Oligonucleotide for detection of SNP TSC0033826
atgtataaagtaa

SEQ ID NO: 135514 - DNA, 13 bp, Artificial Sequence
  Oligonucleotide for detection of SNP TSC0033826
ttactttatacat

SEQ ID NO: 135515 - DNA, 13 bp, Artificial Sequence
  Oligonucleotide for detection of SNP TSC0033826
acgtatgaagtaa

SEQ ID NO: 135516 - DNA, 13 bp, Artificial Sequence
  Oligonucleotide for detection of SNP TSC0033826
ttacttcatacgt

SEQ ID NO: 135517 - DNA, 13 bp, Artificial Sequence
  Oligonucleotide for detection of SNP TSC0033826
acgtataaagtaa

SEQ ID NO: 135518 - DNA, 13 bp, Artificial Sequence
  Oligonucleotide for detection of SNP TSC0033826
ttactttatacgt

SEQ ID NO: 135519 - DNA, 13 bp, Artificial Sequence
  Oligonucleotide for detection of SNP TSC0033827
gtaaaggagtaag

SEQ ID NO: 135520 - DNA, 13 bp, Artificial Sequence
  Oligonucleotide for detection of SNP TSC0033827
cttactcctttac

SEQ ID NO: 135521 - DNA, 13 bp, Artificial Sequence
  Oligonucleotide for detection of SNP TSC0033827
gtaaagaagtaag

SEQ ID NO: 135522 - DNA, 13 bp, Artificial Sequence
  Oligonucleotide for detection of SNP TSC0033827
cttacttctttac

SEQ ID NO: 135523 - DNA, 13 bp, Artificial Sequence
  Oligonucleotide for detection of SNP TSC0033828
gaaattggtaaaa

SEQ ID NO: 135524 - DNA, 13 bp, Artificial Sequence
  Oligonucleotide for detection of SNP TSC0033828
ttttaccaatttc

SEQ ID NO: 135525 - DNA, 13 bp, Artificial Sequence
  Oligonucleotide for detection of SNP TSC0033828
gaaattagtaaaa

SEQ ID NO: 135526 - DNA, 13 bp, Artificial Sequence
  Oligonucleotide for detection of SNP TSC0033828
ttttactaatttc

SEQ ID NO: 135527 - DNA, 13 bp, Artificial Sequence
  Oligonucleotide for detection of SNP TSC0033829
atgatgggggtgg

SEQ ID NO: 135528 - DNA, 13 bp, Artificial Sequence
  Oligonucleotide for detection of SNP TSC0033829
ccacccccatcat

SEQ ID NO: 135529 - DNA, 13 bp, Artificial Sequence
  Oligonucleotide for detection of SNP TSC0033829
atgatgagggtgg

SEQ ID NO: 135530 - DNA, 13 bp, Artificial Sequence
  Oligonucleotide for detection of SNP TSC0033829
ccaccctcatcat

SEQ ID NO: 135531 - DNA, 13 bp, Artificial Sequence
  Oligonucleotide for detection of SNP TSC0033829
atgacgggggtgg

SEQ ID NO: 135532 - DNA, 13 bp, Artificial Sequence
  Oligonucleotide for detection of SNP TSC0033829
ccacccccgtcat

SEQ ID NO: 135533 - DNA, 13 bp, Artificial Sequence
  Oligonucleotide for detection of SNP TSC0033829
atgacgagggtgg

SEQ ID NO: 135534 - DNA, 13 bp, Artificial Sequence
  Oligonucleotide for detection of SNP TSC0033829
ccaccctcgtcat

SEQ ID NO: 135535 - DNA, 13 bp, Artificial Sequence
  Oligonucleotide for detection of SNP TSC0033836
aagatggtagtty

SEQ ID NO: 135536 - DNA, 13 bp, Artificial Sequence
  Oligonucleotide for detection of SNP TSC0033836
raactaccatctt

SEQ ID NO: 135537 - DNA, 13 bp, Artificial Sequence
  Oligonucleotide for detection of SNP TSC0033836
aagatgatagtty

SEQ ID NO: 135538 - DNA, 13 bp, Artificial Sequence
  Oligonucleotide for detection of SNP TSC0033836
raactatcatctt

SEQ ID NO: 135539 - DNA, 13 bp, Artificial Sequence
  Oligonucleotide for detection of SNP TSC0033837
aatgttatttata

SEQ ID NO: 135540 - DNA, 13 bp, Artificial Sequence
  Oligonucleotide for detection of SNP TSC0033837
tataaataacatt

SEQ ID NO: 135541 - DNA, 13 bp, Artificial Sequence
  Oligonucleotide for detection of SNP TSC0033837
aatgttgtttata

SEQ ID NO: 135542 - DNA, 13 bp, Artificial Sequence
  Oligonucleotide for detection of SNP TSC0033837
tataaacaacatt

SEQ ID NO: 135543 - DNA, 13 bp, Artificial Sequence
  Oligonucleotide for detection of SNP TSC0033837
aacgttatttata

SEQ ID NO: 135544 - DNA, 13 bp, Artificial Sequence
  Oligonucleotide for detection of SNP TSC0033837
tataaataacgtt

SEQ ID NO: 135545 - DNA, 13 bp, Artificial Sequence
  Oligonucleotide for detection of SNP TSC0033837
aacgttgtttata

SEQ ID NO: 135546 - DNA, 13 bp, Artificial Sequence
  Oligonucleotide for detection of SNP TSC0033837
tataaacaacgtt

SEQ ID NO: 135547 - DNA, 13 bp, Artificial Sequence
  Oligonucleotide for detection of SNP TSC0033838
atatgagatatty

SEQ ID NO: 135548 - DNA, 13 bp, Artificial Sequence
  Oligonucleotide for detection of SNP TSC0033838
raatatctcatat

SEQ ID NO: 135549 - DNA, 13 bp, Artificial Sequence
  Oligonucleotide for detection of SNP TSC0033838
atatgaaatatty

SEQ ID NO: 135550 - DNA, 13 bp, Artificial Sequence
  Oligonucleotide for detection of SNP TSC0033838
raatatttcatat

SEQ ID NO: 135551 - DNA, 13 bp, Artificial Sequence
  Oligonucleotide for detection of SNP TSC0033839
gaaaaggaggtta

SEQ ID NO: 135552 - DNA, 13 bp, Artificial Sequence
  Oligonucleotide for detection of SNP TSC0033839
taacctccttttc

SEQ ID NO: 135553 - DNA, 13 bp, Artificial Sequence
  Oligonucleotide for detection of SNP TSC0033839
gaaaagaaggtta

SEQ ID NO: 135554 - DNA, 13 bp, Artificial Sequence
  Oligonucleotide for detection of SNP TSC0033839
taaccttcttttc

SEQ ID NO: 135555 - DNA, 13 bp, Artificial Sequence
  Oligonucleotide for detection of SNP TSC0033840
gtagatatataat

SEQ ID NO: 135556 - DNA, 13 bp, Artificial Sequence
  Oligonucleotide for detection of SNP TSC0033840
attatatatctac

SEQ ID NO: 135557 - DNA, 13 bp, Artificial Sequence
  Oligonucleotide for detection of SNP TSC0033840
gtagatttataat

SEQ ID NO: 135558 - DNA, 13 bp, Artificial Sequence
  Oligonucleotide for detection of SNP TSC0033840
attataaatctac

SEQ ID NO: 135559 - DNA, 13 bp, Artificial Sequence
  Oligonucleotide for detection of SNP TSC0033840
attatatgtttgy

SEQ ID NO: 135560 - DNA, 13 bp, Artificial Sequence
  Oligonucleotide for detection of SNP TSC0033840
rcaaacatataat

SEQ ID NO: 135561 - DNA, 13 bp, Artificial Sequence
  Oligonucleotide for detection of SNP TSC0033840
attataggtttgy

SEQ ID NO: 135562 - DNA, 13 bp, Artificial Sequence
  Oligonucleotide for detection of SNP TSC0033840
rcaaacctataat

SEQ ID NO: 135563 - DNA, 13 bp, Artificial Sequence
  Oligonucleotide for detection of SNP TSC0033841
taagaggtgttgt

SEQ ID NO: 135564 - DNA, 13 bp, Artificial Sequence
  Oligonucleotide for detection of SNP TSC0033841
acaacacctctta

SEQ ID NO: 135565 - DNA, 13 bp, Artificial Sequence
  Oligonucleotide for detection of SNP TSC0033841
taagagttgttgt

SEQ ID NO: 135566 - DNA, 13 bp, Artificial Sequence
  Oligonucleotide for detection of SNP TSC0033841
acaacaactctta

SEQ ID NO: 135567 - DNA, 13 bp, Artificial Sequence
  Oligonucleotide for detection of SNP TSC0033841
taagaggcgttgt

SEQ ID NO: 135568 - DNA, 13 bp, Artificial Sequence
  Oligonucleotide for detection of SNP TSC0033841
acaacgcctctta

SEQ ID NO: 135569 - DNA, 13 bp, Artificial Sequence
  Oligonucleotide for detection of SNP TSC0033841
taagagtcgttgt

SEQ ID NO: 135570 - DNA, 13 bp, Artificial Sequence
  Oligonucleotide for detection of SNP TSC0033841
acaacgactctta

SEQ ID NO: 135571 - DNA, 13 bp, Artificial Sequence
  Oligonucleotide for detection of SNP TSC0033841
atagtgttttttg

SEQ ID NO: 135572 - DNA, 13 bp, Artificial Sequence
  Oligonucleotide for detection of SNP TSC0033841
caaaaaacactat

SEQ ID NO: 135573 - DNA, 13 bp, Artificial Sequence
  Oligonucleotide for detection of SNP TSC0033841
atagtgatttttg

SEQ ID NO: 135574 - DNA, 13 bp, Artificial Sequence
  Oligonucleotide for detection of SNP TSC0033841
caaaaatcactat

SEQ ID NO: 135575 - DNA, 13 bp, Artificial Sequence
  Oligonucleotide for detection of SNP TSC0033841
atagcgttttttg

SEQ ID NO: 135576 - DNA, 13 bp, Artificial Sequence
  Oligonucleotide for detection of SNP TSC0033841
caaaaaacgctat

SEQ ID NO: 135577 - DNA, 13 bp, Artificial Sequence
  Oligonucleotide for detection of SNP TSC0033841
atagcgatttttg

SEQ ID NO: 135578 - DNA, 13 bp, Artificial Sequence
  Oligonucleotide for detection of SNP TSC0033841
caaaaatcgctat

SEQ ID NO: 135579 - DNA, 13 bp, Artificial Sequence
  Oligonucleotide for detection of SNP TSC0033842
tagagagaattag

SEQ ID NO: 135580 - DNA, 13 bp, Artificial Sequence
  Oligonucleotide for detection of SNP TSC0033842
ctaattctctcta

SEQ ID NO: 135581 - DNA, 13 bp, Artificial Sequence
  Oligonucleotide for detection of SNP TSC0033842
tagagaaaattag

SEQ ID NO: 135582 - DNA, 13 bp, Artificial Sequence
  Oligonucleotide for detection of SNP TSC0033842
ctaattttctcta

SEQ ID NO: 135583 - DNA, 13 bp, Artificial Sequence
  Oligonucleotide for detection of SNP TSC0033843
tttgtaggtttta

SEQ ID NO: 135584 - DNA, 13 bp, Artificial Sequence
  Oligonucleotide for detection of SNP TSC0033843
taaaacctacaaa

SEQ ID NO: 135585 - DNA, 13 bp, Artificial Sequence
  Oligonucleotide for detection of SNP TSC0033843
tttgtatgtttta

SEQ ID NO: 135586 - DNA, 13 bp, Artificial Sequence
  Oligonucleotide for detection of SNP TSC0033843
taaaacatacaaa

SEQ ID NO: 135587 - DNA, 13 bp, Artificial Sequence
  Oligonucleotide for detection of SNP TSC0033843
tggagtttgtagg

SEQ ID NO: 135588 - DNA, 13 bp, Artificial Sequence
  Oligonucleotide for detection of SNP TSC0033843
cctacaaactcca

SEQ ID NO: 135589 - DNA, 13 bp, Artificial Sequence
  Oligonucleotide for detection of SNP TSC0033843
tggagtatgtagg

SEQ ID NO: 135590 - DNA, 13 bp, Artificial Sequence
  Oligonucleotide for detection of SNP TSC0033843
cctacatactcca

SEQ ID NO: 135591 - DNA, 13 bp, Artificial Sequence
  Oligonucleotide for detection of SNP TSC0033844
ggtggtatatgty

SEQ ID NO: 135592 - DNA, 13 bp, Artificial Sequence
  Oligonucleotide for detection of SNP TSC0033844
racatataccacc

SEQ ID NO: 135593 - DNA, 13 bp, Artificial Sequence
  Oligonucleotide for detection of SNP TSC0033844
ggtggtgtatgty

SEQ ID NO: 135594 - DNA, 13 bp, Artificial Sequence
  Oligonucleotide for detection of SNP TSC0033844
racatacaccacc

SEQ ID NO: 135595 - DNA, 13 bp, Artificial Sequence
  Oligonucleotide for detection of SNP TSC0033844
ggtggcgtatgty

SEQ ID NO: 135596 - DNA, 13 bp, Artificial Sequence
  Oligonucleotide for detection of SNP TSC0033844
racatacgccacc

SEQ ID NO: 135597 - DNA, 13 bp, Artificial Sequence
  Oligonucleotide for detection of SNP TSC0033844
ggtatgtgttaty

SEQ ID NO: 135598 - DNA, 13 bp, Artificial Sequence
  Oligonucleotide for detection of SNP TSC0033844
rataacacatacc

SEQ ID NO: 135599 - DNA, 13 bp, Artificial Sequence
  Oligonucleotide for detection of SNP TSC0033844
ggtatgcgttaty

SEQ ID NO: 135600 - DNA, 13 bp, Artificial Sequence
  Oligonucleotide for detection of SNP TSC0033844
rataacgcatacc

SEQ ID NO: 135601 - DNA, 13 bp, Artificial Sequence
  Oligonucleotide for detection of SNP TSC0033846
ttgaggggggtgg

SEQ ID NO: 135602 - DNA, 13 bp, Artificial Sequence
  Oligonucleotide for detection of SNP TSC0033846
ccacccccctcaa

SEQ ID NO: 135603 - DNA, 13 bp, Artificial Sequence
  Oligonucleotide for detection of SNP TSC0033846
tcgaggggggtgg

SEQ ID NO: 135604 - DNA, 13 bp, Artificial Sequence
  Oligonucleotide for detection of SNP TSC0033846
ccacccccctcga

SEQ ID NO: 135605 - DNA, 13 bp, Artificial Sequence
  Oligonucleotide for detection of SNP TSC0033846
ttgaggggggcgg

SEQ ID NO: 135606 - DNA, 13 bp, Artificial Sequence
  Oligonucleotide for detection of SNP TSC0033846
ccgcccccctcaa

SEQ ID NO: 135607 - DNA, 13 bp, Artificial Sequence
  Oligonucleotide for detection of SNP TSC0033846
tcgaggggggcgg

SEQ ID NO: 135608 - DNA, 13 bp, Artificial Sequence
  Oligonucleotide for detection of SNP TSC0033846
ccgcccccctcga

SEQ ID NO: 135609 - DNA, 13 bp, Artificial Sequence
  Oligonucleotide for detection of SNP TSC0033846
ttgttttttttgg

SEQ ID NO: 135610 - DNA, 13 bp, Artificial Sequence
  Oligonucleotide for detection of SNP TSC0033846
ccaaaaaaaacaa

SEQ ID NO: 135611 - DNA, 13 bp, Artificial Sequence
  Oligonucleotide for detection of SNP TSC0033846
tcgttttttttgg

SEQ ID NO: 135612 - DNA, 13 bp, Artificial Sequence
  Oligonucleotide for detection of SNP TSC0033846
ccaaaaaaaacga

SEQ ID NO: 135613 - DNA, 13 bp, Artificial Sequence
  Oligonucleotide for detection of SNP TSC0033846
ttgtttttttcgg

SEQ ID NO: 135614 - DNA, 13 bp, Artificial Sequence
  Oligonucleotide for detection of SNP TSC0033846
ccgaaaaaaacaa

SEQ ID NO: 135615 - DNA, 13 bp, Artificial Sequence
  Oligonucleotide for detection of SNP TSC0033846
tcgtttttttcgg

SEQ ID NO: 135616 - DNA, 13 bp, Artificial Sequence
  Oligonucleotide for detection of SNP TSC0033846
ccgaaaaaaacga

SEQ ID NO: 135617 - DNA, 13 bp, Artificial Sequence
  Oligonucleotide for detection of SNP TSC0033852
ttttaggggtaga

SEQ ID NO: 135618 - DNA, 13 bp, Artificial Sequence
  Oligonucleotide for detection of SNP TSC0033852
tctacccctaaaa

SEQ ID NO: 135619 - DNA, 13 bp, Artificial Sequence
  Oligonucleotide for detection of SNP TSC0033852
ttttagaggtaga

SEQ ID NO: 135620 - DNA, 13 bp, Artificial Sequence
  Oligonucleotide for detection of SNP TSC0033852
tctacctctaaaa

SEQ ID NO: 135621 - DNA, 13 bp, Artificial Sequence
  Oligonucleotide for detection of SNP TSC0033853
ttgagatgatgty

SEQ ID NO: 135622 - DNA, 13 bp, Artificial Sequence
  Oligonucleotide for detection of SNP TSC0033853
racatcatctcaa

SEQ ID NO: 135623 - DNA, 13 bp, Artificial Sequence
  Oligonucleotide for detection of SNP TSC0033853
ttgagacgatgty

SEQ ID NO: 135624 - DNA, 13 bp, Artificial Sequence
  Oligonucleotide for detection of SNP TSC0033853
racatcgtctcaa

SEQ ID NO: 135625 - DNA, 13 bp, Artificial Sequence
  Oligonucleotide for detection of SNP TSC0033853
ttgagatgacgty

SEQ ID NO: 135626 - DNA, 13 bp, Artificial Sequence
  Oligonucleotide for detection of SNP TSC0033853
racgtcatctcaa

SEQ ID NO: 135627 - DNA, 13 bp, Artificial Sequence
  Oligonucleotide for detection of SNP TSC0033853
ttgagacgacgty

SEQ ID NO: 135628 - DNA, 13 bp, Artificial Sequence
  Oligonucleotide for detection of SNP TSC0033853
racgtcgtctcaa

SEQ ID NO: 135629 - DNA, 13 bp, Artificial Sequence
  Oligonucleotide for detection of SNP TSC0033853
ggtgttgttttag

SEQ ID NO: 135630 - DNA, 13 bp, Artificial Sequence
  Oligonucleotide for detection of SNP TSC0033853
ctaaaacaacacc

SEQ ID NO: 135631 - DNA, 13 bp, Artificial Sequence
  Oligonucleotide for detection of SNP TSC0033853
ggtgttattttag

SEQ ID NO: 135632 - DNA, 13 bp, Artificial Sequence
  Oligonucleotide for detection of SNP TSC0033853
ctaaaataacacc

SEQ ID NO: 135633 - DNA, 13 bp, Artificial Sequence
  Oligonucleotide for detection of SNP TSC0033853
ggcgttgttttag

SEQ ID NO: 135634 - DNA, 13 bp, Artificial Sequence
  Oligonucleotide for detection of SNP TSC0033853
ctaaaacaacgcc

SEQ ID NO: 135635 - DNA, 13 bp, Artificial Sequence
  Oligonucleotide for detection of SNP TSC0033853
ggcgttattttag

SEQ ID NO: 135636 - DNA, 13 bp, Artificial Sequence
  Oligonucleotide for detection of SNP TSC0033853
ctaaaataacgcc

SEQ ID NO: 135637 - DNA, 13 bp, Artificial Sequence
  Oligonucleotide for detection of SNP TSC0033853
ggtgtcgttttag

SEQ ID NO: 135638 - DNA, 13 bp, Artificial Sequence
  Oligonucleotide for detection of SNP TSC0033853
ctaaaacgacacc

SEQ ID NO: 135639 - DNA, 13 bp, Artificial Sequence
  Oligonucleotide for detection of SNP TSC0033853
ggcgtcgttttag

SEQ ID NO: 135640 - DNA, 13 bp, Artificial Sequence
  Oligonucleotide for detection of SNP TSC0033853
ctaaaacgacgcc

SEQ ID NO: 135641 - DNA, 13 bp, Artificial Sequence
  Oligonucleotide for detection of SNP TSC0033854
tagtgtatatggt

SEQ ID NO: 135642 - DNA, 13 bp, Artificial Sequence
  Oligonucleotide for detection of SNP TSC0033854
accatatacacta

SEQ ID NO: 135643 - DNA, 13 bp, Artificial Sequence
  Oligonucleotide for detection of SNP TSC0033854
tagtgtttatggt

SEQ ID NO: 135644 - DNA, 13 bp, Artificial Sequence
  Oligonucleotide for detection of SNP TSC0033854
accataaacacta

SEQ ID NO: 135645 - DNA, 13 bp, Artificial Sequence
  Oligonucleotide for detection of SNP TSC0033854
attatatgtatta

SEQ ID NO: 135646 - DNA, 13 bp, Artificial Sequence
  Oligonucleotide for detection of SNP TSC0033854
taatacatataat

SEQ ID NO: 135647 - DNA, 13 bp, Artificial Sequence
  Oligonucleotide for detection of SNP TSC0033854
attataagtatta

SEQ ID NO: 135648 - DNA, 13 bp, Artificial Sequence
  Oligonucleotide for detection of SNP TSC0033854
taatacttataat

SEQ ID NO: 135649 - DNA, 13 bp, Artificial Sequence
  Oligonucleotide for detection of SNP TSC0033855
attttagttgaaa

SEQ ID NO: 135650 - DNA, 13 bp, Artificial Sequence
  Oligonucleotide for detection of SNP TSC0033855
tttcaactaaaat

SEQ ID NO: 135651 - DNA, 13 bp, Artificial Sequence
  Oligonucleotide for detection of SNP TSC0033855
attttaattgaaa

SEQ ID NO: 135652 - DNA, 13 bp, Artificial Sequence
  Oligonucleotide for detection of SNP TSC0033855
tttcaattaaaat

SEQ ID NO: 135653 - DNA, 13 bp, Artificial Sequence
  Oligonucleotide for detection of SNP TSC0033860
gaaattatttttg

SEQ ID NO: 135654 - DNA, 13 bp, Artificial Sequence
  Oligonucleotide for detection of SNP TSC0033860
caaaaataatttc

SEQ ID NO: 135655 - DNA, 13 bp, Artificial Sequence
  Oligonucleotide for detection of SNP TSC0033861
gaagaatggtaat

SEQ ID NO: 135656 - DNA, 13 bp, Artificial Sequence
  Oligonucleotide for detection of SNP TSC0033861
attaccattcttc

SEQ ID NO: 135657 - DNA, 13 bp, Artificial Sequence
  Oligonucleotide for detection of SNP TSC0033861
gaagaacggtaat

SEQ ID NO: 135658 - DNA, 13 bp, Artificial Sequence
  Oligonucleotide for detection of SNP TSC0033861
attaccgttcttc

SEQ ID NO: 135659 - DNA, 13 bp, Artificial Sequence
  Oligonucleotide for detection of SNP TSC0033862
gtttttaagaata

SEQ ID NO: 135660 - DNA, 13 bp, Artificial Sequence
  Oligonucleotide for detection of SNP TSC0033862
tattcttaaaaac

SEQ ID NO: 135661 - DNA, 13 bp, Artificial Sequence
  Oligonucleotide for detection of SNP TSC0033862
gtttttgagaata

SEQ ID NO: 135662 - DNA, 13 bp, Artificial Sequence
  Oligonucleotide for detection of SNP TSC0033862
tattctcaaaaac

SEQ ID NO: 135663 - DNA, 13 bp, Artificial Sequence
  Oligonucleotide for detection of SNP TSC0033863
atttgtataaaag

SEQ ID NO: 135664 - DNA, 13 bp, Artificial Sequence
  Oligonucleotide for detection of SNP TSC0033863
cttttatacaaat

SEQ ID NO: 135665 - DNA, 13 bp, Artificial Sequence
  Oligonucleotide for detection of SNP TSC0033863
atttgtttaaaag

SEQ ID NO: 135666 - DNA, 13 bp, Artificial Sequence
  Oligonucleotide for detection of SNP TSC0033863
cttttaaacaaat

SEQ ID NO: 135667 - DNA, 13 bp, Artificial Sequence
  Oligonucleotide for detection of SNP TSC0033863
tttttgtatagat

SEQ ID NO: 135668 - DNA, 13 bp, Artificial Sequence
  Oligonucleotide for detection of SNP TSC0033863
atctatacaaaaa

SEQ ID NO: 135669 - DNA, 13 bp, Artificial Sequence
  Oligonucleotide for detection of SNP TSC0033863
tttttggatagat

SEQ ID NO: 135670 - DNA, 13 bp, Artificial Sequence
  Oligonucleotide for detection of SNP TSC0033863
atctatccaaaaa

SEQ ID NO: 135671 - DNA, 13 bp, Artificial Sequence
  Oligonucleotide for detection of SNP TSC0033866
tagtttagttatt

SEQ ID NO: 135672 - DNA, 13 bp, Artificial Sequence
  Oligonucleotide for detection of SNP TSC0033866
aataactaaacta

SEQ ID NO: 135673 - DNA, 13 bp, Artificial Sequence
  Oligonucleotide for detection of SNP TSC0033866
tagttcggttatt

SEQ ID NO: 135674 - DNA, 13 bp, Artificial Sequence
  Oligonucleotide for detection of SNP TSC0033866
aataaccgaacta

SEQ ID NO: 135675 - DNA, 13 bp, Artificial Sequence
  Oligonucleotide for detection of SNP TSC0033866
agtagttgagtta

SEQ ID NO: 135676 - DNA, 13 bp, Artificial Sequence
  Oligonucleotide for detection of SNP TSC0033866
taactcaactact

SEQ ID NO: 135677 - DNA, 13 bp, Artificial Sequence
  Oligonucleotide for detection of SNP TSC0033866
agtagtcgagtta

SEQ ID NO: 135678 - DNA, 13 bp, Artificial Sequence
  Oligonucleotide for detection of SNP TSC0033866
taactcgactact

SEQ ID NO: 135679 - DNA, 13 bp, Artificial Sequence
  Oligonucleotide for detection of SNP TSC0033869
tagtgtagattag

SEQ ID NO: 135680 - DNA, 13 bp, Artificial Sequence
  Oligonucleotide for detection of SNP TSC0033869
ctaatctacacta

SEQ ID NO: 135681 - DNA, 13 bp, Artificial Sequence
  Oligonucleotide for detection of SNP TSC0033869
tagtgtggattag

SEQ ID NO: 135682 - DNA, 13 bp, Artificial Sequence
  Oligonucleotide for detection of SNP TSC0033869
ctaatccacacta

SEQ ID NO: 135683 - DNA, 13 bp, Artificial Sequence
  Oligonucleotide for detection of SNP TSC0033870
aatggagatttat

SEQ ID NO: 135684 - DNA, 13 bp, Artificial Sequence
  Oligonucleotide for detection of SNP TSC0033870
ataaatctccatt

SEQ ID NO: 135685 - DNA, 13 bp, Artificial Sequence
  Oligonucleotide for detection of SNP TSC0033870
aatggaaatttat

SEQ ID NO: 135686 - DNA, 13 bp, Artificial Sequence
  Oligonucleotide for detection of SNP TSC0033870
ataaatttccatt

SEQ ID NO: 135687 - DNA, 13 bp, Artificial Sequence
  Oligonucleotide for detection of SNP TSC0033871
agatatatgtata

SEQ ID NO: 135688 - DNA, 13 bp, Artificial Sequence
  Oligonucleotide for detection of SNP TSC0033871
tatacatatatct

SEQ ID NO: 135689 - DNA, 13 bp, Artificial Sequence
  Oligonucleotide for detection of SNP TSC0033871
agatatgcgtata

SEQ ID NO: 135690 - DNA, 13 bp, Artificial Sequence
  Oligonucleotide for detection of SNP TSC0033871
tatacgcatatct

SEQ ID NO: 135691 - DNA, 13 bp, Artificial Sequence
  Oligonucleotide for detection of SNP TSC0033871
agatatacgtata

SEQ ID NO: 135692 - DNA, 13 bp, Artificial Sequence
  Oligonucleotide for detection of SNP TSC0033871
tatacgtatatct

SEQ ID NO: 135693 - DNA, 13 bp, Artificial Sequence
  Oligonucleotide for detection of SNP TSC0033873
attatttgttttt

SEQ ID NO: 135694 - DNA, 13 bp, Artificial Sequence
  Oligonucleotide for detection of SNP TSC0033873
aaaaacaaataat

SEQ ID NO: 135695 - DNA, 13 bp, Artificial Sequence
  Oligonucleotide for detection of SNP TSC0033873
attattggttttt

SEQ ID NO: 135696 - DNA, 13 bp, Artificial Sequence
  Oligonucleotide for detection of SNP TSC0033873
aaaaaccaataat

SEQ ID NO: 135697 - DNA, 13 bp, Artificial Sequence
  Oligonucleotide for detection of SNP TSC0033873
attattcgttttt

SEQ ID NO: 135698 - DNA, 13 bp, Artificial Sequence
  Oligonucleotide for detection of SNP TSC0033873
aaaaacgaataat

SEQ ID NO: 135699 - DNA, 13 bp, Artificial Sequence
  Oligonucleotide for detection of SNP TSC0033873
aaaaatgagtagt

SEQ ID NO: 135700 - DNA, 13 bp, Artificial Sequence
  Oligonucleotide for detection of SNP TSC0033873
actactcattttt

SEQ ID NO: 135701 - DNA, 13 bp, Artificial Sequence
  Oligonucleotide for detection of SNP TSC0033873
aaaaattagtagt

SEQ ID NO: 135702 - DNA, 13 bp, Artificial Sequence
  Oligonucleotide for detection of SNP TSC0033873
actactaattttt

SEQ ID NO: 135703 - DNA, 13 bp, Artificial Sequence
  Oligonucleotide for detection of SNP TSC0033873
aaaaacgagtagt

SEQ ID NO: 135704 - DNA, 13 bp, Artificial Sequence
  Oligonucleotide for detection of SNP TSC0033873
actactcgttttt

SEQ ID NO: 135705 - DNA, 13 bp, Artificial Sequence
  Oligonucleotide for detection of SNP TSC0033874
gaagggtgaagga

SEQ ID NO: 135706 - DNA, 13 bp, Artificial Sequence
  Oligonucleotide for detection of SNP TSC0033874
tccttcacccttc

SEQ ID NO: 135707 - DNA, 13 bp, Artificial Sequence
  Oligonucleotide for detection of SNP TSC0033874
gaagggcgaagga

SEQ ID NO: 135708 - DNA, 13 bp, Artificial Sequence
  Oligonucleotide for detection of SNP TSC0033874
tccttcgcccttc

SEQ ID NO: 135709 - DNA, 13 bp, Artificial Sequence
  Oligonucleotide for detection of SNP TSC0033880
aagatttttttgt

SEQ ID NO: 135710 - DNA, 13 bp, Artificial Sequence
  Oligonucleotide for detection of SNP TSC0033880
acaaaaaaatctt

SEQ ID NO: 135711 - DNA, 13 bp, Artificial Sequence
  Oligonucleotide for detection of SNP TSC0033880
aagattgttttgt

SEQ ID NO: 135712 - DNA, 13 bp, Artificial Sequence
  Oligonucleotide for detection of SNP TSC0033880
acaaaacaatctt

SEQ ID NO: 135713 - DNA, 13 bp, Artificial Sequence
  Oligonucleotide for detection of SNP TSC0033880
ataaaggagtttt

SEQ ID NO: 135714 - DNA, 13 bp, Artificial Sequence
  Oligonucleotide for detection of SNP TSC0033880
aaaactcctttat

SEQ ID NO: 135715 - DNA, 13 bp, Artificial Sequence
  Oligonucleotide for detection of SNP TSC0033880
ataaagtagtttt

SEQ ID NO: 135716 - DNA, 13 bp, Artificial Sequence
  Oligonucleotide for detection of SNP TSC0033880
aaaactactttat

SEQ ID NO: 135717 - DNA, 13 bp, Artificial Sequence
  Oligonucleotide for detection of SNP TSC0033881
tgggatgataggy

SEQ ID NO: 135718 - DNA, 13 bp, Artificial Sequence
  Oligonucleotide for detection of SNP TSC0033881
rcctatcatccca

SEQ ID NO: 135719 - DNA, 13 bp, Artificial Sequence
  Oligonucleotide for detection of SNP TSC0033885
tatatgtgggaty

SEQ ID NO: 135720 - DNA, 13 bp, Artificial Sequence
  Oligonucleotide for detection of SNP TSC0033885
ratcccacatata

SEQ ID NO: 135721 - DNA, 13 bp, Artificial Sequence
  Oligonucleotide for detection of SNP TSC0033885
tatatgggggaty

SEQ ID NO: 135722 - DNA, 13 bp, Artificial Sequence
  Oligonucleotide for detection of SNP TSC0033885
ratcccccatata

SEQ ID NO: 135723 - DNA, 13 bp, Artificial Sequence
  Oligonucleotide for detection of SNP TSC0033885
tatatgcgggaty

SEQ ID NO: 135724 - DNA, 13 bp, Artificial Sequence
  Oligonucleotide for detection of SNP TSC0033885
ratcccgcatata

SEQ ID NO: 135725 - DNA, 13 bp, Artificial Sequence
  Oligonucleotide for detection of SNP TSC0033885
ggttttgtatgtg

SEQ ID NO: 135726 - DNA, 13 bp, Artificial Sequence
  Oligonucleotide for detection of SNP TSC0033885
cacatacaaaacc

SEQ ID NO: 135727 - DNA, 13 bp, Artificial Sequence
  Oligonucleotide for detection of SNP TSC0033885
ggttttttatgtg

SEQ ID NO: 135728 - DNA, 13 bp, Artificial Sequence
  Oligonucleotide for detection of SNP TSC0033885
cacataaaaaacc

SEQ ID NO: 135729 - DNA, 13 bp, Artificial Sequence
  Oligonucleotide for detection of SNP TSC0033885
ggtttcgtatgtg

SEQ ID NO: 135730 - DNA, 13 bp, Artificial Sequence
  Oligonucleotide for detection of SNP TSC0033885
cacatacgaaacc

SEQ ID NO: 135731 - DNA, 13 bp, Artificial Sequence
  Oligonucleotide for detection of SNP TSC0033890
tatgtaagtatty

SEQ ID NO: 135732 - DNA, 13 bp, Artificial Sequence
  Oligonucleotide for detection of SNP TSC0033890
raatacttacata

SEQ ID NO: 135733 - DNA, 13 bp, Artificial Sequence
  Oligonucleotide for detection of SNP TSC0033890
tatgtaggtatty

SEQ ID NO: 135734 - DNA, 13 bp, Artificial Sequence
  Oligonucleotide for detection of SNP TSC0033890
raatacctacata

SEQ ID NO: 135735 - DNA, 13 bp, Artificial Sequence
  Oligonucleotide for detection of SNP TSC0033892
ttgataggtaata

SEQ ID NO: 135736 - DNA, 13 bp, Artificial Sequence
  Oligonucleotide for detection of SNP TSC0033892
tattacctatcaa

SEQ ID NO: 135737 - DNA, 13 bp, Artificial Sequence
  Oligonucleotide for detection of SNP TSC0033892
ttgataagtaata

SEQ ID NO: 135738 - DNA, 13 bp, Artificial Sequence
  Oligonucleotide for detection of SNP TSC0033892
tattacttatcaa

SEQ ID NO: 135739 - DNA, 13 bp, Artificial Sequence
  Oligonucleotide for detection of SNP TSC0033897
ggggttattgtta

SEQ ID NO: 135740 - DNA, 13 bp, Artificial Sequence
  Oligonucleotide for detection of SNP TSC0033897
taacaataacccc

SEQ ID NO: 135741 - DNA, 13 bp, Artificial Sequence
  Oligonucleotide for detection of SNP TSC0033897
ggggttgttgtta

SEQ ID NO: 135742 - DNA, 13 bp, Artificial Sequence
  Oligonucleotide for detection of SNP TSC0033897
taacaacaacccc

SEQ ID NO: 135743 - DNA, 13 bp, Artificial Sequence
  Oligonucleotide for detection of SNP TSC0033897
ggggtcgttgtta

SEQ ID NO: 135744 - DNA, 13 bp, Artificial Sequence
  Oligonucleotide for detection of SNP TSC0033897
taacaacgacccc

SEQ ID NO: 135745 - DNA, 13 bp, Artificial Sequence
  Oligonucleotide for detection of SNP TSC0033897
tgatagtgattty

SEQ ID NO: 135746 - DNA, 13 bp, Artificial Sequence
  Oligonucleotide for detection of SNP TSC0033897
raaatcactatca

SEQ ID NO: 135747 - DNA, 13 bp, Artificial Sequence
  Oligonucleotide for detection of SNP TSC0033897
tgatagcgattty

SEQ ID NO: 135748 - DNA, 13 bp, Artificial Sequence
  Oligonucleotide for detection of SNP TSC0033897
raaatcgctatca

SEQ ID NO: 135749 - DNA, 13 bp, Artificial Sequence
  Oligonucleotide for detection of SNP TSC0033901
ttattggtgttaa

SEQ ID NO: 135750 - DNA, 13 bp, Artificial Sequence
  Oligonucleotide for detection of SNP TSC0033901
ttaacaccaataa

SEQ ID NO: 135751 - DNA, 13 bp, Artificial Sequence
  Oligonucleotide for detection of SNP TSC0033901
ttattgttgttaa

SEQ ID NO: 135752 - DNA, 13 bp, Artificial Sequence
  Oligonucleotide for detection of SNP TSC0033901
ttaacaacaataa

SEQ ID NO: 135753 - DNA, 13 bp, Artificial Sequence
  Oligonucleotide for detection of SNP TSC0033901
ttaatattaatgg

SEQ ID NO: 135754 - DNA, 13 bp, Artificial Sequence
  Oligonucleotide for detection of SNP TSC0033901
ccattaatattaa

SEQ ID NO: 135755 - DNA, 13 bp, Artificial Sequence
  Oligonucleotide for detection of SNP TSC0033901
ttaataataatgg

SEQ ID NO: 135756 - DNA, 13 bp, Artificial Sequence
  Oligonucleotide for detection of SNP TSC0033901
ccattattattaa

SEQ ID NO: 135757 - DNA, 13 bp, Artificial Sequence
  Oligonucleotide for detection of SNP TSC0033904
gttaaaataggtg

SEQ ID NO: 135758 - DNA, 13 bp, Artificial Sequence
  Oligonucleotide for detection of SNP TSC0033904
cacctattttaac

SEQ ID NO: 135759 - DNA, 13 bp, Artificial Sequence
  Oligonucleotide for detection of SNP TSC0033904
gttaaagtaggtg

SEQ ID NO: 135760 - DNA, 13 bp, Artificial Sequence
  Oligonucleotide for detection of SNP TSC0033904
cacctactttaac

SEQ ID NO: 135761 - DNA, 13 bp, Artificial Sequence
  Oligonucleotide for detection of SNP TSC0033907
tattgaatgttay

SEQ ID NO: 135762 - DNA, 13 bp, Artificial Sequence
  Oligonucleotide for detection of SNP TSC0033907
rtaacattcaata

SEQ ID NO: 135763 - DNA, 13 bp, Artificial Sequence
  Oligonucleotide for detection of SNP TSC0033907
tattgagtgttay

SEQ ID NO: 135764 - DNA, 13 bp, Artificial Sequence
  Oligonucleotide for detection of SNP TSC0033907
rtaacactcaata

SEQ ID NO: 135765 - DNA, 13 bp, Artificial Sequence
  Oligonucleotide for detection of SNP TSC0033907
tatcgaatgttay

SEQ ID NO: 135766 - DNA, 13 bp, Artificial Sequence
  Oligonucleotide for detection of SNP TSC0033907
rtaacattcgata

SEQ ID NO: 135767 - DNA, 13 bp, Artificial Sequence
  Oligonucleotide for detection of SNP TSC0033907
tatcgagtgttay

SEQ ID NO: 135768 - DNA, 13 bp, Artificial Sequence
  Oligonucleotide for detection of SNP TSC0033907
rtaacactcgata

SEQ ID NO: 135769 - DNA, 13 bp, Artificial Sequence
  Oligonucleotide for detection of SNP TSC0033909
tttggatattttt

SEQ ID NO: 135770 - DNA, 13 bp, Artificial Sequence
  Oligonucleotide for detection of SNP TSC0033909
aaaaatatccaaa

SEQ ID NO: 135771 - DNA, 13 bp, Artificial Sequence
  Oligonucleotide for detection of SNP TSC0033909
aaagatgtttagg

SEQ ID NO: 135772 - DNA, 13 bp, Artificial Sequence
  Oligonucleotide for detection of SNP TSC0033909
cctaaacatcttt

SEQ ID NO: 135773 - DNA, 13 bp, Artificial Sequence
  Oligonucleotide for detection of SNP TSC0033910
tgagggataggty

SEQ ID NO: 135774 - DNA, 13 bp, Artificial Sequence
  Oligonucleotide for detection of SNP TSC0033910
racctatccctca

SEQ ID NO: 135775 - DNA, 13 bp, Artificial Sequence
  Oligonucleotide for detection of SNP TSC0033910
tgaggggtaggty

SEQ ID NO: 135776 - DNA, 13 bp, Artificial Sequence
  Oligonucleotide for detection of SNP TSC0033910
racctacccctca

SEQ ID NO: 135777 - DNA, 13 bp, Artificial Sequence
  Oligonucleotide for detection of SNP TSC0033913
ttttttattgtat

SEQ ID NO: 135778 - DNA, 13 bp, Artificial Sequence
  Oligonucleotide for detection of SNP TSC0033913
atacaataaaaaa

SEQ ID NO: 135779 - DNA, 13 bp, Artificial Sequence
  Oligonucleotide for detection of SNP TSC0033913
ttttttgttgtat

SEQ ID NO: 135780 - DNA, 13 bp, Artificial Sequence
  Oligonucleotide for detection of SNP TSC0033913
atacaacaaaaaa

SEQ ID NO: 135781 - DNA, 13 bp, Artificial Sequence
  Oligonucleotide for detection of SNP TSC0033913
tttttcgttgtat

SEQ ID NO: 135782 - DNA, 13 bp, Artificial Sequence
  Oligonucleotide for detection of SNP TSC0033913
atacaacgaaaaa

SEQ ID NO: 135783 - DNA, 13 bp, Artificial Sequence
  Oligonucleotide for detection of SNP TSC0033913
atataatgaaaaa

SEQ ID NO: 135784 - DNA, 13 bp, Artificial Sequence
  Oligonucleotide for detection of SNP TSC0033913
tttttcattatat

SEQ ID NO: 135785 - DNA, 13 bp, Artificial Sequence
  Oligonucleotide for detection of SNP TSC0033913
atataacgaaaaa

SEQ ID NO: 135786 - DNA, 13 bp, Artificial Sequence
  Oligonucleotide for detection of SNP TSC0033913
tttttcgttatat

SEQ ID NO: 135787 - DNA, 13 bp, Artificial Sequence
  Oligonucleotide for detection of SNP TSC0033914
tagtgtagggtga

SEQ ID NO: 135788 - DNA, 13 bp, Artificial Sequence
  Oligonucleotide for detection of SNP TSC0033914
tcaccctacacta

SEQ ID NO: 135789 - DNA, 13 bp, Artificial Sequence
  Oligonucleotide for detection of SNP TSC0033914
tagtgtggggtga

SEQ ID NO: 135790 - DNA, 13 bp, Artificial Sequence
  Oligonucleotide for detection of SNP TSC0033914
tcaccccacacta

SEQ ID NO: 135791 - DNA, 13 bp, Artificial Sequence
  Oligonucleotide for detection of SNP TSC0033915
tgtttttgttagt

SEQ ID NO: 135792 - DNA, 13 bp, Artificial Sequence
  Oligonucleotide for detection of SNP TSC0033915
actaacaaaaaca

SEQ ID NO: 135793 - DNA, 13 bp, Artificial Sequence
  Oligonucleotide for detection of SNP TSC0033915
tgttttcgttagt

SEQ ID NO: 135794 - DNA, 13 bp, Artificial Sequence
  Oligonucleotide for detection of SNP TSC0033915
actaacgaaaaca

SEQ ID NO: 135795 - DNA, 13 bp, Artificial Sequence
  Oligonucleotide for detection of SNP TSC0033915
attgatgggagta

SEQ ID NO: 135796 - DNA, 13 bp, Artificial Sequence
  Oligonucleotide for detection of SNP TSC0033915
tactcccatcaat

SEQ ID NO: 135797 - DNA, 13 bp, Artificial Sequence
  Oligonucleotide for detection of SNP TSC0033915
attgataggagta

SEQ ID NO: 135798 - DNA, 13 bp, Artificial Sequence
  Oligonucleotide for detection of SNP TSC0033915
tactcctatcaat

SEQ ID NO: 135799 - DNA, 13 bp, Artificial Sequence
  Oligonucleotide for detection of SNP TSC0033915
attgacgggagta

SEQ ID NO: 135800 - DNA, 13 bp, Artificial Sequence
  Oligonucleotide for detection of SNP TSC0033915
tactcccgtcaat

SEQ ID NO: 135801 - DNA, 13 bp, Artificial Sequence
  Oligonucleotide for detection of SNP TSC0033916
gtaaagaggatat

SEQ ID NO: 135802 - DNA, 13 bp, Artificial Sequence
  Oligonucleotide for detection of SNP TSC0033916
atatcctctttac

SEQ ID NO: 135803 - DNA, 13 bp, Artificial Sequence
  Oligonucleotide for detection of SNP TSC0033916
gtaaaggggatat

SEQ ID NO: 135804 - DNA, 13 bp, Artificial Sequence
  Oligonucleotide for detection of SNP TSC0033916
atatcccctttac

SEQ ID NO: 135805 - DNA, 13 bp, Artificial Sequence
  Oligonucleotide for detection of SNP TSC0033917
ttatatggtataa

SEQ ID NO: 135806 - DNA, 13 bp, Artificial Sequence
  Oligonucleotide for detection of SNP TSC0033917
ttataccatataa

SEQ ID NO: 135807 - DNA, 13 bp, Artificial Sequence
  Oligonucleotide for detection of SNP TSC0033917
ttatatagtataa

SEQ ID NO: 135808 - DNA, 13 bp, Artificial Sequence
  Oligonucleotide for detection of SNP TSC0033917
ttatactatataa

SEQ ID NO: 135809 - DNA, 13 bp, Artificial Sequence
  Oligonucleotide for detection of SNP TSC0033918
atataaaatatay

SEQ ID NO: 135810 - DNA, 13 bp, Artificial Sequence
  Oligonucleotide for detection of SNP TSC0033918
rtatattttatat

SEQ ID NO: 135811 - DNA, 13 bp, Artificial Sequence
  Oligonucleotide for detection of SNP TSC0033918
atataatatatay

SEQ ID NO: 135812 - DNA, 13 bp, Artificial Sequence
  Oligonucleotide for detection of SNP TSC0033918
rtatatattatat

SEQ ID NO: 135813 - DNA, 13 bp, Artificial Sequence
  Oligonucleotide for detection of SNP TSC0033918
gtatattttatat

SEQ ID NO: 135814 - DNA, 13 bp, Artificial Sequence
  Oligonucleotide for detection of SNP TSC0033918
atataaaatatac

SEQ ID NO: 135815 - DNA, 13 bp, Artificial Sequence
  Oligonucleotide for detection of SNP TSC0033918
gtatatattatat

SEQ ID NO: 135816 - DNA, 13 bp, Artificial Sequence
  Oligonucleotide for detection of SNP TSC0033918
atataatatatac

SEQ ID NO: 135817 - DNA, 13 bp, Artificial Sequence
  Oligonucleotide for detection of SNP TSC0033919
gttttggttagtt

SEQ ID NO: 135818 - DNA, 13 bp, Artificial Sequence
  Oligonucleotide for detection of SNP TSC0033919
aactaaccaaaac

SEQ ID NO: 135819 - DNA, 13 bp, Artificial Sequence
  Oligonucleotide for detection of SNP TSC0033920
ttttaattagttg

SEQ ID NO: 135820 - DNA, 13 bp, Artificial Sequence
  Oligonucleotide for detection of SNP TSC0033920
caactaattaaaa

SEQ ID NO: 135821 - DNA, 13 bp, Artificial Sequence
  Oligonucleotide for detection of SNP TSC0033920
tagttagttggga

SEQ ID NO: 135822 - DNA, 13 bp, Artificial Sequence
  Oligonucleotide for detection of SNP TSC0033920
tcccaactaacta

SEQ ID NO: 135823 - DNA, 13 bp, Artificial Sequence
  Oligonucleotide for detection of SNP TSC0033920
tagttatttggga

SEQ ID NO: 135824 - DNA, 13 bp, Artificial Sequence
  Oligonucleotide for detection of SNP TSC0033920
tcccaaataacta

SEQ ID NO: 135825 - DNA, 13 bp, Artificial Sequence
  Oligonucleotide for detection of SNP TSC0033921
attaaagtagtat

SEQ ID NO: 135826 - DNA, 13 bp, Artificial Sequence
  Oligonucleotide for detection of SNP TSC0033921
atactactttaat

SEQ ID NO: 135827 - DNA, 13 bp, Artificial Sequence
  Oligonucleotide for detection of SNP TSC0033921
attaaaatagtat

SEQ ID NO: 135828 - DNA, 13 bp, Artificial Sequence
  Oligonucleotide for detection of SNP TSC0033921
atactattttaat

SEQ ID NO: 135829 - DNA, 13 bp, Artificial Sequence
  Oligonucleotide for detection of SNP TSC0033922
ttttattgtttag

SEQ ID NO: 135830 - DNA, 13 bp, Artificial Sequence
  Oligonucleotide for detection of SNP TSC0033922
ctaaacaataaaa

SEQ ID NO: 135831 - DNA, 13 bp, Artificial Sequence
  Oligonucleotide for detection of SNP TSC0033922
ttttatcgtttag

SEQ ID NO: 135832 - DNA, 13 bp, Artificial Sequence
  Oligonucleotide for detection of SNP TSC0033922
ctaaacgataaaa

SEQ ID NO: 135833 - DNA, 13 bp, Artificial Sequence
  Oligonucleotide for detection of SNP TSC0033923
ggtttcgatttty

SEQ ID NO: 135834 - DNA, 13 bp, Artificial Sequence
  Oligonucleotide for detection of SNP TSC0033923
raaaatcgaaacc

SEQ ID NO: 135835 - DNA, 13 bp, Artificial Sequence
  Oligonucleotide for detection of SNP TSC0033923
ggagatggagaty

SEQ ID NO: 135836 - DNA, 13 bp, Artificial Sequence
  Oligonucleotide for detection of SNP TSC0033923
ratctccatctcc

SEQ ID NO: 135837 - DNA, 13 bp, Artificial Sequence
  Oligonucleotide for detection of SNP TSC0033923
ggagattgagaty

SEQ ID NO: 135838 - DNA, 13 bp, Artificial Sequence
  Oligonucleotide for detection of SNP TSC0033923
ratctcaatctcc

SEQ ID NO: 135839 - DNA, 13 bp, Artificial Sequence
  Oligonucleotide for detection of SNP TSC0033923
ggagatcgagaty

SEQ ID NO: 135840 - DNA, 13 bp, Artificial Sequence
  Oligonucleotide for detection of SNP TSC0033923
ratctcgatctcc

SEQ ID NO: 135841 - DNA, 13 bp, Artificial Sequence
  Oligonucleotide for detection of SNP TSC0033925
ggtggagagttat

SEQ ID NO: 135842 - DNA, 13 bp, Artificial Sequence
  Oligonucleotide for detection of SNP TSC0033925
ataactctccacc

SEQ ID NO: 135843 - DNA, 13 bp, Artificial Sequence
  Oligonucleotide for detection of SNP TSC0033925
ggtggaaagttat

SEQ ID NO: 135844 - DNA, 13 bp, Artificial Sequence
  Oligonucleotide for detection of SNP TSC0033925
ataactttccacc

SEQ ID NO: 135845 - DNA, 13 bp, Artificial Sequence
  Oligonucleotide for detection of SNP TSC0033926
tgtgtttttatgy

SEQ ID NO: 135846 - DNA, 13 bp, Artificial Sequence
  Oligonucleotide for detection of SNP TSC0033926
rcataaaaacaca

SEQ ID NO: 135847 - DNA, 13 bp, Artificial Sequence
  Oligonucleotide for detection of SNP TSC0033926
tgcgttattatgy

SEQ ID NO: 135848 - DNA, 13 bp, Artificial Sequence
  Oligonucleotide for detection of SNP TSC0033926
rcataataacgca

SEQ ID NO: 135849 - DNA, 13 bp, Artificial Sequence
  Oligonucleotide for detection of SNP TSC0033926
tgcgtttttatgy

SEQ ID NO: 135850 - DNA, 13 bp, Artificial Sequence
  Oligonucleotide for detection of SNP TSC0033926
rcataaaaacgca

SEQ ID NO: 135851 - DNA, 13 bp, Artificial Sequence
  Oligonucleotide for detection of SNP TSC0033926
gtatggtggtgta

SEQ ID NO: 135852 - DNA, 13 bp, Artificial Sequence
  Oligonucleotide for detection of SNP TSC0033926
tacaccaccatac

SEQ ID NO: 135853 - DNA, 13 bp, Artificial Sequence
  Oligonucleotide for detection of SNP TSC0033926
gtatgggggtgta

SEQ ID NO: 135854 - DNA, 13 bp, Artificial Sequence
  Oligonucleotide for detection of SNP TSC0033926
tacacccccatac

SEQ ID NO: 135855 - DNA, 13 bp, Artificial Sequence
  Oligonucleotide for detection of SNP TSC0033926
gtatggtggcgta

SEQ ID NO: 135856 - DNA, 13 bp, Artificial Sequence
  Oligonucleotide for detection of SNP TSC0033926
tacgccaccatac

SEQ ID NO: 135857 - DNA, 13 bp, Artificial Sequence
  Oligonucleotide for detection of SNP TSC0033926
gtatgggggcgta

SEQ ID NO: 135858 - DNA, 13 bp, Artificial Sequence
  Oligonucleotide for detection of SNP TSC0033926
tacgcccccatac

SEQ ID NO: 135859 - DNA, 13 bp, Artificial Sequence
  Oligonucleotide for detection of SNP TSC0033927
tttattaatttga

SEQ ID NO: 135860 - DNA, 13 bp, Artificial Sequence
  Oligonucleotide for detection of SNP TSC0033927
tcaaattaataaa

SEQ ID NO: 135861 - DNA, 13 bp, Artificial Sequence
  Oligonucleotide for detection of SNP TSC0033927
ttaggttaatgaa

SEQ ID NO: 135862 - DNA, 13 bp, Artificial Sequence
  Oligonucleotide for detection of SNP TSC0033927
ttcattaacctaa

SEQ ID NO: 135863 - DNA, 13 bp, Artificial Sequence
  Oligonucleotide for detection of SNP TSC0033927
ttaggtgaatgaa

SEQ ID NO: 135864 - DNA, 13 bp, Artificial Sequence
  Oligonucleotide for detection of SNP TSC0033927
ttcattcacctaa

SEQ ID NO: 135865 - DNA, 13 bp, Artificial Sequence
  Oligonucleotide for detection of SNP TSC0033928
gttaatatataga

SEQ ID NO: 135866 - DNA, 13 bp, Artificial Sequence
  Oligonucleotide for detection of SNP TSC0033928
tctatatattaac

SEQ ID NO: 135867 - DNA, 13 bp, Artificial Sequence
  Oligonucleotide for detection of SNP TSC0033928
gttaatgtataga

SEQ ID NO: 135868 - DNA, 13 bp, Artificial Sequence
  Oligonucleotide for detection of SNP TSC0033928
tctatacattaac

SEQ ID NO: 135869 - DNA, 13 bp, Artificial Sequence
  Oligonucleotide for detection of SNP TSC0033928
gttaacgtataga

SEQ ID NO: 135870 - DNA, 13 bp, Artificial Sequence
  Oligonucleotide for detection of SNP TSC0033928
tctatacgttaac

SEQ ID NO: 135871 - DNA, 13 bp, Artificial Sequence
  Oligonucleotide for detection of SNP TSC0033928
tttatatgttagy

SEQ ID NO: 135872 - DNA, 13 bp, Artificial Sequence
  Oligonucleotide for detection of SNP TSC0033928
rctaacatataaa

SEQ ID NO: 135873 - DNA, 13 bp, Artificial Sequence
  Oligonucleotide for detection of SNP TSC0033928
tttatacgttagy

SEQ ID NO: 135874 - DNA, 13 bp, Artificial Sequence
  Oligonucleotide for detection of SNP TSC0033928
rctaacgtataaa

SEQ ID NO: 135875 - DNA, 13 bp, Artificial Sequence
  Oligonucleotide for detection of SNP TSC0033930
gttttatgtttty

SEQ ID NO: 135876 - DNA, 13 bp, Artificial Sequence
  Oligonucleotide for detection of SNP TSC0033930
raaaacataaaac

SEQ ID NO: 135877 - DNA, 13 bp, Artificial Sequence
  Oligonucleotide for detection of SNP TSC0033930
gttttacgtttty

SEQ ID NO: 135878 - DNA, 13 bp, Artificial Sequence
  Oligonucleotide for detection of SNP TSC0033930
raaaacgtaaaac

SEQ ID NO: 135879 - DNA, 13 bp, Artificial Sequence
  Oligonucleotide for detection of SNP TSC0033930
gaaggtgtgaagy

SEQ ID NO: 135880 - DNA, 13 bp, Artificial Sequence
  Oligonucleotide for detection of SNP TSC0033930
rcttcacaccttc

SEQ ID NO: 135881 - DNA, 13 bp, Artificial Sequence
  Oligonucleotide for detection of SNP TSC0033930
gaaggtatgaagy

SEQ ID NO: 135882 - DNA, 13 bp, Artificial Sequence
  Oligonucleotide for detection of SNP TSC0033930
rcttcataccttc

SEQ ID NO: 135883 - DNA, 13 bp, Artificial Sequence
  Oligonucleotide for detection of SNP TSC0033930
gaaggcgtgaagy

SEQ ID NO: 135884 - DNA, 13 bp, Artificial Sequence
  Oligonucleotide for detection of SNP TSC0033930
rcttcacgccttc

SEQ ID NO: 135885 - DNA, 13 bp, Artificial Sequence
  Oligonucleotide for detection of SNP TSC0033931
attttggttaaaa

SEQ ID NO: 135886 - DNA, 13 bp, Artificial Sequence
  Oligonucleotide for detection of SNP TSC0033931
ttttaaccaaaat

SEQ ID NO: 135887 - DNA, 13 bp, Artificial Sequence
  Oligonucleotide for detection of SNP TSC0033931
attttgtttaaaa

SEQ ID NO: 135888 - DNA, 13 bp, Artificial Sequence
  Oligonucleotide for detection of SNP TSC0033931
ttttaaacaaaat

SEQ ID NO: 135889 - DNA, 13 bp, Artificial Sequence
  Oligonucleotide for detection of SNP TSC0033931
atttcggttaaaa

SEQ ID NO: 135890 - DNA, 13 bp, Artificial Sequence
  Oligonucleotide for detection of SNP TSC0033931
ttttaaccgaaat

SEQ ID NO: 135891 - DNA, 13 bp, Artificial Sequence
  Oligonucleotide for detection of SNP TSC0033931
atttcgtttaaaa

SEQ ID NO: 135892 - DNA, 13 bp, Artificial Sequence
  Oligonucleotide for detection of SNP TSC0033931
ttttaaacgaaat

SEQ ID NO: 135893 - DNA, 13 bp, Artificial Sequence
  Oligonucleotide for detection of SNP TSC0033931
ttttggttgaggt

SEQ ID NO: 135894 - DNA, 13 bp, Artificial Sequence
  Oligonucleotide for detection of SNP TSC0033931
acctcaaccaaaa

SEQ ID NO: 135895 - DNA, 13 bp, Artificial Sequence
  Oligonucleotide for detection of SNP TSC0033931
ttttggatgaggt

SEQ ID NO: 135896 - DNA, 13 bp, Artificial Sequence
  Oligonucleotide for detection of SNP TSC0033931
acctcatccaaaa

SEQ ID NO: 135897 - DNA, 13 bp, Artificial Sequence
  Oligonucleotide for detection of SNP TSC0033931
ttttggtcgaggt

SEQ ID NO: 135898 - DNA, 13 bp, Artificial Sequence
  Oligonucleotide for detection of SNP TSC0033931
acctcgaccaaaa

SEQ ID NO: 135899 - DNA, 13 bp, Artificial Sequence
  Oligonucleotide for detection of SNP TSC0033931
ttttggacgaggt

SEQ ID NO: 135900 - DNA, 13 bp, Artificial Sequence
  Oligonucleotide for detection of SNP TSC0033931
acctcgtccaaaa

SEQ ID NO: 135901 - DNA, 13 bp, Artificial Sequence
  Oligonucleotide for detection of SNP TSC0033932
agttgggtgtggt

SEQ ID NO: 135902 - DNA, 13 bp, Artificial Sequence
  Oligonucleotide for detection of SNP TSC0033932
accacacccaact

SEQ ID NO: 135903 - DNA, 13 bp, Artificial Sequence
  Oligonucleotide for detection of SNP TSC0033932
agttggatgtggt

SEQ ID NO: 135904 - DNA, 13 bp, Artificial Sequence
  Oligonucleotide for detection of SNP TSC0033932
accacatccaact

SEQ ID NO: 135905 - DNA, 13 bp, Artificial Sequence
  Oligonucleotide for detection of SNP TSC0033933
taatttatgggag

SEQ ID NO: 135906 - DNA, 13 bp, Artificial Sequence
  Oligonucleotide for detection of SNP TSC0033933
ctcccataaatta

SEQ ID NO: 135907 - DNA, 13 bp, Artificial Sequence
  Oligonucleotide for detection of SNP TSC0033933
taatttgtgggag

SEQ ID NO: 135908 - DNA, 13 bp, Artificial Sequence
  Oligonucleotide for detection of SNP TSC0033933
ctcccacaaatta

SEQ ID NO: 135909 - DNA, 13 bp, Artificial Sequence
  Oligonucleotide for detection of SNP TSC0033934
gtttaatgtaagg

SEQ ID NO: 135910 - DNA, 13 bp, Artificial Sequence
  Oligonucleotide for detection of SNP TSC0033934
ccttacattaaac

SEQ ID NO: 135911 - DNA, 13 bp, Artificial Sequence
  Oligonucleotide for detection of SNP TSC0033934
gtttaacgtaagg

SEQ ID NO: 135912 - DNA, 13 bp, Artificial Sequence
  Oligonucleotide for detection of SNP TSC0033934
ccttacgttaaac

SEQ ID NO: 135913 - DNA, 13 bp, Artificial Sequence
  Oligonucleotide for detection of SNP TSC0033935
aattatgttttty

SEQ ID NO: 135914 - DNA, 13 bp, Artificial Sequence
  Oligonucleotide for detection of SNP TSC0033935
raaaaacataatt

SEQ ID NO: 135915 - DNA, 13 bp, Artificial Sequence
  Oligonucleotide for detection of SNP TSC0033936
gagtaaaatataa

SEQ ID NO: 135916 - DNA, 13 bp, Artificial Sequence
  Oligonucleotide for detection of SNP TSC0033936
ttatattttactc

SEQ ID NO: 135917 - DNA, 13 bp, Artificial Sequence
  Oligonucleotide for detection of SNP TSC0033936
gagtaagatataa

SEQ ID NO: 135918 - DNA, 13 bp, Artificial Sequence
  Oligonucleotide for detection of SNP TSC0033936
ttatatcttactc

SEQ ID NO: 135919 - DNA, 13 bp, Artificial Sequence
  Oligonucleotide for detection of SNP TSC0033941
taggttgttaaga

SEQ ID NO: 135920 - DNA, 13 bp, Artificial Sequence
  Oligonucleotide for detection of SNP TSC0033941
tcttaacaaccta

SEQ ID NO: 135921 - DNA, 13 bp, Artificial Sequence
  Oligonucleotide for detection of SNP TSC0033941
taggtttttaaga

SEQ ID NO: 135922 - DNA, 13 bp, Artificial Sequence
  Oligonucleotide for detection of SNP TSC0033941
tcttaaaaaccta

SEQ ID NO: 135923 - DNA, 13 bp, Artificial Sequence
  Oligonucleotide for detection of SNP TSC0033941
ttttagtaatttg

SEQ ID NO: 135924 - DNA, 13 bp, Artificial Sequence
  Oligonucleotide for detection of SNP TSC0033941
caaattactaaaa

SEQ ID NO: 135925 - DNA, 13 bp, Artificial Sequence
  Oligonucleotide for detection of SNP TSC0033941
ttttagaaatttg

SEQ ID NO: 135926 - DNA, 13 bp, Artificial Sequence
  Oligonucleotide for detection of SNP TSC0033941
caaatttctaaaa

SEQ ID NO: 135927 - DNA, 13 bp, Artificial Sequence
  Oligonucleotide for detection of SNP TSC0033942
ttggttgaattty

SEQ ID NO: 135928 - DNA, 13 bp, Artificial Sequence
  Oligonucleotide for detection of SNP TSC0033942
raaattcaaccaa

SEQ ID NO: 135929 - DNA, 13 bp, Artificial Sequence
  Oligonucleotide for detection of SNP TSC0033942
ttggttaaattty

SEQ ID NO: 135930 - DNA, 13 bp, Artificial Sequence
  Oligonucleotide for detection of SNP TSC0033942
raaatttaaccaa

SEQ ID NO: 135931 - DNA, 13 bp, Artificial Sequence
  Oligonucleotide for detection of SNP TSC0033944
agagaagaggagt

SEQ ID NO: 135932 - DNA, 13 bp, Artificial Sequence
  Oligonucleotide for detection of SNP TSC0033944
actcctcttctct

SEQ ID NO: 135933 - DNA, 13 bp, Artificial Sequence
  Oligonucleotide for detection of SNP TSC0033944
agagaaaaggagt

SEQ ID NO: 135934 - DNA, 13 bp, Artificial Sequence
  Oligonucleotide for detection of SNP TSC0033944
actccttttctct

SEQ ID NO: 135935 - DNA, 13 bp, Artificial Sequence
  Oligonucleotide for detection of SNP TSC0033946
agagtggatttat

SEQ ID NO: 135936 - DNA, 13 bp, Artificial Sequence
  Oligonucleotide for detection of SNP TSC0033946
ataaatccactct

SEQ ID NO: 135937 - DNA, 13 bp, Artificial Sequence
  Oligonucleotide for detection of SNP TSC0033946
agagtgaatttat

SEQ ID NO: 135938 - DNA, 13 bp, Artificial Sequence
  Oligonucleotide for detection of SNP TSC0033946
ataaattcactct

SEQ ID NO: 135939 - DNA, 13 bp, Artificial Sequence
  Oligonucleotide for detection of SNP TSC0033951
atatatgagtagy

SEQ ID NO: 135940 - DNA, 13 bp, Artificial Sequence
  Oligonucleotide for detection of SNP TSC0033951
rctactcatatat

SEQ ID NO: 135941 - DNA, 13 bp, Artificial Sequence
  Oligonucleotide for detection of SNP TSC0033951
atatataagtagy

SEQ ID NO: 135942 - DNA, 13 bp, Artificial Sequence
  Oligonucleotide for detection of SNP TSC0033951
rctacttatatat

SEQ ID NO: 135943 - DNA, 13 bp, Artificial Sequence
  Oligonucleotide for detection of SNP TSC0033951
atatacgagtagy

SEQ ID NO: 135944 - DNA, 13 bp, Artificial Sequence
  Oligonucleotide for detection of SNP TSC0033951
rctactcgtatat

SEQ ID NO: 135945 - DNA, 13 bp, Artificial Sequence
  Oligonucleotide for detection of SNP TSC0033952
tttatgtgtttat

SEQ ID NO: 135946 - DNA, 13 bp, Artificial Sequence
  Oligonucleotide for detection of SNP TSC0033952
ataaacacataaa

SEQ ID NO: 135947 - DNA, 13 bp, Artificial Sequence
  Oligonucleotide for detection of SNP TSC0033952
tttatgcgtttat

SEQ ID NO: 135948 - DNA, 13 bp, Artificial Sequence
  Oligonucleotide for detection of SNP TSC0033952
ataaacgcataaa

SEQ ID NO: 135949 - DNA, 13 bp, Artificial Sequence
  Oligonucleotide for detection of SNP TSC0033952
ataaatgtatgag

SEQ ID NO: 135950 - DNA, 13 bp, Artificial Sequence
  Oligonucleotide for detection of SNP TSC0033952
ctcatacatttat

SEQ ID NO: 135951 - DNA, 13 bp, Artificial Sequence
  Oligonucleotide for detection of SNP TSC0033952
ataaatatatgag

SEQ ID NO: 135952 - DNA, 13 bp, Artificial Sequence
  Oligonucleotide for detection of SNP TSC0033952
ctcatatatttat

SEQ ID NO: 135953 - DNA, 13 bp, Artificial Sequence
  Oligonucleotide for detection of SNP TSC0033952
ataaacgtatgag

SEQ ID NO: 135954 - DNA, 13 bp, Artificial Sequence
  Oligonucleotide for detection of SNP TSC0033952
ctcatacgtttat

SEQ ID NO: 135955 - DNA, 13 bp, Artificial Sequence
  Oligonucleotide for detection of SNP TSC0033953
agtagtaaatgga

SEQ ID NO: 135956 - DNA, 13 bp, Artificial Sequence
  Oligonucleotide for detection of SNP TSC0033953
tccatttactact

SEQ ID NO: 135957 - DNA, 13 bp, Artificial Sequence
  Oligonucleotide for detection of SNP TSC0033953
agtagttaatgga

SEQ ID NO: 135958 - DNA, 13 bp, Artificial Sequence
  Oligonucleotide for detection of SNP TSC0033953
tccattaactact

SEQ ID NO: 135959 - DNA, 13 bp, Artificial Sequence
  Oligonucleotide for detection of SNP TSC0033953
tttattgattgtt

SEQ ID NO: 135960 - DNA, 13 bp, Artificial Sequence
  Oligonucleotide for detection of SNP TSC0033953
aacaatcaataaa

SEQ ID NO: 135961 - DNA, 13 bp, Artificial Sequence
  Oligonucleotide for detection of SNP TSC0033954
atattttgtttta

SEQ ID NO: 135962 - DNA, 13 bp, Artificial Sequence
  Oligonucleotide for detection of SNP TSC0033954
taaaacaaaatat

SEQ ID NO: 135963 - DNA, 13 bp, Artificial Sequence
  Oligonucleotide for detection of SNP TSC0033954
atatttcgtttta

SEQ ID NO: 135964 - DNA, 13 bp, Artificial Sequence
  Oligonucleotide for detection of SNP TSC0033954
taaaacgaaatat

SEQ ID NO: 135965 - DNA, 13 bp, Artificial Sequence
  Oligonucleotide for detection of SNP TSC0033954
taaggtggggtgt

SEQ ID NO: 135966 - DNA, 13 bp, Artificial Sequence
  Oligonucleotide for detection of SNP TSC0033954
acaccccacctta

SEQ ID NO: 135967 - DNA, 13 bp, Artificial Sequence
  Oligonucleotide for detection of SNP TSC0033954
taaggtagggtgt

SEQ ID NO: 135968 - DNA, 13 bp, Artificial Sequence
  Oligonucleotide for detection of SNP TSC0033954
acaccctacctta

SEQ ID NO: 135969 - DNA, 13 bp, Artificial Sequence
  Oligonucleotide for detection of SNP TSC0033954
taaggcggggtgt

SEQ ID NO: 135970 - DNA, 13 bp, Artificial Sequence
  Oligonucleotide for detection of SNP TSC0033954
acaccccgcctta

SEQ ID NO: 135971 - DNA, 13 bp, Artificial Sequence
  Oligonucleotide for detection of SNP TSC0033957
tgattagtagtty

SEQ ID NO: 135972 - DNA, 13 bp, Artificial Sequence
  Oligonucleotide for detection of SNP TSC0033957
raactactaatca

SEQ ID NO: 135973 - DNA, 13 bp, Artificial Sequence
  Oligonucleotide for detection of SNP TSC0033957
tgattaatagtty

SEQ ID NO: 135974 - DNA, 13 bp, Artificial Sequence
  Oligonucleotide for detection of SNP TSC0033957
raactattaatca

SEQ ID NO: 135975 - DNA, 13 bp, Artificial Sequence
  Oligonucleotide for detection of SNP TSC0033957
cgattagtagtty

SEQ ID NO: 135976 - DNA, 13 bp, Artificial Sequence
  Oligonucleotide for detection of SNP TSC0033957
raactactaatcg

SEQ ID NO: 135977 - DNA, 13 bp, Artificial Sequence
  Oligonucleotide for detection of SNP TSC0033957
cgattaatagtty

SEQ ID NO: 135978 - DNA, 13 bp, Artificial Sequence
  Oligonucleotide for detection of SNP TSC0033957
raactattaatcg

SEQ ID NO: 135979 - DNA, 13 bp, Artificial Sequence
  Oligonucleotide for detection of SNP TSC0033958
gattagtggtgga

SEQ ID NO: 135980 - DNA, 13 bp, Artificial Sequence
  Oligonucleotide for detection of SNP TSC0033958
tccaccactaatc

SEQ ID NO: 135981 - DNA, 13 bp, Artificial Sequence
  Oligonucleotide for detection of SNP TSC0033958
gattagcggtgga

SEQ ID NO: 135982 - DNA, 13 bp, Artificial Sequence
  Oligonucleotide for detection of SNP TSC0033958
tccaccgctaatc

SEQ ID NO: 135983 - DNA, 13 bp, Artificial Sequence
  Oligonucleotide for detection of SNP TSC0033958
tttattgttagty

SEQ ID NO: 135984 - DNA, 13 bp, Artificial Sequence
  Oligonucleotide for detection of SNP TSC0033958
ractaacaataaa

SEQ ID NO: 135985 - DNA, 13 bp, Artificial Sequence
  Oligonucleotide for detection of SNP TSC0033958
tttattattagty

SEQ ID NO: 135986 - DNA, 13 bp, Artificial Sequence
  Oligonucleotide for detection of SNP TSC0033958
ractaataataaa

SEQ ID NO: 135987 - DNA, 13 bp, Artificial Sequence
  Oligonucleotide for detection of SNP TSC0033958
tttatcgttagty

SEQ ID NO: 135988 - DNA, 13 bp, Artificial Sequence
  Oligonucleotide for detection of SNP TSC0033958
ractaacgataaa

SEQ ID NO: 135989 - DNA, 13 bp, Artificial Sequence
  Oligonucleotide for detection of SNP TSC0033959
tttgtggttttgt

SEQ ID NO: 135990 - DNA, 13 bp, Artificial Sequence
  Oligonucleotide for detection of SNP TSC0033959
acaaaaccacaaa

SEQ ID NO: 135991 - DNA, 13 bp, Artificial Sequence
  Oligonucleotide for detection of SNP TSC0033959
tttgtgtttttgt

SEQ ID NO: 135992 - DNA, 13 bp, Artificial Sequence
  Oligonucleotide for detection of SNP TSC0033959
acaaaaacacaaa

SEQ ID NO: 135993 - DNA, 13 bp, Artificial Sequence
  Oligonucleotide for detection of SNP TSC0033959
ataaaattataga

SEQ ID NO: 135994 - DNA, 13 bp, Artificial Sequence
  Oligonucleotide for detection of SNP TSC0033959
tctataattttat

SEQ ID NO: 135995 - DNA, 13 bp, Artificial Sequence
  Oligonucleotide for detection of SNP TSC0033959
ataaaaatataga

SEQ ID NO: 135996 - DNA, 13 bp, Artificial Sequence
  Oligonucleotide for detection of SNP TSC0033959
tctatatttttat

SEQ ID NO: 135997 - DNA, 13 bp, Artificial Sequence
  Oligonucleotide for detection of SNP TSC0033960
taaggaagaagga

SEQ ID NO: 135998 - DNA, 13 bp, Artificial Sequence
  Oligonucleotide for detection of SNP TSC0033960
tccttcttcctta

SEQ ID NO: 135999 - DNA, 13 bp, Artificial Sequence
  Oligonucleotide for detection of SNP TSC0033960
taaggaggaagga

SEQ ID NO: 136000 - DNA, 13 bp, Artificial Sequence
  Oligonucleotide for detection of SNP TSC0033960
tccttcctcctta

SEQ ID NO: 136001 - DNA, 13 bp, Artificial Sequence
  Oligonucleotide for detection of SNP TSC0033961
ggaaaatttaagg

SEQ ID NO: 136002 - DNA, 13 bp, Artificial Sequence
  Oligonucleotide for detection of SNP TSC0033961
ccttaaattttcc

SEQ ID NO: 136003 - DNA, 13 bp, Artificial Sequence
  Oligonucleotide for detection of SNP TSC0033961
ggaaaagttaagg

SEQ ID NO: 136004 - DNA, 13 bp, Artificial Sequence
  Oligonucleotide for detection of SNP TSC0033961
ccttaacttttcc

SEQ ID NO: 136005 - DNA, 13 bp, Artificial Sequence
  Oligonucleotide for detection of SNP TSC0033966
gtgaagggggagg

SEQ ID NO: 136006 - DNA, 13 bp, Artificial Sequence
  Oligonucleotide for detection of SNP TSC0033966
cctcccccttcac

SEQ ID NO: 136007 - DNA, 13 bp, Artificial Sequence
  Oligonucleotide for detection of SNP TSC0033966
gtgaagtgggagg

SEQ ID NO: 136008 - DNA, 13 bp, Artificial Sequence
  Oligonucleotide for detection of SNP TSC0033966
cctcccacttcac

SEQ ID NO: 136009 - DNA, 13 bp, Artificial Sequence
  Oligonucleotide for detection of SNP TSC0033966
gtgaagcgggagg

SEQ ID NO: 136010 - DNA, 13 bp, Artificial Sequence
  Oligonucleotide for detection of SNP TSC0033966
cctcccgcttcac

SEQ ID NO: 136011 - DNA, 13 bp, Artificial Sequence
  Oligonucleotide for detection of SNP TSC0033967
gagtggttgaggy

SEQ ID NO: 136012 - DNA, 13 bp, Artificial Sequence
  Oligonucleotide for detection of SNP TSC0033967
rcctcaaccactc

SEQ ID NO: 136013 - DNA, 13 bp, Artificial Sequence
  Oligonucleotide for detection of SNP TSC0033967
gagtggatgaggy

SEQ ID NO: 136014 - DNA, 13 bp, Artificial Sequence
  Oligonucleotide for detection of SNP TSC0033967
rcctcatccactc

SEQ ID NO: 136015 - DNA, 13 bp, Artificial Sequence
  Oligonucleotide for detection of SNP TSC0033969
tataggggtgttt

SEQ ID NO: 136016 - DNA, 13 bp, Artificial Sequence
  Oligonucleotide for detection of SNP TSC0033969
aaacacccctata

SEQ ID NO: 136017 - DNA, 13 bp, Artificial Sequence
  Oligonucleotide for detection of SNP TSC0033969
tataggagtgttt

SEQ ID NO: 136018 - DNA, 13 bp, Artificial Sequence
  Oligonucleotide for detection of SNP TSC0033969
aaacactcctata

SEQ ID NO: 136019 - DNA, 13 bp, Artificial Sequence
  Oligonucleotide for detection of SNP TSC0033970
aggagaaatattg

SEQ ID NO: 136020 - DNA, 13 bp, Artificial Sequence
  Oligonucleotide for detection of SNP TSC0033970
caatatttctcct

SEQ ID NO: 136021 - DNA, 13 bp, Artificial Sequence
  Oligonucleotide for detection of SNP TSC0033970
aggagatatattg

SEQ ID NO: 136022 - DNA, 13 bp, Artificial Sequence
  Oligonucleotide for detection of SNP TSC0033970
caatatatctcct

SEQ ID NO: 136023 - DNA, 13 bp, Artificial Sequence
  Oligonucleotide for detection of SNP TSC0033970
tagtatttttttt

SEQ ID NO: 136024 - DNA, 13 bp, Artificial Sequence
  Oligonucleotide for detection of SNP TSC0033970
aaaaaaaatacta

SEQ ID NO: 136025 - DNA, 13 bp, Artificial Sequence
  Oligonucleotide for detection of SNP TSC0033970
tagtatgtttttt

SEQ ID NO: 136026 - DNA, 13 bp, Artificial Sequence
  Oligonucleotide for detection of SNP TSC0033970
aaaaaacatacta

SEQ ID NO: 136027 - DNA, 13 bp, Artificial Sequence
  Oligonucleotide for detection of SNP TSC0033971
attgtagtattty

SEQ ID NO: 136028 - DNA, 13 bp, Artificial Sequence
  Oligonucleotide for detection of SNP TSC0033971
raaatactacaat

SEQ ID NO: 136029 - DNA, 13 bp, Artificial Sequence
  Oligonucleotide for detection of SNP TSC0033971
attgtaatattty

SEQ ID NO: 136030 - DNA, 13 bp, Artificial Sequence
  Oligonucleotide for detection of SNP TSC0033971
raaatattacaat

SEQ ID NO: 136031 - DNA, 13 bp, Artificial Sequence
  Oligonucleotide for detection of SNP TSC0033971
atcgtagtattty

SEQ ID NO: 136032 - DNA, 13 bp, Artificial Sequence
  Oligonucleotide for detection of SNP TSC0033971
raaatactacgat

SEQ ID NO: 136033 - DNA, 13 bp, Artificial Sequence
  Oligonucleotide for detection of SNP TSC0033971
atcgtaatattty

SEQ ID NO: 136034 - DNA, 13 bp, Artificial Sequence
  Oligonucleotide for detection of SNP TSC0033971
raaatattacgat

SEQ ID NO: 136035 - DNA, 13 bp, Artificial Sequence
  Oligonucleotide for detection of SNP TSC0033972
tagtggtgtgata

SEQ ID NO: 136036 - DNA, 13 bp, Artificial Sequence
  Oligonucleotide for detection of SNP TSC0033972
tatcacaccacta

SEQ ID NO: 136037 - DNA, 13 bp, Artificial Sequence
  Oligonucleotide for detection of SNP TSC0033972
tagtggcgtgata

SEQ ID NO: 136038 - DNA, 13 bp, Artificial Sequence
  Oligonucleotide for detection of SNP TSC0033972
tatcacgccacta

SEQ ID NO: 136039 - DNA, 13 bp, Artificial Sequence
  Oligonucleotide for detection of SNP TSC0033972
tattatgttattg

SEQ ID NO: 136040 - DNA, 13 bp, Artificial Sequence
  Oligonucleotide for detection of SNP TSC0033972
caataacataata

SEQ ID NO: 136041 - DNA, 13 bp, Artificial Sequence
  Oligonucleotide for detection of SNP TSC0033972
tattatattattg

SEQ ID NO: 136042 - DNA, 13 bp, Artificial Sequence
  Oligonucleotide for detection of SNP TSC0033972
caataatataata

SEQ ID NO: 136043 - DNA, 13 bp, Artificial Sequence
  Oligonucleotide for detection of SNP TSC0033972
tattacgttattg

SEQ ID NO: 136044 - DNA, 13 bp, Artificial Sequence
  Oligonucleotide for detection of SNP TSC0033972
caataacgtaata

SEQ ID NO: 136045 - DNA, 13 bp, Artificial Sequence
  Oligonucleotide for detection of SNP TSC0033973
gttgttaggaatt

SEQ ID NO: 136046 - DNA, 13 bp, Artificial Sequence
  Oligonucleotide for detection of SNP TSC0033973
aattcctaacaac

SEQ ID NO: 136047 - DNA, 13 bp, Artificial Sequence
  Oligonucleotide for detection of SNP TSC0033973
gttgtttggaatt

SEQ ID NO: 136048 - DNA, 13 bp, Artificial Sequence
  Oligonucleotide for detection of SNP TSC0033973
aattccaaacaac

SEQ ID NO: 136049 - DNA, 13 bp, Artificial Sequence
  Oligonucleotide for detection of SNP TSC0033973
aatttttaatagy

SEQ ID NO: 136050 - DNA, 13 bp, Artificial Sequence
  Oligonucleotide for detection of SNP TSC0033973
rctattaaaaatt

SEQ ID NO: 136051 - DNA, 13 bp, Artificial Sequence
  Oligonucleotide for detection of SNP TSC0033973
aattttaaatagy

SEQ ID NO: 136052 - DNA, 13 bp, Artificial Sequence
  Oligonucleotide for detection of SNP TSC0033973
rctatttaaaatt

SEQ ID NO: 136053 - DNA, 13 bp, Artificial Sequence
  Oligonucleotide for detection of SNP TSC0033974
ggtgtgtagataa

SEQ ID NO: 136054 - DNA, 13 bp, Artificial Sequence
  Oligonucleotide for detection of SNP TSC0033974
ttatctacacacc

SEQ ID NO: 136055 - DNA, 13 bp, Artificial Sequence
  Oligonucleotide for detection of SNP TSC0033974
ggtgtggagataa

SEQ ID NO: 136056 - DNA, 13 bp, Artificial Sequence
  Oligonucleotide for detection of SNP TSC0033974
ttatctccacacc

SEQ ID NO: 136057 - DNA, 13 bp, Artificial Sequence
  Oligonucleotide for detection of SNP TSC0033975
gtagaaggatata

SEQ ID NO: 136058 - DNA, 13 bp, Artificial Sequence
  Oligonucleotide for detection of SNP TSC0033975
tatatccttctac

SEQ ID NO: 136059 - DNA, 13 bp, Artificial Sequence
  Oligonucleotide for detection of SNP TSC0033975
gtagaaagatata

SEQ ID NO: 136060 - DNA, 13 bp, Artificial Sequence
  Oligonucleotide for detection of SNP TSC0033975
tatatctttctac

SEQ ID NO: 136061 - DNA, 13 bp, Artificial Sequence
  Oligonucleotide for detection of SNP TSC0033977
taaaaatgtgtat

SEQ ID NO: 136062 - DNA, 13 bp, Artificial Sequence
  Oligonucleotide for detection of SNP TSC0033977
atacacattttta

SEQ ID NO: 136063 - DNA, 13 bp, Artificial Sequence
  Oligonucleotide for detection of SNP TSC0033977
taaaaacgtgtat

SEQ ID NO: 136064 - DNA, 13 bp, Artificial Sequence
  Oligonucleotide for detection of SNP TSC0033977
atacacgttttta

SEQ ID NO: 136065 - DNA, 13 bp, Artificial Sequence
  Oligonucleotide for detection of SNP TSC0033977
atatatgtttttg

SEQ ID NO: 136066 - DNA, 13 bp, Artificial Sequence
  Oligonucleotide for detection of SNP TSC0033977
caaaaacatatat

SEQ ID NO: 136067 - DNA, 13 bp, Artificial Sequence
  Oligonucleotide for detection of SNP TSC0033977
atatatatttttg

SEQ ID NO: 136068 - DNA, 13 bp, Artificial Sequence
  Oligonucleotide for detection of SNP TSC0033977
caaaaatatatat

SEQ ID NO: 136069 - DNA, 13 bp, Artificial Sequence
  Oligonucleotide for detection of SNP TSC0033977
atatacgtttttg

SEQ ID NO: 136070 - DNA, 13 bp, Artificial Sequence
  Oligonucleotide for detection of SNP TSC0033977
caaaaacgtatat

SEQ ID NO: 136071 - DNA, 13 bp, Artificial Sequence
  Oligonucleotide for detection of SNP TSC0033980
taatgtatatttt

SEQ ID NO: 136072 - DNA, 13 bp, Artificial Sequence
  Oligonucleotide for detection of SNP TSC0033980
aaaatatacatta

SEQ ID NO: 136073 - DNA, 13 bp, Artificial Sequence
  Oligonucleotide for detection of SNP TSC0033980
taatgtgtatttt

SEQ ID NO: 136074 - DNA, 13 bp, Artificial Sequence
  Oligonucleotide for detection of SNP TSC0033980
aaaatacacatta

SEQ ID NO: 136075 - DNA, 13 bp, Artificial Sequence
  Oligonucleotide for detection of SNP TSC0033981
aaaaaagaggaaa

SEQ ID NO: 136076 - DNA, 13 bp, Artificial Sequence
  Oligonucleotide for detection of SNP TSC0033981
tttcctctttttt

SEQ ID NO: 136077 - DNA, 13 bp, Artificial Sequence
  Oligonucleotide for detection of SNP TSC0033981
aaaaaataggaaa

SEQ ID NO: 136078 - DNA, 13 bp, Artificial Sequence
  Oligonucleotide for detection of SNP TSC0033981
tttcctatttttt

SEQ ID NO: 136079 - DNA, 13 bp, Artificial Sequence
  Oligonucleotide for detection of SNP TSC0033982
tttagggaattaa

SEQ ID NO: 136080 - DNA, 13 bp, Artificial Sequence
  Oligonucleotide for detection of SNP TSC0033982
ttaattccctaaa

SEQ ID NO: 136081 - DNA, 13 bp, Artificial Sequence
  Oligonucleotide for detection of SNP TSC0033982
tttaggaaattaa

SEQ ID NO: 136082 - DNA, 13 bp, Artificial Sequence
  Oligonucleotide for detection of SNP TSC0033982
ttaatttcctaaa

SEQ ID NO: 136083 - DNA, 13 bp, Artificial Sequence
  Oligonucleotide for detection of SNP TSC0033983
tgggattggtggg

SEQ ID NO: 136084 - DNA, 13 bp, Artificial Sequence
  Oligonucleotide for detection of SNP TSC0033983
cccaccaatccca

SEQ ID NO: 136085 - DNA, 13 bp, Artificial Sequence
  Oligonucleotide for detection of SNP TSC0033983
tgggatcggtggg

SEQ ID NO: 136086 - DNA, 13 bp, Artificial Sequence
  Oligonucleotide for detection of SNP TSC0033983
cccaccgatccca

SEQ ID NO: 136087 - DNA, 13 bp, Artificial Sequence
  Oligonucleotide for detection of SNP TSC0033984
gaggaggaggagg

SEQ ID NO: 136088 - DNA, 13 bp, Artificial Sequence
  Oligonucleotide for detection of SNP TSC0033984
cctcctcctcctc

SEQ ID NO: 136089 - DNA, 13 bp, Artificial Sequence
  Oligonucleotide for detection of SNP TSC0033984
gaggagaaggagg

SEQ ID NO: 136090 - DNA, 13 bp, Artificial Sequence
  Oligonucleotide for detection of SNP TSC0033984
cctccttctcctc

SEQ ID NO: 136091 - DNA, 13 bp, Artificial Sequence
  Oligonucleotide for detection of SNP TSC0033985
tttttttgtgata

SEQ ID NO: 136092 - DNA, 13 bp, Artificial Sequence
  Oligonucleotide for detection of SNP TSC0033985
tatcacaaaaaaa

SEQ ID NO: 136093 - DNA, 13 bp, Artificial Sequence
  Oligonucleotide for detection of SNP TSC0033985
ttttttcgtgata

SEQ ID NO: 136094 - DNA, 13 bp, Artificial Sequence
  Oligonucleotide for detection of SNP TSC0033985
tatcacgaaaaaa

SEQ ID NO: 136095 - DNA, 13 bp, Artificial Sequence
  Oligonucleotide for detection of SNP TSC0033985
tgttatggaagag

SEQ ID NO: 136096 - DNA, 13 bp, Artificial Sequence
  Oligonucleotide for detection of SNP TSC0033985
ctcttccataaca

SEQ ID NO: 136097 - DNA, 13 bp, Artificial Sequence
  Oligonucleotide for detection of SNP TSC0033985
tgttatagaagag

SEQ ID NO: 136098 - DNA, 13 bp, Artificial Sequence
  Oligonucleotide for detection of SNP TSC0033985
ctcttctataaca

SEQ ID NO: 136099 - DNA, 13 bp, Artificial Sequence
  Oligonucleotide for detection of SNP TSC0033985
tgttacggaagag

SEQ ID NO: 136100 - DNA, 13 bp, Artificial Sequence
  Oligonucleotide for detection of SNP TSC0033985
ctcttccgtaaca

SEQ ID NO: 136101 - DNA, 13 bp, Artificial Sequence
  Oligonucleotide for detection of SNP TSC0033989
tgggagatataat

SEQ ID NO: 136102 - DNA, 13 bp, Artificial Sequence
  Oligonucleotide for detection of SNP TSC0033989
attatatctccca

SEQ ID NO: 136103 - DNA, 13 bp, Artificial Sequence
  Oligonucleotide for detection of SNP TSC0033989
tgggagttataat

SEQ ID NO: 136104 - DNA, 13 bp, Artificial Sequence
  Oligonucleotide for detection of SNP TSC0033989
attataactccca

SEQ ID NO: 136105 - DNA, 13 bp, Artificial Sequence
  Oligonucleotide for detection of SNP TSC0033989
attgtagttttta

SEQ ID NO: 136106 - DNA, 13 bp, Artificial Sequence
  Oligonucleotide for detection of SNP TSC0033989
taaaaactacaat

SEQ ID NO: 136107 - DNA, 13 bp, Artificial Sequence
  Oligonucleotide for detection of SNP TSC0033991
atagatggttata

SEQ ID NO: 136108 - DNA, 13 bp, Artificial Sequence
  Oligonucleotide for detection of SNP TSC0033991
tataaccatctat

SEQ ID NO: 136109 - DNA, 13 bp, Artificial Sequence
  Oligonucleotide for detection of SNP TSC0033992
aatattattatty

SEQ ID NO: 136110 - DNA, 13 bp, Artificial Sequence
  Oligonucleotide for detection of SNP TSC0033992
raataataatatt

SEQ ID NO: 136111 - DNA, 13 bp, Artificial Sequence
  Oligonucleotide for detection of SNP TSC0033992
aatattgttatty

SEQ ID NO: 136112 - DNA, 13 bp, Artificial Sequence
  Oligonucleotide for detection of SNP TSC0033992
raataacaatatt

SEQ ID NO: 136113 - DNA, 13 bp, Artificial Sequence
  Oligonucleotide for detection of SNP TSC0033992
aatatcgttatty

SEQ ID NO: 136114 - DNA, 13 bp, Artificial Sequence
  Oligonucleotide for detection of SNP TSC0033992
raataacgatatt

SEQ ID NO: 136115 - DNA, 13 bp, Artificial Sequence
  Oligonucleotide for detection of SNP TSC0033992
gggtggtggtgtt

SEQ ID NO: 136116 - DNA, 13 bp, Artificial Sequence
  Oligonucleotide for detection of SNP TSC0033992
aacaccaccaccc

SEQ ID NO: 136117 - DNA, 13 bp, Artificial Sequence
  Oligonucleotide for detection of SNP TSC0033992
gggtggcggtgtt

SEQ ID NO: 136118 - DNA, 13 bp, Artificial Sequence
  Oligonucleotide for detection of SNP TSC0033992
aacaccgccaccc

SEQ ID NO: 136119 - DNA, 13 bp, Artificial Sequence
  Oligonucleotide for detection of SNP TSC0033993
ataaagattttty

SEQ ID NO: 136120 - DNA, 13 bp, Artificial Sequence
  Oligonucleotide for detection of SNP TSC0033993
raaaaatctttat

SEQ ID NO: 136121 - DNA, 13 bp, Artificial Sequence
  Oligonucleotide for detection of SNP TSC0033993
ataaaggttttty

SEQ ID NO: 136122 - DNA, 13 bp, Artificial Sequence
  Oligonucleotide for detection of SNP TSC0033993
raaaaacctttat

SEQ ID NO: 136123 - DNA, 13 bp, Artificial Sequence
  Oligonucleotide for detection of SNP TSC0033997
tagtaagtttagy

SEQ ID NO: 136124 - DNA, 13 bp, Artificial Sequence
  Oligonucleotide for detection of SNP TSC0033997
rctaaacttacta

SEQ ID NO: 136125 - DNA, 13 bp, Artificial Sequence
  Oligonucleotide for detection of SNP TSC0033997
tagtaaatttagy

SEQ ID NO: 136126 - DNA, 13 bp, Artificial Sequence
  Oligonucleotide for detection of SNP TSC0033997
rctaaatttacta

SEQ ID NO: 136127 - DNA, 13 bp, Artificial Sequence
  Oligonucleotide for detection of SNP TSC0033998
gttgtttttgttt

SEQ ID NO: 136128 - DNA, 13 bp, Artificial Sequence
  Oligonucleotide for detection of SNP TSC0033998
aaacaaaaacaac

SEQ ID NO: 136129 - DNA, 13 bp, Artificial Sequence
  Oligonucleotide for detection of SNP TSC0033998
aaataataataay

SEQ ID NO: 136130 - DNA, 13 bp, Artificial Sequence
  Oligonucleotide for detection of SNP TSC0033998
rttattattattt

SEQ ID NO: 136131 - DNA, 13 bp, Artificial Sequence
  Oligonucleotide for detection of SNP TSC0033998
aaataaaaataay

SEQ ID NO: 136132 - DNA, 13 bp, Artificial Sequence
  Oligonucleotide for detection of SNP TSC0033998
rttatttttattt

SEQ ID NO: 136133 - DNA, 13 bp, Artificial Sequence
  Oligonucleotide for detection of SNP TSC0034000
tttttatagatga

SEQ ID NO: 136134 - DNA, 13 bp, Artificial Sequence
  Oligonucleotide for detection of SNP TSC0034000
tcatctataaaaa

SEQ ID NO: 136135 - DNA, 13 bp, Artificial Sequence
  Oligonucleotide for detection of SNP TSC0034000
tttttagagatga

SEQ ID NO: 136136 - DNA, 13 bp, Artificial Sequence
  Oligonucleotide for detection of SNP TSC0034000
tcatctctaaaaa

SEQ ID NO: 136137 - DNA, 13 bp, Artificial Sequence
  Oligonucleotide for detection of SNP TSC0034000
ttatttgtaaaaa

SEQ ID NO: 136138 - DNA, 13 bp, Artificial Sequence
  Oligonucleotide for detection of SNP TSC0034000
tttttacaaataa

SEQ ID NO: 136139 - DNA, 13 bp, Artificial Sequence
  Oligonucleotide for detection of SNP TSC0034001
tgtaatgttagat

SEQ ID NO: 136140 - DNA, 13 bp, Artificial Sequence
  Oligonucleotide for detection of SNP TSC0034001
atctaacattaca

SEQ ID NO: 136141 - DNA, 13 bp, Artificial Sequence
  Oligonucleotide for detection of SNP TSC0034001
tgtaatattagat

SEQ ID NO: 136142 - DNA, 13 bp, Artificial Sequence
  Oligonucleotide for detection of SNP TSC0034001
atctaatattaca

SEQ ID NO: 136143 - DNA, 13 bp, Artificial Sequence
  Oligonucleotide for detection of SNP TSC0034002
ggtgttagggatg

SEQ ID NO: 136144 - DNA, 13 bp, Artificial Sequence
  Oligonucleotide for detection of SNP TSC0034002
catccctaacacc

SEQ ID NO: 136145 - DNA, 13 bp, Artificial Sequence
  Oligonucleotide for detection of SNP TSC0034002
ggtgttggggatg

SEQ ID NO: 136146 - DNA, 13 bp, Artificial Sequence
  Oligonucleotide for detection of SNP TSC0034002
catccccaacacc

SEQ ID NO: 136147 - DNA, 13 bp, Artificial Sequence
  Oligonucleotide for detection of SNP TSC0034002
ggcgttagggatg

SEQ ID NO: 136148 - DNA, 13 bp, Artificial Sequence
  Oligonucleotide for detection of SNP TSC0034002
catccctaacgcc

SEQ ID NO: 136149 - DNA, 13 bp, Artificial Sequence
  Oligonucleotide for detection of SNP TSC0034002
ggcgttggggatg

SEQ ID NO: 136150 - DNA, 13 bp, Artificial Sequence
  Oligonucleotide for detection of SNP TSC0034002
catccccaacgcc

SEQ ID NO: 136151 - DNA, 13 bp, Artificial Sequence
  Oligonucleotide for detection of SNP TSC0034003
attgtggtagtaa

SEQ ID NO: 136152 - DNA, 13 bp, Artificial Sequence
  Oligonucleotide for detection of SNP TSC0034003
ttactaccacaat

SEQ ID NO: 136153 - DNA, 13 bp, Artificial Sequence
  Oligonucleotide for detection of SNP TSC0034003
attgtgatagtaa

SEQ ID NO: 136154 - DNA, 13 bp, Artificial Sequence
  Oligonucleotide for detection of SNP TSC0034003
ttactatcacaat

SEQ ID NO: 136155 - DNA, 13 bp, Artificial Sequence
  Oligonucleotide for detection of SNP TSC0034003
atcgtggtagtaa

SEQ ID NO: 136156 - DNA, 13 bp, Artificial Sequence
  Oligonucleotide for detection of SNP TSC0034003
ttactaccacgat

SEQ ID NO: 136157 - DNA, 13 bp, Artificial Sequence
  Oligonucleotide for detection of SNP TSC0034003
atcgtgatagtaa

SEQ ID NO: 136158 - DNA, 13 bp, Artificial Sequence
  Oligonucleotide for detection of SNP TSC0034003
ttactatcacgat

SEQ ID NO: 136159 - DNA, 13 bp, Artificial Sequence
  Oligonucleotide for detection of SNP TSC0034004
tttaaatggttgy

SEQ ID NO: 136160 - DNA, 13 bp, Artificial Sequence
  Oligonucleotide for detection of SNP TSC0034004
rcaaccatttaaa

SEQ ID NO: 136161 - DNA, 13 bp, Artificial Sequence
  Oligonucleotide for detection of SNP TSC0034004
tttaaacggttgy

SEQ ID NO: 136162 - DNA, 13 bp, Artificial Sequence
  Oligonucleotide for detection of SNP TSC0034004
rcaaccgtttaaa

SEQ ID NO: 136163 - DNA, 13 bp, Artificial Sequence
  Oligonucleotide for detection of SNP TSC0034004
gtagttgtttggg

SEQ ID NO: 136164 - DNA, 13 bp, Artificial Sequence
  Oligonucleotide for detection of SNP TSC0034004
cccaaacaactac

SEQ ID NO: 136165 - DNA, 13 bp, Artificial Sequence
  Oligonucleotide for detection of SNP TSC0034004
gtagttatttggg

SEQ ID NO: 136166 - DNA, 13 bp, Artificial Sequence
  Oligonucleotide for detection of SNP TSC0034004
cccaaataactac

SEQ ID NO: 136167 - DNA, 13 bp, Artificial Sequence
  Oligonucleotide for detection of SNP TSC0034004
gtagtcgtttggg

SEQ ID NO: 136168 - DNA, 13 bp, Artificial Sequence
  Oligonucleotide for detection of SNP TSC0034004
cccaaacgactac

SEQ ID NO: 136169 - DNA, 13 bp, Artificial Sequence
  Oligonucleotide for detection of SNP TSC0034005
tttatattattat

SEQ ID NO: 136170 - DNA, 13 bp, Artificial Sequence
  Oligonucleotide for detection of SNP TSC0034005
ataataatataaa

SEQ ID NO: 136171 - DNA, 13 bp, Artificial Sequence
  Oligonucleotide for detection of SNP TSC0034005
tttatagtattat

SEQ ID NO: 136172 - DNA, 13 bp, Artificial Sequence
  Oligonucleotide for detection of SNP TSC0034005
ataatactataaa

SEQ ID NO: 136173 - DNA, 13 bp, Artificial Sequence
  Oligonucleotide for detection of SNP TSC0034005
atgatagtatgaa

SEQ ID NO: 136174 - DNA, 13 bp, Artificial Sequence
  Oligonucleotide for detection of SNP TSC0034005
ttcatactatcat

SEQ ID NO: 136175 - DNA, 13 bp, Artificial Sequence
  Oligonucleotide for detection of SNP TSC0034005
atgatattatgaa

SEQ ID NO: 136176 - DNA, 13 bp, Artificial Sequence
  Oligonucleotide for detection of SNP TSC0034005
ttcataatatcat

SEQ ID NO: 136177 - DNA, 13 bp, Artificial Sequence
  Oligonucleotide for detection of SNP TSC0034006
tttgatattttty

SEQ ID NO: 136178 - DNA, 13 bp, Artificial Sequence
  Oligonucleotide for detection of SNP TSC0034006
raaaaatatcaaa

SEQ ID NO: 136179 - DNA, 13 bp, Artificial Sequence
  Oligonucleotide for detection of SNP TSC0034006
tttgattttttty

SEQ ID NO: 136180 - DNA, 13 bp, Artificial Sequence
  Oligonucleotide for detection of SNP TSC0034006
raaaaaaatcaaa

SEQ ID NO: 136181 - DNA, 13 bp, Artificial Sequence
  Oligonucleotide for detection of SNP TSC0034006
gggaggtgttagg

SEQ ID NO: 136182 - DNA, 13 bp, Artificial Sequence
  Oligonucleotide for detection of SNP TSC0034006
cctaacacctccc

SEQ ID NO: 136183 - DNA, 13 bp, Artificial Sequence
  Oligonucleotide for detection of SNP TSC0034006
gggaggagttagg

SEQ ID NO: 136184 - DNA, 13 bp, Artificial Sequence
  Oligonucleotide for detection of SNP TSC0034006
cctaactcctccc

SEQ ID NO: 136185 - DNA, 13 bp, Artificial Sequence
  Oligonucleotide for detection of SNP TSC0034007
gaatatatagtty

SEQ ID NO: 136186 - DNA, 13 bp, Artificial Sequence
  Oligonucleotide for detection of SNP TSC0034007
raactatatattc

SEQ ID NO: 136187 - DNA, 13 bp, Artificial Sequence
  Oligonucleotide for detection of SNP TSC0034007
gaatatgtagtty

SEQ ID NO: 136188 - DNA, 13 bp, Artificial Sequence
  Oligonucleotide for detection of SNP TSC0034007
raactacatattc

SEQ ID NO: 136189 - DNA, 13 bp, Artificial Sequence
  Oligonucleotide for detection of SNP TSC0034007
gaatacgtagtty

SEQ ID NO: 136190 - DNA, 13 bp, Artificial Sequence
  Oligonucleotide for detection of SNP TSC0034007
raactacgtattc

SEQ ID NO: 136191 - DNA, 13 bp, Artificial Sequence
  Oligonucleotide for detection of SNP TSC0034007
gggttgtgtgtty

SEQ ID NO: 136192 - DNA, 13 bp, Artificial Sequence
  Oligonucleotide for detection of SNP TSC0034007
raacacacaaccc

SEQ ID NO: 136193 - DNA, 13 bp, Artificial Sequence
  Oligonucleotide for detection of SNP TSC0034007
gggttgcgtgtty

SEQ ID NO: 136194 - DNA, 13 bp, Artificial Sequence
  Oligonucleotide for detection of SNP TSC0034007
raacacgcaaccc

SEQ ID NO: 136195 - DNA, 13 bp, Artificial Sequence
  Oligonucleotide for detection of SNP TSC0034008
agagtttgggtat

SEQ ID NO: 136196 - DNA, 13 bp, Artificial Sequence
  Oligonucleotide for detection of SNP TSC0034008
atacccaaactct

SEQ ID NO: 136197 - DNA, 13 bp, Artificial Sequence
  Oligonucleotide for detection of SNP TSC0034008
agagttcgggtat

SEQ ID NO: 136198 - DNA, 13 bp, Artificial Sequence
  Oligonucleotide for detection of SNP TSC0034008
atacccgaactct

SEQ ID NO: 136199 - DNA, 13 bp, Artificial Sequence
  Oligonucleotide for detection of SNP TSC0034013
aaaagtgtataat

SEQ ID NO: 136200 - DNA, 13 bp, Artificial Sequence
  Oligonucleotide for detection of SNP TSC0034013
attatacactttt

SEQ ID NO: 136201 - DNA, 13 bp, Artificial Sequence
  Oligonucleotide for detection of SNP TSC0034013
aaaagtatataat

SEQ ID NO: 136202 - DNA, 13 bp, Artificial Sequence
  Oligonucleotide for detection of SNP TSC0034013
attatatactttt

SEQ ID NO: 136203 - DNA, 13 bp, Artificial Sequence
  Oligonucleotide for detection of SNP TSC0034015
taagtgattttty

SEQ ID NO: 136204 - DNA, 13 bp, Artificial Sequence
  Oligonucleotide for detection of SNP TSC0034015
raaaaatcactta

SEQ ID NO: 136205 - DNA, 13 bp, Artificial Sequence
  Oligonucleotide for detection of SNP TSC0034015
taagtggttttty

SEQ ID NO: 136206 - DNA, 13 bp, Artificial Sequence
  Oligonucleotide for detection of SNP TSC0034015
raaaaaccactta

SEQ ID NO: 136207 - DNA, 13 bp, Artificial Sequence
  Oligonucleotide for detection of SNP TSC0034016
agttaggtgttgt

SEQ ID NO: 136208 - DNA, 13 bp, Artificial Sequence
  Oligonucleotide for detection of SNP TSC0034016
acaacacctaact

SEQ ID NO: 136209 - DNA, 13 bp, Artificial Sequence
  Oligonucleotide for detection of SNP TSC0034016
agttagatgttgt

SEQ ID NO: 136210 - DNA, 13 bp, Artificial Sequence
  Oligonucleotide for detection of SNP TSC0034016
acaacatctaact

SEQ ID NO: 136211 - DNA, 13 bp, Artificial Sequence
  Oligonucleotide for detection of SNP TSC0034017
gttttgatatttt

SEQ ID NO: 136212 - DNA, 13 bp, Artificial Sequence
  Oligonucleotide for detection of SNP TSC0034017
aaaatatcaaaac

SEQ ID NO: 136213 - DNA, 13 bp, Artificial Sequence
  Oligonucleotide for detection of SNP TSC0034017
gttttggtatttt

SEQ ID NO: 136214 - DNA, 13 bp, Artificial Sequence
  Oligonucleotide for detection of SNP TSC0034017
aaaataccaaaac

SEQ ID NO: 136215 - DNA, 13 bp, Artificial Sequence
  Oligonucleotide for detection of SNP TSC0034018
ggaagtattttty

SEQ ID NO: 136216 - DNA, 13 bp, Artificial Sequence
  Oligonucleotide for detection of SNP TSC0034018
raaaaatacttcc

SEQ ID NO: 136217 - DNA, 13 bp, Artificial Sequence
  Oligonucleotide for detection of SNP TSC0034018
ggaagtgttttty

SEQ ID NO: 136218 - DNA, 13 bp, Artificial Sequence
  Oligonucleotide for detection of SNP TSC0034018
raaaaacacttcc

SEQ ID NO: 136219 - DNA, 13 bp, Artificial Sequence
  Oligonucleotide for detection of SNP TSC0034022
gtaatgggtattt

SEQ ID NO: 136220 - DNA, 13 bp, Artificial Sequence
  Oligonucleotide for detection of SNP TSC0034022
aaatacccattac

SEQ ID NO: 136221 - DNA, 13 bp, Artificial Sequence
  Oligonucleotide for detection of SNP TSC0034022
gtaatgagtattt

SEQ ID NO: 136222 - DNA, 13 bp, Artificial Sequence
  Oligonucleotide for detection of SNP TSC0034022
aaatactcattac

SEQ ID NO: 136223 - DNA, 13 bp, Artificial Sequence
  Oligonucleotide for detection of SNP TSC0034024
ttttaatgttata

SEQ ID NO: 136224 - DNA, 13 bp, Artificial Sequence
  Oligonucleotide for detection of SNP TSC0034024
tataacattaaaa

SEQ ID NO: 136225 - DNA, 13 bp, Artificial Sequence
  Oligonucleotide for detection of SNP TSC0034024
ttttaacgttata

SEQ ID NO: 136226 - DNA, 13 bp, Artificial Sequence
  Oligonucleotide for detection of SNP TSC0034024
tataacgttaaaa

SEQ ID NO: 136227 - DNA, 13 bp, Artificial Sequence
  Oligonucleotide for detection of SNP TSC0034024
tgtggtgttaaga

SEQ ID NO: 136228 - DNA, 13 bp, Artificial Sequence
  Oligonucleotide for detection of SNP TSC0034024
tcttaacaccaca

SEQ ID NO: 136229 - DNA, 13 bp, Artificial Sequence
  Oligonucleotide for detection of SNP TSC0034024
tgtggtattaaga

SEQ ID NO: 136230 - DNA, 13 bp, Artificial Sequence
  Oligonucleotide for detection of SNP TSC0034024
tcttaataccaca

SEQ ID NO: 136231 - DNA, 13 bp, Artificial Sequence
  Oligonucleotide for detection of SNP TSC0034024
tgtggcgttaaga

SEQ ID NO: 136232 - DNA, 13 bp, Artificial Sequence
  Oligonucleotide for detection of SNP TSC0034024
tcttaacgccaca

SEQ ID NO: 136233 - DNA, 13 bp, Artificial Sequence
  Oligonucleotide for detection of SNP TSC0034025
tatagtgttttty

SEQ ID NO: 136234 - DNA, 13 bp, Artificial Sequence
  Oligonucleotide for detection of SNP TSC0034025
raaaaacactata

SEQ ID NO: 136235 - DNA, 13 bp, Artificial Sequence
  Oligonucleotide for detection of SNP TSC0034025
tatagcgttttty

SEQ ID NO: 136236 - DNA, 13 bp, Artificial Sequence
  Oligonucleotide for detection of SNP TSC0034025
raaaaacgctata

SEQ ID NO: 136237 - DNA, 13 bp, Artificial Sequence
  Oligonucleotide for detection of SNP TSC0034025
gaagggtgttgtg

SEQ ID NO: 136238 - DNA, 13 bp, Artificial Sequence
  Oligonucleotide for detection of SNP TSC0034025
cacaacacccttc

SEQ ID NO: 136239 - DNA, 13 bp, Artificial Sequence
  Oligonucleotide for detection of SNP TSC0034025
gaagggcgttgtg

SEQ ID NO: 136240 - DNA, 13 bp, Artificial Sequence
  Oligonucleotide for detection of SNP TSC0034025
cacaacgcccttc

SEQ ID NO: 136241 - DNA, 13 bp, Artificial Sequence
  Oligonucleotide for detection of SNP TSC0034028
tgaattggttttt

SEQ ID NO: 136242 - DNA, 13 bp, Artificial Sequence
  Oligonucleotide for detection of SNP TSC0034028
aaaaaccaattca

SEQ ID NO: 136243 - DNA, 13 bp, Artificial Sequence
  Oligonucleotide for detection of SNP TSC0034028
tgaatttgttttt

SEQ ID NO: 136244 - DNA, 13 bp, Artificial Sequence
  Oligonucleotide for detection of SNP TSC0034028
aaaaacaaattca

SEQ ID NO: 136245 - DNA, 13 bp, Artificial Sequence
  Oligonucleotide for detection of SNP TSC0034028
aaggattaattta

SEQ ID NO: 136246 - DNA, 13 bp, Artificial Sequence
  Oligonucleotide for detection of SNP TSC0034028
taaattaatcctt

SEQ ID NO: 136247 - DNA, 13 bp, Artificial Sequence
  Oligonucleotide for detection of SNP TSC0034028
aaggataaattta

SEQ ID NO: 136248 - DNA, 13 bp, Artificial Sequence
  Oligonucleotide for detection of SNP TSC0034028
taaatttatcctt

SEQ ID NO: 136249 - DNA, 13 bp, Artificial Sequence
  Oligonucleotide for detection of SNP TSC0034029
tttttgaggtgaa

SEQ ID NO: 136250 - DNA, 13 bp, Artificial Sequence
  Oligonucleotide for detection of SNP TSC0034029
ttcacctcaaaaa

SEQ ID NO: 136251 - DNA, 13 bp, Artificial Sequence
  Oligonucleotide for detection of SNP TSC0034029
tttttgtggtgaa

SEQ ID NO: 136252 - DNA, 13 bp, Artificial Sequence
  Oligonucleotide for detection of SNP TSC0034029
ttcaccacaaaaa

SEQ ID NO: 136253 - DNA, 13 bp, Artificial Sequence
  Oligonucleotide for detection of SNP TSC0034029
tttattttaaaaa

SEQ ID NO: 136254 - DNA, 13 bp, Artificial Sequence
  Oligonucleotide for detection of SNP TSC0034029
tttttaaaataaa

SEQ ID NO: 136255 - DNA, 13 bp, Artificial Sequence
  Oligonucleotide for detection of SNP TSC0034032
tgatttggggaat

SEQ ID NO: 136256 - DNA, 13 bp, Artificial Sequence
  Oligonucleotide for detection of SNP TSC0034032
attccccaaatca

SEQ ID NO: 136257 - DNA, 13 bp, Artificial Sequence
  Oligonucleotide for detection of SNP TSC0034032
tgatttagggaat

SEQ ID NO: 136258 - DNA, 13 bp, Artificial Sequence
  Oligonucleotide for detection of SNP TSC0034032
attccctaaatca

SEQ ID NO: 136259 - DNA, 13 bp, Artificial Sequence
  Oligonucleotide for detection of SNP TSC0034033
gtaataatttaat

SEQ ID NO: 136260 - DNA, 13 bp, Artificial Sequence
  Oligonucleotide for detection of SNP TSC0034033
attaaattattac

SEQ ID NO: 136261 - DNA, 13 bp, Artificial Sequence
  Oligonucleotide for detection of SNP TSC0034033
gtaatagtttaat

SEQ ID NO: 136262 - DNA, 13 bp, Artificial Sequence
  Oligonucleotide for detection of SNP TSC0034033
attaaactattac

SEQ ID NO: 136263 - DNA, 13 bp, Artificial Sequence
  Oligonucleotide for detection of SNP TSC0034034
tgtttttagtgay

SEQ ID NO: 136264 - DNA, 13 bp, Artificial Sequence
  Oligonucleotide for detection of SNP TSC0034034
rtcactaaaaaca

SEQ ID NO: 136265 - DNA, 13 bp, Artificial Sequence
  Oligonucleotide for detection of SNP TSC0034034
tgttttgagtgay

SEQ ID NO: 136266 - DNA, 13 bp, Artificial Sequence
  Oligonucleotide for detection of SNP TSC0034034
rtcactcaaaaca

SEQ ID NO: 136267 - DNA, 13 bp, Artificial Sequence
  Oligonucleotide for detection of SNP TSC0034034
tgtttcgagtgay

SEQ ID NO: 136268 - DNA, 13 bp, Artificial Sequence
  Oligonucleotide for detection of SNP TSC0034034
rtcactcgaaaca

SEQ ID NO: 136269 - DNA, 13 bp, Artificial Sequence
  Oligonucleotide for detection of SNP TSC0034034
gttattggggata

SEQ ID NO: 136270 - DNA, 13 bp, Artificial Sequence
  Oligonucleotide for detection of SNP TSC0034034
tatccccaataac

SEQ ID NO: 136271 - DNA, 13 bp, Artificial Sequence
  Oligonucleotide for detection of SNP TSC0034034
gttatttgggata

SEQ ID NO: 136272 - DNA, 13 bp, Artificial Sequence
  Oligonucleotide for detection of SNP TSC0034034
tatcccaaataac

SEQ ID NO: 136273 - DNA, 13 bp, Artificial Sequence
  Oligonucleotide for detection of SNP TSC0034034
gttattcgggata

SEQ ID NO: 136274 - DNA, 13 bp, Artificial Sequence
  Oligonucleotide for detection of SNP TSC0034034
tatcccgaataac

SEQ ID NO: 136275 - DNA, 13 bp, Artificial Sequence
  Oligonucleotide for detection of SNP TSC0034038
gtttattgtgtay

SEQ ID NO: 136276 - DNA, 13 bp, Artificial Sequence
  Oligonucleotide for detection of SNP TSC0034038
rtacacaataaac

SEQ ID NO: 136277 - DNA, 13 bp, Artificial Sequence
  Oligonucleotide for detection of SNP TSC0034038
gtttatcgtgtay

SEQ ID NO: 136278 - DNA, 13 bp, Artificial Sequence
  Oligonucleotide for detection of SNP TSC0034038
rtacacgataaac

SEQ ID NO: 136279 - DNA, 13 bp, Artificial Sequence
  Oligonucleotide for detection of SNP TSC0034038
gtgtatggtgaay

SEQ ID NO: 136280 - DNA, 13 bp, Artificial Sequence
  Oligonucleotide for detection of SNP TSC0034038
rttcaccatacac

SEQ ID NO: 136281 - DNA, 13 bp, Artificial Sequence
  Oligonucleotide for detection of SNP TSC0034038
gtgtatagtgaay

SEQ ID NO: 136282 - DNA, 13 bp, Artificial Sequence
  Oligonucleotide for detection of SNP TSC0034038
rttcactatacac

SEQ ID NO: 136283 - DNA, 13 bp, Artificial Sequence
  Oligonucleotide for detection of SNP TSC0034038
gtgtacggtgaay

SEQ ID NO: 136284 - DNA, 13 bp, Artificial Sequence
  Oligonucleotide for detection of SNP TSC0034038
rttcaccgtacac

SEQ ID NO: 136285 - DNA, 13 bp, Artificial Sequence
  Oligonucleotide for detection of SNP TSC0034039
ttagttttttaty

SEQ ID NO: 136286 - DNA, 13 bp, Artificial Sequence
  Oligonucleotide for detection of SNP TSC0034039
rataaaaaactaa

SEQ ID NO: 136287 - DNA, 13 bp, Artificial Sequence
  Oligonucleotide for detection of SNP TSC0034039
ttagttgtttaty

SEQ ID NO: 136288 - DNA, 13 bp, Artificial Sequence
  Oligonucleotide for detection of SNP TSC0034039
rataaacaactaa

SEQ ID NO: 136289 - DNA, 13 bp, Artificial Sequence
  Oligonucleotide for detection of SNP TSC0034039
ggtgaagagttag

SEQ ID NO: 136290 - DNA, 13 bp, Artificial Sequence
  Oligonucleotide for detection of SNP TSC0034039
ctaactcttcacc

SEQ ID NO: 136291 - DNA, 13 bp, Artificial Sequence
  Oligonucleotide for detection of SNP TSC0034039
ggtgaatagttag

SEQ ID NO: 136292 - DNA, 13 bp, Artificial Sequence
  Oligonucleotide for detection of SNP TSC0034039
ctaactattcacc

SEQ ID NO: 136293 - DNA, 13 bp, Artificial Sequence
  Oligonucleotide for detection of SNP TSC0034040
gagaatattttaa

SEQ ID NO: 136294 - DNA, 13 bp, Artificial Sequence
  Oligonucleotide for detection of SNP TSC0034040
ttaaaatattctc

SEQ ID NO: 136295 - DNA, 13 bp, Artificial Sequence
  Oligonucleotide for detection of SNP TSC0034040
gagaatgttttaa

SEQ ID NO: 136296 - DNA, 13 bp, Artificial Sequence
  Oligonucleotide for detection of SNP TSC0034040
ttaaaacattctc

SEQ ID NO: 136297 - DNA, 13 bp, Artificial Sequence
  Oligonucleotide for detection of SNP TSC0034040
gagaacgttttaa

SEQ ID NO: 136298 - DNA, 13 bp, Artificial Sequence
  Oligonucleotide for detection of SNP TSC0034040
ttaaaacgttctc

SEQ ID NO: 136299 - DNA, 13 bp, Artificial Sequence
  Oligonucleotide for detection of SNP TSC0034040
ttggagtgtttty

SEQ ID NO: 136300 - DNA, 13 bp, Artificial Sequence
  Oligonucleotide for detection of SNP TSC0034040
raaaacactccaa

SEQ ID NO: 136301 - DNA, 13 bp, Artificial Sequence
  Oligonucleotide for detection of SNP TSC0034040
ttggagcgtttty

SEQ ID NO: 136302 - DNA, 13 bp, Artificial Sequence
  Oligonucleotide for detection of SNP TSC0034040
raaaacgctccaa

SEQ ID NO: 136303 - DNA, 13 bp, Artificial Sequence
  Oligonucleotide for detection of SNP TSC0034041
gttttgaggagtt

SEQ ID NO: 136304 - DNA, 13 bp, Artificial Sequence
  Oligonucleotide for detection of SNP TSC0034041
aactcctcaaaac

SEQ ID NO: 136305 - DNA, 13 bp, Artificial Sequence
  Oligonucleotide for detection of SNP TSC0034041
gttttggggagtt

SEQ ID NO: 136306 - DNA, 13 bp, Artificial Sequence
  Oligonucleotide for detection of SNP TSC0034041
aactccccaaaac

SEQ ID NO: 136307 - DNA, 13 bp, Artificial Sequence
  Oligonucleotide for detection of SNP TSC0034042
tattgtaatatta

SEQ ID NO: 136308 - DNA, 13 bp, Artificial Sequence
  Oligonucleotide for detection of SNP TSC0034042
taatattacaata

SEQ ID NO: 136309 - DNA, 13 bp, Artificial Sequence
  Oligonucleotide for detection of SNP TSC0034042
tattgtgatatta

SEQ ID NO: 136310 - DNA, 13 bp, Artificial Sequence
  Oligonucleotide for detection of SNP TSC0034042
taatatcacaata

SEQ ID NO: 136311 - DNA, 13 bp, Artificial Sequence
  Oligonucleotide for detection of SNP TSC0034044
tgaagatgggtat

SEQ ID NO: 136312 - DNA, 13 bp, Artificial Sequence
  Oligonucleotide for detection of SNP TSC0034044
atacccatcttca

SEQ ID NO: 136313 - DNA, 13 bp, Artificial Sequence
  Oligonucleotide for detection of SNP TSC0034044
tgaagacgggtat

SEQ ID NO: 136314 - DNA, 13 bp, Artificial Sequence
  Oligonucleotide for detection of SNP TSC0034044
atacccgtcttca

SEQ ID NO: 136315 - DNA, 13 bp, Artificial Sequence
  Oligonucleotide for detection of SNP TSC0034046
tatgaaataataa

SEQ ID NO: 136316 - DNA, 13 bp, Artificial Sequence
  Oligonucleotide for detection of SNP TSC0034046
ttattatttcata

SEQ ID NO: 136317 - DNA, 13 bp, Artificial Sequence
  Oligonucleotide for detection of SNP TSC0034046
tatgaagtaataa

SEQ ID NO: 136318 - DNA, 13 bp, Artificial Sequence
  Oligonucleotide for detection of SNP TSC0034046
ttattacttcata

SEQ ID NO: 136319 - DNA, 13 bp, Artificial Sequence
  Oligonucleotide for detection of SNP TSC0034047
aaagttattatgg

SEQ ID NO: 136320 - DNA, 13 bp, Artificial Sequence
  Oligonucleotide for detection of SNP TSC0034047
ccataataacttt

SEQ ID NO: 136321 - DNA, 13 bp, Artificial Sequence
  Oligonucleotide for detection of SNP TSC0034047
aaagttgttatgg

SEQ ID NO: 136322 - DNA, 13 bp, Artificial Sequence
  Oligonucleotide for detection of SNP TSC0034047
ccataacaacttt

SEQ ID NO: 136323 - DNA, 13 bp, Artificial Sequence
  Oligonucleotide for detection of SNP TSC0034047
aaagttattacgg

SEQ ID NO: 136324 - DNA, 13 bp, Artificial Sequence
  Oligonucleotide for detection of SNP TSC0034047
ccgtaataacttt

SEQ ID NO: 136325 - DNA, 13 bp, Artificial Sequence
  Oligonucleotide for detection of SNP TSC0034047
aaagtcgttatgg

SEQ ID NO: 136326 - DNA, 13 bp, Artificial Sequence
  Oligonucleotide for detection of SNP TSC0034047
ccataacgacttt

SEQ ID NO: 136327 - DNA, 13 bp, Artificial Sequence
  Oligonucleotide for detection of SNP TSC0034047
aaagttgttacgg

SEQ ID NO: 136328 - DNA, 13 bp, Artificial Sequence
  Oligonucleotide for detection of SNP TSC0034047
ccgtaacaacttt

SEQ ID NO: 136329 - DNA, 13 bp, Artificial Sequence
  Oligonucleotide for detection of SNP TSC0034047
aaagtcgttacgg

SEQ ID NO: 136330 - DNA, 13 bp, Artificial Sequence
  Oligonucleotide for detection of SNP TSC0034047
ccgtaacgacttt

SEQ ID NO: 136331 - DNA, 13 bp, Artificial Sequence
  Oligonucleotide for detection of SNP TSC0034047
ttgtgatgatttt

SEQ ID NO: 136332 - DNA, 13 bp, Artificial Sequence
  Oligonucleotide for detection of SNP TSC0034047
aaaatcatcacaa

SEQ ID NO: 136333 - DNA, 13 bp, Artificial Sequence
  Oligonucleotide for detection of SNP TSC0034047
tcgtgatgatttt

SEQ ID NO: 136334 - DNA, 13 bp, Artificial Sequence
  Oligonucleotide for detection of SNP TSC0034047
aaaatcatcacga

SEQ ID NO: 136335 - DNA, 13 bp, Artificial Sequence
  Oligonucleotide for detection of SNP TSC0034047
ttgtgacgatttt

SEQ ID NO: 136336 - DNA, 13 bp, Artificial Sequence
  Oligonucleotide for detection of SNP TSC0034047
aaaatcgtcacaa

SEQ ID NO: 136337 - DNA, 13 bp, Artificial Sequence
  Oligonucleotide for detection of SNP TSC0034047
tcgtgacgatttt

SEQ ID NO: 136338 - DNA, 13 bp, Artificial Sequence
  Oligonucleotide for detection of SNP TSC0034047
aaaatcgtcacga

SEQ ID NO: 136339 - DNA, 13 bp, Artificial Sequence
  Oligonucleotide for detection of SNP TSC0034049
tatttaagaaata

SEQ ID NO: 136340 - DNA, 13 bp, Artificial Sequence
  Oligonucleotide for detection of SNP TSC0034049
tatttcttaaata

SEQ ID NO: 136341 - DNA, 13 bp, Artificial Sequence
  Oligonucleotide for detection of SNP TSC0034049
tatttaggaaata

SEQ ID NO: 136342 - DNA, 13 bp, Artificial Sequence
  Oligonucleotide for detection of SNP TSC0034049
tatttcctaaata

SEQ ID NO: 136343 - DNA, 13 bp, Artificial Sequence
  Oligonucleotide for detection of SNP TSC0034052
aggagtaggggta

SEQ ID NO: 136344 - DNA, 13 bp, Artificial Sequence
  Oligonucleotide for detection of SNP TSC0034052
tacccctactcct

SEQ ID NO: 136345 - DNA, 13 bp, Artificial Sequence
  Oligonucleotide for detection of SNP TSC0034052
aggagtgggggta

SEQ ID NO: 136346 - DNA, 13 bp, Artificial Sequence
  Oligonucleotide for detection of SNP TSC0034052
tacccccactcct

SEQ ID NO: 136347 - DNA, 13 bp, Artificial Sequence
  Oligonucleotide for detection of SNP TSC0034052
aggagcgggggta

SEQ ID NO: 136348 - DNA, 13 bp, Artificial Sequence
  Oligonucleotide for detection of SNP TSC0034052
tacccccgctcct

SEQ ID NO: 136349 - DNA, 13 bp, Artificial Sequence
  Oligonucleotide for detection of SNP TSC0034053
gaggttttgaatg

SEQ ID NO: 136350 - DNA, 13 bp, Artificial Sequence
  Oligonucleotide for detection of SNP TSC0034053
cattcaaaacctc

SEQ ID NO: 136351 - DNA, 13 bp, Artificial Sequence
  Oligonucleotide for detection of SNP TSC0034053
gaggttgtgaatg

SEQ ID NO: 136352 - DNA, 13 bp, Artificial Sequence
  Oligonucleotide for detection of SNP TSC0034053
cattcacaacctc

SEQ ID NO: 136353 - DNA, 13 bp, Artificial Sequence
  Oligonucleotide for detection of SNP TSC0034053
tatttagagttty

SEQ ID NO: 136354 - DNA, 13 bp, Artificial Sequence
  Oligonucleotide for detection of SNP TSC0034053
raaactctaaata

SEQ ID NO: 136355 - DNA, 13 bp, Artificial Sequence
  Oligonucleotide for detection of SNP TSC0034053
tatttatagttty

SEQ ID NO: 136356 - DNA, 13 bp, Artificial Sequence
  Oligonucleotide for detection of SNP TSC0034053
raaactataaata

SEQ ID NO: 136357 - DNA, 13 bp, Artificial Sequence
  Oligonucleotide for detection of SNP TSC0034054
tttagtatggatt

SEQ ID NO: 136358 - DNA, 13 bp, Artificial Sequence
  Oligonucleotide for detection of SNP TSC0034054
aatccatactaaa

SEQ ID NO: 136359 - DNA, 13 bp, Artificial Sequence
  Oligonucleotide for detection of SNP TSC0034054
tttagtgtggatt

SEQ ID NO: 136360 - DNA, 13 bp, Artificial Sequence
  Oligonucleotide for detection of SNP TSC0034054
aatccacactaaa

SEQ ID NO: 136361 - DNA, 13 bp, Artificial Sequence
  Oligonucleotide for detection of SNP TSC0034054
tttagcgtggatt

SEQ ID NO: 136362 - DNA, 13 bp, Artificial Sequence
  Oligonucleotide for detection of SNP TSC0034054
aatccacgctaaa

SEQ ID NO: 136363 - DNA, 13 bp, Artificial Sequence
  Oligonucleotide for detection of SNP TSC0034054
aatttatgttggg

SEQ ID NO: 136364 - DNA, 13 bp, Artificial Sequence
  Oligonucleotide for detection of SNP TSC0034054
cccaacataaatt

SEQ ID NO: 136365 - DNA, 13 bp, Artificial Sequence
  Oligonucleotide for detection of SNP TSC0034054
aatttacgttggg

SEQ ID NO: 136366 - DNA, 13 bp, Artificial Sequence
  Oligonucleotide for detection of SNP TSC0034054
cccaacgtaaatt

SEQ ID NO: 136367 - DNA, 13 bp, Artificial Sequence
  Oligonucleotide for detection of SNP TSC0034055
aaatttgttgggt

SEQ ID NO: 136368 - DNA, 13 bp, Artificial Sequence
  Oligonucleotide for detection of SNP TSC0034055
acccaacaaattt

SEQ ID NO: 136369 - DNA, 13 bp, Artificial Sequence
  Oligonucleotide for detection of SNP TSC0034055
aaattttttgggt

SEQ ID NO: 136370 - DNA, 13 bp, Artificial Sequence
  Oligonucleotide for detection of SNP TSC0034055
acccaaaaaattt

SEQ ID NO: 136371 - DNA, 13 bp, Artificial Sequence
  Oligonucleotide for detection of SNP TSC0034055
atttagtaagttt

SEQ ID NO: 136372 - DNA, 13 bp, Artificial Sequence
  Oligonucleotide for detection of SNP TSC0034055
aaacttactaaat

SEQ ID NO: 136373 - DNA, 13 bp, Artificial Sequence
  Oligonucleotide for detection of SNP TSC0034055
atttagaaagttt

SEQ ID NO: 136374 - DNA, 13 bp, Artificial Sequence
  Oligonucleotide for detection of SNP TSC0034055
aaactttctaaat

SEQ ID NO: 136375 - DNA, 13 bp, Artificial Sequence
  Oligonucleotide for detection of SNP TSC0034056
taattttaagtty

SEQ ID NO: 136376 - DNA, 13 bp, Artificial Sequence
  Oligonucleotide for detection of SNP TSC0034056
raacttaaaatta

SEQ ID NO: 136377 - DNA, 13 bp, Artificial Sequence
  Oligonucleotide for detection of SNP TSC0034056
gaattttagatta

SEQ ID NO: 136378 - DNA, 13 bp, Artificial Sequence
  Oligonucleotide for detection of SNP TSC0034056
taatctaaaattc

SEQ ID NO: 136379 - DNA, 13 bp, Artificial Sequence
  Oligonucleotide for detection of SNP TSC0034061
agttaggtataat

SEQ ID NO: 136380 - DNA, 13 bp, Artificial Sequence
  Oligonucleotide for detection of SNP TSC0034061
attatacctaact

SEQ ID NO: 136381 - DNA, 13 bp, Artificial Sequence
  Oligonucleotide for detection of SNP TSC0034061
agttagatataat

SEQ ID NO: 136382 - DNA, 13 bp, Artificial Sequence
  Oligonucleotide for detection of SNP TSC0034061
attatatctaact

SEQ ID NO: 136383 - DNA, 13 bp, Artificial Sequence
  Oligonucleotide for detection of SNP TSC0034062
gggattgtttttt

SEQ ID NO: 136384 - DNA, 13 bp, Artificial Sequence
  Oligonucleotide for detection of SNP TSC0034062
aaaaaacaatccc

SEQ ID NO: 136385 - DNA, 13 bp, Artificial Sequence
  Oligonucleotide for detection of SNP TSC0034067
tgtaggtgagagg

SEQ ID NO: 136386 - DNA, 13 bp, Artificial Sequence
  Oligonucleotide for detection of SNP TSC0034067
cctctcacctaca

SEQ ID NO: 136387 - DNA, 13 bp, Artificial Sequence
  Oligonucleotide for detection of SNP TSC0034067
tgtaggcgagagg

SEQ ID NO: 136388 - DNA, 13 bp, Artificial Sequence
  Oligonucleotide for detection of SNP TSC0034067
cctctcgcctaca

SEQ ID NO: 136389 - DNA, 13 bp, Artificial Sequence
  Oligonucleotide for detection of SNP TSC0034069
ggtttaattttgy

SEQ ID NO: 136390 - DNA, 13 bp, Artificial Sequence
  Oligonucleotide for detection of SNP TSC0034069
rcaaaattaaacc

SEQ ID NO: 136391 - DNA, 13 bp, Artificial Sequence
  Oligonucleotide for detection of SNP TSC0034069
ggtttatttttgy

SEQ ID NO: 136392 - DNA, 13 bp, Artificial Sequence
  Oligonucleotide for detection of SNP TSC0034069
rcaaaaataaacc

SEQ ID NO: 136393 - DNA, 13 bp, Artificial Sequence
  Oligonucleotide for detection of SNP TSC0034069
gtagggttagaty

SEQ ID NO: 136394 - DNA, 13 bp, Artificial Sequence
  Oligonucleotide for detection of SNP TSC0034069
ratctaaccctac

SEQ ID NO: 136395 - DNA, 13 bp, Artificial Sequence
  Oligonucleotide for detection of SNP TSC0034069
gtagggatagaty

SEQ ID NO: 136396 - DNA, 13 bp, Artificial Sequence
  Oligonucleotide for detection of SNP TSC0034069
ratctatccctac

SEQ ID NO: 136397 - DNA, 13 bp, Artificial Sequence
  Oligonucleotide for detection of SNP TSC0034070
agaggaaagagay

SEQ ID NO: 136398 - DNA, 13 bp, Artificial Sequence
  Oligonucleotide for detection of SNP TSC0034070
rtctctttcctct

SEQ ID NO: 136399 - DNA, 13 bp, Artificial Sequence
  Oligonucleotide for detection of SNP TSC0034070
agaggagagagay

SEQ ID NO: 136400 - DNA, 13 bp, Artificial Sequence
  Oligonucleotide for detection of SNP TSC0034070
rtctctctcctct

SEQ ID NO: 136401 - DNA, 13 bp, Artificial Sequence
  Oligonucleotide for detection of SNP TSC0034081
atatattgttaty

SEQ ID NO: 136402 - DNA, 13 bp, Artificial Sequence
  Oligonucleotide for detection of SNP TSC0034081
rataacaatatat

SEQ ID NO: 136403 - DNA, 13 bp, Artificial Sequence
  Oligonucleotide for detection of SNP TSC0034081
atatatcgttaty

SEQ ID NO: 136404 - DNA, 13 bp, Artificial Sequence
  Oligonucleotide for detection of SNP TSC0034081
rataacgatatat

SEQ ID NO: 136405 - DNA, 13 bp, Artificial Sequence
  Oligonucleotide for detection of SNP TSC0034081
ggtagtggtgtgt

SEQ ID NO: 136406 - DNA, 13 bp, Artificial Sequence
  Oligonucleotide for detection of SNP TSC0034081
acacaccactacc

SEQ ID NO: 136407 - DNA, 13 bp, Artificial Sequence
  Oligonucleotide for detection of SNP TSC0034081
ggtagtagtgtgt

SEQ ID NO: 136408 - DNA, 13 bp, Artificial Sequence
  Oligonucleotide for detection of SNP TSC0034081
acacactactacc

SEQ ID NO: 136409 - DNA, 13 bp, Artificial Sequence
  Oligonucleotide for detection of SNP TSC0034081
ggtagcggtgtgt

SEQ ID NO: 136410 - DNA, 13 bp, Artificial Sequence
  Oligonucleotide for detection of SNP TSC0034081
acacaccgctacc

SEQ ID NO: 136411 - DNA, 13 bp, Artificial Sequence
  Oligonucleotide for detection of SNP TSC0034082
attttgattgtat

SEQ ID NO: 136412 - DNA, 13 bp, Artificial Sequence
  Oligonucleotide for detection of SNP TSC0034082
atacaatcaaaat

SEQ ID NO: 136413 - DNA, 13 bp, Artificial Sequence
  Oligonucleotide for detection of SNP TSC0034082
attttgtttgtat

SEQ ID NO: 136414 - DNA, 13 bp, Artificial Sequence
  Oligonucleotide for detection of SNP TSC0034082
atacaaacaaaat

SEQ ID NO: 136415 - DNA, 13 bp, Artificial Sequence
  Oligonucleotide for detection of SNP TSC0034082
atgtagttaaaat

SEQ ID NO: 136416 - DNA, 13 bp, Artificial Sequence
  Oligonucleotide for detection of SNP TSC0034082
attttaactacat

SEQ ID NO: 136417 - DNA, 13 bp, Artificial Sequence
  Oligonucleotide for detection of SNP TSC0034082
atgtagataaaat

SEQ ID NO: 136418 - DNA, 13 bp, Artificial Sequence
  Oligonucleotide for detection of SNP TSC0034082
attttatctacat

SEQ ID NO: 136419 - DNA, 13 bp, Artificial Sequence
  Oligonucleotide for detection of SNP TSC0034089
gtatgttgtttta

SEQ ID NO: 136420 - DNA, 13 bp, Artificial Sequence
  Oligonucleotide for detection of SNP TSC0034089
taaaacaacatac

SEQ ID NO: 136421 - DNA, 13 bp, Artificial Sequence
  Oligonucleotide for detection of SNP TSC0034089
gtatgtcgtttta

SEQ ID NO: 136422 - DNA, 13 bp, Artificial Sequence
  Oligonucleotide for detection of SNP TSC0034089
taaaacgacatac

SEQ ID NO: 136423 - DNA, 13 bp, Artificial Sequence
  Oligonucleotide for detection of SNP TSC0034089
tggggtgatatgy

SEQ ID NO: 136424 - DNA, 13 bp, Artificial Sequence
  Oligonucleotide for detection of SNP TSC0034089
rcatatcacccca

SEQ ID NO: 136425 - DNA, 13 bp, Artificial Sequence
  Oligonucleotide for detection of SNP TSC0034089
tggggtaatatgy

SEQ ID NO: 136426 - DNA, 13 bp, Artificial Sequence
  Oligonucleotide for detection of SNP TSC0034089
rcatattacccca

SEQ ID NO: 136427 - DNA, 13 bp, Artificial Sequence
  Oligonucleotide for detection of SNP TSC0034089
tggggcgatatgy

SEQ ID NO: 136428 - DNA, 13 bp, Artificial Sequence
  Oligonucleotide for detection of SNP TSC0034089
rcatatcgcccca

SEQ ID NO: 136429 - DNA, 13 bp, Artificial Sequence
  Oligonucleotide for detection of SNP TSC0034093
gggtattgtggtg

SEQ ID NO: 136430 - DNA, 13 bp, Artificial Sequence
  Oligonucleotide for detection of SNP TSC0034093
caccacaataccc

SEQ ID NO: 136431 - DNA, 13 bp, Artificial Sequence
  Oligonucleotide for detection of SNP TSC0034093
gggtatcgtggtg

SEQ ID NO: 136432 - DNA, 13 bp, Artificial Sequence
  Oligonucleotide for detection of SNP TSC0034093
caccacgataccc

SEQ ID NO: 136433 - DNA, 13 bp, Artificial Sequence
  Oligonucleotide for detection of SNP TSC0034093
tattatgatgtty

SEQ ID NO: 136434 - DNA, 13 bp, Artificial Sequence
  Oligonucleotide for detection of SNP TSC0034093
raacatcataata

SEQ ID NO: 136435 - DNA, 13 bp, Artificial Sequence
  Oligonucleotide for detection of SNP TSC0034093
tattattatgtty

SEQ ID NO: 136436 - DNA, 13 bp, Artificial Sequence
  Oligonucleotide for detection of SNP TSC0034093
raacataataata

SEQ ID NO: 136437 - DNA, 13 bp, Artificial Sequence
  Oligonucleotide for detection of SNP TSC0034093
tattacgatgtty

SEQ ID NO: 136438 - DNA, 13 bp, Artificial Sequence
  Oligonucleotide for detection of SNP TSC0034093
raacatcgtaata

SEQ ID NO: 136439 - DNA, 13 bp, Artificial Sequence
  Oligonucleotide for detection of SNP TSC0034094
gtaagatgttaaa

SEQ ID NO: 136440 - DNA, 13 bp, Artificial Sequence
  Oligonucleotide for detection of SNP TSC0034094
tttaacatcttac

SEQ ID NO: 136441 - DNA, 13 bp, Artificial Sequence
  Oligonucleotide for detection of SNP TSC0034094
gtaagacgttaaa

SEQ ID NO: 136442 - DNA, 13 bp, Artificial Sequence
  Oligonucleotide for detection of SNP TSC0034094
tttaacgtcttac

SEQ ID NO: 136443 - DNA, 13 bp, Artificial Sequence
  Oligonucleotide for detection of SNP TSC0034095
atgtattttaaaa

SEQ ID NO: 136444 - DNA, 13 bp, Artificial Sequence
  Oligonucleotide for detection of SNP TSC0034095
ttttaaaatacat

SEQ ID NO: 136445 - DNA, 13 bp, Artificial Sequence
  Oligonucleotide for detection of SNP TSC0034095
atgtatgttaaaa

SEQ ID NO: 136446 - DNA, 13 bp, Artificial Sequence
  Oligonucleotide for detection of SNP TSC0034095
ttttaacatacat

SEQ ID NO: 136447 - DNA, 13 bp, Artificial Sequence
  Oligonucleotide for detection of SNP TSC0034095
atgtacgttaaaa

SEQ ID NO: 136448 - DNA, 13 bp, Artificial Sequence
  Oligonucleotide for detection of SNP TSC0034095
ttttaacgtacat

SEQ ID NO: 136449 - DNA, 13 bp, Artificial Sequence
  Oligonucleotide for detection of SNP TSC0034095
ttttagtgtatat

SEQ ID NO: 136450 - DNA, 13 bp, Artificial Sequence
  Oligonucleotide for detection of SNP TSC0034095
atatacactaaaa

SEQ ID NO: 136451 - DNA, 13 bp, Artificial Sequence
  Oligonucleotide for detection of SNP TSC0034095
ttttagcgtatat

SEQ ID NO: 136452 - DNA, 13 bp, Artificial Sequence
  Oligonucleotide for detection of SNP TSC0034095
atatacgctaaaa

SEQ ID NO: 136453 - DNA, 13 bp, Artificial Sequence
  Oligonucleotide for detection of SNP TSC0034100
ttttaatttattt

SEQ ID NO: 136454 - DNA, 13 bp, Artificial Sequence
  Oligonucleotide for detection of SNP TSC0034100
aaataaattaaaa

SEQ ID NO: 136455 - DNA, 13 bp, Artificial Sequence
  Oligonucleotide for detection of SNP TSC0034100
ttttaagttattt

SEQ ID NO: 136456 - DNA, 13 bp, Artificial Sequence
  Oligonucleotide for detection of SNP TSC0034100
aaataacttaaaa

SEQ ID NO: 136457 - DNA, 13 bp, Artificial Sequence
  Oligonucleotide for detection of SNP TSC0034100
aagtaagttagaa

SEQ ID NO: 136458 - DNA, 13 bp, Artificial Sequence
  Oligonucleotide for detection of SNP TSC0034100
ttctaacttactt

SEQ ID NO: 136459 - DNA, 13 bp, Artificial Sequence
  Oligonucleotide for detection of SNP TSC0034100
aagtaatttagaa

SEQ ID NO: 136460 - DNA, 13 bp, Artificial Sequence
  Oligonucleotide for detection of SNP TSC0034100
ttctaaattactt

SEQ ID NO: 136461 - DNA, 13 bp, Artificial Sequence
  Oligonucleotide for detection of SNP TSC0034101
attgtgatattta

SEQ ID NO: 136462 - DNA, 13 bp, Artificial Sequence
  Oligonucleotide for detection of SNP TSC0034101
taaatatcacaat

SEQ ID NO: 136463 - DNA, 13 bp, Artificial Sequence
  Oligonucleotide for detection of SNP TSC0034101
attgtggtattta

SEQ ID NO: 136464 - DNA, 13 bp, Artificial Sequence
  Oligonucleotide for detection of SNP TSC0034101
taaataccacaat

SEQ ID NO: 136465 - DNA, 13 bp, Artificial Sequence
  Oligonucleotide for detection of SNP TSC0034102
tagtgtggtttgt

SEQ ID NO: 136466 - DNA, 13 bp, Artificial Sequence
  Oligonucleotide for detection of SNP TSC0034102
acaaaccacacta

SEQ ID NO: 136467 - DNA, 13 bp, Artificial Sequence
  Oligonucleotide for detection of SNP TSC0034102
tagtgtagtttgt

SEQ ID NO: 136468 - DNA, 13 bp, Artificial Sequence
  Oligonucleotide for detection of SNP TSC0034102
acaaactacacta

SEQ ID NO: 136469 - DNA, 13 bp, Artificial Sequence
  Oligonucleotide for detection of SNP TSC0034103
ggtttgatgtata

SEQ ID NO: 136470 - DNA, 13 bp, Artificial Sequence
  Oligonucleotide for detection of SNP TSC0034103
tatacatcaaacc

SEQ ID NO: 136471 - DNA, 13 bp, Artificial Sequence
  Oligonucleotide for detection of SNP TSC0034103
ggtttgttgtata

SEQ ID NO: 136472 - DNA, 13 bp, Artificial Sequence
  Oligonucleotide for detection of SNP TSC0034103
tatacaacaaacc

SEQ ID NO: 136473 - DNA, 13 bp, Artificial Sequence
  Oligonucleotide for detection of SNP TSC0034103
tatgtattaaaty

SEQ ID NO: 136474 - DNA, 13 bp, Artificial Sequence
  Oligonucleotide for detection of SNP TSC0034103
ratttaatacata

SEQ ID NO: 136475 - DNA, 13 bp, Artificial Sequence
  Oligonucleotide for detection of SNP TSC0034103
tatgtagtaaaty

SEQ ID NO: 136476 - DNA, 13 bp, Artificial Sequence
  Oligonucleotide for detection of SNP TSC0034103
ratttactacata

SEQ ID NO: 136477 - DNA, 13 bp, Artificial Sequence
  Oligonucleotide for detection of SNP TSC0034105
ttatagaggttta

SEQ ID NO: 136478 - DNA, 13 bp, Artificial Sequence
  Oligonucleotide for detection of SNP TSC0034105
taaacctctataa

SEQ ID NO: 136479 - DNA, 13 bp, Artificial Sequence
  Oligonucleotide for detection of SNP TSC0034105
ttatagtggttta

SEQ ID NO: 136480 - DNA, 13 bp, Artificial Sequence
  Oligonucleotide for detection of SNP TSC0034105
taaaccactataa

SEQ ID NO: 136481 - DNA, 13 bp, Artificial Sequence
  Oligonucleotide for detection of SNP TSC0034105
taggtttttgtgg

SEQ ID NO: 136482 - DNA, 13 bp, Artificial Sequence
  Oligonucleotide for detection of SNP TSC0034105
ccacaaaaaccta

SEQ ID NO: 136483 - DNA, 13 bp, Artificial Sequence
  Oligonucleotide for detection of SNP TSC0034105
taggttattgtgg

SEQ ID NO: 136484 - DNA, 13 bp, Artificial Sequence
  Oligonucleotide for detection of SNP TSC0034105
ccacaataaccta

SEQ ID NO: 136485 - DNA, 13 bp, Artificial Sequence
  Oligonucleotide for detection of SNP TSC0034106
atattgtgattgt

SEQ ID NO: 136486 - DNA, 13 bp, Artificial Sequence
  Oligonucleotide for detection of SNP TSC0034106
acaatcacaatat

SEQ ID NO: 136487 - DNA, 13 bp, Artificial Sequence
  Oligonucleotide for detection of SNP TSC0034106
atattgcgattgt

SEQ ID NO: 136488 - DNA, 13 bp, Artificial Sequence
  Oligonucleotide for detection of SNP TSC0034106
acaatcgcaatat

SEQ ID NO: 136489 - DNA, 13 bp, Artificial Sequence
  Oligonucleotide for detection of SNP TSC0034106
atagttgtagtgt

SEQ ID NO: 136490 - DNA, 13 bp, Artificial Sequence
  Oligonucleotide for detection of SNP TSC0034106
acactacaactat

SEQ ID NO: 136491 - DNA, 13 bp, Artificial Sequence
  Oligonucleotide for detection of SNP TSC0034106
atagttatagtgt

SEQ ID NO: 136492 - DNA, 13 bp, Artificial Sequence
  Oligonucleotide for detection of SNP TSC0034106
acactataactat

SEQ ID NO: 136493 - DNA, 13 bp, Artificial Sequence
  Oligonucleotide for detection of SNP TSC0034106
atagtcgtagtgt

SEQ ID NO: 136494 - DNA, 13 bp, Artificial Sequence
  Oligonucleotide for detection of SNP TSC0034106
acactacgactat

SEQ ID NO: 136495 - DNA, 13 bp, Artificial Sequence
  Oligonucleotide for detection of SNP TSC0034107
aaaaaaattttay

SEQ ID NO: 136496 - DNA, 13 bp, Artificial Sequence
  Oligonucleotide for detection of SNP TSC0034107
rtaaaattttttt

SEQ ID NO: 136497 - DNA, 13 bp, Artificial Sequence
  Oligonucleotide for detection of SNP TSC0034107
aaaaaatttttay

SEQ ID NO: 136498 - DNA, 13 bp, Artificial Sequence
  Oligonucleotide for detection of SNP TSC0034107
rtaaaaatttttt

SEQ ID NO: 136499 - DNA, 13 bp, Artificial Sequence
  Oligonucleotide for detection of SNP TSC0034107
gtaaaattttttt

SEQ ID NO: 136500 - DNA, 13 bp, Artificial Sequence
  Oligonucleotide for detection of SNP TSC0034107
aaaaaaattttac

SEQ ID NO: 136501 - DNA, 13 bp, Artificial Sequence
  Oligonucleotide for detection of SNP TSC0034107
gtaaaaatttttt

SEQ ID NO: 136502 - DNA, 13 bp, Artificial Sequence
  Oligonucleotide for detection of SNP TSC0034107
aaaaaatttttac

SEQ ID NO: 136503 - DNA, 13 bp, Artificial Sequence
  Oligonucleotide for detection of SNP TSC0034109
tttttatggtgaa

SEQ ID NO: 136504 - DNA, 13 bp, Artificial Sequence
  Oligonucleotide for detection of SNP TSC0034109
ttcaccataaaaa

SEQ ID NO: 136505 - DNA, 13 bp, Artificial Sequence
  Oligonucleotide for detection of SNP TSC0034109
tttttacggtgaa

SEQ ID NO: 136506 - DNA, 13 bp, Artificial Sequence
  Oligonucleotide for detection of SNP TSC0034109
ttcaccgtaaaaa

SEQ ID NO: 136507 - DNA, 13 bp, Artificial Sequence
  Oligonucleotide for detection of SNP TSC0034110
aaatttgtagagt

SEQ ID NO: 136508 - DNA, 13 bp, Artificial Sequence
  Oligonucleotide for detection of SNP TSC0034110
actctacaaattt

SEQ ID NO: 136509 - DNA, 13 bp, Artificial Sequence
  Oligonucleotide for detection of SNP TSC0034110
aaatttatagagt

SEQ ID NO: 136510 - DNA, 13 bp, Artificial Sequence
  Oligonucleotide for detection of SNP TSC0034110
actctataaattt

SEQ ID NO: 136511 - DNA, 13 bp, Artificial Sequence
  Oligonucleotide for detection of SNP TSC0034116
gtttagaaaagty

SEQ ID NO: 136512 - DNA, 13 bp, Artificial Sequence
  Oligonucleotide for detection of SNP TSC0034116
racttttctaaac

SEQ ID NO: 136513 - DNA, 13 bp, Artificial Sequence
  Oligonucleotide for detection of SNP TSC0034116
gtttagtaaagty

SEQ ID NO: 136514 - DNA, 13 bp, Artificial Sequence
  Oligonucleotide for detection of SNP TSC0034116
ractttactaaac

SEQ ID NO: 136515 - DNA, 13 bp, Artificial Sequence
  Oligonucleotide for detection of SNP TSC0034116
gatttttttaaay

SEQ ID NO: 136516 - DNA, 13 bp, Artificial Sequence
  Oligonucleotide for detection of SNP TSC0034116
rtttaaaaaaatc

SEQ ID NO: 136517 - DNA, 13 bp, Artificial Sequence
  Oligonucleotide for detection of SNP TSC0034116
gattttgttaaay

SEQ ID NO: 136518 - DNA, 13 bp, Artificial Sequence
  Oligonucleotide for detection of SNP TSC0034116
rtttaacaaaatc

SEQ ID NO: 136519 - DNA, 13 bp, Artificial Sequence
  Oligonucleotide for detection of SNP TSC0034117
tgataaatgtaat

SEQ ID NO: 136520 - DNA, 13 bp, Artificial Sequence
  Oligonucleotide for detection of SNP TSC0034117
attacatttatca

SEQ ID NO: 136521 - DNA, 13 bp, Artificial Sequence
  Oligonucleotide for detection of SNP TSC0034117
tgataagtgtaat

SEQ ID NO: 136522 - DNA, 13 bp, Artificial Sequence
  Oligonucleotide for detection of SNP TSC0034117
attacacttatca

SEQ ID NO: 136523 - DNA, 13 bp, Artificial Sequence
  Oligonucleotide for detection of SNP TSC0034118
gaggttttgggtt

SEQ ID NO: 136524 - DNA, 13 bp, Artificial Sequence
  Oligonucleotide for detection of SNP TSC0034118
aacccaaaacctc

SEQ ID NO: 136525 - DNA, 13 bp, Artificial Sequence
  Oligonucleotide for detection of SNP TSC0034118
gaggttgtgggtt

SEQ ID NO: 136526 - DNA, 13 bp, Artificial Sequence
  Oligonucleotide for detection of SNP TSC0034118
aacccacaacctc

SEQ ID NO: 136527 - DNA, 13 bp, Artificial Sequence
  Oligonucleotide for detection of SNP TSC0034118
gaggtcgtgggtt

SEQ ID NO: 136528 - DNA, 13 bp, Artificial Sequence
  Oligonucleotide for detection of SNP TSC0034118
aacccacgacctc

SEQ ID NO: 136529 - DNA, 13 bp, Artificial Sequence
  Oligonucleotide for detection of SNP TSC0034118
agtttagggttty

SEQ ID NO: 136530 - DNA, 13 bp, Artificial Sequence
  Oligonucleotide for detection of SNP TSC0034118
raaaccctaaact

SEQ ID NO: 136531 - DNA, 13 bp, Artificial Sequence
  Oligonucleotide for detection of SNP TSC0034118
agtttatggttty

SEQ ID NO: 136532 - DNA, 13 bp, Artificial Sequence
  Oligonucleotide for detection of SNP TSC0034118
raaaccataaact

SEQ ID NO: 136533 - DNA, 13 bp, Artificial Sequence
  Oligonucleotide for detection of SNP TSC0034118
agtttacggttty

SEQ ID NO: 136534 - DNA, 13 bp, Artificial Sequence
  Oligonucleotide for detection of SNP TSC0034118
raaaccgtaaact

SEQ ID NO: 136535 - DNA, 13 bp, Artificial Sequence
  Oligonucleotide for detection of SNP TSC0034119
gtatggataagga

SEQ ID NO: 136536 - DNA, 13 bp, Artificial Sequence
  Oligonucleotide for detection of SNP TSC0034119
tccttatccatac

SEQ ID NO: 136537 - DNA, 13 bp, Artificial Sequence
  Oligonucleotide for detection of SNP TSC0034119
gtatgggtaagga

SEQ ID NO: 136538 - DNA, 13 bp, Artificial Sequence
  Oligonucleotide for detection of SNP TSC0034119
tccttacccatac

SEQ ID NO: 136539 - DNA, 13 bp, Artificial Sequence
  Oligonucleotide for detection of SNP TSC0034122
aatttttgggtta

SEQ ID NO: 136540 - DNA, 13 bp, Artificial Sequence
  Oligonucleotide for detection of SNP TSC0034122
taacccaaaaatt

SEQ ID NO: 136541 - DNA, 13 bp, Artificial Sequence
  Oligonucleotide for detection of SNP TSC0034122
aattttggggtta

SEQ ID NO: 136542 - DNA, 13 bp, Artificial Sequence
  Oligonucleotide for detection of SNP TSC0034122
taaccccaaaatt

SEQ ID NO: 136543 - DNA, 13 bp, Artificial Sequence
  Oligonucleotide for detection of SNP TSC0034122
aattttcgggtta

SEQ ID NO: 136544 - DNA, 13 bp, Artificial Sequence
  Oligonucleotide for detection of SNP TSC0034122
taacccgaaaatt

SEQ ID NO: 136545 - DNA, 13 bp, Artificial Sequence
  Oligonucleotide for detection of SNP TSC0034122
tggtttgagaatt

SEQ ID NO: 136546 - DNA, 13 bp, Artificial Sequence
  Oligonucleotide for detection of SNP TSC0034122
aattctcaaacca

SEQ ID NO: 136547 - DNA, 13 bp, Artificial Sequence
  Oligonucleotide for detection of SNP TSC0034122
tggttttagaatt

SEQ ID NO: 136548 - DNA, 13 bp, Artificial Sequence
  Oligonucleotide for detection of SNP TSC0034122
aattctaaaacca

SEQ ID NO: 136549 - DNA, 13 bp, Artificial Sequence
  Oligonucleotide for detection of SNP TSC0034122
tggttcgagaatt

SEQ ID NO: 136550 - DNA, 13 bp, Artificial Sequence
  Oligonucleotide for detection of SNP TSC0034122
aattctcgaacca

SEQ ID NO: 136551 - DNA, 13 bp, Artificial Sequence
  Oligonucleotide for detection of SNP TSC0034123
aggtaagagaata

SEQ ID NO: 136552 - DNA, 13 bp, Artificial Sequence
  Oligonucleotide for detection of SNP TSC0034123
tattctcttacct

SEQ ID NO: 136553 - DNA, 13 bp, Artificial Sequence
  Oligonucleotide for detection of SNP TSC0034123
aggtaaaagaata

SEQ ID NO: 136554 - DNA, 13 bp, Artificial Sequence
  Oligonucleotide for detection of SNP TSC0034123
tattcttttacct

SEQ ID NO: 136555 - DNA, 13 bp, Artificial Sequence
  Oligonucleotide for detection of SNP TSC0034124
gatagtattttay

SEQ ID NO: 136556 - DNA, 13 bp, Artificial Sequence
  Oligonucleotide for detection of SNP TSC0034124
rtaaaatactatc

SEQ ID NO: 136557 - DNA, 13 bp, Artificial Sequence
  Oligonucleotide for detection of SNP TSC0034124
gatagtgttttay

SEQ ID NO: 136558 - DNA, 13 bp, Artificial Sequence
  Oligonucleotide for detection of SNP TSC0034124
rtaaaacactatc

SEQ ID NO: 136559 - DNA, 13 bp, Artificial Sequence
  Oligonucleotide for detection of SNP TSC0034124
gatagcgttttay

SEQ ID NO: 136560 - DNA, 13 bp, Artificial Sequence
  Oligonucleotide for detection of SNP TSC0034124
rtaaaacgctatc

SEQ ID NO: 136561 - DNA, 13 bp, Artificial Sequence
  Oligonucleotide for detection of SNP TSC0034124
gtgaaatgttgty

SEQ ID NO: 136562 - DNA, 13 bp, Artificial Sequence
  Oligonucleotide for detection of SNP TSC0034124
racaacatttcac

SEQ ID NO: 136563 - DNA, 13 bp, Artificial Sequence
  Oligonucleotide for detection of SNP TSC0034124
gtgaaacgttgty

SEQ ID NO: 136564 - DNA, 13 bp, Artificial Sequence
  Oligonucleotide for detection of SNP TSC0034124
racaacgtttcac

SEQ ID NO: 136565 - DNA, 13 bp, Artificial Sequence
  Oligonucleotide for detection of SNP TSC0034129
aatttagatagat

SEQ ID NO: 136566 - DNA, 13 bp, Artificial Sequence
  Oligonucleotide for detection of SNP TSC0034129
atctatctaaatt

SEQ ID NO: 136567 - DNA, 13 bp, Artificial Sequence
  Oligonucleotide for detection of SNP TSC0034129
aatttaaatagat

SEQ ID NO: 136568 - DNA, 13 bp, Artificial Sequence
  Oligonucleotide for detection of SNP TSC0034129
atctatttaaatt

SEQ ID NO: 136569 - DNA, 13 bp, Artificial Sequence
  Oligonucleotide for detection of SNP TSC0034130
atatttgttgtty

SEQ ID NO: 136570 - DNA, 13 bp, Artificial Sequence
  Oligonucleotide for detection of SNP TSC0034130
raacaacaaatat

SEQ ID NO: 136571 - DNA, 13 bp, Artificial Sequence
  Oligonucleotide for detection of SNP TSC0034130
atatttattgtty

SEQ ID NO: 136572 - DNA, 13 bp, Artificial Sequence
  Oligonucleotide for detection of SNP TSC0034130
raacaataaatat

SEQ ID NO: 136573 - DNA, 13 bp, Artificial Sequence
  Oligonucleotide for detection of SNP TSC0034131
ttagttgttttay

SEQ ID NO: 136574 - DNA, 13 bp, Artificial Sequence
  Oligonucleotide for detection of SNP TSC0034131
rtaaaacaactaa

SEQ ID NO: 136575 - DNA, 13 bp, Artificial Sequence
  Oligonucleotide for detection of SNP TSC0034131
ttagtcgttttay

SEQ ID NO: 136576 - DNA, 13 bp, Artificial Sequence
  Oligonucleotide for detection of SNP TSC0034131
rtaaaacgactaa

SEQ ID NO: 136577 - DNA, 13 bp, Artificial Sequence
  Oligonucleotide for detection of SNP TSC0034131
gtgaggtggttgg

SEQ ID NO: 136578 - DNA, 13 bp, Artificial Sequence
  Oligonucleotide for detection of SNP TSC0034131
ccaaccacctcac

SEQ ID NO: 136579 - DNA, 13 bp, Artificial Sequence
  Oligonucleotide for detection of SNP TSC0034131
gtgaggcggttgg

SEQ ID NO: 136580 - DNA, 13 bp, Artificial Sequence
  Oligonucleotide for detection of SNP TSC0034131
ccaaccgcctcac

SEQ ID NO: 136581 - DNA, 13 bp, Artificial Sequence
  Oligonucleotide for detection of SNP TSC0034132
gggttgtgggtay

SEQ ID NO: 136582 - DNA, 13 bp, Artificial Sequence
  Oligonucleotide for detection of SNP TSC0034132
rtacccacaaccc

SEQ ID NO: 136583 - DNA, 13 bp, Artificial Sequence
  Oligonucleotide for detection of SNP TSC0034132
gggttgggggtay

SEQ ID NO: 136584 - DNA, 13 bp, Artificial Sequence
  Oligonucleotide for detection of SNP TSC0034132
rtacccccaaccc

SEQ ID NO: 136585 - DNA, 13 bp, Artificial Sequence
  Oligonucleotide for detection of SNP TSC0034132
gggttgcgggtay

SEQ ID NO: 136586 - DNA, 13 bp, Artificial Sequence
  Oligonucleotide for detection of SNP TSC0034132
rtacccgcaaccc

SEQ ID NO: 136587 - DNA, 13 bp, Artificial Sequence
  Oligonucleotide for detection of SNP TSC0034132
gtgtttttaatty

SEQ ID NO: 136588 - DNA, 13 bp, Artificial Sequence
  Oligonucleotide for detection of SNP TSC0034132
raattaaaaacac

SEQ ID NO: 136589 - DNA, 13 bp, Artificial Sequence
  Oligonucleotide for detection of SNP TSC0034132
gtgttcgtaatty

SEQ ID NO: 136590 - DNA, 13 bp, Artificial Sequence
  Oligonucleotide for detection of SNP TSC0034132
raattacgaacac

SEQ ID NO: 136591 - DNA, 13 bp, Artificial Sequence
  Oligonucleotide for detection of SNP TSC0034133
gtaggatgagtat

SEQ ID NO: 136592 - DNA, 13 bp, Artificial Sequence
  Oligonucleotide for detection of SNP TSC0034133
atactcatcctac

SEQ ID NO: 136593 - DNA, 13 bp, Artificial Sequence
  Oligonucleotide for detection of SNP TSC0034133
gtaggacgagtat

SEQ ID NO: 136594 - DNA, 13 bp, Artificial Sequence
  Oligonucleotide for detection of SNP TSC0034133
atactcgtcctac

SEQ ID NO: 136595 - DNA, 13 bp, Artificial Sequence
  Oligonucleotide for detection of SNP TSC0034133
atatttgttttgy

SEQ ID NO: 136596 - DNA, 13 bp, Artificial Sequence
  Oligonucleotide for detection of SNP TSC0034133
rcaaaacaaatat

SEQ ID NO: 136597 - DNA, 13 bp, Artificial Sequence
  Oligonucleotide for detection of SNP TSC0034133
atatttattttgy

SEQ ID NO: 136598 - DNA, 13 bp, Artificial Sequence
  Oligonucleotide for detection of SNP TSC0034133
rcaaaataaatat

SEQ ID NO: 136599 - DNA, 13 bp, Artificial Sequence
  Oligonucleotide for detection of SNP TSC0034133
atattcgttttgy

SEQ ID NO: 136600 - DNA, 13 bp, Artificial Sequence
  Oligonucleotide for detection of SNP TSC0034133
rcaaaacgaatat

SEQ ID NO: 136601 - DNA, 13 bp, Artificial Sequence
  Oligonucleotide for detection of SNP TSC0034134
taagagatattta

SEQ ID NO: 136602 - DNA, 13 bp, Artificial Sequence
  Oligonucleotide for detection of SNP TSC0034134
taaatatctctta

SEQ ID NO: 136603 - DNA, 13 bp, Artificial Sequence
  Oligonucleotide for detection of SNP TSC0034134
taagaggtattta

SEQ ID NO: 136604 - DNA, 13 bp, Artificial Sequence
  Oligonucleotide for detection of SNP TSC0034134
taaatacctctta

SEQ ID NO: 136605 - DNA, 13 bp, Artificial Sequence
  Oligonucleotide for detection of SNP TSC0034135
ttagttatttggt

SEQ ID NO: 136606 - DNA, 13 bp, Artificial Sequence
  Oligonucleotide for detection of SNP TSC0034135
accaaataactaa

SEQ ID NO: 136607 - DNA, 13 bp, Artificial Sequence
  Oligonucleotide for detection of SNP TSC0034135
ttagttgtttggt

SEQ ID NO: 136608 - DNA, 13 bp, Artificial Sequence
  Oligonucleotide for detection of SNP TSC0034135
accaaacaactaa

SEQ ID NO: 136609 - DNA, 13 bp, Artificial Sequence
  Oligonucleotide for detection of SNP TSC0034135
ttagtcgtttggt

SEQ ID NO: 136610 - DNA, 13 bp, Artificial Sequence
  Oligonucleotide for detection of SNP TSC0034135
accaaacgactaa

SEQ ID NO: 136611 - DNA, 13 bp, Artificial Sequence
  Oligonucleotide for detection of SNP TSC0034135
attaggtgattaa

SEQ ID NO: 136612 - DNA, 13 bp, Artificial Sequence
  Oligonucleotide for detection of SNP TSC0034135
ttaatcacctaat

SEQ ID NO: 136613 - DNA, 13 bp, Artificial Sequence
  Oligonucleotide for detection of SNP TSC0034135
attaggcgattaa

SEQ ID NO: 136614 - DNA, 13 bp, Artificial Sequence
  Oligonucleotide for detection of SNP TSC0034135
ttaatcgcctaat

SEQ ID NO: 136615 - DNA, 13 bp, Artificial Sequence
  Oligonucleotide for detection of SNP TSC0034138
aagttataaagat

SEQ ID NO: 136616 - DNA, 13 bp, Artificial Sequence
  Oligonucleotide for detection of SNP TSC0034138
atctttataactt

SEQ ID NO: 136617 - DNA, 13 bp, Artificial Sequence
  Oligonucleotide for detection of SNP TSC0034138
aagttagaaagat

SEQ ID NO: 136618 - DNA, 13 bp, Artificial Sequence
  Oligonucleotide for detection of SNP TSC0034138
atctttctaactt

SEQ ID NO: 136619 - DNA, 13 bp, Artificial Sequence
  Oligonucleotide for detection of SNP TSC0034138
atttttgtgattt

SEQ ID NO: 136620 - DNA, 13 bp, Artificial Sequence
  Oligonucleotide for detection of SNP TSC0034138
aaatcacaaaaat

SEQ ID NO: 136621 - DNA, 13 bp, Artificial Sequence
  Oligonucleotide for detection of SNP TSC0034140
tttgattgttggt

SEQ ID NO: 136622 - DNA, 13 bp, Artificial Sequence
  Oligonucleotide for detection of SNP TSC0034140
accaacaatcaaa

SEQ ID NO: 136623 - DNA, 13 bp, Artificial Sequence
  Oligonucleotide for detection of SNP TSC0034140
attaattgttagg

SEQ ID NO: 136624 - DNA, 13 bp, Artificial Sequence
  Oligonucleotide for detection of SNP TSC0034140
cctaacaattaat

SEQ ID NO: 136625 - DNA, 13 bp, Artificial Sequence
  Oligonucleotide for detection of SNP TSC0034140
attaatagttagg

SEQ ID NO: 136626 - DNA, 13 bp, Artificial Sequence
  Oligonucleotide for detection of SNP TSC0034140
cctaactattaat

SEQ ID NO: 136627 - DNA, 13 bp, Artificial Sequence
  Oligonucleotide for detection of SNP TSC0034140
attaatcgttagg

SEQ ID NO: 136628 - DNA, 13 bp, Artificial Sequence
  Oligonucleotide for detection of SNP TSC0034140
cctaacgattaat

SEQ ID NO: 136629 - DNA, 13 bp, Artificial Sequence
  Oligonucleotide for detection of SNP TSC0034141
tttgttatggggy

SEQ ID NO: 136630 - DNA, 13 bp, Artificial Sequence
  Oligonucleotide for detection of SNP TSC0034141
rccccataacaaa

SEQ ID NO: 136631 - DNA, 13 bp, Artificial Sequence
  Oligonucleotide for detection of SNP TSC0034141
tttgttgtggggy

SEQ ID NO: 136632 - DNA, 13 bp, Artificial Sequence
  Oligonucleotide for detection of SNP TSC0034141
rccccacaacaaa

SEQ ID NO: 136633 - DNA, 13 bp, Artificial Sequence
  Oligonucleotide for detection of SNP TSC0034141
tttgtcgtggggy

SEQ ID NO: 136634 - DNA, 13 bp, Artificial Sequence
  Oligonucleotide for detection of SNP TSC0034141
rccccacgacaaa

SEQ ID NO: 136635 - DNA, 13 bp, Artificial Sequence
  Oligonucleotide for detection of SNP TSC0034141
gttttatgataga

SEQ ID NO: 136636 - DNA, 13 bp, Artificial Sequence
  Oligonucleotide for detection of SNP TSC0034141
tctatcataaaac

SEQ ID NO: 136637 - DNA, 13 bp, Artificial Sequence
  Oligonucleotide for detection of SNP TSC0034141
gttttacgataga

SEQ ID NO: 136638 - DNA, 13 bp, Artificial Sequence
  Oligonucleotide for detection of SNP TSC0034141
tctatcgtaaaac

SEQ ID NO: 136639 - DNA, 13 bp, Artificial Sequence
  Oligonucleotide for detection of SNP TSC0034142
ttggagggtagtg

SEQ ID NO: 136640 - DNA, 13 bp, Artificial Sequence
  Oligonucleotide for detection of SNP TSC0034142
cactaccctccaa

SEQ ID NO: 136641 - DNA, 13 bp, Artificial Sequence
  Oligonucleotide for detection of SNP TSC0034142
tattgttttttaa

SEQ ID NO: 136642 - DNA, 13 bp, Artificial Sequence
  Oligonucleotide for detection of SNP TSC0034142
ttaaaaaacaata

SEQ ID NO: 136643 - DNA, 13 bp, Artificial Sequence
  Oligonucleotide for detection of SNP TSC0034143
tgtgaatgagaga

SEQ ID NO: 136644 - DNA, 13 bp, Artificial Sequence
  Oligonucleotide for detection of SNP TSC0034143
tctctcattcaca

SEQ ID NO: 136645 - DNA, 13 bp, Artificial Sequence
  Oligonucleotide for detection of SNP TSC0034143
cgtgaatgagaga

SEQ ID NO: 136646 - DNA, 13 bp, Artificial Sequence
  Oligonucleotide for detection of SNP TSC0034143
tctctcattcacg

SEQ ID NO: 136647 - DNA, 13 bp, Artificial Sequence
  Oligonucleotide for detection of SNP TSC0034143
tgtgaacgagaga

SEQ ID NO: 136648 - DNA, 13 bp, Artificial Sequence
  Oligonucleotide for detection of SNP TSC0034143
tctctcgttcaca

SEQ ID NO: 136649 - DNA, 13 bp, Artificial Sequence
  Oligonucleotide for detection of SNP TSC0034143
cgtgaacgagaga

SEQ ID NO: 136650 - DNA, 13 bp, Artificial Sequence
  Oligonucleotide for detection of SNP TSC0034143
tctctcgttcacg

SEQ ID NO: 136651 - DNA, 13 bp, Artificial Sequence
  Oligonucleotide for detection of SNP TSC0034143
tttttcgtttatg

SEQ ID NO: 136652 - DNA, 13 bp, Artificial Sequence
  Oligonucleotide for detection of SNP TSC0034143
cataaacgaaaaa

SEQ ID NO: 136653 - DNA, 13 bp, Artificial Sequence
  Oligonucleotide for detection of SNP TSC0034143
ttttttatttacg

SEQ ID NO: 136654 - DNA, 13 bp, Artificial Sequence
  Oligonucleotide for detection of SNP TSC0034143
cgtaaataaaaaa

SEQ ID NO: 136655 - DNA, 13 bp, Artificial Sequence
  Oligonucleotide for detection of SNP TSC0034143
ttttttgtttacg

SEQ ID NO: 136656 - DNA, 13 bp, Artificial Sequence
  Oligonucleotide for detection of SNP TSC0034143
cgtaaacaaaaaa

SEQ ID NO: 136657 - DNA, 13 bp, Artificial Sequence
  Oligonucleotide for detection of SNP TSC0034143
tttttcgtttacg

SEQ ID NO: 136658 - DNA, 13 bp, Artificial Sequence
  Oligonucleotide for detection of SNP TSC0034143
cgtaaacgaaaaa

SEQ ID NO: 136659 - DNA, 13 bp, Artificial Sequence
  Oligonucleotide for detection of SNP TSC0034145
atttgtgtttgtt

SEQ ID NO: 136660 - DNA, 13 bp, Artificial Sequence
  Oligonucleotide for detection of SNP TSC0034145
aacaaacacaaat

SEQ ID NO: 136661 - DNA, 13 bp, Artificial Sequence
  Oligonucleotide for detection of SNP TSC0034145
atttgtatttgtt

SEQ ID NO: 136662 - DNA, 13 bp, Artificial Sequence
  Oligonucleotide for detection of SNP TSC0034145
aacaaatacaaat

SEQ ID NO: 136663 - DNA, 13 bp, Artificial Sequence
  Oligonucleotide for detection of SNP TSC0034148
aaaattaaagtgg

SEQ ID NO: 136664 - DNA, 13 bp, Artificial Sequence
  Oligonucleotide for detection of SNP TSC0034148
ccactttaatttt

SEQ ID NO: 136665 - DNA, 13 bp, Artificial Sequence
  Oligonucleotide for detection of SNP TSC0034148
aaaattgaagtgg

SEQ ID NO: 136666 - DNA, 13 bp, Artificial Sequence
  Oligonucleotide for detection of SNP TSC0034148
ccacttcaatttt

SEQ ID NO: 136667 - DNA, 13 bp, Artificial Sequence
  Oligonucleotide for detection of SNP TSC0034148
aaaatcgaagtgg

SEQ ID NO: 136668 - DNA, 13 bp, Artificial Sequence
  Oligonucleotide for detection of SNP TSC0034148
ccacttcgatttt

SEQ ID NO: 136669 - DNA, 13 bp, Artificial Sequence
  Oligonucleotide for detection of SNP TSC0034148
ttattttgatttt

SEQ ID NO: 136670 - DNA, 13 bp, Artificial Sequence
  Oligonucleotide for detection of SNP TSC0034148
aaaatcaaaataa

SEQ ID NO: 136671 - DNA, 13 bp, Artificial Sequence
  Oligonucleotide for detection of SNP TSC0034149
ttagttatatttt

SEQ ID NO: 136672 - DNA, 13 bp, Artificial Sequence
  Oligonucleotide for detection of SNP TSC0034149
aaaatataactaa

SEQ ID NO: 136673 - DNA, 13 bp, Artificial Sequence
  Oligonucleotide for detection of SNP TSC0034149
ttagttgtatttt

SEQ ID NO: 136674 - DNA, 13 bp, Artificial Sequence
  Oligonucleotide for detection of SNP TSC0034149
aaaatacaactaa

SEQ ID NO: 136675 - DNA, 13 bp, Artificial Sequence
  Oligonucleotide for detection of SNP TSC0034149
ttagtcgtatttt

SEQ ID NO: 136676 - DNA, 13 bp, Artificial Sequence
  Oligonucleotide for detection of SNP TSC0034149
aaaatacgactaa

SEQ ID NO: 136677 - DNA, 13 bp, Artificial Sequence
  Oligonucleotide for detection of SNP TSC0034149
agggtatgattag

SEQ ID NO: 136678 - DNA, 13 bp, Artificial Sequence
  Oligonucleotide for detection of SNP TSC0034149
ctaatcataccct

SEQ ID NO: 136679 - DNA, 13 bp, Artificial Sequence
  Oligonucleotide for detection of SNP TSC0034149
agggtacgattag

SEQ ID NO: 136680 - DNA, 13 bp, Artificial Sequence
  Oligonucleotide for detection of SNP TSC0034149
ctaatcgtaccct

SEQ ID NO: 136681 - DNA, 13 bp, Artificial Sequence
  Oligonucleotide for detection of SNP TSC0034151
tttttgatggagy

SEQ ID NO: 136682 - DNA, 13 bp, Artificial Sequence
  Oligonucleotide for detection of SNP TSC0034151
rctccatcaaaaa

SEQ ID NO: 136683 - DNA, 13 bp, Artificial Sequence
  Oligonucleotide for detection of SNP TSC0034151
tttttggtggagy

SEQ ID NO: 136684 - DNA, 13 bp, Artificial Sequence
  Oligonucleotide for detection of SNP TSC0034151
rctccaccaaaaa

SEQ ID NO: 136685 - DNA, 13 bp, Artificial Sequence
  Oligonucleotide for detection of SNP TSC0034153
taagagatggggt

SEQ ID NO: 136686 - DNA, 13 bp, Artificial Sequence
  Oligonucleotide for detection of SNP TSC0034153
accccatctctta

SEQ ID NO: 136687 - DNA, 13 bp, Artificial Sequence
  Oligonucleotide for detection of SNP TSC0034153
taagaggtggggt

SEQ ID NO: 136688 - DNA, 13 bp, Artificial Sequence
  Oligonucleotide for detection of SNP TSC0034153
accccacctctta

SEQ ID NO: 136689 - DNA, 13 bp, Artificial Sequence
  Oligonucleotide for detection of SNP TSC0034154
ttatttgtataaa

SEQ ID NO: 136690 - DNA, 13 bp, Artificial Sequence
  Oligonucleotide for detection of SNP TSC0034154
tttatacaaataa

SEQ ID NO: 136691 - DNA, 13 bp, Artificial Sequence
  Oligonucleotide for detection of SNP TSC0034154
tttatagagatgg

SEQ ID NO: 136692 - DNA, 13 bp, Artificial Sequence
  Oligonucleotide for detection of SNP TSC0034154
ccatctctataaa

SEQ ID NO: 136693 - DNA, 13 bp, Artificial Sequence
  Oligonucleotide for detection of SNP TSC0034154
tttatatagatgg

SEQ ID NO: 136694 - DNA, 13 bp, Artificial Sequence
  Oligonucleotide for detection of SNP TSC0034154
ccatctatataaa

SEQ ID NO: 136695 - DNA, 13 bp, Artificial Sequence
  Oligonucleotide for detection of SNP TSC0034158
ttatttgtttgtg

SEQ ID NO: 136696 - DNA, 13 bp, Artificial Sequence
  Oligonucleotide for detection of SNP TSC0034158
cacaaacaaataa

SEQ ID NO: 136697 - DNA, 13 bp, Artificial Sequence
  Oligonucleotide for detection of SNP TSC0034158
ttatttttttgtg

SEQ ID NO: 136698 - DNA, 13 bp, Artificial Sequence
  Oligonucleotide for detection of SNP TSC0034158
cacaaaaaaataa

SEQ ID NO: 136699 - DNA, 13 bp, Artificial Sequence
  Oligonucleotide for detection of SNP TSC0034158
tataaataagtaa

SEQ ID NO: 136700 - DNA, 13 bp, Artificial Sequence
  Oligonucleotide for detection of SNP TSC0034158
ttacttatttata

SEQ ID NO: 136701 - DNA, 13 bp, Artificial Sequence
  Oligonucleotide for detection of SNP TSC0034158
tataaaaaagtaa

SEQ ID NO: 136702 - DNA, 13 bp, Artificial Sequence
  Oligonucleotide for detection of SNP TSC0034158
ttacttttttata

SEQ ID NO: 136703 - DNA, 13 bp, Artificial Sequence
  Oligonucleotide for detection of SNP TSC0034165
tagggtggaaggg

SEQ ID NO: 136704 - DNA, 13 bp, Artificial Sequence
  Oligonucleotide for detection of SNP TSC0034165
cccttccacccta

SEQ ID NO: 136705 - DNA, 13 bp, Artificial Sequence
  Oligonucleotide for detection of SNP TSC0034165
tagggtagaaggg

SEQ ID NO: 136706 - DNA, 13 bp, Artificial Sequence
  Oligonucleotide for detection of SNP TSC0034165
cccttctacccta

SEQ ID NO: 136707 - DNA, 13 bp, Artificial Sequence
  Oligonucleotide for detection of SNP TSC0034166
gagagtaaatttt

SEQ ID NO: 136708 - DNA, 13 bp, Artificial Sequence
  Oligonucleotide for detection of SNP TSC0034166
aaaatttactctc

SEQ ID NO: 136709 - DNA, 13 bp, Artificial Sequence
  Oligonucleotide for detection of SNP TSC0034166
gagagtgaatttt

SEQ ID NO: 136710 - DNA, 13 bp, Artificial Sequence
  Oligonucleotide for detection of SNP TSC0034166
aaaattcactctc

SEQ ID NO: 136711 - DNA, 13 bp, Artificial Sequence
  Oligonucleotide for detection of SNP TSC0034166
gagagcgaatttt

SEQ ID NO: 136712 - DNA, 13 bp, Artificial Sequence
  Oligonucleotide for detection of SNP TSC0034166
aaaattcgctctc

SEQ ID NO: 136713 - DNA, 13 bp, Artificial Sequence
  Oligonucleotide for detection of SNP TSC0034166
agggtttgtttty

SEQ ID NO: 136714 - DNA, 13 bp, Artificial Sequence
  Oligonucleotide for detection of SNP TSC0034166
raaaacaaaccct

SEQ ID NO: 136715 - DNA, 13 bp, Artificial Sequence
  Oligonucleotide for detection of SNP TSC0034166
agggttcgtttty

SEQ ID NO: 136716 - DNA, 13 bp, Artificial Sequence
  Oligonucleotide for detection of SNP TSC0034166
raaaacgaaccct

SEQ ID NO: 136717 - DNA, 13 bp, Artificial Sequence
  Oligonucleotide for detection of SNP TSC0034172
ggtttaattgttt

SEQ ID NO: 136718 - DNA, 13 bp, Artificial Sequence
  Oligonucleotide for detection of SNP TSC0034172
aaacaattaaacc

SEQ ID NO: 136719 - DNA, 13 bp, Artificial Sequence
  Oligonucleotide for detection of SNP TSC0034172
ggtttagttgttt

SEQ ID NO: 136720 - DNA, 13 bp, Artificial Sequence
  Oligonucleotide for detection of SNP TSC0034172
aaacaactaaacc

SEQ ID NO: 136721 - DNA, 13 bp, Artificial Sequence
  Oligonucleotide for detection of SNP TSC0034174
aaaatggtgggat

SEQ ID NO: 136722 - DNA, 13 bp, Artificial Sequence
  Oligonucleotide for detection of SNP TSC0034174
atcccaccatttt

SEQ ID NO: 136723 - DNA, 13 bp, Artificial Sequence
  Oligonucleotide for detection of SNP TSC0034174
aaaatgttgggat

SEQ ID NO: 136724 - DNA, 13 bp, Artificial Sequence
  Oligonucleotide for detection of SNP TSC0034174
atcccaacatttt

SEQ ID NO: 136725 - DNA, 13 bp, Artificial Sequence
  Oligonucleotide for detection of SNP TSC0034175
tgtaaatggagta

SEQ ID NO: 136726 - DNA, 13 bp, Artificial Sequence
  Oligonucleotide for detection of SNP TSC0034175
tactccatttaca

SEQ ID NO: 136727 - DNA, 13 bp, Artificial Sequence
  Oligonucleotide for detection of SNP TSC0034175
tgtaaacggagta

SEQ ID NO: 136728 - DNA, 13 bp, Artificial Sequence
  Oligonucleotide for detection of SNP TSC0034175
tactccgtttaca

SEQ ID NO: 136729 - DNA, 13 bp, Artificial Sequence
  Oligonucleotide for detection of SNP TSC0034177
attgaggtttagg

SEQ ID NO: 136730 - DNA, 13 bp, Artificial Sequence
  Oligonucleotide for detection of SNP TSC0034177
cctaaacctcaat

SEQ ID NO: 136731 - DNA, 13 bp, Artificial Sequence
  Oligonucleotide for detection of SNP TSC0034177
attgagatttagg

SEQ ID NO: 136732 - DNA, 13 bp, Artificial Sequence
  Oligonucleotide for detection of SNP TSC0034177
cctaaatctcaat

SEQ ID NO: 136733 - DNA, 13 bp, Artificial Sequence
  Oligonucleotide for detection of SNP TSC0034178
tattttgttgtty

SEQ ID NO: 136734 - DNA, 13 bp, Artificial Sequence
  Oligonucleotide for detection of SNP TSC0034178
raacaacaaaata

SEQ ID NO: 136735 - DNA, 13 bp, Artificial Sequence
  Oligonucleotide for detection of SNP TSC0034178
tattttattgtty

SEQ ID NO: 136736 - DNA, 13 bp, Artificial Sequence
  Oligonucleotide for detection of SNP TSC0034178
raacaataaaata

SEQ ID NO: 136737 - DNA, 13 bp, Artificial Sequence
  Oligonucleotide for detection of SNP TSC0034183
gaaataatttaaa

SEQ ID NO: 136738 - DNA, 13 bp, Artificial Sequence
  Oligonucleotide for detection of SNP TSC0034183
tttaaattatttc

SEQ ID NO: 136739 - DNA, 13 bp, Artificial Sequence
  Oligonucleotide for detection of SNP TSC0034183
gaaatattttaaa

SEQ ID NO: 136740 - DNA, 13 bp, Artificial Sequence
  Oligonucleotide for detection of SNP TSC0034183
tttaaaatatttc

SEQ ID NO: 136741 - DNA, 13 bp, Artificial Sequence
  Oligonucleotide for detection of SNP TSC0034183
tttgaattattty

SEQ ID NO: 136742 - DNA, 13 bp, Artificial Sequence
  Oligonucleotide for detection of SNP TSC0034183
raaataattcaaa

SEQ ID NO: 136743 - DNA, 13 bp, Artificial Sequence
  Oligonucleotide for detection of SNP TSC0034183
tttgaaatattty

SEQ ID NO: 136744 - DNA, 13 bp, Artificial Sequence
  Oligonucleotide for detection of SNP TSC0034183
raaatatttcaaa

SEQ ID NO: 136745 - DNA, 13 bp, Artificial Sequence
  Oligonucleotide for detection of SNP TSC0034184
tagtagatagttt

SEQ ID NO: 136746 - DNA, 13 bp, Artificial Sequence
  Oligonucleotide for detection of SNP TSC0034184
aaactatctacta

SEQ ID NO: 136747 - DNA, 13 bp, Artificial Sequence
  Oligonucleotide for detection of SNP TSC0034184
tagtagttagttt

SEQ ID NO: 136748 - DNA, 13 bp, Artificial Sequence
  Oligonucleotide for detection of SNP TSC0034184
aaactaactacta

SEQ ID NO: 136749 - DNA, 13 bp, Artificial Sequence
  Oligonucleotide for detection of SNP TSC0034184
aggttatttgttg

SEQ ID NO: 136750 - DNA, 13 bp, Artificial Sequence
  Oligonucleotide for detection of SNP TSC0034184
caacaaataacct

SEQ ID NO: 136751 - DNA, 13 bp, Artificial Sequence
  Oligonucleotide for detection of SNP TSC0034184
aggttaattgttg

SEQ ID NO: 136752 - DNA, 13 bp, Artificial Sequence
  Oligonucleotide for detection of SNP TSC0034184
caacaattaacct

SEQ ID NO: 136753 - DNA, 13 bp, Artificial Sequence
  Oligonucleotide for detection of SNP TSC0034185
tatttgtgatagg

SEQ ID NO: 136754 - DNA, 13 bp, Artificial Sequence
  Oligonucleotide for detection of SNP TSC0034185
cctatcacaaata

SEQ ID NO: 136755 - DNA, 13 bp, Artificial Sequence
  Oligonucleotide for detection of SNP TSC0034185
tatttgcgatagg

SEQ ID NO: 136756 - DNA, 13 bp, Artificial Sequence
  Oligonucleotide for detection of SNP TSC0034185
cctatcgcaaata

SEQ ID NO: 136757 - DNA, 13 bp, Artificial Sequence
  Oligonucleotide for detection of SNP TSC0034186
ataattatttagt

SEQ ID NO: 136758 - DNA, 13 bp, Artificial Sequence
  Oligonucleotide for detection of SNP TSC0034186
actaaataattat

SEQ ID NO: 136759 - DNA, 13 bp, Artificial Sequence
  Oligonucleotide for detection of SNP TSC0034186
ataattgtttagt

SEQ ID NO: 136760 - DNA, 13 bp, Artificial Sequence
  Oligonucleotide for detection of SNP TSC0034186
actaaacaattat

SEQ ID NO: 136761 - DNA, 13 bp, Artificial Sequence
  Oligonucleotide for detection of SNP TSC0034187
ttgaaatatagag

SEQ ID NO: 136762 - DNA, 13 bp, Artificial Sequence
  Oligonucleotide for detection of SNP TSC0034187
ctctatatttcaa

SEQ ID NO: 136763 - DNA, 13 bp, Artificial Sequence
  Oligonucleotide for detection of SNP TSC0034187
ttgaaaaatagag

SEQ ID NO: 136764 - DNA, 13 bp, Artificial Sequence
  Oligonucleotide for detection of SNP TSC0034187
ctctatttttcaa

SEQ ID NO: 136765 - DNA, 13 bp, Artificial Sequence
  Oligonucleotide for detection of SNP TSC0034188
ttttaaatttatg

SEQ ID NO: 136766 - DNA, 13 bp, Artificial Sequence
  Oligonucleotide for detection of SNP TSC0034188
cataaatttaaaa

SEQ ID NO: 136767 - DNA, 13 bp, Artificial Sequence
  Oligonucleotide for detection of SNP TSC0034188
ttttaattttatg

SEQ ID NO: 136768 - DNA, 13 bp, Artificial Sequence
  Oligonucleotide for detection of SNP TSC0034188
cataaaattaaaa

SEQ ID NO: 136769 - DNA, 13 bp, Artificial Sequence
  Oligonucleotide for detection of SNP TSC0034188
tatgaatttggag

SEQ ID NO: 136770 - DNA, 13 bp, Artificial Sequence
  Oligonucleotide for detection of SNP TSC0034188
ctccaaattcata

SEQ ID NO: 136771 - DNA, 13 bp, Artificial Sequence
  Oligonucleotide for detection of SNP TSC0034188
tatgaagttggag

SEQ ID NO: 136772 - DNA, 13 bp, Artificial Sequence
  Oligonucleotide for detection of SNP TSC0034188
ctccaacttcata

SEQ ID NO: 136773 - DNA, 13 bp, Artificial Sequence
  Oligonucleotide for detection of SNP TSC0034189
aagttgattttty

SEQ ID NO: 136774 - DNA, 13 bp, Artificial Sequence
  Oligonucleotide for detection of SNP TSC0034189
raaaaatcaactt

SEQ ID NO: 136775 - DNA, 13 bp, Artificial Sequence
  Oligonucleotide for detection of SNP TSC0034189
aagttggttttty

SEQ ID NO: 136776 - DNA, 13 bp, Artificial Sequence
  Oligonucleotide for detection of SNP TSC0034189
raaaaaccaactt

SEQ ID NO: 136777 - DNA, 13 bp, Artificial Sequence
  Oligonucleotide for detection of SNP TSC0034189
aagtcgattttty

SEQ ID NO: 136778 - DNA, 13 bp, Artificial Sequence
  Oligonucleotide for detection of SNP TSC0034189
raaaaatcgactt

SEQ ID NO: 136779 - DNA, 13 bp, Artificial Sequence
  Oligonucleotide for detection of SNP TSC0034189
aagtcggttttty

SEQ ID NO: 136780 - DNA, 13 bp, Artificial Sequence
  Oligonucleotide for detection of SNP TSC0034189
raaaaaccgactt

SEQ ID NO: 136781 - DNA, 13 bp, Artificial Sequence
  Oligonucleotide for detection of SNP TSC0034191
gaggatatgggag

SEQ ID NO: 136782 - DNA, 13 bp, Artificial Sequence
  Oligonucleotide for detection of SNP TSC0034191
ctcccatatcctc

SEQ ID NO: 136783 - DNA, 13 bp, Artificial Sequence
  Oligonucleotide for detection of SNP TSC0034191
gaggatgtgggag

SEQ ID NO: 136784 - DNA, 13 bp, Artificial Sequence
  Oligonucleotide for detection of SNP TSC0034191
ctcccacatcctc

SEQ ID NO: 136785 - DNA, 13 bp, Artificial Sequence
  Oligonucleotide for detection of SNP TSC0034196
aggatgattttta

SEQ ID NO: 136786 - DNA, 13 bp, Artificial Sequence
  Oligonucleotide for detection of SNP TSC0034196
taaaaatcatcct

SEQ ID NO: 136787 - DNA, 13 bp, Artificial Sequence
  Oligonucleotide for detection of SNP TSC0034196
aggatgtttttta

SEQ ID NO: 136788 - DNA, 13 bp, Artificial Sequence
  Oligonucleotide for detection of SNP TSC0034196
taaaaaacatcct

SEQ ID NO: 136789 - DNA, 13 bp, Artificial Sequence
  Oligonucleotide for detection of SNP TSC0034197
ttttaaagtatga

SEQ ID NO: 136790 - DNA, 13 bp, Artificial Sequence
  Oligonucleotide for detection of SNP TSC0034197
tcatactttaaaa

SEQ ID NO: 136791 - DNA, 13 bp, Artificial Sequence
  Oligonucleotide for detection of SNP TSC0034197
ttttaatgtatga

SEQ ID NO: 136792 - DNA, 13 bp, Artificial Sequence
  Oligonucleotide for detection of SNP TSC0034197
tcatacattaaaa

SEQ ID NO: 136793 - DNA, 13 bp, Artificial Sequence
  Oligonucleotide for detection of SNP TSC0034197
ttatatattaaaa

SEQ ID NO: 136794 - DNA, 13 bp, Artificial Sequence
  Oligonucleotide for detection of SNP TSC0034197
ttttaatatataa

SEQ ID NO: 136795 - DNA, 13 bp, Artificial Sequence
  Oligonucleotide for detection of SNP TSC0034199
aaattaatatata

SEQ ID NO: 136796 - DNA, 13 bp, Artificial Sequence
  Oligonucleotide for detection of SNP TSC0034199
tatatattaattt

SEQ ID NO: 136797 - DNA, 13 bp, Artificial Sequence
  Oligonucleotide for detection of SNP TSC0034199
aaattagtatata

SEQ ID NO: 136798 - DNA, 13 bp, Artificial Sequence
  Oligonucleotide for detection of SNP TSC0034199
tatatactaattt

SEQ ID NO: 136799 - DNA, 13 bp, Artificial Sequence
  Oligonucleotide for detection of SNP TSC0034200
ggtgttaagaata

SEQ ID NO: 136800 - DNA, 13 bp, Artificial Sequence
  Oligonucleotide for detection of SNP TSC0034200
tattcttaacacc

SEQ ID NO: 136801 - DNA, 13 bp, Artificial Sequence
  Oligonucleotide for detection of SNP TSC0034200
ggtgttgagaata

SEQ ID NO: 136802 - DNA, 13 bp, Artificial Sequence
  Oligonucleotide for detection of SNP TSC0034200
tattctcaacacc

SEQ ID NO: 136803 - DNA, 13 bp, Artificial Sequence
  Oligonucleotide for detection of SNP TSC0034200
ggcgttaagaata

SEQ ID NO: 136804 - DNA, 13 bp, Artificial Sequence
  Oligonucleotide for detection of SNP TSC0034200
tattcttaacgcc

SEQ ID NO: 136805 - DNA, 13 bp, Artificial Sequence
  Oligonucleotide for detection of SNP TSC0034200
ggcgttgagaata

SEQ ID NO: 136806 - DNA, 13 bp, Artificial Sequence
  Oligonucleotide for detection of SNP TSC0034200
tattctcaacgcc

SEQ ID NO: 136807 - DNA, 13 bp, Artificial Sequence
  Oligonucleotide for detection of SNP TSC0034201
acgtgtatatata

SEQ ID NO: 136808 - DNA, 13 bp, Artificial Sequence
  Oligonucleotide for detection of SNP TSC0034201
tatatatacacgt

SEQ ID NO: 136809 - DNA, 13 bp, Artificial Sequence
  Oligonucleotide for detection of SNP TSC0034201
acgtgtgtatata

SEQ ID NO: 136810 - DNA, 13 bp, Artificial Sequence
  Oligonucleotide for detection of SNP TSC0034201
tatatacacacgt

SEQ ID NO: 136811 - DNA, 13 bp, Artificial Sequence
  Oligonucleotide for detection of SNP TSC0034201
acgcgtatatata

SEQ ID NO: 136812 - DNA, 13 bp, Artificial Sequence
  Oligonucleotide for detection of SNP TSC0034201
tatatatacgcgt

SEQ ID NO: 136813 - DNA, 13 bp, Artificial Sequence
  Oligonucleotide for detection of SNP TSC0034201
acgcgtgtatata

SEQ ID NO: 136814 - DNA, 13 bp, Artificial Sequence
  Oligonucleotide for detection of SNP TSC0034201
tatatacacgcgt

SEQ ID NO: 136815 - DNA, 13 bp, Artificial Sequence
  Oligonucleotide for detection of SNP TSC0034201
acgtgcgtatata

SEQ ID NO: 136816 - DNA, 13 bp, Artificial Sequence
  Oligonucleotide for detection of SNP TSC0034201
tatatacgcacgt

SEQ ID NO: 136817 - DNA, 13 bp, Artificial Sequence
  Oligonucleotide for detection of SNP TSC0034201
acgcgcgtatata

SEQ ID NO: 136818 - DNA, 13 bp, Artificial Sequence
  Oligonucleotide for detection of SNP TSC0034201
tatatacgcgcgt

SEQ ID NO: 136819 - DNA, 13 bp, Artificial Sequence
  Oligonucleotide for detection of SNP TSC0034201
tgtgtgtgtgcgt

SEQ ID NO: 136820 - DNA, 13 bp, Artificial Sequence
  Oligonucleotide for detection of SNP TSC0034201
acgcacacacaca

SEQ ID NO: 136821 - DNA, 13 bp, Artificial Sequence
  Oligonucleotide for detection of SNP TSC0034201
tgtgtgtgcgcgt

SEQ ID NO: 136822 - DNA, 13 bp, Artificial Sequence
  Oligonucleotide for detection of SNP TSC0034201
acgcgcacacaca

SEQ ID NO: 136823 - DNA, 13 bp, Artificial Sequence
  Oligonucleotide for detection of SNP TSC0034201
tgtgtgcgtgcgt

SEQ ID NO: 136824 - DNA, 13 bp, Artificial Sequence
  Oligonucleotide for detection of SNP TSC0034201
acgcacgcacaca

SEQ ID NO: 136825 - DNA, 13 bp, Artificial Sequence
  Oligonucleotide for detection of SNP TSC0034201
tgtgtgcgcgcgt

SEQ ID NO: 136826 - DNA, 13 bp, Artificial Sequence
  Oligonucleotide for detection of SNP TSC0034201
acgcgcgcacaca

SEQ ID NO: 136827 - DNA, 13 bp, Artificial Sequence
  Oligonucleotide for detection of SNP TSC0034203
ttaaaattattag

SEQ ID NO: 136828 - DNA, 13 bp, Artificial Sequence
  Oligonucleotide for detection of SNP TSC0034203
ctaataattttaa

SEQ ID NO: 136829 - DNA, 13 bp, Artificial Sequence
  Oligonucleotide for detection of SNP TSC0034203
ttaaaagtattag

SEQ ID NO: 136830 - DNA, 13 bp, Artificial Sequence
  Oligonucleotide for detection of SNP TSC0034203
ctaatacttttaa

SEQ ID NO: 136831 - DNA, 13 bp, Artificial Sequence
  Oligonucleotide for detection of SNP TSC0034203
ttaatagttttaa

SEQ ID NO: 136832 - DNA, 13 bp, Artificial Sequence
  Oligonucleotide for detection of SNP TSC0034203
ttaaaactattaa

SEQ ID NO: 136833 - DNA, 13 bp, Artificial Sequence
  Oligonucleotide for detection of SNP TSC0034203
ttaatatttttaa

SEQ ID NO: 136834 - DNA, 13 bp, Artificial Sequence
  Oligonucleotide for detection of SNP TSC0034203
ttaaaaatattaa

SEQ ID NO: 136835 - DNA, 13 bp, Artificial Sequence
  Oligonucleotide for detection of SNP TSC0034204
agatgatgggttg

SEQ ID NO: 136836 - DNA, 13 bp, Artificial Sequence
  Oligonucleotide for detection of SNP TSC0034204
caacccatcatct

SEQ ID NO: 136837 - DNA, 13 bp, Artificial Sequence
  Oligonucleotide for detection of SNP TSC0034204
agatgacgggttg

SEQ ID NO: 136838 - DNA, 13 bp, Artificial Sequence
  Oligonucleotide for detection of SNP TSC0034204
caacccgtcatct

SEQ ID NO: 136839 - DNA, 13 bp, Artificial Sequence
  Oligonucleotide for detection of SNP TSC0034204
taatttattattt

SEQ ID NO: 136840 - DNA, 13 bp, Artificial Sequence
  Oligonucleotide for detection of SNP TSC0034204
aaataataaatta

SEQ ID NO: 136841 - DNA, 13 bp, Artificial Sequence
  Oligonucleotide for detection of SNP TSC0034204
taattcgttattt

SEQ ID NO: 136842 - DNA, 13 bp, Artificial Sequence
  Oligonucleotide for detection of SNP TSC0034204
aaataacgaatta

SEQ ID NO: 136843 - DNA, 13 bp, Artificial Sequence
  Oligonucleotide for detection of SNP TSC0034205
atattatgaggtt

SEQ ID NO: 136844 - DNA, 13 bp, Artificial Sequence
  Oligonucleotide for detection of SNP TSC0034205
aacctcataatat

SEQ ID NO: 136845 - DNA, 13 bp, Artificial Sequence
  Oligonucleotide for detection of SNP TSC0034205
atattacgaggtt

SEQ ID NO: 136846 - DNA, 13 bp, Artificial Sequence
  Oligonucleotide for detection of SNP TSC0034205
aacctcgtaatat

SEQ ID NO: 136847 - DNA, 13 bp, Artificial Sequence
  Oligonucleotide for detection of SNP TSC0034205
aattttgtaatgt

SEQ ID NO: 136848 - DNA, 13 bp, Artificial Sequence
  Oligonucleotide for detection of SNP TSC0034205
acattacaaaatt

SEQ ID NO: 136849 - DNA, 13 bp, Artificial Sequence
  Oligonucleotide for detection of SNP TSC0034205
aattttataatgt

SEQ ID NO: 136850 - DNA, 13 bp, Artificial Sequence
  Oligonucleotide for detection of SNP TSC0034205
acattataaaatt

SEQ ID NO: 136851 - DNA, 13 bp, Artificial Sequence
  Oligonucleotide for detection of SNP TSC0034205
aatttcgtaatgt

SEQ ID NO: 136852 - DNA, 13 bp, Artificial Sequence
  Oligonucleotide for detection of SNP TSC0034205
acattacgaaatt

SEQ ID NO: 136853 - DNA, 13 bp, Artificial Sequence
  Oligonucleotide for detection of SNP TSC0034206
ttatgtgatttag

SEQ ID NO: 136854 - DNA, 13 bp, Artificial Sequence
  Oligonucleotide for detection of SNP TSC0034206
ctaaatcacataa

SEQ ID NO: 136855 - DNA, 13 bp, Artificial Sequence
  Oligonucleotide for detection of SNP TSC0034206
ttatgtaatttag

SEQ ID NO: 136856 - DNA, 13 bp, Artificial Sequence
  Oligonucleotide for detection of SNP TSC0034206
ctaaattacataa

SEQ ID NO: 136857 - DNA, 13 bp, Artificial Sequence
  Oligonucleotide for detection of SNP TSC0034207
aaaaatggttgtt

SEQ ID NO: 136858 - DNA, 13 bp, Artificial Sequence
  Oligonucleotide for detection of SNP TSC0034207
aacaaccattttt

SEQ ID NO: 136859 - DNA, 13 bp, Artificial Sequence
  Oligonucleotide for detection of SNP TSC0034207
aaaaattgttgtt

SEQ ID NO: 136860 - DNA, 13 bp, Artificial Sequence
  Oligonucleotide for detection of SNP TSC0034207
aacaacaattttt

SEQ ID NO: 136861 - DNA, 13 bp, Artificial Sequence
  Oligonucleotide for detection of SNP TSC0034207
aaaaacggttgtt

SEQ ID NO: 136862 - DNA, 13 bp, Artificial Sequence
  Oligonucleotide for detection of SNP TSC0034207
aacaaccgttttt

SEQ ID NO: 136863 - DNA, 13 bp, Artificial Sequence
  Oligonucleotide for detection of SNP TSC0034207
aatagttgttttt

SEQ ID NO: 136864 - DNA, 13 bp, Artificial Sequence
  Oligonucleotide for detection of SNP TSC0034207
aaaaacaactatt

SEQ ID NO: 136865 - DNA, 13 bp, Artificial Sequence
  Oligonucleotide for detection of SNP TSC0034207
aatagtagttttt

SEQ ID NO: 136866 - DNA, 13 bp, Artificial Sequence
  Oligonucleotide for detection of SNP TSC0034207
aaaaactactatt

SEQ ID NO: 136867 - DNA, 13 bp, Artificial Sequence
  Oligonucleotide for detection of SNP TSC0034207
aatagtcgttttt

SEQ ID NO: 136868 - DNA, 13 bp, Artificial Sequence
  Oligonucleotide for detection of SNP TSC0034207
aaaaacgactatt

SEQ ID NO: 136869 - DNA, 13 bp, Artificial Sequence
  Oligonucleotide for detection of SNP TSC0034208
attagaagtttty

SEQ ID NO: 136870 - DNA, 13 bp, Artificial Sequence
  Oligonucleotide for detection of SNP TSC0034208
raaaacttctaat

SEQ ID NO: 136871 - DNA, 13 bp, Artificial Sequence
  Oligonucleotide for detection of SNP TSC0034208
attagatgtttty

SEQ ID NO: 136872 - DNA, 13 bp, Artificial Sequence
  Oligonucleotide for detection of SNP TSC0034208
raaaacatctaat

SEQ ID NO: 136873 - DNA, 13 bp, Artificial Sequence
  Oligonucleotide for detection of SNP TSC0034208
attagacgtttty

SEQ ID NO: 136874 - DNA, 13 bp, Artificial Sequence
  Oligonucleotide for detection of SNP TSC0034208
raaaacgtctaat

SEQ ID NO: 136875 - DNA, 13 bp, Artificial Sequence
  Oligonucleotide for detection of SNP TSC0034208
ggagatttttaat

SEQ ID NO: 136876 - DNA, 13 bp, Artificial Sequence
  Oligonucleotide for detection of SNP TSC0034208
attaaaaatctcc

SEQ ID NO: 136877 - DNA, 13 bp, Artificial Sequence
  Oligonucleotide for detection of SNP TSC0034208
ggagatgtttaat

SEQ ID NO: 136878 - DNA, 13 bp, Artificial Sequence
  Oligonucleotide for detection of SNP TSC0034208
attaaacatctcc

SEQ ID NO: 136879 - DNA, 13 bp, Artificial Sequence
  Oligonucleotide for detection of SNP TSC0034208
ggagacgtttaat

SEQ ID NO: 136880 - DNA, 13 bp, Artificial Sequence
  Oligonucleotide for detection of SNP TSC0034208
attaaacgtctcc

SEQ ID NO: 136881 - DNA, 13 bp, Artificial Sequence
  Oligonucleotide for detection of SNP TSC0034209
ttgggtaagttgy

SEQ ID NO: 136882 - DNA, 13 bp, Artificial Sequence
  Oligonucleotide for detection of SNP TSC0034209
rcaacttacccaa

SEQ ID NO: 136883 - DNA, 13 bp, Artificial Sequence
  Oligonucleotide for detection of SNP TSC0034209
ttgggttagttgy

SEQ ID NO: 136884 - DNA, 13 bp, Artificial Sequence
  Oligonucleotide for detection of SNP TSC0034209
rcaactaacccaa

SEQ ID NO: 136885 - DNA, 13 bp, Artificial Sequence
  Oligonucleotide for detection of SNP TSC0034209
gtaatttgtttaa

SEQ ID NO: 136886 - DNA, 13 bp, Artificial Sequence
  Oligonucleotide for detection of SNP TSC0034209
ttaaacaaattac

SEQ ID NO: 136887 - DNA, 13 bp, Artificial Sequence
  Oligonucleotide for detection of SNP TSC0034209
gtaattggtttaa

SEQ ID NO: 136888 - DNA, 13 bp, Artificial Sequence
  Oligonucleotide for detection of SNP TSC0034209
ttaaaccaattac

SEQ ID NO: 136889 - DNA, 13 bp, Artificial Sequence
  Oligonucleotide for detection of SNP TSC0034210
tgtgtatgaaaat

SEQ ID NO: 136890 - DNA, 13 bp, Artificial Sequence
  Oligonucleotide for detection of SNP TSC0034210
attttcatacaca

SEQ ID NO: 136891 - DNA, 13 bp, Artificial Sequence
  Oligonucleotide for detection of SNP TSC0034210
tgtgtacgaaaat

SEQ ID NO: 136892 - DNA, 13 bp, Artificial Sequence
  Oligonucleotide for detection of SNP TSC0034210
attttcgtacaca

SEQ ID NO: 136893 - DNA, 13 bp, Artificial Sequence
  Oligonucleotide for detection of SNP TSC0034212
ataatggtattta

SEQ ID NO: 136894 - DNA, 13 bp, Artificial Sequence
  Oligonucleotide for detection of SNP TSC0034212
taaataccattat

SEQ ID NO: 136895 - DNA, 13 bp, Artificial Sequence
  Oligonucleotide for detection of SNP TSC0034212
ataatgatattta

SEQ ID NO: 136896 - DNA, 13 bp, Artificial Sequence
  Oligonucleotide for detection of SNP TSC0034212
taaatatcattat

SEQ ID NO: 136897 - DNA, 13 bp, Artificial Sequence
  Oligonucleotide for detection of SNP TSC0034213
tatgttagtgtty

SEQ ID NO: 136898 - DNA, 13 bp, Artificial Sequence
  Oligonucleotide for detection of SNP TSC0034213
raacactaacata

SEQ ID NO: 136899 - DNA, 13 bp, Artificial Sequence
  Oligonucleotide for detection of SNP TSC0034213
tatgttggtgtty

SEQ ID NO: 136900 - DNA, 13 bp, Artificial Sequence
  Oligonucleotide for detection of SNP TSC0034213
raacaccaacata

SEQ ID NO: 136901 - DNA, 13 bp, Artificial Sequence
  Oligonucleotide for detection of SNP TSC0034213
tatgttagcgtty

SEQ ID NO: 136902 - DNA, 13 bp, Artificial Sequence
  Oligonucleotide for detection of SNP TSC0034213
raacgctaacata

SEQ ID NO: 136903 - DNA, 13 bp, Artificial Sequence
  Oligonucleotide for detection of SNP TSC0034213
tatgttggcgtty

SEQ ID NO: 136904 - DNA, 13 bp, Artificial Sequence
  Oligonucleotide for detection of SNP TSC0034213
raacgccaacata

SEQ ID NO: 136905 - DNA, 13 bp, Artificial Sequence
  Oligonucleotide for detection of SNP TSC0034214
gtttttggtgtgt

SEQ ID NO: 136906 - DNA, 13 bp, Artificial Sequence
  Oligonucleotide for detection of SNP TSC0034214
acacaccaaaaac

SEQ ID NO: 136907 - DNA, 13 bp, Artificial Sequence
  Oligonucleotide for detection of SNP TSC0034214
gtttttagtgtgt

SEQ ID NO: 136908 - DNA, 13 bp, Artificial Sequence
  Oligonucleotide for detection of SNP TSC0034214
acacactaaaaac

SEQ ID NO: 136909 - DNA, 13 bp, Artificial Sequence
  Oligonucleotide for detection of SNP TSC0034214
gtttttggtgcgt

SEQ ID NO: 136910 - DNA, 13 bp, Artificial Sequence
  Oligonucleotide for detection of SNP TSC0034214
acgcaccaaaaac

SEQ ID NO: 136911 - DNA, 13 bp, Artificial Sequence
  Oligonucleotide for detection of SNP TSC0034214
gtttttagtgcgt

SEQ ID NO: 136912 - DNA, 13 bp, Artificial Sequence
  Oligonucleotide for detection of SNP TSC0034214
acgcactaaaaac

SEQ ID NO: 136913 - DNA, 13 bp, Artificial Sequence
  Oligonucleotide for detection of SNP TSC0034218
ttagttgattttt

SEQ ID NO: 136914 - DNA, 13 bp, Artificial Sequence
  Oligonucleotide for detection of SNP TSC0034218
aaaaatcaactaa

SEQ ID NO: 136915 - DNA, 13 bp, Artificial Sequence
  Oligonucleotide for detection of SNP TSC0034218
ttagttaattttt

SEQ ID NO: 136916 - DNA, 13 bp, Artificial Sequence
  Oligonucleotide for detection of SNP TSC0034218
aaaaattaactaa

SEQ ID NO: 136917 - DNA, 13 bp, Artificial Sequence
  Oligonucleotide for detection of SNP TSC0034219
ttttaaatatttg

SEQ ID NO: 136918 - DNA, 13 bp, Artificial Sequence
  Oligonucleotide for detection of SNP TSC0034219
caaatatttaaaa

SEQ ID NO: 136919 - DNA, 13 bp, Artificial Sequence
  Oligonucleotide for detection of SNP TSC0034219
ttttaattatttg

SEQ ID NO: 136920 - DNA, 13 bp, Artificial Sequence
  Oligonucleotide for detection of SNP TSC0034219
caaataattaaaa

SEQ ID NO: 136921 - DNA, 13 bp, Artificial Sequence
  Oligonucleotide for detection of SNP TSC0034219
taagtatttggga

SEQ ID NO: 136922 - DNA, 13 bp, Artificial Sequence
  Oligonucleotide for detection of SNP TSC0034219
tcccaaatactta

SEQ ID NO: 136923 - DNA, 13 bp, Artificial Sequence
  Oligonucleotide for detection of SNP TSC0034219
taagtaattggga

SEQ ID NO: 136924 - DNA, 13 bp, Artificial Sequence
  Oligonucleotide for detection of SNP TSC0034219
tcccaattactta

SEQ ID NO: 136925 - DNA, 13 bp, Artificial Sequence
  Oligonucleotide for detection of SNP TSC0034220
gaggaagggattt

SEQ ID NO: 136926 - DNA, 13 bp, Artificial Sequence
  Oligonucleotide for detection of SNP TSC0034220
aaatcccttcctc

SEQ ID NO: 136927 - DNA, 13 bp, Artificial Sequence
  Oligonucleotide for detection of SNP TSC0034220
gaggaaaggattt

SEQ ID NO: 136928 - DNA, 13 bp, Artificial Sequence
  Oligonucleotide for detection of SNP TSC0034220
aaatcctttcctc

SEQ ID NO: 136929 - DNA, 13 bp, Artificial Sequence
  Oligonucleotide for detection of SNP TSC0034221
agagtgtggatag

SEQ ID NO: 136930 - DNA, 13 bp, Artificial Sequence
  Oligonucleotide for detection of SNP TSC0034221
ctatccacactct

SEQ ID NO: 136931 - DNA, 13 bp, Artificial Sequence
  Oligonucleotide for detection of SNP TSC0034221
agagtgaggatag

SEQ ID NO: 136932 - DNA, 13 bp, Artificial Sequence
  Oligonucleotide for detection of SNP TSC0034221
ctatcctcactct

SEQ ID NO: 136933 - DNA, 13 bp, Artificial Sequence
  Oligonucleotide for detection of SNP TSC0034223
ttttatgtgttty

SEQ ID NO: 136934 - DNA, 13 bp, Artificial Sequence
  Oligonucleotide for detection of SNP TSC0034223
raaacacataaaa

SEQ ID NO: 136935 - DNA, 13 bp, Artificial Sequence
  Oligonucleotide for detection of SNP TSC0034223
ttttatttgttty

SEQ ID NO: 136936 - DNA, 13 bp, Artificial Sequence
  Oligonucleotide for detection of SNP TSC0034223
raaacaaataaaa

SEQ ID NO: 136937 - DNA, 13 bp, Artificial Sequence
  Oligonucleotide for detection of SNP TSC0034223
ttttacgtgttty

SEQ ID NO: 136938 - DNA, 13 bp, Artificial Sequence
  Oligonucleotide for detection of SNP TSC0034223
raaacacgtaaaa

SEQ ID NO: 136939 - DNA, 13 bp, Artificial Sequence
  Oligonucleotide for detection of SNP TSC0034223
gggatatgtgaaa

SEQ ID NO: 136940 - DNA, 13 bp, Artificial Sequence
  Oligonucleotide for detection of SNP TSC0034223
tttcacatatccc

SEQ ID NO: 136941 - DNA, 13 bp, Artificial Sequence
  Oligonucleotide for detection of SNP TSC0034223
gggataagtgaaa

SEQ ID NO: 136942 - DNA, 13 bp, Artificial Sequence
  Oligonucleotide for detection of SNP TSC0034223
tttcacttatccc

SEQ ID NO: 136943 - DNA, 13 bp, Artificial Sequence
  Oligonucleotide for detection of SNP TSC0034223
gggatacgtgaaa

SEQ ID NO: 136944 - DNA, 13 bp, Artificial Sequence
  Oligonucleotide for detection of SNP TSC0034223
tttcacgtatccc

SEQ ID NO: 136945 - DNA, 13 bp, Artificial Sequence
  Oligonucleotide for detection of SNP TSC0034226
tgtgtattaggta

SEQ ID NO: 136946 - DNA, 13 bp, Artificial Sequence
  Oligonucleotide for detection of SNP TSC0034226
tacctaatacaca

SEQ ID NO: 136947 - DNA, 13 bp, Artificial Sequence
  Oligonucleotide for detection of SNP TSC0034226
tgtgtagtaggta

SEQ ID NO: 136948 - DNA, 13 bp, Artificial Sequence
  Oligonucleotide for detection of SNP TSC0034226
tacctactacaca

SEQ ID NO: 136949 - DNA, 13 bp, Artificial Sequence
  Oligonucleotide for detection of SNP TSC0034226
tgtttagtgtata

SEQ ID NO: 136950 - DNA, 13 bp, Artificial Sequence
  Oligonucleotide for detection of SNP TSC0034226
tatacactaaaca

SEQ ID NO: 136951 - DNA, 13 bp, Artificial Sequence
  Oligonucleotide for detection of SNP TSC0034226
tgtttattgtata

SEQ ID NO: 136952 - DNA, 13 bp, Artificial Sequence
  Oligonucleotide for detection of SNP TSC0034226
tatacaataaaca

SEQ ID NO: 136953 - DNA, 13 bp, Artificial Sequence
  Oligonucleotide for detection of SNP TSC0034227
tatattagttaay

SEQ ID NO: 136954 - DNA, 13 bp, Artificial Sequence
  Oligonucleotide for detection of SNP TSC0034227
rttaactaatata

SEQ ID NO: 136955 - DNA, 13 bp, Artificial Sequence
  Oligonucleotide for detection of SNP TSC0034227
tatattggttaay

SEQ ID NO: 136956 - DNA, 13 bp, Artificial Sequence
  Oligonucleotide for detection of SNP TSC0034227
rttaaccaatata

SEQ ID NO: 136957 - DNA, 13 bp, Artificial Sequence
  Oligonucleotide for detection of SNP TSC0034228
tatgagaatgttt

SEQ ID NO: 136958 - DNA, 13 bp, Artificial Sequence
  Oligonucleotide for detection of SNP TSC0034228
aaacattctcata

SEQ ID NO: 136959 - DNA, 13 bp, Artificial Sequence
  Oligonucleotide for detection of SNP TSC0034228
tatgaggatgttt

SEQ ID NO: 136960 - DNA, 13 bp, Artificial Sequence
  Oligonucleotide for detection of SNP TSC0034228
aaacatcctcata

SEQ ID NO: 136961 - DNA, 13 bp, Artificial Sequence
  Oligonucleotide for detection of SNP TSC0034230
gaattttggttty

SEQ ID NO: 136962 - DNA, 13 bp, Artificial Sequence
  Oligonucleotide for detection of SNP TSC0034230
raaaccaaaattc

SEQ ID NO: 136963 - DNA, 13 bp, Artificial Sequence
  Oligonucleotide for detection of SNP TSC0034230
gaatttcggttty

SEQ ID NO: 136964 - DNA, 13 bp, Artificial Sequence
  Oligonucleotide for detection of SNP TSC0034230
raaaccgaaattc

SEQ ID NO: 136965 - DNA, 13 bp, Artificial Sequence
  Oligonucleotide for detection of SNP TSC0034230
ggagttgggatty

SEQ ID NO: 136966 - DNA, 13 bp, Artificial Sequence
  Oligonucleotide for detection of SNP TSC0034230
raatcccaactcc

SEQ ID NO: 136967 - DNA, 13 bp, Artificial Sequence
  Oligonucleotide for detection of SNP TSC0034230
ggagttaggatty

SEQ ID NO: 136968 - DNA, 13 bp, Artificial Sequence
  Oligonucleotide for detection of SNP TSC0034230
raatcctaactcc

SEQ ID NO: 136969 - DNA, 13 bp, Artificial Sequence
  Oligonucleotide for detection of SNP TSC0034230
ggagtcgggatty

SEQ ID NO: 136970 - DNA, 13 bp, Artificial Sequence
  Oligonucleotide for detection of SNP TSC0034230
raatcccgactcc

SEQ ID NO: 136971 - DNA, 13 bp, Artificial Sequence
  Oligonucleotide for detection of SNP TSC0034233
tttttatgtgttt

SEQ ID NO: 136972 - DNA, 13 bp, Artificial Sequence
  Oligonucleotide for detection of SNP TSC0034233
aaacacataaaaa

SEQ ID NO: 136973 - DNA, 13 bp, Artificial Sequence
  Oligonucleotide for detection of SNP TSC0034233
tttttacgtgttt

SEQ ID NO: 136974 - DNA, 13 bp, Artificial Sequence
  Oligonucleotide for detection of SNP TSC0034233
aaacacgtaaaaa

SEQ ID NO: 136975 - DNA, 13 bp, Artificial Sequence
  Oligonucleotide for detection of SNP TSC0034233
aggtatgtagaag

SEQ ID NO: 136976 - DNA, 13 bp, Artificial Sequence
  Oligonucleotide for detection of SNP TSC0034233
cttctacatacct

SEQ ID NO: 136977 - DNA, 13 bp, Artificial Sequence
  Oligonucleotide for detection of SNP TSC0034233
aggtatatagaag

SEQ ID NO: 136978 - DNA, 13 bp, Artificial Sequence
  Oligonucleotide for detection of SNP TSC0034233
cttctatatacct

SEQ ID NO: 136979 - DNA, 13 bp, Artificial Sequence
  Oligonucleotide for detection of SNP TSC0034233
aggtacgtagaag

SEQ ID NO: 136980 - DNA, 13 bp, Artificial Sequence
  Oligonucleotide for detection of SNP TSC0034233
cttctacgtacct

SEQ ID NO: 136981 - DNA, 13 bp, Artificial Sequence
  Oligonucleotide for detection of SNP TSC0034234
agtttaagtatta

SEQ ID NO: 136982 - DNA, 13 bp, Artificial Sequence
  Oligonucleotide for detection of SNP TSC0034234
taatacttaaact

SEQ ID NO: 136983 - DNA, 13 bp, Artificial Sequence
  Oligonucleotide for detection of SNP TSC0034234
agtttatgtatta

SEQ ID NO: 136984 - DNA, 13 bp, Artificial Sequence
  Oligonucleotide for detection of SNP TSC0034234
taatacataaact

SEQ ID NO: 136985 - DNA, 13 bp, Artificial Sequence
  Oligonucleotide for detection of SNP TSC0034234
agtttacgtatta

SEQ ID NO: 136986 - DNA, 13 bp, Artificial Sequence
  Oligonucleotide for detection of SNP TSC0034234
taatacgtaaact

SEQ ID NO: 136987 - DNA, 13 bp, Artificial Sequence
  Oligonucleotide for detection of SNP TSC0034234
tgatgtttggatt

SEQ ID NO: 136988 - DNA, 13 bp, Artificial Sequence
  Oligonucleotide for detection of SNP TSC0034234
aatccaaacatca

SEQ ID NO: 136989 - DNA, 13 bp, Artificial Sequence
  Oligonucleotide for detection of SNP TSC0034234
tgatgtgtggatt

SEQ ID NO: 136990 - DNA, 13 bp, Artificial Sequence
  Oligonucleotide for detection of SNP TSC0034234
aatccacacatca

SEQ ID NO: 136991 - DNA, 13 bp, Artificial Sequence
  Oligonucleotide for detection of SNP TSC0034234
tgatgcgtggatt

SEQ ID NO: 136992 - DNA, 13 bp, Artificial Sequence
  Oligonucleotide for detection of SNP TSC0034234
aatccacgcatca

SEQ ID NO: 136993 - DNA, 13 bp, Artificial Sequence
  Oligonucleotide for detection of SNP TSC0034235
gaaagtagtgtta

SEQ ID NO: 136994 - DNA, 13 bp, Artificial Sequence
  Oligonucleotide for detection of SNP TSC0034235
taacactactttc

SEQ ID NO: 136995 - DNA, 13 bp, Artificial Sequence
  Oligonucleotide for detection of SNP TSC0034235
gaaagttgtgtta

SEQ ID NO: 136996 - DNA, 13 bp, Artificial Sequence
  Oligonucleotide for detection of SNP TSC0034235
taacacaactttc

SEQ ID NO: 136997 - DNA, 13 bp, Artificial Sequence
  Oligonucleotide for detection of SNP TSC0034235
tggtattgtttty

SEQ ID NO: 136998 - DNA, 13 bp, Artificial Sequence
  Oligonucleotide for detection of SNP TSC0034235
raaaacaatacca

SEQ ID NO: 136999 - DNA, 13 bp, Artificial Sequence
  Oligonucleotide for detection of SNP TSC0034235
tggtatagtttty

SEQ ID NO: 137000 - DNA, 13 bp, Artificial Sequence
  Oligonucleotide for detection of SNP TSC0034235
raaaactatacca

SEQ ID NO: 137001 - DNA, 13 bp, Artificial Sequence
  Oligonucleotide for detection of SNP TSC0034236
tagattaagttaa

SEQ ID NO: 137002 - DNA, 13 bp, Artificial Sequence
  Oligonucleotide for detection of SNP TSC0034236
ttaacttaatcta

SEQ ID NO: 137003 - DNA, 13 bp, Artificial Sequence
  Oligonucleotide for detection of SNP TSC0034236
tagatttagttaa

SEQ ID NO: 137004 - DNA, 13 bp, Artificial Sequence
  Oligonucleotide for detection of SNP TSC0034236
ttaactaaatcta

SEQ ID NO: 137005 - DNA, 13 bp, Artificial Sequence
  Oligonucleotide for detection of SNP TSC0034236
ttagtttggttta

SEQ ID NO: 137006 - DNA, 13 bp, Artificial Sequence
  Oligonucleotide for detection of SNP TSC0034236
taaaccaaactaa

SEQ ID NO: 137007 - DNA, 13 bp, Artificial Sequence
  Oligonucleotide for detection of SNP TSC0034236
ttagttgggttta

SEQ ID NO: 137008 - DNA, 13 bp, Artificial Sequence
  Oligonucleotide for detection of SNP TSC0034236
taaacccaactaa

SEQ ID NO: 137009 - DNA, 13 bp, Artificial Sequence
  Oligonucleotide for detection of SNP TSC0034237
gaaggtataataa

SEQ ID NO: 137010 - DNA, 13 bp, Artificial Sequence
  Oligonucleotide for detection of SNP TSC0034237
ttattataccttc

SEQ ID NO: 137011 - DNA, 13 bp, Artificial Sequence
  Oligonucleotide for detection of SNP TSC0034237
gaaggtgtaataa

SEQ ID NO: 137012 - DNA, 13 bp, Artificial Sequence
  Oligonucleotide for detection of SNP TSC0034237
ttattacaccttc

SEQ ID NO: 137013 - DNA, 13 bp, Artificial Sequence
  Oligonucleotide for detection of SNP TSC0034238
attagttgtgtat

SEQ ID NO: 137014 - DNA, 13 bp, Artificial Sequence
  Oligonucleotide for detection of SNP TSC0034238
atacacaactaat

SEQ ID NO: 137015 - DNA, 13 bp, Artificial Sequence
  Oligonucleotide for detection of SNP TSC0034238
attagtcgtgtat

SEQ ID NO: 137016 - DNA, 13 bp, Artificial Sequence
  Oligonucleotide for detection of SNP TSC0034238
atacacgactaat

SEQ ID NO: 137017 - DNA, 13 bp, Artificial Sequence
  Oligonucleotide for detection of SNP TSC0034238
atatatggttaat

SEQ ID NO: 137018 - DNA, 13 bp, Artificial Sequence
  Oligonucleotide for detection of SNP TSC0034238
attaaccatatat

SEQ ID NO: 137019 - DNA, 13 bp, Artificial Sequence
  Oligonucleotide for detection of SNP TSC0034238
atatatagttaat

SEQ ID NO: 137020 - DNA, 13 bp, Artificial Sequence
  Oligonucleotide for detection of SNP TSC0034238
attaactatatat

SEQ ID NO: 137021 - DNA, 13 bp, Artificial Sequence
  Oligonucleotide for detection of SNP TSC0034238
atatacggttaat

SEQ ID NO: 137022 - DNA, 13 bp, Artificial Sequence
  Oligonucleotide for detection of SNP TSC0034238
attaaccgtatat

SEQ ID NO: 137023 - DNA, 13 bp, Artificial Sequence
  Oligonucleotide for detection of SNP TSC0034241
ttgttagaaagta

SEQ ID NO: 137024 - DNA, 13 bp, Artificial Sequence
  Oligonucleotide for detection of SNP TSC0034241
tactttctaacaa

SEQ ID NO: 137025 - DNA, 13 bp, Artificial Sequence
  Oligonucleotide for detection of SNP TSC0034241
ttgttaaaaagta

SEQ ID NO: 137026 - DNA, 13 bp, Artificial Sequence
  Oligonucleotide for detection of SNP TSC0034241
tactttttaacaa

SEQ ID NO: 137027 - DNA, 13 bp, Artificial Sequence
  Oligonucleotide for detection of SNP TSC0034242
ttttttatgtgta

SEQ ID NO: 137028 - DNA, 13 bp, Artificial Sequence
  Oligonucleotide for detection of SNP TSC0034242
tacacataaaaaa

SEQ ID NO: 137029 - DNA, 13 bp, Artificial Sequence
  Oligonucleotide for detection of SNP TSC0034242
ttttttgtgtgta

SEQ ID NO: 137030 - DNA, 13 bp, Artificial Sequence
  Oligonucleotide for detection of SNP TSC0034242
tacacacaaaaaa

SEQ ID NO: 137031 - DNA, 13 bp, Artificial Sequence
  Oligonucleotide for detection of SNP TSC0034242
tttttcgtgtgta

SEQ ID NO: 137032 - DNA, 13 bp, Artificial Sequence
  Oligonucleotide for detection of SNP TSC0034242
tacacacgaaaaa

SEQ ID NO: 137033 - DNA, 13 bp, Artificial Sequence
  Oligonucleotide for detection of SNP TSC0034242
tgtatatgaggaa

SEQ ID NO: 137034 - DNA, 13 bp, Artificial Sequence
  Oligonucleotide for detection of SNP TSC0034242
ttcctcatataca

SEQ ID NO: 137035 - DNA, 13 bp, Artificial Sequence
  Oligonucleotide for detection of SNP TSC0034242
tgtatacgaggaa

SEQ ID NO: 137036 - DNA, 13 bp, Artificial Sequence
  Oligonucleotide for detection of SNP TSC0034242
ttcctcgtataca

SEQ ID NO: 137037 - DNA, 13 bp, Artificial Sequence
  Oligonucleotide for detection of SNP TSC0034249
gttattacgtttg

SEQ ID NO: 137038 - DNA, 13 bp, Artificial Sequence
  Oligonucleotide for detection of SNP TSC0034249
caaacgtaataac

SEQ ID NO: 137039 - DNA, 13 bp, Artificial Sequence
  Oligonucleotide for detection of SNP TSC0034249
gttattatgttcg

SEQ ID NO: 137040 - DNA, 13 bp, Artificial Sequence
  Oligonucleotide for detection of SNP TSC0034249
cgaacataataac

SEQ ID NO: 137041 - DNA, 13 bp, Artificial Sequence
  Oligonucleotide for detection of SNP TSC0034249
gttattgcgtttg

SEQ ID NO: 137042 - DNA, 13 bp, Artificial Sequence
  Oligonucleotide for detection of SNP TSC0034249
caaacgcaataac

SEQ ID NO: 137043 - DNA, 13 bp, Artificial Sequence
  Oligonucleotide for detection of SNP TSC0034249
gttattacgttcg

SEQ ID NO: 137044 - DNA, 13 bp, Artificial Sequence
  Oligonucleotide for detection of SNP TSC0034249
cgaacgtaataac

SEQ ID NO: 137045 - DNA, 13 bp, Artificial Sequence
  Oligonucleotide for detection of SNP TSC0034249
gttattgtgttcg

SEQ ID NO: 137046 - DNA, 13 bp, Artificial Sequence
  Oligonucleotide for detection of SNP TSC0034249
cgaacacaataac

SEQ ID NO: 137047 - DNA, 13 bp, Artificial Sequence
  Oligonucleotide for detection of SNP TSC0034249
gttatcgcgtttg

SEQ ID NO: 137048 - DNA, 13 bp, Artificial Sequence
  Oligonucleotide for detection of SNP TSC0034249
caaacgcgataac

SEQ ID NO: 137049 - DNA, 13 bp, Artificial Sequence
  Oligonucleotide for detection of SNP TSC0034249
gttatcgtgttcg

SEQ ID NO: 137050 - DNA, 13 bp, Artificial Sequence
  Oligonucleotide for detection of SNP TSC0034249
cgaacacgataac

SEQ ID NO: 137051 - DNA, 13 bp, Artificial Sequence
  Oligonucleotide for detection of SNP TSC0034249
gttattgcgttcg

SEQ ID NO: 137052 - DNA, 13 bp, Artificial Sequence
  Oligonucleotide for detection of SNP TSC0034249
cgaacgcaataac

SEQ ID NO: 137053 - DNA, 13 bp, Artificial Sequence
  Oligonucleotide for detection of SNP TSC0034249
gttatcgcgttcg

SEQ ID NO: 137054 - DNA, 13 bp, Artificial Sequence
  Oligonucleotide for detection of SNP TSC0034249
cgaacgcgataac

SEQ ID NO: 137055 - DNA, 13 bp, Artificial Sequence
  Oligonucleotide for detection of SNP TSC0034249
tgggcgtggtggy

SEQ ID NO: 137056 - DNA, 13 bp, Artificial Sequence
  Oligonucleotide for detection of SNP TSC0034249
rccaccacgccca

SEQ ID NO: 137057 - DNA, 13 bp, Artificial Sequence
  Oligonucleotide for detection of SNP TSC0034249
cgggcgtggtggy

SEQ ID NO: 137058 - DNA, 13 bp, Artificial Sequence
  Oligonucleotide for detection of SNP TSC0034249
rccaccacgcccg

SEQ ID NO: 137059 - DNA, 13 bp, Artificial Sequence
  Oligonucleotide for detection of SNP TSC0034249
tgggcgcggtggy

SEQ ID NO: 137060 - DNA, 13 bp, Artificial Sequence
  Oligonucleotide for detection of SNP TSC0034249
rccaccgcgccca

SEQ ID NO: 137061 - DNA, 13 bp, Artificial Sequence
  Oligonucleotide for detection of SNP TSC0034249
cgggcgcggtggy

SEQ ID NO: 137062 - DNA, 13 bp, Artificial Sequence
  Oligonucleotide for detection of SNP TSC0034249
rccaccgcgcccg

SEQ ID NO: 137063 - DNA, 13 bp, Artificial Sequence
  Oligonucleotide for detection of SNP TSC0034250
gttttgggtgtgg

SEQ ID NO: 137064 - DNA, 13 bp, Artificial Sequence
  Oligonucleotide for detection of SNP TSC0034250
ccacacccaaaac

SEQ ID NO: 137065 - DNA, 13 bp, Artificial Sequence
  Oligonucleotide for detection of SNP TSC0034250
gttttgagtgtgg

SEQ ID NO: 137066 - DNA, 13 bp, Artificial Sequence
  Oligonucleotide for detection of SNP TSC0034250
ccacactcaaaac

SEQ ID NO: 137067 - DNA, 13 bp, Artificial Sequence
  Oligonucleotide for detection of SNP TSC0034250
gtttcgggtgtgg

SEQ ID NO: 137068 - DNA, 13 bp, Artificial Sequence
  Oligonucleotide for detection of SNP TSC0034250
ccacacccgaaac

SEQ ID NO: 137069 - DNA, 13 bp, Artificial Sequence
  Oligonucleotide for detection of SNP TSC0034250
gtttcgagtgtgg

SEQ ID NO: 137070 - DNA, 13 bp, Artificial Sequence
  Oligonucleotide for detection of SNP TSC0034250
ccacactcgaaac

SEQ ID NO: 137071 - DNA, 13 bp, Artificial Sequence
  Oligonucleotide for detection of SNP TSC0034250
gttttgggcgtgg

SEQ ID NO: 137072 - DNA, 13 bp, Artificial Sequence
  Oligonucleotide for detection of SNP TSC0034250
ccacgcccaaaac

SEQ ID NO: 137073 - DNA, 13 bp, Artificial Sequence
  Oligonucleotide for detection of SNP TSC0034250
gttttgagcgtgg

SEQ ID NO: 137074 - DNA, 13 bp, Artificial Sequence
  Oligonucleotide for detection of SNP TSC0034250
ccacgctcaaaac

SEQ ID NO: 137075 - DNA, 13 bp, Artificial Sequence
  Oligonucleotide for detection of SNP TSC0034250
gtttcgggcgtgg

SEQ ID NO: 137076 - DNA, 13 bp, Artificial Sequence
  Oligonucleotide for detection of SNP TSC0034250
ccacgcccgaaac

SEQ ID NO: 137077 - DNA, 13 bp, Artificial Sequence
  Oligonucleotide for detection of SNP TSC0034250
gtttcgagcgtgg

SEQ ID NO: 137078 - DNA, 13 bp, Artificial Sequence
  Oligonucleotide for detection of SNP TSC0034250
ccacgctcgaaac

SEQ ID NO: 137079 - DNA, 13 bp, Artificial Sequence
  Oligonucleotide for detection of SNP TSC0034251
ttattaggagatt

SEQ ID NO: 137080 - DNA, 13 bp, Artificial Sequence
  Oligonucleotide for detection of SNP TSC0034251
aatctcctaataa

SEQ ID NO: 137081 - DNA, 13 bp, Artificial Sequence
  Oligonucleotide for detection of SNP TSC0034251
ttattaagagatt

SEQ ID NO: 137082 - DNA, 13 bp, Artificial Sequence
  Oligonucleotide for detection of SNP TSC0034251
aatctcttaataa

SEQ ID NO: 137083 - DNA, 13 bp, Artificial Sequence
  Oligonucleotide for detection of SNP TSC0034252
aggtaatatagty

SEQ ID NO: 137084 - DNA, 13 bp, Artificial Sequence
  Oligonucleotide for detection of SNP TSC0034252
ractatattacct

SEQ ID NO: 137085 - DNA, 13 bp, Artificial Sequence
  Oligonucleotide for detection of SNP TSC0034252
aggtaagatagty

SEQ ID NO: 137086 - DNA, 13 bp, Artificial Sequence
  Oligonucleotide for detection of SNP TSC0034252
ractatcttacct

SEQ ID NO: 137087 - DNA, 13 bp, Artificial Sequence
  Oligonucleotide for detection of SNP TSC0034252
ggttatgttgttt

SEQ ID NO: 137088 - DNA, 13 bp, Artificial Sequence
  Oligonucleotide for detection of SNP TSC0034252
aaacaacataacc

SEQ ID NO: 137089 - DNA, 13 bp, Artificial Sequence
  Oligonucleotide for detection of SNP TSC0034252
ggttattttgttt

SEQ ID NO: 137090 - DNA, 13 bp, Artificial Sequence
  Oligonucleotide for detection of SNP TSC0034252
aaacaaaataacc

SEQ ID NO: 137091 - DNA, 13 bp, Artificial Sequence
  Oligonucleotide for detection of SNP TSC0034253
ttattgtgttgtg

SEQ ID NO: 137092 - DNA, 13 bp, Artificial Sequence
  Oligonucleotide for detection of SNP TSC0034253
cacaacacaataa

SEQ ID NO: 137093 - DNA, 13 bp, Artificial Sequence
  Oligonucleotide for detection of SNP TSC0034253
ttatcgtgttgtg

SEQ ID NO: 137094 - DNA, 13 bp, Artificial Sequence
  Oligonucleotide for detection of SNP TSC0034253
cacaacacgataa

SEQ ID NO: 137095 - DNA, 13 bp, Artificial Sequence
  Oligonucleotide for detection of SNP TSC0034253
ttattgcgttgtg

SEQ ID NO: 137096 - DNA, 13 bp, Artificial Sequence
  Oligonucleotide for detection of SNP TSC0034253
cacaacgcaataa

SEQ ID NO: 137097 - DNA, 13 bp, Artificial Sequence
  Oligonucleotide for detection of SNP TSC0034253
ttatcgcgttgtg

SEQ ID NO: 137098 - DNA, 13 bp, Artificial Sequence
  Oligonucleotide for detection of SNP TSC0034253
cacaacgcgataa

SEQ ID NO: 137099 - DNA, 13 bp, Artificial Sequence
  Oligonucleotide for detection of SNP TSC0034253
tatagtgtggtgg

SEQ ID NO: 137100 - DNA, 13 bp, Artificial Sequence
  Oligonucleotide for detection of SNP TSC0034253
ccaccacactata

SEQ ID NO: 137101 - DNA, 13 bp, Artificial Sequence
  Oligonucleotide for detection of SNP TSC0034253
tatagtatggtgg

SEQ ID NO: 137102 - DNA, 13 bp, Artificial Sequence
  Oligonucleotide for detection of SNP TSC0034253
ccaccatactata

SEQ ID NO: 137103 - DNA, 13 bp, Artificial Sequence
  Oligonucleotide for detection of SNP TSC0034253
tatagcgtggtgg

SEQ ID NO: 137104 - DNA, 13 bp, Artificial Sequence
  Oligonucleotide for detection of SNP TSC0034253
ccaccacgctata

SEQ ID NO: 137105 - DNA, 13 bp, Artificial Sequence
  Oligonucleotide for detection of SNP TSC0034253
tatagtacggtgg

SEQ ID NO: 137106 - DNA, 13 bp, Artificial Sequence
  Oligonucleotide for detection of SNP TSC0034253
ccaccgtactata

SEQ ID NO: 137107 - DNA, 13 bp, Artificial Sequence
  Oligonucleotide for detection of SNP TSC0034253
tatagtgcggtgg

SEQ ID NO: 137108 - DNA, 13 bp, Artificial Sequence
  Oligonucleotide for detection of SNP TSC0034253
ccaccgcactata

SEQ ID NO: 137109 - DNA, 13 bp, Artificial Sequence
  Oligonucleotide for detection of SNP TSC0034253
tatagcgcggtgg

SEQ ID NO: 137110 - DNA, 13 bp, Artificial Sequence
  Oligonucleotide for detection of SNP TSC0034253
ccaccgcgctata

SEQ ID NO: 137111 - DNA, 13 bp, Artificial Sequence
  Oligonucleotide for detection of SNP TSC0034254
ttaaaaggtttty

SEQ ID NO: 137112 - DNA, 13 bp, Artificial Sequence
  Oligonucleotide for detection of SNP TSC0034254
raaaaccttttaa

SEQ ID NO: 137113 - DNA, 13 bp, Artificial Sequence
  Oligonucleotide for detection of SNP TSC0034254
ttaaaatgtttty

SEQ ID NO: 137114 - DNA, 13 bp, Artificial Sequence
  Oligonucleotide for detection of SNP TSC0034254
raaaacattttaa

SEQ ID NO: 137115 - DNA, 13 bp, Artificial Sequence
  Oligonucleotide for detection of SNP TSC0034254
gaaaattttttaa

SEQ ID NO: 137116 - DNA, 13 bp, Artificial Sequence
  Oligonucleotide for detection of SNP TSC0034254
ttaaaaaattttc

SEQ ID NO: 137117 - DNA, 13 bp, Artificial Sequence
  Oligonucleotide for detection of SNP TSC0034254
gaaaatattttaa

SEQ ID NO: 137118 - DNA, 13 bp, Artificial Sequence
  Oligonucleotide for detection of SNP TSC0034254
ttaaaatattttc

SEQ ID NO: 137119 - DNA, 13 bp, Artificial Sequence
  Oligonucleotide for detection of SNP TSC0034260
aatttatggttag

SEQ ID NO: 137120 - DNA, 13 bp, Artificial Sequence
  Oligonucleotide for detection of SNP TSC0034260
ctaaccataaatt

SEQ ID NO: 137121 - DNA, 13 bp, Artificial Sequence
  Oligonucleotide for detection of SNP TSC0034260
aatttacggttag

SEQ ID NO: 137122 - DNA, 13 bp, Artificial Sequence
  Oligonucleotide for detection of SNP TSC0034260
ctaaccgtaaatt

SEQ ID NO: 137123 - DNA, 13 bp, Artificial Sequence
  Oligonucleotide for detection of SNP TSC0034260
ttggttgtaagtt

SEQ ID NO: 137124 - DNA, 13 bp, Artificial Sequence
  Oligonucleotide for detection of SNP TSC0034260
aacttacaaccaa

SEQ ID NO: 137125 - DNA, 13 bp, Artificial Sequence
  Oligonucleotide for detection of SNP TSC0034260
ttggttataagtt

SEQ ID NO: 137126 - DNA, 13 bp, Artificial Sequence
  Oligonucleotide for detection of SNP TSC0034260
aacttataaccaa

SEQ ID NO: 137127 - DNA, 13 bp, Artificial Sequence
  Oligonucleotide for detection of SNP TSC0034260
ttggtcgtaagtt

SEQ ID NO: 137128 - DNA, 13 bp, Artificial Sequence
  Oligonucleotide for detection of SNP TSC0034260
aacttacgaccaa

SEQ ID NO: 137129 - DNA, 13 bp, Artificial Sequence
  Oligonucleotide for detection of SNP TSC0034261
gcgtggcggttta

SEQ ID NO: 137130 - DNA, 13 bp, Artificial Sequence
  Oligonucleotide for detection of SNP TSC0034261
taaaccgccacgc

SEQ ID NO: 137131 - DNA, 13 bp, Artificial Sequence
  Oligonucleotide for detection of SNP TSC0034261
gtgcggcggttta

SEQ ID NO: 137132 - DNA, 13 bp, Artificial Sequence
  Oligonucleotide for detection of SNP TSC0034261
taaaccgccgcac

SEQ ID NO: 137133 - DNA, 13 bp, Artificial Sequence
  Oligonucleotide for detection of SNP TSC0034261
gcgcggcggttta

SEQ ID NO: 137134 - DNA, 13 bp, Artificial Sequence
  Oligonucleotide for detection of SNP TSC0034261
taaaccgccgcgc

SEQ ID NO: 137135 - DNA, 13 bp, Artificial Sequence
  Oligonucleotide for detection of SNP TSC0034261
tgagttgttgtgy

SEQ ID NO: 137136 - DNA, 13 bp, Artificial Sequence
  Oligonucleotide for detection of SNP TSC0034261
rcacaacaactca

SEQ ID NO: 137137 - DNA, 13 bp, Artificial Sequence
  Oligonucleotide for detection of SNP TSC0034261
tgagtcgttgtgy

SEQ ID NO: 137138 - DNA, 13 bp, Artificial Sequence
  Oligonucleotide for detection of SNP TSC0034261
rcacaacgactca

SEQ ID NO: 137139 - DNA, 13 bp, Artificial Sequence
  Oligonucleotide for detection of SNP TSC0034261
tgagttgtcgtgy

SEQ ID NO: 137140 - DNA, 13 bp, Artificial Sequence
  Oligonucleotide for detection of SNP TSC0034261
rcacgacaactca

SEQ ID NO: 137141 - DNA, 13 bp, Artificial Sequence
  Oligonucleotide for detection of SNP TSC0034261
tgagttgttgcgy

SEQ ID NO: 137142 - DNA, 13 bp, Artificial Sequence
  Oligonucleotide for detection of SNP TSC0034261
rcgcaacaactca

SEQ ID NO: 137143 - DNA, 13 bp, Artificial Sequence
  Oligonucleotide for detection of SNP TSC0034261
tgagtcgtcgtgy

SEQ ID NO: 137144 - DNA, 13 bp, Artificial Sequence
  Oligonucleotide for detection of SNP TSC0034261
rcacgacgactca

SEQ ID NO: 137145 - DNA, 13 bp, Artificial Sequence
  Oligonucleotide for detection of SNP TSC0034261
tgagtcgttgcgy

SEQ ID NO: 137146 - DNA, 13 bp, Artificial Sequence
  Oligonucleotide for detection of SNP TSC0034261
rcgcaacgactca

SEQ ID NO: 137147 - DNA, 13 bp, Artificial Sequence
  Oligonucleotide for detection of SNP TSC0034261
tgagttgtcgcgy

SEQ ID NO: 137148 - DNA, 13 bp, Artificial Sequence
  Oligonucleotide for detection of SNP TSC0034261
rcgcgacaactca

SEQ ID NO: 137149 - DNA, 13 bp, Artificial Sequence
  Oligonucleotide for detection of SNP TSC0034261
tgagtcgtcgcgy

SEQ ID NO: 137150 - DNA, 13 bp, Artificial Sequence
  Oligonucleotide for detection of SNP TSC0034261
rcgcgacgactca

SEQ ID NO: 137151 - DNA, 13 bp, Artificial Sequence
  Oligonucleotide for detection of SNP TSC0034262
gatatttgtgtag

SEQ ID NO: 137152 - DNA, 13 bp, Artificial Sequence
  Oligonucleotide for detection of SNP TSC0034262
ctacacaaatatc

SEQ ID NO: 137153 - DNA, 13 bp, Artificial Sequence
  Oligonucleotide for detection of SNP TSC0034262
gatattcgtgtag

SEQ ID NO: 137154 - DNA, 13 bp, Artificial Sequence
  Oligonucleotide for detection of SNP TSC0034262
ctacacgaatatc

SEQ ID NO: 137155 - DNA, 13 bp, Artificial Sequence
  Oligonucleotide for detection of SNP TSC0034262
ttgtatggataty

SEQ ID NO: 137156 - DNA, 13 bp, Artificial Sequence
  Oligonucleotide for detection of SNP TSC0034262
ratatccatacaa

SEQ ID NO: 137157 - DNA, 13 bp, Artificial Sequence
  Oligonucleotide for detection of SNP TSC0034262
ttgtatagataty

SEQ ID NO: 137158 - DNA, 13 bp, Artificial Sequence
  Oligonucleotide for detection of SNP TSC0034262
ratatctatacaa

SEQ ID NO: 137159 - DNA, 13 bp, Artificial Sequence
  Oligonucleotide for detection of SNP TSC0034262
ttgtacggataty

SEQ ID NO: 137160 - DNA, 13 bp, Artificial Sequence
  Oligonucleotide for detection of SNP TSC0034262
ratatccgtacaa

SEQ ID NO: 137161 - DNA, 13 bp, Artificial Sequence
  Oligonucleotide for detection of SNP TSC0034263
ttgttttgttaty

SEQ ID NO: 137162 - DNA, 13 bp, Artificial Sequence
  Oligonucleotide for detection of SNP TSC0034263
rataacaaaacaa

SEQ ID NO: 137163 - DNA, 13 bp, Artificial Sequence
  Oligonucleotide for detection of SNP TSC0034263
ttgtttcgttaty

SEQ ID NO: 137164 - DNA, 13 bp, Artificial Sequence
  Oligonucleotide for detection of SNP TSC0034263
rataacgaaacaa

SEQ ID NO: 137165 - DNA, 13 bp, Artificial Sequence
  Oligonucleotide for detection of SNP TSC0034264
agatttagttatt

SEQ ID NO: 137166 - DNA, 13 bp, Artificial Sequence
  Oligonucleotide for detection of SNP TSC0034264
aataactaaatct

SEQ ID NO: 137167 - DNA, 13 bp, Artificial Sequence
  Oligonucleotide for detection of SNP TSC0034264
agattttgttatt

SEQ ID NO: 137168 - DNA, 13 bp, Artificial Sequence
  Oligonucleotide for detection of SNP TSC0034264
aataacaaaatct

SEQ ID NO: 137169 - DNA, 13 bp, Artificial Sequence
  Oligonucleotide for detection of SNP TSC0034264
aatgattggattt

SEQ ID NO: 137170 - DNA, 13 bp, Artificial Sequence
  Oligonucleotide for detection of SNP TSC0034264
aaatccaatcatt

SEQ ID NO: 137171 - DNA, 13 bp, Artificial Sequence
  Oligonucleotide for detection of SNP TSC0034264
aatgataggattt

SEQ ID NO: 137172 - DNA, 13 bp, Artificial Sequence
  Oligonucleotide for detection of SNP TSC0034264
aaatcctatcatt

SEQ ID NO: 137173 - DNA, 13 bp, Artificial Sequence
  Oligonucleotide for detection of SNP TSC0034265
tttataattttgt

SEQ ID NO: 137174 - DNA, 13 bp, Artificial Sequence
  Oligonucleotide for detection of SNP TSC0034265
acaaaattataaa

SEQ ID NO: 137175 - DNA, 13 bp, Artificial Sequence
  Oligonucleotide for detection of SNP TSC0034265
ataaaattatgaa

SEQ ID NO: 137176 - DNA, 13 bp, Artificial Sequence
  Oligonucleotide for detection of SNP TSC0034265
ttcataattttat

SEQ ID NO: 137177 - DNA, 13 bp, Artificial Sequence
  Oligonucleotide for detection of SNP TSC0034265
ataaaaatatgaa

SEQ ID NO: 137178 - DNA, 13 bp, Artificial Sequence
  Oligonucleotide for detection of SNP TSC0034265
ttcatatttttat

SEQ ID NO: 137179 - DNA, 13 bp, Artificial Sequence
  Oligonucleotide for detection of SNP TSC0034266
agtagggttttta

SEQ ID NO: 137180 - DNA, 13 bp, Artificial Sequence
  Oligonucleotide for detection of SNP TSC0034266
taaaaaccctact

SEQ ID NO: 137181 - DNA, 13 bp, Artificial Sequence
  Oligonucleotide for detection of SNP TSC0034266
agtaggattttta

SEQ ID NO: 137182 - DNA, 13 bp, Artificial Sequence
  Oligonucleotide for detection of SNP TSC0034266
taaaaatcctact

SEQ ID NO: 137183 - DNA, 13 bp, Artificial Sequence
  Oligonucleotide for detection of SNP TSC0034267
atttttaagaaaa

SEQ ID NO: 137184 - DNA, 13 bp, Artificial Sequence
  Oligonucleotide for detection of SNP TSC0034267
ttttcttaaaaat

SEQ ID NO: 137185 - DNA, 13 bp, Artificial Sequence
  Oligonucleotide for detection of SNP TSC0034267
atttttgagaaaa

SEQ ID NO: 137186 - DNA, 13 bp, Artificial Sequence
  Oligonucleotide for detection of SNP TSC0034267
ttttctcaaaaat

SEQ ID NO: 137187 - DNA, 13 bp, Artificial Sequence
  Oligonucleotide for detection of SNP TSC0034267
attttcgagaaaa

SEQ ID NO: 137188 - DNA, 13 bp, Artificial Sequence
  Oligonucleotide for detection of SNP TSC0034267
ttttctcgaaaat

SEQ ID NO: 137189 - DNA, 13 bp, Artificial Sequence
  Oligonucleotide for detection of SNP TSC0034267
tttttttggaaat

SEQ ID NO: 137190 - DNA, 13 bp, Artificial Sequence
  Oligonucleotide for detection of SNP TSC0034267
atttccaaaaaaa

SEQ ID NO: 137191 - DNA, 13 bp, Artificial Sequence
  Oligonucleotide for detection of SNP TSC0034267
ttttttcggaaat

SEQ ID NO: 137192 - DNA, 13 bp, Artificial Sequence
  Oligonucleotide for detection of SNP TSC0034267
atttccgaaaaaa

SEQ ID NO: 137193 - DNA, 13 bp, Artificial Sequence
  Oligonucleotide for detection of SNP TSC0034271
attttgatttatg

SEQ ID NO: 137194 - DNA, 13 bp, Artificial Sequence
  Oligonucleotide for detection of SNP TSC0034271
cataaatcaaaat

SEQ ID NO: 137195 - DNA, 13 bp, Artificial Sequence
  Oligonucleotide for detection of SNP TSC0034271
attttgttttatg

SEQ ID NO: 137196 - DNA, 13 bp, Artificial Sequence
  Oligonucleotide for detection of SNP TSC0034271
cataaaacaaaat

SEQ ID NO: 137197 - DNA, 13 bp, Artificial Sequence
  Oligonucleotide for detection of SNP TSC0034271
tatagattaaggt

SEQ ID NO: 137198 - DNA, 13 bp, Artificial Sequence
  Oligonucleotide for detection of SNP TSC0034271
accttaatctata

SEQ ID NO: 137199 - DNA, 13 bp, Artificial Sequence
  Oligonucleotide for detection of SNP TSC0034271
tatagagtaaggt

SEQ ID NO: 137200 - DNA, 13 bp, Artificial Sequence
  Oligonucleotide for detection of SNP TSC0034271
accttactctata

SEQ ID NO: 137201 - DNA, 13 bp, Artificial Sequence
  Oligonucleotide for detection of SNP TSC0034272
ttaagttgtaaaa

SEQ ID NO: 137202 - DNA, 13 bp, Artificial Sequence
  Oligonucleotide for detection of SNP TSC0034272
ttttacaacttaa

SEQ ID NO: 137203 - DNA, 13 bp, Artificial Sequence
  Oligonucleotide for detection of SNP TSC0034272
ttaagtcgtaaaa

SEQ ID NO: 137204 - DNA, 13 bp, Artificial Sequence
  Oligonucleotide for detection of SNP TSC0034272
ttttacgacttaa

SEQ ID NO: 137205 - DNA, 13 bp, Artificial Sequence
  Oligonucleotide for detection of SNP TSC0034274
tgtggggaggagg

SEQ ID NO: 137206 - DNA, 13 bp, Artificial Sequence
  Oligonucleotide for detection of SNP TSC0034274
cctcctccccaca

SEQ ID NO: 137207 - DNA, 13 bp, Artificial Sequence
  Oligonucleotide for detection of SNP TSC0034274
tgtgggaaggagg

SEQ ID NO: 137208 - DNA, 13 bp, Artificial Sequence
  Oligonucleotide for detection of SNP TSC0034274
cctccttcccaca

SEQ ID NO: 137209 - DNA, 13 bp, Artificial Sequence
  Oligonucleotide for detection of SNP TSC0034274
cgtggggaggagg

SEQ ID NO: 137210 - DNA, 13 bp, Artificial Sequence
  Oligonucleotide for detection of SNP TSC0034274
cctcctccccacg

SEQ ID NO: 137211 - DNA, 13 bp, Artificial Sequence
  Oligonucleotide for detection of SNP TSC0034274
cgtgggaaggagg

SEQ ID NO: 137212 - DNA, 13 bp, Artificial Sequence
  Oligonucleotide for detection of SNP TSC0034274
cctccttcccacg

SEQ ID NO: 137213 - DNA, 13 bp, Artificial Sequence
  Oligonucleotide for detection of SNP TSC0034276
agttgaataatga

SEQ ID NO: 137214 - DNA, 13 bp, Artificial Sequence
  Oligonucleotide for detection of SNP TSC0034276
tcattattcaact

SEQ ID NO: 137215 - DNA, 13 bp, Artificial Sequence
  Oligonucleotide for detection of SNP TSC0034276
agttgagtaatga

SEQ ID NO: 137216 - DNA, 13 bp, Artificial Sequence
  Oligonucleotide for detection of SNP TSC0034276
tcattactcaact

SEQ ID NO: 137217 - DNA, 13 bp, Artificial Sequence
  Oligonucleotide for detection of SNP TSC0034276
agttgaataacga

SEQ ID NO: 137218 - DNA, 13 bp, Artificial Sequence
  Oligonucleotide for detection of SNP TSC0034276
tcgttattcaact

SEQ ID NO: 137219 - DNA, 13 bp, Artificial Sequence
  Oligonucleotide for detection of SNP TSC0034276
agttgagtaacga

SEQ ID NO: 137220 - DNA, 13 bp, Artificial Sequence
  Oligonucleotide for detection of SNP TSC0034276
tcgttactcaact

SEQ ID NO: 137221 - DNA, 13 bp, Artificial Sequence
  Oligonucleotide for detection of SNP TSC0034277
aaatttgaattag

SEQ ID NO: 137222 - DNA, 13 bp, Artificial Sequence
  Oligonucleotide for detection of SNP TSC0034277
ctaattcaaattt

SEQ ID NO: 137223 - DNA, 13 bp, Artificial Sequence
  Oligonucleotide for detection of SNP TSC0034277
aaatttaaattag

SEQ ID NO: 137224 - DNA, 13 bp, Artificial Sequence
  Oligonucleotide for detection of SNP TSC0034277
ctaatttaaattt

SEQ ID NO: 137225 - DNA, 13 bp, Artificial Sequence
  Oligonucleotide for detection of SNP TSC0034278
tgttttattattt

SEQ ID NO: 137226 - DNA, 13 bp, Artificial Sequence
  Oligonucleotide for detection of SNP TSC0034278
aaataataaaaca

SEQ ID NO: 137227 - DNA, 13 bp, Artificial Sequence
  Oligonucleotide for detection of SNP TSC0034278
tgttttgttattt

SEQ ID NO: 137228 - DNA, 13 bp, Artificial Sequence
  Oligonucleotide for detection of SNP TSC0034278
aaataacaaaaca

SEQ ID NO: 137229 - DNA, 13 bp, Artificial Sequence
  Oligonucleotide for detection of SNP TSC0034278
tgtttcgttattt

SEQ ID NO: 137230 - DNA, 13 bp, Artificial Sequence
  Oligonucleotide for detection of SNP TSC0034278
aaataacgaaaca

SEQ ID NO: 137231 - DNA, 13 bp, Artificial Sequence
  Oligonucleotide for detection of SNP TSC0034278
aagtaatgagata

SEQ ID NO: 137232 - DNA, 13 bp, Artificial Sequence
  Oligonucleotide for detection of SNP TSC0034278
tatctcattactt

SEQ ID NO: 137233 - DNA, 13 bp, Artificial Sequence
  Oligonucleotide for detection of SNP TSC0034278
aagtaacgagata

SEQ ID NO: 137234 - DNA, 13 bp, Artificial Sequence
  Oligonucleotide for detection of SNP TSC0034278
tatctcgttactt

SEQ ID NO: 137235 - DNA, 13 bp, Artificial Sequence
  Oligonucleotide for detection of SNP TSC0034279
agatatattggaa

SEQ ID NO: 137236 - DNA, 13 bp, Artificial Sequence
  Oligonucleotide for detection of SNP TSC0034279
ttccaatatatct

SEQ ID NO: 137237 - DNA, 13 bp, Artificial Sequence
  Oligonucleotide for detection of SNP TSC0034279
agatatgttggaa

SEQ ID NO: 137238 - DNA, 13 bp, Artificial Sequence
  Oligonucleotide for detection of SNP TSC0034279
ttccaacatatct

SEQ ID NO: 137239 - DNA, 13 bp, Artificial Sequence
  Oligonucleotide for detection of SNP TSC0034280
tattaggagttag

SEQ ID NO: 137240 - DNA, 13 bp, Artificial Sequence
  Oligonucleotide for detection of SNP TSC0034280
ctaactcctaata

SEQ ID NO: 137241 - DNA, 13 bp, Artificial Sequence
  Oligonucleotide for detection of SNP TSC0034280
tattagaagttag

SEQ ID NO: 137242 - DNA, 13 bp, Artificial Sequence
  Oligonucleotide for detection of SNP TSC0034280
ctaacttctaata

SEQ ID NO: 137243 - DNA, 13 bp, Artificial Sequence
  Oligonucleotide for detection of SNP TSC0034284
aaatatgagttta

SEQ ID NO: 137244 - DNA, 13 bp, Artificial Sequence
  Oligonucleotide for detection of SNP TSC0034284
taaactcatattt

SEQ ID NO: 137245 - DNA, 13 bp, Artificial Sequence
  Oligonucleotide for detection of SNP TSC0034284
aaatattagttta

SEQ ID NO: 137246 - DNA, 13 bp, Artificial Sequence
  Oligonucleotide for detection of SNP TSC0034284
taaactaatattt

SEQ ID NO: 137247 - DNA, 13 bp, Artificial Sequence
  Oligonucleotide for detection of SNP TSC0034284
taagtttatattt

SEQ ID NO: 137248 - DNA, 13 bp, Artificial Sequence
  Oligonucleotide for detection of SNP TSC0034284
aaatataaactta

SEQ ID NO: 137249 - DNA, 13 bp, Artificial Sequence
  Oligonucleotide for detection of SNP TSC0034284
taagttaatattt

SEQ ID NO: 137250 - DNA, 13 bp, Artificial Sequence
  Oligonucleotide for detection of SNP TSC0034284
aaatattaactta

SEQ ID NO: 137251 - DNA, 13 bp, Artificial Sequence
  Oligonucleotide for detection of SNP TSC0034285
aattaggttggta

SEQ ID NO: 137252 - DNA, 13 bp, Artificial Sequence
  Oligonucleotide for detection of SNP TSC0034285
taccaacctaatt

SEQ ID NO: 137253 - DNA, 13 bp, Artificial Sequence
  Oligonucleotide for detection of SNP TSC0034285
aattagattggta

SEQ ID NO: 137254 - DNA, 13 bp, Artificial Sequence
  Oligonucleotide for detection of SNP TSC0034285
taccaatctaatt

SEQ ID NO: 137255 - DNA, 13 bp, Artificial Sequence
  Oligonucleotide for detection of SNP TSC0034286
tagtaaaggtatt

SEQ ID NO: 137256 - DNA, 13 bp, Artificial Sequence
  Oligonucleotide for detection of SNP TSC0034286
aatacctttacta

SEQ ID NO: 137257 - DNA, 13 bp, Artificial Sequence
  Oligonucleotide for detection of SNP TSC0034286
tagtaagggtatt

SEQ ID NO: 137258 - DNA, 13 bp, Artificial Sequence
  Oligonucleotide for detection of SNP TSC0034286
aatacccttacta

SEQ ID NO: 137259 - DNA, 13 bp, Artificial Sequence
  Oligonucleotide for detection of SNP TSC0034287
tattttgtgatta

SEQ ID NO: 137260 - DNA, 13 bp, Artificial Sequence
  Oligonucleotide for detection of SNP TSC0034287
taatcacaaaata

SEQ ID NO: 137261 - DNA, 13 bp, Artificial Sequence
  Oligonucleotide for detection of SNP TSC0034287
tatttcgtgatta

SEQ ID NO: 137262 - DNA, 13 bp, Artificial Sequence
  Oligonucleotide for detection of SNP TSC0034287
taatcacgaaata

SEQ ID NO: 137263 - DNA, 13 bp, Artificial Sequence
  Oligonucleotide for detection of SNP TSC0034287
tagttatgaggtg

SEQ ID NO: 137264 - DNA, 13 bp, Artificial Sequence
  Oligonucleotide for detection of SNP TSC0034287
cacctcataacta

SEQ ID NO: 137265 - DNA, 13 bp, Artificial Sequence
  Oligonucleotide for detection of SNP TSC0034287
tagttacgaggtg

SEQ ID NO: 137266 - DNA, 13 bp, Artificial Sequence
  Oligonucleotide for detection of SNP TSC0034287
cacctcgtaacta

SEQ ID NO: 137267 - DNA, 13 bp, Artificial Sequence
  Oligonucleotide for detection of SNP TSC0034288
agtagttagagaa

SEQ ID NO: 137268 - DNA, 13 bp, Artificial Sequence
  Oligonucleotide for detection of SNP TSC0034288
ttctctaactact

SEQ ID NO: 137269 - DNA, 13 bp, Artificial Sequence
  Oligonucleotide for detection of SNP TSC0034288
agtagtaagagaa

SEQ ID NO: 137270 - DNA, 13 bp, Artificial Sequence
  Oligonucleotide for detection of SNP TSC0034288
ttctcttactact

SEQ ID NO: 137271 - DNA, 13 bp, Artificial Sequence
  Oligonucleotide for detection of SNP TSC0034293
gaagtatgttgtt

SEQ ID NO: 137272 - DNA, 13 bp, Artificial Sequence
  Oligonucleotide for detection of SNP TSC0034293
aacaacatacttc

SEQ ID NO: 137273 - DNA, 13 bp, Artificial Sequence
  Oligonucleotide for detection of SNP TSC0034293
gaagtacgttgtt

SEQ ID NO: 137274 - DNA, 13 bp, Artificial Sequence
  Oligonucleotide for detection of SNP TSC0034293
aacaacgtacttc

SEQ ID NO: 137275 - DNA, 13 bp, Artificial Sequence
  Oligonucleotide for detection of SNP TSC0034293
aatagtgtgttty

SEQ ID NO: 137276 - DNA, 13 bp, Artificial Sequence
  Oligonucleotide for detection of SNP TSC0034293
raaacacactatt

SEQ ID NO: 137277 - DNA, 13 bp, Artificial Sequence
  Oligonucleotide for detection of SNP TSC0034293
aatagtatgttty

SEQ ID NO: 137278 - DNA, 13 bp, Artificial Sequence
  Oligonucleotide for detection of SNP TSC0034293
raaacatactatt

SEQ ID NO: 137279 - DNA, 13 bp, Artificial Sequence
  Oligonucleotide for detection of SNP TSC0034293
aatagcgtgttty

SEQ ID NO: 137280 - DNA, 13 bp, Artificial Sequence
  Oligonucleotide for detection of SNP TSC0034293
raaacacgctatt

SEQ ID NO: 137281 - DNA, 13 bp, Artificial Sequence
  Oligonucleotide for detection of SNP TSC0034297
tatttggtaatgt

SEQ ID NO: 137282 - DNA, 13 bp, Artificial Sequence
  Oligonucleotide for detection of SNP TSC0034297
acattaccaaata

SEQ ID NO: 137283 - DNA, 13 bp, Artificial Sequence
  Oligonucleotide for detection of SNP TSC0034297
tatttgttaatgt

SEQ ID NO: 137284 - DNA, 13 bp, Artificial Sequence
  Oligonucleotide for detection of SNP TSC0034297
acattaacaaata

SEQ ID NO: 137285 - DNA, 13 bp, Artificial Sequence
  Oligonucleotide for detection of SNP TSC0034297
atattattaaata

SEQ ID NO: 137286 - DNA, 13 bp, Artificial Sequence
  Oligonucleotide for detection of SNP TSC0034297
tatttaataatat

SEQ ID NO: 137287 - DNA, 13 bp, Artificial Sequence
  Oligonucleotide for detection of SNP TSC0034297
atattaataaata

SEQ ID NO: 137288 - DNA, 13 bp, Artificial Sequence
  Oligonucleotide for detection of SNP TSC0034297
tatttattaatat

SEQ ID NO: 137289 - DNA, 13 bp, Artificial Sequence
  Oligonucleotide for detection of SNP TSC0034298
aaaaaagtaatag

SEQ ID NO: 137290 - DNA, 13 bp, Artificial Sequence
  Oligonucleotide for detection of SNP TSC0034298
ctattactttttt

SEQ ID NO: 137291 - DNA, 13 bp, Artificial Sequence
  Oligonucleotide for detection of SNP TSC0034298
aaaaaaataatag

SEQ ID NO: 137292 - DNA, 13 bp, Artificial Sequence
  Oligonucleotide for detection of SNP TSC0034298
ctattattttttt

SEQ ID NO: 137293 - DNA, 13 bp, Artificial Sequence
  Oligonucleotide for detection of SNP TSC0034302
gtagaataaatag

SEQ ID NO: 137294 - DNA, 13 bp, Artificial Sequence
  Oligonucleotide for detection of SNP TSC0034302
ctatttattctac

SEQ ID NO: 137295 - DNA, 13 bp, Artificial Sequence
  Oligonucleotide for detection of SNP TSC0034302
gtagaaaaaatag

SEQ ID NO: 137296 - DNA, 13 bp, Artificial Sequence
  Oligonucleotide for detection of SNP TSC0034302
ctattttttctac

SEQ ID NO: 137297 - DNA, 13 bp, Artificial Sequence
  Oligonucleotide for detection of SNP TSC0034304
ttattttttaagg

SEQ ID NO: 137298 - DNA, 13 bp, Artificial Sequence
  Oligonucleotide for detection of SNP TSC0034304
ccttaaaaaataa

SEQ ID NO: 137299 - DNA, 13 bp, Artificial Sequence
  Oligonucleotide for detection of SNP TSC0034304
ttatttgttaagg

SEQ ID NO: 137300 - DNA, 13 bp, Artificial Sequence
  Oligonucleotide for detection of SNP TSC0034304
ccttaacaaataa

SEQ ID NO: 137301 - DNA, 13 bp, Artificial Sequence
  Oligonucleotide for detection of SNP TSC0034304
ttttaggaggtgg

SEQ ID NO: 137302 - DNA, 13 bp, Artificial Sequence
  Oligonucleotide for detection of SNP TSC0034304
ccacctcctaaaa

SEQ ID NO: 137303 - DNA, 13 bp, Artificial Sequence
  Oligonucleotide for detection of SNP TSC0034304
ttttagtaggtgg

SEQ ID NO: 137304 - DNA, 13 bp, Artificial Sequence
  Oligonucleotide for detection of SNP TSC0034304
ccacctactaaaa

SEQ ID NO: 137305 - DNA, 13 bp, Artificial Sequence
  Oligonucleotide for detection of SNP TSC0034305
tagagtgattaaa

SEQ ID NO: 137306 - DNA, 13 bp, Artificial Sequence
  Oligonucleotide for detection of SNP TSC0034305
tttaatcactcta

SEQ ID NO: 137307 - DNA, 13 bp, Artificial Sequence
  Oligonucleotide for detection of SNP TSC0034305
tagagttattaaa

SEQ ID NO: 137308 - DNA, 13 bp, Artificial Sequence
  Oligonucleotide for detection of SNP TSC0034305
tttaataactcta

SEQ ID NO: 137309 - DNA, 13 bp, Artificial Sequence
  Oligonucleotide for detection of SNP TSC0034305
tagagcgattaaa

SEQ ID NO: 137310 - DNA, 13 bp, Artificial Sequence
  Oligonucleotide for detection of SNP TSC0034305
tttaatcgctcta

SEQ ID NO: 137311 - DNA, 13 bp, Artificial Sequence
  Oligonucleotide for detection of SNP TSC0034305
tttaattgttttg

SEQ ID NO: 137312 - DNA, 13 bp, Artificial Sequence
  Oligonucleotide for detection of SNP TSC0034305
caaaacaattaaa

SEQ ID NO: 137313 - DNA, 13 bp, Artificial Sequence
  Oligonucleotide for detection of SNP TSC0034305
tttaatagttttg

SEQ ID NO: 137314 - DNA, 13 bp, Artificial Sequence
  Oligonucleotide for detection of SNP TSC0034305
caaaactattaaa

SEQ ID NO: 137315 - DNA, 13 bp, Artificial Sequence
  Oligonucleotide for detection of SNP TSC0034305
tttaatcgttttg

SEQ ID NO: 137316 - DNA, 13 bp, Artificial Sequence
  Oligonucleotide for detection of SNP TSC0034305
caaaacgattaaa

SEQ ID NO: 137317 - DNA, 13 bp, Artificial Sequence
  Oligonucleotide for detection of SNP TSC0034307
aggatggagagay

SEQ ID NO: 137318 - DNA, 13 bp, Artificial Sequence
  Oligonucleotide for detection of SNP TSC0034307
rtctctccatcct

SEQ ID NO: 137319 - DNA, 13 bp, Artificial Sequence
  Oligonucleotide for detection of SNP TSC0034307
aggatgtagagay

SEQ ID NO: 137320 - DNA, 13 bp, Artificial Sequence
  Oligonucleotide for detection of SNP TSC0034307
rtctctacatcct

SEQ ID NO: 137321 - DNA, 13 bp, Artificial Sequence
  Oligonucleotide for detection of SNP TSC0034308
ttatggtgatagt

SEQ ID NO: 137322 - DNA, 13 bp, Artificial Sequence
  Oligonucleotide for detection of SNP TSC0034308
actatcaccataa

SEQ ID NO: 137323 - DNA, 13 bp, Artificial Sequence
  Oligonucleotide for detection of SNP TSC0034308
ttatggggatagt

SEQ ID NO: 137324 - DNA, 13 bp, Artificial Sequence
  Oligonucleotide for detection of SNP TSC0034308
actatccccataa

SEQ ID NO: 137325 - DNA, 13 bp, Artificial Sequence
  Oligonucleotide for detection of SNP TSC0034308
ttatggcgatagt

SEQ ID NO: 137326 - DNA, 13 bp, Artificial Sequence
  Oligonucleotide for detection of SNP TSC0034308
actatcgccataa

SEQ ID NO: 137327 - DNA, 13 bp, Artificial Sequence
  Oligonucleotide for detection of SNP TSC0034308
attgttgttatgg

SEQ ID NO: 137328 - DNA, 13 bp, Artificial Sequence
  Oligonucleotide for detection of SNP TSC0034308
ccataacaacaat

SEQ ID NO: 137329 - DNA, 13 bp, Artificial Sequence
  Oligonucleotide for detection of SNP TSC0034308
attgtttttatgg

SEQ ID NO: 137330 - DNA, 13 bp, Artificial Sequence
  Oligonucleotide for detection of SNP TSC0034308
ccataaaaacaat

SEQ ID NO: 137331 - DNA, 13 bp, Artificial Sequence
  Oligonucleotide for detection of SNP TSC0034308
attgtcgttatgg

SEQ ID NO: 137332 - DNA, 13 bp, Artificial Sequence
  Oligonucleotide for detection of SNP TSC0034308
ccataacgacaat

SEQ ID NO: 137333 - DNA, 13 bp, Artificial Sequence
  Oligonucleotide for detection of SNP TSC0034309
tagaaaagattty

SEQ ID NO: 137334 - DNA, 13 bp, Artificial Sequence
  Oligonucleotide for detection of SNP TSC0034309
raaatcttttcta

SEQ ID NO: 137335 - DNA, 13 bp, Artificial Sequence
  Oligonucleotide for detection of SNP TSC0034309
tagaaaggattty

SEQ ID NO: 137336 - DNA, 13 bp, Artificial Sequence
  Oligonucleotide for detection of SNP TSC0034309
raaatcctttcta

SEQ ID NO: 137337 - DNA, 13 bp, Artificial Sequence
  Oligonucleotide for detection of SNP TSC0034310
agggaggagaaaa

SEQ ID NO: 137338 - DNA, 13 bp, Artificial Sequence
  Oligonucleotide for detection of SNP TSC0034310
ttttctcctccct

SEQ ID NO: 137339 - DNA, 13 bp, Artificial Sequence
  Oligonucleotide for detection of SNP TSC0034310
agggagaagaaaa

SEQ ID NO: 137340 - DNA, 13 bp, Artificial Sequence
  Oligonucleotide for detection of SNP TSC0034310
ttttcttctccct

SEQ ID NO: 137341 - DNA, 13 bp, Artificial Sequence
  Oligonucleotide for detection of SNP TSC0034311
aaaaaagggggta

SEQ ID NO: 137342 - DNA, 13 bp, Artificial Sequence
  Oligonucleotide for detection of SNP TSC0034311
taccccctttttt

SEQ ID NO: 137343 - DNA, 13 bp, Artificial Sequence
  Oligonucleotide for detection of SNP TSC0034311
aaaaaaaggggta

SEQ ID NO: 137344 - DNA, 13 bp, Artificial Sequence
  Oligonucleotide for detection of SNP TSC0034311
taccccttttttt

SEQ ID NO: 137345 - DNA, 13 bp, Artificial Sequence
  Oligonucleotide for detection of SNP TSC0034313
tgtaggatattgg

SEQ ID NO: 137346 - DNA, 13 bp, Artificial Sequence
  Oligonucleotide for detection of SNP TSC0034313
ccaatatcctaca

SEQ ID NO: 137347 - DNA, 13 bp, Artificial Sequence
  Oligonucleotide for detection of SNP TSC0034313
tgtagggtattgg

SEQ ID NO: 137348 - DNA, 13 bp, Artificial Sequence
  Oligonucleotide for detection of SNP TSC0034313
ccaataccctaca

SEQ ID NO: 137349 - DNA, 13 bp, Artificial Sequence
  Oligonucleotide for detection of SNP TSC0034313
tgtaggatatcgg

SEQ ID NO: 137350 - DNA, 13 bp, Artificial Sequence
  Oligonucleotide for detection of SNP TSC0034313
ccgatatcctaca

SEQ ID NO: 137351 - DNA, 13 bp, Artificial Sequence
  Oligonucleotide for detection of SNP TSC0034313
tgtagggtatcgg

SEQ ID NO: 137352 - DNA, 13 bp, Artificial Sequence
  Oligonucleotide for detection of SNP TSC0034313
ccgataccctaca

SEQ ID NO: 137353 - DNA, 13 bp, Artificial Sequence
  Oligonucleotide for detection of SNP TSC0034314
ttttttgttggtt

SEQ ID NO: 137354 - DNA, 13 bp, Artificial Sequence
  Oligonucleotide for detection of SNP TSC0034314
aaccaacaaaaaa

SEQ ID NO: 137355 - DNA, 13 bp, Artificial Sequence
  Oligonucleotide for detection of SNP TSC0034314
tttttcgttggtt

SEQ ID NO: 137356 - DNA, 13 bp, Artificial Sequence
  Oligonucleotide for detection of SNP TSC0034314
aaccaacgaaaaa

SEQ ID NO: 137357 - DNA, 13 bp, Artificial Sequence
  Oligonucleotide for detection of SNP TSC0034314
ttttttgtcggtt

SEQ ID NO: 137358 - DNA, 13 bp, Artificial Sequence
  Oligonucleotide for detection of SNP TSC0034314
aaccgacaaaaaa

SEQ ID NO: 137359 - DNA, 13 bp, Artificial Sequence
  Oligonucleotide for detection of SNP TSC0034314
tttttcgtcggtt

SEQ ID NO: 137360 - DNA, 13 bp, Artificial Sequence
  Oligonucleotide for detection of SNP TSC0034314
aaccgacgaaaaa

SEQ ID NO: 137361 - DNA, 13 bp, Artificial Sequence
  Oligonucleotide for detection of SNP TSC0034314
agttggtggagag

SEQ ID NO: 137362 - DNA, 13 bp, Artificial Sequence
  Oligonucleotide for detection of SNP TSC0034314
ctctccaccaact

SEQ ID NO: 137363 - DNA, 13 bp, Artificial Sequence
  Oligonucleotide for detection of SNP TSC0034314
agtcggtggagag

SEQ ID NO: 137364 - DNA, 13 bp, Artificial Sequence
  Oligonucleotide for detection of SNP TSC0034314
ctctccaccgact

SEQ ID NO: 137365 - DNA, 13 bp, Artificial Sequence
  Oligonucleotide for detection of SNP TSC0034314
agttggcggagag

SEQ ID NO: 137366 - DNA, 13 bp, Artificial Sequence
  Oligonucleotide for detection of SNP TSC0034314
ctctccgccaact

SEQ ID NO: 137367 - DNA, 13 bp, Artificial Sequence
  Oligonucleotide for detection of SNP TSC0034314
agtcggcggagag

SEQ ID NO: 137368 - DNA, 13 bp, Artificial Sequence
  Oligonucleotide for detection of SNP TSC0034314
ctctccgccgact

SEQ ID NO: 137369 - DNA, 13 bp, Artificial Sequence
  Oligonucleotide for detection of SNP TSC0034317
aattttgtttgtt

SEQ ID NO: 137370 - DNA, 13 bp, Artificial Sequence
  Oligonucleotide for detection of SNP TSC0034317
aacaaacaaaatt

SEQ ID NO: 137371 - DNA, 13 bp, Artificial Sequence
  Oligonucleotide for detection of SNP TSC0034317
aattttttttgtt

SEQ ID NO: 137372 - DNA, 13 bp, Artificial Sequence
  Oligonucleotide for detection of SNP TSC0034317
aacaaaaaaaatt

SEQ ID NO: 137373 - DNA, 13 bp, Artificial Sequence
  Oligonucleotide for detection of SNP TSC0034317
agtaggtaaaatt

SEQ ID NO: 137374 - DNA, 13 bp, Artificial Sequence
  Oligonucleotide for detection of SNP TSC0034317
aattttacctact

SEQ ID NO: 137375 - DNA, 13 bp, Artificial Sequence
  Oligonucleotide for detection of SNP TSC0034317
agtaggaaaaatt

SEQ ID NO: 137376 - DNA, 13 bp, Artificial Sequence
  Oligonucleotide for detection of SNP TSC0034317
aatttttcctact

SEQ ID NO: 137377 - DNA, 13 bp, Artificial Sequence
  Oligonucleotide for detection of SNP TSC0034318
agttataaggttt

SEQ ID NO: 137378 - DNA, 13 bp, Artificial Sequence
  Oligonucleotide for detection of SNP TSC0034318
aaaccttataact

SEQ ID NO: 137379 - DNA, 13 bp, Artificial Sequence
  Oligonucleotide for detection of SNP TSC0034318
agttatgaggttt

SEQ ID NO: 137380 - DNA, 13 bp, Artificial Sequence
  Oligonucleotide for detection of SNP TSC0034318
aaacctcataact

SEQ ID NO: 137381 - DNA, 13 bp, Artificial Sequence
  Oligonucleotide for detection of SNP TSC0034318
agttacgaggttt

SEQ ID NO: 137382 - DNA, 13 bp, Artificial Sequence
  Oligonucleotide for detection of SNP TSC0034318
aaacctcgtaact

SEQ ID NO: 137383 - DNA, 13 bp, Artificial Sequence
  Oligonucleotide for detection of SNP TSC0034318
aagttttgtagtt

SEQ ID NO: 137384 - DNA, 13 bp, Artificial Sequence
  Oligonucleotide for detection of SNP TSC0034318
aactacaaaactt

SEQ ID NO: 137385 - DNA, 13 bp, Artificial Sequence
  Oligonucleotide for detection of SNP TSC0034318
aagtttcgtagtt

SEQ ID NO: 137386 - DNA, 13 bp, Artificial Sequence
  Oligonucleotide for detection of SNP TSC0034318
aactacgaaactt

SEQ ID NO: 137387 - DNA, 13 bp, Artificial Sequence
  Oligonucleotide for detection of SNP TSC0034319
agttttgttaaaa

SEQ ID NO: 137388 - DNA, 13 bp, Artificial Sequence
  Oligonucleotide for detection of SNP TSC0034319
ttttaacaaaact

SEQ ID NO: 137389 - DNA, 13 bp, Artificial Sequence
  Oligonucleotide for detection of SNP TSC0034320
tttatagtaatgt

SEQ ID NO: 137390 - DNA, 13 bp, Artificial Sequence
  Oligonucleotide for detection of SNP TSC0034320
acattactataaa

SEQ ID NO: 137391 - DNA, 13 bp, Artificial Sequence
  Oligonucleotide for detection of SNP TSC0034320
tttataataatgt

SEQ ID NO: 137392 - DNA, 13 bp, Artificial Sequence
  Oligonucleotide for detection of SNP TSC0034320
acattattataaa

SEQ ID NO: 137393 - DNA, 13 bp, Artificial Sequence
  Oligonucleotide for detection of SNP TSC0034321
tattagggggatg

SEQ ID NO: 137394 - DNA, 13 bp, Artificial Sequence
  Oligonucleotide for detection of SNP TSC0034321
catccccctaata

SEQ ID NO: 137395 - DNA, 13 bp, Artificial Sequence
  Oligonucleotide for detection of SNP TSC0034321
tattagtgggatg

SEQ ID NO: 137396 - DNA, 13 bp, Artificial Sequence
  Oligonucleotide for detection of SNP TSC0034321
catcccactaata

SEQ ID NO: 137397 - DNA, 13 bp, Artificial Sequence
  Oligonucleotide for detection of SNP TSC0034321
tatttttttaata

SEQ ID NO: 137398 - DNA, 13 bp, Artificial Sequence
  Oligonucleotide for detection of SNP TSC0034321
tattaaaaaaata

SEQ ID NO: 137399 - DNA, 13 bp, Artificial Sequence
  Oligonucleotide for detection of SNP TSC0034321
tattttattaata

SEQ ID NO: 137400 - DNA, 13 bp, Artificial Sequence
  Oligonucleotide for detection of SNP TSC0034321
tattaataaaata

SEQ ID NO: 137401 - DNA, 13 bp, Artificial Sequence
  Oligonucleotide for detection of SNP TSC0034325
ttggaaggggatt

SEQ ID NO: 137402 - DNA, 13 bp, Artificial Sequence
  Oligonucleotide for detection of SNP TSC0034325
aatccccttccaa

SEQ ID NO: 137403 - DNA, 13 bp, Artificial Sequence
  Oligonucleotide for detection of SNP TSC0034325
ttggaaagggatt

SEQ ID NO: 137404 - DNA, 13 bp, Artificial Sequence
  Oligonucleotide for detection of SNP TSC0034325
aatccctttccaa

SEQ ID NO: 137405 - DNA, 13 bp, Artificial Sequence
  Oligonucleotide for detection of SNP TSC0034326
tttagtaagatag

SEQ ID NO: 137406 - DNA, 13 bp, Artificial Sequence
  Oligonucleotide for detection of SNP TSC0034326
ctatcttactaaa

SEQ ID NO: 137407 - DNA, 13 bp, Artificial Sequence
  Oligonucleotide for detection of SNP TSC0034326
tttagttagatag

SEQ ID NO: 137408 - DNA, 13 bp, Artificial Sequence
  Oligonucleotide for detection of SNP TSC0034326
ctatctaactaaa

SEQ ID NO: 137409 - DNA, 13 bp, Artificial Sequence
  Oligonucleotide for detection of SNP TSC0034326
ttgttttgttggg

SEQ ID NO: 137410 - DNA, 13 bp, Artificial Sequence
  Oligonucleotide for detection of SNP TSC0034326
cccaacaaaacaa

SEQ ID NO: 137411 - DNA, 13 bp, Artificial Sequence
  Oligonucleotide for detection of SNP TSC0034333
gaagatgaaaggg

SEQ ID NO: 137412 - DNA, 13 bp, Artificial Sequence
  Oligonucleotide for detection of SNP TSC0034333
ccctttcatcttc

SEQ ID NO: 137413 - DNA, 13 bp, Artificial Sequence
  Oligonucleotide for detection of SNP TSC0034333
gaagataaaaggg

SEQ ID NO: 137414 - DNA, 13 bp, Artificial Sequence
  Oligonucleotide for detection of SNP TSC0034333
cccttttatcttc

SEQ ID NO: 137415 - DNA, 13 bp, Artificial Sequence
  Oligonucleotide for detection of SNP TSC0034333
gaagacgaaaggg

SEQ ID NO: 137416 - DNA, 13 bp, Artificial Sequence
  Oligonucleotide for detection of SNP TSC0034333
ccctttcgtcttc

SEQ ID NO: 137417 - DNA, 13 bp, Artificial Sequence
  Oligonucleotide for detection of SNP TSC0034334
gaaattattatty

SEQ ID NO: 137418 - DNA, 13 bp, Artificial Sequence
  Oligonucleotide for detection of SNP TSC0034334
raataataatttc

SEQ ID NO: 137419 - DNA, 13 bp, Artificial Sequence
  Oligonucleotide for detection of SNP TSC0034334
gaaatttttatty

SEQ ID NO: 137420 - DNA, 13 bp, Artificial Sequence
  Oligonucleotide for detection of SNP TSC0034334
raataaaaatttc

SEQ ID NO: 137421 - DNA, 13 bp, Artificial Sequence
  Oligonucleotide for detection of SNP TSC0034334
gaatgataattty

SEQ ID NO: 137422 - DNA, 13 bp, Artificial Sequence
  Oligonucleotide for detection of SNP TSC0034334
raaattatcattc

SEQ ID NO: 137423 - DNA, 13 bp, Artificial Sequence
  Oligonucleotide for detection of SNP TSC0034334
gaatgagaattty

SEQ ID NO: 137424 - DNA, 13 bp, Artificial Sequence
  Oligonucleotide for detection of SNP TSC0034334
raaattctcattc

SEQ ID NO: 137425 - DNA, 13 bp, Artificial Sequence
  Oligonucleotide for detection of SNP TSC0034335
gagaggtgttaga

SEQ ID NO: 137426 - DNA, 13 bp, Artificial Sequence
  Oligonucleotide for detection of SNP TSC0034335
tctaacacctctc

SEQ ID NO: 137427 - DNA, 13 bp, Artificial Sequence
  Oligonucleotide for detection of SNP TSC0034335
gagaggcgttaga

SEQ ID NO: 137428 - DNA, 13 bp, Artificial Sequence
  Oligonucleotide for detection of SNP TSC0034335
tctaacgcctctc

SEQ ID NO: 137429 - DNA, 13 bp, Artificial Sequence
  Oligonucleotide for detection of SNP TSC0034335
tttagtattttty

SEQ ID NO: 137430 - DNA, 13 bp, Artificial Sequence
  Oligonucleotide for detection of SNP TSC0034335
raaaaatactaaa

SEQ ID NO: 137431 - DNA, 13 bp, Artificial Sequence
  Oligonucleotide for detection of SNP TSC0034344
attgtttgtatgy

SEQ ID NO: 137432 - DNA, 13 bp, Artificial Sequence
  Oligonucleotide for detection of SNP TSC0034344
rcatacaaacaat

SEQ ID NO: 137433 - DNA, 13 bp, Artificial Sequence
  Oligonucleotide for detection of SNP TSC0034344
attgttcgtatgy

SEQ ID NO: 137434 - DNA, 13 bp, Artificial Sequence
  Oligonucleotide for detection of SNP TSC0034344
rcatacgaacaat

SEQ ID NO: 137435 - DNA, 13 bp, Artificial Sequence
  Oligonucleotide for detection of SNP TSC0034344
gtatgtgggtaat

SEQ ID NO: 137436 - DNA, 13 bp, Artificial Sequence
  Oligonucleotide for detection of SNP TSC0034344
attacccacatac

SEQ ID NO: 137437 - DNA, 13 bp, Artificial Sequence
  Oligonucleotide for detection of SNP TSC0034344
gtatgtaggtaat

SEQ ID NO: 137438 - DNA, 13 bp, Artificial Sequence
  Oligonucleotide for detection of SNP TSC0034344
attacctacatac

SEQ ID NO: 137439 - DNA, 13 bp, Artificial Sequence
  Oligonucleotide for detection of SNP TSC0034344
gtatgcgggtaat

SEQ ID NO: 137440 - DNA, 13 bp, Artificial Sequence
  Oligonucleotide for detection of SNP TSC0034344
attacccgcatac

SEQ ID NO: 137441 - DNA, 13 bp, Artificial Sequence
  Oligonucleotide for detection of SNP TSC0034347
aatggtgggtaga

SEQ ID NO: 137442 - DNA, 13 bp, Artificial Sequence
  Oligonucleotide for detection of SNP TSC0034347
tctacccaccatt

SEQ ID NO: 137443 - DNA, 13 bp, Artificial Sequence
  Oligonucleotide for detection of SNP TSC0034347
aatggtaggtaga

SEQ ID NO: 137444 - DNA, 13 bp, Artificial Sequence
  Oligonucleotide for detection of SNP TSC0034347
tctacctaccatt

SEQ ID NO: 137445 - DNA, 13 bp, Artificial Sequence
  Oligonucleotide for detection of SNP TSC0034347
aatggcgggtaga

SEQ ID NO: 137446 - DNA, 13 bp, Artificial Sequence
  Oligonucleotide for detection of SNP TSC0034347
tctacccgccatt

SEQ ID NO: 137447 - DNA, 13 bp, Artificial Sequence
  Oligonucleotide for detection of SNP TSC0034348
tggagggtgaaga

SEQ ID NO: 137448 - DNA, 13 bp, Artificial Sequence
  Oligonucleotide for detection of SNP TSC0034348
tcttcaccctcca

SEQ ID NO: 137449 - DNA, 13 bp, Artificial Sequence
  Oligonucleotide for detection of SNP TSC0034348
tggaggatgaaga

SEQ ID NO: 137450 - DNA, 13 bp, Artificial Sequence
  Oligonucleotide for detection of SNP TSC0034348
tcttcatcctcca

SEQ ID NO: 137451 - DNA, 13 bp, Artificial Sequence
  Oligonucleotide for detection of SNP TSC0034348
tggagggcgaaga

SEQ ID NO: 137452 - DNA, 13 bp, Artificial Sequence
  Oligonucleotide for detection of SNP TSC0034348
tcttcgccctcca

SEQ ID NO: 137453 - DNA, 13 bp, Artificial Sequence
  Oligonucleotide for detection of SNP TSC0034348
tggaggacgaaga

SEQ ID NO: 137454 - DNA, 13 bp, Artificial Sequence
  Oligonucleotide for detection of SNP TSC0034348
tcttcgtcctcca

SEQ ID NO: 137455 - DNA, 13 bp, Artificial Sequence
  Oligonucleotide for detection of SNP TSC0034353
taagtaatgttty

SEQ ID NO: 137456 - DNA, 13 bp, Artificial Sequence
  Oligonucleotide for detection of SNP TSC0034353
raaacattactta

SEQ ID NO: 137457 - DNA, 13 bp, Artificial Sequence
  Oligonucleotide for detection of SNP TSC0034353
taagtagtgttty

SEQ ID NO: 137458 - DNA, 13 bp, Artificial Sequence
  Oligonucleotide for detection of SNP TSC0034353
raaacactactta

SEQ ID NO: 137459 - DNA, 13 bp, Artificial Sequence
  Oligonucleotide for detection of SNP TSC0034359
tttatcgtgtgtt

SEQ ID NO: 137460 - DNA, 13 bp, Artificial Sequence
  Oligonucleotide for detection of SNP TSC0034359
aacacacgataaa

SEQ ID NO: 137461 - DNA, 13 bp, Artificial Sequence
  Oligonucleotide for detection of SNP TSC0034359
agtatatggtgga

SEQ ID NO: 137462 - DNA, 13 bp, Artificial Sequence
  Oligonucleotide for detection of SNP TSC0034359
tccaccatatact

SEQ ID NO: 137463 - DNA, 13 bp, Artificial Sequence
  Oligonucleotide for detection of SNP TSC0034359
agtatacggtgga

SEQ ID NO: 137464 - DNA, 13 bp, Artificial Sequence
  Oligonucleotide for detection of SNP TSC0034359
tccaccgtatact

SEQ ID NO: 137465 - DNA, 13 bp, Artificial Sequence
  Oligonucleotide for detection of SNP TSC0034362
ttgaggaagtaay

SEQ ID NO: 137466 - DNA, 13 bp, Artificial Sequence
  Oligonucleotide for detection of SNP TSC0034362
rttacttcctcaa

SEQ ID NO: 137467 - DNA, 13 bp, Artificial Sequence
  Oligonucleotide for detection of SNP TSC0034362
ttgagggagtaay

SEQ ID NO: 137468 - DNA, 13 bp, Artificial Sequence
  Oligonucleotide for detection of SNP TSC0034362
rttactccctcaa

SEQ ID NO: 137469 - DNA, 13 bp, Artificial Sequence
  Oligonucleotide for detection of SNP TSC0034363
aagagtaaaagtg

SEQ ID NO: 137470 - DNA, 13 bp, Artificial Sequence
  Oligonucleotide for detection of SNP TSC0034363
cacttttactctt

SEQ ID NO: 137471 - DNA, 13 bp, Artificial Sequence
  Oligonucleotide for detection of SNP TSC0034363
aagagtgaaagtg

SEQ ID NO: 137472 - DNA, 13 bp, Artificial Sequence
  Oligonucleotide for detection of SNP TSC0034363
cactttcactctt

SEQ ID NO: 137473 - DNA, 13 bp, Artificial Sequence
  Oligonucleotide for detection of SNP TSC0034363
aagagcgaaagtg

SEQ ID NO: 137474 - DNA, 13 bp, Artificial Sequence
  Oligonucleotide for detection of SNP TSC0034363
cactttcgctctt

SEQ ID NO: 137475 - DNA, 13 bp, Artificial Sequence
  Oligonucleotide for detection of SNP TSC0034363
tatttttgttttt

SEQ ID NO: 137476 - DNA, 13 bp, Artificial Sequence
  Oligonucleotide for detection of SNP TSC0034363
aaaaacaaaaata

SEQ ID NO: 137477 - DNA, 13 bp, Artificial Sequence
  Oligonucleotide for detection of SNP TSC0034364
tgttttgagtttt

SEQ ID NO: 137478 - DNA, 13 bp, Artificial Sequence
  Oligonucleotide for detection of SNP TSC0034364
aaaactcaaaaca

SEQ ID NO: 137479 - DNA, 13 bp, Artificial Sequence
  Oligonucleotide for detection of SNP TSC0034364
tgttttaagtttt

SEQ ID NO: 137480 - DNA, 13 bp, Artificial Sequence
  Oligonucleotide for detection of SNP TSC0034364
aaaacttaaaaca

SEQ ID NO: 137481 - DNA, 13 bp, Artificial Sequence
  Oligonucleotide for detection of SNP TSC0034365
gtgggtagattgy

SEQ ID NO: 137482 - DNA, 13 bp, Artificial Sequence
  Oligonucleotide for detection of SNP TSC0034365
rcaatctacccac

SEQ ID NO: 137483 - DNA, 13 bp, Artificial Sequence
  Oligonucleotide for detection of SNP TSC0034365
gtgggtggattgy

SEQ ID NO: 137484 - DNA, 13 bp, Artificial Sequence
  Oligonucleotide for detection of SNP TSC0034365
rcaatccacccac

SEQ ID NO: 137485 - DNA, 13 bp, Artificial Sequence
  Oligonucleotide for detection of SNP TSC0034365
gcgggtagattgy

SEQ ID NO: 137486 - DNA, 13 bp, Artificial Sequence
  Oligonucleotide for detection of SNP TSC0034365
rcaatctacccgc

SEQ ID NO: 137487 - DNA, 13 bp, Artificial Sequence
  Oligonucleotide for detection of SNP TSC0034365
gcgggtggattgy

SEQ ID NO: 137488 - DNA, 13 bp, Artificial Sequence
  Oligonucleotide for detection of SNP TSC0034365
rcaatccacccgc

SEQ ID NO: 137489 - DNA, 13 bp, Artificial Sequence
  Oligonucleotide for detection of SNP TSC0034365
gtgggcggattgy

SEQ ID NO: 137490 - DNA, 13 bp, Artificial Sequence
  Oligonucleotide for detection of SNP TSC0034365
rcaatccgcccac

SEQ ID NO: 137491 - DNA, 13 bp, Artificial Sequence
  Oligonucleotide for detection of SNP TSC0034365
gcgggcggattgy

SEQ ID NO: 137492 - DNA, 13 bp, Artificial Sequence
  Oligonucleotide for detection of SNP TSC0034365
rcaatccgcccgc

SEQ ID NO: 137493 - DNA, 13 bp, Artificial Sequence
  Oligonucleotide for detection of SNP TSC0034365
gtaatttgtttgy

SEQ ID NO: 137494 - DNA, 13 bp, Artificial Sequence
  Oligonucleotide for detection of SNP TSC0034365
rcaaacaaattac

SEQ ID NO: 137495 - DNA, 13 bp, Artificial Sequence
  Oligonucleotide for detection of SNP TSC0034365
gtaatttgttcgy

SEQ ID NO: 137496 - DNA, 13 bp, Artificial Sequence
  Oligonucleotide for detection of SNP TSC0034365
rcgaacaaattac

SEQ ID NO: 137497 - DNA, 13 bp, Artificial Sequence
  Oligonucleotide for detection of SNP TSC0034365
gtaattcgtttgy

SEQ ID NO: 137498 - DNA, 13 bp, Artificial Sequence
  Oligonucleotide for detection of SNP TSC0034365
rcaaacgaattac

SEQ ID NO: 137499 - DNA, 13 bp, Artificial Sequence
  Oligonucleotide for detection of SNP TSC0034365
gtaattcgttcgy

SEQ ID NO: 137500 - DNA, 13 bp, Artificial Sequence
  Oligonucleotide for detection of SNP TSC0034365
rcgaacgaattac

SEQ ID NO: 137501 - DNA, 13 bp, Artificial Sequence
  Oligonucleotide for detection of SNP TSC0034366
ataaaaaaattta

SEQ ID NO: 137502 - DNA, 13 bp, Artificial Sequence
  Oligonucleotide for detection of SNP TSC0034366
taaatttttttat

SEQ ID NO: 137503 - DNA, 13 bp, Artificial Sequence
  Oligonucleotide for detection of SNP TSC0034366
ataaaataattta

SEQ ID NO: 137504 - DNA, 13 bp, Artificial Sequence
  Oligonucleotide for detection of SNP TSC0034366
taaattattttat

SEQ ID NO: 137505 - DNA, 13 bp, Artificial Sequence
  Oligonucleotide for detection of SNP TSC0034366
taaattgttttat

SEQ ID NO: 137506 - DNA, 13 bp, Artificial Sequence
  Oligonucleotide for detection of SNP TSC0034366
ataaaacaattta

SEQ ID NO: 137507 - DNA, 13 bp, Artificial Sequence
  Oligonucleotide for detection of SNP TSC0034367
taggggtataggg

SEQ ID NO: 137508 - DNA, 13 bp, Artificial Sequence
  Oligonucleotide for detection of SNP TSC0034367
ccctataccccta

SEQ ID NO: 137509 - DNA, 13 bp, Artificial Sequence
  Oligonucleotide for detection of SNP TSC0034367
taggggaataggg

SEQ ID NO: 137510 - DNA, 13 bp, Artificial Sequence
  Oligonucleotide for detection of SNP TSC0034367
ccctattccccta

SEQ ID NO: 137511 - DNA, 13 bp, Artificial Sequence
  Oligonucleotide for detection of SNP TSC0034368
gatatggttttty

SEQ ID NO: 137512 - DNA, 13 bp, Artificial Sequence
  Oligonucleotide for detection of SNP TSC0034368
raaaaaccatatc

SEQ ID NO: 137513 - DNA, 13 bp, Artificial Sequence
  Oligonucleotide for detection of SNP TSC0034368
gatatgattttty

SEQ ID NO: 137514 - DNA, 13 bp, Artificial Sequence
  Oligonucleotide for detection of SNP TSC0034368
raaaaatcatatc

SEQ ID NO: 137515 - DNA, 13 bp, Artificial Sequence
  Oligonucleotide for detection of SNP TSC0034375
attttaggtgtgt

SEQ ID NO: 137516 - DNA, 13 bp, Artificial Sequence
  Oligonucleotide for detection of SNP TSC0034375
acacacctaaaat

SEQ ID NO: 137517 - DNA, 13 bp, Artificial Sequence
  Oligonucleotide for detection of SNP TSC0034375
attttaagtgtgt

SEQ ID NO: 137518 - DNA, 13 bp, Artificial Sequence
  Oligonucleotide for detection of SNP TSC0034375
acacacttaaaat

SEQ ID NO: 137519 - DNA, 13 bp, Artificial Sequence
  Oligonucleotide for detection of SNP TSC0034376
tttgagagtaaty

SEQ ID NO: 137520 - DNA, 13 bp, Artificial Sequence
  Oligonucleotide for detection of SNP TSC0034376
rattactctcaaa

SEQ ID NO: 137521 - DNA, 13 bp, Artificial Sequence
  Oligonucleotide for detection of SNP TSC0034376
tttgagggtaaty

SEQ ID NO: 137522 - DNA, 13 bp, Artificial Sequence
  Oligonucleotide for detection of SNP TSC0034376
rattaccctcaaa

SEQ ID NO: 137523 - DNA, 13 bp, Artificial Sequence
  Oligonucleotide for detection of SNP TSC0034377
aaaggaaggaggg

SEQ ID NO: 137524 - DNA, 13 bp, Artificial Sequence
  Oligonucleotide for detection of SNP TSC0034377
ccctccttccttt

SEQ ID NO: 137525 - DNA, 13 bp, Artificial Sequence
  Oligonucleotide for detection of SNP TSC0034377
aaaggagggaggg

SEQ ID NO: 137526 - DNA, 13 bp, Artificial Sequence
  Oligonucleotide for detection of SNP TSC0034377
ccctccctccttt

SEQ ID NO: 137527 - DNA, 13 bp, Artificial Sequence
  Oligonucleotide for detection of SNP TSC0034378
gggagggtattta

SEQ ID NO: 137528 - DNA, 13 bp, Artificial Sequence
  Oligonucleotide for detection of SNP TSC0034378
taaataccctccc

SEQ ID NO: 137529 - DNA, 13 bp, Artificial Sequence
  Oligonucleotide for detection of SNP TSC0034378
gggaggatattta

SEQ ID NO: 137530 - DNA, 13 bp, Artificial Sequence
  Oligonucleotide for detection of SNP TSC0034378
taaatatcctccc

SEQ ID NO: 137531 - DNA, 13 bp, Artificial Sequence
  Oligonucleotide for detection of SNP TSC0034382
agaaaagtattta

SEQ ID NO: 137532 - DNA, 13 bp, Artificial Sequence
  Oligonucleotide for detection of SNP TSC0034382
taaatacttttct

SEQ ID NO: 137533 - DNA, 13 bp, Artificial Sequence
  Oligonucleotide for detection of SNP TSC0034382
agaaaaatattta

SEQ ID NO: 137534 - DNA, 13 bp, Artificial Sequence
  Oligonucleotide for detection of SNP TSC0034382
taaatatttttct

SEQ ID NO: 137535 - DNA, 13 bp, Artificial Sequence
  Oligonucleotide for detection of SNP TSC0034383
ttgttgatttttt

SEQ ID NO: 137536 - DNA, 13 bp, Artificial Sequence
  Oligonucleotide for detection of SNP TSC0034383
aaaaaatcaacaa

SEQ ID NO: 137537 - DNA, 13 bp, Artificial Sequence
  Oligonucleotide for detection of SNP TSC0034383
ttgtcgatttttt

SEQ ID NO: 137538 - DNA, 13 bp, Artificial Sequence
  Oligonucleotide for detection of SNP TSC0034383
aaaaaatcgacaa

SEQ ID NO: 137539 - DNA, 13 bp, Artificial Sequence
  Oligonucleotide for detection of SNP TSC0034383
ttgtcgttttttt

SEQ ID NO: 137540 - DNA, 13 bp, Artificial Sequence
  Oligonucleotide for detection of SNP TSC0034383
aaaaaaacgacaa

SEQ ID NO: 137541 - DNA, 13 bp, Artificial Sequence
  Oligonucleotide for detection of SNP TSC0034383
aaaaaattggtag

SEQ ID NO: 137542 - DNA, 13 bp, Artificial Sequence
  Oligonucleotide for detection of SNP TSC0034383
ctaccaatttttt

SEQ ID NO: 137543 - DNA, 13 bp, Artificial Sequence
  Oligonucleotide for detection of SNP TSC0034383
aaaaaagtggtag

SEQ ID NO: 137544 - DNA, 13 bp, Artificial Sequence
  Oligonucleotide for detection of SNP TSC0034383
ctaccactttttt

SEQ ID NO: 137545 - DNA, 13 bp, Artificial Sequence
  Oligonucleotide for detection of SNP TSC0034383
aaaaaatcggtag

SEQ ID NO: 137546 - DNA, 13 bp, Artificial Sequence
  Oligonucleotide for detection of SNP TSC0034383
ctaccgatttttt

SEQ ID NO: 137547 - DNA, 13 bp, Artificial Sequence
  Oligonucleotide for detection of SNP TSC0034383
aaaaaagcggtag

SEQ ID NO: 137548 - DNA, 13 bp, Artificial Sequence
  Oligonucleotide for detection of SNP TSC0034383
ctaccgctttttt

SEQ ID NO: 137549 - DNA, 13 bp, Artificial Sequence
  Oligonucleotide for detection of SNP TSC0034384
tgatttgagaaga

SEQ ID NO: 137550 - DNA, 13 bp, Artificial Sequence
  Oligonucleotide for detection of SNP TSC0034384
tcttctcaaatca

SEQ ID NO: 137551 - DNA, 13 bp, Artificial Sequence
  Oligonucleotide for detection of SNP TSC0034384
tgattttagaaga

SEQ ID NO: 137552 - DNA, 13 bp, Artificial Sequence
  Oligonucleotide for detection of SNP TSC0034384
tcttctaaaatca

SEQ ID NO: 137553 - DNA, 13 bp, Artificial Sequence
  Oligonucleotide for detection of SNP TSC0034386
tatatttaggagg

SEQ ID NO: 137554 - DNA, 13 bp, Artificial Sequence
  Oligonucleotide for detection of SNP TSC0034386
cctcctaaatata

SEQ ID NO: 137555 - DNA, 13 bp, Artificial Sequence
  Oligonucleotide for detection of SNP TSC0034386
tatattgaggagg

SEQ ID NO: 137556 - DNA, 13 bp, Artificial Sequence
  Oligonucleotide for detection of SNP TSC0034386
cctcctcaatata

SEQ ID NO: 137557 - DNA, 13 bp, Artificial Sequence
  Oligonucleotide for detection of SNP TSC0034386
tatatcgaggagg

SEQ ID NO: 137558 - DNA, 13 bp, Artificial Sequence
  Oligonucleotide for detection of SNP TSC0034386
cctcctcgatata

SEQ ID NO: 137559 - DNA, 13 bp, Artificial Sequence
  Oligonucleotide for detection of SNP TSC0034386
tttttttggtata

SEQ ID NO: 137560 - DNA, 13 bp, Artificial Sequence
  Oligonucleotide for detection of SNP TSC0034386
tataccaaaaaaa

SEQ ID NO: 137561 - DNA, 13 bp, Artificial Sequence
  Oligonucleotide for detection of SNP TSC0034386
ttttttcggtata

SEQ ID NO: 137562 - DNA, 13 bp, Artificial Sequence
  Oligonucleotide for detection of SNP TSC0034386
tataccgaaaaaa

SEQ ID NO: 137563 - DNA, 13 bp, Artificial Sequence
  Oligonucleotide for detection of SNP TSC0034389
tttgttattatcg

SEQ ID NO: 137564 - DNA, 13 bp, Artificial Sequence
  Oligonucleotide for detection of SNP TSC0034389
cgataataacaaa

SEQ ID NO: 137565 - DNA, 13 bp, Artificial Sequence
  Oligonucleotide for detection of SNP TSC0034389
tttgttgttatcg

SEQ ID NO: 137566 - DNA, 13 bp, Artificial Sequence
  Oligonucleotide for detection of SNP TSC0034389
cgataacaacaaa

SEQ ID NO: 137567 - DNA, 13 bp, Artificial Sequence
  Oligonucleotide for detection of SNP TSC0034389
tttgtcgttatcg

SEQ ID NO: 137568 - DNA, 13 bp, Artificial Sequence
  Oligonucleotide for detection of SNP TSC0034389
cgataacgacaaa

SEQ ID NO: 137569 - DNA, 13 bp, Artificial Sequence
  Oligonucleotide for detection of SNP TSC0034389
tgatgatggtaag

SEQ ID NO: 137570 - DNA, 13 bp, Artificial Sequence
  Oligonucleotide for detection of SNP TSC0034389
cttaccatcatca

SEQ ID NO: 137571 - DNA, 13 bp, Artificial Sequence
  Oligonucleotide for detection of SNP TSC0034389
cgatgatggtaag

SEQ ID NO: 137572 - DNA, 13 bp, Artificial Sequence
  Oligonucleotide for detection of SNP TSC0034389
cttaccatcatcg

SEQ ID NO: 137573 - DNA, 13 bp, Artificial Sequence
  Oligonucleotide for detection of SNP TSC0034389
tgatgacggtaag

SEQ ID NO: 137574 - DNA, 13 bp, Artificial Sequence
  Oligonucleotide for detection of SNP TSC0034389
cttaccgtcatca

SEQ ID NO: 137575 - DNA, 13 bp, Artificial Sequence
  Oligonucleotide for detection of SNP TSC0034389
cgatgacggtaag

SEQ ID NO: 137576 - DNA, 13 bp, Artificial Sequence
  Oligonucleotide for detection of SNP TSC0034389
cttaccgtcatcg

SEQ ID NO: 137577 - DNA, 13 bp, Artificial Sequence
  Oligonucleotide for detection of SNP TSC0034390
gttgtggatagaa

SEQ ID NO: 137578 - DNA, 13 bp, Artificial Sequence
  Oligonucleotide for detection of SNP TSC0034390
ttctatccacaac

SEQ ID NO: 137579 - DNA, 13 bp, Artificial Sequence
  Oligonucleotide for detection of SNP TSC0034390
gttgtgaatagaa

SEQ ID NO: 137580 - DNA, 13 bp, Artificial Sequence
  Oligonucleotide for detection of SNP TSC0034390
ttctattcacaac

SEQ ID NO: 137581 - DNA, 13 bp, Artificial Sequence
  Oligonucleotide for detection of SNP TSC0034390
gtcgtggatagaa

SEQ ID NO: 137582 - DNA, 13 bp, Artificial Sequence
  Oligonucleotide for detection of SNP TSC0034390
ttctatccacgac

SEQ ID NO: 137583 - DNA, 13 bp, Artificial Sequence
  Oligonucleotide for detection of SNP TSC0034390
gtcgtgaatagaa

SEQ ID NO: 137584 - DNA, 13 bp, Artificial Sequence
  Oligonucleotide for detection of SNP TSC0034390
ttctattcacgac

SEQ ID NO: 137585 - DNA, 13 bp, Artificial Sequence
  Oligonucleotide for detection of SNP TSC0034391
tatatagaaggga

SEQ ID NO: 137586 - DNA, 13 bp, Artificial Sequence
  Oligonucleotide for detection of SNP TSC0034391
tcccttctatata

SEQ ID NO: 137587 - DNA, 13 bp, Artificial Sequence
  Oligonucleotide for detection of SNP TSC0034391
tatataaaaggga

SEQ ID NO: 137588 - DNA, 13 bp, Artificial Sequence
  Oligonucleotide for detection of SNP TSC0034391
tcccttttatata

SEQ ID NO: 137589 - DNA, 13 bp, Artificial Sequence
  Oligonucleotide for detection of SNP TSC0034392
tggggtatttgtt

SEQ ID NO: 137590 - DNA, 13 bp, Artificial Sequence
  Oligonucleotide for detection of SNP TSC0034392
aacaaatacccca

SEQ ID NO: 137591 - DNA, 13 bp, Artificial Sequence
  Oligonucleotide for detection of SNP TSC0034392
tggggtgtttgtt

SEQ ID NO: 137592 - DNA, 13 bp, Artificial Sequence
  Oligonucleotide for detection of SNP TSC0034392
aacaaacacccca

SEQ ID NO: 137593 - DNA, 13 bp, Artificial Sequence
  Oligonucleotide for detection of SNP TSC0034394
taagaagtatatt

SEQ ID NO: 137594 - DNA, 13 bp, Artificial Sequence
  Oligonucleotide for detection of SNP TSC0034394
aatatacttctta

SEQ ID NO: 137595 - DNA, 13 bp, Artificial Sequence
  Oligonucleotide for detection of SNP TSC0034394
taagaaatatatt

SEQ ID NO: 137596 - DNA, 13 bp, Artificial Sequence
  Oligonucleotide for detection of SNP TSC0034394
aatatatttctta

SEQ ID NO: 137597 - DNA, 13 bp, Artificial Sequence
  Oligonucleotide for detection of SNP TSC0034395
tttagtgttttga

SEQ ID NO: 137598 - DNA, 13 bp, Artificial Sequence
  Oligonucleotide for detection of SNP TSC0034395
tcaaaacactaaa

SEQ ID NO: 137599 - DNA, 13 bp, Artificial Sequence
  Oligonucleotide for detection of SNP TSC0034395
tttagcgttttga

SEQ ID NO: 137600 - DNA, 13 bp, Artificial Sequence
  Oligonucleotide for detection of SNP TSC0034395
tcaaaacgctaaa

SEQ ID NO: 137601 - DNA, 13 bp, Artificial Sequence
  Oligonucleotide for detection of SNP TSC0034395
ttaggatgttgga

SEQ ID NO: 137602 - DNA, 13 bp, Artificial Sequence
  Oligonucleotide for detection of SNP TSC0034395
tccaacatcctaa

SEQ ID NO: 137603 - DNA, 13 bp, Artificial Sequence
  Oligonucleotide for detection of SNP TSC0034395
ttaggacgttgga

SEQ ID NO: 137604 - DNA, 13 bp, Artificial Sequence
  Oligonucleotide for detection of SNP TSC0034395
tccaacgtcctaa

SEQ ID NO: 137605 - DNA, 13 bp, Artificial Sequence
  Oligonucleotide for detection of SNP TSC0034399
agtgagtggaata

SEQ ID NO: 137606 - DNA, 13 bp, Artificial Sequence
  Oligonucleotide for detection of SNP TSC0034399
tattccactcact

SEQ ID NO: 137607 - DNA, 13 bp, Artificial Sequence
  Oligonucleotide for detection of SNP TSC0034399
agtgagcggaata

SEQ ID NO: 137608 - DNA, 13 bp, Artificial Sequence
  Oligonucleotide for detection of SNP TSC0034399
tattccgctcact

SEQ ID NO: 137609 - DNA, 13 bp, Artificial Sequence
  Oligonucleotide for detection of SNP TSC0034399
tatttcgtttatt

SEQ ID NO: 137610 - DNA, 13 bp, Artificial Sequence
  Oligonucleotide for detection of SNP TSC0034399
aataaacgaaata

SEQ ID NO: 137611 - DNA, 13 bp, Artificial Sequence
  Oligonucleotide for detection of SNP TSC0034400
ttagtgaaatgag

SEQ ID NO: 137612 - DNA, 13 bp, Artificial Sequence
  Oligonucleotide for detection of SNP TSC0034400
ctcatttcactaa

SEQ ID NO: 137613 - DNA, 13 bp, Artificial Sequence
  Oligonucleotide for detection of SNP TSC0034400
ttagtgtaatgag

SEQ ID NO: 137614 - DNA, 13 bp, Artificial Sequence
  Oligonucleotide for detection of SNP TSC0034400
ctcattacactaa

SEQ ID NO: 137615 - DNA, 13 bp, Artificial Sequence
  Oligonucleotide for detection of SNP TSC0034400
tttattttattaa

SEQ ID NO: 137616 - DNA, 13 bp, Artificial Sequence
  Oligonucleotide for detection of SNP TSC0034400
ttaataaaataaa

SEQ ID NO: 137617 - DNA, 13 bp, Artificial Sequence
  Oligonucleotide for detection of SNP TSC0034400
tttattgtattaa

SEQ ID NO: 137618 - DNA, 13 bp, Artificial Sequence
  Oligonucleotide for detection of SNP TSC0034400
ttaatacaataaa

SEQ ID NO: 137619 - DNA, 13 bp, Artificial Sequence
  Oligonucleotide for detection of SNP TSC0034402
gaatatgtttata

SEQ ID NO: 137620 - DNA, 13 bp, Artificial Sequence
  Oligonucleotide for detection of SNP TSC0034402
tataaacatattc

SEQ ID NO: 137621 - DNA, 13 bp, Artificial Sequence
  Oligonucleotide for detection of SNP TSC0034402
gaatatatttata

SEQ ID NO: 137622 - DNA, 13 bp, Artificial Sequence
  Oligonucleotide for detection of SNP TSC0034402
tataaatatattc

SEQ ID NO: 137623 - DNA, 13 bp, Artificial Sequence
  Oligonucleotide for detection of SNP TSC0034403
ttaggtagtttta

SEQ ID NO: 137624 - DNA, 13 bp, Artificial Sequence
  Oligonucleotide for detection of SNP TSC0034403
taaaactacctaa

SEQ ID NO: 137625 - DNA, 13 bp, Artificial Sequence
  Oligonucleotide for detection of SNP TSC0034403
ttaggtggtttta

SEQ ID NO: 137626 - DNA, 13 bp, Artificial Sequence
  Oligonucleotide for detection of SNP TSC0034403
taaaaccacctaa

SEQ ID NO: 137627 - DNA, 13 bp, Artificial Sequence
  Oligonucleotide for detection of SNP TSC0034403
ttaggcggtttta

SEQ ID NO: 137628 - DNA, 13 bp, Artificial Sequence
  Oligonucleotide for detection of SNP TSC0034403
taaaaccgcctaa

SEQ ID NO: 137629 - DNA, 13 bp, Artificial Sequence
  Oligonucleotide for detection of SNP TSC0034403
taaaatcgtttaa

SEQ ID NO: 137630 - DNA, 13 bp, Artificial Sequence
  Oligonucleotide for detection of SNP TSC0034403
ttaaacgatttta

SEQ ID NO: 137631 - DNA, 13 bp, Artificial Sequence
  Oligonucleotide for detection of SNP TSC0034404
tggattagaaagy

SEQ ID NO: 137632 - DNA, 13 bp, Artificial Sequence
  Oligonucleotide for detection of SNP TSC0034404
rctttctaatcca

SEQ ID NO: 137633 - DNA, 13 bp, Artificial Sequence
  Oligonucleotide for detection of SNP TSC0034404
tggattggaaagy

SEQ ID NO: 137634 - DNA, 13 bp, Artificial Sequence
  Oligonucleotide for detection of SNP TSC0034404
rctttccaatcca

SEQ ID NO: 137635 - DNA, 13 bp, Artificial Sequence
  Oligonucleotide for detection of SNP TSC0034405
taatgtatagttt

SEQ ID NO: 137636 - DNA, 13 bp, Artificial Sequence
  Oligonucleotide for detection of SNP TSC0034405
aaactatacatta

SEQ ID NO: 137637 - DNA, 13 bp, Artificial Sequence
  Oligonucleotide for detection of SNP TSC0034405
taatgtgtagttt

SEQ ID NO: 137638 - DNA, 13 bp, Artificial Sequence
  Oligonucleotide for detection of SNP TSC0034405
aaactacacatta

SEQ ID NO: 137639 - DNA, 13 bp, Artificial Sequence
  Oligonucleotide for detection of SNP TSC0034407
tgatttgtagtat

SEQ ID NO: 137640 - DNA, 13 bp, Artificial Sequence
  Oligonucleotide for detection of SNP TSC0034407
atactacaaatca

SEQ ID NO: 137641 - DNA, 13 bp, Artificial Sequence
  Oligonucleotide for detection of SNP TSC0034407
tgatttttagtat

SEQ ID NO: 137642 - DNA, 13 bp, Artificial Sequence
  Oligonucleotide for detection of SNP TSC0034407
atactaaaaatca

SEQ ID NO: 137643 - DNA, 13 bp, Artificial Sequence
  Oligonucleotide for detection of SNP TSC0034407
tgattcgtagtat

SEQ ID NO: 137644 - DNA, 13 bp, Artificial Sequence
  Oligonucleotide for detection of SNP TSC0034407
atactacgaatca

SEQ ID NO: 137645 - DNA, 13 bp, Artificial Sequence
  Oligonucleotide for detection of SNP TSC0034407
atgttgtgaatta

SEQ ID NO: 137646 - DNA, 13 bp, Artificial Sequence
  Oligonucleotide for detection of SNP TSC0034407
taattcacaacat

SEQ ID NO: 137647 - DNA, 13 bp, Artificial Sequence
  Oligonucleotide for detection of SNP TSC0034407
atgttgagaatta

SEQ ID NO: 137648 - DNA, 13 bp, Artificial Sequence
  Oligonucleotide for detection of SNP TSC0034407
taattctcaacat

SEQ ID NO: 137649 - DNA, 13 bp, Artificial Sequence
  Oligonucleotide for detection of SNP TSC0034407
atgttgcgaatta

SEQ ID NO: 137650 - DNA, 13 bp, Artificial Sequence
  Oligonucleotide for detection of SNP TSC0034407
taattcgcaacat

SEQ ID NO: 137651 - DNA, 13 bp, Artificial Sequence
  Oligonucleotide for detection of SNP TSC0034408
ttagttatgatta

SEQ ID NO: 137652 - DNA, 13 bp, Artificial Sequence
  Oligonucleotide for detection of SNP TSC0034408
taatcataactaa

SEQ ID NO: 137653 - DNA, 13 bp, Artificial Sequence
  Oligonucleotide for detection of SNP TSC0034408
ttagttgtgatta

SEQ ID NO: 137654 - DNA, 13 bp, Artificial Sequence
  Oligonucleotide for detection of SNP TSC0034408
taatcacaactaa

SEQ ID NO: 137655 - DNA, 13 bp, Artificial Sequence
  Oligonucleotide for detection of SNP TSC0034409
ttgatgtttttat

SEQ ID NO: 137656 - DNA, 13 bp, Artificial Sequence
  Oligonucleotide for detection of SNP TSC0034409
ataaaaacatcaa

SEQ ID NO: 137657 - DNA, 13 bp, Artificial Sequence
  Oligonucleotide for detection of SNP TSC0034409
ttgatggttttat

SEQ ID NO: 137658 - DNA, 13 bp, Artificial Sequence
  Oligonucleotide for detection of SNP TSC0034409
ataaaaccatcaa

SEQ ID NO: 137659 - DNA, 13 bp, Artificial Sequence
  Oligonucleotide for detection of SNP TSC0034409
ataaaggtattag

SEQ ID NO: 137660 - DNA, 13 bp, Artificial Sequence
  Oligonucleotide for detection of SNP TSC0034409
ctaatacctttat

SEQ ID NO: 137661 - DNA, 13 bp, Artificial Sequence
  Oligonucleotide for detection of SNP TSC0034409
ataaagttattag

SEQ ID NO: 137662 - DNA, 13 bp, Artificial Sequence
  Oligonucleotide for detection of SNP TSC0034409
ctaataactttat

SEQ ID NO: 137663 - DNA, 13 bp, Artificial Sequence
  Oligonucleotide for detection of SNP TSC0034410
ttggatgaagtay

SEQ ID NO: 137664 - DNA, 13 bp, Artificial Sequence
  Oligonucleotide for detection of SNP TSC0034410
rtacttcatccaa

SEQ ID NO: 137665 - DNA, 13 bp, Artificial Sequence
  Oligonucleotide for detection of SNP TSC0034410
ttggataaagtay

SEQ ID NO: 137666 - DNA, 13 bp, Artificial Sequence
  Oligonucleotide for detection of SNP TSC0034410
rtactttatccaa

SEQ ID NO: 137667 - DNA, 13 bp, Artificial Sequence
  Oligonucleotide for detection of SNP TSC0034411
atttttagtgttg

SEQ ID NO: 137668 - DNA, 13 bp, Artificial Sequence
  Oligonucleotide for detection of SNP TSC0034411
caacactaaaaat

SEQ ID NO: 137669 - DNA, 13 bp, Artificial Sequence
  Oligonucleotide for detection of SNP TSC0034411
atttttggtgttg

SEQ ID NO: 137670 - DNA, 13 bp, Artificial Sequence
  Oligonucleotide for detection of SNP TSC0034411
caacaccaaaaat

SEQ ID NO: 137671 - DNA, 13 bp, Artificial Sequence
  Oligonucleotide for detection of SNP TSC0034411
attttcggtgttg

SEQ ID NO: 137672 - DNA, 13 bp, Artificial Sequence
  Oligonucleotide for detection of SNP TSC0034411
caacaccgaaaat

SEQ ID NO: 137673 - DNA, 13 bp, Artificial Sequence
  Oligonucleotide for detection of SNP TSC0034411
taatattgaaagt

SEQ ID NO: 137674 - DNA, 13 bp, Artificial Sequence
  Oligonucleotide for detection of SNP TSC0034411
actttcaatatta

SEQ ID NO: 137675 - DNA, 13 bp, Artificial Sequence
  Oligonucleotide for detection of SNP TSC0034411
taatatcgaaagt

SEQ ID NO: 137676 - DNA, 13 bp, Artificial Sequence
  Oligonucleotide for detection of SNP TSC0034411
actttcgatatta

SEQ ID NO: 137677 - DNA, 13 bp, Artificial Sequence
  Oligonucleotide for detection of SNP TSC0034415
tttttttttcgty

SEQ ID NO: 137678 - DNA, 13 bp, Artificial Sequence
  Oligonucleotide for detection of SNP TSC0034415
racgaaaaaaaaa

SEQ ID NO: 137679 - DNA, 13 bp, Artificial Sequence
  Oligonucleotide for detection of SNP TSC0034415
tttttcgtttgty

SEQ ID NO: 137680 - DNA, 13 bp, Artificial Sequence
  Oligonucleotide for detection of SNP TSC0034415
racaaacgaaaaa

SEQ ID NO: 137681 - DNA, 13 bp, Artificial Sequence
  Oligonucleotide for detection of SNP TSC0034415
ttttttgttcgty

SEQ ID NO: 137682 - DNA, 13 bp, Artificial Sequence
  Oligonucleotide for detection of SNP TSC0034415
racgaacaaaaaa

SEQ ID NO: 137683 - DNA, 13 bp, Artificial Sequence
  Oligonucleotide for detection of SNP TSC0034415
tttttcgttcgty

SEQ ID NO: 137684 - DNA, 13 bp, Artificial Sequence
  Oligonucleotide for detection of SNP TSC0034415
racgaacgaaaaa

SEQ ID NO: 137685 - DNA, 13 bp, Artificial Sequence
  Oligonucleotide for detection of SNP TSC0034415
ggtgagggggaga

SEQ ID NO: 137686 - DNA, 13 bp, Artificial Sequence
  Oligonucleotide for detection of SNP TSC0034415
tctccccctcacc

SEQ ID NO: 137687 - DNA, 13 bp, Artificial Sequence
  Oligonucleotide for detection of SNP TSC0034415
ggtgagtgggaga

SEQ ID NO: 137688 - DNA, 13 bp, Artificial Sequence
  Oligonucleotide for detection of SNP TSC0034415
tctcccactcacc

SEQ ID NO: 137689 - DNA, 13 bp, Artificial Sequence
  Oligonucleotide for detection of SNP TSC0034415
ggcgagggggaga

SEQ ID NO: 137690 - DNA, 13 bp, Artificial Sequence
  Oligonucleotide for detection of SNP TSC0034415
tctccccctcgcc

SEQ ID NO: 137691 - DNA, 13 bp, Artificial Sequence
  Oligonucleotide for detection of SNP TSC0034415
ggcgagtgggaga

SEQ ID NO: 137692 - DNA, 13 bp, Artificial Sequence
  Oligonucleotide for detection of SNP TSC0034415
tctcccactcgcc

SEQ ID NO: 137693 - DNA, 13 bp, Artificial Sequence
  Oligonucleotide for detection of SNP TSC0034415
ggtgagcgggaga

SEQ ID NO: 137694 - DNA, 13 bp, Artificial Sequence
  Oligonucleotide for detection of SNP TSC0034415
tctcccgctcacc

SEQ ID NO: 137695 - DNA, 13 bp, Artificial Sequence
  Oligonucleotide for detection of SNP TSC0034415
ggcgagcgggaga

SEQ ID NO: 137696 - DNA, 13 bp, Artificial Sequence
  Oligonucleotide for detection of SNP TSC0034415
tctcccgctcgcc

SEQ ID NO: 137697 - DNA, 13 bp, Artificial Sequence
  Oligonucleotide for detection of SNP TSC0034416
gtaggggtggggy

SEQ ID NO: 137698 - DNA, 13 bp, Artificial Sequence
  Oligonucleotide for detection of SNP TSC0034416
rccccacccctac

SEQ ID NO: 137699 - DNA, 13 bp, Artificial Sequence
  Oligonucleotide for detection of SNP TSC0034416
gtagggatggggy

SEQ ID NO: 137700 - DNA, 13 bp, Artificial Sequence
  Oligonucleotide for detection of SNP TSC0034416
rccccatccctac

SEQ ID NO: 137701 - DNA, 13 bp, Artificial Sequence
  Oligonucleotide for detection of SNP TSC0034416
gtaggggcggggy

SEQ ID NO: 137702 - DNA, 13 bp, Artificial Sequence
  Oligonucleotide for detection of SNP TSC0034416
rccccgcccctac

SEQ ID NO: 137703 - DNA, 13 bp, Artificial Sequence
  Oligonucleotide for detection of SNP TSC0034416
gtagggacggggy

SEQ ID NO: 137704 - DNA, 13 bp, Artificial Sequence
  Oligonucleotide for detection of SNP TSC0034416
rccccgtccctac

SEQ ID NO: 137705 - DNA, 13 bp, Artificial Sequence
  Oligonucleotide for detection of SNP TSC0034417
tgttatatgtaag

SEQ ID NO: 137706 - DNA, 13 bp, Artificial Sequence
  Oligonucleotide for detection of SNP TSC0034417
cttacatataaca

SEQ ID NO: 137707 - DNA, 13 bp, Artificial Sequence
  Oligonucleotide for detection of SNP TSC0034417
tgttatttgtaag

SEQ ID NO: 137708 - DNA, 13 bp, Artificial Sequence
  Oligonucleotide for detection of SNP TSC0034417
cttacaaataaca

SEQ ID NO: 137709 - DNA, 13 bp, Artificial Sequence
  Oligonucleotide for detection of SNP TSC0034417
tttgtatatggta

SEQ ID NO: 137710 - DNA, 13 bp, Artificial Sequence
  Oligonucleotide for detection of SNP TSC0034417
taccatatacaaa

SEQ ID NO: 137711 - DNA, 13 bp, Artificial Sequence
  Oligonucleotide for detection of SNP TSC0034417
tttgtaaatggta

SEQ ID NO: 137712 - DNA, 13 bp, Artificial Sequence
  Oligonucleotide for detection of SNP TSC0034417
taccatttacaaa

SEQ ID NO: 137713 - DNA, 13 bp, Artificial Sequence
  Oligonucleotide for detection of SNP TSC0034418
ttatttttttagy

SEQ ID NO: 137714 - DNA, 13 bp, Artificial Sequence
  Oligonucleotide for detection of SNP TSC0034418
rctaaaaaaataa

SEQ ID NO: 137715 - DNA, 13 bp, Artificial Sequence
  Oligonucleotide for detection of SNP TSC0034418
ttatttgtttagy

SEQ ID NO: 137716 - DNA, 13 bp, Artificial Sequence
  Oligonucleotide for detection of SNP TSC0034418
rctaaacaaataa

SEQ ID NO: 137717 - DNA, 13 bp, Artificial Sequence
  Oligonucleotide for detection of SNP TSC0034418
gttaaggaggtgg

SEQ ID NO: 137718 - DNA, 13 bp, Artificial Sequence
  Oligonucleotide for detection of SNP TSC0034418
ccacctccttaac

SEQ ID NO: 137719 - DNA, 13 bp, Artificial Sequence
  Oligonucleotide for detection of SNP TSC0034418
gttaagtaggtgg

SEQ ID NO: 137720 - DNA, 13 bp, Artificial Sequence
  Oligonucleotide for detection of SNP TSC0034418
ccacctacttaac

SEQ ID NO: 137721 - DNA, 13 bp, Artificial Sequence
  Oligonucleotide for detection of SNP TSC0034420
gaaaaagtgttaa

SEQ ID NO: 137722 - DNA, 13 bp, Artificial Sequence
  Oligonucleotide for detection of SNP TSC0034420
ttaacactttttc

SEQ ID NO: 137723 - DNA, 13 bp, Artificial Sequence
  Oligonucleotide for detection of SNP TSC0034420
gaaaaattgttaa

SEQ ID NO: 137724 - DNA, 13 bp, Artificial Sequence
  Oligonucleotide for detection of SNP TSC0034420
ttaacaatttttc

SEQ ID NO: 137725 - DNA, 13 bp, Artificial Sequence
  Oligonucleotide for detection of SNP TSC0034423
gattaggttgaga

SEQ ID NO: 137726 - DNA, 13 bp, Artificial Sequence
  Oligonucleotide for detection of SNP TSC0034423
tctcaacctaatc

SEQ ID NO: 137727 - DNA, 13 bp, Artificial Sequence
  Oligonucleotide for detection of SNP TSC0034423
gattagattgaga

SEQ ID NO: 137728 - DNA, 13 bp, Artificial Sequence
  Oligonucleotide for detection of SNP TSC0034423
tctcaatctaatc

SEQ ID NO: 137729 - DNA, 13 bp, Artificial Sequence
  Oligonucleotide for detection of SNP TSC0034424
ttaagagagagty

SEQ ID NO: 137730 - DNA, 13 bp, Artificial Sequence
  Oligonucleotide for detection of SNP TSC0034424
ractctctcttaa

SEQ ID NO: 137731 - DNA, 13 bp, Artificial Sequence
  Oligonucleotide for detection of SNP TSC0034424
ttaagaaagagty

SEQ ID NO: 137732 - DNA, 13 bp, Artificial Sequence
  Oligonucleotide for detection of SNP TSC0034424
ractctttcttaa

SEQ ID NO: 137733 - DNA, 13 bp, Artificial Sequence
  Oligonucleotide for detection of SNP TSC0034426
attttagtatgga

SEQ ID NO: 137734 - DNA, 13 bp, Artificial Sequence
  Oligonucleotide for detection of SNP TSC0034426
tccatactaaaat

SEQ ID NO: 137735 - DNA, 13 bp, Artificial Sequence
  Oligonucleotide for detection of SNP TSC0034426
attttaatatgga

SEQ ID NO: 137736 - DNA, 13 bp, Artificial Sequence
  Oligonucleotide for detection of SNP TSC0034426
tccatattaaaat

SEQ ID NO: 137737 - DNA, 13 bp, Artificial Sequence
  Oligonucleotide for detection of SNP TSC0034426
attttagtacgga

SEQ ID NO: 137738 - DNA, 13 bp, Artificial Sequence
  Oligonucleotide for detection of SNP TSC0034426
tccgtactaaaat

SEQ ID NO: 137739 - DNA, 13 bp, Artificial Sequence
  Oligonucleotide for detection of SNP TSC0034426
attttaatacgga

SEQ ID NO: 137740 - DNA, 13 bp, Artificial Sequence
  Oligonucleotide for detection of SNP TSC0034426
tccgtattaaaat

SEQ ID NO: 137741 - DNA, 13 bp, Artificial Sequence
  Oligonucleotide for detection of SNP TSC0034429
attttgtggggty

SEQ ID NO: 137742 - DNA, 13 bp, Artificial Sequence
  Oligonucleotide for detection of SNP TSC0034429
raccccacaaaat

SEQ ID NO: 137743 - DNA, 13 bp, Artificial Sequence
  Oligonucleotide for detection of SNP TSC0034429
atttcgtggggty

SEQ ID NO: 137744 - DNA, 13 bp, Artificial Sequence
  Oligonucleotide for detection of SNP TSC0034429
raccccacgaaat

SEQ ID NO: 137745 - DNA, 13 bp, Artificial Sequence
  Oligonucleotide for detection of SNP TSC0034429
attttgcggggty

SEQ ID NO: 137746 - DNA, 13 bp, Artificial Sequence
  Oligonucleotide for detection of SNP TSC0034429
raccccgcaaaat

SEQ ID NO: 137747 - DNA, 13 bp, Artificial Sequence
  Oligonucleotide for detection of SNP TSC0034429
atttcgcggggty

SEQ ID NO: 137748 - DNA, 13 bp, Artificial Sequence
  Oligonucleotide for detection of SNP TSC0034429
raccccgcgaaat

SEQ ID NO: 137749 - DNA, 13 bp, Artificial Sequence
  Oligonucleotide for detection of SNP TSC0034429
gattttgtggagt

SEQ ID NO: 137750 - DNA, 13 bp, Artificial Sequence
  Oligonucleotide for detection of SNP TSC0034429
actccacaaaatc

SEQ ID NO: 137751 - DNA, 13 bp, Artificial Sequence
  Oligonucleotide for detection of SNP TSC0034429
gattttatggagt

SEQ ID NO: 137752 - DNA, 13 bp, Artificial Sequence
  Oligonucleotide for detection of SNP TSC0034429
actccataaaatc

SEQ ID NO: 137753 - DNA, 13 bp, Artificial Sequence
  Oligonucleotide for detection of SNP TSC0034429
gatttcgtggagt

SEQ ID NO: 137754 - DNA, 13 bp, Artificial Sequence
  Oligonucleotide for detection of SNP TSC0034429
actccacgaaatc

SEQ ID NO: 137755 - DNA, 13 bp, Artificial Sequence
  Oligonucleotide for detection of SNP TSC0034429
gattttacggagt

SEQ ID NO: 137756 - DNA, 13 bp, Artificial Sequence
  Oligonucleotide for detection of SNP TSC0034429
actccgtaaaatc

SEQ ID NO: 137757 - DNA, 13 bp, Artificial Sequence
  Oligonucleotide for detection of SNP TSC0034429
gattttgcggagt

SEQ ID NO: 137758 - DNA, 13 bp, Artificial Sequence
  Oligonucleotide for detection of SNP TSC0034429
actccgcaaaatc

SEQ ID NO: 137759 - DNA, 13 bp, Artificial Sequence
  Oligonucleotide for detection of SNP TSC0034429
gatttcgcggagt

SEQ ID NO: 137760 - DNA, 13 bp, Artificial Sequence
  Oligonucleotide for detection of SNP TSC0034429
actccgcgaaatc

SEQ ID NO: 137761 - DNA, 13 bp, Artificial Sequence
  Oligonucleotide for detection of SNP TSC0034432
tttggaatagaag

SEQ ID NO: 137762 - DNA, 13 bp, Artificial Sequence
  Oligonucleotide for detection of SNP TSC0034432
cttctattccaaa

SEQ ID NO: 137763 - DNA, 13 bp, Artificial Sequence
  Oligonucleotide for detection of SNP TSC0034432
tttggattagaag

SEQ ID NO: 137764 - DNA, 13 bp, Artificial Sequence
  Oligonucleotide for detection of SNP TSC0034432
cttctaatccaaa

SEQ ID NO: 137765 - DNA, 13 bp, Artificial Sequence
  Oligonucleotide for detection of SNP TSC0034432
tttttgttttaag

SEQ ID NO: 137766 - DNA, 13 bp, Artificial Sequence
  Oligonucleotide for detection of SNP TSC0034432
cttaaaacaaaaa

SEQ ID NO: 137767 - DNA, 13 bp, Artificial Sequence
  Oligonucleotide for detection of SNP TSC0034432
tttttggtttaag

SEQ ID NO: 137768 - DNA, 13 bp, Artificial Sequence
  Oligonucleotide for detection of SNP TSC0034432
cttaaaccaaaaa

SEQ ID NO: 137769 - DNA, 13 bp, Artificial Sequence
  Oligonucleotide for detection of SNP TSC0034435
gtagagggtgatg

SEQ ID NO: 137770 - DNA, 13 bp, Artificial Sequence
  Oligonucleotide for detection of SNP TSC0034435
catcaccctctac

SEQ ID NO: 137771 - DNA, 13 bp, Artificial Sequence
  Oligonucleotide for detection of SNP TSC0034435
gtagagagtgatg

SEQ ID NO: 137772 - DNA, 13 bp, Artificial Sequence
  Oligonucleotide for detection of SNP TSC0034435
catcactctctac

SEQ ID NO: 137773 - DNA, 13 bp, Artificial Sequence
  Oligonucleotide for detection of SNP TSC0034436
tagggtgggttgy

SEQ ID NO: 137774 - DNA, 13 bp, Artificial Sequence
  Oligonucleotide for detection of SNP TSC0034436
rcaacccacccta

SEQ ID NO: 137775 - DNA, 13 bp, Artificial Sequence
  Oligonucleotide for detection of SNP TSC0034436
tagggtaggttgy

SEQ ID NO: 137776 - DNA, 13 bp, Artificial Sequence
  Oligonucleotide for detection of SNP TSC0034436
rcaacctacccta

SEQ ID NO: 137777 - DNA, 13 bp, Artificial Sequence
  Oligonucleotide for detection of SNP TSC0034437
tataatatattat

SEQ ID NO: 137778 - DNA, 13 bp, Artificial Sequence
  Oligonucleotide for detection of SNP TSC0034437
ataatatattata

SEQ ID NO: 137779 - DNA, 13 bp, Artificial Sequence
  Oligonucleotide for detection of SNP TSC0034437
tataatgtattat

SEQ ID NO: 137780 - DNA, 13 bp, Artificial Sequence
  Oligonucleotide for detection of SNP TSC0034437
ataatacattata

SEQ ID NO: 137781 - DNA, 13 bp, Artificial Sequence
  Oligonucleotide for detection of SNP TSC0034437
atggtgtgttata

SEQ ID NO: 137782 - DNA, 13 bp, Artificial Sequence
  Oligonucleotide for detection of SNP TSC0034437
tataacacaccat

SEQ ID NO: 137783 - DNA, 13 bp, Artificial Sequence
  Oligonucleotide for detection of SNP TSC0034437
atggtgcgttata

SEQ ID NO: 137784 - DNA, 13 bp, Artificial Sequence
  Oligonucleotide for detection of SNP TSC0034437
tataacgcaccat

SEQ ID NO: 137785 - DNA, 13 bp, Artificial Sequence
  Oligonucleotide for detection of SNP TSC0034439
atgtttgggattt

SEQ ID NO: 137786 - DNA, 13 bp, Artificial Sequence
  Oligonucleotide for detection of SNP TSC0034439
aaatcccaaacat

SEQ ID NO: 137787 - DNA, 13 bp, Artificial Sequence
  Oligonucleotide for detection of SNP TSC0034439
atgtttaggattt

SEQ ID NO: 137788 - DNA, 13 bp, Artificial Sequence
  Oligonucleotide for detection of SNP TSC0034439
aaatcctaaacat

SEQ ID NO: 137789 - DNA, 13 bp, Artificial Sequence
  Oligonucleotide for detection of SNP TSC0034439
acgtttgggattt

SEQ ID NO: 137790 - DNA, 13 bp, Artificial Sequence
  Oligonucleotide for detection of SNP TSC0034439
aaatcccaaacgt

SEQ ID NO: 137791 - DNA, 13 bp, Artificial Sequence
  Oligonucleotide for detection of SNP TSC0034439
acgtttaggattt

SEQ ID NO: 137792 - DNA, 13 bp, Artificial Sequence
  Oligonucleotide for detection of SNP TSC0034439
aaatcctaaacgt

SEQ ID NO: 137793 - DNA, 13 bp, Artificial Sequence
  Oligonucleotide for detection of SNP TSC0034440
aagataatattga

SEQ ID NO: 137794 - DNA, 13 bp, Artificial Sequence
  Oligonucleotide for detection of SNP TSC0034440
tcaatattatctt

SEQ ID NO: 137795 - DNA, 13 bp, Artificial Sequence
  Oligonucleotide for detection of SNP TSC0034440
aagatagtattga

SEQ ID NO: 137796 - DNA, 13 bp, Artificial Sequence
  Oligonucleotide for detection of SNP TSC0034440
tcaatactatctt

SEQ ID NO: 137797 - DNA, 13 bp, Artificial Sequence
  Oligonucleotide for detection of SNP TSC0034441
taggtttaagtga

SEQ ID NO: 137798 - DNA, 13 bp, Artificial Sequence
  Oligonucleotide for detection of SNP TSC0034441
tcacttaaaccta

SEQ ID NO: 137799 - DNA, 13 bp, Artificial Sequence
  Oligonucleotide for detection of SNP TSC0034441
taggttgaagtga

SEQ ID NO: 137800 - DNA, 13 bp, Artificial Sequence
  Oligonucleotide for detection of SNP TSC0034441
tcacttcaaccta

SEQ ID NO: 137801 - DNA, 13 bp, Artificial Sequence
  Oligonucleotide for detection of SNP TSC0034441
ttattttaatttg

SEQ ID NO: 137802 - DNA, 13 bp, Artificial Sequence
  Oligonucleotide for detection of SNP TSC0034441
caaattaaaataa

SEQ ID NO: 137803 - DNA, 13 bp, Artificial Sequence
  Oligonucleotide for detection of SNP TSC0034442
agtagatatgggg

SEQ ID NO: 137804 - DNA, 13 bp, Artificial Sequence
  Oligonucleotide for detection of SNP TSC0034442
ccccatatctact

SEQ ID NO: 137805 - DNA, 13 bp, Artificial Sequence
  Oligonucleotide for detection of SNP TSC0034442
agtagagatgggg

SEQ ID NO: 137806 - DNA, 13 bp, Artificial Sequence
  Oligonucleotide for detection of SNP TSC0034442
ccccatctctact

SEQ ID NO: 137807 - DNA, 13 bp, Artificial Sequence
  Oligonucleotide for detection of SNP TSC0034443
gagaaggtttaaa

SEQ ID NO: 137808 - DNA, 13 bp, Artificial Sequence
  Oligonucleotide for detection of SNP TSC0034443
tttaaaccttctc

SEQ ID NO: 137809 - DNA, 13 bp, Artificial Sequence
  Oligonucleotide for detection of SNP TSC0034443
gagaagatttaaa

SEQ ID NO: 137810 - DNA, 13 bp, Artificial Sequence
  Oligonucleotide for detection of SNP TSC0034443
tttaaatcttctc

SEQ ID NO: 137811 - DNA, 13 bp, Artificial Sequence
  Oligonucleotide for detection of SNP TSC0034450
gagtttaaggtta

SEQ ID NO: 137812 - DNA, 13 bp, Artificial Sequence
  Oligonucleotide for detection of SNP TSC0034450
taaccttaaactc

SEQ ID NO: 137813 - DNA, 13 bp, Artificial Sequence
  Oligonucleotide for detection of SNP TSC0034450
gagtttgaggtta

SEQ ID NO: 137814 - DNA, 13 bp, Artificial Sequence
  Oligonucleotide for detection of SNP TSC0034450
taacctcaaactc

SEQ ID NO: 137815 - DNA, 13 bp, Artificial Sequence
  Oligonucleotide for detection of SNP TSC0034450
gagttcgaggtta

SEQ ID NO: 137816 - DNA, 13 bp, Artificial Sequence
  Oligonucleotide for detection of SNP TSC0034450
taacctcgaactc

SEQ ID NO: 137817 - DNA, 13 bp, Artificial Sequence
  Oligonucleotide for detection of SNP TSC0034452
gtgttgggttgtg

SEQ ID NO: 137818 - DNA, 13 bp, Artificial Sequence
  Oligonucleotide for detection of SNP TSC0034452
cacaacccaacac

SEQ ID NO: 137819 - DNA, 13 bp, Artificial Sequence
  Oligonucleotide for detection of SNP TSC0034452
gtgttgtgttgtg

SEQ ID NO: 137820 - DNA, 13 bp, Artificial Sequence
  Oligonucleotide for detection of SNP TSC0034452
cacaacacaacac

SEQ ID NO: 137821 - DNA, 13 bp, Artificial Sequence
  Oligonucleotide for detection of SNP TSC0034452
tatagtttagtay

SEQ ID NO: 137822 - DNA, 13 bp, Artificial Sequence
  Oligonucleotide for detection of SNP TSC0034452
rtactaaactata

SEQ ID NO: 137823 - DNA, 13 bp, Artificial Sequence
  Oligonucleotide for detection of SNP TSC0034452
tatagtatagtay

SEQ ID NO: 137824 - DNA, 13 bp, Artificial Sequence
  Oligonucleotide for detection of SNP TSC0034452
rtactatactata

SEQ ID NO: 137825 - DNA, 13 bp, Artificial Sequence
  Oligonucleotide for detection of SNP TSC0034453
ggtggtgtatttt

SEQ ID NO: 137826 - DNA, 13 bp, Artificial Sequence
  Oligonucleotide for detection of SNP TSC0034453
aaaatacaccacc

SEQ ID NO: 137827 - DNA, 13 bp, Artificial Sequence
  Oligonucleotide for detection of SNP TSC0034453
ggtggtatatttt

SEQ ID NO: 137828 - DNA, 13 bp, Artificial Sequence
  Oligonucleotide for detection of SNP TSC0034453
aaaatataccacc

SEQ ID NO: 137829 - DNA, 13 bp, Artificial Sequence
  Oligonucleotide for detection of SNP TSC0034458
aatttttttgatg

SEQ ID NO: 137830 - DNA, 13 bp, Artificial Sequence
  Oligonucleotide for detection of SNP TSC0034458
catcaaaaaaatt

SEQ ID NO: 137831 - DNA, 13 bp, Artificial Sequence
  Oligonucleotide for detection of SNP TSC0034458
aattttgttgatg

SEQ ID NO: 137832 - DNA, 13 bp, Artificial Sequence
  Oligonucleotide for detection of SNP TSC0034458
catcaacaaaatt

SEQ ID NO: 137833 - DNA, 13 bp, Artificial Sequence
  Oligonucleotide for detection of SNP TSC0034458
tattaagaagatt

SEQ ID NO: 137834 - DNA, 13 bp, Artificial Sequence
  Oligonucleotide for detection of SNP TSC0034458
aatcttcttaata

SEQ ID NO: 137835 - DNA, 13 bp, Artificial Sequence
  Oligonucleotide for detection of SNP TSC0034458
tattaataagatt

SEQ ID NO: 137836 - DNA, 13 bp, Artificial Sequence
  Oligonucleotide for detection of SNP TSC0034458
aatcttattaata

SEQ ID NO: 137837 - DNA, 13 bp, Artificial Sequence
  Oligonucleotide for detection of SNP TSC0034459
gggtaagtttggy

SEQ ID NO: 137838 - DNA, 13 bp, Artificial Sequence
  Oligonucleotide for detection of SNP TSC0034459
rccaaacttaccc

SEQ ID NO: 137839 - DNA, 13 bp, Artificial Sequence
  Oligonucleotide for detection of SNP TSC0034459
gggtaaatttggy

SEQ ID NO: 137840 - DNA, 13 bp, Artificial Sequence
  Oligonucleotide for detection of SNP TSC0034459
rccaaatttaccc

SEQ ID NO: 137841 - DNA, 13 bp, Artificial Sequence
  Oligonucleotide for detection of SNP TSC0034462
atatgatgtgtay

SEQ ID NO: 137842 - DNA, 13 bp, Artificial Sequence
  Oligonucleotide for detection of SNP TSC0034462
rtacacatcatat

SEQ ID NO: 137843 - DNA, 13 bp, Artificial Sequence
  Oligonucleotide for detection of SNP TSC0034462
atacgatgtgtay

SEQ ID NO: 137844 - DNA, 13 bp, Artificial Sequence
  Oligonucleotide for detection of SNP TSC0034462
rtacacatcgtat

SEQ ID NO: 137845 - DNA, 13 bp, Artificial Sequence
  Oligonucleotide for detection of SNP TSC0034462
atatgacgtgtay

SEQ ID NO: 137846 - DNA, 13 bp, Artificial Sequence
  Oligonucleotide for detection of SNP TSC0034462
rtacacgtcatat

SEQ ID NO: 137847 - DNA, 13 bp, Artificial Sequence
  Oligonucleotide for detection of SNP TSC0034462
atacgacgtgtay

SEQ ID NO: 137848 - DNA, 13 bp, Artificial Sequence
  Oligonucleotide for detection of SNP TSC0034462
rtacacgtcgtat

SEQ ID NO: 137849 - DNA, 13 bp, Artificial Sequence
  Oligonucleotide for detection of SNP TSC0034462
gtgtatgttgtgt

SEQ ID NO: 137850 - DNA, 13 bp, Artificial Sequence
  Oligonucleotide for detection of SNP TSC0034462
acacaacatacac

SEQ ID NO: 137851 - DNA, 13 bp, Artificial Sequence
  Oligonucleotide for detection of SNP TSC0034462
gtgtatattgtgt

SEQ ID NO: 137852 - DNA, 13 bp, Artificial Sequence
  Oligonucleotide for detection of SNP TSC0034462
acacaatatacac

SEQ ID NO: 137853 - DNA, 13 bp, Artificial Sequence
  Oligonucleotide for detection of SNP TSC0034462
gtgtacgttgtgt

SEQ ID NO: 137854 - DNA, 13 bp, Artificial Sequence
  Oligonucleotide for detection of SNP TSC0034462
acacaacgtacac

SEQ ID NO: 137855 - DNA, 13 bp, Artificial Sequence
  Oligonucleotide for detection of SNP TSC0034462
gtgtatatcgtgt

SEQ ID NO: 137856 - DNA, 13 bp, Artificial Sequence
  Oligonucleotide for detection of SNP TSC0034462
acacgatatacac

SEQ ID NO: 137857 - DNA, 13 bp, Artificial Sequence
  Oligonucleotide for detection of SNP TSC0034462
gtgtatgtcgtgt

SEQ ID NO: 137858 - DNA, 13 bp, Artificial Sequence
  Oligonucleotide for detection of SNP TSC0034462
acacgacatacac

SEQ ID NO: 137859 - DNA, 13 bp, Artificial Sequence
  Oligonucleotide for detection of SNP TSC0034462
gtgtacgtcgtgt

SEQ ID NO: 137860 - DNA, 13 bp, Artificial Sequence
  Oligonucleotide for detection of SNP TSC0034462
acacgacgtacac

SEQ ID NO: 137861 - DNA, 13 bp, Artificial Sequence
  Oligonucleotide for detection of SNP TSC0034463
gagatagggtttt

SEQ ID NO: 137862 - DNA, 13 bp, Artificial Sequence
  Oligonucleotide for detection of SNP TSC0034463
aaaaccctatctc

SEQ ID NO: 137863 - DNA, 13 bp, Artificial Sequence
  Oligonucleotide for detection of SNP TSC0034463
gagataaggtttt

SEQ ID NO: 137864 - DNA, 13 bp, Artificial Sequence
  Oligonucleotide for detection of SNP TSC0034463
aaaaccttatctc

SEQ ID NO: 137865 - DNA, 13 bp, Artificial Sequence
  Oligonucleotide for detection of SNP TSC0034465
ttattatgaaaag

SEQ ID NO: 137866 - DNA, 13 bp, Artificial Sequence
  Oligonucleotide for detection of SNP TSC0034465
cttttcataataa

SEQ ID NO: 137867 - DNA, 13 bp, Artificial Sequence
  Oligonucleotide for detection of SNP TSC0034465
ttattacgaaaag

SEQ ID NO: 137868 - DNA, 13 bp, Artificial Sequence
  Oligonucleotide for detection of SNP TSC0034465
cttttcgtaataa

SEQ ID NO: 137869 - DNA, 13 bp, Artificial Sequence
  Oligonucleotide for detection of SNP TSC0034468
tatttgtggttgg

SEQ ID NO: 137870 - DNA, 13 bp, Artificial Sequence
  Oligonucleotide for detection of SNP TSC0034468
ccaaccacaaata

SEQ ID NO: 137871 - DNA, 13 bp, Artificial Sequence
  Oligonucleotide for detection of SNP TSC0034468
tatttgcggttgg

SEQ ID NO: 137872 - DNA, 13 bp, Artificial Sequence
  Oligonucleotide for detection of SNP TSC0034468
ccaaccgcaaata

SEQ ID NO: 137873 - DNA, 13 bp, Artificial Sequence
  Oligonucleotide for detection of SNP TSC0034468
tatttgtggtcgg

SEQ ID NO: 137874 - DNA, 13 bp, Artificial Sequence
  Oligonucleotide for detection of SNP TSC0034468
ccgaccacaaata

SEQ ID NO: 137875 - DNA, 13 bp, Artificial Sequence
  Oligonucleotide for detection of SNP TSC0034468
tatttgcggtcgg

SEQ ID NO: 137876 - DNA, 13 bp, Artificial Sequence
  Oligonucleotide for detection of SNP TSC0034468
ccgaccgcaaata

SEQ ID NO: 137877 - DNA, 13 bp, Artificial Sequence
  Oligonucleotide for detection of SNP TSC0034469
tttttgagtttty

SEQ ID NO: 137878 - DNA, 13 bp, Artificial Sequence
  Oligonucleotide for detection of SNP TSC0034469
raaaactcaaaaa

SEQ ID NO: 137879 - DNA, 13 bp, Artificial Sequence
  Oligonucleotide for detection of SNP TSC0034469
tttttgggtttty

SEQ ID NO: 137880 - DNA, 13 bp, Artificial Sequence
  Oligonucleotide for detection of SNP TSC0034469
raaaacccaaaaa

SEQ ID NO: 137881 - DNA, 13 bp, Artificial Sequence
  Oligonucleotide for detection of SNP TSC0034469
ttttcgagtttty

SEQ ID NO: 137882 - DNA, 13 bp, Artificial Sequence
  Oligonucleotide for detection of SNP TSC0034469
raaaactcgaaaa

SEQ ID NO: 137883 - DNA, 13 bp, Artificial Sequence
  Oligonucleotide for detection of SNP TSC0034469
ttttcgggtttty

SEQ ID NO: 137884 - DNA, 13 bp, Artificial Sequence
  Oligonucleotide for detection of SNP TSC0034469
raaaacccgaaaa

SEQ ID NO: 137885 - DNA, 13 bp, Artificial Sequence
  Oligonucleotide for detection of SNP TSC0034471
ataagtttagagy

SEQ ID NO: 137886 - DNA, 13 bp, Artificial Sequence
  Oligonucleotide for detection of SNP TSC0034471
rctctaaacttat

SEQ ID NO: 137887 - DNA, 13 bp, Artificial Sequence
  Oligonucleotide for detection of SNP TSC0034471
ataagtgtagagy

SEQ ID NO: 137888 - DNA, 13 bp, Artificial Sequence
  Oligonucleotide for detection of SNP TSC0034471
rctctacacttat

SEQ ID NO: 137889 - DNA, 13 bp, Artificial Sequence
  Oligonucleotide for detection of SNP TSC0034471
ataagcgtagagy

SEQ ID NO: 137890 - DNA, 13 bp, Artificial Sequence
  Oligonucleotide for detection of SNP TSC0034471
rctctacgcttat

SEQ ID NO: 137891 - DNA, 13 bp, Artificial Sequence
  Oligonucleotide for detection of SNP TSC0034471
gttttaggtttat

SEQ ID NO: 137892 - DNA, 13 bp, Artificial Sequence
  Oligonucleotide for detection of SNP TSC0034471
ataaacctaaaac

SEQ ID NO: 137893 - DNA, 13 bp, Artificial Sequence
  Oligonucleotide for detection of SNP TSC0034471
gttttatgtttat

SEQ ID NO: 137894 - DNA, 13 bp, Artificial Sequence
  Oligonucleotide for detection of SNP TSC0034471
ataaacataaaac

SEQ ID NO: 137895 - DNA, 13 bp, Artificial Sequence
  Oligonucleotide for detection of SNP TSC0034471
gttttacgtttat

SEQ ID NO: 137896 - DNA, 13 bp, Artificial Sequence
  Oligonucleotide for detection of SNP TSC0034471
ataaacgtaaaac

SEQ ID NO: 137897 - DNA, 13 bp, Artificial Sequence
  Oligonucleotide for detection of SNP TSC0034473
aagaagattatga

SEQ ID NO: 137898 - DNA, 13 bp, Artificial Sequence
  Oligonucleotide for detection of SNP TSC0034473
tcataatcttctt

SEQ ID NO: 137899 - DNA, 13 bp, Artificial Sequence
  Oligonucleotide for detection of SNP TSC0034473
aagaaggttatga

SEQ ID NO: 137900 - DNA, 13 bp, Artificial Sequence
  Oligonucleotide for detection of SNP TSC0034473
tcataaccttctt

SEQ ID NO: 137901 - DNA, 13 bp, Artificial Sequence
  Oligonucleotide for detection of SNP TSC0034474
attagtatagtay

SEQ ID NO: 137902 - DNA, 13 bp, Artificial Sequence
  Oligonucleotide for detection of SNP TSC0034474
rtactatactaat

SEQ ID NO: 137903 - DNA, 13 bp, Artificial Sequence
  Oligonucleotide for detection of SNP TSC0034474
attagtttagtay

SEQ ID NO: 137904 - DNA, 13 bp, Artificial Sequence
  Oligonucleotide for detection of SNP TSC0034474
rtactaaactaat

SEQ ID NO: 137905 - DNA, 13 bp, Artificial Sequence
  Oligonucleotide for detection of SNP TSC0034474
gtgttgtattgat

SEQ ID NO: 137906 - DNA, 13 bp, Artificial Sequence
  Oligonucleotide for detection of SNP TSC0034474
atcaatacaacac

SEQ ID NO: 137907 - DNA, 13 bp, Artificial Sequence
  Oligonucleotide for detection of SNP TSC0034474
gtgttggattgat

SEQ ID NO: 137908 - DNA, 13 bp, Artificial Sequence
  Oligonucleotide for detection of SNP TSC0034474
atcaatccaacac

SEQ ID NO: 137909 - DNA, 13 bp, Artificial Sequence
  Oligonucleotide for detection of SNP TSC0034481
agattatgaggty

SEQ ID NO: 137910 - DNA, 13 bp, Artificial Sequence
  Oligonucleotide for detection of SNP TSC0034481
racctcataatct

SEQ ID NO: 137911 - DNA, 13 bp, Artificial Sequence
  Oligonucleotide for detection of SNP TSC0034481
agattaggaggty

SEQ ID NO: 137912 - DNA, 13 bp, Artificial Sequence
  Oligonucleotide for detection of SNP TSC0034481
racctcctaatct

SEQ ID NO: 137913 - DNA, 13 bp, Artificial Sequence
  Oligonucleotide for detection of SNP TSC0034481
agattacgaggty

SEQ ID NO: 137914 - DNA, 13 bp, Artificial Sequence
  Oligonucleotide for detection of SNP TSC0034481
racctcgtaatct

SEQ ID NO: 137915 - DNA, 13 bp, Artificial Sequence
  Oligonucleotide for detection of SNP TSC0034481
gattttttgattt

SEQ ID NO: 137916 - DNA, 13 bp, Artificial Sequence
  Oligonucleotide for detection of SNP TSC0034481
aaatcaaaaaatc

SEQ ID NO: 137917 - DNA, 13 bp, Artificial Sequence
  Oligonucleotide for detection of SNP TSC0034483
ttttaggtgattt

SEQ ID NO: 137918 - DNA, 13 bp, Artificial Sequence
  Oligonucleotide for detection of SNP TSC0034483
aaatcacctaaaa

SEQ ID NO: 137919 - DNA, 13 bp, Artificial Sequence
  Oligonucleotide for detection of SNP TSC0034483
ttttagatgattt

SEQ ID NO: 137920 - DNA, 13 bp, Artificial Sequence
  Oligonucleotide for detection of SNP TSC0034483
aaatcatctaaaa

SEQ ID NO: 137921 - DNA, 13 bp, Artificial Sequence
  Oligonucleotide for detection of SNP TSC0034484
atttaaattttaa

SEQ ID NO: 137922 - DNA, 13 bp, Artificial Sequence
  Oligonucleotide for detection of SNP TSC0034484
ttaaaatttaaat

SEQ ID NO: 137923 - DNA, 13 bp, Artificial Sequence
  Oligonucleotide for detection of SNP TSC0034484
atttaagttttaa

SEQ ID NO: 137924 - DNA, 13 bp, Artificial Sequence
  Oligonucleotide for detection of SNP TSC0034484
ttaaaacttaaat

SEQ ID NO: 137925 - DNA, 13 bp, Artificial Sequence
  Oligonucleotide for detection of SNP TSC0034488
gttttttgaaagy

SEQ ID NO: 137926 - DNA, 13 bp, Artificial Sequence
  Oligonucleotide for detection of SNP TSC0034488
rctttcaaaaaac

SEQ ID NO: 137927 - DNA, 13 bp, Artificial Sequence
  Oligonucleotide for detection of SNP TSC0034488
gtttttcgaaagy

SEQ ID NO: 137928 - DNA, 13 bp, Artificial Sequence
  Oligonucleotide for detection of SNP TSC0034488
rctttcgaaaaac

SEQ ID NO: 137929 - DNA, 13 bp, Artificial Sequence
  Oligonucleotide for detection of SNP TSC0034488
gtttttgaaggay

SEQ ID NO: 137930 - DNA, 13 bp, Artificial Sequence
  Oligonucleotide for detection of SNP TSC0034488
rtccttcaaaaac

SEQ ID NO: 137931 - DNA, 13 bp, Artificial Sequence
  Oligonucleotide for detection of SNP TSC0034488
gtttttaaaggay

SEQ ID NO: 137932 - DNA, 13 bp, Artificial Sequence
  Oligonucleotide for detection of SNP TSC0034488
rtcctttaaaaac

SEQ ID NO: 137933 - DNA, 13 bp, Artificial Sequence
  Oligonucleotide for detection of SNP TSC0034488
gttttcgaaggay

SEQ ID NO: 137934 - DNA, 13 bp, Artificial Sequence
  Oligonucleotide for detection of SNP TSC0034488
rtccttcgaaaac

SEQ ID NO: 137935 - DNA, 13 bp, Artificial Sequence
  Oligonucleotide for detection of SNP TSC0034489
gaggtaaagatgt

SEQ ID NO: 137936 - DNA, 13 bp, Artificial Sequence
  Oligonucleotide for detection of SNP TSC0034489
acatctttacctc

SEQ ID NO: 137937 - DNA, 13 bp, Artificial Sequence
  Oligonucleotide for detection of SNP TSC0034489
gaggtatagatgt

SEQ ID NO: 137938 - DNA, 13 bp, Artificial Sequence
  Oligonucleotide for detection of SNP TSC0034489
acatctatacctc

SEQ ID NO: 137939 - DNA, 13 bp, Artificial Sequence
  Oligonucleotide for detection of SNP TSC0034491
ggaaggaagggag

SEQ ID NO: 137940 - DNA, 13 bp, Artificial Sequence
  Oligonucleotide for detection of SNP TSC0034491
ctcccttccttcc

SEQ ID NO: 137941 - DNA, 13 bp, Artificial Sequence
  Oligonucleotide for detection of SNP TSC0034491
ggaagggagggag

SEQ ID NO: 137942 - DNA, 13 bp, Artificial Sequence
  Oligonucleotide for detection of SNP TSC0034491
ctccctcccttcc

SEQ ID NO: 137943 - DNA, 13 bp, Artificial Sequence
  Oligonucleotide for detection of SNP TSC0034497
agagtgatttagy

SEQ ID NO: 137944 - DNA, 13 bp, Artificial Sequence
  Oligonucleotide for detection of SNP TSC0034497
rctaaatcactct

SEQ ID NO: 137945 - DNA, 13 bp, Artificial Sequence
  Oligonucleotide for detection of SNP TSC0034497
agagtggtttagy

SEQ ID NO: 137946 - DNA, 13 bp, Artificial Sequence
  Oligonucleotide for detection of SNP TSC0034497
rctaaaccactct

SEQ ID NO: 137947 - DNA, 13 bp, Artificial Sequence
  Oligonucleotide for detection of SNP TSC0034499
aggtttagtttty

SEQ ID NO: 137948 - DNA, 13 bp, Artificial Sequence
  Oligonucleotide for detection of SNP TSC0034499
raaaactaaacct

SEQ ID NO: 137949 - DNA, 13 bp, Artificial Sequence
  Oligonucleotide for detection of SNP TSC0034499
aggttttgtttty

SEQ ID NO: 137950 - DNA, 13 bp, Artificial Sequence
  Oligonucleotide for detection of SNP TSC0034499
raaaacaaaacct

SEQ ID NO: 137951 - DNA, 13 bp, Artificial Sequence
  Oligonucleotide for detection of SNP TSC0034499
aggtttcgtttty

SEQ ID NO: 137952 - DNA, 13 bp, Artificial Sequence
  Oligonucleotide for detection of SNP TSC0034499
raaaacgaaacct

SEQ ID NO: 137953 - DNA, 13 bp, Artificial Sequence
  Oligonucleotide for detection of SNP TSC0034499
gagggttagattt

SEQ ID NO: 137954 - DNA, 13 bp, Artificial Sequence
  Oligonucleotide for detection of SNP TSC0034499
aaatctaaccctc

SEQ ID NO: 137955 - DNA, 13 bp, Artificial Sequence
  Oligonucleotide for detection of SNP TSC0034499
gagggtgagattt

SEQ ID NO: 137956 - DNA, 13 bp, Artificial Sequence
  Oligonucleotide for detection of SNP TSC0034499
aaatctcaccctc

SEQ ID NO: 137957 - DNA, 13 bp, Artificial Sequence
  Oligonucleotide for detection of SNP TSC0034499
gagggcgagattt

SEQ ID NO: 137958 - DNA, 13 bp, Artificial Sequence
  Oligonucleotide for detection of SNP TSC0034499
aaatctcgccctc

SEQ ID NO: 137959 - DNA, 13 bp, Artificial Sequence
  Oligonucleotide for detection of SNP TSC0034500
aatgaatgaagga

SEQ ID NO: 137960 - DNA, 13 bp, Artificial Sequence
  Oligonucleotide for detection of SNP TSC0034500
tccttcattcatt

SEQ ID NO: 137961 - DNA, 13 bp, Artificial Sequence
  Oligonucleotide for detection of SNP TSC0034500
aatgaaggaagga

SEQ ID NO: 137962 - DNA, 13 bp, Artificial Sequence
  Oligonucleotide for detection of SNP TSC0034500
tccttccttcatt

SEQ ID NO: 137963 - DNA, 13 bp, Artificial Sequence
  Oligonucleotide for detection of SNP TSC0034506
gtagggaaaatgy

SEQ ID NO: 137964 - DNA, 13 bp, Artificial Sequence
  Oligonucleotide for detection of SNP TSC0034506
rcattttccctac

SEQ ID NO: 137965 - DNA, 13 bp, Artificial Sequence
  Oligonucleotide for detection of SNP TSC0034506
gtaggggaaatgy

SEQ ID NO: 137966 - DNA, 13 bp, Artificial Sequence
  Oligonucleotide for detection of SNP TSC0034506
rcatttcccctac

SEQ ID NO: 137967 - DNA, 13 bp, Artificial Sequence
  Oligonucleotide for detection of SNP TSC0034507
atataaggtttag

SEQ ID NO: 137968 - DNA, 13 bp, Artificial Sequence
  Oligonucleotide for detection of SNP TSC0034507
ctaaaccttatat

SEQ ID NO: 137969 - DNA, 13 bp, Artificial Sequence
  Oligonucleotide for detection of SNP TSC0034507
ttaggtgttgtat

SEQ ID NO: 137970 - DNA, 13 bp, Artificial Sequence
  Oligonucleotide for detection of SNP TSC0034507
atacaacacctaa

SEQ ID NO: 137971 - DNA, 13 bp, Artificial Sequence
  Oligonucleotide for detection of SNP TSC0034507
ttaggttttgtat

SEQ ID NO: 137972 - DNA, 13 bp, Artificial Sequence
  Oligonucleotide for detection of SNP TSC0034507
atacaaaacctaa

SEQ ID NO: 137973 - DNA, 13 bp, Artificial Sequence
  Oligonucleotide for detection of SNP TSC0034507
ttaggcgttgtat

SEQ ID NO: 137974 - DNA, 13 bp, Artificial Sequence
  Oligonucleotide for detection of SNP TSC0034507
atacaacgcctaa

SEQ ID NO: 137975 - DNA, 13 bp, Artificial Sequence
  Oligonucleotide for detection of SNP TSC0034508
taattgatgatta

SEQ ID NO: 137976 - DNA, 13 bp, Artificial Sequence
  Oligonucleotide for detection of SNP TSC0034508
taatcatcaatta

SEQ ID NO: 137977 - DNA, 13 bp, Artificial Sequence
  Oligonucleotide for detection of SNP TSC0034508
taattggtgatta

SEQ ID NO: 137978 - DNA, 13 bp, Artificial Sequence
  Oligonucleotide for detection of SNP TSC0034508
taatcaccaatta

SEQ ID NO: 137979 - DNA, 13 bp, Artificial Sequence
  Oligonucleotide for detection of SNP TSC0034509
tttattaatatat

SEQ ID NO: 137980 - DNA, 13 bp, Artificial Sequence
  Oligonucleotide for detection of SNP TSC0034509
atatattaataaa

SEQ ID NO: 137981 - DNA, 13 bp, Artificial Sequence
  Oligonucleotide for detection of SNP TSC0034509
tttattgatatat

SEQ ID NO: 137982 - DNA, 13 bp, Artificial Sequence
  Oligonucleotide for detection of SNP TSC0034509
atatatcaataaa

SEQ ID NO: 137983 - DNA, 13 bp, Artificial Sequence
  Oligonucleotide for detection of SNP TSC0034510
tatattaggtatt

SEQ ID NO: 137984 - DNA, 13 bp, Artificial Sequence
  Oligonucleotide for detection of SNP TSC0034510
aatacctaatata

SEQ ID NO: 137985 - DNA, 13 bp, Artificial Sequence
  Oligonucleotide for detection of SNP TSC0034510
tatattgggtatt

SEQ ID NO: 137986 - DNA, 13 bp, Artificial Sequence
  Oligonucleotide for detection of SNP TSC0034510
aatacccaatata

SEQ ID NO: 137987 - DNA, 13 bp, Artificial Sequence
  Oligonucleotide for detection of SNP TSC0034520
attttgaaaatgt

SEQ ID NO: 137988 - DNA, 13 bp, Artificial Sequence
  Oligonucleotide for detection of SNP TSC0034520
acattttcaaaat

SEQ ID NO: 137989 - DNA, 13 bp, Artificial Sequence
  Oligonucleotide for detection of SNP TSC0034520
attttgtaaatgt

SEQ ID NO: 137990 - DNA, 13 bp, Artificial Sequence
  Oligonucleotide for detection of SNP TSC0034520
acatttacaaaat

SEQ ID NO: 137991 - DNA, 13 bp, Artificial Sequence
  Oligonucleotide for detection of SNP TSC0034520
atatttttagaat

SEQ ID NO: 137992 - DNA, 13 bp, Artificial Sequence
  Oligonucleotide for detection of SNP TSC0034520
attctaaaaatat

SEQ ID NO: 137993 - DNA, 13 bp, Artificial Sequence
  Oligonucleotide for detection of SNP TSC0034520
atatttgtagaat

SEQ ID NO: 137994 - DNA, 13 bp, Artificial Sequence
  Oligonucleotide for detection of SNP TSC0034520
attctacaaatat

SEQ ID NO: 137995 - DNA, 13 bp, Artificial Sequence
  Oligonucleotide for detection of SNP TSC0034522
tgtgtttgtgtgg

SEQ ID NO: 137996 - DNA, 13 bp, Artificial Sequence
  Oligonucleotide for detection of SNP TSC0034522
ccacacaaacaca

SEQ ID NO: 137997 - DNA, 13 bp, Artificial Sequence
  Oligonucleotide for detection of SNP TSC0034522
tgtgttcgtgtgg

SEQ ID NO: 137998 - DNA, 13 bp, Artificial Sequence
  Oligonucleotide for detection of SNP TSC0034522
ccacacgaacaca

SEQ ID NO: 137999 - DNA, 13 bp, Artificial Sequence
  Oligonucleotide for detection of SNP TSC0034524
atttggaggttty

SEQ ID NO: 138000 - DNA, 13 bp, Artificial Sequence
  Oligonucleotide for detection of SNP TSC0034524
raaacctccaaat

SEQ ID NO: 138001 - DNA, 13 bp, Artificial Sequence
  Oligonucleotide for detection of SNP TSC0034524
atttgggggttty

SEQ ID NO: 138002 - DNA, 13 bp, Artificial Sequence
  Oligonucleotide for detection of SNP TSC0034524
raaacccccaaat

SEQ ID NO: 138003 - DNA, 13 bp, Artificial Sequence
  Oligonucleotide for detection of SNP TSC0034525
ggagttaaagtay

SEQ ID NO: 138004 - DNA, 13 bp, Artificial Sequence
  Oligonucleotide for detection of SNP TSC0034525
rtactttaactcc

SEQ ID NO: 138005 - DNA, 13 bp, Artificial Sequence
  Oligonucleotide for detection of SNP TSC0034525
ggagtttaagtay

SEQ ID NO: 138006 - DNA, 13 bp, Artificial Sequence
  Oligonucleotide for detection of SNP TSC0034525
rtacttaaactcc

SEQ ID NO: 138007 - DNA, 13 bp, Artificial Sequence
  Oligonucleotide for detection of SNP TSC0034525
gtgttttggttty

SEQ ID NO: 138008 - DNA, 13 bp, Artificial Sequence
  Oligonucleotide for detection of SNP TSC0034525
raaaccaaaacac

SEQ ID NO: 138009 - DNA, 13 bp, Artificial Sequence
  Oligonucleotide for detection of SNP TSC0034525
gtgtttgggttty

SEQ ID NO: 138010 - DNA, 13 bp, Artificial Sequence
  Oligonucleotide for detection of SNP TSC0034525
raaacccaaacac

SEQ ID NO: 138011 - DNA, 13 bp, Artificial Sequence
  Oligonucleotide for detection of SNP TSC0034528
tgttatgttaaat

SEQ ID NO: 138012 - DNA, 13 bp, Artificial Sequence
  Oligonucleotide for detection of SNP TSC0034528
atttaacataaca

SEQ ID NO: 138013 - DNA, 13 bp, Artificial Sequence
  Oligonucleotide for detection of SNP TSC0034528
tgttatattaaat

SEQ ID NO: 138014 - DNA, 13 bp, Artificial Sequence
  Oligonucleotide for detection of SNP TSC0034528
atttaatataaca

SEQ ID NO: 138015 - DNA, 13 bp, Artificial Sequence
  Oligonucleotide for detection of SNP TSC0034529
agttatagttgta

SEQ ID NO: 138016 - DNA, 13 bp, Artificial Sequence
  Oligonucleotide for detection of SNP TSC0034529
tacaactataact

SEQ ID NO: 138017 - DNA, 13 bp, Artificial Sequence
  Oligonucleotide for detection of SNP TSC0034529
agttattgttgta

SEQ ID NO: 138018 - DNA, 13 bp, Artificial Sequence
  Oligonucleotide for detection of SNP TSC0034529
tacaacaataact

SEQ ID NO: 138019 - DNA, 13 bp, Artificial Sequence
  Oligonucleotide for detection of SNP TSC0034529
agttatcgttgta

SEQ ID NO: 138020 - DNA, 13 bp, Artificial Sequence
  Oligonucleotide for detection of SNP TSC0034529
tacaacgataact

SEQ ID NO: 138021 - DNA, 13 bp, Artificial Sequence
  Oligonucleotide for detection of SNP TSC0034529
tataattatgatt

SEQ ID NO: 138022 - DNA, 13 bp, Artificial Sequence
  Oligonucleotide for detection of SNP TSC0034529
aatcataattata

SEQ ID NO: 138023 - DNA, 13 bp, Artificial Sequence
  Oligonucleotide for detection of SNP TSC0034529
tataatgatgatt

SEQ ID NO: 138024 - DNA, 13 bp, Artificial Sequence
  Oligonucleotide for detection of SNP TSC0034529
aatcatcattata

SEQ ID NO: 138025 - DNA, 13 bp, Artificial Sequence
  Oligonucleotide for detection of SNP TSC0034529
tataacgatgatt

SEQ ID NO: 138026 - DNA, 13 bp, Artificial Sequence
  Oligonucleotide for detection of SNP TSC0034529
aatcatcgttata

SEQ ID NO: 138027 - DNA, 13 bp, Artificial Sequence
  Oligonucleotide for detection of SNP TSC0034531
ggttgaagggggy

SEQ ID NO: 138028 - DNA, 13 bp, Artificial Sequence
  Oligonucleotide for detection of SNP TSC0034531
rcccccttcaacc

SEQ ID NO: 138029 - DNA, 13 bp, Artificial Sequence
  Oligonucleotide for detection of SNP TSC0034531
ggttgaggggggy

SEQ ID NO: 138030 - DNA, 13 bp, Artificial Sequence
  Oligonucleotide for detection of SNP TSC0034531
rcccccctcaacc

SEQ ID NO: 138031 - DNA, 13 bp, Artificial Sequence
  Oligonucleotide for detection of SNP TSC0034531
ggtcgaagggggy

SEQ ID NO: 138032 - DNA, 13 bp, Artificial Sequence
  Oligonucleotide for detection of SNP TSC0034531
rcccccttcgacc

SEQ ID NO: 138033 - DNA, 13 bp, Artificial Sequence
  Oligonucleotide for detection of SNP TSC0034531
ggtcgaggggggy

SEQ ID NO: 138034 - DNA, 13 bp, Artificial Sequence
  Oligonucleotide for detection of SNP TSC0034531
rcccccctcgacc

SEQ ID NO: 138035 - DNA, 13 bp, Artificial Sequence
  Oligonucleotide for detection of SNP TSC0034532
atgaagtgatgga

SEQ ID NO: 138036 - DNA, 13 bp, Artificial Sequence
  Oligonucleotide for detection of SNP TSC0034532
tccatcacttcat

SEQ ID NO: 138037 - DNA, 13 bp, Artificial Sequence
  Oligonucleotide for detection of SNP TSC0034532
atgaagggatgga

SEQ ID NO: 138038 - DNA, 13 bp, Artificial Sequence
  Oligonucleotide for detection of SNP TSC0034532
tccatcccttcat

SEQ ID NO: 138039 - DNA, 13 bp, Artificial Sequence
  Oligonucleotide for detection of SNP TSC0034533
aagttaatatgaa

SEQ ID NO: 138040 - DNA, 13 bp, Artificial Sequence
  Oligonucleotide for detection of SNP TSC0034533
ttcatattaactt

SEQ ID NO: 138041 - DNA, 13 bp, Artificial Sequence
  Oligonucleotide for detection of SNP TSC0034533
aagttagtatgaa

SEQ ID NO: 138042 - DNA, 13 bp, Artificial Sequence
  Oligonucleotide for detection of SNP TSC0034533
ttcatactaactt

SEQ ID NO: 138043 - DNA, 13 bp, Artificial Sequence
  Oligonucleotide for detection of SNP TSC0034534
attaatgtaatat

SEQ ID NO: 138044 - DNA, 13 bp, Artificial Sequence
  Oligonucleotide for detection of SNP TSC0034534
atattacattaat

SEQ ID NO: 138045 - DNA, 13 bp, Artificial Sequence
  Oligonucleotide for detection of SNP TSC0034534
attaatataatat

SEQ ID NO: 138046 - DNA, 13 bp, Artificial Sequence
  Oligonucleotide for detection of SNP TSC0034534
atattatattaat

SEQ ID NO: 138047 - DNA, 13 bp, Artificial Sequence
  Oligonucleotide for detection of SNP TSC0034536
tttattataaagg

SEQ ID NO: 138048 - DNA, 13 bp, Artificial Sequence
  Oligonucleotide for detection of SNP TSC0034536
cctttataataaa

SEQ ID NO: 138049 - DNA, 13 bp, Artificial Sequence
  Oligonucleotide for detection of SNP TSC0034536
tttattttaaagg

SEQ ID NO: 138050 - DNA, 13 bp, Artificial Sequence
  Oligonucleotide for detection of SNP TSC0034536
cctttaaaataaa

SEQ ID NO: 138051 - DNA, 13 bp, Artificial Sequence
  Oligonucleotide for detection of SNP TSC0034536
tttttgtaataga

SEQ ID NO: 138052 - DNA, 13 bp, Artificial Sequence
  Oligonucleotide for detection of SNP TSC0034536
tctattacaaaaa

SEQ ID NO: 138053 - DNA, 13 bp, Artificial Sequence
  Oligonucleotide for detection of SNP TSC0034536
tttttgaaataga

SEQ ID NO: 138054 - DNA, 13 bp, Artificial Sequence
  Oligonucleotide for detection of SNP TSC0034536
tctatttcaaaaa

SEQ ID NO: 138055 - DNA, 13 bp, Artificial Sequence
  Oligonucleotide for detection of SNP TSC0034537
tgtttggtaggay

SEQ ID NO: 138056 - DNA, 13 bp, Artificial Sequence
  Oligonucleotide for detection of SNP TSC0034537
rtcctaccaaaca

SEQ ID NO: 138057 - DNA, 13 bp, Artificial Sequence
  Oligonucleotide for detection of SNP TSC0034537
tgtttgataggay

SEQ ID NO: 138058 - DNA, 13 bp, Artificial Sequence
  Oligonucleotide for detection of SNP TSC0034537
rtcctatcaaaca

SEQ ID NO: 138059 - DNA, 13 bp, Artificial Sequence
  Oligonucleotide for detection of SNP TSC0034542
tattattattaay

SEQ ID NO: 138060 - DNA, 13 bp, Artificial Sequence
  Oligonucleotide for detection of SNP TSC0034542
rttaataataata

SEQ ID NO: 138061 - DNA, 13 bp, Artificial Sequence
  Oligonucleotide for detection of SNP TSC0034542
tattatgattaay

SEQ ID NO: 138062 - DNA, 13 bp, Artificial Sequence
  Oligonucleotide for detection of SNP TSC0034542
rttaatcataata

SEQ ID NO: 138063 - DNA, 13 bp, Artificial Sequence
  Oligonucleotide for detection of SNP TSC0034542
gttaatgataatg

SEQ ID NO: 138064 - DNA, 13 bp, Artificial Sequence
  Oligonucleotide for detection of SNP TSC0034542
cattatcattaac

SEQ ID NO: 138065 - DNA, 13 bp, Artificial Sequence
  Oligonucleotide for detection of SNP TSC0034542
gttaattataatg

SEQ ID NO: 138066 - DNA, 13 bp, Artificial Sequence
  Oligonucleotide for detection of SNP TSC0034542
cattataattaac

SEQ ID NO: 138067 - DNA, 13 bp, Artificial Sequence
  Oligonucleotide for detection of SNP TSC0034544
taaagtgagatty

SEQ ID NO: 138068 - DNA, 13 bp, Artificial Sequence
  Oligonucleotide for detection of SNP TSC0034544
raatctcacttta

SEQ ID NO: 138069 - DNA, 13 bp, Artificial Sequence
  Oligonucleotide for detection of SNP TSC0034544
taaagtaagatty

SEQ ID NO: 138070 - DNA, 13 bp, Artificial Sequence
  Oligonucleotide for detection of SNP TSC0034544
raatcttacttta

SEQ ID NO: 138071 - DNA, 13 bp, Artificial Sequence
  Oligonucleotide for detection of SNP TSC0034544
taaagcgagatty

SEQ ID NO: 138072 - DNA, 13 bp, Artificial Sequence
  Oligonucleotide for detection of SNP TSC0034544
raatctcgcttta

SEQ ID NO: 138073 - DNA, 13 bp, Artificial Sequence
  Oligonucleotide for detection of SNP TSC0034550
taatttgtatgta

SEQ ID NO: 138074 - DNA, 13 bp, Artificial Sequence
  Oligonucleotide for detection of SNP TSC0034550
tacatacaaatta

SEQ ID NO: 138075 - DNA, 13 bp, Artificial Sequence
  Oligonucleotide for detection of SNP TSC0034550
taatttatatgta

SEQ ID NO: 138076 - DNA, 13 bp, Artificial Sequence
  Oligonucleotide for detection of SNP TSC0034550
tacatataaatta

SEQ ID NO: 138077 - DNA, 13 bp, Artificial Sequence
  Oligonucleotide for detection of SNP TSC0034550
taatttgtacgta

SEQ ID NO: 138078 - DNA, 13 bp, Artificial Sequence
  Oligonucleotide for detection of SNP TSC0034550
tacgtacaaatta

SEQ ID NO: 138079 - DNA, 13 bp, Artificial Sequence
  Oligonucleotide for detection of SNP TSC0034550
taatttatacgta

SEQ ID NO: 138080 - DNA, 13 bp, Artificial Sequence
  Oligonucleotide for detection of SNP TSC0034550
tacgtataaatta

SEQ ID NO: 138081 - DNA, 13 bp, Artificial Sequence
  Oligonucleotide for detection of SNP TSC0034556
tgatattgtttta

SEQ ID NO: 138082 - DNA, 13 bp, Artificial Sequence
  Oligonucleotide for detection of SNP TSC0034556
taaaacaatatca

SEQ ID NO: 138083 - DNA, 13 bp, Artificial Sequence
  Oligonucleotide for detection of SNP TSC0034556
tgatatcgtttta

SEQ ID NO: 138084 - DNA, 13 bp, Artificial Sequence
  Oligonucleotide for detection of SNP TSC0034556
taaaacgatatca

SEQ ID NO: 138085 - DNA, 13 bp, Artificial Sequence
  Oligonucleotide for detection of SNP TSC0034556
tggaatgatatta

SEQ ID NO: 138086 - DNA, 13 bp, Artificial Sequence
  Oligonucleotide for detection of SNP TSC0034556
taatatcattcca

SEQ ID NO: 138087 - DNA, 13 bp, Artificial Sequence
  Oligonucleotide for detection of SNP TSC0034556
tggaacgatatta

SEQ ID NO: 138088 - DNA, 13 bp, Artificial Sequence
  Oligonucleotide for detection of SNP TSC0034556
taatatcgttcca

SEQ ID NO: 138089 - DNA, 13 bp, Artificial Sequence
  Oligonucleotide for detection of SNP TSC0034560
tgtatatgggttt

SEQ ID NO: 138090 - DNA, 13 bp, Artificial Sequence
  Oligonucleotide for detection of SNP TSC0034560
aaacccatataca

SEQ ID NO: 138091 - DNA, 13 bp, Artificial Sequence
  Oligonucleotide for detection of SNP TSC0034560
tgtatacgggttt

SEQ ID NO: 138092 - DNA, 13 bp, Artificial Sequence
  Oligonucleotide for detection of SNP TSC0034560
aaacccgtataca

SEQ ID NO: 138093 - DNA, 13 bp, Artificial Sequence
  Oligonucleotide for detection of SNP TSC0034560
aaatttgtgtgta

SEQ ID NO: 138094 - DNA, 13 bp, Artificial Sequence
  Oligonucleotide for detection of SNP TSC0034560
tacacacaaattt

SEQ ID NO: 138095 - DNA, 13 bp, Artificial Sequence
  Oligonucleotide for detection of SNP TSC0034560
aaatttatgtgta

SEQ ID NO: 138096 - DNA, 13 bp, Artificial Sequence
  Oligonucleotide for detection of SNP TSC0034560
tacacataaattt

SEQ ID NO: 138097 - DNA, 13 bp, Artificial Sequence
  Oligonucleotide for detection of SNP TSC0034560
aaattcgtgtgta

SEQ ID NO: 138098 - DNA, 13 bp, Artificial Sequence
  Oligonucleotide for detection of SNP TSC0034560
tacacacgaattt

SEQ ID NO: 138099 - DNA, 13 bp, Artificial Sequence
  Oligonucleotide for detection of SNP TSC0034562
tttgtagaaatay

SEQ ID NO: 138100 - DNA, 13 bp, Artificial Sequence
  Oligonucleotide for detection of SNP TSC0034562
rtatttctacaaa

SEQ ID NO: 138101 - DNA, 13 bp, Artificial Sequence
  Oligonucleotide for detection of SNP TSC0034562
tttgtaaaaatay

SEQ ID NO: 138102 - DNA, 13 bp, Artificial Sequence
  Oligonucleotide for detection of SNP TSC0034562
rtatttttacaaa

SEQ ID NO: 138103 - DNA, 13 bp, Artificial Sequence
  Oligonucleotide for detection of SNP TSC0034564
cgttttgttgtty

SEQ ID NO: 138104 - DNA, 13 bp, Artificial Sequence
  Oligonucleotide for detection of SNP TSC0034564
raacaacaaaacg

SEQ ID NO: 138105 - DNA, 13 bp, Artificial Sequence
  Oligonucleotide for detection of SNP TSC0034564
cgttttattgtty

SEQ ID NO: 138106 - DNA, 13 bp, Artificial Sequence
  Oligonucleotide for detection of SNP TSC0034564
raacaataaaacg

SEQ ID NO: 138107 - DNA, 13 bp, Artificial Sequence
  Oligonucleotide for detection of SNP TSC0034564
tgttttgtcgtty

SEQ ID NO: 138108 - DNA, 13 bp, Artificial Sequence
  Oligonucleotide for detection of SNP TSC0034564
raacgacaaaaca

SEQ ID NO: 138109 - DNA, 13 bp, Artificial Sequence
  Oligonucleotide for detection of SNP TSC0034564
tgttttatcgtty

SEQ ID NO: 138110 - DNA, 13 bp, Artificial Sequence
  Oligonucleotide for detection of SNP TSC0034564
raacgataaaaca

SEQ ID NO: 138111 - DNA, 13 bp, Artificial Sequence
  Oligonucleotide for detection of SNP TSC0034564
cgttttgtcgtty

SEQ ID NO: 138112 - DNA, 13 bp, Artificial Sequence
  Oligonucleotide for detection of SNP TSC0034564
raacgacaaaacg

SEQ ID NO: 138113 - DNA, 13 bp, Artificial Sequence
  Oligonucleotide for detection of SNP TSC0034564
cgttttatcgtty

SEQ ID NO: 138114 - DNA, 13 bp, Artificial Sequence
  Oligonucleotide for detection of SNP TSC0034564
raacgataaaacg

SEQ ID NO: 138115 - DNA, 13 bp, Artificial Sequence
  Oligonucleotide for detection of SNP TSC0034565
gaagttaaataay

SEQ ID NO: 138116 - DNA, 13 bp, Artificial Sequence
  Oligonucleotide for detection of SNP TSC0034565
rttatttaacttc

SEQ ID NO: 138117 - DNA, 13 bp, Artificial Sequence
  Oligonucleotide for detection of SNP TSC0034565
gaagttgaataay

SEQ ID NO: 138118 - DNA, 13 bp, Artificial Sequence
  Oligonucleotide for detection of SNP TSC0034565
rttattcaacttc

SEQ ID NO: 138119 - DNA, 13 bp, Artificial Sequence
  Oligonucleotide for detection of SNP TSC0034565
gaagtcgaataay

SEQ ID NO: 138120 - DNA, 13 bp, Artificial Sequence
  Oligonucleotide for detection of SNP TSC0034565
rttattcgacttc

SEQ ID NO: 138121 - DNA, 13 bp, Artificial Sequence
  Oligonucleotide for detection of SNP TSC0034566
attttatagtgga

SEQ ID NO: 138122 - DNA, 13 bp, Artificial Sequence
  Oligonucleotide for detection of SNP TSC0034566
tccactataaaat

SEQ ID NO: 138123 - DNA, 13 bp, Artificial Sequence
  Oligonucleotide for detection of SNP TSC0034566
attttagagtgga

SEQ ID NO: 138124 - DNA, 13 bp, Artificial Sequence
  Oligonucleotide for detection of SNP TSC0034566
tccactctaaaat

SEQ ID NO: 138125 - DNA, 13 bp, Artificial Sequence
  Oligonucleotide for detection of SNP TSC0034566
tttattgtagagt

SEQ ID NO: 138126 - DNA, 13 bp, Artificial Sequence
  Oligonucleotide for detection of SNP TSC0034566
actctacaataaa

SEQ ID NO: 138127 - DNA, 13 bp, Artificial Sequence
  Oligonucleotide for detection of SNP TSC0034566
tttattttagagt

SEQ ID NO: 138128 - DNA, 13 bp, Artificial Sequence
  Oligonucleotide for detection of SNP TSC0034566
actctaaaataaa

SEQ ID NO: 138129 - DNA, 13 bp, Artificial Sequence
  Oligonucleotide for detection of SNP TSC0034569
ataaaaagaaata

SEQ ID NO: 138130 - DNA, 13 bp, Artificial Sequence
  Oligonucleotide for detection of SNP TSC0034569
tatttctttttat

SEQ ID NO: 138131 - DNA, 13 bp, Artificial Sequence
  Oligonucleotide for detection of SNP TSC0034569
ataaaatgaaata

SEQ ID NO: 138132 - DNA, 13 bp, Artificial Sequence
  Oligonucleotide for detection of SNP TSC0034569
tatttcattttat

SEQ ID NO: 138133 - DNA, 13 bp, Artificial Sequence
  Oligonucleotide for detection of SNP TSC0034569
ataaaacgaaata

SEQ ID NO: 138134 - DNA, 13 bp, Artificial Sequence
  Oligonucleotide for detection of SNP TSC0034569
tatttcgttttat

SEQ ID NO: 138135 - DNA, 13 bp, Artificial Sequence
  Oligonucleotide for detection of SNP TSC0034572
agtaagtgaagga

SEQ ID NO: 138136 - DNA, 13 bp, Artificial Sequence
  Oligonucleotide for detection of SNP TSC0034572
tccttcacttact

SEQ ID NO: 138137 - DNA, 13 bp, Artificial Sequence
  Oligonucleotide for detection of SNP TSC0034572
agtaagcgaagga

SEQ ID NO: 138138 - DNA, 13 bp, Artificial Sequence
  Oligonucleotide for detection of SNP TSC0034572
tccttcgcttact

SEQ ID NO: 138139 - DNA, 13 bp, Artificial Sequence
  Oligonucleotide for detection of SNP TSC0034576
tgattttaaaaag

SEQ ID NO: 138140 - DNA, 13 bp, Artificial Sequence
  Oligonucleotide for detection of SNP TSC0034576
ctttttaaaatca

SEQ ID NO: 138141 - DNA, 13 bp, Artificial Sequence
  Oligonucleotide for detection of SNP TSC0034576
tgatttaaaaaag

SEQ ID NO: 138142 - DNA, 13 bp, Artificial Sequence
  Oligonucleotide for detection of SNP TSC0034576
cttttttaaatca

SEQ ID NO: 138143 - DNA, 13 bp, Artificial Sequence
  Oligonucleotide for detection of SNP TSC0034579
gaggaagtgatta

SEQ ID NO: 138144 - DNA, 13 bp, Artificial Sequence
  Oligonucleotide for detection of SNP TSC0034579
taatcacttcctc

SEQ ID NO: 138145 - DNA, 13 bp, Artificial Sequence
  Oligonucleotide for detection of SNP TSC0034579
gaggaaatgatta

SEQ ID NO: 138146 - DNA, 13 bp, Artificial Sequence
  Oligonucleotide for detection of SNP TSC0034579
taatcatttcctc

SEQ ID NO: 138147 - DNA, 13 bp, Artificial Sequence
  Oligonucleotide for detection of SNP TSC0034581
ttagattgatgtg

SEQ ID NO: 138148 - DNA, 13 bp, Artificial Sequence
  Oligonucleotide for detection of SNP TSC0034581
cacatcaatctaa

SEQ ID NO: 138149 - DNA, 13 bp, Artificial Sequence
  Oligonucleotide for detection of SNP TSC0034581
ttagatcgatgtg

SEQ ID NO: 138150 - DNA, 13 bp, Artificial Sequence
  Oligonucleotide for detection of SNP TSC0034581
cacatcgatctaa

SEQ ID NO: 138151 - DNA, 13 bp, Artificial Sequence
  Oligonucleotide for detection of SNP TSC0034581
tatattgatttgg

SEQ ID NO: 138152 - DNA, 13 bp, Artificial Sequence
  Oligonucleotide for detection of SNP TSC0034581
ccaaatcaatata

SEQ ID NO: 138153 - DNA, 13 bp, Artificial Sequence
  Oligonucleotide for detection of SNP TSC0034581
tatattaatttgg

SEQ ID NO: 138154 - DNA, 13 bp, Artificial Sequence
  Oligonucleotide for detection of SNP TSC0034581
ccaaattaatata

SEQ ID NO: 138155 - DNA, 13 bp, Artificial Sequence
  Oligonucleotide for detection of SNP TSC0034581
tatatcgatttgg

SEQ ID NO: 138156 - DNA, 13 bp, Artificial Sequence
  Oligonucleotide for detection of SNP TSC0034581
ccaaatcgatata

SEQ ID NO: 138157 - DNA, 13 bp, Artificial Sequence
  Oligonucleotide for detection of SNP TSC0034582
gaaaaagaatatg

SEQ ID NO: 138158 - DNA, 13 bp, Artificial Sequence
  Oligonucleotide for detection of SNP TSC0034582
catattctttttc

SEQ ID NO: 138159 - DNA, 13 bp, Artificial Sequence
  Oligonucleotide for detection of SNP TSC0034582
gaaaaaaaatatg

SEQ ID NO: 138160 - DNA, 13 bp, Artificial Sequence
  Oligonucleotide for detection of SNP TSC0034582
catattttttttc

SEQ ID NO: 138161 - DNA, 13 bp, Artificial Sequence
  Oligonucleotide for detection of SNP TSC0034583
gttattttttgaa

SEQ ID NO: 138162 - DNA, 13 bp, Artificial Sequence
  Oligonucleotide for detection of SNP TSC0034583
ttcaaaaaataac

SEQ ID NO: 138163 - DNA, 13 bp, Artificial Sequence
  Oligonucleotide for detection of SNP TSC0034583
gttattgtttgaa

SEQ ID NO: 138164 - DNA, 13 bp, Artificial Sequence
  Oligonucleotide for detection of SNP TSC0034583
ttcaaacaataac

SEQ ID NO: 138165 - DNA, 13 bp, Artificial Sequence
  Oligonucleotide for detection of SNP TSC0034583
tttaaagaatgay

SEQ ID NO: 138166 - DNA, 13 bp, Artificial Sequence
  Oligonucleotide for detection of SNP TSC0034583
rtcattctttaaa

SEQ ID NO: 138167 - DNA, 13 bp, Artificial Sequence
  Oligonucleotide for detection of SNP TSC0034583
tttaaataatgay

SEQ ID NO: 138168 - DNA, 13 bp, Artificial Sequence
  Oligonucleotide for detection of SNP TSC0034583
rtcattatttaaa

SEQ ID NO: 138169 - DNA, 13 bp, Artificial Sequence
  Oligonucleotide for detection of SNP TSC0034584
gtatatttgtaty

SEQ ID NO: 138170 - DNA, 13 bp, Artificial Sequence
  Oligonucleotide for detection of SNP TSC0034584
ratacaaatatac

SEQ ID NO: 138171 - DNA, 13 bp, Artificial Sequence
  Oligonucleotide for detection of SNP TSC0034584
gtatatgtgtaty

SEQ ID NO: 138172 - DNA, 13 bp, Artificial Sequence
  Oligonucleotide for detection of SNP TSC0034584
ratacacatatac

SEQ ID NO: 138173 - DNA, 13 bp, Artificial Sequence
  Oligonucleotide for detection of SNP TSC0034584
gtatacgtgtaty

SEQ ID NO: 138174 - DNA, 13 bp, Artificial Sequence
  Oligonucleotide for detection of SNP TSC0034584
ratacacgtatac

SEQ ID NO: 138175 - DNA, 13 bp, Artificial Sequence
  Oligonucleotide for detection of SNP TSC0034584
gatataggtatgy

SEQ ID NO: 138176 - DNA, 13 bp, Artificial Sequence
  Oligonucleotide for detection of SNP TSC0034584
rcatacctatatc

SEQ ID NO: 138177 - DNA, 13 bp, Artificial Sequence
  Oligonucleotide for detection of SNP TSC0034584
gatatatgtatgy

SEQ ID NO: 138178 - DNA, 13 bp, Artificial Sequence
  Oligonucleotide for detection of SNP TSC0034584
rcatacatatatc

SEQ ID NO: 138179 - DNA, 13 bp, Artificial Sequence
  Oligonucleotide for detection of SNP TSC0034584
gatatacgtatgy

SEQ ID NO: 138180 - DNA, 13 bp, Artificial Sequence
  Oligonucleotide for detection of SNP TSC0034584
rcatacgtatatc

SEQ ID NO: 138181 - DNA, 13 bp, Artificial Sequence
  Oligonucleotide for detection of SNP TSC0034585
tatgtagtattat

SEQ ID NO: 138182 - DNA, 13 bp, Artificial Sequence
  Oligonucleotide for detection of SNP TSC0034585
ataatactacata

SEQ ID NO: 138183 - DNA, 13 bp, Artificial Sequence
  Oligonucleotide for detection of SNP TSC0034585
tatgtaatattat

SEQ ID NO: 138184 - DNA, 13 bp, Artificial Sequence
  Oligonucleotide for detection of SNP TSC0034585
ataatattacata

SEQ ID NO: 138185 - DNA, 13 bp, Artificial Sequence
  Oligonucleotide for detection of SNP TSC0034586
taaaagttaaaaa

SEQ ID NO: 138186 - DNA, 13 bp, Artificial Sequence
  Oligonucleotide for detection of SNP TSC0034586
tttttaactttta

SEQ ID NO: 138187 - DNA, 13 bp, Artificial Sequence
  Oligonucleotide for detection of SNP TSC0034586
taaaagataaaaa

SEQ ID NO: 138188 - DNA, 13 bp, Artificial Sequence
  Oligonucleotide for detection of SNP TSC0034586
tttttatctttta

SEQ ID NO: 138189 - DNA, 13 bp, Artificial Sequence
  Oligonucleotide for detection of SNP TSC0034587
atttgggttttag

SEQ ID NO: 138190 - DNA, 13 bp, Artificial Sequence
  Oligonucleotide for detection of SNP TSC0034587
ctaaaacccaaat

SEQ ID NO: 138191 - DNA, 13 bp, Artificial Sequence
  Oligonucleotide for detection of SNP TSC0034587
atttggtttttag

SEQ ID NO: 138192 - DNA, 13 bp, Artificial Sequence
  Oligonucleotide for detection of SNP TSC0034587
ctaaaaaccaaat

SEQ ID NO: 138193 - DNA, 13 bp, Artificial Sequence
  Oligonucleotide for detection of SNP TSC0034587
ttggagtttaggt

SEQ ID NO: 138194 - DNA, 13 bp, Artificial Sequence
  Oligonucleotide for detection of SNP TSC0034587
acctaaactccaa

SEQ ID NO: 138195 - DNA, 13 bp, Artificial Sequence
  Oligonucleotide for detection of SNP TSC0034587
ttggagattaggt

SEQ ID NO: 138196 - DNA, 13 bp, Artificial Sequence
  Oligonucleotide for detection of SNP TSC0034587
acctaatctccaa

SEQ ID NO: 138197 - DNA, 13 bp, Artificial Sequence
  Oligonucleotide for detection of SNP TSC0034588
aagtagttaggay

SEQ ID NO: 138198 - DNA, 13 bp, Artificial Sequence
  Oligonucleotide for detection of SNP TSC0034588
rtcctaactactt

SEQ ID NO: 138199 - DNA, 13 bp, Artificial Sequence
  Oligonucleotide for detection of SNP TSC0034588
aagtaggtaggay

SEQ ID NO: 138200 - DNA, 13 bp, Artificial Sequence
  Oligonucleotide for detection of SNP TSC0034588
rtcctacctactt

SEQ ID NO: 138201 - DNA, 13 bp, Artificial Sequence
  Oligonucleotide for detection of SNP TSC0034592
gatgggtgggaga

SEQ ID NO: 138202 - DNA, 13 bp, Artificial Sequence
  Oligonucleotide for detection of SNP TSC0034592
tctcccacccatc

SEQ ID NO: 138203 - DNA, 13 bp, Artificial Sequence
  Oligonucleotide for detection of SNP TSC0034592
gatgggcgggaga

SEQ ID NO: 138204 - DNA, 13 bp, Artificial Sequence
  Oligonucleotide for detection of SNP TSC0034592
tctcccgcccatc

SEQ ID NO: 138205 - DNA, 13 bp, Artificial Sequence
  Oligonucleotide for detection of SNP TSC0034592
ttttttgtttaty

SEQ ID NO: 138206 - DNA, 13 bp, Artificial Sequence
  Oligonucleotide for detection of SNP TSC0034592
rataaacaaaaaa

SEQ ID NO: 138207 - DNA, 13 bp, Artificial Sequence
  Oligonucleotide for detection of SNP TSC0034592
tttttcgtttaty

SEQ ID NO: 138208 - DNA, 13 bp, Artificial Sequence
  Oligonucleotide for detection of SNP TSC0034592
rataaacgaaaaa

SEQ ID NO: 138209 - DNA, 13 bp, Artificial Sequence
  Oligonucleotide for detection of SNP TSC0034593
tttaagaaggagg

SEQ ID NO: 138210 - DNA, 13 bp, Artificial Sequence
  Oligonucleotide for detection of SNP TSC0034593
cctccttcttaaa

SEQ ID NO: 138211 - DNA, 13 bp, Artificial Sequence
  Oligonucleotide for detection of SNP TSC0034593
tttaaggaggagg

SEQ ID NO: 138212 - DNA, 13 bp, Artificial Sequence
  Oligonucleotide for detection of SNP TSC0034593
cctcctccttaaa

SEQ ID NO: 138213 - DNA, 13 bp, Artificial Sequence
  Oligonucleotide for detection of SNP TSC0034594
atatgtggaatag

SEQ ID NO: 138214 - DNA, 13 bp, Artificial Sequence
  Oligonucleotide for detection of SNP TSC0034594
ctattccacatat

SEQ ID NO: 138215 - DNA, 13 bp, Artificial Sequence
  Oligonucleotide for detection of SNP TSC0034594
atatgttgaatag

SEQ ID NO: 138216 - DNA, 13 bp, Artificial Sequence
  Oligonucleotide for detection of SNP TSC0034594
ctattcaacatat

SEQ ID NO: 138217 - DNA, 13 bp, Artificial Sequence
  Oligonucleotide for detection of SNP TSC0034594
ttgttttatatgt

SEQ ID NO: 138218 - DNA, 13 bp, Artificial Sequence
  Oligonucleotide for detection of SNP TSC0034594
acatataaaacaa

SEQ ID NO: 138219 - DNA, 13 bp, Artificial Sequence
  Oligonucleotide for detection of SNP TSC0034594
ttgtttaatatgt

SEQ ID NO: 138220 - DNA, 13 bp, Artificial Sequence
  Oligonucleotide for detection of SNP TSC0034594
acatattaaacaa

SEQ ID NO: 138221 - DNA, 13 bp, Artificial Sequence
  Oligonucleotide for detection of SNP TSC0034595
gtgataatttttt

SEQ ID NO: 138222 - DNA, 13 bp, Artificial Sequence
  Oligonucleotide for detection of SNP TSC0034595
aaaaaattatcac

SEQ ID NO: 138223 - DNA, 13 bp, Artificial Sequence
  Oligonucleotide for detection of SNP TSC0034595
gtgatattttttt

SEQ ID NO: 138224 - DNA, 13 bp, Artificial Sequence
  Oligonucleotide for detection of SNP TSC0034595
aaaaaaatatcac

SEQ ID NO: 138225 - DNA, 13 bp, Artificial Sequence
  Oligonucleotide for detection of SNP TSC0034595
agaaaattattay

SEQ ID NO: 138226 - DNA, 13 bp, Artificial Sequence
  Oligonucleotide for detection of SNP TSC0034595
rtaataattttct

SEQ ID NO: 138227 - DNA, 13 bp, Artificial Sequence
  Oligonucleotide for detection of SNP TSC0034595
agaaaaatattay

SEQ ID NO: 138228 - DNA, 13 bp, Artificial Sequence
  Oligonucleotide for detection of SNP TSC0034595
rtaatatttttct

SEQ ID NO: 138229 - DNA, 13 bp, Artificial Sequence
  Oligonucleotide for detection of SNP TSC0034599
ttttatttataty

SEQ ID NO: 138230 - DNA, 13 bp, Artificial Sequence
  Oligonucleotide for detection of SNP TSC0034599
ratataaataaaa

SEQ ID NO: 138231 - DNA, 13 bp, Artificial Sequence
  Oligonucleotide for detection of SNP TSC0034599
ggtgtgtgtgagg

SEQ ID NO: 138232 - DNA, 13 bp, Artificial Sequence
  Oligonucleotide for detection of SNP TSC0034599
cctcacacacacc

SEQ ID NO: 138233 - DNA, 13 bp, Artificial Sequence
  Oligonucleotide for detection of SNP TSC0034599
ggtgtgagtgagg

SEQ ID NO: 138234 - DNA, 13 bp, Artificial Sequence
  Oligonucleotide for detection of SNP TSC0034599
cctcactcacacc

SEQ ID NO: 138235 - DNA, 13 bp, Artificial Sequence
  Oligonucleotide for detection of SNP TSC0034599
ggtgtgcgtgagg

SEQ ID NO: 138236 - DNA, 13 bp, Artificial Sequence
  Oligonucleotide for detection of SNP TSC0034599
cctcacgcacacc

SEQ ID NO: 138237 - DNA, 13 bp, Artificial Sequence
  Oligonucleotide for detection of SNP TSC0034601
gtgtgggggtggt

SEQ ID NO: 138238 - DNA, 13 bp, Artificial Sequence
  Oligonucleotide for detection of SNP TSC0034601
accacccccacac

SEQ ID NO: 138239 - DNA, 13 bp, Artificial Sequence
  Oligonucleotide for detection of SNP TSC0034601
gtgtggaggtggt

SEQ ID NO: 138240 - DNA, 13 bp, Artificial Sequence
  Oligonucleotide for detection of SNP TSC0034601
accacctccacac

SEQ ID NO: 138241 - DNA, 13 bp, Artificial Sequence
  Oligonucleotide for detection of SNP TSC0034601
gtgcgggggtggt

SEQ ID NO: 138242 - DNA, 13 bp, Artificial Sequence
  Oligonucleotide for detection of SNP TSC0034601
accacccccgcac

SEQ ID NO: 138243 - DNA, 13 bp, Artificial Sequence
  Oligonucleotide for detection of SNP TSC0034601
gtgcggaggtggt

SEQ ID NO: 138244 - DNA, 13 bp, Artificial Sequence
  Oligonucleotide for detection of SNP TSC0034601
accacctccgcac

SEQ ID NO: 138245 - DNA, 13 bp, Artificial Sequence
  Oligonucleotide for detection of SNP TSC0034601
gtgtgggggcggt

SEQ ID NO: 138246 - DNA, 13 bp, Artificial Sequence
  Oligonucleotide for detection of SNP TSC0034601
accgcccccacac

SEQ ID NO: 138247 - DNA, 13 bp, Artificial Sequence
  Oligonucleotide for detection of SNP TSC0034601
gtgtggaggcggt

SEQ ID NO: 138248 - DNA, 13 bp, Artificial Sequence
  Oligonucleotide for detection of SNP TSC0034601
accgcctccacac

SEQ ID NO: 138249 - DNA, 13 bp, Artificial Sequence
  Oligonucleotide for detection of SNP TSC0034601
gtgcgggggcggt

SEQ ID NO: 138250 - DNA, 13 bp, Artificial Sequence
  Oligonucleotide for detection of SNP TSC0034601
accgcccccgcac

SEQ ID NO: 138251 - DNA, 13 bp, Artificial Sequence
  Oligonucleotide for detection of SNP TSC0034601
gtgcggaggcggt

SEQ ID NO: 138252 - DNA, 13 bp, Artificial Sequence
  Oligonucleotide for detection of SNP TSC0034601
accgcctccgcac

SEQ ID NO: 138253 - DNA, 13 bp, Artificial Sequence
  Oligonucleotide for detection of SNP TSC0034602
taggaggttgaga

SEQ ID NO: 138254 - DNA, 13 bp, Artificial Sequence
  Oligonucleotide for detection of SNP TSC0034602
tctcaacctccta

SEQ ID NO: 138255 - DNA, 13 bp, Artificial Sequence
  Oligonucleotide for detection of SNP TSC0034606
gatattagattty

SEQ ID NO: 138256 - DNA, 13 bp, Artificial Sequence
  Oligonucleotide for detection of SNP TSC0034606
raaatctaatatc

SEQ ID NO: 138257 - DNA, 13 bp, Artificial Sequence
  Oligonucleotide for detection of SNP TSC0034606
gatattggattty

SEQ ID NO: 138258 - DNA, 13 bp, Artificial Sequence
  Oligonucleotide for detection of SNP TSC0034606
raaatccaatatc

SEQ ID NO: 138259 - DNA, 13 bp, Artificial Sequence
  Oligonucleotide for detection of SNP TSC0034606
gatatcggattty

SEQ ID NO: 138260 - DNA, 13 bp, Artificial Sequence
  Oligonucleotide for detection of SNP TSC0034606
raaatccgatatc

SEQ ID NO: 138261 - DNA, 13 bp, Artificial Sequence
  Oligonucleotide for detection of SNP TSC0034606
gaagtttggtaty

SEQ ID NO: 138262 - DNA, 13 bp, Artificial Sequence
  Oligonucleotide for detection of SNP TSC0034606
rataccaaacttc

SEQ ID NO: 138263 - DNA, 13 bp, Artificial Sequence
  Oligonucleotide for detection of SNP TSC0034606
gaagttcggtaty

SEQ ID NO: 138264 - DNA, 13 bp, Artificial Sequence
  Oligonucleotide for detection of SNP TSC0034606
rataccgaacttc

SEQ ID NO: 138265 - DNA, 13 bp, Artificial Sequence
  Oligonucleotide for detection of SNP TSC0034607
tgttgtaattgat

SEQ ID NO: 138266 - DNA, 13 bp, Artificial Sequence
  Oligonucleotide for detection of SNP TSC0034607
atcaattacaaca

SEQ ID NO: 138267 - DNA, 13 bp, Artificial Sequence
  Oligonucleotide for detection of SNP TSC0034607
tgttgtgattgat

SEQ ID NO: 138268 - DNA, 13 bp, Artificial Sequence
  Oligonucleotide for detection of SNP TSC0034607
atcaatcacaaca

SEQ ID NO: 138269 - DNA, 13 bp, Artificial Sequence
  Oligonucleotide for detection of SNP TSC0034607
tgttgcgattgat

SEQ ID NO: 138270 - DNA, 13 bp, Artificial Sequence
  Oligonucleotide for detection of SNP TSC0034607
atcaatcgcaaca

SEQ ID NO: 138271 - DNA, 13 bp, Artificial Sequence
  Oligonucleotide for detection of SNP TSC0034607
attaattgtagta

SEQ ID NO: 138272 - DNA, 13 bp, Artificial Sequence
  Oligonucleotide for detection of SNP TSC0034607
tactacaattaat

SEQ ID NO: 138273 - DNA, 13 bp, Artificial Sequence
  Oligonucleotide for detection of SNP TSC0034607
attaatcgtagta

SEQ ID NO: 138274 - DNA, 13 bp, Artificial Sequence
  Oligonucleotide for detection of SNP TSC0034607
tactacgattaat

SEQ ID NO: 138275 - DNA, 13 bp, Artificial Sequence
  Oligonucleotide for detection of SNP TSC0034608
ttgtttagggggy

SEQ ID NO: 138276 - DNA, 13 bp, Artificial Sequence
  Oligonucleotide for detection of SNP TSC0034608
rccccctaaacaa

SEQ ID NO: 138277 - DNA, 13 bp, Artificial Sequence
  Oligonucleotide for detection of SNP TSC0034608
ttgtttggggggy

SEQ ID NO: 138278 - DNA, 13 bp, Artificial Sequence
  Oligonucleotide for detection of SNP TSC0034608
rccccccaaacaa

SEQ ID NO: 138279 - DNA, 13 bp, Artificial Sequence
  Oligonucleotide for detection of SNP TSC0034608
tcgtttagggggy

SEQ ID NO: 138280 - DNA, 13 bp, Artificial Sequence
  Oligonucleotide for detection of SNP TSC0034608
rccccctaaacga

SEQ ID NO: 138281 - DNA, 13 bp, Artificial Sequence
  Oligonucleotide for detection of SNP TSC0034608
tcgtttggggggy

SEQ ID NO: 138282 - DNA, 13 bp, Artificial Sequence
  Oligonucleotide for detection of SNP TSC0034608
rccccccaaacga

SEQ ID NO: 138283 - DNA, 13 bp, Artificial Sequence
  Oligonucleotide for detection of SNP TSC0034609
gagattattaggg

SEQ ID NO: 138284 - DNA, 13 bp, Artificial Sequence
  Oligonucleotide for detection of SNP TSC0034609
ccctaataatctc

SEQ ID NO: 138285 - DNA, 13 bp, Artificial Sequence
  Oligonucleotide for detection of SNP TSC0034609
ttttggtagttty

SEQ ID NO: 138286 - DNA, 13 bp, Artificial Sequence
  Oligonucleotide for detection of SNP TSC0034609
raaactaccaaaa

SEQ ID NO: 138287 - DNA, 13 bp, Artificial Sequence
  Oligonucleotide for detection of SNP TSC0034610
ggttggagatagt

SEQ ID NO: 138288 - DNA, 13 bp, Artificial Sequence
  Oligonucleotide for detection of SNP TSC0034610
actatctccaacc

SEQ ID NO: 138289 - DNA, 13 bp, Artificial Sequence
  Oligonucleotide for detection of SNP TSC0034610
ggttggggatagt

SEQ ID NO: 138290 - DNA, 13 bp, Artificial Sequence
  Oligonucleotide for detection of SNP TSC0034610
actatccccaacc

SEQ ID NO: 138291 - DNA, 13 bp, Artificial Sequence
  Oligonucleotide for detection of SNP TSC0034612
tatttatgggaag

SEQ ID NO: 138292 - DNA, 13 bp, Artificial Sequence
  Oligonucleotide for detection of SNP TSC0034612
cttcccataaata

SEQ ID NO: 138293 - DNA, 13 bp, Artificial Sequence
  Oligonucleotide for detection of SNP TSC0034612
tatttacgggaag

SEQ ID NO: 138294 - DNA, 13 bp, Artificial Sequence
  Oligonucleotide for detection of SNP TSC0034612
cttcccgtaaata

SEQ ID NO: 138295 - DNA, 13 bp, Artificial Sequence
  Oligonucleotide for detection of SNP TSC0034612
tttttcgtaagta

SEQ ID NO: 138296 - DNA, 13 bp, Artificial Sequence
  Oligonucleotide for detection of SNP TSC0034612
tacttacgaaaaa

SEQ ID NO: 138297 - DNA, 13 bp, Artificial Sequence
  Oligonucleotide for detection of SNP TSC0034616
tatagtgttatta

SEQ ID NO: 138298 - DNA, 13 bp, Artificial Sequence
  Oligonucleotide for detection of SNP TSC0034616
taataacactata

SEQ ID NO: 138299 - DNA, 13 bp, Artificial Sequence
  Oligonucleotide for detection of SNP TSC0034616
tatagtattatta

SEQ ID NO: 138300 - DNA, 13 bp, Artificial Sequence
  Oligonucleotide for detection of SNP TSC0034616
taataatactata

SEQ ID NO: 138301 - DNA, 13 bp, Artificial Sequence
  Oligonucleotide for detection of SNP TSC0034618
gtttttatttgag

SEQ ID NO: 138302 - DNA, 13 bp, Artificial Sequence
  Oligonucleotide for detection of SNP TSC0034618
ctcaaataaaaac

SEQ ID NO: 138303 - DNA, 13 bp, Artificial Sequence
  Oligonucleotide for detection of SNP TSC0034618
gtttttttttgag

SEQ ID NO: 138304 - DNA, 13 bp, Artificial Sequence
  Oligonucleotide for detection of SNP TSC0034618
ctcaaaaaaaaac

SEQ ID NO: 138305 - DNA, 13 bp, Artificial Sequence
  Oligonucleotide for detection of SNP TSC0034618
tttaggtaagggy

SEQ ID NO: 138306 - DNA, 13 bp, Artificial Sequence
  Oligonucleotide for detection of SNP TSC0034618
rcccttacctaaa

SEQ ID NO: 138307 - DNA, 13 bp, Artificial Sequence
  Oligonucleotide for detection of SNP TSC0034618
tttagggaagggy

SEQ ID NO: 138308 - DNA, 13 bp, Artificial Sequence
  Oligonucleotide for detection of SNP TSC0034618
rcccttccctaaa

SEQ ID NO: 138309 - DNA, 13 bp, Artificial Sequence
  Oligonucleotide for detection of SNP TSC0034621
gattttgtgaaaa

SEQ ID NO: 138310 - DNA, 13 bp, Artificial Sequence
  Oligonucleotide for detection of SNP TSC0034621
ttttcacaaaatc

SEQ ID NO: 138311 - DNA, 13 bp, Artificial Sequence
  Oligonucleotide for detection of SNP TSC0034621
gattttatgaaaa

SEQ ID NO: 138312 - DNA, 13 bp, Artificial Sequence
  Oligonucleotide for detection of SNP TSC0034621
ttttcataaaatc

SEQ ID NO: 138313 - DNA, 13 bp, Artificial Sequence
  Oligonucleotide for detection of SNP TSC0034622
atgtagtgattag

SEQ ID NO: 138314 - DNA, 13 bp, Artificial Sequence
  Oligonucleotide for detection of SNP TSC0034622
ctaatcactacat

SEQ ID NO: 138315 - DNA, 13 bp, Artificial Sequence
  Oligonucleotide for detection of SNP TSC0034622
atgtagcgattag

SEQ ID NO: 138316 - DNA, 13 bp, Artificial Sequence
  Oligonucleotide for detection of SNP TSC0034622
ctaatcgctacat

SEQ ID NO: 138317 - DNA, 13 bp, Artificial Sequence
  Oligonucleotide for detection of SNP TSC0034623
tgagaaaatagaa

SEQ ID NO: 138318 - DNA, 13 bp, Artificial Sequence
  Oligonucleotide for detection of SNP TSC0034623
ttctattttctca

SEQ ID NO: 138319 - DNA, 13 bp, Artificial Sequence
  Oligonucleotide for detection of SNP TSC0034623
tgagaagatagaa

SEQ ID NO: 138320 - DNA, 13 bp, Artificial Sequence
  Oligonucleotide for detection of SNP TSC0034623
ttctatcttctca

SEQ ID NO: 138321 - DNA, 13 bp, Artificial Sequence
  Oligonucleotide for detection of SNP TSC0034625
gttttgggattty

SEQ ID NO: 138322 - DNA, 13 bp, Artificial Sequence
  Oligonucleotide for detection of SNP TSC0034625
raaatcccaaaac

SEQ ID NO: 138323 - DNA, 13 bp, Artificial Sequence
  Oligonucleotide for detection of SNP TSC0034625
gttttgtgattty

SEQ ID NO: 138324 - DNA, 13 bp, Artificial Sequence
  Oligonucleotide for detection of SNP TSC0034625
raaatcacaaaac

SEQ ID NO: 138325 - DNA, 13 bp, Artificial Sequence
  Oligonucleotide for detection of SNP TSC0034625
gaggttttagagy

SEQ ID NO: 138326 - DNA, 13 bp, Artificial Sequence
  Oligonucleotide for detection of SNP TSC0034625
rctctaaaacctc

SEQ ID NO: 138327 - DNA, 13 bp, Artificial Sequence
  Oligonucleotide for detection of SNP TSC0034625
gaggttatagagy

SEQ ID NO: 138328 - DNA, 13 bp, Artificial Sequence
  Oligonucleotide for detection of SNP TSC0034625
rctctataacctc

SEQ ID NO: 138329 - DNA, 13 bp, Artificial Sequence
  Oligonucleotide for detection of SNP TSC0034626
ttagttatattta

SEQ ID NO: 138330 - DNA, 13 bp, Artificial Sequence
  Oligonucleotide for detection of SNP TSC0034626
taaatataactaa

SEQ ID NO: 138331 - DNA, 13 bp, Artificial Sequence
  Oligonucleotide for detection of SNP TSC0034626
ttagttttattta

SEQ ID NO: 138332 - DNA, 13 bp, Artificial Sequence
  Oligonucleotide for detection of SNP TSC0034626
taaataaaactaa

SEQ ID NO: 138333 - DNA, 13 bp, Artificial Sequence
  Oligonucleotide for detection of SNP TSC0034626
tggatatagttaa

SEQ ID NO: 138334 - DNA, 13 bp, Artificial Sequence
  Oligonucleotide for detection of SNP TSC0034626
ttaactatatcca

SEQ ID NO: 138335 - DNA, 13 bp, Artificial Sequence
  Oligonucleotide for detection of SNP TSC0034626
tggatagagttaa

SEQ ID NO: 138336 - DNA, 13 bp, Artificial Sequence
  Oligonucleotide for detection of SNP TSC0034626
ttaactctatcca

SEQ ID NO: 138337 - DNA, 13 bp, Artificial Sequence
  Oligonucleotide for detection of SNP TSC0034633
gtagtagggttga

SEQ ID NO: 138338 - DNA, 13 bp, Artificial Sequence
  Oligonucleotide for detection of SNP TSC0034633
tcaaccctactac

SEQ ID NO: 138339 - DNA, 13 bp, Artificial Sequence
  Oligonucleotide for detection of SNP TSC0034633
gtagtaaggttga

SEQ ID NO: 138340 - DNA, 13 bp, Artificial Sequence
  Oligonucleotide for detection of SNP TSC0034633
tcaaccttactac

SEQ ID NO: 138341 - DNA, 13 bp, Artificial Sequence
  Oligonucleotide for detection of SNP TSC0034642
ataattgaaaaaa

SEQ ID NO: 138342 - DNA, 13 bp, Artificial Sequence
  Oligonucleotide for detection of SNP TSC0034642
ttttttcaattat

SEQ ID NO: 138343 - DNA, 13 bp, Artificial Sequence
  Oligonucleotide for detection of SNP TSC0034642
tttttttaattgt

SEQ ID NO: 138344 - DNA, 13 bp, Artificial Sequence
  Oligonucleotide for detection of SNP TSC0034642
acaattaaaaaaa

SEQ ID NO: 138345 - DNA, 13 bp, Artificial Sequence
  Oligonucleotide for detection of SNP TSC0034643
gtgtaggtagaaa

SEQ ID NO: 138346 - DNA, 13 bp, Artificial Sequence
  Oligonucleotide for detection of SNP TSC0034643
tttctacctacac

SEQ ID NO: 138347 - DNA, 13 bp, Artificial Sequence
  Oligonucleotide for detection of SNP TSC0034643
gtgtagatagaaa

SEQ ID NO: 138348 - DNA, 13 bp, Artificial Sequence
  Oligonucleotide for detection of SNP TSC0034643
tttctatctacac

SEQ ID NO: 138349 - DNA, 13 bp, Artificial Sequence
  Oligonucleotide for detection of SNP TSC0034646
aaaaaaaaaaaay

SEQ ID NO: 138350 - DNA, 13 bp, Artificial Sequence
  Oligonucleotide for detection of SNP TSC0034646
rtttttttttttt

SEQ ID NO: 138351 - DNA, 13 bp, Artificial Sequence
  Oligonucleotide for detection of SNP TSC0034646
aaaaaataaaaay

SEQ ID NO: 138352 - DNA, 13 bp, Artificial Sequence
  Oligonucleotide for detection of SNP TSC0034646
rtttttatttttt

SEQ ID NO: 138353 - DNA, 13 bp, Artificial Sequence
  Oligonucleotide for detection of SNP TSC0034647
tttagttgagagy

SEQ ID NO: 138354 - DNA, 13 bp, Artificial Sequence
  Oligonucleotide for detection of SNP TSC0034647
rctctcaactaaa

SEQ ID NO: 138355 - DNA, 13 bp, Artificial Sequence
  Oligonucleotide for detection of SNP TSC0034647
tttagtcgagagy

SEQ ID NO: 138356 - DNA, 13 bp, Artificial Sequence
  Oligonucleotide for detection of SNP TSC0034647
rctctcgactaaa

SEQ ID NO: 138357 - DNA, 13 bp, Artificial Sequence
  Oligonucleotide for detection of SNP TSC0034647
gtttttgattgaa

SEQ ID NO: 138358 - DNA, 13 bp, Artificial Sequence
  Oligonucleotide for detection of SNP TSC0034647
ttcaatcaaaaac

SEQ ID NO: 138359 - DNA, 13 bp, Artificial Sequence
  Oligonucleotide for detection of SNP TSC0034647
gtttttaattgaa

SEQ ID NO: 138360 - DNA, 13 bp, Artificial Sequence
  Oligonucleotide for detection of SNP TSC0034647
ttcaattaaaaac

SEQ ID NO: 138361 - DNA, 13 bp, Artificial Sequence
  Oligonucleotide for detection of SNP TSC0034647
gttttcgattgaa

SEQ ID NO: 138362 - DNA, 13 bp, Artificial Sequence
  Oligonucleotide for detection of SNP TSC0034647
ttcaatcgaaaac

SEQ ID NO: 138363 - DNA, 13 bp, Artificial Sequence
  Oligonucleotide for detection of SNP TSC0034649
attgagttgttty

SEQ ID NO: 138364 - DNA, 13 bp, Artificial Sequence
  Oligonucleotide for detection of SNP TSC0034649
raaacaactcaat

SEQ ID NO: 138365 - DNA, 13 bp, Artificial Sequence
  Oligonucleotide for detection of SNP TSC0034649
attgaggtgttty

SEQ ID NO: 138366 - DNA, 13 bp, Artificial Sequence
  Oligonucleotide for detection of SNP TSC0034649
raaacacctcaat

SEQ ID NO: 138367 - DNA, 13 bp, Artificial Sequence
  Oligonucleotide for detection of SNP TSC0034649
ggagtagtttaat

SEQ ID NO: 138368 - DNA, 13 bp, Artificial Sequence
  Oligonucleotide for detection of SNP TSC0034649
attaaactactcc

SEQ ID NO: 138369 - DNA, 13 bp, Artificial Sequence
  Oligonucleotide for detection of SNP TSC0034649
ggagtattttaat

SEQ ID NO: 138370 - DNA, 13 bp, Artificial Sequence
  Oligonucleotide for detection of SNP TSC0034649
attaaaatactcc

SEQ ID NO: 138371 - DNA, 13 bp, Artificial Sequence
  Oligonucleotide for detection of SNP TSC0034650
tagggtatagtgg

SEQ ID NO: 138372 - DNA, 13 bp, Artificial Sequence
  Oligonucleotide for detection of SNP TSC0034650
ccactatacccta

SEQ ID NO: 138373 - DNA, 13 bp, Artificial Sequence
  Oligonucleotide for detection of SNP TSC0034650
tagggtgtagtgg

SEQ ID NO: 138374 - DNA, 13 bp, Artificial Sequence
  Oligonucleotide for detection of SNP TSC0034650
ccactacacccta

SEQ ID NO: 138375 - DNA, 13 bp, Artificial Sequence
  Oligonucleotide for detection of SNP TSC0034650
tagggcgtagtgg

SEQ ID NO: 138376 - DNA, 13 bp, Artificial Sequence
  Oligonucleotide for detection of SNP TSC0034650
ccactacgcccta

SEQ ID NO: 138377 - DNA, 13 bp, Artificial Sequence
  Oligonucleotide for detection of SNP TSC0034651
tttggtaaaataa

SEQ ID NO: 138378 - DNA, 13 bp, Artificial Sequence
  Oligonucleotide for detection of SNP TSC0034651
ttattttaccaaa

SEQ ID NO: 138379 - DNA, 13 bp, Artificial Sequence
  Oligonucleotide for detection of SNP TSC0034651
tttggtgaaataa

SEQ ID NO: 138380 - DNA, 13 bp, Artificial Sequence
  Oligonucleotide for detection of SNP TSC0034651
ttatttcaccaaa

SEQ ID NO: 138381 - DNA, 13 bp, Artificial Sequence
  Oligonucleotide for detection of SNP TSC0034654
tttttttgcgggy

SEQ ID NO: 138382 - DNA, 13 bp, Artificial Sequence
  Oligonucleotide for detection of SNP TSC0034654
rcccgcaaaaaaa

SEQ ID NO: 138383 - DNA, 13 bp, Artificial Sequence
  Oligonucleotide for detection of SNP TSC0034654
ttttttcgcgggy

SEQ ID NO: 138384 - DNA, 13 bp, Artificial Sequence
  Oligonucleotide for detection of SNP TSC0034654
rcccgcgaaaaaa

SEQ ID NO: 138385 - DNA, 13 bp, Artificial Sequence
  Oligonucleotide for detection of SNP TSC0034654
gtttgtggaggga

SEQ ID NO: 138386 - DNA, 13 bp, Artificial Sequence
  Oligonucleotide for detection of SNP TSC0034654
tccctccacaaac

SEQ ID NO: 138387 - DNA, 13 bp, Artificial Sequence
  Oligonucleotide for detection of SNP TSC0034654
gtttgtagaggga

SEQ ID NO: 138388 - DNA, 13 bp, Artificial Sequence
  Oligonucleotide for detection of SNP TSC0034654
tccctctacaaac

SEQ ID NO: 138389 - DNA, 13 bp, Artificial Sequence
  Oligonucleotide for detection of SNP TSC0034654
gttcgtggaggga

SEQ ID NO: 138390 - DNA, 13 bp, Artificial Sequence
  Oligonucleotide for detection of SNP TSC0034654
tccctccacgaac

SEQ ID NO: 138391 - DNA, 13 bp, Artificial Sequence
  Oligonucleotide for detection of SNP TSC0034654
gttcgtagaggga

SEQ ID NO: 138392 - DNA, 13 bp, Artificial Sequence
  Oligonucleotide for detection of SNP TSC0034654
tccctctacgaac

SEQ ID NO: 138393 - DNA, 13 bp, Artificial Sequence
  Oligonucleotide for detection of SNP TSC0034654
gtttgcggaggga

SEQ ID NO: 138394 - DNA, 13 bp, Artificial Sequence
  Oligonucleotide for detection of SNP TSC0034654
tccctccgcaaac

SEQ ID NO: 138395 - DNA, 13 bp, Artificial Sequence
  Oligonucleotide for detection of SNP TSC0034654
gttcgcggaggga

SEQ ID NO: 138396 - DNA, 13 bp, Artificial Sequence
  Oligonucleotide for detection of SNP TSC0034654
tccctccgcgaac

SEQ ID NO: 138397 - DNA, 13 bp, Artificial Sequence
  Oligonucleotide for detection of SNP TSC0034655
tttgagatggaty

SEQ ID NO: 138398 - DNA, 13 bp, Artificial Sequence
  Oligonucleotide for detection of SNP TSC0034655
ratccatctcaaa

SEQ ID NO: 138399 - DNA, 13 bp, Artificial Sequence
  Oligonucleotide for detection of SNP TSC0034655
tttgaggtggaty

SEQ ID NO: 138400 - DNA, 13 bp, Artificial Sequence
  Oligonucleotide for detection of SNP TSC0034655
ratccacctcaaa

SEQ ID NO: 138401 - DNA, 13 bp, Artificial Sequence
  Oligonucleotide for detection of SNP TSC0034656
tgagaggatagty

SEQ ID NO: 138402 - DNA, 13 bp, Artificial Sequence
  Oligonucleotide for detection of SNP TSC0034656
ractatcctctca

SEQ ID NO: 138403 - DNA, 13 bp, Artificial Sequence
  Oligonucleotide for detection of SNP TSC0034656
tgagagaatagty

SEQ ID NO: 138404 - DNA, 13 bp, Artificial Sequence
  Oligonucleotide for detection of SNP TSC0034656
ractattctctca

SEQ ID NO: 138405 - DNA, 13 bp, Artificial Sequence
  Oligonucleotide for detection of SNP TSC0034657
taagttgaataga

SEQ ID NO: 138406 - DNA, 13 bp, Artificial Sequence
  Oligonucleotide for detection of SNP TSC0034657
tctattcaactta

SEQ ID NO: 138407 - DNA, 13 bp, Artificial Sequence
  Oligonucleotide for detection of SNP TSC0034657
taagtttaataga

SEQ ID NO: 138408 - DNA, 13 bp, Artificial Sequence
  Oligonucleotide for detection of SNP TSC0034657
tctattaaactta

SEQ ID NO: 138409 - DNA, 13 bp, Artificial Sequence
  Oligonucleotide for detection of SNP TSC0034657
tttatttagtttg

SEQ ID NO: 138410 - DNA, 13 bp, Artificial Sequence
  Oligonucleotide for detection of SNP TSC0034657
caaactaaataaa

SEQ ID NO: 138411 - DNA, 13 bp, Artificial Sequence
  Oligonucleotide for detection of SNP TSC0034657
tttattaagtttg

SEQ ID NO: 138412 - DNA, 13 bp, Artificial Sequence
  Oligonucleotide for detection of SNP TSC0034657
caaacttaataaa

SEQ ID NO: 138413 - DNA, 13 bp, Artificial Sequence
  Oligonucleotide for detection of SNP TSC0034660
taagttagagtay

SEQ ID NO: 138414 - DNA, 13 bp, Artificial Sequence
  Oligonucleotide for detection of SNP TSC0034660
rtactctaactta

SEQ ID NO: 138415 - DNA, 13 bp, Artificial Sequence
  Oligonucleotide for detection of SNP TSC0034660
taagttggagtay

SEQ ID NO: 138416 - DNA, 13 bp, Artificial Sequence
  Oligonucleotide for detection of SNP TSC0034660
rtactccaactta

SEQ ID NO: 138417 - DNA, 13 bp, Artificial Sequence
  Oligonucleotide for detection of SNP TSC0034660
taagtcggagtay

SEQ ID NO: 138418 - DNA, 13 bp, Artificial Sequence
  Oligonucleotide for detection of SNP TSC0034660
rtactccgactta

SEQ ID NO: 138419 - DNA, 13 bp, Artificial Sequence
  Oligonucleotide for detection of SNP TSC0034660
gtgttttggtttg

SEQ ID NO: 138420 - DNA, 13 bp, Artificial Sequence
  Oligonucleotide for detection of SNP TSC0034660
caaaccaaaacac

SEQ ID NO: 138421 - DNA, 13 bp, Artificial Sequence
  Oligonucleotide for detection of SNP TSC0034660
gtgtttcggtttg

SEQ ID NO: 138422 - DNA, 13 bp, Artificial Sequence
  Oligonucleotide for detection of SNP TSC0034660
caaaccgaaacac

SEQ ID NO: 138423 - DNA, 13 bp, Artificial Sequence
  Oligonucleotide for detection of SNP TSC0034661
tgtagtatttatg

SEQ ID NO: 138424 - DNA, 13 bp, Artificial Sequence
  Oligonucleotide for detection of SNP TSC0034661
cataaatactaca

SEQ ID NO: 138425 - DNA, 13 bp, Artificial Sequence
  Oligonucleotide for detection of SNP TSC0034661
tgtagtgtttatg

SEQ ID NO: 138426 - DNA, 13 bp, Artificial Sequence
  Oligonucleotide for detection of SNP TSC0034661
cataaacactaca

SEQ ID NO: 138427 - DNA, 13 bp, Artificial Sequence
  Oligonucleotide for detection of SNP TSC0034661
tgtagcgtttatg

SEQ ID NO: 138428 - DNA, 13 bp, Artificial Sequence
  Oligonucleotide for detection of SNP TSC0034661
cataaacgctaca

SEQ ID NO: 138429 - DNA, 13 bp, Artificial Sequence
  Oligonucleotide for detection of SNP TSC0034661
tatgggtgttata

SEQ ID NO: 138430 - DNA, 13 bp, Artificial Sequence
  Oligonucleotide for detection of SNP TSC0034661
tataacacccata

SEQ ID NO: 138431 - DNA, 13 bp, Artificial Sequence
  Oligonucleotide for detection of SNP TSC0034661
tatgggcgttata

SEQ ID NO: 138432 - DNA, 13 bp, Artificial Sequence
  Oligonucleotide for detection of SNP TSC0034661
tataacgcccata

SEQ ID NO: 138433 - DNA, 13 bp, Artificial Sequence
  Oligonucleotide for detection of SNP TSC0034662
atattttttttty

SEQ ID NO: 138434 - DNA, 13 bp, Artificial Sequence
  Oligonucleotide for detection of SNP TSC0034662
raaaaaaaaatat

SEQ ID NO: 138435 - DNA, 13 bp, Artificial Sequence
  Oligonucleotide for detection of SNP TSC0034662
gagaagtaaatgt

SEQ ID NO: 138436 - DNA, 13 bp, Artificial Sequence
  Oligonucleotide for detection of SNP TSC0034662
acatttacttctc

SEQ ID NO: 138437 - DNA, 13 bp, Artificial Sequence
  Oligonucleotide for detection of SNP TSC0034662
gagaaggaaatgt

SEQ ID NO: 138438 - DNA, 13 bp, Artificial Sequence
  Oligonucleotide for detection of SNP TSC0034662
acatttccttctc

SEQ ID NO: 138439 - DNA, 13 bp, Artificial Sequence
  Oligonucleotide for detection of SNP TSC0034663
tttattatgttta

SEQ ID NO: 138440 - DNA, 13 bp, Artificial Sequence
  Oligonucleotide for detection of SNP TSC0034663
taaacataataaa

SEQ ID NO: 138441 - DNA, 13 bp, Artificial Sequence
  Oligonucleotide for detection of SNP TSC0034663
tttattgtgttta

SEQ ID NO: 138442 - DNA, 13 bp, Artificial Sequence
  Oligonucleotide for detection of SNP TSC0034663
taaacacaataaa

SEQ ID NO: 138443 - DNA, 13 bp, Artificial Sequence
  Oligonucleotide for detection of SNP TSC0034663
tttatcgtgttta

SEQ ID NO: 138444 - DNA, 13 bp, Artificial Sequence
  Oligonucleotide for detection of SNP TSC0034663
taaacacgataaa

SEQ ID NO: 138445 - DNA, 13 bp, Artificial Sequence
  Oligonucleotide for detection of SNP TSC0034663
tgaatatggtaag

SEQ ID NO: 138446 - DNA, 13 bp, Artificial Sequence
  Oligonucleotide for detection of SNP TSC0034663
cttaccatattca

SEQ ID NO: 138447 - DNA, 13 bp, Artificial Sequence
  Oligonucleotide for detection of SNP TSC0034663
tgaatacggtaag

SEQ ID NO: 138448 - DNA, 13 bp, Artificial Sequence
  Oligonucleotide for detection of SNP TSC0034663
cttaccgtattca

SEQ ID NO: 138449 - DNA, 13 bp, Artificial Sequence
  Oligonucleotide for detection of SNP TSC0034664
ggttgtaatgatt

SEQ ID NO: 138450 - DNA, 13 bp, Artificial Sequence
  Oligonucleotide for detection of SNP TSC0034664
aatcattacaacc

SEQ ID NO: 138451 - DNA, 13 bp, Artificial Sequence
  Oligonucleotide for detection of SNP TSC0034664
ggttgtgatgatt

SEQ ID NO: 138452 - DNA, 13 bp, Artificial Sequence
  Oligonucleotide for detection of SNP TSC0034664
aatcatcacaacc

SEQ ID NO: 138453 - DNA, 13 bp, Artificial Sequence
  Oligonucleotide for detection of SNP TSC0034664
ggttgtaacgatt

SEQ ID NO: 138454 - DNA, 13 bp, Artificial Sequence
  Oligonucleotide for detection of SNP TSC0034664
aatcgttacaacc

SEQ ID NO: 138455 - DNA, 13 bp, Artificial Sequence
  Oligonucleotide for detection of SNP TSC0034664
ggttgtgacgatt

SEQ ID NO: 138456 - DNA, 13 bp, Artificial Sequence
  Oligonucleotide for detection of SNP TSC0034664
aatcgtcacaacc

SEQ ID NO: 138457 - DNA, 13 bp, Artificial Sequence
  Oligonucleotide for detection of SNP TSC0034665
atgtaagtagtta

SEQ ID NO: 138458 - DNA, 13 bp, Artificial Sequence
  Oligonucleotide for detection of SNP TSC0034665
taactacttacat

SEQ ID NO: 138459 - DNA, 13 bp, Artificial Sequence
  Oligonucleotide for detection of SNP TSC0034665
atgtaaatagtta

SEQ ID NO: 138460 - DNA, 13 bp, Artificial Sequence
  Oligonucleotide for detection of SNP TSC0034665
taactatttacat

SEQ ID NO: 138461 - DNA, 13 bp, Artificial Sequence
  Oligonucleotide for detection of SNP TSC0034666
ataaggtatatta

SEQ ID NO: 138462 - DNA, 13 bp, Artificial Sequence
  Oligonucleotide for detection of SNP TSC0034666
taatataccttat

SEQ ID NO: 138463 - DNA, 13 bp, Artificial Sequence
  Oligonucleotide for detection of SNP TSC0034666
ataaggaatatta

SEQ ID NO: 138464 - DNA, 13 bp, Artificial Sequence
  Oligonucleotide for detection of SNP TSC0034666
taatattccttat

SEQ ID NO: 138465 - DNA, 13 bp, Artificial Sequence
  Oligonucleotide for detection of SNP TSC0034671
aaattagttattg

SEQ ID NO: 138466 - DNA, 13 bp, Artificial Sequence
  Oligonucleotide for detection of SNP TSC0034671
caataactaattt

SEQ ID NO: 138467 - DNA, 13 bp, Artificial Sequence
  Oligonucleotide for detection of SNP TSC0034671
aaattaattattg

SEQ ID NO: 138468 - DNA, 13 bp, Artificial Sequence
  Oligonucleotide for detection of SNP TSC0034671
caataattaattt

SEQ ID NO: 138469 - DNA, 13 bp, Artificial Sequence
  Oligonucleotide for detection of SNP TSC0034672
agaagtgttatat

SEQ ID NO: 138470 - DNA, 13 bp, Artificial Sequence
  Oligonucleotide for detection of SNP TSC0034672
atataacacttct

SEQ ID NO: 138471 - DNA, 13 bp, Artificial Sequence
  Oligonucleotide for detection of SNP TSC0034672
agaagttttatat

SEQ ID NO: 138472 - DNA, 13 bp, Artificial Sequence
  Oligonucleotide for detection of SNP TSC0034672
atataaaacttct

SEQ ID NO: 138473 - DNA, 13 bp, Artificial Sequence
  Oligonucleotide for detection of SNP TSC0034672
atgtaatattttt

SEQ ID NO: 138474 - DNA, 13 bp, Artificial Sequence
  Oligonucleotide for detection of SNP TSC0034672
aaaaatattacat

SEQ ID NO: 138475 - DNA, 13 bp, Artificial Sequence
  Oligonucleotide for detection of SNP TSC0034672
atgtaaaattttt

SEQ ID NO: 138476 - DNA, 13 bp, Artificial Sequence
  Oligonucleotide for detection of SNP TSC0034672
aaaaattttacat

SEQ ID NO: 138477 - DNA, 13 bp, Artificial Sequence
  Oligonucleotide for detection of SNP TSC0034675
ttgatatggttgy

SEQ ID NO: 138478 - DNA, 13 bp, Artificial Sequence
  Oligonucleotide for detection of SNP TSC0034675
rcaaccatatcaa

SEQ ID NO: 138479 - DNA, 13 bp, Artificial Sequence
  Oligonucleotide for detection of SNP TSC0034675
ttgatagggttgy

SEQ ID NO: 138480 - DNA, 13 bp, Artificial Sequence
  Oligonucleotide for detection of SNP TSC0034675
rcaaccctatcaa

SEQ ID NO: 138481 - DNA, 13 bp, Artificial Sequence
  Oligonucleotide for detection of SNP TSC0034676
tttaggatagtgg

SEQ ID NO: 138482 - DNA, 13 bp, Artificial Sequence
  Oligonucleotide for detection of SNP TSC0034676
ccactatcctaaa

SEQ ID NO: 138483 - DNA, 13 bp, Artificial Sequence
  Oligonucleotide for detection of SNP TSC0034676
tttagggtagtgg

SEQ ID NO: 138484 - DNA, 13 bp, Artificial Sequence
  Oligonucleotide for detection of SNP TSC0034676
ccactaccctaaa

SEQ ID NO: 138485 - DNA, 13 bp, Artificial Sequence
  Oligonucleotide for detection of SNP TSC0034681
aattatggaagty

SEQ ID NO: 138486 - DNA, 13 bp, Artificial Sequence
  Oligonucleotide for detection of SNP TSC0034681
racttccataatt

SEQ ID NO: 138487 - DNA, 13 bp, Artificial Sequence
  Oligonucleotide for detection of SNP TSC0034681
aattatagaagty

SEQ ID NO: 138488 - DNA, 13 bp, Artificial Sequence
  Oligonucleotide for detection of SNP TSC0034681
racttctataatt

SEQ ID NO: 138489 - DNA, 13 bp, Artificial Sequence
  Oligonucleotide for detection of SNP TSC0034687
gtaattgagatta

SEQ ID NO: 138490 - DNA, 13 bp, Artificial Sequence
  Oligonucleotide for detection of SNP TSC0034687
taatctcaattac

SEQ ID NO: 138491 - DNA, 13 bp, Artificial Sequence
  Oligonucleotide for detection of SNP TSC0034687
gtaattaagatta

SEQ ID NO: 138492 - DNA, 13 bp, Artificial Sequence
  Oligonucleotide for detection of SNP TSC0034687
taatcttaattac

SEQ ID NO: 138493 - DNA, 13 bp, Artificial Sequence
  Oligonucleotide for detection of SNP TSC0034691
gattgaatgggtt

SEQ ID NO: 138494 - DNA, 13 bp, Artificial Sequence
  Oligonucleotide for detection of SNP TSC0034691
aacccattcaatc

SEQ ID NO: 138495 - DNA, 13 bp, Artificial Sequence
  Oligonucleotide for detection of SNP TSC0034691
gattgagtgggtt

SEQ ID NO: 138496 - DNA, 13 bp, Artificial Sequence
  Oligonucleotide for detection of SNP TSC0034691
aacccactcaatc

SEQ ID NO: 138497 - DNA, 13 bp, Artificial Sequence
  Oligonucleotide for detection of SNP TSC0034691
gatcgaatgggtt

SEQ ID NO: 138498 - DNA, 13 bp, Artificial Sequence
  Oligonucleotide for detection of SNP TSC0034691
aacccattcgatc

SEQ ID NO: 138499 - DNA, 13 bp, Artificial Sequence
  Oligonucleotide for detection of SNP TSC0034691
gatcgagtgggtt

SEQ ID NO: 138500 - DNA, 13 bp, Artificial Sequence
  Oligonucleotide for detection of SNP TSC0034691
aacccactcgatc

SEQ ID NO: 138501 - DNA, 13 bp, Artificial Sequence
  Oligonucleotide for detection of SNP TSC0034692
ttttttgagttta

SEQ ID NO: 138502 - DNA, 13 bp, Artificial Sequence
  Oligonucleotide for detection of SNP TSC0034692
taaactcaaaaaa

SEQ ID NO: 138503 - DNA, 13 bp, Artificial Sequence
  Oligonucleotide for detection of SNP TSC0034692
ttttttaagttta

SEQ ID NO: 138504 - DNA, 13 bp, Artificial Sequence
  Oligonucleotide for detection of SNP TSC0034692
taaacttaaaaaa

SEQ ID NO: 138505 - DNA, 13 bp, Artificial Sequence
  Oligonucleotide for detection of SNP TSC0034693
gtttatatttaty

SEQ ID NO: 138506 - DNA, 13 bp, Artificial Sequence
  Oligonucleotide for detection of SNP TSC0034693
rataaatataaac

SEQ ID NO: 138507 - DNA, 13 bp, Artificial Sequence
  Oligonucleotide for detection of SNP TSC0034693
gtttatgtttaty

SEQ ID NO: 138508 - DNA, 13 bp, Artificial Sequence
  Oligonucleotide for detection of SNP TSC0034693
rataaacataaac

SEQ ID NO: 138509 - DNA, 13 bp, Artificial Sequence
  Oligonucleotide for detection of SNP TSC0034693
gtttacgtttaty

SEQ ID NO: 138510 - DNA, 13 bp, Artificial Sequence
  Oligonucleotide for detection of SNP TSC0034693
rataaacgtaaac

SEQ ID NO: 138511 - DNA, 13 bp, Artificial Sequence
  Oligonucleotide for detection of SNP TSC0034693
gatagatgtgaay

SEQ ID NO: 138512 - DNA, 13 bp, Artificial Sequence
  Oligonucleotide for detection of SNP TSC0034693
rttcacatctatc

SEQ ID NO: 138513 - DNA, 13 bp, Artificial Sequence
  Oligonucleotide for detection of SNP TSC0034693
gatagacgtgaay

SEQ ID NO: 138514 - DNA, 13 bp, Artificial Sequence
  Oligonucleotide for detection of SNP TSC0034693
rttcacgtctatc

SEQ ID NO: 138515 - DNA, 13 bp, Artificial Sequence
  Oligonucleotide for detection of SNP TSC0034694
atttggaaggtgg

SEQ ID NO: 138516 - DNA, 13 bp, Artificial Sequence
  Oligonucleotide for detection of SNP TSC0034694
ccaccttccaaat

SEQ ID NO: 138517 - DNA, 13 bp, Artificial Sequence
  Oligonucleotide for detection of SNP TSC0034700
ttgtttatgtttg

SEQ ID NO: 138518 - DNA, 13 bp, Artificial Sequence
  Oligonucleotide for detection of SNP TSC0034700
caaacataaacaa

SEQ ID NO: 138519 - DNA, 13 bp, Artificial Sequence
  Oligonucleotide for detection of SNP TSC0034700
ttgtttttgtttg

SEQ ID NO: 138520 - DNA, 13 bp, Artificial Sequence
  Oligonucleotide for detection of SNP TSC0034700
caaacaaaaacaa

SEQ ID NO: 138521 - DNA, 13 bp, Artificial Sequence
  Oligonucleotide for detection of SNP TSC0034700
tagatatgggtag

SEQ ID NO: 138522 - DNA, 13 bp, Artificial Sequence
  Oligonucleotide for detection of SNP TSC0034700
ctacccatatcta

SEQ ID NO: 138523 - DNA, 13 bp, Artificial Sequence
  Oligonucleotide for detection of SNP TSC0034700
tagataagggtag

SEQ ID NO: 138524 - DNA, 13 bp, Artificial Sequence
  Oligonucleotide for detection of SNP TSC0034700
ctacccttatcta

SEQ ID NO: 138525 - DNA, 13 bp, Artificial Sequence
  Oligonucleotide for detection of SNP TSC0034702
gatagagttattt

SEQ ID NO: 138526 - DNA, 13 bp, Artificial Sequence
  Oligonucleotide for detection of SNP TSC0034702
aaataactctatc

SEQ ID NO: 138527 - DNA, 13 bp, Artificial Sequence
  Oligonucleotide for detection of SNP TSC0034702
gatagaattattt

SEQ ID NO: 138528 - DNA, 13 bp, Artificial Sequence
  Oligonucleotide for detection of SNP TSC0034702
aaataattctatc

SEQ ID NO: 138529 - DNA, 13 bp, Artificial Sequence
  Oligonucleotide for detection of SNP TSC0034703
attattgtggtgt

SEQ ID NO: 138530 - DNA, 13 bp, Artificial Sequence
  Oligonucleotide for detection of SNP TSC0034703
acaccacaataat

SEQ ID NO: 138531 - DNA, 13 bp, Artificial Sequence
  Oligonucleotide for detection of SNP TSC0034703
attattatggtgt

SEQ ID NO: 138532 - DNA, 13 bp, Artificial Sequence
  Oligonucleotide for detection of SNP TSC0034703
acaccataataat

SEQ ID NO: 138533 - DNA, 13 bp, Artificial Sequence
  Oligonucleotide for detection of SNP TSC0034706
taaataatttggt

SEQ ID NO: 138534 - DNA, 13 bp, Artificial Sequence
  Oligonucleotide for detection of SNP TSC0034706
accaaattattta

SEQ ID NO: 138535 - DNA, 13 bp, Artificial Sequence
  Oligonucleotide for detection of SNP TSC0034706
taaatagtttggt

SEQ ID NO: 138536 - DNA, 13 bp, Artificial Sequence
  Oligonucleotide for detection of SNP TSC0034706
accaaactattta

SEQ ID NO: 138537 - DNA, 13 bp, Artificial Sequence
  Oligonucleotide for detection of SNP TSC0034707
agaagggattgaa

SEQ ID NO: 138538 - DNA, 13 bp, Artificial Sequence
  Oligonucleotide for detection of SNP TSC0034707
ttcaatcccttct

SEQ ID NO: 138539 - DNA, 13 bp, Artificial Sequence
  Oligonucleotide for detection of SNP TSC0034707
agaaggtattgaa

SEQ ID NO: 138540 - DNA, 13 bp, Artificial Sequence
  Oligonucleotide for detection of SNP TSC0034707
ttcaataccttct

SEQ ID NO: 138541 - DNA, 13 bp, Artificial Sequence
  Oligonucleotide for detection of SNP TSC0034708
agttttatagtty

SEQ ID NO: 138542 - DNA, 13 bp, Artificial Sequence
  Oligonucleotide for detection of SNP TSC0034708
raactataaaact

SEQ ID NO: 138543 - DNA, 13 bp, Artificial Sequence
  Oligonucleotide for detection of SNP TSC0034708
agttttgtagtty

SEQ ID NO: 138544 - DNA, 13 bp, Artificial Sequence
  Oligonucleotide for detection of SNP TSC0034708
raactacaaaact

SEQ ID NO: 138545 - DNA, 13 bp, Artificial Sequence
  Oligonucleotide for detection of SNP TSC0034708
agtttcgtagtty

SEQ ID NO: 138546 - DNA, 13 bp, Artificial Sequence
  Oligonucleotide for detection of SNP TSC0034708
raactacgaaact

SEQ ID NO: 138547 - DNA, 13 bp, Artificial Sequence
  Oligonucleotide for detection of SNP TSC0034708
gaattgtggggtt

SEQ ID NO: 138548 - DNA, 13 bp, Artificial Sequence
  Oligonucleotide for detection of SNP TSC0034708
aaccccacaattc

SEQ ID NO: 138549 - DNA, 13 bp, Artificial Sequence
  Oligonucleotide for detection of SNP TSC0034708
gaattgcggggtt

SEQ ID NO: 138550 - DNA, 13 bp, Artificial Sequence
  Oligonucleotide for detection of SNP TSC0034708
aaccccgcaattc

SEQ ID NO: 138551 - DNA, 13 bp, Artificial Sequence
  Oligonucleotide for detection of SNP TSC0034711
tttgtagttttag

SEQ ID NO: 138552 - DNA, 13 bp, Artificial Sequence
  Oligonucleotide for detection of SNP TSC0034711
ctaaaactacaaa

SEQ ID NO: 138553 - DNA, 13 bp, Artificial Sequence
  Oligonucleotide for detection of SNP TSC0034712
gttagttggaatg

SEQ ID NO: 138554 - DNA, 13 bp, Artificial Sequence
  Oligonucleotide for detection of SNP TSC0034712
cattccaactaac

SEQ ID NO: 138555 - DNA, 13 bp, Artificial Sequence
  Oligonucleotide for detection of SNP TSC0034712
gttagtcggaatg

SEQ ID NO: 138556 - DNA, 13 bp, Artificial Sequence
  Oligonucleotide for detection of SNP TSC0034712
cattccgactaac

SEQ ID NO: 138557 - DNA, 13 bp, Artificial Sequence
  Oligonucleotide for detection of SNP TSC0034712
tattttggttagy

SEQ ID NO: 138558 - DNA, 13 bp, Artificial Sequence
  Oligonucleotide for detection of SNP TSC0034712
rctaaccaaaata

SEQ ID NO: 138559 - DNA, 13 bp, Artificial Sequence
  Oligonucleotide for detection of SNP TSC0034712
tattttagttagy

SEQ ID NO: 138560 - DNA, 13 bp, Artificial Sequence
  Oligonucleotide for detection of SNP TSC0034712
rctaactaaaata

SEQ ID NO: 138561 - DNA, 13 bp, Artificial Sequence
  Oligonucleotide for detection of SNP TSC0034712
tatttcggttagy

SEQ ID NO: 138562 - DNA, 13 bp, Artificial Sequence
  Oligonucleotide for detection of SNP TSC0034712
rctaaccgaaata

SEQ ID NO: 138563 - DNA, 13 bp, Artificial Sequence
  Oligonucleotide for detection of SNP TSC0034713
aatatggtatatg

SEQ ID NO: 138564 - DNA, 13 bp, Artificial Sequence
  Oligonucleotide for detection of SNP TSC0034713
catataccatatt

SEQ ID NO: 138565 - DNA, 13 bp, Artificial Sequence
  Oligonucleotide for detection of SNP TSC0034713
aatatgatatatg

SEQ ID NO: 138566 - DNA, 13 bp, Artificial Sequence
  Oligonucleotide for detection of SNP TSC0034713
catatatcatatt

SEQ ID NO: 138567 - DNA, 13 bp, Artificial Sequence
  Oligonucleotide for detection of SNP TSC0034714
ggagatgggggaa

SEQ ID NO: 138568 - DNA, 13 bp, Artificial Sequence
  Oligonucleotide for detection of SNP TSC0034714
ttcccccatctcc

SEQ ID NO: 138569 - DNA, 13 bp, Artificial Sequence
  Oligonucleotide for detection of SNP TSC0034714
ggagattggggaa

SEQ ID NO: 138570 - DNA, 13 bp, Artificial Sequence
  Oligonucleotide for detection of SNP TSC0034714
ttccccaatctcc

SEQ ID NO: 138571 - DNA, 13 bp, Artificial Sequence
  Oligonucleotide for detection of SNP TSC0034714
ggagacgggggaa

SEQ ID NO: 138572 - DNA, 13 bp, Artificial Sequence
  Oligonucleotide for detection of SNP TSC0034714
ttcccccgtctcc

SEQ ID NO: 138573 - DNA, 13 bp, Artificial Sequence
  Oligonucleotide for detection of SNP TSC0034714
ggagatcggggaa

SEQ ID NO: 138574 - DNA, 13 bp, Artificial Sequence
  Oligonucleotide for detection of SNP TSC0034714
ttccccgatctcc

SEQ ID NO: 138575 - DNA, 13 bp, Artificial Sequence
  Oligonucleotide for detection of SNP TSC0034715
gtttgggtattga

SEQ ID NO: 138576 - DNA, 13 bp, Artificial Sequence
  Oligonucleotide for detection of SNP TSC0034715
tcaatacccaaac

SEQ ID NO: 138577 - DNA, 13 bp, Artificial Sequence
  Oligonucleotide for detection of SNP TSC0034715
gtttggatattga

SEQ ID NO: 138578 - DNA, 13 bp, Artificial Sequence
  Oligonucleotide for detection of SNP TSC0034715
tcaatatccaaac

SEQ ID NO: 138579 - DNA, 13 bp, Artificial Sequence
  Oligonucleotide for detection of SNP TSC0034715
gtttgggtatcga

SEQ ID NO: 138580 - DNA, 13 bp, Artificial Sequence
  Oligonucleotide for detection of SNP TSC0034715
tcgatacccaaac

SEQ ID NO: 138581 - DNA, 13 bp, Artificial Sequence
  Oligonucleotide for detection of SNP TSC0034715
gtttggatatcga

SEQ ID NO: 138582 - DNA, 13 bp, Artificial Sequence
  Oligonucleotide for detection of SNP TSC0034715
tcgatatccaaac

SEQ ID NO: 138583 - DNA, 13 bp, Artificial Sequence
  Oligonucleotide for detection of SNP TSC0034716
gttttgagtatgy

SEQ ID NO: 138584 - DNA, 13 bp, Artificial Sequence
  Oligonucleotide for detection of SNP TSC0034716
rcatactcaaaac

SEQ ID NO: 138585 - DNA, 13 bp, Artificial Sequence
  Oligonucleotide for detection of SNP TSC0034716
gttttgtgtatgy

SEQ ID NO: 138586 - DNA, 13 bp, Artificial Sequence
  Oligonucleotide for detection of SNP TSC0034716
rcatacacaaaac

SEQ ID NO: 138587 - DNA, 13 bp, Artificial Sequence
  Oligonucleotide for detection of SNP TSC0034716
gtttcgagtatgy

SEQ ID NO: 138588 - DNA, 13 bp, Artificial Sequence
  Oligonucleotide for detection of SNP TSC0034716
rcatactcgaaac

SEQ ID NO: 138589 - DNA, 13 bp, Artificial Sequence
  Oligonucleotide for detection of SNP TSC0034716
gtttcgtgtatgy

SEQ ID NO: 138590 - DNA, 13 bp, Artificial Sequence
  Oligonucleotide for detection of SNP TSC0034716
rcatacacgaaac

SEQ ID NO: 138591 - DNA, 13 bp, Artificial Sequence
  Oligonucleotide for detection of SNP TSC0034716
gttttgcgtatgy

SEQ ID NO: 138592 - DNA, 13 bp, Artificial Sequence
  Oligonucleotide for detection of SNP TSC0034716
rcatacgcaaaac

SEQ ID NO: 138593 - DNA, 13 bp, Artificial Sequence
  Oligonucleotide for detection of SNP TSC0034716
gtttcgcgtatgy

SEQ ID NO: 138594 - DNA, 13 bp, Artificial Sequence
  Oligonucleotide for detection of SNP TSC0034716
rcatacgcgaaac

SEQ ID NO: 138595 - DNA, 13 bp, Artificial Sequence
  Oligonucleotide for detection of SNP TSC0034716
gtatgtttgaggy

SEQ ID NO: 138596 - DNA, 13 bp, Artificial Sequence
  Oligonucleotide for detection of SNP TSC0034716
rcctcaaacatac

SEQ ID NO: 138597 - DNA, 13 bp, Artificial Sequence
  Oligonucleotide for detection of SNP TSC0034716
gtatgtgtgaggy

SEQ ID NO: 138598 - DNA, 13 bp, Artificial Sequence
  Oligonucleotide for detection of SNP TSC0034716
rcctcacacatac

SEQ ID NO: 138599 - DNA, 13 bp, Artificial Sequence
  Oligonucleotide for detection of SNP TSC0034716
gtatgttcgaggy

SEQ ID NO: 138600 - DNA, 13 bp, Artificial Sequence
  Oligonucleotide for detection of SNP TSC0034716
rcctcgaacatac

SEQ ID NO: 138601 - DNA, 13 bp, Artificial Sequence
  Oligonucleotide for detection of SNP TSC0034716
gtatgcgtgaggy

SEQ ID NO: 138602 - DNA, 13 bp, Artificial Sequence
  Oligonucleotide for detection of SNP TSC0034716
rcctcacgcatac

SEQ ID NO: 138603 - DNA, 13 bp, Artificial Sequence
  Oligonucleotide for detection of SNP TSC0034716
gtatgtgcgaggy

SEQ ID NO: 138604 - DNA, 13 bp, Artificial Sequence
  Oligonucleotide for detection of SNP TSC0034716
rcctcgcacatac

SEQ ID NO: 138605 - DNA, 13 bp, Artificial Sequence
  Oligonucleotide for detection of SNP TSC0034716
gtatgcgcgaggy

SEQ ID NO: 138606 - DNA, 13 bp, Artificial Sequence
  Oligonucleotide for detection of SNP TSC0034716
rcctcgcgcatac

SEQ ID NO: 138607 - DNA, 13 bp, Artificial Sequence
  Oligonucleotide for detection of SNP TSC0034717
taatattgtgtga

SEQ ID NO: 138608 - DNA, 13 bp, Artificial Sequence
  Oligonucleotide for detection of SNP TSC0034717
tcacacaatatta

SEQ ID NO: 138609 - DNA, 13 bp, Artificial Sequence
  Oligonucleotide for detection of SNP TSC0034717
taatatcgtgtga

SEQ ID NO: 138610 - DNA, 13 bp, Artificial Sequence
  Oligonucleotide for detection of SNP TSC0034717
tcacacgatatta

SEQ ID NO: 138611 - DNA, 13 bp, Artificial Sequence
  Oligonucleotide for detection of SNP TSC0034717
ttatatggtattg

SEQ ID NO: 138612 - DNA, 13 bp, Artificial Sequence
  Oligonucleotide for detection of SNP TSC0034717
caataccatataa

SEQ ID NO: 138613 - DNA, 13 bp, Artificial Sequence
  Oligonucleotide for detection of SNP TSC0034717
ttatatagtattg

SEQ ID NO: 138614 - DNA, 13 bp, Artificial Sequence
  Oligonucleotide for detection of SNP TSC0034717
caatactatataa

SEQ ID NO: 138615 - DNA, 13 bp, Artificial Sequence
  Oligonucleotide for detection of SNP TSC0034717
ttatacggtattg

SEQ ID NO: 138616 - DNA, 13 bp, Artificial Sequence
  Oligonucleotide for detection of SNP TSC0034717
caataccgtataa

SEQ ID NO: 138617 - DNA, 13 bp, Artificial Sequence
  Oligonucleotide for detection of SNP TSC0034719
tgtgtgggtgtgt

SEQ ID NO: 138618 - DNA, 13 bp, Artificial Sequence
  Oligonucleotide for detection of SNP TSC0034719
acacacccacaca

SEQ ID NO: 138619 - DNA, 13 bp, Artificial Sequence
  Oligonucleotide for detection of SNP TSC0034720
aagttagtgttat

SEQ ID NO: 138620 - DNA, 13 bp, Artificial Sequence
  Oligonucleotide for detection of SNP TSC0034720
ataacactaactt

SEQ ID NO: 138621 - DNA, 13 bp, Artificial Sequence
  Oligonucleotide for detection of SNP TSC0034720
aagttaatgttat

SEQ ID NO: 138622 - DNA, 13 bp, Artificial Sequence
  Oligonucleotide for detection of SNP TSC0034720
ataacattaactt

SEQ ID NO: 138623 - DNA, 13 bp, Artificial Sequence
  Oligonucleotide for detection of SNP TSC0034721
tgtttagttatta

SEQ ID NO: 138624 - DNA, 13 bp, Artificial Sequence
  Oligonucleotide for detection of SNP TSC0034721
taataactaaaca

SEQ ID NO: 138625 - DNA, 13 bp, Artificial Sequence
  Oligonucleotide for detection of SNP TSC0034721
tgtttaattatta

SEQ ID NO: 138626 - DNA, 13 bp, Artificial Sequence
  Oligonucleotide for detection of SNP TSC0034721
taataattaaaca

SEQ ID NO: 138627 - DNA, 13 bp, Artificial Sequence
  Oligonucleotide for detection of SNP TSC0034722
atgaagggaatag

SEQ ID NO: 138628 - DNA, 13 bp, Artificial Sequence
  Oligonucleotide for detection of SNP TSC0034722
ctattcccttcat

SEQ ID NO: 138629 - DNA, 13 bp, Artificial Sequence
  Oligonucleotide for detection of SNP TSC0034722
atgaagagaatag

SEQ ID NO: 138630 - DNA, 13 bp, Artificial Sequence
  Oligonucleotide for detection of SNP TSC0034722
ctattctcttcat

SEQ ID NO: 138631 - DNA, 13 bp, Artificial Sequence
  Oligonucleotide for detection of SNP TSC0034722
acgaagggaatag

SEQ ID NO: 138632 - DNA, 13 bp, Artificial Sequence
  Oligonucleotide for detection of SNP TSC0034722
ctattcccttcgt

SEQ ID NO: 138633 - DNA, 13 bp, Artificial Sequence
  Oligonucleotide for detection of SNP TSC0034722
acgaagagaatag

SEQ ID NO: 138634 - DNA, 13 bp, Artificial Sequence
  Oligonucleotide for detection of SNP TSC0034722
ctattctcttcgt

SEQ ID NO: 138635 - DNA, 13 bp, Artificial Sequence
  Oligonucleotide for detection of SNP TSC0034723
ttttgggtgagty

SEQ ID NO: 138636 - DNA, 13 bp, Artificial Sequence
  Oligonucleotide for detection of SNP TSC0034723
ractcacccaaaa

SEQ ID NO: 138637 - DNA, 13 bp, Artificial Sequence
  Oligonucleotide for detection of SNP TSC0034723
ttttggatgagty

SEQ ID NO: 138638 - DNA, 13 bp, Artificial Sequence
  Oligonucleotide for detection of SNP TSC0034723
ractcatccaaaa

SEQ ID NO: 138639 - DNA, 13 bp, Artificial Sequence
  Oligonucleotide for detection of SNP TSC0034723
tttcgggtgagty

SEQ ID NO: 138640 - DNA, 13 bp, Artificial Sequence
  Oligonucleotide for detection of SNP TSC0034723
ractcacccgaaa

SEQ ID NO: 138641 - DNA, 13 bp, Artificial Sequence
  Oligonucleotide for detection of SNP TSC0034723
tttcggatgagty

SEQ ID NO: 138642 - DNA, 13 bp, Artificial Sequence
  Oligonucleotide for detection of SNP TSC0034723
ractcatccgaaa

SEQ ID NO: 138643 - DNA, 13 bp, Artificial Sequence
  Oligonucleotide for detection of SNP TSC0034724
atgtgtgagtaag

SEQ ID NO: 138644 - DNA, 13 bp, Artificial Sequence
  Oligonucleotide for detection of SNP TSC0034724
cttactcacacat

SEQ ID NO: 138645 - DNA, 13 bp, Artificial Sequence
  Oligonucleotide for detection of SNP TSC0034724
atgtgtaagtaag

SEQ ID NO: 138646 - DNA, 13 bp, Artificial Sequence
  Oligonucleotide for detection of SNP TSC0034724
cttacttacacat

SEQ ID NO: 138647 - DNA, 13 bp, Artificial Sequence
  Oligonucleotide for detection of SNP TSC0034730
tttaattgataty

SEQ ID NO: 138648 - DNA, 13 bp, Artificial Sequence
  Oligonucleotide for detection of SNP TSC0034730
ratatcaattaaa

SEQ ID NO: 138649 - DNA, 13 bp, Artificial Sequence
  Oligonucleotide for detection of SNP TSC0034730
tttaatcgataty

SEQ ID NO: 138650 - DNA, 13 bp, Artificial Sequence
  Oligonucleotide for detection of SNP TSC0034730
ratatcgattaaa

SEQ ID NO: 138651 - DNA, 13 bp, Artificial Sequence
  Oligonucleotide for detection of SNP TSC0034730
gatattgattgaa

SEQ ID NO: 138652 - DNA, 13 bp, Artificial Sequence
  Oligonucleotide for detection of SNP TSC0034730
ttcaatcaatatc

SEQ ID NO: 138653 - DNA, 13 bp, Artificial Sequence
  Oligonucleotide for detection of SNP TSC0034730
gatattaattgaa

SEQ ID NO: 138654 - DNA, 13 bp, Artificial Sequence
  Oligonucleotide for detection of SNP TSC0034730
ttcaattaatatc

SEQ ID NO: 138655 - DNA, 13 bp, Artificial Sequence
  Oligonucleotide for detection of SNP TSC0034730
gatatcgattgaa

SEQ ID NO: 138656 - DNA, 13 bp, Artificial Sequence
  Oligonucleotide for detection of SNP TSC0034730
ttcaatcgatatc

SEQ ID NO: 138657 - DNA, 13 bp, Artificial Sequence
  Oligonucleotide for detection of SNP TSC0034731
gagtggagttatg

SEQ ID NO: 138658 - DNA, 13 bp, Artificial Sequence
  Oligonucleotide for detection of SNP TSC0034731
cataactccactc

SEQ ID NO: 138659 - DNA, 13 bp, Artificial Sequence
  Oligonucleotide for detection of SNP TSC0034731
gagtggggttatg

SEQ ID NO: 138660 - DNA, 13 bp, Artificial Sequence
  Oligonucleotide for detection of SNP TSC0034731
cataaccccactc

SEQ ID NO: 138661 - DNA, 13 bp, Artificial Sequence
  Oligonucleotide for detection of SNP TSC0034733
ttaagtataaatt

SEQ ID NO: 138662 - DNA, 13 bp, Artificial Sequence
  Oligonucleotide for detection of SNP TSC0034733
aatttatacttaa

SEQ ID NO: 138663 - DNA, 13 bp, Artificial Sequence
  Oligonucleotide for detection of SNP TSC0034733
ttaagtgtaaatt

SEQ ID NO: 138664 - DNA, 13 bp, Artificial Sequence
  Oligonucleotide for detection of SNP TSC0034733
aatttacacttaa

SEQ ID NO: 138665 - DNA, 13 bp, Artificial Sequence
  Oligonucleotide for detection of SNP TSC0034733
ttaagcgtaaatt

SEQ ID NO: 138666 - DNA, 13 bp, Artificial Sequence
  Oligonucleotide for detection of SNP TSC0034733
aatttacgcttaa

SEQ ID NO: 138667 - DNA, 13 bp, Artificial Sequence
  Oligonucleotide for detection of SNP TSC0034733
aatttatgtttga

SEQ ID NO: 138668 - DNA, 13 bp, Artificial Sequence
  Oligonucleotide for detection of SNP TSC0034733
tcaaacataaatt

SEQ ID NO: 138669 - DNA, 13 bp, Artificial Sequence
  Oligonucleotide for detection of SNP TSC0034733
aatttacgtttga

SEQ ID NO: 138670 - DNA, 13 bp, Artificial Sequence
  Oligonucleotide for detection of SNP TSC0034733
tcaaacgtaaatt

SEQ ID NO: 138671 - DNA, 13 bp, Artificial Sequence
  Oligonucleotide for detection of SNP TSC0034736
aattgtaatttty

SEQ ID NO: 138672 - DNA, 13 bp, Artificial Sequence
  Oligonucleotide for detection of SNP TSC0034736
raaaattacaatt

SEQ ID NO: 138673 - DNA, 13 bp, Artificial Sequence
  Oligonucleotide for detection of SNP TSC0034736
aattgtgatttty

SEQ ID NO: 138674 - DNA, 13 bp, Artificial Sequence
  Oligonucleotide for detection of SNP TSC0034736
raaaatcacaatt

SEQ ID NO: 138675 - DNA, 13 bp, Artificial Sequence
  Oligonucleotide for detection of SNP TSC0034738
aggaggtaattag

SEQ ID NO: 138676 - DNA, 13 bp, Artificial Sequence
  Oligonucleotide for detection of SNP TSC0034738
ctaattacctcct

SEQ ID NO: 138677 - DNA, 13 bp, Artificial Sequence
  Oligonucleotide for detection of SNP TSC0034738
aggagggaattag

SEQ ID NO: 138678 - DNA, 13 bp, Artificial Sequence
  Oligonucleotide for detection of SNP TSC0034738
ctaattccctcct

SEQ ID NO: 138679 - DNA, 13 bp, Artificial Sequence
  Oligonucleotide for detection of SNP TSC0034739
aaagggaaaggaa

SEQ ID NO: 138680 - DNA, 13 bp, Artificial Sequence
  Oligonucleotide for detection of SNP TSC0034739
ttcctttcccttt

SEQ ID NO: 138681 - DNA, 13 bp, Artificial Sequence
  Oligonucleotide for detection of SNP TSC0034739
aaaggggaaggaa

SEQ ID NO: 138682 - DNA, 13 bp, Artificial Sequence
  Oligonucleotide for detection of SNP TSC0034739
ttccttccccttt

SEQ ID NO: 138683 - DNA, 13 bp, Artificial Sequence
  Oligonucleotide for detection of SNP TSC0034740
ataaaagtattat

SEQ ID NO: 138684 - DNA, 13 bp, Artificial Sequence
  Oligonucleotide for detection of SNP TSC0034740
ataatacttttat

SEQ ID NO: 138685 - DNA, 13 bp, Artificial Sequence
  Oligonucleotide for detection of SNP TSC0034740
ataaaaatattat

SEQ ID NO: 138686 - DNA, 13 bp, Artificial Sequence
  Oligonucleotide for detection of SNP TSC0034740
ataatatttttat

SEQ ID NO: 138687 - DNA, 13 bp, Artificial Sequence
  Oligonucleotide for detection of SNP TSC0034745
atttgatgtttat

SEQ ID NO: 138688 - DNA, 13 bp, Artificial Sequence
  Oligonucleotide for detection of SNP TSC0034745
ataaacatcaaat

SEQ ID NO: 138689 - DNA, 13 bp, Artificial Sequence
  Oligonucleotide for detection of SNP TSC0034745
atttgacgtttat

SEQ ID NO: 138690 - DNA, 13 bp, Artificial Sequence
  Oligonucleotide for detection of SNP TSC0034745
ataaacgtcaaat

SEQ ID NO: 138691 - DNA, 13 bp, Artificial Sequence
  Oligonucleotide for detection of SNP TSC0034745
atggatgttaggt

SEQ ID NO: 138692 - DNA, 13 bp, Artificial Sequence
  Oligonucleotide for detection of SNP TSC0034745
acctaacatccat

SEQ ID NO: 138693 - DNA, 13 bp, Artificial Sequence
  Oligonucleotide for detection of SNP TSC0034745
atggatattaggt

SEQ ID NO: 138694 - DNA, 13 bp, Artificial Sequence
  Oligonucleotide for detection of SNP TSC0034745
acctaatatccat

SEQ ID NO: 138695 - DNA, 13 bp, Artificial Sequence
  Oligonucleotide for detection of SNP TSC0034745
atggacgttaggt

SEQ ID NO: 138696 - DNA, 13 bp, Artificial Sequence
  Oligonucleotide for detection of SNP TSC0034745
acctaacgtccat

SEQ ID NO: 138697 - DNA, 13 bp, Artificial Sequence
  Oligonucleotide for detection of SNP TSC0034750
atgggaaaaaagy

SEQ ID NO: 138698 - DNA, 13 bp, Artificial Sequence
  Oligonucleotide for detection of SNP TSC0034750
rcttttttcccat

SEQ ID NO: 138699 - DNA, 13 bp, Artificial Sequence
  Oligonucleotide for detection of SNP TSC0034750
atgggataaaagy

SEQ ID NO: 138700 - DNA, 13 bp, Artificial Sequence
  Oligonucleotide for detection of SNP TSC0034750
rcttttatcccat

SEQ ID NO: 138701 - DNA, 13 bp, Artificial Sequence
  Oligonucleotide for detection of SNP TSC0034750
gttttttttttat

SEQ ID NO: 138702 - DNA, 13 bp, Artificial Sequence
  Oligonucleotide for detection of SNP TSC0034750
ataaaaaaaaaac

SEQ ID NO: 138703 - DNA, 13 bp, Artificial Sequence
  Oligonucleotide for detection of SNP TSC0034750
gtttttgttttat

SEQ ID NO: 138704 - DNA, 13 bp, Artificial Sequence
  Oligonucleotide for detection of SNP TSC0034750
ataaaacaaaaac

SEQ ID NO: 138705 - DNA, 13 bp, Artificial Sequence
  Oligonucleotide for detection of SNP TSC0034752
gttattggtattt

SEQ ID NO: 138706 - DNA, 13 bp, Artificial Sequence
  Oligonucleotide for detection of SNP TSC0034752
aaataccaataac

SEQ ID NO: 138707 - DNA, 13 bp, Artificial Sequence
  Oligonucleotide for detection of SNP TSC0034752
aaatgttaatagy

SEQ ID NO: 138708 - DNA, 13 bp, Artificial Sequence
  Oligonucleotide for detection of SNP TSC0034752
rctattaacattt

SEQ ID NO: 138709 - DNA, 13 bp, Artificial Sequence
  Oligonucleotide for detection of SNP TSC0034752
aaatgtaaatagy

SEQ ID NO: 138710 - DNA, 13 bp, Artificial Sequence
  Oligonucleotide for detection of SNP TSC0034752
rctatttacattt

SEQ ID NO: 138711 - DNA, 13 bp, Artificial Sequence
  Oligonucleotide for detection of SNP TSC0034753
gatttttgtttty

SEQ ID NO: 138712 - DNA, 13 bp, Artificial Sequence
  Oligonucleotide for detection of SNP TSC0034753
raaaacaaaaatc

SEQ ID NO: 138713 - DNA, 13 bp, Artificial Sequence
  Oligonucleotide for detection of SNP TSC0034753
gattttcgtttty

SEQ ID NO: 138714 - DNA, 13 bp, Artificial Sequence
  Oligonucleotide for detection of SNP TSC0034753
raaaacgaaaatc

SEQ ID NO: 138715 - DNA, 13 bp, Artificial Sequence
  Oligonucleotide for detection of SNP TSC0034753
gagggtgaaggty

SEQ ID NO: 138716 - DNA, 13 bp, Artificial Sequence
  Oligonucleotide for detection of SNP TSC0034753
raccttcaccctc

SEQ ID NO: 138717 - DNA, 13 bp, Artificial Sequence
  Oligonucleotide for detection of SNP TSC0034753
gagggtaaaggty

SEQ ID NO: 138718 - DNA, 13 bp, Artificial Sequence
  Oligonucleotide for detection of SNP TSC0034753
racctttaccctc

SEQ ID NO: 138719 - DNA, 13 bp, Artificial Sequence
  Oligonucleotide for detection of SNP TSC0034753
gagggcgaaggty

SEQ ID NO: 138720 - DNA, 13 bp, Artificial Sequence
  Oligonucleotide for detection of SNP TSC0034753
raccttcgccctc

SEQ ID NO: 138721 - DNA, 13 bp, Artificial Sequence
  Oligonucleotide for detection of SNP TSC0034754
ttaggtagagtta

SEQ ID NO: 138722 - DNA, 13 bp, Artificial Sequence
  Oligonucleotide for detection of SNP TSC0034754
taactctacctaa

SEQ ID NO: 138723 - DNA, 13 bp, Artificial Sequence
  Oligonucleotide for detection of SNP TSC0034754
ttaggtggagtta

SEQ ID NO: 138724 - DNA, 13 bp, Artificial Sequence
  Oligonucleotide for detection of SNP TSC0034754
taactccacctaa

SEQ ID NO: 138725 - DNA, 13 bp, Artificial Sequence
  Oligonucleotide for detection of SNP TSC0034754
ttaggcggagtta

SEQ ID NO: 138726 - DNA, 13 bp, Artificial Sequence
  Oligonucleotide for detection of SNP TSC0034754
taactccgcctaa

SEQ ID NO: 138727 - DNA, 13 bp, Artificial Sequence
  Oligonucleotide for detection of SNP TSC0034754
tggttttgtttga

SEQ ID NO: 138728 - DNA, 13 bp, Artificial Sequence
  Oligonucleotide for detection of SNP TSC0034754
tcaaacaaaacca

SEQ ID NO: 138729 - DNA, 13 bp, Artificial Sequence
  Oligonucleotide for detection of SNP TSC0034754
tggtttcgtttga

SEQ ID NO: 138730 - DNA, 13 bp, Artificial Sequence
  Oligonucleotide for detection of SNP TSC0034754
tcaaacgaaacca

SEQ ID NO: 138731 - DNA, 13 bp, Artificial Sequence
  Oligonucleotide for detection of SNP TSC0034757
gggtataggatgt

SEQ ID NO: 138732 - DNA, 13 bp, Artificial Sequence
  Oligonucleotide for detection of SNP TSC0034757
acatcctataccc

SEQ ID NO: 138733 - DNA, 13 bp, Artificial Sequence
  Oligonucleotide for detection of SNP TSC0034757
gggtatgggatgt

SEQ ID NO: 138734 - DNA, 13 bp, Artificial Sequence
  Oligonucleotide for detection of SNP TSC0034757
acatcccataccc

SEQ ID NO: 138735 - DNA, 13 bp, Artificial Sequence
  Oligonucleotide for detection of SNP TSC0034758
ttaagaattttta

SEQ ID NO: 138736 - DNA, 13 bp, Artificial Sequence
  Oligonucleotide for detection of SNP TSC0034758
taaaaattcttaa

SEQ ID NO: 138737 - DNA, 13 bp, Artificial Sequence
  Oligonucleotide for detection of SNP TSC0034758
ttaagatttttta

SEQ ID NO: 138738 - DNA, 13 bp, Artificial Sequence
  Oligonucleotide for detection of SNP TSC0034758
taaaaaatcttaa

SEQ ID NO: 138739 - DNA, 13 bp, Artificial Sequence
  Oligonucleotide for detection of SNP TSC0034758
tggaaatttttgg

SEQ ID NO: 138740 - DNA, 13 bp, Artificial Sequence
  Oligonucleotide for detection of SNP TSC0034758
ccaaaaatttcca

SEQ ID NO: 138741 - DNA, 13 bp, Artificial Sequence
  Oligonucleotide for detection of SNP TSC0034758
tggaaagttttgg

SEQ ID NO: 138742 - DNA, 13 bp, Artificial Sequence
  Oligonucleotide for detection of SNP TSC0034758
ccaaaactttcca

SEQ ID NO: 138743 - DNA, 13 bp, Artificial Sequence
  Oligonucleotide for detection of SNP TSC0034760
gtggaggagtttg

SEQ ID NO: 138744 - DNA, 13 bp, Artificial Sequence
  Oligonucleotide for detection of SNP TSC0034760
caaactcctccac

SEQ ID NO: 138745 - DNA, 13 bp, Artificial Sequence
  Oligonucleotide for detection of SNP TSC0034760
gtggagaagtttg

SEQ ID NO: 138746 - DNA, 13 bp, Artificial Sequence
  Oligonucleotide for detection of SNP TSC0034760
caaacttctccac

SEQ ID NO: 138747 - DNA, 13 bp, Artificial Sequence
  Oligonucleotide for detection of SNP TSC0034761
tatatatatatgt

SEQ ID NO: 138748 - DNA, 13 bp, Artificial Sequence
  Oligonucleotide for detection of SNP TSC0034761
acatatatatata

SEQ ID NO: 138749 - DNA, 13 bp, Artificial Sequence
  Oligonucleotide for detection of SNP TSC0034761
tatatagatatgt

SEQ ID NO: 138750 - DNA, 13 bp, Artificial Sequence
  Oligonucleotide for detection of SNP TSC0034761
acatatctatata

SEQ ID NO: 138751 - DNA, 13 bp, Artificial Sequence
  Oligonucleotide for detection of SNP TSC0034761
tatatatatacgt

SEQ ID NO: 138752 - DNA, 13 bp, Artificial Sequence
  Oligonucleotide for detection of SNP TSC0034761
acgtatatatata

SEQ ID NO: 138753 - DNA, 13 bp, Artificial Sequence
  Oligonucleotide for detection of SNP TSC0034761
tatatagatacgt

SEQ ID NO: 138754 - DNA, 13 bp, Artificial Sequence
  Oligonucleotide for detection of SNP TSC0034761
acgtatctatata

SEQ ID NO: 138755 - DNA, 13 bp, Artificial Sequence
  Oligonucleotide for detection of SNP TSC0034761
atgtgtttgtgtg

SEQ ID NO: 138756 - DNA, 13 bp, Artificial Sequence
  Oligonucleotide for detection of SNP TSC0034761
cacacaaacacat

SEQ ID NO: 138757 - DNA, 13 bp, Artificial Sequence
  Oligonucleotide for detection of SNP TSC0034761
acgtgtgtgtgtg

SEQ ID NO: 138758 - DNA, 13 bp, Artificial Sequence
  Oligonucleotide for detection of SNP TSC0034761
cacacacacacgt

SEQ ID NO: 138759 - DNA, 13 bp, Artificial Sequence
  Oligonucleotide for detection of SNP TSC0034761
acgtgtttgtgtg

SEQ ID NO: 138760 - DNA, 13 bp, Artificial Sequence
  Oligonucleotide for detection of SNP TSC0034761
cacacaaacacgt

SEQ ID NO: 138761 - DNA, 13 bp, Artificial Sequence
  Oligonucleotide for detection of SNP TSC0034762
taaattattttay

SEQ ID NO: 138762 - DNA, 13 bp, Artificial Sequence
  Oligonucleotide for detection of SNP TSC0034762
rtaaaataattta

SEQ ID NO: 138763 - DNA, 13 bp, Artificial Sequence
  Oligonucleotide for detection of SNP TSC0034762
taaatttttttay

SEQ ID NO: 138764 - DNA, 13 bp, Artificial Sequence
  Oligonucleotide for detection of SNP TSC0034762
rtaaaaaaattta

SEQ ID NO: 138765 - DNA, 13 bp, Artificial Sequence
  Oligonucleotide for detection of SNP TSC0034762
gtagagtggttta

SEQ ID NO: 138766 - DNA, 13 bp, Artificial Sequence
  Oligonucleotide for detection of SNP TSC0034762
taaaccactctac

SEQ ID NO: 138767 - DNA, 13 bp, Artificial Sequence
  Oligonucleotide for detection of SNP TSC0034762
gtagagaggttta

SEQ ID NO: 138768 - DNA, 13 bp, Artificial Sequence
  Oligonucleotide for detection of SNP TSC0034762
taaacctctctac

SEQ ID NO: 138769 - DNA, 13 bp, Artificial Sequence
  Oligonucleotide for detection of SNP TSC0034763
tggtttgttattg

SEQ ID NO: 138770 - DNA, 13 bp, Artificial Sequence
  Oligonucleotide for detection of SNP TSC0034763
caataacaaacca

SEQ ID NO: 138771 - DNA, 13 bp, Artificial Sequence
  Oligonucleotide for detection of SNP TSC0034763
tggttttttattg

SEQ ID NO: 138772 - DNA, 13 bp, Artificial Sequence
  Oligonucleotide for detection of SNP TSC0034763
caataaaaaacca

SEQ ID NO: 138773 - DNA, 13 bp, Artificial Sequence
  Oligonucleotide for detection of SNP TSC0034763
cggtttgttattg

SEQ ID NO: 138774 - DNA, 13 bp, Artificial Sequence
  Oligonucleotide for detection of SNP TSC0034763
caataacaaaccg

SEQ ID NO: 138775 - DNA, 13 bp, Artificial Sequence
  Oligonucleotide for detection of SNP TSC0034763
cggttttttattg

SEQ ID NO: 138776 - DNA, 13 bp, Artificial Sequence
  Oligonucleotide for detection of SNP TSC0034763
caataaaaaaccg

SEQ ID NO: 138777 - DNA, 13 bp, Artificial Sequence
  Oligonucleotide for detection of SNP TSC0034763
tggttcgttattg

SEQ ID NO: 138778 - DNA, 13 bp, Artificial Sequence
  Oligonucleotide for detection of SNP TSC0034763
caataacgaacca

SEQ ID NO: 138779 - DNA, 13 bp, Artificial Sequence
  Oligonucleotide for detection of SNP TSC0034763
cggttcgttattg

SEQ ID NO: 138780 - DNA, 13 bp, Artificial Sequence
  Oligonucleotide for detection of SNP TSC0034763
caataacgaaccg

SEQ ID NO: 138781 - DNA, 13 bp, Artificial Sequence
  Oligonucleotide for detection of SNP TSC0034763
taatgatgggttg

SEQ ID NO: 138782 - DNA, 13 bp, Artificial Sequence
  Oligonucleotide for detection of SNP TSC0034763
caacccatcatta

SEQ ID NO: 138783 - DNA, 13 bp, Artificial Sequence
  Oligonucleotide for detection of SNP TSC0034763
taatgaagggttg

SEQ ID NO: 138784 - DNA, 13 bp, Artificial Sequence
  Oligonucleotide for detection of SNP TSC0034763
caacccttcatta

SEQ ID NO: 138785 - DNA, 13 bp, Artificial Sequence
  Oligonucleotide for detection of SNP TSC0034763
taatgacgggttg

SEQ ID NO: 138786 - DNA, 13 bp, Artificial Sequence
  Oligonucleotide for detection of SNP TSC0034763
caacccgtcatta

SEQ ID NO: 138787 - DNA, 13 bp, Artificial Sequence
  Oligonucleotide for detection of SNP TSC0034763
taatgaagggtcg

SEQ ID NO: 138788 - DNA, 13 bp, Artificial Sequence
  Oligonucleotide for detection of SNP TSC0034763
cgacccttcatta

SEQ ID NO: 138789 - DNA, 13 bp, Artificial Sequence
  Oligonucleotide for detection of SNP TSC0034763
taatgatgggtcg

SEQ ID NO: 138790 - DNA, 13 bp, Artificial Sequence
  Oligonucleotide for detection of SNP TSC0034763
cgacccatcatta

SEQ ID NO: 138791 - DNA, 13 bp, Artificial Sequence
  Oligonucleotide for detection of SNP TSC0034763
taatgacgggtcg

SEQ ID NO: 138792 - DNA, 13 bp, Artificial Sequence
  Oligonucleotide for detection of SNP TSC0034763
cgacccgtcatta

SEQ ID NO: 138793 - DNA, 13 bp, Artificial Sequence
  Oligonucleotide for detection of SNP TSC0034764
gattagaataagy

SEQ ID NO: 138794 - DNA, 13 bp, Artificial Sequence
  Oligonucleotide for detection of SNP TSC0034764
rcttattctaatc

SEQ ID NO: 138795 - DNA, 13 bp, Artificial Sequence
  Oligonucleotide for detection of SNP TSC0034764
gattagtataagy

SEQ ID NO: 138796 - DNA, 13 bp, Artificial Sequence
  Oligonucleotide for detection of SNP TSC0034764
rcttatactaatc

SEQ ID NO: 138797 - DNA, 13 bp, Artificial Sequence
  Oligonucleotide for detection of SNP TSC0034764
gtttgttttgaty

SEQ ID NO: 138798 - DNA, 13 bp, Artificial Sequence
  Oligonucleotide for detection of SNP TSC0034764
ratcaaaacaaac

SEQ ID NO: 138799 - DNA, 13 bp, Artificial Sequence
  Oligonucleotide for detection of SNP TSC0034764
gtttgtattgaty

SEQ ID NO: 138800 - DNA, 13 bp, Artificial Sequence
  Oligonucleotide for detection of SNP TSC0034764
ratcaatacaaac

SEQ ID NO: 138801 - DNA, 13 bp, Artificial Sequence
  Oligonucleotide for detection of SNP TSC0034765
tagaggtgttagg

SEQ ID NO: 138802 - DNA, 13 bp, Artificial Sequence
  Oligonucleotide for detection of SNP TSC0034765
cctaacacctcta

SEQ ID NO: 138803 - DNA, 13 bp, Artificial Sequence
  Oligonucleotide for detection of SNP TSC0034765
tagaggggttagg

SEQ ID NO: 138804 - DNA, 13 bp, Artificial Sequence
  Oligonucleotide for detection of SNP TSC0034765
cctaacccctcta

SEQ ID NO: 138805 - DNA, 13 bp, Artificial Sequence
  Oligonucleotide for detection of SNP TSC0034765
tagaggcgttagg

SEQ ID NO: 138806 - DNA, 13 bp, Artificial Sequence
  Oligonucleotide for detection of SNP TSC0034765
cctaacgcctcta

SEQ ID NO: 138807 - DNA, 13 bp, Artificial Sequence
  Oligonucleotide for detection of SNP TSC0034765
tttggtttttttg

SEQ ID NO: 138808 - DNA, 13 bp, Artificial Sequence
  Oligonucleotide for detection of SNP TSC0034765
caaaaaaaccaaa

SEQ ID NO: 138809 - DNA, 13 bp, Artificial Sequence
  Oligonucleotide for detection of SNP TSC0034766
agattgataataa

SEQ ID NO: 138810 - DNA, 13 bp, Artificial Sequence
  Oligonucleotide for detection of SNP TSC0034766
ttattatcaatct

SEQ ID NO: 138811 - DNA, 13 bp, Artificial Sequence
  Oligonucleotide for detection of SNP TSC0034766
agattggtaataa

SEQ ID NO: 138812 - DNA, 13 bp, Artificial Sequence
  Oligonucleotide for detection of SNP TSC0034766
ttattaccaatct

SEQ ID NO: 138813 - DNA, 13 bp, Artificial Sequence
  Oligonucleotide for detection of SNP TSC0034767
aatatatgtgtga

SEQ ID NO: 138814 - DNA, 13 bp, Artificial Sequence
  Oligonucleotide for detection of SNP TSC0034767
tcacacatatatt

SEQ ID NO: 138815 - DNA, 13 bp, Artificial Sequence
  Oligonucleotide for detection of SNP TSC0034767
aatataggtgtga

SEQ ID NO: 138816 - DNA, 13 bp, Artificial Sequence
  Oligonucleotide for detection of SNP TSC0034767
tcacacctatatt

SEQ ID NO: 138817 - DNA, 13 bp, Artificial Sequence
  Oligonucleotide for detection of SNP TSC0034767
aatatacgtgtga

SEQ ID NO: 138818 - DNA, 13 bp, Artificial Sequence
  Oligonucleotide for detection of SNP TSC0034767
tcacacgtatatt

SEQ ID NO: 138819 - DNA, 13 bp, Artificial Sequence
  Oligonucleotide for detection of SNP TSC0034767
ttatatgtgtatt

SEQ ID NO: 138820 - DNA, 13 bp, Artificial Sequence
  Oligonucleotide for detection of SNP TSC0034767
aatacacatataa

SEQ ID NO: 138821 - DNA, 13 bp, Artificial Sequence
  Oligonucleotide for detection of SNP TSC0034767
ttatatttgtatt

SEQ ID NO: 138822 - DNA, 13 bp, Artificial Sequence
  Oligonucleotide for detection of SNP TSC0034767
aatacaaatataa

SEQ ID NO: 138823 - DNA, 13 bp, Artificial Sequence
  Oligonucleotide for detection of SNP TSC0034767
ttatacgtgtatt

SEQ ID NO: 138824 - DNA, 13 bp, Artificial Sequence
  Oligonucleotide for detection of SNP TSC0034767
aatacacgtataa

SEQ ID NO: 138825 - DNA, 13 bp, Artificial Sequence
  Oligonucleotide for detection of SNP TSC0034768
taaatagttatgt

SEQ ID NO: 138826 - DNA, 13 bp, Artificial Sequence
  Oligonucleotide for detection of SNP TSC0034768
acataactattta

SEQ ID NO: 138827 - DNA, 13 bp, Artificial Sequence
  Oligonucleotide for detection of SNP TSC0034768
taaatatttatgt

SEQ ID NO: 138828 - DNA, 13 bp, Artificial Sequence
  Oligonucleotide for detection of SNP TSC0034768
acataaatattta

SEQ ID NO: 138829 - DNA, 13 bp, Artificial Sequence
  Oligonucleotide for detection of SNP TSC0034768
atataattgtttg

SEQ ID NO: 138830 - DNA, 13 bp, Artificial Sequence
  Oligonucleotide for detection of SNP TSC0034768
caaacaattatat

SEQ ID NO: 138831 - DNA, 13 bp, Artificial Sequence
  Oligonucleotide for detection of SNP TSC0034768
atataaatgtttg

SEQ ID NO: 138832 - DNA, 13 bp, Artificial Sequence
  Oligonucleotide for detection of SNP TSC0034768
caaacatttatat

SEQ ID NO: 138833 - DNA, 13 bp, Artificial Sequence
  Oligonucleotide for detection of SNP TSC0034769
tatggttgtgttt

SEQ ID NO: 138834 - DNA, 13 bp, Artificial Sequence
  Oligonucleotide for detection of SNP TSC0034769
aaacacaaccata

SEQ ID NO: 138835 - DNA, 13 bp, Artificial Sequence
  Oligonucleotide for detection of SNP TSC0034769
tatggtggtgttt

SEQ ID NO: 138836 - DNA, 13 bp, Artificial Sequence
  Oligonucleotide for detection of SNP TSC0034769
aaacaccaccata

SEQ ID NO: 138837 - DNA, 13 bp, Artificial Sequence
  Oligonucleotide for detection of SNP TSC0034769
tatggtcgtgttt

SEQ ID NO: 138838 - DNA, 13 bp, Artificial Sequence
  Oligonucleotide for detection of SNP TSC0034769
aaacacgaccata

SEQ ID NO: 138839 - DNA, 13 bp, Artificial Sequence
  Oligonucleotide for detection of SNP TSC0034769
aagtatgattatg

SEQ ID NO: 138840 - DNA, 13 bp, Artificial Sequence
  Oligonucleotide for detection of SNP TSC0034769
cataatcatactt

SEQ ID NO: 138841 - DNA, 13 bp, Artificial Sequence
  Oligonucleotide for detection of SNP TSC0034769
aagtattattatg

SEQ ID NO: 138842 - DNA, 13 bp, Artificial Sequence
  Oligonucleotide for detection of SNP TSC0034769
cataataatactt

SEQ ID NO: 138843 - DNA, 13 bp, Artificial Sequence
  Oligonucleotide for detection of SNP TSC0034769
aagtacgattatg

SEQ ID NO: 138844 - DNA, 13 bp, Artificial Sequence
  Oligonucleotide for detection of SNP TSC0034769
cataatcgtactt

SEQ ID NO: 138845 - DNA, 13 bp, Artificial Sequence
  Oligonucleotide for detection of SNP TSC0034770
agtttaggtgaag

SEQ ID NO: 138846 - DNA, 13 bp, Artificial Sequence
  Oligonucleotide for detection of SNP TSC0034770
cttcacctaaact

SEQ ID NO: 138847 - DNA, 13 bp, Artificial Sequence
  Oligonucleotide for detection of SNP TSC0034770
agtttaagtgaag

SEQ ID NO: 138848 - DNA, 13 bp, Artificial Sequence
  Oligonucleotide for detection of SNP TSC0034770
cttcacttaaact

SEQ ID NO: 138849 - DNA, 13 bp, Artificial Sequence
  Oligonucleotide for detection of SNP TSC0034772
ggagaggggaatt

SEQ ID NO: 138850 - DNA, 13 bp, Artificial Sequence
  Oligonucleotide for detection of SNP TSC0034772
aattcccctctcc

SEQ ID NO: 138851 - DNA, 13 bp, Artificial Sequence
  Oligonucleotide for detection of SNP TSC0034772
ggagagtggaatt

SEQ ID NO: 138852 - DNA, 13 bp, Artificial Sequence
  Oligonucleotide for detection of SNP TSC0034772
aattccactctcc

SEQ ID NO: 138853 - DNA, 13 bp, Artificial Sequence
  Oligonucleotide for detection of SNP TSC0034772
ggagagcggaatt

SEQ ID NO: 138854 - DNA, 13 bp, Artificial Sequence
  Oligonucleotide for detection of SNP TSC0034772
aattccgctctcc

SEQ ID NO: 138855 - DNA, 13 bp, Artificial Sequence
  Oligonucleotide for detection of SNP TSC0034774
gtttggaatagty

SEQ ID NO: 138856 - DNA, 13 bp, Artificial Sequence
  Oligonucleotide for detection of SNP TSC0034774
ractattccaaac

SEQ ID NO: 138857 - DNA, 13 bp, Artificial Sequence
  Oligonucleotide for detection of SNP TSC0034774
gtttgggatagty

SEQ ID NO: 138858 - DNA, 13 bp, Artificial Sequence
  Oligonucleotide for detection of SNP TSC0034774
ractatcccaaac

SEQ ID NO: 138859 - DNA, 13 bp, Artificial Sequence
  Oligonucleotide for detection of SNP TSC0034774
gttcggaatagty

SEQ ID NO: 138860 - DNA, 13 bp, Artificial Sequence
  Oligonucleotide for detection of SNP TSC0034774
ractattccgaac

SEQ ID NO: 138861 - DNA, 13 bp, Artificial Sequence
  Oligonucleotide for detection of SNP TSC0034774
gttcgggatagty

SEQ ID NO: 138862 - DNA, 13 bp, Artificial Sequence
  Oligonucleotide for detection of SNP TSC0034774
ractatcccgaac

SEQ ID NO: 138863 - DNA, 13 bp, Artificial Sequence
  Oligonucleotide for detection of SNP TSC0034775
aatgaggataatt

SEQ ID NO: 138864 - DNA, 13 bp, Artificial Sequence
  Oligonucleotide for detection of SNP TSC0034775
aattatcctcatt

SEQ ID NO: 138865 - DNA, 13 bp, Artificial Sequence
  Oligonucleotide for detection of SNP TSC0034775
aatgagaataatt

SEQ ID NO: 138866 - DNA, 13 bp, Artificial Sequence
  Oligonucleotide for detection of SNP TSC0034775
aattattctcatt

SEQ ID NO: 138867 - DNA, 13 bp, Artificial Sequence
  Oligonucleotide for detection of SNP TSC0034776
aatggagttaagt

SEQ ID NO: 138868 - DNA, 13 bp, Artificial Sequence
  Oligonucleotide for detection of SNP TSC0034776
acttaactccatt

SEQ ID NO: 138869 - DNA, 13 bp, Artificial Sequence
  Oligonucleotide for detection of SNP TSC0034776
aatggaattaagt

SEQ ID NO: 138870 - DNA, 13 bp, Artificial Sequence
  Oligonucleotide for detection of SNP TSC0034776
acttaattccatt

SEQ ID NO: 138871 - DNA, 13 bp, Artificial Sequence
  Oligonucleotide for detection of SNP TSC0034782
gagttttgaaggt

SEQ ID NO: 138872 - DNA, 13 bp, Artificial Sequence
  Oligonucleotide for detection of SNP TSC0034782
accttcaaaactc

SEQ ID NO: 138873 - DNA, 13 bp, Artificial Sequence
  Oligonucleotide for detection of SNP TSC0034782
gagtttagaaggt

SEQ ID NO: 138874 - DNA, 13 bp, Artificial Sequence
  Oligonucleotide for detection of SNP TSC0034782
accttctaaactc

SEQ ID NO: 138875 - DNA, 13 bp, Artificial Sequence
  Oligonucleotide for detection of SNP TSC0034788
taggttatgtttg

SEQ ID NO: 138876 - DNA, 13 bp, Artificial Sequence
  Oligonucleotide for detection of SNP TSC0034788
caaacataaccta

SEQ ID NO: 138877 - DNA, 13 bp, Artificial Sequence
  Oligonucleotide for detection of SNP TSC0034788
taggttttgtttg

SEQ ID NO: 138878 - DNA, 13 bp, Artificial Sequence
  Oligonucleotide for detection of SNP TSC0034788
caaacaaaaccta

SEQ ID NO: 138879 - DNA, 13 bp, Artificial Sequence
  Oligonucleotide for detection of SNP TSC0034788
taggtatggtttg

SEQ ID NO: 138880 - DNA, 13 bp, Artificial Sequence
  Oligonucleotide for detection of SNP TSC0034788
caaaccataccta

SEQ ID NO: 138881 - DNA, 13 bp, Artificial Sequence
  Oligonucleotide for detection of SNP TSC0034788
taggtagggtttg

SEQ ID NO: 138882 - DNA, 13 bp, Artificial Sequence
  Oligonucleotide for detection of SNP TSC0034788
caaaccctaccta

SEQ ID NO: 138883 - DNA, 13 bp, Artificial Sequence
  Oligonucleotide for detection of SNP TSC0034789
aagtaagtgttty

SEQ ID NO: 138884 - DNA, 13 bp, Artificial Sequence
  Oligonucleotide for detection of SNP TSC0034789
raaacacttactt

SEQ ID NO: 138885 - DNA, 13 bp, Artificial Sequence
  Oligonucleotide for detection of SNP TSC0034789
aagtaaatgttty

SEQ ID NO: 138886 - DNA, 13 bp, Artificial Sequence
  Oligonucleotide for detection of SNP TSC0034789
raaacatttactt

SEQ ID NO: 138887 - DNA, 13 bp, Artificial Sequence
  Oligonucleotide for detection of SNP TSC0034791
ttttgggagggta

SEQ ID NO: 138888 - DNA, 13 bp, Artificial Sequence
  Oligonucleotide for detection of SNP TSC0034791
taccctcccaaaa

SEQ ID NO: 138889 - DNA, 13 bp, Artificial Sequence
  Oligonucleotide for detection of SNP TSC0034791
ttttggaagggta

SEQ ID NO: 138890 - DNA, 13 bp, Artificial Sequence
  Oligonucleotide for detection of SNP TSC0034791
tacccttccaaaa

SEQ ID NO: 138891 - DNA, 13 bp, Artificial Sequence
  Oligonucleotide for detection of SNP TSC0034791
tttcgggagggta

SEQ ID NO: 138892 - DNA, 13 bp, Artificial Sequence
  Oligonucleotide for detection of SNP TSC0034791
taccctcccgaaa

SEQ ID NO: 138893 - DNA, 13 bp, Artificial Sequence
  Oligonucleotide for detection of SNP TSC0034791
tttcggaagggta

SEQ ID NO: 138894 - DNA, 13 bp, Artificial Sequence
  Oligonucleotide for detection of SNP TSC0034791
tacccttccgaaa

SEQ ID NO: 138895 - DNA, 13 bp, Artificial Sequence
  Oligonucleotide for detection of SNP TSC0034792
ttaaaatgtttay

SEQ ID NO: 138896 - DNA, 13 bp, Artificial Sequence
  Oligonucleotide for detection of SNP TSC0034792
rtaaacattttaa

SEQ ID NO: 138897 - DNA, 13 bp, Artificial Sequence
  Oligonucleotide for detection of SNP TSC0034792
ttaaaacgtttay

SEQ ID NO: 138898 - DNA, 13 bp, Artificial Sequence
  Oligonucleotide for detection of SNP TSC0034792
rtaaacgttttaa

SEQ ID NO: 138899 - DNA, 13 bp, Artificial Sequence
  Oligonucleotide for detection of SNP TSC0034792
gtaagtgttttaa

SEQ ID NO: 138900 - DNA, 13 bp, Artificial Sequence
  Oligonucleotide for detection of SNP TSC0034792
ttaaaacacttac

SEQ ID NO: 138901 - DNA, 13 bp, Artificial Sequence
  Oligonucleotide for detection of SNP TSC0034792
gtaagtattttaa

SEQ ID NO: 138902 - DNA, 13 bp, Artificial Sequence
  Oligonucleotide for detection of SNP TSC0034792
ttaaaatacttac

SEQ ID NO: 138903 - DNA, 13 bp, Artificial Sequence
  Oligonucleotide for detection of SNP TSC0034792
gtaagcgttttaa

SEQ ID NO: 138904 - DNA, 13 bp, Artificial Sequence
  Oligonucleotide for detection of SNP TSC0034792
ttaaaacgcttac

SEQ ID NO: 138905 - DNA, 13 bp, Artificial Sequence
  Oligonucleotide for detection of SNP TSC0034798
ttttttcgtattt

SEQ ID NO: 138906 - DNA, 13 bp, Artificial Sequence
  Oligonucleotide for detection of SNP TSC0034798
aaatacgaaaaaa

SEQ ID NO: 138907 - DNA, 13 bp, Artificial Sequence
  Oligonucleotide for detection of SNP TSC0034798
aagtgtgggggaa

SEQ ID NO: 138908 - DNA, 13 bp, Artificial Sequence
  Oligonucleotide for detection of SNP TSC0034798
ttcccccacactt

SEQ ID NO: 138909 - DNA, 13 bp, Artificial Sequence
  Oligonucleotide for detection of SNP TSC0034798
aagtgtaggggaa

SEQ ID NO: 138910 - DNA, 13 bp, Artificial Sequence
  Oligonucleotide for detection of SNP TSC0034798
ttcccctacactt

SEQ ID NO: 138911 - DNA, 13 bp, Artificial Sequence
  Oligonucleotide for detection of SNP TSC0034798
aagtgcgggggaa

SEQ ID NO: 138912 - DNA, 13 bp, Artificial Sequence
  Oligonucleotide for detection of SNP TSC0034798
ttcccccgcactt

SEQ ID NO: 138913 - DNA, 13 bp, Artificial Sequence
  Oligonucleotide for detection of SNP TSC0034799
taggatgtttttt

SEQ ID NO: 138914 - DNA, 13 bp, Artificial Sequence
  Oligonucleotide for detection of SNP TSC0034799
aaaaaacatccta

SEQ ID NO: 138915 - DNA, 13 bp, Artificial Sequence
  Oligonucleotide for detection of SNP TSC0034799
taggacgtttttt

SEQ ID NO: 138916 - DNA, 13 bp, Artificial Sequence
  Oligonucleotide for detection of SNP TSC0034799
aaaaaacgtccta

SEQ ID NO: 138917 - DNA, 13 bp, Artificial Sequence
  Oligonucleotide for detection of SNP TSC0034799
agggagtgttttg

SEQ ID NO: 138918 - DNA, 13 bp, Artificial Sequence
  Oligonucleotide for detection of SNP TSC0034799
caaaacactccct

SEQ ID NO: 138919 - DNA, 13 bp, Artificial Sequence
  Oligonucleotide for detection of SNP TSC0034799
agggagcgttttg

SEQ ID NO: 138920 - DNA, 13 bp, Artificial Sequence
  Oligonucleotide for detection of SNP TSC0034799
caaaacgctccct

SEQ ID NO: 138921 - DNA, 13 bp, Artificial Sequence
  Oligonucleotide for detection of SNP TSC0034802
ttatcgtttttty

SEQ ID NO: 138922 - DNA, 13 bp, Artificial Sequence
  Oligonucleotide for detection of SNP TSC0034802
raaaaaacgataa

SEQ ID NO: 138923 - DNA, 13 bp, Artificial Sequence
  Oligonucleotide for detection of SNP TSC0034802
ttatcggttttty

SEQ ID NO: 138924 - DNA, 13 bp, Artificial Sequence
  Oligonucleotide for detection of SNP TSC0034802
raaaaaccgataa

SEQ ID NO: 138925 - DNA, 13 bp, Artificial Sequence
  Oligonucleotide for detection of SNP TSC0034802
gaaagggtggtgg

SEQ ID NO: 138926 - DNA, 13 bp, Artificial Sequence
  Oligonucleotide for detection of SNP TSC0034802
ccaccaccctttc

SEQ ID NO: 138927 - DNA, 13 bp, Artificial Sequence
  Oligonucleotide for detection of SNP TSC0034802
gaaaggttggtgg

SEQ ID NO: 138928 - DNA, 13 bp, Artificial Sequence
  Oligonucleotide for detection of SNP TSC0034802
ccaccaacctttc

SEQ ID NO: 138929 - DNA, 13 bp, Artificial Sequence
  Oligonucleotide for detection of SNP TSC0034802
gaaagggcggtgg

SEQ ID NO: 138930 - DNA, 13 bp, Artificial Sequence
  Oligonucleotide for detection of SNP TSC0034802
ccaccgccctttc

SEQ ID NO: 138931 - DNA, 13 bp, Artificial Sequence
  Oligonucleotide for detection of SNP TSC0034802
gaaaggtcggtgg

SEQ ID NO: 138932 - DNA, 13 bp, Artificial Sequence
  Oligonucleotide for detection of SNP TSC0034802
ccaccgacctttc

SEQ ID NO: 138933 - DNA, 13 bp, Artificial Sequence
  Oligonucleotide for detection of SNP TSC0034804
tttattagttata

SEQ ID NO: 138934 - DNA, 13 bp, Artificial Sequence
  Oligonucleotide for detection of SNP TSC0034804
tataactaataaa

SEQ ID NO: 138935 - DNA, 13 bp, Artificial Sequence
  Oligonucleotide for detection of SNP TSC0034804
tttatttgttata

SEQ ID NO: 138936 - DNA, 13 bp, Artificial Sequence
  Oligonucleotide for detection of SNP TSC0034804
tataacaaataaa

SEQ ID NO: 138937 - DNA, 13 bp, Artificial Sequence
  Oligonucleotide for detection of SNP TSC0034804
tatagttgatggg

SEQ ID NO: 138938 - DNA, 13 bp, Artificial Sequence
  Oligonucleotide for detection of SNP TSC0034804
cccatcaactata

SEQ ID NO: 138939 - DNA, 13 bp, Artificial Sequence
  Oligonucleotide for detection of SNP TSC0034804
tatagtagatggg

SEQ ID NO: 138940 - DNA, 13 bp, Artificial Sequence
  Oligonucleotide for detection of SNP TSC0034804
cccatctactata

SEQ ID NO: 138941 - DNA, 13 bp, Artificial Sequence
  Oligonucleotide for detection of SNP TSC0034805
ggtttagaggatg

SEQ ID NO: 138942 - DNA, 13 bp, Artificial Sequence
  Oligonucleotide for detection of SNP TSC0034805
catcctctaaacc

SEQ ID NO: 138943 - DNA, 13 bp, Artificial Sequence
  Oligonucleotide for detection of SNP TSC0034805
ggtttaaaggatg

SEQ ID NO: 138944 - DNA, 13 bp, Artificial Sequence
  Oligonucleotide for detection of SNP TSC0034805
catcctttaaacc

SEQ ID NO: 138945 - DNA, 13 bp, Artificial Sequence
  Oligonucleotide for detection of SNP TSC0034808
tgttttattttaa

SEQ ID NO: 138946 - DNA, 13 bp, Artificial Sequence
  Oligonucleotide for detection of SNP TSC0034808
ttaaaataaaaca

SEQ ID NO: 138947 - DNA, 13 bp, Artificial Sequence
  Oligonucleotide for detection of SNP TSC0034808
tgtttcgttttaa

SEQ ID NO: 138948 - DNA, 13 bp, Artificial Sequence
  Oligonucleotide for detection of SNP TSC0034808
ttaaaacgaaaca

SEQ ID NO: 138949 - DNA, 13 bp, Artificial Sequence
  Oligonucleotide for detection of SNP TSC0034808
ttgagatggagta

SEQ ID NO: 138950 - DNA, 13 bp, Artificial Sequence
  Oligonucleotide for detection of SNP TSC0034808
tactccatctcaa

SEQ ID NO: 138951 - DNA, 13 bp, Artificial Sequence
  Oligonucleotide for detection of SNP TSC0034808
ttgagacggagta

SEQ ID NO: 138952 - DNA, 13 bp, Artificial Sequence
  Oligonucleotide for detection of SNP TSC0034808
tactccgtctcaa

SEQ ID NO: 138953 - DNA, 13 bp, Artificial Sequence
  Oligonucleotide for detection of SNP TSC0034809
aaaattgttaagg

SEQ ID NO: 138954 - DNA, 13 bp, Artificial Sequence
  Oligonucleotide for detection of SNP TSC0034809
ccttaacaatttt

SEQ ID NO: 138955 - DNA, 13 bp, Artificial Sequence
  Oligonucleotide for detection of SNP TSC0034811
tagtatattttga

SEQ ID NO: 138956 - DNA, 13 bp, Artificial Sequence
  Oligonucleotide for detection of SNP TSC0034811
tcaaaatatacta

SEQ ID NO: 138957 - DNA, 13 bp, Artificial Sequence
  Oligonucleotide for detection of SNP TSC0034811
tagtatgttttga

SEQ ID NO: 138958 - DNA, 13 bp, Artificial Sequence
  Oligonucleotide for detection of SNP TSC0034811
tcaaaacatacta

SEQ ID NO: 138959 - DNA, 13 bp, Artificial Sequence
  Oligonucleotide for detection of SNP TSC0034813
gtagttttagtgy

SEQ ID NO: 138960 - DNA, 13 bp, Artificial Sequence
  Oligonucleotide for detection of SNP TSC0034813
rcactaaaactac

SEQ ID NO: 138961 - DNA, 13 bp, Artificial Sequence
  Oligonucleotide for detection of SNP TSC0034813
gtagttgtagtgy

SEQ ID NO: 138962 - DNA, 13 bp, Artificial Sequence
  Oligonucleotide for detection of SNP TSC0034813
rcactacaactac

SEQ ID NO: 138963 - DNA, 13 bp, Artificial Sequence
  Oligonucleotide for detection of SNP TSC0034813
gtagttttagcgy

SEQ ID NO: 138964 - DNA, 13 bp, Artificial Sequence
  Oligonucleotide for detection of SNP TSC0034813
rcgctaaaactac

SEQ ID NO: 138965 - DNA, 13 bp, Artificial Sequence
  Oligonucleotide for detection of SNP TSC0034813
gtagtcgtagtgy

SEQ ID NO: 138966 - DNA, 13 bp, Artificial Sequence
  Oligonucleotide for detection of SNP TSC0034813
rcactacgactac

SEQ ID NO: 138967 - DNA, 13 bp, Artificial Sequence
  Oligonucleotide for detection of SNP TSC0034813
gtagttgtagcgy

SEQ ID NO: 138968 - DNA, 13 bp, Artificial Sequence
  Oligonucleotide for detection of SNP TSC0034813
rcgctacaactac

SEQ ID NO: 138969 - DNA, 13 bp, Artificial Sequence
  Oligonucleotide for detection of SNP TSC0034813
gtagtcgtagcgy

SEQ ID NO: 138970 - DNA, 13 bp, Artificial Sequence
  Oligonucleotide for detection of SNP TSC0034813
rcgctacgactac

SEQ ID NO: 138971 - DNA, 13 bp, Artificial Sequence
  Oligonucleotide for detection of SNP TSC0034813
gtgttggggttgy

SEQ ID NO: 138972 - DNA, 13 bp, Artificial Sequence
  Oligonucleotide for detection of SNP TSC0034813
rcaaccccaacac

SEQ ID NO: 138973 - DNA, 13 bp, Artificial Sequence
  Oligonucleotide for detection of SNP TSC0034813
gtgttgtggttgy

SEQ ID NO: 138974 - DNA, 13 bp, Artificial Sequence
  Oligonucleotide for detection of SNP TSC0034813
rcaaccacaacac

SEQ ID NO: 138975 - DNA, 13 bp, Artificial Sequence
  Oligonucleotide for detection of SNP TSC0034813
gcgttggggttgy

SEQ ID NO: 138976 - DNA, 13 bp, Artificial Sequence
  Oligonucleotide for detection of SNP TSC0034813
rcaaccccaacgc

SEQ ID NO: 138977 - DNA, 13 bp, Artificial Sequence
  Oligonucleotide for detection of SNP TSC0034813
gcgttgtggttgy

SEQ ID NO: 138978 - DNA, 13 bp, Artificial Sequence
  Oligonucleotide for detection of SNP TSC0034813
rcaaccacaacgc

SEQ ID NO: 138979 - DNA, 13 bp, Artificial Sequence
  Oligonucleotide for detection of SNP TSC0034813
gtgttgcggttgy

SEQ ID NO: 138980 - DNA, 13 bp, Artificial Sequence
  Oligonucleotide for detection of SNP TSC0034813
rcaaccgcaacac

SEQ ID NO: 138981 - DNA, 13 bp, Artificial Sequence
  Oligonucleotide for detection of SNP TSC0034813
gcgttgcggttgy

SEQ ID NO: 138982 - DNA, 13 bp, Artificial Sequence
  Oligonucleotide for detection of SNP TSC0034813
rcaaccgcaacgc

SEQ ID NO: 138983 - DNA, 13 bp, Artificial Sequence
  Oligonucleotide for detection of SNP TSC0034814
tgtagtgtaagta

SEQ ID NO: 138984 - DNA, 13 bp, Artificial Sequence
  Oligonucleotide for detection of SNP TSC0034814
tacttacactaca

SEQ ID NO: 138985 - DNA, 13 bp, Artificial Sequence
  Oligonucleotide for detection of SNP TSC0034814
tgtagtataagta

SEQ ID NO: 138986 - DNA, 13 bp, Artificial Sequence
  Oligonucleotide for detection of SNP TSC0034814
tacttatactaca

SEQ ID NO: 138987 - DNA, 13 bp, Artificial Sequence
  Oligonucleotide for detection of SNP TSC0034814
cgtagtgtaagta

SEQ ID NO: 138988 - DNA, 13 bp, Artificial Sequence
  Oligonucleotide for detection of SNP TSC0034814
tacttacactacg

SEQ ID NO: 138989 - DNA, 13 bp, Artificial Sequence
  Oligonucleotide for detection of SNP TSC0034814
cgtagtataagta

SEQ ID NO: 138990 - DNA, 13 bp, Artificial Sequence
  Oligonucleotide for detection of SNP TSC0034814
tacttatactacg

SEQ ID NO: 138991 - DNA, 13 bp, Artificial Sequence
  Oligonucleotide for detection of SNP TSC0034815
ttagtagtaatag

SEQ ID NO: 138992 - DNA, 13 bp, Artificial Sequence
  Oligonucleotide for detection of SNP TSC0034815
ctattactactaa

SEQ ID NO: 138993 - DNA, 13 bp, Artificial Sequence
  Oligonucleotide for detection of SNP TSC0034815
ttagtattaatag

SEQ ID NO: 138994 - DNA, 13 bp, Artificial Sequence
  Oligonucleotide for detection of SNP TSC0034815
ctattaatactaa

SEQ ID NO: 138995 - DNA, 13 bp, Artificial Sequence
  Oligonucleotide for detection of SNP TSC0034815
ttgttattattgg

SEQ ID NO: 138996 - DNA, 13 bp, Artificial Sequence
  Oligonucleotide for detection of SNP TSC0034815
ccaataataacaa

SEQ ID NO: 138997 - DNA, 13 bp, Artificial Sequence
  Oligonucleotide for detection of SNP TSC0034815
ttgttaatattgg

SEQ ID NO: 138998 - DNA, 13 bp, Artificial Sequence
  Oligonucleotide for detection of SNP TSC0034815
ccaatattaacaa

SEQ ID NO: 138999 - DNA, 13 bp, Artificial Sequence
  Oligonucleotide for detection of SNP TSC0034816
tttgaaaaattga

SEQ ID NO: 139000 - DNA, 13 bp, Artificial Sequence
  Oligonucleotide for detection of SNP TSC0034816
tcaatttttcaaa

SEQ ID NO: 139001 - DNA, 13 bp, Artificial Sequence
  Oligonucleotide for detection of SNP TSC0034816
tttgaagaattga

SEQ ID NO: 139002 - DNA, 13 bp, Artificial Sequence
  Oligonucleotide for detection of SNP TSC0034816
tcaattcttcaaa

SEQ ID NO: 139003 - DNA, 13 bp, Artificial Sequence
  Oligonucleotide for detection of SNP TSC0034819
gttaaagtaatgy

SEQ ID NO: 139004 - DNA, 13 bp, Artificial Sequence
  Oligonucleotide for detection of SNP TSC0034819
rcattactttaac

SEQ ID NO: 139005 - DNA, 13 bp, Artificial Sequence
  Oligonucleotide for detection of SNP TSC0034819
gttaaaataatgy

SEQ ID NO: 139006 - DNA, 13 bp, Artificial Sequence
  Oligonucleotide for detection of SNP TSC0034819
rcattattttaac

SEQ ID NO: 139007 - DNA, 13 bp, Artificial Sequence
  Oligonucleotide for detection of SNP TSC0034820
tatagagatttgy

SEQ ID NO: 139008 - DNA, 13 bp, Artificial Sequence
  Oligonucleotide for detection of SNP TSC0034820
rcaaatctctata

SEQ ID NO: 139009 - DNA, 13 bp, Artificial Sequence
  Oligonucleotide for detection of SNP TSC0034820
tatagatatttgy

SEQ ID NO: 139010 - DNA, 13 bp, Artificial Sequence
  Oligonucleotide for detection of SNP TSC0034820
rcaaatatctata

SEQ ID NO: 139011 - DNA, 13 bp, Artificial Sequence
  Oligonucleotide for detection of SNP TSC0034820
gtaaatttttatg

SEQ ID NO: 139012 - DNA, 13 bp, Artificial Sequence
  Oligonucleotide for detection of SNP TSC0034820
cataaaaatttac

SEQ ID NO: 139013 - DNA, 13 bp, Artificial Sequence
  Oligonucleotide for detection of SNP TSC0034820
gtaaatatttatg

SEQ ID NO: 139014 - DNA, 13 bp, Artificial Sequence
  Oligonucleotide for detection of SNP TSC0034820
cataaatatttac

SEQ ID NO: 139015 - DNA, 13 bp, Artificial Sequence
  Oligonucleotide for detection of SNP TSC0034821
aatttttgggtay

SEQ ID NO: 139016 - DNA, 13 bp, Artificial Sequence
  Oligonucleotide for detection of SNP TSC0034821
rtacccaaaaatt

SEQ ID NO: 139017 - DNA, 13 bp, Artificial Sequence
  Oligonucleotide for detection of SNP TSC0034821
aattttcgggtay

SEQ ID NO: 139018 - DNA, 13 bp, Artificial Sequence
  Oligonucleotide for detection of SNP TSC0034821
rtacccgaaaatt

SEQ ID NO: 139019 - DNA, 13 bp, Artificial Sequence
  Oligonucleotide for detection of SNP TSC0034821
gtgtttgaggatt

SEQ ID NO: 139020 - DNA, 13 bp, Artificial Sequence
  Oligonucleotide for detection of SNP TSC0034821
aatcctcaaacac

SEQ ID NO: 139021 - DNA, 13 bp, Artificial Sequence
  Oligonucleotide for detection of SNP TSC0034821
gtgtttaaggatt

SEQ ID NO: 139022 - DNA, 13 bp, Artificial Sequence
  Oligonucleotide for detection of SNP TSC0034821
aatccttaaacac

SEQ ID NO: 139023 - DNA, 13 bp, Artificial Sequence
  Oligonucleotide for detection of SNP TSC0034821
gtgttcgaggatt

SEQ ID NO: 139024 - DNA, 13 bp, Artificial Sequence
  Oligonucleotide for detection of SNP TSC0034821
aatcctcgaacac

SEQ ID NO: 139025 - DNA, 13 bp, Artificial Sequence
  Oligonucleotide for detection of SNP TSC0034826
ggttagattattg

SEQ ID NO: 139026 - DNA, 13 bp, Artificial Sequence
  Oligonucleotide for detection of SNP TSC0034826
caataatctaacc

SEQ ID NO: 139027 - DNA, 13 bp, Artificial Sequence
  Oligonucleotide for detection of SNP TSC0034826
ggttaggttattg

SEQ ID NO: 139028 - DNA, 13 bp, Artificial Sequence
  Oligonucleotide for detection of SNP TSC0034826
caataacctaacc

SEQ ID NO: 139029 - DNA, 13 bp, Artificial Sequence
  Oligonucleotide for detection of SNP TSC0034826
ggttagattatcg

SEQ ID NO: 139030 - DNA, 13 bp, Artificial Sequence
  Oligonucleotide for detection of SNP TSC0034826
cgataatctaacc

SEQ ID NO: 139031 - DNA, 13 bp, Artificial Sequence
  Oligonucleotide for detection of SNP TSC0034826
ggttaggttatcg

SEQ ID NO: 139032 - DNA, 13 bp, Artificial Sequence
  Oligonucleotide for detection of SNP TSC0034826
cgataacctaacc

SEQ ID NO: 139033 - DNA, 13 bp, Artificial Sequence
  Oligonucleotide for detection of SNP TSC0034831
atgattatttaag

SEQ ID NO: 139034 - DNA, 13 bp, Artificial Sequence
  Oligonucleotide for detection of SNP TSC0034831
cttaaataatcat

SEQ ID NO: 139035 - DNA, 13 bp, Artificial Sequence
  Oligonucleotide for detection of SNP TSC0034831
atgattgtttaag

SEQ ID NO: 139036 - DNA, 13 bp, Artificial Sequence
  Oligonucleotide for detection of SNP TSC0034831
cttaaacaatcat

SEQ ID NO: 139037 - DNA, 13 bp, Artificial Sequence
  Oligonucleotide for detection of SNP TSC0034831
atgatcgtttaag

SEQ ID NO: 139038 - DNA, 13 bp, Artificial Sequence
  Oligonucleotide for detection of SNP TSC0034831
cttaaacgatcat

SEQ ID NO: 139039 - DNA, 13 bp, Artificial Sequence
  Oligonucleotide for detection of SNP TSC0034831
tttaagtgattat

SEQ ID NO: 139040 - DNA, 13 bp, Artificial Sequence
  Oligonucleotide for detection of SNP TSC0034831
ataatcacttaaa

SEQ ID NO: 139041 - DNA, 13 bp, Artificial Sequence
  Oligonucleotide for detection of SNP TSC0034831
tttaagcgattat

SEQ ID NO: 139042 - DNA, 13 bp, Artificial Sequence
  Oligonucleotide for detection of SNP TSC0034831
ataatcgcttaaa

SEQ ID NO: 139043 - DNA, 13 bp, Artificial Sequence
  Oligonucleotide for detection of SNP TSC0034832
aattgcgtttaty

SEQ ID NO: 139044 - DNA, 13 bp, Artificial Sequence
  Oligonucleotide for detection of SNP TSC0034832
rataaacgcaatt

SEQ ID NO: 139045 - DNA, 13 bp, Artificial Sequence
  Oligonucleotide for detection of SNP TSC0034832
ggtaggtgtagtt

SEQ ID NO: 139046 - DNA, 13 bp, Artificial Sequence
  Oligonucleotide for detection of SNP TSC0034832
aactacacctacc

SEQ ID NO: 139047 - DNA, 13 bp, Artificial Sequence
  Oligonucleotide for detection of SNP TSC0034832
ggtaggcgtagtt

SEQ ID NO: 139048 - DNA, 13 bp, Artificial Sequence
  Oligonucleotide for detection of SNP TSC0034832
aactacgcctacc

SEQ ID NO: 139049 - DNA, 13 bp, Artificial Sequence
  Oligonucleotide for detection of SNP TSC0034834
ttaggtatatggg

SEQ ID NO: 139050 - DNA, 13 bp, Artificial Sequence
  Oligonucleotide for detection of SNP TSC0034834
cccatatacctaa

SEQ ID NO: 139051 - DNA, 13 bp, Artificial Sequence
  Oligonucleotide for detection of SNP TSC0034834
ttaggtgtatggg

SEQ ID NO: 139052 - DNA, 13 bp, Artificial Sequence
  Oligonucleotide for detection of SNP TSC0034834
cccatacacctaa

SEQ ID NO: 139053 - DNA, 13 bp, Artificial Sequence
  Oligonucleotide for detection of SNP TSC0034834
ttaggcgtatggg

SEQ ID NO: 139054 - DNA, 13 bp, Artificial Sequence
  Oligonucleotide for detection of SNP TSC0034834
cccatacgcctaa

SEQ ID NO: 139055 - DNA, 13 bp, Artificial Sequence
  Oligonucleotide for detection of SNP TSC0034834
tttatatgtttgg

SEQ ID NO: 139056 - DNA, 13 bp, Artificial Sequence
  Oligonucleotide for detection of SNP TSC0034834
ccaaacatataaa

SEQ ID NO: 139057 - DNA, 13 bp, Artificial Sequence
  Oligonucleotide for detection of SNP TSC0034834
tttatacgtttgg

SEQ ID NO: 139058 - DNA, 13 bp, Artificial Sequence
  Oligonucleotide for detection of SNP TSC0034834
ccaaacgtataaa

SEQ ID NO: 139059 - DNA, 13 bp, Artificial Sequence
  Oligonucleotide for detection of SNP TSC0034835
tttataatttaga

SEQ ID NO: 139060 - DNA, 13 bp, Artificial Sequence
  Oligonucleotide for detection of SNP TSC0034835
tctaaattataaa

SEQ ID NO: 139061 - DNA, 13 bp, Artificial Sequence
  Oligonucleotide for detection of SNP TSC0034835
tttatattttaga

SEQ ID NO: 139062 - DNA, 13 bp, Artificial Sequence
  Oligonucleotide for detection of SNP TSC0034835
tctaaaatataaa

SEQ ID NO: 139063 - DNA, 13 bp, Artificial Sequence
  Oligonucleotide for detection of SNP TSC0034835
tttgggttgtagg

SEQ ID NO: 139064 - DNA, 13 bp, Artificial Sequence
  Oligonucleotide for detection of SNP TSC0034835
cctacaacccaaa

SEQ ID NO: 139065 - DNA, 13 bp, Artificial Sequence
  Oligonucleotide for detection of SNP TSC0034835
tttgggatgtagg

SEQ ID NO: 139066 - DNA, 13 bp, Artificial Sequence
  Oligonucleotide for detection of SNP TSC0034835
cctacatcccaaa

SEQ ID NO: 139067 - DNA, 13 bp, Artificial Sequence
  Oligonucleotide for detection of SNP TSC0034838
gttggggaatttg

SEQ ID NO: 139068 - DNA, 13 bp, Artificial Sequence
  Oligonucleotide for detection of SNP TSC0034838
caaattccccaac

SEQ ID NO: 139069 - DNA, 13 bp, Artificial Sequence
  Oligonucleotide for detection of SNP TSC0034838
gttgggaaatttg

SEQ ID NO: 139070 - DNA, 13 bp, Artificial Sequence
  Oligonucleotide for detection of SNP TSC0034838
caaatttcccaac

SEQ ID NO: 139071 - DNA, 13 bp, Artificial Sequence
  Oligonucleotide for detection of SNP TSC0034839
gtatatgttagtg

SEQ ID NO: 139072 - DNA, 13 bp, Artificial Sequence
  Oligonucleotide for detection of SNP TSC0034839
cactaacatatac

SEQ ID NO: 139073 - DNA, 13 bp, Artificial Sequence
  Oligonucleotide for detection of SNP TSC0034839
gtatattttagtg

SEQ ID NO: 139074 - DNA, 13 bp, Artificial Sequence
  Oligonucleotide for detection of SNP TSC0034839
cactaaaatatac

SEQ ID NO: 139075 - DNA, 13 bp, Artificial Sequence
  Oligonucleotide for detection of SNP TSC0034839
tattgatatgtay

SEQ ID NO: 139076 - DNA, 13 bp, Artificial Sequence
  Oligonucleotide for detection of SNP TSC0034839
rtacatatcaata

SEQ ID NO: 139077 - DNA, 13 bp, Artificial Sequence
  Oligonucleotide for detection of SNP TSC0034839
tattgaaatgtay

SEQ ID NO: 139078 - DNA, 13 bp, Artificial Sequence
  Oligonucleotide for detection of SNP TSC0034839
rtacatttcaata

SEQ ID NO: 139079 - DNA, 13 bp, Artificial Sequence
  Oligonucleotide for detection of SNP TSC0034840
aattttatagtat

SEQ ID NO: 139080 - DNA, 13 bp, Artificial Sequence
  Oligonucleotide for detection of SNP TSC0034840
atactataaaatt

SEQ ID NO: 139081 - DNA, 13 bp, Artificial Sequence
  Oligonucleotide for detection of SNP TSC0034840
aattttgtagtat

SEQ ID NO: 139082 - DNA, 13 bp, Artificial Sequence
  Oligonucleotide for detection of SNP TSC0034840
atactacaaaatt

SEQ ID NO: 139083 - DNA, 13 bp, Artificial Sequence
  Oligonucleotide for detection of SNP TSC0034840
aatttcgtagtat

SEQ ID NO: 139084 - DNA, 13 bp, Artificial Sequence
  Oligonucleotide for detection of SNP TSC0034840
atactacgaaatt

SEQ ID NO: 139085 - DNA, 13 bp, Artificial Sequence
  Oligonucleotide for detection of SNP TSC0034840
atgttatggaatt

SEQ ID NO: 139086 - DNA, 13 bp, Artificial Sequence
  Oligonucleotide for detection of SNP TSC0034840
aattccataacat

SEQ ID NO: 139087 - DNA, 13 bp, Artificial Sequence
  Oligonucleotide for detection of SNP TSC0034840
atgttacggaatt

SEQ ID NO: 139088 - DNA, 13 bp, Artificial Sequence
  Oligonucleotide for detection of SNP TSC0034840
aattccgtaacat

SEQ ID NO: 139089 - DNA, 13 bp, Artificial Sequence
  Oligonucleotide for detection of SNP TSC0034842
gttgtttgttata

SEQ ID NO: 139090 - DNA, 13 bp, Artificial Sequence
  Oligonucleotide for detection of SNP TSC0034842
tataacaaacaac

SEQ ID NO: 139091 - DNA, 13 bp, Artificial Sequence
  Oligonucleotide for detection of SNP TSC0034842
gttgttcgttata

SEQ ID NO: 139092 - DNA, 13 bp, Artificial Sequence
  Oligonucleotide for detection of SNP TSC0034842
tataacgaacaac

SEQ ID NO: 139093 - DNA, 13 bp, Artificial Sequence
  Oligonucleotide for detection of SNP TSC0034842
tgtgatggatagy

SEQ ID NO: 139094 - DNA, 13 bp, Artificial Sequence
  Oligonucleotide for detection of SNP TSC0034842
rctatccatcaca

SEQ ID NO: 139095 - DNA, 13 bp, Artificial Sequence
  Oligonucleotide for detection of SNP TSC0034842
tgtgatagatagy

SEQ ID NO: 139096 - DNA, 13 bp, Artificial Sequence
  Oligonucleotide for detection of SNP TSC0034842
rctatctatcaca

SEQ ID NO: 139097 - DNA, 13 bp, Artificial Sequence
  Oligonucleotide for detection of SNP TSC0034842
tgtgacggatagy

SEQ ID NO: 139098 - DNA, 13 bp, Artificial Sequence
  Oligonucleotide for detection of SNP TSC0034842
rctatccgtcaca

SEQ ID NO: 139099 - DNA, 13 bp, Artificial Sequence
  Oligonucleotide for detection of SNP TSC0034844
tgaagtgttgtty

SEQ ID NO: 139100 - DNA, 13 bp, Artificial Sequence
  Oligonucleotide for detection of SNP TSC0034844
raacaacacttca

SEQ ID NO: 139101 - DNA, 13 bp, Artificial Sequence
  Oligonucleotide for detection of SNP TSC0034844
tgaagttttgtty

SEQ ID NO: 139102 - DNA, 13 bp, Artificial Sequence
  Oligonucleotide for detection of SNP TSC0034844
raacaaaacttca

SEQ ID NO: 139103 - DNA, 13 bp, Artificial Sequence
  Oligonucleotide for detection of SNP TSC0034844
gagtaatatttta

SEQ ID NO: 139104 - DNA, 13 bp, Artificial Sequence
  Oligonucleotide for detection of SNP TSC0034844
taaaatattactc

SEQ ID NO: 139105 - DNA, 13 bp, Artificial Sequence
  Oligonucleotide for detection of SNP TSC0034844
gagtaaaatttta

SEQ ID NO: 139106 - DNA, 13 bp, Artificial Sequence
  Oligonucleotide for detection of SNP TSC0034844
taaaattttactc

SEQ ID NO: 139107 - DNA, 13 bp, Artificial Sequence
  Oligonucleotide for detection of SNP TSC0034845
ttttataaggtta

SEQ ID NO: 139108 - DNA, 13 bp, Artificial Sequence
  Oligonucleotide for detection of SNP TSC0034845
taaccttataaaa

SEQ ID NO: 139109 - DNA, 13 bp, Artificial Sequence
  Oligonucleotide for detection of SNP TSC0034845
ttttatgaggtta

SEQ ID NO: 139110 - DNA, 13 bp, Artificial Sequence
  Oligonucleotide for detection of SNP TSC0034845
taacctcataaaa

SEQ ID NO: 139111 - DNA, 13 bp, Artificial Sequence
  Oligonucleotide for detection of SNP TSC0034845
ttttacgaggtta

SEQ ID NO: 139112 - DNA, 13 bp, Artificial Sequence
  Oligonucleotide for detection of SNP TSC0034845
taacctcgtaaaa

SEQ ID NO: 139113 - DNA, 13 bp, Artificial Sequence
  Oligonucleotide for detection of SNP TSC0034845
tggttttgtgggg

SEQ ID NO: 139114 - DNA, 13 bp, Artificial Sequence
  Oligonucleotide for detection of SNP TSC0034845
ccccacaaaacca

SEQ ID NO: 139115 - DNA, 13 bp, Artificial Sequence
  Oligonucleotide for detection of SNP TSC0034845
tggtttcgtgggg

SEQ ID NO: 139116 - DNA, 13 bp, Artificial Sequence
  Oligonucleotide for detection of SNP TSC0034845
ccccacgaaacca

SEQ ID NO: 139117 - DNA, 13 bp, Artificial Sequence
  Oligonucleotide for detection of SNP TSC0034846
ataaaggttgttt

SEQ ID NO: 139118 - DNA, 13 bp, Artificial Sequence
  Oligonucleotide for detection of SNP TSC0034846
aaacaacctttat

SEQ ID NO: 139119 - DNA, 13 bp, Artificial Sequence
  Oligonucleotide for detection of SNP TSC0034846
ataaagtttgttt

SEQ ID NO: 139120 - DNA, 13 bp, Artificial Sequence
  Oligonucleotide for detection of SNP TSC0034846
aaacaaactttat

SEQ ID NO: 139121 - DNA, 13 bp, Artificial Sequence
  Oligonucleotide for detection of SNP TSC0034847
ttattgtgttttg

SEQ ID NO: 139122 - DNA, 13 bp, Artificial Sequence
  Oligonucleotide for detection of SNP TSC0034847
caaaacacaataa

SEQ ID NO: 139123 - DNA, 13 bp, Artificial Sequence
  Oligonucleotide for detection of SNP TSC0034847
ttattgcgttttg

SEQ ID NO: 139124 - DNA, 13 bp, Artificial Sequence
  Oligonucleotide for detection of SNP TSC0034847
caaaacgcaataa

SEQ ID NO: 139125 - DNA, 13 bp, Artificial Sequence
  Oligonucleotide for detection of SNP TSC0034847
tagagtgtagtaa

SEQ ID NO: 139126 - DNA, 13 bp, Artificial Sequence
  Oligonucleotide for detection of SNP TSC0034847
ttactacactcta

SEQ ID NO: 139127 - DNA, 13 bp, Artificial Sequence
  Oligonucleotide for detection of SNP TSC0034847
tagagtatagtaa

SEQ ID NO: 139128 - DNA, 13 bp, Artificial Sequence
  Oligonucleotide for detection of SNP TSC0034847
ttactatactcta

SEQ ID NO: 139129 - DNA, 13 bp, Artificial Sequence
  Oligonucleotide for detection of SNP TSC0034847
tagagcgtagtaa

SEQ ID NO: 139130 - DNA, 13 bp, Artificial Sequence
  Oligonucleotide for detection of SNP TSC0034847
ttactacgctcta

SEQ ID NO: 139131 - DNA, 13 bp, Artificial Sequence
  Oligonucleotide for detection of SNP TSC0034852
tttttttttaaty

SEQ ID NO: 139132 - DNA, 13 bp, Artificial Sequence
  Oligonucleotide for detection of SNP TSC0034852
rattaaaaaaaaa

SEQ ID NO: 139133 - DNA, 13 bp, Artificial Sequence
  Oligonucleotide for detection of SNP TSC0034852
ttttttgttaaty

SEQ ID NO: 139134 - DNA, 13 bp, Artificial Sequence
  Oligonucleotide for detection of SNP TSC0034852
rattaacaaaaaa

SEQ ID NO: 139135 - DNA, 13 bp, Artificial Sequence
  Oligonucleotide for detection of SNP TSC0034852
tttttcgttaaty

SEQ ID NO: 139136 - DNA, 13 bp, Artificial Sequence
  Oligonucleotide for detection of SNP TSC0034852
rattaacgaaaaa

SEQ ID NO: 139137 - DNA, 13 bp, Artificial Sequence
  Oligonucleotide for detection of SNP TSC0034852
ggttgaggaggga

SEQ ID NO: 139138 - DNA, 13 bp, Artificial Sequence
  Oligonucleotide for detection of SNP TSC0034852
tccctcctcaacc

SEQ ID NO: 139139 - DNA, 13 bp, Artificial Sequence
  Oligonucleotide for detection of SNP TSC0034852
ggttgatgaggga

SEQ ID NO: 139140 - DNA, 13 bp, Artificial Sequence
  Oligonucleotide for detection of SNP TSC0034852
tccctcatcaacc

SEQ ID NO: 139141 - DNA, 13 bp, Artificial Sequence
  Oligonucleotide for detection of SNP TSC0034852
ggttgacgaggga

SEQ ID NO: 139142 - DNA, 13 bp, Artificial Sequence
  Oligonucleotide for detection of SNP TSC0034852
tccctcgtcaacc

SEQ ID NO: 139143 - DNA, 13 bp, Artificial Sequence
  Oligonucleotide for detection of SNP TSC0034853
aggttgggaagat

SEQ ID NO: 139144 - DNA, 13 bp, Artificial Sequence
  Oligonucleotide for detection of SNP TSC0034853
atcttcccaacct

SEQ ID NO: 139145 - DNA, 13 bp, Artificial Sequence
  Oligonucleotide for detection of SNP TSC0034853
aggttgtgaagat

SEQ ID NO: 139146 - DNA, 13 bp, Artificial Sequence
  Oligonucleotide for detection of SNP TSC0034853
atcttcacaacct

SEQ ID NO: 139147 - DNA, 13 bp, Artificial Sequence
  Oligonucleotide for detection of SNP TSC0034854
ttgggaagatgaa

SEQ ID NO: 139148 - DNA, 13 bp, Artificial Sequence
  Oligonucleotide for detection of SNP TSC0034854
ttcatcttcccaa

SEQ ID NO: 139149 - DNA, 13 bp, Artificial Sequence
  Oligonucleotide for detection of SNP TSC0034854
ttgggaggatgaa

SEQ ID NO: 139150 - DNA, 13 bp, Artificial Sequence
  Oligonucleotide for detection of SNP TSC0034854
ttcatcctcccaa

SEQ ID NO: 139151 - DNA, 13 bp, Artificial Sequence
  Oligonucleotide for detection of SNP TSC0034855
aggttgggggtty

SEQ ID NO: 139152 - DNA, 13 bp, Artificial Sequence
  Oligonucleotide for detection of SNP TSC0034855
raacccccaacct

SEQ ID NO: 139153 - DNA, 13 bp, Artificial Sequence
  Oligonucleotide for detection of SNP TSC0034855
aggttgagggtty

SEQ ID NO: 139154 - DNA, 13 bp, Artificial Sequence
  Oligonucleotide for detection of SNP TSC0034855
raaccctcaacct

SEQ ID NO: 139155 - DNA, 13 bp, Artificial Sequence
  Oligonucleotide for detection of SNP TSC0034856
ttttagatagata

SEQ ID NO: 139156 - DNA, 13 bp, Artificial Sequence
  Oligonucleotide for detection of SNP TSC0034856
tatctatctaaaa

SEQ ID NO: 139157 - DNA, 13 bp, Artificial Sequence
  Oligonucleotide for detection of SNP TSC0034856
ttttaggtagata

SEQ ID NO: 139158 - DNA, 13 bp, Artificial Sequence
  Oligonucleotide for detection of SNP TSC0034856
tatctacctaaaa

SEQ ID NO: 139159 - DNA, 13 bp, Artificial Sequence
  Oligonucleotide for detection of SNP TSC0034857
tcgttaatttttt

SEQ ID NO: 139160 - DNA, 13 bp, Artificial Sequence
  Oligonucleotide for detection of SNP TSC0034857
aaaaaattaacga

SEQ ID NO: 139161 - DNA, 13 bp, Artificial Sequence
  Oligonucleotide for detection of SNP TSC0034857
tcgttagtttttt

SEQ ID NO: 139162 - DNA, 13 bp, Artificial Sequence
  Oligonucleotide for detection of SNP TSC0034857
aaaaaactaacga

SEQ ID NO: 139163 - DNA, 13 bp, Artificial Sequence
  Oligonucleotide for detection of SNP TSC0034860
ttataaatttagy

SEQ ID NO: 139164 - DNA, 13 bp, Artificial Sequence
  Oligonucleotide for detection of SNP TSC0034860
rctaaatttataa

SEQ ID NO: 139165 - DNA, 13 bp, Artificial Sequence
  Oligonucleotide for detection of SNP TSC0034860
ttataattttagy

SEQ ID NO: 139166 - DNA, 13 bp, Artificial Sequence
  Oligonucleotide for detection of SNP TSC0034860
rctaaaattataa

SEQ ID NO: 139167 - DNA, 13 bp, Artificial Sequence
  Oligonucleotide for detection of SNP TSC0034861
gaggtttaggtag

SEQ ID NO: 139168 - DNA, 13 bp, Artificial Sequence
  Oligonucleotide for detection of SNP TSC0034861
ctacctaaacctc

SEQ ID NO: 139169 - DNA, 13 bp, Artificial Sequence
  Oligonucleotide for detection of SNP TSC0034861
ttgtttgagttty

SEQ ID NO: 139170 - DNA, 13 bp, Artificial Sequence
  Oligonucleotide for detection of SNP TSC0034861
raaactcaaacaa

SEQ ID NO: 139171 - DNA, 13 bp, Artificial Sequence
  Oligonucleotide for detection of SNP TSC0034861
ttgttttagttty

SEQ ID NO: 139172 - DNA, 13 bp, Artificial Sequence
  Oligonucleotide for detection of SNP TSC0034861
raaactaaaacaa

SEQ ID NO: 139173 - DNA, 13 bp, Artificial Sequence
  Oligonucleotide for detection of SNP TSC0034862
aggggtatttaat

SEQ ID NO: 139174 - DNA, 13 bp, Artificial Sequence
  Oligonucleotide for detection of SNP TSC0034862
attaaatacccct

SEQ ID NO: 139175 - DNA, 13 bp, Artificial Sequence
  Oligonucleotide for detection of SNP TSC0034862
aggggtgtttaat

SEQ ID NO: 139176 - DNA, 13 bp, Artificial Sequence
  Oligonucleotide for detection of SNP TSC0034862
attaaacacccct

SEQ ID NO: 139177 - DNA, 13 bp, Artificial Sequence
  Oligonucleotide for detection of SNP TSC0034862
aggggcgtttaat

SEQ ID NO: 139178 - DNA, 13 bp, Artificial Sequence
  Oligonucleotide for detection of SNP TSC0034862
attaaacgcccct

SEQ ID NO: 139179 - DNA, 13 bp, Artificial Sequence
  Oligonucleotide for detection of SNP TSC0034862
attaggtgttttt

SEQ ID NO: 139180 - DNA, 13 bp, Artificial Sequence
  Oligonucleotide for detection of SNP TSC0034862
aaaaacacctaat

SEQ ID NO: 139181 - DNA, 13 bp, Artificial Sequence
  Oligonucleotide for detection of SNP TSC0034862
attaggcgttttt

SEQ ID NO: 139182 - DNA, 13 bp, Artificial Sequence
  Oligonucleotide for detection of SNP TSC0034862
aaaaacgcctaat

SEQ ID NO: 139183 - DNA, 13 bp, Artificial Sequence
  Oligonucleotide for detection of SNP TSC0034866
tgttttaaggtag

SEQ ID NO: 139184 - DNA, 13 bp, Artificial Sequence
  Oligonucleotide for detection of SNP TSC0034866
ctaccttaaaaca

SEQ ID NO: 139185 - DNA, 13 bp, Artificial Sequence
  Oligonucleotide for detection of SNP TSC0034866
tgttttgaggtag

SEQ ID NO: 139186 - DNA, 13 bp, Artificial Sequence
  Oligonucleotide for detection of SNP TSC0034866
ctacctcaaaaca

SEQ ID NO: 139187 - DNA, 13 bp, Artificial Sequence
  Oligonucleotide for detection of SNP TSC0034866
tgtttcgaggtag

SEQ ID NO: 139188 - DNA, 13 bp, Artificial Sequence
  Oligonucleotide for detection of SNP TSC0034866
ctacctcgaaaca

SEQ ID NO: 139189 - DNA, 13 bp, Artificial Sequence
  Oligonucleotide for detection of SNP TSC0034866
ttgttttggaata

SEQ ID NO: 139190 - DNA, 13 bp, Artificial Sequence
  Oligonucleotide for detection of SNP TSC0034866
tattccaaaacaa

SEQ ID NO: 139191 - DNA, 13 bp, Artificial Sequence
  Oligonucleotide for detection of SNP TSC0034866
ttgtttcggaata

SEQ ID NO: 139192 - DNA, 13 bp, Artificial Sequence
  Oligonucleotide for detection of SNP TSC0034866
tattccgaaacaa

SEQ ID NO: 139193 - DNA, 13 bp, Artificial Sequence
  Oligonucleotide for detection of SNP TSC0034867
atatgggtattta

SEQ ID NO: 139194 - DNA, 13 bp, Artificial Sequence
  Oligonucleotide for detection of SNP TSC0034867
taaatacccatat

SEQ ID NO: 139195 - DNA, 13 bp, Artificial Sequence
  Oligonucleotide for detection of SNP TSC0034867
atatggatattta

SEQ ID NO: 139196 - DNA, 13 bp, Artificial Sequence
  Oligonucleotide for detection of SNP TSC0034867
taaatatccatat

SEQ ID NO: 139197 - DNA, 13 bp, Artificial Sequence
  Oligonucleotide for detection of SNP TSC0034867
atacgggtattta

SEQ ID NO: 139198 - DNA, 13 bp, Artificial Sequence
  Oligonucleotide for detection of SNP TSC0034867
taaatacccgtat

SEQ ID NO: 139199 - DNA, 13 bp, Artificial Sequence
  Oligonucleotide for detection of SNP TSC0034867
atacggatattta

SEQ ID NO: 139200 - DNA, 13 bp, Artificial Sequence
  Oligonucleotide for detection of SNP TSC0034867
taaatatccgtat

SEQ ID NO: 139201 - DNA, 13 bp, Artificial Sequence
  Oligonucleotide for detection of SNP TSC0034868
gatttaatgtaag

SEQ ID NO: 139202 - DNA, 13 bp, Artificial Sequence
  Oligonucleotide for detection of SNP TSC0034868
cttacattaaatc

SEQ ID NO: 139203 - DNA, 13 bp, Artificial Sequence
  Oligonucleotide for detection of SNP TSC0034868
gatttagtgtaag

SEQ ID NO: 139204 - DNA, 13 bp, Artificial Sequence
  Oligonucleotide for detection of SNP TSC0034868
cttacactaaatc

SEQ ID NO: 139205 - DNA, 13 bp, Artificial Sequence
  Oligonucleotide for detection of SNP TSC0034870
ttaatagatgatt

SEQ ID NO: 139206 - DNA, 13 bp, Artificial Sequence
  Oligonucleotide for detection of SNP TSC0034870
aatcatctattaa

SEQ ID NO: 139207 - DNA, 13 bp, Artificial Sequence
  Oligonucleotide for detection of SNP TSC0034870
ttaataaatgatt

SEQ ID NO: 139208 - DNA, 13 bp, Artificial Sequence
  Oligonucleotide for detection of SNP TSC0034870
aatcatttattaa

SEQ ID NO: 139209 - DNA, 13 bp, Artificial Sequence
  Oligonucleotide for detection of SNP TSC0034873
gtattttggaaay

SEQ ID NO: 139210 - DNA, 13 bp, Artificial Sequence
  Oligonucleotide for detection of SNP TSC0034873
rtttccaaaatac

SEQ ID NO: 139211 - DNA, 13 bp, Artificial Sequence
  Oligonucleotide for detection of SNP TSC0034873
gtatttcggaaay

SEQ ID NO: 139212 - DNA, 13 bp, Artificial Sequence
  Oligonucleotide for detection of SNP TSC0034873
rtttccgaaatac

SEQ ID NO: 139213 - DNA, 13 bp, Artificial Sequence
  Oligonucleotide for detection of SNP TSC0034873
gtttttgaagtay

SEQ ID NO: 139214 - DNA, 13 bp, Artificial Sequence
  Oligonucleotide for detection of SNP TSC0034873
rtacttcaaaaac

SEQ ID NO: 139215 - DNA, 13 bp, Artificial Sequence
  Oligonucleotide for detection of SNP TSC0034873
gtttttaaagtay

SEQ ID NO: 139216 - DNA, 13 bp, Artificial Sequence
  Oligonucleotide for detection of SNP TSC0034873
rtactttaaaaac

SEQ ID NO: 139217 - DNA, 13 bp, Artificial Sequence
  Oligonucleotide for detection of SNP TSC0034873
gttttcgaagtay

SEQ ID NO: 139218 - DNA, 13 bp, Artificial Sequence
  Oligonucleotide for detection of SNP TSC0034873
rtacttcgaaaac

SEQ ID NO: 139219 - DNA, 13 bp, Artificial Sequence
  Oligonucleotide for detection of SNP TSC0034874
ggtagaattgttt

SEQ ID NO: 139220 - DNA, 13 bp, Artificial Sequence
  Oligonucleotide for detection of SNP TSC0034874
aaacaattctacc

SEQ ID NO: 139221 - DNA, 13 bp, Artificial Sequence
  Oligonucleotide for detection of SNP TSC0034874
ggtagatttgttt

SEQ ID NO: 139222 - DNA, 13 bp, Artificial Sequence
  Oligonucleotide for detection of SNP TSC0034874
aaacaaatctacc

SEQ ID NO: 139223 - DNA, 13 bp, Artificial Sequence
  Oligonucleotide for detection of SNP TSC0034874
aaatagttttgty

SEQ ID NO: 139224 - DNA, 13 bp, Artificial Sequence
  Oligonucleotide for detection of SNP TSC0034874
racaaaactattt

SEQ ID NO: 139225 - DNA, 13 bp, Artificial Sequence
  Oligonucleotide for detection of SNP TSC0034874
aaatagatttgty

SEQ ID NO: 139226 - DNA, 13 bp, Artificial Sequence
  Oligonucleotide for detection of SNP TSC0034874
racaaatctattt

SEQ ID NO: 139227 - DNA, 13 bp, Artificial Sequence
  Oligonucleotide for detection of SNP TSC0034875
aaaatagattagt

SEQ ID NO: 139228 - DNA, 13 bp, Artificial Sequence
  Oligonucleotide for detection of SNP TSC0034875
actaatctatttt

SEQ ID NO: 139229 - DNA, 13 bp, Artificial Sequence
  Oligonucleotide for detection of SNP TSC0034875
aaaataaattagt

SEQ ID NO: 139230 - DNA, 13 bp, Artificial Sequence
  Oligonucleotide for detection of SNP TSC0034875
actaatttatttt

SEQ ID NO: 139231 - DNA, 13 bp, Artificial Sequence
  Oligonucleotide for detection of SNP TSC0034876
tgagaatgtagaa

SEQ ID NO: 139232 - DNA, 13 bp, Artificial Sequence
  Oligonucleotide for detection of SNP TSC0034876
ttctacattctca

SEQ ID NO: 139233 - DNA, 13 bp, Artificial Sequence
  Oligonucleotide for detection of SNP TSC0034876
tgagaacgtagaa

SEQ ID NO: 139234 - DNA, 13 bp, Artificial Sequence
  Oligonucleotide for detection of SNP TSC0034876
ttctacgttctca

SEQ ID NO: 139235 - DNA, 13 bp, Artificial Sequence
  Oligonucleotide for detection of SNP TSC0034877
ggagttagagaty

SEQ ID NO: 139236 - DNA, 13 bp, Artificial Sequence
  Oligonucleotide for detection of SNP TSC0034877
ratctctaactcc

SEQ ID NO: 139237 - DNA, 13 bp, Artificial Sequence
  Oligonucleotide for detection of SNP TSC0034878
ttagtaggataaa

SEQ ID NO: 139238 - DNA, 13 bp, Artificial Sequence
  Oligonucleotide for detection of SNP TSC0034878
tttatcctactaa

SEQ ID NO: 139239 - DNA, 13 bp, Artificial Sequence
  Oligonucleotide for detection of SNP TSC0034878
ttagtaagataaa

SEQ ID NO: 139240 - DNA, 13 bp, Artificial Sequence
  Oligonucleotide for detection of SNP TSC0034878
tttatcttactaa

SEQ ID NO: 139241 - DNA, 13 bp, Artificial Sequence
  Oligonucleotide for detection of SNP TSC0034880
aattggttgggtg

SEQ ID NO: 139242 - DNA, 13 bp, Artificial Sequence
  Oligonucleotide for detection of SNP TSC0034880
cacccaaccaatt

SEQ ID NO: 139243 - DNA, 13 bp, Artificial Sequence
  Oligonucleotide for detection of SNP TSC0034880
aattgggtgggtg

SEQ ID NO: 139244 - DNA, 13 bp, Artificial Sequence
  Oligonucleotide for detection of SNP TSC0034880
cacccacccaatt

SEQ ID NO: 139245 - DNA, 13 bp, Artificial Sequence
  Oligonucleotide for detection of SNP TSC0034880
aattggtcgggtg

SEQ ID NO: 139246 - DNA, 13 bp, Artificial Sequence
  Oligonucleotide for detection of SNP TSC0034880
cacccgaccaatt

SEQ ID NO: 139247 - DNA, 13 bp, Artificial Sequence
  Oligonucleotide for detection of SNP TSC0034880
aattgggcgggtg

SEQ ID NO: 139248 - DNA, 13 bp, Artificial Sequence
  Oligonucleotide for detection of SNP TSC0034880
cacccgcccaatt

SEQ ID NO: 139249 - DNA, 13 bp, Artificial Sequence
  Oligonucleotide for detection of SNP TSC0034880
aattggttgggcg

SEQ ID NO: 139250 - DNA, 13 bp, Artificial Sequence
  Oligonucleotide for detection of SNP TSC0034880
cgcccaaccaatt

SEQ ID NO: 139251 - DNA, 13 bp, Artificial Sequence
  Oligonucleotide for detection of SNP TSC0034880
aattgggtgggcg

SEQ ID NO: 139252 - DNA, 13 bp, Artificial Sequence
  Oligonucleotide for detection of SNP TSC0034880
cgcccacccaatt

SEQ ID NO: 139253 - DNA, 13 bp, Artificial Sequence
  Oligonucleotide for detection of SNP TSC0034880
aattggtcgggcg

SEQ ID NO: 139254 - DNA, 13 bp, Artificial Sequence
  Oligonucleotide for detection of SNP TSC0034880
cgcccgaccaatt

SEQ ID NO: 139255 - DNA, 13 bp, Artificial Sequence
  Oligonucleotide for detection of SNP TSC0034880
aattgggcgggcg

SEQ ID NO: 139256 - DNA, 13 bp, Artificial Sequence
  Oligonucleotide for detection of SNP TSC0034880
cgcccgcccaatt

SEQ ID NO: 139257 - DNA, 13 bp, Artificial Sequence
  Oligonucleotide for detection of SNP TSC0034880
tgtttggttagtt

SEQ ID NO: 139258 - DNA, 13 bp, Artificial Sequence
  Oligonucleotide for detection of SNP TSC0034880
aactaaccaaaca

SEQ ID NO: 139259 - DNA, 13 bp, Artificial Sequence
  Oligonucleotide for detection of SNP TSC0034880
tgtttgtttagtt

SEQ ID NO: 139260 - DNA, 13 bp, Artificial Sequence
  Oligonucleotide for detection of SNP TSC0034880
aactaaacaaaca

SEQ ID NO: 139261 - DNA, 13 bp, Artificial Sequence
  Oligonucleotide for detection of SNP TSC0034880
cgtttggttagtt

SEQ ID NO: 139262 - DNA, 13 bp, Artificial Sequence
  Oligonucleotide for detection of SNP TSC0034880
aactaaccaaacg

SEQ ID NO: 139263 - DNA, 13 bp, Artificial Sequence
  Oligonucleotide for detection of SNP TSC0034880
cgtttgtttagtt

SEQ ID NO: 139264 - DNA, 13 bp, Artificial Sequence
  Oligonucleotide for detection of SNP TSC0034880
aactaaacaaacg

SEQ ID NO: 139265 - DNA, 13 bp, Artificial Sequence
  Oligonucleotide for detection of SNP TSC0034880
tgttcggttagtt

SEQ ID NO: 139266 - DNA, 13 bp, Artificial Sequence
  Oligonucleotide for detection of SNP TSC0034880
aactaaccgaaca

SEQ ID NO: 139267 - DNA, 13 bp, Artificial Sequence
  Oligonucleotide for detection of SNP TSC0034880
tgttcgtttagtt

SEQ ID NO: 139268 - DNA, 13 bp, Artificial Sequence
  Oligonucleotide for detection of SNP TSC0034880
aactaaacgaaca

SEQ ID NO: 139269 - DNA, 13 bp, Artificial Sequence
  Oligonucleotide for detection of SNP TSC0034880
cgttcggttagtt

SEQ ID NO: 139270 - DNA, 13 bp, Artificial Sequence
  Oligonucleotide for detection of SNP TSC0034880
aactaaccgaacg

SEQ ID NO: 139271 - DNA, 13 bp, Artificial Sequence
  Oligonucleotide for detection of SNP TSC0034880
cgttcgtttagtt

SEQ ID NO: 139272 - DNA, 13 bp, Artificial Sequence
  Oligonucleotide for detection of SNP TSC0034880
aactaaacgaacg

SEQ ID NO: 139273 - DNA, 13 bp, Artificial Sequence
  Oligonucleotide for detection of SNP TSC0034881
ttagaagggaggt

SEQ ID NO: 139274 - DNA, 13 bp, Artificial Sequence
  Oligonucleotide for detection of SNP TSC0034881
acctcccttctaa

SEQ ID NO: 139275 - DNA, 13 bp, Artificial Sequence
  Oligonucleotide for detection of SNP TSC0034881
ttagaaaggaggt

SEQ ID NO: 139276 - DNA, 13 bp, Artificial Sequence
  Oligonucleotide for detection of SNP TSC0034881
acctcctttctaa

SEQ ID NO: 139277 - DNA, 13 bp, Artificial Sequence
  Oligonucleotide for detection of SNP TSC0034882
ttgtgttttggty

SEQ ID NO: 139278 - DNA, 13 bp, Artificial Sequence
  Oligonucleotide for detection of SNP TSC0034882
raccaaaacacaa

SEQ ID NO: 139279 - DNA, 13 bp, Artificial Sequence
  Oligonucleotide for detection of SNP TSC0034882
ttgtgtgttggty

SEQ ID NO: 139280 - DNA, 13 bp, Artificial Sequence
  Oligonucleotide for detection of SNP TSC0034882
raccaacacacaa

SEQ ID NO: 139281 - DNA, 13 bp, Artificial Sequence
  Oligonucleotide for detection of SNP TSC0034882
ttgtgcgttggty

SEQ ID NO: 139282 - DNA, 13 bp, Artificial Sequence
  Oligonucleotide for detection of SNP TSC0034882
raccaacgcacaa

SEQ ID NO: 139283 - DNA, 13 bp, Artificial Sequence
  Oligonucleotide for detection of SNP TSC0034882
ggttagggtatag

SEQ ID NO: 139284 - DNA, 13 bp, Artificial Sequence
  Oligonucleotide for detection of SNP TSC0034882
ctataccctaacc

SEQ ID NO: 139285 - DNA, 13 bp, Artificial Sequence
  Oligonucleotide for detection of SNP TSC0034882
ggttagtgtatag

SEQ ID NO: 139286 - DNA, 13 bp, Artificial Sequence
  Oligonucleotide for detection of SNP TSC0034882
ctatacactaacc

SEQ ID NO: 139287 - DNA, 13 bp, Artificial Sequence
  Oligonucleotide for detection of SNP TSC0034882
ggttagcgtatag

SEQ ID NO: 139288 - DNA, 13 bp, Artificial Sequence
  Oligonucleotide for detection of SNP TSC0034882
ctatacgctaacc

SEQ ID NO: 139289 - DNA, 13 bp, Artificial Sequence
  Oligonucleotide for detection of SNP TSC0034884
agggtggtttagg

SEQ ID NO: 139290 - DNA, 13 bp, Artificial Sequence
  Oligonucleotide for detection of SNP TSC0034884
cctaaaccaccct

SEQ ID NO: 139291 - DNA, 13 bp, Artificial Sequence
  Oligonucleotide for detection of SNP TSC0034884
agggtgttttagg

SEQ ID NO: 139292 - DNA, 13 bp, Artificial Sequence
  Oligonucleotide for detection of SNP TSC0034884
cctaaaacaccct

SEQ ID NO: 139293 - DNA, 13 bp, Artificial Sequence
  Oligonucleotide for detection of SNP TSC0034884
tttggattatttt

SEQ ID NO: 139294 - DNA, 13 bp, Artificial Sequence
  Oligonucleotide for detection of SNP TSC0034884
aaaataatccaaa

SEQ ID NO: 139295 - DNA, 13 bp, Artificial Sequence
  Oligonucleotide for detection of SNP TSC0034884
tttggaatatttt

SEQ ID NO: 139296 - DNA, 13 bp, Artificial Sequence
  Oligonucleotide for detection of SNP TSC0034884
aaaatattccaaa

SEQ ID NO: 139297 - DNA, 13 bp, Artificial Sequence
  Oligonucleotide for detection of SNP TSC0034887
tgaaggtgtggtg

SEQ ID NO: 139298 - DNA, 13 bp, Artificial Sequence
  Oligonucleotide for detection of SNP TSC0034887
caccacaccttca

SEQ ID NO: 139299 - DNA, 13 bp, Artificial Sequence
  Oligonucleotide for detection of SNP TSC0034887
tgaaggcgtggtg

SEQ ID NO: 139300 - DNA, 13 bp, Artificial Sequence
  Oligonucleotide for detection of SNP TSC0034887
caccacgccttca

SEQ ID NO: 139301 - DNA, 13 bp, Artificial Sequence
  Oligonucleotide for detection of SNP TSC0034887
tgaaggtgcggtg

SEQ ID NO: 139302 - DNA, 13 bp, Artificial Sequence
  Oligonucleotide for detection of SNP TSC0034887
caccgcaccttca

SEQ ID NO: 139303 - DNA, 13 bp, Artificial Sequence
  Oligonucleotide for detection of SNP TSC0034887
tgaaggtgtggcg

SEQ ID NO: 139304 - DNA, 13 bp, Artificial Sequence
  Oligonucleotide for detection of SNP TSC0034887
cgccacaccttca

SEQ ID NO: 139305 - DNA, 13 bp, Artificial Sequence
  Oligonucleotide for detection of SNP TSC0034887
tgaaggtgcggcg

SEQ ID NO: 139306 - DNA, 13 bp, Artificial Sequence
  Oligonucleotide for detection of SNP TSC0034887
cgccgcaccttca

SEQ ID NO: 139307 - DNA, 13 bp, Artificial Sequence
  Oligonucleotide for detection of SNP TSC0034887
tgaaggcgcggtg

SEQ ID NO: 139308 - DNA, 13 bp, Artificial Sequence
  Oligonucleotide for detection of SNP TSC0034887
caccgcgccttca

SEQ ID NO: 139309 - DNA, 13 bp, Artificial Sequence
  Oligonucleotide for detection of SNP TSC0034887
tgaaggcgtggcg

SEQ ID NO: 139310 - DNA, 13 bp, Artificial Sequence
  Oligonucleotide for detection of SNP TSC0034887
cgccacgccttca

SEQ ID NO: 139311 - DNA, 13 bp, Artificial Sequence
  Oligonucleotide for detection of SNP TSC0034887
tgaaggcgcggcg

SEQ ID NO: 139312 - DNA, 13 bp, Artificial Sequence
  Oligonucleotide for detection of SNP TSC0034887
cgccgcgccttca

SEQ ID NO: 139313 - DNA, 13 bp, Artificial Sequence
  Oligonucleotide for detection of SNP TSC0034887
tgttgtattttta

SEQ ID NO: 139314 - DNA, 13 bp, Artificial Sequence
  Oligonucleotide for detection of SNP TSC0034887
taaaaatacaaca

SEQ ID NO: 139315 - DNA, 13 bp, Artificial Sequence
  Oligonucleotide for detection of SNP TSC0034887
cgttgtgttttta

SEQ ID NO: 139316 - DNA, 13 bp, Artificial Sequence
  Oligonucleotide for detection of SNP TSC0034887
taaaaacacaacg

SEQ ID NO: 139317 - DNA, 13 bp, Artificial Sequence
  Oligonucleotide for detection of SNP TSC0034887
cgttgtattttta

SEQ ID NO: 139318 - DNA, 13 bp, Artificial Sequence
  Oligonucleotide for detection of SNP TSC0034887
taaaaatacaacg

SEQ ID NO: 139319 - DNA, 13 bp, Artificial Sequence
  Oligonucleotide for detection of SNP TSC0034887
tgtcgtgttttta

SEQ ID NO: 139320 - DNA, 13 bp, Artificial Sequence
  Oligonucleotide for detection of SNP TSC0034887
taaaaacacgaca

SEQ ID NO: 139321 - DNA, 13 bp, Artificial Sequence
  Oligonucleotide for detection of SNP TSC0034887
tgtcgtattttta

SEQ ID NO: 139322 - DNA, 13 bp, Artificial Sequence
  Oligonucleotide for detection of SNP TSC0034887
taaaaatacgaca

SEQ ID NO: 139323 - DNA, 13 bp, Artificial Sequence
  Oligonucleotide for detection of SNP TSC0034887
tgttgcgttttta

SEQ ID NO: 139324 - DNA, 13 bp, Artificial Sequence
  Oligonucleotide for detection of SNP TSC0034887
taaaaacgcaaca

SEQ ID NO: 139325 - DNA, 13 bp, Artificial Sequence
  Oligonucleotide for detection of SNP TSC0034887
cgtcgtattttta

SEQ ID NO: 139326 - DNA, 13 bp, Artificial Sequence
  Oligonucleotide for detection of SNP TSC0034887
taaaaatacgacg

SEQ ID NO: 139327 - DNA, 13 bp, Artificial Sequence
  Oligonucleotide for detection of SNP TSC0034887
cgtcgtgttttta

SEQ ID NO: 139328 - DNA, 13 bp, Artificial Sequence
  Oligonucleotide for detection of SNP TSC0034887
taaaaacacgacg

SEQ ID NO: 139329 - DNA, 13 bp, Artificial Sequence
  Oligonucleotide for detection of SNP TSC0034887
cgttgcgttttta

SEQ ID NO: 139330 - DNA, 13 bp, Artificial Sequence
  Oligonucleotide for detection of SNP TSC0034887
taaaaacgcaacg

SEQ ID NO: 139331 - DNA, 13 bp, Artificial Sequence
  Oligonucleotide for detection of SNP TSC0034887
tgtcgcgttttta

SEQ ID NO: 139332 - DNA, 13 bp, Artificial Sequence
  Oligonucleotide for detection of SNP TSC0034887
taaaaacgcgaca

SEQ ID NO: 139333 - DNA, 13 bp, Artificial Sequence
  Oligonucleotide for detection of SNP TSC0034887
cgtcgcgttttta

SEQ ID NO: 139334 - DNA, 13 bp, Artificial Sequence
  Oligonucleotide for detection of SNP TSC0034887
taaaaacgcgacg

SEQ ID NO: 139335 - DNA, 13 bp, Artificial Sequence
  Oligonucleotide for detection of SNP TSC0034889
gtgggtattgggg

SEQ ID NO: 139336 - DNA, 13 bp, Artificial Sequence
  Oligonucleotide for detection of SNP TSC0034889
ccccaatacccac

SEQ ID NO: 139337 - DNA, 13 bp, Artificial Sequence
  Oligonucleotide for detection of SNP TSC0034889
gtgggtgttgggg

SEQ ID NO: 139338 - DNA, 13 bp, Artificial Sequence
  Oligonucleotide for detection of SNP TSC0034889
ccccaacacccac

SEQ ID NO: 139339 - DNA, 13 bp, Artificial Sequence
  Oligonucleotide for detection of SNP TSC0034889
gtgggcgttgggg

SEQ ID NO: 139340 - DNA, 13 bp, Artificial Sequence
  Oligonucleotide for detection of SNP TSC0034889
ccccaacgcccac

SEQ ID NO: 139341 - DNA, 13 bp, Artificial Sequence
  Oligonucleotide for detection of SNP TSC0034889
ttttaatgtttay

SEQ ID NO: 139342 - DNA, 13 bp, Artificial Sequence
  Oligonucleotide for detection of SNP TSC0034889
rtaaacattaaaa

SEQ ID NO: 139343 - DNA, 13 bp, Artificial Sequence
  Oligonucleotide for detection of SNP TSC0034889
ttttaacgtttay

SEQ ID NO: 139344 - DNA, 13 bp, Artificial Sequence
  Oligonucleotide for detection of SNP TSC0034889
rtaaacgttaaaa

SEQ ID NO: 139345 - DNA, 13 bp, Artificial Sequence
  Oligonucleotide for detection of SNP TSC0034890
gggagttgtgggg

SEQ ID NO: 139346 - DNA, 13 bp, Artificial Sequence
  Oligonucleotide for detection of SNP TSC0034890
ccccacaactccc

SEQ ID NO: 139347 - DNA, 13 bp, Artificial Sequence
  Oligonucleotide for detection of SNP TSC0034890
gggagtggtgggg

SEQ ID NO: 139348 - DNA, 13 bp, Artificial Sequence
  Oligonucleotide for detection of SNP TSC0034890
ccccaccactccc

SEQ ID NO: 139349 - DNA, 13 bp, Artificial Sequence
  Oligonucleotide for detection of SNP TSC0034890
gggagtcgtgggg

SEQ ID NO: 139350 - DNA, 13 bp, Artificial Sequence
  Oligonucleotide for detection of SNP TSC0034890
ccccacgactccc

SEQ ID NO: 139351 - DNA, 13 bp, Artificial Sequence
  Oligonucleotide for detection of SNP TSC0034890
gggagcggtgggg

SEQ ID NO: 139352 - DNA, 13 bp, Artificial Sequence
  Oligonucleotide for detection of SNP TSC0034890
ccccaccgctccc

SEQ ID NO: 139353 - DNA, 13 bp, Artificial Sequence
  Oligonucleotide for detection of SNP TSC0034891
ggaattaatgtta

SEQ ID NO: 139354 - DNA, 13 bp, Artificial Sequence
  Oligonucleotide for detection of SNP TSC0034891
taacattaattcc

SEQ ID NO: 139355 - DNA, 13 bp, Artificial Sequence
  Oligonucleotide for detection of SNP TSC0034891
ggaattgatgtta

SEQ ID NO: 139356 - DNA, 13 bp, Artificial Sequence
  Oligonucleotide for detection of SNP TSC0034891
taacatcaattcc

SEQ ID NO: 139357 - DNA, 13 bp, Artificial Sequence
  Oligonucleotide for detection of SNP TSC0034891
ggaatcgatgtta

SEQ ID NO: 139358 - DNA, 13 bp, Artificial Sequence
  Oligonucleotide for detection of SNP TSC0034891
taacatcgattcc

SEQ ID NO: 139359 - DNA, 13 bp, Artificial Sequence
  Oligonucleotide for detection of SNP TSC0034891
taatattggttty

SEQ ID NO: 139360 - DNA, 13 bp, Artificial Sequence
  Oligonucleotide for detection of SNP TSC0034891
raaaccaatatta

SEQ ID NO: 139361 - DNA, 13 bp, Artificial Sequence
  Oligonucleotide for detection of SNP TSC0034891
taatatcggttty

SEQ ID NO: 139362 - DNA, 13 bp, Artificial Sequence
  Oligonucleotide for detection of SNP TSC0034891
raaaccgatatta

SEQ ID NO: 139363 - DNA, 13 bp, Artificial Sequence
  Oligonucleotide for detection of SNP TSC0034892
atatatattatay

SEQ ID NO: 139364 - DNA, 13 bp, Artificial Sequence
  Oligonucleotide for detection of SNP TSC0034892
rtataatatatat

SEQ ID NO: 139365 - DNA, 13 bp, Artificial Sequence
  Oligonucleotide for detection of SNP TSC0034892
atatatgttatay

SEQ ID NO: 139366 - DNA, 13 bp, Artificial Sequence
  Oligonucleotide for detection of SNP TSC0034892
rtataacatatat

SEQ ID NO: 139367 - DNA, 13 bp, Artificial Sequence
  Oligonucleotide for detection of SNP TSC0034894
tagttttttgtgg

SEQ ID NO: 139368 - DNA, 13 bp, Artificial Sequence
  Oligonucleotide for detection of SNP TSC0034894
ccacaaaaaacta

SEQ ID NO: 139369 - DNA, 13 bp, Artificial Sequence
  Oligonucleotide for detection of SNP TSC0034894
tagtttgttgtgg

SEQ ID NO: 139370 - DNA, 13 bp, Artificial Sequence
  Oligonucleotide for detection of SNP TSC0034894
ccacaacaaacta

SEQ ID NO: 139371 - DNA, 13 bp, Artificial Sequence
  Oligonucleotide for detection of SNP TSC0034894
tagtttttcgtgg

SEQ ID NO: 139372 - DNA, 13 bp, Artificial Sequence
  Oligonucleotide for detection of SNP TSC0034894
ccacgaaaaacta

SEQ ID NO: 139373 - DNA, 13 bp, Artificial Sequence
  Oligonucleotide for detection of SNP TSC0034894
tagttcgttgtgg

SEQ ID NO: 139374 - DNA, 13 bp, Artificial Sequence
  Oligonucleotide for detection of SNP TSC0034894
ccacaacgaacta

SEQ ID NO: 139375 - DNA, 13 bp, Artificial Sequence
  Oligonucleotide for detection of SNP TSC0034894
tagtttgtcgtgg

SEQ ID NO: 139376 - DNA, 13 bp, Artificial Sequence
  Oligonucleotide for detection of SNP TSC0034894
ccacgacaaacta

SEQ ID NO: 139377 - DNA, 13 bp, Artificial Sequence
  Oligonucleotide for detection of SNP TSC0034894
tagttcgtcgtgg

SEQ ID NO: 139378 - DNA, 13 bp, Artificial Sequence
  Oligonucleotide for detection of SNP TSC0034894
ccacgacgaacta

SEQ ID NO: 139379 - DNA, 13 bp, Artificial Sequence
  Oligonucleotide for detection of SNP TSC0034894
ttatggggggtta

SEQ ID NO: 139380 - DNA, 13 bp, Artificial Sequence
  Oligonucleotide for detection of SNP TSC0034894
taaccccccataa

SEQ ID NO: 139381 - DNA, 13 bp, Artificial Sequence
  Oligonucleotide for detection of SNP TSC0034894
ttatggtgggtta

SEQ ID NO: 139382 - DNA, 13 bp, Artificial Sequence
  Oligonucleotide for detection of SNP TSC0034894
taacccaccataa

SEQ ID NO: 139383 - DNA, 13 bp, Artificial Sequence
  Oligonucleotide for detection of SNP TSC0034894
ttacggggggtta

SEQ ID NO: 139384 - DNA, 13 bp, Artificial Sequence
  Oligonucleotide for detection of SNP TSC0034894
taaccccccgtaa

SEQ ID NO: 139385 - DNA, 13 bp, Artificial Sequence
  Oligonucleotide for detection of SNP TSC0034894
ttacggtgggtta

SEQ ID NO: 139386 - DNA, 13 bp, Artificial Sequence
  Oligonucleotide for detection of SNP TSC0034894
taacccaccgtaa

SEQ ID NO: 139387 - DNA, 13 bp, Artificial Sequence
  Oligonucleotide for detection of SNP TSC0034894
ttatggcgggtta

SEQ ID NO: 139388 - DNA, 13 bp, Artificial Sequence
  Oligonucleotide for detection of SNP TSC0034894
taacccgccataa

SEQ ID NO: 139389 - DNA, 13 bp, Artificial Sequence
  Oligonucleotide for detection of SNP TSC0034894
ttacggcgggtta

SEQ ID NO: 139390 - DNA, 13 bp, Artificial Sequence
  Oligonucleotide for detection of SNP TSC0034894
taacccgccgtaa

SEQ ID NO: 139391 - DNA, 13 bp, Artificial Sequence
  Oligonucleotide for detection of SNP TSC0034896
ttttttgtttgga

SEQ ID NO: 139392 - DNA, 13 bp, Artificial Sequence
  Oligonucleotide for detection of SNP TSC0034896
tccaaacaaaaaa

SEQ ID NO: 139393 - DNA, 13 bp, Artificial Sequence
  Oligonucleotide for detection of SNP TSC0034896
tttagggagggag

SEQ ID NO: 139394 - DNA, 13 bp, Artificial Sequence
  Oligonucleotide for detection of SNP TSC0034896
ctccctccctaaa

SEQ ID NO: 139395 - DNA, 13 bp, Artificial Sequence
  Oligonucleotide for detection of SNP TSC0034896
tttaggtagggag

SEQ ID NO: 139396 - DNA, 13 bp, Artificial Sequence
  Oligonucleotide for detection of SNP TSC0034896
ctccctacctaaa

SEQ ID NO: 139397 - DNA, 13 bp, Artificial Sequence
  Oligonucleotide for detection of SNP TSC0034897
ttaggtgattgtg

SEQ ID NO: 139398 - DNA, 13 bp, Artificial Sequence
  Oligonucleotide for detection of SNP TSC0034897
cacaatcacctaa

SEQ ID NO: 139399 - DNA, 13 bp, Artificial Sequence
  Oligonucleotide for detection of SNP TSC0034897
ttaggtaattgtg

SEQ ID NO: 139400 - DNA, 13 bp, Artificial Sequence
  Oligonucleotide for detection of SNP TSC0034897
cacaattacctaa

SEQ ID NO: 139401 - DNA, 13 bp, Artificial Sequence
  Oligonucleotide for detection of SNP TSC0034898
gttagtgggaatt

SEQ ID NO: 139402 - DNA, 13 bp, Artificial Sequence
  Oligonucleotide for detection of SNP TSC0034898
aattcccactaac

SEQ ID NO: 139403 - DNA, 13 bp, Artificial Sequence
  Oligonucleotide for detection of SNP TSC0034898
gttagtaggaatt

SEQ ID NO: 139404 - DNA, 13 bp, Artificial Sequence
  Oligonucleotide for detection of SNP TSC0034898
aattcctactaac

SEQ ID NO: 139405 - DNA, 13 bp, Artificial Sequence
  Oligonucleotide for detection of SNP TSC0034899
tttatttggaagy

SEQ ID NO: 139406 - DNA, 13 bp, Artificial Sequence
  Oligonucleotide for detection of SNP TSC0034899
rcttccaaataaa

SEQ ID NO: 139407 - DNA, 13 bp, Artificial Sequence
  Oligonucleotide for detection of SNP TSC0034899
tttattcggaagy

SEQ ID NO: 139408 - DNA, 13 bp, Artificial Sequence
  Oligonucleotide for detection of SNP TSC0034899
rcttccgaataaa

SEQ ID NO: 139409 - DNA, 13 bp, Artificial Sequence
  Oligonucleotide for detection of SNP TSC0034899
gtttttgggtgag

SEQ ID NO: 139410 - DNA, 13 bp, Artificial Sequence
  Oligonucleotide for detection of SNP TSC0034899
ctcacccaaaaac

SEQ ID NO: 139411 - DNA, 13 bp, Artificial Sequence
  Oligonucleotide for detection of SNP TSC0034899
gtttttaggtgag

SEQ ID NO: 139412 - DNA, 13 bp, Artificial Sequence
  Oligonucleotide for detection of SNP TSC0034899
ctcacctaaaaac

SEQ ID NO: 139413 - DNA, 13 bp, Artificial Sequence
  Oligonucleotide for detection of SNP TSC0034899
gttttcgggtgag

SEQ ID NO: 139414 - DNA, 13 bp, Artificial Sequence
  Oligonucleotide for detection of SNP TSC0034899
ctcacccgaaaac

SEQ ID NO: 139415 - DNA, 13 bp, Artificial Sequence
  Oligonucleotide for detection of SNP TSC0034900
gttagtagtaaay

SEQ ID NO: 139416 - DNA, 13 bp, Artificial Sequence
  Oligonucleotide for detection of SNP TSC0034900
rtttactactaac

SEQ ID NO: 139417 - DNA, 13 bp, Artificial Sequence
  Oligonucleotide for detection of SNP TSC0034900
gttagtggtaaay

SEQ ID NO: 139418 - DNA, 13 bp, Artificial Sequence
  Oligonucleotide for detection of SNP TSC0034900
rtttaccactaac

SEQ ID NO: 139419 - DNA, 13 bp, Artificial Sequence
  Oligonucleotide for detection of SNP TSC0034903
tgagtgatgttag

SEQ ID NO: 139420 - DNA, 13 bp, Artificial Sequence
  Oligonucleotide for detection of SNP TSC0034903
ctaacatcactca

SEQ ID NO: 139421 - DNA, 13 bp, Artificial Sequence
  Oligonucleotide for detection of SNP TSC0034903
tgagtggtgttag

SEQ ID NO: 139422 - DNA, 13 bp, Artificial Sequence
  Oligonucleotide for detection of SNP TSC0034903
ctaacaccactca

SEQ ID NO: 139423 - DNA, 13 bp, Artificial Sequence
  Oligonucleotide for detection of SNP TSC0034904
taagatattattg

SEQ ID NO: 139424 - DNA, 13 bp, Artificial Sequence
  Oligonucleotide for detection of SNP TSC0034904
caataatatctta

SEQ ID NO: 139425 - DNA, 13 bp, Artificial Sequence
  Oligonucleotide for detection of SNP TSC0034904
taagatgttattg

SEQ ID NO: 139426 - DNA, 13 bp, Artificial Sequence
  Oligonucleotide for detection of SNP TSC0034904
caataacatctta

SEQ ID NO: 139427 - DNA, 13 bp, Artificial Sequence
  Oligonucleotide for detection of SNP TSC0034904
taagacgttattg

SEQ ID NO: 139428 - DNA, 13 bp, Artificial Sequence
  Oligonucleotide for detection of SNP TSC0034904
caataacgtctta

SEQ ID NO: 139429 - DNA, 13 bp, Artificial Sequence
  Oligonucleotide for detection of SNP TSC0034904
taatgatgttttg

SEQ ID NO: 139430 - DNA, 13 bp, Artificial Sequence
  Oligonucleotide for detection of SNP TSC0034904
caaaacatcatta

SEQ ID NO: 139431 - DNA, 13 bp, Artificial Sequence
  Oligonucleotide for detection of SNP TSC0034904
taatgacgttttg

SEQ ID NO: 139432 - DNA, 13 bp, Artificial Sequence
  Oligonucleotide for detection of SNP TSC0034904
caaaacgtcatta

SEQ ID NO: 139433 - DNA, 13 bp, Artificial Sequence
  Oligonucleotide for detection of SNP TSC0034905
attatttattgaa

SEQ ID NO: 139434 - DNA, 13 bp, Artificial Sequence
  Oligonucleotide for detection of SNP TSC0034905
ttcaataaataat

SEQ ID NO: 139435 - DNA, 13 bp, Artificial Sequence
  Oligonucleotide for detection of SNP TSC0034905
attattgattgaa

SEQ ID NO: 139436 - DNA, 13 bp, Artificial Sequence
  Oligonucleotide for detection of SNP TSC0034905
ttcaatcaataat

SEQ ID NO: 139437 - DNA, 13 bp, Artificial Sequence
  Oligonucleotide for detection of SNP TSC0034905
attatttatcgaa

SEQ ID NO: 139438 - DNA, 13 bp, Artificial Sequence
  Oligonucleotide for detection of SNP TSC0034905
ttcgataaataat

SEQ ID NO: 139439 - DNA, 13 bp, Artificial Sequence
  Oligonucleotide for detection of SNP TSC0034905
attattgatcgaa

SEQ ID NO: 139440 - DNA, 13 bp, Artificial Sequence
  Oligonucleotide for detection of SNP TSC0034905
ttcgatcaataat

SEQ ID NO: 139441 - DNA, 13 bp, Artificial Sequence
  Oligonucleotide for detection of SNP TSC0034905
tttggtgagtgat

SEQ ID NO: 139442 - DNA, 13 bp, Artificial Sequence
  Oligonucleotide for detection of SNP TSC0034905
atcactcaccaaa

SEQ ID NO: 139443 - DNA, 13 bp, Artificial Sequence
  Oligonucleotide for detection of SNP TSC0034905
tttggttagtgat

SEQ ID NO: 139444 - DNA, 13 bp, Artificial Sequence
  Oligonucleotide for detection of SNP TSC0034905
atcactaaccaaa

SEQ ID NO: 139445 - DNA, 13 bp, Artificial Sequence
  Oligonucleotide for detection of SNP TSC0034905
ttcggtgagtgat

SEQ ID NO: 139446 - DNA, 13 bp, Artificial Sequence
  Oligonucleotide for detection of SNP TSC0034905
atcactcaccgaa

SEQ ID NO: 139447 - DNA, 13 bp, Artificial Sequence
  Oligonucleotide for detection of SNP TSC0034905
ttcggttagtgat

SEQ ID NO: 139448 - DNA, 13 bp, Artificial Sequence
  Oligonucleotide for detection of SNP TSC0034905
atcactaaccgaa

SEQ ID NO: 139449 - DNA, 13 bp, Artificial Sequence
  Oligonucleotide for detection of SNP TSC0034906
tttgaatagggty

SEQ ID NO: 139450 - DNA, 13 bp, Artificial Sequence
  Oligonucleotide for detection of SNP TSC0034906
raccctattcaaa

SEQ ID NO: 139451 - DNA, 13 bp, Artificial Sequence
  Oligonucleotide for detection of SNP TSC0034906
tttgaagagggty

SEQ ID NO: 139452 - DNA, 13 bp, Artificial Sequence
  Oligonucleotide for detection of SNP TSC0034906
raccctcttcaaa

SEQ ID NO: 139453 - DNA, 13 bp, Artificial Sequence
  Oligonucleotide for detection of SNP TSC0034906
ggttttgtttagg

SEQ ID NO: 139454 - DNA, 13 bp, Artificial Sequence
  Oligonucleotide for detection of SNP TSC0034906
cctaaacaaaacc

SEQ ID NO: 139455 - DNA, 13 bp, Artificial Sequence
  Oligonucleotide for detection of SNP TSC0034906
ggttttttttagg

SEQ ID NO: 139456 - DNA, 13 bp, Artificial Sequence
  Oligonucleotide for detection of SNP TSC0034906
cctaaaaaaaacc

SEQ ID NO: 139457 - DNA, 13 bp, Artificial Sequence
  Oligonucleotide for detection of SNP TSC0034908
ggttggggaagty

SEQ ID NO: 139458 - DNA, 13 bp, Artificial Sequence
  Oligonucleotide for detection of SNP TSC0034908
racttccccaacc

SEQ ID NO: 139459 - DNA, 13 bp, Artificial Sequence
  Oligonucleotide for detection of SNP TSC0034908
ggttggagaagty

SEQ ID NO: 139460 - DNA, 13 bp, Artificial Sequence
  Oligonucleotide for detection of SNP TSC0034908
racttctccaacc

SEQ ID NO: 139461 - DNA, 13 bp, Artificial Sequence
  Oligonucleotide for detection of SNP TSC0034909
ggttaaggaaaag

SEQ ID NO: 139462 - DNA, 13 bp, Artificial Sequence
  Oligonucleotide for detection of SNP TSC0034909
cttttccttaacc

SEQ ID NO: 139463 - DNA, 13 bp, Artificial Sequence
  Oligonucleotide for detection of SNP TSC0034909
ggttaaagaaaag

SEQ ID NO: 139464 - DNA, 13 bp, Artificial Sequence
  Oligonucleotide for detection of SNP TSC0034909
cttttctttaacc

SEQ ID NO: 139465 - DNA, 13 bp, Artificial Sequence
  Oligonucleotide for detection of SNP TSC0034913
aaggttgttgttt

SEQ ID NO: 139466 - DNA, 13 bp, Artificial Sequence
  Oligonucleotide for detection of SNP TSC0034913
aaacaacaacctt

SEQ ID NO: 139467 - DNA, 13 bp, Artificial Sequence
  Oligonucleotide for detection of SNP TSC0034913
aaggttattgttt

SEQ ID NO: 139468 - DNA, 13 bp, Artificial Sequence
  Oligonucleotide for detection of SNP TSC0034913
aaacaataacctt

SEQ ID NO: 139469 - DNA, 13 bp, Artificial Sequence
  Oligonucleotide for detection of SNP TSC0034914
atatatgtttatt

SEQ ID NO: 139470 - DNA, 13 bp, Artificial Sequence
  Oligonucleotide for detection of SNP TSC0034914
aataaacatatat

SEQ ID NO: 139471 - DNA, 13 bp, Artificial Sequence
  Oligonucleotide for detection of SNP TSC0034926
tagaaaaatagtg

SEQ ID NO: 139472 - DNA, 13 bp, Artificial Sequence
  Oligonucleotide for detection of SNP TSC0034926
cactatttttcta

SEQ ID NO: 139473 - DNA, 13 bp, Artificial Sequence
  Oligonucleotide for detection of SNP TSC0034926
tagaaagatagtg

SEQ ID NO: 139474 - DNA, 13 bp, Artificial Sequence
  Oligonucleotide for detection of SNP TSC0034926
cactatctttcta

SEQ ID NO: 139475 - DNA, 13 bp, Artificial Sequence
  Oligonucleotide for detection of SNP TSC0034927
gagagaatttaga

SEQ ID NO: 139476 - DNA, 13 bp, Artificial Sequence
  Oligonucleotide for detection of SNP TSC0034927
tctaaattctctc

SEQ ID NO: 139477 - DNA, 13 bp, Artificial Sequence
  Oligonucleotide for detection of SNP TSC0034927
gagagattttaga

SEQ ID NO: 139478 - DNA, 13 bp, Artificial Sequence
  Oligonucleotide for detection of SNP TSC0034927
tctaaaatctctc

SEQ ID NO: 139479 - DNA, 13 bp, Artificial Sequence
  Oligonucleotide for detection of SNP TSC0034927
tttgaatttttty

SEQ ID NO: 139480 - DNA, 13 bp, Artificial Sequence
  Oligonucleotide for detection of SNP TSC0034927
raaaaaattcaaa

SEQ ID NO: 139481 - DNA, 13 bp, Artificial Sequence
  Oligonucleotide for detection of SNP TSC0034927
tttgaaattttty

SEQ ID NO: 139482 - DNA, 13 bp, Artificial Sequence
  Oligonucleotide for detection of SNP TSC0034927
raaaaatttcaaa

SEQ ID NO: 139483 - DNA, 13 bp, Artificial Sequence
  Oligonucleotide for detection of SNP TSC0034928
atttaatgaatat

SEQ ID NO: 139484 - DNA, 13 bp, Artificial Sequence
  Oligonucleotide for detection of SNP TSC0034928
atattcattaaat

SEQ ID NO: 139485 - DNA, 13 bp, Artificial Sequence
  Oligonucleotide for detection of SNP TSC0034928
atttaacgaatat

SEQ ID NO: 139486 - DNA, 13 bp, Artificial Sequence
  Oligonucleotide for detection of SNP TSC0034928
atattcgttaaat

SEQ ID NO: 139487 - DNA, 13 bp, Artificial Sequence
  Oligonucleotide for detection of SNP TSC0034928
atgtttgttggat

SEQ ID NO: 139488 - DNA, 13 bp, Artificial Sequence
  Oligonucleotide for detection of SNP TSC0034928
atccaacaaacat

SEQ ID NO: 139489 - DNA, 13 bp, Artificial Sequence
  Oligonucleotide for detection of SNP TSC0034928
atgtttattggat

SEQ ID NO: 139490 - DNA, 13 bp, Artificial Sequence
  Oligonucleotide for detection of SNP TSC0034928
atccaataaacat

SEQ ID NO: 139491 - DNA, 13 bp, Artificial Sequence
  Oligonucleotide for detection of SNP TSC0034928
atgttcgttggat

SEQ ID NO: 139492 - DNA, 13 bp, Artificial Sequence
  Oligonucleotide for detection of SNP TSC0034928
atccaacgaacat

SEQ ID NO: 139493 - DNA, 13 bp, Artificial Sequence
  Oligonucleotide for detection of SNP TSC0034930
gaaaaatagaagg

SEQ ID NO: 139494 - DNA, 13 bp, Artificial Sequence
  Oligonucleotide for detection of SNP TSC0034930
ccttctatttttc

SEQ ID NO: 139495 - DNA, 13 bp, Artificial Sequence
  Oligonucleotide for detection of SNP TSC0034930
gaaaaaaagaagg

SEQ ID NO: 139496 - DNA, 13 bp, Artificial Sequence
  Oligonucleotide for detection of SNP TSC0034930
ccttctttttttc

SEQ ID NO: 139497 - DNA, 13 bp, Artificial Sequence
  Oligonucleotide for detection of SNP TSC0034931
ggaggttgaggtt

SEQ ID NO: 139498 - DNA, 13 bp, Artificial Sequence
  Oligonucleotide for detection of SNP TSC0034931
aacctcaacctcc

SEQ ID NO: 139499 - DNA, 13 bp, Artificial Sequence
  Oligonucleotide for detection of SNP TSC0034931
ggaggtcgaggtt

SEQ ID NO: 139500 - DNA, 13 bp, Artificial Sequence
  Oligonucleotide for detection of SNP TSC0034931
aacctcgacctcc

SEQ ID NO: 139501 - DNA, 13 bp, Artificial Sequence
  Oligonucleotide for detection of SNP TSC0034933
atttgggagattt

SEQ ID NO: 139502 - DNA, 13 bp, Artificial Sequence
  Oligonucleotide for detection of SNP TSC0034933
aaatctcccaaat

SEQ ID NO: 139503 - DNA, 13 bp, Artificial Sequence
  Oligonucleotide for detection of SNP TSC0034933
atttggaagattt

SEQ ID NO: 139504 - DNA, 13 bp, Artificial Sequence
  Oligonucleotide for detection of SNP TSC0034933
aaatcttccaaat

SEQ ID NO: 139505 - DNA, 13 bp, Artificial Sequence
  Oligonucleotide for detection of SNP TSC0034934
aaagttattgata

SEQ ID NO: 139506 - DNA, 13 bp, Artificial Sequence
  Oligonucleotide for detection of SNP TSC0034934
tatcaataacttt

SEQ ID NO: 139507 - DNA, 13 bp, Artificial Sequence
  Oligonucleotide for detection of SNP TSC0034934
aaagttgttgata

SEQ ID NO: 139508 - DNA, 13 bp, Artificial Sequence
  Oligonucleotide for detection of SNP TSC0034934
tatcaacaacttt

SEQ ID NO: 139509 - DNA, 13 bp, Artificial Sequence
  Oligonucleotide for detection of SNP TSC0034934
aaagtcgttgata

SEQ ID NO: 139510 - DNA, 13 bp, Artificial Sequence
  Oligonucleotide for detection of SNP TSC0034934
tatcaacgacttt

SEQ ID NO: 139511 - DNA, 13 bp, Artificial Sequence
  Oligonucleotide for detection of SNP TSC0034934
tattaatggtttt

SEQ ID NO: 139512 - DNA, 13 bp, Artificial Sequence
  Oligonucleotide for detection of SNP TSC0034934
aaaaccattaata

SEQ ID NO: 139513 - DNA, 13 bp, Artificial Sequence
  Oligonucleotide for detection of SNP TSC0034934
tattaacggtttt

SEQ ID NO: 139514 - DNA, 13 bp, Artificial Sequence
  Oligonucleotide for detection of SNP TSC0034934
aaaaccgttaata

SEQ ID NO: 139515 - DNA, 13 bp, Artificial Sequence
  Oligonucleotide for detection of SNP TSC0034935
aaggaggattgga

SEQ ID NO: 139516 - DNA, 13 bp, Artificial Sequence
  Oligonucleotide for detection of SNP TSC0034935
tccaatcctcctt

SEQ ID NO: 139517 - DNA, 13 bp, Artificial Sequence
  Oligonucleotide for detection of SNP TSC0034935
aaggagtattgga

SEQ ID NO: 139518 - DNA, 13 bp, Artificial Sequence
  Oligonucleotide for detection of SNP TSC0034935
tccaatactcctt

SEQ ID NO: 139519 - DNA, 13 bp, Artificial Sequence
  Oligonucleotide for detection of SNP TSC0034937
atgaatgtgtgtt

SEQ ID NO: 139520 - DNA, 13 bp, Artificial Sequence
  Oligonucleotide for detection of SNP TSC0034937
aacacacattcat

SEQ ID NO: 139521 - DNA, 13 bp, Artificial Sequence
  Oligonucleotide for detection of SNP TSC0034937
atgaatatgtgtt

SEQ ID NO: 139522 - DNA, 13 bp, Artificial Sequence
  Oligonucleotide for detection of SNP TSC0034937
aacacatattcat

SEQ ID NO: 139523 - DNA, 13 bp, Artificial Sequence
  Oligonucleotide for detection of SNP TSC0034937
atgaatgtgcgtt

SEQ ID NO: 139524 - DNA, 13 bp, Artificial Sequence
  Oligonucleotide for detection of SNP TSC0034937
aacgcacattcat

SEQ ID NO: 139525 - DNA, 13 bp, Artificial Sequence
  Oligonucleotide for detection of SNP TSC0034937
atgaatatgcgtt

SEQ ID NO: 139526 - DNA, 13 bp, Artificial Sequence
  Oligonucleotide for detection of SNP TSC0034937
aacgcatattcat

SEQ ID NO: 139527 - DNA, 13 bp, Artificial Sequence
  Oligonucleotide for detection of SNP TSC0034938
tatgttgaattag

SEQ ID NO: 139528 - DNA, 13 bp, Artificial Sequence
  Oligonucleotide for detection of SNP TSC0034938
ctaattcaacata

SEQ ID NO: 139529 - DNA, 13 bp, Artificial Sequence
  Oligonucleotide for detection of SNP TSC0034938
tatgtttaattag

SEQ ID NO: 139530 - DNA, 13 bp, Artificial Sequence
  Oligonucleotide for detection of SNP TSC0034938
ctaattaaacata

SEQ ID NO: 139531 - DNA, 13 bp, Artificial Sequence
  Oligonucleotide for detection of SNP TSC0034938
tacgttgaattag

SEQ ID NO: 139532 - DNA, 13 bp, Artificial Sequence
  Oligonucleotide for detection of SNP TSC0034938
ctaattcaacgta

SEQ ID NO: 139533 - DNA, 13 bp, Artificial Sequence
  Oligonucleotide for detection of SNP TSC0034938
tacgtttaattag

SEQ ID NO: 139534 - DNA, 13 bp, Artificial Sequence
  Oligonucleotide for detection of SNP TSC0034938
ctaattaaacgta

SEQ ID NO: 139535 - DNA, 13 bp, Artificial Sequence
  Oligonucleotide for detection of SNP TSC0034938
ttgatttagtgta

SEQ ID NO: 139536 - DNA, 13 bp, Artificial Sequence
  Oligonucleotide for detection of SNP TSC0034938
tacactaaatcaa

SEQ ID NO: 139537 - DNA, 13 bp, Artificial Sequence
  Oligonucleotide for detection of SNP TSC0034938
ttgattaagtgta

SEQ ID NO: 139538 - DNA, 13 bp, Artificial Sequence
  Oligonucleotide for detection of SNP TSC0034938
tacacttaatcaa

SEQ ID NO: 139539 - DNA, 13 bp, Artificial Sequence
  Oligonucleotide for detection of SNP TSC0034938
ttgatttagcgta

SEQ ID NO: 139540 - DNA, 13 bp, Artificial Sequence
  Oligonucleotide for detection of SNP TSC0034938
tacgctaaatcaa

SEQ ID NO: 139541 - DNA, 13 bp, Artificial Sequence
  Oligonucleotide for detection of SNP TSC0034938
ttgattaagcgta

SEQ ID NO: 139542 - DNA, 13 bp, Artificial Sequence
  Oligonucleotide for detection of SNP TSC0034938
tacgcttaatcaa

SEQ ID NO: 139543 - DNA, 13 bp, Artificial Sequence
  Oligonucleotide for detection of SNP TSC0034941
tttttttagttag

SEQ ID NO: 139544 - DNA, 13 bp, Artificial Sequence
  Oligonucleotide for detection of SNP TSC0034941
ctaactaaaaaaa

SEQ ID NO: 139545 - DNA, 13 bp, Artificial Sequence
  Oligonucleotide for detection of SNP TSC0034941
ttttttgagttag

SEQ ID NO: 139546 - DNA, 13 bp, Artificial Sequence
  Oligonucleotide for detection of SNP TSC0034941
ctaactcaaaaaa

SEQ ID NO: 139547 - DNA, 13 bp, Artificial Sequence
  Oligonucleotide for detection of SNP TSC0034941
ttagttgaaggga

SEQ ID NO: 139548 - DNA, 13 bp, Artificial Sequence
  Oligonucleotide for detection of SNP TSC0034941
tcccttcaactaa

SEQ ID NO: 139549 - DNA, 13 bp, Artificial Sequence
  Oligonucleotide for detection of SNP TSC0034941
ttagtttaaggga

SEQ ID NO: 139550 - DNA, 13 bp, Artificial Sequence
  Oligonucleotide for detection of SNP TSC0034941
tcccttaaactaa

SEQ ID NO: 139551 - DNA, 13 bp, Artificial Sequence
  Oligonucleotide for detection of SNP TSC0034943
agttgaatttttt

SEQ ID NO: 139552 - DNA, 13 bp, Artificial Sequence
  Oligonucleotide for detection of SNP TSC0034943
aaaaaattcaact

SEQ ID NO: 139553 - DNA, 13 bp, Artificial Sequence
  Oligonucleotide for detection of SNP TSC0034943
agttgagtttttt

SEQ ID NO: 139554 - DNA, 13 bp, Artificial Sequence
  Oligonucleotide for detection of SNP TSC0034943
aaaaaactcaact

SEQ ID NO: 139555 - DNA, 13 bp, Artificial Sequence
  Oligonucleotide for detection of SNP TSC0034944
gtttttttgtgtg

SEQ ID NO: 139556 - DNA, 13 bp, Artificial Sequence
  Oligonucleotide for detection of SNP TSC0034944
cacacaaaaaaac

SEQ ID NO: 139557 - DNA, 13 bp, Artificial Sequence
  Oligonucleotide for detection of SNP TSC0034944
tatatatgggaay

SEQ ID NO: 139558 - DNA, 13 bp, Artificial Sequence
  Oligonucleotide for detection of SNP TSC0034944
rttcccatatata

SEQ ID NO: 139559 - DNA, 13 bp, Artificial Sequence
  Oligonucleotide for detection of SNP TSC0034944
tatataagggaay

SEQ ID NO: 139560 - DNA, 13 bp, Artificial Sequence
  Oligonucleotide for detection of SNP TSC0034944
rttcccttatata

SEQ ID NO: 139561 - DNA, 13 bp, Artificial Sequence
  Oligonucleotide for detection of SNP TSC0034945
atttaggagagtt

SEQ ID NO: 139562 - DNA, 13 bp, Artificial Sequence
  Oligonucleotide for detection of SNP TSC0034945
aactctcctaaat

SEQ ID NO: 139563 - DNA, 13 bp, Artificial Sequence
  Oligonucleotide for detection of SNP TSC0034945
atttagtagagtt

SEQ ID NO: 139564 - DNA, 13 bp, Artificial Sequence
  Oligonucleotide for detection of SNP TSC0034945
aactctactaaat

SEQ ID NO: 139565 - DNA, 13 bp, Artificial Sequence
  Oligonucleotide for detection of SNP TSC0034946
attgatatggtta

SEQ ID NO: 139566 - DNA, 13 bp, Artificial Sequence
  Oligonucleotide for detection of SNP TSC0034946
taaccatatcaat

SEQ ID NO: 139567 - DNA, 13 bp, Artificial Sequence
  Oligonucleotide for detection of SNP TSC0034946
attgatgtggtta

SEQ ID NO: 139568 - DNA, 13 bp, Artificial Sequence
  Oligonucleotide for detection of SNP TSC0034946
taaccacatcaat

SEQ ID NO: 139569 - DNA, 13 bp, Artificial Sequence
  Oligonucleotide for detection of SNP TSC0034947
ataaaggaaagtg

SEQ ID NO: 139570 - DNA, 13 bp, Artificial Sequence
  Oligonucleotide for detection of SNP TSC0034947
cactttcctttat

SEQ ID NO: 139571 - DNA, 13 bp, Artificial Sequence
  Oligonucleotide for detection of SNP TSC0034947
ataaagaaaagtg

SEQ ID NO: 139572 - DNA, 13 bp, Artificial Sequence
  Oligonucleotide for detection of SNP TSC0034947
cacttttctttat

SEQ ID NO: 139573 - DNA, 13 bp, Artificial Sequence
  Oligonucleotide for detection of SNP TSC0034951
gatttgaaaaagg

SEQ ID NO: 139574 - DNA, 13 bp, Artificial Sequence
  Oligonucleotide for detection of SNP TSC0034951
cctttttcaaatc

SEQ ID NO: 139575 - DNA, 13 bp, Artificial Sequence
  Oligonucleotide for detection of SNP TSC0034951
gatttggaaaagg

SEQ ID NO: 139576 - DNA, 13 bp, Artificial Sequence
  Oligonucleotide for detection of SNP TSC0034951
ccttttccaaatc

SEQ ID NO: 139577 - DNA, 13 bp, Artificial Sequence
  Oligonucleotide for detection of SNP TSC0034952
ttgttttgtgtgg

SEQ ID NO: 139578 - DNA, 13 bp, Artificial Sequence
  Oligonucleotide for detection of SNP TSC0034952
ccacacaaaacaa

SEQ ID NO: 139579 - DNA, 13 bp, Artificial Sequence
  Oligonucleotide for detection of SNP TSC0034952
tcgttttgtgtgg

SEQ ID NO: 139580 - DNA, 13 bp, Artificial Sequence
  Oligonucleotide for detection of SNP TSC0034952
ccacacaaaacga

SEQ ID NO: 139581 - DNA, 13 bp, Artificial Sequence
  Oligonucleotide for detection of SNP TSC0034952
ttgtttcgtgtgg

SEQ ID NO: 139582 - DNA, 13 bp, Artificial Sequence
  Oligonucleotide for detection of SNP TSC0034952
ccacacgaaacaa

SEQ ID NO: 139583 - DNA, 13 bp, Artificial Sequence
  Oligonucleotide for detection of SNP TSC0034952
ttgttttgcgtgg

SEQ ID NO: 139584 - DNA, 13 bp, Artificial Sequence
  Oligonucleotide for detection of SNP TSC0034952
ccacgcaaaacaa

SEQ ID NO: 139585 - DNA, 13 bp, Artificial Sequence
  Oligonucleotide for detection of SNP TSC0034952
tcgttttgcgtgg

SEQ ID NO: 139586 - DNA, 13 bp, Artificial Sequence
  Oligonucleotide for detection of SNP TSC0034952
ccacgcaaaacga

SEQ ID NO: 139587 - DNA, 13 bp, Artificial Sequence
  Oligonucleotide for detection of SNP TSC0034952
tcgtttcgtgtgg

SEQ ID NO: 139588 - DNA, 13 bp, Artificial Sequence
  Oligonucleotide for detection of SNP TSC0034952
ccacacgaaacga

SEQ ID NO: 139589 - DNA, 13 bp, Artificial Sequence
  Oligonucleotide for detection of SNP TSC0034952
ttgtttcgcgtgg

SEQ ID NO: 139590 - DNA, 13 bp, Artificial Sequence
  Oligonucleotide for detection of SNP TSC0034952
ccacgcgaaacaa

SEQ ID NO: 139591 - DNA, 13 bp, Artificial Sequence
  Oligonucleotide for detection of SNP TSC0034952
tcgtttcgcgtgg

SEQ ID NO: 139592 - DNA, 13 bp, Artificial Sequence
  Oligonucleotide for detection of SNP TSC0034952
ccacgcgaaacga

SEQ ID NO: 139593 - DNA, 13 bp, Artificial Sequence
  Oligonucleotide for detection of SNP TSC0034952
ttatgtggagtgg

SEQ ID NO: 139594 - DNA, 13 bp, Artificial Sequence
  Oligonucleotide for detection of SNP TSC0034952
ccactccacataa

SEQ ID NO: 139595 - DNA, 13 bp, Artificial Sequence
  Oligonucleotide for detection of SNP TSC0034952
ttatgtagagtgg

SEQ ID NO: 139596 - DNA, 13 bp, Artificial Sequence
  Oligonucleotide for detection of SNP TSC0034952
ccactctacataa

SEQ ID NO: 139597 - DNA, 13 bp, Artificial Sequence
  Oligonucleotide for detection of SNP TSC0034952
ttacgtggagtgg

SEQ ID NO: 139598 - DNA, 13 bp, Artificial Sequence
  Oligonucleotide for detection of SNP TSC0034952
ccactccacgtaa

SEQ ID NO: 139599 - DNA, 13 bp, Artificial Sequence
  Oligonucleotide for detection of SNP TSC0034952
ttacgtagagtgg

SEQ ID NO: 139600 - DNA, 13 bp, Artificial Sequence
  Oligonucleotide for detection of SNP TSC0034952
ccactctacgtaa

SEQ ID NO: 139601 - DNA, 13 bp, Artificial Sequence
  Oligonucleotide for detection of SNP TSC0034952
ttatgcggagtgg

SEQ ID NO: 139602 - DNA, 13 bp, Artificial Sequence
  Oligonucleotide for detection of SNP TSC0034952
ccactccgcataa

SEQ ID NO: 139603 - DNA, 13 bp, Artificial Sequence
  Oligonucleotide for detection of SNP TSC0034952
ttatgtagagcgg

SEQ ID NO: 139604 - DNA, 13 bp, Artificial Sequence
  Oligonucleotide for detection of SNP TSC0034952
ccgctctacataa

SEQ ID NO: 139605 - DNA, 13 bp, Artificial Sequence
  Oligonucleotide for detection of SNP TSC0034952
ttatgtggagcgg

SEQ ID NO: 139606 - DNA, 13 bp, Artificial Sequence
  Oligonucleotide for detection of SNP TSC0034952
ccgctccacataa

SEQ ID NO: 139607 - DNA, 13 bp, Artificial Sequence
  Oligonucleotide for detection of SNP TSC0034952
ttacgtagagcgg

SEQ ID NO: 139608 - DNA, 13 bp, Artificial Sequence
  Oligonucleotide for detection of SNP TSC0034952
ccgctctacgtaa

SEQ ID NO: 139609 - DNA, 13 bp, Artificial Sequence
  Oligonucleotide for detection of SNP TSC0034952
ttacgcggagtgg

SEQ ID NO: 139610 - DNA, 13 bp, Artificial Sequence
  Oligonucleotide for detection of SNP TSC0034952
ccactccgcgtaa

SEQ ID NO: 139611 - DNA, 13 bp, Artificial Sequence
  Oligonucleotide for detection of SNP TSC0034952
ttacgtggagcgg

SEQ ID NO: 139612 - DNA, 13 bp, Artificial Sequence
  Oligonucleotide for detection of SNP TSC0034952
ccgctccacgtaa

SEQ ID NO: 139613 - DNA, 13 bp, Artificial Sequence
  Oligonucleotide for detection of SNP TSC0034952
ttatgcggagcgg

SEQ ID NO: 139614 - DNA, 13 bp, Artificial Sequence
  Oligonucleotide for detection of SNP TSC0034952
ccgctccgcataa

SEQ ID NO: 139615 - DNA, 13 bp, Artificial Sequence
  Oligonucleotide for detection of SNP TSC0034952
ttacgcggagcgg

SEQ ID NO: 139616 - DNA, 13 bp, Artificial Sequence
  Oligonucleotide for detection of SNP TSC0034952
ccgctccgcgtaa

SEQ ID NO: 139617 - DNA, 13 bp, Artificial Sequence
  Oligonucleotide for detection of SNP TSC0034953
atttaagttttty

SEQ ID NO: 139618 - DNA, 13 bp, Artificial Sequence
  Oligonucleotide for detection of SNP TSC0034953
raaaaacttaaat

SEQ ID NO: 139619 - DNA, 13 bp, Artificial Sequence
  Oligonucleotide for detection of SNP TSC0034954
aaaaaggtattgt

SEQ ID NO: 139620 - DNA, 13 bp, Artificial Sequence
  Oligonucleotide for detection of SNP TSC0034954
acaataccttttt

SEQ ID NO: 139621 - DNA, 13 bp, Artificial Sequence
  Oligonucleotide for detection of SNP TSC0034954
aaaaagatattgt

SEQ ID NO: 139622 - DNA, 13 bp, Artificial Sequence
  Oligonucleotide for detection of SNP TSC0034954
acaatatcttttt

SEQ ID NO: 139623 - DNA, 13 bp, Artificial Sequence
  Oligonucleotide for detection of SNP TSC0034956
gaagtatgtagtg

SEQ ID NO: 139624 - DNA, 13 bp, Artificial Sequence
  Oligonucleotide for detection of SNP TSC0034956
cactacatacttc

SEQ ID NO: 139625 - DNA, 13 bp, Artificial Sequence
  Oligonucleotide for detection of SNP TSC0034956
gaagtacgtagtg

SEQ ID NO: 139626 - DNA, 13 bp, Artificial Sequence
  Oligonucleotide for detection of SNP TSC0034956
cactacgtacttc

SEQ ID NO: 139627 - DNA, 13 bp, Artificial Sequence
  Oligonucleotide for detection of SNP TSC0034956
tattgtatgttty

SEQ ID NO: 139628 - DNA, 13 bp, Artificial Sequence
  Oligonucleotide for detection of SNP TSC0034956
raaacatacaata

SEQ ID NO: 139629 - DNA, 13 bp, Artificial Sequence
  Oligonucleotide for detection of SNP TSC0034956
tattgcgtgttty

SEQ ID NO: 139630 - DNA, 13 bp, Artificial Sequence
  Oligonucleotide for detection of SNP TSC0034956
raaacacgcaata

SEQ ID NO: 139631 - DNA, 13 bp, Artificial Sequence
  Oligonucleotide for detection of SNP TSC0034957
ggttgatgtagaa

SEQ ID NO: 139632 - DNA, 13 bp, Artificial Sequence
  Oligonucleotide for detection of SNP TSC0034957
ttctacatcaacc

SEQ ID NO: 139633 - DNA, 13 bp, Artificial Sequence
  Oligonucleotide for detection of SNP TSC0034957
ggttgacgtagaa

SEQ ID NO: 139634 - DNA, 13 bp, Artificial Sequence
  Oligonucleotide for detection of SNP TSC0034957
ttctacgtcaacc

SEQ ID NO: 139635 - DNA, 13 bp, Artificial Sequence
  Oligonucleotide for detection of SNP TSC0034957
ttttatgttagty

SEQ ID NO: 139636 - DNA, 13 bp, Artificial Sequence
  Oligonucleotide for detection of SNP TSC0034957
ractaacataaaa

SEQ ID NO: 139637 - DNA, 13 bp, Artificial Sequence
  Oligonucleotide for detection of SNP TSC0034957
ttttacgttagty

SEQ ID NO: 139638 - DNA, 13 bp, Artificial Sequence
  Oligonucleotide for detection of SNP TSC0034957
ractaacgtaaaa

SEQ ID NO: 139639 - DNA, 13 bp, Artificial Sequence
  Oligonucleotide for detection of SNP TSC0034958
ttttattgaattg

SEQ ID NO: 139640 - DNA, 13 bp, Artificial Sequence
  Oligonucleotide for detection of SNP TSC0034958
caattcaataaaa

SEQ ID NO: 139641 - DNA, 13 bp, Artificial Sequence
  Oligonucleotide for detection of SNP TSC0034958
ttttatcgaattg

SEQ ID NO: 139642 - DNA, 13 bp, Artificial Sequence
  Oligonucleotide for detection of SNP TSC0034958
caattcgataaaa

SEQ ID NO: 139643 - DNA, 13 bp, Artificial Sequence
  Oligonucleotide for detection of SNP TSC0034958
taatttgataaag

SEQ ID NO: 139644 - DNA, 13 bp, Artificial Sequence
  Oligonucleotide for detection of SNP TSC0034958
ctttatcaaatta

SEQ ID NO: 139645 - DNA, 13 bp, Artificial Sequence
  Oligonucleotide for detection of SNP TSC0034958
taatttaataaag

SEQ ID NO: 139646 - DNA, 13 bp, Artificial Sequence
  Oligonucleotide for detection of SNP TSC0034958
ctttattaaatta

SEQ ID NO: 139647 - DNA, 13 bp, Artificial Sequence
  Oligonucleotide for detection of SNP TSC0034958
taattcgataaag

SEQ ID NO: 139648 - DNA, 13 bp, Artificial Sequence
  Oligonucleotide for detection of SNP TSC0034958
ctttatcgaatta

SEQ ID NO: 139649 - DNA, 13 bp, Artificial Sequence
  Oligonucleotide for detection of SNP TSC0034959
gtattagtatagt

SEQ ID NO: 139650 - DNA, 13 bp, Artificial Sequence
  Oligonucleotide for detection of SNP TSC0034959
actatactaatac

SEQ ID NO: 139651 - DNA, 13 bp, Artificial Sequence
  Oligonucleotide for detection of SNP TSC0034959
gtattaatatagt

SEQ ID NO: 139652 - DNA, 13 bp, Artificial Sequence
  Oligonucleotide for detection of SNP TSC0034959
actatattaatac

SEQ ID NO: 139653 - DNA, 13 bp, Artificial Sequence
  Oligonucleotide for detection of SNP TSC0034960
gtaggggagggtg

SEQ ID NO: 139654 - DNA, 13 bp, Artificial Sequence
  Oligonucleotide for detection of SNP TSC0034960
caccctcccctac

SEQ ID NO: 139655 - DNA, 13 bp, Artificial Sequence
  Oligonucleotide for detection of SNP TSC0034960
gtagggaagggtg

SEQ ID NO: 139656 - DNA, 13 bp, Artificial Sequence
  Oligonucleotide for detection of SNP TSC0034960
cacccttccctac

SEQ ID NO: 139657 - DNA, 13 bp, Artificial Sequence
  Oligonucleotide for detection of SNP TSC0034961
tgttatatgtata

SEQ ID NO: 139658 - DNA, 13 bp, Artificial Sequence
  Oligonucleotide for detection of SNP TSC0034961
tatacatataaca

SEQ ID NO: 139659 - DNA, 13 bp, Artificial Sequence
  Oligonucleotide for detection of SNP TSC0034961
tgttatgtgtata

SEQ ID NO: 139660 - DNA, 13 bp, Artificial Sequence
  Oligonucleotide for detection of SNP TSC0034961
tatacacataaca

SEQ ID NO: 139661 - DNA, 13 bp, Artificial Sequence
  Oligonucleotide for detection of SNP TSC0034961
tgttacgtgtata

SEQ ID NO: 139662 - DNA, 13 bp, Artificial Sequence
  Oligonucleotide for detection of SNP TSC0034961
tatacacgtaaca

SEQ ID NO: 139663 - DNA, 13 bp, Artificial Sequence
  Oligonucleotide for detection of SNP TSC0034961
tgtatatgtggta

SEQ ID NO: 139664 - DNA, 13 bp, Artificial Sequence
  Oligonucleotide for detection of SNP TSC0034961
taccacatataca

SEQ ID NO: 139665 - DNA, 13 bp, Artificial Sequence
  Oligonucleotide for detection of SNP TSC0034961
tgtatacgtggta

SEQ ID NO: 139666 - DNA, 13 bp, Artificial Sequence
  Oligonucleotide for detection of SNP TSC0034961
taccacgtataca

SEQ ID NO: 139667 - DNA, 13 bp, Artificial Sequence
  Oligonucleotide for detection of SNP TSC0034962
atatatatgtata

SEQ ID NO: 139668 - DNA, 13 bp, Artificial Sequence
  Oligonucleotide for detection of SNP TSC0034962
tatacatatatat

SEQ ID NO: 139669 - DNA, 13 bp, Artificial Sequence
  Oligonucleotide for detection of SNP TSC0034962
atatatacgtata

SEQ ID NO: 139670 - DNA, 13 bp, Artificial Sequence
  Oligonucleotide for detection of SNP TSC0034962
tatacgtatatat

SEQ ID NO: 139671 - DNA, 13 bp, Artificial Sequence
  Oligonucleotide for detection of SNP TSC0034962
atatacgtgtata

SEQ ID NO: 139672 - DNA, 13 bp, Artificial Sequence
  Oligonucleotide for detection of SNP TSC0034962
tatacacgtatat

SEQ ID NO: 139673 - DNA, 13 bp, Artificial Sequence
  Oligonucleotide for detection of SNP TSC0034962
atatatgcgtata

SEQ ID NO: 139674 - DNA, 13 bp, Artificial Sequence
  Oligonucleotide for detection of SNP TSC0034962
tatacgcatatat

SEQ ID NO: 139675 - DNA, 13 bp, Artificial Sequence
  Oligonucleotide for detection of SNP TSC0034962
atatacgcgtata

SEQ ID NO: 139676 - DNA, 13 bp, Artificial Sequence
  Oligonucleotide for detection of SNP TSC0034962
tatacgcgtatat

SEQ ID NO: 139677 - DNA, 13 bp, Artificial Sequence
  Oligonucleotide for detection of SNP TSC0034963
gatgaatggttty

SEQ ID NO: 139678 - DNA, 13 bp, Artificial Sequence
  Oligonucleotide for detection of SNP TSC0034963
raaaccattcatc

SEQ ID NO: 139679 - DNA, 13 bp, Artificial Sequence
  Oligonucleotide for detection of SNP TSC0034963
gatgaacggttty

SEQ ID NO: 139680 - DNA, 13 bp, Artificial Sequence
  Oligonucleotide for detection of SNP TSC0034963
raaaccgttcatc

SEQ ID NO: 139681 - DNA, 13 bp, Artificial Sequence
  Oligonucleotide for detection of SNP TSC0034963
ggaattatttaty

SEQ ID NO: 139682 - DNA, 13 bp, Artificial Sequence
  Oligonucleotide for detection of SNP TSC0034963
rataaataattcc

SEQ ID NO: 139683 - DNA, 13 bp, Artificial Sequence
  Oligonucleotide for detection of SNP TSC0034967
agggagttatgat

SEQ ID NO: 139684 - DNA, 13 bp, Artificial Sequence
  Oligonucleotide for detection of SNP TSC0034967
atcataactccct

SEQ ID NO: 139685 - DNA, 13 bp, Artificial Sequence
  Oligonucleotide for detection of SNP TSC0034967
agggagatatgat

SEQ ID NO: 139686 - DNA, 13 bp, Artificial Sequence
  Oligonucleotide for detection of SNP TSC0034967
atcatatctccct

SEQ ID NO: 139687 - DNA, 13 bp, Artificial Sequence
  Oligonucleotide for detection of SNP TSC0034968
atgaggattagaa

SEQ ID NO: 139688 - DNA, 13 bp, Artificial Sequence
  Oligonucleotide for detection of SNP TSC0034968
ttctaatcctcat

SEQ ID NO: 139689 - DNA, 13 bp, Artificial Sequence
  Oligonucleotide for detection of SNP TSC0034968
atgaggtttagaa

SEQ ID NO: 139690 - DNA, 13 bp, Artificial Sequence
  Oligonucleotide for detection of SNP TSC0034968
ttctaaacctcat

SEQ ID NO: 139691 - DNA, 13 bp, Artificial Sequence
  Oligonucleotide for detection of SNP TSC0034968
ttttgaattttat

SEQ ID NO: 139692 - DNA, 13 bp, Artificial Sequence
  Oligonucleotide for detection of SNP TSC0034968
ataaaattcaaaa

SEQ ID NO: 139693 - DNA, 13 bp, Artificial Sequence
  Oligonucleotide for detection of SNP TSC0034969
ttgttatttgtgy

SEQ ID NO: 139694 - DNA, 13 bp, Artificial Sequence
  Oligonucleotide for detection of SNP TSC0034969
rcacaaataacaa

SEQ ID NO: 139695 - DNA, 13 bp, Artificial Sequence
  Oligonucleotide for detection of SNP TSC0034969
ttgttagttgtgy

SEQ ID NO: 139696 - DNA, 13 bp, Artificial Sequence
  Oligonucleotide for detection of SNP TSC0034969
rcacaactaacaa

SEQ ID NO: 139697 - DNA, 13 bp, Artificial Sequence
  Oligonucleotide for detection of SNP TSC0034969
ttgttattcgtgy

SEQ ID NO: 139698 - DNA, 13 bp, Artificial Sequence
  Oligonucleotide for detection of SNP TSC0034969
rcacgaataacaa

SEQ ID NO: 139699 - DNA, 13 bp, Artificial Sequence
  Oligonucleotide for detection of SNP TSC0034969
ttgttagtcgtgy

SEQ ID NO: 139700 - DNA, 13 bp, Artificial Sequence
  Oligonucleotide for detection of SNP TSC0034969
rcacgactaacaa

SEQ ID NO: 139701 - DNA, 13 bp, Artificial Sequence
  Oligonucleotide for detection of SNP TSC0034969
ttgttatttgcgy

SEQ ID NO: 139702 - DNA, 13 bp, Artificial Sequence
  Oligonucleotide for detection of SNP TSC0034969
rcgcaaataacaa

SEQ ID NO: 139703 - DNA, 13 bp, Artificial Sequence
  Oligonucleotide for detection of SNP TSC0034969
ttgttagttgcgy

SEQ ID NO: 139704 - DNA, 13 bp, Artificial Sequence
  Oligonucleotide for detection of SNP TSC0034969
rcgcaactaacaa

SEQ ID NO: 139705 - DNA, 13 bp, Artificial Sequence
  Oligonucleotide for detection of SNP TSC0034969
ttgttattcgcgy

SEQ ID NO: 139706 - DNA, 13 bp, Artificial Sequence
  Oligonucleotide for detection of SNP TSC0034969
rcgcgaataacaa

SEQ ID NO: 139707 - DNA, 13 bp, Artificial Sequence
  Oligonucleotide for detection of SNP TSC0034969
ttgttagtcgcgy

SEQ ID NO: 139708 - DNA, 13 bp, Artificial Sequence
  Oligonucleotide for detection of SNP TSC0034969
rcgcgactaacaa

SEQ ID NO: 139709 - DNA, 13 bp, Artificial Sequence
  Oligonucleotide for detection of SNP TSC0034969
gtgtgagtggtag

SEQ ID NO: 139710 - DNA, 13 bp, Artificial Sequence
  Oligonucleotide for detection of SNP TSC0034969
ctaccactcacac

SEQ ID NO: 139711 - DNA, 13 bp, Artificial Sequence
  Oligonucleotide for detection of SNP TSC0034969
gtgtgattggtag

SEQ ID NO: 139712 - DNA, 13 bp, Artificial Sequence
  Oligonucleotide for detection of SNP TSC0034969
ctaccaatcacac

SEQ ID NO: 139713 - DNA, 13 bp, Artificial Sequence
  Oligonucleotide for detection of SNP TSC0034969
gcgtgagtggtag

SEQ ID NO: 139714 - DNA, 13 bp, Artificial Sequence
  Oligonucleotide for detection of SNP TSC0034969
ctaccactcacgc

SEQ ID NO: 139715 - DNA, 13 bp, Artificial Sequence
  Oligonucleotide for detection of SNP TSC0034969
gcgtgattggtag

SEQ ID NO: 139716 - DNA, 13 bp, Artificial Sequence
  Oligonucleotide for detection of SNP TSC0034969
ctaccaatcacgc

SEQ ID NO: 139717 - DNA, 13 bp, Artificial Sequence
  Oligonucleotide for detection of SNP TSC0034969
gtgcgagtggtag

SEQ ID NO: 139718 - DNA, 13 bp, Artificial Sequence
  Oligonucleotide for detection of SNP TSC0034969
ctaccactcgcac

SEQ ID NO: 139719 - DNA, 13 bp, Artificial Sequence
  Oligonucleotide for detection of SNP TSC0034969
gtgcgattggtag

SEQ ID NO: 139720 - DNA, 13 bp, Artificial Sequence
  Oligonucleotide for detection of SNP TSC0034969
ctaccaatcgcac

SEQ ID NO: 139721 - DNA, 13 bp, Artificial Sequence
  Oligonucleotide for detection of SNP TSC0034969
gcgcgagtggtag

SEQ ID NO: 139722 - DNA, 13 bp, Artificial Sequence
  Oligonucleotide for detection of SNP TSC0034969
ctaccactcgcgc

SEQ ID NO: 139723 - DNA, 13 bp, Artificial Sequence
  Oligonucleotide for detection of SNP TSC0034969
gcgcgattggtag

SEQ ID NO: 139724 - DNA, 13 bp, Artificial Sequence
  Oligonucleotide for detection of SNP TSC0034969
ctaccaatcgcgc

SEQ ID NO: 139725 - DNA, 13 bp, Artificial Sequence
  Oligonucleotide for detection of SNP TSC0034974
gagtttttatgty

SEQ ID NO: 139726 - DNA, 13 bp, Artificial Sequence
  Oligonucleotide for detection of SNP TSC0034974
racataaaaactc

SEQ ID NO: 139727 - DNA, 13 bp, Artificial Sequence
  Oligonucleotide for detection of SNP TSC0034974
gagtttgtatgty

SEQ ID NO: 139728 - DNA, 13 bp, Artificial Sequence
  Oligonucleotide for detection of SNP TSC0034974
racatacaaactc

SEQ ID NO: 139729 - DNA, 13 bp, Artificial Sequence
  Oligonucleotide for detection of SNP TSC0034974
gatatggagatty

SEQ ID NO: 139730 - DNA, 13 bp, Artificial Sequence
  Oligonucleotide for detection of SNP TSC0034974
raatctccatatc

SEQ ID NO: 139731 - DNA, 13 bp, Artificial Sequence
  Oligonucleotide for detection of SNP TSC0034974
gatatgtagatty

SEQ ID NO: 139732 - DNA, 13 bp, Artificial Sequence
  Oligonucleotide for detection of SNP TSC0034974
raatctacatatc

SEQ ID NO: 139733 - DNA, 13 bp, Artificial Sequence
  Oligonucleotide for detection of SNP TSC0034975
tttttgaaattta

SEQ ID NO: 139734 - DNA, 13 bp, Artificial Sequence
  Oligonucleotide for detection of SNP TSC0034975
taaatttcaaaaa

SEQ ID NO: 139735 - DNA, 13 bp, Artificial Sequence
  Oligonucleotide for detection of SNP TSC0034975
tttttggaattta

SEQ ID NO: 139736 - DNA, 13 bp, Artificial Sequence
  Oligonucleotide for detection of SNP TSC0034975
taaattccaaaaa

SEQ ID NO: 139737 - DNA, 13 bp, Artificial Sequence
  Oligonucleotide for detection of SNP TSC0034977
gttgtttaggttg

SEQ ID NO: 139738 - DNA, 13 bp, Artificial Sequence
  Oligonucleotide for detection of SNP TSC0034977
caacctaaacaac

SEQ ID NO: 139739 - DNA, 13 bp, Artificial Sequence
  Oligonucleotide for detection of SNP TSC0034977
gttgttgaggttg

SEQ ID NO: 139740 - DNA, 13 bp, Artificial Sequence
  Oligonucleotide for detection of SNP TSC0034977
caacctcaacaac

SEQ ID NO: 139741 - DNA, 13 bp, Artificial Sequence
  Oligonucleotide for detection of SNP TSC0034977
gttgtcgaggttg

SEQ ID NO: 139742 - DNA, 13 bp, Artificial Sequence
  Oligonucleotide for detection of SNP TSC0034977
caacctcgacaac

SEQ ID NO: 139743 - DNA, 13 bp, Artificial Sequence
  Oligonucleotide for detection of SNP TSC0034977
taatttgggtaay

SEQ ID NO: 139744 - DNA, 13 bp, Artificial Sequence
  Oligonucleotide for detection of SNP TSC0034977
rttacccaaatta

SEQ ID NO: 139745 - DNA, 13 bp, Artificial Sequence
  Oligonucleotide for detection of SNP TSC0034977
taattttggtaay

SEQ ID NO: 139746 - DNA, 13 bp, Artificial Sequence
  Oligonucleotide for detection of SNP TSC0034977
rttaccaaaatta

SEQ ID NO: 139747 - DNA, 13 bp, Artificial Sequence
  Oligonucleotide for detection of SNP TSC0034977
taatttcggtaay

SEQ ID NO: 139748 - DNA, 13 bp, Artificial Sequence
  Oligonucleotide for detection of SNP TSC0034977
rttaccgaaatta

SEQ ID NO: 139749 - DNA, 13 bp, Artificial Sequence
  Oligonucleotide for detection of SNP TSC0034979
atataagttataa

SEQ ID NO: 139750 - DNA, 13 bp, Artificial Sequence
  Oligonucleotide for detection of SNP TSC0034979
ttataacttatat

SEQ ID NO: 139751 - DNA, 13 bp, Artificial Sequence
  Oligonucleotide for detection of SNP TSC0034979
atataaattataa

SEQ ID NO: 139752 - DNA, 13 bp, Artificial Sequence
  Oligonucleotide for detection of SNP TSC0034979
ttataatttatat

SEQ ID NO: 139753 - DNA, 13 bp, Artificial Sequence
  Oligonucleotide for detection of SNP TSC0034982
taataggaagaga

SEQ ID NO: 139754 - DNA, 13 bp, Artificial Sequence
  Oligonucleotide for detection of SNP TSC0034982
tctcttcctatta

SEQ ID NO: 139755 - DNA, 13 bp, Artificial Sequence
  Oligonucleotide for detection of SNP TSC0034982
taatagaaagaga

SEQ ID NO: 139756 - DNA, 13 bp, Artificial Sequence
  Oligonucleotide for detection of SNP TSC0034982
tctctttctatta

SEQ ID NO: 139757 - DNA, 13 bp, Artificial Sequence
  Oligonucleotide for detection of SNP TSC0034984
gtttgggtgggaa

SEQ ID NO: 139758 - DNA, 13 bp, Artificial Sequence
  Oligonucleotide for detection of SNP TSC0034984
ttcccacccaaac

SEQ ID NO: 139759 - DNA, 13 bp, Artificial Sequence
  Oligonucleotide for detection of SNP TSC0034984
gtttggatgggaa

SEQ ID NO: 139760 - DNA, 13 bp, Artificial Sequence
  Oligonucleotide for detection of SNP TSC0034984
ttcccatccaaac

SEQ ID NO: 139761 - DNA, 13 bp, Artificial Sequence
  Oligonucleotide for detection of SNP TSC0034985
tagagggtgtaga

SEQ ID NO: 139762 - DNA, 13 bp, Artificial Sequence
  Oligonucleotide for detection of SNP TSC0034985
tctacaccctcta

SEQ ID NO: 139763 - DNA, 13 bp, Artificial Sequence
  Oligonucleotide for detection of SNP TSC0034985
tagaggatgtaga

SEQ ID NO: 139764 - DNA, 13 bp, Artificial Sequence
  Oligonucleotide for detection of SNP TSC0034985
tctacatcctcta

SEQ ID NO: 139765 - DNA, 13 bp, Artificial Sequence
  Oligonucleotide for detection of SNP TSC0034986
agttgatgttttg

SEQ ID NO: 139766 - DNA, 13 bp, Artificial Sequence
  Oligonucleotide for detection of SNP TSC0034986
caaaacatcaact

SEQ ID NO: 139767 - DNA, 13 bp, Artificial Sequence
  Oligonucleotide for detection of SNP TSC0034986
agttgacgttttg

SEQ ID NO: 139768 - DNA, 13 bp, Artificial Sequence
  Oligonucleotide for detection of SNP TSC0034986
caaaacgtcaact

SEQ ID NO: 139769 - DNA, 13 bp, Artificial Sequence
  Oligonucleotide for detection of SNP TSC0034986
tagaatgttagtt

SEQ ID NO: 139770 - DNA, 13 bp, Artificial Sequence
  Oligonucleotide for detection of SNP TSC0034986
aactaacattcta

SEQ ID NO: 139771 - DNA, 13 bp, Artificial Sequence
  Oligonucleotide for detection of SNP TSC0034986
tagaatattagtt

SEQ ID NO: 139772 - DNA, 13 bp, Artificial Sequence
  Oligonucleotide for detection of SNP TSC0034986
aactaatattcta

SEQ ID NO: 139773 - DNA, 13 bp, Artificial Sequence
  Oligonucleotide for detection of SNP TSC0034986
tagaacgttagtt

SEQ ID NO: 139774 - DNA, 13 bp, Artificial Sequence
  Oligonucleotide for detection of SNP TSC0034986
aactaacgttcta

SEQ ID NO: 139775 - DNA, 13 bp, Artificial Sequence
  Oligonucleotide for detection of SNP TSC0034989
ggggtatgttgaa

SEQ ID NO: 139776 - DNA, 13 bp, Artificial Sequence
  Oligonucleotide for detection of SNP TSC0034989
ttcaacatacccc

SEQ ID NO: 139777 - DNA, 13 bp, Artificial Sequence
  Oligonucleotide for detection of SNP TSC0034989
ggggtacgttgaa

SEQ ID NO: 139778 - DNA, 13 bp, Artificial Sequence
  Oligonucleotide for detection of SNP TSC0034989
ttcaacgtacccc

SEQ ID NO: 139779 - DNA, 13 bp, Artificial Sequence
  Oligonucleotide for detection of SNP TSC0034989
tttagtgtattty

SEQ ID NO: 139780 - DNA, 13 bp, Artificial Sequence
  Oligonucleotide for detection of SNP TSC0034989
raaatacactaaa

SEQ ID NO: 139781 - DNA, 13 bp, Artificial Sequence
  Oligonucleotide for detection of SNP TSC0034989
tttagtatattty

SEQ ID NO: 139782 - DNA, 13 bp, Artificial Sequence
  Oligonucleotide for detection of SNP TSC0034989
raaatatactaaa

SEQ ID NO: 139783 - DNA, 13 bp, Artificial Sequence
  Oligonucleotide for detection of SNP TSC0034989
tttagcgtattty

SEQ ID NO: 139784 - DNA, 13 bp, Artificial Sequence
  Oligonucleotide for detection of SNP TSC0034989
raaatacgctaaa

SEQ ID NO: 139785 - DNA, 13 bp, Artificial Sequence
  Oligonucleotide for detection of SNP TSC0034990
taagtaagaaaty

SEQ ID NO: 139786 - DNA, 13 bp, Artificial Sequence
  Oligonucleotide for detection of SNP TSC0034990
ratttcttactta

SEQ ID NO: 139787 - DNA, 13 bp, Artificial Sequence
  Oligonucleotide for detection of SNP TSC0034990
taagtaggaaaty

SEQ ID NO: 139788 - DNA, 13 bp, Artificial Sequence
  Oligonucleotide for detection of SNP TSC0034990
ratttcctactta

SEQ ID NO: 139789 - DNA, 13 bp, Artificial Sequence
  Oligonucleotide for detection of SNP TSC0034995
atatttgtgagta

SEQ ID NO: 139790 - DNA, 13 bp, Artificial Sequence
  Oligonucleotide for detection of SNP TSC0034995
tactcacaaatat

SEQ ID NO: 139791 - DNA, 13 bp, Artificial Sequence
  Oligonucleotide for detection of SNP TSC0034995
atatttttgagta

SEQ ID NO: 139792 - DNA, 13 bp, Artificial Sequence
  Oligonucleotide for detection of SNP TSC0034995
tactcaaaaatat

SEQ ID NO: 139793 - DNA, 13 bp, Artificial Sequence
  Oligonucleotide for detection of SNP TSC0034995
atatttgcgagta

SEQ ID NO: 139794 - DNA, 13 bp, Artificial Sequence
  Oligonucleotide for detection of SNP TSC0034995
tactcgcaaatat

SEQ ID NO: 139795 - DNA, 13 bp, Artificial Sequence
  Oligonucleotide for detection of SNP TSC0034995
atattttcgagta

SEQ ID NO: 139796 - DNA, 13 bp, Artificial Sequence
  Oligonucleotide for detection of SNP TSC0034995
tactcgaaaatat

SEQ ID NO: 139797 - DNA, 13 bp, Artificial Sequence
  Oligonucleotide for detection of SNP TSC0034995
tgttcgtagatgt

SEQ ID NO: 139798 - DNA, 13 bp, Artificial Sequence
  Oligonucleotide for detection of SNP TSC0034995
acatctacgaaca

SEQ ID NO: 139799 - DNA, 13 bp, Artificial Sequence
  Oligonucleotide for detection of SNP TSC0034995
tgttcgaagatgt

SEQ ID NO: 139800 - DNA, 13 bp, Artificial Sequence
  Oligonucleotide for detection of SNP TSC0034995
acatcttcgaaca

SEQ ID NO: 139801 - DNA, 13 bp, Artificial Sequence
  Oligonucleotide for detection of SNP TSC0035004
ggatgaatatata

SEQ ID NO: 139802 - DNA, 13 bp, Artificial Sequence
  Oligonucleotide for detection of SNP TSC0035004
tatatattcatcc

SEQ ID NO: 139803 - DNA, 13 bp, Artificial Sequence
  Oligonucleotide for detection of SNP TSC0035004
ggatgagtatata

SEQ ID NO: 139804 - DNA, 13 bp, Artificial Sequence
  Oligonucleotide for detection of SNP TSC0035004
tatatactcatcc

SEQ ID NO: 139805 - DNA, 13 bp, Artificial Sequence
  Oligonucleotide for detection of SNP TSC0035005
tagtggtgttaty

SEQ ID NO: 139806 - DNA, 13 bp, Artificial Sequence
  Oligonucleotide for detection of SNP TSC0035005
rataacaccacta

SEQ ID NO: 139807 - DNA, 13 bp, Artificial Sequence
  Oligonucleotide for detection of SNP TSC0035005
tagtggcgttaty

SEQ ID NO: 139808 - DNA, 13 bp, Artificial Sequence
  Oligonucleotide for detection of SNP TSC0035005
rataacgccacta

SEQ ID NO: 139809 - DNA, 13 bp, Artificial Sequence
  Oligonucleotide for detection of SNP TSC0035005
gatagtgttattg

SEQ ID NO: 139810 - DNA, 13 bp, Artificial Sequence
  Oligonucleotide for detection of SNP TSC0035005
caataacactatc

SEQ ID NO: 139811 - DNA, 13 bp, Artificial Sequence
  Oligonucleotide for detection of SNP TSC0035005
gatagtattattg

SEQ ID NO: 139812 - DNA, 13 bp, Artificial Sequence
  Oligonucleotide for detection of SNP TSC0035005
caataatactatc

SEQ ID NO: 139813 - DNA, 13 bp, Artificial Sequence
  Oligonucleotide for detection of SNP TSC0035005
gatagcgttattg

SEQ ID NO: 139814 - DNA, 13 bp, Artificial Sequence
  Oligonucleotide for detection of SNP TSC0035005
caataacgctatc

SEQ ID NO: 139815 - DNA, 13 bp, Artificial Sequence
  Oligonucleotide for detection of SNP TSC0035007
atggtaattaagg

SEQ ID NO: 139816 - DNA, 13 bp, Artificial Sequence
  Oligonucleotide for detection of SNP TSC0035007
ccttaattaccat

SEQ ID NO: 139817 - DNA, 13 bp, Artificial Sequence
  Oligonucleotide for detection of SNP TSC0035007
atggtagttaagg

SEQ ID NO: 139818 - DNA, 13 bp, Artificial Sequence
  Oligonucleotide for detection of SNP TSC0035007
ccttaactaccat

SEQ ID NO: 139819 - DNA, 13 bp, Artificial Sequence
  Oligonucleotide for detection of SNP TSC0035008
ttttgaatgtggg

SEQ ID NO: 139820 - DNA, 13 bp, Artificial Sequence
  Oligonucleotide for detection of SNP TSC0035008
cccacattcaaaa

SEQ ID NO: 139821 - DNA, 13 bp, Artificial Sequence
  Oligonucleotide for detection of SNP TSC0035008
ttttgagtgtggg

SEQ ID NO: 139822 - DNA, 13 bp, Artificial Sequence
  Oligonucleotide for detection of SNP TSC0035008
cccacactcaaaa

SEQ ID NO: 139823 - DNA, 13 bp, Artificial Sequence
  Oligonucleotide for detection of SNP TSC0035008
tttcgaatgtggg

SEQ ID NO: 139824 - DNA, 13 bp, Artificial Sequence
  Oligonucleotide for detection of SNP TSC0035008
cccacattcgaaa

SEQ ID NO: 139825 - DNA, 13 bp, Artificial Sequence
  Oligonucleotide for detection of SNP TSC0035008
tttcgagtgtggg

SEQ ID NO: 139826 - DNA, 13 bp, Artificial Sequence
  Oligonucleotide for detection of SNP TSC0035008
cccacactcgaaa

SEQ ID NO: 139827 - DNA, 13 bp, Artificial Sequence
  Oligonucleotide for detection of SNP TSC0035010
tttgtaagtggga

SEQ ID NO: 139828 - DNA, 13 bp, Artificial Sequence
  Oligonucleotide for detection of SNP TSC0035010
tcccacttacaaa

SEQ ID NO: 139829 - DNA, 13 bp, Artificial Sequence
  Oligonucleotide for detection of SNP TSC0035010
tttgtaggtggga

SEQ ID NO: 139830 - DNA, 13 bp, Artificial Sequence
  Oligonucleotide for detection of SNP TSC0035010
tcccacctacaaa

SEQ ID NO: 139831 - DNA, 13 bp, Artificial Sequence
  Oligonucleotide for detection of SNP TSC0035012
ttagtggttttgy

SEQ ID NO: 139832 - DNA, 13 bp, Artificial Sequence
  Oligonucleotide for detection of SNP TSC0035012
rcaaaaccactaa

SEQ ID NO: 139833 - DNA, 13 bp, Artificial Sequence
  Oligonucleotide for detection of SNP TSC0035012
ttagtgattttgy

SEQ ID NO: 139834 - DNA, 13 bp, Artificial Sequence
  Oligonucleotide for detection of SNP TSC0035012
rcaaaatcactaa

SEQ ID NO: 139835 - DNA, 13 bp, Artificial Sequence
  Oligonucleotide for detection of SNP TSC0035017
gattttaattaaa

SEQ ID NO: 139836 - DNA, 13 bp, Artificial Sequence
  Oligonucleotide for detection of SNP TSC0035017
tttaattaaaatc

SEQ ID NO: 139837 - DNA, 13 bp, Artificial Sequence
  Oligonucleotide for detection of SNP TSC0035017
gatttttattaaa

SEQ ID NO: 139838 - DNA, 13 bp, Artificial Sequence
  Oligonucleotide for detection of SNP TSC0035017
tttaataaaaatc

SEQ ID NO: 139839 - DNA, 13 bp, Artificial Sequence
  Oligonucleotide for detection of SNP TSC0035017
tttgattggggty

SEQ ID NO: 139840 - DNA, 13 bp, Artificial Sequence
  Oligonucleotide for detection of SNP TSC0035017
raccccaatcaaa

SEQ ID NO: 139841 - DNA, 13 bp, Artificial Sequence
  Oligonucleotide for detection of SNP TSC0035017
tttgatgggggty

SEQ ID NO: 139842 - DNA, 13 bp, Artificial Sequence
  Oligonucleotide for detection of SNP TSC0035017
racccccatcaaa

SEQ ID NO: 139843 - DNA, 13 bp, Artificial Sequence
  Oligonucleotide for detection of SNP TSC0035018
ttgtgtgtaaatg

SEQ ID NO: 139844 - DNA, 13 bp, Artificial Sequence
  Oligonucleotide for detection of SNP TSC0035018
catttacacacaa

SEQ ID NO: 139845 - DNA, 13 bp, Artificial Sequence
  Oligonucleotide for detection of SNP TSC0035018
ttgtgtataaatg

SEQ ID NO: 139846 - DNA, 13 bp, Artificial Sequence
  Oligonucleotide for detection of SNP TSC0035018
catttatacacaa

SEQ ID NO: 139847 - DNA, 13 bp, Artificial Sequence
  Oligonucleotide for detection of SNP TSC0035020
tttggatgaggga

SEQ ID NO: 139848 - DNA, 13 bp, Artificial Sequence
  Oligonucleotide for detection of SNP TSC0035020
tccctcatccaaa

SEQ ID NO: 139849 - DNA, 13 bp, Artificial Sequence
  Oligonucleotide for detection of SNP TSC0035020
tttggacgaggga

SEQ ID NO: 139850 - DNA, 13 bp, Artificial Sequence
  Oligonucleotide for detection of SNP TSC0035020
tccctcgtccaaa

SEQ ID NO: 139851 - DNA, 13 bp, Artificial Sequence
  Oligonucleotide for detection of SNP TSC0035022
tttggttttgttt

SEQ ID NO: 139852 - DNA, 13 bp, Artificial Sequence
  Oligonucleotide for detection of SNP TSC0035022
aaacaaaaccaaa

SEQ ID NO: 139853 - DNA, 13 bp, Artificial Sequence
  Oligonucleotide for detection of SNP TSC0035022
agataagattaaa

SEQ ID NO: 139854 - DNA, 13 bp, Artificial Sequence
  Oligonucleotide for detection of SNP TSC0035022
tttaatcttatct

SEQ ID NO: 139855 - DNA, 13 bp, Artificial Sequence
  Oligonucleotide for detection of SNP TSC0035022
agataatattaaa

SEQ ID NO: 139856 - DNA, 13 bp, Artificial Sequence
  Oligonucleotide for detection of SNP TSC0035022
tttaatattatct

SEQ ID NO: 139857 - DNA, 13 bp, Artificial Sequence
  Oligonucleotide for detection of SNP TSC0035024
tgtagtggtgtta

SEQ ID NO: 139858 - DNA, 13 bp, Artificial Sequence
  Oligonucleotide for detection of SNP TSC0035024
taacaccactaca

SEQ ID NO: 139859 - DNA, 13 bp, Artificial Sequence
  Oligonucleotide for detection of SNP TSC0035024
tgtagtagtgtta

SEQ ID NO: 139860 - DNA, 13 bp, Artificial Sequence
  Oligonucleotide for detection of SNP TSC0035024
taacactactaca

SEQ ID NO: 139861 - DNA, 13 bp, Artificial Sequence
  Oligonucleotide for detection of SNP TSC0035025
ttttatatagttt

SEQ ID NO: 139862 - DNA, 13 bp, Artificial Sequence
  Oligonucleotide for detection of SNP TSC0035025
aaactatataaaa

SEQ ID NO: 139863 - DNA, 13 bp, Artificial Sequence
  Oligonucleotide for detection of SNP TSC0035025
ttttatgtagttt

SEQ ID NO: 139864 - DNA, 13 bp, Artificial Sequence
  Oligonucleotide for detection of SNP TSC0035025
aaactacataaaa

SEQ ID NO: 139865 - DNA, 13 bp, Artificial Sequence
  Oligonucleotide for detection of SNP TSC0035030
ttttttgaattty

SEQ ID NO: 139866 - DNA, 13 bp, Artificial Sequence
  Oligonucleotide for detection of SNP TSC0035030
raaattcaaaaaa

SEQ ID NO: 139867 - DNA, 13 bp, Artificial Sequence
  Oligonucleotide for detection of SNP TSC0035030
gagattgaggaag

SEQ ID NO: 139868 - DNA, 13 bp, Artificial Sequence
  Oligonucleotide for detection of SNP TSC0035030
cttcctcaatctc

SEQ ID NO: 139869 - DNA, 13 bp, Artificial Sequence
  Oligonucleotide for detection of SNP TSC0035030
gagatttaggaag

SEQ ID NO: 139870 - DNA, 13 bp, Artificial Sequence
  Oligonucleotide for detection of SNP TSC0035030
cttcctaaatctc

SEQ ID NO: 139871 - DNA, 13 bp, Artificial Sequence
  Oligonucleotide for detection of SNP TSC0035031
tattggggttaat

SEQ ID NO: 139872 - DNA, 13 bp, Artificial Sequence
  Oligonucleotide for detection of SNP TSC0035031
attaaccccaata

SEQ ID NO: 139873 - DNA, 13 bp, Artificial Sequence
  Oligonucleotide for detection of SNP TSC0035031
tattggtgttaat

SEQ ID NO: 139874 - DNA, 13 bp, Artificial Sequence
  Oligonucleotide for detection of SNP TSC0035031
attaacaccaata

SEQ ID NO: 139875 - DNA, 13 bp, Artificial Sequence
  Oligonucleotide for detection of SNP TSC0035031
attagttttaata

SEQ ID NO: 139876 - DNA, 13 bp, Artificial Sequence
  Oligonucleotide for detection of SNP TSC0035031
tattaaaactaat

SEQ ID NO: 139877 - DNA, 13 bp, Artificial Sequence
  Oligonucleotide for detection of SNP TSC0035031
attagtattaata

SEQ ID NO: 139878 - DNA, 13 bp, Artificial Sequence
  Oligonucleotide for detection of SNP TSC0035031
tattaatactaat

SEQ ID NO: 139879 - DNA, 13 bp, Artificial Sequence
  Oligonucleotide for detection of SNP TSC0035032
ttgtgtataaaag

SEQ ID NO: 139880 - DNA, 13 bp, Artificial Sequence
  Oligonucleotide for detection of SNP TSC0035032
cttttatacacaa

SEQ ID NO: 139881 - DNA, 13 bp, Artificial Sequence
  Oligonucleotide for detection of SNP TSC0035032
ttgtgtgtaaaag

SEQ ID NO: 139882 - DNA, 13 bp, Artificial Sequence
  Oligonucleotide for detection of SNP TSC0035032
cttttacacacaa

SEQ ID NO: 139883 - DNA, 13 bp, Artificial Sequence
  Oligonucleotide for detection of SNP TSC0035032
tcgtgtataaaag

SEQ ID NO: 139884 - DNA, 13 bp, Artificial Sequence
  Oligonucleotide for detection of SNP TSC0035032
cttttatacacga

SEQ ID NO: 139885 - DNA, 13 bp, Artificial Sequence
  Oligonucleotide for detection of SNP TSC0035032
tcgtgtgtaaaag

SEQ ID NO: 139886 - DNA, 13 bp, Artificial Sequence
  Oligonucleotide for detection of SNP TSC0035032
cttttacacacga

SEQ ID NO: 139887 - DNA, 13 bp, Artificial Sequence
  Oligonucleotide for detection of SNP TSC0035033
atttgtagtttgg

SEQ ID NO: 139888 - DNA, 13 bp, Artificial Sequence
  Oligonucleotide for detection of SNP TSC0035033
ccaaactacaaat

SEQ ID NO: 139889 - DNA, 13 bp, Artificial Sequence
  Oligonucleotide for detection of SNP TSC0035033
atttgtggtttgg

SEQ ID NO: 139890 - DNA, 13 bp, Artificial Sequence
  Oligonucleotide for detection of SNP TSC0035033
ccaaaccacaaat

SEQ ID NO: 139891 - DNA, 13 bp, Artificial Sequence
  Oligonucleotide for detection of SNP TSC0035033
atttgtagttcgg

SEQ ID NO: 139892 - DNA, 13 bp, Artificial Sequence
  Oligonucleotide for detection of SNP TSC0035033
ccgaactacaaat

SEQ ID NO: 139893 - DNA, 13 bp, Artificial Sequence
  Oligonucleotide for detection of SNP TSC0035033
atttgcggtttgg

SEQ ID NO: 139894 - DNA, 13 bp, Artificial Sequence
  Oligonucleotide for detection of SNP TSC0035033
ccaaaccgcaaat

SEQ ID NO: 139895 - DNA, 13 bp, Artificial Sequence
  Oligonucleotide for detection of SNP TSC0035033
atttgtggttcgg

SEQ ID NO: 139896 - DNA, 13 bp, Artificial Sequence
  Oligonucleotide for detection of SNP TSC0035033
ccgaaccacaaat

SEQ ID NO: 139897 - DNA, 13 bp, Artificial Sequence
  Oligonucleotide for detection of SNP TSC0035033
atttgcggttcgg

SEQ ID NO: 139898 - DNA, 13 bp, Artificial Sequence
  Oligonucleotide for detection of SNP TSC0035033
ccgaaccgcaaat

SEQ ID NO: 139899 - DNA, 13 bp, Artificial Sequence
  Oligonucleotide for detection of SNP TSC0035033
ttgggttgtaggt

SEQ ID NO: 139900 - DNA, 13 bp, Artificial Sequence
  Oligonucleotide for detection of SNP TSC0035033
acctacaacccaa

SEQ ID NO: 139901 - DNA, 13 bp, Artificial Sequence
  Oligonucleotide for detection of SNP TSC0035033
tcgggttgtaggt

SEQ ID NO: 139902 - DNA, 13 bp, Artificial Sequence
  Oligonucleotide for detection of SNP TSC0035033
acctacaacccga

SEQ ID NO: 139903 - DNA, 13 bp, Artificial Sequence
  Oligonucleotide for detection of SNP TSC0035033
ttgggtcgtaggt

SEQ ID NO: 139904 - DNA, 13 bp, Artificial Sequence
  Oligonucleotide for detection of SNP TSC0035033
acctacgacccaa

SEQ ID NO: 139905 - DNA, 13 bp, Artificial Sequence
  Oligonucleotide for detection of SNP TSC0035033
tcgggtcgtaggt

SEQ ID NO: 139906 - DNA, 13 bp, Artificial Sequence
  Oligonucleotide for detection of SNP TSC0035033
acctacgacccga

SEQ ID NO: 139907 - DNA, 13 bp, Artificial Sequence
  Oligonucleotide for detection of SNP TSC0035034
tagttcgggtaay

SEQ ID NO: 139908 - DNA, 13 bp, Artificial Sequence
  Oligonucleotide for detection of SNP TSC0035034
rttacccgaacta

SEQ ID NO: 139909 - DNA, 13 bp, Artificial Sequence
  Oligonucleotide for detection of SNP TSC0035036
tttatttttaaga

SEQ ID NO: 139910 - DNA, 13 bp, Artificial Sequence
  Oligonucleotide for detection of SNP TSC0035036
tcttaaaaataaa

SEQ ID NO: 139911 - DNA, 13 bp, Artificial Sequence
  Oligonucleotide for detection of SNP TSC0035036
tttattgttaaga

SEQ ID NO: 139912 - DNA, 13 bp, Artificial Sequence
  Oligonucleotide for detection of SNP TSC0035036
tcttaacaataaa

SEQ ID NO: 139913 - DNA, 13 bp, Artificial Sequence
  Oligonucleotide for detection of SNP TSC0035036
tttatcgttaaga

SEQ ID NO: 139914 - DNA, 13 bp, Artificial Sequence
  Oligonucleotide for detection of SNP TSC0035036
tcttaacgataaa

SEQ ID NO: 139915 - DNA, 13 bp, Artificial Sequence
  Oligonucleotide for detection of SNP TSC0035036
ttttgagggtgga

SEQ ID NO: 139916 - DNA, 13 bp, Artificial Sequence
  Oligonucleotide for detection of SNP TSC0035036
tccaccctcaaaa

SEQ ID NO: 139917 - DNA, 13 bp, Artificial Sequence
  Oligonucleotide for detection of SNP TSC0035036
ttttgatggtgga

SEQ ID NO: 139918 - DNA, 13 bp, Artificial Sequence
  Oligonucleotide for detection of SNP TSC0035036
tccaccatcaaaa

SEQ ID NO: 139919 - DNA, 13 bp, Artificial Sequence
  Oligonucleotide for detection of SNP TSC0035036
ttttgacggtgga

SEQ ID NO: 139920 - DNA, 13 bp, Artificial Sequence
  Oligonucleotide for detection of SNP TSC0035036
tccaccgtcaaaa

SEQ ID NO: 139921 - DNA, 13 bp, Artificial Sequence
  Oligonucleotide for detection of SNP TSC0035037
tgttttattaatg

SEQ ID NO: 139922 - DNA, 13 bp, Artificial Sequence
  Oligonucleotide for detection of SNP TSC0035037
cattaataaaaca

SEQ ID NO: 139923 - DNA, 13 bp, Artificial Sequence
  Oligonucleotide for detection of SNP TSC0035037
tgtttttttaatg

SEQ ID NO: 139924 - DNA, 13 bp, Artificial Sequence
  Oligonucleotide for detection of SNP TSC0035037
cattaaaaaaaca

SEQ ID NO: 139925 - DNA, 13 bp, Artificial Sequence
  Oligonucleotide for detection of SNP TSC0035037
tattagtaaagta

SEQ ID NO: 139926 - DNA, 13 bp, Artificial Sequence
  Oligonucleotide for detection of SNP TSC0035037
tactttactaata

SEQ ID NO: 139927 - DNA, 13 bp, Artificial Sequence
  Oligonucleotide for detection of SNP TSC0035037
tattagaaaagta

SEQ ID NO: 139928 - DNA, 13 bp, Artificial Sequence
  Oligonucleotide for detection of SNP TSC0035037
tacttttctaata

SEQ ID NO: 139929 - DNA, 13 bp, Artificial Sequence
  Oligonucleotide for detection of SNP TSC0035038
agttgtgggattt

SEQ ID NO: 139930 - DNA, 13 bp, Artificial Sequence
  Oligonucleotide for detection of SNP TSC0035038
aaatcccacaact

SEQ ID NO: 139931 - DNA, 13 bp, Artificial Sequence
  Oligonucleotide for detection of SNP TSC0035038
agttgtaggattt

SEQ ID NO: 139932 - DNA, 13 bp, Artificial Sequence
  Oligonucleotide for detection of SNP TSC0035038
aaatcctacaact

SEQ ID NO: 139933 - DNA, 13 bp, Artificial Sequence
  Oligonucleotide for detection of SNP TSC0035042
tttttggattaty

SEQ ID NO: 139934 - DNA, 13 bp, Artificial Sequence
  Oligonucleotide for detection of SNP TSC0035042
rataatccaaaaa

SEQ ID NO: 139935 - DNA, 13 bp, Artificial Sequence
  Oligonucleotide for detection of SNP TSC0035042
tttttgaattaty

SEQ ID NO: 139936 - DNA, 13 bp, Artificial Sequence
  Oligonucleotide for detection of SNP TSC0035042
rataattcaaaaa

SEQ ID NO: 139937 - DNA, 13 bp, Artificial Sequence
  Oligonucleotide for detection of SNP TSC0035046
aaaatataaagay

SEQ ID NO: 139938 - DNA, 13 bp, Artificial Sequence
  Oligonucleotide for detection of SNP TSC0035046
rtctttatatttt

SEQ ID NO: 139939 - DNA, 13 bp, Artificial Sequence
  Oligonucleotide for detection of SNP TSC0035046
aaaataaaaagay

SEQ ID NO: 139940 - DNA, 13 bp, Artificial Sequence
  Oligonucleotide for detection of SNP TSC0035046
rtctttttatttt

SEQ ID NO: 139941 - DNA, 13 bp, Artificial Sequence
  Oligonucleotide for detection of SNP TSC0035050
ataaaaagttatt

SEQ ID NO: 139942 - DNA, 13 bp, Artificial Sequence
  Oligonucleotide for detection of SNP TSC0035050
aataactttttat

SEQ ID NO: 139943 - DNA, 13 bp, Artificial Sequence
  Oligonucleotide for detection of SNP TSC0035050
ataaaaggttatt

SEQ ID NO: 139944 - DNA, 13 bp, Artificial Sequence
  Oligonucleotide for detection of SNP TSC0035050
aataaccttttat

SEQ ID NO: 139945 - DNA, 13 bp, Artificial Sequence
  Oligonucleotide for detection of SNP TSC0035051
atttgatttgaag

SEQ ID NO: 139946 - DNA, 13 bp, Artificial Sequence
  Oligonucleotide for detection of SNP TSC0035051
cttcaaatcaaat

SEQ ID NO: 139947 - DNA, 13 bp, Artificial Sequence
  Oligonucleotide for detection of SNP TSC0035051
atttgagttgaag

SEQ ID NO: 139948 - DNA, 13 bp, Artificial Sequence
  Oligonucleotide for detection of SNP TSC0035051
cttcaactcaaat

SEQ ID NO: 139949 - DNA, 13 bp, Artificial Sequence
  Oligonucleotide for detection of SNP TSC0035051
ttttaggttagat

SEQ ID NO: 139950 - DNA, 13 bp, Artificial Sequence
  Oligonucleotide for detection of SNP TSC0035051
atctaacctaaaa

SEQ ID NO: 139951 - DNA, 13 bp, Artificial Sequence
  Oligonucleotide for detection of SNP TSC0035051
ttttagtttagat

SEQ ID NO: 139952 - DNA, 13 bp, Artificial Sequence
  Oligonucleotide for detection of SNP TSC0035051
atctaaactaaaa

SEQ ID NO: 139953 - DNA, 13 bp, Artificial Sequence
  Oligonucleotide for detection of SNP TSC0035052
attgatataggta

SEQ ID NO: 139954 - DNA, 13 bp, Artificial Sequence
  Oligonucleotide for detection of SNP TSC0035052
tacctatatcaat

SEQ ID NO: 139955 - DNA, 13 bp, Artificial Sequence
  Oligonucleotide for detection of SNP TSC0035052
attgatgtaggta

SEQ ID NO: 139956 - DNA, 13 bp, Artificial Sequence
  Oligonucleotide for detection of SNP TSC0035052
tacctacatcaat

SEQ ID NO: 139957 - DNA, 13 bp, Artificial Sequence
  Oligonucleotide for detection of SNP TSC0035052
atcgatataggta

SEQ ID NO: 139958 - DNA, 13 bp, Artificial Sequence
  Oligonucleotide for detection of SNP TSC0035052
tacctatatcgat

SEQ ID NO: 139959 - DNA, 13 bp, Artificial Sequence
  Oligonucleotide for detection of SNP TSC0035052
atcgatgtaggta

SEQ ID NO: 139960 - DNA, 13 bp, Artificial Sequence
  Oligonucleotide for detection of SNP TSC0035052
tacctacatcgat

SEQ ID NO: 139961 - DNA, 13 bp, Artificial Sequence
  Oligonucleotide for detection of SNP TSC0035052
attgacgtaggta

SEQ ID NO: 139962 - DNA, 13 bp, Artificial Sequence
  Oligonucleotide for detection of SNP TSC0035052
tacctacgtcaat

SEQ ID NO: 139963 - DNA, 13 bp, Artificial Sequence
  Oligonucleotide for detection of SNP TSC0035052
atcgacgtaggta

SEQ ID NO: 139964 - DNA, 13 bp, Artificial Sequence
  Oligonucleotide for detection of SNP TSC0035052
tacctacgtcgat

SEQ ID NO: 139965 - DNA, 13 bp, Artificial Sequence
  Oligonucleotide for detection of SNP TSC0035052
tgtttgtgttggt

SEQ ID NO: 139966 - DNA, 13 bp, Artificial Sequence
  Oligonucleotide for detection of SNP TSC0035052
accaacacaaaca

SEQ ID NO: 139967 - DNA, 13 bp, Artificial Sequence
  Oligonucleotide for detection of SNP TSC0035052
tgtttgtgtcggt

SEQ ID NO: 139968 - DNA, 13 bp, Artificial Sequence
  Oligonucleotide for detection of SNP TSC0035052
accgacacaaaca

SEQ ID NO: 139969 - DNA, 13 bp, Artificial Sequence
  Oligonucleotide for detection of SNP TSC0035052
tgtttgcgttggt

SEQ ID NO: 139970 - DNA, 13 bp, Artificial Sequence
  Oligonucleotide for detection of SNP TSC0035052
accaacgcaaaca

SEQ ID NO: 139971 - DNA, 13 bp, Artificial Sequence
  Oligonucleotide for detection of SNP TSC0035052
tgtttgcgtcggt

SEQ ID NO: 139972 - DNA, 13 bp, Artificial Sequence
  Oligonucleotide for detection of SNP TSC0035052
accgacgcaaaca

SEQ ID NO: 139973 - DNA, 13 bp, Artificial Sequence
  Oligonucleotide for detection of SNP TSC0035053
ttgtttggtggtt

SEQ ID NO: 139974 - DNA, 13 bp, Artificial Sequence
  Oligonucleotide for detection of SNP TSC0035053
aaccaccaaacaa

SEQ ID NO: 139975 - DNA, 13 bp, Artificial Sequence
  Oligonucleotide for detection of SNP TSC0035053
aattattaaataa

SEQ ID NO: 139976 - DNA, 13 bp, Artificial Sequence
  Oligonucleotide for detection of SNP TSC0035053
ttatttaataatt

SEQ ID NO: 139977 - DNA, 13 bp, Artificial Sequence
  Oligonucleotide for detection of SNP TSC0035053
aattataaaataa

SEQ ID NO: 139978 - DNA, 13 bp, Artificial Sequence
  Oligonucleotide for detection of SNP TSC0035053
ttattttataatt

SEQ ID NO: 139979 - DNA, 13 bp, Artificial Sequence
  Oligonucleotide for detection of SNP TSC0035057
aaaatggagatay

SEQ ID NO: 139980 - DNA, 13 bp, Artificial Sequence
  Oligonucleotide for detection of SNP TSC0035057
rtatctccatttt

SEQ ID NO: 139981 - DNA, 13 bp, Artificial Sequence
  Oligonucleotide for detection of SNP TSC0035057
aaaatgaagatay

SEQ ID NO: 139982 - DNA, 13 bp, Artificial Sequence
  Oligonucleotide for detection of SNP TSC0035057
rtatcttcatttt

SEQ ID NO: 139983 - DNA, 13 bp, Artificial Sequence
  Oligonucleotide for detection of SNP TSC0035062
tggaaataaaaag

SEQ ID NO: 139984 - DNA, 13 bp, Artificial Sequence
  Oligonucleotide for detection of SNP TSC0035062
ctttttatttcca

SEQ ID NO: 139985 - DNA, 13 bp, Artificial Sequence
  Oligonucleotide for detection of SNP TSC0035062
tggaaaaaaaaag

SEQ ID NO: 139986 - DNA, 13 bp, Artificial Sequence
  Oligonucleotide for detection of SNP TSC0035062
ctttttttttcca

SEQ ID NO: 139987 - DNA, 13 bp, Artificial Sequence
  Oligonucleotide for detection of SNP TSC0035064
tttatagtggatt

SEQ ID NO: 139988 - DNA, 13 bp, Artificial Sequence
  Oligonucleotide for detection of SNP TSC0035064
aatccactataaa

SEQ ID NO: 139989 - DNA, 13 bp, Artificial Sequence
  Oligonucleotide for detection of SNP TSC0035064
tttataatggatt

SEQ ID NO: 139990 - DNA, 13 bp, Artificial Sequence
  Oligonucleotide for detection of SNP TSC0035064
aatccattataaa

SEQ ID NO: 139991 - DNA, 13 bp, Artificial Sequence
  Oligonucleotide for detection of SNP TSC0035065
tgatttttttaat

SEQ ID NO: 139992 - DNA, 13 bp, Artificial Sequence
  Oligonucleotide for detection of SNP TSC0035065
attaaaaaaatca

SEQ ID NO: 139993 - DNA, 13 bp, Artificial Sequence
  Oligonucleotide for detection of SNP TSC0035065
tgatttgtttaat

SEQ ID NO: 139994 - DNA, 13 bp, Artificial Sequence
  Oligonucleotide for detection of SNP TSC0035065
attaaacaaatca

SEQ ID NO: 139995 - DNA, 13 bp, Artificial Sequence
  Oligonucleotide for detection of SNP TSC0035065
tgattcgtttaat

SEQ ID NO: 139996 - DNA, 13 bp, Artificial Sequence
  Oligonucleotide for detection of SNP TSC0035065
attaaacgaatca

SEQ ID NO: 139997 - DNA, 13 bp, Artificial Sequence
  Oligonucleotide for detection of SNP TSC0035065
attagaggggtta

SEQ ID NO: 139998 - DNA, 13 bp, Artificial Sequence
  Oligonucleotide for detection of SNP TSC0035065
taacccctctaat

SEQ ID NO: 139999 - DNA, 13 bp, Artificial Sequence
  Oligonucleotide for detection of SNP TSC0035065
attagatgggtta

SEQ ID NO: 140000 - DNA, 13 bp, Artificial Sequence
  Oligonucleotide for detection of SNP TSC0035065
taacccatctaat

SEQ ID NO: 140001 - DNA, 13 bp, Artificial Sequence
  Oligonucleotide for detection of SNP TSC0035065
attagacgggtta

SEQ ID NO: 140002 - DNA, 13 bp, Artificial Sequence
  Oligonucleotide for detection of SNP TSC0035065
taacccgtctaat

SEQ ID NO: 140003 - DNA, 13 bp, Artificial Sequence
  Oligonucleotide for detection of SNP TSC0035066
atatttatatgat

SEQ ID NO: 140004 - DNA, 13 bp, Artificial Sequence
  Oligonucleotide for detection of SNP TSC0035066
atcatataaatat

SEQ ID NO: 140005 - DNA, 13 bp, Artificial Sequence
  Oligonucleotide for detection of SNP TSC0035066
atatttttatgat

SEQ ID NO: 140006 - DNA, 13 bp, Artificial Sequence
  Oligonucleotide for detection of SNP TSC0035066
atcataaaaatat

SEQ ID NO: 140007 - DNA, 13 bp, Artificial Sequence
  Oligonucleotide for detection of SNP TSC0035066
attatatagatat

SEQ ID NO: 140008 - DNA, 13 bp, Artificial Sequence
  Oligonucleotide for detection of SNP TSC0035066
atatctatataat

SEQ ID NO: 140009 - DNA, 13 bp, Artificial Sequence
  Oligonucleotide for detection of SNP TSC0035066
attataaagatat

SEQ ID NO: 140010 - DNA, 13 bp, Artificial Sequence
  Oligonucleotide for detection of SNP TSC0035066
atatctttataat

SEQ ID NO: 140011 - DNA, 13 bp, Artificial Sequence
  Oligonucleotide for detection of SNP TSC0035067
atttaggattata

SEQ ID NO: 140012 - DNA, 13 bp, Artificial Sequence
  Oligonucleotide for detection of SNP TSC0035067
tataatcctaaat

SEQ ID NO: 140013 - DNA, 13 bp, Artificial Sequence
  Oligonucleotide for detection of SNP TSC0035067
atttagaattata

SEQ ID NO: 140014 - DNA, 13 bp, Artificial Sequence
  Oligonucleotide for detection of SNP TSC0035067
tataattctaaat

SEQ ID NO: 140015 - DNA, 13 bp, Artificial Sequence
  Oligonucleotide for detection of SNP TSC0035068
tgtttaaagggta

SEQ ID NO: 140016 - DNA, 13 bp, Artificial Sequence
  Oligonucleotide for detection of SNP TSC0035068
taccctttaaaca

SEQ ID NO: 140017 - DNA, 13 bp, Artificial Sequence
  Oligonucleotide for detection of SNP TSC0035068
tgtttatagggta

SEQ ID NO: 140018 - DNA, 13 bp, Artificial Sequence
  Oligonucleotide for detection of SNP TSC0035068
taccctataaaca

SEQ ID NO: 140019 - DNA, 13 bp, Artificial Sequence
  Oligonucleotide for detection of SNP TSC0035068
tgttttttgggta

SEQ ID NO: 140020 - DNA, 13 bp, Artificial Sequence
  Oligonucleotide for detection of SNP TSC0035068
tacccaaaaaaca

SEQ ID NO: 140021 - DNA, 13 bp, Artificial Sequence
  Oligonucleotide for detection of SNP TSC0035068
tgttttgtgggta

SEQ ID NO: 140022 - DNA, 13 bp, Artificial Sequence
  Oligonucleotide for detection of SNP TSC0035068
tacccacaaaaca

SEQ ID NO: 140023 - DNA, 13 bp, Artificial Sequence
  Oligonucleotide for detection of SNP TSC0035070
taggattgtgatg

SEQ ID NO: 140024 - DNA, 13 bp, Artificial Sequence
  Oligonucleotide for detection of SNP TSC0035070
catcacaatccta

SEQ ID NO: 140025 - DNA, 13 bp, Artificial Sequence
  Oligonucleotide for detection of SNP TSC0035070
taggatcgtgatg

SEQ ID NO: 140026 - DNA, 13 bp, Artificial Sequence
  Oligonucleotide for detection of SNP TSC0035070
catcacgatccta

SEQ ID NO: 140027 - DNA, 13 bp, Artificial Sequence
  Oligonucleotide for detection of SNP TSC0035070
tattatggtttta

SEQ ID NO: 140028 - DNA, 13 bp, Artificial Sequence
  Oligonucleotide for detection of SNP TSC0035070
taaaaccataata

SEQ ID NO: 140029 - DNA, 13 bp, Artificial Sequence
  Oligonucleotide for detection of SNP TSC0035070
tattatagtttta

SEQ ID NO: 140030 - DNA, 13 bp, Artificial Sequence
  Oligonucleotide for detection of SNP TSC0035070
taaaactataata

SEQ ID NO: 140031 - DNA, 13 bp, Artificial Sequence
  Oligonucleotide for detection of SNP TSC0035070
tattacggtttta

SEQ ID NO: 140032 - DNA, 13 bp, Artificial Sequence
  Oligonucleotide for detection of SNP TSC0035070
taaaaccgtaata

SEQ ID NO: 140033 - DNA, 13 bp, Artificial Sequence
  Oligonucleotide for detection of SNP TSC0035071
attaatggtattt

SEQ ID NO: 140034 - DNA, 13 bp, Artificial Sequence
  Oligonucleotide for detection of SNP TSC0035071
aaataccattaat

SEQ ID NO: 140035 - DNA, 13 bp, Artificial Sequence
  Oligonucleotide for detection of SNP TSC0035071
aaatattattaat

SEQ ID NO: 140036 - DNA, 13 bp, Artificial Sequence
  Oligonucleotide for detection of SNP TSC0035071
attaataatattt

SEQ ID NO: 140037 - DNA, 13 bp, Artificial Sequence
  Oligonucleotide for detection of SNP TSC0035071
aaatataattaat

SEQ ID NO: 140038 - DNA, 13 bp, Artificial Sequence
  Oligonucleotide for detection of SNP TSC0035071
attaattatattt

SEQ ID NO: 140039 - DNA, 13 bp, Artificial Sequence
  Oligonucleotide for detection of SNP TSC0035072
tgtgttaggttaa

SEQ ID NO: 140040 - DNA, 13 bp, Artificial Sequence
  Oligonucleotide for detection of SNP TSC0035072
ttaacctaacaca

SEQ ID NO: 140041 - DNA, 13 bp, Artificial Sequence
  Oligonucleotide for detection of SNP TSC0035072
tgcgttaggttaa

SEQ ID NO: 140042 - DNA, 13 bp, Artificial Sequence
  Oligonucleotide for detection of SNP TSC0035072
ttaacctaacgca

SEQ ID NO: 140043 - DNA, 13 bp, Artificial Sequence
  Oligonucleotide for detection of SNP TSC0035072
ttaatttggtgta

SEQ ID NO: 140044 - DNA, 13 bp, Artificial Sequence
  Oligonucleotide for detection of SNP TSC0035072
tacaccaaattaa

SEQ ID NO: 140045 - DNA, 13 bp, Artificial Sequence
  Oligonucleotide for detection of SNP TSC0035072
ttaattgggtgta

SEQ ID NO: 140046 - DNA, 13 bp, Artificial Sequence
  Oligonucleotide for detection of SNP TSC0035072
tacacccaattaa

SEQ ID NO: 140047 - DNA, 13 bp, Artificial Sequence
  Oligonucleotide for detection of SNP TSC0035072
ttaatttggcgta

SEQ ID NO: 140048 - DNA, 13 bp, Artificial Sequence
  Oligonucleotide for detection of SNP TSC0035072
tacgccaaattaa

SEQ ID NO: 140049 - DNA, 13 bp, Artificial Sequence
  Oligonucleotide for detection of SNP TSC0035072
ttaatcgggtgta

SEQ ID NO: 140050 - DNA, 13 bp, Artificial Sequence
  Oligonucleotide for detection of SNP TSC0035072
tacacccgattaa

SEQ ID NO: 140051 - DNA, 13 bp, Artificial Sequence
  Oligonucleotide for detection of SNP TSC0035072
ttaattgggcgta

SEQ ID NO: 140052 - DNA, 13 bp, Artificial Sequence
  Oligonucleotide for detection of SNP TSC0035072
tacgcccaattaa

SEQ ID NO: 140053 - DNA, 13 bp, Artificial Sequence
  Oligonucleotide for detection of SNP TSC0035072
ttaatcgggcgta

SEQ ID NO: 140054 - DNA, 13 bp, Artificial Sequence
  Oligonucleotide for detection of SNP TSC0035072
tacgcccgattaa

SEQ ID NO: 140055 - DNA, 13 bp, Artificial Sequence
  Oligonucleotide for detection of SNP TSC0035074
gtttgtgatttta

SEQ ID NO: 140056 - DNA, 13 bp, Artificial Sequence
  Oligonucleotide for detection of SNP TSC0035074
taaaatcacaaac

SEQ ID NO: 140057 - DNA, 13 bp, Artificial Sequence
  Oligonucleotide for detection of SNP TSC0035077
gtagatgaggaag

SEQ ID NO: 140058 - DNA, 13 bp, Artificial Sequence
  Oligonucleotide for detection of SNP TSC0035077
cttcctcatctac

SEQ ID NO: 140059 - DNA, 13 bp, Artificial Sequence
  Oligonucleotide for detection of SNP TSC0035077
gtagattaggaag

SEQ ID NO: 140060 - DNA, 13 bp, Artificial Sequence
  Oligonucleotide for detection of SNP TSC0035077
cttcctaatctac

SEQ ID NO: 140061 - DNA, 13 bp, Artificial Sequence
  Oligonucleotide for detection of SNP TSC0035077
tttttttatttay

SEQ ID NO: 140062 - DNA, 13 bp, Artificial Sequence
  Oligonucleotide for detection of SNP TSC0035077
rtaaataaaaaaa

SEQ ID NO: 140063 - DNA, 13 bp, Artificial Sequence
  Oligonucleotide for detection of SNP TSC0035078
gatgttaattagy

SEQ ID NO: 140064 - DNA, 13 bp, Artificial Sequence
  Oligonucleotide for detection of SNP TSC0035078
rctaattaacatc

SEQ ID NO: 140065 - DNA, 13 bp, Artificial Sequence
  Oligonucleotide for detection of SNP TSC0035078
gatgtttattagy

SEQ ID NO: 140066 - DNA, 13 bp, Artificial Sequence
  Oligonucleotide for detection of SNP TSC0035078
rctaataaacatc

SEQ ID NO: 140067 - DNA, 13 bp, Artificial Sequence
  Oligonucleotide for detection of SNP TSC0035078
gttgattagtaty

SEQ ID NO: 140068 - DNA, 13 bp, Artificial Sequence
  Oligonucleotide for detection of SNP TSC0035078
ratactaatcaac

SEQ ID NO: 140069 - DNA, 13 bp, Artificial Sequence
  Oligonucleotide for detection of SNP TSC0035078
gttgataagtaty

SEQ ID NO: 140070 - DNA, 13 bp, Artificial Sequence
  Oligonucleotide for detection of SNP TSC0035078
ratacttatcaac

SEQ ID NO: 140071 - DNA, 13 bp, Artificial Sequence
  Oligonucleotide for detection of SNP TSC0035083
aaaggttgttggg

SEQ ID NO: 140072 - DNA, 13 bp, Artificial Sequence
  Oligonucleotide for detection of SNP TSC0035083
cccaacaaccttt

SEQ ID NO: 140073 - DNA, 13 bp, Artificial Sequence
  Oligonucleotide for detection of SNP TSC0035083
aaaggtcgttggg

SEQ ID NO: 140074 - DNA, 13 bp, Artificial Sequence
  Oligonucleotide for detection of SNP TSC0035083
cccaacgaccttt

SEQ ID NO: 140075 - DNA, 13 bp, Artificial Sequence
  Oligonucleotide for detection of SNP TSC0035083
tttagtagttttt

SEQ ID NO: 140076 - DNA, 13 bp, Artificial Sequence
  Oligonucleotide for detection of SNP TSC0035083
aaaaactactaaa

SEQ ID NO: 140077 - DNA, 13 bp, Artificial Sequence
  Oligonucleotide for detection of SNP TSC0035083
tttagcggttttt

SEQ ID NO: 140078 - DNA, 13 bp, Artificial Sequence
  Oligonucleotide for detection of SNP TSC0035083
aaaaaccgctaaa

SEQ ID NO: 140079 - DNA, 13 bp, Artificial Sequence
  Oligonucleotide for detection of SNP TSC0035084
attatagttttta

SEQ ID NO: 140080 - DNA, 13 bp, Artificial Sequence
  Oligonucleotide for detection of SNP TSC0035084
taaaaactataat

SEQ ID NO: 140081 - DNA, 13 bp, Artificial Sequence
  Oligonucleotide for detection of SNP TSC0035091
tttatttgttggt

SEQ ID NO: 140082 - DNA, 13 bp, Artificial Sequence
  Oligonucleotide for detection of SNP TSC0035091
accaacaaataaa

SEQ ID NO: 140083 - DNA, 13 bp, Artificial Sequence
  Oligonucleotide for detection of SNP TSC0035091
tttattcgttggt

SEQ ID NO: 140084 - DNA, 13 bp, Artificial Sequence
  Oligonucleotide for detection of SNP TSC0035091
accaacgaataaa

SEQ ID NO: 140085 - DNA, 13 bp, Artificial Sequence
  Oligonucleotide for detection of SNP TSC0035091
attagtgaataaa

SEQ ID NO: 140086 - DNA, 13 bp, Artificial Sequence
  Oligonucleotide for detection of SNP TSC0035091
tttattcactaat

SEQ ID NO: 140087 - DNA, 13 bp, Artificial Sequence
  Oligonucleotide for detection of SNP TSC0035091
attagtaaataaa

SEQ ID NO: 140088 - DNA, 13 bp, Artificial Sequence
  Oligonucleotide for detection of SNP TSC0035091
tttatttactaat

SEQ ID NO: 140089 - DNA, 13 bp, Artificial Sequence
  Oligonucleotide for detection of SNP TSC0035091
attagcgaataaa

SEQ ID NO: 140090 - DNA, 13 bp, Artificial Sequence
  Oligonucleotide for detection of SNP TSC0035091
tttattcgctaat

SEQ ID NO: 140091 - DNA, 13 bp, Artificial Sequence
  Oligonucleotide for detection of SNP TSC0035092
tatgtcgtattty

SEQ ID NO: 140092 - DNA, 13 bp, Artificial Sequence
  Oligonucleotide for detection of SNP TSC0035092
raaatacgacata

SEQ ID NO: 140093 - DNA, 13 bp, Artificial Sequence
  Oligonucleotide for detection of SNP TSC0035092
gggatgtggtatg

SEQ ID NO: 140094 - DNA, 13 bp, Artificial Sequence
  Oligonucleotide for detection of SNP TSC0035092
cataccacatccc

SEQ ID NO: 140095 - DNA, 13 bp, Artificial Sequence
  Oligonucleotide for detection of SNP TSC0035092
gggatgcggtatg

SEQ ID NO: 140096 - DNA, 13 bp, Artificial Sequence
  Oligonucleotide for detection of SNP TSC0035092
cataccgcatccc

SEQ ID NO: 140097 - DNA, 13 bp, Artificial Sequence
  Oligonucleotide for detection of SNP TSC0035093
tgggaaggtgata

SEQ ID NO: 140098 - DNA, 13 bp, Artificial Sequence
  Oligonucleotide for detection of SNP TSC0035093
tatcaccttccca

SEQ ID NO: 140099 - DNA, 13 bp, Artificial Sequence
  Oligonucleotide for detection of SNP TSC0035093
tgggaaagtgata

SEQ ID NO: 140100 - DNA, 13 bp, Artificial Sequence
  Oligonucleotide for detection of SNP TSC0035093
tatcactttccca

SEQ ID NO: 140101 - DNA, 13 bp, Artificial Sequence
  Oligonucleotide for detection of SNP TSC0035094
tttgggattttay

SEQ ID NO: 140102 - DNA, 13 bp, Artificial Sequence
  Oligonucleotide for detection of SNP TSC0035094
rtaaaatcccaaa

SEQ ID NO: 140103 - DNA, 13 bp, Artificial Sequence
  Oligonucleotide for detection of SNP TSC0035094
tttgggtttttay

SEQ ID NO: 140104 - DNA, 13 bp, Artificial Sequence
  Oligonucleotide for detection of SNP TSC0035094
rtaaaaacccaaa

SEQ ID NO: 140105 - DNA, 13 bp, Artificial Sequence
  Oligonucleotide for detection of SNP TSC0035094
gtggggttttagg

SEQ ID NO: 140106 - DNA, 13 bp, Artificial Sequence
  Oligonucleotide for detection of SNP TSC0035094
cctaaaaccccac

SEQ ID NO: 140107 - DNA, 13 bp, Artificial Sequence
  Oligonucleotide for detection of SNP TSC0035094
gtggggatttagg

SEQ ID NO: 140108 - DNA, 13 bp, Artificial Sequence
  Oligonucleotide for detection of SNP TSC0035094
cctaaatccccac

SEQ ID NO: 140109 - DNA, 13 bp, Artificial Sequence
  Oligonucleotide for detection of SNP TSC0035096
agaaggttgggta

SEQ ID NO: 140110 - DNA, 13 bp, Artificial Sequence
  Oligonucleotide for detection of SNP TSC0035096
tacccaaccttct

SEQ ID NO: 140111 - DNA, 13 bp, Artificial Sequence
  Oligonucleotide for detection of SNP TSC0035096
agaagggtgggta

SEQ ID NO: 140112 - DNA, 13 bp, Artificial Sequence
  Oligonucleotide for detection of SNP TSC0035096
tacccacccttct

SEQ ID NO: 140113 - DNA, 13 bp, Artificial Sequence
  Oligonucleotide for detection of SNP TSC0035101
tggtttgttatgy

SEQ ID NO: 140114 - DNA, 13 bp, Artificial Sequence
  Oligonucleotide for detection of SNP TSC0035101
rcataacaaacca

SEQ ID NO: 140115 - DNA, 13 bp, Artificial Sequence
  Oligonucleotide for detection of SNP TSC0035101
tggtttattatgy

SEQ ID NO: 140116 - DNA, 13 bp, Artificial Sequence
  Oligonucleotide for detection of SNP TSC0035101
rcataataaacca

SEQ ID NO: 140117 - DNA, 13 bp, Artificial Sequence
  Oligonucleotide for detection of SNP TSC0035102
aattatattggty

SEQ ID NO: 140118 - DNA, 13 bp, Artificial Sequence
  Oligonucleotide for detection of SNP TSC0035102
raccaatataatt

SEQ ID NO: 140119 - DNA, 13 bp, Artificial Sequence
  Oligonucleotide for detection of SNP TSC0035102
aattatgttggty

SEQ ID NO: 140120 - DNA, 13 bp, Artificial Sequence
  Oligonucleotide for detection of SNP TSC0035102
raccaacataatt

SEQ ID NO: 140121 - DNA, 13 bp, Artificial Sequence
  Oligonucleotide for detection of SNP TSC0035102
aattacgttggty

SEQ ID NO: 140122 - DNA, 13 bp, Artificial Sequence
  Oligonucleotide for detection of SNP TSC0035102
raccaacgtaatt

SEQ ID NO: 140123 - DNA, 13 bp, Artificial Sequence
  Oligonucleotide for detection of SNP TSC0035102
gattagtgtggtt

SEQ ID NO: 140124 - DNA, 13 bp, Artificial Sequence
  Oligonucleotide for detection of SNP TSC0035102
aaccacactaatc

SEQ ID NO: 140125 - DNA, 13 bp, Artificial Sequence
  Oligonucleotide for detection of SNP TSC0035102
gattagcgtggtt

SEQ ID NO: 140126 - DNA, 13 bp, Artificial Sequence
  Oligonucleotide for detection of SNP TSC0035102
aaccacgctaatc

SEQ ID NO: 140127 - DNA, 13 bp, Artificial Sequence
  Oligonucleotide for detection of SNP TSC0035104
aaaagataggata

SEQ ID NO: 140128 - DNA, 13 bp, Artificial Sequence
  Oligonucleotide for detection of SNP TSC0035104
tatcctatctttt

SEQ ID NO: 140129 - DNA, 13 bp, Artificial Sequence
  Oligonucleotide for detection of SNP TSC0035104
aaaagagaggata

SEQ ID NO: 140130 - DNA, 13 bp, Artificial Sequence
  Oligonucleotide for detection of SNP TSC0035104
tatcctctctttt

SEQ ID NO: 140131 - DNA, 13 bp, Artificial Sequence
  Oligonucleotide for detection of SNP TSC0035106
tgtaaagagtatg

SEQ ID NO: 140132 - DNA, 13 bp, Artificial Sequence
  Oligonucleotide for detection of SNP TSC0035106
catactctttaca

SEQ ID NO: 140133 - DNA, 13 bp, Artificial Sequence
  Oligonucleotide for detection of SNP TSC0035106
tgtaaaaagtatg

SEQ ID NO: 140134 - DNA, 13 bp, Artificial Sequence
  Oligonucleotide for detection of SNP TSC0035106
catactttttaca

SEQ ID NO: 140135 - DNA, 13 bp, Artificial Sequence
  Oligonucleotide for detection of SNP TSC0035107
atattaaatagta

SEQ ID NO: 140136 - DNA, 13 bp, Artificial Sequence
  Oligonucleotide for detection of SNP TSC0035107
tactatttaatat

SEQ ID NO: 140137 - DNA, 13 bp, Artificial Sequence
  Oligonucleotide for detection of SNP TSC0035107
atattagatagta

SEQ ID NO: 140138 - DNA, 13 bp, Artificial Sequence
  Oligonucleotide for detection of SNP TSC0035107
tactatctaatat

SEQ ID NO: 140139 - DNA, 13 bp, Artificial Sequence
  Oligonucleotide for detection of SNP TSC0035108
taatttagtttta

SEQ ID NO: 140140 - DNA, 13 bp, Artificial Sequence
  Oligonucleotide for detection of SNP TSC0035108
taaaactaaatta

SEQ ID NO: 140141 - DNA, 13 bp, Artificial Sequence
  Oligonucleotide for detection of SNP TSC0035108
taatttggtttta

SEQ ID NO: 140142 - DNA, 13 bp, Artificial Sequence
  Oligonucleotide for detection of SNP TSC0035108
taaaaccaaatta

SEQ ID NO: 140143 - DNA, 13 bp, Artificial Sequence
  Oligonucleotide for detection of SNP TSC0035108
taattcggtttta

SEQ ID NO: 140144 - DNA, 13 bp, Artificial Sequence
  Oligonucleotide for detection of SNP TSC0035108
taaaaccgaatta

SEQ ID NO: 140145 - DNA, 13 bp, Artificial Sequence
  Oligonucleotide for detection of SNP TSC0035108
tgggattgagtta

SEQ ID NO: 140146 - DNA, 13 bp, Artificial Sequence
  Oligonucleotide for detection of SNP TSC0035108
taactcaatccca

SEQ ID NO: 140147 - DNA, 13 bp, Artificial Sequence
  Oligonucleotide for detection of SNP TSC0035108
tgggatcgagtta

SEQ ID NO: 140148 - DNA, 13 bp, Artificial Sequence
  Oligonucleotide for detection of SNP TSC0035108
taactcgatccca

SEQ ID NO: 140149 - DNA, 13 bp, Artificial Sequence
  Oligonucleotide for detection of SNP TSC0035109
aagaaagatgtgg

SEQ ID NO: 140150 - DNA, 13 bp, Artificial Sequence
  Oligonucleotide for detection of SNP TSC0035109
ccacatctttctt

SEQ ID NO: 140151 - DNA, 13 bp, Artificial Sequence
  Oligonucleotide for detection of SNP TSC0035109
aagaaaaatgtgg

SEQ ID NO: 140152 - DNA, 13 bp, Artificial Sequence
  Oligonucleotide for detection of SNP TSC0035109
ccacatttttctt

SEQ ID NO: 140153 - DNA, 13 bp, Artificial Sequence
  Oligonucleotide for detection of SNP TSC0035111
tatgttgtaaaat

SEQ ID NO: 140154 - DNA, 13 bp, Artificial Sequence
  Oligonucleotide for detection of SNP TSC0035111
attttacaacata

SEQ ID NO: 140155 - DNA, 13 bp, Artificial Sequence
  Oligonucleotide for detection of SNP TSC0035111
tatgttataaaat

SEQ ID NO: 140156 - DNA, 13 bp, Artificial Sequence
  Oligonucleotide for detection of SNP TSC0035111
attttataacata

SEQ ID NO: 140157 - DNA, 13 bp, Artificial Sequence
  Oligonucleotide for detection of SNP TSC0035112
gttgttatggata

SEQ ID NO: 140158 - DNA, 13 bp, Artificial Sequence
  Oligonucleotide for detection of SNP TSC0035112
tatccataacaac

SEQ ID NO: 140159 - DNA, 13 bp, Artificial Sequence
  Oligonucleotide for detection of SNP TSC0035112
gttgttgtggata

SEQ ID NO: 140160 - DNA, 13 bp, Artificial Sequence
  Oligonucleotide for detection of SNP TSC0035112
tatccacaacaac

SEQ ID NO: 140161 - DNA, 13 bp, Artificial Sequence
  Oligonucleotide for detection of SNP TSC0035113
aggagtgaaaata

SEQ ID NO: 140162 - DNA, 13 bp, Artificial Sequence
  Oligonucleotide for detection of SNP TSC0035113
tattttcactcct

SEQ ID NO: 140163 - DNA, 13 bp, Artificial Sequence
  Oligonucleotide for detection of SNP TSC0035113
aggagtaaaaata

SEQ ID NO: 140164 - DNA, 13 bp, Artificial Sequence
  Oligonucleotide for detection of SNP TSC0035113
tatttttactcct

SEQ ID NO: 140165 - DNA, 13 bp, Artificial Sequence
  Oligonucleotide for detection of SNP TSC0035113
aggagcgaaaata

SEQ ID NO: 140166 - DNA, 13 bp, Artificial Sequence
  Oligonucleotide for detection of SNP TSC0035113
tattttcgctcct

SEQ ID NO: 140167 - DNA, 13 bp, Artificial Sequence
  Oligonucleotide for detection of SNP TSC0035114
gaaaaagtaatag

SEQ ID NO: 140168 - DNA, 13 bp, Artificial Sequence
  Oligonucleotide for detection of SNP TSC0035114
ctattactttttc

SEQ ID NO: 140169 - DNA, 13 bp, Artificial Sequence
  Oligonucleotide for detection of SNP TSC0035114
gaaaaattaatag

SEQ ID NO: 140170 - DNA, 13 bp, Artificial Sequence
  Oligonucleotide for detection of SNP TSC0035114
ctattaatttttc

SEQ ID NO: 140171 - DNA, 13 bp, Artificial Sequence
  Oligonucleotide for detection of SNP TSC0035114
ttattatttttty

SEQ ID NO: 140172 - DNA, 13 bp, Artificial Sequence
  Oligonucleotide for detection of SNP TSC0035114
raaaaaataataa

SEQ ID NO: 140173 - DNA, 13 bp, Artificial Sequence
  Oligonucleotide for detection of SNP TSC0035116
ggaaagtttattt

SEQ ID NO: 140174 - DNA, 13 bp, Artificial Sequence
  Oligonucleotide for detection of SNP TSC0035116
aaataaactttcc

SEQ ID NO: 140175 - DNA, 13 bp, Artificial Sequence
  Oligonucleotide for detection of SNP TSC0035116
ggaaaggttattt

SEQ ID NO: 140176 - DNA, 13 bp, Artificial Sequence
  Oligonucleotide for detection of SNP TSC0035116
aaataacctttcc

SEQ ID NO: 140177 - DNA, 13 bp, Artificial Sequence
  Oligonucleotide for detection of SNP TSC0035116
aaataagttttty

SEQ ID NO: 140178 - DNA, 13 bp, Artificial Sequence
  Oligonucleotide for detection of SNP TSC0035116
raaaaacttattt

SEQ ID NO: 140179 - DNA, 13 bp, Artificial Sequence
  Oligonucleotide for detection of SNP TSC0035118
tttttggggatta

SEQ ID NO: 140180 - DNA, 13 bp, Artificial Sequence
  Oligonucleotide for detection of SNP TSC0035118
taatccccaaaaa

SEQ ID NO: 140181 - DNA, 13 bp, Artificial Sequence
  Oligonucleotide for detection of SNP TSC0035118
tttttgtggatta

SEQ ID NO: 140182 - DNA, 13 bp, Artificial Sequence
  Oligonucleotide for detection of SNP TSC0035118
taatccacaaaaa

SEQ ID NO: 140183 - DNA, 13 bp, Artificial Sequence
  Oligonucleotide for detection of SNP TSC0035118
tgatttttaagag

SEQ ID NO: 140184 - DNA, 13 bp, Artificial Sequence
  Oligonucleotide for detection of SNP TSC0035118
ctcttaaaaatca

SEQ ID NO: 140185 - DNA, 13 bp, Artificial Sequence
  Oligonucleotide for detection of SNP TSC0035118
tgatttataagag

SEQ ID NO: 140186 - DNA, 13 bp, Artificial Sequence
  Oligonucleotide for detection of SNP TSC0035118
ctcttataaatca

SEQ ID NO: 140187 - DNA, 13 bp, Artificial Sequence
  Oligonucleotide for detection of SNP TSC0035119
gtgaaaagttgty

SEQ ID NO: 140188 - DNA, 13 bp, Artificial Sequence
  Oligonucleotide for detection of SNP TSC0035119
racaacttttcac

SEQ ID NO: 140189 - DNA, 13 bp, Artificial Sequence
  Oligonucleotide for detection of SNP TSC0035119
gatagttttttay

SEQ ID NO: 140190 - DNA, 13 bp, Artificial Sequence
  Oligonucleotide for detection of SNP TSC0035119
rtaaaaaactatc

SEQ ID NO: 140191 - DNA, 13 bp, Artificial Sequence
  Oligonucleotide for detection of SNP TSC0035122
ataaaagaaaaag

SEQ ID NO: 140192 - DNA, 13 bp, Artificial Sequence
  Oligonucleotide for detection of SNP TSC0035122
ctttttcttttat

SEQ ID NO: 140193 - DNA, 13 bp, Artificial Sequence
  Oligonucleotide for detection of SNP TSC0035122
ataaaataaaaag

SEQ ID NO: 140194 - DNA, 13 bp, Artificial Sequence
  Oligonucleotide for detection of SNP TSC0035122
ctttttattttat

SEQ ID NO: 140195 - DNA, 13 bp, Artificial Sequence
  Oligonucleotide for detection of SNP TSC0035126
atttgtgttattt

SEQ ID NO: 140196 - DNA, 13 bp, Artificial Sequence
  Oligonucleotide for detection of SNP TSC0035126
aaataacacaaat

SEQ ID NO: 140197 - DNA, 13 bp, Artificial Sequence
  Oligonucleotide for detection of SNP TSC0035126
atttgtattattt

SEQ ID NO: 140198 - DNA, 13 bp, Artificial Sequence
  Oligonucleotide for detection of SNP TSC0035126
aaataatacaaat

SEQ ID NO: 140199 - DNA, 13 bp, Artificial Sequence
  Oligonucleotide for detection of SNP TSC0035127
tttgatagtattt

SEQ ID NO: 140200 - DNA, 13 bp, Artificial Sequence
  Oligonucleotide for detection of SNP TSC0035127
aaatactatcaaa

SEQ ID NO: 140201 - DNA, 13 bp, Artificial Sequence
  Oligonucleotide for detection of SNP TSC0035127
tttgatggtattt

SEQ ID NO: 140202 - DNA, 13 bp, Artificial Sequence
  Oligonucleotide for detection of SNP TSC0035127
aaataccatcaaa

SEQ ID NO: 140203 - DNA, 13 bp, Artificial Sequence
  Oligonucleotide for detection of SNP TSC0035127
tttgacggtattt

SEQ ID NO: 140204 - DNA, 13 bp, Artificial Sequence
  Oligonucleotide for detection of SNP TSC0035127
aaataccgtcaaa

SEQ ID NO: 140205 - DNA, 13 bp, Artificial Sequence
  Oligonucleotide for detection of SNP TSC0035127
aggtgttgttaga

SEQ ID NO: 140206 - DNA, 13 bp, Artificial Sequence
  Oligonucleotide for detection of SNP TSC0035127
tctaacaacacct

SEQ ID NO: 140207 - DNA, 13 bp, Artificial Sequence
  Oligonucleotide for detection of SNP TSC0035127
aggtgtcgttaga

SEQ ID NO: 140208 - DNA, 13 bp, Artificial Sequence
  Oligonucleotide for detection of SNP TSC0035127
tctaacgacacct

SEQ ID NO: 140209 - DNA, 13 bp, Artificial Sequence
  Oligonucleotide for detection of SNP TSC0035128
ggttaaatatggg

SEQ ID NO: 140210 - DNA, 13 bp, Artificial Sequence
  Oligonucleotide for detection of SNP TSC0035128
cccatatttaacc

SEQ ID NO: 140211 - DNA, 13 bp, Artificial Sequence
  Oligonucleotide for detection of SNP TSC0035128
ggttaagtatggg

SEQ ID NO: 140212 - DNA, 13 bp, Artificial Sequence
  Oligonucleotide for detection of SNP TSC0035128
cccatacttaacc

SEQ ID NO: 140213 - DNA, 13 bp, Artificial Sequence
  Oligonucleotide for detection of SNP TSC0035129
tagttgtgagttt

SEQ ID NO: 140214 - DNA, 13 bp, Artificial Sequence
  Oligonucleotide for detection of SNP TSC0035129
aaactcacaacta

SEQ ID NO: 140215 - DNA, 13 bp, Artificial Sequence
  Oligonucleotide for detection of SNP TSC0035129
tagttgcgagttt

SEQ ID NO: 140216 - DNA, 13 bp, Artificial Sequence
  Oligonucleotide for detection of SNP TSC0035129
aaactcgcaacta

SEQ ID NO: 140217 - DNA, 13 bp, Artificial Sequence
  Oligonucleotide for detection of SNP TSC0035129
agatttgtagtta

SEQ ID NO: 140218 - DNA, 13 bp, Artificial Sequence
  Oligonucleotide for detection of SNP TSC0035129
taactacaaatct

SEQ ID NO: 140219 - DNA, 13 bp, Artificial Sequence
  Oligonucleotide for detection of SNP TSC0035129
agatttatagtta

SEQ ID NO: 140220 - DNA, 13 bp, Artificial Sequence
  Oligonucleotide for detection of SNP TSC0035129
taactataaatct

SEQ ID NO: 140221 - DNA, 13 bp, Artificial Sequence
  Oligonucleotide for detection of SNP TSC0035129
agattcgtagtta

SEQ ID NO: 140222 - DNA, 13 bp, Artificial Sequence
  Oligonucleotide for detection of SNP TSC0035129
taactacgaatct

SEQ ID NO: 140223 - DNA, 13 bp, Artificial Sequence
  Oligonucleotide for detection of SNP TSC0035130
atgattgtattay

SEQ ID NO: 140224 - DNA, 13 bp, Artificial Sequence
  Oligonucleotide for detection of SNP TSC0035130
rtaatacaatcat

SEQ ID NO: 140225 - DNA, 13 bp, Artificial Sequence
  Oligonucleotide for detection of SNP TSC0035130
atgattatattay

SEQ ID NO: 140226 - DNA, 13 bp, Artificial Sequence
  Oligonucleotide for detection of SNP TSC0035130
rtaatataatcat

SEQ ID NO: 140227 - DNA, 13 bp, Artificial Sequence
  Oligonucleotide for detection of SNP TSC0035131
ttataattgagty

SEQ ID NO: 140228 - DNA, 13 bp, Artificial Sequence
  Oligonucleotide for detection of SNP TSC0035131
ractcaattataa

SEQ ID NO: 140229 - DNA, 13 bp, Artificial Sequence
  Oligonucleotide for detection of SNP TSC0035131
ttataagtgagty

SEQ ID NO: 140230 - DNA, 13 bp, Artificial Sequence
  Oligonucleotide for detection of SNP TSC0035131
ractcacttataa

SEQ ID NO: 140231 - DNA, 13 bp, Artificial Sequence
  Oligonucleotide for detection of SNP TSC0035132
atagttgaataty

SEQ ID NO: 140232 - DNA, 13 bp, Artificial Sequence
  Oligonucleotide for detection of SNP TSC0035132
ratattcaactat

SEQ ID NO: 140233 - DNA, 13 bp, Artificial Sequence
  Oligonucleotide for detection of SNP TSC0035132
atagttaaataty

SEQ ID NO: 140234 - DNA, 13 bp, Artificial Sequence
  Oligonucleotide for detection of SNP TSC0035132
ratatttaactat

SEQ ID NO: 140235 - DNA, 13 bp, Artificial Sequence
  Oligonucleotide for detection of SNP TSC0035134
ttttagattagag

SEQ ID NO: 140236 - DNA, 13 bp, Artificial Sequence
  Oligonucleotide for detection of SNP TSC0035134
ctctaatctaaaa

SEQ ID NO: 140237 - DNA, 13 bp, Artificial Sequence
  Oligonucleotide for detection of SNP TSC0035134
ttttagtttagag

SEQ ID NO: 140238 - DNA, 13 bp, Artificial Sequence
  Oligonucleotide for detection of SNP TSC0035134
ctctaaactaaaa

SEQ ID NO: 140239 - DNA, 13 bp, Artificial Sequence
  Oligonucleotide for detection of SNP TSC0035134
ttttggtttagag

SEQ ID NO: 140240 - DNA, 13 bp, Artificial Sequence
  Oligonucleotide for detection of SNP TSC0035134
ctctaaaccaaaa

SEQ ID NO: 140241 - DNA, 13 bp, Artificial Sequence
  Oligonucleotide for detection of SNP TSC0035134
ttttgggttagag

SEQ ID NO: 140242 - DNA, 13 bp, Artificial Sequence
  Oligonucleotide for detection of SNP TSC0035134
ctctaacccaaaa

SEQ ID NO: 140243 - DNA, 13 bp, Artificial Sequence
  Oligonucleotide for detection of SNP TSC0035135
tgtaaatgtgaaa

SEQ ID NO: 140244 - DNA, 13 bp, Artificial Sequence
  Oligonucleotide for detection of SNP TSC0035135
tttcacatttaca

SEQ ID NO: 140245 - DNA, 13 bp, Artificial Sequence
  Oligonucleotide for detection of SNP TSC0035135
tgtaaaagtgaaa

SEQ ID NO: 140246 - DNA, 13 bp, Artificial Sequence
  Oligonucleotide for detection of SNP TSC0035135
tttcacttttaca

SEQ ID NO: 140247 - DNA, 13 bp, Artificial Sequence
  Oligonucleotide for detection of SNP TSC0035136
tagtttgttaggy

SEQ ID NO: 140248 - DNA, 13 bp, Artificial Sequence
  Oligonucleotide for detection of SNP TSC0035136
rcctaacaaacta

SEQ ID NO: 140249 - DNA, 13 bp, Artificial Sequence
  Oligonucleotide for detection of SNP TSC0035136
tagttttttaggy

SEQ ID NO: 140250 - DNA, 13 bp, Artificial Sequence
  Oligonucleotide for detection of SNP TSC0035136
rcctaaaaaacta

SEQ ID NO: 140251 - DNA, 13 bp, Artificial Sequence
  Oligonucleotide for detection of SNP TSC0035136
gtttggtaaatta

SEQ ID NO: 140252 - DNA, 13 bp, Artificial Sequence
  Oligonucleotide for detection of SNP TSC0035136
taatttaccaaac

SEQ ID NO: 140253 - DNA, 13 bp, Artificial Sequence
  Oligonucleotide for detection of SNP TSC0035136
gtttggaaaatta

SEQ ID NO: 140254 - DNA, 13 bp, Artificial Sequence
  Oligonucleotide for detection of SNP TSC0035136
taattttccaaac

SEQ ID NO: 140255 - DNA, 13 bp, Artificial Sequence
  Oligonucleotide for detection of SNP TSC0035140
gattattggtatg

SEQ ID NO: 140256 - DNA, 13 bp, Artificial Sequence
  Oligonucleotide for detection of SNP TSC0035140
cataccaataatc

SEQ ID NO: 140257 - DNA, 13 bp, Artificial Sequence
  Oligonucleotide for detection of SNP TSC0035140
gattatcggtatg

SEQ ID NO: 140258 - DNA, 13 bp, Artificial Sequence
  Oligonucleotide for detection of SNP TSC0035140
cataccgataatc

SEQ ID NO: 140259 - DNA, 13 bp, Artificial Sequence
  Oligonucleotide for detection of SNP TSC0035140
tatgttggtaaty

SEQ ID NO: 140260 - DNA, 13 bp, Artificial Sequence
  Oligonucleotide for detection of SNP TSC0035140
rattaccaacata

SEQ ID NO: 140261 - DNA, 13 bp, Artificial Sequence
  Oligonucleotide for detection of SNP TSC0035140
tatgttagtaaty

SEQ ID NO: 140262 - DNA, 13 bp, Artificial Sequence
  Oligonucleotide for detection of SNP TSC0035140
rattactaacata

SEQ ID NO: 140263 - DNA, 13 bp, Artificial Sequence
  Oligonucleotide for detection of SNP TSC0035140
tatgtcggtaaty

SEQ ID NO: 140264 - DNA, 13 bp, Artificial Sequence
  Oligonucleotide for detection of SNP TSC0035140
rattaccgacata

SEQ ID NO: 140265 - DNA, 13 bp, Artificial Sequence
  Oligonucleotide for detection of SNP TSC0035141
aaattttggaatg

SEQ ID NO: 140266 - DNA, 13 bp, Artificial Sequence
  Oligonucleotide for detection of SNP TSC0035141
cattccaaaattt

SEQ ID NO: 140267 - DNA, 13 bp, Artificial Sequence
  Oligonucleotide for detection of SNP TSC0035141
aaatttcggaatg

SEQ ID NO: 140268 - DNA, 13 bp, Artificial Sequence
  Oligonucleotide for detection of SNP TSC0035141
cattccgaaattt

SEQ ID NO: 140269 - DNA, 13 bp, Artificial Sequence
  Oligonucleotide for detection of SNP TSC0035141
tattttggagttt

SEQ ID NO: 140270 - DNA, 13 bp, Artificial Sequence
  Oligonucleotide for detection of SNP TSC0035141
aaactccaaaata

SEQ ID NO: 140271 - DNA, 13 bp, Artificial Sequence
  Oligonucleotide for detection of SNP TSC0035141
tattttagagttt

SEQ ID NO: 140272 - DNA, 13 bp, Artificial Sequence
  Oligonucleotide for detection of SNP TSC0035141
aaactctaaaata

SEQ ID NO: 140273 - DNA, 13 bp, Artificial Sequence
  Oligonucleotide for detection of SNP TSC0035141
tatttcggagttt

SEQ ID NO: 140274 - DNA, 13 bp, Artificial Sequence
  Oligonucleotide for detection of SNP TSC0035141
aaactccgaaata

SEQ ID NO: 140275 - DNA, 13 bp, Artificial Sequence
  Oligonucleotide for detection of SNP TSC0035147
tatgtggtagagt

SEQ ID NO: 140276 - DNA, 13 bp, Artificial Sequence
  Oligonucleotide for detection of SNP TSC0035147
actctaccacata

SEQ ID NO: 140277 - DNA, 13 bp, Artificial Sequence
  Oligonucleotide for detection of SNP TSC0035147
tatgtgatagagt

SEQ ID NO: 140278 - DNA, 13 bp, Artificial Sequence
  Oligonucleotide for detection of SNP TSC0035147
actctatcacata

SEQ ID NO: 140279 - DNA, 13 bp, Artificial Sequence
  Oligonucleotide for detection of SNP TSC0035150
ggttttaggtaga

SEQ ID NO: 140280 - DNA, 13 bp, Artificial Sequence
  Oligonucleotide for detection of SNP TSC0035150
tctacctaaaacc

SEQ ID NO: 140281 - DNA, 13 bp, Artificial Sequence
  Oligonucleotide for detection of SNP TSC0035150
ggttttgggtaga

SEQ ID NO: 140282 - DNA, 13 bp, Artificial Sequence
  Oligonucleotide for detection of SNP TSC0035150
tctacccaaaacc

SEQ ID NO: 140283 - DNA, 13 bp, Artificial Sequence
  Oligonucleotide for detection of SNP TSC0035150
ggtttcgggtaga

SEQ ID NO: 140284 - DNA, 13 bp, Artificial Sequence
  Oligonucleotide for detection of SNP TSC0035150
tctacccgaaacc

SEQ ID NO: 140285 - DNA, 13 bp, Artificial Sequence
  Oligonucleotide for detection of SNP TSC0035150
tttgtttggaaty

SEQ ID NO: 140286 - DNA, 13 bp, Artificial Sequence
  Oligonucleotide for detection of SNP TSC0035150
rattccaaacaaa

SEQ ID NO: 140287 - DNA, 13 bp, Artificial Sequence
  Oligonucleotide for detection of SNP TSC0035150
tttgttcggaaty

SEQ ID NO: 140288 - DNA, 13 bp, Artificial Sequence
  Oligonucleotide for detection of SNP TSC0035150
rattccgaacaaa

SEQ ID NO: 140289 - DNA, 13 bp, Artificial Sequence
  Oligonucleotide for detection of SNP TSC0035151
gaggagtgttttt

SEQ ID NO: 140290 - DNA, 13 bp, Artificial Sequence
  Oligonucleotide for detection of SNP TSC0035151
aaaaacactcctc

SEQ ID NO: 140291 - DNA, 13 bp, Artificial Sequence
  Oligonucleotide for detection of SNP TSC0035151
gaggagggttttt

SEQ ID NO: 140292 - DNA, 13 bp, Artificial Sequence
  Oligonucleotide for detection of SNP TSC0035151
aaaaaccctcctc

SEQ ID NO: 140293 - DNA, 13 bp, Artificial Sequence
  Oligonucleotide for detection of SNP TSC0035151
gaggagcgttttt

SEQ ID NO: 140294 - DNA, 13 bp, Artificial Sequence
  Oligonucleotide for detection of SNP TSC0035151
aaaaacgctcctc

SEQ ID NO: 140295 - DNA, 13 bp, Artificial Sequence
  Oligonucleotide for detection of SNP TSC0035151
agagatgttttty

SEQ ID NO: 140296 - DNA, 13 bp, Artificial Sequence
  Oligonucleotide for detection of SNP TSC0035151
raaaaacatctct

SEQ ID NO: 140297 - DNA, 13 bp, Artificial Sequence
  Oligonucleotide for detection of SNP TSC0035151
agagattttttty

SEQ ID NO: 140298 - DNA, 13 bp, Artificial Sequence
  Oligonucleotide for detection of SNP TSC0035151
raaaaaaatctct

SEQ ID NO: 140299 - DNA, 13 bp, Artificial Sequence
  Oligonucleotide for detection of SNP TSC0035151
agagacgttttty

SEQ ID NO: 140300 - DNA, 13 bp, Artificial Sequence
  Oligonucleotide for detection of SNP TSC0035151
raaaaacgtctct

SEQ ID NO: 140301 - DNA, 13 bp, Artificial Sequence
  Oligonucleotide for detection of SNP TSC0035155
gtgtggagtaggy

SEQ ID NO: 140302 - DNA, 13 bp, Artificial Sequence
  Oligonucleotide for detection of SNP TSC0035155
rcctactccacac

SEQ ID NO: 140303 - DNA, 13 bp, Artificial Sequence
  Oligonucleotide for detection of SNP TSC0035155
gtgtggggtaggy

SEQ ID NO: 140304 - DNA, 13 bp, Artificial Sequence
  Oligonucleotide for detection of SNP TSC0035155
rcctaccccacac

SEQ ID NO: 140305 - DNA, 13 bp, Artificial Sequence
  Oligonucleotide for detection of SNP TSC0035157
ataatatagaatg

SEQ ID NO: 140306 - DNA, 13 bp, Artificial Sequence
  Oligonucleotide for detection of SNP TSC0035157
cattctatattat

SEQ ID NO: 140307 - DNA, 13 bp, Artificial Sequence
  Oligonucleotide for detection of SNP TSC0035157
ataatagagaatg

SEQ ID NO: 140308 - DNA, 13 bp, Artificial Sequence
  Oligonucleotide for detection of SNP TSC0035157
cattctctattat

SEQ ID NO: 140309 - DNA, 13 bp, Artificial Sequence
  Oligonucleotide for detection of SNP TSC0035157
tattttgtattat

SEQ ID NO: 140310 - DNA, 13 bp, Artificial Sequence
  Oligonucleotide for detection of SNP TSC0035157
ataatacaaaata

SEQ ID NO: 140311 - DNA, 13 bp, Artificial Sequence
  Oligonucleotide for detection of SNP TSC0035159
tatataggtatat

SEQ ID NO: 140312 - DNA, 13 bp, Artificial Sequence
  Oligonucleotide for detection of SNP TSC0035159
atatacctatata

SEQ ID NO: 140313 - DNA, 13 bp, Artificial Sequence
  Oligonucleotide for detection of SNP TSC0035167
tttttagaattay

SEQ ID NO: 140314 - DNA, 13 bp, Artificial Sequence
  Oligonucleotide for detection of SNP TSC0035167
rtaattctaaaaa

SEQ ID NO: 140315 - DNA, 13 bp, Artificial Sequence
  Oligonucleotide for detection of SNP TSC0035167
tttttaaaattay

SEQ ID NO: 140316 - DNA, 13 bp, Artificial Sequence
  Oligonucleotide for detection of SNP TSC0035167
rtaattttaaaaa

SEQ ID NO: 140317 - DNA, 13 bp, Artificial Sequence
  Oligonucleotide for detection of SNP TSC0035168
gaatgtagatgty

SEQ ID NO: 140318 - DNA, 13 bp, Artificial Sequence
  Oligonucleotide for detection of SNP TSC0035168
racatctacattc

SEQ ID NO: 140319 - DNA, 13 bp, Artificial Sequence
  Oligonucleotide for detection of SNP TSC0035168
gaatgtggatgty

SEQ ID NO: 140320 - DNA, 13 bp, Artificial Sequence
  Oligonucleotide for detection of SNP TSC0035168
racatccacattc

SEQ ID NO: 140321 - DNA, 13 bp, Artificial Sequence
  Oligonucleotide for detection of SNP TSC0035169
gtttttagaatty

SEQ ID NO: 140322 - DNA, 13 bp, Artificial Sequence
  Oligonucleotide for detection of SNP TSC0035169
raattctaaaaac

SEQ ID NO: 140323 - DNA, 13 bp, Artificial Sequence
  Oligonucleotide for detection of SNP TSC0035169
gttttcggaatty

SEQ ID NO: 140324 - DNA, 13 bp, Artificial Sequence
  Oligonucleotide for detection of SNP TSC0035169
raattccgaaaac

SEQ ID NO: 140325 - DNA, 13 bp, Artificial Sequence
  Oligonucleotide for detection of SNP TSC0035169
gagttttgggggy

SEQ ID NO: 140326 - DNA, 13 bp, Artificial Sequence
  Oligonucleotide for detection of SNP TSC0035169
rcccccaaaactc

SEQ ID NO: 140327 - DNA, 13 bp, Artificial Sequence
  Oligonucleotide for detection of SNP TSC0035169
gagtttcgggggy

SEQ ID NO: 140328 - DNA, 13 bp, Artificial Sequence
  Oligonucleotide for detection of SNP TSC0035169
rcccccgaaactc

SEQ ID NO: 140329 - DNA, 13 bp, Artificial Sequence
  Oligonucleotide for detection of SNP TSC0035174
gaaaatatattgg

SEQ ID NO: 140330 - DNA, 13 bp, Artificial Sequence
  Oligonucleotide for detection of SNP TSC0035174
ccaatatattttc

SEQ ID NO: 140331 - DNA, 13 bp, Artificial Sequence
  Oligonucleotide for detection of SNP TSC0035174
gaaaatgtattgg

SEQ ID NO: 140332 - DNA, 13 bp, Artificial Sequence
  Oligonucleotide for detection of SNP TSC0035174
ccaatacattttc

SEQ ID NO: 140333 - DNA, 13 bp, Artificial Sequence
  Oligonucleotide for detection of SNP TSC0035176
ttggttaattgta

SEQ ID NO: 140334 - DNA, 13 bp, Artificial Sequence
  Oligonucleotide for detection of SNP TSC0035176
tacaattaaccaa

SEQ ID NO: 140335 - DNA, 13 bp, Artificial Sequence
  Oligonucleotide for detection of SNP TSC0035176
tcggttaattgta

SEQ ID NO: 140336 - DNA, 13 bp, Artificial Sequence
  Oligonucleotide for detection of SNP TSC0035176
tacaattaaccga

SEQ ID NO: 140337 - DNA, 13 bp, Artificial Sequence
  Oligonucleotide for detection of SNP TSC0035176
tcggtttattgta

SEQ ID NO: 140338 - DNA, 13 bp, Artificial Sequence
  Oligonucleotide for detection of SNP TSC0035176
tacaataaaccga

SEQ ID NO: 140339 - DNA, 13 bp, Artificial Sequence
  Oligonucleotide for detection of SNP TSC0035176
tgtagttagttga

SEQ ID NO: 140340 - DNA, 13 bp, Artificial Sequence
  Oligonucleotide for detection of SNP TSC0035176
tcaactaactaca

SEQ ID NO: 140341 - DNA, 13 bp, Artificial Sequence
  Oligonucleotide for detection of SNP TSC0035176
tgtagttagtcga

SEQ ID NO: 140342 - DNA, 13 bp, Artificial Sequence
  Oligonucleotide for detection of SNP TSC0035176
tcgactaactaca

SEQ ID NO: 140343 - DNA, 13 bp, Artificial Sequence
  Oligonucleotide for detection of SNP TSC0035176
tgtagtgagtcga

SEQ ID NO: 140344 - DNA, 13 bp, Artificial Sequence
  Oligonucleotide for detection of SNP TSC0035176
tcgactcactaca

SEQ ID NO: 140345 - DNA, 13 bp, Artificial Sequence
  Oligonucleotide for detection of SNP TSC0035179
aattgggagtgay

SEQ ID NO: 140346 - DNA, 13 bp, Artificial Sequence
  Oligonucleotide for detection of SNP TSC0035179
rtcactcccaatt

SEQ ID NO: 140347 - DNA, 13 bp, Artificial Sequence
  Oligonucleotide for detection of SNP TSC0035179
aattggaagtgay

SEQ ID NO: 140348 - DNA, 13 bp, Artificial Sequence
  Oligonucleotide for detection of SNP TSC0035179
rtcacttccaatt

SEQ ID NO: 140349 - DNA, 13 bp, Artificial Sequence
  Oligonucleotide for detection of SNP TSC0035179
aattgggagcgay

SEQ ID NO: 140350 - DNA, 13 bp, Artificial Sequence
  Oligonucleotide for detection of SNP TSC0035179
rtcgctcccaatt

SEQ ID NO: 140351 - DNA, 13 bp, Artificial Sequence
  Oligonucleotide for detection of SNP TSC0035179
aattggaagcgay

SEQ ID NO: 140352 - DNA, 13 bp, Artificial Sequence
  Oligonucleotide for detection of SNP TSC0035179
rtcgcttccaatt

SEQ ID NO: 140353 - DNA, 13 bp, Artificial Sequence
  Oligonucleotide for detection of SNP TSC0035180
aatatttggagga

SEQ ID NO: 140354 - DNA, 13 bp, Artificial Sequence
  Oligonucleotide for detection of SNP TSC0035180
tcctccaaatatt

SEQ ID NO: 140355 - DNA, 13 bp, Artificial Sequence
  Oligonucleotide for detection of SNP TSC0035180
aatattcggagga

SEQ ID NO: 140356 - DNA, 13 bp, Artificial Sequence
  Oligonucleotide for detection of SNP TSC0035180
tcctccgaatatt

SEQ ID NO: 140357 - DNA, 13 bp, Artificial Sequence
  Oligonucleotide for detection of SNP TSC0035180
ttttttggatgtt

SEQ ID NO: 140358 - DNA, 13 bp, Artificial Sequence
  Oligonucleotide for detection of SNP TSC0035180
aacatccaaaaaa

SEQ ID NO: 140359 - DNA, 13 bp, Artificial Sequence
  Oligonucleotide for detection of SNP TSC0035180
ttttttagatgtt

SEQ ID NO: 140360 - DNA, 13 bp, Artificial Sequence
  Oligonucleotide for detection of SNP TSC0035180
aacatctaaaaaa

SEQ ID NO: 140361 - DNA, 13 bp, Artificial Sequence
  Oligonucleotide for detection of SNP TSC0035180
tttttcggatgtt

SEQ ID NO: 140362 - DNA, 13 bp, Artificial Sequence
  Oligonucleotide for detection of SNP TSC0035180
aacatccgaaaaa

SEQ ID NO: 140363 - DNA, 13 bp, Artificial Sequence
  Oligonucleotide for detection of SNP TSC0035181
aaaatagtagaaa

SEQ ID NO: 140364 - DNA, 13 bp, Artificial Sequence
  Oligonucleotide for detection of SNP TSC0035181
tttctactatttt

SEQ ID NO: 140365 - DNA, 13 bp, Artificial Sequence
  Oligonucleotide for detection of SNP TSC0035181
aaaataatagaaa

SEQ ID NO: 140366 - DNA, 13 bp, Artificial Sequence
  Oligonucleotide for detection of SNP TSC0035181
tttctattatttt

SEQ ID NO: 140367 - DNA, 13 bp, Artificial Sequence
  Oligonucleotide for detection of SNP TSC0035182
ggatatatagggt

SEQ ID NO: 140368 - DNA, 13 bp, Artificial Sequence
  Oligonucleotide for detection of SNP TSC0035182
accctatatatcc

SEQ ID NO: 140369 - DNA, 13 bp, Artificial Sequence
  Oligonucleotide for detection of SNP TSC0035182
ggatatgtagggt

SEQ ID NO: 140370 - DNA, 13 bp, Artificial Sequence
  Oligonucleotide for detection of SNP TSC0035182
accctacatatcc

SEQ ID NO: 140371 - DNA, 13 bp, Artificial Sequence
  Oligonucleotide for detection of SNP TSC0035182
ggatacgtagggt

SEQ ID NO: 140372 - DNA, 13 bp, Artificial Sequence
  Oligonucleotide for detection of SNP TSC0035182
accctacgtatcc

SEQ ID NO: 140373 - DNA, 13 bp, Artificial Sequence
  Oligonucleotide for detection of SNP TSC0035182
attttatgtatty

SEQ ID NO: 140374 - DNA, 13 bp, Artificial Sequence
  Oligonucleotide for detection of SNP TSC0035182
raatacataaaat

SEQ ID NO: 140375 - DNA, 13 bp, Artificial Sequence
  Oligonucleotide for detection of SNP TSC0035182
attttacgtatty

SEQ ID NO: 140376 - DNA, 13 bp, Artificial Sequence
  Oligonucleotide for detection of SNP TSC0035182
raatacgtaaaat

SEQ ID NO: 140377 - DNA, 13 bp, Artificial Sequence
  Oligonucleotide for detection of SNP TSC0035187
aaaaaggttttty

SEQ ID NO: 140378 - DNA, 13 bp, Artificial Sequence
  Oligonucleotide for detection of SNP TSC0035187
raaaaaccttttt

SEQ ID NO: 140379 - DNA, 13 bp, Artificial Sequence
  Oligonucleotide for detection of SNP TSC0035187
aaaaagtttttty

SEQ ID NO: 140380 - DNA, 13 bp, Artificial Sequence
  Oligonucleotide for detection of SNP TSC0035187
raaaaaacttttt

SEQ ID NO: 140381 - DNA, 13 bp, Artificial Sequence
  Oligonucleotide for detection of SNP TSC0035187
gggggattttttt

SEQ ID NO: 140382 - DNA, 13 bp, Artificial Sequence
  Oligonucleotide for detection of SNP TSC0035187
aaaaaaatccccc

SEQ ID NO: 140383 - DNA, 13 bp, Artificial Sequence
  Oligonucleotide for detection of SNP TSC0035187
gggggaatttttt

SEQ ID NO: 140384 - DNA, 13 bp, Artificial Sequence
  Oligonucleotide for detection of SNP TSC0035187
aaaaaattccccc

SEQ ID NO: 140385 - DNA, 13 bp, Artificial Sequence
  Oligonucleotide for detection of SNP TSC0035188
taaaattgttttt

SEQ ID NO: 140386 - DNA, 13 bp, Artificial Sequence
  Oligonucleotide for detection of SNP TSC0035188
aaaaacaatttta

SEQ ID NO: 140387 - DNA, 13 bp, Artificial Sequence
  Oligonucleotide for detection of SNP TSC0035188
taaaatggttttt

SEQ ID NO: 140388 - DNA, 13 bp, Artificial Sequence
  Oligonucleotide for detection of SNP TSC0035188
aaaaaccatttta

SEQ ID NO: 140389 - DNA, 13 bp, Artificial Sequence
  Oligonucleotide for detection of SNP TSC0035188
taaaatcgttttt

SEQ ID NO: 140390 - DNA, 13 bp, Artificial Sequence
  Oligonucleotide for detection of SNP TSC0035188
aaaaacgatttta

SEQ ID NO: 140391 - DNA, 13 bp, Artificial Sequence
  Oligonucleotide for detection of SNP TSC0035188
taaaacggttttt

SEQ ID NO: 140392 - DNA, 13 bp, Artificial Sequence
  Oligonucleotide for detection of SNP TSC0035188
aaaaaccgtttta

SEQ ID NO: 140393 - DNA, 13 bp, Artificial Sequence
  Oligonucleotide for detection of SNP TSC0035188
aagaatggtttta

SEQ ID NO: 140394 - DNA, 13 bp, Artificial Sequence
  Oligonucleotide for detection of SNP TSC0035188
taaaaccattctt

SEQ ID NO: 140395 - DNA, 13 bp, Artificial Sequence
  Oligonucleotide for detection of SNP TSC0035188
aagaattgtttta

SEQ ID NO: 140396 - DNA, 13 bp, Artificial Sequence
  Oligonucleotide for detection of SNP TSC0035188
taaaacaattctt

SEQ ID NO: 140397 - DNA, 13 bp, Artificial Sequence
  Oligonucleotide for detection of SNP TSC0035188
aagaacggtttta

SEQ ID NO: 140398 - DNA, 13 bp, Artificial Sequence
  Oligonucleotide for detection of SNP TSC0035188
taaaaccgttctt

SEQ ID NO: 140399 - DNA, 13 bp, Artificial Sequence
  Oligonucleotide for detection of SNP TSC0035188
aagaatcgtttta

SEQ ID NO: 140400 - DNA, 13 bp, Artificial Sequence
  Oligonucleotide for detection of SNP TSC0035188
taaaacgattctt

SEQ ID NO: 140401 - DNA, 13 bp, Artificial Sequence
  Oligonucleotide for detection of SNP TSC0035189
taggaagttaata

SEQ ID NO: 140402 - DNA, 13 bp, Artificial Sequence
  Oligonucleotide for detection of SNP TSC0035189
tattaacttccta

SEQ ID NO: 140403 - DNA, 13 bp, Artificial Sequence
  Oligonucleotide for detection of SNP TSC0035189
taggaaattaata

SEQ ID NO: 140404 - DNA, 13 bp, Artificial Sequence
  Oligonucleotide for detection of SNP TSC0035189
tattaatttccta

SEQ ID NO: 140405 - DNA, 13 bp, Artificial Sequence
  Oligonucleotide for detection of SNP TSC0035192
ttgtttgtagaaa

SEQ ID NO: 140406 - DNA, 13 bp, Artificial Sequence
  Oligonucleotide for detection of SNP TSC0035192
tttctacaaacaa

SEQ ID NO: 140407 - DNA, 13 bp, Artificial Sequence
  Oligonucleotide for detection of SNP TSC0035192
ttgtttatagaaa

SEQ ID NO: 140408 - DNA, 13 bp, Artificial Sequence
  Oligonucleotide for detection of SNP TSC0035192
tttctataaacaa

SEQ ID NO: 140409 - DNA, 13 bp, Artificial Sequence
  Oligonucleotide for detection of SNP TSC0035195
agtgttgtttttt

SEQ ID NO: 140410 - DNA, 13 bp, Artificial Sequence
  Oligonucleotide for detection of SNP TSC0035195
aaaaaacaacact

SEQ ID NO: 140411 - DNA, 13 bp, Artificial Sequence
  Oligonucleotide for detection of SNP TSC0035195
agtgttatttttt

SEQ ID NO: 140412 - DNA, 13 bp, Artificial Sequence
  Oligonucleotide for detection of SNP TSC0035195
aaaaaataacact

SEQ ID NO: 140413 - DNA, 13 bp, Artificial Sequence
  Oligonucleotide for detection of SNP TSC0035196
gaatatagggaga

SEQ ID NO: 140414 - DNA, 13 bp, Artificial Sequence
  Oligonucleotide for detection of SNP TSC0035196
tctccctatattc

SEQ ID NO: 140415 - DNA, 13 bp, Artificial Sequence
  Oligonucleotide for detection of SNP TSC0035196
gaatatggggaga

SEQ ID NO: 140416 - DNA, 13 bp, Artificial Sequence
  Oligonucleotide for detection of SNP TSC0035196
tctccccatattc

SEQ ID NO: 140417 - DNA, 13 bp, Artificial Sequence
  Oligonucleotide for detection of SNP TSC0035196
gaatacggggaga

SEQ ID NO: 140418 - DNA, 13 bp, Artificial Sequence
  Oligonucleotide for detection of SNP TSC0035196
tctccccgtattc

SEQ ID NO: 140419 - DNA, 13 bp, Artificial Sequence
  Oligonucleotide for detection of SNP TSC0035196
ttttttcgtgtty

SEQ ID NO: 140420 - DNA, 13 bp, Artificial Sequence
  Oligonucleotide for detection of SNP TSC0035196
raacacgaaaaaa

SEQ ID NO: 140421 - DNA, 13 bp, Artificial Sequence
  Oligonucleotide for detection of SNP TSC0035198
gatttaaagttty

SEQ ID NO: 140422 - DNA, 13 bp, Artificial Sequence
  Oligonucleotide for detection of SNP TSC0035198
raaactttaaatc

SEQ ID NO: 140423 - DNA, 13 bp, Artificial Sequence
  Oligonucleotide for detection of SNP TSC0035198
gatttagagttty

SEQ ID NO: 140424 - DNA, 13 bp, Artificial Sequence
  Oligonucleotide for detection of SNP TSC0035198
raaactctaaatc

SEQ ID NO: 140425 - DNA, 13 bp, Artificial Sequence
  Oligonucleotide for detection of SNP TSC0035199
ttttgttgtttaa

SEQ ID NO: 140426 - DNA, 13 bp, Artificial Sequence
  Oligonucleotide for detection of SNP TSC0035199
ttaaacaacaaaa

SEQ ID NO: 140427 - DNA, 13 bp, Artificial Sequence
  Oligonucleotide for detection of SNP TSC0035199
ttttgtggtttaa

SEQ ID NO: 140428 - DNA, 13 bp, Artificial Sequence
  Oligonucleotide for detection of SNP TSC0035199
ttaaaccacaaaa

SEQ ID NO: 140429 - DNA, 13 bp, Artificial Sequence
  Oligonucleotide for detection of SNP TSC0035199
tttcgttgtttaa

SEQ ID NO: 140430 - DNA, 13 bp, Artificial Sequence
  Oligonucleotide for detection of SNP TSC0035199
ttaaacaacgaaa

SEQ ID NO: 140431 - DNA, 13 bp, Artificial Sequence
  Oligonucleotide for detection of SNP TSC0035199
tttcgtggtttaa

SEQ ID NO: 140432 - DNA, 13 bp, Artificial Sequence
  Oligonucleotide for detection of SNP TSC0035199
ttaaaccacgaaa

SEQ ID NO: 140433 - DNA, 13 bp, Artificial Sequence
  Oligonucleotide for detection of SNP TSC0035199
ttttgtcgtttaa

SEQ ID NO: 140434 - DNA, 13 bp, Artificial Sequence
  Oligonucleotide for detection of SNP TSC0035199
ttaaacgacaaaa

SEQ ID NO: 140435 - DNA, 13 bp, Artificial Sequence
  Oligonucleotide for detection of SNP TSC0035199
ttttgcggtttaa

SEQ ID NO: 140436 - DNA, 13 bp, Artificial Sequence
  Oligonucleotide for detection of SNP TSC0035199
ttaaaccgcaaaa

SEQ ID NO: 140437 - DNA, 13 bp, Artificial Sequence
  Oligonucleotide for detection of SNP TSC0035199
tttcgtcgtttaa

SEQ ID NO: 140438 - DNA, 13 bp, Artificial Sequence
  Oligonucleotide for detection of SNP TSC0035199
ttaaacgacgaaa

SEQ ID NO: 140439 - DNA, 13 bp, Artificial Sequence
  Oligonucleotide for detection of SNP TSC0035199
tttcgcggtttaa

SEQ ID NO: 140440 - DNA, 13 bp, Artificial Sequence
  Oligonucleotide for detection of SNP TSC0035199
ttaaaccgcgaaa

SEQ ID NO: 140441 - DNA, 13 bp, Artificial Sequence
  Oligonucleotide for detection of SNP TSC0035199
ttgaatggtggag

SEQ ID NO: 140442 - DNA, 13 bp, Artificial Sequence
  Oligonucleotide for detection of SNP TSC0035199
ctccaccattcaa

SEQ ID NO: 140443 - DNA, 13 bp, Artificial Sequence
  Oligonucleotide for detection of SNP TSC0035199
ttgaattgtggag

SEQ ID NO: 140444 - DNA, 13 bp, Artificial Sequence
  Oligonucleotide for detection of SNP TSC0035199
ctccacaattcaa

SEQ ID NO: 140445 - DNA, 13 bp, Artificial Sequence
  Oligonucleotide for detection of SNP TSC0035199
ttgaacggtggag

SEQ ID NO: 140446 - DNA, 13 bp, Artificial Sequence
  Oligonucleotide for detection of SNP TSC0035199
ctccaccgttcaa

SEQ ID NO: 140447 - DNA, 13 bp, Artificial Sequence
  Oligonucleotide for detection of SNP TSC0035199
ttgaatcgtggag

SEQ ID NO: 140448 - DNA, 13 bp, Artificial Sequence
  Oligonucleotide for detection of SNP TSC0035199
ctccacgattcaa

SEQ ID NO: 140449 - DNA, 13 bp, Artificial Sequence
  Oligonucleotide for detection of SNP TSC0035199
ttgaatggcggag

SEQ ID NO: 140450 - DNA, 13 bp, Artificial Sequence
  Oligonucleotide for detection of SNP TSC0035199
ctccgccattcaa

SEQ ID NO: 140451 - DNA, 13 bp, Artificial Sequence
  Oligonucleotide for detection of SNP TSC0035199
ttgaattgcggag

SEQ ID NO: 140452 - DNA, 13 bp, Artificial Sequence
  Oligonucleotide for detection of SNP TSC0035199
ctccgcaattcaa

SEQ ID NO: 140453 - DNA, 13 bp, Artificial Sequence
  Oligonucleotide for detection of SNP TSC0035199
ttgaacggcggag

SEQ ID NO: 140454 - DNA, 13 bp, Artificial Sequence
  Oligonucleotide for detection of SNP TSC0035199
ctccgccgttcaa

SEQ ID NO: 140455 - DNA, 13 bp, Artificial Sequence
  Oligonucleotide for detection of SNP TSC0035199
ttgaatcgcggag

SEQ ID NO: 140456 - DNA, 13 bp, Artificial Sequence
  Oligonucleotide for detection of SNP TSC0035199
ctccgcgattcaa

SEQ ID NO: 140457 - DNA, 13 bp, Artificial Sequence
  Oligonucleotide for detection of SNP TSC0035200
gggagggtgtatg

SEQ ID NO: 140458 - DNA, 13 bp, Artificial Sequence
  Oligonucleotide for detection of SNP TSC0035200
catacaccctccc

SEQ ID NO: 140459 - DNA, 13 bp, Artificial Sequence
  Oligonucleotide for detection of SNP TSC0035200
gggaggatgtatg

SEQ ID NO: 140460 - DNA, 13 bp, Artificial Sequence
  Oligonucleotide for detection of SNP TSC0035200
catacatcctccc

SEQ ID NO: 140461 - DNA, 13 bp, Artificial Sequence
  Oligonucleotide for detection of SNP TSC0035200
gggagggcgtatg

SEQ ID NO: 140462 - DNA, 13 bp, Artificial Sequence
  Oligonucleotide for detection of SNP TSC0035200
catacgccctccc

SEQ ID NO: 140463 - DNA, 13 bp, Artificial Sequence
  Oligonucleotide for detection of SNP TSC0035200
gggaggacgtatg

SEQ ID NO: 140464 - DNA, 13 bp, Artificial Sequence
  Oligonucleotide for detection of SNP TSC0035200
catacgtcctccc

SEQ ID NO: 140465 - DNA, 13 bp, Artificial Sequence
  Oligonucleotide for detection of SNP TSC0035203
tgtaggatggagg

SEQ ID NO: 140466 - DNA, 13 bp, Artificial Sequence
  Oligonucleotide for detection of SNP TSC0035203
cctccatcctaca

SEQ ID NO: 140467 - DNA, 13 bp, Artificial Sequence
  Oligonucleotide for detection of SNP TSC0035203
tgtagggtggagg

SEQ ID NO: 140468 - DNA, 13 bp, Artificial Sequence
  Oligonucleotide for detection of SNP TSC0035203
cctccaccctaca

SEQ ID NO: 140469 - DNA, 13 bp, Artificial Sequence
  Oligonucleotide for detection of SNP TSC0035208
tggtataaataaa

SEQ ID NO: 140470 - DNA, 13 bp, Artificial Sequence
  Oligonucleotide for detection of SNP TSC0035208
tttatttatacca

SEQ ID NO: 140471 - DNA, 13 bp, Artificial Sequence
  Oligonucleotide for detection of SNP TSC0035208
tggtatgaataaa

SEQ ID NO: 140472 - DNA, 13 bp, Artificial Sequence
  Oligonucleotide for detection of SNP TSC0035208
tttattcatacca

SEQ ID NO: 140473 - DNA, 13 bp, Artificial Sequence
  Oligonucleotide for detection of SNP TSC0035214
gttttaagaggtg

SEQ ID NO: 140474 - DNA, 13 bp, Artificial Sequence
  Oligonucleotide for detection of SNP TSC0035214
cacctcttaaaac

SEQ ID NO: 140475 - DNA, 13 bp, Artificial Sequence
  Oligonucleotide for detection of SNP TSC0035214
gttttaggaggtg

SEQ ID NO: 140476 - DNA, 13 bp, Artificial Sequence
  Oligonucleotide for detection of SNP TSC0035214
cacctcctaaaac

SEQ ID NO: 140477 - DNA, 13 bp, Artificial Sequence
  Oligonucleotide for detection of SNP TSC0035215
taatttttttgty

SEQ ID NO: 140478 - DNA, 13 bp, Artificial Sequence
  Oligonucleotide for detection of SNP TSC0035215
racaaaaaaatta

SEQ ID NO: 140479 - DNA, 13 bp, Artificial Sequence
  Oligonucleotide for detection of SNP TSC0035215
ggtaggtgaattg

SEQ ID NO: 140480 - DNA, 13 bp, Artificial Sequence
  Oligonucleotide for detection of SNP TSC0035215
caattcacctacc

SEQ ID NO: 140481 - DNA, 13 bp, Artificial Sequence
  Oligonucleotide for detection of SNP TSC0035215
ggtaggcgaattg

SEQ ID NO: 140482 - DNA, 13 bp, Artificial Sequence
  Oligonucleotide for detection of SNP TSC0035215
caattcgcctacc

SEQ ID NO: 140483 - DNA, 13 bp, Artificial Sequence
  Oligonucleotide for detection of SNP TSC0035216
attggtatgtggt

SEQ ID NO: 140484 - DNA, 13 bp, Artificial Sequence
  Oligonucleotide for detection of SNP TSC0035216
accacataccaat

SEQ ID NO: 140485 - DNA, 13 bp, Artificial Sequence
  Oligonucleotide for detection of SNP TSC0035216
attggtgtgtggt

SEQ ID NO: 140486 - DNA, 13 bp, Artificial Sequence
  Oligonucleotide for detection of SNP TSC0035216
accacacaccaat

SEQ ID NO: 140487 - DNA, 13 bp, Artificial Sequence
  Oligonucleotide for detection of SNP TSC0035216
attggtatgcggt

SEQ ID NO: 140488 - DNA, 13 bp, Artificial Sequence
  Oligonucleotide for detection of SNP TSC0035216
accgcataccaat

SEQ ID NO: 140489 - DNA, 13 bp, Artificial Sequence
  Oligonucleotide for detection of SNP TSC0035216
attggtgtgcggt

SEQ ID NO: 140490 - DNA, 13 bp, Artificial Sequence
  Oligonucleotide for detection of SNP TSC0035216
accgcacaccaat

SEQ ID NO: 140491 - DNA, 13 bp, Artificial Sequence
  Oligonucleotide for detection of SNP TSC0035218
tttagtatattta

SEQ ID NO: 140492 - DNA, 13 bp, Artificial Sequence
  Oligonucleotide for detection of SNP TSC0035218
taaatatactaaa

SEQ ID NO: 140493 - DNA, 13 bp, Artificial Sequence
  Oligonucleotide for detection of SNP TSC0035218
tttagtgtattta

SEQ ID NO: 140494 - DNA, 13 bp, Artificial Sequence
  Oligonucleotide for detection of SNP TSC0035218
taaatacactaaa

SEQ ID NO: 140495 - DNA, 13 bp, Artificial Sequence
  Oligonucleotide for detection of SNP TSC0035218
tttagcgtattta

SEQ ID NO: 140496 - DNA, 13 bp, Artificial Sequence
  Oligonucleotide for detection of SNP TSC0035218
taaatacgctaaa

SEQ ID NO: 140497 - DNA, 13 bp, Artificial Sequence
  Oligonucleotide for detection of SNP TSC0035218
tagatgtgttaag

SEQ ID NO: 140498 - DNA, 13 bp, Artificial Sequence
  Oligonucleotide for detection of SNP TSC0035218
cttaacacatcta

SEQ ID NO: 140499 - DNA, 13 bp, Artificial Sequence
  Oligonucleotide for detection of SNP TSC0035218
tagatgcgttaag

SEQ ID NO: 140500 - DNA, 13 bp, Artificial Sequence
  Oligonucleotide for detection of SNP TSC0035218
cttaacgcatcta

SEQ ID NO: 140501 - DNA, 13 bp, Artificial Sequence
  Oligonucleotide for detection of SNP TSC0035222
gtaggtagtttgt

SEQ ID NO: 140502 - DNA, 13 bp, Artificial Sequence
  Oligonucleotide for detection of SNP TSC0035222
acaaactacctac

SEQ ID NO: 140503 - DNA, 13 bp, Artificial Sequence
  Oligonucleotide for detection of SNP TSC0035222
gtaggtggtttgt

SEQ ID NO: 140504 - DNA, 13 bp, Artificial Sequence
  Oligonucleotide for detection of SNP TSC0035222
acaaaccacctac

SEQ ID NO: 140505 - DNA, 13 bp, Artificial Sequence
  Oligonucleotide for detection of SNP TSC0035223
attaaatgggatg

SEQ ID NO: 140506 - DNA, 13 bp, Artificial Sequence
  Oligonucleotide for detection of SNP TSC0035223
catcccatttaat

SEQ ID NO: 140507 - DNA, 13 bp, Artificial Sequence
  Oligonucleotide for detection of SNP TSC0035223
attaaacgggatg

SEQ ID NO: 140508 - DNA, 13 bp, Artificial Sequence
  Oligonucleotide for detection of SNP TSC0035223
catcccgtttaat

SEQ ID NO: 140509 - DNA, 13 bp, Artificial Sequence
  Oligonucleotide for detection of SNP TSC0035223
tattttgtttggt

SEQ ID NO: 140510 - DNA, 13 bp, Artificial Sequence
  Oligonucleotide for detection of SNP TSC0035223
accaaacaaaata

SEQ ID NO: 140511 - DNA, 13 bp, Artificial Sequence
  Oligonucleotide for detection of SNP TSC0035223
tattttatttggt

SEQ ID NO: 140512 - DNA, 13 bp, Artificial Sequence
  Oligonucleotide for detection of SNP TSC0035223
accaaataaaata

SEQ ID NO: 140513 - DNA, 13 bp, Artificial Sequence
  Oligonucleotide for detection of SNP TSC0035223
tatttcgtttggt

SEQ ID NO: 140514 - DNA, 13 bp, Artificial Sequence
  Oligonucleotide for detection of SNP TSC0035223
accaaacgaaata

SEQ ID NO: 140515 - DNA, 13 bp, Artificial Sequence
  Oligonucleotide for detection of SNP TSC0035228
tttagggttatay

SEQ ID NO: 140516 - DNA, 13 bp, Artificial Sequence
  Oligonucleotide for detection of SNP TSC0035228
rtataaccctaaa

SEQ ID NO: 140517 - DNA, 13 bp, Artificial Sequence
  Oligonucleotide for detection of SNP TSC0035228
tttaggtttatay

SEQ ID NO: 140518 - DNA, 13 bp, Artificial Sequence
  Oligonucleotide for detection of SNP TSC0035228
rtataaacctaaa

SEQ ID NO: 140519 - DNA, 13 bp, Artificial Sequence
  Oligonucleotide for detection of SNP TSC0035228
gtgtgattttgag

SEQ ID NO: 140520 - DNA, 13 bp, Artificial Sequence
  Oligonucleotide for detection of SNP TSC0035228
ctcaaaatcacac

SEQ ID NO: 140521 - DNA, 13 bp, Artificial Sequence
  Oligonucleotide for detection of SNP TSC0035228
gtgtgaatttgag

SEQ ID NO: 140522 - DNA, 13 bp, Artificial Sequence
  Oligonucleotide for detection of SNP TSC0035228
ctcaaattcacac

SEQ ID NO: 140523 - DNA, 13 bp, Artificial Sequence
  Oligonucleotide for detection of SNP TSC0035229
tttttagtagtaa

SEQ ID NO: 140524 - DNA, 13 bp, Artificial Sequence
  Oligonucleotide for detection of SNP TSC0035229
ttactactaaaaa

SEQ ID NO: 140525 - DNA, 13 bp, Artificial Sequence
  Oligonucleotide for detection of SNP TSC0035229
tttttaatagtaa

SEQ ID NO: 140526 - DNA, 13 bp, Artificial Sequence
  Oligonucleotide for detection of SNP TSC0035229
ttactattaaaaa

SEQ ID NO: 140527 - DNA, 13 bp, Artificial Sequence
  Oligonucleotide for detection of SNP TSC0035230
taaggatgattty

SEQ ID NO: 140528 - DNA, 13 bp, Artificial Sequence
  Oligonucleotide for detection of SNP TSC0035230
raaatcatcctta

SEQ ID NO: 140529 - DNA, 13 bp, Artificial Sequence
  Oligonucleotide for detection of SNP TSC0035230
taaggacgattty

SEQ ID NO: 140530 - DNA, 13 bp, Artificial Sequence
  Oligonucleotide for detection of SNP TSC0035230
raaatcgtcctta

SEQ ID NO: 140531 - DNA, 13 bp, Artificial Sequence
  Oligonucleotide for detection of SNP TSC0035230
ggggttgtttttg

SEQ ID NO: 140532 - DNA, 13 bp, Artificial Sequence
  Oligonucleotide for detection of SNP TSC0035230
caaaaacaacccc

SEQ ID NO: 140533 - DNA, 13 bp, Artificial Sequence
  Oligonucleotide for detection of SNP TSC0035230
ggggttatttttg

SEQ ID NO: 140534 - DNA, 13 bp, Artificial Sequence
  Oligonucleotide for detection of SNP TSC0035230
caaaaataacccc

SEQ ID NO: 140535 - DNA, 13 bp, Artificial Sequence
  Oligonucleotide for detection of SNP TSC0035230
ggggtcgtttttg

SEQ ID NO: 140536 - DNA, 13 bp, Artificial Sequence
  Oligonucleotide for detection of SNP TSC0035230
caaaaacgacccc

SEQ ID NO: 140537 - DNA, 13 bp, Artificial Sequence
  Oligonucleotide for detection of SNP TSC0035231
agttttggttttg

SEQ ID NO: 140538 - DNA, 13 bp, Artificial Sequence
  Oligonucleotide for detection of SNP TSC0035231
caaaaccaaaact

SEQ ID NO: 140539 - DNA, 13 bp, Artificial Sequence
  Oligonucleotide for detection of SNP TSC0035231
agtttttgttttg

SEQ ID NO: 140540 - DNA, 13 bp, Artificial Sequence
  Oligonucleotide for detection of SNP TSC0035231
caaaacaaaaact

SEQ ID NO: 140541 - DNA, 13 bp, Artificial Sequence
  Oligonucleotide for detection of SNP TSC0035231
agtttcggttttg

SEQ ID NO: 140542 - DNA, 13 bp, Artificial Sequence
  Oligonucleotide for detection of SNP TSC0035231
caaaaccgaaact

SEQ ID NO: 140543 - DNA, 13 bp, Artificial Sequence
  Oligonucleotide for detection of SNP TSC0035231
taggattgagatt

SEQ ID NO: 140544 - DNA, 13 bp, Artificial Sequence
  Oligonucleotide for detection of SNP TSC0035231
aatctcaatccta

SEQ ID NO: 140545 - DNA, 13 bp, Artificial Sequence
  Oligonucleotide for detection of SNP TSC0035231
taggatagagatt

SEQ ID NO: 140546 - DNA, 13 bp, Artificial Sequence
  Oligonucleotide for detection of SNP TSC0035231
aatctctatccta

SEQ ID NO: 140547 - DNA, 13 bp, Artificial Sequence
  Oligonucleotide for detection of SNP TSC0035231
taggatcgagatt

SEQ ID NO: 140548 - DNA, 13 bp, Artificial Sequence
  Oligonucleotide for detection of SNP TSC0035231
aatctcgatccta

SEQ ID NO: 140549 - DNA, 13 bp, Artificial Sequence
  Oligonucleotide for detection of SNP TSC0035239
aagagagttttay

SEQ ID NO: 140550 - DNA, 13 bp, Artificial Sequence
  Oligonucleotide for detection of SNP TSC0035239
rtaaaactctctt

SEQ ID NO: 140551 - DNA, 13 bp, Artificial Sequence
  Oligonucleotide for detection of SNP TSC0035239
aagagaattttay

SEQ ID NO: 140552 - DNA, 13 bp, Artificial Sequence
  Oligonucleotide for detection of SNP TSC0035239
rtaaaattctctt

SEQ ID NO: 140553 - DNA, 13 bp, Artificial Sequence
  Oligonucleotide for detection of SNP TSC0035240
ttatgtatttgga

SEQ ID NO: 140554 - DNA, 13 bp, Artificial Sequence
  Oligonucleotide for detection of SNP TSC0035240
tccaaatacataa

SEQ ID NO: 140555 - DNA, 13 bp, Artificial Sequence
  Oligonucleotide for detection of SNP TSC0035240
ttatgtttttgga

SEQ ID NO: 140556 - DNA, 13 bp, Artificial Sequence
  Oligonucleotide for detection of SNP TSC0035240
tccaaaaacataa

SEQ ID NO: 140557 - DNA, 13 bp, Artificial Sequence
  Oligonucleotide for detection of SNP TSC0035240
tttagatatatgg

SEQ ID NO: 140558 - DNA, 13 bp, Artificial Sequence
  Oligonucleotide for detection of SNP TSC0035240
ccatatatctaaa

SEQ ID NO: 140559 - DNA, 13 bp, Artificial Sequence
  Oligonucleotide for detection of SNP TSC0035240
tttagagatatgg

SEQ ID NO: 140560 - DNA, 13 bp, Artificial Sequence
  Oligonucleotide for detection of SNP TSC0035240
ccatatctctaaa

SEQ ID NO: 140561 - DNA, 13 bp, Artificial Sequence
  Oligonucleotide for detection of SNP TSC0035243
tattttataatty

SEQ ID NO: 140562 - DNA, 13 bp, Artificial Sequence
  Oligonucleotide for detection of SNP TSC0035243
raattataaaata

SEQ ID NO: 140563 - DNA, 13 bp, Artificial Sequence
  Oligonucleotide for detection of SNP TSC0035243
tattttttaatty

SEQ ID NO: 140564 - DNA, 13 bp, Artificial Sequence
  Oligonucleotide for detection of SNP TSC0035243
raattaaaaaata

SEQ ID NO: 140565 - DNA, 13 bp, Artificial Sequence
  Oligonucleotide for detection of SNP TSC0035243
gaattatagaata

SEQ ID NO: 140566 - DNA, 13 bp, Artificial Sequence
  Oligonucleotide for detection of SNP TSC0035243
tattctataattc

SEQ ID NO: 140567 - DNA, 13 bp, Artificial Sequence
  Oligonucleotide for detection of SNP TSC0035243
gaattagagaata

SEQ ID NO: 140568 - DNA, 13 bp, Artificial Sequence
  Oligonucleotide for detection of SNP TSC0035243
tattctctaattc

SEQ ID NO: 140569 - DNA, 13 bp, Artificial Sequence
  Oligonucleotide for detection of SNP TSC0035244
gaaaaggagaaga

SEQ ID NO: 140570 - DNA, 13 bp, Artificial Sequence
  Oligonucleotide for detection of SNP TSC0035244
tcttctccttttc

SEQ ID NO: 140571 - DNA, 13 bp, Artificial Sequence
  Oligonucleotide for detection of SNP TSC0035244
gaaaagtagaaga

SEQ ID NO: 140572 - DNA, 13 bp, Artificial Sequence
  Oligonucleotide for detection of SNP TSC0035244
tcttctacttttc

SEQ ID NO: 140573 - DNA, 13 bp, Artificial Sequence
  Oligonucleotide for detection of SNP TSC0035245
tggtaagagggtg

SEQ ID NO: 140574 - DNA, 13 bp, Artificial Sequence
  Oligonucleotide for detection of SNP TSC0035245
caccctcttacca

SEQ ID NO: 140575 - DNA, 13 bp, Artificial Sequence
  Oligonucleotide for detection of SNP TSC0035245
tggtaaaagggtg

SEQ ID NO: 140576 - DNA, 13 bp, Artificial Sequence
  Oligonucleotide for detection of SNP TSC0035245
cacccttttacca

SEQ ID NO: 140577 - DNA, 13 bp, Artificial Sequence
  Oligonucleotide for detection of SNP TSC0035245
tggtaagagggcg

SEQ ID NO: 140578 - DNA, 13 bp, Artificial Sequence
  Oligonucleotide for detection of SNP TSC0035245
cgccctcttacca

SEQ ID NO: 140579 - DNA, 13 bp, Artificial Sequence
  Oligonucleotide for detection of SNP TSC0035245
tggtaaaagggcg

SEQ ID NO: 140580 - DNA, 13 bp, Artificial Sequence
  Oligonucleotide for detection of SNP TSC0035245
cgcccttttacca

SEQ ID NO: 140581 - DNA, 13 bp, Artificial Sequence
  Oligonucleotide for detection of SNP TSC0035246
gaatatgtggagy

SEQ ID NO: 140582 - DNA, 13 bp, Artificial Sequence
  Oligonucleotide for detection of SNP TSC0035246
rctccacatattc

SEQ ID NO: 140583 - DNA, 13 bp, Artificial Sequence
  Oligonucleotide for detection of SNP TSC0035246
gaatatatggagy

SEQ ID NO: 140584 - DNA, 13 bp, Artificial Sequence
  Oligonucleotide for detection of SNP TSC0035246
rctccatatattc

SEQ ID NO: 140585 - DNA, 13 bp, Artificial Sequence
  Oligonucleotide for detection of SNP TSC0035246
gaatacgtggagy

SEQ ID NO: 140586 - DNA, 13 bp, Artificial Sequence
  Oligonucleotide for detection of SNP TSC0035246
rctccacgtattc

SEQ ID NO: 140587 - DNA, 13 bp, Artificial Sequence
  Oligonucleotide for detection of SNP TSC0035247
gtgtattgtgtty

SEQ ID NO: 140588 - DNA, 13 bp, Artificial Sequence
  Oligonucleotide for detection of SNP TSC0035247
raacacaatacac

SEQ ID NO: 140589 - DNA, 13 bp, Artificial Sequence
  Oligonucleotide for detection of SNP TSC0035247
gtgtatcgtgtty

SEQ ID NO: 140590 - DNA, 13 bp, Artificial Sequence
  Oligonucleotide for detection of SNP TSC0035247
raacacgatacac

SEQ ID NO: 140591 - DNA, 13 bp, Artificial Sequence
  Oligonucleotide for detection of SNP TSC0035247
gtgtattgcgtty

SEQ ID NO: 140592 - DNA, 13 bp, Artificial Sequence
  Oligonucleotide for detection of SNP TSC0035247
raacgcaatacac

SEQ ID NO: 140593 - DNA, 13 bp, Artificial Sequence
  Oligonucleotide for detection of SNP TSC0035247
gtgtatggcgtty

SEQ ID NO: 140594 - DNA, 13 bp, Artificial Sequence
  Oligonucleotide for detection of SNP TSC0035247
raacgccatacac

SEQ ID NO: 140595 - DNA, 13 bp, Artificial Sequence
  Oligonucleotide for detection of SNP TSC0035247
gtgtatcgcgtty

SEQ ID NO: 140596 - DNA, 13 bp, Artificial Sequence
  Oligonucleotide for detection of SNP TSC0035247
raacgcgatacac

SEQ ID NO: 140597 - DNA, 13 bp, Artificial Sequence
  Oligonucleotide for detection of SNP TSC0035247
gtgtacggcgtty

SEQ ID NO: 140598 - DNA, 13 bp, Artificial Sequence
  Oligonucleotide for detection of SNP TSC0035247
raacgccgtacac

SEQ ID NO: 140599 - DNA, 13 bp, Artificial Sequence
  Oligonucleotide for detection of SNP TSC0035247
ggatgtggtgtay

SEQ ID NO: 140600 - DNA, 13 bp, Artificial Sequence
  Oligonucleotide for detection of SNP TSC0035247
rtacaccacatcc

SEQ ID NO: 140601 - DNA, 13 bp, Artificial Sequence
  Oligonucleotide for detection of SNP TSC0035247
ggatgttgtgtay

SEQ ID NO: 140602 - DNA, 13 bp, Artificial Sequence
  Oligonucleotide for detection of SNP TSC0035247
rtacacaacatcc

SEQ ID NO: 140603 - DNA, 13 bp, Artificial Sequence
  Oligonucleotide for detection of SNP TSC0035247
ggacgtggtgtay

SEQ ID NO: 140604 - DNA, 13 bp, Artificial Sequence
  Oligonucleotide for detection of SNP TSC0035247
rtacaccacgtcc

SEQ ID NO: 140605 - DNA, 13 bp, Artificial Sequence
  Oligonucleotide for detection of SNP TSC0035247
ggacgttgtgtay

SEQ ID NO: 140606 - DNA, 13 bp, Artificial Sequence
  Oligonucleotide for detection of SNP TSC0035247
rtacacaacgtcc

SEQ ID NO: 140607 - DNA, 13 bp, Artificial Sequence
  Oligonucleotide for detection of SNP TSC0035247
ggatgcggtgtay

SEQ ID NO: 140608 - DNA, 13 bp, Artificial Sequence
  Oligonucleotide for detection of SNP TSC0035247
rtacaccgcatcc

SEQ ID NO: 140609 - DNA, 13 bp, Artificial Sequence
  Oligonucleotide for detection of SNP TSC0035247
ggatgtcgtgtay

SEQ ID NO: 140610 - DNA, 13 bp, Artificial Sequence
  Oligonucleotide for detection of SNP TSC0035247
rtacacgacatcc

SEQ ID NO: 140611 - DNA, 13 bp, Artificial Sequence
  Oligonucleotide for detection of SNP TSC0035247
ggacgcggtgtay

SEQ ID NO: 140612 - DNA, 13 bp, Artificial Sequence
  Oligonucleotide for detection of SNP TSC0035247
rtacaccgcgtcc

SEQ ID NO: 140613 - DNA, 13 bp, Artificial Sequence
  Oligonucleotide for detection of SNP TSC0035247
ggacgtcgtgtay

SEQ ID NO: 140614 - DNA, 13 bp, Artificial Sequence
  Oligonucleotide for detection of SNP TSC0035247
rtacacgacgtcc

SEQ ID NO: 140615 - DNA, 13 bp, Artificial Sequence
  Oligonucleotide for detection of SNP TSC0035248
attggtagagttt

SEQ ID NO: 140616 - DNA, 13 bp, Artificial Sequence
  Oligonucleotide for detection of SNP TSC0035248
aaactctaccaat

SEQ ID NO: 140617 - DNA, 13 bp, Artificial Sequence
  Oligonucleotide for detection of SNP TSC0035248
attggtggagttt

SEQ ID NO: 140618 - DNA, 13 bp, Artificial Sequence
  Oligonucleotide for detection of SNP TSC0035248
aaactccaccaat

SEQ ID NO: 140619 - DNA, 13 bp, Artificial Sequence
  Oligonucleotide for detection of SNP TSC0035248
attggcggagttt

SEQ ID NO: 140620 - DNA, 13 bp, Artificial Sequence
  Oligonucleotide for detection of SNP TSC0035248
aaactccgccaat

SEQ ID NO: 140621 - DNA, 13 bp, Artificial Sequence
  Oligonucleotide for detection of SNP TSC0035248
aagttttgttagt

SEQ ID NO: 140622 - DNA, 13 bp, Artificial Sequence
  Oligonucleotide for detection of SNP TSC0035248
actaacaaaactt

SEQ ID NO: 140623 - DNA, 13 bp, Artificial Sequence
  Oligonucleotide for detection of SNP TSC0035248
aagtttcgttagt

SEQ ID NO: 140624 - DNA, 13 bp, Artificial Sequence
  Oligonucleotide for detection of SNP TSC0035248
actaacgaaactt

SEQ ID NO: 140625 - DNA, 13 bp, Artificial Sequence
  Oligonucleotide for detection of SNP TSC0035249
tttaggagaggtt

SEQ ID NO: 140626 - DNA, 13 bp, Artificial Sequence
  Oligonucleotide for detection of SNP TSC0035249
aacctctcctaaa

SEQ ID NO: 140627 - DNA, 13 bp, Artificial Sequence
  Oligonucleotide for detection of SNP TSC0035249
tttaggggaggtt

SEQ ID NO: 140628 - DNA, 13 bp, Artificial Sequence
  Oligonucleotide for detection of SNP TSC0035249
aacctcccctaaa

SEQ ID NO: 140629 - DNA, 13 bp, Artificial Sequence
  Oligonucleotide for detection of SNP TSC0035253
tagggtgtagtty

SEQ ID NO: 140630 - DNA, 13 bp, Artificial Sequence
  Oligonucleotide for detection of SNP TSC0035253
raactacacccta

SEQ ID NO: 140631 - DNA, 13 bp, Artificial Sequence
  Oligonucleotide for detection of SNP TSC0035253
tagggtatagtty

SEQ ID NO: 140632 - DNA, 13 bp, Artificial Sequence
  Oligonucleotide for detection of SNP TSC0035253
raactatacccta

SEQ ID NO: 140633 - DNA, 13 bp, Artificial Sequence
  Oligonucleotide for detection of SNP TSC0035254
aaggtatggatga

SEQ ID NO: 140634 - DNA, 13 bp, Artificial Sequence
  Oligonucleotide for detection of SNP TSC0035254
tcatccatacctt

SEQ ID NO: 140635 - DNA, 13 bp, Artificial Sequence
  Oligonucleotide for detection of SNP TSC0035254
aaggtacggatga

SEQ ID NO: 140636 - DNA, 13 bp, Artificial Sequence
  Oligonucleotide for detection of SNP TSC0035254
tcatccgtacctt

SEQ ID NO: 140637 - DNA, 13 bp, Artificial Sequence
  Oligonucleotide for detection of SNP TSC0035254
aaggtatggacga

SEQ ID NO: 140638 - DNA, 13 bp, Artificial Sequence
  Oligonucleotide for detection of SNP TSC0035254
tcgtccatacctt

SEQ ID NO: 140639 - DNA, 13 bp, Artificial Sequence
  Oligonucleotide for detection of SNP TSC0035254
aaggtacggacga

SEQ ID NO: 140640 - DNA, 13 bp, Artificial Sequence
  Oligonucleotide for detection of SNP TSC0035254
tcgtccgtacctt

SEQ ID NO: 140641 - DNA, 13 bp, Artificial Sequence
  Oligonucleotide for detection of SNP TSC0035254
ttgtttgtgtttt

SEQ ID NO: 140642 - DNA, 13 bp, Artificial Sequence
  Oligonucleotide for detection of SNP TSC0035254
aaaacacaaacaa

SEQ ID NO: 140643 - DNA, 13 bp, Artificial Sequence
  Oligonucleotide for detection of SNP TSC0035254
ttgtttatgtttt

SEQ ID NO: 140644 - DNA, 13 bp, Artificial Sequence
  Oligonucleotide for detection of SNP TSC0035254
aaaacataaacaa

SEQ ID NO: 140645 - DNA, 13 bp, Artificial Sequence
  Oligonucleotide for detection of SNP TSC0035254
tcgtttgtgtttt

SEQ ID NO: 140646 - DNA, 13 bp, Artificial Sequence
  Oligonucleotide for detection of SNP TSC0035254
aaaacacaaacga

SEQ ID NO: 140647 - DNA, 13 bp, Artificial Sequence
  Oligonucleotide for detection of SNP TSC0035254
tcgtttatgtttt

SEQ ID NO: 140648 - DNA, 13 bp, Artificial Sequence
  Oligonucleotide for detection of SNP TSC0035254
aaaacataaacga

SEQ ID NO: 140649 - DNA, 13 bp, Artificial Sequence
  Oligonucleotide for detection of SNP TSC0035254
ttgttcgtgtttt

SEQ ID NO: 140650 - DNA, 13 bp, Artificial Sequence
  Oligonucleotide for detection of SNP TSC0035254
aaaacacgaacaa

SEQ ID NO: 140651 - DNA, 13 bp, Artificial Sequence
  Oligonucleotide for detection of SNP TSC0035254
tcgttcgtgtttt

SEQ ID NO: 140652 - DNA, 13 bp, Artificial Sequence
  Oligonucleotide for detection of SNP TSC0035254
aaaacacgaacga

SEQ ID NO: 140653 - DNA, 13 bp, Artificial Sequence
  Oligonucleotide for detection of SNP TSC0035256
tgatttgattaag

SEQ ID NO: 140654 - DNA, 13 bp, Artificial Sequence
  Oligonucleotide for detection of SNP TSC0035256
cttaatcaaatca

SEQ ID NO: 140655 - DNA, 13 bp, Artificial Sequence
  Oligonucleotide for detection of SNP TSC0035256
tgattttattaag

SEQ ID NO: 140656 - DNA, 13 bp, Artificial Sequence
  Oligonucleotide for detection of SNP TSC0035256
cttaataaaatca

SEQ ID NO: 140657 - DNA, 13 bp, Artificial Sequence
  Oligonucleotide for detection of SNP TSC0035256
tgattcgattaag

SEQ ID NO: 140658 - DNA, 13 bp, Artificial Sequence
  Oligonucleotide for detection of SNP TSC0035256
cttaatcgaatca

SEQ ID NO: 140659 - DNA, 13 bp, Artificial Sequence
  Oligonucleotide for detection of SNP TSC0035256
tttaattgggtta

SEQ ID NO: 140660 - DNA, 13 bp, Artificial Sequence
  Oligonucleotide for detection of SNP TSC0035256
taacccaattaaa

SEQ ID NO: 140661 - DNA, 13 bp, Artificial Sequence
  Oligonucleotide for detection of SNP TSC0035256
tttaatagggtta

SEQ ID NO: 140662 - DNA, 13 bp, Artificial Sequence
  Oligonucleotide for detection of SNP TSC0035256
taaccctattaaa

SEQ ID NO: 140663 - DNA, 13 bp, Artificial Sequence
  Oligonucleotide for detection of SNP TSC0035256
tttaatcgggtta

SEQ ID NO: 140664 - DNA, 13 bp, Artificial Sequence
  Oligonucleotide for detection of SNP TSC0035256
taacccgattaaa

SEQ ID NO: 140665 - DNA, 13 bp, Artificial Sequence
  Oligonucleotide for detection of SNP TSC0035257
tgtttgtgtttgt

SEQ ID NO: 140666 - DNA, 13 bp, Artificial Sequence
  Oligonucleotide for detection of SNP TSC0035257
acaaacacaaaca

SEQ ID NO: 140667 - DNA, 13 bp, Artificial Sequence
  Oligonucleotide for detection of SNP TSC0035257
tgtttgcgtttgt

SEQ ID NO: 140668 - DNA, 13 bp, Artificial Sequence
  Oligonucleotide for detection of SNP TSC0035257
acaaacgcaaaca

SEQ ID NO: 140669 - DNA, 13 bp, Artificial Sequence
  Oligonucleotide for detection of SNP TSC0035257
atagatgtaggta

SEQ ID NO: 140670 - DNA, 13 bp, Artificial Sequence
  Oligonucleotide for detection of SNP TSC0035257
tacctacatctat

SEQ ID NO: 140671 - DNA, 13 bp, Artificial Sequence
  Oligonucleotide for detection of SNP TSC0035257
atagatataggta

SEQ ID NO: 140672 - DNA, 13 bp, Artificial Sequence
  Oligonucleotide for detection of SNP TSC0035257
tacctatatctat

SEQ ID NO: 140673 - DNA, 13 bp, Artificial Sequence
  Oligonucleotide for detection of SNP TSC0035257
atagacgtaggta

SEQ ID NO: 140674 - DNA, 13 bp, Artificial Sequence
  Oligonucleotide for detection of SNP TSC0035257
tacctacgtctat

SEQ ID NO: 140675 - DNA, 13 bp, Artificial Sequence
  Oligonucleotide for detection of SNP TSC0035258
agatgaggttaag

SEQ ID NO: 140676 - DNA, 13 bp, Artificial Sequence
  Oligonucleotide for detection of SNP TSC0035258
cttaacctcatct

SEQ ID NO: 140677 - DNA, 13 bp, Artificial Sequence
  Oligonucleotide for detection of SNP TSC0035258
agatgaagttaag

SEQ ID NO: 140678 - DNA, 13 bp, Artificial Sequence
  Oligonucleotide for detection of SNP TSC0035258
cttaacttcatct

SEQ ID NO: 140679 - DNA, 13 bp, Artificial Sequence
  Oligonucleotide for detection of SNP TSC0035259
tttttttagttta

SEQ ID NO: 140680 - DNA, 13 bp, Artificial Sequence
  Oligonucleotide for detection of SNP TSC0035259
taaactaaaaaaa

SEQ ID NO: 140681 - DNA, 13 bp, Artificial Sequence
  Oligonucleotide for detection of SNP TSC0035259
tgaattgaggaaa

SEQ ID NO: 140682 - DNA, 13 bp, Artificial Sequence
  Oligonucleotide for detection of SNP TSC0035259
tttcctcaattca

SEQ ID NO: 140683 - DNA, 13 bp, Artificial Sequence
  Oligonucleotide for detection of SNP TSC0035259
tgaatttaggaaa

SEQ ID NO: 140684 - DNA, 13 bp, Artificial Sequence
  Oligonucleotide for detection of SNP TSC0035259
tttcctaaattca

SEQ ID NO: 140685 - DNA, 13 bp, Artificial Sequence
  Oligonucleotide for detection of SNP TSC0035260
tatgatagttgty

SEQ ID NO: 140686 - DNA, 13 bp, Artificial Sequence
  Oligonucleotide for detection of SNP TSC0035260
racaactatcata

SEQ ID NO: 140687 - DNA, 13 bp, Artificial Sequence
  Oligonucleotide for detection of SNP TSC0035260
tatgatggttgty

SEQ ID NO: 140688 - DNA, 13 bp, Artificial Sequence
  Oligonucleotide for detection of SNP TSC0035260
racaaccatcata

SEQ ID NO: 140689 - DNA, 13 bp, Artificial Sequence
  Oligonucleotide for detection of SNP TSC0035260
tatgacggttgty

SEQ ID NO: 140690 - DNA, 13 bp, Artificial Sequence
  Oligonucleotide for detection of SNP TSC0035260
racaaccgtcata

SEQ ID NO: 140691 - DNA, 13 bp, Artificial Sequence
  Oligonucleotide for detection of SNP TSC0035260
gataattgttatg

SEQ ID NO: 140692 - DNA, 13 bp, Artificial Sequence
  Oligonucleotide for detection of SNP TSC0035260
cataacaattatc

SEQ ID NO: 140693 - DNA, 13 bp, Artificial Sequence
  Oligonucleotide for detection of SNP TSC0035260
gataatcgttatg

SEQ ID NO: 140694 - DNA, 13 bp, Artificial Sequence
  Oligonucleotide for detection of SNP TSC0035260
cataacgattatc

SEQ ID NO: 140695 - DNA, 13 bp, Artificial Sequence
  Oligonucleotide for detection of SNP TSC0035261
aagagattgttga

SEQ ID NO: 140696 - DNA, 13 bp, Artificial Sequence
  Oligonucleotide for detection of SNP TSC0035261
tcaacaatctctt

SEQ ID NO: 140697 - DNA, 13 bp, Artificial Sequence
  Oligonucleotide for detection of SNP TSC0035261
aagagagtgttga

SEQ ID NO: 140698 - DNA, 13 bp, Artificial Sequence
  Oligonucleotide for detection of SNP TSC0035261
tcaacactctctt

SEQ ID NO: 140699 - DNA, 13 bp, Artificial Sequence
  Oligonucleotide for detection of SNP TSC0035261
ttaatagtttttt

SEQ ID NO: 140700 - DNA, 13 bp, Artificial Sequence
  Oligonucleotide for detection of SNP TSC0035261
aaaaaactattaa

SEQ ID NO: 140701 - DNA, 13 bp, Artificial Sequence
  Oligonucleotide for detection of SNP TSC0035261
ttaatattttttt

SEQ ID NO: 140702 - DNA, 13 bp, Artificial Sequence
  Oligonucleotide for detection of SNP TSC0035261
aaaaaaatattaa

SEQ ID NO: 140703 - DNA, 13 bp, Artificial Sequence
  Oligonucleotide for detection of SNP TSC0035264
tttaaagtagagg

SEQ ID NO: 140704 - DNA, 13 bp, Artificial Sequence
  Oligonucleotide for detection of SNP TSC0035264
cctctactttaaa

SEQ ID NO: 140705 - DNA, 13 bp, Artificial Sequence
  Oligonucleotide for detection of SNP TSC0035264
tttaaaatagagg

SEQ ID NO: 140706 - DNA, 13 bp, Artificial Sequence
  Oligonucleotide for detection of SNP TSC0035264
cctctattttaaa

SEQ ID NO: 140707 - DNA, 13 bp, Artificial Sequence
  Oligonucleotide for detection of SNP TSC0035265
aagatttgtttty

SEQ ID NO: 140708 - DNA, 13 bp, Artificial Sequence
  Oligonucleotide for detection of SNP TSC0035265
raaaacaaatctt

SEQ ID NO: 140709 - DNA, 13 bp, Artificial Sequence
  Oligonucleotide for detection of SNP TSC0035265
aagattcgtttty

SEQ ID NO: 140710 - DNA, 13 bp, Artificial Sequence
  Oligonucleotide for detection of SNP TSC0035265
raaaacgaatctt

SEQ ID NO: 140711 - DNA, 13 bp, Artificial Sequence
  Oligonucleotide for detection of SNP TSC0035265
gggagtaggtttt

SEQ ID NO: 140712 - DNA, 13 bp, Artificial Sequence
  Oligonucleotide for detection of SNP TSC0035265
aaaacctactccc

SEQ ID NO: 140713 - DNA, 13 bp, Artificial Sequence
  Oligonucleotide for detection of SNP TSC0035265
gggagtgggtttt

SEQ ID NO: 140714 - DNA, 13 bp, Artificial Sequence
  Oligonucleotide for detection of SNP TSC0035265
aaaacccactccc

SEQ ID NO: 140715 - DNA, 13 bp, Artificial Sequence
  Oligonucleotide for detection of SNP TSC0035265
gggagcgggtttt

SEQ ID NO: 140716 - DNA, 13 bp, Artificial Sequence
  Oligonucleotide for detection of SNP TSC0035265
aaaacccgctccc

SEQ ID NO: 140717 - DNA, 13 bp, Artificial Sequence
  Oligonucleotide for detection of SNP TSC0035267
aatgtggttttta

SEQ ID NO: 140718 - DNA, 13 bp, Artificial Sequence
  Oligonucleotide for detection of SNP TSC0035267
taaaaaccacatt

SEQ ID NO: 140719 - DNA, 13 bp, Artificial Sequence
  Oligonucleotide for detection of SNP TSC0035267
aatgtgattttta

SEQ ID NO: 140720 - DNA, 13 bp, Artificial Sequence
  Oligonucleotide for detection of SNP TSC0035267
taaaaatcacatt

SEQ ID NO: 140721 - DNA, 13 bp, Artificial Sequence
  Oligonucleotide for detection of SNP TSC0035268
taatgtggtttty

SEQ ID NO: 140722 - DNA, 13 bp, Artificial Sequence
  Oligonucleotide for detection of SNP TSC0035268
raaaaccacatta

SEQ ID NO: 140723 - DNA, 13 bp, Artificial Sequence
  Oligonucleotide for detection of SNP TSC0035268
taatgtagtttty

SEQ ID NO: 140724 - DNA, 13 bp, Artificial Sequence
  Oligonucleotide for detection of SNP TSC0035268
raaaactacatta

SEQ ID NO: 140725 - DNA, 13 bp, Artificial Sequence
  Oligonucleotide for detection of SNP TSC0035269
tgagttaggggtt

SEQ ID NO: 140726 - DNA, 13 bp, Artificial Sequence
  Oligonucleotide for detection of SNP TSC0035269
aacccctaactca

SEQ ID NO: 140727 - DNA, 13 bp, Artificial Sequence
  Oligonucleotide for detection of SNP TSC0035269
tgagttgggggtt

SEQ ID NO: 140728 - DNA, 13 bp, Artificial Sequence
  Oligonucleotide for detection of SNP TSC0035269
aacccccaactca

SEQ ID NO: 140729 - DNA, 13 bp, Artificial Sequence
  Oligonucleotide for detection of SNP TSC0035269
cgagttaggggtt

SEQ ID NO: 140730 - DNA, 13 bp, Artificial Sequence
  Oligonucleotide for detection of SNP TSC0035269
aacccctaactcg

SEQ ID NO: 140731 - DNA, 13 bp, Artificial Sequence
  Oligonucleotide for detection of SNP TSC0035269
cgagttgggggtt

SEQ ID NO: 140732 - DNA, 13 bp, Artificial Sequence
  Oligonucleotide for detection of SNP TSC0035269
aacccccaactcg

SEQ ID NO: 140733 - DNA, 13 bp, Artificial Sequence
  Oligonucleotide for detection of SNP TSC0035269
tgagtcgggggtt

SEQ ID NO: 140734 - DNA, 13 bp, Artificial Sequence
  Oligonucleotide for detection of SNP TSC0035269
aacccccgactca

SEQ ID NO: 140735 - DNA, 13 bp, Artificial Sequence
  Oligonucleotide for detection of SNP TSC0035269
cgagtcgggggtt

SEQ ID NO: 140736 - DNA, 13 bp, Artificial Sequence
  Oligonucleotide for detection of SNP TSC0035269
aacccccgactcg

SEQ ID NO: 140737 - DNA, 13 bp, Artificial Sequence
  Oligonucleotide for detection of SNP TSC0035269
agtttttgatttg

SEQ ID NO: 140738 - DNA, 13 bp, Artificial Sequence
  Oligonucleotide for detection of SNP TSC0035269
caaatcaaaaact

SEQ ID NO: 140739 - DNA, 13 bp, Artificial Sequence
  Oligonucleotide for detection of SNP TSC0035269
agtttttgattcg

SEQ ID NO: 140740 - DNA, 13 bp, Artificial Sequence
  Oligonucleotide for detection of SNP TSC0035269
cgaatcaaaaact

SEQ ID NO: 140741 - DNA, 13 bp, Artificial Sequence
  Oligonucleotide for detection of SNP TSC0035269
agttttcgatttg

SEQ ID NO: 140742 - DNA, 13 bp, Artificial Sequence
  Oligonucleotide for detection of SNP TSC0035269
caaatcgaaaact

SEQ ID NO: 140743 - DNA, 13 bp, Artificial Sequence
  Oligonucleotide for detection of SNP TSC0035269
agttttcgattcg

SEQ ID NO: 140744 - DNA, 13 bp, Artificial Sequence
  Oligonucleotide for detection of SNP TSC0035269
cgaatcgaaaact

SEQ ID NO: 140745 - DNA, 13 bp, Artificial Sequence
  Oligonucleotide for detection of SNP TSC0035270
gatttgtgtgtty

SEQ ID NO: 140746 - DNA, 13 bp, Artificial Sequence
  Oligonucleotide for detection of SNP TSC0035270
raacacacaaatc

SEQ ID NO: 140747 - DNA, 13 bp, Artificial Sequence
  Oligonucleotide for detection of SNP TSC0035270
gatttgggtgtty

SEQ ID NO: 140748 - DNA, 13 bp, Artificial Sequence
  Oligonucleotide for detection of SNP TSC0035270
raacacccaaatc

SEQ ID NO: 140749 - DNA, 13 bp, Artificial Sequence
  Oligonucleotide for detection of SNP TSC0035270
gatttgcgtgtty

SEQ ID NO: 140750 - DNA, 13 bp, Artificial Sequence
  Oligonucleotide for detection of SNP TSC0035270
raacacgcaaatc

SEQ ID NO: 140751 - DNA, 13 bp, Artificial Sequence
  Oligonucleotide for detection of SNP TSC0035270
gatttgggcgtty

SEQ ID NO: 140752 - DNA, 13 bp, Artificial Sequence
  Oligonucleotide for detection of SNP TSC0035270
raacgcccaaatc

SEQ ID NO: 140753 - DNA, 13 bp, Artificial Sequence
  Oligonucleotide for detection of SNP TSC0035270
gatttgtgcgtty

SEQ ID NO: 140754 - DNA, 13 bp, Artificial Sequence
  Oligonucleotide for detection of SNP TSC0035270
raacgcacaaatc

SEQ ID NO: 140755 - DNA, 13 bp, Artificial Sequence
  Oligonucleotide for detection of SNP TSC0035270
gatttgcgcgtty

SEQ ID NO: 140756 - DNA, 13 bp, Artificial Sequence
  Oligonucleotide for detection of SNP TSC0035270
raacgcgcaaatc

SEQ ID NO: 140757 - DNA, 13 bp, Artificial Sequence
  Oligonucleotide for detection of SNP TSC0035270
gggtgtgtaggty

SEQ ID NO: 140758 - DNA, 13 bp, Artificial Sequence
  Oligonucleotide for detection of SNP TSC0035270
racctacacaccc

SEQ ID NO: 140759 - DNA, 13 bp, Artificial Sequence
  Oligonucleotide for detection of SNP TSC0035270
gggtgtttaggty

SEQ ID NO: 140760 - DNA, 13 bp, Artificial Sequence
  Oligonucleotide for detection of SNP TSC0035270
racctaaacaccc

SEQ ID NO: 140761 - DNA, 13 bp, Artificial Sequence
  Oligonucleotide for detection of SNP TSC0035270
gggcgtgtaggty

SEQ ID NO: 140762 - DNA, 13 bp, Artificial Sequence
  Oligonucleotide for detection of SNP TSC0035270
racctacacgccc

SEQ ID NO: 140763 - DNA, 13 bp, Artificial Sequence
  Oligonucleotide for detection of SNP TSC0035270
gggcgtttaggty

SEQ ID NO: 140764 - DNA, 13 bp, Artificial Sequence
  Oligonucleotide for detection of SNP TSC0035270
racctaaacgccc

SEQ ID NO: 140765 - DNA, 13 bp, Artificial Sequence
  Oligonucleotide for detection of SNP TSC0035270
gggtgcgtaggty

SEQ ID NO: 140766 - DNA, 13 bp, Artificial Sequence
  Oligonucleotide for detection of SNP TSC0035270
racctacgcaccc

SEQ ID NO: 140767 - DNA, 13 bp, Artificial Sequence
  Oligonucleotide for detection of SNP TSC0035270
gggcgcgtaggty

SEQ ID NO: 140768 - DNA, 13 bp, Artificial Sequence
  Oligonucleotide for detection of SNP TSC0035270
racctacgcgccc

SEQ ID NO: 140769 - DNA, 13 bp, Artificial Sequence
  Oligonucleotide for detection of SNP TSC0035271
atttcgattttgt

SEQ ID NO: 140770 - DNA, 13 bp, Artificial Sequence
  Oligonucleotide for detection of SNP TSC0035271
acaaaatcgaaat

SEQ ID NO: 140771 - DNA, 13 bp, Artificial Sequence
  Oligonucleotide for detection of SNP TSC0035271
atttcggttttgt

SEQ ID NO: 140772 - DNA, 13 bp, Artificial Sequence
  Oligonucleotide for detection of SNP TSC0035271
acaaaaccgaaat

SEQ ID NO: 140773 - DNA, 13 bp, Artificial Sequence
  Oligonucleotide for detection of SNP TSC0035272
ttaggtatgttta

SEQ ID NO: 140774 - DNA, 13 bp, Artificial Sequence
  Oligonucleotide for detection of SNP TSC0035272
taaacatacctaa

SEQ ID NO: 140775 - DNA, 13 bp, Artificial Sequence
  Oligonucleotide for detection of SNP TSC0035272
ttaggtgtgttta

SEQ ID NO: 140776 - DNA, 13 bp, Artificial Sequence
  Oligonucleotide for detection of SNP TSC0035272
taaacacacctaa

SEQ ID NO: 140777 - DNA, 13 bp, Artificial Sequence
  Oligonucleotide for detection of SNP TSC0035273
gagtgtggtggtg

SEQ ID NO: 140778 - DNA, 13 bp, Artificial Sequence
  Oligonucleotide for detection of SNP TSC0035273
caccaccacactc

SEQ ID NO: 140779 - DNA, 13 bp, Artificial Sequence
  Oligonucleotide for detection of SNP TSC0035273
gagtgtagtggtg

SEQ ID NO: 140780 - DNA, 13 bp, Artificial Sequence
  Oligonucleotide for detection of SNP TSC0035273
caccactacactc

SEQ ID NO: 140781 - DNA, 13 bp, Artificial Sequence
  Oligonucleotide for detection of SNP TSC0035274
attattatattty

SEQ ID NO: 140782 - DNA, 13 bp, Artificial Sequence
  Oligonucleotide for detection of SNP TSC0035274
raaatataataat

SEQ ID NO: 140783 - DNA, 13 bp, Artificial Sequence
  Oligonucleotide for detection of SNP TSC0035274
attattgtattty

SEQ ID NO: 140784 - DNA, 13 bp, Artificial Sequence
  Oligonucleotide for detection of SNP TSC0035274
raaatacaataat

SEQ ID NO: 140785 - DNA, 13 bp, Artificial Sequence
  Oligonucleotide for detection of SNP TSC0035274
attatcgtattty

SEQ ID NO: 140786 - DNA, 13 bp, Artificial Sequence
  Oligonucleotide for detection of SNP TSC0035274
raaatacgataat

SEQ ID NO: 140787 - DNA, 13 bp, Artificial Sequence
  Oligonucleotide for detection of SNP TSC0035274
ggagtgtggtggt

SEQ ID NO: 140788 - DNA, 13 bp, Artificial Sequence
  Oligonucleotide for detection of SNP TSC0035274
accaccacactcc

SEQ ID NO: 140789 - DNA, 13 bp, Artificial Sequence
  Oligonucleotide for detection of SNP TSC0035274
ggagtgcggtggt

SEQ ID NO: 140790 - DNA, 13 bp, Artificial Sequence
  Oligonucleotide for detection of SNP TSC0035274
accaccgcactcc

SEQ ID NO: 140791 - DNA, 13 bp, Artificial Sequence
  Oligonucleotide for detection of SNP TSC0035275
gttatgataaatt

SEQ ID NO: 140792 - DNA, 13 bp, Artificial Sequence
  Oligonucleotide for detection of SNP TSC0035275
aatttatcataac

SEQ ID NO: 140793 - DNA, 13 bp, Artificial Sequence
  Oligonucleotide for detection of SNP TSC0035275
gttatgttaaatt

SEQ ID NO: 140794 - DNA, 13 bp, Artificial Sequence
  Oligonucleotide for detection of SNP TSC0035275
aatttaacataac

SEQ ID NO: 140795 - DNA, 13 bp, Artificial Sequence
  Oligonucleotide for detection of SNP TSC0035275
aatttattatagy

SEQ ID NO: 140796 - DNA, 13 bp, Artificial Sequence
  Oligonucleotide for detection of SNP TSC0035275
rctataataaatt

SEQ ID NO: 140797 - DNA, 13 bp, Artificial Sequence
  Oligonucleotide for detection of SNP TSC0035275
aatttaatatagy

SEQ ID NO: 140798 - DNA, 13 bp, Artificial Sequence
  Oligonucleotide for detection of SNP TSC0035275
rctatattaaatt

SEQ ID NO: 140799 - DNA, 13 bp, Artificial Sequence
  Oligonucleotide for detection of SNP TSC0035277
taatatatgtgta

SEQ ID NO: 140800 - DNA, 13 bp, Artificial Sequence
  Oligonucleotide for detection of SNP TSC0035277
tacacatatatta

SEQ ID NO: 140801 - DNA, 13 bp, Artificial Sequence
  Oligonucleotide for detection of SNP TSC0035277
taatatttgtgta

SEQ ID NO: 140802 - DNA, 13 bp, Artificial Sequence
  Oligonucleotide for detection of SNP TSC0035277
tacacaaatatta

SEQ ID NO: 140803 - DNA, 13 bp, Artificial Sequence
  Oligonucleotide for detection of SNP TSC0035277
tatataagtatta

SEQ ID NO: 140804 - DNA, 13 bp, Artificial Sequence
  Oligonucleotide for detection of SNP TSC0035277
taatacttatata

SEQ ID NO: 140805 - DNA, 13 bp, Artificial Sequence
  Oligonucleotide for detection of SNP TSC0035278
tttgggaattttt

SEQ ID NO: 140806 - DNA, 13 bp, Artificial Sequence
  Oligonucleotide for detection of SNP TSC0035278
aaaaattcccaaa

SEQ ID NO: 140807 - DNA, 13 bp, Artificial Sequence
  Oligonucleotide for detection of SNP TSC0035278
tttggggattttt

SEQ ID NO: 140808 - DNA, 13 bp, Artificial Sequence
  Oligonucleotide for detection of SNP TSC0035278
aaaaatccccaaa

SEQ ID NO: 140809 - DNA, 13 bp, Artificial Sequence
  Oligonucleotide for detection of SNP TSC0035279
tttttaataatgy

SEQ ID NO: 140810 - DNA, 13 bp, Artificial Sequence
  Oligonucleotide for detection of SNP TSC0035279
rcattattaaaaa

SEQ ID NO: 140811 - DNA, 13 bp, Artificial Sequence
  Oligonucleotide for detection of SNP TSC0035279
tttttattaatgy

SEQ ID NO: 140812 - DNA, 13 bp, Artificial Sequence
  Oligonucleotide for detection of SNP TSC0035279
rcattaataaaaa

SEQ ID NO: 140813 - DNA, 13 bp, Artificial Sequence
  Oligonucleotide for detection of SNP TSC0035279
gtattgttggagg

SEQ ID NO: 140814 - DNA, 13 bp, Artificial Sequence
  Oligonucleotide for detection of SNP TSC0035279
cctccaacaatac

SEQ ID NO: 140815 - DNA, 13 bp, Artificial Sequence
  Oligonucleotide for detection of SNP TSC0035279
gtattgatggagg

SEQ ID NO: 140816 - DNA, 13 bp, Artificial Sequence
  Oligonucleotide for detection of SNP TSC0035279
cctccatcaatac

SEQ ID NO: 140817 - DNA, 13 bp, Artificial Sequence
  Oligonucleotide for detection of SNP TSC0035281
tgatttatgtagt

SEQ ID NO: 140818 - DNA, 13 bp, Artificial Sequence
  Oligonucleotide for detection of SNP TSC0035281
actacataaatca

SEQ ID NO: 140819 - DNA, 13 bp, Artificial Sequence
  Oligonucleotide for detection of SNP TSC0035281
tgatttttgtagt

SEQ ID NO: 140820 - DNA, 13 bp, Artificial Sequence
  Oligonucleotide for detection of SNP TSC0035281
actacaaaaatca

SEQ ID NO: 140821 - DNA, 13 bp, Artificial Sequence
  Oligonucleotide for detection of SNP TSC0035281
attgtataaatta

SEQ ID NO: 140822 - DNA, 13 bp, Artificial Sequence
  Oligonucleotide for detection of SNP TSC0035281
taatttatacaat

SEQ ID NO: 140823 - DNA, 13 bp, Artificial Sequence
  Oligonucleotide for detection of SNP TSC0035281
attgtagaaatta

SEQ ID NO: 140824 - DNA, 13 bp, Artificial Sequence
  Oligonucleotide for detection of SNP TSC0035281
taatttctacaat

SEQ ID NO: 140825 - DNA, 13 bp, Artificial Sequence
  Oligonucleotide for detection of SNP TSC0035282
agttggtagttgt

SEQ ID NO: 140826 - DNA, 13 bp, Artificial Sequence
  Oligonucleotide for detection of SNP TSC0035282
acaactaccaact

SEQ ID NO: 140827 - DNA, 13 bp, Artificial Sequence
  Oligonucleotide for detection of SNP TSC0035282
agttgggagttgt

SEQ ID NO: 140828 - DNA, 13 bp, Artificial Sequence
  Oligonucleotide for detection of SNP TSC0035282
acaactcccaact

SEQ ID NO: 140829 - DNA, 13 bp, Artificial Sequence
  Oligonucleotide for detection of SNP TSC0035282
atagttgttagtt

SEQ ID NO: 140830 - DNA, 13 bp, Artificial Sequence
  Oligonucleotide for detection of SNP TSC0035282
aactaacaactat

SEQ ID NO: 140831 - DNA, 13 bp, Artificial Sequence
  Oligonucleotide for detection of SNP TSC0035282
atagtttttagtt

SEQ ID NO: 140832 - DNA, 13 bp, Artificial Sequence
  Oligonucleotide for detection of SNP TSC0035282
aactaaaaactat

SEQ ID NO: 140833 - DNA, 13 bp, Artificial Sequence
  Oligonucleotide for detection of SNP TSC0035285
tggagtaaggata

SEQ ID NO: 140834 - DNA, 13 bp, Artificial Sequence
  Oligonucleotide for detection of SNP TSC0035285
tatccttactcca

SEQ ID NO: 140835 - DNA, 13 bp, Artificial Sequence
  Oligonucleotide for detection of SNP TSC0035285
tggagtgaggata

SEQ ID NO: 140836 - DNA, 13 bp, Artificial Sequence
  Oligonucleotide for detection of SNP TSC0035285
tatcctcactcca

SEQ ID NO: 140837 - DNA, 13 bp, Artificial Sequence
  Oligonucleotide for detection of SNP TSC0035289
aagtataagtttt

SEQ ID NO: 140838 - DNA, 13 bp, Artificial Sequence
  Oligonucleotide for detection of SNP TSC0035289
aaaacttatactt

SEQ ID NO: 140839 - DNA, 13 bp, Artificial Sequence
  Oligonucleotide for detection of SNP TSC0035289
aagtatgagtttt

SEQ ID NO: 140840 - DNA, 13 bp, Artificial Sequence
  Oligonucleotide for detection of SNP TSC0035289
aaaactcatactt

SEQ ID NO: 140841 - DNA, 13 bp, Artificial Sequence
  Oligonucleotide for detection of SNP TSC0035289
aagtacgagtttt

SEQ ID NO: 140842 - DNA, 13 bp, Artificial Sequence
  Oligonucleotide for detection of SNP TSC0035289
aaaactcgtactt

SEQ ID NO: 140843 - DNA, 13 bp, Artificial Sequence
  Oligonucleotide for detection of SNP TSC0035289
aaaatttgtattt

SEQ ID NO: 140844 - DNA, 13 bp, Artificial Sequence
  Oligonucleotide for detection of SNP TSC0035289
aaatacaaatttt

SEQ ID NO: 140845 - DNA, 13 bp, Artificial Sequence
  Oligonucleotide for detection of SNP TSC0035289
aaaattcgtattt

SEQ ID NO: 140846 - DNA, 13 bp, Artificial Sequence
  Oligonucleotide for detection of SNP TSC0035289
aaatacgaatttt

SEQ ID NO: 140847 - DNA, 13 bp, Artificial Sequence
  Oligonucleotide for detection of SNP TSC0035290
atttaatgaaata

SEQ ID NO: 140848 - DNA, 13 bp, Artificial Sequence
  Oligonucleotide for detection of SNP TSC0035290
tatttcattaaat

SEQ ID NO: 140849 - DNA, 13 bp, Artificial Sequence
  Oligonucleotide for detection of SNP TSC0035290
atttaacgaaata

SEQ ID NO: 140850 - DNA, 13 bp, Artificial Sequence
  Oligonucleotide for detection of SNP TSC0035290
tatttcgttaaat

SEQ ID NO: 140851 - DNA, 13 bp, Artificial Sequence
  Oligonucleotide for detection of SNP TSC0035290
tgttttgttgaat

SEQ ID NO: 140852 - DNA, 13 bp, Artificial Sequence
  Oligonucleotide for detection of SNP TSC0035290
attcaacaaaaca

SEQ ID NO: 140853 - DNA, 13 bp, Artificial Sequence
  Oligonucleotide for detection of SNP TSC0035290
tgttttattgaat

SEQ ID NO: 140854 - DNA, 13 bp, Artificial Sequence
  Oligonucleotide for detection of SNP TSC0035290
attcaataaaaca

SEQ ID NO: 140855 - DNA, 13 bp, Artificial Sequence
  Oligonucleotide for detection of SNP TSC0035290
tgtttcgttgaat

SEQ ID NO: 140856 - DNA, 13 bp, Artificial Sequence
  Oligonucleotide for detection of SNP TSC0035290
attcaacgaaaca

SEQ ID NO: 140857 - DNA, 13 bp, Artificial Sequence
  Oligonucleotide for detection of SNP TSC0035291
tttgtaaaggaty

SEQ ID NO: 140858 - DNA, 13 bp, Artificial Sequence
  Oligonucleotide for detection of SNP TSC0035291
ratcctttacaaa

SEQ ID NO: 140859 - DNA, 13 bp, Artificial Sequence
  Oligonucleotide for detection of SNP TSC0035291
tttgtagaggaty

SEQ ID NO: 140860 - DNA, 13 bp, Artificial Sequence
  Oligonucleotide for detection of SNP TSC0035291
ratcctctacaaa

SEQ ID NO: 140861 - DNA, 13 bp, Artificial Sequence
  Oligonucleotide for detection of SNP TSC0035293
gaaagtgttttty

SEQ ID NO: 140862 - DNA, 13 bp, Artificial Sequence
  Oligonucleotide for detection of SNP TSC0035293
raaaaacactttc

SEQ ID NO: 140863 - DNA, 13 bp, Artificial Sequence
  Oligonucleotide for detection of SNP TSC0035293
gaaagttttttty

SEQ ID NO: 140864 - DNA, 13 bp, Artificial Sequence
  Oligonucleotide for detection of SNP TSC0035293
raaaaaaactttc

SEQ ID NO: 140865 - DNA, 13 bp, Artificial Sequence
  Oligonucleotide for detection of SNP TSC0035293
gaaagcgttttty

SEQ ID NO: 140866 - DNA, 13 bp, Artificial Sequence
  Oligonucleotide for detection of SNP TSC0035293
raaaaacgctttc

SEQ ID NO: 140867 - DNA, 13 bp, Artificial Sequence
  Oligonucleotide for detection of SNP TSC0035293
gagggatgtttty

SEQ ID NO: 140868 - DNA, 13 bp, Artificial Sequence
  Oligonucleotide for detection of SNP TSC0035293
raaaacatccctc

SEQ ID NO: 140869 - DNA, 13 bp, Artificial Sequence
  Oligonucleotide for detection of SNP TSC0035293
gagggaagtttty

SEQ ID NO: 140870 - DNA, 13 bp, Artificial Sequence
  Oligonucleotide for detection of SNP TSC0035293
raaaacttccctc

SEQ ID NO: 140871 - DNA, 13 bp, Artificial Sequence
  Oligonucleotide for detection of SNP TSC0035293
gagggacgtttty

SEQ ID NO: 140872 - DNA, 13 bp, Artificial Sequence
  Oligonucleotide for detection of SNP TSC0035293
raaaacgtccctc

SEQ ID NO: 140873 - DNA, 13 bp, Artificial Sequence
  Oligonucleotide for detection of SNP TSC0035294
taaaatgtaaaat

SEQ ID NO: 140874 - DNA, 13 bp, Artificial Sequence
  Oligonucleotide for detection of SNP TSC0035294
attttacatttta

SEQ ID NO: 140875 - DNA, 13 bp, Artificial Sequence
  Oligonucleotide for detection of SNP TSC0035295
aaaaataaggtaa

SEQ ID NO: 140876 - DNA, 13 bp, Artificial Sequence
  Oligonucleotide for detection of SNP TSC0035295
ttaccttattttt

SEQ ID NO: 140877 - DNA, 13 bp, Artificial Sequence
  Oligonucleotide for detection of SNP TSC0035295
aaaaatgaggtaa

SEQ ID NO: 140878 - DNA, 13 bp, Artificial Sequence
  Oligonucleotide for detection of SNP TSC0035295
ttacctcattttt

SEQ ID NO: 140879 - DNA, 13 bp, Artificial Sequence
  Oligonucleotide for detection of SNP TSC0035296
ttgattgttttgt

SEQ ID NO: 140880 - DNA, 13 bp, Artificial Sequence
  Oligonucleotide for detection of SNP TSC0035296
acaaaacaatcaa

SEQ ID NO: 140881 - DNA, 13 bp, Artificial Sequence
  Oligonucleotide for detection of SNP TSC0035296
ttgattattttgt

SEQ ID NO: 140882 - DNA, 13 bp, Artificial Sequence
  Oligonucleotide for detection of SNP TSC0035296
acaaaataatcaa

SEQ ID NO: 140883 - DNA, 13 bp, Artificial Sequence
  Oligonucleotide for detection of SNP TSC0035297
ttttttggtagat

SEQ ID NO: 140884 - DNA, 13 bp, Artificial Sequence
  Oligonucleotide for detection of SNP TSC0035297
atctaccaaaaaa

SEQ ID NO: 140885 - DNA, 13 bp, Artificial Sequence
  Oligonucleotide for detection of SNP TSC0035297
tttttcggtagat

SEQ ID NO: 140886 - DNA, 13 bp, Artificial Sequence
  Oligonucleotide for detection of SNP TSC0035297
atctaccgaaaaa

SEQ ID NO: 140887 - DNA, 13 bp, Artificial Sequence
  Oligonucleotide for detection of SNP TSC0035297
atttatggggaag

SEQ ID NO: 140888 - DNA, 13 bp, Artificial Sequence
  Oligonucleotide for detection of SNP TSC0035297
cttccccataaat

SEQ ID NO: 140889 - DNA, 13 bp, Artificial Sequence
  Oligonucleotide for detection of SNP TSC0035297
atttattgggaag

SEQ ID NO: 140890 - DNA, 13 bp, Artificial Sequence
  Oligonucleotide for detection of SNP TSC0035297
cttcccaataaat

SEQ ID NO: 140891 - DNA, 13 bp, Artificial Sequence
  Oligonucleotide for detection of SNP TSC0035297
atttacggggaag

SEQ ID NO: 140892 - DNA, 13 bp, Artificial Sequence
  Oligonucleotide for detection of SNP TSC0035297
cttccccgtaaat

SEQ ID NO: 140893 - DNA, 13 bp, Artificial Sequence
  Oligonucleotide for detection of SNP TSC0035297
atttatcgggaag

SEQ ID NO: 140894 - DNA, 13 bp, Artificial Sequence
  Oligonucleotide for detection of SNP TSC0035297
cttcccgataaat

SEQ ID NO: 140895 - DNA, 13 bp, Artificial Sequence
  Oligonucleotide for detection of SNP TSC0035299
aatatatgaaaat

SEQ ID NO: 140896 - DNA, 13 bp, Artificial Sequence
  Oligonucleotide for detection of SNP TSC0035299
attttcatatatt

SEQ ID NO: 140897 - DNA, 13 bp, Artificial Sequence
  Oligonucleotide for detection of SNP TSC0035302
attatagatgtaa

SEQ ID NO: 140898 - DNA, 13 bp, Artificial Sequence
  Oligonucleotide for detection of SNP TSC0035302
ttacatctataat

SEQ ID NO: 140899 - DNA, 13 bp, Artificial Sequence
  Oligonucleotide for detection of SNP TSC0035302
attataaatgtaa

SEQ ID NO: 140900 - DNA, 13 bp, Artificial Sequence
  Oligonucleotide for detection of SNP TSC0035302
ttacatttataat

SEQ ID NO: 140901 - DNA, 13 bp, Artificial Sequence
  Oligonucleotide for detection of SNP TSC0035304
ttataagtgattt

SEQ ID NO: 140902 - DNA, 13 bp, Artificial Sequence
  Oligonucleotide for detection of SNP TSC0035304
aaatcacttataa

SEQ ID NO: 140903 - DNA, 13 bp, Artificial Sequence
  Oligonucleotide for detection of SNP TSC0035304
ttataagcgattt

SEQ ID NO: 140904 - DNA, 13 bp, Artificial Sequence
  Oligonucleotide for detection of SNP TSC0035304
aaatcgcttataa

SEQ ID NO: 140905 - DNA, 13 bp, Artificial Sequence
  Oligonucleotide for detection of SNP TSC0035304
ttataaacgattt

SEQ ID NO: 140906 - DNA, 13 bp, Artificial Sequence
  Oligonucleotide for detection of SNP TSC0035304
aaatcgtttataa

SEQ ID NO: 140907 - DNA, 13 bp, Artificial Sequence
  Oligonucleotide for detection of SNP TSC0035305
taaaaagaaaaat

SEQ ID NO: 140908 - DNA, 13 bp, Artificial Sequence
  Oligonucleotide for detection of SNP TSC0035305
atttttcttttta

SEQ ID NO: 140909 - DNA, 13 bp, Artificial Sequence
  Oligonucleotide for detection of SNP TSC0035314
aggaggggaagga

SEQ ID NO: 140910 - DNA, 13 bp, Artificial Sequence
  Oligonucleotide for detection of SNP TSC0035314
tccttcccctcct

SEQ ID NO: 140911 - DNA, 13 bp, Artificial Sequence
  Oligonucleotide for detection of SNP TSC0035314
aggaggagaagga

SEQ ID NO: 140912 - DNA, 13 bp, Artificial Sequence
  Oligonucleotide for detection of SNP TSC0035314
tccttctcctcct

SEQ ID NO: 140913 - DNA, 13 bp, Artificial Sequence
  Oligonucleotide for detection of SNP TSC0035317
ttttttgagggta

SEQ ID NO: 140914 - DNA, 13 bp, Artificial Sequence
  Oligonucleotide for detection of SNP TSC0035317
taccctcaaaaaa

SEQ ID NO: 140915 - DNA, 13 bp, Artificial Sequence
  Oligonucleotide for detection of SNP TSC0035317
tttttcgagggta

SEQ ID NO: 140916 - DNA, 13 bp, Artificial Sequence
  Oligonucleotide for detection of SNP TSC0035317
taccctcgaaaaa

SEQ ID NO: 140917 - DNA, 13 bp, Artificial Sequence
  Oligonucleotide for detection of SNP TSC0035317
tattttggaggaa

SEQ ID NO: 140918 - DNA, 13 bp, Artificial Sequence
  Oligonucleotide for detection of SNP TSC0035317
ttcctccaaaata

SEQ ID NO: 140919 - DNA, 13 bp, Artificial Sequence
  Oligonucleotide for detection of SNP TSC0035317
tatttttgaggaa

SEQ ID NO: 140920 - DNA, 13 bp, Artificial Sequence
  Oligonucleotide for detection of SNP TSC0035317
ttcctcaaaaata

SEQ ID NO: 140921 - DNA, 13 bp, Artificial Sequence
  Oligonucleotide for detection of SNP TSC0035317
tattttcgaggaa

SEQ ID NO: 140922 - DNA, 13 bp, Artificial Sequence
  Oligonucleotide for detection of SNP TSC0035317
ttcctcgaaaata

SEQ ID NO: 140923 - DNA, 13 bp, Artificial Sequence
  Oligonucleotide for detection of SNP TSC0035320
atgaagaagtagy

SEQ ID NO: 140924 - DNA, 13 bp, Artificial Sequence
  Oligonucleotide for detection of SNP TSC0035320
rctacttcttcat

SEQ ID NO: 140925 - DNA, 13 bp, Artificial Sequence
  Oligonucleotide for detection of SNP TSC0035320
atgaagtagtagy

SEQ ID NO: 140926 - DNA, 13 bp, Artificial Sequence
  Oligonucleotide for detection of SNP TSC0035320
rctactacttcat

SEQ ID NO: 140927 - DNA, 13 bp, Artificial Sequence
  Oligonucleotide for detection of SNP TSC0035320
acgaagaagtagy

SEQ ID NO: 140928 - DNA, 13 bp, Artificial Sequence
  Oligonucleotide for detection of SNP TSC0035320
rctacttcttcgt

SEQ ID NO: 140929 - DNA, 13 bp, Artificial Sequence
  Oligonucleotide for detection of SNP TSC0035320
acgaagtagtagy

SEQ ID NO: 140930 - DNA, 13 bp, Artificial Sequence
  Oligonucleotide for detection of SNP TSC0035320
rctactacttcgt

SEQ ID NO: 140931 - DNA, 13 bp, Artificial Sequence
  Oligonucleotide for detection of SNP TSC0035320
gttgtttttttgt

SEQ ID NO: 140932 - DNA, 13 bp, Artificial Sequence
  Oligonucleotide for detection of SNP TSC0035320
acaaaaaaacaac

SEQ ID NO: 140933 - DNA, 13 bp, Artificial Sequence
  Oligonucleotide for detection of SNP TSC0035320
gttgttgttttgt

SEQ ID NO: 140934 - DNA, 13 bp, Artificial Sequence
  Oligonucleotide for detection of SNP TSC0035320
acaaaacaacaac

SEQ ID NO: 140935 - DNA, 13 bp, Artificial Sequence
  Oligonucleotide for detection of SNP TSC0035320
gttgttttttcgt

SEQ ID NO: 140936 - DNA, 13 bp, Artificial Sequence
  Oligonucleotide for detection of SNP TSC0035320
acgaaaaaacaac

SEQ ID NO: 140937 - DNA, 13 bp, Artificial Sequence
  Oligonucleotide for detection of SNP TSC0035320
gttgttgtttcgt

SEQ ID NO: 140938 - DNA, 13 bp, Artificial Sequence
  Oligonucleotide for detection of SNP TSC0035320
acgaaacaacaac

SEQ ID NO: 140939 - DNA, 13 bp, Artificial Sequence
  Oligonucleotide for detection of SNP TSC0035321
ggatgtagggtgt

SEQ ID NO: 140940 - DNA, 13 bp, Artificial Sequence
  Oligonucleotide for detection of SNP TSC0035321
acaccctacatcc

SEQ ID NO: 140941 - DNA, 13 bp, Artificial Sequence
  Oligonucleotide for detection of SNP TSC0035321
ggatgtggggtgt

SEQ ID NO: 140942 - DNA, 13 bp, Artificial Sequence
  Oligonucleotide for detection of SNP TSC0035321
acaccccacatcc

SEQ ID NO: 140943 - DNA, 13 bp, Artificial Sequence
  Oligonucleotide for detection of SNP TSC0035321
ggacgtagggtgt

SEQ ID NO: 140944 - DNA, 13 bp, Artificial Sequence
  Oligonucleotide for detection of SNP TSC0035321
acaccctacgtcc

SEQ ID NO: 140945 - DNA, 13 bp, Artificial Sequence
  Oligonucleotide for detection of SNP TSC0035321
ggacgtggggtgt

SEQ ID NO: 140946 - DNA, 13 bp, Artificial Sequence
  Oligonucleotide for detection of SNP TSC0035321
acaccccacgtcc

SEQ ID NO: 140947 - DNA, 13 bp, Artificial Sequence
  Oligonucleotide for detection of SNP TSC0035322
tatttggtaattt

SEQ ID NO: 140948 - DNA, 13 bp, Artificial Sequence
  Oligonucleotide for detection of SNP TSC0035322
aaattaccaaata

SEQ ID NO: 140949 - DNA, 13 bp, Artificial Sequence
  Oligonucleotide for detection of SNP TSC0035322
tatttgataattt

SEQ ID NO: 140950 - DNA, 13 bp, Artificial Sequence
  Oligonucleotide for detection of SNP TSC0035322
aaattatcaaata

SEQ ID NO: 140951 - DNA, 13 bp, Artificial Sequence
  Oligonucleotide for detection of SNP TSC0035323
gttttagttaggy

SEQ ID NO: 140952 - DNA, 13 bp, Artificial Sequence
  Oligonucleotide for detection of SNP TSC0035323
rcctaactaaaac

SEQ ID NO: 140953 - DNA, 13 bp, Artificial Sequence
  Oligonucleotide for detection of SNP TSC0035323
gttttaattaggy

SEQ ID NO: 140954 - DNA, 13 bp, Artificial Sequence
  Oligonucleotide for detection of SNP TSC0035323
rcctaattaaaac

SEQ ID NO: 140955 - DNA, 13 bp, Artificial Sequence
  Oligonucleotide for detection of SNP TSC0035326
ttttaagtatggg

SEQ ID NO: 140956 - DNA, 13 bp, Artificial Sequence
  Oligonucleotide for detection of SNP TSC0035326
cccatacttaaaa

SEQ ID NO: 140957 - DNA, 13 bp, Artificial Sequence
  Oligonucleotide for detection of SNP TSC0035326
ttttaattatggg

SEQ ID NO: 140958 - DNA, 13 bp, Artificial Sequence
  Oligonucleotide for detection of SNP TSC0035326
cccataattaaaa

SEQ ID NO: 140959 - DNA, 13 bp, Artificial Sequence
  Oligonucleotide for detection of SNP TSC0035326
tttatatttgaaa

SEQ ID NO: 140960 - DNA, 13 bp, Artificial Sequence
  Oligonucleotide for detection of SNP TSC0035326
tttcaaatataaa

SEQ ID NO: 140961 - DNA, 13 bp, Artificial Sequence
  Oligonucleotide for detection of SNP TSC0035326
tttataattgaaa

SEQ ID NO: 140962 - DNA, 13 bp, Artificial Sequence
  Oligonucleotide for detection of SNP TSC0035326
tttcaattataaa

SEQ ID NO: 140963 - DNA, 13 bp, Artificial Sequence
  Oligonucleotide for detection of SNP TSC0035328
atataaaaaaaaa

SEQ ID NO: 140964 - DNA, 13 bp, Artificial Sequence
  Oligonucleotide for detection of SNP TSC0035328
tttttttttatat

SEQ ID NO: 140965 - DNA, 13 bp, Artificial Sequence
  Oligonucleotide for detection of SNP TSC0035328
atataagaaaaaa

SEQ ID NO: 140966 - DNA, 13 bp, Artificial Sequence
  Oligonucleotide for detection of SNP TSC0035328
ttttttcttatat

SEQ ID NO: 140967 - DNA, 13 bp, Artificial Sequence
  Oligonucleotide for detection of SNP TSC0035329
taaaaagaaaata

SEQ ID NO: 140968 - DNA, 13 bp, Artificial Sequence
  Oligonucleotide for detection of SNP TSC0035329
tattttcttttta

SEQ ID NO: 140969 - DNA, 13 bp, Artificial Sequence
  Oligonucleotide for detection of SNP TSC0035333
ttgtttagaattt

SEQ ID NO: 140970 - DNA, 13 bp, Artificial Sequence
  Oligonucleotide for detection of SNP TSC0035333
aaattctaaacaa

SEQ ID NO: 140971 - DNA, 13 bp, Artificial Sequence
  Oligonucleotide for detection of SNP TSC0035333
ttgtttggaattt

SEQ ID NO: 140972 - DNA, 13 bp, Artificial Sequence
  Oligonucleotide for detection of SNP TSC0035333
aaattccaaacaa

SEQ ID NO: 140973 - DNA, 13 bp, Artificial Sequence
  Oligonucleotide for detection of SNP TSC0035335
ttatggtgggggg

SEQ ID NO: 140974 - DNA, 13 bp, Artificial Sequence
  Oligonucleotide for detection of SNP TSC0035335
ccccccaccataa

SEQ ID NO: 140975 - DNA, 13 bp, Artificial Sequence
  Oligonucleotide for detection of SNP TSC0035335
ttatggggggggg

SEQ ID NO: 140976 - DNA, 13 bp, Artificial Sequence
  Oligonucleotide for detection of SNP TSC0035335
cccccccccataa

SEQ ID NO: 140977 - DNA, 13 bp, Artificial Sequence
  Oligonucleotide for detection of SNP TSC0035335
ttatggcgggggg

SEQ ID NO: 140978 - DNA, 13 bp, Artificial Sequence
  Oligonucleotide for detection of SNP TSC0035335
ccccccgccataa

SEQ ID NO: 140979 - DNA, 13 bp, Artificial Sequence
  Oligonucleotide for detection of SNP TSC0035335
tttttttttatgg

SEQ ID NO: 140980 - DNA, 13 bp, Artificial Sequence
  Oligonucleotide for detection of SNP TSC0035335
ccataaaaaaaaa

SEQ ID NO: 140981 - DNA, 13 bp, Artificial Sequence
  Oligonucleotide for detection of SNP TSC0035336
gtttattggtgtt

SEQ ID NO: 140982 - DNA, 13 bp, Artificial Sequence
  Oligonucleotide for detection of SNP TSC0035336
aacaccaataaac

SEQ ID NO: 140983 - DNA, 13 bp, Artificial Sequence
  Oligonucleotide for detection of SNP TSC0035336
gtttatcggtgtt

SEQ ID NO: 140984 - DNA, 13 bp, Artificial Sequence
  Oligonucleotide for detection of SNP TSC0035336
aacaccgataaac

SEQ ID NO: 140985 - DNA, 13 bp, Artificial Sequence
  Oligonucleotide for detection of SNP TSC0035336
agtattggtagay

SEQ ID NO: 140986 - DNA, 13 bp, Artificial Sequence
  Oligonucleotide for detection of SNP TSC0035336
rtctaccaatact

SEQ ID NO: 140987 - DNA, 13 bp, Artificial Sequence
  Oligonucleotide for detection of SNP TSC0035336
agtattagtagay

SEQ ID NO: 140988 - DNA, 13 bp, Artificial Sequence
  Oligonucleotide for detection of SNP TSC0035336
rtctactaatact

SEQ ID NO: 140989 - DNA, 13 bp, Artificial Sequence
  Oligonucleotide for detection of SNP TSC0035336
agtatcggtagay

SEQ ID NO: 140990 - DNA, 13 bp, Artificial Sequence
  Oligonucleotide for detection of SNP TSC0035336
rtctaccgatact

SEQ ID NO: 140991 - DNA, 13 bp, Artificial Sequence
  Oligonucleotide for detection of SNP TSC0035337
gtattttggaagg

SEQ ID NO: 140992 - DNA, 13 bp, Artificial Sequence
  Oligonucleotide for detection of SNP TSC0035337
ccttccaaaatac

SEQ ID NO: 140993 - DNA, 13 bp, Artificial Sequence
  Oligonucleotide for detection of SNP TSC0035337
gtatttcggaagg

SEQ ID NO: 140994 - DNA, 13 bp, Artificial Sequence
  Oligonucleotide for detection of SNP TSC0035337
ccttccgaaatac

SEQ ID NO: 140995 - DNA, 13 bp, Artificial Sequence
  Oligonucleotide for detection of SNP TSC0035339
ataagtaagggag

SEQ ID NO: 140996 - DNA, 13 bp, Artificial Sequence
  Oligonucleotide for detection of SNP TSC0035339
ctcccttacttat

SEQ ID NO: 140997 - DNA, 13 bp, Artificial Sequence
  Oligonucleotide for detection of SNP TSC0035339
ataagtgagggag

SEQ ID NO: 140998 - DNA, 13 bp, Artificial Sequence
  Oligonucleotide for detection of SNP TSC0035339
ctccctcacttat

SEQ ID NO: 140999 - DNA, 13 bp, Artificial Sequence
  Oligonucleotide for detection of SNP TSC0035341
tgagttagagtgg

SEQ ID NO: 141000 - DNA, 13 bp, Artificial Sequence
  Oligonucleotide for detection of SNP TSC0035341
ccactctaactca

SEQ ID NO: 141001 - DNA, 13 bp, Artificial Sequence
  Oligonucleotide for detection of SNP TSC0035341
tgagttggagtgg

SEQ ID NO: 141002 - DNA, 13 bp, Artificial Sequence
  Oligonucleotide for detection of SNP TSC0035341
ccactccaactca

SEQ ID NO: 141003 - DNA, 13 bp, Artificial Sequence
  Oligonucleotide for detection of SNP TSC0035342
gggggaatttgta

SEQ ID NO: 141004 - DNA, 13 bp, Artificial Sequence
  Oligonucleotide for detection of SNP TSC0035342
tacaaattccccc

SEQ ID NO: 141005 - DNA, 13 bp, Artificial Sequence
  Oligonucleotide for detection of SNP TSC0035342
gggggattttgta

SEQ ID NO: 141006 - DNA, 13 bp, Artificial Sequence
  Oligonucleotide for detection of SNP TSC0035342
tacaaaatccccc

SEQ ID NO: 141007 - DNA, 13 bp, Artificial Sequence
  Oligonucleotide for detection of SNP TSC0035343
tgttttgtaaagg

SEQ ID NO: 141008 - DNA, 13 bp, Artificial Sequence
  Oligonucleotide for detection of SNP TSC0035343
cctttacaaaaca

SEQ ID NO: 141009 - DNA, 13 bp, Artificial Sequence
  Oligonucleotide for detection of SNP TSC0035343
tgttttataaagg

SEQ ID NO: 141010 - DNA, 13 bp, Artificial Sequence
  Oligonucleotide for detection of SNP TSC0035343
cctttataaaaca

SEQ ID NO: 141011 - DNA, 13 bp, Artificial Sequence
  Oligonucleotide for detection of SNP TSC0035344
aaggtttttttag

SEQ ID NO: 141012 - DNA, 13 bp, Artificial Sequence
  Oligonucleotide for detection of SNP TSC0035344
ctaaaaaaacctt

SEQ ID NO: 141013 - DNA, 13 bp, Artificial Sequence
  Oligonucleotide for detection of SNP TSC0035344
ttggagtgatttt

SEQ ID NO: 141014 - DNA, 13 bp, Artificial Sequence
  Oligonucleotide for detection of SNP TSC0035344
aaaatcactccaa

SEQ ID NO: 141015 - DNA, 13 bp, Artificial Sequence
  Oligonucleotide for detection of SNP TSC0035344
ttggagagatttt

SEQ ID NO: 141016 - DNA, 13 bp, Artificial Sequence
  Oligonucleotide for detection of SNP TSC0035344
aaaatctctccaa

SEQ ID NO: 141017 - DNA, 13 bp, Artificial Sequence
  Oligonucleotide for detection of SNP TSC0035345
ggggggagggggg

SEQ ID NO: 141018 - DNA, 13 bp, Artificial Sequence
  Oligonucleotide for detection of SNP TSC0035345
cccccctcccccc

SEQ ID NO: 141019 - DNA, 13 bp, Artificial Sequence
  Oligonucleotide for detection of SNP TSC0035347
agtttttggtttt

SEQ ID NO: 141020 - DNA, 13 bp, Artificial Sequence
  Oligonucleotide for detection of SNP TSC0035347
aaaaccaaaaact

SEQ ID NO: 141021 - DNA, 13 bp, Artificial Sequence
  Oligonucleotide for detection of SNP TSC0035347
agttttcggtttt

SEQ ID NO: 141022 - DNA, 13 bp, Artificial Sequence
  Oligonucleotide for detection of SNP TSC0035347
aaaaccgaaaact

SEQ ID NO: 141023 - DNA, 13 bp, Artificial Sequence
  Oligonucleotide for detection of SNP TSC0035347
agggttgaaaatt

SEQ ID NO: 141024 - DNA, 13 bp, Artificial Sequence
  Oligonucleotide for detection of SNP TSC0035347
aattttcaaccct

SEQ ID NO: 141025 - DNA, 13 bp, Artificial Sequence
  Oligonucleotide for detection of SNP TSC0035347
agggttaaaaatt

SEQ ID NO: 141026 - DNA, 13 bp, Artificial Sequence
  Oligonucleotide for detection of SNP TSC0035347
aatttttaaccct

SEQ ID NO: 141027 - DNA, 13 bp, Artificial Sequence
  Oligonucleotide for detection of SNP TSC0035347
agggtcgaaaatt

SEQ ID NO: 141028 - DNA, 13 bp, Artificial Sequence
  Oligonucleotide for detection of SNP TSC0035347
aattttcgaccct

SEQ ID NO: 141029 - DNA, 13 bp, Artificial Sequence
  Oligonucleotide for detection of SNP TSC0035348
atttagaaggtag

SEQ ID NO: 141030 - DNA, 13 bp, Artificial Sequence
  Oligonucleotide for detection of SNP TSC0035348
ctaccttctaaat

SEQ ID NO: 141031 - DNA, 13 bp, Artificial Sequence
  Oligonucleotide for detection of SNP TSC0035348
atttaggaggtag

SEQ ID NO: 141032 - DNA, 13 bp, Artificial Sequence
  Oligonucleotide for detection of SNP TSC0035348
ctacctcctaaat

SEQ ID NO: 141033 - DNA, 13 bp, Artificial Sequence
  Oligonucleotide for detection of SNP TSC0035350
taggatggggttg

SEQ ID NO: 141034 - DNA, 13 bp, Artificial Sequence
  Oligonucleotide for detection of SNP TSC0035350
caaccccatccta

SEQ ID NO: 141035 - DNA, 13 bp, Artificial Sequence
  Oligonucleotide for detection of SNP TSC0035350
taggattgggttg

SEQ ID NO: 141036 - DNA, 13 bp, Artificial Sequence
  Oligonucleotide for detection of SNP TSC0035350
caacccaatccta

SEQ ID NO: 141037 - DNA, 13 bp, Artificial Sequence
  Oligonucleotide for detection of SNP TSC0035350
taggacggggttg

SEQ ID NO: 141038 - DNA, 13 bp, Artificial Sequence
  Oligonucleotide for detection of SNP TSC0035350
caaccccgtccta

SEQ ID NO: 141039 - DNA, 13 bp, Artificial Sequence
  Oligonucleotide for detection of SNP TSC0035350
taggatcgggttg

SEQ ID NO: 141040 - DNA, 13 bp, Artificial Sequence
  Oligonucleotide for detection of SNP TSC0035350
caacccgatccta

SEQ ID NO: 141041 - DNA, 13 bp, Artificial Sequence
  Oligonucleotide for detection of SNP TSC0035351
ggaagtaattgag

SEQ ID NO: 141042 - DNA, 13 bp, Artificial Sequence
  Oligonucleotide for detection of SNP TSC0035351
ctcaattacttcc

SEQ ID NO: 141043 - DNA, 13 bp, Artificial Sequence
  Oligonucleotide for detection of SNP TSC0035351
ggaagttattgag

SEQ ID NO: 141044 - DNA, 13 bp, Artificial Sequence
  Oligonucleotide for detection of SNP TSC0035351
ctcaataacttcc

SEQ ID NO: 141045 - DNA, 13 bp, Artificial Sequence
  Oligonucleotide for detection of SNP TSC0035351
tttaattatttty

SEQ ID NO: 141046 - DNA, 13 bp, Artificial Sequence
  Oligonucleotide for detection of SNP TSC0035351
raaaataattaaa

SEQ ID NO: 141047 - DNA, 13 bp, Artificial Sequence
  Oligonucleotide for detection of SNP TSC0035351
tttaataatttty

SEQ ID NO: 141048 - DNA, 13 bp, Artificial Sequence
  Oligonucleotide for detection of SNP TSC0035351
raaaattattaaa

SEQ ID NO: 141049 - DNA, 13 bp, Artificial Sequence
  Oligonucleotide for detection of SNP TSC0035352
gaaagtatgtgta

SEQ ID NO: 141050 - DNA, 13 bp, Artificial Sequence
  Oligonucleotide for detection of SNP TSC0035352
tacacatactttc

SEQ ID NO: 141051 - DNA, 13 bp, Artificial Sequence
  Oligonucleotide for detection of SNP TSC0035352
gaaagtgtgtgta

SEQ ID NO: 141052 - DNA, 13 bp, Artificial Sequence
  Oligonucleotide for detection of SNP TSC0035352
tacacacactttc

SEQ ID NO: 141053 - DNA, 13 bp, Artificial Sequence
  Oligonucleotide for detection of SNP TSC0035352
gaaagtatgcgta

SEQ ID NO: 141054 - DNA, 13 bp, Artificial Sequence
  Oligonucleotide for detection of SNP TSC0035352
tacgcatactttc

SEQ ID NO: 141055 - DNA, 13 bp, Artificial Sequence
  Oligonucleotide for detection of SNP TSC0035352
gaaagcgtgtgta

SEQ ID NO: 141056 - DNA, 13 bp, Artificial Sequence
  Oligonucleotide for detection of SNP TSC0035352
tacacacgctttc

SEQ ID NO: 141057 - DNA, 13 bp, Artificial Sequence
  Oligonucleotide for detection of SNP TSC0035352
gaaagtgtgcgta

SEQ ID NO: 141058 - DNA, 13 bp, Artificial Sequence
  Oligonucleotide for detection of SNP TSC0035352
tacgcacactttc

SEQ ID NO: 141059 - DNA, 13 bp, Artificial Sequence
  Oligonucleotide for detection of SNP TSC0035352
gaaagcgtgcgta

SEQ ID NO: 141060 - DNA, 13 bp, Artificial Sequence
  Oligonucleotide for detection of SNP TSC0035352
tacgcacgctttc

SEQ ID NO: 141061 - DNA, 13 bp, Artificial Sequence
  Oligonucleotide for detection of SNP TSC0035352
tatgtatgtttty

SEQ ID NO: 141062 - DNA, 13 bp, Artificial Sequence
  Oligonucleotide for detection of SNP TSC0035352
raaaacatacata

SEQ ID NO: 141063 - DNA, 13 bp, Artificial Sequence
  Oligonucleotide for detection of SNP TSC0035352
tacgtatgtttty

SEQ ID NO: 141064 - DNA, 13 bp, Artificial Sequence
  Oligonucleotide for detection of SNP TSC0035352
raaaacatacgta

SEQ ID NO: 141065 - DNA, 13 bp, Artificial Sequence
  Oligonucleotide for detection of SNP TSC0035352
tatgtacgtttty

SEQ ID NO: 141066 - DNA, 13 bp, Artificial Sequence
  Oligonucleotide for detection of SNP TSC0035352
raaaacgtacata

SEQ ID NO: 141067 - DNA, 13 bp, Artificial Sequence
  Oligonucleotide for detection of SNP TSC0035352
tacgtacgtttty

SEQ ID NO: 141068 - DNA, 13 bp, Artificial Sequence
  Oligonucleotide for detection of SNP TSC0035352
raaaacgtacgta

SEQ ID NO: 141069 - DNA, 13 bp, Artificial Sequence
  Oligonucleotide for detection of SNP TSC0035353
aatagtattgttt

SEQ ID NO: 141070 - DNA, 13 bp, Artificial Sequence
  Oligonucleotide for detection of SNP TSC0035353
aaacaatactatt

SEQ ID NO: 141071 - DNA, 13 bp, Artificial Sequence
  Oligonucleotide for detection of SNP TSC0035353
aatagtgttgttt

SEQ ID NO: 141072 - DNA, 13 bp, Artificial Sequence
  Oligonucleotide for detection of SNP TSC0035353
aaacaacactatt

SEQ ID NO: 141073 - DNA, 13 bp, Artificial Sequence
  Oligonucleotide for detection of SNP TSC0035353
aatagcgttgttt

SEQ ID NO: 141074 - DNA, 13 bp, Artificial Sequence
  Oligonucleotide for detection of SNP TSC0035353
aaacaacgctatt

SEQ ID NO: 141075 - DNA, 13 bp, Artificial Sequence
  Oligonucleotide for detection of SNP TSC0035353
agataatgttatt

SEQ ID NO: 141076 - DNA, 13 bp, Artificial Sequence
  Oligonucleotide for detection of SNP TSC0035353
aataacattatct

SEQ ID NO: 141077 - DNA, 13 bp, Artificial Sequence
  Oligonucleotide for detection of SNP TSC0035353
agataacgttatt

SEQ ID NO: 141078 - DNA, 13 bp, Artificial Sequence
  Oligonucleotide for detection of SNP TSC0035353
aataacgttatct

SEQ ID NO: 141079 - DNA, 13 bp, Artificial Sequence
  Oligonucleotide for detection of SNP TSC0035355
ttattagaatttg

SEQ ID NO: 141080 - DNA, 13 bp, Artificial Sequence
  Oligonucleotide for detection of SNP TSC0035355
caaattctaataa

SEQ ID NO: 141081 - DNA, 13 bp, Artificial Sequence
  Oligonucleotide for detection of SNP TSC0035355
ttattaaaatttg

SEQ ID NO: 141082 - DNA, 13 bp, Artificial Sequence
  Oligonucleotide for detection of SNP TSC0035355
caaattttaataa

SEQ ID NO: 141083 - DNA, 13 bp, Artificial Sequence
  Oligonucleotide for detection of SNP TSC0035356
gaggataggaata

SEQ ID NO: 141084 - DNA, 13 bp, Artificial Sequence
  Oligonucleotide for detection of SNP TSC0035356
tattcctatcctc

SEQ ID NO: 141085 - DNA, 13 bp, Artificial Sequence
  Oligonucleotide for detection of SNP TSC0035356
gaggatgggaata

SEQ ID NO: 141086 - DNA, 13 bp, Artificial Sequence
  Oligonucleotide for detection of SNP TSC0035356
tattcccatcctc

SEQ ID NO: 141087 - DNA, 13 bp, Artificial Sequence
  Oligonucleotide for detection of SNP TSC0035356
gaggacgggaata

SEQ ID NO: 141088 - DNA, 13 bp, Artificial Sequence
  Oligonucleotide for detection of SNP TSC0035356
tattcccgtcctc

SEQ ID NO: 141089 - DNA, 13 bp, Artificial Sequence
  Oligonucleotide for detection of SNP TSC0035360
tattagtaggtaa

SEQ ID NO: 141090 - DNA, 13 bp, Artificial Sequence
  Oligonucleotide for detection of SNP TSC0035360
ttacctactaata

SEQ ID NO: 141091 - DNA, 13 bp, Artificial Sequence
  Oligonucleotide for detection of SNP TSC0035360
tattaggaggtaa

SEQ ID NO: 141092 - DNA, 13 bp, Artificial Sequence
  Oligonucleotide for detection of SNP TSC0035360
ttacctcctaata

SEQ ID NO: 141093 - DNA, 13 bp, Artificial Sequence
  Oligonucleotide for detection of SNP TSC0035360
ttattttttggta

SEQ ID NO: 141094 - DNA, 13 bp, Artificial Sequence
  Oligonucleotide for detection of SNP TSC0035360
taccaaaaaataa

SEQ ID NO: 141095 - DNA, 13 bp, Artificial Sequence
  Oligonucleotide for detection of SNP TSC0035361
tatattattaaat

SEQ ID NO: 141096 - DNA, 13 bp, Artificial Sequence
  Oligonucleotide for detection of SNP TSC0035361
atttaataatata

SEQ ID NO: 141097 - DNA, 13 bp, Artificial Sequence
  Oligonucleotide for detection of SNP TSC0035361
tatattgttaaat

SEQ ID NO: 141098 - DNA, 13 bp, Artificial Sequence
  Oligonucleotide for detection of SNP TSC0035361
atttaacaatata

SEQ ID NO: 141099 - DNA, 13 bp, Artificial Sequence
  Oligonucleotide for detection of SNP TSC0035361
tatatcgttaaat

SEQ ID NO: 141100 - DNA, 13 bp, Artificial Sequence
  Oligonucleotide for detection of SNP TSC0035361
atttaacgatata

SEQ ID NO: 141101 - DNA, 13 bp, Artificial Sequence
  Oligonucleotide for detection of SNP TSC0035361
atttgatgatgtg

SEQ ID NO: 141102 - DNA, 13 bp, Artificial Sequence
  Oligonucleotide for detection of SNP TSC0035361
cacatcatcaaat

SEQ ID NO: 141103 - DNA, 13 bp, Artificial Sequence
  Oligonucleotide for detection of SNP TSC0035361
atttgacgatgtg

SEQ ID NO: 141104 - DNA, 13 bp, Artificial Sequence
  Oligonucleotide for detection of SNP TSC0035361
cacatcgtcaaat

SEQ ID NO: 141105 - DNA, 13 bp, Artificial Sequence
  Oligonucleotide for detection of SNP TSC0035362
tgtaatgttagtt

SEQ ID NO: 141106 - DNA, 13 bp, Artificial Sequence
  Oligonucleotide for detection of SNP TSC0035362
aactaacattaca

SEQ ID NO: 141107 - DNA, 13 bp, Artificial Sequence
  Oligonucleotide for detection of SNP TSC0035363
ggtgtggtggtag

SEQ ID NO: 141108 - DNA, 13 bp, Artificial Sequence
  Oligonucleotide for detection of SNP TSC0035363
ctaccaccacacc

SEQ ID NO: 141109 - DNA, 13 bp, Artificial Sequence
  Oligonucleotide for detection of SNP TSC0035363
ggtgtgttggtag

SEQ ID NO: 141110 - DNA, 13 bp, Artificial Sequence
  Oligonucleotide for detection of SNP TSC0035363
ctaccaacacacc

SEQ ID NO: 141111 - DNA, 13 bp, Artificial Sequence
  Oligonucleotide for detection of SNP TSC0035363
ggcgtggtggtag

SEQ ID NO: 141112 - DNA, 13 bp, Artificial Sequence
  Oligonucleotide for detection of SNP TSC0035363
ctaccaccacgcc

SEQ ID NO: 141113 - DNA, 13 bp, Artificial Sequence
  Oligonucleotide for detection of SNP TSC0035363
ggcgtgttggtag

SEQ ID NO: 141114 - DNA, 13 bp, Artificial Sequence
  Oligonucleotide for detection of SNP TSC0035363
ctaccaacacgcc

SEQ ID NO: 141115 - DNA, 13 bp, Artificial Sequence
  Oligonucleotide for detection of SNP TSC0035363
ttgttattatgty

SEQ ID NO: 141116 - DNA, 13 bp, Artificial Sequence
  Oligonucleotide for detection of SNP TSC0035363
racataataacaa

SEQ ID NO: 141117 - DNA, 13 bp, Artificial Sequence
  Oligonucleotide for detection of SNP TSC0035363
ttgttaatatgty

SEQ ID NO: 141118 - DNA, 13 bp, Artificial Sequence
  Oligonucleotide for detection of SNP TSC0035363
racatattaacaa

SEQ ID NO: 141119 - DNA, 13 bp, Artificial Sequence
  Oligonucleotide for detection of SNP TSC0035363
ttgttattacgty

SEQ ID NO: 141120 - DNA, 13 bp, Artificial Sequence
  Oligonucleotide for detection of SNP TSC0035363
racgtaataacaa

SEQ ID NO: 141121 - DNA, 13 bp, Artificial Sequence
  Oligonucleotide for detection of SNP TSC0035363
ttgttaatacgty

SEQ ID NO: 141122 - DNA, 13 bp, Artificial Sequence
  Oligonucleotide for detection of SNP TSC0035363
racgtattaacaa

SEQ ID NO: 141123 - DNA, 13 bp, Artificial Sequence
  Oligonucleotide for detection of SNP TSC0035366
aattattaatttg

SEQ ID NO: 141124 - DNA, 13 bp, Artificial Sequence
  Oligonucleotide for detection of SNP TSC0035366
caaattaataatt

SEQ ID NO: 141125 - DNA, 13 bp, Artificial Sequence
  Oligonucleotide for detection of SNP TSC0035366
aattatgaatttg

SEQ ID NO: 141126 - DNA, 13 bp, Artificial Sequence
  Oligonucleotide for detection of SNP TSC0035366
caaattcataatt

SEQ ID NO: 141127 - DNA, 13 bp, Artificial Sequence
  Oligonucleotide for detection of SNP TSC0035366
taaattgatggtt

SEQ ID NO: 141128 - DNA, 13 bp, Artificial Sequence
  Oligonucleotide for detection of SNP TSC0035366
aaccatcaattta

SEQ ID NO: 141129 - DNA, 13 bp, Artificial Sequence
  Oligonucleotide for detection of SNP TSC0035366
taaatttatggtt

SEQ ID NO: 141130 - DNA, 13 bp, Artificial Sequence
  Oligonucleotide for detection of SNP TSC0035366
aaccataaattta

SEQ ID NO: 141131 - DNA, 13 bp, Artificial Sequence
  Oligonucleotide for detection of SNP TSC0035370
gagagtgttatat

SEQ ID NO: 141132 - DNA, 13 bp, Artificial Sequence
  Oligonucleotide for detection of SNP TSC0035370
atataacactctc

SEQ ID NO: 141133 - DNA, 13 bp, Artificial Sequence
  Oligonucleotide for detection of SNP TSC0035370
gagagtattatat

SEQ ID NO: 141134 - DNA, 13 bp, Artificial Sequence
  Oligonucleotide for detection of SNP TSC0035370
atataatactctc

SEQ ID NO: 141135 - DNA, 13 bp, Artificial Sequence
  Oligonucleotide for detection of SNP TSC0035371
gatgaagtgattt

SEQ ID NO: 141136 - DNA, 13 bp, Artificial Sequence
  Oligonucleotide for detection of SNP TSC0035371
aaatcacttcatc

SEQ ID NO: 141137 - DNA, 13 bp, Artificial Sequence
  Oligonucleotide for detection of SNP TSC0035371
gatgaaatgattt

SEQ ID NO: 141138 - DNA, 13 bp, Artificial Sequence
  Oligonucleotide for detection of SNP TSC0035371
aaatcatttcatc

SEQ ID NO: 141139 - DNA, 13 bp, Artificial Sequence
  Oligonucleotide for detection of SNP TSC0035376
gatttaaatttag

SEQ ID NO: 141140 - DNA, 13 bp, Artificial Sequence
  Oligonucleotide for detection of SNP TSC0035376
ctaaatttaaatc

SEQ ID NO: 141141 - DNA, 13 bp, Artificial Sequence
  Oligonucleotide for detection of SNP TSC0035377
aggagatataggt

SEQ ID NO: 141142 - DNA, 13 bp, Artificial Sequence
  Oligonucleotide for detection of SNP TSC0035377
acctatatctcct

SEQ ID NO: 141143 - DNA, 13 bp, Artificial Sequence
  Oligonucleotide for detection of SNP TSC0035377
aggagagataggt

SEQ ID NO: 141144 - DNA, 13 bp, Artificial Sequence
  Oligonucleotide for detection of SNP TSC0035377
acctatctctcct

SEQ ID NO: 141145 - DNA, 13 bp, Artificial Sequence
  Oligonucleotide for detection of SNP TSC0035377
atttgtttttttt

SEQ ID NO: 141146 - DNA, 13 bp, Artificial Sequence
  Oligonucleotide for detection of SNP TSC0035377
aaaaaaaacaaat

SEQ ID NO: 141147 - DNA, 13 bp, Artificial Sequence
  Oligonucleotide for detection of SNP TSC0035378
tgtgtaggtttta

SEQ ID NO: 141148 - DNA, 13 bp, Artificial Sequence
  Oligonucleotide for detection of SNP TSC0035378
taaaacctacaca

SEQ ID NO: 141149 - DNA, 13 bp, Artificial Sequence
  Oligonucleotide for detection of SNP TSC0035378
tgtgtatgtttta

SEQ ID NO: 141150 - DNA, 13 bp, Artificial Sequence
  Oligonucleotide for detection of SNP TSC0035378
taaaacatacaca

SEQ ID NO: 141151 - DNA, 13 bp, Artificial Sequence
  Oligonucleotide for detection of SNP TSC0035378
tgcgtaggtttta

SEQ ID NO: 141152 - DNA, 13 bp, Artificial Sequence
  Oligonucleotide for detection of SNP TSC0035378
taaaacctacgca

SEQ ID NO: 141153 - DNA, 13 bp, Artificial Sequence
  Oligonucleotide for detection of SNP TSC0035378
tgcgtatgtttta

SEQ ID NO: 141154 - DNA, 13 bp, Artificial Sequence
  Oligonucleotide for detection of SNP TSC0035378
taaaacatacgca

SEQ ID NO: 141155 - DNA, 13 bp, Artificial Sequence
  Oligonucleotide for detection of SNP TSC0035378
tgaagtttgtgta

SEQ ID NO: 141156 - DNA, 13 bp, Artificial Sequence
  Oligonucleotide for detection of SNP TSC0035378
tacacaaacttca

SEQ ID NO: 141157 - DNA, 13 bp, Artificial Sequence
  Oligonucleotide for detection of SNP TSC0035378
tgaagtatgtgta

SEQ ID NO: 141158 - DNA, 13 bp, Artificial Sequence
  Oligonucleotide for detection of SNP TSC0035378
tacacatacttca

SEQ ID NO: 141159 - DNA, 13 bp, Artificial Sequence
  Oligonucleotide for detection of SNP TSC0035378
tgaagtttgcgta

SEQ ID NO: 141160 - DNA, 13 bp, Artificial Sequence
  Oligonucleotide for detection of SNP TSC0035378
tacgcaaacttca

SEQ ID NO: 141161 - DNA, 13 bp, Artificial Sequence
  Oligonucleotide for detection of SNP TSC0035378
tgaagtatgcgta

SEQ ID NO: 141162 - DNA, 13 bp, Artificial Sequence
  Oligonucleotide for detection of SNP TSC0035378
tacgcatacttca

SEQ ID NO: 141163 - DNA, 13 bp, Artificial Sequence
  Oligonucleotide for detection of SNP TSC0035379
gtttagatgatty

SEQ ID NO: 141164 - DNA, 13 bp, Artificial Sequence
  Oligonucleotide for detection of SNP TSC0035379
raatcatctaaac

SEQ ID NO: 141165 - DNA, 13 bp, Artificial Sequence
  Oligonucleotide for detection of SNP TSC0035380
gtaggtagttatt

SEQ ID NO: 141166 - DNA, 13 bp, Artificial Sequence
  Oligonucleotide for detection of SNP TSC0035380
aataactacctac

SEQ ID NO: 141167 - DNA, 13 bp, Artificial Sequence
  Oligonucleotide for detection of SNP TSC0035380
gtaggtggttatt

SEQ ID NO: 141168 - DNA, 13 bp, Artificial Sequence
  Oligonucleotide for detection of SNP TSC0035380
aataaccacctac

SEQ ID NO: 141169 - DNA, 13 bp, Artificial Sequence
  Oligonucleotide for detection of SNP TSC0035380
gtaggcggttatt

SEQ ID NO: 141170 - DNA, 13 bp, Artificial Sequence
  Oligonucleotide for detection of SNP TSC0035380
aataaccgcctac

SEQ ID NO: 141171 - DNA, 13 bp, Artificial Sequence
  Oligonucleotide for detection of SNP TSC0035380
aatgattgtttgy

SEQ ID NO: 141172 - DNA, 13 bp, Artificial Sequence
  Oligonucleotide for detection of SNP TSC0035380
rcaaacaatcatt

SEQ ID NO: 141173 - DNA, 13 bp, Artificial Sequence
  Oligonucleotide for detection of SNP TSC0035380
aatgatcgtttgy

SEQ ID NO: 141174 - DNA, 13 bp, Artificial Sequence
  Oligonucleotide for detection of SNP TSC0035380
rcaaacgatcatt

SEQ ID NO: 141175 - DNA, 13 bp, Artificial Sequence
  Oligonucleotide for detection of SNP TSC0035382
tttttgatggggy

SEQ ID NO: 141176 - DNA, 13 bp, Artificial Sequence
  Oligonucleotide for detection of SNP TSC0035382
rccccatcaaaaa

SEQ ID NO: 141177 - DNA, 13 bp, Artificial Sequence
  Oligonucleotide for detection of SNP TSC0035382
tttttggtggggy

SEQ ID NO: 141178 - DNA, 13 bp, Artificial Sequence
  Oligonucleotide for detection of SNP TSC0035382
rccccaccaaaaa

SEQ ID NO: 141179 - DNA, 13 bp, Artificial Sequence
  Oligonucleotide for detection of SNP TSC0035385
attggaggaagga

SEQ ID NO: 141180 - DNA, 13 bp, Artificial Sequence
  Oligonucleotide for detection of SNP TSC0035385
tccttcctccaat

SEQ ID NO: 141181 - DNA, 13 bp, Artificial Sequence
  Oligonucleotide for detection of SNP TSC0035385
attggaagaagga

SEQ ID NO: 141182 - DNA, 13 bp, Artificial Sequence
  Oligonucleotide for detection of SNP TSC0035385
tccttcttccaat

SEQ ID NO: 141183 - DNA, 13 bp, Artificial Sequence
  Oligonucleotide for detection of SNP TSC0035386
taaatgggtttty

SEQ ID NO: 141184 - DNA, 13 bp, Artificial Sequence
  Oligonucleotide for detection of SNP TSC0035386
raaaacccattta

SEQ ID NO: 141185 - DNA, 13 bp, Artificial Sequence
  Oligonucleotide for detection of SNP TSC0035386
taaatgtgtttty

SEQ ID NO: 141186 - DNA, 13 bp, Artificial Sequence
  Oligonucleotide for detection of SNP TSC0035386
raaaacacattta

SEQ ID NO: 141187 - DNA, 13 bp, Artificial Sequence
  Oligonucleotide for detection of SNP TSC0035386
gagagtttattta

SEQ ID NO: 141188 - DNA, 13 bp, Artificial Sequence
  Oligonucleotide for detection of SNP TSC0035386
taaataaactctc

SEQ ID NO: 141189 - DNA, 13 bp, Artificial Sequence
  Oligonucleotide for detection of SNP TSC0035386
gagagtatattta

SEQ ID NO: 141190 - DNA, 13 bp, Artificial Sequence
  Oligonucleotide for detection of SNP TSC0035386
taaatatactctc

SEQ ID NO: 141191 - DNA, 13 bp, Artificial Sequence
  Oligonucleotide for detection of SNP TSC0035387
taagtagttgtta

SEQ ID NO: 141192 - DNA, 13 bp, Artificial Sequence
  Oligonucleotide for detection of SNP TSC0035387
taacaactactta

SEQ ID NO: 141193 - DNA, 13 bp, Artificial Sequence
  Oligonucleotide for detection of SNP TSC0035387
taagtaattgtta

SEQ ID NO: 141194 - DNA, 13 bp, Artificial Sequence
  Oligonucleotide for detection of SNP TSC0035387
taacaattactta

SEQ ID NO: 141195 - DNA, 13 bp, Artificial Sequence
  Oligonucleotide for detection of SNP TSC0035389
tatttgattaatg

SEQ ID NO: 141196 - DNA, 13 bp, Artificial Sequence
  Oligonucleotide for detection of SNP TSC0035389
cattaatcaaata

SEQ ID NO: 141197 - DNA, 13 bp, Artificial Sequence
  Oligonucleotide for detection of SNP TSC0035389
tatttgtttaatg

SEQ ID NO: 141198 - DNA, 13 bp, Artificial Sequence
  Oligonucleotide for detection of SNP TSC0035389
cattaaacaaata

SEQ ID NO: 141199 - DNA, 13 bp, Artificial Sequence
  Oligonucleotide for detection of SNP TSC0035389
tattagttaagtg

SEQ ID NO: 141200 - DNA, 13 bp, Artificial Sequence
  Oligonucleotide for detection of SNP TSC0035389
cacttaactaata

SEQ ID NO: 141201 - DNA, 13 bp, Artificial Sequence
  Oligonucleotide for detection of SNP TSC0035389
tattaggtaagtg

SEQ ID NO: 141202 - DNA, 13 bp, Artificial Sequence
  Oligonucleotide for detection of SNP TSC0035389
cacttacctaata

SEQ ID NO: 141203 - DNA, 13 bp, Artificial Sequence
  Oligonucleotide for detection of SNP TSC0035390
agtggaggaaatt

SEQ ID NO: 141204 - DNA, 13 bp, Artificial Sequence
  Oligonucleotide for detection of SNP TSC0035390
aatttcctccact

SEQ ID NO: 141205 - DNA, 13 bp, Artificial Sequence
  Oligonucleotide for detection of SNP TSC0035390
agtggatgaaatt

SEQ ID NO: 141206 - DNA, 13 bp, Artificial Sequence
  Oligonucleotide for detection of SNP TSC0035390
aatttcatccact

SEQ ID NO: 141207 - DNA, 13 bp, Artificial Sequence
  Oligonucleotide for detection of SNP TSC0035390
agttttttttatt

SEQ ID NO: 141208 - DNA, 13 bp, Artificial Sequence
  Oligonucleotide for detection of SNP TSC0035390
aataaaaaaaact

SEQ ID NO: 141209 - DNA, 13 bp, Artificial Sequence
  Oligonucleotide for detection of SNP TSC0035392
tttggtggaagtg

SEQ ID NO: 141210 - DNA, 13 bp, Artificial Sequence
  Oligonucleotide for detection of SNP TSC0035392
cacttccaccaaa

SEQ ID NO: 141211 - DNA, 13 bp, Artificial Sequence
  Oligonucleotide for detection of SNP TSC0035392
tttggtagaagtg

SEQ ID NO: 141212 - DNA, 13 bp, Artificial Sequence
  Oligonucleotide for detection of SNP TSC0035392
cacttctaccaaa

SEQ ID NO: 141213 - DNA, 13 bp, Artificial Sequence
  Oligonucleotide for detection of SNP TSC0035392
tttggtggaagcg

SEQ ID NO: 141214 - DNA, 13 bp, Artificial Sequence
  Oligonucleotide for detection of SNP TSC0035392
cgcttccaccaaa

SEQ ID NO: 141215 - DNA, 13 bp, Artificial Sequence
  Oligonucleotide for detection of SNP TSC0035392
tttggtagaagcg

SEQ ID NO: 141216 - DNA, 13 bp, Artificial Sequence
  Oligonucleotide for detection of SNP TSC0035392
cgcttctaccaaa

SEQ ID NO: 141217 - DNA, 13 bp, Artificial Sequence
  Oligonucleotide for detection of SNP TSC0035396
gaggggaatggtt

SEQ ID NO: 141218 - DNA, 13 bp, Artificial Sequence
  Oligonucleotide for detection of SNP TSC0035396
aaccattcccctc

SEQ ID NO: 141219 - DNA, 13 bp, Artificial Sequence
  Oligonucleotide for detection of SNP TSC0035396
gagggggatggtt

SEQ ID NO: 141220 - DNA, 13 bp, Artificial Sequence
  Oligonucleotide for detection of SNP TSC0035396
aaccatccccctc

SEQ ID NO: 141221 - DNA, 13 bp, Artificial Sequence
  Oligonucleotide for detection of SNP TSC0035396
gaggggaacggtt

SEQ ID NO: 141222 - DNA, 13 bp, Artificial Sequence
  Oligonucleotide for detection of SNP TSC0035396
aaccgttcccctc

SEQ ID NO: 141223 - DNA, 13 bp, Artificial Sequence
  Oligonucleotide for detection of SNP TSC0035396
gagggggacggtt

SEQ ID NO: 141224 - DNA, 13 bp, Artificial Sequence
  Oligonucleotide for detection of SNP TSC0035396
aaccgtccccctc

SEQ ID NO: 141225 - DNA, 13 bp, Artificial Sequence
  Oligonucleotide for detection of SNP TSC0035397
gtagatgtttaty

SEQ ID NO: 141226 - DNA, 13 bp, Artificial Sequence
  Oligonucleotide for detection of SNP TSC0035397
rataaacatctac

SEQ ID NO: 141227 - DNA, 13 bp, Artificial Sequence
  Oligonucleotide for detection of SNP TSC0035397
gtagatatttaty

SEQ ID NO: 141228 - DNA, 13 bp, Artificial Sequence
  Oligonucleotide for detection of SNP TSC0035397
rataaatatctac

SEQ ID NO: 141229 - DNA, 13 bp, Artificial Sequence
  Oligonucleotide for detection of SNP TSC0035399
tattatattttgy

SEQ ID NO: 141230 - DNA, 13 bp, Artificial Sequence
  Oligonucleotide for detection of SNP TSC0035399
rcaaaatataata

SEQ ID NO: 141231 - DNA, 13 bp, Artificial Sequence
  Oligonucleotide for detection of SNP TSC0035399
tattattttttgy

SEQ ID NO: 141232 - DNA, 13 bp, Artificial Sequence
  Oligonucleotide for detection of SNP TSC0035399
rcaaaaaataata

SEQ ID NO: 141233 - DNA, 13 bp, Artificial Sequence
  Oligonucleotide for detection of SNP TSC0035399
gtaggatgtggtg

SEQ ID NO: 141234 - DNA, 13 bp, Artificial Sequence
  Oligonucleotide for detection of SNP TSC0035399
caccacatcctac

SEQ ID NO: 141235 - DNA, 13 bp, Artificial Sequence
  Oligonucleotide for detection of SNP TSC0035399
gtaggaggtggtg

SEQ ID NO: 141236 - DNA, 13 bp, Artificial Sequence
  Oligonucleotide for detection of SNP TSC0035399
caccacctcctac

SEQ ID NO: 141237 - DNA, 13 bp, Artificial Sequence
  Oligonucleotide for detection of SNP TSC0035400
atagtgatatata

SEQ ID NO: 141238 - DNA, 13 bp, Artificial Sequence
  Oligonucleotide for detection of SNP TSC0035400
tatatatcactat

SEQ ID NO: 141239 - DNA, 13 bp, Artificial Sequence
  Oligonucleotide for detection of SNP TSC0035405
tttattgataaat

SEQ ID NO: 141240 - DNA, 13 bp, Artificial Sequence
  Oligonucleotide for detection of SNP TSC0035405
atttatcaataaa

SEQ ID NO: 141241 - DNA, 13 bp, Artificial Sequence
  Oligonucleotide for detection of SNP TSC0035405
tttattaataaat

SEQ ID NO: 141242 - DNA, 13 bp, Artificial Sequence
  Oligonucleotide for detection of SNP TSC0035405
atttattaataaa

SEQ ID NO: 141243 - DNA, 13 bp, Artificial Sequence
  Oligonucleotide for detection of SNP TSC0035406
atgagtaatttta

SEQ ID NO: 141244 - DNA, 13 bp, Artificial Sequence
  Oligonucleotide for detection of SNP TSC0035406
taaaattactcat

SEQ ID NO: 141245 - DNA, 13 bp, Artificial Sequence
  Oligonucleotide for detection of SNP TSC0035406
atgagtgatttta

SEQ ID NO: 141246 - DNA, 13 bp, Artificial Sequence
  Oligonucleotide for detection of SNP TSC0035406
taaaatcactcat

SEQ ID NO: 141247 - DNA, 13 bp, Artificial Sequence
  Oligonucleotide for detection of SNP TSC0035406
acgagtaatttta

SEQ ID NO: 141248 - DNA, 13 bp, Artificial Sequence
  Oligonucleotide for detection of SNP TSC0035406
taaaattactcgt

SEQ ID NO: 141249 - DNA, 13 bp, Artificial Sequence
  Oligonucleotide for detection of SNP TSC0035406
acgagtgatttta

SEQ ID NO: 141250 - DNA, 13 bp, Artificial Sequence
  Oligonucleotide for detection of SNP TSC0035406
taaaatcactcgt

SEQ ID NO: 141251 - DNA, 13 bp, Artificial Sequence
  Oligonucleotide for detection of SNP TSC0035406
atgagcgatttta

SEQ ID NO: 141252 - DNA, 13 bp, Artificial Sequence
  Oligonucleotide for detection of SNP TSC0035406
taaaatcgctcat

SEQ ID NO: 141253 - DNA, 13 bp, Artificial Sequence
  Oligonucleotide for detection of SNP TSC0035406
acgagcgatttta

SEQ ID NO: 141254 - DNA, 13 bp, Artificial Sequence
  Oligonucleotide for detection of SNP TSC0035406
taaaatcgctcgt

SEQ ID NO: 141255 - DNA, 13 bp, Artificial Sequence
  Oligonucleotide for detection of SNP TSC0035406
tggagttgtttgt

SEQ ID NO: 141256 - DNA, 13 bp, Artificial Sequence
  Oligonucleotide for detection of SNP TSC0035406
acaaacaactcca

SEQ ID NO: 141257 - DNA, 13 bp, Artificial Sequence
  Oligonucleotide for detection of SNP TSC0035406
tggagttgttcgt

SEQ ID NO: 141258 - DNA, 13 bp, Artificial Sequence
  Oligonucleotide for detection of SNP TSC0035406
acgaacaactcca

SEQ ID NO: 141259 - DNA, 13 bp, Artificial Sequence
  Oligonucleotide for detection of SNP TSC0035406
tggagtcgtttgt

SEQ ID NO: 141260 - DNA, 13 bp, Artificial Sequence
  Oligonucleotide for detection of SNP TSC0035406
acaaacgactcca

SEQ ID NO: 141261 - DNA, 13 bp, Artificial Sequence
  Oligonucleotide for detection of SNP TSC0035406
tggagtcgttcgt

SEQ ID NO: 141262 - DNA, 13 bp, Artificial Sequence
  Oligonucleotide for detection of SNP TSC0035406
acgaacgactcca

SEQ ID NO: 141263 - DNA, 13 bp, Artificial Sequence
  Oligonucleotide for detection of SNP TSC0035407
attgattgtaggg

SEQ ID NO: 141264 - DNA, 13 bp, Artificial Sequence
  Oligonucleotide for detection of SNP TSC0035407
ccctacaatcaat

SEQ ID NO: 141265 - DNA, 13 bp, Artificial Sequence
  Oligonucleotide for detection of SNP TSC0035407
atcgattgtaggg

SEQ ID NO: 141266 - DNA, 13 bp, Artificial Sequence
  Oligonucleotide for detection of SNP TSC0035407
ccctacaatcgat

SEQ ID NO: 141267 - DNA, 13 bp, Artificial Sequence
  Oligonucleotide for detection of SNP TSC0035407
attgatcgtaggg

SEQ ID NO: 141268 - DNA, 13 bp, Artificial Sequence
  Oligonucleotide for detection of SNP TSC0035407
ccctacgatcaat

SEQ ID NO: 141269 - DNA, 13 bp, Artificial Sequence
  Oligonucleotide for detection of SNP TSC0035407
atcgatcgtaggg

SEQ ID NO: 141270 - DNA, 13 bp, Artificial Sequence
  Oligonucleotide for detection of SNP TSC0035407
ccctacgatcgat

SEQ ID NO: 141271 - DNA, 13 bp, Artificial Sequence
  Oligonucleotide for detection of SNP TSC0035407
ttttgtggttgat

SEQ ID NO: 141272 - DNA, 13 bp, Artificial Sequence
  Oligonucleotide for detection of SNP TSC0035407
atcaaccacaaaa

SEQ ID NO: 141273 - DNA, 13 bp, Artificial Sequence
  Oligonucleotide for detection of SNP TSC0035407
ttttgtagttgat

SEQ ID NO: 141274 - DNA, 13 bp, Artificial Sequence
  Oligonucleotide for detection of SNP TSC0035407
atcaactacaaaa

SEQ ID NO: 141275 - DNA, 13 bp, Artificial Sequence
  Oligonucleotide for detection of SNP TSC0035407
ttttgcggttgat

SEQ ID NO: 141276 - DNA, 13 bp, Artificial Sequence
  Oligonucleotide for detection of SNP TSC0035407
atcaaccgcaaaa

SEQ ID NO: 141277 - DNA, 13 bp, Artificial Sequence
  Oligonucleotide for detection of SNP TSC0035407
ttttgtagtcgat

SEQ ID NO: 141278 - DNA, 13 bp, Artificial Sequence
  Oligonucleotide for detection of SNP TSC0035407
atcgactacaaaa

SEQ ID NO: 141279 - DNA, 13 bp, Artificial Sequence
  Oligonucleotide for detection of SNP TSC0035407
ttttgtggtcgat

SEQ ID NO: 141280 - DNA, 13 bp, Artificial Sequence
  Oligonucleotide for detection of SNP TSC0035407
atcgaccacaaaa

SEQ ID NO: 141281 - DNA, 13 bp, Artificial Sequence
  Oligonucleotide for detection of SNP TSC0035407
ttttgcggtcgat

SEQ ID NO: 141282 - DNA, 13 bp, Artificial Sequence
  Oligonucleotide for detection of SNP TSC0035407
atcgaccgcaaaa

SEQ ID NO: 141283 - DNA, 13 bp, Artificial Sequence
  Oligonucleotide for detection of SNP TSC0035408
gtgtataggttga

SEQ ID NO: 141284 - DNA, 13 bp, Artificial Sequence
  Oligonucleotide for detection of SNP TSC0035408
tcaacctatacac

SEQ ID NO: 141285 - DNA, 13 bp, Artificial Sequence
  Oligonucleotide for detection of SNP TSC0035408
gtgtatgggttga

SEQ ID NO: 141286 - DNA, 13 bp, Artificial Sequence
  Oligonucleotide for detection of SNP TSC0035408
tcaacccatacac

SEQ ID NO: 141287 - DNA, 13 bp, Artificial Sequence
  Oligonucleotide for detection of SNP TSC0035408
gtgtacgggttga

SEQ ID NO: 141288 - DNA, 13 bp, Artificial Sequence
  Oligonucleotide for detection of SNP TSC0035408
tcaacccgtacac

SEQ ID NO: 141289 - DNA, 13 bp, Artificial Sequence
  Oligonucleotide for detection of SNP TSC0035409
tattaggtggaaa

SEQ ID NO: 141290 - DNA, 13 bp, Artificial Sequence
  Oligonucleotide for detection of SNP TSC0035409
tttccacctaata

SEQ ID NO: 141291 - DNA, 13 bp, Artificial Sequence
  Oligonucleotide for detection of SNP TSC0035409
tattagttggaaa

SEQ ID NO: 141292 - DNA, 13 bp, Artificial Sequence
  Oligonucleotide for detection of SNP TSC0035409
tttccaactaata

SEQ ID NO: 141293 - DNA, 13 bp, Artificial Sequence
  Oligonucleotide for detection of SNP TSC0035409
tttttatttgata

SEQ ID NO: 141294 - DNA, 13 bp, Artificial Sequence
  Oligonucleotide for detection of SNP TSC0035409
tatcaaataaaaa

SEQ ID NO: 141295 - DNA, 13 bp, Artificial Sequence
  Oligonucleotide for detection of SNP TSC0035409
tttttaattgata

SEQ ID NO: 141296 - DNA, 13 bp, Artificial Sequence
  Oligonucleotide for detection of SNP TSC0035409
tatcaattaaaaa

SEQ ID NO: 141297 - DNA, 13 bp, Artificial Sequence
  Oligonucleotide for detection of SNP TSC0035410
aagagagaggtag

SEQ ID NO: 141298 - DNA, 13 bp, Artificial Sequence
  Oligonucleotide for detection of SNP TSC0035410
ctacctctctctt

SEQ ID NO: 141299 - DNA, 13 bp, Artificial Sequence
  Oligonucleotide for detection of SNP TSC0035410
aagagaaaggtag

SEQ ID NO: 141300 - DNA, 13 bp, Artificial Sequence
  Oligonucleotide for detection of SNP TSC0035410
ctacctttctctt

SEQ ID NO: 141301 - DNA, 13 bp, Artificial Sequence
  Oligonucleotide for detection of SNP TSC0035411
ggaagagagaggy

SEQ ID NO: 141302 - DNA, 13 bp, Artificial Sequence
  Oligonucleotide for detection of SNP TSC0035411
rcctctctcttcc

SEQ ID NO: 141303 - DNA, 13 bp, Artificial Sequence
  Oligonucleotide for detection of SNP TSC0035411
ggaagaaagaggy

SEQ ID NO: 141304 - DNA, 13 bp, Artificial Sequence
  Oligonucleotide for detection of SNP TSC0035411
rcctctttcttcc

SEQ ID NO: 141305 - DNA, 13 bp, Artificial Sequence
  Oligonucleotide for detection of SNP TSC0035412
ttaggtgttttay

SEQ ID NO: 141306 - DNA, 13 bp, Artificial Sequence
  Oligonucleotide for detection of SNP TSC0035412
rtaaaacacctaa

SEQ ID NO: 141307 - DNA, 13 bp, Artificial Sequence
  Oligonucleotide for detection of SNP TSC0035416
attgtatgtgaaa

SEQ ID NO: 141308 - DNA, 13 bp, Artificial Sequence
  Oligonucleotide for detection of SNP TSC0035416
tttcacatacaat

SEQ ID NO: 141309 - DNA, 13 bp, Artificial Sequence
  Oligonucleotide for detection of SNP TSC0035416
attgtacgtgaaa

SEQ ID NO: 141310 - DNA, 13 bp, Artificial Sequence
  Oligonucleotide for detection of SNP TSC0035416
tttcacgtacaat

SEQ ID NO: 141311 - DNA, 13 bp, Artificial Sequence
  Oligonucleotide for detection of SNP TSC0035416
ttttatgtatagt

SEQ ID NO: 141312 - DNA, 13 bp, Artificial Sequence
  Oligonucleotide for detection of SNP TSC0035416
actatacataaaa

SEQ ID NO: 141313 - DNA, 13 bp, Artificial Sequence
  Oligonucleotide for detection of SNP TSC0035416
ttttatatatagt

SEQ ID NO: 141314 - DNA, 13 bp, Artificial Sequence
  Oligonucleotide for detection of SNP TSC0035416
actatatataaaa

SEQ ID NO: 141315 - DNA, 13 bp, Artificial Sequence
  Oligonucleotide for detection of SNP TSC0035416
ttttacgtatagt

SEQ ID NO: 141316 - DNA, 13 bp, Artificial Sequence
  Oligonucleotide for detection of SNP TSC0035416
actatacgtaaaa

SEQ ID NO: 141317 - DNA, 13 bp, Artificial Sequence
  Oligonucleotide for detection of SNP TSC0035419
ataaataattttt

SEQ ID NO: 141318 - DNA, 13 bp, Artificial Sequence
  Oligonucleotide for detection of SNP TSC0035419
aaaaattatttat

SEQ ID NO: 141319 - DNA, 13 bp, Artificial Sequence
  Oligonucleotide for detection of SNP TSC0035419
ataaattattttt

SEQ ID NO: 141320 - DNA, 13 bp, Artificial Sequence
  Oligonucleotide for detection of SNP TSC0035419
aaaaataatttat

SEQ ID NO: 141321 - DNA, 13 bp, Artificial Sequence
  Oligonucleotide for detection of SNP TSC0035419
aaaagttatttgt

SEQ ID NO: 141322 - DNA, 13 bp, Artificial Sequence
  Oligonucleotide for detection of SNP TSC0035419
acaaataactttt

SEQ ID NO: 141323 - DNA, 13 bp, Artificial Sequence
  Oligonucleotide for detection of SNP TSC0035419
aaaagtaatttgt

SEQ ID NO: 141324 - DNA, 13 bp, Artificial Sequence
  Oligonucleotide for detection of SNP TSC0035419
acaaattactttt

SEQ ID NO: 141325 - DNA, 13 bp, Artificial Sequence
  Oligonucleotide for detection of SNP TSC0035420
tgtattattaaat

SEQ ID NO: 141326 - DNA, 13 bp, Artificial Sequence
  Oligonucleotide for detection of SNP TSC0035420
atttaataataca

SEQ ID NO: 141327 - DNA, 13 bp, Artificial Sequence
  Oligonucleotide for detection of SNP TSC0035420
tgtattgttaaat

SEQ ID NO: 141328 - DNA, 13 bp, Artificial Sequence
  Oligonucleotide for detection of SNP TSC0035420
atttaacaataca

SEQ ID NO: 141329 - DNA, 13 bp, Artificial Sequence
  Oligonucleotide for detection of SNP TSC0035421
tgattagttttgt

SEQ ID NO: 141330 - DNA, 13 bp, Artificial Sequence
  Oligonucleotide for detection of SNP TSC0035421
acaaaactaatca

SEQ ID NO: 141331 - DNA, 13 bp, Artificial Sequence
  Oligonucleotide for detection of SNP TSC0035421
tgattaattttgt

SEQ ID NO: 141332 - DNA, 13 bp, Artificial Sequence
  Oligonucleotide for detection of SNP TSC0035421
acaaaattaatca

SEQ ID NO: 141333 - DNA, 13 bp, Artificial Sequence
  Oligonucleotide for detection of SNP TSC0035422
ttttataatgttt

SEQ ID NO: 141334 - DNA, 13 bp, Artificial Sequence
  Oligonucleotide for detection of SNP TSC0035422
aaacattataaaa

SEQ ID NO: 141335 - DNA, 13 bp, Artificial Sequence
  Oligonucleotide for detection of SNP TSC0035422
ttttatgatgttt

SEQ ID NO: 141336 - DNA, 13 bp, Artificial Sequence
  Oligonucleotide for detection of SNP TSC0035422
aaacatcataaaa

SEQ ID NO: 141337 - DNA, 13 bp, Artificial Sequence
  Oligonucleotide for detection of SNP TSC0035424
atgtaagttaaaa

SEQ ID NO: 141338 - DNA, 13 bp, Artificial Sequence
  Oligonucleotide for detection of SNP TSC0035424
ttttaacttacat

SEQ ID NO: 141339 - DNA, 13 bp, Artificial Sequence
  Oligonucleotide for detection of SNP TSC0035424
atgtaaattaaaa

SEQ ID NO: 141340 - DNA, 13 bp, Artificial Sequence
  Oligonucleotide for detection of SNP TSC0035424
ttttaatttacat

SEQ ID NO: 141341 - DNA, 13 bp, Artificial Sequence
  Oligonucleotide for detection of SNP TSC0035425
ttatttttgttgt

SEQ ID NO: 141342 - DNA, 13 bp, Artificial Sequence
  Oligonucleotide for detection of SNP TSC0035425
acaacaaaaataa

SEQ ID NO: 141343 - DNA, 13 bp, Artificial Sequence
  Oligonucleotide for detection of SNP TSC0035425
ttatttgtgttgt

SEQ ID NO: 141344 - DNA, 13 bp, Artificial Sequence
  Oligonucleotide for detection of SNP TSC0035425
acaacacaaataa

SEQ ID NO: 141345 - DNA, 13 bp, Artificial Sequence
  Oligonucleotide for detection of SNP TSC0035425
atagtagagatgg

SEQ ID NO: 141346 - DNA, 13 bp, Artificial Sequence
  Oligonucleotide for detection of SNP TSC0035425
ccatctctactat

SEQ ID NO: 141347 - DNA, 13 bp, Artificial Sequence
  Oligonucleotide for detection of SNP TSC0035425
atagtatagatgg

SEQ ID NO: 141348 - DNA, 13 bp, Artificial Sequence
  Oligonucleotide for detection of SNP TSC0035425
ccatctatactat

SEQ ID NO: 141349 - DNA, 13 bp, Artificial Sequence
  Oligonucleotide for detection of SNP TSC0035426
tagtgttgaataa

SEQ ID NO: 141350 - DNA, 13 bp, Artificial Sequence
  Oligonucleotide for detection of SNP TSC0035426
ttattcaacacta

SEQ ID NO: 141351 - DNA, 13 bp, Artificial Sequence
  Oligonucleotide for detection of SNP TSC0035426
tagcgttgaataa

SEQ ID NO: 141352 - DNA, 13 bp, Artificial Sequence
  Oligonucleotide for detection of SNP TSC0035426
ttattcaacgcta

SEQ ID NO: 141353 - DNA, 13 bp, Artificial Sequence
  Oligonucleotide for detection of SNP TSC0035426
tagtgtcgaataa

SEQ ID NO: 141354 - DNA, 13 bp, Artificial Sequence
  Oligonucleotide for detection of SNP TSC0035426
ttattcgacacta

SEQ ID NO: 141355 - DNA, 13 bp, Artificial Sequence
  Oligonucleotide for detection of SNP TSC0035426
tagcgtcgaataa

SEQ ID NO: 141356 - DNA, 13 bp, Artificial Sequence
  Oligonucleotide for detection of SNP TSC0035426
ttattcgacgcta

SEQ ID NO: 141357 - DNA, 13 bp, Artificial Sequence
  Oligonucleotide for detection of SNP TSC0035426
ttatttggtgttg

SEQ ID NO: 141358 - DNA, 13 bp, Artificial Sequence
  Oligonucleotide for detection of SNP TSC0035426
caacaccaaataa

SEQ ID NO: 141359 - DNA, 13 bp, Artificial Sequence
  Oligonucleotide for detection of SNP TSC0035426
ttatttagtgttg

SEQ ID NO: 141360 - DNA, 13 bp, Artificial Sequence
  Oligonucleotide for detection of SNP TSC0035426
caacactaaataa

SEQ ID NO: 141361 - DNA, 13 bp, Artificial Sequence
  Oligonucleotide for detection of SNP TSC0035426
ttattcggtgttg

SEQ ID NO: 141362 - DNA, 13 bp, Artificial Sequence
  Oligonucleotide for detection of SNP TSC0035426
caacaccgaataa

SEQ ID NO: 141363 - DNA, 13 bp, Artificial Sequence
  Oligonucleotide for detection of SNP TSC0035426
ttatttagcgttg

SEQ ID NO: 141364 - DNA, 13 bp, Artificial Sequence
  Oligonucleotide for detection of SNP TSC0035426
caacgctaaataa

SEQ ID NO: 141365 - DNA, 13 bp, Artificial Sequence
  Oligonucleotide for detection of SNP TSC0035426
ttatttggcgttg

SEQ ID NO: 141366 - DNA, 13 bp, Artificial Sequence
  Oligonucleotide for detection of SNP TSC0035426
caacgccaaataa

SEQ ID NO: 141367 - DNA, 13 bp, Artificial Sequence
  Oligonucleotide for detection of SNP TSC0035426
ttattcggcgttg

SEQ ID NO: 141368 - DNA, 13 bp, Artificial Sequence
  Oligonucleotide for detection of SNP TSC0035426
caacgccgaataa

SEQ ID NO: 141369 - DNA, 13 bp, Artificial Sequence
  Oligonucleotide for detection of SNP TSC0035427
ttgtggataaggt

SEQ ID NO: 141370 - DNA, 13 bp, Artificial Sequence
  Oligonucleotide for detection of SNP TSC0035427
accttatccacaa

SEQ ID NO: 141371 - DNA, 13 bp, Artificial Sequence
  Oligonucleotide for detection of SNP TSC0035427
ttgtgggtaaggt

SEQ ID NO: 141372 - DNA, 13 bp, Artificial Sequence
  Oligonucleotide for detection of SNP TSC0035427
accttacccacaa

SEQ ID NO: 141373 - DNA, 13 bp, Artificial Sequence
  Oligonucleotide for detection of SNP TSC0035429
agtaagtaagaaa

SEQ ID NO: 141374 - DNA, 13 bp, Artificial Sequence
  Oligonucleotide for detection of SNP TSC0035429
tttcttacttact

SEQ ID NO: 141375 - DNA, 13 bp, Artificial Sequence
  Oligonucleotide for detection of SNP TSC0035429
agtaagaaagaaa

SEQ ID NO: 141376 - DNA, 13 bp, Artificial Sequence
  Oligonucleotide for detection of SNP TSC0035429
tttctttcttact

SEQ ID NO: 141377 - DNA, 13 bp, Artificial Sequence
  Oligonucleotide for detection of SNP TSC0035430
agaaagtaagtaa

SEQ ID NO: 141378 - DNA, 13 bp, Artificial Sequence
  Oligonucleotide for detection of SNP TSC0035430
ttacttactttct

SEQ ID NO: 141379 - DNA, 13 bp, Artificial Sequence
  Oligonucleotide for detection of SNP TSC0035430
agaaagaaagtaa

SEQ ID NO: 141380 - DNA, 13 bp, Artificial Sequence
  Oligonucleotide for detection of SNP TSC0035430
ttactttctttct

SEQ ID NO: 141381 - DNA, 13 bp, Artificial Sequence
  Oligonucleotide for detection of SNP TSC0035431
ggttaggaatttg

SEQ ID NO: 141382 - DNA, 13 bp, Artificial Sequence
  Oligonucleotide for detection of SNP TSC0035431
caaattcctaacc

SEQ ID NO: 141383 - DNA, 13 bp, Artificial Sequence
  Oligonucleotide for detection of SNP TSC0035431
ggttagtaatttg

SEQ ID NO: 141384 - DNA, 13 bp, Artificial Sequence
  Oligonucleotide for detection of SNP TSC0035431
caaattactaacc

SEQ ID NO: 141385 - DNA, 13 bp, Artificial Sequence
  Oligonucleotide for detection of SNP TSC0035431
taaatttttggty

SEQ ID NO: 141386 - DNA, 13 bp, Artificial Sequence
  Oligonucleotide for detection of SNP TSC0035431
raccaaaaattta

SEQ ID NO: 141387 - DNA, 13 bp, Artificial Sequence
  Oligonucleotide for detection of SNP TSC0035431
taaattattggty

SEQ ID NO: 141388 - DNA, 13 bp, Artificial Sequence
  Oligonucleotide for detection of SNP TSC0035431
raccaataattta

SEQ ID NO: 141389 - DNA, 13 bp, Artificial Sequence
  Oligonucleotide for detection of SNP TSC0035432
gatgaaagatagt

SEQ ID NO: 141390 - DNA, 13 bp, Artificial Sequence
  Oligonucleotide for detection of SNP TSC0035432
actatctttcatc

SEQ ID NO: 141391 - DNA, 13 bp, Artificial Sequence
  Oligonucleotide for detection of SNP TSC0035432
gatgaaggatagt

SEQ ID NO: 141392 - DNA, 13 bp, Artificial Sequence
  Oligonucleotide for detection of SNP TSC0035432
actatccttcatc

SEQ ID NO: 141393 - DNA, 13 bp, Artificial Sequence
  Oligonucleotide for detection of SNP TSC0035434
ttattttttttty

SEQ ID NO: 141394 - DNA, 13 bp, Artificial Sequence
  Oligonucleotide for detection of SNP TSC0035434
raaaaaaaaataa

SEQ ID NO: 141395 - DNA, 13 bp, Artificial Sequence
  Oligonucleotide for detection of SNP TSC0035434
gaggagtaggtgg

SEQ ID NO: 141396 - DNA, 13 bp, Artificial Sequence
  Oligonucleotide for detection of SNP TSC0035434
ccacctactcctc

SEQ ID NO: 141397 - DNA, 13 bp, Artificial Sequence
  Oligonucleotide for detection of SNP TSC0035434
gaggaggaggtgg

SEQ ID NO: 141398 - DNA, 13 bp, Artificial Sequence
  Oligonucleotide for detection of SNP TSC0035434
ccacctcctcctc

SEQ ID NO: 141399 - DNA, 13 bp, Artificial Sequence
  Oligonucleotide for detection of SNP TSC0035436
tttgtggtggtaa

SEQ ID NO: 141400 - DNA, 13 bp, Artificial Sequence
  Oligonucleotide for detection of SNP TSC0035436
ttaccaccacaaa

SEQ ID NO: 141401 - DNA, 13 bp, Artificial Sequence
  Oligonucleotide for detection of SNP TSC0035436
tttgtgatggtaa

SEQ ID NO: 141402 - DNA, 13 bp, Artificial Sequence
  Oligonucleotide for detection of SNP TSC0035436
ttaccatcacaaa

SEQ ID NO: 141403 - DNA, 13 bp, Artificial Sequence
  Oligonucleotide for detection of SNP TSC0035436
tttgcggtggtaa

SEQ ID NO: 141404 - DNA, 13 bp, Artificial Sequence
  Oligonucleotide for detection of SNP TSC0035436
ttaccaccgcaaa

SEQ ID NO: 141405 - DNA, 13 bp, Artificial Sequence
  Oligonucleotide for detection of SNP TSC0035436
tttgcgatggtaa

SEQ ID NO: 141406 - DNA, 13 bp, Artificial Sequence
  Oligonucleotide for detection of SNP TSC0035436
ttaccatcgcaaa

SEQ ID NO: 141407 - DNA, 13 bp, Artificial Sequence
  Oligonucleotide for detection of SNP TSC0035439
tgtatatgtgtty

SEQ ID NO: 141408 - DNA, 13 bp, Artificial Sequence
  Oligonucleotide for detection of SNP TSC0035439
raacacatataca

SEQ ID NO: 141409 - DNA, 13 bp, Artificial Sequence
  Oligonucleotide for detection of SNP TSC0035439
tgtatacgtgtty

SEQ ID NO: 141410 - DNA, 13 bp, Artificial Sequence
  Oligonucleotide for detection of SNP TSC0035439
raacacgtataca

SEQ ID NO: 141411 - DNA, 13 bp, Artificial Sequence
  Oligonucleotide for detection of SNP TSC0035439
tgtatatgcgtty

SEQ ID NO: 141412 - DNA, 13 bp, Artificial Sequence
  Oligonucleotide for detection of SNP TSC0035439
raacgcatataca

SEQ ID NO: 141413 - DNA, 13 bp, Artificial Sequence
  Oligonucleotide for detection of SNP TSC0035439
tgtatacgcgtty

SEQ ID NO: 141414 - DNA, 13 bp, Artificial Sequence
  Oligonucleotide for detection of SNP TSC0035439
raacgcgtataca

SEQ ID NO: 141415 - DNA, 13 bp, Artificial Sequence
  Oligonucleotide for detection of SNP TSC0035439
gggtgtgtatgta

SEQ ID NO: 141416 - DNA, 13 bp, Artificial Sequence
  Oligonucleotide for detection of SNP TSC0035439
tacatacacaccc

SEQ ID NO: 141417 - DNA, 13 bp, Artificial Sequence
  Oligonucleotide for detection of SNP TSC0035439
gggtgtatatgta

SEQ ID NO: 141418 - DNA, 13 bp, Artificial Sequence
  Oligonucleotide for detection of SNP TSC0035439
tacatatacaccc

SEQ ID NO: 141419 - DNA, 13 bp, Artificial Sequence
  Oligonucleotide for detection of SNP TSC0035439
gggcgtgtatgta

SEQ ID NO: 141420 - DNA, 13 bp, Artificial Sequence
  Oligonucleotide for detection of SNP TSC0035439
tacatacacgccc

SEQ ID NO: 141421 - DNA, 13 bp, Artificial Sequence
  Oligonucleotide for detection of SNP TSC0035439
gggcgtatatgta

SEQ ID NO: 141422 - DNA, 13 bp, Artificial Sequence
  Oligonucleotide for detection of SNP TSC0035439
tacatatacgccc

SEQ ID NO: 141423 - DNA, 13 bp, Artificial Sequence
  Oligonucleotide for detection of SNP TSC0035439
gggtgcgtatgta

SEQ ID NO: 141424 - DNA, 13 bp, Artificial Sequence
  Oligonucleotide for detection of SNP TSC0035439
tacatacgcaccc

SEQ ID NO: 141425 - DNA, 13 bp, Artificial Sequence
  Oligonucleotide for detection of SNP TSC0035439
gggcgcgtatgta

SEQ ID NO: 141426 - DNA, 13 bp, Artificial Sequence
  Oligonucleotide for detection of SNP TSC0035439
tacatacgcgccc

SEQ ID NO: 141427 - DNA, 13 bp, Artificial Sequence
  Oligonucleotide for detection of SNP TSC0035440
aaaatagaataay

SEQ ID NO: 141428 - DNA, 13 bp, Artificial Sequence
  Oligonucleotide for detection of SNP TSC0035440
rttattctatttt

SEQ ID NO: 141429 - DNA, 13 bp, Artificial Sequence
  Oligonucleotide for detection of SNP TSC0035440
aaaatataataay

SEQ ID NO: 141430 - DNA, 13 bp, Artificial Sequence
  Oligonucleotide for detection of SNP TSC0035440
rttattatatttt

SEQ ID NO: 141431 - DNA, 13 bp, Artificial Sequence
  Oligonucleotide for detection of SNP TSC0035440
gttattttgtttt

SEQ ID NO: 141432 - DNA, 13 bp, Artificial Sequence
  Oligonucleotide for detection of SNP TSC0035440
aaaacaaaataac

SEQ ID NO: 141433 - DNA, 13 bp, Artificial Sequence
  Oligonucleotide for detection of SNP TSC0035442
tttgtgtggttaa

SEQ ID NO: 141434 - DNA, 13 bp, Artificial Sequence
  Oligonucleotide for detection of SNP TSC0035442
ttaaccacacaaa

SEQ ID NO: 141435 - DNA, 13 bp, Artificial Sequence
  Oligonucleotide for detection of SNP TSC0035442
tttgtgcggttaa

SEQ ID NO: 141436 - DNA, 13 bp, Artificial Sequence
  Oligonucleotide for detection of SNP TSC0035442
ttaaccgcacaaa

SEQ ID NO: 141437 - DNA, 13 bp, Artificial Sequence
  Oligonucleotide for detection of SNP TSC0035442
ttaattgtataga

SEQ ID NO: 141438 - DNA, 13 bp, Artificial Sequence
  Oligonucleotide for detection of SNP TSC0035442
tctatacaattaa

SEQ ID NO: 141439 - DNA, 13 bp, Artificial Sequence
  Oligonucleotide for detection of SNP TSC0035442
ttaattatataga

SEQ ID NO: 141440 - DNA, 13 bp, Artificial Sequence
  Oligonucleotide for detection of SNP TSC0035442
tctatataattaa

SEQ ID NO: 141441 - DNA, 13 bp, Artificial Sequence
  Oligonucleotide for detection of SNP TSC0035442
ttaatcgtataga

SEQ ID NO: 141442 - DNA, 13 bp, Artificial Sequence
  Oligonucleotide for detection of SNP TSC0035442
tctatacgattaa

SEQ ID NO: 141443 - DNA, 13 bp, Artificial Sequence
  Oligonucleotide for detection of SNP TSC0035443
aaaatgtgtgtaa

SEQ ID NO: 141444 - DNA, 13 bp, Artificial Sequence
  Oligonucleotide for detection of SNP TSC0035443
ttacacacatttt

SEQ ID NO: 141445 - DNA, 13 bp, Artificial Sequence
  Oligonucleotide for detection of SNP TSC0035443
aaaatgcgtgtaa

SEQ ID NO: 141446 - DNA, 13 bp, Artificial Sequence
  Oligonucleotide for detection of SNP TSC0035443
ttacacgcatttt

SEQ ID NO: 141447 - DNA, 13 bp, Artificial Sequence
  Oligonucleotide for detection of SNP TSC0035444
aaatttagttttg

SEQ ID NO: 141448 - DNA, 13 bp, Artificial Sequence
  Oligonucleotide for detection of SNP TSC0035444
caaaactaaattt

SEQ ID NO: 141449 - DNA, 13 bp, Artificial Sequence
  Oligonucleotide for detection of SNP TSC0035444
aaatttggttttg

SEQ ID NO: 141450 - DNA, 13 bp, Artificial Sequence
  Oligonucleotide for detection of SNP TSC0035444
caaaaccaaattt

SEQ ID NO: 141451 - DNA, 13 bp, Artificial Sequence
  Oligonucleotide for detection of SNP TSC0035444
aaatttagtttcg

SEQ ID NO: 141452 - DNA, 13 bp, Artificial Sequence
  Oligonucleotide for detection of SNP TSC0035444
cgaaactaaattt

SEQ ID NO: 141453 - DNA, 13 bp, Artificial Sequence
  Oligonucleotide for detection of SNP TSC0035444
aaattcggttttg

SEQ ID NO: 141454 - DNA, 13 bp, Artificial Sequence
  Oligonucleotide for detection of SNP TSC0035444
caaaaccgaattt

SEQ ID NO: 141455 - DNA, 13 bp, Artificial Sequence
  Oligonucleotide for detection of SNP TSC0035444
aaatttggtttcg

SEQ ID NO: 141456 - DNA, 13 bp, Artificial Sequence
  Oligonucleotide for detection of SNP TSC0035444
cgaaaccaaattt

SEQ ID NO: 141457 - DNA, 13 bp, Artificial Sequence
  Oligonucleotide for detection of SNP TSC0035444
aaattcggtttcg

SEQ ID NO: 141458 - DNA, 13 bp, Artificial Sequence
  Oligonucleotide for detection of SNP TSC0035444
cgaaaccgaattt

SEQ ID NO: 141459 - DNA, 13 bp, Artificial Sequence
  Oligonucleotide for detection of SNP TSC0035444
tggggttgagttt

SEQ ID NO: 141460 - DNA, 13 bp, Artificial Sequence
  Oligonucleotide for detection of SNP TSC0035444
aaactcaacccca

SEQ ID NO: 141461 - DNA, 13 bp, Artificial Sequence
  Oligonucleotide for detection of SNP TSC0035444
cggggttgagttt

SEQ ID NO: 141462 - DNA, 13 bp, Artificial Sequence
  Oligonucleotide for detection of SNP TSC0035444
aaactcaaccccg

SEQ ID NO: 141463 - DNA, 13 bp, Artificial Sequence
  Oligonucleotide for detection of SNP TSC0035444
tggggtcgagttt

SEQ ID NO: 141464 - DNA, 13 bp, Artificial Sequence
  Oligonucleotide for detection of SNP TSC0035444
aaactcgacccca

SEQ ID NO: 141465 - DNA, 13 bp, Artificial Sequence
  Oligonucleotide for detection of SNP TSC0035444
cggggtcgagttt

SEQ ID NO: 141466 - DNA, 13 bp, Artificial Sequence
  Oligonucleotide for detection of SNP TSC0035444
aaactcgaccccg

SEQ ID NO: 141467 - DNA, 13 bp, Artificial Sequence
  Oligonucleotide for detection of SNP TSC0035446
agtattattgtgy

SEQ ID NO: 141468 - DNA, 13 bp, Artificial Sequence
  Oligonucleotide for detection of SNP TSC0035446
rcacaataatact

SEQ ID NO: 141469 - DNA, 13 bp, Artificial Sequence
  Oligonucleotide for detection of SNP TSC0035446
agtatttttgtgy

SEQ ID NO: 141470 - DNA, 13 bp, Artificial Sequence
  Oligonucleotide for detection of SNP TSC0035446
rcacaaaaatact

SEQ ID NO: 141471 - DNA, 13 bp, Artificial Sequence
  Oligonucleotide for detection of SNP TSC0035446
gtataatgatatt

SEQ ID NO: 141472 - DNA, 13 bp, Artificial Sequence
  Oligonucleotide for detection of SNP TSC0035446
aatatcattatac

SEQ ID NO: 141473 - DNA, 13 bp, Artificial Sequence
  Oligonucleotide for detection of SNP TSC0035446
gtataaggatatt

SEQ ID NO: 141474 - DNA, 13 bp, Artificial Sequence
  Oligonucleotide for detection of SNP TSC0035446
aatatccttatac

SEQ ID NO: 141475 - DNA, 13 bp, Artificial Sequence
  Oligonucleotide for detection of SNP TSC0035447
gtaggtagtgttt

SEQ ID NO: 141476 - DNA, 13 bp, Artificial Sequence
  Oligonucleotide for detection of SNP TSC0035447
aaacactacctac

SEQ ID NO: 141477 - DNA, 13 bp, Artificial Sequence
  Oligonucleotide for detection of SNP TSC0035447
gtaggtggtgttt

SEQ ID NO: 141478 - DNA, 13 bp, Artificial Sequence
  Oligonucleotide for detection of SNP TSC0035447
aaacaccacctac

SEQ ID NO: 141479 - DNA, 13 bp, Artificial Sequence
  Oligonucleotide for detection of SNP TSC0035447
gtaggtagcgttt

SEQ ID NO: 141480 - DNA, 13 bp, Artificial Sequence
  Oligonucleotide for detection of SNP TSC0035447
aaacgctacctac

SEQ ID NO: 141481 - DNA, 13 bp, Artificial Sequence
  Oligonucleotide for detection of SNP TSC0035447
gtaggcggtgttt

SEQ ID NO: 141482 - DNA, 13 bp, Artificial Sequence
  Oligonucleotide for detection of SNP TSC0035447
aaacaccgcctac

SEQ ID NO: 141483 - DNA, 13 bp, Artificial Sequence
  Oligonucleotide for detection of SNP TSC0035447
gtaggtggcgttt

SEQ ID NO: 141484 - DNA, 13 bp, Artificial Sequence
  Oligonucleotide for detection of SNP TSC0035447
aaacgccacctac

SEQ ID NO: 141485 - DNA, 13 bp, Artificial Sequence
  Oligonucleotide for detection of SNP TSC0035447
gtaggcggcgttt

SEQ ID NO: 141486 - DNA, 13 bp, Artificial Sequence
  Oligonucleotide for detection of SNP TSC0035447
aaacgccgcctac

SEQ ID NO: 141487 - DNA, 13 bp, Artificial Sequence
  Oligonucleotide for detection of SNP TSC0035447
aggtgttgtttgy

SEQ ID NO: 141488 - DNA, 13 bp, Artificial Sequence
  Oligonucleotide for detection of SNP TSC0035447
rcaaacaacacct

SEQ ID NO: 141489 - DNA, 13 bp, Artificial Sequence
  Oligonucleotide for detection of SNP TSC0035447
aggcgttgtttgy

SEQ ID NO: 141490 - DNA, 13 bp, Artificial Sequence
  Oligonucleotide for detection of SNP TSC0035447
rcaaacaacgcct

SEQ ID NO: 141491 - DNA, 13 bp, Artificial Sequence
  Oligonucleotide for detection of SNP TSC0035447
aggtgtcgtttgy

SEQ ID NO: 141492 - DNA, 13 bp, Artificial Sequence
  Oligonucleotide for detection of SNP TSC0035447
rcaaacgacacct

SEQ ID NO: 141493 - DNA, 13 bp, Artificial Sequence
  Oligonucleotide for detection of SNP TSC0035447
aggcgtcgtttgy

SEQ ID NO: 141494 - DNA, 13 bp, Artificial Sequence
  Oligonucleotide for detection of SNP TSC0035447
rcaaacgacgcct

SEQ ID NO: 141495 - DNA, 13 bp, Artificial Sequence
  Oligonucleotide for detection of SNP TSC0035448
ttttttaattgtt

SEQ ID NO: 141496 - DNA, 13 bp, Artificial Sequence
  Oligonucleotide for detection of SNP TSC0035448
aacaattaaaaaa

SEQ ID NO: 141497 - DNA, 13 bp, Artificial Sequence
  Oligonucleotide for detection of SNP TSC0035448
tttttttattgtt

SEQ ID NO: 141498 - DNA, 13 bp, Artificial Sequence
  Oligonucleotide for detection of SNP TSC0035448
aacaataaaaaaa

SEQ ID NO: 141499 - DNA, 13 bp, Artificial Sequence
  Oligonucleotide for detection of SNP TSC0035448
aatagttaaaaaa

SEQ ID NO: 141500 - DNA, 13 bp, Artificial Sequence
  Oligonucleotide for detection of SNP TSC0035448
ttttttaactatt

SEQ ID NO: 141501 - DNA, 13 bp, Artificial Sequence
  Oligonucleotide for detection of SNP TSC0035448
aatagtaaaaaaa

SEQ ID NO: 141502 - DNA, 13 bp, Artificial Sequence
  Oligonucleotide for detection of SNP TSC0035448
tttttttactatt

SEQ ID NO: 141503 - DNA, 13 bp, Artificial Sequence
  Oligonucleotide for detection of SNP TSC0035454
atgtatatttatg

SEQ ID NO: 141504 - DNA, 13 bp, Artificial Sequence
  Oligonucleotide for detection of SNP TSC0035454
cataaatatacat

SEQ ID NO: 141505 - DNA, 13 bp, Artificial Sequence
  Oligonucleotide for detection of SNP TSC0035454
atgtatgtttatg

SEQ ID NO: 141506 - DNA, 13 bp, Artificial Sequence
  Oligonucleotide for detection of SNP TSC0035454
cataaacatacat

SEQ ID NO: 141507 - DNA, 13 bp, Artificial Sequence
  Oligonucleotide for detection of SNP TSC0035454
atgtacgtttatg

SEQ ID NO: 141508 - DNA, 13 bp, Artificial Sequence
  Oligonucleotide for detection of SNP TSC0035454
cataaacgtacat

SEQ ID NO: 141509 - DNA, 13 bp, Artificial Sequence
  Oligonucleotide for detection of SNP TSC0035454
tataaatgtatat

SEQ ID NO: 141510 - DNA, 13 bp, Artificial Sequence
  Oligonucleotide for detection of SNP TSC0035454
atatacatttata

SEQ ID NO: 141511 - DNA, 13 bp, Artificial Sequence
  Oligonucleotide for detection of SNP TSC0035454
tataaacgtatat

SEQ ID NO: 141512 - DNA, 13 bp, Artificial Sequence
  Oligonucleotide for detection of SNP TSC0035454
atatacgtttata

SEQ ID NO: 141513 - DNA, 13 bp, Artificial Sequence
  Oligonucleotide for detection of SNP TSC0035455
tagttacgtatat

SEQ ID NO: 141514 - DNA, 13 bp, Artificial Sequence
  Oligonucleotide for detection of SNP TSC0035455
atatacgtaacta

SEQ ID NO: 141515 - DNA, 13 bp, Artificial Sequence
  Oligonucleotide for detection of SNP TSC0035455
atatacgtaattg

SEQ ID NO: 141516 - DNA, 13 bp, Artificial Sequence
  Oligonucleotide for detection of SNP TSC0035455
caattacgtatat

SEQ ID NO: 141517 - DNA, 13 bp, Artificial Sequence
  Oligonucleotide for detection of SNP TSC0035456
gtatattgtgata

SEQ ID NO: 141518 - DNA, 13 bp, Artificial Sequence
  Oligonucleotide for detection of SNP TSC0035456
tatcacaatatac

SEQ ID NO: 141519 - DNA, 13 bp, Artificial Sequence
  Oligonucleotide for detection of SNP TSC0035456
gtatatcgtgata

SEQ ID NO: 141520 - DNA, 13 bp, Artificial Sequence
  Oligonucleotide for detection of SNP TSC0035456
tatcacgatatac

SEQ ID NO: 141521 - DNA, 13 bp, Artificial Sequence
  Oligonucleotide for detection of SNP TSC0035456
tattatgatatay

SEQ ID NO: 141522 - DNA, 13 bp, Artificial Sequence
  Oligonucleotide for detection of SNP TSC0035456
rtatatcataata

SEQ ID NO: 141523 - DNA, 13 bp, Artificial Sequence
  Oligonucleotide for detection of SNP TSC0035456
tattataatatay

SEQ ID NO: 141524 - DNA, 13 bp, Artificial Sequence
  Oligonucleotide for detection of SNP TSC0035456
rtatattataata

SEQ ID NO: 141525 - DNA, 13 bp, Artificial Sequence
  Oligonucleotide for detection of SNP TSC0035456
tattacgatatay

SEQ ID NO: 141526 - DNA, 13 bp, Artificial Sequence
  Oligonucleotide for detection of SNP TSC0035456
rtatatcgtaata

SEQ ID NO: 141527 - DNA, 13 bp, Artificial Sequence
  Oligonucleotide for detection of SNP TSC0035457
tttgtatgtatty

SEQ ID NO: 141528 - DNA, 13 bp, Artificial Sequence
  Oligonucleotide for detection of SNP TSC0035457
raatacatacaaa

SEQ ID NO: 141529 - DNA, 13 bp, Artificial Sequence
  Oligonucleotide for detection of SNP TSC0035457
tttgtacgtatty

SEQ ID NO: 141530 - DNA, 13 bp, Artificial Sequence
  Oligonucleotide for detection of SNP TSC0035457
raatacgtacaaa

SEQ ID NO: 141531 - DNA, 13 bp, Artificial Sequence
  Oligonucleotide for detection of SNP TSC0035457
gagtatgtataaa

SEQ ID NO: 141532 - DNA, 13 bp, Artificial Sequence
  Oligonucleotide for detection of SNP TSC0035457
tttatacatactc

SEQ ID NO: 141533 - DNA, 13 bp, Artificial Sequence
  Oligonucleotide for detection of SNP TSC0035457
gagtatatataaa

SEQ ID NO: 141534 - DNA, 13 bp, Artificial Sequence
  Oligonucleotide for detection of SNP TSC0035457
tttatatatactc

SEQ ID NO: 141535 - DNA, 13 bp, Artificial Sequence
  Oligonucleotide for detection of SNP TSC0035457
gagtacgtataaa

SEQ ID NO: 141536 - DNA, 13 bp, Artificial Sequence
  Oligonucleotide for detection of SNP TSC0035457
tttatacgtactc

SEQ ID NO: 141537 - DNA, 13 bp, Artificial Sequence
  Oligonucleotide for detection of SNP TSC0035461
atgaagattttty

SEQ ID NO: 141538 - DNA, 13 bp, Artificial Sequence
  Oligonucleotide for detection of SNP TSC0035461
raaaaatcttcat

SEQ ID NO: 141539 - DNA, 13 bp, Artificial Sequence
  Oligonucleotide for detection of SNP TSC0035461
atgaaggttttty

SEQ ID NO: 141540 - DNA, 13 bp, Artificial Sequence
  Oligonucleotide for detection of SNP TSC0035461
raaaaaccttcat

SEQ ID NO: 141541 - DNA, 13 bp, Artificial Sequence
  Oligonucleotide for detection of SNP TSC0035462
aggagtggttgga

SEQ ID NO: 141542 - DNA, 13 bp, Artificial Sequence
  Oligonucleotide for detection of SNP TSC0035462
tccaaccactcct

SEQ ID NO: 141543 - DNA, 13 bp, Artificial Sequence
  Oligonucleotide for detection of SNP TSC0035462
aggagtagttgga

SEQ ID NO: 141544 - DNA, 13 bp, Artificial Sequence
  Oligonucleotide for detection of SNP TSC0035462
tccaactactcct

SEQ ID NO: 141545 - DNA, 13 bp, Artificial Sequence
  Oligonucleotide for detection of SNP TSC0035462
aggagcggttgga

SEQ ID NO: 141546 - DNA, 13 bp, Artificial Sequence
  Oligonucleotide for detection of SNP TSC0035462
tccaaccgctcct

SEQ ID NO: 141547 - DNA, 13 bp, Artificial Sequence
  Oligonucleotide for detection of SNP TSC0035463
ggttttagagatg

SEQ ID NO: 141548 - DNA, 13 bp, Artificial Sequence
  Oligonucleotide for detection of SNP TSC0035463
catctctaaaacc

SEQ ID NO: 141549 - DNA, 13 bp, Artificial Sequence
  Oligonucleotide for detection of SNP TSC0035463
ggtttttgagatg

SEQ ID NO: 141550 - DNA, 13 bp, Artificial Sequence
  Oligonucleotide for detection of SNP TSC0035463
catctcaaaaacc

SEQ ID NO: 141551 - DNA, 13 bp, Artificial Sequence
  Oligonucleotide for detection of SNP TSC0035463
tatttttgagaty

SEQ ID NO: 141552 - DNA, 13 bp, Artificial Sequence
  Oligonucleotide for detection of SNP TSC0035463
ratctcaaaaata

SEQ ID NO: 141553 - DNA, 13 bp, Artificial Sequence
  Oligonucleotide for detection of SNP TSC0035463
tattttagagaty

SEQ ID NO: 141554 - DNA, 13 bp, Artificial Sequence
  Oligonucleotide for detection of SNP TSC0035463
ratctctaaaata

SEQ ID NO: 141555 - DNA, 13 bp, Artificial Sequence
  Oligonucleotide for detection of SNP TSC0035464
aagtagttagaaa

SEQ ID NO: 141556 - DNA, 13 bp, Artificial Sequence
  Oligonucleotide for detection of SNP TSC0035464
tttctaactactt

SEQ ID NO: 141557 - DNA, 13 bp, Artificial Sequence
  Oligonucleotide for detection of SNP TSC0035464
aagtaggtagaaa

SEQ ID NO: 141558 - DNA, 13 bp, Artificial Sequence
  Oligonucleotide for detection of SNP TSC0035464
tttctacctactt

SEQ ID NO: 141559 - DNA, 13 bp, Artificial Sequence
  Oligonucleotide for detection of SNP TSC0035464
tttttagttattt

SEQ ID NO: 141560 - DNA, 13 bp, Artificial Sequence
  Oligonucleotide for detection of SNP TSC0035464
aaataactaaaaa

SEQ ID NO: 141561 - DNA, 13 bp, Artificial Sequence
  Oligonucleotide for detection of SNP TSC0035465
gtagtagttattg

SEQ ID NO: 141562 - DNA, 13 bp, Artificial Sequence
  Oligonucleotide for detection of SNP TSC0035465
caataactactac

SEQ ID NO: 141563 - DNA, 13 bp, Artificial Sequence
  Oligonucleotide for detection of SNP TSC0035465
gtagtaattattg

SEQ ID NO: 141564 - DNA, 13 bp, Artificial Sequence
  Oligonucleotide for detection of SNP TSC0035465
caataattactac

SEQ ID NO: 141565 - DNA, 13 bp, Artificial Sequence
  Oligonucleotide for detection of SNP TSC0035466
ttaagatgatagy

SEQ ID NO: 141566 - DNA, 13 bp, Artificial Sequence
  Oligonucleotide for detection of SNP TSC0035466
rctatcatcttaa

SEQ ID NO: 141567 - DNA, 13 bp, Artificial Sequence
  Oligonucleotide for detection of SNP TSC0035466
ttaagacgatagy

SEQ ID NO: 141568 - DNA, 13 bp, Artificial Sequence
  Oligonucleotide for detection of SNP TSC0035466
rctatcgtcttaa

SEQ ID NO: 141569 - DNA, 13 bp, Artificial Sequence
  Oligonucleotide for detection of SNP TSC0035466
gttgttgttttga

SEQ ID NO: 141570 - DNA, 13 bp, Artificial Sequence
  Oligonucleotide for detection of SNP TSC0035466
tcaaaacaacaac

SEQ ID NO: 141571 - DNA, 13 bp, Artificial Sequence
  Oligonucleotide for detection of SNP TSC0035466
gttgttattttga

SEQ ID NO: 141572 - DNA, 13 bp, Artificial Sequence
  Oligonucleotide for detection of SNP TSC0035466
tcaaaataacaac

SEQ ID NO: 141573 - DNA, 13 bp, Artificial Sequence
  Oligonucleotide for detection of SNP TSC0035466
gttgtcgttttga

SEQ ID NO: 141574 - DNA, 13 bp, Artificial Sequence
  Oligonucleotide for detection of SNP TSC0035466
tcaaaacgacaac

SEQ ID NO: 141575 - DNA, 13 bp, Artificial Sequence
  Oligonucleotide for detection of SNP TSC0035471
ggaattattatay

SEQ ID NO: 141576 - DNA, 13 bp, Artificial Sequence
  Oligonucleotide for detection of SNP TSC0035471
rtataataattcc

SEQ ID NO: 141577 - DNA, 13 bp, Artificial Sequence
  Oligonucleotide for detection of SNP TSC0035471
ggaattgttatay

SEQ ID NO: 141578 - DNA, 13 bp, Artificial Sequence
  Oligonucleotide for detection of SNP TSC0035471
rtataacaattcc

SEQ ID NO: 141579 - DNA, 13 bp, Artificial Sequence
  Oligonucleotide for detection of SNP TSC0035471
ggaatcgttatay

SEQ ID NO: 141580 - DNA, 13 bp, Artificial Sequence
  Oligonucleotide for detection of SNP TSC0035471
rtataacgattcc

SEQ ID NO: 141581 - DNA, 13 bp, Artificial Sequence
  Oligonucleotide for detection of SNP TSC0035471
gtgtggtgattty

SEQ ID NO: 141582 - DNA, 13 bp, Artificial Sequence
  Oligonucleotide for detection of SNP TSC0035471
raaatcaccacac

SEQ ID NO: 141583 - DNA, 13 bp, Artificial Sequence
  Oligonucleotide for detection of SNP TSC0035471
gtgtggcgattty

SEQ ID NO: 141584 - DNA, 13 bp, Artificial Sequence
  Oligonucleotide for detection of SNP TSC0035471
raaatcgccacac

SEQ ID NO: 141585 - DNA, 13 bp, Artificial Sequence
  Oligonucleotide for detection of SNP TSC0035473
tagtaattgaatg

SEQ ID NO: 141586 - DNA, 13 bp, Artificial Sequence
  Oligonucleotide for detection of SNP TSC0035473
cattcaattacta

SEQ ID NO: 141587 - DNA, 13 bp, Artificial Sequence
  Oligonucleotide for detection of SNP TSC0035473
tagtaagtgaatg

SEQ ID NO: 141588 - DNA, 13 bp, Artificial Sequence
  Oligonucleotide for detection of SNP TSC0035473
cattcacttacta

SEQ ID NO: 141589 - DNA, 13 bp, Artificial Sequence
  Oligonucleotide for detection of SNP TSC0035473
tatttagttattg

SEQ ID NO: 141590 - DNA, 13 bp, Artificial Sequence
  Oligonucleotide for detection of SNP TSC0035473
caataactaaata

SEQ ID NO: 141591 - DNA, 13 bp, Artificial Sequence
  Oligonucleotide for detection of SNP TSC0035473
tatttatttattg

SEQ ID NO: 141592 - DNA, 13 bp, Artificial Sequence
  Oligonucleotide for detection of SNP TSC0035473
caataaataaata

SEQ ID NO: 141593 - DNA, 13 bp, Artificial Sequence
  Oligonucleotide for detection of SNP TSC0035474
tagataaagttgy

SEQ ID NO: 141594 - DNA, 13 bp, Artificial Sequence
  Oligonucleotide for detection of SNP TSC0035474
rcaactttatcta

SEQ ID NO: 141595 - DNA, 13 bp, Artificial Sequence
  Oligonucleotide for detection of SNP TSC0035474
tagatagagttgy

SEQ ID NO: 141596 - DNA, 13 bp, Artificial Sequence
  Oligonucleotide for detection of SNP TSC0035474
rcaactctatcta

SEQ ID NO: 141597 - DNA, 13 bp, Artificial Sequence
  Oligonucleotide for detection of SNP TSC0035476
ttagtatgtttat

SEQ ID NO: 141598 - DNA, 13 bp, Artificial Sequence
  Oligonucleotide for detection of SNP TSC0035476
ataaacatactaa

SEQ ID NO: 141599 - DNA, 13 bp, Artificial Sequence
  Oligonucleotide for detection of SNP TSC0035476
ttagtacgtttat

SEQ ID NO: 141600 - DNA, 13 bp, Artificial Sequence
  Oligonucleotide for detection of SNP TSC0035476
ataaacgtactaa

SEQ ID NO: 141601 - DNA, 13 bp, Artificial Sequence
  Oligonucleotide for detection of SNP TSC0035476
atgggtgtgttaa

SEQ ID NO: 141602 - DNA, 13 bp, Artificial Sequence
  Oligonucleotide for detection of SNP TSC0035476
ttaacacacccat

SEQ ID NO: 141603 - DNA, 13 bp, Artificial Sequence
  Oligonucleotide for detection of SNP TSC0035476
atgggtatgttaa

SEQ ID NO: 141604 - DNA, 13 bp, Artificial Sequence
  Oligonucleotide for detection of SNP TSC0035476
ttaacatacccat

SEQ ID NO: 141605 - DNA, 13 bp, Artificial Sequence
  Oligonucleotide for detection of SNP TSC0035476
atgggcgtgttaa

SEQ ID NO: 141606 - DNA, 13 bp, Artificial Sequence
  Oligonucleotide for detection of SNP TSC0035476
ttaacacgcccat

SEQ ID NO: 141607 - DNA, 13 bp, Artificial Sequence
  Oligonucleotide for detection of SNP TSC0035479
aattgtaaaatat

SEQ ID NO: 141608 - DNA, 13 bp, Artificial Sequence
  Oligonucleotide for detection of SNP TSC0035479
atattttacaatt

SEQ ID NO: 141609 - DNA, 13 bp, Artificial Sequence
  Oligonucleotide for detection of SNP TSC0035479
aattgtgaaatat

SEQ ID NO: 141610 - DNA, 13 bp, Artificial Sequence
  Oligonucleotide for detection of SNP TSC0035479
atatttcacaatt

SEQ ID NO: 141611 - DNA, 13 bp, Artificial Sequence
  Oligonucleotide for detection of SNP TSC0035479
aattgcgaaatat

SEQ ID NO: 141612 - DNA, 13 bp, Artificial Sequence
  Oligonucleotide for detection of SNP TSC0035479
atatttcgcaatt

SEQ ID NO: 141613 - DNA, 13 bp, Artificial Sequence
  Oligonucleotide for detection of SNP TSC0035479
atattttgtaatt

SEQ ID NO: 141614 - DNA, 13 bp, Artificial Sequence
  Oligonucleotide for detection of SNP TSC0035479
aattacaaaatat

SEQ ID NO: 141615 - DNA, 13 bp, Artificial Sequence
  Oligonucleotide for detection of SNP TSC0035479
atatttcgtaatt

SEQ ID NO: 141616 - DNA, 13 bp, Artificial Sequence
  Oligonucleotide for detection of SNP TSC0035479
aattacgaaatat

SEQ ID NO: 141617 - DNA, 13 bp, Artificial Sequence
  Oligonucleotide for detection of SNP TSC0035480
aagtagaggtgay

SEQ ID NO: 141618 - DNA, 13 bp, Artificial Sequence
  Oligonucleotide for detection of SNP TSC0035480
rtcacctctactt

SEQ ID NO: 141619 - DNA, 13 bp, Artificial Sequence
  Oligonucleotide for detection of SNP TSC0035480
aagtaggggtgay

SEQ ID NO: 141620 - DNA, 13 bp, Artificial Sequence
  Oligonucleotide for detection of SNP TSC0035480
rtcacccctactt

SEQ ID NO: 141621 - DNA, 13 bp, Artificial Sequence
  Oligonucleotide for detection of SNP TSC0035483
ttattatgtttcg

SEQ ID NO: 141622 - DNA, 13 bp, Artificial Sequence
  Oligonucleotide for detection of SNP TSC0035483
cgaaacataataa

SEQ ID NO: 141623 - DNA, 13 bp, Artificial Sequence
  Oligonucleotide for detection of SNP TSC0035483
ttattacgtttcg

SEQ ID NO: 141624 - DNA, 13 bp, Artificial Sequence
  Oligonucleotide for detection of SNP TSC0035483
cgaaacgtaataa

SEQ ID NO: 141625 - DNA, 13 bp, Artificial Sequence
  Oligonucleotide for detection of SNP TSC0035483
tgggatgtggtgg

SEQ ID NO: 141626 - DNA, 13 bp, Artificial Sequence
  Oligonucleotide for detection of SNP TSC0035483
ccaccacatccca

SEQ ID NO: 141627 - DNA, 13 bp, Artificial Sequence
  Oligonucleotide for detection of SNP TSC0035483
tgggatatggtgg

SEQ ID NO: 141628 - DNA, 13 bp, Artificial Sequence
  Oligonucleotide for detection of SNP TSC0035483
ccaccatatccca

SEQ ID NO: 141629 - DNA, 13 bp, Artificial Sequence
  Oligonucleotide for detection of SNP TSC0035483
cgggatgtggtgg

SEQ ID NO: 141630 - DNA, 13 bp, Artificial Sequence
  Oligonucleotide for detection of SNP TSC0035483
ccaccacatcccg

SEQ ID NO: 141631 - DNA, 13 bp, Artificial Sequence
  Oligonucleotide for detection of SNP TSC0035483
cgggatatggtgg

SEQ ID NO: 141632 - DNA, 13 bp, Artificial Sequence
  Oligonucleotide for detection of SNP TSC0035483
ccaccatatcccg

SEQ ID NO: 141633 - DNA, 13 bp, Artificial Sequence
  Oligonucleotide for detection of SNP TSC0035483
tgggacgtggtgg

SEQ ID NO: 141634 - DNA, 13 bp, Artificial Sequence
  Oligonucleotide for detection of SNP TSC0035483
ccaccacgtccca

SEQ ID NO: 141635 - DNA, 13 bp, Artificial Sequence
  Oligonucleotide for detection of SNP TSC0035483
cgggacgtggtgg

SEQ ID NO: 141636 - DNA, 13 bp, Artificial Sequence
  Oligonucleotide for detection of SNP TSC0035483
ccaccacgtcccg

SEQ ID NO: 141637 - DNA, 13 bp, Artificial Sequence
  Oligonucleotide for detection of SNP TSC0035484
ttttatggagata

SEQ ID NO: 141638 - DNA, 13 bp, Artificial Sequence
  Oligonucleotide for detection of SNP TSC0035484
tatctccataaaa

SEQ ID NO: 141639 - DNA, 13 bp, Artificial Sequence
  Oligonucleotide for detection of SNP TSC0035484
ttttattgagata

SEQ ID NO: 141640 - DNA, 13 bp, Artificial Sequence
  Oligonucleotide for detection of SNP TSC0035484
tatctcaataaaa

SEQ ID NO: 141641 - DNA, 13 bp, Artificial Sequence
  Oligonucleotide for detection of SNP TSC0035484
ttttacggagata

SEQ ID NO: 141642 - DNA, 13 bp, Artificial Sequence
  Oligonucleotide for detection of SNP TSC0035484
tatctccgtaaaa

SEQ ID NO: 141643 - DNA, 13 bp, Artificial Sequence
  Oligonucleotide for detection of SNP TSC0035484
tatttttgtgaag

SEQ ID NO: 141644 - DNA, 13 bp, Artificial Sequence
  Oligonucleotide for detection of SNP TSC0035484
cttcacaaaaata

SEQ ID NO: 141645 - DNA, 13 bp, Artificial Sequence
  Oligonucleotide for detection of SNP TSC0035484
tattttagtgaag

SEQ ID NO: 141646 - DNA, 13 bp, Artificial Sequence
  Oligonucleotide for detection of SNP TSC0035484
cttcactaaaata

SEQ ID NO: 141647 - DNA, 13 bp, Artificial Sequence
  Oligonucleotide for detection of SNP TSC0035484
tattttcgtgaag

SEQ ID NO: 141648 - DNA, 13 bp, Artificial Sequence
  Oligonucleotide for detection of SNP TSC0035484
cttcacgaaaata

SEQ ID NO: 141649 - DNA, 13 bp, Artificial Sequence
  Oligonucleotide for detection of SNP TSC0035485
agaagggtgtttg

SEQ ID NO: 141650 - DNA, 13 bp, Artificial Sequence
  Oligonucleotide for detection of SNP TSC0035485
caaacacccttct

SEQ ID NO: 141651 - DNA, 13 bp, Artificial Sequence
  Oligonucleotide for detection of SNP TSC0035485
agaaggatgtttg

SEQ ID NO: 141652 - DNA, 13 bp, Artificial Sequence
  Oligonucleotide for detection of SNP TSC0035485
caaacatccttct

SEQ ID NO: 141653 - DNA, 13 bp, Artificial Sequence
  Oligonucleotide for detection of SNP TSC0035486
tttggtaaatatt

SEQ ID NO: 141654 - DNA, 13 bp, Artificial Sequence
  Oligonucleotide for detection of SNP TSC0035486
aatatttaccaaa

SEQ ID NO: 141655 - DNA, 13 bp, Artificial Sequence
  Oligonucleotide for detection of SNP TSC0035486
tttggtgaatatt

SEQ ID NO: 141656 - DNA, 13 bp, Artificial Sequence
  Oligonucleotide for detection of SNP TSC0035486
aatattcaccaaa

SEQ ID NO: 141657 - DNA, 13 bp, Artificial Sequence
  Oligonucleotide for detection of SNP TSC0035490
tgtttttgattay

SEQ ID NO: 141658 - DNA, 13 bp, Artificial Sequence
  Oligonucleotide for detection of SNP TSC0035490
rtaatcaaaaaca

SEQ ID NO: 141659 - DNA, 13 bp, Artificial Sequence
  Oligonucleotide for detection of SNP TSC0035490
tgttttcgattay

SEQ ID NO: 141660 - DNA, 13 bp, Artificial Sequence
  Oligonucleotide for detection of SNP TSC0035490
rtaatcgaaaaca

SEQ ID NO: 141661 - DNA, 13 bp, Artificial Sequence
  Oligonucleotide for detection of SNP TSC0035491
ttttttattgagy

SEQ ID NO: 141662 - DNA, 13 bp, Artificial Sequence
  Oligonucleotide for detection of SNP TSC0035491
rctcaataaaaaa

SEQ ID NO: 141663 - DNA, 13 bp, Artificial Sequence
  Oligonucleotide for detection of SNP TSC0035491
ttttttgttgagy

SEQ ID NO: 141664 - DNA, 13 bp, Artificial Sequence
  Oligonucleotide for detection of SNP TSC0035491
rctcaacaaaaaa

SEQ ID NO: 141665 - DNA, 13 bp, Artificial Sequence
  Oligonucleotide for detection of SNP TSC0035491
tttttcgttgagy

SEQ ID NO: 141666 - DNA, 13 bp, Artificial Sequence
  Oligonucleotide for detection of SNP TSC0035491
rctcaacgaaaaa

SEQ ID NO: 141667 - DNA, 13 bp, Artificial Sequence
  Oligonucleotide for detection of SNP TSC0035491
gtttaatgaggag

SEQ ID NO: 141668 - DNA, 13 bp, Artificial Sequence
  Oligonucleotide for detection of SNP TSC0035491
ctcctcattaaac

SEQ ID NO: 141669 - DNA, 13 bp, Artificial Sequence
  Oligonucleotide for detection of SNP TSC0035491
gtttaacgaggag

SEQ ID NO: 141670 - DNA, 13 bp, Artificial Sequence
  Oligonucleotide for detection of SNP TSC0035491
ctcctcgttaaac

SEQ ID NO: 141671 - DNA, 13 bp, Artificial Sequence
  Oligonucleotide for detection of SNP TSC0035496
agatagggggata

SEQ ID NO: 141672 - DNA, 13 bp, Artificial Sequence
  Oligonucleotide for detection of SNP TSC0035496
tatccccctatct

SEQ ID NO: 141673 - DNA, 13 bp, Artificial Sequence
  Oligonucleotide for detection of SNP TSC0035496
agatagtgggata

SEQ ID NO: 141674 - DNA, 13 bp, Artificial Sequence
  Oligonucleotide for detection of SNP TSC0035496
tatcccactatct

SEQ ID NO: 141675 - DNA, 13 bp, Artificial Sequence
  Oligonucleotide for detection of SNP TSC0035496
agatagcgggata

SEQ ID NO: 141676 - DNA, 13 bp, Artificial Sequence
  Oligonucleotide for detection of SNP TSC0035496
tatcccgctatct

SEQ ID NO: 141677 - DNA, 13 bp, Artificial Sequence
  Oligonucleotide for detection of SNP TSC0035497
tgtagttatttga

SEQ ID NO: 141678 - DNA, 13 bp, Artificial Sequence
  Oligonucleotide for detection of SNP TSC0035497
tcaaataactaca

SEQ ID NO: 141679 - DNA, 13 bp, Artificial Sequence
  Oligonucleotide for detection of SNP TSC0035497
tgtagtaatttga

SEQ ID NO: 141680 - DNA, 13 bp, Artificial Sequence
  Oligonucleotide for detection of SNP TSC0035497
tcaaattactaca

SEQ ID NO: 141681 - DNA, 13 bp, Artificial Sequence
  Oligonucleotide for detection of SNP TSC0035501
gatagagattgaa

SEQ ID NO: 141682 - DNA, 13 bp, Artificial Sequence
  Oligonucleotide for detection of SNP TSC0035501
ttcaatctctatc

SEQ ID NO: 141683 - DNA, 13 bp, Artificial Sequence
  Oligonucleotide for detection of SNP TSC0035501
gatagaaattgaa

SEQ ID NO: 141684 - DNA, 13 bp, Artificial Sequence
  Oligonucleotide for detection of SNP TSC0035501
ttcaatttctatc

SEQ ID NO: 141685 - DNA, 13 bp, Artificial Sequence
  Oligonucleotide for detection of SNP TSC0035502
tggggtatggtgt

SEQ ID NO: 141686 - DNA, 13 bp, Artificial Sequence
  Oligonucleotide for detection of SNP TSC0035502
acaccatacccca

SEQ ID NO: 141687 - DNA, 13 bp, Artificial Sequence
  Oligonucleotide for detection of SNP TSC0035502
tggggtgtggtgt

SEQ ID NO: 141688 - DNA, 13 bp, Artificial Sequence
  Oligonucleotide for detection of SNP TSC0035502
acaccacacccca

SEQ ID NO: 141689 - DNA, 13 bp, Artificial Sequence
  Oligonucleotide for detection of SNP TSC0035502
tggggtacggtgt

SEQ ID NO: 141690 - DNA, 13 bp, Artificial Sequence
  Oligonucleotide for detection of SNP TSC0035502
acaccgtacccca

SEQ ID NO: 141691 - DNA, 13 bp, Artificial Sequence
  Oligonucleotide for detection of SNP TSC0035502
tggggtgcggtgt

SEQ ID NO: 141692 - DNA, 13 bp, Artificial Sequence
  Oligonucleotide for detection of SNP TSC0035502
acaccgcacccca

SEQ ID NO: 141693 - DNA, 13 bp, Artificial Sequence
  Oligonucleotide for detection of SNP TSC0035509
ataatcgtattay

SEQ ID NO: 141694 - DNA, 13 bp, Artificial Sequence
  Oligonucleotide for detection of SNP TSC0035509
rtaatacgattat

SEQ ID NO: 141695 - DNA, 13 bp, Artificial Sequence
  Oligonucleotide for detection of SNP TSC0035509
gtaatgtgattat

SEQ ID NO: 141696 - DNA, 13 bp, Artificial Sequence
  Oligonucleotide for detection of SNP TSC0035509
ataatcacattac

SEQ ID NO: 141697 - DNA, 13 bp, Artificial Sequence
  Oligonucleotide for detection of SNP TSC0035509
gtaatgcgattat

SEQ ID NO: 141698 - DNA, 13 bp, Artificial Sequence
  Oligonucleotide for detection of SNP TSC0035509
ataatcgcattac

SEQ ID NO: 141699 - DNA, 13 bp, Artificial Sequence
  Oligonucleotide for detection of SNP TSC0035512
tgtgtaattgggy

SEQ ID NO: 141700 - DNA, 13 bp, Artificial Sequence
  Oligonucleotide for detection of SNP TSC0035512
rcccaattacaca

SEQ ID NO: 141701 - DNA, 13 bp, Artificial Sequence
  Oligonucleotide for detection of SNP TSC0035512
tgtgtagttgggy

SEQ ID NO: 141702 - DNA, 13 bp, Artificial Sequence
  Oligonucleotide for detection of SNP TSC0035512
rcccaactacaca

SEQ ID NO: 141703 - DNA, 13 bp, Artificial Sequence
  Oligonucleotide for detection of SNP TSC0035513
attatagtttgaa

SEQ ID NO: 141704 - DNA, 13 bp, Artificial Sequence
  Oligonucleotide for detection of SNP TSC0035513
ttcaaactataat

SEQ ID NO: 141705 - DNA, 13 bp, Artificial Sequence
  Oligonucleotide for detection of SNP TSC0035513
attatattttgaa

SEQ ID NO: 141706 - DNA, 13 bp, Artificial Sequence
  Oligonucleotide for detection of SNP TSC0035513
ttcaaaatataat

SEQ ID NO: 141707 - DNA, 13 bp, Artificial Sequence
  Oligonucleotide for detection of SNP TSC0035513
tttaaattgtaat

SEQ ID NO: 141708 - DNA, 13 bp, Artificial Sequence
  Oligonucleotide for detection of SNP TSC0035513
attacaatttaaa

SEQ ID NO: 141709 - DNA, 13 bp, Artificial Sequence
  Oligonucleotide for detection of SNP TSC0035513
tttaaaatgtaat

SEQ ID NO: 141710 - DNA, 13 bp, Artificial Sequence
  Oligonucleotide for detection of SNP TSC0035513
attacattttaaa

SEQ ID NO: 141711 - DNA, 13 bp, Artificial Sequence
  Oligonucleotide for detection of SNP TSC0035514
ttggataagggta

SEQ ID NO: 141712 - DNA, 13 bp, Artificial Sequence
  Oligonucleotide for detection of SNP TSC0035514
tacccttatccaa

SEQ ID NO: 141713 - DNA, 13 bp, Artificial Sequence
  Oligonucleotide for detection of SNP TSC0035514
ttggattagggta

SEQ ID NO: 141714 - DNA, 13 bp, Artificial Sequence
  Oligonucleotide for detection of SNP TSC0035514
taccctaatccaa

SEQ ID NO: 141715 - DNA, 13 bp, Artificial Sequence
  Oligonucleotide for detection of SNP TSC0035514
tgtttttatttag

SEQ ID NO: 141716 - DNA, 13 bp, Artificial Sequence
  Oligonucleotide for detection of SNP TSC0035514
ctaaataaaaaca

SEQ ID NO: 141717 - DNA, 13 bp, Artificial Sequence
  Oligonucleotide for detection of SNP TSC0035514
tgttttaatttag

SEQ ID NO: 141718 - DNA, 13 bp, Artificial Sequence
  Oligonucleotide for detection of SNP TSC0035514
ctaaattaaaaca

SEQ ID NO: 141719 - DNA, 13 bp, Artificial Sequence
  Oligonucleotide for detection of SNP TSC0035515
tttaaagaggttt

SEQ ID NO: 141720 - DNA, 13 bp, Artificial Sequence
  Oligonucleotide for detection of SNP TSC0035515
aaacctctttaaa

SEQ ID NO: 141721 - DNA, 13 bp, Artificial Sequence
  Oligonucleotide for detection of SNP TSC0035515
tttaaaaaggttt

SEQ ID NO: 141722 - DNA, 13 bp, Artificial Sequence
  Oligonucleotide for detection of SNP TSC0035515
aaacctttttaaa

SEQ ID NO: 141723 - DNA, 13 bp, Artificial Sequence
  Oligonucleotide for detection of SNP TSC0035516
taggaatagtgta

SEQ ID NO: 141724 - DNA, 13 bp, Artificial Sequence
  Oligonucleotide for detection of SNP TSC0035516
tacactattccta

SEQ ID NO: 141725 - DNA, 13 bp, Artificial Sequence
  Oligonucleotide for detection of SNP TSC0035516
taggaagagtgta

SEQ ID NO: 141726 - DNA, 13 bp, Artificial Sequence
  Oligonucleotide for detection of SNP TSC0035516
tacactcttccta

SEQ ID NO: 141727 - DNA, 13 bp, Artificial Sequence
  Oligonucleotide for detection of SNP TSC0035516
tgtattttttttg

SEQ ID NO: 141728 - DNA, 13 bp, Artificial Sequence
  Oligonucleotide for detection of SNP TSC0035516
caaaaaaaataca

SEQ ID NO: 141729 - DNA, 13 bp, Artificial Sequence
  Oligonucleotide for detection of SNP TSC0035517
tttaaataataga

SEQ ID NO: 141730 - DNA, 13 bp, Artificial Sequence
  Oligonucleotide for detection of SNP TSC0035517
tctattatttaaa

SEQ ID NO: 141731 - DNA, 13 bp, Artificial Sequence
  Oligonucleotide for detection of SNP TSC0035517
tttgttttttaag

SEQ ID NO: 141732 - DNA, 13 bp, Artificial Sequence
  Oligonucleotide for detection of SNP TSC0035517
cttaaaaaacaaa

SEQ ID NO: 141733 - DNA, 13 bp, Artificial Sequence
  Oligonucleotide for detection of SNP TSC0035518
aaaaaggaaagtt

SEQ ID NO: 141734 - DNA, 13 bp, Artificial Sequence
  Oligonucleotide for detection of SNP TSC0035518
aactttccttttt

SEQ ID NO: 141735 - DNA, 13 bp, Artificial Sequence
  Oligonucleotide for detection of SNP TSC0035518
aaaaagaaaagtt

SEQ ID NO: 141736 - DNA, 13 bp, Artificial Sequence
  Oligonucleotide for detection of SNP TSC0035518
aacttttcttttt

SEQ ID NO: 141737 - DNA, 13 bp, Artificial Sequence
  Oligonucleotide for detection of SNP TSC0035519
tttaatatgggty

SEQ ID NO: 141738 - DNA, 13 bp, Artificial Sequence
  Oligonucleotide for detection of SNP TSC0035519
racccatattaaa

SEQ ID NO: 141739 - DNA, 13 bp, Artificial Sequence
  Oligonucleotide for detection of SNP TSC0035519
tttaatttgggty

SEQ ID NO: 141740 - DNA, 13 bp, Artificial Sequence
  Oligonucleotide for detection of SNP TSC0035519
racccaaattaaa

SEQ ID NO: 141741 - DNA, 13 bp, Artificial Sequence
  Oligonucleotide for detection of SNP TSC0035519
ggtttatgttgag

SEQ ID NO: 141742 - DNA, 13 bp, Artificial Sequence
  Oligonucleotide for detection of SNP TSC0035519
ctcaacataaacc

SEQ ID NO: 141743 - DNA, 13 bp, Artificial Sequence
  Oligonucleotide for detection of SNP TSC0035519
ggtttaggttgag

SEQ ID NO: 141744 - DNA, 13 bp, Artificial Sequence
  Oligonucleotide for detection of SNP TSC0035519
ctcaacctaaacc

SEQ ID NO: 141745 - DNA, 13 bp, Artificial Sequence
  Oligonucleotide for detection of SNP TSC0035523
ggatttatttagy

SEQ ID NO: 141746 - DNA, 13 bp, Artificial Sequence
  Oligonucleotide for detection of SNP TSC0035523
rctaaataaatcc

SEQ ID NO: 141747 - DNA, 13 bp, Artificial Sequence
  Oligonucleotide for detection of SNP TSC0035523
ggatttttttagy

SEQ ID NO: 141748 - DNA, 13 bp, Artificial Sequence
  Oligonucleotide for detection of SNP TSC0035523
rctaaaaaaatcc

SEQ ID NO: 141749 - DNA, 13 bp, Artificial Sequence
  Oligonucleotide for detection of SNP TSC0035523
gttgggtaaatty

SEQ ID NO: 141750 - DNA, 13 bp, Artificial Sequence
  Oligonucleotide for detection of SNP TSC0035523
raatttacccaac

SEQ ID NO: 141751 - DNA, 13 bp, Artificial Sequence
  Oligonucleotide for detection of SNP TSC0035523
gttggggaaatty

SEQ ID NO: 141752 - DNA, 13 bp, Artificial Sequence
  Oligonucleotide for detection of SNP TSC0035523
raatttccccaac

SEQ ID NO: 141753 - DNA, 13 bp, Artificial Sequence
  Oligonucleotide for detection of SNP TSC0035524
aatgaaaaaagaa

SEQ ID NO: 141754 - DNA, 13 bp, Artificial Sequence
  Oligonucleotide for detection of SNP TSC0035524
ttcttttttcatt

SEQ ID NO: 141755 - DNA, 13 bp, Artificial Sequence
  Oligonucleotide for detection of SNP TSC0035524
aatgaagaaagaa

SEQ ID NO: 141756 - DNA, 13 bp, Artificial Sequence
  Oligonucleotide for detection of SNP TSC0035524
ttctttcttcatt

SEQ ID NO: 141757 - DNA, 13 bp, Artificial Sequence
  Oligonucleotide for detection of SNP TSC0035524
aacgaaaaaagaa

SEQ ID NO: 141758 - DNA, 13 bp, Artificial Sequence
  Oligonucleotide for detection of SNP TSC0035524
ttcttttttcgtt

SEQ ID NO: 141759 - DNA, 13 bp, Artificial Sequence
  Oligonucleotide for detection of SNP TSC0035524
aacgaagaaagaa

SEQ ID NO: 141760 - DNA, 13 bp, Artificial Sequence
  Oligonucleotide for detection of SNP TSC0035524
ttctttcttcgtt

SEQ ID NO: 141761 - DNA, 13 bp, Artificial Sequence
  Oligonucleotide for detection of SNP TSC0035525
tttgagtgagtaa

SEQ ID NO: 141762 - DNA, 13 bp, Artificial Sequence
  Oligonucleotide for detection of SNP TSC0035525
ttactcactcaaa

SEQ ID NO: 141763 - DNA, 13 bp, Artificial Sequence
  Oligonucleotide for detection of SNP TSC0035525
tttgagcgagtaa

SEQ ID NO: 141764 - DNA, 13 bp, Artificial Sequence
  Oligonucleotide for detection of SNP TSC0035525
ttactcgctcaaa

SEQ ID NO: 141765 - DNA, 13 bp, Artificial Sequence
  Oligonucleotide for detection of SNP TSC0035525
ttgtttgtttagg

SEQ ID NO: 141766 - DNA, 13 bp, Artificial Sequence
  Oligonucleotide for detection of SNP TSC0035525
cctaaacaaacaa

SEQ ID NO: 141767 - DNA, 13 bp, Artificial Sequence
  Oligonucleotide for detection of SNP TSC0035525
ttgtttatttagg

SEQ ID NO: 141768 - DNA, 13 bp, Artificial Sequence
  Oligonucleotide for detection of SNP TSC0035525
cctaaataaacaa

SEQ ID NO: 141769 - DNA, 13 bp, Artificial Sequence
  Oligonucleotide for detection of SNP TSC0035525
ttgttcgtttagg

SEQ ID NO: 141770 - DNA, 13 bp, Artificial Sequence
  Oligonucleotide for detection of SNP TSC0035525
cctaaacgaacaa

SEQ ID NO: 141771 - DNA, 13 bp, Artificial Sequence
  Oligonucleotide for detection of SNP TSC0035526
tttgttaggaaty

SEQ ID NO: 141772 - DNA, 13 bp, Artificial Sequence
  Oligonucleotide for detection of SNP TSC0035526
rattcctaacaaa

SEQ ID NO: 141773 - DNA, 13 bp, Artificial Sequence
  Oligonucleotide for detection of SNP TSC0035526
tttgttgggaaty

SEQ ID NO: 141774 - DNA, 13 bp, Artificial Sequence
  Oligonucleotide for detection of SNP TSC0035526
rattcccaacaaa

SEQ ID NO: 141775 - DNA, 13 bp, Artificial Sequence
  Oligonucleotide for detection of SNP TSC0035527
ttttatgtattaa

SEQ ID NO: 141776 - DNA, 13 bp, Artificial Sequence
  Oligonucleotide for detection of SNP TSC0035527
ttaatacataaaa

SEQ ID NO: 141777 - DNA, 13 bp, Artificial Sequence
  Oligonucleotide for detection of SNP TSC0035528
taaaatatttgtg

SEQ ID NO: 141778 - DNA, 13 bp, Artificial Sequence
  Oligonucleotide for detection of SNP TSC0035528
cacaaatatttta

SEQ ID NO: 141779 - DNA, 13 bp, Artificial Sequence
  Oligonucleotide for detection of SNP TSC0035528
taaaatttttgtg

SEQ ID NO: 141780 - DNA, 13 bp, Artificial Sequence
  Oligonucleotide for detection of SNP TSC0035528
cacaaaaatttta

SEQ ID NO: 141781 - DNA, 13 bp, Artificial Sequence
  Oligonucleotide for detection of SNP TSC0035528
tataaatattttg

SEQ ID NO: 141782 - DNA, 13 bp, Artificial Sequence
  Oligonucleotide for detection of SNP TSC0035528
caaaatatttata

SEQ ID NO: 141783 - DNA, 13 bp, Artificial Sequence
  Oligonucleotide for detection of SNP TSC0035528
tataaagattttg

SEQ ID NO: 141784 - DNA, 13 bp, Artificial Sequence
  Oligonucleotide for detection of SNP TSC0035528
caaaatctttata

SEQ ID NO: 141785 - DNA, 13 bp, Artificial Sequence
  Oligonucleotide for detection of SNP TSC0035529
ggaggtggtagtg

SEQ ID NO: 141786 - DNA, 13 bp, Artificial Sequence
  Oligonucleotide for detection of SNP TSC0035529
cactaccacctcc

SEQ ID NO: 141787 - DNA, 13 bp, Artificial Sequence
  Oligonucleotide for detection of SNP TSC0035529
ggaggttgtagtg

SEQ ID NO: 141788 - DNA, 13 bp, Artificial Sequence
  Oligonucleotide for detection of SNP TSC0035529
cactacaacctcc

SEQ ID NO: 141789 - DNA, 13 bp, Artificial Sequence
  Oligonucleotide for detection of SNP TSC0035529
tattgttatttty

SEQ ID NO: 141790 - DNA, 13 bp, Artificial Sequence
  Oligonucleotide for detection of SNP TSC0035529
raaaataacaata

SEQ ID NO: 141791 - DNA, 13 bp, Artificial Sequence
  Oligonucleotide for detection of SNP TSC0035529
tattgtaatttty

SEQ ID NO: 141792 - DNA, 13 bp, Artificial Sequence
  Oligonucleotide for detection of SNP TSC0035529
raaaattacaata

SEQ ID NO: 141793 - DNA, 13 bp, Artificial Sequence
  Oligonucleotide for detection of SNP TSC0035530
tatgtgttagttt

SEQ ID NO: 141794 - DNA, 13 bp, Artificial Sequence
  Oligonucleotide for detection of SNP TSC0035530
aaactaacacata

SEQ ID NO: 141795 - DNA, 13 bp, Artificial Sequence
  Oligonucleotide for detection of SNP TSC0035530
tatgtggtagttt

SEQ ID NO: 141796 - DNA, 13 bp, Artificial Sequence
  Oligonucleotide for detection of SNP TSC0035530
aaactaccacata

SEQ ID NO: 141797 - DNA, 13 bp, Artificial Sequence
  Oligonucleotide for detection of SNP TSC0035530
tacgtgttagttt

SEQ ID NO: 141798 - DNA, 13 bp, Artificial Sequence
  Oligonucleotide for detection of SNP TSC0035530
aaactaacacgta

SEQ ID NO: 141799 - DNA, 13 bp, Artificial Sequence
  Oligonucleotide for detection of SNP TSC0035530
tacgtggtagttt

SEQ ID NO: 141800 - DNA, 13 bp, Artificial Sequence
  Oligonucleotide for detection of SNP TSC0035530
aaactaccacgta

SEQ ID NO: 141801 - DNA, 13 bp, Artificial Sequence
  Oligonucleotide for detection of SNP TSC0035530
aaattagtatgta

SEQ ID NO: 141802 - DNA, 13 bp, Artificial Sequence
  Oligonucleotide for detection of SNP TSC0035530
tacatactaattt

SEQ ID NO: 141803 - DNA, 13 bp, Artificial Sequence
  Oligonucleotide for detection of SNP TSC0035530
aaattattatgta

SEQ ID NO: 141804 - DNA, 13 bp, Artificial Sequence
  Oligonucleotide for detection of SNP TSC0035530
tacataataattt

SEQ ID NO: 141805 - DNA, 13 bp, Artificial Sequence
  Oligonucleotide for detection of SNP TSC0035530
aaattagtacgta

SEQ ID NO: 141806 - DNA, 13 bp, Artificial Sequence
  Oligonucleotide for detection of SNP TSC0035530
tacgtactaattt

SEQ ID NO: 141807 - DNA, 13 bp, Artificial Sequence
  Oligonucleotide for detection of SNP TSC0035530
aaattattacgta

SEQ ID NO: 141808 - DNA, 13 bp, Artificial Sequence
  Oligonucleotide for detection of SNP TSC0035530
tacgtaataattt

SEQ ID NO: 141809 - DNA, 13 bp, Artificial Sequence
  Oligonucleotide for detection of SNP TSC0035533
aagttatgtagta

SEQ ID NO: 141810 - DNA, 13 bp, Artificial Sequence
  Oligonucleotide for detection of SNP TSC0035533
tactacataactt

SEQ ID NO: 141811 - DNA, 13 bp, Artificial Sequence
  Oligonucleotide for detection of SNP TSC0035533
aagttacgtagta

SEQ ID NO: 141812 - DNA, 13 bp, Artificial Sequence
  Oligonucleotide for detection of SNP TSC0035533
tactacgtaactt

SEQ ID NO: 141813 - DNA, 13 bp, Artificial Sequence
  Oligonucleotide for detection of SNP TSC0035533
tgttatgtaattt

SEQ ID NO: 141814 - DNA, 13 bp, Artificial Sequence
  Oligonucleotide for detection of SNP TSC0035533
aaattacataaca

SEQ ID NO: 141815 - DNA, 13 bp, Artificial Sequence
  Oligonucleotide for detection of SNP TSC0035533
tgttatataattt

SEQ ID NO: 141816 - DNA, 13 bp, Artificial Sequence
  Oligonucleotide for detection of SNP TSC0035533
aaattatataaca

SEQ ID NO: 141817 - DNA, 13 bp, Artificial Sequence
  Oligonucleotide for detection of SNP TSC0035533
tgttacgtaattt

SEQ ID NO: 141818 - DNA, 13 bp, Artificial Sequence
  Oligonucleotide for detection of SNP TSC0035533
aaattacgtaaca

SEQ ID NO: 141819 - DNA, 13 bp, Artificial Sequence
  Oligonucleotide for detection of SNP TSC0035534
ttaggttgtttat

SEQ ID NO: 141820 - DNA, 13 bp, Artificial Sequence
  Oligonucleotide for detection of SNP TSC0035534
ataaacaacctaa

SEQ ID NO: 141821 - DNA, 13 bp, Artificial Sequence
  Oligonucleotide for detection of SNP TSC0035534
ttaggtcgtttat

SEQ ID NO: 141822 - DNA, 13 bp, Artificial Sequence
  Oligonucleotide for detection of SNP TSC0035534
ataaacgacctaa

SEQ ID NO: 141823 - DNA, 13 bp, Artificial Sequence
  Oligonucleotide for detection of SNP TSC0035534
ataaatgatttga

SEQ ID NO: 141824 - DNA, 13 bp, Artificial Sequence
  Oligonucleotide for detection of SNP TSC0035534
tcaaatcatttat

SEQ ID NO: 141825 - DNA, 13 bp, Artificial Sequence
  Oligonucleotide for detection of SNP TSC0035534
ataaataatttga

SEQ ID NO: 141826 - DNA, 13 bp, Artificial Sequence
  Oligonucleotide for detection of SNP TSC0035534
tcaaattatttat

SEQ ID NO: 141827 - DNA, 13 bp, Artificial Sequence
  Oligonucleotide for detection of SNP TSC0035534
ataaacgatttga

SEQ ID NO: 141828 - DNA, 13 bp, Artificial Sequence
  Oligonucleotide for detection of SNP TSC0035534
tcaaatcgtttat

SEQ ID NO: 141829 - DNA, 13 bp, Artificial Sequence
  Oligonucleotide for detection of SNP TSC0035535
tgttttgtaagaa

SEQ ID NO: 141830 - DNA, 13 bp, Artificial Sequence
  Oligonucleotide for detection of SNP TSC0035535
ttcttacaaaaca

SEQ ID NO: 141831 - DNA, 13 bp, Artificial Sequence
  Oligonucleotide for detection of SNP TSC0035535
tttttataggata

SEQ ID NO: 141832 - DNA, 13 bp, Artificial Sequence
  Oligonucleotide for detection of SNP TSC0035535
tatcctataaaaa

SEQ ID NO: 141833 - DNA, 13 bp, Artificial Sequence
  Oligonucleotide for detection of SNP TSC0035535
tttttaaaggata

SEQ ID NO: 141834 - DNA, 13 bp, Artificial Sequence
  Oligonucleotide for detection of SNP TSC0035535
tatcctttaaaaa

SEQ ID NO: 141835 - DNA, 13 bp, Artificial Sequence
  Oligonucleotide for detection of SNP TSC0035536
tgtagtaattaaa

SEQ ID NO: 141836 - DNA, 13 bp, Artificial Sequence
  Oligonucleotide for detection of SNP TSC0035536
tttaattactaca

SEQ ID NO: 141837 - DNA, 13 bp, Artificial Sequence
  Oligonucleotide for detection of SNP TSC0035536
tgtagttattaaa

SEQ ID NO: 141838 - DNA, 13 bp, Artificial Sequence
  Oligonucleotide for detection of SNP TSC0035536
tttaataactaca

SEQ ID NO: 141839 - DNA, 13 bp, Artificial Sequence
  Oligonucleotide for detection of SNP TSC0035536
tttgattgttgta

SEQ ID NO: 141840 - DNA, 13 bp, Artificial Sequence
  Oligonucleotide for detection of SNP TSC0035536
tacaacaatcaaa

SEQ ID NO: 141841 - DNA, 13 bp, Artificial Sequence
  Oligonucleotide for detection of SNP TSC0035536
tttgatagttgta

SEQ ID NO: 141842 - DNA, 13 bp, Artificial Sequence
  Oligonucleotide for detection of SNP TSC0035536
tacaactatcaaa

SEQ ID NO: 141843 - DNA, 13 bp, Artificial Sequence
  Oligonucleotide for detection of SNP TSC0035540
tttgtatggaaaa

SEQ ID NO: 141844 - DNA, 13 bp, Artificial Sequence
  Oligonucleotide for detection of SNP TSC0035540
ttttccatacaaa

SEQ ID NO: 141845 - DNA, 13 bp, Artificial Sequence
  Oligonucleotide for detection of SNP TSC0035540
tttgtacggaaaa

SEQ ID NO: 141846 - DNA, 13 bp, Artificial Sequence
  Oligonucleotide for detection of SNP TSC0035540
ttttccgtacaaa

SEQ ID NO: 141847 - DNA, 13 bp, Artificial Sequence
  Oligonucleotide for detection of SNP TSC0035541
tgattgagtaatt

SEQ ID NO: 141848 - DNA, 13 bp, Artificial Sequence
  Oligonucleotide for detection of SNP TSC0035541
aattactcaatca

SEQ ID NO: 141849 - DNA, 13 bp, Artificial Sequence
  Oligonucleotide for detection of SNP TSC0035541
tgattgggtaatt

SEQ ID NO: 141850 - DNA, 13 bp, Artificial Sequence
  Oligonucleotide for detection of SNP TSC0035541
aattacccaatca

SEQ ID NO: 141851 - DNA, 13 bp, Artificial Sequence
  Oligonucleotide for detection of SNP TSC0035544
gggagggggggtt

SEQ ID NO: 141852 - DNA, 13 bp, Artificial Sequence
  Oligonucleotide for detection of SNP TSC0035544
aaccccccctccc

SEQ ID NO: 141853 - DNA, 13 bp, Artificial Sequence
  Oligonucleotide for detection of SNP TSC0035544
gggaggtggggtt

SEQ ID NO: 141854 - DNA, 13 bp, Artificial Sequence
  Oligonucleotide for detection of SNP TSC0035544
aaccccacctccc

SEQ ID NO: 141855 - DNA, 13 bp, Artificial Sequence
  Oligonucleotide for detection of SNP TSC0035544
gggaggcggggtt

SEQ ID NO: 141856 - DNA, 13 bp, Artificial Sequence
  Oligonucleotide for detection of SNP TSC0035544
aaccccgcctccc

SEQ ID NO: 141857 - DNA, 13 bp, Artificial Sequence
  Oligonucleotide for detection of SNP TSC0035547
tggagatgttaag

SEQ ID NO: 141858 - DNA, 13 bp, Artificial Sequence
  Oligonucleotide for detection of SNP TSC0035547
cttaacatctcca

SEQ ID NO: 141859 - DNA, 13 bp, Artificial Sequence
  Oligonucleotide for detection of SNP TSC0035547
tggagacgttaag

SEQ ID NO: 141860 - DNA, 13 bp, Artificial Sequence
  Oligonucleotide for detection of SNP TSC0035547
cttaacgtctcca

SEQ ID NO: 141861 - DNA, 13 bp, Artificial Sequence
  Oligonucleotide for detection of SNP TSC0035548
aatatagttagat

SEQ ID NO: 141862 - DNA, 13 bp, Artificial Sequence
  Oligonucleotide for detection of SNP TSC0035548
atctaactatatt

SEQ ID NO: 141863 - DNA, 13 bp, Artificial Sequence
  Oligonucleotide for detection of SNP TSC0035548
aatataattagat

SEQ ID NO: 141864 - DNA, 13 bp, Artificial Sequence
  Oligonucleotide for detection of SNP TSC0035548
atctaattatatt

SEQ ID NO: 141865 - DNA, 13 bp, Artificial Sequence
  Oligonucleotide for detection of SNP TSC0035549
tattgtggggggg

SEQ ID NO: 141866 - DNA, 13 bp, Artificial Sequence
  Oligonucleotide for detection of SNP TSC0035549
cccccccacaata

SEQ ID NO: 141867 - DNA, 13 bp, Artificial Sequence
  Oligonucleotide for detection of SNP TSC0035549
tattgttgggggg

SEQ ID NO: 141868 - DNA, 13 bp, Artificial Sequence
  Oligonucleotide for detection of SNP TSC0035549
ccccccaacaata

SEQ ID NO: 141869 - DNA, 13 bp, Artificial Sequence
  Oligonucleotide for detection of SNP TSC0035549
tttttttatagta

SEQ ID NO: 141870 - DNA, 13 bp, Artificial Sequence
  Oligonucleotide for detection of SNP TSC0035549
tactataaaaaaa

SEQ ID NO: 141871 - DNA, 13 bp, Artificial Sequence
  Oligonucleotide for detection of SNP TSC0035549
ttttttaatagta

SEQ ID NO: 141872 - DNA, 13 bp, Artificial Sequence
  Oligonucleotide for detection of SNP TSC0035549
tactattaaaaaa

SEQ ID NO: 141873 - DNA, 13 bp, Artificial Sequence
  Oligonucleotide for detection of SNP TSC0035550
gattgtattttat

SEQ ID NO: 141874 - DNA, 13 bp, Artificial Sequence
  Oligonucleotide for detection of SNP TSC0035550
ataaaatacaatc

SEQ ID NO: 141875 - DNA, 13 bp, Artificial Sequence
  Oligonucleotide for detection of SNP TSC0035550
gattgtgttttat

SEQ ID NO: 141876 - DNA, 13 bp, Artificial Sequence
  Oligonucleotide for detection of SNP TSC0035550
ataaaacacaatc

SEQ ID NO: 141877 - DNA, 13 bp, Artificial Sequence
  Oligonucleotide for detection of SNP TSC0035552
aggtgttgttttt

SEQ ID NO: 141878 - DNA, 13 bp, Artificial Sequence
  Oligonucleotide for detection of SNP TSC0035552
aaaaacaacacct

SEQ ID NO: 141879 - DNA, 13 bp, Artificial Sequence
  Oligonucleotide for detection of SNP TSC0035552
aggcgttgttttt

SEQ ID NO: 141880 - DNA, 13 bp, Artificial Sequence
  Oligonucleotide for detection of SNP TSC0035552
aaaaacaacgcct

SEQ ID NO: 141881 - DNA, 13 bp, Artificial Sequence
  Oligonucleotide for detection of SNP TSC0035552
aggtgtcgttttt

SEQ ID NO: 141882 - DNA, 13 bp, Artificial Sequence
  Oligonucleotide for detection of SNP TSC0035552
aaaaacgacacct

SEQ ID NO: 141883 - DNA, 13 bp, Artificial Sequence
  Oligonucleotide for detection of SNP TSC0035552
aggcgtcgttttt

SEQ ID NO: 141884 - DNA, 13 bp, Artificial Sequence
  Oligonucleotide for detection of SNP TSC0035552
aaaaacgacgcct

SEQ ID NO: 141885 - DNA, 13 bp, Artificial Sequence
  Oligonucleotide for detection of SNP TSC0035552
aggggtggtgttt

SEQ ID NO: 141886 - DNA, 13 bp, Artificial Sequence
  Oligonucleotide for detection of SNP TSC0035552
aaacaccacccct

SEQ ID NO: 141887 - DNA, 13 bp, Artificial Sequence
  Oligonucleotide for detection of SNP TSC0035552
aggggtagtgttt

SEQ ID NO: 141888 - DNA, 13 bp, Artificial Sequence
  Oligonucleotide for detection of SNP TSC0035552
aaacactacccct

SEQ ID NO: 141889 - DNA, 13 bp, Artificial Sequence
  Oligonucleotide for detection of SNP TSC0035552
aggggcggtgttt

SEQ ID NO: 141890 - DNA, 13 bp, Artificial Sequence
  Oligonucleotide for detection of SNP TSC0035552
aaacaccgcccct

SEQ ID NO: 141891 - DNA, 13 bp, Artificial Sequence
  Oligonucleotide for detection of SNP TSC0035552
aggggtagcgttt

SEQ ID NO: 141892 - DNA, 13 bp, Artificial Sequence
  Oligonucleotide for detection of SNP TSC0035552
aaacgctacccct

SEQ ID NO: 141893 - DNA, 13 bp, Artificial Sequence
  Oligonucleotide for detection of SNP TSC0035552
aggggtggcgttt

SEQ ID NO: 141894 - DNA, 13 bp, Artificial Sequence
  Oligonucleotide for detection of SNP TSC0035552
aaacgccacccct

SEQ ID NO: 141895 - DNA, 13 bp, Artificial Sequence
  Oligonucleotide for detection of SNP TSC0035552
aggggcggcgttt

SEQ ID NO: 141896 - DNA, 13 bp, Artificial Sequence
  Oligonucleotide for detection of SNP TSC0035552
aaacgccgcccct

SEQ ID NO: 141897 - DNA, 13 bp, Artificial Sequence
  Oligonucleotide for detection of SNP TSC0035553
tatttgtgggtay

SEQ ID NO: 141898 - DNA, 13 bp, Artificial Sequence
  Oligonucleotide for detection of SNP TSC0035553
rtacccacaaata

SEQ ID NO: 141899 - DNA, 13 bp, Artificial Sequence
  Oligonucleotide for detection of SNP TSC0035553
tatttgcgggtay

SEQ ID NO: 141900 - DNA, 13 bp, Artificial Sequence
  Oligonucleotide for detection of SNP TSC0035553
rtacccgcaaata

SEQ ID NO: 141901 - DNA, 13 bp, Artificial Sequence
  Oligonucleotide for detection of SNP TSC0035553
gtgtttgtaggtg

SEQ ID NO: 141902 - DNA, 13 bp, Artificial Sequence
  Oligonucleotide for detection of SNP TSC0035553
cacctacaaacac

SEQ ID NO: 141903 - DNA, 13 bp, Artificial Sequence
  Oligonucleotide for detection of SNP TSC0035553
gtgtttataggtg

SEQ ID NO: 141904 - DNA, 13 bp, Artificial Sequence
  Oligonucleotide for detection of SNP TSC0035553
cacctataaacac

SEQ ID NO: 141905 - DNA, 13 bp, Artificial Sequence
  Oligonucleotide for detection of SNP TSC0035553
gtgttcgtaggtg

SEQ ID NO: 141906 - DNA, 13 bp, Artificial Sequence
  Oligonucleotide for detection of SNP TSC0035553
cacctacgaacac

SEQ ID NO: 141907 - DNA, 13 bp, Artificial Sequence
  Oligonucleotide for detection of SNP TSC0035554
gtttgaattaaaa

SEQ ID NO: 141908 - DNA, 13 bp, Artificial Sequence
  Oligonucleotide for detection of SNP TSC0035554
ttttaattcaaac

SEQ ID NO: 141909 - DNA, 13 bp, Artificial Sequence
  Oligonucleotide for detection of SNP TSC0035554
gtttgatttaaaa

SEQ ID NO: 141910 - DNA, 13 bp, Artificial Sequence
  Oligonucleotide for detection of SNP TSC0035554
ttttaaatcaaac

SEQ ID NO: 141911 - DNA, 13 bp, Artificial Sequence
  Oligonucleotide for detection of SNP TSC0035554
ttttggtttaggy

SEQ ID NO: 141912 - DNA, 13 bp, Artificial Sequence
  Oligonucleotide for detection of SNP TSC0035554
rcctaaaccaaaa

SEQ ID NO: 141913 - DNA, 13 bp, Artificial Sequence
  Oligonucleotide for detection of SNP TSC0035554
ttttgggttaggy

SEQ ID NO: 141914 - DNA, 13 bp, Artificial Sequence
  Oligonucleotide for detection of SNP TSC0035554
rcctaacccaaaa

SEQ ID NO: 141915 - DNA, 13 bp, Artificial Sequence
  Oligonucleotide for detection of SNP TSC0035555
ttaaaatgtatat

SEQ ID NO: 141916 - DNA, 13 bp, Artificial Sequence
  Oligonucleotide for detection of SNP TSC0035555
atatacattttaa

SEQ ID NO: 141917 - DNA, 13 bp, Artificial Sequence
  Oligonucleotide for detection of SNP TSC0035555
ttaaaacgtatat

SEQ ID NO: 141918 - DNA, 13 bp, Artificial Sequence
  Oligonucleotide for detection of SNP TSC0035555
atatacgttttaa

SEQ ID NO: 141919 - DNA, 13 bp, Artificial Sequence
  Oligonucleotide for detection of SNP TSC0035555
atatgtgttttaa

SEQ ID NO: 141920 - DNA, 13 bp, Artificial Sequence
  Oligonucleotide for detection of SNP TSC0035555
ttaaaacacatat

SEQ ID NO: 141921 - DNA, 13 bp, Artificial Sequence
  Oligonucleotide for detection of SNP TSC0035555
atatgtattttaa

SEQ ID NO: 141922 - DNA, 13 bp, Artificial Sequence
  Oligonucleotide for detection of SNP TSC0035555
ttaaaatacatat

SEQ ID NO: 141923 - DNA, 13 bp, Artificial Sequence
  Oligonucleotide for detection of SNP TSC0035555
atatgcgttttaa

SEQ ID NO: 141924 - DNA, 13 bp, Artificial Sequence
  Oligonucleotide for detection of SNP TSC0035555
ttaaaacgcatat

SEQ ID NO: 141925 - DNA, 13 bp, Artificial Sequence
  Oligonucleotide for detection of SNP TSC0035556
aatgtatgtaggt

SEQ ID NO: 141926 - DNA, 13 bp, Artificial Sequence
  Oligonucleotide for detection of SNP TSC0035556
acctacatacatt

SEQ ID NO: 141927 - DNA, 13 bp, Artificial Sequence
  Oligonucleotide for detection of SNP TSC0035556
aatgtacgtaggt

SEQ ID NO: 141928 - DNA, 13 bp, Artificial Sequence
  Oligonucleotide for detection of SNP TSC0035556
acctacgtacatt

SEQ ID NO: 141929 - DNA, 13 bp, Artificial Sequence
  Oligonucleotide for detection of SNP TSC0035556
atttatgtgtatt

SEQ ID NO: 141930 - DNA, 13 bp, Artificial Sequence
  Oligonucleotide for detection of SNP TSC0035556
aatacacataaat

SEQ ID NO: 141931 - DNA, 13 bp, Artificial Sequence
  Oligonucleotide for detection of SNP TSC0035556
atttatatgtatt

SEQ ID NO: 141932 - DNA, 13 bp, Artificial Sequence
  Oligonucleotide for detection of SNP TSC0035556
aatacatataaat

SEQ ID NO: 141933 - DNA, 13 bp, Artificial Sequence
  Oligonucleotide for detection of SNP TSC0035556
atttacgtgtatt

SEQ ID NO: 141934 - DNA, 13 bp, Artificial Sequence
  Oligonucleotide for detection of SNP TSC0035556
aatacacgtaaat

SEQ ID NO: 141935 - DNA, 13 bp, Artificial Sequence
  Oligonucleotide for detection of SNP TSC0035557
agtaattgtttgy

SEQ ID NO: 141936 - DNA, 13 bp, Artificial Sequence
  Oligonucleotide for detection of SNP TSC0035557
rcaaacaattact

SEQ ID NO: 141937 - DNA, 13 bp, Artificial Sequence
  Oligonucleotide for detection of SNP TSC0035557
agtaatagtttgy

SEQ ID NO: 141938 - DNA, 13 bp, Artificial Sequence
  Oligonucleotide for detection of SNP TSC0035557
rcaaactattact

SEQ ID NO: 141939 - DNA, 13 bp, Artificial Sequence
  Oligonucleotide for detection of SNP TSC0035557
agtaatcgtttgy

SEQ ID NO: 141940 - DNA, 13 bp, Artificial Sequence
  Oligonucleotide for detection of SNP TSC0035557
rcaaacgattact

SEQ ID NO: 141941 - DNA, 13 bp, Artificial Sequence
  Oligonucleotide for detection of SNP TSC0035557
gtaggttgttatt

SEQ ID NO: 141942 - DNA, 13 bp, Artificial Sequence
  Oligonucleotide for detection of SNP TSC0035557
aataacaacctac

SEQ ID NO: 141943 - DNA, 13 bp, Artificial Sequence
  Oligonucleotide for detection of SNP TSC0035559
tatttatgatagt

SEQ ID NO: 141944 - DNA, 13 bp, Artificial Sequence
  Oligonucleotide for detection of SNP TSC0035559
actatcataaata

SEQ ID NO: 141945 - DNA, 13 bp, Artificial Sequence
  Oligonucleotide for detection of SNP TSC0035559
tatttacgatagt

SEQ ID NO: 141946 - DNA, 13 bp, Artificial Sequence
  Oligonucleotide for detection of SNP TSC0035559
actatcgtaaata

SEQ ID NO: 141947 - DNA, 13 bp, Artificial Sequence
  Oligonucleotide for detection of SNP TSC0035559
attattgtaagta

SEQ ID NO: 141948 - DNA, 13 bp, Artificial Sequence
  Oligonucleotide for detection of SNP TSC0035559
tacttacaataat

SEQ ID NO: 141949 - DNA, 13 bp, Artificial Sequence
  Oligonucleotide for detection of SNP TSC0035559
attattataagta

SEQ ID NO: 141950 - DNA, 13 bp, Artificial Sequence
  Oligonucleotide for detection of SNP TSC0035559
tacttataataat

SEQ ID NO: 141951 - DNA, 13 bp, Artificial Sequence
  Oligonucleotide for detection of SNP TSC0035559
attatcgtaagta

SEQ ID NO: 141952 - DNA, 13 bp, Artificial Sequence
  Oligonucleotide for detection of SNP TSC0035559
tacttacgataat

SEQ ID NO: 141953 - DNA, 13 bp, Artificial Sequence
  Oligonucleotide for detection of SNP TSC0035560
tattttgtagatg

SEQ ID NO: 141954 - DNA, 13 bp, Artificial Sequence
  Oligonucleotide for detection of SNP TSC0035560
catctacaaaata

SEQ ID NO: 141955 - DNA, 13 bp, Artificial Sequence
  Oligonucleotide for detection of SNP TSC0035560
tattttatagatg

SEQ ID NO: 141956 - DNA, 13 bp, Artificial Sequence
  Oligonucleotide for detection of SNP TSC0035560
catctataaaata

SEQ ID NO: 141957 - DNA, 13 bp, Artificial Sequence
  Oligonucleotide for detection of SNP TSC0035561
tagttaagtatat

SEQ ID NO: 141958 - DNA, 13 bp, Artificial Sequence
  Oligonucleotide for detection of SNP TSC0035561
atatacttaacta

SEQ ID NO: 141959 - DNA, 13 bp, Artificial Sequence
  Oligonucleotide for detection of SNP TSC0035561
atgtatttagtta

SEQ ID NO: 141960 - DNA, 13 bp, Artificial Sequence
  Oligonucleotide for detection of SNP TSC0035561
taactaaatacat

SEQ ID NO: 141961 - DNA, 13 bp, Artificial Sequence
  Oligonucleotide for detection of SNP TSC0035561
atgtatatagtta

SEQ ID NO: 141962 - DNA, 13 bp, Artificial Sequence
  Oligonucleotide for detection of SNP TSC0035561
taactatatacat

SEQ ID NO: 141963 - DNA, 13 bp, Artificial Sequence
  Oligonucleotide for detection of SNP TSC0035562
ggaggttagatgt

SEQ ID NO: 141964 - DNA, 13 bp, Artificial Sequence
  Oligonucleotide for detection of SNP TSC0035562
acatctaacctcc

SEQ ID NO: 141965 - DNA, 13 bp, Artificial Sequence
  Oligonucleotide for detection of SNP TSC0035562
ggaggtgagatgt

SEQ ID NO: 141966 - DNA, 13 bp, Artificial Sequence
  Oligonucleotide for detection of SNP TSC0035562
acatctcacctcc

SEQ ID NO: 141967 - DNA, 13 bp, Artificial Sequence
  Oligonucleotide for detection of SNP TSC0035562
ggaggttagacgt

SEQ ID NO: 141968 - DNA, 13 bp, Artificial Sequence
  Oligonucleotide for detection of SNP TSC0035562
acgtctaacctcc

SEQ ID NO: 141969 - DNA, 13 bp, Artificial Sequence
  Oligonucleotide for detection of SNP TSC0035562
ggaggcgagatgt

SEQ ID NO: 141970 - DNA, 13 bp, Artificial Sequence
  Oligonucleotide for detection of SNP TSC0035562
acatctcgcctcc

SEQ ID NO: 141971 - DNA, 13 bp, Artificial Sequence
  Oligonucleotide for detection of SNP TSC0035562
ggaggtgagacgt

SEQ ID NO: 141972 - DNA, 13 bp, Artificial Sequence
  Oligonucleotide for detection of SNP TSC0035562
acgtctcacctcc

SEQ ID NO: 141973 - DNA, 13 bp, Artificial Sequence
  Oligonucleotide for detection of SNP TSC0035562
ggaggcgagacgt

SEQ ID NO: 141974 - DNA, 13 bp, Artificial Sequence
  Oligonucleotide for detection of SNP TSC0035562
acgtctcgcctcc

SEQ ID NO: 141975 - DNA, 13 bp, Artificial Sequence
  Oligonucleotide for detection of SNP TSC0035562
acgtttggtttty

SEQ ID NO: 141976 - DNA, 13 bp, Artificial Sequence
  Oligonucleotide for detection of SNP TSC0035562
raaaaccaaacgt

SEQ ID NO: 141977 - DNA, 13 bp, Artificial Sequence
  Oligonucleotide for detection of SNP TSC0035562
acgttttgtttty

SEQ ID NO: 141978 - DNA, 13 bp, Artificial Sequence
  Oligonucleotide for detection of SNP TSC0035562
raaaacaaaacgt

SEQ ID NO: 141979 - DNA, 13 bp, Artificial Sequence
  Oligonucleotide for detection of SNP TSC0035562
acgtttcgtttty

SEQ ID NO: 141980 - DNA, 13 bp, Artificial Sequence
  Oligonucleotide for detection of SNP TSC0035562
raaaacgaaacgt

SEQ ID NO: 141981 - DNA, 13 bp, Artificial Sequence
  Oligonucleotide for detection of SNP TSC0035564
tggtggtttatgy

SEQ ID NO: 141982 - DNA, 13 bp, Artificial Sequence
  Oligonucleotide for detection of SNP TSC0035564
rcataaaccacca

SEQ ID NO: 141983 - DNA, 13 bp, Artificial Sequence
  Oligonucleotide for detection of SNP TSC0035564
tggtgggttatgy

SEQ ID NO: 141984 - DNA, 13 bp, Artificial Sequence
  Oligonucleotide for detection of SNP TSC0035564
rcataacccacca

SEQ ID NO: 141985 - DNA, 13 bp, Artificial Sequence
  Oligonucleotide for detection of SNP TSC0035564
tggtggtttacgy

SEQ ID NO: 141986 - DNA, 13 bp, Artificial Sequence
  Oligonucleotide for detection of SNP TSC0035564
rcgtaaaccacca

SEQ ID NO: 141987 - DNA, 13 bp, Artificial Sequence
  Oligonucleotide for detection of SNP TSC0035564
tggtgggttacgy

SEQ ID NO: 141988 - DNA, 13 bp, Artificial Sequence
  Oligonucleotide for detection of SNP TSC0035564
rcgtaacccacca

SEQ ID NO: 141989 - DNA, 13 bp, Artificial Sequence
  Oligonucleotide for detection of SNP TSC0035564
gtgtgatttatta

SEQ ID NO: 141990 - DNA, 13 bp, Artificial Sequence
  Oligonucleotide for detection of SNP TSC0035564
taataaatcacac

SEQ ID NO: 141991 - DNA, 13 bp, Artificial Sequence
  Oligonucleotide for detection of SNP TSC0035564
gcgtgatttatta

SEQ ID NO: 141992 - DNA, 13 bp, Artificial Sequence
  Oligonucleotide for detection of SNP TSC0035564
taataaatcacgc

SEQ ID NO: 141993 - DNA, 13 bp, Artificial Sequence
  Oligonucleotide for detection of SNP TSC0035565
ttatttatattaa

SEQ ID NO: 141994 - DNA, 13 bp, Artificial Sequence
  Oligonucleotide for detection of SNP TSC0035565
ttaatataaataa

SEQ ID NO: 141995 - DNA, 13 bp, Artificial Sequence
  Oligonucleotide for detection of SNP TSC0035565
ttatttgtattaa

SEQ ID NO: 141996 - DNA, 13 bp, Artificial Sequence
  Oligonucleotide for detection of SNP TSC0035565
ttaatacaaataa

SEQ ID NO: 141997 - DNA, 13 bp, Artificial Sequence
  Oligonucleotide for detection of SNP TSC0035572
gggtaaaaggtag

SEQ ID NO: 141998 - DNA, 13 bp, Artificial Sequence
  Oligonucleotide for detection of SNP TSC0035572
ctaccttttaccc

SEQ ID NO: 141999 - DNA, 13 bp, Artificial Sequence
  Oligonucleotide for detection of SNP TSC0035572
gggtaataggtag

SEQ ID NO: 142000 - DNA, 13 bp, Artificial Sequence
  Oligonucleotide for detection of SNP TSC0035572
ctacctattaccc

SEQ ID NO: 142001 - DNA, 13 bp, Artificial Sequence
  Oligonucleotide for detection of SNP TSC0035572
ttgttttttatty

SEQ ID NO: 142002 - DNA, 13 bp, Artificial Sequence
  Oligonucleotide for detection of SNP TSC0035572
raataaaaaacaa

SEQ ID NO: 142003 - DNA, 13 bp, Artificial Sequence
  Oligonucleotide for detection of SNP TSC0035572
ttgtttattatty

SEQ ID NO: 142004 - DNA, 13 bp, Artificial Sequence
  Oligonucleotide for detection of SNP TSC0035572
raataataaacaa

SEQ ID NO: 142005 - DNA, 13 bp, Artificial Sequence
  Oligonucleotide for detection of SNP TSC0035573
ttgttgaatttta

SEQ ID NO: 142006 - DNA, 13 bp, Artificial Sequence
  Oligonucleotide for detection of SNP TSC0035573
taaaattcaacaa

SEQ ID NO: 142007 - DNA, 13 bp, Artificial Sequence
  Oligonucleotide for detection of SNP TSC0035573
ttgtcgaatttta

SEQ ID NO: 142008 - DNA, 13 bp, Artificial Sequence
  Oligonucleotide for detection of SNP TSC0035573
taaaattcgacaa

SEQ ID NO: 142009 - DNA, 13 bp, Artificial Sequence
  Oligonucleotide for detection of SNP TSC0035573
ttgtcgtatttta

SEQ ID NO: 142010 - DNA, 13 bp, Artificial Sequence
  Oligonucleotide for detection of SNP TSC0035573
taaaatacgacaa

SEQ ID NO: 142011 - DNA, 13 bp, Artificial Sequence
  Oligonucleotide for detection of SNP TSC0035573
tgagatttgataa

SEQ ID NO: 142012 - DNA, 13 bp, Artificial Sequence
  Oligonucleotide for detection of SNP TSC0035573
ttatcaaatctca

SEQ ID NO: 142013 - DNA, 13 bp, Artificial Sequence
  Oligonucleotide for detection of SNP TSC0035573
tgagatatgataa

SEQ ID NO: 142014 - DNA, 13 bp, Artificial Sequence
  Oligonucleotide for detection of SNP TSC0035573
ttatcatatctca

SEQ ID NO: 142015 - DNA, 13 bp, Artificial Sequence
  Oligonucleotide for detection of SNP TSC0035573
tgagattcgataa

SEQ ID NO: 142016 - DNA, 13 bp, Artificial Sequence
  Oligonucleotide for detection of SNP TSC0035573
ttatcgaatctca

SEQ ID NO: 142017 - DNA, 13 bp, Artificial Sequence
  Oligonucleotide for detection of SNP TSC0035573
tgagatacgataa

SEQ ID NO: 142018 - DNA, 13 bp, Artificial Sequence
  Oligonucleotide for detection of SNP TSC0035573
ttatcgtatctca

SEQ ID NO: 142019 - DNA, 13 bp, Artificial Sequence
  Oligonucleotide for detection of SNP TSC0035574
gggggaagaaaaa

SEQ ID NO: 142020 - DNA, 13 bp, Artificial Sequence
  Oligonucleotide for detection of SNP TSC0035574
tttttcttccccc

SEQ ID NO: 142021 - DNA, 13 bp, Artificial Sequence
  Oligonucleotide for detection of SNP TSC0035574
gggggaggaaaaa

SEQ ID NO: 142022 - DNA, 13 bp, Artificial Sequence
  Oligonucleotide for detection of SNP TSC0035574
tttttcctccccc

SEQ ID NO: 142023 - DNA, 13 bp, Artificial Sequence
  Oligonucleotide for detection of SNP TSC0035575
gggaaataaagag

SEQ ID NO: 142024 - DNA, 13 bp, Artificial Sequence
  Oligonucleotide for detection of SNP TSC0035575
ctctttatttccc

SEQ ID NO: 142025 - DNA, 13 bp, Artificial Sequence
  Oligonucleotide for detection of SNP TSC0035575
gggaaaaaaagag

SEQ ID NO: 142026 - DNA, 13 bp, Artificial Sequence
  Oligonucleotide for detection of SNP TSC0035575
ctctttttttccc

SEQ ID NO: 142027 - DNA, 13 bp, Artificial Sequence
  Oligonucleotide for detection of SNP TSC0035576
atggttataatty

SEQ ID NO: 142028 - DNA, 13 bp, Artificial Sequence
  Oligonucleotide for detection of SNP TSC0035576
raattataaccat

SEQ ID NO: 142029 - DNA, 13 bp, Artificial Sequence
  Oligonucleotide for detection of SNP TSC0035576
atggttgtaatty

SEQ ID NO: 142030 - DNA, 13 bp, Artificial Sequence
  Oligonucleotide for detection of SNP TSC0035576
raattacaaccat

SEQ ID NO: 142031 - DNA, 13 bp, Artificial Sequence
  Oligonucleotide for detection of SNP TSC0035576
acggttataatty

SEQ ID NO: 142032 - DNA, 13 bp, Artificial Sequence
  Oligonucleotide for detection of SNP TSC0035576
raattataaccgt

SEQ ID NO: 142033 - DNA, 13 bp, Artificial Sequence
  Oligonucleotide for detection of SNP TSC0035576
acggttgtaatty

SEQ ID NO: 142034 - DNA, 13 bp, Artificial Sequence
  Oligonucleotide for detection of SNP TSC0035576
raattacaaccgt

SEQ ID NO: 142035 - DNA, 13 bp, Artificial Sequence
  Oligonucleotide for detection of SNP TSC0035577
taatataggttgg

SEQ ID NO: 142036 - DNA, 13 bp, Artificial Sequence
  Oligonucleotide for detection of SNP TSC0035577
ccaacctatatta

SEQ ID NO: 142037 - DNA, 13 bp, Artificial Sequence
  Oligonucleotide for detection of SNP TSC0035577
taatatgggttgg

SEQ ID NO: 142038 - DNA, 13 bp, Artificial Sequence
  Oligonucleotide for detection of SNP TSC0035577
ccaacccatatta

SEQ ID NO: 142039 - DNA, 13 bp, Artificial Sequence
  Oligonucleotide for detection of SNP TSC0035577
taatataggtcgg

SEQ ID NO: 142040 - DNA, 13 bp, Artificial Sequence
  Oligonucleotide for detection of SNP TSC0035577
ccgacctatatta

SEQ ID NO: 142041 - DNA, 13 bp, Artificial Sequence
  Oligonucleotide for detection of SNP TSC0035577
taatacgggttgg

SEQ ID NO: 142042 - DNA, 13 bp, Artificial Sequence
  Oligonucleotide for detection of SNP TSC0035577
ccaacccgtatta

SEQ ID NO: 142043 - DNA, 13 bp, Artificial Sequence
  Oligonucleotide for detection of SNP TSC0035577
taatatgggtcgg

SEQ ID NO: 142044 - DNA, 13 bp, Artificial Sequence
  Oligonucleotide for detection of SNP TSC0035577
ccgacccatatta

SEQ ID NO: 142045 - DNA, 13 bp, Artificial Sequence
  Oligonucleotide for detection of SNP TSC0035577
taatacgggtcgg

SEQ ID NO: 142046 - DNA, 13 bp, Artificial Sequence
  Oligonucleotide for detection of SNP TSC0035577
ccgacccgtatta

SEQ ID NO: 142047 - DNA, 13 bp, Artificial Sequence
  Oligonucleotide for detection of SNP TSC0035577
ttgatttgtattg

SEQ ID NO: 142048 - DNA, 13 bp, Artificial Sequence
  Oligonucleotide for detection of SNP TSC0035577
caatacaaatcaa

SEQ ID NO: 142049 - DNA, 13 bp, Artificial Sequence
  Oligonucleotide for detection of SNP TSC0035577
tcgatttgtattg

SEQ ID NO: 142050 - DNA, 13 bp, Artificial Sequence
  Oligonucleotide for detection of SNP TSC0035577
caatacaaatcga

SEQ ID NO: 142051 - DNA, 13 bp, Artificial Sequence
  Oligonucleotide for detection of SNP TSC0035577
ttgattcgtattg

SEQ ID NO: 142052 - DNA, 13 bp, Artificial Sequence
  Oligonucleotide for detection of SNP TSC0035577
caatacgaatcaa

SEQ ID NO: 142053 - DNA, 13 bp, Artificial Sequence
  Oligonucleotide for detection of SNP TSC0035577
tcgattcgtattg

SEQ ID NO: 142054 - DNA, 13 bp, Artificial Sequence
  Oligonucleotide for detection of SNP TSC0035577
caatacgaatcga

SEQ ID NO: 142055 - DNA, 13 bp, Artificial Sequence
  Oligonucleotide for detection of SNP TSC0035578
gtgtttggttagg

SEQ ID NO: 142056 - DNA, 13 bp, Artificial Sequence
  Oligonucleotide for detection of SNP TSC0035578
cctaaccaaacac

SEQ ID NO: 142057 - DNA, 13 bp, Artificial Sequence
  Oligonucleotide for detection of SNP TSC0035578
gtgttttgttagg

SEQ ID NO: 142058 - DNA, 13 bp, Artificial Sequence
  Oligonucleotide for detection of SNP TSC0035578
cctaacaaaacac

SEQ ID NO: 142059 - DNA, 13 bp, Artificial Sequence
  Oligonucleotide for detection of SNP TSC0035578
gtgttcggttagg

SEQ ID NO: 142060 - DNA, 13 bp, Artificial Sequence
  Oligonucleotide for detection of SNP TSC0035578
cctaaccgaacac

SEQ ID NO: 142061 - DNA, 13 bp, Artificial Sequence
  Oligonucleotide for detection of SNP TSC0035578
tttagtagggtay

SEQ ID NO: 142062 - DNA, 13 bp, Artificial Sequence
  Oligonucleotide for detection of SNP TSC0035578
rtaccctactaaa

SEQ ID NO: 142063 - DNA, 13 bp, Artificial Sequence
  Oligonucleotide for detection of SNP TSC0035579
gagggagttataa

SEQ ID NO: 142064 - DNA, 13 bp, Artificial Sequence
  Oligonucleotide for detection of SNP TSC0035579
ttataactccctc

SEQ ID NO: 142065 - DNA, 13 bp, Artificial Sequence
  Oligonucleotide for detection of SNP TSC0035579
gagggaattataa

SEQ ID NO: 142066 - DNA, 13 bp, Artificial Sequence
  Oligonucleotide for detection of SNP TSC0035579
ttataattccctc

SEQ ID NO: 142067 - DNA, 13 bp, Artificial Sequence
  Oligonucleotide for detection of SNP TSC0035580
gtttgtagttttt

SEQ ID NO: 142068 - DNA, 13 bp, Artificial Sequence
  Oligonucleotide for detection of SNP TSC0035580
aaaaactacaaac

SEQ ID NO: 142069 - DNA, 13 bp, Artificial Sequence
  Oligonucleotide for detection of SNP TSC0035580
gtttgtggttttt

SEQ ID NO: 142070 - DNA, 13 bp, Artificial Sequence
  Oligonucleotide for detection of SNP TSC0035580
aaaaaccacaaac

SEQ ID NO: 142071 - DNA, 13 bp, Artificial Sequence
  Oligonucleotide for detection of SNP TSC0035580
gtttgcggttttt

SEQ ID NO: 142072 - DNA, 13 bp, Artificial Sequence
  Oligonucleotide for detection of SNP TSC0035580
aaaaaccgcaaac

SEQ ID NO: 142073 - DNA, 13 bp, Artificial Sequence
  Oligonucleotide for detection of SNP TSC0035580
aagggttgtagay

SEQ ID NO: 142074 - DNA, 13 bp, Artificial Sequence
  Oligonucleotide for detection of SNP TSC0035580
rtctacaaccctt

SEQ ID NO: 142075 - DNA, 13 bp, Artificial Sequence
  Oligonucleotide for detection of SNP TSC0035580
aagggtcgtagay

SEQ ID NO: 142076 - DNA, 13 bp, Artificial Sequence
  Oligonucleotide for detection of SNP TSC0035580
rtctacgaccctt

SEQ ID NO: 142077 - DNA, 13 bp, Artificial Sequence
  Oligonucleotide for detection of SNP TSC0035581
ttaattgtttata

SEQ ID NO: 142078 - DNA, 13 bp, Artificial Sequence
  Oligonucleotide for detection of SNP TSC0035581
tataaacaattaa

SEQ ID NO: 142079 - DNA, 13 bp, Artificial Sequence
  Oligonucleotide for detection of SNP TSC0035581
ttaattatttata

SEQ ID NO: 142080 - DNA, 13 bp, Artificial Sequence
  Oligonucleotide for detection of SNP TSC0035581
tataaataattaa

SEQ ID NO: 142081 - DNA, 13 bp, Artificial Sequence
  Oligonucleotide for detection of SNP TSC0035582
gtagataattgay

SEQ ID NO: 142082 - DNA, 13 bp, Artificial Sequence
  Oligonucleotide for detection of SNP TSC0035582
rtcaattatctac

SEQ ID NO: 142083 - DNA, 13 bp, Artificial Sequence
  Oligonucleotide for detection of SNP TSC0035582
gtagattattgay

SEQ ID NO: 142084 - DNA, 13 bp, Artificial Sequence
  Oligonucleotide for detection of SNP TSC0035582
rtcaataatctac

SEQ ID NO: 142085 - DNA, 13 bp, Artificial Sequence
  Oligonucleotide for detection of SNP TSC0035582
gttaattgtttay

SEQ ID NO: 142086 - DNA, 13 bp, Artificial Sequence
  Oligonucleotide for detection of SNP TSC0035582
rtaaacaattaac

SEQ ID NO: 142087 - DNA, 13 bp, Artificial Sequence
  Oligonucleotide for detection of SNP TSC0035582
gttaatagtttay

SEQ ID NO: 142088 - DNA, 13 bp, Artificial Sequence
  Oligonucleotide for detection of SNP TSC0035582
rtaaactattaac

SEQ ID NO: 142089 - DNA, 13 bp, Artificial Sequence
  Oligonucleotide for detection of SNP TSC0035584
gtggttattgtty

SEQ ID NO: 142090 - DNA, 13 bp, Artificial Sequence
  Oligonucleotide for detection of SNP TSC0035584
raacaataaccac

SEQ ID NO: 142091 - DNA, 13 bp, Artificial Sequence
  Oligonucleotide for detection of SNP TSC0035584
gtggttgttgtty

SEQ ID NO: 142092 - DNA, 13 bp, Artificial Sequence
  Oligonucleotide for detection of SNP TSC0035584
raacaacaaccac

SEQ ID NO: 142093 - DNA, 13 bp, Artificial Sequence
  Oligonucleotide for detection of SNP TSC0035585
atgataatgagat

SEQ ID NO: 142094 - DNA, 13 bp, Artificial Sequence
  Oligonucleotide for detection of SNP TSC0035585
atctcattatcat

SEQ ID NO: 142095 - DNA, 13 bp, Artificial Sequence
  Oligonucleotide for detection of SNP TSC0035585
atgatagtgagat

SEQ ID NO: 142096 - DNA, 13 bp, Artificial Sequence
  Oligonucleotide for detection of SNP TSC0035585
atctcactatcat

SEQ ID NO: 142097 - DNA, 13 bp, Artificial Sequence
  Oligonucleotide for detection of SNP TSC0035585
atgataacgagat

SEQ ID NO: 142098 - DNA, 13 bp, Artificial Sequence
  Oligonucleotide for detection of SNP TSC0035585
atctcgttatcat

SEQ ID NO: 142099 - DNA, 13 bp, Artificial Sequence
  Oligonucleotide for detection of SNP TSC0035585
atgatagcgagat

SEQ ID NO: 142100 - DNA, 13 bp, Artificial Sequence
  Oligonucleotide for detection of SNP TSC0035585
atctcgctatcat

SEQ ID NO: 142101 - DNA, 13 bp, Artificial Sequence
  Oligonucleotide for detection of SNP TSC0035589
aaattgtggtatt

SEQ ID NO: 142102 - DNA, 13 bp, Artificial Sequence
  Oligonucleotide for detection of SNP TSC0035589
aataccacaattt

SEQ ID NO: 142103 - DNA, 13 bp, Artificial Sequence
  Oligonucleotide for detection of SNP TSC0035589
aaattgcggtatt

SEQ ID NO: 142104 - DNA, 13 bp, Artificial Sequence
  Oligonucleotide for detection of SNP TSC0035589
aataccgcaattt

SEQ ID NO: 142105 - DNA, 13 bp, Artificial Sequence
  Oligonucleotide for detection of SNP TSC0035589
aatgttgtaattt

SEQ ID NO: 142106 - DNA, 13 bp, Artificial Sequence
  Oligonucleotide for detection of SNP TSC0035589
aaattacaacatt

SEQ ID NO: 142107 - DNA, 13 bp, Artificial Sequence
  Oligonucleotide for detection of SNP TSC0035589
aatgttataattt

SEQ ID NO: 142108 - DNA, 13 bp, Artificial Sequence
  Oligonucleotide for detection of SNP TSC0035589
aaattataacatt

SEQ ID NO: 142109 - DNA, 13 bp, Artificial Sequence
  Oligonucleotide for detection of SNP TSC0035589
aatgtcgtaattt

SEQ ID NO: 142110 - DNA, 13 bp, Artificial Sequence
  Oligonucleotide for detection of SNP TSC0035589
aaattacgacatt

SEQ ID NO: 142111 - DNA, 13 bp, Artificial Sequence
  Oligonucleotide for detection of SNP TSC0035591
ttatatattaatg

SEQ ID NO: 142112 - DNA, 13 bp, Artificial Sequence
  Oligonucleotide for detection of SNP TSC0035591
cattaatatataa

SEQ ID NO: 142113 - DNA, 13 bp, Artificial Sequence
  Oligonucleotide for detection of SNP TSC0035591
ttatatgttaatg

SEQ ID NO: 142114 - DNA, 13 bp, Artificial Sequence
  Oligonucleotide for detection of SNP TSC0035591
cattaacatataa

SEQ ID NO: 142115 - DNA, 13 bp, Artificial Sequence
  Oligonucleotide for detection of SNP TSC0035591
ttatacgttaatg

SEQ ID NO: 142116 - DNA, 13 bp, Artificial Sequence
  Oligonucleotide for detection of SNP TSC0035591
cattaacgtataa

SEQ ID NO: 142117 - DNA, 13 bp, Artificial Sequence
  Oligonucleotide for detection of SNP TSC0035591
tattaatgtataa

SEQ ID NO: 142118 - DNA, 13 bp, Artificial Sequence
  Oligonucleotide for detection of SNP TSC0035591
ttatacattaata

SEQ ID NO: 142119 - DNA, 13 bp, Artificial Sequence
  Oligonucleotide for detection of SNP TSC0035591
tattaacgtataa

SEQ ID NO: 142120 - DNA, 13 bp, Artificial Sequence
  Oligonucleotide for detection of SNP TSC0035591
ttatacgttaata

SEQ ID NO: 142121 - DNA, 13 bp, Artificial Sequence
  Oligonucleotide for detection of SNP TSC0035594
gatttagttttga

SEQ ID NO: 142122 - DNA, 13 bp, Artificial Sequence
  Oligonucleotide for detection of SNP TSC0035594
tcaaaactaaatc

SEQ ID NO: 142123 - DNA, 13 bp, Artificial Sequence
  Oligonucleotide for detection of SNP TSC0035594
gatttatttttga

SEQ ID NO: 142124 - DNA, 13 bp, Artificial Sequence
  Oligonucleotide for detection of SNP TSC0035594
tcaaaaataaatc

SEQ ID NO: 142125 - DNA, 13 bp, Artificial Sequence
  Oligonucleotide for detection of SNP TSC0035594
ttaggattgagty

SEQ ID NO: 142126 - DNA, 13 bp, Artificial Sequence
  Oligonucleotide for detection of SNP TSC0035594
ractcaatcctaa

SEQ ID NO: 142127 - DNA, 13 bp, Artificial Sequence
  Oligonucleotide for detection of SNP TSC0035594
ttaggaatgagty

SEQ ID NO: 142128 - DNA, 13 bp, Artificial Sequence
  Oligonucleotide for detection of SNP TSC0035594
ractcattcctaa

SEQ ID NO: 142129 - DNA, 13 bp, Artificial Sequence
  Oligonucleotide for detection of SNP TSC0035599
tttaatgtaagta

SEQ ID NO: 142130 - DNA, 13 bp, Artificial Sequence
  Oligonucleotide for detection of SNP TSC0035599
tacttacattaaa

SEQ ID NO: 142131 - DNA, 13 bp, Artificial Sequence
  Oligonucleotide for detection of SNP TSC0035599
tttaatataagta

SEQ ID NO: 142132 - DNA, 13 bp, Artificial Sequence
  Oligonucleotide for detection of SNP TSC0035599
tacttatattaaa

SEQ ID NO: 142133 - DNA, 13 bp, Artificial Sequence
  Oligonucleotide for detection of SNP TSC0035600
gaaaagataaata

SEQ ID NO: 142134 - DNA, 13 bp, Artificial Sequence
  Oligonucleotide for detection of SNP TSC0035600
tatttatcttttc

SEQ ID NO: 142135 - DNA, 13 bp, Artificial Sequence
  Oligonucleotide for detection of SNP TSC0035600
gaaaaggtaaata

SEQ ID NO: 142136 - DNA, 13 bp, Artificial Sequence
  Oligonucleotide for detection of SNP TSC0035600
tatttaccttttc

SEQ ID NO: 142137 - DNA, 13 bp, Artificial Sequence
  Oligonucleotide for detection of SNP TSC0035607
ttttttaggtatt

SEQ ID NO: 142138 - DNA, 13 bp, Artificial Sequence
  Oligonucleotide for detection of SNP TSC0035607
aatacctaaaaaa

SEQ ID NO: 142139 - DNA, 13 bp, Artificial Sequence
  Oligonucleotide for detection of SNP TSC0035607
ttttttgggtatt

SEQ ID NO: 142140 - DNA, 13 bp, Artificial Sequence
  Oligonucleotide for detection of SNP TSC0035607
aatacccaaaaaa

SEQ ID NO: 142141 - DNA, 13 bp, Artificial Sequence
  Oligonucleotide for detection of SNP TSC0035607
tttttcgggtatt

SEQ ID NO: 142142 - DNA, 13 bp, Artificial Sequence
  Oligonucleotide for detection of SNP TSC0035607
aatacccgaaaaa

SEQ ID NO: 142143 - DNA, 13 bp, Artificial Sequence
  Oligonucleotide for detection of SNP TSC0035607
aatatttgggagg

SEQ ID NO: 142144 - DNA, 13 bp, Artificial Sequence
  Oligonucleotide for detection of SNP TSC0035607
cctcccaaatatt

SEQ ID NO: 142145 - DNA, 13 bp, Artificial Sequence
  Oligonucleotide for detection of SNP TSC0035607
aatattcgggagg

SEQ ID NO: 142146 - DNA, 13 bp, Artificial Sequence
  Oligonucleotide for detection of SNP TSC0035607
cctcccgaatatt

SEQ ID NO: 142147 - DNA, 13 bp, Artificial Sequence
  Oligonucleotide for detection of SNP TSC0035608
gagggaggtagtg

SEQ ID NO: 142148 - DNA, 13 bp, Artificial Sequence
  Oligonucleotide for detection of SNP TSC0035608
cactacctccctc

SEQ ID NO: 142149 - DNA, 13 bp, Artificial Sequence
  Oligonucleotide for detection of SNP TSC0035608
gagggaagtagtg

SEQ ID NO: 142150 - DNA, 13 bp, Artificial Sequence
  Oligonucleotide for detection of SNP TSC0035608
cactacttccctc

SEQ ID NO: 142151 - DNA, 13 bp, Artificial Sequence
  Oligonucleotide for detection of SNP TSC0035610
aaataagttagaa

SEQ ID NO: 142152 - DNA, 13 bp, Artificial Sequence
  Oligonucleotide for detection of SNP TSC0035610
ttctaacttattt

SEQ ID NO: 142153 - DNA, 13 bp, Artificial Sequence
  Oligonucleotide for detection of SNP TSC0035610
aaataaattagaa

SEQ ID NO: 142154 - DNA, 13 bp, Artificial Sequence
  Oligonucleotide for detection of SNP TSC0035610
ttctaatttattt

SEQ ID NO: 142155 - DNA, 13 bp, Artificial Sequence
  Oligonucleotide for detection of SNP TSC0035611
atagtatttggta

SEQ ID NO: 142156 - DNA, 13 bp, Artificial Sequence
  Oligonucleotide for detection of SNP TSC0035611
taccaaatactat

SEQ ID NO: 142157 - DNA, 13 bp, Artificial Sequence
  Oligonucleotide for detection of SNP TSC0035611
atagtagttggta

SEQ ID NO: 142158 - DNA, 13 bp, Artificial Sequence
  Oligonucleotide for detection of SNP TSC0035611
taccaactactat

SEQ ID NO: 142159 - DNA, 13 bp, Artificial Sequence
  Oligonucleotide for detection of SNP TSC0035611
tattaggtattgt

SEQ ID NO: 142160 - DNA, 13 bp, Artificial Sequence
  Oligonucleotide for detection of SNP TSC0035611
acaatacctaata

SEQ ID NO: 142161 - DNA, 13 bp, Artificial Sequence
  Oligonucleotide for detection of SNP TSC0035611
tattagttattgt

SEQ ID NO: 142162 - DNA, 13 bp, Artificial Sequence
  Oligonucleotide for detection of SNP TSC0035611
acaataactaata

SEQ ID NO: 142163 - DNA, 13 bp, Artificial Sequence
  Oligonucleotide for detection of SNP TSC0035612
ggaggtattggga

SEQ ID NO: 142164 - DNA, 13 bp, Artificial Sequence
  Oligonucleotide for detection of SNP TSC0035612
tcccaatacctcc

SEQ ID NO: 142165 - DNA, 13 bp, Artificial Sequence
  Oligonucleotide for detection of SNP TSC0035612
ggaggtgttggga

SEQ ID NO: 142166 - DNA, 13 bp, Artificial Sequence
  Oligonucleotide for detection of SNP TSC0035612
tcccaacacctcc

SEQ ID NO: 142167 - DNA, 13 bp, Artificial Sequence
  Oligonucleotide for detection of SNP TSC0035612
ggaggcgttggga

SEQ ID NO: 142168 - DNA, 13 bp, Artificial Sequence
  Oligonucleotide for detection of SNP TSC0035612
tcccaacgcctcc

SEQ ID NO: 142169 - DNA, 13 bp, Artificial Sequence
  Oligonucleotide for detection of SNP TSC0035613
gtatatattagtg

SEQ ID NO: 142170 - DNA, 13 bp, Artificial Sequence
  Oligonucleotide for detection of SNP TSC0035613
cactaatatatac

SEQ ID NO: 142171 - DNA, 13 bp, Artificial Sequence
  Oligonucleotide for detection of SNP TSC0035614
aggttaagtaatt

SEQ ID NO: 142172 - DNA, 13 bp, Artificial Sequence
  Oligonucleotide for detection of SNP TSC0035614
aattacttaacct

SEQ ID NO: 142173 - DNA, 13 bp, Artificial Sequence
  Oligonucleotide for detection of SNP TSC0035614
aggttatgtaatt

SEQ ID NO: 142174 - DNA, 13 bp, Artificial Sequence
  Oligonucleotide for detection of SNP TSC0035614
aattacataacct

SEQ ID NO: 142175 - DNA, 13 bp, Artificial Sequence
  Oligonucleotide for detection of SNP TSC0035614
aggttacgtaatt

SEQ ID NO: 142176 - DNA, 13 bp, Artificial Sequence
  Oligonucleotide for detection of SNP TSC0035614
aattacgtaacct

SEQ ID NO: 142177 - DNA, 13 bp, Artificial Sequence
  Oligonucleotide for detection of SNP TSC0035614
agttatttagttt

SEQ ID NO: 142178 - DNA, 13 bp, Artificial Sequence
  Oligonucleotide for detection of SNP TSC0035614
aaactaaataact

SEQ ID NO: 142179 - DNA, 13 bp, Artificial Sequence
  Oligonucleotide for detection of SNP TSC0035614
agttatgtagttt

SEQ ID NO: 142180 - DNA, 13 bp, Artificial Sequence
  Oligonucleotide for detection of SNP TSC0035614
aaactacataact

SEQ ID NO: 142181 - DNA, 13 bp, Artificial Sequence
  Oligonucleotide for detection of SNP TSC0035614
agttacgtagttt

SEQ ID NO: 142182 - DNA, 13 bp, Artificial Sequence
  Oligonucleotide for detection of SNP TSC0035614
aaactacgtaact

SEQ ID NO: 142183 - DNA, 13 bp, Artificial Sequence
  Oligonucleotide for detection of SNP TSC0035617
gttagagtagttg

SEQ ID NO: 142184 - DNA, 13 bp, Artificial Sequence
  Oligonucleotide for detection of SNP TSC0035617
caactactctaac

SEQ ID NO: 142185 - DNA, 13 bp, Artificial Sequence
  Oligonucleotide for detection of SNP TSC0035617
gttagattagttg

SEQ ID NO: 142186 - DNA, 13 bp, Artificial Sequence
  Oligonucleotide for detection of SNP TSC0035617
caactaatctaac

SEQ ID NO: 142187 - DNA, 13 bp, Artificial Sequence
  Oligonucleotide for detection of SNP TSC0035617
tagttgttttgay

SEQ ID NO: 142188 - DNA, 13 bp, Artificial Sequence
  Oligonucleotide for detection of SNP TSC0035617
rtcaaaacaacta

SEQ ID NO: 142189 - DNA, 13 bp, Artificial Sequence
  Oligonucleotide for detection of SNP TSC0035617
tagttgatttgay

SEQ ID NO: 142190 - DNA, 13 bp, Artificial Sequence
  Oligonucleotide for detection of SNP TSC0035617
rtcaaatcaacta

SEQ ID NO: 142191 - DNA, 13 bp, Artificial Sequence
  Oligonucleotide for detection of SNP TSC0035618
ttttgtggttggt

SEQ ID NO: 142192 - DNA, 13 bp, Artificial Sequence
  Oligonucleotide for detection of SNP TSC0035618
accaaccacaaaa

SEQ ID NO: 142193 - DNA, 13 bp, Artificial Sequence
  Oligonucleotide for detection of SNP TSC0035618
ttttgtagttggt

SEQ ID NO: 142194 - DNA, 13 bp, Artificial Sequence
  Oligonucleotide for detection of SNP TSC0035618
accaactacaaaa

SEQ ID NO: 142195 - DNA, 13 bp, Artificial Sequence
  Oligonucleotide for detection of SNP TSC0035618
ttttgcggttggt

SEQ ID NO: 142196 - DNA, 13 bp, Artificial Sequence
  Oligonucleotide for detection of SNP TSC0035618
accaaccgcaaaa

SEQ ID NO: 142197 - DNA, 13 bp, Artificial Sequence
  Oligonucleotide for detection of SNP TSC0035618
ttttgtagtcggt

SEQ ID NO: 142198 - DNA, 13 bp, Artificial Sequence
  Oligonucleotide for detection of SNP TSC0035618
accgactacaaaa

SEQ ID NO: 142199 - DNA, 13 bp, Artificial Sequence
  Oligonucleotide for detection of SNP TSC0035618
ttttgtggtcggt

SEQ ID NO: 142200 - DNA, 13 bp, Artificial Sequence
  Oligonucleotide for detection of SNP TSC0035618
accgaccacaaaa

SEQ ID NO: 142201 - DNA, 13 bp, Artificial Sequence
  Oligonucleotide for detection of SNP TSC0035618
ttttgcggtcggt

SEQ ID NO: 142202 - DNA, 13 bp, Artificial Sequence
  Oligonucleotide for detection of SNP TSC0035618
accgaccgcaaaa

SEQ ID NO: 142203 - DNA, 13 bp, Artificial Sequence
  Oligonucleotide for detection of SNP TSC0035619
ggtggaggttgaa

SEQ ID NO: 142204 - DNA, 13 bp, Artificial Sequence
  Oligonucleotide for detection of SNP TSC0035619
ttcaacctccacc

SEQ ID NO: 142205 - DNA, 13 bp, Artificial Sequence
  Oligonucleotide for detection of SNP TSC0035619
ggtggatgttgaa

SEQ ID NO: 142206 - DNA, 13 bp, Artificial Sequence
  Oligonucleotide for detection of SNP TSC0035619
ttcaacatccacc

SEQ ID NO: 142207 - DNA, 13 bp, Artificial Sequence
  Oligonucleotide for detection of SNP TSC0035619
ggcggaggttgaa

SEQ ID NO: 142208 - DNA, 13 bp, Artificial Sequence
  Oligonucleotide for detection of SNP TSC0035619
ttcaacctccgcc

SEQ ID NO: 142209 - DNA, 13 bp, Artificial Sequence
  Oligonucleotide for detection of SNP TSC0035619
ggcggatgttgaa

SEQ ID NO: 142210 - DNA, 13 bp, Artificial Sequence
  Oligonucleotide for detection of SNP TSC0035619
ttcaacatccgcc

SEQ ID NO: 142211 - DNA, 13 bp, Artificial Sequence
  Oligonucleotide for detection of SNP TSC0035619
ggtggacgttgaa

SEQ ID NO: 142212 - DNA, 13 bp, Artificial Sequence
  Oligonucleotide for detection of SNP TSC0035619
ttcaacgtccacc

SEQ ID NO: 142213 - DNA, 13 bp, Artificial Sequence
  Oligonucleotide for detection of SNP TSC0035619
ggcggacgttgaa

SEQ ID NO: 142214 - DNA, 13 bp, Artificial Sequence
  Oligonucleotide for detection of SNP TSC0035619
ttcaacgtccgcc

SEQ ID NO: 142215 - DNA, 13 bp, Artificial Sequence
  Oligonucleotide for detection of SNP TSC0035620
gttgtgaggtggg

SEQ ID NO: 142216 - DNA, 13 bp, Artificial Sequence
  Oligonucleotide for detection of SNP TSC0035620
cccacctcacaac

SEQ ID NO: 142217 - DNA, 13 bp, Artificial Sequence
  Oligonucleotide for detection of SNP TSC0035620
gttgtggggtggg

SEQ ID NO: 142218 - DNA, 13 bp, Artificial Sequence
  Oligonucleotide for detection of SNP TSC0035620
cccaccccacaac

SEQ ID NO: 142219 - DNA, 13 bp, Artificial Sequence
  Oligonucleotide for detection of SNP TSC0035620
gtcgtgaggtggg

SEQ ID NO: 142220 - DNA, 13 bp, Artificial Sequence
  Oligonucleotide for detection of SNP TSC0035620
cccacctcacgac

SEQ ID NO: 142221 - DNA, 13 bp, Artificial Sequence
  Oligonucleotide for detection of SNP TSC0035620
gtcgtggggtggg

SEQ ID NO: 142222 - DNA, 13 bp, Artificial Sequence
  Oligonucleotide for detection of SNP TSC0035620
cccaccccacgac

SEQ ID NO: 142223 - DNA, 13 bp, Artificial Sequence
  Oligonucleotide for detection of SNP TSC0035620
gttgtgaggcggg

SEQ ID NO: 142224 - DNA, 13 bp, Artificial Sequence
  Oligonucleotide for detection of SNP TSC0035620
cccgcctcacaac

SEQ ID NO: 142225 - DNA, 13 bp, Artificial Sequence
  Oligonucleotide for detection of SNP TSC0035620
gttgtggggcggg

SEQ ID NO: 142226 - DNA, 13 bp, Artificial Sequence
  Oligonucleotide for detection of SNP TSC0035620
cccgccccacaac

SEQ ID NO: 142227 - DNA, 13 bp, Artificial Sequence
  Oligonucleotide for detection of SNP TSC0035620
gtcgtgaggcggg

SEQ ID NO: 142228 - DNA, 13 bp, Artificial Sequence
  Oligonucleotide for detection of SNP TSC0035620
cccgcctcacgac

SEQ ID NO: 142229 - DNA, 13 bp, Artificial Sequence
  Oligonucleotide for detection of SNP TSC0035620
gtcgtggggcggg

SEQ ID NO: 142230 - DNA, 13 bp, Artificial Sequence
  Oligonucleotide for detection of SNP TSC0035620
cccgccccacgac

SEQ ID NO: 142231 - DNA, 13 bp, Artificial Sequence
  Oligonucleotide for detection of SNP TSC0035621
aggtttagaaaat

SEQ ID NO: 142232 - DNA, 13 bp, Artificial Sequence
  Oligonucleotide for detection of SNP TSC0035621
attttctaaacct

SEQ ID NO: 142233 - DNA, 13 bp, Artificial Sequence
  Oligonucleotide for detection of SNP TSC0035621
aggtttggaaaat

SEQ ID NO: 142234 - DNA, 13 bp, Artificial Sequence
  Oligonucleotide for detection of SNP TSC0035621
attttccaaacct

SEQ ID NO: 142235 - DNA, 13 bp, Artificial Sequence
  Oligonucleotide for detection of SNP TSC0035621
aggttcggaaaat

SEQ ID NO: 142236 - DNA, 13 bp, Artificial Sequence
  Oligonucleotide for detection of SNP TSC0035621
attttccgaacct

SEQ ID NO: 142237 - DNA, 13 bp, Artificial Sequence
  Oligonucleotide for detection of SNP TSC0035622
ggattataggtgy

SEQ ID NO: 142238 - DNA, 13 bp, Artificial Sequence
  Oligonucleotide for detection of SNP TSC0035622
rcacctataatcc

SEQ ID NO: 142239 - DNA, 13 bp, Artificial Sequence
  Oligonucleotide for detection of SNP TSC0035622
ggattagaggtgy

SEQ ID NO: 142240 - DNA, 13 bp, Artificial Sequence
  Oligonucleotide for detection of SNP TSC0035622
rcacctctaatcc

SEQ ID NO: 142241 - DNA, 13 bp, Artificial Sequence
  Oligonucleotide for detection of SNP TSC0035622
gtatttgtagtty

SEQ ID NO: 142242 - DNA, 13 bp, Artificial Sequence
  Oligonucleotide for detection of SNP TSC0035622
raactacaaatac

SEQ ID NO: 142243 - DNA, 13 bp, Artificial Sequence
  Oligonucleotide for detection of SNP TSC0035622
gtatttttagtty

SEQ ID NO: 142244 - DNA, 13 bp, Artificial Sequence
  Oligonucleotide for detection of SNP TSC0035622
raactaaaaatac

SEQ ID NO: 142245 - DNA, 13 bp, Artificial Sequence
  Oligonucleotide for detection of SNP TSC0035624
ggttaaatgggga

SEQ ID NO: 142246 - DNA, 13 bp, Artificial Sequence
  Oligonucleotide for detection of SNP TSC0035624
tccccatttaacc

SEQ ID NO: 142247 - DNA, 13 bp, Artificial Sequence
  Oligonucleotide for detection of SNP TSC0035624
ggttaattgggga

SEQ ID NO: 142248 - DNA, 13 bp, Artificial Sequence
  Oligonucleotide for detection of SNP TSC0035624
tccccaattaacc

SEQ ID NO: 142249 - DNA, 13 bp, Artificial Sequence
  Oligonucleotide for detection of SNP TSC0035624
tttttagttgaty

SEQ ID NO: 142250 - DNA, 13 bp, Artificial Sequence
  Oligonucleotide for detection of SNP TSC0035624
ratcaactaaaaa

SEQ ID NO: 142251 - DNA, 13 bp, Artificial Sequence
  Oligonucleotide for detection of SNP TSC0035626
atttttgtattty

SEQ ID NO: 142252 - DNA, 13 bp, Artificial Sequence
  Oligonucleotide for detection of SNP TSC0035626
raaatacaaaaat

SEQ ID NO: 142253 - DNA, 13 bp, Artificial Sequence
  Oligonucleotide for detection of SNP TSC0035626
attttcgtattty

SEQ ID NO: 142254 - DNA, 13 bp, Artificial Sequence
  Oligonucleotide for detection of SNP TSC0035626
raaatacgaaaat

SEQ ID NO: 142255 - DNA, 13 bp, Artificial Sequence
  Oligonucleotide for detection of SNP TSC0035626
gggatggggagat

SEQ ID NO: 142256 - DNA, 13 bp, Artificial Sequence
  Oligonucleotide for detection of SNP TSC0035626
atctccccatccc

SEQ ID NO: 142257 - DNA, 13 bp, Artificial Sequence
  Oligonucleotide for detection of SNP TSC0035626
gggatgtggagat

SEQ ID NO: 142258 - DNA, 13 bp, Artificial Sequence
  Oligonucleotide for detection of SNP TSC0035626
atctccacatccc

SEQ ID NO: 142259 - DNA, 13 bp, Artificial Sequence
  Oligonucleotide for detection of SNP TSC0035626
gggatgcggagat

SEQ ID NO: 142260 - DNA, 13 bp, Artificial Sequence
  Oligonucleotide for detection of SNP TSC0035626
atctccgcatccc

SEQ ID NO: 142261 - DNA, 13 bp, Artificial Sequence
  Oligonucleotide for detection of SNP TSC0035627
gatgtaaagatga

SEQ ID NO: 142262 - DNA, 13 bp, Artificial Sequence
  Oligonucleotide for detection of SNP TSC0035627
tcatctttacatc

SEQ ID NO: 142263 - DNA, 13 bp, Artificial Sequence
  Oligonucleotide for detection of SNP TSC0035627
gatgtagagatga

SEQ ID NO: 142264 - DNA, 13 bp, Artificial Sequence
  Oligonucleotide for detection of SNP TSC0035627
tcatctctacatc

SEQ ID NO: 142265 - DNA, 13 bp, Artificial Sequence
  Oligonucleotide for detection of SNP TSC0035628
gttttgagagttt

SEQ ID NO: 142266 - DNA, 13 bp, Artificial Sequence
  Oligonucleotide for detection of SNP TSC0035628
aaactctcaaaac

SEQ ID NO: 142267 - DNA, 13 bp, Artificial Sequence
  Oligonucleotide for detection of SNP TSC0035628
gttttgggagttt

SEQ ID NO: 142268 - DNA, 13 bp, Artificial Sequence
  Oligonucleotide for detection of SNP TSC0035628
aaactcccaaaac

SEQ ID NO: 142269 - DNA, 13 bp, Artificial Sequence
  Oligonucleotide for detection of SNP TSC0035629
ttttttaataggy

SEQ ID NO: 142270 - DNA, 13 bp, Artificial Sequence
  Oligonucleotide for detection of SNP TSC0035629
rcctattaaaaaa

SEQ ID NO: 142271 - DNA, 13 bp, Artificial Sequence
  Oligonucleotide for detection of SNP TSC0035629
tttttcgataggy

SEQ ID NO: 142272 - DNA, 13 bp, Artificial Sequence
  Oligonucleotide for detection of SNP TSC0035629
rcctatcgaaaaa

SEQ ID NO: 142273 - DNA, 13 bp, Artificial Sequence
  Oligonucleotide for detection of SNP TSC0035629
gtttgttggagaa

SEQ ID NO: 142274 - DNA, 13 bp, Artificial Sequence
  Oligonucleotide for detection of SNP TSC0035629
ttctccaacaaac

SEQ ID NO: 142275 - DNA, 13 bp, Artificial Sequence
  Oligonucleotide for detection of SNP TSC0035629
gtttgtcggagaa

SEQ ID NO: 142276 - DNA, 13 bp, Artificial Sequence
  Oligonucleotide for detection of SNP TSC0035629
ttctccgacaaac

SEQ ID NO: 142277 - DNA, 13 bp, Artificial Sequence
  Oligonucleotide for detection of SNP TSC0035631
tttaatatgaaaa

SEQ ID NO: 142278 - DNA, 13 bp, Artificial Sequence
  Oligonucleotide for detection of SNP TSC0035631
ttttcatattaaa

SEQ ID NO: 142279 - DNA, 13 bp, Artificial Sequence
  Oligonucleotide for detection of SNP TSC0035631
tttaatgtgaaaa

SEQ ID NO: 142280 - DNA, 13 bp, Artificial Sequence
  Oligonucleotide for detection of SNP TSC0035631
ttttcacattaaa

SEQ ID NO: 142281 - DNA, 13 bp, Artificial Sequence
  Oligonucleotide for detection of SNP TSC0035633
taaagaattatty

SEQ ID NO: 142282 - DNA, 13 bp, Artificial Sequence
  Oligonucleotide for detection of SNP TSC0035633
raataattcttta

SEQ ID NO: 142283 - DNA, 13 bp, Artificial Sequence
  Oligonucleotide for detection of SNP TSC0035633
taaagatttatty

SEQ ID NO: 142284 - DNA, 13 bp, Artificial Sequence
  Oligonucleotide for detection of SNP TSC0035633
raataaatcttta

SEQ ID NO: 142285 - DNA, 13 bp, Artificial Sequence
  Oligonucleotide for detection of SNP TSC0035633
ggatagtttttta

SEQ ID NO: 142286 - DNA, 13 bp, Artificial Sequence
  Oligonucleotide for detection of SNP TSC0035633
taaaaaactatcc

SEQ ID NO: 142287 - DNA, 13 bp, Artificial Sequence
  Oligonucleotide for detection of SNP TSC0035633
ggatagattttta

SEQ ID NO: 142288 - DNA, 13 bp, Artificial Sequence
  Oligonucleotide for detection of SNP TSC0035633
taaaaatctatcc

SEQ ID NO: 142289 - DNA, 13 bp, Artificial Sequence
  Oligonucleotide for detection of SNP TSC0035643
tattaagaaaata

SEQ ID NO: 142290 - DNA, 13 bp, Artificial Sequence
  Oligonucleotide for detection of SNP TSC0035643
tattttcttaata

SEQ ID NO: 142291 - DNA, 13 bp, Artificial Sequence
  Oligonucleotide for detection of SNP TSC0035645
attgtttgggagg

SEQ ID NO: 142292 - DNA, 13 bp, Artificial Sequence
  Oligonucleotide for detection of SNP TSC0035645
cctcccaaacaat

SEQ ID NO: 142293 - DNA, 13 bp, Artificial Sequence
  Oligonucleotide for detection of SNP TSC0035645
attgttcgggagg

SEQ ID NO: 142294 - DNA, 13 bp, Artificial Sequence
  Oligonucleotide for detection of SNP TSC0035645
cctcccgaacaat

SEQ ID NO: 142295 - DNA, 13 bp, Artificial Sequence
  Oligonucleotide for detection of SNP TSC0035645
ttttttgagtagt

SEQ ID NO: 142296 - DNA, 13 bp, Artificial Sequence
  Oligonucleotide for detection of SNP TSC0035645
actactcaaaaaa

SEQ ID NO: 142297 - DNA, 13 bp, Artificial Sequence
  Oligonucleotide for detection of SNP TSC0035645
ttttttaagtagt

SEQ ID NO: 142298 - DNA, 13 bp, Artificial Sequence
  Oligonucleotide for detection of SNP TSC0035645
actacttaaaaaa

SEQ ID NO: 142299 - DNA, 13 bp, Artificial Sequence
  Oligonucleotide for detection of SNP TSC0035645
tttttcgagtagt

SEQ ID NO: 142300 - DNA, 13 bp, Artificial Sequence
  Oligonucleotide for detection of SNP TSC0035645
actactcgaaaaa

SEQ ID NO: 142301 - DNA, 13 bp, Artificial Sequence
  Oligonucleotide for detection of SNP TSC0035647
tatttgggaagta

SEQ ID NO: 142302 - DNA, 13 bp, Artificial Sequence
  Oligonucleotide for detection of SNP TSC0035647
tacttcccaaata

SEQ ID NO: 142303 - DNA, 13 bp, Artificial Sequence
  Oligonucleotide for detection of SNP TSC0035647
tatttgtgaagta

SEQ ID NO: 142304 - DNA, 13 bp, Artificial Sequence
  Oligonucleotide for detection of SNP TSC0035647
tacttcacaaata

SEQ ID NO: 142305 - DNA, 13 bp, Artificial Sequence
  Oligonucleotide for detection of SNP TSC0035647
tattttttagata

SEQ ID NO: 142306 - DNA, 13 bp, Artificial Sequence
  Oligonucleotide for detection of SNP TSC0035647
tatctaaaaaata

SEQ ID NO: 142307 - DNA, 13 bp, Artificial Sequence
  Oligonucleotide for detection of SNP TSC0035648
gggtatagtggtt

SEQ ID NO: 142308 - DNA, 13 bp, Artificial Sequence
  Oligonucleotide for detection of SNP TSC0035648
aaccactataccc

SEQ ID NO: 142309 - DNA, 13 bp, Artificial Sequence
  Oligonucleotide for detection of SNP TSC0035671
tagtttaggggaa

SEQ ID NO: 142310 - DNA, 13 bp, Artificial Sequence
  Oligonucleotide for detection of SNP TSC0035671
ttcccctaaacta

SEQ ID NO: 142311 - DNA, 13 bp, Artificial Sequence
  Oligonucleotide for detection of SNP TSC0035674
agtataatgagtt

SEQ ID NO: 142312 - DNA, 13 bp, Artificial Sequence
  Oligonucleotide for detection of SNP TSC0035674
aactcattatact

SEQ ID NO: 142313 - DNA, 13 bp, Artificial Sequence
  Oligonucleotide for detection of SNP TSC0035677
gggaggtatagat

SEQ ID NO: 142314 - DNA, 13 bp, Artificial Sequence
  Oligonucleotide for detection of SNP TSC0035677
atctatacctccc

SEQ ID NO: 142315 - DNA, 13 bp, Artificial Sequence
  Oligonucleotide for detection of SNP TSC0035677
gggaggaatagat

SEQ ID NO: 142316 - DNA, 13 bp, Artificial Sequence
  Oligonucleotide for detection of SNP TSC0035677
atctattcctccc

SEQ ID NO: 142317 - DNA, 13 bp, Artificial Sequence
  Oligonucleotide for detection of SNP TSC0035678
atgattatattta

SEQ ID NO: 142318 - DNA, 13 bp, Artificial Sequence
  Oligonucleotide for detection of SNP TSC0035678
taaatataatcat

SEQ ID NO: 142319 - DNA, 13 bp, Artificial Sequence
  Oligonucleotide for detection of SNP TSC0035678
taggtgtgattat

SEQ ID NO: 142320 - DNA, 13 bp, Artificial Sequence
  Oligonucleotide for detection of SNP TSC0035678
ataatcacaccta

SEQ ID NO: 142321 - DNA, 13 bp, Artificial Sequence
  Oligonucleotide for detection of SNP TSC0035678
taggtgagattat

SEQ ID NO: 142322 - DNA, 13 bp, Artificial Sequence
  Oligonucleotide for detection of SNP TSC0035678
ataatctcaccta

SEQ ID NO: 142323 - DNA, 13 bp, Artificial Sequence
  Oligonucleotide for detection of SNP TSC0035679
gagaaaaatatay

SEQ ID NO: 142324 - DNA, 13 bp, Artificial Sequence
  Oligonucleotide for detection of SNP TSC0035679
rtatatttttctc

SEQ ID NO: 142325 - DNA, 13 bp, Artificial Sequence
  Oligonucleotide for detection of SNP TSC0035679
gagaaatatatay

SEQ ID NO: 142326 - DNA, 13 bp, Artificial Sequence
  Oligonucleotide for detection of SNP TSC0035679
rtatatatttctc

SEQ ID NO: 142327 - DNA, 13 bp, Artificial Sequence
  Oligonucleotide for detection of SNP TSC0035680
tgtggttggatty

SEQ ID NO: 142328 - DNA, 13 bp, Artificial Sequence
  Oligonucleotide for detection of SNP TSC0035680
raatccaaccaca

SEQ ID NO: 142329 - DNA, 13 bp, Artificial Sequence
  Oligonucleotide for detection of SNP TSC0035680
tgtggtcggatty

SEQ ID NO: 142330 - DNA, 13 bp, Artificial Sequence
  Oligonucleotide for detection of SNP TSC0035680
raatccgaccaca

SEQ ID NO: 142331 - DNA, 13 bp, Artificial Sequence
  Oligonucleotide for detection of SNP TSC0035680
gaatttggttata

SEQ ID NO: 142332 - DNA, 13 bp, Artificial Sequence
  Oligonucleotide for detection of SNP TSC0035680
tataaccaaattc

SEQ ID NO: 142333 - DNA, 13 bp, Artificial Sequence
  Oligonucleotide for detection of SNP TSC0035680
gaatttagttata

SEQ ID NO: 142334 - DNA, 13 bp, Artificial Sequence
  Oligonucleotide for detection of SNP TSC0035680
tataactaaattc

SEQ ID NO: 142335 - DNA, 13 bp, Artificial Sequence
  Oligonucleotide for detection of SNP TSC0035680
gaattcggttata

SEQ ID NO: 142336 - DNA, 13 bp, Artificial Sequence
  Oligonucleotide for detection of SNP TSC0035680
tataaccgaattc

SEQ ID NO: 142337 - DNA, 13 bp, Artificial Sequence
  Oligonucleotide for detection of SNP TSC0035681
tattgaagtttgy

SEQ ID NO: 142338 - DNA, 13 bp, Artificial Sequence
  Oligonucleotide for detection of SNP TSC0035681
rcaaacttcaata

SEQ ID NO: 142339 - DNA, 13 bp, Artificial Sequence
  Oligonucleotide for detection of SNP TSC0035681
tattgatgtttgy

SEQ ID NO: 142340 - DNA, 13 bp, Artificial Sequence
  Oligonucleotide for detection of SNP TSC0035681
rcaaacatcaata

SEQ ID NO: 142341 - DNA, 13 bp, Artificial Sequence
  Oligonucleotide for detection of SNP TSC0035681
tattgacgtttgy

SEQ ID NO: 142342 - DNA, 13 bp, Artificial Sequence
  Oligonucleotide for detection of SNP TSC0035681
rcaaacgtcaata

SEQ ID NO: 142343 - DNA, 13 bp, Artificial Sequence
  Oligonucleotide for detection of SNP TSC0035681
gtaaattttagtg

SEQ ID NO: 142344 - DNA, 13 bp, Artificial Sequence
  Oligonucleotide for detection of SNP TSC0035681
cactaaaatttac

SEQ ID NO: 142345 - DNA, 13 bp, Artificial Sequence
  Oligonucleotide for detection of SNP TSC0035681
gtaaatgttagtg

SEQ ID NO: 142346 - DNA, 13 bp, Artificial Sequence
  Oligonucleotide for detection of SNP TSC0035681
cactaacatttac

SEQ ID NO: 142347 - DNA, 13 bp, Artificial Sequence
  Oligonucleotide for detection of SNP TSC0035681
gtaaacgttagtg

SEQ ID NO: 142348 - DNA, 13 bp, Artificial Sequence
  Oligonucleotide for detection of SNP TSC0035681
cactaacgtttac

SEQ ID NO: 142349 - DNA, 13 bp, Artificial Sequence
  Oligonucleotide for detection of SNP TSC0035683
agggtggtttaag

SEQ ID NO: 142350 - DNA, 13 bp, Artificial Sequence
  Oligonucleotide for detection of SNP TSC0035683
cttaaaccaccct

SEQ ID NO: 142351 - DNA, 13 bp, Artificial Sequence
  Oligonucleotide for detection of SNP TSC0035683
agggtgatttaag

SEQ ID NO: 142352 - DNA, 13 bp, Artificial Sequence
  Oligonucleotide for detection of SNP TSC0035683
cttaaatcaccct

SEQ ID NO: 142353 - DNA, 13 bp, Artificial Sequence
  Oligonucleotide for detection of SNP TSC0035684
ggttgatggtaty

SEQ ID NO: 142354 - DNA, 13 bp, Artificial Sequence
  Oligonucleotide for detection of SNP TSC0035684
rataccatcaacc

SEQ ID NO: 142355 - DNA, 13 bp, Artificial Sequence
  Oligonucleotide for detection of SNP TSC0035684
ggttgagggtaty

SEQ ID NO: 142356 - DNA, 13 bp, Artificial Sequence
  Oligonucleotide for detection of SNP TSC0035684
rataccctcaacc

SEQ ID NO: 142357 - DNA, 13 bp, Artificial Sequence
  Oligonucleotide for detection of SNP TSC0035684
ggttgacggtaty

SEQ ID NO: 142358 - DNA, 13 bp, Artificial Sequence
  Oligonucleotide for detection of SNP TSC0035684
rataccgtcaacc

SEQ ID NO: 142359 - DNA, 13 bp, Artificial Sequence
  Oligonucleotide for detection of SNP TSC0035684
ggtgttgttaaty

SEQ ID NO: 142360 - DNA, 13 bp, Artificial Sequence
  Oligonucleotide for detection of SNP TSC0035684
rattaacaacacc

SEQ ID NO: 142361 - DNA, 13 bp, Artificial Sequence
  Oligonucleotide for detection of SNP TSC0035684
ggtgtttttaaty

SEQ ID NO: 142362 - DNA, 13 bp, Artificial Sequence
  Oligonucleotide for detection of SNP TSC0035684
rattaaaaacacc

SEQ ID NO: 142363 - DNA, 13 bp, Artificial Sequence
  Oligonucleotide for detection of SNP TSC0035684
ggtgtcgttaaty

SEQ ID NO: 142364 - DNA, 13 bp, Artificial Sequence
  Oligonucleotide for detection of SNP TSC0035684
rattaacgacacc

SEQ ID NO: 142365 - DNA, 13 bp, Artificial Sequence
  Oligonucleotide for detection of SNP TSC0035685
agttgtgattgtt

SEQ ID NO: 142366 - DNA, 13 bp, Artificial Sequence
  Oligonucleotide for detection of SNP TSC0035685
aacaatcacaact

SEQ ID NO: 142367 - DNA, 13 bp, Artificial Sequence
  Oligonucleotide for detection of SNP TSC0035685
agttgtaattgtt

SEQ ID NO: 142368 - DNA, 13 bp, Artificial Sequence
  Oligonucleotide for detection of SNP TSC0035685
aacaattacaact

SEQ ID NO: 142369 - DNA, 13 bp, Artificial Sequence
  Oligonucleotide for detection of SNP TSC0035689
gatttgagtttay

SEQ ID NO: 142370 - DNA, 13 bp, Artificial Sequence
  Oligonucleotide for detection of SNP TSC0035689
rtaaactcaaatc

SEQ ID NO: 142371 - DNA, 13 bp, Artificial Sequence
  Oligonucleotide for detection of SNP TSC0035689
gatttgtgtttay

SEQ ID NO: 142372 - DNA, 13 bp, Artificial Sequence
  Oligonucleotide for detection of SNP TSC0035689
rtaaacacaaatc

SEQ ID NO: 142373 - DNA, 13 bp, Artificial Sequence
  Oligonucleotide for detection of SNP TSC0035689
gatttgcgtttay

SEQ ID NO: 142374 - DNA, 13 bp, Artificial Sequence
  Oligonucleotide for detection of SNP TSC0035689
rtaaacgcaaatc

SEQ ID NO: 142375 - DNA, 13 bp, Artificial Sequence
  Oligonucleotide for detection of SNP TSC0035689
gtgggtttaggty

SEQ ID NO: 142376 - DNA, 13 bp, Artificial Sequence
  Oligonucleotide for detection of SNP TSC0035689
racctaaacccac

SEQ ID NO: 142377 - DNA, 13 bp, Artificial Sequence
  Oligonucleotide for detection of SNP TSC0035689
gtgggtgtaggty

SEQ ID NO: 142378 - DNA, 13 bp, Artificial Sequence
  Oligonucleotide for detection of SNP TSC0035689
racctacacccac

SEQ ID NO: 142379 - DNA, 13 bp, Artificial Sequence
  Oligonucleotide for detection of SNP TSC0035689
gtgggcgtaggty

SEQ ID NO: 142380 - DNA, 13 bp, Artificial Sequence
  Oligonucleotide for detection of SNP TSC0035689
racctacgcccac

SEQ ID NO: 142381 - DNA, 13 bp, Artificial Sequence
  Oligonucleotide for detection of SNP TSC0035690
agaaaggaaatga

SEQ ID NO: 142382 - DNA, 13 bp, Artificial Sequence
  Oligonucleotide for detection of SNP TSC0035690
tcatttcctttct

SEQ ID NO: 142383 - DNA, 13 bp, Artificial Sequence
  Oligonucleotide for detection of SNP TSC0035690
agaaagtaaatga

SEQ ID NO: 142384 - DNA, 13 bp, Artificial Sequence
  Oligonucleotide for detection of SNP TSC0035690
tcatttactttct

SEQ ID NO: 142385 - DNA, 13 bp, Artificial Sequence
  Oligonucleotide for detection of SNP TSC0035691
taaggaattttta

SEQ ID NO: 142386 - DNA, 13 bp, Artificial Sequence
  Oligonucleotide for detection of SNP TSC0035691
taaaaattcctta

SEQ ID NO: 142387 - DNA, 13 bp, Artificial Sequence
  Oligonucleotide for detection of SNP TSC0035691
taaggatttttta

SEQ ID NO: 142388 - DNA, 13 bp, Artificial Sequence
  Oligonucleotide for detection of SNP TSC0035691
taaaaaatcctta

SEQ ID NO: 142389 - DNA, 13 bp, Artificial Sequence
  Oligonucleotide for detection of SNP TSC0035691
taaaaattttttg

SEQ ID NO: 142390 - DNA, 13 bp, Artificial Sequence
  Oligonucleotide for detection of SNP TSC0035691
caaaaaattttta

SEQ ID NO: 142391 - DNA, 13 bp, Artificial Sequence
  Oligonucleotide for detection of SNP TSC0035691
taaaaagtttttg

SEQ ID NO: 142392 - DNA, 13 bp, Artificial Sequence
  Oligonucleotide for detection of SNP TSC0035691
caaaaacttttta

SEQ ID NO: 142393 - DNA, 13 bp, Artificial Sequence
  Oligonucleotide for detection of SNP TSC0035692
tatttaaatgtgy

SEQ ID NO: 142394 - DNA, 13 bp, Artificial Sequence
  Oligonucleotide for detection of SNP TSC0035692
rcacatttaaata

SEQ ID NO: 142395 - DNA, 13 bp, Artificial Sequence
  Oligonucleotide for detection of SNP TSC0035692
tatttagatgtgy

SEQ ID NO: 142396 - DNA, 13 bp, Artificial Sequence
  Oligonucleotide for detection of SNP TSC0035692
rcacatctaaata

SEQ ID NO: 142397 - DNA, 13 bp, Artificial Sequence
  Oligonucleotide for detection of SNP TSC0035693
tttagaattggtg

SEQ ID NO: 142398 - DNA, 13 bp, Artificial Sequence
  Oligonucleotide for detection of SNP TSC0035693
caccaattctaaa

SEQ ID NO: 142399 - DNA, 13 bp, Artificial Sequence
  Oligonucleotide for detection of SNP TSC0035693
tttagatttggtg

SEQ ID NO: 142400 - DNA, 13 bp, Artificial Sequence
  Oligonucleotide for detection of SNP TSC0035693
caccaaatctaaa

SEQ ID NO: 142401 - DNA, 13 bp, Artificial Sequence
  Oligonucleotide for detection of SNP TSC0035693
tattagatttaaa

SEQ ID NO: 142402 - DNA, 13 bp, Artificial Sequence
  Oligonucleotide for detection of SNP TSC0035693
tttaaatctaata

SEQ ID NO: 142403 - DNA, 13 bp, Artificial Sequence
  Oligonucleotide for detection of SNP TSC0035698
tgttatatgatga

SEQ ID NO: 142404 - DNA, 13 bp, Artificial Sequence
  Oligonucleotide for detection of SNP TSC0035698
tcatcatataaca

SEQ ID NO: 142405 - DNA, 13 bp, Artificial Sequence
  Oligonucleotide for detection of SNP TSC0035698
tgttatgtgatga

SEQ ID NO: 142406 - DNA, 13 bp, Artificial Sequence
  Oligonucleotide for detection of SNP TSC0035698
tcatcacataaca

SEQ ID NO: 142407 - DNA, 13 bp, Artificial Sequence
  Oligonucleotide for detection of SNP TSC0035698
cgttatatgatga

SEQ ID NO: 142408 - DNA, 13 bp, Artificial Sequence
  Oligonucleotide for detection of SNP TSC0035698
tcatcatataacg

SEQ ID NO: 142409 - DNA, 13 bp, Artificial Sequence
  Oligonucleotide for detection of SNP TSC0035698
cgttatgtgatga

SEQ ID NO: 142410 - DNA, 13 bp, Artificial Sequence
  Oligonucleotide for detection of SNP TSC0035698
tcatcacataacg

SEQ ID NO: 142411 - DNA, 13 bp, Artificial Sequence
  Oligonucleotide for detection of SNP TSC0035698
tgttacgtgatga

SEQ ID NO: 142412 - DNA, 13 bp, Artificial Sequence
  Oligonucleotide for detection of SNP TSC0035698
tcatcacgtaaca

SEQ ID NO: 142413 - DNA, 13 bp, Artificial Sequence
  Oligonucleotide for detection of SNP TSC0035698
cgttacgtgatga

SEQ ID NO: 142414 - DNA, 13 bp, Artificial Sequence
  Oligonucleotide for detection of SNP TSC0035698
tcatcacgtaacg

SEQ ID NO: 142415 - DNA, 13 bp, Artificial Sequence
  Oligonucleotide for detection of SNP TSC0035698
ttattatgtggtg

SEQ ID NO: 142416 - DNA, 13 bp, Artificial Sequence
  Oligonucleotide for detection of SNP TSC0035698
caccacataataa

SEQ ID NO: 142417 - DNA, 13 bp, Artificial Sequence
  Oligonucleotide for detection of SNP TSC0035698
ttattatgtggcg

SEQ ID NO: 142418 - DNA, 13 bp, Artificial Sequence
  Oligonucleotide for detection of SNP TSC0035698
cgccacataataa

SEQ ID NO: 142419 - DNA, 13 bp, Artificial Sequence
  Oligonucleotide for detection of SNP TSC0035698
ttattacgtggtg

SEQ ID NO: 142420 - DNA, 13 bp, Artificial Sequence
  Oligonucleotide for detection of SNP TSC0035698
caccacgtaataa

SEQ ID NO: 142421 - DNA, 13 bp, Artificial Sequence
  Oligonucleotide for detection of SNP TSC0035698
ttattacgtggcg

SEQ ID NO: 142422 - DNA, 13 bp, Artificial Sequence
  Oligonucleotide for detection of SNP TSC0035698
cgccacgtaataa

SEQ ID NO: 142423 - DNA, 13 bp, Artificial Sequence
  Oligonucleotide for detection of SNP TSC0035702
tattttagtgatg

SEQ ID NO: 142424 - DNA, 13 bp, Artificial Sequence
  Oligonucleotide for detection of SNP TSC0035702
catcactaaaata

SEQ ID NO: 142425 - DNA, 13 bp, Artificial Sequence
  Oligonucleotide for detection of SNP TSC0035702
tattttggtgatg

SEQ ID NO: 142426 - DNA, 13 bp, Artificial Sequence
  Oligonucleotide for detection of SNP TSC0035702
catcaccaaaata

SEQ ID NO: 142427 - DNA, 13 bp, Artificial Sequence
  Oligonucleotide for detection of SNP TSC0035702
tatttcggtgatg

SEQ ID NO: 142428 - DNA, 13 bp, Artificial Sequence
  Oligonucleotide for detection of SNP TSC0035702
catcaccgaaata

SEQ ID NO: 142429 - DNA, 13 bp, Artificial Sequence
  Oligonucleotide for detection of SNP TSC0035702
tattattggggtg

SEQ ID NO: 142430 - DNA, 13 bp, Artificial Sequence
  Oligonucleotide for detection of SNP TSC0035702
caccccaataata

SEQ ID NO: 142431 - DNA, 13 bp, Artificial Sequence
  Oligonucleotide for detection of SNP TSC0035702
tattatcggggtg

SEQ ID NO: 142432 - DNA, 13 bp, Artificial Sequence
  Oligonucleotide for detection of SNP TSC0035702
caccccgataata

SEQ ID NO: 142433 - DNA, 13 bp, Artificial Sequence
  Oligonucleotide for detection of SNP TSC0035703
tgagtgtgtggtt

SEQ ID NO: 142434 - DNA, 13 bp, Artificial Sequence
  Oligonucleotide for detection of SNP TSC0035703
aaccacacactca

SEQ ID NO: 142435 - DNA, 13 bp, Artificial Sequence
  Oligonucleotide for detection of SNP TSC0035703
tgagcgtgtggtt

SEQ ID NO: 142436 - DNA, 13 bp, Artificial Sequence
  Oligonucleotide for detection of SNP TSC0035703
aaccacacgctca

SEQ ID NO: 142437 - DNA, 13 bp, Artificial Sequence
  Oligonucleotide for detection of SNP TSC0035703
tgagtgcgtggtt

SEQ ID NO: 142438 - DNA, 13 bp, Artificial Sequence
  Oligonucleotide for detection of SNP TSC0035703
aaccacgcactca

SEQ ID NO: 142439 - DNA, 13 bp, Artificial Sequence
  Oligonucleotide for detection of SNP TSC0035703
tgagcgcgtggtt

SEQ ID NO: 142440 - DNA, 13 bp, Artificial Sequence
  Oligonucleotide for detection of SNP TSC0035703
aaccacgcgctca

SEQ ID NO: 142441 - DNA, 13 bp, Artificial Sequence
  Oligonucleotide for detection of SNP TSC0035703
aattatacgttta

SEQ ID NO: 142442 - DNA, 13 bp, Artificial Sequence
  Oligonucleotide for detection of SNP TSC0035703
taaacgtataatt

SEQ ID NO: 142443 - DNA, 13 bp, Artificial Sequence
  Oligonucleotide for detection of SNP TSC0035703
aattatgcgttta

SEQ ID NO: 142444 - DNA, 13 bp, Artificial Sequence
  Oligonucleotide for detection of SNP TSC0035703
taaacgcataatt

SEQ ID NO: 142445 - DNA, 13 bp, Artificial Sequence
  Oligonucleotide for detection of SNP TSC0035703
aattacgcgttta

SEQ ID NO: 142446 - DNA, 13 bp, Artificial Sequence
  Oligonucleotide for detection of SNP TSC0035703
taaacgcgtaatt

SEQ ID NO: 142447 - DNA, 13 bp, Artificial Sequence
  Oligonucleotide for detection of SNP TSC0035704
ggatttagtagta

SEQ ID NO: 142448 - DNA, 13 bp, Artificial Sequence
  Oligonucleotide for detection of SNP TSC0035704
tactactaaatcc

SEQ ID NO: 142449 - DNA, 13 bp, Artificial Sequence
  Oligonucleotide for detection of SNP TSC0035704
ggatttggtagta

SEQ ID NO: 142450 - DNA, 13 bp, Artificial Sequence
  Oligonucleotide for detection of SNP TSC0035704
tactaccaaatcc

SEQ ID NO: 142451 - DNA, 13 bp, Artificial Sequence
  Oligonucleotide for detection of SNP TSC0035707
gagttatgattta

SEQ ID NO: 142452 - DNA, 13 bp, Artificial Sequence
  Oligonucleotide for detection of SNP TSC0035707
taaatcataactc

SEQ ID NO: 142453 - DNA, 13 bp, Artificial Sequence
  Oligonucleotide for detection of SNP TSC0035707
gagttacgattta

SEQ ID NO: 142454 - DNA, 13 bp, Artificial Sequence
  Oligonucleotide for detection of SNP TSC0035707
taaatcgtaactc

SEQ ID NO: 142455 - DNA, 13 bp, Artificial Sequence
  Oligonucleotide for detection of SNP TSC0035707
tgaattgtagtty

SEQ ID NO: 142456 - DNA, 13 bp, Artificial Sequence
  Oligonucleotide for detection of SNP TSC0035707
raactacaattca

SEQ ID NO: 142457 - DNA, 13 bp, Artificial Sequence
  Oligonucleotide for detection of SNP TSC0035707
tgaattatagtty

SEQ ID NO: 142458 - DNA, 13 bp, Artificial Sequence
  Oligonucleotide for detection of SNP TSC0035707
raactataattca

SEQ ID NO: 142459 - DNA, 13 bp, Artificial Sequence
  Oligonucleotide for detection of SNP TSC0035707
tgaatcgtagtty

SEQ ID NO: 142460 - DNA, 13 bp, Artificial Sequence
  Oligonucleotide for detection of SNP TSC0035707
raactacgattca

SEQ ID NO: 142461 - DNA, 13 bp, Artificial Sequence
  Oligonucleotide for detection of SNP TSC0035708
atttttggtggag

SEQ ID NO: 142462 - DNA, 13 bp, Artificial Sequence
  Oligonucleotide for detection of SNP TSC0035708
ctccaccaaaaat

SEQ ID NO: 142463 - DNA, 13 bp, Artificial Sequence
  Oligonucleotide for detection of SNP TSC0035708
atttttagtggag

SEQ ID NO: 142464 - DNA, 13 bp, Artificial Sequence
  Oligonucleotide for detection of SNP TSC0035708
ctccactaaaaat

SEQ ID NO: 142465 - DNA, 13 bp, Artificial Sequence
  Oligonucleotide for detection of SNP TSC0035709
gggagaaagtaty

SEQ ID NO: 142466 - DNA, 13 bp, Artificial Sequence
  Oligonucleotide for detection of SNP TSC0035709
ratactttctccc

SEQ ID NO: 142467 - DNA, 13 bp, Artificial Sequence
  Oligonucleotide for detection of SNP TSC0035709
gggagatagtaty

SEQ ID NO: 142468 - DNA, 13 bp, Artificial Sequence
  Oligonucleotide for detection of SNP TSC0035709
ratactatctccc

SEQ ID NO: 142469 - DNA, 13 bp, Artificial Sequence
  Oligonucleotide for detection of SNP TSC0035709
gatgtttttttty

SEQ ID NO: 142470 - DNA, 13 bp, Artificial Sequence
  Oligonucleotide for detection of SNP TSC0035709
raaaaaaaacatc

SEQ ID NO: 142471 - DNA, 13 bp, Artificial Sequence
  Oligonucleotide for detection of SNP TSC0035709
gatgttgttttty

SEQ ID NO: 142472 - DNA, 13 bp, Artificial Sequence
  Oligonucleotide for detection of SNP TSC0035709
raaaaacaacatc

SEQ ID NO: 142473 - DNA, 13 bp, Artificial Sequence
  Oligonucleotide for detection of SNP TSC0035713
gagggaggatagy

SEQ ID NO: 142474 - DNA, 13 bp, Artificial Sequence
  Oligonucleotide for detection of SNP TSC0035713
rctatcctccctc

SEQ ID NO: 142475 - DNA, 13 bp, Artificial Sequence
  Oligonucleotide for detection of SNP TSC0035713
gagggaagatagy

SEQ ID NO: 142476 - DNA, 13 bp, Artificial Sequence
  Oligonucleotide for detection of SNP TSC0035713
rctatcttccctc

SEQ ID NO: 142477 - DNA, 13 bp, Artificial Sequence
  Oligonucleotide for detection of SNP TSC0035714
tttggtgggggag

SEQ ID NO: 142478 - DNA, 13 bp, Artificial Sequence
  Oligonucleotide for detection of SNP TSC0035714
ctcccccaccaaa

SEQ ID NO: 142479 - DNA, 13 bp, Artificial Sequence
  Oligonucleotide for detection of SNP TSC0035714
tttggtaggggag

SEQ ID NO: 142480 - DNA, 13 bp, Artificial Sequence
  Oligonucleotide for detection of SNP TSC0035714
ctcccctaccaaa

SEQ ID NO: 142481 - DNA, 13 bp, Artificial Sequence
  Oligonucleotide for detection of SNP TSC0035715
gagttaggtatgg

SEQ ID NO: 142482 - DNA, 13 bp, Artificial Sequence
  Oligonucleotide for detection of SNP TSC0035715
ccatacctaactc

SEQ ID NO: 142483 - DNA, 13 bp, Artificial Sequence
  Oligonucleotide for detection of SNP TSC0035715
gagttatgtatgg

SEQ ID NO: 142484 - DNA, 13 bp, Artificial Sequence
  Oligonucleotide for detection of SNP TSC0035715
ccatacataactc

SEQ ID NO: 142485 - DNA, 13 bp, Artificial Sequence
  Oligonucleotide for detection of SNP TSC0035715
ttatgtttggtty

SEQ ID NO: 142486 - DNA, 13 bp, Artificial Sequence
  Oligonucleotide for detection of SNP TSC0035715
raaccaaacataa

SEQ ID NO: 142487 - DNA, 13 bp, Artificial Sequence
  Oligonucleotide for detection of SNP TSC0035715
ttatgtatggtty

SEQ ID NO: 142488 - DNA, 13 bp, Artificial Sequence
  Oligonucleotide for detection of SNP TSC0035715
raaccatacataa

SEQ ID NO: 142489 - DNA, 13 bp, Artificial Sequence
  Oligonucleotide for detection of SNP TSC0035716
ttatagagtttgg

SEQ ID NO: 142490 - DNA, 13 bp, Artificial Sequence
  Oligonucleotide for detection of SNP TSC0035716
ccaaactctataa

SEQ ID NO: 142491 - DNA, 13 bp, Artificial Sequence
  Oligonucleotide for detection of SNP TSC0035716
ttatagtgtttgg

SEQ ID NO: 142492 - DNA, 13 bp, Artificial Sequence
  Oligonucleotide for detection of SNP TSC0035716
ccaaacactataa

SEQ ID NO: 142493 - DNA, 13 bp, Artificial Sequence
  Oligonucleotide for detection of SNP TSC0035716
ttatagagttcgg

SEQ ID NO: 142494 - DNA, 13 bp, Artificial Sequence
  Oligonucleotide for detection of SNP TSC0035716
ccgaactctataa

SEQ ID NO: 142495 - DNA, 13 bp, Artificial Sequence
  Oligonucleotide for detection of SNP TSC0035716
ttatagcgtttgg

SEQ ID NO: 142496 - DNA, 13 bp, Artificial Sequence
  Oligonucleotide for detection of SNP TSC0035716
ccaaacgctataa

SEQ ID NO: 142497 - DNA, 13 bp, Artificial Sequence
  Oligonucleotide for detection of SNP TSC0035716
ttatagtgttcgg

SEQ ID NO: 142498 - DNA, 13 bp, Artificial Sequence
  Oligonucleotide for detection of SNP TSC0035716
ccgaacactataa

SEQ ID NO: 142499 - DNA, 13 bp, Artificial Sequence
  Oligonucleotide for detection of SNP TSC0035716
ttatagcgttcgg

SEQ ID NO: 142500 - DNA, 13 bp, Artificial Sequence
  Oligonucleotide for detection of SNP TSC0035716
ccgaacgctataa

SEQ ID NO: 142501 - DNA, 13 bp, Artificial Sequence
  Oligonucleotide for detection of SNP TSC0035716
ttgggttttgtga

SEQ ID NO: 142502 - DNA, 13 bp, Artificial Sequence
  Oligonucleotide for detection of SNP TSC0035716
tcacaaaacccaa

SEQ ID NO: 142503 - DNA, 13 bp, Artificial Sequence
  Oligonucleotide for detection of SNP TSC0035716
ttgggtgttgtga

SEQ ID NO: 142504 - DNA, 13 bp, Artificial Sequence
  Oligonucleotide for detection of SNP TSC0035716
tcacaacacccaa

SEQ ID NO: 142505 - DNA, 13 bp, Artificial Sequence
  Oligonucleotide for detection of SNP TSC0035716
tcgggttttgtga

SEQ ID NO: 142506 - DNA, 13 bp, Artificial Sequence
  Oligonucleotide for detection of SNP TSC0035716
tcacaaaacccga

SEQ ID NO: 142507 - DNA, 13 bp, Artificial Sequence
  Oligonucleotide for detection of SNP TSC0035716
tcgggtgttgtga

SEQ ID NO: 142508 - DNA, 13 bp, Artificial Sequence
  Oligonucleotide for detection of SNP TSC0035716
tcacaacacccga

SEQ ID NO: 142509 - DNA, 13 bp, Artificial Sequence
  Oligonucleotide for detection of SNP TSC0035716
ttgggcgttgtga

SEQ ID NO: 142510 - DNA, 13 bp, Artificial Sequence
  Oligonucleotide for detection of SNP TSC0035716
tcacaacgcccaa

SEQ ID NO: 142511 - DNA, 13 bp, Artificial Sequence
  Oligonucleotide for detection of SNP TSC0035716
tcgggcgttgtga

SEQ ID NO: 142512 - DNA, 13 bp, Artificial Sequence
  Oligonucleotide for detection of SNP TSC0035716
tcacaacgcccga

SEQ ID NO: 142513 - DNA, 13 bp, Artificial Sequence
  Oligonucleotide for detection of SNP TSC0035718
ttttttagaaatg

SEQ ID NO: 142514 - DNA, 13 bp, Artificial Sequence
  Oligonucleotide for detection of SNP TSC0035718
catttctaaaaaa

SEQ ID NO: 142515 - DNA, 13 bp, Artificial Sequence
  Oligonucleotide for detection of SNP TSC0035718
ttttttggaaatg

SEQ ID NO: 142516 - DNA, 13 bp, Artificial Sequence
  Oligonucleotide for detection of SNP TSC0035718
catttccaaaaaa

SEQ ID NO: 142517 - DNA, 13 bp, Artificial Sequence
  Oligonucleotide for detection of SNP TSC0035718
tttttcggaaatg

SEQ ID NO: 142518 - DNA, 13 bp, Artificial Sequence
  Oligonucleotide for detection of SNP TSC0035718
catttccgaaaaa

SEQ ID NO: 142519 - DNA, 13 bp, Artificial Sequence
  Oligonucleotide for detection of SNP TSC0035722
ggtgagatttgta

SEQ ID NO: 142520 - DNA, 13 bp, Artificial Sequence
  Oligonucleotide for detection of SNP TSC0035722
tacaaatctcacc

SEQ ID NO: 142521 - DNA, 13 bp, Artificial Sequence
  Oligonucleotide for detection of SNP TSC0035722
ggtgaggtttgta

SEQ ID NO: 142522 - DNA, 13 bp, Artificial Sequence
  Oligonucleotide for detection of SNP TSC0035722
tacaaacctcacc

SEQ ID NO: 142523 - DNA, 13 bp, Artificial Sequence
  Oligonucleotide for detection of SNP TSC0035729
gagattagtttag

SEQ ID NO: 142524 - DNA, 13 bp, Artificial Sequence
  Oligonucleotide for detection of SNP TSC0035729
ctaaactaatctc

SEQ ID NO: 142525 - DNA, 13 bp, Artificial Sequence
  Oligonucleotide for detection of SNP TSC0035729
gagattggtttag

SEQ ID NO: 142526 - DNA, 13 bp, Artificial Sequence
  Oligonucleotide for detection of SNP TSC0035729
ctaaaccaatctc

SEQ ID NO: 142527 - DNA, 13 bp, Artificial Sequence
  Oligonucleotide for detection of SNP TSC0035729
gagatcggtttag

SEQ ID NO: 142528 - DNA, 13 bp, Artificial Sequence
  Oligonucleotide for detection of SNP TSC0035729
ctaaaccgatctc

SEQ ID NO: 142529 - DNA, 13 bp, Artificial Sequence
  Oligonucleotide for detection of SNP TSC0035729
ttaggttgattty

SEQ ID NO: 142530 - DNA, 13 bp, Artificial Sequence
  Oligonucleotide for detection of SNP TSC0035729
raaatcaacctaa

SEQ ID NO: 142531 - DNA, 13 bp, Artificial Sequence
  Oligonucleotide for detection of SNP TSC0035729
ttaggtcgattty

SEQ ID NO: 142532 - DNA, 13 bp, Artificial Sequence
  Oligonucleotide for detection of SNP TSC0035729
raaatcgacctaa

SEQ ID NO: 142533 - DNA, 13 bp, Artificial Sequence
  Oligonucleotide for detection of SNP TSC0035730
ggagagggagtgt

SEQ ID NO: 142534 - DNA, 13 bp, Artificial Sequence
  Oligonucleotide for detection of SNP TSC0035730
acactccctctcc

SEQ ID NO: 142535 - DNA, 13 bp, Artificial Sequence
  Oligonucleotide for detection of SNP TSC0035730
ggagagagagtgt

SEQ ID NO: 142536 - DNA, 13 bp, Artificial Sequence
  Oligonucleotide for detection of SNP TSC0035730
acactctctctcc

SEQ ID NO: 142537 - DNA, 13 bp, Artificial Sequence
  Oligonucleotide for detection of SNP TSC0035733
tatagtaatatat

SEQ ID NO: 142538 - DNA, 13 bp, Artificial Sequence
  Oligonucleotide for detection of SNP TSC0035733
atatattactata

SEQ ID NO: 142539 - DNA, 13 bp, Artificial Sequence
  Oligonucleotide for detection of SNP TSC0035733
tatagttatatat

SEQ ID NO: 142540 - DNA, 13 bp, Artificial Sequence
  Oligonucleotide for detection of SNP TSC0035733
atatataactata

SEQ ID NO: 142541 - DNA, 13 bp, Artificial Sequence
  Oligonucleotide for detection of SNP TSC0035733
atgtgttattgta

SEQ ID NO: 142542 - DNA, 13 bp, Artificial Sequence
  Oligonucleotide for detection of SNP TSC0035733
tacaataacacat

SEQ ID NO: 142543 - DNA, 13 bp, Artificial Sequence
  Oligonucleotide for detection of SNP TSC0035733
atgtgtgattgta

SEQ ID NO: 142544 - DNA, 13 bp, Artificial Sequence
  Oligonucleotide for detection of SNP TSC0035733
tacaatcacacat

SEQ ID NO: 142545 - DNA, 13 bp, Artificial Sequence
  Oligonucleotide for detection of SNP TSC0035734
ggtatagtagggy

SEQ ID NO: 142546 - DNA, 13 bp, Artificial Sequence
  Oligonucleotide for detection of SNP TSC0035734
rccctactatacc

SEQ ID NO: 142547 - DNA, 13 bp, Artificial Sequence
  Oligonucleotide for detection of SNP TSC0035734
ggtataatagggy

SEQ ID NO: 142548 - DNA, 13 bp, Artificial Sequence
  Oligonucleotide for detection of SNP TSC0035734
rccctattatacc

SEQ ID NO: 142549 - DNA, 13 bp, Artificial Sequence
  Oligonucleotide for detection of SNP TSC0035735
atatggataatta

SEQ ID NO: 142550 - DNA, 13 bp, Artificial Sequence
  Oligonucleotide for detection of SNP TSC0035735
taattatccatat

SEQ ID NO: 142551 - DNA, 13 bp, Artificial Sequence
  Oligonucleotide for detection of SNP TSC0035735
atatggttaatta

SEQ ID NO: 142552 - DNA, 13 bp, Artificial Sequence
  Oligonucleotide for detection of SNP TSC0035735
taattaaccatat

SEQ ID NO: 142553 - DNA, 13 bp, Artificial Sequence
  Oligonucleotide for detection of SNP TSC0035735
atacggataatta

SEQ ID NO: 142554 - DNA, 13 bp, Artificial Sequence
  Oligonucleotide for detection of SNP TSC0035735
taattatccgtat

SEQ ID NO: 142555 - DNA, 13 bp, Artificial Sequence
  Oligonucleotide for detection of SNP TSC0035735
atacggttaatta

SEQ ID NO: 142556 - DNA, 13 bp, Artificial Sequence
  Oligonucleotide for detection of SNP TSC0035735
taattaaccgtat

SEQ ID NO: 142557 - DNA, 13 bp, Artificial Sequence
  Oligonucleotide for detection of SNP TSC0035735
taattgtttgtgt

SEQ ID NO: 142558 - DNA, 13 bp, Artificial Sequence
  Oligonucleotide for detection of SNP TSC0035735
acacaaacaatta

SEQ ID NO: 142559 - DNA, 13 bp, Artificial Sequence
  Oligonucleotide for detection of SNP TSC0035735
taattgattgtgt

SEQ ID NO: 142560 - DNA, 13 bp, Artificial Sequence
  Oligonucleotide for detection of SNP TSC0035735
acacaatcaatta

SEQ ID NO: 142561 - DNA, 13 bp, Artificial Sequence
  Oligonucleotide for detection of SNP TSC0035735
taattgttcgtgt

SEQ ID NO: 142562 - DNA, 13 bp, Artificial Sequence
  Oligonucleotide for detection of SNP TSC0035735
acacgaacaatta

SEQ ID NO: 142563 - DNA, 13 bp, Artificial Sequence
  Oligonucleotide for detection of SNP TSC0035735
taattgatcgtgt

SEQ ID NO: 142564 - DNA, 13 bp, Artificial Sequence
  Oligonucleotide for detection of SNP TSC0035735
acacgatcaatta

SEQ ID NO: 142565 - DNA, 13 bp, Artificial Sequence
  Oligonucleotide for detection of SNP TSC0035736
aataaaggaatat

SEQ ID NO: 142566 - DNA, 13 bp, Artificial Sequence
  Oligonucleotide for detection of SNP TSC0035736
atattcctttatt

SEQ ID NO: 142567 - DNA, 13 bp, Artificial Sequence
  Oligonucleotide for detection of SNP TSC0035736
aataaatgaatat

SEQ ID NO: 142568 - DNA, 13 bp, Artificial Sequence
  Oligonucleotide for detection of SNP TSC0035736
atattcatttatt

SEQ ID NO: 142569 - DNA, 13 bp, Artificial Sequence
  Oligonucleotide for detection of SNP TSC0035736
atgtttttttgtt

SEQ ID NO: 142570 - DNA, 13 bp, Artificial Sequence
  Oligonucleotide for detection of SNP TSC0035736
aacaaaaaaacat

SEQ ID NO: 142571 - DNA, 13 bp, Artificial Sequence
  Oligonucleotide for detection of SNP TSC0035736
atgtttatttgtt

SEQ ID NO: 142572 - DNA, 13 bp, Artificial Sequence
  Oligonucleotide for detection of SNP TSC0035736
aacaaataaacat

SEQ ID NO: 142573 - DNA, 13 bp, Artificial Sequence
  Oligonucleotide for detection of SNP TSC0035737
tgaattaggtagt

SEQ ID NO: 142574 - DNA, 13 bp, Artificial Sequence
  Oligonucleotide for detection of SNP TSC0035737
actacctaattca

SEQ ID NO: 142575 - DNA, 13 bp, Artificial Sequence
  Oligonucleotide for detection of SNP TSC0035737
tgaattgggtagt

SEQ ID NO: 142576 - DNA, 13 bp, Artificial Sequence
  Oligonucleotide for detection of SNP TSC0035737
actacccaattca

SEQ ID NO: 142577 - DNA, 13 bp, Artificial Sequence
  Oligonucleotide for detection of SNP TSC0035737
tgaatcgggtagt

SEQ ID NO: 142578 - DNA, 13 bp, Artificial Sequence
  Oligonucleotide for detection of SNP TSC0035737
actacccgattca

SEQ ID NO: 142579 - DNA, 13 bp, Artificial Sequence
  Oligonucleotide for detection of SNP TSC0035737
attgtttggttta

SEQ ID NO: 142580 - DNA, 13 bp, Artificial Sequence
  Oligonucleotide for detection of SNP TSC0035737
taaaccaaacaat

SEQ ID NO: 142581 - DNA, 13 bp, Artificial Sequence
  Oligonucleotide for detection of SNP TSC0035737
attgttcggttta

SEQ ID NO: 142582 - DNA, 13 bp, Artificial Sequence
  Oligonucleotide for detection of SNP TSC0035737
taaaccgaacaat

SEQ ID NO: 142583 - DNA, 13 bp, Artificial Sequence
  Oligonucleotide for detection of SNP TSC0035742
gaaattatagaaa

SEQ ID NO: 142584 - DNA, 13 bp, Artificial Sequence
  Oligonucleotide for detection of SNP TSC0035742
tttctataatttc

SEQ ID NO: 142585 - DNA, 13 bp, Artificial Sequence
  Oligonucleotide for detection of SNP TSC0035742
gaaattttagaaa

SEQ ID NO: 142586 - DNA, 13 bp, Artificial Sequence
  Oligonucleotide for detection of SNP TSC0035742
tttctaaaatttc

SEQ ID NO: 142587 - DNA, 13 bp, Artificial Sequence
  Oligonucleotide for detection of SNP TSC0035742
tttttgtggttty

SEQ ID NO: 142588 - DNA, 13 bp, Artificial Sequence
  Oligonucleotide for detection of SNP TSC0035742
raaaccacaaaaa

SEQ ID NO: 142589 - DNA, 13 bp, Artificial Sequence
  Oligonucleotide for detection of SNP TSC0035742
tttttggggttty

SEQ ID NO: 142590 - DNA, 13 bp, Artificial Sequence
  Oligonucleotide for detection of SNP TSC0035742
raaaccccaaaaa

SEQ ID NO: 142591 - DNA, 13 bp, Artificial Sequence
  Oligonucleotide for detection of SNP TSC0035744
aagttgatattaa

SEQ ID NO: 142592 - DNA, 13 bp, Artificial Sequence
  Oligonucleotide for detection of SNP TSC0035744
ttaatatcaactt

SEQ ID NO: 142593 - DNA, 13 bp, Artificial Sequence
  Oligonucleotide for detection of SNP TSC0035744
aagttgttattaa

SEQ ID NO: 142594 - DNA, 13 bp, Artificial Sequence
  Oligonucleotide for detection of SNP TSC0035744
ttaataacaactt

SEQ ID NO: 142595 - DNA, 13 bp, Artificial Sequence
  Oligonucleotide for detection of SNP TSC0035744
ttgatattaattt

SEQ ID NO: 142596 - DNA, 13 bp, Artificial Sequence
  Oligonucleotide for detection of SNP TSC0035744
aaattaatatcaa

SEQ ID NO: 142597 - DNA, 13 bp, Artificial Sequence
  Oligonucleotide for detection of SNP TSC0035744
ttgataataattt

SEQ ID NO: 142598 - DNA, 13 bp, Artificial Sequence
  Oligonucleotide for detection of SNP TSC0035744
aaattattatcaa

SEQ ID NO: 142599 - DNA, 13 bp, Artificial Sequence
  Oligonucleotide for detection of SNP TSC0035745
gtaattatatggg

SEQ ID NO: 142600 - DNA, 13 bp, Artificial Sequence
  Oligonucleotide for detection of SNP TSC0035745
cccatataattac

SEQ ID NO: 142601 - DNA, 13 bp, Artificial Sequence
  Oligonucleotide for detection of SNP TSC0035745
gtaattgtatggg

SEQ ID NO: 142602 - DNA, 13 bp, Artificial Sequence
  Oligonucleotide for detection of SNP TSC0035745
cccatacaattac

SEQ ID NO: 142603 - DNA, 13 bp, Artificial Sequence
  Oligonucleotide for detection of SNP TSC0035745
gtaatcgtatggg

SEQ ID NO: 142604 - DNA, 13 bp, Artificial Sequence
  Oligonucleotide for detection of SNP TSC0035745
cccatacgattac

SEQ ID NO: 142605 - DNA, 13 bp, Artificial Sequence
  Oligonucleotide for detection of SNP TSC0035745
tttatatgattgy

SEQ ID NO: 142606 - DNA, 13 bp, Artificial Sequence
  Oligonucleotide for detection of SNP TSC0035745
rcaatcatataaa

SEQ ID NO: 142607 - DNA, 13 bp, Artificial Sequence
  Oligonucleotide for detection of SNP TSC0035745
tttatacgattgy

SEQ ID NO: 142608 - DNA, 13 bp, Artificial Sequence
  Oligonucleotide for detection of SNP TSC0035745
rcaatcgtataaa

SEQ ID NO: 142609 - DNA, 13 bp, Artificial Sequence
  Oligonucleotide for detection of SNP TSC0035750
tggttaagggagg

SEQ ID NO: 142610 - DNA, 13 bp, Artificial Sequence
  Oligonucleotide for detection of SNP TSC0035750
cctcccttaacca

SEQ ID NO: 142611 - DNA, 13 bp, Artificial Sequence
  Oligonucleotide for detection of SNP TSC0035750
tggttaggggagg

SEQ ID NO: 142612 - DNA, 13 bp, Artificial Sequence
  Oligonucleotide for detection of SNP TSC0035750
cctcccctaacca

SEQ ID NO: 142613 - DNA, 13 bp, Artificial Sequence
  Oligonucleotide for detection of SNP TSC0035755
taggtagtaaatg

SEQ ID NO: 142614 - DNA, 13 bp, Artificial Sequence
  Oligonucleotide for detection of SNP TSC0035755
catttactaccta

SEQ ID NO: 142615 - DNA, 13 bp, Artificial Sequence
  Oligonucleotide for detection of SNP TSC0035755
taggtaataaatg

SEQ ID NO: 142616 - DNA, 13 bp, Artificial Sequence
  Oligonucleotide for detection of SNP TSC0035755
catttattaccta

SEQ ID NO: 142617 - DNA, 13 bp, Artificial Sequence
  Oligonucleotide for detection of SNP TSC0035758
tttgagataggta

SEQ ID NO: 142618 - DNA, 13 bp, Artificial Sequence
  Oligonucleotide for detection of SNP TSC0035758
tacctatctcaaa

SEQ ID NO: 142619 - DNA, 13 bp, Artificial Sequence
  Oligonucleotide for detection of SNP TSC0035758
tttgagttaggta

SEQ ID NO: 142620 - DNA, 13 bp, Artificial Sequence
  Oligonucleotide for detection of SNP TSC0035758
tacctaactcaaa

SEQ ID NO: 142621 - DNA, 13 bp, Artificial Sequence
  Oligonucleotide for detection of SNP TSC0035758
tatttgttttaaa

SEQ ID NO: 142622 - DNA, 13 bp, Artificial Sequence
  Oligonucleotide for detection of SNP TSC0035758
tttaaaacaaata

SEQ ID NO: 142623 - DNA, 13 bp, Artificial Sequence
  Oligonucleotide for detection of SNP TSC0035758
tatttgatttaaa

SEQ ID NO: 142624 - DNA, 13 bp, Artificial Sequence
  Oligonucleotide for detection of SNP TSC0035758
tttaaatcaaata

SEQ ID NO: 142625 - DNA, 13 bp, Artificial Sequence
  Oligonucleotide for detection of SNP TSC0035759
tttattatattaa

SEQ ID NO: 142626 - DNA, 13 bp, Artificial Sequence
  Oligonucleotide for detection of SNP TSC0035759
ttaatataataaa

SEQ ID NO: 142627 - DNA, 13 bp, Artificial Sequence
  Oligonucleotide for detection of SNP TSC0035760
aatttatagtgtt

SEQ ID NO: 142628 - DNA, 13 bp, Artificial Sequence
  Oligonucleotide for detection of SNP TSC0035760
aacactataaatt

SEQ ID NO: 142629 - DNA, 13 bp, Artificial Sequence
  Oligonucleotide for detection of SNP TSC0035760
aatttagagtgtt

SEQ ID NO: 142630 - DNA, 13 bp, Artificial Sequence
  Oligonucleotide for detection of SNP TSC0035760
aacactctaaatt

SEQ ID NO: 142631 - DNA, 13 bp, Artificial Sequence
  Oligonucleotide for detection of SNP TSC0035760
agtattgtggatt

SEQ ID NO: 142632 - DNA, 13 bp, Artificial Sequence
  Oligonucleotide for detection of SNP TSC0035760
aatccacaatact

SEQ ID NO: 142633 - DNA, 13 bp, Artificial Sequence
  Oligonucleotide for detection of SNP TSC0035760
agtattttggatt

SEQ ID NO: 142634 - DNA, 13 bp, Artificial Sequence
  Oligonucleotide for detection of SNP TSC0035760
aatccaaaatact

SEQ ID NO: 142635 - DNA, 13 bp, Artificial Sequence
  Oligonucleotide for detection of SNP TSC0035761
aaaagaggaaata

SEQ ID NO: 142636 - DNA, 13 bp, Artificial Sequence
  Oligonucleotide for detection of SNP TSC0035761
tatttcctctttt

SEQ ID NO: 142637 - DNA, 13 bp, Artificial Sequence
  Oligonucleotide for detection of SNP TSC0035761
aaaagatgaaata

SEQ ID NO: 142638 - DNA, 13 bp, Artificial Sequence
  Oligonucleotide for detection of SNP TSC0035761
tatttcatctttt

SEQ ID NO: 142639 - DNA, 13 bp, Artificial Sequence
  Oligonucleotide for detection of SNP TSC0035770
ggtttaggattta

SEQ ID NO: 142640 - DNA, 13 bp, Artificial Sequence
  Oligonucleotide for detection of SNP TSC0035770
taaatcctaaacc

SEQ ID NO: 142641 - DNA, 13 bp, Artificial Sequence
  Oligonucleotide for detection of SNP TSC0035770
ggtttaagattta

SEQ ID NO: 142642 - DNA, 13 bp, Artificial Sequence
  Oligonucleotide for detection of SNP TSC0035770
taaatcttaaacc

SEQ ID NO: 142643 - DNA, 13 bp, Artificial Sequence
  Oligonucleotide for detection of SNP TSC0035771
ttgaagtgggtgg

SEQ ID NO: 142644 - DNA, 13 bp, Artificial Sequence
  Oligonucleotide for detection of SNP TSC0035771
ccacccacttcaa

SEQ ID NO: 142645 - DNA, 13 bp, Artificial Sequence
  Oligonucleotide for detection of SNP TSC0035771
tcgaagtgggtgg

SEQ ID NO: 142646 - DNA, 13 bp, Artificial Sequence
  Oligonucleotide for detection of SNP TSC0035771
ccacccacttcga

SEQ ID NO: 142647 - DNA, 13 bp, Artificial Sequence
  Oligonucleotide for detection of SNP TSC0035771
ttgaagtgggcgg

SEQ ID NO: 142648 - DNA, 13 bp, Artificial Sequence
  Oligonucleotide for detection of SNP TSC0035771
ccgcccacttcaa

SEQ ID NO: 142649 - DNA, 13 bp, Artificial Sequence
  Oligonucleotide for detection of SNP TSC0035771
ttgaagcgggtgg

SEQ ID NO: 142650 - DNA, 13 bp, Artificial Sequence
  Oligonucleotide for detection of SNP TSC0035771
ccacccgcttcaa

SEQ ID NO: 142651 - DNA, 13 bp, Artificial Sequence
  Oligonucleotide for detection of SNP TSC0035771
tcgaagtgggcgg

SEQ ID NO: 142652 - DNA, 13 bp, Artificial Sequence
  Oligonucleotide for detection of SNP TSC0035771
ccgcccacttcga

SEQ ID NO: 142653 - DNA, 13 bp, Artificial Sequence
  Oligonucleotide for detection of SNP TSC0035771
tcgaagcgggtgg

SEQ ID NO: 142654 - DNA, 13 bp, Artificial Sequence
  Oligonucleotide for detection of SNP TSC0035771
ccacccgcttcga

SEQ ID NO: 142655 - DNA, 13 bp, Artificial Sequence
  Oligonucleotide for detection of SNP TSC0035771
ttgaagcgggcgg

SEQ ID NO: 142656 - DNA, 13 bp, Artificial Sequence
  Oligonucleotide for detection of SNP TSC0035771
ccgcccgcttcaa

SEQ ID NO: 142657 - DNA, 13 bp, Artificial Sequence
  Oligonucleotide for detection of SNP TSC0035771
tcgaagcgggcgg

SEQ ID NO: 142658 - DNA, 13 bp, Artificial Sequence
  Oligonucleotide for detection of SNP TSC0035771
ccgcccgcttcga

SEQ ID NO: 142659 - DNA, 13 bp, Artificial Sequence
  Oligonucleotide for detection of SNP TSC0035777
tgggaaggattaa

SEQ ID NO: 142660 - DNA, 13 bp, Artificial Sequence
  Oligonucleotide for detection of SNP TSC0035777
ttaatccttccca

SEQ ID NO: 142661 - DNA, 13 bp, Artificial Sequence
  Oligonucleotide for detection of SNP TSC0035777
tgggaatgattaa

SEQ ID NO: 142662 - DNA, 13 bp, Artificial Sequence
  Oligonucleotide for detection of SNP TSC0035777
ttaatcattccca

SEQ ID NO: 142663 - DNA, 13 bp, Artificial Sequence
  Oligonucleotide for detection of SNP TSC0035777
ttgatttttttta

SEQ ID NO: 142664 - DNA, 13 bp, Artificial Sequence
  Oligonucleotide for detection of SNP TSC0035777
taaaaaaaatcaa

SEQ ID NO: 142665 - DNA, 13 bp, Artificial Sequence
  Oligonucleotide for detection of SNP TSC0035777
ttgattattttta

SEQ ID NO: 142666 - DNA, 13 bp, Artificial Sequence
  Oligonucleotide for detection of SNP TSC0035777
taaaaataatcaa

SEQ ID NO: 142667 - DNA, 13 bp, Artificial Sequence
  Oligonucleotide for detection of SNP TSC0035780
agatttgtaatty

SEQ ID NO: 142668 - DNA, 13 bp, Artificial Sequence
  Oligonucleotide for detection of SNP TSC0035780
raattacaaatct

SEQ ID NO: 142669 - DNA, 13 bp, Artificial Sequence
  Oligonucleotide for detection of SNP TSC0035780
agatttataatty

SEQ ID NO: 142670 - DNA, 13 bp, Artificial Sequence
  Oligonucleotide for detection of SNP TSC0035780
raattataaatct

SEQ ID NO: 142671 - DNA, 13 bp, Artificial Sequence
  Oligonucleotide for detection of SNP TSC0035781
gatattgtgtttg

SEQ ID NO: 142672 - DNA, 13 bp, Artificial Sequence
  Oligonucleotide for detection of SNP TSC0035781
caaacacaatatc

SEQ ID NO: 142673 - DNA, 13 bp, Artificial Sequence
  Oligonucleotide for detection of SNP TSC0035781
gatattatgtttg

SEQ ID NO: 142674 - DNA, 13 bp, Artificial Sequence
  Oligonucleotide for detection of SNP TSC0035781
caaacataatatc

SEQ ID NO: 142675 - DNA, 13 bp, Artificial Sequence
  Oligonucleotide for detection of SNP TSC0035781
gatattgcgtttg

SEQ ID NO: 142676 - DNA, 13 bp, Artificial Sequence
  Oligonucleotide for detection of SNP TSC0035781
caaacgcaatatc

SEQ ID NO: 142677 - DNA, 13 bp, Artificial Sequence
  Oligonucleotide for detection of SNP TSC0035781
gatattacgtttg

SEQ ID NO: 142678 - DNA, 13 bp, Artificial Sequence
  Oligonucleotide for detection of SNP TSC0035781
caaacgtaatatc

SEQ ID NO: 142679 - DNA, 13 bp, Artificial Sequence
  Oligonucleotide for detection of SNP TSC0035782
atgtttatgaagg

SEQ ID NO: 142680 - DNA, 13 bp, Artificial Sequence
  Oligonucleotide for detection of SNP TSC0035782
ccttcataaacat

SEQ ID NO: 142681 - DNA, 13 bp, Artificial Sequence
  Oligonucleotide for detection of SNP TSC0035782
atgtttgtgaagg

SEQ ID NO: 142682 - DNA, 13 bp, Artificial Sequence
  Oligonucleotide for detection of SNP TSC0035782
ccttcacaaacat

SEQ ID NO: 142683 - DNA, 13 bp, Artificial Sequence
  Oligonucleotide for detection of SNP TSC0035782
atgttcgtgaagg

SEQ ID NO: 142684 - DNA, 13 bp, Artificial Sequence
  Oligonucleotide for detection of SNP TSC0035782
ccttcacgaacat

SEQ ID NO: 142685 - DNA, 13 bp, Artificial Sequence
  Oligonucleotide for detection of SNP TSC0035782
tttttatggatat

SEQ ID NO: 142686 - DNA, 13 bp, Artificial Sequence
  Oligonucleotide for detection of SNP TSC0035782
atatccataaaaa

SEQ ID NO: 142687 - DNA, 13 bp, Artificial Sequence
  Oligonucleotide for detection of SNP TSC0035782
tttttacggatat

SEQ ID NO: 142688 - DNA, 13 bp, Artificial Sequence
  Oligonucleotide for detection of SNP TSC0035782
atatccgtaaaaa

SEQ ID NO: 142689 - DNA, 13 bp, Artificial Sequence
  Oligonucleotide for detection of SNP TSC0035783
agaaaaaggaatt

SEQ ID NO: 142690 - DNA, 13 bp, Artificial Sequence
  Oligonucleotide for detection of SNP TSC0035783
aattcctttttct

SEQ ID NO: 142691 - DNA, 13 bp, Artificial Sequence
  Oligonucleotide for detection of SNP TSC0035783
agaaaagggaatt

SEQ ID NO: 142692 - DNA, 13 bp, Artificial Sequence
  Oligonucleotide for detection of SNP TSC0035783
aattcccttttct

SEQ ID NO: 142693 - DNA, 13 bp, Artificial Sequence
  Oligonucleotide for detection of SNP TSC0035791
gtttttatttaty

SEQ ID NO: 142694 - DNA, 13 bp, Artificial Sequence
  Oligonucleotide for detection of SNP TSC0035791
rataaataaaaac

SEQ ID NO: 142695 - DNA, 13 bp, Artificial Sequence
  Oligonucleotide for detection of SNP TSC0035791
gataaaggaaggy

SEQ ID NO: 142696 - DNA, 13 bp, Artificial Sequence
  Oligonucleotide for detection of SNP TSC0035791
rccttcctttatc

SEQ ID NO: 142697 - DNA, 13 bp, Artificial Sequence
  Oligonucleotide for detection of SNP TSC0035791
gataaatgaaggy

SEQ ID NO: 142698 - DNA, 13 bp, Artificial Sequence
  Oligonucleotide for detection of SNP TSC0035791
rccttcatttatc

SEQ ID NO: 142699 - DNA, 13 bp, Artificial Sequence
  Oligonucleotide for detection of SNP TSC0035792
gagagattaggta

SEQ ID NO: 142700 - DNA, 13 bp, Artificial Sequence
  Oligonucleotide for detection of SNP TSC0035792
tacctaatctctc

SEQ ID NO: 142701 - DNA, 13 bp, Artificial Sequence
  Oligonucleotide for detection of SNP TSC0035792
gagagaataggta

SEQ ID NO: 142702 - DNA, 13 bp, Artificial Sequence
  Oligonucleotide for detection of SNP TSC0035792
tacctattctctc

SEQ ID NO: 142703 - DNA, 13 bp, Artificial Sequence
  Oligonucleotide for detection of SNP TSC0035795
ggggtagaatata

SEQ ID NO: 142704 - DNA, 13 bp, Artificial Sequence
  Oligonucleotide for detection of SNP TSC0035795
tatattctacccc

SEQ ID NO: 142705 - DNA, 13 bp, Artificial Sequence
  Oligonucleotide for detection of SNP TSC0035795
ggggtaaaatata

SEQ ID NO: 142706 - DNA, 13 bp, Artificial Sequence
  Oligonucleotide for detection of SNP TSC0035795
tatattttacccc

SEQ ID NO: 142707 - DNA, 13 bp, Artificial Sequence
  Oligonucleotide for detection of SNP TSC0035797
gtttttagtatty

SEQ ID NO: 142708 - DNA, 13 bp, Artificial Sequence
  Oligonucleotide for detection of SNP TSC0035797
raatactaaaaac

SEQ ID NO: 142709 - DNA, 13 bp, Artificial Sequence
  Oligonucleotide for detection of SNP TSC0035797
gtttttggtatty

SEQ ID NO: 142710 - DNA, 13 bp, Artificial Sequence
  Oligonucleotide for detection of SNP TSC0035797
raataccaaaaac

SEQ ID NO: 142711 - DNA, 13 bp, Artificial Sequence
  Oligonucleotide for detection of SNP TSC0035797
gttttcggtatty

SEQ ID NO: 142712 - DNA, 13 bp, Artificial Sequence
  Oligonucleotide for detection of SNP TSC0035797
raataccgaaaac

SEQ ID NO: 142713 - DNA, 13 bp, Artificial Sequence
  Oligonucleotide for detection of SNP TSC0035797
ggatgttgagggy

SEQ ID NO: 142714 - DNA, 13 bp, Artificial Sequence
  Oligonucleotide for detection of SNP TSC0035797
rccctcaacatcc

SEQ ID NO: 142715 - DNA, 13 bp, Artificial Sequence
  Oligonucleotide for detection of SNP TSC0035797
ggatgtcgagggy

SEQ ID NO: 142716 - DNA, 13 bp, Artificial Sequence
  Oligonucleotide for detection of SNP TSC0035797
rccctcgacatcc

SEQ ID NO: 142717 - DNA, 13 bp, Artificial Sequence
  Oligonucleotide for detection of SNP TSC0035798
taagtaaataaat

SEQ ID NO: 142718 - DNA, 13 bp, Artificial Sequence
  Oligonucleotide for detection of SNP TSC0035798
atttatttactta

SEQ ID NO: 142719 - DNA, 13 bp, Artificial Sequence
  Oligonucleotide for detection of SNP TSC0035798
taagtatataaat

SEQ ID NO: 142720 - DNA, 13 bp, Artificial Sequence
  Oligonucleotide for detection of SNP TSC0035798
atttatatactta

SEQ ID NO: 142721 - DNA, 13 bp, Artificial Sequence
  Oligonucleotide for detection of SNP TSC0035798
atttatttgttta

SEQ ID NO: 142722 - DNA, 13 bp, Artificial Sequence
  Oligonucleotide for detection of SNP TSC0035798
taaacaaataaat

SEQ ID NO: 142723 - DNA, 13 bp, Artificial Sequence
  Oligonucleotide for detection of SNP TSC0035798
atttatgtgttta

SEQ ID NO: 142724 - DNA, 13 bp, Artificial Sequence
  Oligonucleotide for detection of SNP TSC0035798
taaacacataaat

SEQ ID NO: 142725 - DNA, 13 bp, Artificial Sequence
  Oligonucleotide for detection of SNP TSC0035800
atattatagagag

SEQ ID NO: 142726 - DNA, 13 bp, Artificial Sequence
  Oligonucleotide for detection of SNP TSC0035800
ctctctataatat

SEQ ID NO: 142727 - DNA, 13 bp, Artificial Sequence
  Oligonucleotide for detection of SNP TSC0035800
atattagagagag

SEQ ID NO: 142728 - DNA, 13 bp, Artificial Sequence
  Oligonucleotide for detection of SNP TSC0035800
ctctctctaatat

SEQ ID NO: 142729 - DNA, 13 bp, Artificial Sequence
  Oligonucleotide for detection of SNP TSC0035800
ttttttgtgatgt

SEQ ID NO: 142730 - DNA, 13 bp, Artificial Sequence
  Oligonucleotide for detection of SNP TSC0035800
acatcacaaaaaa

SEQ ID NO: 142731 - DNA, 13 bp, Artificial Sequence
  Oligonucleotide for detection of SNP TSC0035800
ttttttttgatgt

SEQ ID NO: 142732 - DNA, 13 bp, Artificial Sequence
  Oligonucleotide for detection of SNP TSC0035800
acatcaaaaaaaa

SEQ ID NO: 142733 - DNA, 13 bp, Artificial Sequence
  Oligonucleotide for detection of SNP TSC0035801
tttttataagggg

SEQ ID NO: 142734 - DNA, 13 bp, Artificial Sequence
  Oligonucleotide for detection of SNP TSC0035801
ccccttataaaaa

SEQ ID NO: 142735 - DNA, 13 bp, Artificial Sequence
  Oligonucleotide for detection of SNP TSC0035801
tttttagaagggg

SEQ ID NO: 142736 - DNA, 13 bp, Artificial Sequence
  Oligonucleotide for detection of SNP TSC0035801
ccccttctaaaaa

SEQ ID NO: 142737 - DNA, 13 bp, Artificial Sequence
  Oligonucleotide for detection of SNP TSC0035804
agattgtggtgaa

SEQ ID NO: 142738 - DNA, 13 bp, Artificial Sequence
  Oligonucleotide for detection of SNP TSC0035804
ttcaccacaatct

SEQ ID NO: 142739 - DNA, 13 bp, Artificial Sequence
  Oligonucleotide for detection of SNP TSC0035804
agatcgtggtgaa

SEQ ID NO: 142740 - DNA, 13 bp, Artificial Sequence
  Oligonucleotide for detection of SNP TSC0035804
ttcaccacgatct

SEQ ID NO: 142741 - DNA, 13 bp, Artificial Sequence
  Oligonucleotide for detection of SNP TSC0035804
agattgcggtgaa

SEQ ID NO: 142742 - DNA, 13 bp, Artificial Sequence
  Oligonucleotide for detection of SNP TSC0035804
ttcaccgcaatct

SEQ ID NO: 142743 - DNA, 13 bp, Artificial Sequence
  Oligonucleotide for detection of SNP TSC0035804
agatcgcggtgaa

SEQ ID NO: 142744 - DNA, 13 bp, Artificial Sequence
  Oligonucleotide for detection of SNP TSC0035804
ttcaccgcgatct

SEQ ID NO: 142745 - DNA, 13 bp, Artificial Sequence
  Oligonucleotide for detection of SNP TSC0035804
tttattacggttt

SEQ ID NO: 142746 - DNA, 13 bp, Artificial Sequence
  Oligonucleotide for detection of SNP TSC0035804
aaaccgtaataaa

SEQ ID NO: 142747 - DNA, 13 bp, Artificial Sequence
  Oligonucleotide for detection of SNP TSC0035804
tttattgcggttt

SEQ ID NO: 142748 - DNA, 13 bp, Artificial Sequence
  Oligonucleotide for detection of SNP TSC0035804
aaaccgcaataaa

SEQ ID NO: 142749 - DNA, 13 bp, Artificial Sequence
  Oligonucleotide for detection of SNP TSC0035804
tttatcgcggttt

SEQ ID NO: 142750 - DNA, 13 bp, Artificial Sequence
  Oligonucleotide for detection of SNP TSC0035804
aaaccgcgataaa

SEQ ID NO: 142751 - DNA, 13 bp, Artificial Sequence
  Oligonucleotide for detection of SNP TSC0035805
aagttgtgtggtt

SEQ ID NO: 142752 - DNA, 13 bp, Artificial Sequence
  Oligonucleotide for detection of SNP TSC0035805
aaccacacaactt

SEQ ID NO: 142753 - DNA, 13 bp, Artificial Sequence
  Oligonucleotide for detection of SNP TSC0035805
aagttgcgtggtt

SEQ ID NO: 142754 - DNA, 13 bp, Artificial Sequence
  Oligonucleotide for detection of SNP TSC0035805
aaccacgcaactt

SEQ ID NO: 142755 - DNA, 13 bp, Artificial Sequence
  Oligonucleotide for detection of SNP TSC0035805
agttatgtaattt

SEQ ID NO: 142756 - DNA, 13 bp, Artificial Sequence
  Oligonucleotide for detection of SNP TSC0035805
aaattacataact

SEQ ID NO: 142757 - DNA, 13 bp, Artificial Sequence
  Oligonucleotide for detection of SNP TSC0035805
agttatataattt

SEQ ID NO: 142758 - DNA, 13 bp, Artificial Sequence
  Oligonucleotide for detection of SNP TSC0035805
aaattatataact

SEQ ID NO: 142759 - DNA, 13 bp, Artificial Sequence
  Oligonucleotide for detection of SNP TSC0035805
agttacgtaattt

SEQ ID NO: 142760 - DNA, 13 bp, Artificial Sequence
  Oligonucleotide for detection of SNP TSC0035805
aaattacgtaact

SEQ ID NO: 142761 - DNA, 13 bp, Artificial Sequence
  Oligonucleotide for detection of SNP TSC0035806
aagttaggattay

SEQ ID NO: 142762 - DNA, 13 bp, Artificial Sequence
  Oligonucleotide for detection of SNP TSC0035806
rtaatcctaactt

SEQ ID NO: 142763 - DNA, 13 bp, Artificial Sequence
  Oligonucleotide for detection of SNP TSC0035806
aagttaagattay

SEQ ID NO: 142764 - DNA, 13 bp, Artificial Sequence
  Oligonucleotide for detection of SNP TSC0035806
rtaatcttaactt

SEQ ID NO: 142765 - DNA, 13 bp, Artificial Sequence
  Oligonucleotide for detection of SNP TSC0035807
ttgttaggagtty

SEQ ID NO: 142766 - DNA, 13 bp, Artificial Sequence
  Oligonucleotide for detection of SNP TSC0035807
raactcctaacaa

SEQ ID NO: 142767 - DNA, 13 bp, Artificial Sequence
  Oligonucleotide for detection of SNP TSC0035807
ttgttaagagtty

SEQ ID NO: 142768 - DNA, 13 bp, Artificial Sequence
  Oligonucleotide for detection of SNP TSC0035807
raactcttaacaa

SEQ ID NO: 142769 - DNA, 13 bp, Artificial Sequence
  Oligonucleotide for detection of SNP TSC0035807
tcgttaggagtty

SEQ ID NO: 142770 - DNA, 13 bp, Artificial Sequence
  Oligonucleotide for detection of SNP TSC0035807
raactcctaacga

SEQ ID NO: 142771 - DNA, 13 bp, Artificial Sequence
  Oligonucleotide for detection of SNP TSC0035807
tcgttaagagtty

SEQ ID NO: 142772 - DNA, 13 bp, Artificial Sequence
  Oligonucleotide for detection of SNP TSC0035807
raactcttaacga

SEQ ID NO: 142773 - DNA, 13 bp, Artificial Sequence
  Oligonucleotide for detection of SNP TSC0035817
gtgtgatgaatga

SEQ ID NO: 142774 - DNA, 13 bp, Artificial Sequence
  Oligonucleotide for detection of SNP TSC0035817
tcattcatcacac

SEQ ID NO: 142775 - DNA, 13 bp, Artificial Sequence
  Oligonucleotide for detection of SNP TSC0035817
gcgtgatgaatga

SEQ ID NO: 142776 - DNA, 13 bp, Artificial Sequence
  Oligonucleotide for detection of SNP TSC0035817
tcattcatcacgc

SEQ ID NO: 142777 - DNA, 13 bp, Artificial Sequence
  Oligonucleotide for detection of SNP TSC0035817
gtgtgacgaatga

SEQ ID NO: 142778 - DNA, 13 bp, Artificial Sequence
  Oligonucleotide for detection of SNP TSC0035817
tcattcgtcacac

SEQ ID NO: 142779 - DNA, 13 bp, Artificial Sequence
  Oligonucleotide for detection of SNP TSC0035817
gcgtgacgaatga

SEQ ID NO: 142780 - DNA, 13 bp, Artificial Sequence
  Oligonucleotide for detection of SNP TSC0035817
tcattcgtcacgc

SEQ ID NO: 142781 - DNA, 13 bp, Artificial Sequence
  Oligonucleotide for detection of SNP TSC0035817
ttatttattatgy

SEQ ID NO: 142782 - DNA, 13 bp, Artificial Sequence
  Oligonucleotide for detection of SNP TSC0035817
rcataataaataa

SEQ ID NO: 142783 - DNA, 13 bp, Artificial Sequence
  Oligonucleotide for detection of SNP TSC0035817
ttatttattacgy

SEQ ID NO: 142784 - DNA, 13 bp, Artificial Sequence
  Oligonucleotide for detection of SNP TSC0035817
rcgtaataaataa

SEQ ID NO: 142785 - DNA, 13 bp, Artificial Sequence
  Oligonucleotide for detection of SNP TSC0035817
ttatttgttacgy

SEQ ID NO: 142786 - DNA, 13 bp, Artificial Sequence
  Oligonucleotide for detection of SNP TSC0035817
rcgtaacaaataa

SEQ ID NO: 142787 - DNA, 13 bp, Artificial Sequence
  Oligonucleotide for detection of SNP TSC0035817
ttattcgttacgy

SEQ ID NO: 142788 - DNA, 13 bp, Artificial Sequence
  Oligonucleotide for detection of SNP TSC0035817
rcgtaacgaataa

SEQ ID NO: 142789 - DNA, 13 bp, Artificial Sequence
  Oligonucleotide for detection of SNP TSC0035818
gaaaattgatatg

SEQ ID NO: 142790 - DNA, 13 bp, Artificial Sequence
  Oligonucleotide for detection of SNP TSC0035818
catatcaattttc

SEQ ID NO: 142791 - DNA, 13 bp, Artificial Sequence
  Oligonucleotide for detection of SNP TSC0035818
gaaaatcgatatg

SEQ ID NO: 142792 - DNA, 13 bp, Artificial Sequence
  Oligonucleotide for detection of SNP TSC0035818
catatcgattttc

SEQ ID NO: 142793 - DNA, 13 bp, Artificial Sequence
  Oligonucleotide for detection of SNP TSC0035818
tatattggtttty

SEQ ID NO: 142794 - DNA, 13 bp, Artificial Sequence
  Oligonucleotide for detection of SNP TSC0035818
raaaaccaatata

SEQ ID NO: 142795 - DNA, 13 bp, Artificial Sequence
  Oligonucleotide for detection of SNP TSC0035818
tatattagtttty

SEQ ID NO: 142796 - DNA, 13 bp, Artificial Sequence
  Oligonucleotide for detection of SNP TSC0035818
raaaactaatata

SEQ ID NO: 142797 - DNA, 13 bp, Artificial Sequence
  Oligonucleotide for detection of SNP TSC0035818
tatatcggtttty

SEQ ID NO: 142798 - DNA, 13 bp, Artificial Sequence
  Oligonucleotide for detection of SNP TSC0035818
raaaaccgatata

SEQ ID NO: 142799 - DNA, 13 bp, Artificial Sequence
  Oligonucleotide for detection of SNP TSC0035819
ggcgggtggatta

SEQ ID NO: 142800 - DNA, 13 bp, Artificial Sequence
  Oligonucleotide for detection of SNP TSC0035819
taatccacccgcc

SEQ ID NO: 142801 - DNA, 13 bp, Artificial Sequence
  Oligonucleotide for detection of SNP TSC0035819
ggcgggcggatta

SEQ ID NO: 142802 - DNA, 13 bp, Artificial Sequence
  Oligonucleotide for detection of SNP TSC0035819
taatccgcccgcc

SEQ ID NO: 142803 - DNA, 13 bp, Artificial Sequence
  Oligonucleotide for detection of SNP TSC0035819
tgatttattcgty

SEQ ID NO: 142804 - DNA, 13 bp, Artificial Sequence
  Oligonucleotide for detection of SNP TSC0035819
racgaataaatca

SEQ ID NO: 142805 - DNA, 13 bp, Artificial Sequence
  Oligonucleotide for detection of SNP TSC0035819
tgatttgttcgty

SEQ ID NO: 142806 - DNA, 13 bp, Artificial Sequence
  Oligonucleotide for detection of SNP TSC0035819
racgaacaaatca

SEQ ID NO: 142807 - DNA, 13 bp, Artificial Sequence
  Oligonucleotide for detection of SNP TSC0035819
tgattcgttcgty

SEQ ID NO: 142808 - DNA, 13 bp, Artificial Sequence
  Oligonucleotide for detection of SNP TSC0035819
racgaacgaatca

SEQ ID NO: 142809 - DNA, 13 bp, Artificial Sequence
  Oligonucleotide for detection of SNP TSC0035820
aattaatggggaa

SEQ ID NO: 142810 - DNA, 13 bp, Artificial Sequence
  Oligonucleotide for detection of SNP TSC0035820
ttccccattaatt

SEQ ID NO: 142811 - DNA, 13 bp, Artificial Sequence
  Oligonucleotide for detection of SNP TSC0035820
aattaacggggaa

SEQ ID NO: 142812 - DNA, 13 bp, Artificial Sequence
  Oligonucleotide for detection of SNP TSC0035820
ttccccgttaatt

SEQ ID NO: 142813 - DNA, 13 bp, Artificial Sequence
  Oligonucleotide for detection of SNP TSC0035823
tttatggaatttt

SEQ ID NO: 142814 - DNA, 13 bp, Artificial Sequence
  Oligonucleotide for detection of SNP TSC0035823
aaaattccataaa

SEQ ID NO: 142815 - DNA, 13 bp, Artificial Sequence
  Oligonucleotide for detection of SNP TSC0035824
aggaagaattgga

SEQ ID NO: 142816 - DNA, 13 bp, Artificial Sequence
  Oligonucleotide for detection of SNP TSC0035824
tccaattcttcct

SEQ ID NO: 142817 - DNA, 13 bp, Artificial Sequence
  Oligonucleotide for detection of SNP TSC0035824
aggaagtattgga

SEQ ID NO: 142818 - DNA, 13 bp, Artificial Sequence
  Oligonucleotide for detection of SNP TSC0035824
tccaatacttcct

SEQ ID NO: 142819 - DNA, 13 bp, Artificial Sequence
  Oligonucleotide for detection of SNP TSC0035825
tggttttgtttag

SEQ ID NO: 142820 - DNA, 13 bp, Artificial Sequence
  Oligonucleotide for detection of SNP TSC0035825
ctaaacaaaacca

SEQ ID NO: 142821 - DNA, 13 bp, Artificial Sequence
  Oligonucleotide for detection of SNP TSC0035825
tggtttcgtttag

SEQ ID NO: 142822 - DNA, 13 bp, Artificial Sequence
  Oligonucleotide for detection of SNP TSC0035825
ctaaacgaaacca

SEQ ID NO: 142823 - DNA, 13 bp, Artificial Sequence
  Oligonucleotide for detection of SNP TSC0035825
ttgggtggggtta

SEQ ID NO: 142824 - DNA, 13 bp, Artificial Sequence
  Oligonucleotide for detection of SNP TSC0035825
taaccccacccaa

SEQ ID NO: 142825 - DNA, 13 bp, Artificial Sequence
  Oligonucleotide for detection of SNP TSC0035825
ttgggtagggtta

SEQ ID NO: 142826 - DNA, 13 bp, Artificial Sequence
  Oligonucleotide for detection of SNP TSC0035825
taaccctacccaa

SEQ ID NO: 142827 - DNA, 13 bp, Artificial Sequence
  Oligonucleotide for detection of SNP TSC0035825
ttgggcggggtta

SEQ ID NO: 142828 - DNA, 13 bp, Artificial Sequence
  Oligonucleotide for detection of SNP TSC0035825
taaccccgcccaa

SEQ ID NO: 142829 - DNA, 13 bp, Artificial Sequence
  Oligonucleotide for detection of SNP TSC0035826
ggttgaagtagta

SEQ ID NO: 142830 - DNA, 13 bp, Artificial Sequence
  Oligonucleotide for detection of SNP TSC0035826
tactacttcaacc

SEQ ID NO: 142831 - DNA, 13 bp, Artificial Sequence
  Oligonucleotide for detection of SNP TSC0035826
ggttgaggtagta

SEQ ID NO: 142832 - DNA, 13 bp, Artificial Sequence
  Oligonucleotide for detection of SNP TSC0035826
tactacctcaacc

SEQ ID NO: 142833 - DNA, 13 bp, Artificial Sequence
  Oligonucleotide for detection of SNP TSC0035828
tatatttgttata

SEQ ID NO: 142834 - DNA, 13 bp, Artificial Sequence
  Oligonucleotide for detection of SNP TSC0035828
tataacaaatata

SEQ ID NO: 142835 - DNA, 13 bp, Artificial Sequence
  Oligonucleotide for detection of SNP TSC0035828
tatattcgttata

SEQ ID NO: 142836 - DNA, 13 bp, Artificial Sequence
  Oligonucleotide for detection of SNP TSC0035828
tataacgaatata

SEQ ID NO: 142837 - DNA, 13 bp, Artificial Sequence
  Oligonucleotide for detection of SNP TSC0035828
tgtagtgggtata

SEQ ID NO: 142838 - DNA, 13 bp, Artificial Sequence
  Oligonucleotide for detection of SNP TSC0035828
tatacccactaca

SEQ ID NO: 142839 - DNA, 13 bp, Artificial Sequence
  Oligonucleotide for detection of SNP TSC0035828
tgtagtaggtata

SEQ ID NO: 142840 - DNA, 13 bp, Artificial Sequence
  Oligonucleotide for detection of SNP TSC0035828
tatacctactaca

SEQ ID NO: 142841 - DNA, 13 bp, Artificial Sequence
  Oligonucleotide for detection of SNP TSC0035828
tgtagcgggtata

SEQ ID NO: 142842 - DNA, 13 bp, Artificial Sequence
  Oligonucleotide for detection of SNP TSC0035828
tatacccgctaca

SEQ ID NO: 142843 - DNA, 13 bp, Artificial Sequence
  Oligonucleotide for detection of SNP TSC0035831
gtgagatgtgtat

SEQ ID NO: 142844 - DNA, 13 bp, Artificial Sequence
  Oligonucleotide for detection of SNP TSC0035831
atacacatctcac

SEQ ID NO: 142845 - DNA, 13 bp, Artificial Sequence
  Oligonucleotide for detection of SNP TSC0035831
gtgagacgtgtat

SEQ ID NO: 142846 - DNA, 13 bp, Artificial Sequence
  Oligonucleotide for detection of SNP TSC0035831
atacacgtctcac

SEQ ID NO: 142847 - DNA, 13 bp, Artificial Sequence
  Oligonucleotide for detection of SNP TSC0035831
atgtatgttttay

SEQ ID NO: 142848 - DNA, 13 bp, Artificial Sequence
  Oligonucleotide for detection of SNP TSC0035831
rtaaaacatacat

SEQ ID NO: 142849 - DNA, 13 bp, Artificial Sequence
  Oligonucleotide for detection of SNP TSC0035831
atgtatattttay

SEQ ID NO: 142850 - DNA, 13 bp, Artificial Sequence
  Oligonucleotide for detection of SNP TSC0035831
rtaaaatatacat

SEQ ID NO: 142851 - DNA, 13 bp, Artificial Sequence
  Oligonucleotide for detection of SNP TSC0035831
atgtacgttttay

SEQ ID NO: 142852 - DNA, 13 bp, Artificial Sequence
  Oligonucleotide for detection of SNP TSC0035831
rtaaaacgtacat

SEQ ID NO: 142853 - DNA, 13 bp, Artificial Sequence
  Oligonucleotide for detection of SNP TSC0035832
aagaatatggaga

SEQ ID NO: 142854 - DNA, 13 bp, Artificial Sequence
  Oligonucleotide for detection of SNP TSC0035832
tctccatattctt

SEQ ID NO: 142855 - DNA, 13 bp, Artificial Sequence
  Oligonucleotide for detection of SNP TSC0035832
aagaatgtggaga

SEQ ID NO: 142856 - DNA, 13 bp, Artificial Sequence
  Oligonucleotide for detection of SNP TSC0035832
tctccacattctt

SEQ ID NO: 142857 - DNA, 13 bp, Artificial Sequence
  Oligonucleotide for detection of SNP TSC0035832
aagaacgtggaga

SEQ ID NO: 142858 - DNA, 13 bp, Artificial Sequence
  Oligonucleotide for detection of SNP TSC0035832
tctccacgttctt

SEQ ID NO: 142859 - DNA, 13 bp, Artificial Sequence
  Oligonucleotide for detection of SNP TSC0035836
aatatggtttaay

SEQ ID NO: 142860 - DNA, 13 bp, Artificial Sequence
  Oligonucleotide for detection of SNP TSC0035836
rttaaaccatatt

SEQ ID NO: 142861 - DNA, 13 bp, Artificial Sequence
  Oligonucleotide for detection of SNP TSC0035836
aatatgatttaay

SEQ ID NO: 142862 - DNA, 13 bp, Artificial Sequence
  Oligonucleotide for detection of SNP TSC0035836
rttaaatcatatt

SEQ ID NO: 142863 - DNA, 13 bp, Artificial Sequence
  Oligonucleotide for detection of SNP TSC0035837
gtgtaagtttatg

SEQ ID NO: 142864 - DNA, 13 bp, Artificial Sequence
  Oligonucleotide for detection of SNP TSC0035837
cataaacttacac

SEQ ID NO: 142865 - DNA, 13 bp, Artificial Sequence
  Oligonucleotide for detection of SNP TSC0035837
gtgtaaatttatg

SEQ ID NO: 142866 - DNA, 13 bp, Artificial Sequence
  Oligonucleotide for detection of SNP TSC0035837
cataaatttacac

SEQ ID NO: 142867 - DNA, 13 bp, Artificial Sequence
  Oligonucleotide for detection of SNP TSC0035839
tttattcgtttta

SEQ ID NO: 142868 - DNA, 13 bp, Artificial Sequence
  Oligonucleotide for detection of SNP TSC0035839
taaaacgaataaa

SEQ ID NO: 142869 - DNA, 13 bp, Artificial Sequence
  Oligonucleotide for detection of SNP TSC0035839
tgagatggataag

SEQ ID NO: 142870 - DNA, 13 bp, Artificial Sequence
  Oligonucleotide for detection of SNP TSC0035839
cttatccatctca

SEQ ID NO: 142871 - DNA, 13 bp, Artificial Sequence
  Oligonucleotide for detection of SNP TSC0035839
tgagattgataag

SEQ ID NO: 142872 - DNA, 13 bp, Artificial Sequence
  Oligonucleotide for detection of SNP TSC0035839
cttatcaatctca

SEQ ID NO: 142873 - DNA, 13 bp, Artificial Sequence
  Oligonucleotide for detection of SNP TSC0035839
tgagacggataag

SEQ ID NO: 142874 - DNA, 13 bp, Artificial Sequence
  Oligonucleotide for detection of SNP TSC0035839
cttatccgtctca

SEQ ID NO: 142875 - DNA, 13 bp, Artificial Sequence
  Oligonucleotide for detection of SNP TSC0035839
tgagatcgataag

SEQ ID NO: 142876 - DNA, 13 bp, Artificial Sequence
  Oligonucleotide for detection of SNP TSC0035839
cttatcgatctca

SEQ ID NO: 142877 - DNA, 13 bp, Artificial Sequence
  Oligonucleotide for detection of SNP TSC0035841
gttgtaatggtaa

SEQ ID NO: 142878 - DNA, 13 bp, Artificial Sequence
  Oligonucleotide for detection of SNP TSC0035841
ttaccattacaac

SEQ ID NO: 142879 - DNA, 13 bp, Artificial Sequence
  Oligonucleotide for detection of SNP TSC0035841
gttgtagtggtaa

SEQ ID NO: 142880 - DNA, 13 bp, Artificial Sequence
  Oligonucleotide for detection of SNP TSC0035841
ttaccactacaac

SEQ ID NO: 142881 - DNA, 13 bp, Artificial Sequence
  Oligonucleotide for detection of SNP TSC0035841
gtcgtaatggtaa

SEQ ID NO: 142882 - DNA, 13 bp, Artificial Sequence
  Oligonucleotide for detection of SNP TSC0035841
ttaccattacgac

SEQ ID NO: 142883 - DNA, 13 bp, Artificial Sequence
  Oligonucleotide for detection of SNP TSC0035841
gtcgtagtggtaa

SEQ ID NO: 142884 - DNA, 13 bp, Artificial Sequence
  Oligonucleotide for detection of SNP TSC0035841
ttaccactacgac

SEQ ID NO: 142885 - DNA, 13 bp, Artificial Sequence
  Oligonucleotide for detection of SNP TSC0035841
gttgtaacggtaa

SEQ ID NO: 142886 - DNA, 13 bp, Artificial Sequence
  Oligonucleotide for detection of SNP TSC0035841
ttaccgttacaac

SEQ ID NO: 142887 - DNA, 13 bp, Artificial Sequence
  Oligonucleotide for detection of SNP TSC0035841
gttgtagcggtaa

SEQ ID NO: 142888 - DNA, 13 bp, Artificial Sequence
  Oligonucleotide for detection of SNP TSC0035841
ttaccgctacaac

SEQ ID NO: 142889 - DNA, 13 bp, Artificial Sequence
  Oligonucleotide for detection of SNP TSC0035841
gtcgtaacggtaa

SEQ ID NO: 142890 - DNA, 13 bp, Artificial Sequence
  Oligonucleotide for detection of SNP TSC0035841
ttaccgttacgac

SEQ ID NO: 142891 - DNA, 13 bp, Artificial Sequence
  Oligonucleotide for detection of SNP TSC0035841
gtcgtagcggtaa

SEQ ID NO: 142892 - DNA, 13 bp, Artificial Sequence
  Oligonucleotide for detection of SNP TSC0035841
ttaccgctacgac

SEQ ID NO: 142893 - DNA, 13 bp, Artificial Sequence
  Oligonucleotide for detection of SNP TSC0035842
tattttaggaagy

SEQ ID NO: 142894 - DNA, 13 bp, Artificial Sequence
  Oligonucleotide for detection of SNP TSC0035842
rcttcctaaaata

SEQ ID NO: 142895 - DNA, 13 bp, Artificial Sequence
  Oligonucleotide for detection of SNP TSC0035842
tatttttggaagy

SEQ ID NO: 142896 - DNA, 13 bp, Artificial Sequence
  Oligonucleotide for detection of SNP TSC0035842
rcttccaaaaata

SEQ ID NO: 142897 - DNA, 13 bp, Artificial Sequence
  Oligonucleotide for detection of SNP TSC0035842
tattttcggaagy

SEQ ID NO: 142898 - DNA, 13 bp, Artificial Sequence
  Oligonucleotide for detection of SNP TSC0035842
rcttccgaaaata

SEQ ID NO: 142899 - DNA, 13 bp, Artificial Sequence
  Oligonucleotide for detection of SNP TSC0035842
gttttttaaagtg

SEQ ID NO: 142900 - DNA, 13 bp, Artificial Sequence
  Oligonucleotide for detection of SNP TSC0035842
cactttaaaaaac

SEQ ID NO: 142901 - DNA, 13 bp, Artificial Sequence
  Oligonucleotide for detection of SNP TSC0035843
ataaaaatttaaa

SEQ ID NO: 142902 - DNA, 13 bp, Artificial Sequence
  Oligonucleotide for detection of SNP TSC0035843
tttaaatttttat

SEQ ID NO: 142903 - DNA, 13 bp, Artificial Sequence
  Oligonucleotide for detection of SNP TSC0035843
ataaaattttaaa

SEQ ID NO: 142904 - DNA, 13 bp, Artificial Sequence
  Oligonucleotide for detection of SNP TSC0035843
tttaaaattttat

SEQ ID NO: 142905 - DNA, 13 bp, Artificial Sequence
  Oligonucleotide for detection of SNP TSC0035843
tttgaatttttgt

SEQ ID NO: 142906 - DNA, 13 bp, Artificial Sequence
  Oligonucleotide for detection of SNP TSC0035843
acaaaaattcaaa

SEQ ID NO: 142907 - DNA, 13 bp, Artificial Sequence
  Oligonucleotide for detection of SNP TSC0035843
tttgaagttttgt

SEQ ID NO: 142908 - DNA, 13 bp, Artificial Sequence
  Oligonucleotide for detection of SNP TSC0035843
acaaaacttcaaa

SEQ ID NO: 142909 - DNA, 13 bp, Artificial Sequence
  Oligonucleotide for detection of SNP TSC0035848
ttttgaaattttg

SEQ ID NO: 142910 - DNA, 13 bp, Artificial Sequence
  Oligonucleotide for detection of SNP TSC0035848
caaaatttcaaaa

SEQ ID NO: 142911 - DNA, 13 bp, Artificial Sequence
  Oligonucleotide for detection of SNP TSC0035850
attagttgggggy

SEQ ID NO: 142912 - DNA, 13 bp, Artificial Sequence
  Oligonucleotide for detection of SNP TSC0035850
rcccccaactaat

SEQ ID NO: 142913 - DNA, 13 bp, Artificial Sequence
  Oligonucleotide for detection of SNP TSC0035850
attagtcgggggy

SEQ ID NO: 142914 - DNA, 13 bp, Artificial Sequence
  Oligonucleotide for detection of SNP TSC0035850
rcccccgactaat

SEQ ID NO: 142915 - DNA, 13 bp, Artificial Sequence
  Oligonucleotide for detection of SNP TSC0035850
gtttttagttaat

SEQ ID NO: 142916 - DNA, 13 bp, Artificial Sequence
  Oligonucleotide for detection of SNP TSC0035850
attaactaaaaac

SEQ ID NO: 142917 - DNA, 13 bp, Artificial Sequence
  Oligonucleotide for detection of SNP TSC0035850
gtttttggttaat

SEQ ID NO: 142918 - DNA, 13 bp, Artificial Sequence
  Oligonucleotide for detection of SNP TSC0035850
attaaccaaaaac

SEQ ID NO: 142919 - DNA, 13 bp, Artificial Sequence
  Oligonucleotide for detection of SNP TSC0035850
gttttcggttaat

SEQ ID NO: 142920 - DNA, 13 bp, Artificial Sequence
  Oligonucleotide for detection of SNP TSC0035850
attaaccgaaaac

SEQ ID NO: 142921 - DNA, 13 bp, Artificial Sequence
  Oligonucleotide for detection of SNP TSC0035855
attttaatttata

SEQ ID NO: 142922 - DNA, 13 bp, Artificial Sequence
  Oligonucleotide for detection of SNP TSC0035855
tataaattaaaat

SEQ ID NO: 142923 - DNA, 13 bp, Artificial Sequence
  Oligonucleotide for detection of SNP TSC0035855
attttagtttata

SEQ ID NO: 142924 - DNA, 13 bp, Artificial Sequence
  Oligonucleotide for detection of SNP TSC0035855
tataaactaaaat

SEQ ID NO: 142925 - DNA, 13 bp, Artificial Sequence
  Oligonucleotide for detection of SNP TSC0035856
agtagagtagtty

SEQ ID NO: 142926 - DNA, 13 bp, Artificial Sequence
  Oligonucleotide for detection of SNP TSC0035856
raactactctact

SEQ ID NO: 142927 - DNA, 13 bp, Artificial Sequence
  Oligonucleotide for detection of SNP TSC0035856
agtagaatagtty

SEQ ID NO: 142928 - DNA, 13 bp, Artificial Sequence
  Oligonucleotide for detection of SNP TSC0035856
raactattctact

SEQ ID NO: 142929 - DNA, 13 bp, Artificial Sequence
  Oligonucleotide for detection of SNP TSC0035857
tagtttaataaay

SEQ ID NO: 142930 - DNA, 13 bp, Artificial Sequence
  Oligonucleotide for detection of SNP TSC0035857
rtttattaaacta

SEQ ID NO: 142931 - DNA, 13 bp, Artificial Sequence
  Oligonucleotide for detection of SNP TSC0035857
tagtttgataaay

SEQ ID NO: 142932 - DNA, 13 bp, Artificial Sequence
  Oligonucleotide for detection of SNP TSC0035857
rtttatcaaacta

SEQ ID NO: 142933 - DNA, 13 bp, Artificial Sequence
  Oligonucleotide for detection of SNP TSC0035857
tagttcgataaay

SEQ ID NO: 142934 - DNA, 13 bp, Artificial Sequence
  Oligonucleotide for detection of SNP TSC0035857
rtttatcgaacta

SEQ ID NO: 142935 - DNA, 13 bp, Artificial Sequence
  Oligonucleotide for detection of SNP TSC0035857
gtttgttgggtta

SEQ ID NO: 142936 - DNA, 13 bp, Artificial Sequence
  Oligonucleotide for detection of SNP TSC0035857
taacccaacaaac

SEQ ID NO: 142937 - DNA, 13 bp, Artificial Sequence
  Oligonucleotide for detection of SNP TSC0035857
gtttgtcgggtta

SEQ ID NO: 142938 - DNA, 13 bp, Artificial Sequence
  Oligonucleotide for detection of SNP TSC0035857
taacccgacaaac

SEQ ID NO: 142939 - DNA, 13 bp, Artificial Sequence
  Oligonucleotide for detection of SNP TSC0035858
agagttatagatt

SEQ ID NO: 142940 - DNA, 13 bp, Artificial Sequence
  Oligonucleotide for detection of SNP TSC0035858
aatctataactct

SEQ ID NO: 142941 - DNA, 13 bp, Artificial Sequence
  Oligonucleotide for detection of SNP TSC0035858
agagttgtagatt

SEQ ID NO: 142942 - DNA, 13 bp, Artificial Sequence
  Oligonucleotide for detection of SNP TSC0035858
aatctacaactct

SEQ ID NO: 142943 - DNA, 13 bp, Artificial Sequence
  Oligonucleotide for detection of SNP TSC0035859
ggtttttaaattt

SEQ ID NO: 142944 - DNA, 13 bp, Artificial Sequence
  Oligonucleotide for detection of SNP TSC0035859
aaatttaaaaacc

SEQ ID NO: 142945 - DNA, 13 bp, Artificial Sequence
  Oligonucleotide for detection of SNP TSC0035859
ggttttgaaattt

SEQ ID NO: 142946 - DNA, 13 bp, Artificial Sequence
  Oligonucleotide for detection of SNP TSC0035859
aaatttcaaaacc

SEQ ID NO: 142947 - DNA, 13 bp, Artificial Sequence
  Oligonucleotide for detection of SNP TSC0035859
ggtttcgaaattt

SEQ ID NO: 142948 - DNA, 13 bp, Artificial Sequence
  Oligonucleotide for detection of SNP TSC0035859
aaatttcgaaacc

SEQ ID NO: 142949 - DNA, 13 bp, Artificial Sequence
  Oligonucleotide for detection of SNP TSC0035859
aggtttggaaaty

SEQ ID NO: 142950 - DNA, 13 bp, Artificial Sequence
  Oligonucleotide for detection of SNP TSC0035859
ratttccaaacct

SEQ ID NO: 142951 - DNA, 13 bp, Artificial Sequence
  Oligonucleotide for detection of SNP TSC0035859
aggttttgaaaty

SEQ ID NO: 142952 - DNA, 13 bp, Artificial Sequence
  Oligonucleotide for detection of SNP TSC0035859
ratttcaaaacct

SEQ ID NO: 142953 - DNA, 13 bp, Artificial Sequence
  Oligonucleotide for detection of SNP TSC0035859
aggtttcgaaaty

SEQ ID NO: 142954 - DNA, 13 bp, Artificial Sequence
  Oligonucleotide for detection of SNP TSC0035859
ratttcgaaacct

SEQ ID NO: 142955 - DNA, 13 bp, Artificial Sequence
  Oligonucleotide for detection of SNP TSC0035861
tgtagggtgaagy

SEQ ID NO: 142956 - DNA, 13 bp, Artificial Sequence
  Oligonucleotide for detection of SNP TSC0035861
rcttcaccctaca

SEQ ID NO: 142957 - DNA, 13 bp, Artificial Sequence
  Oligonucleotide for detection of SNP TSC0035861
tgtaggatgaagy

SEQ ID NO: 142958 - DNA, 13 bp, Artificial Sequence
  Oligonucleotide for detection of SNP TSC0035861
rcttcatcctaca

SEQ ID NO: 142959 - DNA, 13 bp, Artificial Sequence
  Oligonucleotide for detection of SNP TSC0035861
cgtagggtgaagy

SEQ ID NO: 142960 - DNA, 13 bp, Artificial Sequence
  Oligonucleotide for detection of SNP TSC0035861
rcttcaccctacg

SEQ ID NO: 142961 - DNA, 13 bp, Artificial Sequence
  Oligonucleotide for detection of SNP TSC0035861
cgtaggatgaagy

SEQ ID NO: 142962 - DNA, 13 bp, Artificial Sequence
  Oligonucleotide for detection of SNP TSC0035861
rcttcatcctacg

SEQ ID NO: 142963 - DNA, 13 bp, Artificial Sequence
  Oligonucleotide for detection of SNP TSC0035861
tgtagggcgaagy

SEQ ID NO: 142964 - DNA, 13 bp, Artificial Sequence
  Oligonucleotide for detection of SNP TSC0035861
rcttcgccctaca

SEQ ID NO: 142965 - DNA, 13 bp, Artificial Sequence
  Oligonucleotide for detection of SNP TSC0035861
tgtaggacgaagy

SEQ ID NO: 142966 - DNA, 13 bp, Artificial Sequence
  Oligonucleotide for detection of SNP TSC0035861
rcttcgtcctaca

SEQ ID NO: 142967 - DNA, 13 bp, Artificial Sequence
  Oligonucleotide for detection of SNP TSC0035861
cgtagggcgaagy

SEQ ID NO: 142968 - DNA, 13 bp, Artificial Sequence
  Oligonucleotide for detection of SNP TSC0035861
rcttcgccctacg

SEQ ID NO: 142969 - DNA, 13 bp, Artificial Sequence
  Oligonucleotide for detection of SNP TSC0035861
cgtaggacgaagy

SEQ ID NO: 142970 - DNA, 13 bp, Artificial Sequence
  Oligonucleotide for detection of SNP TSC0035861
rcttcgtcctacg

SEQ ID NO: 142971 - DNA, 13 bp, Artificial Sequence
  Oligonucleotide for detection of SNP TSC0035862
tagggtatagagg

SEQ ID NO: 142972 - DNA, 13 bp, Artificial Sequence
  Oligonucleotide for detection of SNP TSC0035862
cctctatacccta

SEQ ID NO: 142973 - DNA, 13 bp, Artificial Sequence
  Oligonucleotide for detection of SNP TSC0035862
tagggtgtagagg

SEQ ID NO: 142974 - DNA, 13 bp, Artificial Sequence
  Oligonucleotide for detection of SNP TSC0035862
cctctacacccta

SEQ ID NO: 142975 - DNA, 13 bp, Artificial Sequence
  Oligonucleotide for detection of SNP TSC0035862
tagggcgtagagg

SEQ ID NO: 142976 - DNA, 13 bp, Artificial Sequence
  Oligonucleotide for detection of SNP TSC0035862
cctctacgcccta

SEQ ID NO: 142977 - DNA, 13 bp, Artificial Sequence
  Oligonucleotide for detection of SNP TSC0035869
tagtaattaggta

SEQ ID NO: 142978 - DNA, 13 bp, Artificial Sequence
  Oligonucleotide for detection of SNP TSC0035869
tacctaattacta

SEQ ID NO: 142979 - DNA, 13 bp, Artificial Sequence
  Oligonucleotide for detection of SNP TSC0035869
tagtaagtaggta

SEQ ID NO: 142980 - DNA, 13 bp, Artificial Sequence
  Oligonucleotide for detection of SNP TSC0035869
tacctacttacta

SEQ ID NO: 142981 - DNA, 13 bp, Artificial Sequence
  Oligonucleotide for detection of SNP TSC0035870
tttgggtgagaga

SEQ ID NO: 142982 - DNA, 13 bp, Artificial Sequence
  Oligonucleotide for detection of SNP TSC0035870
tctctcacccaaa

SEQ ID NO: 142983 - DNA, 13 bp, Artificial Sequence
  Oligonucleotide for detection of SNP TSC0035870
tttgggcgagaga

SEQ ID NO: 142984 - DNA, 13 bp, Artificial Sequence
  Oligonucleotide for detection of SNP TSC0035870
tctctcgcccaaa

SEQ ID NO: 142985 - DNA, 13 bp, Artificial Sequence
  Oligonucleotide for detection of SNP TSC0035881
aatttttaaatga

SEQ ID NO: 142986 - DNA, 13 bp, Artificial Sequence
  Oligonucleotide for detection of SNP TSC0035881
tcatttaaaaatt

SEQ ID NO: 142987 - DNA, 13 bp, Artificial Sequence
  Oligonucleotide for detection of SNP TSC0035881
aattttgaaatga

SEQ ID NO: 142988 - DNA, 13 bp, Artificial Sequence
  Oligonucleotide for detection of SNP TSC0035881
tcatttcaaaatt

SEQ ID NO: 142989 - DNA, 13 bp, Artificial Sequence
  Oligonucleotide for detection of SNP TSC0035881
ttatttgaggatt

SEQ ID NO: 142990 - DNA, 13 bp, Artificial Sequence
  Oligonucleotide for detection of SNP TSC0035881
aatcctcaaataa

SEQ ID NO: 142991 - DNA, 13 bp, Artificial Sequence
  Oligonucleotide for detection of SNP TSC0035881
ttattttaggatt

SEQ ID NO: 142992 - DNA, 13 bp, Artificial Sequence
  Oligonucleotide for detection of SNP TSC0035881
aatcctaaaataa

SEQ ID NO: 142993 - DNA, 13 bp, Artificial Sequence
  Oligonucleotide for detection of SNP TSC0035882
tttttgatttagy

SEQ ID NO: 142994 - DNA, 13 bp, Artificial Sequence
  Oligonucleotide for detection of SNP TSC0035882
rctaaatcaaaaa

SEQ ID NO: 142995 - DNA, 13 bp, Artificial Sequence
  Oligonucleotide for detection of SNP TSC0035882
gttgagttagaag

SEQ ID NO: 142996 - DNA, 13 bp, Artificial Sequence
  Oligonucleotide for detection of SNP TSC0035882
cttctaactcaac

SEQ ID NO: 142997 - DNA, 13 bp, Artificial Sequence
  Oligonucleotide for detection of SNP TSC0035882
gttgaggtagaag

SEQ ID NO: 142998 - DNA, 13 bp, Artificial Sequence
  Oligonucleotide for detection of SNP TSC0035882
cttctacctcaac

SEQ ID NO: 142999 - DNA, 13 bp, Artificial Sequence
  Oligonucleotide for detection of SNP TSC0035883
tgaattttgtaty

SEQ ID NO: 143000 - DNA, 13 bp, Artificial Sequence
  Oligonucleotide for detection of SNP TSC0035883
ratacaaaattca

SEQ ID NO: 143001 - DNA, 13 bp, Artificial Sequence
  Oligonucleotide for detection of SNP TSC0035883
tgaattgtgtaty

SEQ ID NO: 143002 - DNA, 13 bp, Artificial Sequence
  Oligonucleotide for detection of SNP TSC0035883
ratacacaattca

SEQ ID NO: 143003 - DNA, 13 bp, Artificial Sequence
  Oligonucleotide for detection of SNP TSC0035883
tgaatttcgtaty

SEQ ID NO: 143004 - DNA, 13 bp, Artificial Sequence
  Oligonucleotide for detection of SNP TSC0035883
ratacgaaattca

SEQ ID NO: 143005 - DNA, 13 bp, Artificial Sequence
  Oligonucleotide for detection of SNP TSC0035883
tgaattgcgtaty

SEQ ID NO: 143006 - DNA, 13 bp, Artificial Sequence
  Oligonucleotide for detection of SNP TSC0035883
ratacgcaattca

SEQ ID NO: 143007 - DNA, 13 bp, Artificial Sequence
  Oligonucleotide for detection of SNP TSC0035883
gatatggagttta

SEQ ID NO: 143008 - DNA, 13 bp, Artificial Sequence
  Oligonucleotide for detection of SNP TSC0035883
taaactccatatc

SEQ ID NO: 143009 - DNA, 13 bp, Artificial Sequence
  Oligonucleotide for detection of SNP TSC0035883
gatatgtagttta

SEQ ID NO: 143010 - DNA, 13 bp, Artificial Sequence
  Oligonucleotide for detection of SNP TSC0035883
taaactacatatc

SEQ ID NO: 143011 - DNA, 13 bp, Artificial Sequence
  Oligonucleotide for detection of SNP TSC0035883
gatacggagttta

SEQ ID NO: 143012 - DNA, 13 bp, Artificial Sequence
  Oligonucleotide for detection of SNP TSC0035883
taaactccgtatc

SEQ ID NO: 143013 - DNA, 13 bp, Artificial Sequence
  Oligonucleotide for detection of SNP TSC0035883
gatacgtagttta

SEQ ID NO: 143014 - DNA, 13 bp, Artificial Sequence
  Oligonucleotide for detection of SNP TSC0035883
taaactacgtatc

SEQ ID NO: 143015 - DNA, 13 bp, Artificial Sequence
  Oligonucleotide for detection of SNP TSC0035884
tgggatttggtga

SEQ ID NO: 143016 - DNA, 13 bp, Artificial Sequence
  Oligonucleotide for detection of SNP TSC0035884
tcaccaaatccca

SEQ ID NO: 143017 - DNA, 13 bp, Artificial Sequence
  Oligonucleotide for detection of SNP TSC0035884
tgggatgtggtga

SEQ ID NO: 143018 - DNA, 13 bp, Artificial Sequence
  Oligonucleotide for detection of SNP TSC0035884
tcaccacatccca

SEQ ID NO: 143019 - DNA, 13 bp, Artificial Sequence
  Oligonucleotide for detection of SNP TSC0035884
cgggatttggtga

SEQ ID NO: 143020 - DNA, 13 bp, Artificial Sequence
  Oligonucleotide for detection of SNP TSC0035884
tcaccaaatcccg

SEQ ID NO: 143021 - DNA, 13 bp, Artificial Sequence
  Oligonucleotide for detection of SNP TSC0035884
cgggatgtggtga

SEQ ID NO: 143022 - DNA, 13 bp, Artificial Sequence
  Oligonucleotide for detection of SNP TSC0035884
tcaccacatcccg

SEQ ID NO: 143023 - DNA, 13 bp, Artificial Sequence
  Oligonucleotide for detection of SNP TSC0035884
tgggattcggtga

SEQ ID NO: 143024 - DNA, 13 bp, Artificial Sequence
  Oligonucleotide for detection of SNP TSC0035884
tcaccgaatccca

SEQ ID NO: 143025 - DNA, 13 bp, Artificial Sequence
  Oligonucleotide for detection of SNP TSC0035884
tgggacgtggtga

SEQ ID NO: 143026 - DNA, 13 bp, Artificial Sequence
  Oligonucleotide for detection of SNP TSC0035884
tcaccacgtccca

SEQ ID NO: 143027 - DNA, 13 bp, Artificial Sequence
  Oligonucleotide for detection of SNP TSC0035884
cgggattcggtga

SEQ ID NO: 143028 - DNA, 13 bp, Artificial Sequence
  Oligonucleotide for detection of SNP TSC0035884
tcaccgaatcccg

SEQ ID NO: 143029 - DNA, 13 bp, Artificial Sequence
  Oligonucleotide for detection of SNP TSC0035884
tgggatgcggtga

SEQ ID NO: 143030 - DNA, 13 bp, Artificial Sequence
  Oligonucleotide for detection of SNP TSC0035884
tcaccgcatccca

SEQ ID NO: 143031 - DNA, 13 bp, Artificial Sequence
  Oligonucleotide for detection of SNP TSC0035884
cgggacgtggtga

SEQ ID NO: 143032 - DNA, 13 bp, Artificial Sequence
  Oligonucleotide for detection of SNP TSC0035884
tcaccacgtcccg

SEQ ID NO: 143033 - DNA, 13 bp, Artificial Sequence
  Oligonucleotide for detection of SNP TSC0035884
cgggatgcggtga

SEQ ID NO: 143034 - DNA, 13 bp, Artificial Sequence
  Oligonucleotide for detection of SNP TSC0035884
tcaccgcatcccg

SEQ ID NO: 143035 - DNA, 13 bp, Artificial Sequence
  Oligonucleotide for detection of SNP TSC0035884
tgggacgcggtga

SEQ ID NO: 143036 - DNA, 13 bp, Artificial Sequence
  Oligonucleotide for detection of SNP TSC0035884
tcaccgcgtccca

SEQ ID NO: 143037 - DNA, 13 bp, Artificial Sequence
  Oligonucleotide for detection of SNP TSC0035884
cgggacgcggtga

SEQ ID NO: 143038 - DNA, 13 bp, Artificial Sequence
  Oligonucleotide for detection of SNP TSC0035884
tcaccgcgtcccg

SEQ ID NO: 143039 - DNA, 13 bp, Artificial Sequence
  Oligonucleotide for detection of SNP TSC0035884
ttattgggttttg

SEQ ID NO: 143040 - DNA, 13 bp, Artificial Sequence
  Oligonucleotide for detection of SNP TSC0035884
caaaacccaataa

SEQ ID NO: 143041 - DNA, 13 bp, Artificial Sequence
  Oligonucleotide for detection of SNP TSC0035884
ttatcgggttttg

SEQ ID NO: 143042 - DNA, 13 bp, Artificial Sequence
  Oligonucleotide for detection of SNP TSC0035884
caaaacccgataa

SEQ ID NO: 143043 - DNA, 13 bp, Artificial Sequence
  Oligonucleotide for detection of SNP TSC0035884
ttatcgtgttttg

SEQ ID NO: 143044 - DNA, 13 bp, Artificial Sequence
  Oligonucleotide for detection of SNP TSC0035884
caaaacacgataa

SEQ ID NO: 143045 - DNA, 13 bp, Artificial Sequence
  Oligonucleotide for detection of SNP TSC0035884
ttattgggtttcg

SEQ ID NO: 143046 - DNA, 13 bp, Artificial Sequence
  Oligonucleotide for detection of SNP TSC0035884
cgaaacccaataa

SEQ ID NO: 143047 - DNA, 13 bp, Artificial Sequence
  Oligonucleotide for detection of SNP TSC0035884
ttatcgggtttcg

SEQ ID NO: 143048 - DNA, 13 bp, Artificial Sequence
  Oligonucleotide for detection of SNP TSC0035884
cgaaacccgataa

SEQ ID NO: 143049 - DNA, 13 bp, Artificial Sequence
  Oligonucleotide for detection of SNP TSC0035884
ttattgtgtttcg

SEQ ID NO: 143050 - DNA, 13 bp, Artificial Sequence
  Oligonucleotide for detection of SNP TSC0035884
cgaaacacaataa

SEQ ID NO: 143051 - DNA, 13 bp, Artificial Sequence
  Oligonucleotide for detection of SNP TSC0035884
ttatcgcgttttg

SEQ ID NO: 143052 - DNA, 13 bp, Artificial Sequence
  Oligonucleotide for detection of SNP TSC0035884
caaaacgcgataa

SEQ ID NO: 143053 - DNA, 13 bp, Artificial Sequence
  Oligonucleotide for detection of SNP TSC0035884
ttatcgtgtttcg

SEQ ID NO: 143054 - DNA, 13 bp, Artificial Sequence
  Oligonucleotide for detection of SNP TSC0035884
cgaaacacgataa

SEQ ID NO: 143055 - DNA, 13 bp, Artificial Sequence
  Oligonucleotide for detection of SNP TSC0035884
ttattgcgtttcg

SEQ ID NO: 143056 - DNA, 13 bp, Artificial Sequence
  Oligonucleotide for detection of SNP TSC0035884
cgaaacgcaataa

SEQ ID NO: 143057 - DNA, 13 bp, Artificial Sequence
  Oligonucleotide for detection of SNP TSC0035884
ttatcgcgtttcg

SEQ ID NO: 143058 - DNA, 13 bp, Artificial Sequence
  Oligonucleotide for detection of SNP TSC0035884
cgaaacgcgataa

SEQ ID NO: 143059 - DNA, 13 bp, Artificial Sequence
  Oligonucleotide for detection of SNP TSC0035885
taattatggttty

SEQ ID NO: 143060 - DNA, 13 bp, Artificial Sequence
  Oligonucleotide for detection of SNP TSC0035885
raaaccataatta

SEQ ID NO: 143061 - DNA, 13 bp, Artificial Sequence
  Oligonucleotide for detection of SNP TSC0035885
taattacggttty

SEQ ID NO: 143062 - DNA, 13 bp, Artificial Sequence
  Oligonucleotide for detection of SNP TSC0035885
raaaccgtaatta

SEQ ID NO: 143063 - DNA, 13 bp, Artificial Sequence
  Oligonucleotide for detection of SNP TSC0035885
gaagttgtgattg

SEQ ID NO: 143064 - DNA, 13 bp, Artificial Sequence
  Oligonucleotide for detection of SNP TSC0035885
caatcacaacttc

SEQ ID NO: 143065 - DNA, 13 bp, Artificial Sequence
  Oligonucleotide for detection of SNP TSC0035885
gaagttatgattg

SEQ ID NO: 143066 - DNA, 13 bp, Artificial Sequence
  Oligonucleotide for detection of SNP TSC0035885
caatcataacttc

SEQ ID NO: 143067 - DNA, 13 bp, Artificial Sequence
  Oligonucleotide for detection of SNP TSC0035885
gaagtcgtgattg

SEQ ID NO: 143068 - DNA, 13 bp, Artificial Sequence
  Oligonucleotide for detection of SNP TSC0035885
caatcacgacttc

SEQ ID NO: 143069 - DNA, 13 bp, Artificial Sequence
  Oligonucleotide for detection of SNP TSC0035886
gggaggtaattga

SEQ ID NO: 143070 - DNA, 13 bp, Artificial Sequence
  Oligonucleotide for detection of SNP TSC0035886
tcaattacctccc

SEQ ID NO: 143071 - DNA, 13 bp, Artificial Sequence
  Oligonucleotide for detection of SNP TSC0035886
gggaggaaattga

SEQ ID NO: 143072 - DNA, 13 bp, Artificial Sequence
  Oligonucleotide for detection of SNP TSC0035886
tcaatttcctccc

SEQ ID NO: 143073 - DNA, 13 bp, Artificial Sequence
  Oligonucleotide for detection of SNP TSC0035889
ataaaggtttaga

SEQ ID NO: 143074 - DNA, 13 bp, Artificial Sequence
  Oligonucleotide for detection of SNP TSC0035889
tctaaacctttat

SEQ ID NO: 143075 - DNA, 13 bp, Artificial Sequence
  Oligonucleotide for detection of SNP TSC0035889
ataaagttttaga

SEQ ID NO: 143076 - DNA, 13 bp, Artificial Sequence
  Oligonucleotide for detection of SNP TSC0035889
tctaaaactttat

SEQ ID NO: 143077 - DNA, 13 bp, Artificial Sequence
  Oligonucleotide for detection of SNP TSC0035889
tttgggtttttgt

SEQ ID NO: 143078 - DNA, 13 bp, Artificial Sequence
  Oligonucleotide for detection of SNP TSC0035889
acaaaaacccaaa

SEQ ID NO: 143079 - DNA, 13 bp, Artificial Sequence
  Oligonucleotide for detection of SNP TSC0035889
tttgggattttgt

SEQ ID NO: 143080 - DNA, 13 bp, Artificial Sequence
  Oligonucleotide for detection of SNP TSC0035889
acaaaatcccaaa

SEQ ID NO: 143081 - DNA, 13 bp, Artificial Sequence
  Oligonucleotide for detection of SNP TSC0035890
agatttgaaaaty

SEQ ID NO: 143082 - DNA, 13 bp, Artificial Sequence
  Oligonucleotide for detection of SNP TSC0035890
rattttcaaatct

SEQ ID NO: 143083 - DNA, 13 bp, Artificial Sequence
  Oligonucleotide for detection of SNP TSC0035890
agattttaaaaty

SEQ ID NO: 143084 - DNA, 13 bp, Artificial Sequence
  Oligonucleotide for detection of SNP TSC0035890
rattttaaaatct

SEQ ID NO: 143085 - DNA, 13 bp, Artificial Sequence
  Oligonucleotide for detection of SNP TSC0035890
agattcgaaaaty

SEQ ID NO: 143086 - DNA, 13 bp, Artificial Sequence
  Oligonucleotide for detection of SNP TSC0035890
rattttcgaatct

SEQ ID NO: 143087 - DNA, 13 bp, Artificial Sequence
  Oligonucleotide for detection of SNP TSC0035890
gatttttggattt

SEQ ID NO: 143088 - DNA, 13 bp, Artificial Sequence
  Oligonucleotide for detection of SNP TSC0035890
aaatccaaaaatc

SEQ ID NO: 143089 - DNA, 13 bp, Artificial Sequence
  Oligonucleotide for detection of SNP TSC0035890
gattttaggattt

SEQ ID NO: 143090 - DNA, 13 bp, Artificial Sequence
  Oligonucleotide for detection of SNP TSC0035890
aaatcctaaaatc

SEQ ID NO: 143091 - DNA, 13 bp, Artificial Sequence
  Oligonucleotide for detection of SNP TSC0035890
gattttcggattt

SEQ ID NO: 143092 - DNA, 13 bp, Artificial Sequence
  Oligonucleotide for detection of SNP TSC0035890
aaatccgaaaatc

SEQ ID NO: 143093 - DNA, 13 bp, Artificial Sequence
  Oligonucleotide for detection of SNP TSC0035891
agtagatgttaaa

SEQ ID NO: 143094 - DNA, 13 bp, Artificial Sequence
  Oligonucleotide for detection of SNP TSC0035891
tttaacatctact

SEQ ID NO: 143095 - DNA, 13 bp, Artificial Sequence
  Oligonucleotide for detection of SNP TSC0035891
agtagacgttaaa

SEQ ID NO: 143096 - DNA, 13 bp, Artificial Sequence
  Oligonucleotide for detection of SNP TSC0035891
tttaacgtctact

SEQ ID NO: 143097 - DNA, 13 bp, Artificial Sequence
  Oligonucleotide for detection of SNP TSC0035891
tttggtgtttgtt

SEQ ID NO: 143098 - DNA, 13 bp, Artificial Sequence
  Oligonucleotide for detection of SNP TSC0035891
aacaaacaccaaa

SEQ ID NO: 143099 - DNA, 13 bp, Artificial Sequence
  Oligonucleotide for detection of SNP TSC0035891
tttggtatttgtt

SEQ ID NO: 143100 - DNA, 13 bp, Artificial Sequence
  Oligonucleotide for detection of SNP TSC0035891
aacaaataccaaa

SEQ ID NO: 143101 - DNA, 13 bp, Artificial Sequence
  Oligonucleotide for detection of SNP TSC0035891
tttggcgtttgtt

SEQ ID NO: 143102 - DNA, 13 bp, Artificial Sequence
  Oligonucleotide for detection of SNP TSC0035891
aacaaacgccaaa

SEQ ID NO: 143103 - DNA, 13 bp, Artificial Sequence
  Oligonucleotide for detection of SNP TSC0035892
tttttatggggaa

SEQ ID NO: 143104 - DNA, 13 bp, Artificial Sequence
  Oligonucleotide for detection of SNP TSC0035892
ttccccataaaaa

SEQ ID NO: 143105 - DNA, 13 bp, Artificial Sequence
  Oligonucleotide for detection of SNP TSC0035892
tttttacggggaa

SEQ ID NO: 143106 - DNA, 13 bp, Artificial Sequence
  Oligonucleotide for detection of SNP TSC0035892
ttccccgtaaaaa

SEQ ID NO: 143107 - DNA, 13 bp, Artificial Sequence
  Oligonucleotide for detection of SNP TSC0035892
ttttttgtagaga

SEQ ID NO: 143108 - DNA, 13 bp, Artificial Sequence
  Oligonucleotide for detection of SNP TSC0035892
tctctacaaaaaa

SEQ ID NO: 143109 - DNA, 13 bp, Artificial Sequence
  Oligonucleotide for detection of SNP TSC0035892
ttttttatagaga

SEQ ID NO: 143110 - DNA, 13 bp, Artificial Sequence
  Oligonucleotide for detection of SNP TSC0035892
tctctataaaaaa

SEQ ID NO: 143111 - DNA, 13 bp, Artificial Sequence
  Oligonucleotide for detection of SNP TSC0035892
tttttcgtagaga

SEQ ID NO: 143112 - DNA, 13 bp, Artificial Sequence
  Oligonucleotide for detection of SNP TSC0035892
tctctacgaaaaa

SEQ ID NO: 143113 - DNA, 13 bp, Artificial Sequence
  Oligonucleotide for detection of SNP TSC0035894
aaatatatgtatt

SEQ ID NO: 143114 - DNA, 13 bp, Artificial Sequence
  Oligonucleotide for detection of SNP TSC0035894
aatacatatattt

SEQ ID NO: 143115 - DNA, 13 bp, Artificial Sequence
  Oligonucleotide for detection of SNP TSC0035894
aaatatgtgtatt

SEQ ID NO: 143116 - DNA, 13 bp, Artificial Sequence
  Oligonucleotide for detection of SNP TSC0035894
aatacacatattt

SEQ ID NO: 143117 - DNA, 13 bp, Artificial Sequence
  Oligonucleotide for detection of SNP TSC0035894
aaatacgtgtatt

SEQ ID NO: 143118 - DNA, 13 bp, Artificial Sequence
  Oligonucleotide for detection of SNP TSC0035894
aatacacgtattt

SEQ ID NO: 143119 - DNA, 13 bp, Artificial Sequence
  Oligonucleotide for detection of SNP TSC0035894
aatgtatgtgttt

SEQ ID NO: 143120 - DNA, 13 bp, Artificial Sequence
  Oligonucleotide for detection of SNP TSC0035894
aaacacatacatt

SEQ ID NO: 143121 - DNA, 13 bp, Artificial Sequence
  Oligonucleotide for detection of SNP TSC0035894
aatgtacgtgttt

SEQ ID NO: 143122 - DNA, 13 bp, Artificial Sequence
  Oligonucleotide for detection of SNP TSC0035894
aaacacgtacatt

SEQ ID NO: 143123 - DNA, 13 bp, Artificial Sequence
  Oligonucleotide for detection of SNP TSC0035899
aagagagatagag

SEQ ID NO: 143124 - DNA, 13 bp, Artificial Sequence
  Oligonucleotide for detection of SNP TSC0035899
ctctatctctctt

SEQ ID NO: 143125 - DNA, 13 bp, Artificial Sequence
  Oligonucleotide for detection of SNP TSC0035899
aagagaaatagag

SEQ ID NO: 143126 - DNA, 13 bp, Artificial Sequence
  Oligonucleotide for detection of SNP TSC0035899
ctctatttctctt

SEQ ID NO: 143127 - DNA, 13 bp, Artificial Sequence
  Oligonucleotide for detection of SNP TSC0035902
atttaagaaaaaa

SEQ ID NO: 143128 - DNA, 13 bp, Artificial Sequence
  Oligonucleotide for detection of SNP TSC0035902
ttttttcttaaat

SEQ ID NO: 143129 - DNA, 13 bp, Artificial Sequence
  Oligonucleotide for detection of SNP TSC0035902
atttaaaaaaaaa

SEQ ID NO: 143130 - DNA, 13 bp, Artificial Sequence
  Oligonucleotide for detection of SNP TSC0035902
tttttttttaaat

SEQ ID NO: 143131 - DNA, 13 bp, Artificial Sequence
  Oligonucleotide for detection of SNP TSC0035903
agattaggaataa

SEQ ID NO: 143132 - DNA, 13 bp, Artificial Sequence
  Oligonucleotide for detection of SNP TSC0035903
ttattcctaatct

SEQ ID NO: 143133 - DNA, 13 bp, Artificial Sequence
  Oligonucleotide for detection of SNP TSC0035903
agattatgaataa

SEQ ID NO: 143134 - DNA, 13 bp, Artificial Sequence
  Oligonucleotide for detection of SNP TSC0035903
ttattcataatct

SEQ ID NO: 143135 - DNA, 13 bp, Artificial Sequence
  Oligonucleotide for detection of SNP TSC0035903
ttatttttgattt

SEQ ID NO: 143136 - DNA, 13 bp, Artificial Sequence
  Oligonucleotide for detection of SNP TSC0035903
aaatcaaaaataa

SEQ ID NO: 143137 - DNA, 13 bp, Artificial Sequence
  Oligonucleotide for detection of SNP TSC0035903
ttatttatgattt

SEQ ID NO: 143138 - DNA, 13 bp, Artificial Sequence
  Oligonucleotide for detection of SNP TSC0035903
aaatcataaataa

SEQ ID NO: 143139 - DNA, 13 bp, Artificial Sequence
  Oligonucleotide for detection of SNP TSC0035904
tagattgttagtt

SEQ ID NO: 143140 - DNA, 13 bp, Artificial Sequence
  Oligonucleotide for detection of SNP TSC0035904
aactaacaatcta

SEQ ID NO: 143141 - DNA, 13 bp, Artificial Sequence
  Oligonucleotide for detection of SNP TSC0035904
tagattattagtt

SEQ ID NO: 143142 - DNA, 13 bp, Artificial Sequence
  Oligonucleotide for detection of SNP TSC0035904
aactaataatcta

SEQ ID NO: 143143 - DNA, 13 bp, Artificial Sequence
  Oligonucleotide for detection of SNP TSC0035905
tggaatgtgaaay

SEQ ID NO: 143144 - DNA, 13 bp, Artificial Sequence
  Oligonucleotide for detection of SNP TSC0035905
rtttcacattcca

SEQ ID NO: 143145 - DNA, 13 bp, Artificial Sequence
  Oligonucleotide for detection of SNP TSC0035905
tggaatatgaaay

SEQ ID NO: 143146 - DNA, 13 bp, Artificial Sequence
  Oligonucleotide for detection of SNP TSC0035905
rtttcatattcca

SEQ ID NO: 143147 - DNA, 13 bp, Artificial Sequence
  Oligonucleotide for detection of SNP TSC0035905
cggaatgtgaaay

SEQ ID NO: 143148 - DNA, 13 bp, Artificial Sequence
  Oligonucleotide for detection of SNP TSC0035905
rtttcacattccg

SEQ ID NO: 143149 - DNA, 13 bp, Artificial Sequence
  Oligonucleotide for detection of SNP TSC0035905
cggaatatgaaay

SEQ ID NO: 143150 - DNA, 13 bp, Artificial Sequence
  Oligonucleotide for detection of SNP TSC0035905
rtttcatattccg

SEQ ID NO: 143151 - DNA, 13 bp, Artificial Sequence
  Oligonucleotide for detection of SNP TSC0035906
atattttttttgg

SEQ ID NO: 143152 - DNA, 13 bp, Artificial Sequence
  Oligonucleotide for detection of SNP TSC0035906
ccaaaaaaaatat

SEQ ID NO: 143153 - DNA, 13 bp, Artificial Sequence
  Oligonucleotide for detection of SNP TSC0035906
ttagaatgaatat

SEQ ID NO: 143154 - DNA, 13 bp, Artificial Sequence
  Oligonucleotide for detection of SNP TSC0035906
atattcattctaa

SEQ ID NO: 143155 - DNA, 13 bp, Artificial Sequence
  Oligonucleotide for detection of SNP TSC0035906
ttagaaggaatat

SEQ ID NO: 143156 - DNA, 13 bp, Artificial Sequence
  Oligonucleotide for detection of SNP TSC0035906
atattccttctaa

SEQ ID NO: 143157 - DNA, 13 bp, Artificial Sequence
  Oligonucleotide for detection of SNP TSC0035907
tgtattatgtaat

SEQ ID NO: 143158 - DNA, 13 bp, Artificial Sequence
  Oligonucleotide for detection of SNP TSC0035907
attacataataca

SEQ ID NO: 143159 - DNA, 13 bp, Artificial Sequence
  Oligonucleotide for detection of SNP TSC0035907
tgtattttgtaat

SEQ ID NO: 143160 - DNA, 13 bp, Artificial Sequence
  Oligonucleotide for detection of SNP TSC0035907
attacaaaataca

SEQ ID NO: 143161 - DNA, 13 bp, Artificial Sequence
  Oligonucleotide for detection of SNP TSC0035907
attatataatgta

SEQ ID NO: 143162 - DNA, 13 bp, Artificial Sequence
  Oligonucleotide for detection of SNP TSC0035907
tacattatataat

SEQ ID NO: 143163 - DNA, 13 bp, Artificial Sequence
  Oligonucleotide for detection of SNP TSC0035907
attatagaatgta

SEQ ID NO: 143164 - DNA, 13 bp, Artificial Sequence
  Oligonucleotide for detection of SNP TSC0035907
tacattctataat

SEQ ID NO: 143165 - DNA, 13 bp, Artificial Sequence
  Oligonucleotide for detection of SNP TSC0035912
gaggttgaggtat

SEQ ID NO: 143166 - DNA, 13 bp, Artificial Sequence
  Oligonucleotide for detection of SNP TSC0035912
atacctcaacctc

SEQ ID NO: 143167 - DNA, 13 bp, Artificial Sequence
  Oligonucleotide for detection of SNP TSC0035912
gaggttaaggtat

SEQ ID NO: 143168 - DNA, 13 bp, Artificial Sequence
  Oligonucleotide for detection of SNP TSC0035912
ataccttaacctc

SEQ ID NO: 143169 - DNA, 13 bp, Artificial Sequence
  Oligonucleotide for detection of SNP TSC0035912
gaggtcgaggtat

SEQ ID NO: 143170 - DNA, 13 bp, Artificial Sequence
  Oligonucleotide for detection of SNP TSC0035912
atacctcgacctc

SEQ ID NO: 143171 - DNA, 13 bp, Artificial Sequence
  Oligonucleotide for detection of SNP TSC0035913
gaagagtgagatt

SEQ ID NO: 143172 - DNA, 13 bp, Artificial Sequence
  Oligonucleotide for detection of SNP TSC0035913
aatctcactcttc

SEQ ID NO: 143173 - DNA, 13 bp, Artificial Sequence
  Oligonucleotide for detection of SNP TSC0035913
gaagagcgagatt

SEQ ID NO: 143174 - DNA, 13 bp, Artificial Sequence
  Oligonucleotide for detection of SNP TSC0035913
aatctcgctcttc

SEQ ID NO: 143175 - DNA, 13 bp, Artificial Sequence
  Oligonucleotide for detection of SNP TSC0035914
atattaatatagy

SEQ ID NO: 143176 - DNA, 13 bp, Artificial Sequence
  Oligonucleotide for detection of SNP TSC0035914
rctatattaatat

SEQ ID NO: 143177 - DNA, 13 bp, Artificial Sequence
  Oligonucleotide for detection of SNP TSC0035914
atattattatagy

SEQ ID NO: 143178 - DNA, 13 bp, Artificial Sequence
  Oligonucleotide for detection of SNP TSC0035914
rctataataatat

SEQ ID NO: 143179 - DNA, 13 bp, Artificial Sequence
  Oligonucleotide for detection of SNP TSC0035914
gttatgttaatgt

SEQ ID NO: 143180 - DNA, 13 bp, Artificial Sequence
  Oligonucleotide for detection of SNP TSC0035914
acattaacataac

SEQ ID NO: 143181 - DNA, 13 bp, Artificial Sequence
  Oligonucleotide for detection of SNP TSC0035914
gttatgataatgt

SEQ ID NO: 143182 - DNA, 13 bp, Artificial Sequence
  Oligonucleotide for detection of SNP TSC0035914
acattatcataac

SEQ ID NO: 143183 - DNA, 13 bp, Artificial Sequence
  Oligonucleotide for detection of SNP TSC0035918
ggggttaggggaa

SEQ ID NO: 143184 - DNA, 13 bp, Artificial Sequence
  Oligonucleotide for detection of SNP TSC0035918
ttcccctaacccc

SEQ ID NO: 143185 - DNA, 13 bp, Artificial Sequence
  Oligonucleotide for detection of SNP TSC0035918
ggggttgggggaa

SEQ ID NO: 143186 - DNA, 13 bp, Artificial Sequence
  Oligonucleotide for detection of SNP TSC0035918
ttcccccaacccc

SEQ ID NO: 143187 - DNA, 13 bp, Artificial Sequence
  Oligonucleotide for detection of SNP TSC0035918
ggggtcgggggaa

SEQ ID NO: 143188 - DNA, 13 bp, Artificial Sequence
  Oligonucleotide for detection of SNP TSC0035918
ttcccccgacccc

SEQ ID NO: 143189 - DNA, 13 bp, Artificial Sequence
  Oligonucleotide for detection of SNP TSC0035919
ttagaagtttttt

SEQ ID NO: 143190 - DNA, 13 bp, Artificial Sequence
  Oligonucleotide for detection of SNP TSC0035919
aaaaaacttctaa

SEQ ID NO: 143191 - DNA, 13 bp, Artificial Sequence
  Oligonucleotide for detection of SNP TSC0035919
ttagaaatttttt

SEQ ID NO: 143192 - DNA, 13 bp, Artificial Sequence
  Oligonucleotide for detection of SNP TSC0035919
aaaaaatttctaa

SEQ ID NO: 143193 - DNA, 13 bp, Artificial Sequence
  Oligonucleotide for detection of SNP TSC0035931
aaagttgggagga

SEQ ID NO: 143194 - DNA, 13 bp, Artificial Sequence
  Oligonucleotide for detection of SNP TSC0035931
tcctcccaacttt

SEQ ID NO: 143195 - DNA, 13 bp, Artificial Sequence
  Oligonucleotide for detection of SNP TSC0035931
aaagttaggagga

SEQ ID NO: 143196 - DNA, 13 bp, Artificial Sequence
  Oligonucleotide for detection of SNP TSC0035931
tcctcctaacttt

SEQ ID NO: 143197 - DNA, 13 bp, Artificial Sequence
  Oligonucleotide for detection of SNP TSC0035931
aaagtcgggagga

SEQ ID NO: 143198 - DNA, 13 bp, Artificial Sequence
  Oligonucleotide for detection of SNP TSC0035931
tcctcccgacttt

SEQ ID NO: 143199 - DNA, 13 bp, Artificial Sequence
  Oligonucleotide for detection of SNP TSC0035932
ggtatttgggaga

SEQ ID NO: 143200 - DNA, 13 bp, Artificial Sequence
  Oligonucleotide for detection of SNP TSC0035932
tctcccaaatacc

SEQ ID NO: 143201 - DNA, 13 bp, Artificial Sequence
  Oligonucleotide for detection of SNP TSC0035932
ggtattcgggaga

SEQ ID NO: 143202 - DNA, 13 bp, Artificial Sequence
  Oligonucleotide for detection of SNP TSC0035932
tctcccgaatacc

SEQ ID NO: 143203 - DNA, 13 bp, Artificial Sequence
  Oligonucleotide for detection of SNP TSC0035935
tgtggggaataty

SEQ ID NO: 143204 - DNA, 13 bp, Artificial Sequence
  Oligonucleotide for detection of SNP TSC0035935
ratattccccaca

SEQ ID NO: 143205 - DNA, 13 bp, Artificial Sequence
  Oligonucleotide for detection of SNP TSC0035935
tgtgggaaataty

SEQ ID NO: 143206 - DNA, 13 bp, Artificial Sequence
  Oligonucleotide for detection of SNP TSC0035935
ratatttcccaca

SEQ ID NO: 143207 - DNA, 13 bp, Artificial Sequence
  Oligonucleotide for detection of SNP TSC0035935
cgtggggaataty

SEQ ID NO: 143208 - DNA, 13 bp, Artificial Sequence
  Oligonucleotide for detection of SNP TSC0035935
ratattccccacg

SEQ ID NO: 143209 - DNA, 13 bp, Artificial Sequence
  Oligonucleotide for detection of SNP TSC0035935
cgtgggaaataty

SEQ ID NO: 143210 - DNA, 13 bp, Artificial Sequence
  Oligonucleotide for detection of SNP TSC0035935
ratatttcccacg

SEQ ID NO: 143211 - DNA, 13 bp, Artificial Sequence
  Oligonucleotide for detection of SNP TSC0035935
tgcggggaataty

SEQ ID NO: 143212 - DNA, 13 bp, Artificial Sequence
  Oligonucleotide for detection of SNP TSC0035935
ratattccccgca

SEQ ID NO: 143213 - DNA, 13 bp, Artificial Sequence
  Oligonucleotide for detection of SNP TSC0035935
tgcgggaaataty

SEQ ID NO: 143214 - DNA, 13 bp, Artificial Sequence
  Oligonucleotide for detection of SNP TSC0035935
ratatttcccgca

SEQ ID NO: 143215 - DNA, 13 bp, Artificial Sequence
  Oligonucleotide for detection of SNP TSC0035935
cgcggggaataty

SEQ ID NO: 143216 - DNA, 13 bp, Artificial Sequence
  Oligonucleotide for detection of SNP TSC0035935
ratattccccgcg

SEQ ID NO: 143217 - DNA, 13 bp, Artificial Sequence
  Oligonucleotide for detection of SNP TSC0035935
cgcgggaaataty

SEQ ID NO: 143218 - DNA, 13 bp, Artificial Sequence
  Oligonucleotide for detection of SNP TSC0035935
ratatttcccgcg

SEQ ID NO: 143219 - DNA, 13 bp, Artificial Sequence
  Oligonucleotide for detection of SNP TSC0035936
ttgttttgatttg

SEQ ID NO: 143220 - DNA, 13 bp, Artificial Sequence
  Oligonucleotide for detection of SNP TSC0035936
caaatcaaaacaa

SEQ ID NO: 143221 - DNA, 13 bp, Artificial Sequence
  Oligonucleotide for detection of SNP TSC0035936
ttgtttcgatttg

SEQ ID NO: 143222 - DNA, 13 bp, Artificial Sequence
  Oligonucleotide for detection of SNP TSC0035936
caaatcgaaacaa

SEQ ID NO: 143223 - DNA, 13 bp, Artificial Sequence
  Oligonucleotide for detection of SNP TSC0035936
ttgttttgattcg

SEQ ID NO: 143224 - DNA, 13 bp, Artificial Sequence
  Oligonucleotide for detection of SNP TSC0035936
cgaatcaaaacaa

SEQ ID NO: 143225 - DNA, 13 bp, Artificial Sequence
  Oligonucleotide for detection of SNP TSC0035936
ttgtttcgattcg

SEQ ID NO: 143226 - DNA, 13 bp, Artificial Sequence
  Oligonucleotide for detection of SNP TSC0035936
cgaatcgaaacaa

SEQ ID NO: 143227 - DNA, 13 bp, Artificial Sequence
  Oligonucleotide for detection of SNP TSC0035936
tgggttggggtag

SEQ ID NO: 143228 - DNA, 13 bp, Artificial Sequence
  Oligonucleotide for detection of SNP TSC0035936
ctaccccaaccca

SEQ ID NO: 143229 - DNA, 13 bp, Artificial Sequence
  Oligonucleotide for detection of SNP TSC0035936
tgggttagggtag

SEQ ID NO: 143230 - DNA, 13 bp, Artificial Sequence
  Oligonucleotide for detection of SNP TSC0035936
ctaccctaaccca

SEQ ID NO: 143231 - DNA, 13 bp, Artificial Sequence
  Oligonucleotide for detection of SNP TSC0035936
cgggttggggtag

SEQ ID NO: 143232 - DNA, 13 bp, Artificial Sequence
  Oligonucleotide for detection of SNP TSC0035936
ctaccccaacccg

SEQ ID NO: 143233 - DNA, 13 bp, Artificial Sequence
  Oligonucleotide for detection of SNP TSC0035936
cgggttagggtag

SEQ ID NO: 143234 - DNA, 13 bp, Artificial Sequence
  Oligonucleotide for detection of SNP TSC0035936
ctaccctaacccg

SEQ ID NO: 143235 - DNA, 13 bp, Artificial Sequence
  Oligonucleotide for detection of SNP TSC0035936
tgggtcggggtag

SEQ ID NO: 143236 - DNA, 13 bp, Artificial Sequence
  Oligonucleotide for detection of SNP TSC0035936
ctaccccgaccca

SEQ ID NO: 143237 - DNA, 13 bp, Artificial Sequence
  Oligonucleotide for detection of SNP TSC0035936
cgggtcggggtag

SEQ ID NO: 143238 - DNA, 13 bp, Artificial Sequence
  Oligonucleotide for detection of SNP TSC0035936
ctaccccgacccg

SEQ ID NO: 143239 - DNA, 13 bp, Artificial Sequence
  Oligonucleotide for detection of SNP TSC0035937
ttttaagatagag

SEQ ID NO: 143240 - DNA, 13 bp, Artificial Sequence
  Oligonucleotide for detection of SNP TSC0035937
ctctatcttaaaa

SEQ ID NO: 143241 - DNA, 13 bp, Artificial Sequence
  Oligonucleotide for detection of SNP TSC0035937
ttttaaaatagag

SEQ ID NO: 143242 - DNA, 13 bp, Artificial Sequence
  Oligonucleotide for detection of SNP TSC0035937
ctctattttaaaa

SEQ ID NO: 143243 - DNA, 13 bp, Artificial Sequence
  Oligonucleotide for detection of SNP TSC0035938
tggtaagttttga

SEQ ID NO: 143244 - DNA, 13 bp, Artificial Sequence
  Oligonucleotide for detection of SNP TSC0035938
tcaaaacttacca

SEQ ID NO: 143245 - DNA, 13 bp, Artificial Sequence
  Oligonucleotide for detection of SNP TSC0035938
tggtaatttttga

SEQ ID NO: 143246 - DNA, 13 bp, Artificial Sequence
  Oligonucleotide for detection of SNP TSC0035938
tcaaaaattacca

SEQ ID NO: 143247 - DNA, 13 bp, Artificial Sequence
  Oligonucleotide for detection of SNP TSC0035938
ttagggtttgtta

SEQ ID NO: 143248 - DNA, 13 bp, Artificial Sequence
  Oligonucleotide for detection of SNP TSC0035938
taacaaaccctaa

SEQ ID NO: 143249 - DNA, 13 bp, Artificial Sequence
  Oligonucleotide for detection of SNP TSC0035938
ttagggattgtta

SEQ ID NO: 143250 - DNA, 13 bp, Artificial Sequence
  Oligonucleotide for detection of SNP TSC0035938
taacaatccctaa

SEQ ID NO: 143251 - DNA, 13 bp, Artificial Sequence
  Oligonucleotide for detection of SNP TSC0035940
aagtattgtagay

SEQ ID NO: 143252 - DNA, 13 bp, Artificial Sequence
  Oligonucleotide for detection of SNP TSC0035940
rtctacaatactt

SEQ ID NO: 143253 - DNA, 13 bp, Artificial Sequence
  Oligonucleotide for detection of SNP TSC0035940
aagtatcgtagay

SEQ ID NO: 143254 - DNA, 13 bp, Artificial Sequence
  Oligonucleotide for detection of SNP TSC0035940
rtctacgatactt

SEQ ID NO: 143255 - DNA, 13 bp, Artificial Sequence
  Oligonucleotide for detection of SNP TSC0035941
ggttatgtattaa

SEQ ID NO: 143256 - DNA, 13 bp, Artificial Sequence
  Oligonucleotide for detection of SNP TSC0035941
ttaatacataacc

SEQ ID NO: 143257 - DNA, 13 bp, Artificial Sequence
  Oligonucleotide for detection of SNP TSC0035941
ggttatatattaa

SEQ ID NO: 143258 - DNA, 13 bp, Artificial Sequence
  Oligonucleotide for detection of SNP TSC0035941
ttaatatataacc

SEQ ID NO: 143259 - DNA, 13 bp, Artificial Sequence
  Oligonucleotide for detection of SNP TSC0035942
attgagatagaty

SEQ ID NO: 143260 - DNA, 13 bp, Artificial Sequence
  Oligonucleotide for detection of SNP TSC0035942
ratctatctcaat

SEQ ID NO: 143261 - DNA, 13 bp, Artificial Sequence
  Oligonucleotide for detection of SNP TSC0035942
attgaggtagaty

SEQ ID NO: 143262 - DNA, 13 bp, Artificial Sequence
  Oligonucleotide for detection of SNP TSC0035942
ratctacctcaat

SEQ ID NO: 143263 - DNA, 13 bp, Artificial Sequence
  Oligonucleotide for detection of SNP TSC0035943
aaatataatagga

SEQ ID NO: 143264 - DNA, 13 bp, Artificial Sequence
  Oligonucleotide for detection of SNP TSC0035943
tcctattatattt

SEQ ID NO: 143265 - DNA, 13 bp, Artificial Sequence
  Oligonucleotide for detection of SNP TSC0035943
aaatattatagga

SEQ ID NO: 143266 - DNA, 13 bp, Artificial Sequence
  Oligonucleotide for detection of SNP TSC0035943
tcctataatattt

SEQ ID NO: 143267 - DNA, 13 bp, Artificial Sequence
  Oligonucleotide for detection of SNP TSC0035943
ttttatggtgttt

SEQ ID NO: 143268 - DNA, 13 bp, Artificial Sequence
  Oligonucleotide for detection of SNP TSC0035943
aaacaccataaaa

SEQ ID NO: 143269 - DNA, 13 bp, Artificial Sequence
  Oligonucleotide for detection of SNP TSC0035951
attaatggagggt

SEQ ID NO: 143270 - DNA, 13 bp, Artificial Sequence
  Oligonucleotide for detection of SNP TSC0035951
accctccattaat

SEQ ID NO: 143271 - DNA, 13 bp, Artificial Sequence
  Oligonucleotide for detection of SNP TSC0035951
attaattgagggt

SEQ ID NO: 143272 - DNA, 13 bp, Artificial Sequence
  Oligonucleotide for detection of SNP TSC0035951
accctcaattaat

SEQ ID NO: 143273 - DNA, 13 bp, Artificial Sequence
  Oligonucleotide for detection of SNP TSC0035951
attttttattaat

SEQ ID NO: 143274 - DNA, 13 bp, Artificial Sequence
  Oligonucleotide for detection of SNP TSC0035951
attaataaaaaat

SEQ ID NO: 143275 - DNA, 13 bp, Artificial Sequence
  Oligonucleotide for detection of SNP TSC0035951
atttttaattaat

SEQ ID NO: 143276 - DNA, 13 bp, Artificial Sequence
  Oligonucleotide for detection of SNP TSC0035951
attaattaaaaat

SEQ ID NO: 143277 - DNA, 13 bp, Artificial Sequence
  Oligonucleotide for detection of SNP TSC0035954
ttttgggtttaaa

SEQ ID NO: 143278 - DNA, 13 bp, Artificial Sequence
  Oligonucleotide for detection of SNP TSC0035954
tttaaacccaaaa

SEQ ID NO: 143279 - DNA, 13 bp, Artificial Sequence
  Oligonucleotide for detection of SNP TSC0035954
ttttggatttaaa

SEQ ID NO: 143280 - DNA, 13 bp, Artificial Sequence
  Oligonucleotide for detection of SNP TSC0035954
tttaaatccaaaa

SEQ ID NO: 143281 - DNA, 13 bp, Artificial Sequence
  Oligonucleotide for detection of SNP TSC0035956
taattggatttat

SEQ ID NO: 143282 - DNA, 13 bp, Artificial Sequence
  Oligonucleotide for detection of SNP TSC0035956
ataaatccaatta

SEQ ID NO: 143283 - DNA, 13 bp, Artificial Sequence
  Oligonucleotide for detection of SNP TSC0035956
taattgaatttat

SEQ ID NO: 143284 - DNA, 13 bp, Artificial Sequence
  Oligonucleotide for detection of SNP TSC0035956
ataaattcaatta

SEQ ID NO: 143285 - DNA, 13 bp, Artificial Sequence
  Oligonucleotide for detection of SNP TSC0035957
taatatagtgaga

SEQ ID NO: 143286 - DNA, 13 bp, Artificial Sequence
  Oligonucleotide for detection of SNP TSC0035957
tctcactatatta

SEQ ID NO: 143287 - DNA, 13 bp, Artificial Sequence
  Oligonucleotide for detection of SNP TSC0035957
taatatggtgaga

SEQ ID NO: 143288 - DNA, 13 bp, Artificial Sequence
  Oligonucleotide for detection of SNP TSC0035957
tctcaccatatta

SEQ ID NO: 143289 - DNA, 13 bp, Artificial Sequence
  Oligonucleotide for detection of SNP TSC0035957
taatacggtgaga

SEQ ID NO: 143290 - DNA, 13 bp, Artificial Sequence
  Oligonucleotide for detection of SNP TSC0035957
tctcaccgtatta

SEQ ID NO: 143291 - DNA, 13 bp, Artificial Sequence
  Oligonucleotide for detection of SNP TSC0035957
ttttattgtatta

SEQ ID NO: 143292 - DNA, 13 bp, Artificial Sequence
  Oligonucleotide for detection of SNP TSC0035957
taatacaataaaa

SEQ ID NO: 143293 - DNA, 13 bp, Artificial Sequence
  Oligonucleotide for detection of SNP TSC0035957
ttttatcgtatta

SEQ ID NO: 143294 - DNA, 13 bp, Artificial Sequence
  Oligonucleotide for detection of SNP TSC0035957
taatacgataaaa

SEQ ID NO: 143295 - DNA, 13 bp, Artificial Sequence
  Oligonucleotide for detection of SNP TSC0035959
taggaaggttaga

SEQ ID NO: 143296 - DNA, 13 bp, Artificial Sequence
  Oligonucleotide for detection of SNP TSC0035959
tctaaccttccta

SEQ ID NO: 143297 - DNA, 13 bp, Artificial Sequence
  Oligonucleotide for detection of SNP TSC0035959
taggaaagttaga

SEQ ID NO: 143298 - DNA, 13 bp, Artificial Sequence
  Oligonucleotide for detection of SNP TSC0035959
tctaactttccta

SEQ ID NO: 143299 - DNA, 13 bp, Artificial Sequence
  Oligonucleotide for detection of SNP TSC0035960
gttatttggtgty

SEQ ID NO: 143300 - DNA, 13 bp, Artificial Sequence
  Oligonucleotide for detection of SNP TSC0035960
racaccaaataac

SEQ ID NO: 143301 - DNA, 13 bp, Artificial Sequence
  Oligonucleotide for detection of SNP TSC0035960
gttattcggtgty

SEQ ID NO: 143302 - DNA, 13 bp, Artificial Sequence
  Oligonucleotide for detection of SNP TSC0035960
racaccgaataac

SEQ ID NO: 143303 - DNA, 13 bp, Artificial Sequence
  Oligonucleotide for detection of SNP TSC0035960
gttatttggcgty

SEQ ID NO: 143304 - DNA, 13 bp, Artificial Sequence
  Oligonucleotide for detection of SNP TSC0035960
racgccaaataac

SEQ ID NO: 143305 - DNA, 13 bp, Artificial Sequence
  Oligonucleotide for detection of SNP TSC0035960
gttattcggcgty

SEQ ID NO: 143306 - DNA, 13 bp, Artificial Sequence
  Oligonucleotide for detection of SNP TSC0035960
racgccgaataac

SEQ ID NO: 143307 - DNA, 13 bp, Artificial Sequence
  Oligonucleotide for detection of SNP TSC0035960
ggtgttgggtgay

SEQ ID NO: 143308 - DNA, 13 bp, Artificial Sequence
  Oligonucleotide for detection of SNP TSC0035960
rtcacccaacacc

SEQ ID NO: 143309 - DNA, 13 bp, Artificial Sequence
  Oligonucleotide for detection of SNP TSC0035960
ggtgttaggtgay

SEQ ID NO: 143310 - DNA, 13 bp, Artificial Sequence
  Oligonucleotide for detection of SNP TSC0035960
rtcacctaacacc

SEQ ID NO: 143311 - DNA, 13 bp, Artificial Sequence
  Oligonucleotide for detection of SNP TSC0035960
ggcgttgggtgay

SEQ ID NO: 143312 - DNA, 13 bp, Artificial Sequence
  Oligonucleotide for detection of SNP TSC0035960
rtcacccaacgcc

SEQ ID NO: 143313 - DNA, 13 bp, Artificial Sequence
  Oligonucleotide for detection of SNP TSC0035960
ggcgttaggtgay

SEQ ID NO: 143314 - DNA, 13 bp, Artificial Sequence
  Oligonucleotide for detection of SNP TSC0035960
rtcacctaacgcc

SEQ ID NO: 143315 - DNA, 13 bp, Artificial Sequence
  Oligonucleotide for detection of SNP TSC0035960
ggtgtcgggtgay

SEQ ID NO: 143316 - DNA, 13 bp, Artificial Sequence
  Oligonucleotide for detection of SNP TSC0035960
rtcacccgacacc

SEQ ID NO: 143317 - DNA, 13 bp, Artificial Sequence
  Oligonucleotide for detection of SNP TSC0035960
ggcgtcgggtgay

SEQ ID NO: 143318 - DNA, 13 bp, Artificial Sequence
  Oligonucleotide for detection of SNP TSC0035960
rtcacccgacgcc

SEQ ID NO: 143319 - DNA, 13 bp, Artificial Sequence
  Oligonucleotide for detection of SNP TSC0035961
tggaatttagata

SEQ ID NO: 143320 - DNA, 13 bp, Artificial Sequence
  Oligonucleotide for detection of SNP TSC0035961
tatctaaattcca

SEQ ID NO: 143321 - DNA, 13 bp, Artificial Sequence
  Oligonucleotide for detection of SNP TSC0035961
tggaatgtagata

SEQ ID NO: 143322 - DNA, 13 bp, Artificial Sequence
  Oligonucleotide for detection of SNP TSC0035961
tatctacattcca

SEQ ID NO: 143323 - DNA, 13 bp, Artificial Sequence
  Oligonucleotide for detection of SNP TSC0035961
tggaacgtagata

SEQ ID NO: 143324 - DNA, 13 bp, Artificial Sequence
  Oligonucleotide for detection of SNP TSC0035961
tatctacgttcca

SEQ ID NO: 143325 - DNA, 13 bp, Artificial Sequence
  Oligonucleotide for detection of SNP TSC0035961
tatttaggtttta

SEQ ID NO: 143326 - DNA, 13 bp, Artificial Sequence
  Oligonucleotide for detection of SNP TSC0035961
taaaacctaaata

SEQ ID NO: 143327 - DNA, 13 bp, Artificial Sequence
  Oligonucleotide for detection of SNP TSC0035961
tatttatgtttta

SEQ ID NO: 143328 - DNA, 13 bp, Artificial Sequence
  Oligonucleotide for detection of SNP TSC0035961
taaaacataaata

SEQ ID NO: 143329 - DNA, 13 bp, Artificial Sequence
  Oligonucleotide for detection of SNP TSC0035961
tatttacgtttta

SEQ ID NO: 143330 - DNA, 13 bp, Artificial Sequence
  Oligonucleotide for detection of SNP TSC0035961
taaaacgtaaata

SEQ ID NO: 143331 - DNA, 13 bp, Artificial Sequence
  Oligonucleotide for detection of SNP TSC0035962
ttattttgttgaa

SEQ ID NO: 143332 - DNA, 13 bp, Artificial Sequence
  Oligonucleotide for detection of SNP TSC0035962
ttcaacaaaataa

SEQ ID NO: 143333 - DNA, 13 bp, Artificial Sequence
  Oligonucleotide for detection of SNP TSC0035962
ttatttcgttgaa

SEQ ID NO: 143334 - DNA, 13 bp, Artificial Sequence
  Oligonucleotide for detection of SNP TSC0035962
ttcaacgaaataa

SEQ ID NO: 143335 - DNA, 13 bp, Artificial Sequence
  Oligonucleotide for detection of SNP TSC0035962
tttaacgagataa

SEQ ID NO: 143336 - DNA, 13 bp, Artificial Sequence
  Oligonucleotide for detection of SNP TSC0035962
ttatctcgttaaa

SEQ ID NO: 143337 - DNA, 13 bp, Artificial Sequence
  Oligonucleotide for detection of SNP TSC0035963
ttttttatgggat

SEQ ID NO: 143338 - DNA, 13 bp, Artificial Sequence
  Oligonucleotide for detection of SNP TSC0035963
atcccataaaaaa

SEQ ID NO: 143339 - DNA, 13 bp, Artificial Sequence
  Oligonucleotide for detection of SNP TSC0035963
ttttttgtgggat

SEQ ID NO: 143340 - DNA, 13 bp, Artificial Sequence
  Oligonucleotide for detection of SNP TSC0035963
atcccacaaaaaa

SEQ ID NO: 143341 - DNA, 13 bp, Artificial Sequence
  Oligonucleotide for detection of SNP TSC0035963
tttttcgtgggat

SEQ ID NO: 143342 - DNA, 13 bp, Artificial Sequence
  Oligonucleotide for detection of SNP TSC0035963
atcccacgaaaaa

SEQ ID NO: 143343 - DNA, 13 bp, Artificial Sequence
  Oligonucleotide for detection of SNP TSC0035963
attttatgaaaag

SEQ ID NO: 143344 - DNA, 13 bp, Artificial Sequence
  Oligonucleotide for detection of SNP TSC0035963
cttttcataaaat

SEQ ID NO: 143345 - DNA, 13 bp, Artificial Sequence
  Oligonucleotide for detection of SNP TSC0035963
attttacgaaaag

SEQ ID NO: 143346 - DNA, 13 bp, Artificial Sequence
  Oligonucleotide for detection of SNP TSC0035963
cttttcgtaaaat

SEQ ID NO: 143347 - DNA, 13 bp, Artificial Sequence
  Oligonucleotide for detection of SNP TSC0035964
attaaagtatttt

SEQ ID NO: 143348 - DNA, 13 bp, Artificial Sequence
  Oligonucleotide for detection of SNP TSC0035964
aaaatactttaat

SEQ ID NO: 143349 - DNA, 13 bp, Artificial Sequence
  Oligonucleotide for detection of SNP TSC0035964
attaaaatatttt

SEQ ID NO: 143350 - DNA, 13 bp, Artificial Sequence
  Oligonucleotide for detection of SNP TSC0035964
aaaatattttaat

SEQ ID NO: 143351 - DNA, 13 bp, Artificial Sequence
  Oligonucleotide for detection of SNP TSC0035966
gtattttttggta

SEQ ID NO: 143352 - DNA, 13 bp, Artificial Sequence
  Oligonucleotide for detection of SNP TSC0035966
taccaaaaaatac

SEQ ID NO: 143353 - DNA, 13 bp, Artificial Sequence
  Oligonucleotide for detection of SNP TSC0035966
gtatttgttggta

SEQ ID NO: 143354 - DNA, 13 bp, Artificial Sequence
  Oligonucleotide for detection of SNP TSC0035966
taccaacaaatac

SEQ ID NO: 143355 - DNA, 13 bp, Artificial Sequence
  Oligonucleotide for detection of SNP TSC0035966
tattaggaggtgy

SEQ ID NO: 143356 - DNA, 13 bp, Artificial Sequence
  Oligonucleotide for detection of SNP TSC0035966
rcacctcctaata

SEQ ID NO: 143357 - DNA, 13 bp, Artificial Sequence
  Oligonucleotide for detection of SNP TSC0035966
tattagtaggtgy

SEQ ID NO: 143358 - DNA, 13 bp, Artificial Sequence
  Oligonucleotide for detection of SNP TSC0035966
rcacctactaata

SEQ ID NO: 143359 - DNA, 13 bp, Artificial Sequence
  Oligonucleotide for detection of SNP TSC0035968
tagaaaagaagga

SEQ ID NO: 143360 - DNA, 13 bp, Artificial Sequence
  Oligonucleotide for detection of SNP TSC0035968
tccttcttttcta

SEQ ID NO: 143361 - DNA, 13 bp, Artificial Sequence
  Oligonucleotide for detection of SNP TSC0035968
tagaaaggaagga

SEQ ID NO: 143362 - DNA, 13 bp, Artificial Sequence
  Oligonucleotide for detection of SNP TSC0035968
tccttcctttcta

SEQ ID NO: 143363 - DNA, 13 bp, Artificial Sequence
  Oligonucleotide for detection of SNP TSC0035969
gtaatagagtgag

SEQ ID NO: 143364 - DNA, 13 bp, Artificial Sequence
  Oligonucleotide for detection of SNP TSC0035969
ctcactctattac

SEQ ID NO: 143365 - DNA, 13 bp, Artificial Sequence
  Oligonucleotide for detection of SNP TSC0035969
gtaataaagtgag

SEQ ID NO: 143366 - DNA, 13 bp, Artificial Sequence
  Oligonucleotide for detection of SNP TSC0035969
ctcactttattac

SEQ ID NO: 143367 - DNA, 13 bp, Artificial Sequence
  Oligonucleotide for detection of SNP TSC0035969
gtaatagagcgag

SEQ ID NO: 143368 - DNA, 13 bp, Artificial Sequence
  Oligonucleotide for detection of SNP TSC0035969
ctcgctctattac

SEQ ID NO: 143369 - DNA, 13 bp, Artificial Sequence
  Oligonucleotide for detection of SNP TSC0035969
gtaataaagcgag

SEQ ID NO: 143370 - DNA, 13 bp, Artificial Sequence
  Oligonucleotide for detection of SNP TSC0035969
ctcgctttattac

SEQ ID NO: 143371 - DNA, 13 bp, Artificial Sequence
  Oligonucleotide for detection of SNP TSC0035978
ttgaattgtttgg

SEQ ID NO: 143372 - DNA, 13 bp, Artificial Sequence
  Oligonucleotide for detection of SNP TSC0035978
ccaaacaattcaa

SEQ ID NO: 143373 - DNA, 13 bp, Artificial Sequence
  Oligonucleotide for detection of SNP TSC0035978
ttgaatcgtttgg

SEQ ID NO: 143374 - DNA, 13 bp, Artificial Sequence
  Oligonucleotide for detection of SNP TSC0035978
ccaaacgattcaa

SEQ ID NO: 143375 - DNA, 13 bp, Artificial Sequence
  Oligonucleotide for detection of SNP TSC0035978
ttaagtgatttaa

SEQ ID NO: 143376 - DNA, 13 bp, Artificial Sequence
  Oligonucleotide for detection of SNP TSC0035978
ttaaatcacttaa

SEQ ID NO: 143377 - DNA, 13 bp, Artificial Sequence
  Oligonucleotide for detection of SNP TSC0035978
ttaagtaatttaa

SEQ ID NO: 143378 - DNA, 13 bp, Artificial Sequence
  Oligonucleotide for detection of SNP TSC0035978
ttaaattacttaa

SEQ ID NO: 143379 - DNA, 13 bp, Artificial Sequence
  Oligonucleotide for detection of SNP TSC0035978
ttaagcgatttaa

SEQ ID NO: 143380 - DNA, 13 bp, Artificial Sequence
  Oligonucleotide for detection of SNP TSC0035978
ttaaatcgcttaa

SEQ ID NO: 143381 - DNA, 13 bp, Artificial Sequence
  Oligonucleotide for detection of SNP TSC0035983
ttttgagggagat

SEQ ID NO: 143382 - DNA, 13 bp, Artificial Sequence
  Oligonucleotide for detection of SNP TSC0035983
atctccctcaaaa

SEQ ID NO: 143383 - DNA, 13 bp, Artificial Sequence
  Oligonucleotide for detection of SNP TSC0035983
ttttgaaggagat

SEQ ID NO: 143384 - DNA, 13 bp, Artificial Sequence
  Oligonucleotide for detection of SNP TSC0035983
atctccttcaaaa

SEQ ID NO: 143385 - DNA, 13 bp, Artificial Sequence
  Oligonucleotide for detection of SNP TSC0035984
attttgaattttt

SEQ ID NO: 143386 - DNA, 13 bp, Artificial Sequence
  Oligonucleotide for detection of SNP TSC0035984
aaaaattcaaaat

SEQ ID NO: 143387 - DNA, 13 bp, Artificial Sequence
  Oligonucleotide for detection of SNP TSC0035984
attttggattttt

SEQ ID NO: 143388 - DNA, 13 bp, Artificial Sequence
  Oligonucleotide for detection of SNP TSC0035984
aaaaatccaaaat

SEQ ID NO: 143389 - DNA, 13 bp, Artificial Sequence
  Oligonucleotide for detection of SNP TSC0035986
tatgttgtgattt

SEQ ID NO: 143390 - DNA, 13 bp, Artificial Sequence
  Oligonucleotide for detection of SNP TSC0035986
aaatcacaacata

SEQ ID NO: 143391 - DNA, 13 bp, Artificial Sequence
  Oligonucleotide for detection of SNP TSC0035986
tatgttatgattt

SEQ ID NO: 143392 - DNA, 13 bp, Artificial Sequence
  Oligonucleotide for detection of SNP TSC0035986
aaatcataacata

SEQ ID NO: 143393 - DNA, 13 bp, Artificial Sequence
  Oligonucleotide for detection of SNP TSC0035991
atttttatgtttg

SEQ ID NO: 143394 - DNA, 13 bp, Artificial Sequence
  Oligonucleotide for detection of SNP TSC0035991
caaacataaaaat

SEQ ID NO: 143395 - DNA, 13 bp, Artificial Sequence
  Oligonucleotide for detection of SNP TSC0035991
atttttttgtttg

SEQ ID NO: 143396 - DNA, 13 bp, Artificial Sequence
  Oligonucleotide for detection of SNP TSC0035991
caaacaaaaaaat

SEQ ID NO: 143397 - DNA, 13 bp, Artificial Sequence
  Oligonucleotide for detection of SNP TSC0035991
tagatataggaat

SEQ ID NO: 143398 - DNA, 13 bp, Artificial Sequence
  Oligonucleotide for detection of SNP TSC0035991
attcctatatcta

SEQ ID NO: 143399 - DNA, 13 bp, Artificial Sequence
  Oligonucleotide for detection of SNP TSC0035991
tagataaaggaat

SEQ ID NO: 143400 - DNA, 13 bp, Artificial Sequence
  Oligonucleotide for detection of SNP TSC0035991
attcctttatcta

SEQ ID NO: 143401 - DNA, 13 bp, Artificial Sequence
  Oligonucleotide for detection of SNP TSC0035993
gagttagttatat

SEQ ID NO: 143402 - DNA, 13 bp, Artificial Sequence
  Oligonucleotide for detection of SNP TSC0035993
atataactaactc

SEQ ID NO: 143403 - DNA, 13 bp, Artificial Sequence
  Oligonucleotide for detection of SNP TSC0035993
gagttaattatat

SEQ ID NO: 143404 - DNA, 13 bp, Artificial Sequence
  Oligonucleotide for detection of SNP TSC0035993
atataattaactc

SEQ ID NO: 143405 - DNA, 13 bp, Artificial Sequence
  Oligonucleotide for detection of SNP TSC0035994
attattatttggg

SEQ ID NO: 143406 - DNA, 13 bp, Artificial Sequence
  Oligonucleotide for detection of SNP TSC0035994
cccaaataataat

SEQ ID NO: 143407 - DNA, 13 bp, Artificial Sequence
  Oligonucleotide for detection of SNP TSC0035994
attattgtttggg

SEQ ID NO: 143408 - DNA, 13 bp, Artificial Sequence
  Oligonucleotide for detection of SNP TSC0035994
cccaaacaataat

SEQ ID NO: 143409 - DNA, 13 bp, Artificial Sequence
  Oligonucleotide for detection of SNP TSC0035995
tagggttgaggtt

SEQ ID NO: 143410 - DNA, 13 bp, Artificial Sequence
  Oligonucleotide for detection of SNP TSC0035995
aacctcaacccta

SEQ ID NO: 143411 - DNA, 13 bp, Artificial Sequence
  Oligonucleotide for detection of SNP TSC0035995
tagggtcgaggtt

SEQ ID NO: 143412 - DNA, 13 bp, Artificial Sequence
  Oligonucleotide for detection of SNP TSC0035995
aacctcgacccta

SEQ ID NO: 143413 - DNA, 13 bp, Artificial Sequence
  Oligonucleotide for detection of SNP TSC0036001
gaattaaatgaaa

SEQ ID NO: 143414 - DNA, 13 bp, Artificial Sequence
  Oligonucleotide for detection of SNP TSC0036001
tttcatttaattc

SEQ ID NO: 143415 - DNA, 13 bp, Artificial Sequence
  Oligonucleotide for detection of SNP TSC0036001
gaattagatgaaa

SEQ ID NO: 143416 - DNA, 13 bp, Artificial Sequence
  Oligonucleotide for detection of SNP TSC0036001
tttcatctaattc

SEQ ID NO: 143417 - DNA, 13 bp, Artificial Sequence
  Oligonucleotide for detection of SNP TSC0036002
taaattatttagt

SEQ ID NO: 143418 - DNA, 13 bp, Artificial Sequence
  Oligonucleotide for detection of SNP TSC0036002
actaaataattta

SEQ ID NO: 143419 - DNA, 13 bp, Artificial Sequence
  Oligonucleotide for detection of SNP TSC0036002
taaattttttagt

SEQ ID NO: 143420 - DNA, 13 bp, Artificial Sequence
  Oligonucleotide for detection of SNP TSC0036002
actaaaaaattta

SEQ ID NO: 143421 - DNA, 13 bp, Artificial Sequence
  Oligonucleotide for detection of SNP TSC0036002
attagataattta

SEQ ID NO: 143422 - DNA, 13 bp, Artificial Sequence
  Oligonucleotide for detection of SNP TSC0036002
taaattatctaat

SEQ ID NO: 143423 - DNA, 13 bp, Artificial Sequence
  Oligonucleotide for detection of SNP TSC0036002
attagagaattta

SEQ ID NO: 143424 - DNA, 13 bp, Artificial Sequence
  Oligonucleotide for detection of SNP TSC0036002
taaattctctaat

SEQ ID NO: 143425 - DNA, 13 bp, Artificial Sequence
  Oligonucleotide for detection of SNP TSC0036003
ggattgggtaggg

SEQ ID NO: 143426 - DNA, 13 bp, Artificial Sequence
  Oligonucleotide for detection of SNP TSC0036003
ccctacccaatcc

SEQ ID NO: 143427 - DNA, 13 bp, Artificial Sequence
  Oligonucleotide for detection of SNP TSC0036003
ggattgagtaggg

SEQ ID NO: 143428 - DNA, 13 bp, Artificial Sequence
  Oligonucleotide for detection of SNP TSC0036003
ccctactcaatcc

SEQ ID NO: 143429 - DNA, 13 bp, Artificial Sequence
  Oligonucleotide for detection of SNP TSC0036004
ataaatgtgtgtt

SEQ ID NO: 143430 - DNA, 13 bp, Artificial Sequence
  Oligonucleotide for detection of SNP TSC0036004
aacacacatttat

SEQ ID NO: 143431 - DNA, 13 bp, Artificial Sequence
  Oligonucleotide for detection of SNP TSC0036004
ataaatatgtgtt

SEQ ID NO: 143432 - DNA, 13 bp, Artificial Sequence
  Oligonucleotide for detection of SNP TSC0036004
aacacatatttat

SEQ ID NO: 143433 - DNA, 13 bp, Artificial Sequence
  Oligonucleotide for detection of SNP TSC0036006
tttttttggaagg

SEQ ID NO: 143434 - DNA, 13 bp, Artificial Sequence
  Oligonucleotide for detection of SNP TSC0036006
ccttccaaaaaaa

SEQ ID NO: 143435 - DNA, 13 bp, Artificial Sequence
  Oligonucleotide for detection of SNP TSC0036006
ttttttcggaagg

SEQ ID NO: 143436 - DNA, 13 bp, Artificial Sequence
  Oligonucleotide for detection of SNP TSC0036006
ccttccgaaaaaa

SEQ ID NO: 143437 - DNA, 13 bp, Artificial Sequence
  Oligonucleotide for detection of SNP TSC0036006
ttttttgaaagag

SEQ ID NO: 143438 - DNA, 13 bp, Artificial Sequence
  Oligonucleotide for detection of SNP TSC0036006
ctctttcaaaaaa

SEQ ID NO: 143439 - DNA, 13 bp, Artificial Sequence
  Oligonucleotide for detection of SNP TSC0036006
ttttttaaaagag

SEQ ID NO: 143440 - DNA, 13 bp, Artificial Sequence
  Oligonucleotide for detection of SNP TSC0036006
ctcttttaaaaaa

SEQ ID NO: 143441 - DNA, 13 bp, Artificial Sequence
  Oligonucleotide for detection of SNP TSC0036006
tttttcgaaagag

SEQ ID NO: 143442 - DNA, 13 bp, Artificial Sequence
  Oligonucleotide for detection of SNP TSC0036006
ctctttcgaaaaa

SEQ ID NO: 143443 - DNA, 13 bp, Artificial Sequence
  Oligonucleotide for detection of SNP TSC0036009
tttaatatttgga

SEQ ID NO: 143444 - DNA, 13 bp, Artificial Sequence
  Oligonucleotide for detection of SNP TSC0036009
tccaaatattaaa

SEQ ID NO: 143445 - DNA, 13 bp, Artificial Sequence
  Oligonucleotide for detection of SNP TSC0036010
ttttgaaatttag

SEQ ID NO: 143446 - DNA, 13 bp, Artificial Sequence
  Oligonucleotide for detection of SNP TSC0036010
ctaaatttcaaaa

SEQ ID NO: 143447 - DNA, 13 bp, Artificial Sequence
  Oligonucleotide for detection of SNP TSC0036010
ttttgatatttag

SEQ ID NO: 143448 - DNA, 13 bp, Artificial Sequence
  Oligonucleotide for detection of SNP TSC0036010
ctaaatatcaaaa

SEQ ID NO: 143449 - DNA, 13 bp, Artificial Sequence
  Oligonucleotide for detection of SNP TSC0036010
ttgaattttagga

SEQ ID NO: 143450 - DNA, 13 bp, Artificial Sequence
  Oligonucleotide for detection of SNP TSC0036010
tcctaaaattcaa

SEQ ID NO: 143451 - DNA, 13 bp, Artificial Sequence
  Oligonucleotide for detection of SNP TSC0036010
ttgaatattagga

SEQ ID NO: 143452 - DNA, 13 bp, Artificial Sequence
  Oligonucleotide for detection of SNP TSC0036010
tcctaatattcaa

SEQ ID NO: 143453 - DNA, 13 bp, Artificial Sequence
  Oligonucleotide for detection of SNP TSC0036011
gtggaaatggata

SEQ ID NO: 143454 - DNA, 13 bp, Artificial Sequence
  Oligonucleotide for detection of SNP TSC0036011
tatccatttccac

SEQ ID NO: 143455 - DNA, 13 bp, Artificial Sequence
  Oligonucleotide for detection of SNP TSC0036011
gtggaagtggata

SEQ ID NO: 143456 - DNA, 13 bp, Artificial Sequence
  Oligonucleotide for detection of SNP TSC0036011
tatccacttccac

SEQ ID NO: 143457 - DNA, 13 bp, Artificial Sequence
  Oligonucleotide for detection of SNP TSC0036011
gcggaaatggata

SEQ ID NO: 143458 - DNA, 13 bp, Artificial Sequence
  Oligonucleotide for detection of SNP TSC0036011
tatccatttccgc

SEQ ID NO: 143459 - DNA, 13 bp, Artificial Sequence
  Oligonucleotide for detection of SNP TSC0036011
gcggaagtggata

SEQ ID NO: 143460 - DNA, 13 bp, Artificial Sequence
  Oligonucleotide for detection of SNP TSC0036011
tatccacttccgc

SEQ ID NO: 143461 - DNA, 13 bp, Artificial Sequence
  Oligonucleotide for detection of SNP TSC0036012
tatttttatgaat

SEQ ID NO: 143462 - DNA, 13 bp, Artificial Sequence
  Oligonucleotide for detection of SNP TSC0036012
attcataaaaata

SEQ ID NO: 143463 - DNA, 13 bp, Artificial Sequence
  Oligonucleotide for detection of SNP TSC0036012
tattttgatgaat

SEQ ID NO: 143464 - DNA, 13 bp, Artificial Sequence
  Oligonucleotide for detection of SNP TSC0036012
attcatcaaaata

SEQ ID NO: 143465 - DNA, 13 bp, Artificial Sequence
  Oligonucleotide for detection of SNP TSC0036012
atttatgaaagta

SEQ ID NO: 143466 - DNA, 13 bp, Artificial Sequence
  Oligonucleotide for detection of SNP TSC0036012
tactttcataaat

SEQ ID NO: 143467 - DNA, 13 bp, Artificial Sequence
  Oligonucleotide for detection of SNP TSC0036012
atttattaaagta

SEQ ID NO: 143468 - DNA, 13 bp, Artificial Sequence
  Oligonucleotide for detection of SNP TSC0036012
tactttaataaat

SEQ ID NO: 143469 - DNA, 13 bp, Artificial Sequence
  Oligonucleotide for detection of SNP TSC0036013
tatggatgaagga

SEQ ID NO: 143470 - DNA, 13 bp, Artificial Sequence
  Oligonucleotide for detection of SNP TSC0036013
tccttcatccata

SEQ ID NO: 143471 - DNA, 13 bp, Artificial Sequence
  Oligonucleotide for detection of SNP TSC0036013
tatggaagaagga

SEQ ID NO: 143472 - DNA, 13 bp, Artificial Sequence
  Oligonucleotide for detection of SNP TSC0036013
tccttcttccata

SEQ ID NO: 143473 - DNA, 13 bp, Artificial Sequence
  Oligonucleotide for detection of SNP TSC0036013
tatggacgaagga

SEQ ID NO: 143474 - DNA, 13 bp, Artificial Sequence
  Oligonucleotide for detection of SNP TSC0036013
tccttcgtccata

SEQ ID NO: 143475 - DNA, 13 bp, Artificial Sequence
  Oligonucleotide for detection of SNP TSC0036018
tgatggggtgtgt

SEQ ID NO: 143476 - DNA, 13 bp, Artificial Sequence
  Oligonucleotide for detection of SNP TSC0036018
acacaccccatca

SEQ ID NO: 143477 - DNA, 13 bp, Artificial Sequence
  Oligonucleotide for detection of SNP TSC0036018
tgatggtgtgtgt

SEQ ID NO: 143478 - DNA, 13 bp, Artificial Sequence
  Oligonucleotide for detection of SNP TSC0036018
acacacaccatca

SEQ ID NO: 143479 - DNA, 13 bp, Artificial Sequence
  Oligonucleotide for detection of SNP TSC0036019
aaaaagtggaaag

SEQ ID NO: 143480 - DNA, 13 bp, Artificial Sequence
  Oligonucleotide for detection of SNP TSC0036019
ctttccacttttt

SEQ ID NO: 143481 - DNA, 13 bp, Artificial Sequence
  Oligonucleotide for detection of SNP TSC0036019
aaaaagcggaaag

SEQ ID NO: 143482 - DNA, 13 bp, Artificial Sequence
  Oligonucleotide for detection of SNP TSC0036019
ctttccgcttttt

SEQ ID NO: 143483 - DNA, 13 bp, Artificial Sequence
  Oligonucleotide for detection of SNP TSC0036024
gaatttgtattgt

SEQ ID NO: 143484 - DNA, 13 bp, Artificial Sequence
  Oligonucleotide for detection of SNP TSC0036024
acaatacaaattc

SEQ ID NO: 143485 - DNA, 13 bp, Artificial Sequence
  Oligonucleotide for detection of SNP TSC0036024
gaatttatattgt

SEQ ID NO: 143486 - DNA, 13 bp, Artificial Sequence
  Oligonucleotide for detection of SNP TSC0036024
acaatataaattc

SEQ ID NO: 143487 - DNA, 13 bp, Artificial Sequence
  Oligonucleotide for detection of SNP TSC0036025
gggaaattggtty

SEQ ID NO: 143488 - DNA, 13 bp, Artificial Sequence
  Oligonucleotide for detection of SNP TSC0036025
raaccaatttccc

SEQ ID NO: 143489 - DNA, 13 bp, Artificial Sequence
  Oligonucleotide for detection of SNP TSC0036025
gggaaaatggtty

SEQ ID NO: 143490 - DNA, 13 bp, Artificial Sequence
  Oligonucleotide for detection of SNP TSC0036025
raaccattttccc

SEQ ID NO: 143491 - DNA, 13 bp, Artificial Sequence
  Oligonucleotide for detection of SNP TSC0036025
ggattaattttty

SEQ ID NO: 143492 - DNA, 13 bp, Artificial Sequence
  Oligonucleotide for detection of SNP TSC0036025
raaaaattaatcc

SEQ ID NO: 143493 - DNA, 13 bp, Artificial Sequence
  Oligonucleotide for detection of SNP TSC0036025
ggattatttttty

SEQ ID NO: 143494 - DNA, 13 bp, Artificial Sequence
  Oligonucleotide for detection of SNP TSC0036025
raaaaaataatcc

SEQ ID NO: 143495 - DNA, 13 bp, Artificial Sequence
  Oligonucleotide for detection of SNP TSC0036027
agaattttgttat

SEQ ID NO: 143496 - DNA, 13 bp, Artificial Sequence
  Oligonucleotide for detection of SNP TSC0036027
ataacaaaattct

SEQ ID NO: 143497 - DNA, 13 bp, Artificial Sequence
  Oligonucleotide for detection of SNP TSC0036027
agaattgtgttat

SEQ ID NO: 143498 - DNA, 13 bp, Artificial Sequence
  Oligonucleotide for detection of SNP TSC0036027
ataacacaattct

SEQ ID NO: 143499 - DNA, 13 bp, Artificial Sequence
  Oligonucleotide for detection of SNP TSC0036027
agaatcgtgttat

SEQ ID NO: 143500 - DNA, 13 bp, Artificial Sequence
  Oligonucleotide for detection of SNP TSC0036027
ataacacgattct

SEQ ID NO: 143501 - DNA, 13 bp, Artificial Sequence
  Oligonucleotide for detection of SNP TSC0036027
atgataggatttt

SEQ ID NO: 143502 - DNA, 13 bp, Artificial Sequence
  Oligonucleotide for detection of SNP TSC0036027
aaaatcctatcat

SEQ ID NO: 143503 - DNA, 13 bp, Artificial Sequence
  Oligonucleotide for detection of SNP TSC0036027
atgatatgatttt

SEQ ID NO: 143504 - DNA, 13 bp, Artificial Sequence
  Oligonucleotide for detection of SNP TSC0036027
aaaatcatatcat

SEQ ID NO: 143505 - DNA, 13 bp, Artificial Sequence
  Oligonucleotide for detection of SNP TSC0036027
atgatacgatttt

SEQ ID NO: 143506 - DNA, 13 bp, Artificial Sequence
  Oligonucleotide for detection of SNP TSC0036027
aaaatcgtatcat

SEQ ID NO: 143507 - DNA, 13 bp, Artificial Sequence
  Oligonucleotide for detection of SNP TSC0036028
taagaagattaat

SEQ ID NO: 143508 - DNA, 13 bp, Artificial Sequence
  Oligonucleotide for detection of SNP TSC0036028
attaatcttctta

SEQ ID NO: 143509 - DNA, 13 bp, Artificial Sequence
  Oligonucleotide for detection of SNP TSC0036028
taagaaaattaat

SEQ ID NO: 143510 - DNA, 13 bp, Artificial Sequence
  Oligonucleotide for detection of SNP TSC0036028
attaattttctta

SEQ ID NO: 143511 - DNA, 13 bp, Artificial Sequence
  Oligonucleotide for detection of SNP TSC0036029
gattagaataaga

SEQ ID NO: 143512 - DNA, 13 bp, Artificial Sequence
  Oligonucleotide for detection of SNP TSC0036029
tcttattctaatc

SEQ ID NO: 143513 - DNA, 13 bp, Artificial Sequence
  Oligonucleotide for detection of SNP TSC0036029
gattagtataaga

SEQ ID NO: 143514 - DNA, 13 bp, Artificial Sequence
  Oligonucleotide for detection of SNP TSC0036029
tcttatactaatc

SEQ ID NO: 143515 - DNA, 13 bp, Artificial Sequence
  Oligonucleotide for detection of SNP TSC0036029
ttttgttttaaty

SEQ ID NO: 143516 - DNA, 13 bp, Artificial Sequence
  Oligonucleotide for detection of SNP TSC0036029
rattaaaacaaaa

SEQ ID NO: 143517 - DNA, 13 bp, Artificial Sequence
  Oligonucleotide for detection of SNP TSC0036029
ttttgtattaaty

SEQ ID NO: 143518 - DNA, 13 bp, Artificial Sequence
  Oligonucleotide for detection of SNP TSC0036029
rattaatacaaaa

SEQ ID NO: 143519 - DNA, 13 bp, Artificial Sequence
  Oligonucleotide for detection of SNP TSC0036030
taagtatgttaat

SEQ ID NO: 143520 - DNA, 13 bp, Artificial Sequence
  Oligonucleotide for detection of SNP TSC0036030
attaacatactta

SEQ ID NO: 143521 - DNA, 13 bp, Artificial Sequence
  Oligonucleotide for detection of SNP TSC0036030
taagtacgttaat

SEQ ID NO: 143522 - DNA, 13 bp, Artificial Sequence
  Oligonucleotide for detection of SNP TSC0036030
attaacgtactta

SEQ ID NO: 143523 - DNA, 13 bp, Artificial Sequence
  Oligonucleotide for detection of SNP TSC0036030
attgatgtatttg

SEQ ID NO: 143524 - DNA, 13 bp, Artificial Sequence
  Oligonucleotide for detection of SNP TSC0036030
caaatacatcaat

SEQ ID NO: 143525 - DNA, 13 bp, Artificial Sequence
  Oligonucleotide for detection of SNP TSC0036030
attgatatatttg

SEQ ID NO: 143526 - DNA, 13 bp, Artificial Sequence
  Oligonucleotide for detection of SNP TSC0036030
caaatatatcaat

SEQ ID NO: 143527 - DNA, 13 bp, Artificial Sequence
  Oligonucleotide for detection of SNP TSC0036030
attgacgtatttg

SEQ ID NO: 143528 - DNA, 13 bp, Artificial Sequence
  Oligonucleotide for detection of SNP TSC0036030
caaatacgtcaat

SEQ ID NO: 143529 - DNA, 13 bp, Artificial Sequence
  Oligonucleotide for detection of SNP TSC0036032
ttttaaataaaga

SEQ ID NO: 143530 - DNA, 13 bp, Artificial Sequence
  Oligonucleotide for detection of SNP TSC0036032
tctttatttaaaa

SEQ ID NO: 143531 - DNA, 13 bp, Artificial Sequence
  Oligonucleotide for detection of SNP TSC0036032
ttttaagtaaaga

SEQ ID NO: 143532 - DNA, 13 bp, Artificial Sequence
  Oligonucleotide for detection of SNP TSC0036032
tctttacttaaaa

SEQ ID NO: 143533 - DNA, 13 bp, Artificial Sequence
  Oligonucleotide for detection of SNP TSC0036033
gtgttttgggtay

SEQ ID NO: 143534 - DNA, 13 bp, Artificial Sequence
  Oligonucleotide for detection of SNP TSC0036033
rtacccaaaacac

SEQ ID NO: 143535 - DNA, 13 bp, Artificial Sequence
  Oligonucleotide for detection of SNP TSC0036033
gtgtttggggtay

SEQ ID NO: 143536 - DNA, 13 bp, Artificial Sequence
  Oligonucleotide for detection of SNP TSC0036033
rtaccccaaacac

SEQ ID NO: 143537 - DNA, 13 bp, Artificial Sequence
  Oligonucleotide for detection of SNP TSC0036033
gtgtttcgggtay

SEQ ID NO: 143538 - DNA, 13 bp, Artificial Sequence
  Oligonucleotide for detection of SNP TSC0036033
rtacccgaaacac

SEQ ID NO: 143539 - DNA, 13 bp, Artificial Sequence
  Oligonucleotide for detection of SNP TSC0036033
gtatttgaaatay

SEQ ID NO: 143540 - DNA, 13 bp, Artificial Sequence
  Oligonucleotide for detection of SNP TSC0036033
rtatttcaaatac

SEQ ID NO: 143541 - DNA, 13 bp, Artificial Sequence
  Oligonucleotide for detection of SNP TSC0036033
gtattttaaatay

SEQ ID NO: 143542 - DNA, 13 bp, Artificial Sequence
  Oligonucleotide for detection of SNP TSC0036033
rtatttaaaatac

SEQ ID NO: 143543 - DNA, 13 bp, Artificial Sequence
  Oligonucleotide for detection of SNP TSC0036033
gtattcgaaatay

SEQ ID NO: 143544 - DNA, 13 bp, Artificial Sequence
  Oligonucleotide for detection of SNP TSC0036033
rtatttcgaatac

SEQ ID NO: 143545 - DNA, 13 bp, Artificial Sequence
  Oligonucleotide for detection of SNP TSC0036034
ggtggaaatttgg

SEQ ID NO: 143546 - DNA, 13 bp, Artificial Sequence
  Oligonucleotide for detection of SNP TSC0036034
ccaaatttccacc

SEQ ID NO: 143547 - DNA, 13 bp, Artificial Sequence
  Oligonucleotide for detection of SNP TSC0036034
ggtggagatttgg

SEQ ID NO: 143548 - DNA, 13 bp, Artificial Sequence
  Oligonucleotide for detection of SNP TSC0036034
ccaaatctccacc

SEQ ID NO: 143549 - DNA, 13 bp, Artificial Sequence
  Oligonucleotide for detection of SNP TSC0036035
ttttatatggatt

SEQ ID NO: 143550 - DNA, 13 bp, Artificial Sequence
  Oligonucleotide for detection of SNP TSC0036035
aatccatataaaa

SEQ ID NO: 143551 - DNA, 13 bp, Artificial Sequence
  Oligonucleotide for detection of SNP TSC0036035
ttttatgtggatt

SEQ ID NO: 143552 - DNA, 13 bp, Artificial Sequence
  Oligonucleotide for detection of SNP TSC0036035
aatccacataaaa

SEQ ID NO: 143553 - DNA, 13 bp, Artificial Sequence
  Oligonucleotide for detection of SNP TSC0036035
ttttacgtggatt

SEQ ID NO: 143554 - DNA, 13 bp, Artificial Sequence
  Oligonucleotide for detection of SNP TSC0036035
aatccacgtaaaa

SEQ ID NO: 143555 - DNA, 13 bp, Artificial Sequence
  Oligonucleotide for detection of SNP TSC0036035
aatttatgtgggg

SEQ ID NO: 143556 - DNA, 13 bp, Artificial Sequence
  Oligonucleotide for detection of SNP TSC0036035
ccccacataaatt

SEQ ID NO: 143557 - DNA, 13 bp, Artificial Sequence
  Oligonucleotide for detection of SNP TSC0036035
aatttacgtgggg

SEQ ID NO: 143558 - DNA, 13 bp, Artificial Sequence
  Oligonucleotide for detection of SNP TSC0036035
ccccacgtaaatt

SEQ ID NO: 143559 - DNA, 13 bp, Artificial Sequence
  Oligonucleotide for detection of SNP TSC0036036
tgtaggtattgtg

SEQ ID NO: 143560 - DNA, 13 bp, Artificial Sequence
  Oligonucleotide for detection of SNP TSC0036036
cacaatacctaca

SEQ ID NO: 143561 - DNA, 13 bp, Artificial Sequence
  Oligonucleotide for detection of SNP TSC0036036
tgtagggattgtg

SEQ ID NO: 143562 - DNA, 13 bp, Artificial Sequence
  Oligonucleotide for detection of SNP TSC0036036
cacaatccctaca

SEQ ID NO: 143563 - DNA, 13 bp, Artificial Sequence
  Oligonucleotide for detection of SNP TSC0036036
tataatgtttgta

SEQ ID NO: 143564 - DNA, 13 bp, Artificial Sequence
  Oligonucleotide for detection of SNP TSC0036036
tacaaacattata

SEQ ID NO: 143565 - DNA, 13 bp, Artificial Sequence
  Oligonucleotide for detection of SNP TSC0036036
tataatttttgta

SEQ ID NO: 143566 - DNA, 13 bp, Artificial Sequence
  Oligonucleotide for detection of SNP TSC0036036
tacaaaaattata

SEQ ID NO: 143567 - DNA, 13 bp, Artificial Sequence
  Oligonucleotide for detection of SNP TSC0036037
gagataaatttay

SEQ ID NO: 143568 - DNA, 13 bp, Artificial Sequence
  Oligonucleotide for detection of SNP TSC0036037
rtaaatttatctc

SEQ ID NO: 143569 - DNA, 13 bp, Artificial Sequence
  Oligonucleotide for detection of SNP TSC0036037
gagatatatttay

SEQ ID NO: 143570 - DNA, 13 bp, Artificial Sequence
  Oligonucleotide for detection of SNP TSC0036037
rtaaatatatctc

SEQ ID NO: 143571 - DNA, 13 bp, Artificial Sequence
  Oligonucleotide for detection of SNP TSC0036037
gtgagtttgttty

SEQ ID NO: 143572 - DNA, 13 bp, Artificial Sequence
  Oligonucleotide for detection of SNP TSC0036037
raaacaaactcac

SEQ ID NO: 143573 - DNA, 13 bp, Artificial Sequence
  Oligonucleotide for detection of SNP TSC0036037
gtgagtgtgttty

SEQ ID NO: 143574 - DNA, 13 bp, Artificial Sequence
  Oligonucleotide for detection of SNP TSC0036037
raaacacactcac

SEQ ID NO: 143575 - DNA, 13 bp, Artificial Sequence
  Oligonucleotide for detection of SNP TSC0036040
aggagagagttga

SEQ ID NO: 143576 - DNA, 13 bp, Artificial Sequence
  Oligonucleotide for detection of SNP TSC0036040
tcaactctctcct

SEQ ID NO: 143577 - DNA, 13 bp, Artificial Sequence
  Oligonucleotide for detection of SNP TSC0036040
aggagatagttga

SEQ ID NO: 143578 - DNA, 13 bp, Artificial Sequence
  Oligonucleotide for detection of SNP TSC0036040
tcaactatctcct

SEQ ID NO: 143579 - DNA, 13 bp, Artificial Sequence
  Oligonucleotide for detection of SNP TSC0036047
atttgaagttagg

SEQ ID NO: 143580 - DNA, 13 bp, Artificial Sequence
  Oligonucleotide for detection of SNP TSC0036047
cctaacttcaaat

SEQ ID NO: 143581 - DNA, 13 bp, Artificial Sequence
  Oligonucleotide for detection of SNP TSC0036047
atttgacgttagg

SEQ ID NO: 143582 - DNA, 13 bp, Artificial Sequence
  Oligonucleotide for detection of SNP TSC0036047
cctaacgtcaaat

SEQ ID NO: 143583 - DNA, 13 bp, Artificial Sequence
  Oligonucleotide for detection of SNP TSC0036047
tttagttttagat

SEQ ID NO: 143584 - DNA, 13 bp, Artificial Sequence
  Oligonucleotide for detection of SNP TSC0036047
atctaaaactaaa

SEQ ID NO: 143585 - DNA, 13 bp, Artificial Sequence
  Oligonucleotide for detection of SNP TSC0036047
tttagcgttagat

SEQ ID NO: 143586 - DNA, 13 bp, Artificial Sequence
  Oligonucleotide for detection of SNP TSC0036047
atctaacgctaaa

SEQ ID NO: 143587 - DNA, 13 bp, Artificial Sequence
  Oligonucleotide for detection of SNP TSC0036049
gagtaggtttaga

SEQ ID NO: 143588 - DNA, 13 bp, Artificial Sequence
  Oligonucleotide for detection of SNP TSC0036049
tctaaacctactc

SEQ ID NO: 143589 - DNA, 13 bp, Artificial Sequence
  Oligonucleotide for detection of SNP TSC0036049
gagtagttttaga

SEQ ID NO: 143590 - DNA, 13 bp, Artificial Sequence
  Oligonucleotide for detection of SNP TSC0036049
tctaaaactactc

SEQ ID NO: 143591 - DNA, 13 bp, Artificial Sequence
  Oligonucleotide for detection of SNP TSC0036049
tttagatttgtty

SEQ ID NO: 143592 - DNA, 13 bp, Artificial Sequence
  Oligonucleotide for detection of SNP TSC0036049
raacaaatctaaa

SEQ ID NO: 143593 - DNA, 13 bp, Artificial Sequence
  Oligonucleotide for detection of SNP TSC0036049
tttagaattgtty

SEQ ID NO: 143594 - DNA, 13 bp, Artificial Sequence
  Oligonucleotide for detection of SNP TSC0036049
raacaattctaaa

SEQ ID NO: 143595 - DNA, 13 bp, Artificial Sequence
  Oligonucleotide for detection of SNP TSC0036050
aatgttaaaagay

SEQ ID NO: 143596 - DNA, 13 bp, Artificial Sequence
  Oligonucleotide for detection of SNP TSC0036050
rtcttttaacatt

SEQ ID NO: 143597 - DNA, 13 bp, Artificial Sequence
  Oligonucleotide for detection of SNP TSC0036050
aatgttgaaagay

SEQ ID NO: 143598 - DNA, 13 bp, Artificial Sequence
  Oligonucleotide for detection of SNP TSC0036050
rtctttcaacatt

SEQ ID NO: 143599 - DNA, 13 bp, Artificial Sequence
  Oligonucleotide for detection of SNP TSC0036050
aatgtcgaaagay

SEQ ID NO: 143600 - DNA, 13 bp, Artificial Sequence
  Oligonucleotide for detection of SNP TSC0036050
rtctttcgacatt

SEQ ID NO: 143601 - DNA, 13 bp, Artificial Sequence
  Oligonucleotide for detection of SNP TSC0036051
atttaaaatgata

SEQ ID NO: 143602 - DNA, 13 bp, Artificial Sequence
  Oligonucleotide for detection of SNP TSC0036051
tatcattttaaat

SEQ ID NO: 143603 - DNA, 13 bp, Artificial Sequence
  Oligonucleotide for detection of SNP TSC0036051
atttaagatgata

SEQ ID NO: 143604 - DNA, 13 bp, Artificial Sequence
  Oligonucleotide for detection of SNP TSC0036051
tatcatcttaaat

SEQ ID NO: 143605 - DNA, 13 bp, Artificial Sequence
  Oligonucleotide for detection of SNP TSC0036051
atttaaaacgata

SEQ ID NO: 143606 - DNA, 13 bp, Artificial Sequence
  Oligonucleotide for detection of SNP TSC0036051
tatcgttttaaat

SEQ ID NO: 143607 - DNA, 13 bp, Artificial Sequence
  Oligonucleotide for detection of SNP TSC0036051
atttaagacgata

SEQ ID NO: 143608 - DNA, 13 bp, Artificial Sequence
  Oligonucleotide for detection of SNP TSC0036051
tatcgtcttaaat

SEQ ID NO: 143609 - DNA, 13 bp, Artificial Sequence
  Oligonucleotide for detection of SNP TSC0036052
tagagaattttat

SEQ ID NO: 143610 - DNA, 13 bp, Artificial Sequence
  Oligonucleotide for detection of SNP TSC0036052
ataaaattctcta

SEQ ID NO: 143611 - DNA, 13 bp, Artificial Sequence
  Oligonucleotide for detection of SNP TSC0036052
tagagatttttat

SEQ ID NO: 143612 - DNA, 13 bp, Artificial Sequence
  Oligonucleotide for detection of SNP TSC0036052
ataaaaatctcta

SEQ ID NO: 143613 - DNA, 13 bp, Artificial Sequence
  Oligonucleotide for detection of SNP TSC0036052
ataggatttttta

SEQ ID NO: 143614 - DNA, 13 bp, Artificial Sequence
  Oligonucleotide for detection of SNP TSC0036052
taaaaaatcctat

SEQ ID NO: 143615 - DNA, 13 bp, Artificial Sequence
  Oligonucleotide for detection of SNP TSC0036052
ataggaattttta

SEQ ID NO: 143616 - DNA, 13 bp, Artificial Sequence
  Oligonucleotide for detection of SNP TSC0036052
taaaaattcctat

SEQ ID NO: 143617 - DNA, 13 bp, Artificial Sequence
  Oligonucleotide for detection of SNP TSC0036053
aaattagtattat

SEQ ID NO: 143618 - DNA, 13 bp, Artificial Sequence
  Oligonucleotide for detection of SNP TSC0036053
ataatactaattt

SEQ ID NO: 143619 - DNA, 13 bp, Artificial Sequence
  Oligonucleotide for detection of SNP TSC0036053
aaattaatattat

SEQ ID NO: 143620 - DNA, 13 bp, Artificial Sequence
  Oligonucleotide for detection of SNP TSC0036053
ataatattaattt

SEQ ID NO: 143621 - DNA, 13 bp, Artificial Sequence
  Oligonucleotide for detection of SNP TSC0036054
gtatatggaagaa

SEQ ID NO: 143622 - DNA, 13 bp, Artificial Sequence
  Oligonucleotide for detection of SNP TSC0036054
ttcttccatatac

SEQ ID NO: 143623 - DNA, 13 bp, Artificial Sequence
  Oligonucleotide for detection of SNP TSC0036054
gtatatagaagaa

SEQ ID NO: 143624 - DNA, 13 bp, Artificial Sequence
  Oligonucleotide for detection of SNP TSC0036054
ttcttctatatac

SEQ ID NO: 143625 - DNA, 13 bp, Artificial Sequence
  Oligonucleotide for detection of SNP TSC0036058
taaggtaaggtgg

SEQ ID NO: 143626 - DNA, 13 bp, Artificial Sequence
  Oligonucleotide for detection of SNP TSC0036058
ccaccttacctta

SEQ ID NO: 143627 - DNA, 13 bp, Artificial Sequence
  Oligonucleotide for detection of SNP TSC0036058
taaggtgaggtgg

SEQ ID NO: 143628 - DNA, 13 bp, Artificial Sequence
  Oligonucleotide for detection of SNP TSC0036058
ccacctcacctta

SEQ ID NO: 143629 - DNA, 13 bp, Artificial Sequence
  Oligonucleotide for detection of SNP TSC0036059
tatattgtatata

SEQ ID NO: 143630 - DNA, 13 bp, Artificial Sequence
  Oligonucleotide for detection of SNP TSC0036059
tatatacaatata

SEQ ID NO: 143631 - DNA, 13 bp, Artificial Sequence
  Oligonucleotide for detection of SNP TSC0036060
ttggatgtggtta

SEQ ID NO: 143632 - DNA, 13 bp, Artificial Sequence
  Oligonucleotide for detection of SNP TSC0036060
taaccacatccaa

SEQ ID NO: 143633 - DNA, 13 bp, Artificial Sequence
  Oligonucleotide for detection of SNP TSC0036060
ttggatatggtta

SEQ ID NO: 143634 - DNA, 13 bp, Artificial Sequence
  Oligonucleotide for detection of SNP TSC0036060
taaccatatccaa

SEQ ID NO: 143635 - DNA, 13 bp, Artificial Sequence
  Oligonucleotide for detection of SNP TSC0036061
tttggtgagttag

SEQ ID NO: 143636 - DNA, 13 bp, Artificial Sequence
  Oligonucleotide for detection of SNP TSC0036061
ctaactcaccaaa

SEQ ID NO: 143637 - DNA, 13 bp, Artificial Sequence
  Oligonucleotide for detection of SNP TSC0036061
tttggtaagttag

SEQ ID NO: 143638 - DNA, 13 bp, Artificial Sequence
  Oligonucleotide for detection of SNP TSC0036061
ctaacttaccaaa

SEQ ID NO: 143639 - DNA, 13 bp, Artificial Sequence
  Oligonucleotide for detection of SNP TSC0036063
atgttgatggtga

SEQ ID NO: 143640 - DNA, 13 bp, Artificial Sequence
  Oligonucleotide for detection of SNP TSC0036063
tcaccatcaacat

SEQ ID NO: 143641 - DNA, 13 bp, Artificial Sequence
  Oligonucleotide for detection of SNP TSC0036063
atgttggtggtga

SEQ ID NO: 143642 - DNA, 13 bp, Artificial Sequence
  Oligonucleotide for detection of SNP TSC0036063
tcaccaccaacat

SEQ ID NO: 143643 - DNA, 13 bp, Artificial Sequence
  Oligonucleotide for detection of SNP TSC0036064
gggtggagaggga

SEQ ID NO: 143644 - DNA, 13 bp, Artificial Sequence
  Oligonucleotide for detection of SNP TSC0036064
tccctctccaccc

SEQ ID NO: 143645 - DNA, 13 bp, Artificial Sequence
  Oligonucleotide for detection of SNP TSC0036064
gggtggggaggga

SEQ ID NO: 143646 - DNA, 13 bp, Artificial Sequence
  Oligonucleotide for detection of SNP TSC0036064
tccctccccaccc

SEQ ID NO: 143647 - DNA, 13 bp, Artificial Sequence
  Oligonucleotide for detection of SNP TSC0036064
gggcggagaggga

SEQ ID NO: 143648 - DNA, 13 bp, Artificial Sequence
  Oligonucleotide for detection of SNP TSC0036064
tccctctccgccc

SEQ ID NO: 143649 - DNA, 13 bp, Artificial Sequence
  Oligonucleotide for detection of SNP TSC0036064
gggcggggaggga

SEQ ID NO: 143650 - DNA, 13 bp, Artificial Sequence
  Oligonucleotide for detection of SNP TSC0036064
tccctccccgccc

SEQ ID NO: 143651 - DNA, 13 bp, Artificial Sequence
  Oligonucleotide for detection of SNP TSC0036066
tataatgttaaga

SEQ ID NO: 143652 - DNA, 13 bp, Artificial Sequence
  Oligonucleotide for detection of SNP TSC0036066
tcttaacattata

SEQ ID NO: 143653 - DNA, 13 bp, Artificial Sequence
  Oligonucleotide for detection of SNP TSC0036066
tataatattaaga

SEQ ID NO: 143654 - DNA, 13 bp, Artificial Sequence
  Oligonucleotide for detection of SNP TSC0036066
tcttaatattata

SEQ ID NO: 143655 - DNA, 13 bp, Artificial Sequence
  Oligonucleotide for detection of SNP TSC0036067
aattgtatgtgtg

SEQ ID NO: 143656 - DNA, 13 bp, Artificial Sequence
  Oligonucleotide for detection of SNP TSC0036067
cacacatacaatt

SEQ ID NO: 143657 - DNA, 13 bp, Artificial Sequence
  Oligonucleotide for detection of SNP TSC0036067
aattgtgtgtgtg

SEQ ID NO: 143658 - DNA, 13 bp, Artificial Sequence
  Oligonucleotide for detection of SNP TSC0036067
cacacacacaatt

SEQ ID NO: 143659 - DNA, 13 bp, Artificial Sequence
  Oligonucleotide for detection of SNP TSC0036069
ggataaaataaay

SEQ ID NO: 143660 - DNA, 13 bp, Artificial Sequence
  Oligonucleotide for detection of SNP TSC0036069
rtttattttatcc

SEQ ID NO: 143661 - DNA, 13 bp, Artificial Sequence
  Oligonucleotide for detection of SNP TSC0036069
ggataagataaay

SEQ ID NO: 143662 - DNA, 13 bp, Artificial Sequence
  Oligonucleotide for detection of SNP TSC0036069
rtttatcttatcc

SEQ ID NO: 143663 - DNA, 13 bp, Artificial Sequence
  Oligonucleotide for detection of SNP TSC0036070
aaaatatgggtta

SEQ ID NO: 143664 - DNA, 13 bp, Artificial Sequence
  Oligonucleotide for detection of SNP TSC0036070
taacccatatttt

SEQ ID NO: 143665 - DNA, 13 bp, Artificial Sequence
  Oligonucleotide for detection of SNP TSC0036070
aaaatacgggtta

SEQ ID NO: 143666 - DNA, 13 bp, Artificial Sequence
  Oligonucleotide for detection of SNP TSC0036070
taacccgtatttt

SEQ ID NO: 143667 - DNA, 13 bp, Artificial Sequence
  Oligonucleotide for detection of SNP TSC0036070
taatttgtgtttt

SEQ ID NO: 143668 - DNA, 13 bp, Artificial Sequence
  Oligonucleotide for detection of SNP TSC0036070
aaaacacaaatta

SEQ ID NO: 143669 - DNA, 13 bp, Artificial Sequence
  Oligonucleotide for detection of SNP TSC0036070
taatttatgtttt

SEQ ID NO: 143670 - DNA, 13 bp, Artificial Sequence
  Oligonucleotide for detection of SNP TSC0036070
aaaacataaatta

SEQ ID NO: 143671 - DNA, 13 bp, Artificial Sequence
  Oligonucleotide for detection of SNP TSC0036070
taattcgtgtttt

SEQ ID NO: 143672 - DNA, 13 bp, Artificial Sequence
  Oligonucleotide for detection of SNP TSC0036070
aaaacacgaatta

SEQ ID NO: 143673 - DNA, 13 bp, Artificial Sequence
  Oligonucleotide for detection of SNP TSC0036071
atagatataaagg

SEQ ID NO: 143674 - DNA, 13 bp, Artificial Sequence
  Oligonucleotide for detection of SNP TSC0036071
cctttatatctat

SEQ ID NO: 143675 - DNA, 13 bp, Artificial Sequence
  Oligonucleotide for detection of SNP TSC0036071
atagatgtaaagg

SEQ ID NO: 143676 - DNA, 13 bp, Artificial Sequence
  Oligonucleotide for detection of SNP TSC0036071
cctttacatctat

SEQ ID NO: 143677 - DNA, 13 bp, Artificial Sequence
  Oligonucleotide for detection of SNP TSC0036076
tttgatatttaty

SEQ ID NO: 143678 - DNA, 13 bp, Artificial Sequence
  Oligonucleotide for detection of SNP TSC0036076
rataaatatcaaa

SEQ ID NO: 143679 - DNA, 13 bp, Artificial Sequence
  Oligonucleotide for detection of SNP TSC0036076
tttgatgtttaty

SEQ ID NO: 143680 - DNA, 13 bp, Artificial Sequence
  Oligonucleotide for detection of SNP TSC0036076
rataaacatcaaa

SEQ ID NO: 143681 - DNA, 13 bp, Artificial Sequence
  Oligonucleotide for detection of SNP TSC0036076
tttgacgtttaty

SEQ ID NO: 143682 - DNA, 13 bp, Artificial Sequence
  Oligonucleotide for detection of SNP TSC0036076
rataaacgtcaaa

SEQ ID NO: 143683 - DNA, 13 bp, Artificial Sequence
  Oligonucleotide for detection of SNP TSC0036076
gatggatgttagg

SEQ ID NO: 143684 - DNA, 13 bp, Artificial Sequence
  Oligonucleotide for detection of SNP TSC0036076
cctaacatccatc

SEQ ID NO: 143685 - DNA, 13 bp, Artificial Sequence
  Oligonucleotide for detection of SNP TSC0036076
gatggacgttagg

SEQ ID NO: 143686 - DNA, 13 bp, Artificial Sequence
  Oligonucleotide for detection of SNP TSC0036076
cctaacgtccatc

SEQ ID NO: 143687 - DNA, 13 bp, Artificial Sequence
  Oligonucleotide for detection of SNP TSC0036082
tttaaaagataag

SEQ ID NO: 143688 - DNA, 13 bp, Artificial Sequence
  Oligonucleotide for detection of SNP TSC0036082
cttatcttttaaa

SEQ ID NO: 143689 - DNA, 13 bp, Artificial Sequence
  Oligonucleotide for detection of SNP TSC0036083
gttgggtatggtg

SEQ ID NO: 143690 - DNA, 13 bp, Artificial Sequence
  Oligonucleotide for detection of SNP TSC0036083
caccatacccaac

SEQ ID NO: 143691 - DNA, 13 bp, Artificial Sequence
  Oligonucleotide for detection of SNP TSC0036083
gttggggatggtg

SEQ ID NO: 143692 - DNA, 13 bp, Artificial Sequence
  Oligonucleotide for detection of SNP TSC0036083
caccatccccaac

SEQ ID NO: 143693 - DNA, 13 bp, Artificial Sequence
  Oligonucleotide for detection of SNP TSC0036083
gttgggtacggtg

SEQ ID NO: 143694 - DNA, 13 bp, Artificial Sequence
  Oligonucleotide for detection of SNP TSC0036083
caccgtacccaac

SEQ ID NO: 143695 - DNA, 13 bp, Artificial Sequence
  Oligonucleotide for detection of SNP TSC0036083
gttggggacggtg

SEQ ID NO: 143696 - DNA, 13 bp, Artificial Sequence
  Oligonucleotide for detection of SNP TSC0036083
caccgtccccaac

SEQ ID NO: 143697 - DNA, 13 bp, Artificial Sequence
  Oligonucleotide for detection of SNP TSC0036083
tattgtttttagy

SEQ ID NO: 143698 - DNA, 13 bp, Artificial Sequence
  Oligonucleotide for detection of SNP TSC0036083
rctaaaaacaata

SEQ ID NO: 143699 - DNA, 13 bp, Artificial Sequence
  Oligonucleotide for detection of SNP TSC0036083
tatcgtttttagy

SEQ ID NO: 143700 - DNA, 13 bp, Artificial Sequence
  Oligonucleotide for detection of SNP TSC0036083
rctaaaaacgata

SEQ ID NO: 143701 - DNA, 13 bp, Artificial Sequence
  Oligonucleotide for detection of SNP TSC0036084
gaatttagttgtg

SEQ ID NO: 143702 - DNA, 13 bp, Artificial Sequence
  Oligonucleotide for detection of SNP TSC0036084
cacaactaaattc

SEQ ID NO: 143703 - DNA, 13 bp, Artificial Sequence
  Oligonucleotide for detection of SNP TSC0036084
gaattttgttgtg

SEQ ID NO: 143704 - DNA, 13 bp, Artificial Sequence
  Oligonucleotide for detection of SNP TSC0036084
cacaacaaaattc

SEQ ID NO: 143705 - DNA, 13 bp, Artificial Sequence
  Oligonucleotide for detection of SNP TSC0036084
tataattgggtty

SEQ ID NO: 143706 - DNA, 13 bp, Artificial Sequence
  Oligonucleotide for detection of SNP TSC0036084
raacccaattata

SEQ ID NO: 143707 - DNA, 13 bp, Artificial Sequence
  Oligonucleotide for detection of SNP TSC0036084
tataatagggtty

SEQ ID NO: 143708 - DNA, 13 bp, Artificial Sequence
  Oligonucleotide for detection of SNP TSC0036084
raaccctattata

SEQ ID NO: 143709 - DNA, 13 bp, Artificial Sequence
  Oligonucleotide for detection of SNP TSC0036085
tgtttttttatag

SEQ ID NO: 143710 - DNA, 13 bp, Artificial Sequence
  Oligonucleotide for detection of SNP TSC0036085
ctataaaaaaaca

SEQ ID NO: 143711 - DNA, 13 bp, Artificial Sequence
  Oligonucleotide for detection of SNP TSC0036085
tgttttgttatag

SEQ ID NO: 143712 - DNA, 13 bp, Artificial Sequence
  Oligonucleotide for detection of SNP TSC0036085
ctataacaaaaca

SEQ ID NO: 143713 - DNA, 13 bp, Artificial Sequence
  Oligonucleotide for detection of SNP TSC0036085
ttgtaagaaagta

SEQ ID NO: 143714 - DNA, 13 bp, Artificial Sequence
  Oligonucleotide for detection of SNP TSC0036085
tactttcttacaa

SEQ ID NO: 143715 - DNA, 13 bp, Artificial Sequence
  Oligonucleotide for detection of SNP TSC0036085
ttgtaataaagta

SEQ ID NO: 143716 - DNA, 13 bp, Artificial Sequence
  Oligonucleotide for detection of SNP TSC0036085
tactttattacaa

SEQ ID NO: 143717 - DNA, 13 bp, Artificial Sequence
  Oligonucleotide for detection of SNP TSC0036086
tataatgtttggt

SEQ ID NO: 143718 - DNA, 13 bp, Artificial Sequence
  Oligonucleotide for detection of SNP TSC0036086
accaaacattata

SEQ ID NO: 143719 - DNA, 13 bp, Artificial Sequence
  Oligonucleotide for detection of SNP TSC0036086
tataatatttggt

SEQ ID NO: 143720 - DNA, 13 bp, Artificial Sequence
  Oligonucleotide for detection of SNP TSC0036086
accaaatattata

SEQ ID NO: 143721 - DNA, 13 bp, Artificial Sequence
  Oligonucleotide for detection of SNP TSC0036087
attatggtaagta

SEQ ID NO: 143722 - DNA, 13 bp, Artificial Sequence
  Oligonucleotide for detection of SNP TSC0036087
tacttaccataat

SEQ ID NO: 143723 - DNA, 13 bp, Artificial Sequence
  Oligonucleotide for detection of SNP TSC0036087
attatgataagta

SEQ ID NO: 143724 - DNA, 13 bp, Artificial Sequence
  Oligonucleotide for detection of SNP TSC0036087
tacttatcataat

SEQ ID NO: 143725 - DNA, 13 bp, Artificial Sequence
  Oligonucleotide for detection of SNP TSC0036088
aggagatgttggg

SEQ ID NO: 143726 - DNA, 13 bp, Artificial Sequence
  Oligonucleotide for detection of SNP TSC0036088
cccaacatctcct

SEQ ID NO: 143727 - DNA, 13 bp, Artificial Sequence
  Oligonucleotide for detection of SNP TSC0036088
aggagaagttggg

SEQ ID NO: 143728 - DNA, 13 bp, Artificial Sequence
  Oligonucleotide for detection of SNP TSC0036088
cccaacttctcct

SEQ ID NO: 143729 - DNA, 13 bp, Artificial Sequence
  Oligonucleotide for detection of SNP TSC0036089
ttgtaatgaatga

SEQ ID NO: 143730 - DNA, 13 bp, Artificial Sequence
  Oligonucleotide for detection of SNP TSC0036089
tcattcattacaa

SEQ ID NO: 143731 - DNA, 13 bp, Artificial Sequence
  Oligonucleotide for detection of SNP TSC0036089
ttgtaacgaatga

SEQ ID NO: 143732 - DNA, 13 bp, Artificial Sequence
  Oligonucleotide for detection of SNP TSC0036089
tcattcgttacaa

SEQ ID NO: 143733 - DNA, 13 bp, Artificial Sequence
  Oligonucleotide for detection of SNP TSC0036090
atgtgttgtttay

SEQ ID NO: 143734 - DNA, 13 bp, Artificial Sequence
  Oligonucleotide for detection of SNP TSC0036090
rtaaacaacacat

SEQ ID NO: 143735 - DNA, 13 bp, Artificial Sequence
  Oligonucleotide for detection of SNP TSC0036090
atgtgtcgtttay

SEQ ID NO: 143736 - DNA, 13 bp, Artificial Sequence
  Oligonucleotide for detection of SNP TSC0036090
rtaaacgacacat

SEQ ID NO: 143737 - DNA, 13 bp, Artificial Sequence
  Oligonucleotide for detection of SNP TSC0036090
gtggatggtatat

SEQ ID NO: 143738 - DNA, 13 bp, Artificial Sequence
  Oligonucleotide for detection of SNP TSC0036090
atataccatccac

SEQ ID NO: 143739 - DNA, 13 bp, Artificial Sequence
  Oligonucleotide for detection of SNP TSC0036090
gtggatagtatat

SEQ ID NO: 143740 - DNA, 13 bp, Artificial Sequence
  Oligonucleotide for detection of SNP TSC0036090
atatactatccac

SEQ ID NO: 143741 - DNA, 13 bp, Artificial Sequence
  Oligonucleotide for detection of SNP TSC0036090
gtggacggtatat

SEQ ID NO: 143742 - DNA, 13 bp, Artificial Sequence
  Oligonucleotide for detection of SNP TSC0036090
atataccgtccac

SEQ ID NO: 143743 - DNA, 13 bp, Artificial Sequence
  Oligonucleotide for detection of SNP TSC0036091
ttttttcgggggg

SEQ ID NO: 143744 - DNA, 13 bp, Artificial Sequence
  Oligonucleotide for detection of SNP TSC0036091
ccccccgaaaaaa

SEQ ID NO: 143745 - DNA, 13 bp, Artificial Sequence
  Oligonucleotide for detection of SNP TSC0036091
ttttttgaagaaa

SEQ ID NO: 143746 - DNA, 13 bp, Artificial Sequence
  Oligonucleotide for detection of SNP TSC0036091
tttcttcaaaaaa

SEQ ID NO: 143747 - DNA, 13 bp, Artificial Sequence
  Oligonucleotide for detection of SNP TSC0036091
ttttttaaagaaa

SEQ ID NO: 143748 - DNA, 13 bp, Artificial Sequence
  Oligonucleotide for detection of SNP TSC0036091
tttctttaaaaaa

SEQ ID NO: 143749 - DNA, 13 bp, Artificial Sequence
  Oligonucleotide for detection of SNP TSC0036091
tttttcgaagaaa

SEQ ID NO: 143750 - DNA, 13 bp, Artificial Sequence
  Oligonucleotide for detection of SNP TSC0036091
tttcttcgaaaaa

SEQ ID NO: 143751 - DNA, 13 bp, Artificial Sequence
  Oligonucleotide for detection of SNP TSC0036096
attataatgttag

SEQ ID NO: 143752 - DNA, 13 bp, Artificial Sequence
  Oligonucleotide for detection of SNP TSC0036096
ctaacattataat

SEQ ID NO: 143753 - DNA, 13 bp, Artificial Sequence
  Oligonucleotide for detection of SNP TSC0036096
attatattgttag

SEQ ID NO: 143754 - DNA, 13 bp, Artificial Sequence
  Oligonucleotide for detection of SNP TSC0036096
ctaacaatataat

SEQ ID NO: 143755 - DNA, 13 bp, Artificial Sequence
  Oligonucleotide for detection of SNP TSC0036096
ttagtattgtaat

SEQ ID NO: 143756 - DNA, 13 bp, Artificial Sequence
  Oligonucleotide for detection of SNP TSC0036096
attacaatactaa

SEQ ID NO: 143757 - DNA, 13 bp, Artificial Sequence
  Oligonucleotide for detection of SNP TSC0036096
ttagtagtgtaat

SEQ ID NO: 143758 - DNA, 13 bp, Artificial Sequence
  Oligonucleotide for detection of SNP TSC0036096
attacactactaa

SEQ ID NO: 143759 - DNA, 13 bp, Artificial Sequence
  Oligonucleotide for detection of SNP TSC0036097
atttattgtttta

SEQ ID NO: 143760 - DNA, 13 bp, Artificial Sequence
  Oligonucleotide for detection of SNP TSC0036097
taaaacaataaat

SEQ ID NO: 143761 - DNA, 13 bp, Artificial Sequence
  Oligonucleotide for detection of SNP TSC0036097
tggaattgtgagt

SEQ ID NO: 143762 - DNA, 13 bp, Artificial Sequence
  Oligonucleotide for detection of SNP TSC0036097
actcacaattcca

SEQ ID NO: 143763 - DNA, 13 bp, Artificial Sequence
  Oligonucleotide for detection of SNP TSC0036097
tggaatagtgagt

SEQ ID NO: 143764 - DNA, 13 bp, Artificial Sequence
  Oligonucleotide for detection of SNP TSC0036097
actcactattcca

SEQ ID NO: 143765 - DNA, 13 bp, Artificial Sequence
  Oligonucleotide for detection of SNP TSC0036098
ggtttaaatatta

SEQ ID NO: 143766 - DNA, 13 bp, Artificial Sequence
  Oligonucleotide for detection of SNP TSC0036098
taatatttaaacc

SEQ ID NO: 143767 - DNA, 13 bp, Artificial Sequence
  Oligonucleotide for detection of SNP TSC0036098
ggtttagatatta

SEQ ID NO: 143768 - DNA, 13 bp, Artificial Sequence
  Oligonucleotide for detection of SNP TSC0036098
taatatctaaacc

SEQ ID NO: 143769 - DNA, 13 bp, Artificial Sequence
  Oligonucleotide for detection of SNP TSC0036100
tggaatagtagtt

SEQ ID NO: 143770 - DNA, 13 bp, Artificial Sequence
  Oligonucleotide for detection of SNP TSC0036100
aactactattcca

SEQ ID NO: 143771 - DNA, 13 bp, Artificial Sequence
  Oligonucleotide for detection of SNP TSC0036100
tggaattgtagtt

SEQ ID NO: 143772 - DNA, 13 bp, Artificial Sequence
  Oligonucleotide for detection of SNP TSC0036100
aactacaattcca

SEQ ID NO: 143773 - DNA, 13 bp, Artificial Sequence
  Oligonucleotide for detection of SNP TSC0036100
tggaatcgtagtt

SEQ ID NO: 143774 - DNA, 13 bp, Artificial Sequence
  Oligonucleotide for detection of SNP TSC0036100
aactacgattcca

SEQ ID NO: 143775 - DNA, 13 bp, Artificial Sequence
  Oligonucleotide for detection of SNP TSC0036100
aattattatttta

SEQ ID NO: 143776 - DNA, 13 bp, Artificial Sequence
  Oligonucleotide for detection of SNP TSC0036100
taaaataataatt

SEQ ID NO: 143777 - DNA, 13 bp, Artificial Sequence
  Oligonucleotide for detection of SNP TSC0036100
aattatgatttta

SEQ ID NO: 143778 - DNA, 13 bp, Artificial Sequence
  Oligonucleotide for detection of SNP TSC0036100
taaaatcataatt

SEQ ID NO: 143779 - DNA, 13 bp, Artificial Sequence
  Oligonucleotide for detection of SNP TSC0036100
aattacgatttta

SEQ ID NO: 143780 - DNA, 13 bp, Artificial Sequence
  Oligonucleotide for detection of SNP TSC0036100
taaaatcgtaatt

SEQ ID NO: 143781 - DNA, 13 bp, Artificial Sequence
  Oligonucleotide for detection of SNP TSC0036101
gttttttgatttt

SEQ ID NO: 143782 - DNA, 13 bp, Artificial Sequence
  Oligonucleotide for detection of SNP TSC0036101
aaaatcaaaaaac

SEQ ID NO: 143783 - DNA, 13 bp, Artificial Sequence
  Oligonucleotide for detection of SNP TSC0036101
gtttttcgatttt

SEQ ID NO: 143784 - DNA, 13 bp, Artificial Sequence
  Oligonucleotide for detection of SNP TSC0036101
aaaatcgaaaaac

SEQ ID NO: 143785 - DNA, 13 bp, Artificial Sequence
  Oligonucleotide for detection of SNP TSC0036101
agggttggagagy

SEQ ID NO: 143786 - DNA, 13 bp, Artificial Sequence
  Oligonucleotide for detection of SNP TSC0036101
rctctccaaccct

SEQ ID NO: 143787 - DNA, 13 bp, Artificial Sequence
  Oligonucleotide for detection of SNP TSC0036101
agggttagagagy

SEQ ID NO: 143788 - DNA, 13 bp, Artificial Sequence
  Oligonucleotide for detection of SNP TSC0036101
rctctctaaccct

SEQ ID NO: 143789 - DNA, 13 bp, Artificial Sequence
  Oligonucleotide for detection of SNP TSC0036101
agggtcggagagy

SEQ ID NO: 143790 - DNA, 13 bp, Artificial Sequence
  Oligonucleotide for detection of SNP TSC0036101
rctctccgaccct

SEQ ID NO: 143791 - DNA, 13 bp, Artificial Sequence
  Oligonucleotide for detection of SNP TSC0036102
tggtttatgtata

SEQ ID NO: 143792 - DNA, 13 bp, Artificial Sequence
  Oligonucleotide for detection of SNP TSC0036102
tatacataaacca

SEQ ID NO: 143793 - DNA, 13 bp, Artificial Sequence
  Oligonucleotide for detection of SNP TSC0036102
tggtttgtgtata

SEQ ID NO: 143794 - DNA, 13 bp, Artificial Sequence
  Oligonucleotide for detection of SNP TSC0036102
tatacacaaacca

SEQ ID NO: 143795 - DNA, 13 bp, Artificial Sequence
  Oligonucleotide for detection of SNP TSC0036102
tggttcgtgtata

SEQ ID NO: 143796 - DNA, 13 bp, Artificial Sequence
  Oligonucleotide for detection of SNP TSC0036102
tatacacgaacca

SEQ ID NO: 143797 - DNA, 13 bp, Artificial Sequence
  Oligonucleotide for detection of SNP TSC0036102
tatatatgggtta

SEQ ID NO: 143798 - DNA, 13 bp, Artificial Sequence
  Oligonucleotide for detection of SNP TSC0036102
taacccatatata

SEQ ID NO: 143799 - DNA, 13 bp, Artificial Sequence
  Oligonucleotide for detection of SNP TSC0036102
tatatacgggtta

SEQ ID NO: 143800 - DNA, 13 bp, Artificial Sequence
  Oligonucleotide for detection of SNP TSC0036102
taacccgtatata

SEQ ID NO: 143801 - DNA, 13 bp, Artificial Sequence
  Oligonucleotide for detection of SNP TSC0036106
tgataaaattttt

SEQ ID NO: 143802 - DNA, 13 bp, Artificial Sequence
  Oligonucleotide for detection of SNP TSC0036106
aaaaattttatca

SEQ ID NO: 143803 - DNA, 13 bp, Artificial Sequence
  Oligonucleotide for detection of SNP TSC0036106
tgataatattttt

SEQ ID NO: 143804 - DNA, 13 bp, Artificial Sequence
  Oligonucleotide for detection of SNP TSC0036106
aaaaatattatca

SEQ ID NO: 143805 - DNA, 13 bp, Artificial Sequence
  Oligonucleotide for detection of SNP TSC0036106
cgataaaattttt

SEQ ID NO: 143806 - DNA, 13 bp, Artificial Sequence
  Oligonucleotide for detection of SNP TSC0036106
aaaaattttatcg

SEQ ID NO: 143807 - DNA, 13 bp, Artificial Sequence
  Oligonucleotide for detection of SNP TSC0036106
cgataatattttt

SEQ ID NO: 143808 - DNA, 13 bp, Artificial Sequence
  Oligonucleotide for detection of SNP TSC0036106
aaaaatattatcg

SEQ ID NO: 143809 - DNA, 13 bp, Artificial Sequence
  Oligonucleotide for detection of SNP TSC0036106
aaaaattttgttg

SEQ ID NO: 143810 - DNA, 13 bp, Artificial Sequence
  Oligonucleotide for detection of SNP TSC0036106
caacaaaattttt

SEQ ID NO: 143811 - DNA, 13 bp, Artificial Sequence
  Oligonucleotide for detection of SNP TSC0036106
aaaaatgttgttg

SEQ ID NO: 143812 - DNA, 13 bp, Artificial Sequence
  Oligonucleotide for detection of SNP TSC0036106
caacaacattttt

SEQ ID NO: 143813 - DNA, 13 bp, Artificial Sequence
  Oligonucleotide for detection of SNP TSC0036106
aaaaattttgtcg

SEQ ID NO: 143814 - DNA, 13 bp, Artificial Sequence
  Oligonucleotide for detection of SNP TSC0036106
cgacaaaattttt

SEQ ID NO: 143815 - DNA, 13 bp, Artificial Sequence
  Oligonucleotide for detection of SNP TSC0036106
aaaaatgttgtcg

SEQ ID NO: 143816 - DNA, 13 bp, Artificial Sequence
  Oligonucleotide for detection of SNP TSC0036106
cgacaacattttt

SEQ ID NO: 143817 - DNA, 13 bp, Artificial Sequence
  Oligonucleotide for detection of SNP TSC0036107
gaggagtaaggag

SEQ ID NO: 143818 - DNA, 13 bp, Artificial Sequence
  Oligonucleotide for detection of SNP TSC0036107
ctccttactcctc

SEQ ID NO: 143819 - DNA, 13 bp, Artificial Sequence
  Oligonucleotide for detection of SNP TSC0036107
gaggaggaaggag

SEQ ID NO: 143820 - DNA, 13 bp, Artificial Sequence
  Oligonucleotide for detection of SNP TSC0036107
ctccttcctcctc

SEQ ID NO: 143821 - DNA, 13 bp, Artificial Sequence
  Oligonucleotide for detection of SNP TSC0036110
gttgtttgggagg

SEQ ID NO: 143822 - DNA, 13 bp, Artificial Sequence
  Oligonucleotide for detection of SNP TSC0036110
cctcccaaacaac

SEQ ID NO: 143823 - DNA, 13 bp, Artificial Sequence
  Oligonucleotide for detection of SNP TSC0036110
gttgttcgggagg

SEQ ID NO: 143824 - DNA, 13 bp, Artificial Sequence
  Oligonucleotide for detection of SNP TSC0036110
cctcccgaacaac

SEQ ID NO: 143825 - DNA, 13 bp, Artificial Sequence
  Oligonucleotide for detection of SNP TSC0036112
agttttattttgt

SEQ ID NO: 143826 - DNA, 13 bp, Artificial Sequence
  Oligonucleotide for detection of SNP TSC0036112
acaaaataaaact

SEQ ID NO: 143827 - DNA, 13 bp, Artificial Sequence
  Oligonucleotide for detection of SNP TSC0036112
agtttcgttttgt

SEQ ID NO: 143828 - DNA, 13 bp, Artificial Sequence
  Oligonucleotide for detection of SNP TSC0036112
acaaaacgaaact

SEQ ID NO: 143829 - DNA, 13 bp, Artificial Sequence
  Oligonucleotide for detection of SNP TSC0036118
ttataggagaggg

SEQ ID NO: 143830 - DNA, 13 bp, Artificial Sequence
  Oligonucleotide for detection of SNP TSC0036118
ccctctcctataa

SEQ ID NO: 143831 - DNA, 13 bp, Artificial Sequence
  Oligonucleotide for detection of SNP TSC0036118
ttatagtagaggg

SEQ ID NO: 143832 - DNA, 13 bp, Artificial Sequence
  Oligonucleotide for detection of SNP TSC0036118
ccctctactataa

SEQ ID NO: 143833 - DNA, 13 bp, Artificial Sequence
  Oligonucleotide for detection of SNP TSC0036119
atgaataatattg

SEQ ID NO: 143834 - DNA, 13 bp, Artificial Sequence
  Oligonucleotide for detection of SNP TSC0036119
caatattattcat

SEQ ID NO: 143835 - DNA, 13 bp, Artificial Sequence
  Oligonucleotide for detection of SNP TSC0036119
atgaattatattg

SEQ ID NO: 143836 - DNA, 13 bp, Artificial Sequence
  Oligonucleotide for detection of SNP TSC0036119
caatataattcat

SEQ ID NO: 143837 - DNA, 13 bp, Artificial Sequence
  Oligonucleotide for detection of SNP TSC0036119
taatgttgtttat

SEQ ID NO: 143838 - DNA, 13 bp, Artificial Sequence
  Oligonucleotide for detection of SNP TSC0036119
ataaacaacatta

SEQ ID NO: 143839 - DNA, 13 bp, Artificial Sequence
  Oligonucleotide for detection of SNP TSC0036119
taatgtggtttat

SEQ ID NO: 143840 - DNA, 13 bp, Artificial Sequence
  Oligonucleotide for detection of SNP TSC0036119
ataaaccacatta

SEQ ID NO: 143841 - DNA, 13 bp, Artificial Sequence
  Oligonucleotide for detection of SNP TSC0036120
agggatgtgatga

SEQ ID NO: 143842 - DNA, 13 bp, Artificial Sequence
  Oligonucleotide for detection of SNP TSC0036120
tcatcacatccct

SEQ ID NO: 143843 - DNA, 13 bp, Artificial Sequence
  Oligonucleotide for detection of SNP TSC0036120
agggatttgatga

SEQ ID NO: 143844 - DNA, 13 bp, Artificial Sequence
  Oligonucleotide for detection of SNP TSC0036120
tcatcaaatccct

SEQ ID NO: 143845 - DNA, 13 bp, Artificial Sequence
  Oligonucleotide for detection of SNP TSC0036120
agggacgtgatga

SEQ ID NO: 143846 - DNA, 13 bp, Artificial Sequence
  Oligonucleotide for detection of SNP TSC0036120
tcatcacgtccct

SEQ ID NO: 143847 - DNA, 13 bp, Artificial Sequence
  Oligonucleotide for detection of SNP TSC0036120
agggattcgatga

SEQ ID NO: 143848 - DNA, 13 bp, Artificial Sequence
  Oligonucleotide for detection of SNP TSC0036120
tcatcgaatccct

SEQ ID NO: 143849 - DNA, 13 bp, Artificial Sequence
  Oligonucleotide for detection of SNP TSC0036120
agggatgcgatga

SEQ ID NO: 143850 - DNA, 13 bp, Artificial Sequence
  Oligonucleotide for detection of SNP TSC0036120
tcatcgcatccct

SEQ ID NO: 143851 - DNA, 13 bp, Artificial Sequence
  Oligonucleotide for detection of SNP TSC0036120
agggacgcgatga

SEQ ID NO: 143852 - DNA, 13 bp, Artificial Sequence
  Oligonucleotide for detection of SNP TSC0036120
tcatcgcgtccct

SEQ ID NO: 143853 - DNA, 13 bp, Artificial Sequence
  Oligonucleotide for detection of SNP TSC0036120
ttattgagttttt

SEQ ID NO: 143854 - DNA, 13 bp, Artificial Sequence
  Oligonucleotide for detection of SNP TSC0036120
aaaaactcaataa

SEQ ID NO: 143855 - DNA, 13 bp, Artificial Sequence
  Oligonucleotide for detection of SNP TSC0036120
ttatcgtgttttt

SEQ ID NO: 143856 - DNA, 13 bp, Artificial Sequence
  Oligonucleotide for detection of SNP TSC0036120
aaaaacacgataa

SEQ ID NO: 143857 - DNA, 13 bp, Artificial Sequence
  Oligonucleotide for detection of SNP TSC0036120
ttatcgagttttt

SEQ ID NO: 143858 - DNA, 13 bp, Artificial Sequence
  Oligonucleotide for detection of SNP TSC0036120
aaaaactcgataa

SEQ ID NO: 143859 - DNA, 13 bp, Artificial Sequence
  Oligonucleotide for detection of SNP TSC0036120
ttatcgcgttttt

SEQ ID NO: 143860 - DNA, 13 bp, Artificial Sequence
  Oligonucleotide for detection of SNP TSC0036120
aaaaacgcgataa

SEQ ID NO: 143861 - DNA, 13 bp, Artificial Sequence
  Oligonucleotide for detection of SNP TSC0036121
agtatagatttay

SEQ ID NO: 143862 - DNA, 13 bp, Artificial Sequence
  Oligonucleotide for detection of SNP TSC0036121
rtaaatctatact

SEQ ID NO: 143863 - DNA, 13 bp, Artificial Sequence
  Oligonucleotide for detection of SNP TSC0036121
agtatatatttay

SEQ ID NO: 143864 - DNA, 13 bp, Artificial Sequence
  Oligonucleotide for detection of SNP TSC0036121
rtaaatatatact

SEQ ID NO: 143865 - DNA, 13 bp, Artificial Sequence
  Oligonucleotide for detection of SNP TSC0036121
gtgaatttgtatt

SEQ ID NO: 143866 - DNA, 13 bp, Artificial Sequence
  Oligonucleotide for detection of SNP TSC0036121
aatacaaattcac

SEQ ID NO: 143867 - DNA, 13 bp, Artificial Sequence
  Oligonucleotide for detection of SNP TSC0036121
gtgaatatgtatt

SEQ ID NO: 143868 - DNA, 13 bp, Artificial Sequence
  Oligonucleotide for detection of SNP TSC0036121
aatacatattcac

SEQ ID NO: 143869 - DNA, 13 bp, Artificial Sequence
  Oligonucleotide for detection of SNP TSC0036123
attttgtgatttt

SEQ ID NO: 143870 - DNA, 13 bp, Artificial Sequence
  Oligonucleotide for detection of SNP TSC0036123
aaaatcacaaaat

SEQ ID NO: 143871 - DNA, 13 bp, Artificial Sequence
  Oligonucleotide for detection of SNP TSC0036123
attttgcgatttt

SEQ ID NO: 143872 - DNA, 13 bp, Artificial Sequence
  Oligonucleotide for detection of SNP TSC0036123
aaaatcgcaaaat

SEQ ID NO: 143873 - DNA, 13 bp, Artificial Sequence
  Oligonucleotide for detection of SNP TSC0036123
aaggttgtagaat

SEQ ID NO: 143874 - DNA, 13 bp, Artificial Sequence
  Oligonucleotide for detection of SNP TSC0036123
attctacaacctt

SEQ ID NO: 143875 - DNA, 13 bp, Artificial Sequence
  Oligonucleotide for detection of SNP TSC0036123
aaggttatagaat

SEQ ID NO: 143876 - DNA, 13 bp, Artificial Sequence
  Oligonucleotide for detection of SNP TSC0036123
attctataacctt

SEQ ID NO: 143877 - DNA, 13 bp, Artificial Sequence
  Oligonucleotide for detection of SNP TSC0036123
aaggtcgtagaat

SEQ ID NO: 143878 - DNA, 13 bp, Artificial Sequence
  Oligonucleotide for detection of SNP TSC0036123
attctacgacctt

SEQ ID NO: 143879 - DNA, 13 bp, Artificial Sequence
  Oligonucleotide for detection of SNP TSC0036124
ttatgtgttttaa

SEQ ID NO: 143880 - DNA, 13 bp, Artificial Sequence
  Oligonucleotide for detection of SNP TSC0036124
ttaaaacacataa

SEQ ID NO: 143881 - DNA, 13 bp, Artificial Sequence
  Oligonucleotide for detection of SNP TSC0036124
ttatgttttttaa

SEQ ID NO: 143882 - DNA, 13 bp, Artificial Sequence
  Oligonucleotide for detection of SNP TSC0036124
ttaaaaaacataa

SEQ ID NO: 143883 - DNA, 13 bp, Artificial Sequence
  Oligonucleotide for detection of SNP TSC0036124
ttaaaatatatga

SEQ ID NO: 143884 - DNA, 13 bp, Artificial Sequence
  Oligonucleotide for detection of SNP TSC0036124
tcatatattttaa

SEQ ID NO: 143885 - DNA, 13 bp, Artificial Sequence
  Oligonucleotide for detection of SNP TSC0036124
ttaaaaaatatga

SEQ ID NO: 143886 - DNA, 13 bp, Artificial Sequence
  Oligonucleotide for detection of SNP TSC0036124
tcatattttttaa

SEQ ID NO: 143887 - DNA, 13 bp, Artificial Sequence
  Oligonucleotide for detection of SNP TSC0036127
agagaggttggtg

SEQ ID NO: 143888 - DNA, 13 bp, Artificial Sequence
  Oligonucleotide for detection of SNP TSC0036127
caccaacctctct

SEQ ID NO: 143889 - DNA, 13 bp, Artificial Sequence
  Oligonucleotide for detection of SNP TSC0036127
agagagtttggtg

SEQ ID NO: 143890 - DNA, 13 bp, Artificial Sequence
  Oligonucleotide for detection of SNP TSC0036127
caccaaactctct

SEQ ID NO: 143891 - DNA, 13 bp, Artificial Sequence
  Oligonucleotide for detection of SNP TSC0036127
tattagttttttt

SEQ ID NO: 143892 - DNA, 13 bp, Artificial Sequence
  Oligonucleotide for detection of SNP TSC0036127
aaaaaaactaata

SEQ ID NO: 143893 - DNA, 13 bp, Artificial Sequence
  Oligonucleotide for detection of SNP TSC0036127
tattagatttttt

SEQ ID NO: 143894 - DNA, 13 bp, Artificial Sequence
  Oligonucleotide for detection of SNP TSC0036127
aaaaaatctaata

SEQ ID NO: 143895 - DNA, 13 bp, Artificial Sequence
  Oligonucleotide for detection of SNP TSC0036128
ttaagagatttty

SEQ ID NO: 143896 - DNA, 13 bp, Artificial Sequence
  Oligonucleotide for detection of SNP TSC0036128
raaaatctcttaa

SEQ ID NO: 143897 - DNA, 13 bp, Artificial Sequence
  Oligonucleotide for detection of SNP TSC0036128
ttaagaaatttty

SEQ ID NO: 143898 - DNA, 13 bp, Artificial Sequence
  Oligonucleotide for detection of SNP TSC0036128
raaaatttcttaa

SEQ ID NO: 143899 - DNA, 13 bp, Artificial Sequence
  Oligonucleotide for detection of SNP TSC0036129
ggttgatgtatay

SEQ ID NO: 143900 - DNA, 13 bp, Artificial Sequence
  Oligonucleotide for detection of SNP TSC0036129
rtatacatcaacc

SEQ ID NO: 143901 - DNA, 13 bp, Artificial Sequence
  Oligonucleotide for detection of SNP TSC0036129
ggttgacgtatay

SEQ ID NO: 143902 - DNA, 13 bp, Artificial Sequence
  Oligonucleotide for detection of SNP TSC0036129
rtatacgtcaacc

SEQ ID NO: 143903 - DNA, 13 bp, Artificial Sequence
  Oligonucleotide for detection of SNP TSC0036129
gtgtgtgttagty

SEQ ID NO: 143904 - DNA, 13 bp, Artificial Sequence
  Oligonucleotide for detection of SNP TSC0036129
ractaacacacac

SEQ ID NO: 143905 - DNA, 13 bp, Artificial Sequence
  Oligonucleotide for detection of SNP TSC0036129
gtgtgtattagty

SEQ ID NO: 143906 - DNA, 13 bp, Artificial Sequence
  Oligonucleotide for detection of SNP TSC0036129
ractaatacacac

SEQ ID NO: 143907 - DNA, 13 bp, Artificial Sequence
  Oligonucleotide for detection of SNP TSC0036129
gtgtgcgttagty

SEQ ID NO: 143908 - DNA, 13 bp, Artificial Sequence
  Oligonucleotide for detection of SNP TSC0036129
ractaacgcacac

SEQ ID NO: 143909 - DNA, 13 bp, Artificial Sequence
  Oligonucleotide for detection of SNP TSC0036131
gaaaattaagtga

SEQ ID NO: 143910 - DNA, 13 bp, Artificial Sequence
  Oligonucleotide for detection of SNP TSC0036131
tcacttaattttc

SEQ ID NO: 143911 - DNA, 13 bp, Artificial Sequence
  Oligonucleotide for detection of SNP TSC0036131
gaaaatgaagtga

SEQ ID NO: 143912 - DNA, 13 bp, Artificial Sequence
  Oligonucleotide for detection of SNP TSC0036131
tcacttcattttc

SEQ ID NO: 143913 - DNA, 13 bp, Artificial Sequence
  Oligonucleotide for detection of SNP TSC0036131
ttatttgatttty

SEQ ID NO: 143914 - DNA, 13 bp, Artificial Sequence
  Oligonucleotide for detection of SNP TSC0036131
raaaatcaaataa

SEQ ID NO: 143915 - DNA, 13 bp, Artificial Sequence
  Oligonucleotide for detection of SNP TSC0036139
atgtataatttat

SEQ ID NO: 143916 - DNA, 13 bp, Artificial Sequence
  Oligonucleotide for detection of SNP TSC0036139
ataaattatacat

SEQ ID NO: 143917 - DNA, 13 bp, Artificial Sequence
  Oligonucleotide for detection of SNP TSC0036139
atgtattatttat

SEQ ID NO: 143918 - DNA, 13 bp, Artificial Sequence
  Oligonucleotide for detection of SNP TSC0036139
ataaataatacat

SEQ ID NO: 143919 - DNA, 13 bp, Artificial Sequence
  Oligonucleotide for detection of SNP TSC0036139
atagattgtgtat

SEQ ID NO: 143920 - DNA, 13 bp, Artificial Sequence
  Oligonucleotide for detection of SNP TSC0036139
atacacaatctat

SEQ ID NO: 143921 - DNA, 13 bp, Artificial Sequence
  Oligonucleotide for detection of SNP TSC0036139
atagatggtgtat

SEQ ID NO: 143922 - DNA, 13 bp, Artificial Sequence
  Oligonucleotide for detection of SNP TSC0036139
atacaccatctat

SEQ ID NO: 143923 - DNA, 13 bp, Artificial Sequence
  Oligonucleotide for detection of SNP TSC0036140
tatattttaattg

SEQ ID NO: 143924 - DNA, 13 bp, Artificial Sequence
  Oligonucleotide for detection of SNP TSC0036140
caattaaaatata

SEQ ID NO: 143925 - DNA, 13 bp, Artificial Sequence
  Oligonucleotide for detection of SNP TSC0036140
tatattgtaattg

SEQ ID NO: 143926 - DNA, 13 bp, Artificial Sequence
  Oligonucleotide for detection of SNP TSC0036140
caattacaatata

SEQ ID NO: 143927 - DNA, 13 bp, Artificial Sequence
  Oligonucleotide for detection of SNP TSC0036140
taattagaatata

SEQ ID NO: 143928 - DNA, 13 bp, Artificial Sequence
  Oligonucleotide for detection of SNP TSC0036140
tatattctaatta

SEQ ID NO: 143929 - DNA, 13 bp, Artificial Sequence
  Oligonucleotide for detection of SNP TSC0036140
taattataatata

SEQ ID NO: 143930 - DNA, 13 bp, Artificial Sequence
  Oligonucleotide for detection of SNP TSC0036140
tatattataatta

SEQ ID NO: 143931 - DNA, 13 bp, Artificial Sequence
  Oligonucleotide for detection of SNP TSC0036141
taaaatagagaaa

SEQ ID NO: 143932 - DNA, 13 bp, Artificial Sequence
  Oligonucleotide for detection of SNP TSC0036141
tttctctatttta

SEQ ID NO: 143933 - DNA, 13 bp, Artificial Sequence
  Oligonucleotide for detection of SNP TSC0036141
taaaatggagaaa

SEQ ID NO: 143934 - DNA, 13 bp, Artificial Sequence
  Oligonucleotide for detection of SNP TSC0036141
tttctccatttta

SEQ ID NO: 143935 - DNA, 13 bp, Artificial Sequence
  Oligonucleotide for detection of SNP TSC0036141
taaaacggagaaa

SEQ ID NO: 143936 - DNA, 13 bp, Artificial Sequence
  Oligonucleotide for detection of SNP TSC0036141
tttctccgtttta

SEQ ID NO: 143937 - DNA, 13 bp, Artificial Sequence
  Oligonucleotide for detection of SNP TSC0036144
aaggagtgggaga

SEQ ID NO: 143938 - DNA, 13 bp, Artificial Sequence
  Oligonucleotide for detection of SNP TSC0036144
tctcccactcctt

SEQ ID NO: 143939 - DNA, 13 bp, Artificial Sequence
  Oligonucleotide for detection of SNP TSC0036144
aaggagggggaga

SEQ ID NO: 143940 - DNA, 13 bp, Artificial Sequence
  Oligonucleotide for detection of SNP TSC0036144
tctccccctcctt

SEQ ID NO: 143941 - DNA, 13 bp, Artificial Sequence
  Oligonucleotide for detection of SNP TSC0036144
aaggagcgggaga

SEQ ID NO: 143942 - DNA, 13 bp, Artificial Sequence
  Oligonucleotide for detection of SNP TSC0036144
tctcccgctcctt

SEQ ID NO: 143943 - DNA, 13 bp, Artificial Sequence
  Oligonucleotide for detection of SNP TSC0036145
ttagaagtttata

SEQ ID NO: 143944 - DNA, 13 bp, Artificial Sequence
  Oligonucleotide for detection of SNP TSC0036145
tataaacttctaa

SEQ ID NO: 143945 - DNA, 13 bp, Artificial Sequence
  Oligonucleotide for detection of SNP TSC0036145
ttagaattttata

SEQ ID NO: 143946 - DNA, 13 bp, Artificial Sequence
  Oligonucleotide for detection of SNP TSC0036145
tataaaattctaa

SEQ ID NO: 143947 - DNA, 13 bp, Artificial Sequence
  Oligonucleotide for detection of SNP TSC0036145
tgtaagtttttaa

SEQ ID NO: 143948 - DNA, 13 bp, Artificial Sequence
  Oligonucleotide for detection of SNP TSC0036145
ttaaaaacttaca

SEQ ID NO: 143949 - DNA, 13 bp, Artificial Sequence
  Oligonucleotide for detection of SNP TSC0036145
tgtaagattttaa

SEQ ID NO: 143950 - DNA, 13 bp, Artificial Sequence
  Oligonucleotide for detection of SNP TSC0036145
ttaaaatcttaca

SEQ ID NO: 143951 - DNA, 13 bp, Artificial Sequence
  Oligonucleotide for detection of SNP TSC0036151
tatagtaaagttt

SEQ ID NO: 143952 - DNA, 13 bp, Artificial Sequence
  Oligonucleotide for detection of SNP TSC0036151
aaactttactata

SEQ ID NO: 143953 - DNA, 13 bp, Artificial Sequence
  Oligonucleotide for detection of SNP TSC0036151
tatagttaagttt

SEQ ID NO: 143954 - DNA, 13 bp, Artificial Sequence
  Oligonucleotide for detection of SNP TSC0036151
aaacttaactata

SEQ ID NO: 143955 - DNA, 13 bp, Artificial Sequence
  Oligonucleotide for detection of SNP TSC0036151
aaattttgttatg

SEQ ID NO: 143956 - DNA, 13 bp, Artificial Sequence
  Oligonucleotide for detection of SNP TSC0036151
cataacaaaattt

SEQ ID NO: 143957 - DNA, 13 bp, Artificial Sequence
  Oligonucleotide for detection of SNP TSC0036151
aaatttggttatg

SEQ ID NO: 143958 - DNA, 13 bp, Artificial Sequence
  Oligonucleotide for detection of SNP TSC0036151
cataaccaaattt

SEQ ID NO: 143959 - DNA, 13 bp, Artificial Sequence
  Oligonucleotide for detection of SNP TSC0036155
taatatgggtgta

SEQ ID NO: 143960 - DNA, 13 bp, Artificial Sequence
  Oligonucleotide for detection of SNP TSC0036155
tacacccatatta

SEQ ID NO: 143961 - DNA, 13 bp, Artificial Sequence
  Oligonucleotide for detection of SNP TSC0036155
taatataggtgta

SEQ ID NO: 143962 - DNA, 13 bp, Artificial Sequence
  Oligonucleotide for detection of SNP TSC0036155
tacacctatatta

SEQ ID NO: 143963 - DNA, 13 bp, Artificial Sequence
  Oligonucleotide for detection of SNP TSC0036159
ttggagagttatt

SEQ ID NO: 143964 - DNA, 13 bp, Artificial Sequence
  Oligonucleotide for detection of SNP TSC0036159
aataactctccaa

SEQ ID NO: 143965 - DNA, 13 bp, Artificial Sequence
  Oligonucleotide for detection of SNP TSC0036159
ttggagggttatt

SEQ ID NO: 143966 - DNA, 13 bp, Artificial Sequence
  Oligonucleotide for detection of SNP TSC0036159
aataaccctccaa

SEQ ID NO: 143967 - DNA, 13 bp, Artificial Sequence
  Oligonucleotide for detection of SNP TSC0036160
gataatatttaty

SEQ ID NO: 143968 - DNA, 13 bp, Artificial Sequence
  Oligonucleotide for detection of SNP TSC0036160
rataaatattatc

SEQ ID NO: 143969 - DNA, 13 bp, Artificial Sequence
  Oligonucleotide for detection of SNP TSC0036160
gataatgtttaty

SEQ ID NO: 143970 - DNA, 13 bp, Artificial Sequence
  Oligonucleotide for detection of SNP TSC0036160
rataaacattatc

SEQ ID NO: 143971 - DNA, 13 bp, Artificial Sequence
  Oligonucleotide for detection of SNP TSC0036160
gataacgtttaty

SEQ ID NO: 143972 - DNA, 13 bp, Artificial Sequence
  Oligonucleotide for detection of SNP TSC0036160
rataaacgttatc

SEQ ID NO: 143973 - DNA, 13 bp, Artificial Sequence
  Oligonucleotide for detection of SNP TSC0036160
ggtggatgttgty

SEQ ID NO: 143974 - DNA, 13 bp, Artificial Sequence
  Oligonucleotide for detection of SNP TSC0036160
racaacatccacc

SEQ ID NO: 143975 - DNA, 13 bp, Artificial Sequence
  Oligonucleotide for detection of SNP TSC0036160
ggtggacgttgty

SEQ ID NO: 143976 - DNA, 13 bp, Artificial Sequence
  Oligonucleotide for detection of SNP TSC0036160
racaacgtccacc

SEQ ID NO: 143977 - DNA, 13 bp, Artificial Sequence
  Oligonucleotide for detection of SNP TSC0036161
atatgatgtatty

SEQ ID NO: 143978 - DNA, 13 bp, Artificial Sequence
  Oligonucleotide for detection of SNP TSC0036161
raatacatcatat

SEQ ID NO: 143979 - DNA, 13 bp, Artificial Sequence
  Oligonucleotide for detection of SNP TSC0036161
atatgacgtatty

SEQ ID NO: 143980 - DNA, 13 bp, Artificial Sequence
  Oligonucleotide for detection of SNP TSC0036161
raatacgtcatat

SEQ ID NO: 143981 - DNA, 13 bp, Artificial Sequence
  Oligonucleotide for detection of SNP TSC0036161
ggatgtgttatgt

SEQ ID NO: 143982 - DNA, 13 bp, Artificial Sequence
  Oligonucleotide for detection of SNP TSC0036161
acataacacatcc

SEQ ID NO: 143983 - DNA, 13 bp, Artificial Sequence
  Oligonucleotide for detection of SNP TSC0036161
ggatgtattatgt

SEQ ID NO: 143984 - DNA, 13 bp, Artificial Sequence
  Oligonucleotide for detection of SNP TSC0036161
acataatacatcc

SEQ ID NO: 143985 - DNA, 13 bp, Artificial Sequence
  Oligonucleotide for detection of SNP TSC0036161
ggatgcgttatgt

SEQ ID NO: 143986 - DNA, 13 bp, Artificial Sequence
  Oligonucleotide for detection of SNP TSC0036161
acataacgcatcc

SEQ ID NO: 143987 - DNA, 13 bp, Artificial Sequence
  Oligonucleotide for detection of SNP TSC0036164
atgttatggaagg

SEQ ID NO: 143988 - DNA, 13 bp, Artificial Sequence
  Oligonucleotide for detection of SNP TSC0036164
ccttccataacat

SEQ ID NO: 143989 - DNA, 13 bp, Artificial Sequence
  Oligonucleotide for detection of SNP TSC0036164
atgttagggaagg

SEQ ID NO: 143990 - DNA, 13 bp, Artificial Sequence
  Oligonucleotide for detection of SNP TSC0036164
ccttccctaacat

SEQ ID NO: 143991 - DNA, 13 bp, Artificial Sequence
  Oligonucleotide for detection of SNP TSC0036164
acgttatggaagg

SEQ ID NO: 143992 - DNA, 13 bp, Artificial Sequence
  Oligonucleotide for detection of SNP TSC0036164
ccttccataacgt

SEQ ID NO: 143993 - DNA, 13 bp, Artificial Sequence
  Oligonucleotide for detection of SNP TSC0036164
acgttagggaagg

SEQ ID NO: 143994 - DNA, 13 bp, Artificial Sequence
  Oligonucleotide for detection of SNP TSC0036164
ccttccctaacgt

SEQ ID NO: 143995 - DNA, 13 bp, Artificial Sequence
  Oligonucleotide for detection of SNP TSC0036164
atgttacggaagg

SEQ ID NO: 143996 - DNA, 13 bp, Artificial Sequence
  Oligonucleotide for detection of SNP TSC0036164
ccttccgtaacat

SEQ ID NO: 143997 - DNA, 13 bp, Artificial Sequence
  Oligonucleotide for detection of SNP TSC0036164
acgttacggaagg

SEQ ID NO: 143998 - DNA, 13 bp, Artificial Sequence
  Oligonucleotide for detection of SNP TSC0036164
ccttccgtaacgt

SEQ ID NO: 143999 - DNA, 13 bp, Artificial Sequence
  Oligonucleotide for detection of SNP TSC0036164
ttttttgtggtgt

SEQ ID NO: 144000 - DNA, 13 bp, Artificial Sequence
  Oligonucleotide for detection of SNP TSC0036164
acaccacaaaaaa

SEQ ID NO: 144001 - DNA, 13 bp, Artificial Sequence
  Oligonucleotide for detection of SNP TSC0036164
ttttttttggtgt

SEQ ID NO: 144002 - DNA, 13 bp, Artificial Sequence
  Oligonucleotide for detection of SNP TSC0036164
acaccaaaaaaaa

SEQ ID NO: 144003 - DNA, 13 bp, Artificial Sequence
  Oligonucleotide for detection of SNP TSC0036164
tttttcgtggtgt

SEQ ID NO: 144004 - DNA, 13 bp, Artificial Sequence
  Oligonucleotide for detection of SNP TSC0036164
acaccacgaaaaa

SEQ ID NO: 144005 - DNA, 13 bp, Artificial Sequence
  Oligonucleotide for detection of SNP TSC0036164
ttttttttggcgt

SEQ ID NO: 144006 - DNA, 13 bp, Artificial Sequence
  Oligonucleotide for detection of SNP TSC0036164
acgccaaaaaaaa

SEQ ID NO: 144007 - DNA, 13 bp, Artificial Sequence
  Oligonucleotide for detection of SNP TSC0036164
ttttttgtggcgt

SEQ ID NO: 144008 - DNA, 13 bp, Artificial Sequence
  Oligonucleotide for detection of SNP TSC0036164
acgccacaaaaaa

SEQ ID NO: 144009 - DNA, 13 bp, Artificial Sequence
  Oligonucleotide for detection of SNP TSC0036164
tttttcgtggcgt

SEQ ID NO: 144010 - DNA, 13 bp, Artificial Sequence
  Oligonucleotide for detection of SNP TSC0036164
acgccacgaaaaa

SEQ ID NO: 144011 - DNA, 13 bp, Artificial Sequence
  Oligonucleotide for detection of SNP TSC0036165
tggaaggtttagy

SEQ ID NO: 144012 - DNA, 13 bp, Artificial Sequence
  Oligonucleotide for detection of SNP TSC0036165
rctaaaccttcca

SEQ ID NO: 144013 - DNA, 13 bp, Artificial Sequence
  Oligonucleotide for detection of SNP TSC0036165
tggaagttttagy

SEQ ID NO: 144014 - DNA, 13 bp, Artificial Sequence
  Oligonucleotide for detection of SNP TSC0036165
rctaaaacttcca

SEQ ID NO: 144015 - DNA, 13 bp, Artificial Sequence
  Oligonucleotide for detection of SNP TSC0036165
gttgagtttttta

SEQ ID NO: 144016 - DNA, 13 bp, Artificial Sequence
  Oligonucleotide for detection of SNP TSC0036165
taaaaaactcaac

SEQ ID NO: 144017 - DNA, 13 bp, Artificial Sequence
  Oligonucleotide for detection of SNP TSC0036165
gttgagattttta

SEQ ID NO: 144018 - DNA, 13 bp, Artificial Sequence
  Oligonucleotide for detection of SNP TSC0036165
taaaaatctcaac

SEQ ID NO: 144019 - DNA, 13 bp, Artificial Sequence
  Oligonucleotide for detection of SNP TSC0036166
gttatatggagay

SEQ ID NO: 144020 - DNA, 13 bp, Artificial Sequence
  Oligonucleotide for detection of SNP TSC0036166
rtctccatataac

SEQ ID NO: 144021 - DNA, 13 bp, Artificial Sequence
  Oligonucleotide for detection of SNP TSC0036166
gttatacggagay

SEQ ID NO: 144022 - DNA, 13 bp, Artificial Sequence
  Oligonucleotide for detection of SNP TSC0036166
rtctccgtataac

SEQ ID NO: 144023 - DNA, 13 bp, Artificial Sequence
  Oligonucleotide for detection of SNP TSC0036166
gtttttgtgtggy

SEQ ID NO: 144024 - DNA, 13 bp, Artificial Sequence
  Oligonucleotide for detection of SNP TSC0036166
rccacacaaaaac

SEQ ID NO: 144025 - DNA, 13 bp, Artificial Sequence
  Oligonucleotide for detection of SNP TSC0036166
gtttttatgtggy

SEQ ID NO: 144026 - DNA, 13 bp, Artificial Sequence
  Oligonucleotide for detection of SNP TSC0036166
rccacataaaaac

SEQ ID NO: 144027 - DNA, 13 bp, Artificial Sequence
  Oligonucleotide for detection of SNP TSC0036166
gttttcgtgtggy

SEQ ID NO: 144028 - DNA, 13 bp, Artificial Sequence
  Oligonucleotide for detection of SNP TSC0036166
rccacacgaaaac

SEQ ID NO: 144029 - DNA, 13 bp, Artificial Sequence
  Oligonucleotide for detection of SNP TSC0036168
gttaaggtagatt

SEQ ID NO: 144030 - DNA, 13 bp, Artificial Sequence
  Oligonucleotide for detection of SNP TSC0036168
aatctaccttaac

SEQ ID NO: 144031 - DNA, 13 bp, Artificial Sequence
  Oligonucleotide for detection of SNP TSC0036168
gttaagatagatt

SEQ ID NO: 144032 - DNA, 13 bp, Artificial Sequence
  Oligonucleotide for detection of SNP TSC0036168
aatctatcttaac

SEQ ID NO: 144033 - DNA, 13 bp, Artificial Sequence
  Oligonucleotide for detection of SNP TSC0036173
ggtggggttgtaa

SEQ ID NO: 144034 - DNA, 13 bp, Artificial Sequence
  Oligonucleotide for detection of SNP TSC0036173
ttacaaccccacc

SEQ ID NO: 144035 - DNA, 13 bp, Artificial Sequence
  Oligonucleotide for detection of SNP TSC0036173
ggtgggattgtaa

SEQ ID NO: 144036 - DNA, 13 bp, Artificial Sequence
  Oligonucleotide for detection of SNP TSC0036173
ttacaatcccacc

SEQ ID NO: 144037 - DNA, 13 bp, Artificial Sequence
  Oligonucleotide for detection of SNP TSC0036175
gagaatagtttga

SEQ ID NO: 144038 - DNA, 13 bp, Artificial Sequence
  Oligonucleotide for detection of SNP TSC0036175
tcaaactattctc

SEQ ID NO: 144039 - DNA, 13 bp, Artificial Sequence
  Oligonucleotide for detection of SNP TSC0036176
taggatggtttta

SEQ ID NO: 144040 - DNA, 13 bp, Artificial Sequence
  Oligonucleotide for detection of SNP TSC0036176
taaaaccatccta

SEQ ID NO: 144041 - DNA, 13 bp, Artificial Sequence
  Oligonucleotide for detection of SNP TSC0036176
taggatagtttta

SEQ ID NO: 144042 - DNA, 13 bp, Artificial Sequence
  Oligonucleotide for detection of SNP TSC0036176
taaaactatccta

SEQ ID NO: 144043 - DNA, 13 bp, Artificial Sequence
  Oligonucleotide for detection of SNP TSC0036177
aggtttattttaa

SEQ ID NO: 144044 - DNA, 13 bp, Artificial Sequence
  Oligonucleotide for detection of SNP TSC0036177
ttaaaataaacct

SEQ ID NO: 144045 - DNA, 13 bp, Artificial Sequence
  Oligonucleotide for detection of SNP TSC0036177
aggtttgttttaa

SEQ ID NO: 144046 - DNA, 13 bp, Artificial Sequence
  Oligonucleotide for detection of SNP TSC0036177
ttaaaacaaacct

SEQ ID NO: 144047 - DNA, 13 bp, Artificial Sequence
  Oligonucleotide for detection of SNP TSC0036177
aggttcgttttaa

SEQ ID NO: 144048 - DNA, 13 bp, Artificial Sequence
  Oligonucleotide for detection of SNP TSC0036177
ttaaaacgaacct

SEQ ID NO: 144049 - DNA, 13 bp, Artificial Sequence
  Oligonucleotide for detection of SNP TSC0036177
ttaaaatgaattt

SEQ ID NO: 144050 - DNA, 13 bp, Artificial Sequence
  Oligonucleotide for detection of SNP TSC0036177
aaattcattttaa

SEQ ID NO: 144051 - DNA, 13 bp, Artificial Sequence
  Oligonucleotide for detection of SNP TSC0036177
ttaaaacgaattt

SEQ ID NO: 144052 - DNA, 13 bp, Artificial Sequence
  Oligonucleotide for detection of SNP TSC0036177
aaattcgttttaa

SEQ ID NO: 144053 - DNA, 13 bp, Artificial Sequence
  Oligonucleotide for detection of SNP TSC0036178
gttataattaaat

SEQ ID NO: 144054 - DNA, 13 bp, Artificial Sequence
  Oligonucleotide for detection of SNP TSC0036178
atttaattataac

SEQ ID NO: 144055 - DNA, 13 bp, Artificial Sequence
  Oligonucleotide for detection of SNP TSC0036178
gttatagttaaat

SEQ ID NO: 144056 - DNA, 13 bp, Artificial Sequence
  Oligonucleotide for detection of SNP TSC0036178
atttaactataac

SEQ ID NO: 144057 - DNA, 13 bp, Artificial Sequence
  Oligonucleotide for detection of SNP TSC0036180
tggtttatgaaty

SEQ ID NO: 144058 - DNA, 13 bp, Artificial Sequence
  Oligonucleotide for detection of SNP TSC0036180
rattcataaacca

SEQ ID NO: 144059 - DNA, 13 bp, Artificial Sequence
  Oligonucleotide for detection of SNP TSC0036180
tggtttgtgaaty

SEQ ID NO: 144060 - DNA, 13 bp, Artificial Sequence
  Oligonucleotide for detection of SNP TSC0036180
rattcacaaacca

SEQ ID NO: 144061 - DNA, 13 bp, Artificial Sequence
  Oligonucleotide for detection of SNP TSC0036180
tggttcgtgaaty

SEQ ID NO: 144062 - DNA, 13 bp, Artificial Sequence
  Oligonucleotide for detection of SNP TSC0036180
rattcacgaacca

SEQ ID NO: 144063 - DNA, 13 bp, Artificial Sequence
  Oligonucleotide for detection of SNP TSC0036180
ggtttatgaatta

SEQ ID NO: 144064 - DNA, 13 bp, Artificial Sequence
  Oligonucleotide for detection of SNP TSC0036180
taattcataaacc

SEQ ID NO: 144065 - DNA, 13 bp, Artificial Sequence
  Oligonucleotide for detection of SNP TSC0036180
ggtttacgaatta

SEQ ID NO: 144066 - DNA, 13 bp, Artificial Sequence
  Oligonucleotide for detection of SNP TSC0036180
taattcgtaaacc

SEQ ID NO: 144067 - DNA, 13 bp, Artificial Sequence
  Oligonucleotide for detection of SNP TSC0036184
agaggatggttty

SEQ ID NO: 144068 - DNA, 13 bp, Artificial Sequence
  Oligonucleotide for detection of SNP TSC0036184
raaaccatcctct

SEQ ID NO: 144069 - DNA, 13 bp, Artificial Sequence
  Oligonucleotide for detection of SNP TSC0036184
agaggacggttty

SEQ ID NO: 144070 - DNA, 13 bp, Artificial Sequence
  Oligonucleotide for detection of SNP TSC0036184
raaaccgtcctct

SEQ ID NO: 144071 - DNA, 13 bp, Artificial Sequence
  Oligonucleotide for detection of SNP TSC0036184
gaaattgtttttt

SEQ ID NO: 144072 - DNA, 13 bp, Artificial Sequence
  Oligonucleotide for detection of SNP TSC0036184
aaaaaacaatttc

SEQ ID NO: 144073 - DNA, 13 bp, Artificial Sequence
  Oligonucleotide for detection of SNP TSC0036184
gaaattatttttt

SEQ ID NO: 144074 - DNA, 13 bp, Artificial Sequence
  Oligonucleotide for detection of SNP TSC0036184
aaaaaataatttc

SEQ ID NO: 144075 - DNA, 13 bp, Artificial Sequence
  Oligonucleotide for detection of SNP TSC0036184
gaaatcgtttttt

SEQ ID NO: 144076 - DNA, 13 bp, Artificial Sequence
  Oligonucleotide for detection of SNP TSC0036184
aaaaaacgatttc

SEQ ID NO: 144077 - DNA, 13 bp, Artificial Sequence
  Oligonucleotide for detection of SNP TSC0036190
gattttcgttttt

SEQ ID NO: 144078 - DNA, 13 bp, Artificial Sequence
  Oligonucleotide for detection of SNP TSC0036190
aaaaacgaaaatc

SEQ ID NO: 144079 - DNA, 13 bp, Artificial Sequence
  Oligonucleotide for detection of SNP TSC0036190
aagaatgaagaty

SEQ ID NO: 144080 - DNA, 13 bp, Artificial Sequence
  Oligonucleotide for detection of SNP TSC0036190
ratcttcattctt

SEQ ID NO: 144081 - DNA, 13 bp, Artificial Sequence
  Oligonucleotide for detection of SNP TSC0036190
aagaattaagaty

SEQ ID NO: 144082 - DNA, 13 bp, Artificial Sequence
  Oligonucleotide for detection of SNP TSC0036190
ratcttaattctt

SEQ ID NO: 144083 - DNA, 13 bp, Artificial Sequence
  Oligonucleotide for detection of SNP TSC0036190
aagaacgaagaty

SEQ ID NO: 144084 - DNA, 13 bp, Artificial Sequence
  Oligonucleotide for detection of SNP TSC0036190
ratcttcgttctt

SEQ ID NO: 144085 - DNA, 13 bp, Artificial Sequence
  Oligonucleotide for detection of SNP TSC0036191
ttgaggggttaag

SEQ ID NO: 144086 - DNA, 13 bp, Artificial Sequence
  Oligonucleotide for detection of SNP TSC0036191
cttaacccctcaa

SEQ ID NO: 144087 - DNA, 13 bp, Artificial Sequence
  Oligonucleotide for detection of SNP TSC0036191
ttgaggagttaag

SEQ ID NO: 144088 - DNA, 13 bp, Artificial Sequence
  Oligonucleotide for detection of SNP TSC0036191
cttaactcctcaa

SEQ ID NO: 144089 - DNA, 13 bp, Artificial Sequence
  Oligonucleotide for detection of SNP TSC0036192
tataatgttttga

SEQ ID NO: 144090 - DNA, 13 bp, Artificial Sequence
  Oligonucleotide for detection of SNP TSC0036192
tcaaaacattata

SEQ ID NO: 144091 - DNA, 13 bp, Artificial Sequence
  Oligonucleotide for detection of SNP TSC0036192
tataatattttga

SEQ ID NO: 144092 - DNA, 13 bp, Artificial Sequence
  Oligonucleotide for detection of SNP TSC0036192
tcaaaatattata

SEQ ID NO: 144093 - DNA, 13 bp, Artificial Sequence
  Oligonucleotide for detection of SNP TSC0036193
tgattaggataat

SEQ ID NO: 144094 - DNA, 13 bp, Artificial Sequence
  Oligonucleotide for detection of SNP TSC0036193
attatcctaatca

SEQ ID NO: 144095 - DNA, 13 bp, Artificial Sequence
  Oligonucleotide for detection of SNP TSC0036193
tgattaagataat

SEQ ID NO: 144096 - DNA, 13 bp, Artificial Sequence
  Oligonucleotide for detection of SNP TSC0036193
attatcttaatca

SEQ ID NO: 144097 - DNA, 13 bp, Artificial Sequence
  Oligonucleotide for detection of SNP TSC0036194
ttttaaaagtttt

SEQ ID NO: 144098 - DNA, 13 bp, Artificial Sequence
  Oligonucleotide for detection of SNP TSC0036194
aaaacttttaaaa

SEQ ID NO: 144099 - DNA, 13 bp, Artificial Sequence
  Oligonucleotide for detection of SNP TSC0036195
gagtgtttaatay

SEQ ID NO: 144100 - DNA, 13 bp, Artificial Sequence
  Oligonucleotide for detection of SNP TSC0036195
rtattaaacactc

SEQ ID NO: 144101 - DNA, 13 bp, Artificial Sequence
  Oligonucleotide for detection of SNP TSC0036195
gagtgtgtaatay

SEQ ID NO: 144102 - DNA, 13 bp, Artificial Sequence
  Oligonucleotide for detection of SNP TSC0036195
rtattacacactc

SEQ ID NO: 144103 - DNA, 13 bp, Artificial Sequence
  Oligonucleotide for detection of SNP TSC0036195
gagtgcgtaatay

SEQ ID NO: 144104 - DNA, 13 bp, Artificial Sequence
  Oligonucleotide for detection of SNP TSC0036195
rtattacgcactc

SEQ ID NO: 144105 - DNA, 13 bp, Artificial Sequence
  Oligonucleotide for detection of SNP TSC0036195
gtgttgggtatty

SEQ ID NO: 144106 - DNA, 13 bp, Artificial Sequence
  Oligonucleotide for detection of SNP TSC0036195
raatacccaacac

SEQ ID NO: 144107 - DNA, 13 bp, Artificial Sequence
  Oligonucleotide for detection of SNP TSC0036195
gtgttgtgtatty

SEQ ID NO: 144108 - DNA, 13 bp, Artificial Sequence
  Oligonucleotide for detection of SNP TSC0036195
raatacacaacac

SEQ ID NO: 144109 - DNA, 13 bp, Artificial Sequence
  Oligonucleotide for detection of SNP TSC0036195
gtgttgcgtatty

SEQ ID NO: 144110 - DNA, 13 bp, Artificial Sequence
  Oligonucleotide for detection of SNP TSC0036195
raatacgcaacac

SEQ ID NO: 144111 - DNA, 13 bp, Artificial Sequence
  Oligonucleotide for detection of SNP TSC0036197
tatatggtttata

SEQ ID NO: 144112 - DNA, 13 bp, Artificial Sequence
  Oligonucleotide for detection of SNP TSC0036197
tataaaccatata

SEQ ID NO: 144113 - DNA, 13 bp, Artificial Sequence
  Oligonucleotide for detection of SNP TSC0036197
tatatgatttata

SEQ ID NO: 144114 - DNA, 13 bp, Artificial Sequence
  Oligonucleotide for detection of SNP TSC0036197
tataaatcatata

SEQ ID NO: 144115 - DNA, 13 bp, Artificial Sequence
  Oligonucleotide for detection of SNP TSC0036198
tttgtagtgtaag

SEQ ID NO: 144116 - DNA, 13 bp, Artificial Sequence
  Oligonucleotide for detection of SNP TSC0036198
cttacactacaaa

SEQ ID NO: 144117 - DNA, 13 bp, Artificial Sequence
  Oligonucleotide for detection of SNP TSC0036198
tttgtaatgtaag

SEQ ID NO: 144118 - DNA, 13 bp, Artificial Sequence
  Oligonucleotide for detection of SNP TSC0036198
cttacattacaaa

SEQ ID NO: 144119 - DNA, 13 bp, Artificial Sequence
  Oligonucleotide for detection of SNP TSC0036202
tttgtggttgttg

SEQ ID NO: 144120 - DNA, 13 bp, Artificial Sequence
  Oligonucleotide for detection of SNP TSC0036202
caacaaccacaaa

SEQ ID NO: 144121 - DNA, 13 bp, Artificial Sequence
  Oligonucleotide for detection of SNP TSC0036202
tttgtgattgttg

SEQ ID NO: 144122 - DNA, 13 bp, Artificial Sequence
  Oligonucleotide for detection of SNP TSC0036202
caacaatcacaaa

SEQ ID NO: 144123 - DNA, 13 bp, Artificial Sequence
  Oligonucleotide for detection of SNP TSC0036203
atgtaggataaga

SEQ ID NO: 144124 - DNA, 13 bp, Artificial Sequence
  Oligonucleotide for detection of SNP TSC0036203
tcttatcctacat

SEQ ID NO: 144125 - DNA, 13 bp, Artificial Sequence
  Oligonucleotide for detection of SNP TSC0036203
atgtagaataaga

SEQ ID NO: 144126 - DNA, 13 bp, Artificial Sequence
  Oligonucleotide for detection of SNP TSC0036203
tcttattctacat

SEQ ID NO: 144127 - DNA, 13 bp, Artificial Sequence
  Oligonucleotide for detection of SNP TSC0036204
aattgtttttttt

SEQ ID NO: 144128 - DNA, 13 bp, Artificial Sequence
  Oligonucleotide for detection of SNP TSC0036204
aaaaaaaacaatt

SEQ ID NO: 144129 - DNA, 13 bp, Artificial Sequence
  Oligonucleotide for detection of SNP TSC0036204
aattgtatttttt

SEQ ID NO: 144130 - DNA, 13 bp, Artificial Sequence
  Oligonucleotide for detection of SNP TSC0036204
aaaaaatacaatt

SEQ ID NO: 144131 - DNA, 13 bp, Artificial Sequence
  Oligonucleotide for detection of SNP TSC0036209
tttgggtgtaaag

SEQ ID NO: 144132 - DNA, 13 bp, Artificial Sequence
  Oligonucleotide for detection of SNP TSC0036209
ctttacacccaaa

SEQ ID NO: 144133 - DNA, 13 bp, Artificial Sequence
  Oligonucleotide for detection of SNP TSC0036209
tttgggcgtaaag

SEQ ID NO: 144134 - DNA, 13 bp, Artificial Sequence
  Oligonucleotide for detection of SNP TSC0036209
ctttacgcccaaa

SEQ ID NO: 144135 - DNA, 13 bp, Artificial Sequence
  Oligonucleotide for detection of SNP TSC0036209
ttttgtgtttaag

SEQ ID NO: 144136 - DNA, 13 bp, Artificial Sequence
  Oligonucleotide for detection of SNP TSC0036209
cttaaacacaaaa

SEQ ID NO: 144137 - DNA, 13 bp, Artificial Sequence
  Oligonucleotide for detection of SNP TSC0036209
ttttgtatttaag

SEQ ID NO: 144138 - DNA, 13 bp, Artificial Sequence
  Oligonucleotide for detection of SNP TSC0036209
cttaaatacaaaa

SEQ ID NO: 144139 - DNA, 13 bp, Artificial Sequence
  Oligonucleotide for detection of SNP TSC0036209
ttttgcgtttaag

SEQ ID NO: 144140 - DNA, 13 bp, Artificial Sequence
  Oligonucleotide for detection of SNP TSC0036209
cttaaacgcaaaa

SEQ ID NO: 144141 - DNA, 13 bp, Artificial Sequence
  Oligonucleotide for detection of SNP TSC0036210
ttatttttttgag

SEQ ID NO: 144142 - DNA, 13 bp, Artificial Sequence
  Oligonucleotide for detection of SNP TSC0036210
ctcaaaaaaataa

SEQ ID NO: 144143 - DNA, 13 bp, Artificial Sequence
  Oligonucleotide for detection of SNP TSC0036210
tttaagtgagtga

SEQ ID NO: 144144 - DNA, 13 bp, Artificial Sequence
  Oligonucleotide for detection of SNP TSC0036210
tcactcacttaaa

SEQ ID NO: 144145 - DNA, 13 bp, Artificial Sequence
  Oligonucleotide for detection of SNP TSC0036210
tttaagggagtga

SEQ ID NO: 144146 - DNA, 13 bp, Artificial Sequence
  Oligonucleotide for detection of SNP TSC0036210
tcactcccttaaa

SEQ ID NO: 144147 - DNA, 13 bp, Artificial Sequence
  Oligonucleotide for detection of SNP TSC0036211
aatataaaggttt

SEQ ID NO: 144148 - DNA, 13 bp, Artificial Sequence
  Oligonucleotide for detection of SNP TSC0036211
aaacctttatatt

SEQ ID NO: 144149 - DNA, 13 bp, Artificial Sequence
  Oligonucleotide for detection of SNP TSC0036211
aatatagaggttt

SEQ ID NO: 144150 - DNA, 13 bp, Artificial Sequence
  Oligonucleotide for detection of SNP TSC0036211
aaacctctatatt

SEQ ID NO: 144151 - DNA, 13 bp, Artificial Sequence
  Oligonucleotide for detection of SNP TSC0036213
ttggaaagggagg

SEQ ID NO: 144152 - DNA, 13 bp, Artificial Sequence
  Oligonucleotide for detection of SNP TSC0036213
cctccctttccaa

SEQ ID NO: 144153 - DNA, 13 bp, Artificial Sequence
  Oligonucleotide for detection of SNP TSC0036213
ttggaatgggagg

SEQ ID NO: 144154 - DNA, 13 bp, Artificial Sequence
  Oligonucleotide for detection of SNP TSC0036213
cctcccattccaa

SEQ ID NO: 144155 - DNA, 13 bp, Artificial Sequence
  Oligonucleotide for detection of SNP TSC0036219
agtttttggaagy

SEQ ID NO: 144156 - DNA, 13 bp, Artificial Sequence
  Oligonucleotide for detection of SNP TSC0036219
rcttccaaaaact

SEQ ID NO: 144157 - DNA, 13 bp, Artificial Sequence
  Oligonucleotide for detection of SNP TSC0036219
agttttcggaagy

SEQ ID NO: 144158 - DNA, 13 bp, Artificial Sequence
  Oligonucleotide for detection of SNP TSC0036219
rcttccgaaaact

SEQ ID NO: 144159 - DNA, 13 bp, Artificial Sequence
  Oligonucleotide for detection of SNP TSC0036219
gtttttggaagtt

SEQ ID NO: 144160 - DNA, 13 bp, Artificial Sequence
  Oligonucleotide for detection of SNP TSC0036219
aacttccaaaaac

SEQ ID NO: 144161 - DNA, 13 bp, Artificial Sequence
  Oligonucleotide for detection of SNP TSC0036219
gtttttagaagtt

SEQ ID NO: 144162 - DNA, 13 bp, Artificial Sequence
  Oligonucleotide for detection of SNP TSC0036219
aacttctaaaaac

SEQ ID NO: 144163 - DNA, 13 bp, Artificial Sequence
  Oligonucleotide for detection of SNP TSC0036219
gttttcggaagtt

SEQ ID NO: 144164 - DNA, 13 bp, Artificial Sequence
  Oligonucleotide for detection of SNP TSC0036219
aacttccgaaaac

SEQ ID NO: 144165 - DNA, 13 bp, Artificial Sequence
  Oligonucleotide for detection of SNP TSC0036220
gagtttattttty

SEQ ID NO: 144166 - DNA, 13 bp, Artificial Sequence
  Oligonucleotide for detection of SNP TSC0036220
raaaaataaactc

SEQ ID NO: 144167 - DNA, 13 bp, Artificial Sequence
  Oligonucleotide for detection of SNP TSC0036220
gagtttgttttty

SEQ ID NO: 144168 - DNA, 13 bp, Artificial Sequence
  Oligonucleotide for detection of SNP TSC0036220
raaaaacaaactc

SEQ ID NO: 144169 - DNA, 13 bp, Artificial Sequence
  Oligonucleotide for detection of SNP TSC0036226
gagatcgtattty

SEQ ID NO: 144170 - DNA, 13 bp, Artificial Sequence
  Oligonucleotide for detection of SNP TSC0036226
raaatacgatctc

SEQ ID NO: 144171 - DNA, 13 bp, Artificial Sequence
  Oligonucleotide for detection of SNP TSC0036226
gaggtgggattty

SEQ ID NO: 144172 - DNA, 13 bp, Artificial Sequence
  Oligonucleotide for detection of SNP TSC0036226
raaatcccacctc

SEQ ID NO: 144173 - DNA, 13 bp, Artificial Sequence
  Oligonucleotide for detection of SNP TSC0036226
gaggtgtgattty

SEQ ID NO: 144174 - DNA, 13 bp, Artificial Sequence
  Oligonucleotide for detection of SNP TSC0036226
raaatcacacctc

SEQ ID NO: 144175 - DNA, 13 bp, Artificial Sequence
  Oligonucleotide for detection of SNP TSC0036226
gaggtgcgattty

SEQ ID NO: 144176 - DNA, 13 bp, Artificial Sequence
  Oligonucleotide for detection of SNP TSC0036226
raaatcgcacctc

SEQ ID NO: 144177 - DNA, 13 bp, Artificial Sequence
  Oligonucleotide for detection of SNP TSC0036230
tttgtaggaagat

SEQ ID NO: 144178 - DNA, 13 bp, Artificial Sequence
  Oligonucleotide for detection of SNP TSC0036230
atcttcctacaaa

SEQ ID NO: 144179 - DNA, 13 bp, Artificial Sequence
  Oligonucleotide for detection of SNP TSC0036230
tttgtatgaagat

SEQ ID NO: 144180 - DNA, 13 bp, Artificial Sequence
  Oligonucleotide for detection of SNP TSC0036230
atcttcatacaaa

SEQ ID NO: 144181 - DNA, 13 bp, Artificial Sequence
  Oligonucleotide for detection of SNP TSC0036230
atttttttgtaga

SEQ ID NO: 144182 - DNA, 13 bp, Artificial Sequence
  Oligonucleotide for detection of SNP TSC0036230
tctacaaaaaaat

SEQ ID NO: 144183 - DNA, 13 bp, Artificial Sequence
  Oligonucleotide for detection of SNP TSC0036230
atttttatgtaga

SEQ ID NO: 144184 - DNA, 13 bp, Artificial Sequence
  Oligonucleotide for detection of SNP TSC0036230
tctacataaaaat

SEQ ID NO: 144185 - DNA, 13 bp, Artificial Sequence
  Oligonucleotide for detection of SNP TSC0036241
agaaaagtaaaay

SEQ ID NO: 144186 - DNA, 13 bp, Artificial Sequence
  Oligonucleotide for detection of SNP TSC0036241
rttttacttttct

SEQ ID NO: 144187 - DNA, 13 bp, Artificial Sequence
  Oligonucleotide for detection of SNP TSC0036241
agaaaaataaaay

SEQ ID NO: 144188 - DNA, 13 bp, Artificial Sequence
  Oligonucleotide for detection of SNP TSC0036241
rttttatttttct

SEQ ID NO: 144189 - DNA, 13 bp, Artificial Sequence
  Oligonucleotide for detection of SNP TSC0036246
gtatgaatttggy

SEQ ID NO: 144190 - DNA, 13 bp, Artificial Sequence
  Oligonucleotide for detection of SNP TSC0036246
rccaaattcatac

SEQ ID NO: 144191 - DNA, 13 bp, Artificial Sequence
  Oligonucleotide for detection of SNP TSC0036246
gtatgattttggy

SEQ ID NO: 144192 - DNA, 13 bp, Artificial Sequence
  Oligonucleotide for detection of SNP TSC0036246
rccaaaatcatac

SEQ ID NO: 144193 - DNA, 13 bp, Artificial Sequence
  Oligonucleotide for detection of SNP TSC0036246
gttaagtttatgy

SEQ ID NO: 144194 - DNA, 13 bp, Artificial Sequence
  Oligonucleotide for detection of SNP TSC0036246
rcataaacttaac

SEQ ID NO: 144195 - DNA, 13 bp, Artificial Sequence
  Oligonucleotide for detection of SNP TSC0036246
gttaagattatgy

SEQ ID NO: 144196 - DNA, 13 bp, Artificial Sequence
  Oligonucleotide for detection of SNP TSC0036246
rcataatcttaac

SEQ ID NO: 144197 - DNA, 13 bp, Artificial Sequence
  Oligonucleotide for detection of SNP TSC0036247
ttatagatatatg

SEQ ID NO: 144198 - DNA, 13 bp, Artificial Sequence
  Oligonucleotide for detection of SNP TSC0036247
catatatctataa

SEQ ID NO: 144199 - DNA, 13 bp, Artificial Sequence
  Oligonucleotide for detection of SNP TSC0036247
ttataggtatatg

SEQ ID NO: 144200 - DNA, 13 bp, Artificial Sequence
  Oligonucleotide for detection of SNP TSC0036247
catatacctataa

SEQ ID NO: 144201 - DNA, 13 bp, Artificial Sequence
  Oligonucleotide for detection of SNP TSC0036248
taatgtattttgt

SEQ ID NO: 144202 - DNA, 13 bp, Artificial Sequence
  Oligonucleotide for detection of SNP TSC0036248
acaaaatacatta

SEQ ID NO: 144203 - DNA, 13 bp, Artificial Sequence
  Oligonucleotide for detection of SNP TSC0036250
aattaagaggtgg

SEQ ID NO: 144204 - DNA, 13 bp, Artificial Sequence
  Oligonucleotide for detection of SNP TSC0036250
ccacctcttaatt

SEQ ID NO: 144205 - DNA, 13 bp, Artificial Sequence
  Oligonucleotide for detection of SNP TSC0036250
aattaaaaggtgg

SEQ ID NO: 144206 - DNA, 13 bp, Artificial Sequence
  Oligonucleotide for detection of SNP TSC0036250
ccaccttttaatt

SEQ ID NO: 144207 - DNA, 13 bp, Artificial Sequence
  Oligonucleotide for detection of SNP TSC0036253
agaattatttgga

SEQ ID NO: 144208 - DNA, 13 bp, Artificial Sequence
  Oligonucleotide for detection of SNP TSC0036253
tccaaataattct

SEQ ID NO: 144209 - DNA, 13 bp, Artificial Sequence
  Oligonucleotide for detection of SNP TSC0036253
agaattttttgga

SEQ ID NO: 144210 - DNA, 13 bp, Artificial Sequence
  Oligonucleotide for detection of SNP TSC0036253
tccaaaaaattct

SEQ ID NO: 144211 - DNA, 13 bp, Artificial Sequence
  Oligonucleotide for detection of SNP TSC0036254
tttttagaaaagy

SEQ ID NO: 144212 - DNA, 13 bp, Artificial Sequence
  Oligonucleotide for detection of SNP TSC0036254
rcttttctaaaaa

SEQ ID NO: 144213 - DNA, 13 bp, Artificial Sequence
  Oligonucleotide for detection of SNP TSC0036254
tttttaaaaaagy

SEQ ID NO: 144214 - DNA, 13 bp, Artificial Sequence
  Oligonucleotide for detection of SNP TSC0036254
rcttttttaaaaa

SEQ ID NO: 144215 - DNA, 13 bp, Artificial Sequence
  Oligonucleotide for detection of SNP TSC0036258
agaagtattatgg

SEQ ID NO: 144216 - DNA, 13 bp, Artificial Sequence
  Oligonucleotide for detection of SNP TSC0036258
ccataatacttct

SEQ ID NO: 144217 - DNA, 13 bp, Artificial Sequence
  Oligonucleotide for detection of SNP TSC0036258
agaagtgttatgg

SEQ ID NO: 144218 - DNA, 13 bp, Artificial Sequence
  Oligonucleotide for detection of SNP TSC0036258
ccataacacttct

SEQ ID NO: 144219 - DNA, 13 bp, Artificial Sequence
  Oligonucleotide for detection of SNP TSC0036258
agaagcgttatgg

SEQ ID NO: 144220 - DNA, 13 bp, Artificial Sequence
  Oligonucleotide for detection of SNP TSC0036258
ccataacgcttct

SEQ ID NO: 144221 - DNA, 13 bp, Artificial Sequence
  Oligonucleotide for detection of SNP TSC0036258
ttatgatgttttt

SEQ ID NO: 144222 - DNA, 13 bp, Artificial Sequence
  Oligonucleotide for detection of SNP TSC0036258
aaaaacatcataa

SEQ ID NO: 144223 - DNA, 13 bp, Artificial Sequence
  Oligonucleotide for detection of SNP TSC0036258
ttatgacgttttt

SEQ ID NO: 144224 - DNA, 13 bp, Artificial Sequence
  Oligonucleotide for detection of SNP TSC0036258
aaaaacgtcataa

SEQ ID NO: 144225 - DNA, 13 bp, Artificial Sequence
  Oligonucleotide for detection of SNP TSC0036260
gtaagtatatttt

SEQ ID NO: 144226 - DNA, 13 bp, Artificial Sequence
  Oligonucleotide for detection of SNP TSC0036260
aaaatatacttac

SEQ ID NO: 144227 - DNA, 13 bp, Artificial Sequence
  Oligonucleotide for detection of SNP TSC0036260
gtaagtttatttt

SEQ ID NO: 144228 - DNA, 13 bp, Artificial Sequence
  Oligonucleotide for detection of SNP TSC0036260
aaaataaacttac

SEQ ID NO: 144229 - DNA, 13 bp, Artificial Sequence
  Oligonucleotide for detection of SNP TSC0036260
aagatgtgtttgy

SEQ ID NO: 144230 - DNA, 13 bp, Artificial Sequence
  Oligonucleotide for detection of SNP TSC0036260
rcaaacacatctt

SEQ ID NO: 144231 - DNA, 13 bp, Artificial Sequence
  Oligonucleotide for detection of SNP TSC0036260
aagatgggtttgy

SEQ ID NO: 144232 - DNA, 13 bp, Artificial Sequence
  Oligonucleotide for detection of SNP TSC0036260
rcaaacccatctt

SEQ ID NO: 144233 - DNA, 13 bp, Artificial Sequence
  Oligonucleotide for detection of SNP TSC0036262
attatagtatatg

SEQ ID NO: 144234 - DNA, 13 bp, Artificial Sequence
  Oligonucleotide for detection of SNP TSC0036262
catatactataat

SEQ ID NO: 144235 - DNA, 13 bp, Artificial Sequence
  Oligonucleotide for detection of SNP TSC0036262
attatattatatg

SEQ ID NO: 144236 - DNA, 13 bp, Artificial Sequence
  Oligonucleotide for detection of SNP TSC0036262
catataatataat

SEQ ID NO: 144237 - DNA, 13 bp, Artificial Sequence
  Oligonucleotide for detection of SNP TSC0036262
tatgtgttatggt

SEQ ID NO: 144238 - DNA, 13 bp, Artificial Sequence
  Oligonucleotide for detection of SNP TSC0036262
accataacacata

SEQ ID NO: 144239 - DNA, 13 bp, Artificial Sequence
  Oligonucleotide for detection of SNP TSC0036262
tatgtgatatggt

SEQ ID NO: 144240 - DNA, 13 bp, Artificial Sequence
  Oligonucleotide for detection of SNP TSC0036262
accatatcacata

SEQ ID NO: 144241 - DNA, 13 bp, Artificial Sequence
  Oligonucleotide for detection of SNP TSC0036264
ggttggggttgag

SEQ ID NO: 144242 - DNA, 13 bp, Artificial Sequence
  Oligonucleotide for detection of SNP TSC0036264
ctcaaccccaacc

SEQ ID NO: 144243 - DNA, 13 bp, Artificial Sequence
  Oligonucleotide for detection of SNP TSC0036264
ggttggtgttgag

SEQ ID NO: 144244 - DNA, 13 bp, Artificial Sequence
  Oligonucleotide for detection of SNP TSC0036264
ctcaacaccaacc

SEQ ID NO: 144245 - DNA, 13 bp, Artificial Sequence
  Oligonucleotide for detection of SNP TSC0036264
tttaattttagty

SEQ ID NO: 144246 - DNA, 13 bp, Artificial Sequence
  Oligonucleotide for detection of SNP TSC0036264
ractaaaattaaa

SEQ ID NO: 144247 - DNA, 13 bp, Artificial Sequence
  Oligonucleotide for detection of SNP TSC0036264
tttaatattagty

SEQ ID NO: 144248 - DNA, 13 bp, Artificial Sequence
  Oligonucleotide for detection of SNP TSC0036264
ractaatattaaa

SEQ ID NO: 144249 - DNA, 13 bp, Artificial Sequence
  Oligonucleotide for detection of SNP TSC0036265
ttaaaaatgttty

SEQ ID NO: 144250 - DNA, 13 bp, Artificial Sequence
  Oligonucleotide for detection of SNP TSC0036265
raaacatttttaa

SEQ ID NO: 144251 - DNA, 13 bp, Artificial Sequence
  Oligonucleotide for detection of SNP TSC0036265
ttaaaagtgttty

SEQ ID NO: 144252 - DNA, 13 bp, Artificial Sequence
  Oligonucleotide for detection of SNP TSC0036265
raaacacttttaa

SEQ ID NO: 144253 - DNA, 13 bp, Artificial Sequence
  Oligonucleotide for detection of SNP TSC0036266
gtaatgggatggg

SEQ ID NO: 144254 - DNA, 13 bp, Artificial Sequence
  Oligonucleotide for detection of SNP TSC0036266
cccatcccattac

SEQ ID NO: 144255 - DNA, 13 bp, Artificial Sequence
  Oligonucleotide for detection of SNP TSC0036266
gtaatgagatggg

SEQ ID NO: 144256 - DNA, 13 bp, Artificial Sequence
  Oligonucleotide for detection of SNP TSC0036266
cccatctcattac

SEQ ID NO: 144257 - DNA, 13 bp, Artificial Sequence
  Oligonucleotide for detection of SNP TSC0036266
gtaacgggatggg

SEQ ID NO: 144258 - DNA, 13 bp, Artificial Sequence
  Oligonucleotide for detection of SNP TSC0036266
cccatcccgttac

SEQ ID NO: 144259 - DNA, 13 bp, Artificial Sequence
  Oligonucleotide for detection of SNP TSC0036266
gtaacgagatggg

SEQ ID NO: 144260 - DNA, 13 bp, Artificial Sequence
  Oligonucleotide for detection of SNP TSC0036266
cccatctcgttac

SEQ ID NO: 144261 - DNA, 13 bp, Artificial Sequence
  Oligonucleotide for detection of SNP TSC0036267
agttgaagaggtt

SEQ ID NO: 144262 - DNA, 13 bp, Artificial Sequence
  Oligonucleotide for detection of SNP TSC0036267
aacctcttcaact

SEQ ID NO: 144263 - DNA, 13 bp, Artificial Sequence
  Oligonucleotide for detection of SNP TSC0036267
agttgaggaggtt

SEQ ID NO: 144264 - DNA, 13 bp, Artificial Sequence
  Oligonucleotide for detection of SNP TSC0036267
aacctcctcaact

SEQ ID NO: 144265 - DNA, 13 bp, Artificial Sequence
  Oligonucleotide for detection of SNP TSC0036271
ttaaattgtaaag

SEQ ID NO: 144266 - DNA, 13 bp, Artificial Sequence
  Oligonucleotide for detection of SNP TSC0036271
ctttacaatttaa

SEQ ID NO: 144267 - DNA, 13 bp, Artificial Sequence
  Oligonucleotide for detection of SNP TSC0036271
ttaaatcgtaaag

SEQ ID NO: 144268 - DNA, 13 bp, Artificial Sequence
  Oligonucleotide for detection of SNP TSC0036271
ctttacgatttaa

SEQ ID NO: 144269 - DNA, 13 bp, Artificial Sequence
  Oligonucleotide for detection of SNP TSC0036271
ttttgtgatttga

SEQ ID NO: 144270 - DNA, 13 bp, Artificial Sequence
  Oligonucleotide for detection of SNP TSC0036271
tcaaatcacaaaa

SEQ ID NO: 144271 - DNA, 13 bp, Artificial Sequence
  Oligonucleotide for detection of SNP TSC0036271
ttttgtaatttga

SEQ ID NO: 144272 - DNA, 13 bp, Artificial Sequence
  Oligonucleotide for detection of SNP TSC0036271
tcaaattacaaaa

SEQ ID NO: 144273 - DNA, 13 bp, Artificial Sequence
  Oligonucleotide for detection of SNP TSC0036271
ttttgcgatttga

SEQ ID NO: 144274 - DNA, 13 bp, Artificial Sequence
  Oligonucleotide for detection of SNP TSC0036271
tcaaatcgcaaaa

SEQ ID NO: 144275 - DNA, 13 bp, Artificial Sequence
  Oligonucleotide for detection of SNP TSC0036272
tgttttatgtgtt

SEQ ID NO: 144276 - DNA, 13 bp, Artificial Sequence
  Oligonucleotide for detection of SNP TSC0036272
aacacataaaaca

SEQ ID NO: 144277 - DNA, 13 bp, Artificial Sequence
  Oligonucleotide for detection of SNP TSC0036272
tgttttgtgtgtt

SEQ ID NO: 144278 - DNA, 13 bp, Artificial Sequence
  Oligonucleotide for detection of SNP TSC0036272
aacacacaaaaca

SEQ ID NO: 144279 - DNA, 13 bp, Artificial Sequence
  Oligonucleotide for detection of SNP TSC0036272
tgtttcgtgtgtt

SEQ ID NO: 144280 - DNA, 13 bp, Artificial Sequence
  Oligonucleotide for detection of SNP TSC0036272
aacacacgaaaca

SEQ ID NO: 144281 - DNA, 13 bp, Artificial Sequence
  Oligonucleotide for detection of SNP TSC0036272
agtatatgaaata

SEQ ID NO: 144282 - DNA, 13 bp, Artificial Sequence
  Oligonucleotide for detection of SNP TSC0036272
tatttcatatact

SEQ ID NO: 144283 - DNA, 13 bp, Artificial Sequence
  Oligonucleotide for detection of SNP TSC0036272
agtatacgaaata

SEQ ID NO: 144284 - DNA, 13 bp, Artificial Sequence
  Oligonucleotide for detection of SNP TSC0036272
tatttcgtatact

SEQ ID NO: 144285 - DNA, 13 bp, Artificial Sequence
  Oligonucleotide for detection of SNP TSC0036273
gttttgaatttty

SEQ ID NO: 144286 - DNA, 13 bp, Artificial Sequence
  Oligonucleotide for detection of SNP TSC0036273
raaaattcaaaac

SEQ ID NO: 144287 - DNA, 13 bp, Artificial Sequence
  Oligonucleotide for detection of SNP TSC0036273
gttttggatttty

SEQ ID NO: 144288 - DNA, 13 bp, Artificial Sequence
  Oligonucleotide for detection of SNP TSC0036273
raaaatccaaaac

SEQ ID NO: 144289 - DNA, 13 bp, Artificial Sequence
  Oligonucleotide for detection of SNP TSC0036275
gttttatggatty

SEQ ID NO: 144290 - DNA, 13 bp, Artificial Sequence
  Oligonucleotide for detection of SNP TSC0036275
raatccataaaac

SEQ ID NO: 144291 - DNA, 13 bp, Artificial Sequence
  Oligonucleotide for detection of SNP TSC0036275
gttttacggatty

SEQ ID NO: 144292 - DNA, 13 bp, Artificial Sequence
  Oligonucleotide for detection of SNP TSC0036275
raatccgtaaaac

SEQ ID NO: 144293 - DNA, 13 bp, Artificial Sequence
  Oligonucleotide for detection of SNP TSC0036275
gaatttgtgaggy

SEQ ID NO: 144294 - DNA, 13 bp, Artificial Sequence
  Oligonucleotide for detection of SNP TSC0036275
rcctcacaaattc

SEQ ID NO: 144295 - DNA, 13 bp, Artificial Sequence
  Oligonucleotide for detection of SNP TSC0036275
gaatttatgaggy

SEQ ID NO: 144296 - DNA, 13 bp, Artificial Sequence
  Oligonucleotide for detection of SNP TSC0036275
rcctcataaattc

SEQ ID NO: 144297 - DNA, 13 bp, Artificial Sequence
  Oligonucleotide for detection of SNP TSC0036275
gaattcgtgaggy

SEQ ID NO: 144298 - DNA, 13 bp, Artificial Sequence
  Oligonucleotide for detection of SNP TSC0036275
rcctcacgaattc

SEQ ID NO: 144299 - DNA, 13 bp, Artificial Sequence
  Oligonucleotide for detection of SNP TSC0036278
gaaatatggtaaa

SEQ ID NO: 144300 - DNA, 13 bp, Artificial Sequence
  Oligonucleotide for detection of SNP TSC0036278
tttaccatatttc

SEQ ID NO: 144301 - DNA, 13 bp, Artificial Sequence
  Oligonucleotide for detection of SNP TSC0036278
gaaatacggtaaa

SEQ ID NO: 144302 - DNA, 13 bp, Artificial Sequence
  Oligonucleotide for detection of SNP TSC0036278
tttaccgtatttc

SEQ ID NO: 144303 - DNA, 13 bp, Artificial Sequence
  Oligonucleotide for detection of SNP TSC0036278
tttgtcgtgttty

SEQ ID NO: 144304 - DNA, 13 bp, Artificial Sequence
  Oligonucleotide for detection of SNP TSC0036278
raaacacgacaaa

SEQ ID NO: 144305 - DNA, 13 bp, Artificial Sequence
  Oligonucleotide for detection of SNP TSC0036279
aaggttgggtggg

SEQ ID NO: 144306 - DNA, 13 bp, Artificial Sequence
  Oligonucleotide for detection of SNP TSC0036279
cccacccaacctt

SEQ ID NO: 144307 - DNA, 13 bp, Artificial Sequence
  Oligonucleotide for detection of SNP TSC0036279
aaggtttggtggg

SEQ ID NO: 144308 - DNA, 13 bp, Artificial Sequence
  Oligonucleotide for detection of SNP TSC0036279
cccaccaaacctt

SEQ ID NO: 144309 - DNA, 13 bp, Artificial Sequence
  Oligonucleotide for detection of SNP TSC0036279
aaggtcgggtggg

SEQ ID NO: 144310 - DNA, 13 bp, Artificial Sequence
  Oligonucleotide for detection of SNP TSC0036279
cccacccgacctt

SEQ ID NO: 144311 - DNA, 13 bp, Artificial Sequence
  Oligonucleotide for detection of SNP TSC0036279
aaggtttggcggg

SEQ ID NO: 144312 - DNA, 13 bp, Artificial Sequence
  Oligonucleotide for detection of SNP TSC0036279
cccgccaaacctt

SEQ ID NO: 144313 - DNA, 13 bp, Artificial Sequence
  Oligonucleotide for detection of SNP TSC0036279
aaggttgggcggg

SEQ ID NO: 144314 - DNA, 13 bp, Artificial Sequence
  Oligonucleotide for detection of SNP TSC0036279
cccgcccaacctt

SEQ ID NO: 144315 - DNA, 13 bp, Artificial Sequence
  Oligonucleotide for detection of SNP TSC0036279
aaggtcgggcggg

SEQ ID NO: 144316 - DNA, 13 bp, Artificial Sequence
  Oligonucleotide for detection of SNP TSC0036279
cccgcccgacctt

SEQ ID NO: 144317 - DNA, 13 bp, Artificial Sequence
  Oligonucleotide for detection of SNP TSC0036279
tttgtttgatttt

SEQ ID NO: 144318 - DNA, 13 bp, Artificial Sequence
  Oligonucleotide for detection of SNP TSC0036279
aaaatcaaacaaa

SEQ ID NO: 144319 - DNA, 13 bp, Artificial Sequence
  Oligonucleotide for detection of SNP TSC0036279
tttgttagatttt

SEQ ID NO: 144320 - DNA, 13 bp, Artificial Sequence
  Oligonucleotide for detection of SNP TSC0036279
aaaatctaacaaa

SEQ ID NO: 144321 - DNA, 13 bp, Artificial Sequence
  Oligonucleotide for detection of SNP TSC0036279
ttcgtttgatttt

SEQ ID NO: 144322 - DNA, 13 bp, Artificial Sequence
  Oligonucleotide for detection of SNP TSC0036279
aaaatcaaacgaa

SEQ ID NO: 144323 - DNA, 13 bp, Artificial Sequence
  Oligonucleotide for detection of SNP TSC0036279
ttcgttagatttt

SEQ ID NO: 144324 - DNA, 13 bp, Artificial Sequence
  Oligonucleotide for detection of SNP TSC0036279
aaaatctaacgaa

SEQ ID NO: 144325 - DNA, 13 bp, Artificial Sequence
  Oligonucleotide for detection of SNP TSC0036279
tttgttcgatttt

SEQ ID NO: 144326 - DNA, 13 bp, Artificial Sequence
  Oligonucleotide for detection of SNP TSC0036279
aaaatcgaacaaa

SEQ ID NO: 144327 - DNA, 13 bp, Artificial Sequence
  Oligonucleotide for detection of SNP TSC0036279
ttcgttcgatttt

SEQ ID NO: 144328 - DNA, 13 bp, Artificial Sequence
  Oligonucleotide for detection of SNP TSC0036279
aaaatcgaacgaa

SEQ ID NO: 144329 - DNA, 13 bp, Artificial Sequence
  Oligonucleotide for detection of SNP TSC0036284
ttagggaaaaaga

SEQ ID NO: 144330 - DNA, 13 bp, Artificial Sequence
  Oligonucleotide for detection of SNP TSC0036284
tctttttccctaa

SEQ ID NO: 144331 - DNA, 13 bp, Artificial Sequence
  Oligonucleotide for detection of SNP TSC0036284
ttaggggaaaaga

SEQ ID NO: 144332 - DNA, 13 bp, Artificial Sequence
  Oligonucleotide for detection of SNP TSC0036284
tcttttcccctaa

SEQ ID NO: 144333 - DNA, 13 bp, Artificial Sequence
  Oligonucleotide for detection of SNP TSC0036286
ttttggggtagtt

SEQ ID NO: 144334 - DNA, 13 bp, Artificial Sequence
  Oligonucleotide for detection of SNP TSC0036286
aactaccccaaaa

SEQ ID NO: 144335 - DNA, 13 bp, Artificial Sequence
  Oligonucleotide for detection of SNP TSC0036286
ttttggagtagtt

SEQ ID NO: 144336 - DNA, 13 bp, Artificial Sequence
  Oligonucleotide for detection of SNP TSC0036286
aactactccaaaa

SEQ ID NO: 144337 - DNA, 13 bp, Artificial Sequence
  Oligonucleotide for detection of SNP TSC0036286
tttcggggtagtt

SEQ ID NO: 144338 - DNA, 13 bp, Artificial Sequence
  Oligonucleotide for detection of SNP TSC0036286
aactaccccgaaa

SEQ ID NO: 144339 - DNA, 13 bp, Artificial Sequence
  Oligonucleotide for detection of SNP TSC0036286
tttcggagtagtt

SEQ ID NO: 144340 - DNA, 13 bp, Artificial Sequence
  Oligonucleotide for detection of SNP TSC0036286
aactactccgaaa

SEQ ID NO: 144341 - DNA, 13 bp, Artificial Sequence
  Oligonucleotide for detection of SNP TSC0036287
tggtgtatatgtg

SEQ ID NO: 144342 - DNA, 13 bp, Artificial Sequence
  Oligonucleotide for detection of SNP TSC0036287
cacatatacacca

SEQ ID NO: 144343 - DNA, 13 bp, Artificial Sequence
  Oligonucleotide for detection of SNP TSC0036287
tggtgtgtatgtg

SEQ ID NO: 144344 - DNA, 13 bp, Artificial Sequence
  Oligonucleotide for detection of SNP TSC0036287
cacatacacacca

SEQ ID NO: 144345 - DNA, 13 bp, Artificial Sequence
  Oligonucleotide for detection of SNP TSC0036294
attagtatgtagy

SEQ ID NO: 144346 - DNA, 13 bp, Artificial Sequence
  Oligonucleotide for detection of SNP TSC0036294
rctacatactaat

SEQ ID NO: 144347 - DNA, 13 bp, Artificial Sequence
  Oligonucleotide for detection of SNP TSC0036294
attagtttgtagy

SEQ ID NO: 144348 - DNA, 13 bp, Artificial Sequence
  Oligonucleotide for detection of SNP TSC0036294
rctacaaactaat

SEQ ID NO: 144349 - DNA, 13 bp, Artificial Sequence
  Oligonucleotide for detection of SNP TSC0036294
gttgtatgttggt

SEQ ID NO: 144350 - DNA, 13 bp, Artificial Sequence
  Oligonucleotide for detection of SNP TSC0036294
accaacatacaac

SEQ ID NO: 144351 - DNA, 13 bp, Artificial Sequence
  Oligonucleotide for detection of SNP TSC0036294
gttgtaggttggt

SEQ ID NO: 144352 - DNA, 13 bp, Artificial Sequence
  Oligonucleotide for detection of SNP TSC0036294
accaacctacaac

SEQ ID NO: 144353 - DNA, 13 bp, Artificial Sequence
  Oligonucleotide for detection of SNP TSC0036295
taggttttaagay

SEQ ID NO: 144354 - DNA, 13 bp, Artificial Sequence
  Oligonucleotide for detection of SNP TSC0036295
rtcttaaaaccta

SEQ ID NO: 144355 - DNA, 13 bp, Artificial Sequence
  Oligonucleotide for detection of SNP TSC0036295
gttttataatttg

SEQ ID NO: 144356 - DNA, 13 bp, Artificial Sequence
  Oligonucleotide for detection of SNP TSC0036295
caaattataaaac

SEQ ID NO: 144357 - DNA, 13 bp, Artificial Sequence
  Oligonucleotide for detection of SNP TSC0036295
gttttaaaatttg

SEQ ID NO: 144358 - DNA, 13 bp, Artificial Sequence
  Oligonucleotide for detection of SNP TSC0036295
caaattttaaaac

SEQ ID NO: 144359 - DNA, 13 bp, Artificial Sequence
  Oligonucleotide for detection of SNP TSC0036296
ttttttggatggg

SEQ ID NO: 144360 - DNA, 13 bp, Artificial Sequence
  Oligonucleotide for detection of SNP TSC0036296
cccatccaaaaaa

SEQ ID NO: 144361 - DNA, 13 bp, Artificial Sequence
  Oligonucleotide for detection of SNP TSC0036296
ttttttagatggg

SEQ ID NO: 144362 - DNA, 13 bp, Artificial Sequence
  Oligonucleotide for detection of SNP TSC0036296
cccatctaaaaaa

SEQ ID NO: 144363 - DNA, 13 bp, Artificial Sequence
  Oligonucleotide for detection of SNP TSC0036296
tttttcggatggg

SEQ ID NO: 144364 - DNA, 13 bp, Artificial Sequence
  Oligonucleotide for detection of SNP TSC0036296
cccatccgaaaaa

SEQ ID NO: 144365 - DNA, 13 bp, Artificial Sequence
  Oligonucleotide for detection of SNP TSC0036297
ataattagtgatg

SEQ ID NO: 144366 - DNA, 13 bp, Artificial Sequence
  Oligonucleotide for detection of SNP TSC0036297
catcactaattat

SEQ ID NO: 144367 - DNA, 13 bp, Artificial Sequence
  Oligonucleotide for detection of SNP TSC0036297
ataattggtgatg

SEQ ID NO: 144368 - DNA, 13 bp, Artificial Sequence
  Oligonucleotide for detection of SNP TSC0036297
catcaccaattat

SEQ ID NO: 144369 - DNA, 13 bp, Artificial Sequence
  Oligonucleotide for detection of SNP TSC0036297
ataatcggtgatg

SEQ ID NO: 144370 - DNA, 13 bp, Artificial Sequence
  Oligonucleotide for detection of SNP TSC0036297
catcaccgattat

SEQ ID NO: 144371 - DNA, 13 bp, Artificial Sequence
  Oligonucleotide for detection of SNP TSC0036297
tattattggttgt

SEQ ID NO: 144372 - DNA, 13 bp, Artificial Sequence
  Oligonucleotide for detection of SNP TSC0036297
acaaccaataata

SEQ ID NO: 144373 - DNA, 13 bp, Artificial Sequence
  Oligonucleotide for detection of SNP TSC0036297
tattatcggttgt

SEQ ID NO: 144374 - DNA, 13 bp, Artificial Sequence
  Oligonucleotide for detection of SNP TSC0036297
acaaccgataata

SEQ ID NO: 144375 - DNA, 13 bp, Artificial Sequence
  Oligonucleotide for detection of SNP TSC0036298
tggaaggagatty

SEQ ID NO: 144376 - DNA, 13 bp, Artificial Sequence
  Oligonucleotide for detection of SNP TSC0036298
raatctccttcca

SEQ ID NO: 144377 - DNA, 13 bp, Artificial Sequence
  Oligonucleotide for detection of SNP TSC0036298
tggaagaagatty

SEQ ID NO: 144378 - DNA, 13 bp, Artificial Sequence
  Oligonucleotide for detection of SNP TSC0036298
raatcttcttcca

SEQ ID NO: 144379 - DNA, 13 bp, Artificial Sequence
  Oligonucleotide for detection of SNP TSC0036299
aggttagttttaa

SEQ ID NO: 144380 - DNA, 13 bp, Artificial Sequence
  Oligonucleotide for detection of SNP TSC0036299
ttaaaactaacct

SEQ ID NO: 144381 - DNA, 13 bp, Artificial Sequence
  Oligonucleotide for detection of SNP TSC0036299
aggttaattttaa

SEQ ID NO: 144382 - DNA, 13 bp, Artificial Sequence
  Oligonucleotide for detection of SNP TSC0036299
ttaaaattaacct

SEQ ID NO: 144383 - DNA, 13 bp, Artificial Sequence
  Oligonucleotide for detection of SNP TSC0036302
tgggagaataatt

SEQ ID NO: 144384 - DNA, 13 bp, Artificial Sequence
  Oligonucleotide for detection of SNP TSC0036302
aattattctccca

SEQ ID NO: 144385 - DNA, 13 bp, Artificial Sequence
  Oligonucleotide for detection of SNP TSC0036302
tgggagtataatt

SEQ ID NO: 144386 - DNA, 13 bp, Artificial Sequence
  Oligonucleotide for detection of SNP TSC0036302
aattatactccca

SEQ ID NO: 144387 - DNA, 13 bp, Artificial Sequence
  Oligonucleotide for detection of SNP TSC0036302
aattgttttttta

SEQ ID NO: 144388 - DNA, 13 bp, Artificial Sequence
  Oligonucleotide for detection of SNP TSC0036302
taaaaaaacaatt

SEQ ID NO: 144389 - DNA, 13 bp, Artificial Sequence
  Oligonucleotide for detection of SNP TSC0036302
aattgtgttttta

SEQ ID NO: 144390 - DNA, 13 bp, Artificial Sequence
  Oligonucleotide for detection of SNP TSC0036302
taaaaacacaatt

SEQ ID NO: 144391 - DNA, 13 bp, Artificial Sequence
  Oligonucleotide for detection of SNP TSC0036303
gggtttttattty

SEQ ID NO: 144392 - DNA, 13 bp, Artificial Sequence
  Oligonucleotide for detection of SNP TSC0036303
raaataaaaaccc

SEQ ID NO: 144393 - DNA, 13 bp, Artificial Sequence
  Oligonucleotide for detection of SNP TSC0036303
gagatgggagtty

SEQ ID NO: 144394 - DNA, 13 bp, Artificial Sequence
  Oligonucleotide for detection of SNP TSC0036303
raactcccatctc

SEQ ID NO: 144395 - DNA, 13 bp, Artificial Sequence
  Oligonucleotide for detection of SNP TSC0036303
gagatgtgagtty

SEQ ID NO: 144396 - DNA, 13 bp, Artificial Sequence
  Oligonucleotide for detection of SNP TSC0036303
raactcacatctc

SEQ ID NO: 144397 - DNA, 13 bp, Artificial Sequence
  Oligonucleotide for detection of SNP TSC0036303
gagatgcgagtty

SEQ ID NO: 144398 - DNA, 13 bp, Artificial Sequence
  Oligonucleotide for detection of SNP TSC0036303
raactcgcatctc

SEQ ID NO: 144399 - DNA, 13 bp, Artificial Sequence
  Oligonucleotide for detection of SNP TSC0036304
tgttttattgtaa

SEQ ID NO: 144400 - DNA, 13 bp, Artificial Sequence
  Oligonucleotide for detection of SNP TSC0036304
ttacaataaaaca

SEQ ID NO: 144401 - DNA, 13 bp, Artificial Sequence
  Oligonucleotide for detection of SNP TSC0036304
tgttttgttgtaa

SEQ ID NO: 144402 - DNA, 13 bp, Artificial Sequence
  Oligonucleotide for detection of SNP TSC0036304
ttacaacaaaaca

SEQ ID NO: 144403 - DNA, 13 bp, Artificial Sequence
  Oligonucleotide for detection of SNP TSC0036304
tgtttcgttgtaa

SEQ ID NO: 144404 - DNA, 13 bp, Artificial Sequence
  Oligonucleotide for detection of SNP TSC0036304
ttacaacgaaaca

SEQ ID NO: 144405 - DNA, 13 bp, Artificial Sequence
  Oligonucleotide for detection of SNP TSC0036304
ttatagtgaaata

SEQ ID NO: 144406 - DNA, 13 bp, Artificial Sequence
  Oligonucleotide for detection of SNP TSC0036304
tatttcactataa

SEQ ID NO: 144407 - DNA, 13 bp, Artificial Sequence
  Oligonucleotide for detection of SNP TSC0036304
ttatagcgaaata

SEQ ID NO: 144408 - DNA, 13 bp, Artificial Sequence
  Oligonucleotide for detection of SNP TSC0036304
tatttcgctataa

SEQ ID NO: 144409 - DNA, 13 bp, Artificial Sequence
  Oligonucleotide for detection of SNP TSC0036306
ttatttgttgaaa

SEQ ID NO: 144410 - DNA, 13 bp, Artificial Sequence
  Oligonucleotide for detection of SNP TSC0036306
tttcaacaaataa

SEQ ID NO: 144411 - DNA, 13 bp, Artificial Sequence
  Oligonucleotide for detection of SNP TSC0036306
ttattttttgaaa

SEQ ID NO: 144412 - DNA, 13 bp, Artificial Sequence
  Oligonucleotide for detection of SNP TSC0036306
tttcaaaaaataa

SEQ ID NO: 144413 - DNA, 13 bp, Artificial Sequence
  Oligonucleotide for detection of SNP TSC0036306
ttattcgttgaaa

SEQ ID NO: 144414 - DNA, 13 bp, Artificial Sequence
  Oligonucleotide for detection of SNP TSC0036306
tttcaacgaataa

SEQ ID NO: 144415 - DNA, 13 bp, Artificial Sequence
  Oligonucleotide for detection of SNP TSC0036306
ttttaatggatga

SEQ ID NO: 144416 - DNA, 13 bp, Artificial Sequence
  Oligonucleotide for detection of SNP TSC0036306
tcatccattaaaa

SEQ ID NO: 144417 - DNA, 13 bp, Artificial Sequence
  Oligonucleotide for detection of SNP TSC0036306
ttttaaaggatga

SEQ ID NO: 144418 - DNA, 13 bp, Artificial Sequence
  Oligonucleotide for detection of SNP TSC0036306
tcatcctttaaaa

SEQ ID NO: 144419 - DNA, 13 bp, Artificial Sequence
  Oligonucleotide for detection of SNP TSC0036306
ttttaacggatga

SEQ ID NO: 144420 - DNA, 13 bp, Artificial Sequence
  Oligonucleotide for detection of SNP TSC0036306
tcatccgttaaaa

SEQ ID NO: 144421 - DNA, 13 bp, Artificial Sequence
  Oligonucleotide for detection of SNP TSC0036307
ataataattattt

SEQ ID NO: 144422 - DNA, 13 bp, Artificial Sequence
  Oligonucleotide for detection of SNP TSC0036307
aaataattattat

SEQ ID NO: 144423 - DNA, 13 bp, Artificial Sequence
  Oligonucleotide for detection of SNP TSC0036307
ataatatttattt

SEQ ID NO: 144424 - DNA, 13 bp, Artificial Sequence
  Oligonucleotide for detection of SNP TSC0036307
aaataaatattat

SEQ ID NO: 144425 - DNA, 13 bp, Artificial Sequence
  Oligonucleotide for detection of SNP TSC0036307
aggtagttattat

SEQ ID NO: 144426 - DNA, 13 bp, Artificial Sequence
  Oligonucleotide for detection of SNP TSC0036307
ataataactacct

SEQ ID NO: 144427 - DNA, 13 bp, Artificial Sequence
  Oligonucleotide for detection of SNP TSC0036307
aggtaggtattat

SEQ ID NO: 144428 - DNA, 13 bp, Artificial Sequence
  Oligonucleotide for detection of SNP TSC0036307
ataatacctacct

SEQ ID NO: 144429 - DNA, 13 bp, Artificial Sequence
  Oligonucleotide for detection of SNP TSC0036308
atatgaggtttgy

SEQ ID NO: 144430 - DNA, 13 bp, Artificial Sequence
  Oligonucleotide for detection of SNP TSC0036308
rcaaacctcatat

SEQ ID NO: 144431 - DNA, 13 bp, Artificial Sequence
  Oligonucleotide for detection of SNP TSC0036308
atatgaagtttgy

SEQ ID NO: 144432 - DNA, 13 bp, Artificial Sequence
  Oligonucleotide for detection of SNP TSC0036308
rcaaacttcatat

SEQ ID NO: 144433 - DNA, 13 bp, Artificial Sequence
  Oligonucleotide for detection of SNP TSC0036315
tatgggattaaat

SEQ ID NO: 144434 - DNA, 13 bp, Artificial Sequence
  Oligonucleotide for detection of SNP TSC0036315
atttaatcccata

SEQ ID NO: 144435 - DNA, 13 bp, Artificial Sequence
  Oligonucleotide for detection of SNP TSC0036315
tatgggtttaaat

SEQ ID NO: 144436 - DNA, 13 bp, Artificial Sequence
  Oligonucleotide for detection of SNP TSC0036315
atttaaacccata

SEQ ID NO: 144437 - DNA, 13 bp, Artificial Sequence
  Oligonucleotide for detection of SNP TSC0036315
atttagttttatg

SEQ ID NO: 144438 - DNA, 13 bp, Artificial Sequence
  Oligonucleotide for detection of SNP TSC0036315
cataaaactaaat

SEQ ID NO: 144439 - DNA, 13 bp, Artificial Sequence
  Oligonucleotide for detection of SNP TSC0036315
atttaggtttatg

SEQ ID NO: 144440 - DNA, 13 bp, Artificial Sequence
  Oligonucleotide for detection of SNP TSC0036315
cataaacctaaat

SEQ ID NO: 144441 - DNA, 13 bp, Artificial Sequence
  Oligonucleotide for detection of SNP TSC0036316
ttttagggtagag

SEQ ID NO: 144442 - DNA, 13 bp, Artificial Sequence
  Oligonucleotide for detection of SNP TSC0036316
ctctaccctaaaa

SEQ ID NO: 144443 - DNA, 13 bp, Artificial Sequence
  Oligonucleotide for detection of SNP TSC0036316
ttttagagtagag

SEQ ID NO: 144444 - DNA, 13 bp, Artificial Sequence
  Oligonucleotide for detection of SNP TSC0036316
ctctactctaaaa

SEQ ID NO: 144445 - DNA, 13 bp, Artificial Sequence
  Oligonucleotide for detection of SNP TSC0036318
atgttaagaaaat

SEQ ID NO: 144446 - DNA, 13 bp, Artificial Sequence
  Oligonucleotide for detection of SNP TSC0036318
attttcttaacat

SEQ ID NO: 144447 - DNA, 13 bp, Artificial Sequence
  Oligonucleotide for detection of SNP TSC0036318
atgttatgaaaat

SEQ ID NO: 144448 - DNA, 13 bp, Artificial Sequence
  Oligonucleotide for detection of SNP TSC0036318
attttcataacat

SEQ ID NO: 144449 - DNA, 13 bp, Artificial Sequence
  Oligonucleotide for detection of SNP TSC0036318
atttttttggtat

SEQ ID NO: 144450 - DNA, 13 bp, Artificial Sequence
  Oligonucleotide for detection of SNP TSC0036318
ataccaaaaaaat

SEQ ID NO: 144451 - DNA, 13 bp, Artificial Sequence
  Oligonucleotide for detection of SNP TSC0036318
atttttatggtat

SEQ ID NO: 144452 - DNA, 13 bp, Artificial Sequence
  Oligonucleotide for detection of SNP TSC0036318
ataccataaaaat

SEQ ID NO: 144453 - DNA, 13 bp, Artificial Sequence
  Oligonucleotide for detection of SNP TSC0036319
aaaaaaattttag

SEQ ID NO: 144454 - DNA, 13 bp, Artificial Sequence
  Oligonucleotide for detection of SNP TSC0036319
ctaaaattttttt

SEQ ID NO: 144455 - DNA, 13 bp, Artificial Sequence
  Oligonucleotide for detection of SNP TSC0036319
aaaaaagttttag

SEQ ID NO: 144456 - DNA, 13 bp, Artificial Sequence
  Oligonucleotide for detection of SNP TSC0036319
ctaaaactttttt

SEQ ID NO: 144457 - DNA, 13 bp, Artificial Sequence
  Oligonucleotide for detection of SNP TSC0036321
tattttatatatt

SEQ ID NO: 144458 - DNA, 13 bp, Artificial Sequence
  Oligonucleotide for detection of SNP TSC0036321
aatatataaaata

SEQ ID NO: 144459 - DNA, 13 bp, Artificial Sequence
  Oligonucleotide for detection of SNP TSC0036321
tattttttatatt

SEQ ID NO: 144460 - DNA, 13 bp, Artificial Sequence
  Oligonucleotide for detection of SNP TSC0036321
aatataaaaaata

SEQ ID NO: 144461 - DNA, 13 bp, Artificial Sequence
  Oligonucleotide for detection of SNP TSC0036321
aatgtataaaata

SEQ ID NO: 144462 - DNA, 13 bp, Artificial Sequence
  Oligonucleotide for detection of SNP TSC0036321
tattttatacatt

SEQ ID NO: 144463 - DNA, 13 bp, Artificial Sequence
  Oligonucleotide for detection of SNP TSC0036321
aatgtaaaaaata

SEQ ID NO: 144464 - DNA, 13 bp, Artificial Sequence
  Oligonucleotide for detection of SNP TSC0036321
tattttttacatt

SEQ ID NO: 144465 - DNA, 13 bp, Artificial Sequence
  Oligonucleotide for detection of SNP TSC0036322
tttattgttgtay

SEQ ID NO: 144466 - DNA, 13 bp, Artificial Sequence
  Oligonucleotide for detection of SNP TSC0036322
rtacaacaataaa

SEQ ID NO: 144467 - DNA, 13 bp, Artificial Sequence
  Oligonucleotide for detection of SNP TSC0036322
tttatttttgtay

SEQ ID NO: 144468 - DNA, 13 bp, Artificial Sequence
  Oligonucleotide for detection of SNP TSC0036322
rtacaaaaataaa

SEQ ID NO: 144469 - DNA, 13 bp, Artificial Sequence
  Oligonucleotide for detection of SNP TSC0036322
gtataataataag

SEQ ID NO: 144470 - DNA, 13 bp, Artificial Sequence
  Oligonucleotide for detection of SNP TSC0036322
cttattattatac

SEQ ID NO: 144471 - DNA, 13 bp, Artificial Sequence
  Oligonucleotide for detection of SNP TSC0036322
gtataaaaataag

SEQ ID NO: 144472 - DNA, 13 bp, Artificial Sequence
  Oligonucleotide for detection of SNP TSC0036322
cttatttttatac

SEQ ID NO: 144473 - DNA, 13 bp, Artificial Sequence
  Oligonucleotide for detection of SNP TSC0036324
atatttaagtaag

SEQ ID NO: 144474 - DNA, 13 bp, Artificial Sequence
  Oligonucleotide for detection of SNP TSC0036324
cttacttaaatat

SEQ ID NO: 144475 - DNA, 13 bp, Artificial Sequence
  Oligonucleotide for detection of SNP TSC0036324
atattttagtaag

SEQ ID NO: 144476 - DNA, 13 bp, Artificial Sequence
  Oligonucleotide for detection of SNP TSC0036324
cttactaaaatat

SEQ ID NO: 144477 - DNA, 13 bp, Artificial Sequence
  Oligonucleotide for detection of SNP TSC0036325
tgttgtttgttta

SEQ ID NO: 144478 - DNA, 13 bp, Artificial Sequence
  Oligonucleotide for detection of SNP TSC0036325
taaacaaacaaca

SEQ ID NO: 144479 - DNA, 13 bp, Artificial Sequence
  Oligonucleotide for detection of SNP TSC0036325
cgttgtatgttta

SEQ ID NO: 144480 - DNA, 13 bp, Artificial Sequence
  Oligonucleotide for detection of SNP TSC0036325
taaacatacaacg

SEQ ID NO: 144481 - DNA, 13 bp, Artificial Sequence
  Oligonucleotide for detection of SNP TSC0036325
cgttgtttgttta

SEQ ID NO: 144482 - DNA, 13 bp, Artificial Sequence
  Oligonucleotide for detection of SNP TSC0036325
taaacaaacaacg

SEQ ID NO: 144483 - DNA, 13 bp, Artificial Sequence
  Oligonucleotide for detection of SNP TSC0036325
tggatatgtaatg

SEQ ID NO: 144484 - DNA, 13 bp, Artificial Sequence
  Oligonucleotide for detection of SNP TSC0036325
cattacatatcca

SEQ ID NO: 144485 - DNA, 13 bp, Artificial Sequence
  Oligonucleotide for detection of SNP TSC0036325
tggataggtaatg

SEQ ID NO: 144486 - DNA, 13 bp, Artificial Sequence
  Oligonucleotide for detection of SNP TSC0036325
cattacctatcca

SEQ ID NO: 144487 - DNA, 13 bp, Artificial Sequence
  Oligonucleotide for detection of SNP TSC0036325
tggatatgtaacg

SEQ ID NO: 144488 - DNA, 13 bp, Artificial Sequence
  Oligonucleotide for detection of SNP TSC0036325
cgttacatatcca

SEQ ID NO: 144489 - DNA, 13 bp, Artificial Sequence
  Oligonucleotide for detection of SNP TSC0036325
tggataggtaacg

SEQ ID NO: 144490 - DNA, 13 bp, Artificial Sequence
  Oligonucleotide for detection of SNP TSC0036325
cgttacctatcca

SEQ ID NO: 144491 - DNA, 13 bp, Artificial Sequence
  Oligonucleotide for detection of SNP TSC0036326
attttaggtggga

SEQ ID NO: 144492 - DNA, 13 bp, Artificial Sequence
  Oligonucleotide for detection of SNP TSC0036326
tcccacctaaaat

SEQ ID NO: 144493 - DNA, 13 bp, Artificial Sequence
  Oligonucleotide for detection of SNP TSC0036326
attttatgtggga

SEQ ID NO: 144494 - DNA, 13 bp, Artificial Sequence
  Oligonucleotide for detection of SNP TSC0036326
tcccacataaaat

SEQ ID NO: 144495 - DNA, 13 bp, Artificial Sequence
  Oligonucleotide for detection of SNP TSC0036326
ttttatttaaaat

SEQ ID NO: 144496 - DNA, 13 bp, Artificial Sequence
  Oligonucleotide for detection of SNP TSC0036326
attttaaataaaa

SEQ ID NO: 144497 - DNA, 13 bp, Artificial Sequence
  Oligonucleotide for detection of SNP TSC0036326
ttttatataaaat

SEQ ID NO: 144498 - DNA, 13 bp, Artificial Sequence
  Oligonucleotide for detection of SNP TSC0036326
attttatataaaa

SEQ ID NO: 144499 - DNA, 13 bp, Artificial Sequence
  Oligonucleotide for detection of SNP TSC0036327
agtattatttata

SEQ ID NO: 144500 - DNA, 13 bp, Artificial Sequence
  Oligonucleotide for detection of SNP TSC0036327
tataaataatact

SEQ ID NO: 144501 - DNA, 13 bp, Artificial Sequence
  Oligonucleotide for detection of SNP TSC0036327
agtattttttata

SEQ ID NO: 144502 - DNA, 13 bp, Artificial Sequence
  Oligonucleotide for detection of SNP TSC0036327
tataaaaaatact

SEQ ID NO: 144503 - DNA, 13 bp, Artificial Sequence
  Oligonucleotide for detection of SNP TSC0036327
tatgaataatgtt

SEQ ID NO: 144504 - DNA, 13 bp, Artificial Sequence
  Oligonucleotide for detection of SNP TSC0036327
aacattattcata

SEQ ID NO: 144505 - DNA, 13 bp, Artificial Sequence
  Oligonucleotide for detection of SNP TSC0036327
tatgaaaaatgtt

SEQ ID NO: 144506 - DNA, 13 bp, Artificial Sequence
  Oligonucleotide for detection of SNP TSC0036327
aacatttttcata

SEQ ID NO: 144507 - DNA, 13 bp, Artificial Sequence
  Oligonucleotide for detection of SNP TSC0036328
ttattttgtagtt

SEQ ID NO: 144508 - DNA, 13 bp, Artificial Sequence
  Oligonucleotide for detection of SNP TSC0036328
aactacaaaataa

SEQ ID NO: 144509 - DNA, 13 bp, Artificial Sequence
  Oligonucleotide for detection of SNP TSC0036328
ttatttcgtagtt

SEQ ID NO: 144510 - DNA, 13 bp, Artificial Sequence
  Oligonucleotide for detection of SNP TSC0036328
aactacgaaataa

SEQ ID NO: 144511 - DNA, 13 bp, Artificial Sequence
  Oligonucleotide for detection of SNP TSC0036328
agttgtggagtga

SEQ ID NO: 144512 - DNA, 13 bp, Artificial Sequence
  Oligonucleotide for detection of SNP TSC0036328
tcactccacaact

SEQ ID NO: 144513 - DNA, 13 bp, Artificial Sequence
  Oligonucleotide for detection of SNP TSC0036328
agttgtagagtga

SEQ ID NO: 144514 - DNA, 13 bp, Artificial Sequence
  Oligonucleotide for detection of SNP TSC0036328
tcactctacaact

SEQ ID NO: 144515 - DNA, 13 bp, Artificial Sequence
  Oligonucleotide for detection of SNP TSC0036328
agttgcggagtga

SEQ ID NO: 144516 - DNA, 13 bp, Artificial Sequence
  Oligonucleotide for detection of SNP TSC0036328
tcactccgcaact

SEQ ID NO: 144517 - DNA, 13 bp, Artificial Sequence
  Oligonucleotide for detection of SNP TSC0036337
atttaaatgatty

SEQ ID NO: 144518 - DNA, 13 bp, Artificial Sequence
  Oligonucleotide for detection of SNP TSC0036337
raatcatttaaat

SEQ ID NO: 144519 - DNA, 13 bp, Artificial Sequence
  Oligonucleotide for detection of SNP TSC0036337
atttaagtgatty

SEQ ID NO: 144520 - DNA, 13 bp, Artificial Sequence
  Oligonucleotide for detection of SNP TSC0036337
raatcacttaaat

SEQ ID NO: 144521 - DNA, 13 bp, Artificial Sequence
  Oligonucleotide for detection of SNP TSC0036340
taatttattgatt

SEQ ID NO: 144522 - DNA, 13 bp, Artificial Sequence
  Oligonucleotide for detection of SNP TSC0036340
aatcaataaatta

SEQ ID NO: 144523 - DNA, 13 bp, Artificial Sequence
  Oligonucleotide for detection of SNP TSC0036340
taatttgttgatt

SEQ ID NO: 144524 - DNA, 13 bp, Artificial Sequence
  Oligonucleotide for detection of SNP TSC0036340
aatcaacaaatta

SEQ ID NO: 144525 - DNA, 13 bp, Artificial Sequence
  Oligonucleotide for detection of SNP TSC0036340
taatttatcgatt

SEQ ID NO: 144526 - DNA, 13 bp, Artificial Sequence
  Oligonucleotide for detection of SNP TSC0036340
aatcgataaatta

SEQ ID NO: 144527 - DNA, 13 bp, Artificial Sequence
  Oligonucleotide for detection of SNP TSC0036340
taatttgtcgatt

SEQ ID NO: 144528 - DNA, 13 bp, Artificial Sequence
  Oligonucleotide for detection of SNP TSC0036340
aatcgacaaatta

SEQ ID NO: 144529 - DNA, 13 bp, Artificial Sequence
  Oligonucleotide for detection of SNP TSC0036342
atgaggaaataag

SEQ ID NO: 144530 - DNA, 13 bp, Artificial Sequence
  Oligonucleotide for detection of SNP TSC0036342
cttatttcctcat

SEQ ID NO: 144531 - DNA, 13 bp, Artificial Sequence
  Oligonucleotide for detection of SNP TSC0036342
atgaggtaataag

SEQ ID NO: 144532 - DNA, 13 bp, Artificial Sequence
  Oligonucleotide for detection of SNP TSC0036342
cttattacctcat

SEQ ID NO: 144533 - DNA, 13 bp, Artificial Sequence
  Oligonucleotide for detection of SNP TSC0036342
tttgtttttttat

SEQ ID NO: 144534 - DNA, 13 bp, Artificial Sequence
  Oligonucleotide for detection of SNP TSC0036342
ataaaaaaacaaa

SEQ ID NO: 144535 - DNA, 13 bp, Artificial Sequence
  Oligonucleotide for detection of SNP TSC0036342
tttgttattttat

SEQ ID NO: 144536 - DNA, 13 bp, Artificial Sequence
  Oligonucleotide for detection of SNP TSC0036342
ataaaataacaaa

SEQ ID NO: 144537 - DNA, 13 bp, Artificial Sequence
  Oligonucleotide for detection of SNP TSC0036343
atgttttggatgy

SEQ ID NO: 144538 - DNA, 13 bp, Artificial Sequence
  Oligonucleotide for detection of SNP TSC0036343
rcatccaaaacat

SEQ ID NO: 144539 - DNA, 13 bp, Artificial Sequence
  Oligonucleotide for detection of SNP TSC0036343
atgtttgggatgy

SEQ ID NO: 144540 - DNA, 13 bp, Artificial Sequence
  Oligonucleotide for detection of SNP TSC0036343
rcatcccaaacat

SEQ ID NO: 144541 - DNA, 13 bp, Artificial Sequence
  Oligonucleotide for detection of SNP TSC0036343
atgtttcggatgy

SEQ ID NO: 144542 - DNA, 13 bp, Artificial Sequence
  Oligonucleotide for detection of SNP TSC0036343
rcatccgaaacat

SEQ ID NO: 144543 - DNA, 13 bp, Artificial Sequence
  Oligonucleotide for detection of SNP TSC0036343
gtatttgaggtat

SEQ ID NO: 144544 - DNA, 13 bp, Artificial Sequence
  Oligonucleotide for detection of SNP TSC0036343
atacctcaaatac

SEQ ID NO: 144545 - DNA, 13 bp, Artificial Sequence
  Oligonucleotide for detection of SNP TSC0036343
gtattttaggtat

SEQ ID NO: 144546 - DNA, 13 bp, Artificial Sequence
  Oligonucleotide for detection of SNP TSC0036343
atacctaaaatac

SEQ ID NO: 144547 - DNA, 13 bp, Artificial Sequence
  Oligonucleotide for detection of SNP TSC0036343
gtattcgaggtat

SEQ ID NO: 144548 - DNA, 13 bp, Artificial Sequence
  Oligonucleotide for detection of SNP TSC0036343
atacctcgaatac

SEQ ID NO: 144549 - DNA, 13 bp, Artificial Sequence
  Oligonucleotide for detection of SNP TSC0036348
aaatttattttga

SEQ ID NO: 144550 - DNA, 13 bp, Artificial Sequence
  Oligonucleotide for detection of SNP TSC0036348
tcaaaataaattt

SEQ ID NO: 144551 - DNA, 13 bp, Artificial Sequence
  Oligonucleotide for detection of SNP TSC0036348
aaattttttttga

SEQ ID NO: 144552 - DNA, 13 bp, Artificial Sequence
  Oligonucleotide for detection of SNP TSC0036348
tcaaaaaaaattt

SEQ ID NO: 144553 - DNA, 13 bp, Artificial Sequence
  Oligonucleotide for detection of SNP TSC0036348
ttaagataaattt

SEQ ID NO: 144554 - DNA, 13 bp, Artificial Sequence
  Oligonucleotide for detection of SNP TSC0036348
aaatttatcttaa

SEQ ID NO: 144555 - DNA, 13 bp, Artificial Sequence
  Oligonucleotide for detection of SNP TSC0036348
ttaagaaaaattt

SEQ ID NO: 144556 - DNA, 13 bp, Artificial Sequence
  Oligonucleotide for detection of SNP TSC0036348
aaatttttcttaa

SEQ ID NO: 144557 - DNA, 13 bp, Artificial Sequence
  Oligonucleotide for detection of SNP TSC0036353
atgtagtgtttat

SEQ ID NO: 144558 - DNA, 13 bp, Artificial Sequence
  Oligonucleotide for detection of SNP TSC0036353
ataaacactacat

SEQ ID NO: 144559 - DNA, 13 bp, Artificial Sequence
  Oligonucleotide for detection of SNP TSC0036353
acgtagtgtttat

SEQ ID NO: 144560 - DNA, 13 bp, Artificial Sequence
  Oligonucleotide for detection of SNP TSC0036353
ataaacactacgt

SEQ ID NO: 144561 - DNA, 13 bp, Artificial Sequence
  Oligonucleotide for detection of SNP TSC0036353
atgtagcgtttat

SEQ ID NO: 144562 - DNA, 13 bp, Artificial Sequence
  Oligonucleotide for detection of SNP TSC0036353
ataaacgctacat

SEQ ID NO: 144563 - DNA, 13 bp, Artificial Sequence
  Oligonucleotide for detection of SNP TSC0036353
acgtagcgtttat

SEQ ID NO: 144564 - DNA, 13 bp, Artificial Sequence
  Oligonucleotide for detection of SNP TSC0036353
ataaacgctacgt

SEQ ID NO: 144565 - DNA, 13 bp, Artificial Sequence
  Oligonucleotide for detection of SNP TSC0036353
atggatgttatgt

SEQ ID NO: 144566 - DNA, 13 bp, Artificial Sequence
  Oligonucleotide for detection of SNP TSC0036353
acataacatccat

SEQ ID NO: 144567 - DNA, 13 bp, Artificial Sequence
  Oligonucleotide for detection of SNP TSC0036353
atggatattatgt

SEQ ID NO: 144568 - DNA, 13 bp, Artificial Sequence
  Oligonucleotide for detection of SNP TSC0036353
acataatatccat

SEQ ID NO: 144569 - DNA, 13 bp, Artificial Sequence
  Oligonucleotide for detection of SNP TSC0036353
atggacgttatgt

SEQ ID NO: 144570 - DNA, 13 bp, Artificial Sequence
  Oligonucleotide for detection of SNP TSC0036353
acataacgtccat

SEQ ID NO: 144571 - DNA, 13 bp, Artificial Sequence
  Oligonucleotide for detection of SNP TSC0036353
atggatattacgt

SEQ ID NO: 144572 - DNA, 13 bp, Artificial Sequence
  Oligonucleotide for detection of SNP TSC0036353
acgtaatatccat

SEQ ID NO: 144573 - DNA, 13 bp, Artificial Sequence
  Oligonucleotide for detection of SNP TSC0036353
atggatgttacgt

SEQ ID NO: 144574 - DNA, 13 bp, Artificial Sequence
  Oligonucleotide for detection of SNP TSC0036353
acgtaacatccat

SEQ ID NO: 144575 - DNA, 13 bp, Artificial Sequence
  Oligonucleotide for detection of SNP TSC0036353
atggacgttacgt

SEQ ID NO: 144576 - DNA, 13 bp, Artificial Sequence
  Oligonucleotide for detection of SNP TSC0036353
acgtaacgtccat

SEQ ID NO: 144577 - DNA, 13 bp, Artificial Sequence
  Oligonucleotide for detection of SNP TSC0036357
taatattaaatat

SEQ ID NO: 144578 - DNA, 13 bp, Artificial Sequence
  Oligonucleotide for detection of SNP TSC0036357
atatttaatatta

SEQ ID NO: 144579 - DNA, 13 bp, Artificial Sequence
  Oligonucleotide for detection of SNP TSC0036357
taatatgaaatat

SEQ ID NO: 144580 - DNA, 13 bp, Artificial Sequence
  Oligonucleotide for detection of SNP TSC0036357
atatttcatatta

SEQ ID NO: 144581 - DNA, 13 bp, Artificial Sequence
  Oligonucleotide for detection of SNP TSC0036357
atgtttgatgttg

SEQ ID NO: 144582 - DNA, 13 bp, Artificial Sequence
  Oligonucleotide for detection of SNP TSC0036357
caacatcaaacat

SEQ ID NO: 144583 - DNA, 13 bp, Artificial Sequence
  Oligonucleotide for detection of SNP TSC0036357
atgttttatgttg

SEQ ID NO: 144584 - DNA, 13 bp, Artificial Sequence
  Oligonucleotide for detection of SNP TSC0036357
caacataaaacat

SEQ ID NO: 144585 - DNA, 13 bp, Artificial Sequence
  Oligonucleotide for detection of SNP TSC0036358
gtgtgtatgtggg

SEQ ID NO: 144586 - DNA, 13 bp, Artificial Sequence
  Oligonucleotide for detection of SNP TSC0036358
cccacatacacac

SEQ ID NO: 144587 - DNA, 13 bp, Artificial Sequence
  Oligonucleotide for detection of SNP TSC0036358
gtgtgtgtgtggg

SEQ ID NO: 144588 - DNA, 13 bp, Artificial Sequence
  Oligonucleotide for detection of SNP TSC0036358
cccacacacacac

SEQ ID NO: 144589 - DNA, 13 bp, Artificial Sequence
  Oligonucleotide for detection of SNP TSC0036359
ttaagttgtggag

SEQ ID NO: 144590 - DNA, 13 bp, Artificial Sequence
  Oligonucleotide for detection of SNP TSC0036359
ctccacaacttaa

SEQ ID NO: 144591 - DNA, 13 bp, Artificial Sequence
  Oligonucleotide for detection of SNP TSC0036359
ttaagtcgtggag

SEQ ID NO: 144592 - DNA, 13 bp, Artificial Sequence
  Oligonucleotide for detection of SNP TSC0036359
ctccacgacttaa

SEQ ID NO: 144593 - DNA, 13 bp, Artificial Sequence
  Oligonucleotide for detection of SNP TSC0036362
gggttgaagggtg

SEQ ID NO: 144594 - DNA, 13 bp, Artificial Sequence
  Oligonucleotide for detection of SNP TSC0036362
cacccttcaaccc

SEQ ID NO: 144595 - DNA, 13 bp, Artificial Sequence
  Oligonucleotide for detection of SNP TSC0036362
gggttggagggtg

SEQ ID NO: 144596 - DNA, 13 bp, Artificial Sequence
  Oligonucleotide for detection of SNP TSC0036362
caccctccaaccc

SEQ ID NO: 144597 - DNA, 13 bp, Artificial Sequence
  Oligonucleotide for detection of SNP TSC0036363
atttagtgaggty

SEQ ID NO: 144598 - DNA, 13 bp, Artificial Sequence
  Oligonucleotide for detection of SNP TSC0036363
racctcactaaat

SEQ ID NO: 144599 - DNA, 13 bp, Artificial Sequence
  Oligonucleotide for detection of SNP TSC0036363
atttagcgaggty

SEQ ID NO: 144600 - DNA, 13 bp, Artificial Sequence
  Oligonucleotide for detection of SNP TSC0036363
racctcgctaaat

SEQ ID NO: 144601 - DNA, 13 bp, Artificial Sequence
  Oligonucleotide for detection of SNP TSC0036363
ggttttgttaagt

SEQ ID NO: 144602 - DNA, 13 bp, Artificial Sequence
  Oligonucleotide for detection of SNP TSC0036363
acttaacaaaacc

SEQ ID NO: 144603 - DNA, 13 bp, Artificial Sequence
  Oligonucleotide for detection of SNP TSC0036363
ggtttcgttaagt

SEQ ID NO: 144604 - DNA, 13 bp, Artificial Sequence
  Oligonucleotide for detection of SNP TSC0036363
acttaacgaaacc

SEQ ID NO: 144605 - DNA, 13 bp, Artificial Sequence
  Oligonucleotide for detection of SNP TSC0036364
gatgggtagttag

SEQ ID NO: 144606 - DNA, 13 bp, Artificial Sequence
  Oligonucleotide for detection of SNP TSC0036364
ctaactacccatc

SEQ ID NO: 144607 - DNA, 13 bp, Artificial Sequence
  Oligonucleotide for detection of SNP TSC0036364
gatggggagttag

SEQ ID NO: 144608 - DNA, 13 bp, Artificial Sequence
  Oligonucleotide for detection of SNP TSC0036364
ctaactccccatc

SEQ ID NO: 144609 - DNA, 13 bp, Artificial Sequence
  Oligonucleotide for detection of SNP TSC0036364
ttgattgtttaty

SEQ ID NO: 144610 - DNA, 13 bp, Artificial Sequence
  Oligonucleotide for detection of SNP TSC0036364
rataaacaatcaa

SEQ ID NO: 144611 - DNA, 13 bp, Artificial Sequence
  Oligonucleotide for detection of SNP TSC0036364
ttgattttttaty

SEQ ID NO: 144612 - DNA, 13 bp, Artificial Sequence
  Oligonucleotide for detection of SNP TSC0036364
rataaaaaatcaa

SEQ ID NO: 144613 - DNA, 13 bp, Artificial Sequence
  Oligonucleotide for detection of SNP TSC0036370
tagggttttgttg

SEQ ID NO: 144614 - DNA, 13 bp, Artificial Sequence
  Oligonucleotide for detection of SNP TSC0036370
caacaaaacccta

SEQ ID NO: 144615 - DNA, 13 bp, Artificial Sequence
  Oligonucleotide for detection of SNP TSC0036370
tagggtgttgttg

SEQ ID NO: 144616 - DNA, 13 bp, Artificial Sequence
  Oligonucleotide for detection of SNP TSC0036370
caacaacacccta

SEQ ID NO: 144617 - DNA, 13 bp, Artificial Sequence
  Oligonucleotide for detection of SNP TSC0036370
tagggtttcgttg

SEQ ID NO: 144618 - DNA, 13 bp, Artificial Sequence
  Oligonucleotide for detection of SNP TSC0036370
caacgaaacccta

SEQ ID NO: 144619 - DNA, 13 bp, Artificial Sequence
  Oligonucleotide for detection of SNP TSC0036370
tagggcgttgttg

SEQ ID NO: 144620 - DNA, 13 bp, Artificial Sequence
  Oligonucleotide for detection of SNP TSC0036370
caacaacgcccta

SEQ ID NO: 144621 - DNA, 13 bp, Artificial Sequence
  Oligonucleotide for detection of SNP TSC0036370
tagggtgtcgttg

SEQ ID NO: 144622 - DNA, 13 bp, Artificial Sequence
  Oligonucleotide for detection of SNP TSC0036370
caacgacacccta

SEQ ID NO: 144623 - DNA, 13 bp, Artificial Sequence
  Oligonucleotide for detection of SNP TSC0036370
tagggcgtcgttg

SEQ ID NO: 144624 - DNA, 13 bp, Artificial Sequence
  Oligonucleotide for detection of SNP TSC0036370
caacgacgcccta

SEQ ID NO: 144625 - DNA, 13 bp, Artificial Sequence
  Oligonucleotide for detection of SNP TSC0036370
tagtgaggttttg

SEQ ID NO: 144626 - DNA, 13 bp, Artificial Sequence
  Oligonucleotide for detection of SNP TSC0036370
caaaacctcacta

SEQ ID NO: 144627 - DNA, 13 bp, Artificial Sequence
  Oligonucleotide for detection of SNP TSC0036370
tagtgatgttttg

SEQ ID NO: 144628 - DNA, 13 bp, Artificial Sequence
  Oligonucleotide for detection of SNP TSC0036370
caaaacatcacta

SEQ ID NO: 144629 - DNA, 13 bp, Artificial Sequence
  Oligonucleotide for detection of SNP TSC0036370
tagcgaggttttg

SEQ ID NO: 144630 - DNA, 13 bp, Artificial Sequence
  Oligonucleotide for detection of SNP TSC0036370
caaaacctcgcta

SEQ ID NO: 144631 - DNA, 13 bp, Artificial Sequence
  Oligonucleotide for detection of SNP TSC0036370
tagcgatgttttg

SEQ ID NO: 144632 - DNA, 13 bp, Artificial Sequence
  Oligonucleotide for detection of SNP TSC0036370
caaaacatcgcta

SEQ ID NO: 144633 - DNA, 13 bp, Artificial Sequence
  Oligonucleotide for detection of SNP TSC0036370
tagtgacgttttg

SEQ ID NO: 144634 - DNA, 13 bp, Artificial Sequence
  Oligonucleotide for detection of SNP TSC0036370
caaaacgtcacta

SEQ ID NO: 144635 - DNA, 13 bp, Artificial Sequence
  Oligonucleotide for detection of SNP TSC0036370
tagcgacgttttg

SEQ ID NO: 144636 - DNA, 13 bp, Artificial Sequence
  Oligonucleotide for detection of SNP TSC0036370
caaaacgtcgcta

SEQ ID NO: 144637 - DNA, 13 bp, Artificial Sequence
  Oligonucleotide for detection of SNP TSC0036372
agggagaattaty

SEQ ID NO: 144638 - DNA, 13 bp, Artificial Sequence
  Oligonucleotide for detection of SNP TSC0036372
rataattctccct

SEQ ID NO: 144639 - DNA, 13 bp, Artificial Sequence
  Oligonucleotide for detection of SNP TSC0036372
agggaggattaty

SEQ ID NO: 144640 - DNA, 13 bp, Artificial Sequence
  Oligonucleotide for detection of SNP TSC0036372
rataatcctccct

SEQ ID NO: 144641 - DNA, 13 bp, Artificial Sequence
  Oligonucleotide for detection of SNP TSC0036373
aaatgggtggggt

SEQ ID NO: 144642 - DNA, 13 bp, Artificial Sequence
  Oligonucleotide for detection of SNP TSC0036373
accccacccattt

SEQ ID NO: 144643 - DNA, 13 bp, Artificial Sequence
  Oligonucleotide for detection of SNP TSC0036373
aaatggatggggt

SEQ ID NO: 144644 - DNA, 13 bp, Artificial Sequence
  Oligonucleotide for detection of SNP TSC0036373
accccatccattt

SEQ ID NO: 144645 - DNA, 13 bp, Artificial Sequence
  Oligonucleotide for detection of SNP TSC0036375
atatgcgtttagt

SEQ ID NO: 144646 - DNA, 13 bp, Artificial Sequence
  Oligonucleotide for detection of SNP TSC0036375
actaaacgcatat

SEQ ID NO: 144647 - DNA, 13 bp, Artificial Sequence
  Oligonucleotide for detection of SNP TSC0036375
attaaatgtatgt

SEQ ID NO: 144648 - DNA, 13 bp, Artificial Sequence
  Oligonucleotide for detection of SNP TSC0036375
acatacatttaat

SEQ ID NO: 144649 - DNA, 13 bp, Artificial Sequence
  Oligonucleotide for detection of SNP TSC0036375
attaaacgtatgt

SEQ ID NO: 144650 - DNA, 13 bp, Artificial Sequence
  Oligonucleotide for detection of SNP TSC0036375
acatacgtttaat

SEQ ID NO: 144651 - DNA, 13 bp, Artificial Sequence
  Oligonucleotide for detection of SNP TSC0036377
tggggaaggatag

SEQ ID NO: 144652 - DNA, 13 bp, Artificial Sequence
  Oligonucleotide for detection of SNP TSC0036377
ctatccttcccca

SEQ ID NO: 144653 - DNA, 13 bp, Artificial Sequence
  Oligonucleotide for detection of SNP TSC0036377
tggggagggatag

SEQ ID NO: 144654 - DNA, 13 bp, Artificial Sequence
  Oligonucleotide for detection of SNP TSC0036377
ctatccctcccca

SEQ ID NO: 144655 - DNA, 13 bp, Artificial Sequence
  Oligonucleotide for detection of SNP TSC0036377
cggggaaggatag

SEQ ID NO: 144656 - DNA, 13 bp, Artificial Sequence
  Oligonucleotide for detection of SNP TSC0036377
ctatccttccccg

SEQ ID NO: 144657 - DNA, 13 bp, Artificial Sequence
  Oligonucleotide for detection of SNP TSC0036377
cggggagggatag

SEQ ID NO: 144658 - DNA, 13 bp, Artificial Sequence
  Oligonucleotide for detection of SNP TSC0036377
ctatccctccccg

SEQ ID NO: 144659 - DNA, 13 bp, Artificial Sequence
  Oligonucleotide for detection of SNP TSC0036381
atttatagatgtt

SEQ ID NO: 144660 - DNA, 13 bp, Artificial Sequence
  Oligonucleotide for detection of SNP TSC0036381
aacatctataaat

SEQ ID NO: 144661 - DNA, 13 bp, Artificial Sequence
  Oligonucleotide for detection of SNP TSC0036381
atttattgatgtt

SEQ ID NO: 144662 - DNA, 13 bp, Artificial Sequence
  Oligonucleotide for detection of SNP TSC0036381
aacatcaataaat

SEQ ID NO: 144663 - DNA, 13 bp, Artificial Sequence
  Oligonucleotide for detection of SNP TSC0036381
aatatttgtaaat

SEQ ID NO: 144664 - DNA, 13 bp, Artificial Sequence
  Oligonucleotide for detection of SNP TSC0036381
atttacaaatatt

SEQ ID NO: 144665 - DNA, 13 bp, Artificial Sequence
  Oligonucleotide for detection of SNP TSC0036381
aatattagtaaat

SEQ ID NO: 144666 - DNA, 13 bp, Artificial Sequence
  Oligonucleotide for detection of SNP TSC0036381
atttactaatatt

SEQ ID NO: 144667 - DNA, 13 bp, Artificial Sequence
  Oligonucleotide for detection of SNP TSC0036382
gagttagtagaaa

SEQ ID NO: 144668 - DNA, 13 bp, Artificial Sequence
  Oligonucleotide for detection of SNP TSC0036382
tttctactaactc

SEQ ID NO: 144669 - DNA, 13 bp, Artificial Sequence
  Oligonucleotide for detection of SNP TSC0036382
gagttaatagaaa

SEQ ID NO: 144670 - DNA, 13 bp, Artificial Sequence
  Oligonucleotide for detection of SNP TSC0036382
tttctattaactc

SEQ ID NO: 144671 - DNA, 13 bp, Artificial Sequence
  Oligonucleotide for detection of SNP TSC0036386
gtgattatataaa

SEQ ID NO: 144672 - DNA, 13 bp, Artificial Sequence
  Oligonucleotide for detection of SNP TSC0036386
tttatataatcac

SEQ ID NO: 144673 - DNA, 13 bp, Artificial Sequence
  Oligonucleotide for detection of SNP TSC0036386
gtgattgtataaa

SEQ ID NO: 144674 - DNA, 13 bp, Artificial Sequence
  Oligonucleotide for detection of SNP TSC0036386
tttatacaatcac

SEQ ID NO: 144675 - DNA, 13 bp, Artificial Sequence
  Oligonucleotide for detection of SNP TSC0036386
gcgattatataaa

SEQ ID NO: 144676 - DNA, 13 bp, Artificial Sequence
  Oligonucleotide for detection of SNP TSC0036386
tttatataatcgc

SEQ ID NO: 144677 - DNA, 13 bp, Artificial Sequence
  Oligonucleotide for detection of SNP TSC0036386
gcgattgtataaa

SEQ ID NO: 144678 - DNA, 13 bp, Artificial Sequence
  Oligonucleotide for detection of SNP TSC0036386
tttatacaatcgc

SEQ ID NO: 144679 - DNA, 13 bp, Artificial Sequence
  Oligonucleotide for detection of SNP TSC0036388
taatttgggtagy

SEQ ID NO: 144680 - DNA, 13 bp, Artificial Sequence
  Oligonucleotide for detection of SNP TSC0036388
rctacccaaatta

SEQ ID NO: 144681 - DNA, 13 bp, Artificial Sequence
  Oligonucleotide for detection of SNP TSC0036388
taatttaggtagy

SEQ ID NO: 144682 - DNA, 13 bp, Artificial Sequence
  Oligonucleotide for detection of SNP TSC0036388
rctacctaaatta

SEQ ID NO: 144683 - DNA, 13 bp, Artificial Sequence
  Oligonucleotide for detection of SNP TSC0036395
ttatttggaaagy

SEQ ID NO: 144684 - DNA, 13 bp, Artificial Sequence
  Oligonucleotide for detection of SNP TSC0036395
rctttccaaataa

SEQ ID NO: 144685 - DNA, 13 bp, Artificial Sequence
  Oligonucleotide for detection of SNP TSC0036395
ttatttagaaagy

SEQ ID NO: 144686 - DNA, 13 bp, Artificial Sequence
  Oligonucleotide for detection of SNP TSC0036395
rctttctaaataa

SEQ ID NO: 144687 - DNA, 13 bp, Artificial Sequence
  Oligonucleotide for detection of SNP TSC0036395
ttattcggaaagy

SEQ ID NO: 144688 - DNA, 13 bp, Artificial Sequence
  Oligonucleotide for detection of SNP TSC0036395
rctttccgaataa

SEQ ID NO: 144689 - DNA, 13 bp, Artificial Sequence
  Oligonucleotide for detection of SNP TSC0036396
tgtagatgtagty

SEQ ID NO: 144690 - DNA, 13 bp, Artificial Sequence
  Oligonucleotide for detection of SNP TSC0036396
ractacatctaca

SEQ ID NO: 144691 - DNA, 13 bp, Artificial Sequence
  Oligonucleotide for detection of SNP TSC0036396
tgtagacgtagty

SEQ ID NO: 144692 - DNA, 13 bp, Artificial Sequence
  Oligonucleotide for detection of SNP TSC0036396
ractacgtctaca

SEQ ID NO: 144693 - DNA, 13 bp, Artificial Sequence
  Oligonucleotide for detection of SNP TSC0036405
tattgatgtggga

SEQ ID NO: 144694 - DNA, 13 bp, Artificial Sequence
  Oligonucleotide for detection of SNP TSC0036405
tcccacatcaata

SEQ ID NO: 144695 - DNA, 13 bp, Artificial Sequence
  Oligonucleotide for detection of SNP TSC0036405
tattgacgtggga

SEQ ID NO: 144696 - DNA, 13 bp, Artificial Sequence
  Oligonucleotide for detection of SNP TSC0036405
tcccacgtcaata

SEQ ID NO: 144697 - DNA, 13 bp, Artificial Sequence
  Oligonucleotide for detection of SNP TSC0036405
ttttacgttaata

SEQ ID NO: 144698 - DNA, 13 bp, Artificial Sequence
  Oligonucleotide for detection of SNP TSC0036405
tattaacgtaaaa

SEQ ID NO: 144699 - DNA, 13 bp, Artificial Sequence
  Oligonucleotide for detection of SNP TSC0036406
ttttgaataattg

SEQ ID NO: 144700 - DNA, 13 bp, Artificial Sequence
  Oligonucleotide for detection of SNP TSC0036406
caattattcaaaa

SEQ ID NO: 144701 - DNA, 13 bp, Artificial Sequence
  Oligonucleotide for detection of SNP TSC0036406
ttttgagtaattg

SEQ ID NO: 144702 - DNA, 13 bp, Artificial Sequence
  Oligonucleotide for detection of SNP TSC0036406
caattactcaaaa

SEQ ID NO: 144703 - DNA, 13 bp, Artificial Sequence
  Oligonucleotide for detection of SNP TSC0036410
aggtttataatgt

SEQ ID NO: 144704 - DNA, 13 bp, Artificial Sequence
  Oligonucleotide for detection of SNP TSC0036410
acattataaacct

SEQ ID NO: 144705 - DNA, 13 bp, Artificial Sequence
  Oligonucleotide for detection of SNP TSC0036410
aggtttgtaatgt

SEQ ID NO: 144706 - DNA, 13 bp, Artificial Sequence
  Oligonucleotide for detection of SNP TSC0036410
acattacaaacct

SEQ ID NO: 144707 - DNA, 13 bp, Artificial Sequence
  Oligonucleotide for detection of SNP TSC0036410
aggttcgtaatgt

SEQ ID NO: 144708 - DNA, 13 bp, Artificial Sequence
  Oligonucleotide for detection of SNP TSC0036410
acattacgaacct

SEQ ID NO: 144709 - DNA, 13 bp, Artificial Sequence
  Oligonucleotide for detection of SNP TSC0036410
atattgtgaattt

SEQ ID NO: 144710 - DNA, 13 bp, Artificial Sequence
  Oligonucleotide for detection of SNP TSC0036410
aaattcacaatat

SEQ ID NO: 144711 - DNA, 13 bp, Artificial Sequence
  Oligonucleotide for detection of SNP TSC0036410
atattgcgaattt

SEQ ID NO: 144712 - DNA, 13 bp, Artificial Sequence
  Oligonucleotide for detection of SNP TSC0036410
aaattcgcaatat

SEQ ID NO: 144713 - DNA, 13 bp, Artificial Sequence
  Oligonucleotide for detection of SNP TSC0036412
gttgatgtatgga

SEQ ID NO: 144714 - DNA, 13 bp, Artificial Sequence
  Oligonucleotide for detection of SNP TSC0036412
tccatacatcaac

SEQ ID NO: 144715 - DNA, 13 bp, Artificial Sequence
  Oligonucleotide for detection of SNP TSC0036412
gttgatttatgga

SEQ ID NO: 144716 - DNA, 13 bp, Artificial Sequence
  Oligonucleotide for detection of SNP TSC0036412
tccataaatcaac

SEQ ID NO: 144717 - DNA, 13 bp, Artificial Sequence
  Oligonucleotide for detection of SNP TSC0036412
gttgacgtatgga

SEQ ID NO: 144718 - DNA, 13 bp, Artificial Sequence
  Oligonucleotide for detection of SNP TSC0036412
tccatacgtcaac

SEQ ID NO: 144719 - DNA, 13 bp, Artificial Sequence
  Oligonucleotide for detection of SNP TSC0036412
tttatgtgttaay

SEQ ID NO: 144720 - DNA, 13 bp, Artificial Sequence
  Oligonucleotide for detection of SNP TSC0036412
rttaacacataaa

SEQ ID NO: 144721 - DNA, 13 bp, Artificial Sequence
  Oligonucleotide for detection of SNP TSC0036412
tttatgagttaay

SEQ ID NO: 144722 - DNA, 13 bp, Artificial Sequence
  Oligonucleotide for detection of SNP TSC0036412
rttaactcataaa

SEQ ID NO: 144723 - DNA, 13 bp, Artificial Sequence
  Oligonucleotide for detection of SNP TSC0036412
tttatgcgttaay

SEQ ID NO: 144724 - DNA, 13 bp, Artificial Sequence
  Oligonucleotide for detection of SNP TSC0036412
rttaacgcataaa

SEQ ID NO: 144725 - DNA, 13 bp, Artificial Sequence
  Oligonucleotide for detection of SNP TSC0036417
tggttatgagtat

SEQ ID NO: 144726 - DNA, 13 bp, Artificial Sequence
  Oligonucleotide for detection of SNP TSC0036417
atactcataacca

SEQ ID NO: 144727 - DNA, 13 bp, Artificial Sequence
  Oligonucleotide for detection of SNP TSC0036417
tggttacgagtat

SEQ ID NO: 144728 - DNA, 13 bp, Artificial Sequence
  Oligonucleotide for detection of SNP TSC0036417
atactcgtaacca

SEQ ID NO: 144729 - DNA, 13 bp, Artificial Sequence
  Oligonucleotide for detection of SNP TSC0036419
attaagatttagt

SEQ ID NO: 144730 - DNA, 13 bp, Artificial Sequence
  Oligonucleotide for detection of SNP TSC0036419
actaaatcttaat

SEQ ID NO: 144731 - DNA, 13 bp, Artificial Sequence
  Oligonucleotide for detection of SNP TSC0036419
attaaggtttagt

SEQ ID NO: 144732 - DNA, 13 bp, Artificial Sequence
  Oligonucleotide for detection of SNP TSC0036419
actaaaccttaat

SEQ ID NO: 144733 - DNA, 13 bp, Artificial Sequence
  Oligonucleotide for detection of SNP TSC0036421
tgtttgtgtgagy

SEQ ID NO: 144734 - DNA, 13 bp, Artificial Sequence
  Oligonucleotide for detection of SNP TSC0036421
rctcacacaaaca

SEQ ID NO: 144735 - DNA, 13 bp, Artificial Sequence
  Oligonucleotide for detection of SNP TSC0036421
tgtttgggtgagy

SEQ ID NO: 144736 - DNA, 13 bp, Artificial Sequence
  Oligonucleotide for detection of SNP TSC0036421
rctcacccaaaca

SEQ ID NO: 144737 - DNA, 13 bp, Artificial Sequence
  Oligonucleotide for detection of SNP TSC0036421
cgtttgtgtgagy

SEQ ID NO: 144738 - DNA, 13 bp, Artificial Sequence
  Oligonucleotide for detection of SNP TSC0036421
rctcacacaaacg

SEQ ID NO: 144739 - DNA, 13 bp, Artificial Sequence
  Oligonucleotide for detection of SNP TSC0036421
cgtttgggtgagy

SEQ ID NO: 144740 - DNA, 13 bp, Artificial Sequence
  Oligonucleotide for detection of SNP TSC0036421
rctcacccaaacg

SEQ ID NO: 144741 - DNA, 13 bp, Artificial Sequence
  Oligonucleotide for detection of SNP TSC0036421
tgttcgtgtgagy

SEQ ID NO: 144742 - DNA, 13 bp, Artificial Sequence
  Oligonucleotide for detection of SNP TSC0036421
rctcacacgaaca

SEQ ID NO: 144743 - DNA, 13 bp, Artificial Sequence
  Oligonucleotide for detection of SNP TSC0036421
tgttcgggtgagy

SEQ ID NO: 144744 - DNA, 13 bp, Artificial Sequence
  Oligonucleotide for detection of SNP TSC0036421
rctcacccgaaca

SEQ ID NO: 144745 - DNA, 13 bp, Artificial Sequence
  Oligonucleotide for detection of SNP TSC0036421
tgtttgcgtgagy

SEQ ID NO: 144746 - DNA, 13 bp, Artificial Sequence
  Oligonucleotide for detection of SNP TSC0036421
rctcacgcaaaca

SEQ ID NO: 144747 - DNA, 13 bp, Artificial Sequence
  Oligonucleotide for detection of SNP TSC0036421
tgtttgggcgagy

SEQ ID NO: 144748 - DNA, 13 bp, Artificial Sequence
  Oligonucleotide for detection of SNP TSC0036421
rctcgcccaaaca

SEQ ID NO: 144749 - DNA, 13 bp, Artificial Sequence
  Oligonucleotide for detection of SNP TSC0036421
tgtttgtgcgagy

SEQ ID NO: 144750 - DNA, 13 bp, Artificial Sequence
  Oligonucleotide for detection of SNP TSC0036421
rctcgcacaaaca

SEQ ID NO: 144751 - DNA, 13 bp, Artificial Sequence
  Oligonucleotide for detection of SNP TSC0036421
cgttcgggtgagy

SEQ ID NO: 144752 - DNA, 13 bp, Artificial Sequence
  Oligonucleotide for detection of SNP TSC0036421
rctcacccgaacg

SEQ ID NO: 144753 - DNA, 13 bp, Artificial Sequence
  Oligonucleotide for detection of SNP TSC0036421
cgttcgtgtgagy

SEQ ID NO: 144754 - DNA, 13 bp, Artificial Sequence
  Oligonucleotide for detection of SNP TSC0036421
rctcacacgaacg

SEQ ID NO: 144755 - DNA, 13 bp, Artificial Sequence
  Oligonucleotide for detection of SNP TSC0036421
cgtttgggcgagy

SEQ ID NO: 144756 - DNA, 13 bp, Artificial Sequence
  Oligonucleotide for detection of SNP TSC0036421
rctcgcccaaacg

SEQ ID NO: 144757 - DNA, 13 bp, Artificial Sequence
  Oligonucleotide for detection of SNP TSC0036421
cgtttgcgtgagy

SEQ ID NO: 144758 - DNA, 13 bp, Artificial Sequence
  Oligonucleotide for detection of SNP TSC0036421
rctcacgcaaacg

SEQ ID NO: 144759 - DNA, 13 bp, Artificial Sequence
  Oligonucleotide for detection of SNP TSC0036421
tgttcgggcgagy

SEQ ID NO: 144760 - DNA, 13 bp, Artificial Sequence
  Oligonucleotide for detection of SNP TSC0036421
rctcgcccgaaca

SEQ ID NO: 144761 - DNA, 13 bp, Artificial Sequence
  Oligonucleotide for detection of SNP TSC0036421
cgtttgtgcgagy

SEQ ID NO: 144762 - DNA, 13 bp, Artificial Sequence
  Oligonucleotide for detection of SNP TSC0036421
rctcgcacaaacg

SEQ ID NO: 144763 - DNA, 13 bp, Artificial Sequence
  Oligonucleotide for detection of SNP TSC0036421
cgttcgggcgagy

SEQ ID NO: 144764 - DNA, 13 bp, Artificial Sequence
  Oligonucleotide for detection of SNP TSC0036421
rctcgcccgaacg

SEQ ID NO: 144765 - DNA, 13 bp, Artificial Sequence
  Oligonucleotide for detection of SNP TSC0036421
tgttcgcgtgagy

SEQ ID NO: 144766 - DNA, 13 bp, Artificial Sequence
  Oligonucleotide for detection of SNP TSC0036421
rctcacgcgaaca

SEQ ID NO: 144767 - DNA, 13 bp, Artificial Sequence
  Oligonucleotide for detection of SNP TSC0036421
tgttcgtgcgagy

SEQ ID NO: 144768 - DNA, 13 bp, Artificial Sequence
  Oligonucleotide for detection of SNP TSC0036421
rctcgcacgaaca

SEQ ID NO: 144769 - DNA, 13 bp, Artificial Sequence
  Oligonucleotide for detection of SNP TSC0036421
tgtttgcgcgagy

SEQ ID NO: 144770 - DNA, 13 bp, Artificial Sequence
  Oligonucleotide for detection of SNP TSC0036421
rctcgcgcaaaca

SEQ ID NO: 144771 - DNA, 13 bp, Artificial Sequence
  Oligonucleotide for detection of SNP TSC0036421
cgttcgcgtgagy

SEQ ID NO: 144772 - DNA, 13 bp, Artificial Sequence
  Oligonucleotide for detection of SNP TSC0036421
rctcacgcgaacg

SEQ ID NO: 144773 - DNA, 13 bp, Artificial Sequence
  Oligonucleotide for detection of SNP TSC0036421
cgttcgtgcgagy

SEQ ID NO: 144774 - DNA, 13 bp, Artificial Sequence
  Oligonucleotide for detection of SNP TSC0036421
rctcgcacgaacg

SEQ ID NO: 144775 - DNA, 13 bp, Artificial Sequence
  Oligonucleotide for detection of SNP TSC0036421
cgtttgcgcgagy

SEQ ID NO: 144776 - DNA, 13 bp, Artificial Sequence
  Oligonucleotide for detection of SNP TSC0036421
rctcgcgcaaacg

SEQ ID NO: 144777 - DNA, 13 bp, Artificial Sequence
  Oligonucleotide for detection of SNP TSC0036421
tgttcgcgcgagy

SEQ ID NO: 144778 - DNA, 13 bp, Artificial Sequence
  Oligonucleotide for detection of SNP TSC0036421
rctcgcgcgaaca

SEQ ID NO: 144779 - DNA, 13 bp, Artificial Sequence
  Oligonucleotide for detection of SNP TSC0036421
cgttcgcgcgagy

SEQ ID NO: 144780 - DNA, 13 bp, Artificial Sequence
  Oligonucleotide for detection of SNP TSC0036421
rctcgcgcgaacg

SEQ ID NO: 144781 - DNA, 13 bp, Artificial Sequence
  Oligonucleotide for detection of SNP TSC0036421
gtttgtgtggatg

SEQ ID NO: 144782 - DNA, 13 bp, Artificial Sequence
  Oligonucleotide for detection of SNP TSC0036421
catccacacaaac

SEQ ID NO: 144783 - DNA, 13 bp, Artificial Sequence
  Oligonucleotide for detection of SNP TSC0036421
gtttgtttggatg

SEQ ID NO: 144784 - DNA, 13 bp, Artificial Sequence
  Oligonucleotide for detection of SNP TSC0036421
catccaaacaaac

SEQ ID NO: 144785 - DNA, 13 bp, Artificial Sequence
  Oligonucleotide for detection of SNP TSC0036421
gttcgtgtggatg

SEQ ID NO: 144786 - DNA, 13 bp, Artificial Sequence
  Oligonucleotide for detection of SNP TSC0036421
catccacacgaac

SEQ ID NO: 144787 - DNA, 13 bp, Artificial Sequence
  Oligonucleotide for detection of SNP TSC0036421
gttcgtttggatg

SEQ ID NO: 144788 - DNA, 13 bp, Artificial Sequence
  Oligonucleotide for detection of SNP TSC0036421
catccaaacgaac

SEQ ID NO: 144789 - DNA, 13 bp, Artificial Sequence
  Oligonucleotide for detection of SNP TSC0036421
gtttgcgtggatg

SEQ ID NO: 144790 - DNA, 13 bp, Artificial Sequence
  Oligonucleotide for detection of SNP TSC0036421
catccacgcaaac

SEQ ID NO: 144791 - DNA, 13 bp, Artificial Sequence
  Oligonucleotide for detection of SNP TSC0036421
gtttgttcggatg

SEQ ID NO: 144792 - DNA, 13 bp, Artificial Sequence
  Oligonucleotide for detection of SNP TSC0036421
catccgaacaaac

SEQ ID NO: 144793 - DNA, 13 bp, Artificial Sequence
  Oligonucleotide for detection of SNP TSC0036421
gtttgtgcggatg

SEQ ID NO: 144794 - DNA, 13 bp, Artificial Sequence
  Oligonucleotide for detection of SNP TSC0036421
catccgcacaaac

SEQ ID NO: 144795 - DNA, 13 bp, Artificial Sequence
  Oligonucleotide for detection of SNP TSC0036421
gtttgtttggacg

SEQ ID NO: 144796 - DNA, 13 bp, Artificial Sequence
  Oligonucleotide for detection of SNP TSC0036421
cgtccaaacaaac

SEQ ID NO: 144797 - DNA, 13 bp, Artificial Sequence
  Oligonucleotide for detection of SNP TSC0036421
gtttgtgtggacg

SEQ ID NO: 144798 - DNA, 13 bp, Artificial Sequence
  Oligonucleotide for detection of SNP TSC0036421
cgtccacacaaac

SEQ ID NO: 144799 - DNA, 13 bp, Artificial Sequence
  Oligonucleotide for detection of SNP TSC0036421
gttcgttcggatg

SEQ ID NO: 144800 - DNA, 13 bp, Artificial Sequence
  Oligonucleotide for detection of SNP TSC0036421
catccgaacgaac

SEQ ID NO: 144801 - DNA, 13 bp, Artificial Sequence
  Oligonucleotide for detection of SNP TSC0036421
gttcgcgtggatg

SEQ ID NO: 144802 - DNA, 13 bp, Artificial Sequence
  Oligonucleotide for detection of SNP TSC0036421
catccacgcgaac

SEQ ID NO: 144803 - DNA, 13 bp, Artificial Sequence
  Oligonucleotide for detection of SNP TSC0036421
gttcgtttggacg

SEQ ID NO: 144804 - DNA, 13 bp, Artificial Sequence
  Oligonucleotide for detection of SNP TSC0036421
cgtccaaacgaac

SEQ ID NO: 144805 - DNA, 13 bp, Artificial Sequence
  Oligonucleotide for detection of SNP TSC0036421
gttcgtgcggatg

SEQ ID NO: 144806 - DNA, 13 bp, Artificial Sequence
  Oligonucleotide for detection of SNP TSC0036421
catccgcacgaac

SEQ ID NO: 144807 - DNA, 13 bp, Artificial Sequence
  Oligonucleotide for detection of SNP TSC0036421
gtttgttcggacg

SEQ ID NO: 144808 - DNA, 13 bp, Artificial Sequence
  Oligonucleotide for detection of SNP TSC0036421
cgtccgaacaaac

SEQ ID NO: 144809 - DNA, 13 bp, Artificial Sequence
  Oligonucleotide for detection of SNP TSC0036421
gttcgtgtggacg

SEQ ID NO: 144810 - DNA, 13 bp, Artificial Sequence
  Oligonucleotide for detection of SNP TSC0036421
cgtccacacgaac

SEQ ID NO: 144811 - DNA, 13 bp, Artificial Sequence
  Oligonucleotide for detection of SNP TSC0036421
gttcgttcggacg

SEQ ID NO: 144812 - DNA, 13 bp, Artificial Sequence
  Oligonucleotide for detection of SNP TSC0036421
cgtccgaacgaac

SEQ ID NO: 144813 - DNA, 13 bp, Artificial Sequence
  Oligonucleotide for detection of SNP TSC0036421
gtttgcgcggatg

SEQ ID NO: 144814 - DNA, 13 bp, Artificial Sequence
  Oligonucleotide for detection of SNP TSC0036421
catccgcgcaaac

SEQ ID NO: 144815 - DNA, 13 bp, Artificial Sequence
  Oligonucleotide for detection of SNP TSC0036421
gtttgcgtggacg

SEQ ID NO: 144816 - DNA, 13 bp, Artificial Sequence
  Oligonucleotide for detection of SNP TSC0036421
cgtccacgcaaac

SEQ ID NO: 144817 - DNA, 13 bp, Artificial Sequence
  Oligonucleotide for detection of SNP TSC0036421
gtttgtgcggacg

SEQ ID NO: 144818 - DNA, 13 bp, Artificial Sequence
  Oligonucleotide for detection of SNP TSC0036421
cgtccgcacaaac

SEQ ID NO: 144819 - DNA, 13 bp, Artificial Sequence
  Oligonucleotide for detection of SNP TSC0036421
gttcgcgcggatg

SEQ ID NO: 144820 - DNA, 13 bp, Artificial Sequence
  Oligonucleotide for detection of SNP TSC0036421
catccgcgcgaac

SEQ ID NO: 144821 - DNA, 13 bp, Artificial Sequence
  Oligonucleotide for detection of SNP TSC0036421
gttcgcgtggacg

SEQ ID NO: 144822 - DNA, 13 bp, Artificial Sequence
  Oligonucleotide for detection of SNP TSC0036421
cgtccacgcgaac

SEQ ID NO: 144823 - DNA, 13 bp, Artificial Sequence
  Oligonucleotide for detection of SNP TSC0036421
gttcgtgcggacg

SEQ ID NO: 144824 - DNA, 13 bp, Artificial Sequence
  Oligonucleotide for detection of SNP TSC0036421
cgtccgcacgaac

SEQ ID NO: 144825 - DNA, 13 bp, Artificial Sequence
  Oligonucleotide for detection of SNP TSC0036421
gtttgcgcggacg

SEQ ID NO: 144826 - DNA, 13 bp, Artificial Sequence
  Oligonucleotide for detection of SNP TSC0036421
cgtccgcgcaaac

SEQ ID NO: 144827 - DNA, 13 bp, Artificial Sequence
  Oligonucleotide for detection of SNP TSC0036421
gttcgcgcggacg

SEQ ID NO: 144828 - DNA, 13 bp, Artificial Sequence
  Oligonucleotide for detection of SNP TSC0036421
cgtccgcgcgaac

SEQ ID NO: 144829 - DNA, 13 bp, Artificial Sequence
  Oligonucleotide for detection of SNP TSC0036422
gaggggatttaga

SEQ ID NO: 144830 - DNA, 13 bp, Artificial Sequence
  Oligonucleotide for detection of SNP TSC0036422
tctaaatcccctc

SEQ ID NO: 144831 - DNA, 13 bp, Artificial Sequence
  Oligonucleotide for detection of SNP TSC0036423
tttttaataagaa

SEQ ID NO: 144832 - DNA, 13 bp, Artificial Sequence
  Oligonucleotide for detection of SNP TSC0036423
ttcttattaaaaa

SEQ ID NO: 144833 - DNA, 13 bp, Artificial Sequence
  Oligonucleotide for detection of SNP TSC0036423
tttttagtaagaa

SEQ ID NO: 144834 - DNA, 13 bp, Artificial Sequence
  Oligonucleotide for detection of SNP TSC0036423
ttcttactaaaaa

SEQ ID NO: 144835 - DNA, 13 bp, Artificial Sequence
  Oligonucleotide for detection of SNP TSC0036424
tgaaagtgggagt

SEQ ID NO: 144836 - DNA, 13 bp, Artificial Sequence
  Oligonucleotide for detection of SNP TSC0036424
actcccactttca

SEQ ID NO: 144837 - DNA, 13 bp, Artificial Sequence
  Oligonucleotide for detection of SNP TSC0036424
tgaaagcgggagt

SEQ ID NO: 144838 - DNA, 13 bp, Artificial Sequence
  Oligonucleotide for detection of SNP TSC0036424
actcccgctttca

SEQ ID NO: 144839 - DNA, 13 bp, Artificial Sequence
  Oligonucleotide for detection of SNP TSC0036426
tggaaaattttty

SEQ ID NO: 144840 - DNA, 13 bp, Artificial Sequence
  Oligonucleotide for detection of SNP TSC0036426
raaaaattttcca

SEQ ID NO: 144841 - DNA, 13 bp, Artificial Sequence
  Oligonucleotide for detection of SNP TSC0036426
tggaaatttttty

SEQ ID NO: 144842 - DNA, 13 bp, Artificial Sequence
  Oligonucleotide for detection of SNP TSC0036426
raaaaaatttcca

SEQ ID NO: 144843 - DNA, 13 bp, Artificial Sequence
  Oligonucleotide for detection of SNP TSC0036426
gaaaaatttttta

SEQ ID NO: 144844 - DNA, 13 bp, Artificial Sequence
  Oligonucleotide for detection of SNP TSC0036426
taaaaaatttttc

SEQ ID NO: 144845 - DNA, 13 bp, Artificial Sequence
  Oligonucleotide for detection of SNP TSC0036426
gaaaaaattttta

SEQ ID NO: 144846 - DNA, 13 bp, Artificial Sequence
  Oligonucleotide for detection of SNP TSC0036426
taaaaattttttc

SEQ ID NO: 144847 - DNA, 13 bp, Artificial Sequence
  Oligonucleotide for detection of SNP TSC0036427
taatgatgtaagy

SEQ ID NO: 144848 - DNA, 13 bp, Artificial Sequence
  Oligonucleotide for detection of SNP TSC0036427
rcttacatcatta

SEQ ID NO: 144849 - DNA, 13 bp, Artificial Sequence
  Oligonucleotide for detection of SNP TSC0036427
taatgacgtaagy

SEQ ID NO: 144850 - DNA, 13 bp, Artificial Sequence
  Oligonucleotide for detection of SNP TSC0036427
rcttacgtcatta

SEQ ID NO: 144851 - DNA, 13 bp, Artificial Sequence
  Oligonucleotide for detection of SNP TSC0036427
gtttgtgttattg

SEQ ID NO: 144852 - DNA, 13 bp, Artificial Sequence
  Oligonucleotide for detection of SNP TSC0036427
caataacacaaac

SEQ ID NO: 144853 - DNA, 13 bp, Artificial Sequence
  Oligonucleotide for detection of SNP TSC0036427
gtttgtattattg

SEQ ID NO: 144854 - DNA, 13 bp, Artificial Sequence
  Oligonucleotide for detection of SNP TSC0036427
caataatacaaac

SEQ ID NO: 144855 - DNA, 13 bp, Artificial Sequence
  Oligonucleotide for detection of SNP TSC0036427
gtttgcgttattg

SEQ ID NO: 144856 - DNA, 13 bp, Artificial Sequence
  Oligonucleotide for detection of SNP TSC0036427
caataacgcaaac

SEQ ID NO: 144857 - DNA, 13 bp, Artificial Sequence
  Oligonucleotide for detection of SNP TSC0036432
aattattgtttaa

SEQ ID NO: 144858 - DNA, 13 bp, Artificial Sequence
  Oligonucleotide for detection of SNP TSC0036432
ttaaacaataatt

SEQ ID NO: 144859 - DNA, 13 bp, Artificial Sequence
  Oligonucleotide for detection of SNP TSC0036432
aattatcgtttaa

SEQ ID NO: 144860 - DNA, 13 bp, Artificial Sequence
  Oligonucleotide for detection of SNP TSC0036432
ttaaacgataatt

SEQ ID NO: 144861 - DNA, 13 bp, Artificial Sequence
  Oligonucleotide for detection of SNP TSC0036432
ttgagtggtggtt

SEQ ID NO: 144862 - DNA, 13 bp, Artificial Sequence
  Oligonucleotide for detection of SNP TSC0036432
aaccaccactcaa

SEQ ID NO: 144863 - DNA, 13 bp, Artificial Sequence
  Oligonucleotide for detection of SNP TSC0036432
ttgagtagtggtt

SEQ ID NO: 144864 - DNA, 13 bp, Artificial Sequence
  Oligonucleotide for detection of SNP TSC0036432
aaccactactcaa

SEQ ID NO: 144865 - DNA, 13 bp, Artificial Sequence
  Oligonucleotide for detection of SNP TSC0036432
ttgagcggtggtt

SEQ ID NO: 144866 - DNA, 13 bp, Artificial Sequence
  Oligonucleotide for detection of SNP TSC0036432
aaccaccgctcaa

SEQ ID NO: 144867 - DNA, 13 bp, Artificial Sequence
  Oligonucleotide for detection of SNP TSC0036433
ttgagatgattta

SEQ ID NO: 144868 - DNA, 13 bp, Artificial Sequence
  Oligonucleotide for detection of SNP TSC0036433
taaatcatctcaa

SEQ ID NO: 144869 - DNA, 13 bp, Artificial Sequence
  Oligonucleotide for detection of SNP TSC0036433
ttgagaggattta

SEQ ID NO: 144870 - DNA, 13 bp, Artificial Sequence
  Oligonucleotide for detection of SNP TSC0036433
taaatcctctcaa

SEQ ID NO: 144871 - DNA, 13 bp, Artificial Sequence
  Oligonucleotide for detection of SNP TSC0036433
ttgagacgattta

SEQ ID NO: 144872 - DNA, 13 bp, Artificial Sequence
  Oligonucleotide for detection of SNP TSC0036433
taaatcgtctcaa

SEQ ID NO: 144873 - DNA, 13 bp, Artificial Sequence
  Oligonucleotide for detection of SNP TSC0036433
tgagttgttttaa

SEQ ID NO: 144874 - DNA, 13 bp, Artificial Sequence
  Oligonucleotide for detection of SNP TSC0036433
ttaaaacaactca

SEQ ID NO: 144875 - DNA, 13 bp, Artificial Sequence
  Oligonucleotide for detection of SNP TSC0036433
tgagtttttttaa

SEQ ID NO: 144876 - DNA, 13 bp, Artificial Sequence
  Oligonucleotide for detection of SNP TSC0036433
ttaaaaaaactca

SEQ ID NO: 144877 - DNA, 13 bp, Artificial Sequence
  Oligonucleotide for detection of SNP TSC0036433
tgagtcgttttaa

SEQ ID NO: 144878 - DNA, 13 bp, Artificial Sequence
  Oligonucleotide for detection of SNP TSC0036433
ttaaaacgactca

SEQ ID NO: 144879 - DNA, 13 bp, Artificial Sequence
  Oligonucleotide for detection of SNP TSC0036434
agtggaaatgggg

SEQ ID NO: 144880 - DNA, 13 bp, Artificial Sequence
  Oligonucleotide for detection of SNP TSC0036434
ccccatttccact

SEQ ID NO: 144881 - DNA, 13 bp, Artificial Sequence
  Oligonucleotide for detection of SNP TSC0036434
agtggagatgggg

SEQ ID NO: 144882 - DNA, 13 bp, Artificial Sequence
  Oligonucleotide for detection of SNP TSC0036434
ccccatctccact

SEQ ID NO: 144883 - DNA, 13 bp, Artificial Sequence
  Oligonucleotide for detection of SNP TSC0036435
agtttgtgggtay

SEQ ID NO: 144884 - DNA, 13 bp, Artificial Sequence
  Oligonucleotide for detection of SNP TSC0036435
rtacccacaaact

SEQ ID NO: 144885 - DNA, 13 bp, Artificial Sequence
  Oligonucleotide for detection of SNP TSC0036435
agttcgtgggtay

SEQ ID NO: 144886 - DNA, 13 bp, Artificial Sequence
  Oligonucleotide for detection of SNP TSC0036435
rtacccacgaact

SEQ ID NO: 144887 - DNA, 13 bp, Artificial Sequence
  Oligonucleotide for detection of SNP TSC0036435
agtttgcgggtay

SEQ ID NO: 144888 - DNA, 13 bp, Artificial Sequence
  Oligonucleotide for detection of SNP TSC0036435
rtacccgcaaact

SEQ ID NO: 144889 - DNA, 13 bp, Artificial Sequence
  Oligonucleotide for detection of SNP TSC0036435
agttcgcgggtay

SEQ ID NO: 144890 - DNA, 13 bp, Artificial Sequence
  Oligonucleotide for detection of SNP TSC0036435
rtacccgcgaact

SEQ ID NO: 144891 - DNA, 13 bp, Artificial Sequence
  Oligonucleotide for detection of SNP TSC0036435
gtgtttgtgagtt

SEQ ID NO: 144892 - DNA, 13 bp, Artificial Sequence
  Oligonucleotide for detection of SNP TSC0036435
aactcacaaacac

SEQ ID NO: 144893 - DNA, 13 bp, Artificial Sequence
  Oligonucleotide for detection of SNP TSC0036435
gtgtttatgagtt

SEQ ID NO: 144894 - DNA, 13 bp, Artificial Sequence
  Oligonucleotide for detection of SNP TSC0036435
aactcataaacac

SEQ ID NO: 144895 - DNA, 13 bp, Artificial Sequence
  Oligonucleotide for detection of SNP TSC0036435
gtgttcgtgagtt

SEQ ID NO: 144896 - DNA, 13 bp, Artificial Sequence
  Oligonucleotide for detection of SNP TSC0036435
aactcacgaacac

SEQ ID NO: 144897 - DNA, 13 bp, Artificial Sequence
  Oligonucleotide for detection of SNP TSC0036435
gtgtttacgagtt

SEQ ID NO: 144898 - DNA, 13 bp, Artificial Sequence
  Oligonucleotide for detection of SNP TSC0036435
aactcgtaaacac

SEQ ID NO: 144899 - DNA, 13 bp, Artificial Sequence
  Oligonucleotide for detection of SNP TSC0036435
gtgtttgcgagtt

SEQ ID NO: 144900 - DNA, 13 bp, Artificial Sequence
  Oligonucleotide for detection of SNP TSC0036435
aactcgcaaacac

SEQ ID NO: 144901 - DNA, 13 bp, Artificial Sequence
  Oligonucleotide for detection of SNP TSC0036435
gtgttcgcgagtt

SEQ ID NO: 144902 - DNA, 13 bp, Artificial Sequence
  Oligonucleotide for detection of SNP TSC0036435
aactcgcgaacac

SEQ ID NO: 144903 - DNA, 13 bp, Artificial Sequence
  Oligonucleotide for detection of SNP TSC0036436
gttattgattggy

SEQ ID NO: 144904 - DNA, 13 bp, Artificial Sequence
  Oligonucleotide for detection of SNP TSC0036436
rccaatcaataac

SEQ ID NO: 144905 - DNA, 13 bp, Artificial Sequence
  Oligonucleotide for detection of SNP TSC0036436
gttattaattggy

SEQ ID NO: 144906 - DNA, 13 bp, Artificial Sequence
  Oligonucleotide for detection of SNP TSC0036436
rccaattaataac

SEQ ID NO: 144907 - DNA, 13 bp, Artificial Sequence
  Oligonucleotide for detection of SNP TSC0036437
ttttttatgaaat

SEQ ID NO: 144908 - DNA, 13 bp, Artificial Sequence
  Oligonucleotide for detection of SNP TSC0036437
atttcataaaaaa

SEQ ID NO: 144909 - DNA, 13 bp, Artificial Sequence
  Oligonucleotide for detection of SNP TSC0036437
ttttttttgaaat

SEQ ID NO: 144910 - DNA, 13 bp, Artificial Sequence
  Oligonucleotide for detection of SNP TSC0036437
atttcaaaaaaaa

SEQ ID NO: 144911 - DNA, 13 bp, Artificial Sequence
  Oligonucleotide for detection of SNP TSC0036437
attttataaagaa

SEQ ID NO: 144912 - DNA, 13 bp, Artificial Sequence
  Oligonucleotide for detection of SNP TSC0036437
ttctttataaaat

SEQ ID NO: 144913 - DNA, 13 bp, Artificial Sequence
  Oligonucleotide for detection of SNP TSC0036437
attttaaaaagaa

SEQ ID NO: 144914 - DNA, 13 bp, Artificial Sequence
  Oligonucleotide for detection of SNP TSC0036437
ttctttttaaaat

SEQ ID NO: 144915 - DNA, 13 bp, Artificial Sequence
  Oligonucleotide for detection of SNP TSC0036439
ttatggagtttgg

SEQ ID NO: 144916 - DNA, 13 bp, Artificial Sequence
  Oligonucleotide for detection of SNP TSC0036439
ccaaactccataa

SEQ ID NO: 144917 - DNA, 13 bp, Artificial Sequence
  Oligonucleotide for detection of SNP TSC0036439
ttatggggtttgg

SEQ ID NO: 144918 - DNA, 13 bp, Artificial Sequence
  Oligonucleotide for detection of SNP TSC0036439
ccaaaccccataa

SEQ ID NO: 144919 - DNA, 13 bp, Artificial Sequence
  Oligonucleotide for detection of SNP TSC0036439
ttacggagtttgg

SEQ ID NO: 144920 - DNA, 13 bp, Artificial Sequence
  Oligonucleotide for detection of SNP TSC0036439
ccaaactccgtaa

SEQ ID NO: 144921 - DNA, 13 bp, Artificial Sequence
  Oligonucleotide for detection of SNP TSC0036439
ttacggggtttgg

SEQ ID NO: 144922 - DNA, 13 bp, Artificial Sequence
  Oligonucleotide for detection of SNP TSC0036439
ccaaaccccgtaa

SEQ ID NO: 144923 - DNA, 13 bp, Artificial Sequence
  Oligonucleotide for detection of SNP TSC0036439
ttatggagttcgg

SEQ ID NO: 144924 - DNA, 13 bp, Artificial Sequence
  Oligonucleotide for detection of SNP TSC0036439
ccgaactccataa

SEQ ID NO: 144925 - DNA, 13 bp, Artificial Sequence
  Oligonucleotide for detection of SNP TSC0036439
ttatggggttcgg

SEQ ID NO: 144926 - DNA, 13 bp, Artificial Sequence
  Oligonucleotide for detection of SNP TSC0036439
ccgaaccccataa

SEQ ID NO: 144927 - DNA, 13 bp, Artificial Sequence
  Oligonucleotide for detection of SNP TSC0036439
ttacggagttcgg

SEQ ID NO: 144928 - DNA, 13 bp, Artificial Sequence
  Oligonucleotide for detection of SNP TSC0036439
ccgaactccgtaa

SEQ ID NO: 144929 - DNA, 13 bp, Artificial Sequence
  Oligonucleotide for detection of SNP TSC0036439
ttacggggttcgg

SEQ ID NO: 144930 - DNA, 13 bp, Artificial Sequence
  Oligonucleotide for detection of SNP TSC0036439
ccgaaccccgtaa

SEQ ID NO: 144931 - DNA, 13 bp, Artificial Sequence
  Oligonucleotide for detection of SNP TSC0036442
ggggttagattta

SEQ ID NO: 144932 - DNA, 13 bp, Artificial Sequence
  Oligonucleotide for detection of SNP TSC0036442
taaatctaacccc

SEQ ID NO: 144933 - DNA, 13 bp, Artificial Sequence
  Oligonucleotide for detection of SNP TSC0036442
ggggttggattta

SEQ ID NO: 144934 - DNA, 13 bp, Artificial Sequence
  Oligonucleotide for detection of SNP TSC0036442
taaatccaacccc

SEQ ID NO: 144935 - DNA, 13 bp, Artificial Sequence
  Oligonucleotide for detection of SNP TSC0036443
ggaagattggttt

SEQ ID NO: 144936 - DNA, 13 bp, Artificial Sequence
  Oligonucleotide for detection of SNP TSC0036443
aaaccaatcttcc

SEQ ID NO: 144937 - DNA, 13 bp, Artificial Sequence
  Oligonucleotide for detection of SNP TSC0036443
ggaagagtggttt

SEQ ID NO: 144938 - DNA, 13 bp, Artificial Sequence
  Oligonucleotide for detection of SNP TSC0036443
aaaccactcttcc

SEQ ID NO: 144939 - DNA, 13 bp, Artificial Sequence
  Oligonucleotide for detection of SNP TSC0036443
aggttagttttty

SEQ ID NO: 144940 - DNA, 13 bp, Artificial Sequence
  Oligonucleotide for detection of SNP TSC0036443
raaaaactaacct

SEQ ID NO: 144941 - DNA, 13 bp, Artificial Sequence
  Oligonucleotide for detection of SNP TSC0036443
aggttatttttty

SEQ ID NO: 144942 - DNA, 13 bp, Artificial Sequence
  Oligonucleotide for detection of SNP TSC0036443
raaaaaataacct

SEQ ID NO: 144943 - DNA, 13 bp, Artificial Sequence
  Oligonucleotide for detection of SNP TSC0036444
tttttagataata

SEQ ID NO: 144944 - DNA, 13 bp, Artificial Sequence
  Oligonucleotide for detection of SNP TSC0036444
tattatctaaaaa

SEQ ID NO: 144945 - DNA, 13 bp, Artificial Sequence
  Oligonucleotide for detection of SNP TSC0036444
tttttatataata

SEQ ID NO: 144946 - DNA, 13 bp, Artificial Sequence
  Oligonucleotide for detection of SNP TSC0036444
tattatataaaaa

SEQ ID NO: 144947 - DNA, 13 bp, Artificial Sequence
  Oligonucleotide for detection of SNP TSC0036444
tgttatttaaaaa

SEQ ID NO: 144948 - DNA, 13 bp, Artificial Sequence
  Oligonucleotide for detection of SNP TSC0036444
tttttaaataaca

SEQ ID NO: 144949 - DNA, 13 bp, Artificial Sequence
  Oligonucleotide for detection of SNP TSC0036444
tgttatataaaaa

SEQ ID NO: 144950 - DNA, 13 bp, Artificial Sequence
  Oligonucleotide for detection of SNP TSC0036444
tttttatataaca

SEQ ID NO: 144951 - DNA, 13 bp, Artificial Sequence
  Oligonucleotide for detection of SNP TSC0036446
atatgtaggttgt

SEQ ID NO: 144952 - DNA, 13 bp, Artificial Sequence
  Oligonucleotide for detection of SNP TSC0036446
acaacctacatat

SEQ ID NO: 144953 - DNA, 13 bp, Artificial Sequence
  Oligonucleotide for detection of SNP TSC0036446
atatgtgggttgt

SEQ ID NO: 144954 - DNA, 13 bp, Artificial Sequence
  Oligonucleotide for detection of SNP TSC0036446
acaacccacatat

SEQ ID NO: 144955 - DNA, 13 bp, Artificial Sequence
  Oligonucleotide for detection of SNP TSC0036446
atatgcgggttgt

SEQ ID NO: 144956 - DNA, 13 bp, Artificial Sequence
  Oligonucleotide for detection of SNP TSC0036446
acaacccgcatat

SEQ ID NO: 144957 - DNA, 13 bp, Artificial Sequence
  Oligonucleotide for detection of SNP TSC0036446
atagtttgtatat

SEQ ID NO: 144958 - DNA, 13 bp, Artificial Sequence
  Oligonucleotide for detection of SNP TSC0036446
atatacaaactat

SEQ ID NO: 144959 - DNA, 13 bp, Artificial Sequence
  Oligonucleotide for detection of SNP TSC0036446
atagttcgtatat

SEQ ID NO: 144960 - DNA, 13 bp, Artificial Sequence
  Oligonucleotide for detection of SNP TSC0036446
atatacgaactat

SEQ ID NO: 144961 - DNA, 13 bp, Artificial Sequence
  Oligonucleotide for detection of SNP TSC0036451
atttggattttag

SEQ ID NO: 144962 - DNA, 13 bp, Artificial Sequence
  Oligonucleotide for detection of SNP TSC0036451
ctaaaatccaaat

SEQ ID NO: 144963 - DNA, 13 bp, Artificial Sequence
  Oligonucleotide for detection of SNP TSC0036454
gagggggaaaata

SEQ ID NO: 144964 - DNA, 13 bp, Artificial Sequence
  Oligonucleotide for detection of SNP TSC0036454
tattttccccctc

SEQ ID NO: 144965 - DNA, 13 bp, Artificial Sequence
  Oligonucleotide for detection of SNP TSC0036454
gaggggaaaaata

SEQ ID NO: 144966 - DNA, 13 bp, Artificial Sequence
  Oligonucleotide for detection of SNP TSC0036454
tatttttcccctc

SEQ ID NO: 144967 - DNA, 13 bp, Artificial Sequence
  Oligonucleotide for detection of SNP TSC0036455
aaatttttaagta

SEQ ID NO: 144968 - DNA, 13 bp, Artificial Sequence
  Oligonucleotide for detection of SNP TSC0036455
tacttaaaaattt

SEQ ID NO: 144969 - DNA, 13 bp, Artificial Sequence
  Oligonucleotide for detection of SNP TSC0036455
aaatttgtaagta

SEQ ID NO: 144970 - DNA, 13 bp, Artificial Sequence
  Oligonucleotide for detection of SNP TSC0036455
tacttacaaattt

SEQ ID NO: 144971 - DNA, 13 bp, Artificial Sequence
  Oligonucleotide for detection of SNP TSC0036455
tatttggagattt

SEQ ID NO: 144972 - DNA, 13 bp, Artificial Sequence
  Oligonucleotide for detection of SNP TSC0036455
aaatctccaaata

SEQ ID NO: 144973 - DNA, 13 bp, Artificial Sequence
  Oligonucleotide for detection of SNP TSC0036455
tatttgtagattt

SEQ ID NO: 144974 - DNA, 13 bp, Artificial Sequence
  Oligonucleotide for detection of SNP TSC0036455
aaatctacaaata

SEQ ID NO: 144975 - DNA, 13 bp, Artificial Sequence
  Oligonucleotide for detection of SNP TSC0036456
agatagagagttt

SEQ ID NO: 144976 - DNA, 13 bp, Artificial Sequence
  Oligonucleotide for detection of SNP TSC0036456
aaactctctatct

SEQ ID NO: 144977 - DNA, 13 bp, Artificial Sequence
  Oligonucleotide for detection of SNP TSC0036456
agatagtgagttt

SEQ ID NO: 144978 - DNA, 13 bp, Artificial Sequence
  Oligonucleotide for detection of SNP TSC0036456
aaactcactatct

SEQ ID NO: 144979 - DNA, 13 bp, Artificial Sequence
  Oligonucleotide for detection of SNP TSC0036456
agattttttgttt

SEQ ID NO: 144980 - DNA, 13 bp, Artificial Sequence
  Oligonucleotide for detection of SNP TSC0036456
aaacaaaaaatct

SEQ ID NO: 144981 - DNA, 13 bp, Artificial Sequence
  Oligonucleotide for detection of SNP TSC0036463
ttgagagtttagy

SEQ ID NO: 144982 - DNA, 13 bp, Artificial Sequence
  Oligonucleotide for detection of SNP TSC0036463
rctaaactctcaa

SEQ ID NO: 144983 - DNA, 13 bp, Artificial Sequence
  Oligonucleotide for detection of SNP TSC0036463
ttgagaatttagy

SEQ ID NO: 144984 - DNA, 13 bp, Artificial Sequence
  Oligonucleotide for detection of SNP TSC0036463
rctaaattctcaa

SEQ ID NO: 144985 - DNA, 13 bp, Artificial Sequence
  Oligonucleotide for detection of SNP TSC0036464
ttgggagtatagg

SEQ ID NO: 144986 - DNA, 13 bp, Artificial Sequence
  Oligonucleotide for detection of SNP TSC0036464
cctatactcccaa

SEQ ID NO: 144987 - DNA, 13 bp, Artificial Sequence
  Oligonucleotide for detection of SNP TSC0036464
ttgggattatagg

SEQ ID NO: 144988 - DNA, 13 bp, Artificial Sequence
  Oligonucleotide for detection of SNP TSC0036464
cctataatcccaa

SEQ ID NO: 144989 - DNA, 13 bp, Artificial Sequence
  Oligonucleotide for detection of SNP TSC0036465
aagatgaggttty

SEQ ID NO: 144990 - DNA, 13 bp, Artificial Sequence
  Oligonucleotide for detection of SNP TSC0036465
raaacctcatctt

SEQ ID NO: 144991 - DNA, 13 bp, Artificial Sequence
  Oligonucleotide for detection of SNP TSC0036465
aagatggggttty

SEQ ID NO: 144992 - DNA, 13 bp, Artificial Sequence
  Oligonucleotide for detection of SNP TSC0036465
raaaccccatctt

SEQ ID NO: 144993 - DNA, 13 bp, Artificial Sequence
  Oligonucleotide for detection of SNP TSC0036466
gatgaagaaatga

SEQ ID NO: 144994 - DNA, 13 bp, Artificial Sequence
  Oligonucleotide for detection of SNP TSC0036466
tcatttcttcatc

SEQ ID NO: 144995 - DNA, 13 bp, Artificial Sequence
  Oligonucleotide for detection of SNP TSC0036466
gatgaaaaaatga

SEQ ID NO: 144996 - DNA, 13 bp, Artificial Sequence
  Oligonucleotide for detection of SNP TSC0036466
tcattttttcatc

SEQ ID NO: 144997 - DNA, 13 bp, Artificial Sequence
  Oligonucleotide for detection of SNP TSC0036466
gatgaagaaacga

SEQ ID NO: 144998 - DNA, 13 bp, Artificial Sequence
  Oligonucleotide for detection of SNP TSC0036466
tcgtttcttcatc

SEQ ID NO: 144999 - DNA, 13 bp, Artificial Sequence
  Oligonucleotide for detection of SNP TSC0036466
gatgaaaaaacga

SEQ ID NO: 145000 - DNA, 13 bp, Artificial Sequence
  Oligonucleotide for detection of SNP TSC0036466
tcgttttttcatc

SEQ ID NO: 145001 - DNA, 13 bp, Artificial Sequence
  Oligonucleotide for detection of SNP TSC0036470
gagataggggtga

SEQ ID NO: 145002 - DNA, 13 bp, Artificial Sequence
  Oligonucleotide for detection of SNP TSC0036470
tcacccctatctc

SEQ ID NO: 145003 - DNA, 13 bp, Artificial Sequence
  Oligonucleotide for detection of SNP TSC0036470
gagataagggtga

SEQ ID NO: 145004 - DNA, 13 bp, Artificial Sequence
  Oligonucleotide for detection of SNP TSC0036470
tcacccttatctc

SEQ ID NO: 145005 - DNA, 13 bp, Artificial Sequence
  Oligonucleotide for detection of SNP TSC0036470
gagataggggcga

SEQ ID NO: 145006 - DNA, 13 bp, Artificial Sequence
  Oligonucleotide for detection of SNP TSC0036470
tcgcccctatctc

SEQ ID NO: 145007 - DNA, 13 bp, Artificial Sequence
  Oligonucleotide for detection of SNP TSC0036470
gagataagggcga

SEQ ID NO: 145008 - DNA, 13 bp, Artificial Sequence
  Oligonucleotide for detection of SNP TSC0036470
tcgcccttatctc

SEQ ID NO: 145009 - DNA, 13 bp, Artificial Sequence
  Oligonucleotide for detection of SNP TSC0036472
ggaattgttgtta

SEQ ID NO: 145010 - DNA, 13 bp, Artificial Sequence
  Oligonucleotide for detection of SNP TSC0036472
taacaacaattcc

SEQ ID NO: 145011 - DNA, 13 bp, Artificial Sequence
  Oligonucleotide for detection of SNP TSC0036472
ggaattattgtta

SEQ ID NO: 145012 - DNA, 13 bp, Artificial Sequence
  Oligonucleotide for detection of SNP TSC0036472
taacaataattcc

SEQ ID NO: 145013 - DNA, 13 bp, Artificial Sequence
  Oligonucleotide for detection of SNP TSC0036473
atatttataattt

SEQ ID NO: 145014 - DNA, 13 bp, Artificial Sequence
  Oligonucleotide for detection of SNP TSC0036473
aaattataaatat

SEQ ID NO: 145015 - DNA, 13 bp, Artificial Sequence
  Oligonucleotide for detection of SNP TSC0036473
atatttgtaattt

SEQ ID NO: 145016 - DNA, 13 bp, Artificial Sequence
  Oligonucleotide for detection of SNP TSC0036473
aaattacaaatat

SEQ ID NO: 145017 - DNA, 13 bp, Artificial Sequence
  Oligonucleotide for detection of SNP TSC0036473
atattcgtaattt

SEQ ID NO: 145018 - DNA, 13 bp, Artificial Sequence
  Oligonucleotide for detection of SNP TSC0036473
aaattacgaatat

SEQ ID NO: 145019 - DNA, 13 bp, Artificial Sequence
  Oligonucleotide for detection of SNP TSC0036473
agattatgggtgt

SEQ ID NO: 145020 - DNA, 13 bp, Artificial Sequence
  Oligonucleotide for detection of SNP TSC0036473
acacccataatct

SEQ ID NO: 145021 - DNA, 13 bp, Artificial Sequence
  Oligonucleotide for detection of SNP TSC0036473
agattacgggtgt

SEQ ID NO: 145022 - DNA, 13 bp, Artificial Sequence
  Oligonucleotide for detection of SNP TSC0036473
acacccgtaatct

SEQ ID NO: 145023 - DNA, 13 bp, Artificial Sequence
  Oligonucleotide for detection of SNP TSC0036480
tttgagatttgaa

SEQ ID NO: 145024 - DNA, 13 bp, Artificial Sequence
  Oligonucleotide for detection of SNP TSC0036480
ttcaaatctcaaa

SEQ ID NO: 145025 - DNA, 13 bp, Artificial Sequence
  Oligonucleotide for detection of SNP TSC0036480
tttgagttttgaa

SEQ ID NO: 145026 - DNA, 13 bp, Artificial Sequence
  Oligonucleotide for detection of SNP TSC0036480
ttcaaaactcaaa

SEQ ID NO: 145027 - DNA, 13 bp, Artificial Sequence
  Oligonucleotide for detection of SNP TSC0036480
tttaagttttaaa

SEQ ID NO: 145028 - DNA, 13 bp, Artificial Sequence
  Oligonucleotide for detection of SNP TSC0036480
tttaaaacttaaa

SEQ ID NO: 145029 - DNA, 13 bp, Artificial Sequence
  Oligonucleotide for detection of SNP TSC0036480
tttaagatttaaa

SEQ ID NO: 145030 - DNA, 13 bp, Artificial Sequence
  Oligonucleotide for detection of SNP TSC0036480
tttaaatcttaaa

SEQ ID NO: 145031 - DNA, 13 bp, Artificial Sequence
  Oligonucleotide for detection of SNP TSC0036481
gaatagtgttagg

SEQ ID NO: 145032 - DNA, 13 bp, Artificial Sequence
  Oligonucleotide for detection of SNP TSC0036481
cctaacactattc

SEQ ID NO: 145033 - DNA, 13 bp, Artificial Sequence
  Oligonucleotide for detection of SNP TSC0036481
gaatagcgttagg

SEQ ID NO: 145034 - DNA, 13 bp, Artificial Sequence
  Oligonucleotide for detection of SNP TSC0036481
cctaacgctattc

SEQ ID NO: 145035 - DNA, 13 bp, Artificial Sequence
  Oligonucleotide for detection of SNP TSC0036482
attttgtgttgty

SEQ ID NO: 145036 - DNA, 13 bp, Artificial Sequence
  Oligonucleotide for detection of SNP TSC0036482
racaacacaaaat

SEQ ID NO: 145037 - DNA, 13 bp, Artificial Sequence
  Oligonucleotide for detection of SNP TSC0036482
attttgcgttgty

SEQ ID NO: 145038 - DNA, 13 bp, Artificial Sequence
  Oligonucleotide for detection of SNP TSC0036482
racaacgcaaaat

SEQ ID NO: 145039 - DNA, 13 bp, Artificial Sequence
  Oligonucleotide for detection of SNP TSC0036482
ggtaatgtagaat

SEQ ID NO: 145040 - DNA, 13 bp, Artificial Sequence
  Oligonucleotide for detection of SNP TSC0036482
attctacattacc

SEQ ID NO: 145041 - DNA, 13 bp, Artificial Sequence
  Oligonucleotide for detection of SNP TSC0036482
ggtaatatagaat

SEQ ID NO: 145042 - DNA, 13 bp, Artificial Sequence
  Oligonucleotide for detection of SNP TSC0036482
attctatattacc

SEQ ID NO: 145043 - DNA, 13 bp, Artificial Sequence
  Oligonucleotide for detection of SNP TSC0036482
ggtaacgtagaat

SEQ ID NO: 145044 - DNA, 13 bp, Artificial Sequence
  Oligonucleotide for detection of SNP TSC0036482
attctacgttacc

SEQ ID NO: 145045 - DNA, 13 bp, Artificial Sequence
  Oligonucleotide for detection of SNP TSC0036487
tagtatgtgattg

SEQ ID NO: 145046 - DNA, 13 bp, Artificial Sequence
  Oligonucleotide for detection of SNP TSC0036487
caatcacatacta

SEQ ID NO: 145047 - DNA, 13 bp, Artificial Sequence
  Oligonucleotide for detection of SNP TSC0036487
tagtatatgattg

SEQ ID NO: 145048 - DNA, 13 bp, Artificial Sequence
  Oligonucleotide for detection of SNP TSC0036487
caatcatatacta

SEQ ID NO: 145049 - DNA, 13 bp, Artificial Sequence
  Oligonucleotide for detection of SNP TSC0036494
gaaggggttttgg

SEQ ID NO: 145050 - DNA, 13 bp, Artificial Sequence
  Oligonucleotide for detection of SNP TSC0036494
ccaaaaccccttc

SEQ ID NO: 145051 - DNA, 13 bp, Artificial Sequence
  Oligonucleotide for detection of SNP TSC0036494
gaagggtttttgg

SEQ ID NO: 145052 - DNA, 13 bp, Artificial Sequence
  Oligonucleotide for detection of SNP TSC0036494
ccaaaaacccttc

SEQ ID NO: 145053 - DNA, 13 bp, Artificial Sequence
  Oligonucleotide for detection of SNP TSC0036494
ttagagtttttty

SEQ ID NO: 145054 - DNA, 13 bp, Artificial Sequence
  Oligonucleotide for detection of SNP TSC0036494
raaaaaactctaa

SEQ ID NO: 145055 - DNA, 13 bp, Artificial Sequence
  Oligonucleotide for detection of SNP TSC0036494
ttagagattttty

SEQ ID NO: 145056 - DNA, 13 bp, Artificial Sequence
  Oligonucleotide for detection of SNP TSC0036494
raaaaatctctaa

SEQ ID NO: 145057 - DNA, 13 bp, Artificial Sequence
  Oligonucleotide for detection of SNP TSC0036495
gtaattttaaggy

SEQ ID NO: 145058 - DNA, 13 bp, Artificial Sequence
  Oligonucleotide for detection of SNP TSC0036495
rccttaaaattac

SEQ ID NO: 145059 - DNA, 13 bp, Artificial Sequence
  Oligonucleotide for detection of SNP TSC0036495
gtaattgtaaggy

SEQ ID NO: 145060 - DNA, 13 bp, Artificial Sequence
  Oligonucleotide for detection of SNP TSC0036495
rccttacaattac

SEQ ID NO: 145061 - DNA, 13 bp, Artificial Sequence
  Oligonucleotide for detection of SNP TSC0036495
gttttggagttay

SEQ ID NO: 145062 - DNA, 13 bp, Artificial Sequence
  Oligonucleotide for detection of SNP TSC0036495
rtaactccaaaac

SEQ ID NO: 145063 - DNA, 13 bp, Artificial Sequence
  Oligonucleotide for detection of SNP TSC0036495
gttttgtagttay

SEQ ID NO: 145064 - DNA, 13 bp, Artificial Sequence
  Oligonucleotide for detection of SNP TSC0036495
rtaactacaaaac

SEQ ID NO: 145065 - DNA, 13 bp, Artificial Sequence
  Oligonucleotide for detection of SNP TSC0036496
ttttaggtagagy

SEQ ID NO: 145066 - DNA, 13 bp, Artificial Sequence
  Oligonucleotide for detection of SNP TSC0036496
rctctacctaaaa

SEQ ID NO: 145067 - DNA, 13 bp, Artificial Sequence
  Oligonucleotide for detection of SNP TSC0036496
ttttagatagagy

SEQ ID NO: 145068 - DNA, 13 bp, Artificial Sequence
  Oligonucleotide for detection of SNP TSC0036496
rctctatctaaaa

SEQ ID NO: 145069 - DNA, 13 bp, Artificial Sequence
  Oligonucleotide for detection of SNP TSC0036504
gggaaatgttaag

SEQ ID NO: 145070 - DNA, 13 bp, Artificial Sequence
  Oligonucleotide for detection of SNP TSC0036504
cttaacatttccc

SEQ ID NO: 145071 - DNA, 13 bp, Artificial Sequence
  Oligonucleotide for detection of SNP TSC0036504
gggaaaggttaag

SEQ ID NO: 145072 - DNA, 13 bp, Artificial Sequence
  Oligonucleotide for detection of SNP TSC0036504
cttaacctttccc

SEQ ID NO: 145073 - DNA, 13 bp, Artificial Sequence
  Oligonucleotide for detection of SNP TSC0036506
taatgtatttaty

SEQ ID NO: 145074 - DNA, 13 bp, Artificial Sequence
  Oligonucleotide for detection of SNP TSC0036506
rataaatacatta

SEQ ID NO: 145075 - DNA, 13 bp, Artificial Sequence
  Oligonucleotide for detection of SNP TSC0036506
taatgtgtttaty

SEQ ID NO: 145076 - DNA, 13 bp, Artificial Sequence
  Oligonucleotide for detection of SNP TSC0036506
rataaacacatta

SEQ ID NO: 145077 - DNA, 13 bp, Artificial Sequence
  Oligonucleotide for detection of SNP TSC0036506
taatgcgtttaty

SEQ ID NO: 145078 - DNA, 13 bp, Artificial Sequence
  Oligonucleotide for detection of SNP TSC0036506
rataaacgcatta

SEQ ID NO: 145079 - DNA, 13 bp, Artificial Sequence
  Oligonucleotide for detection of SNP TSC0036506
ggtaaatgtattg

SEQ ID NO: 145080 - DNA, 13 bp, Artificial Sequence
  Oligonucleotide for detection of SNP TSC0036506
caatacatttacc

SEQ ID NO: 145081 - DNA, 13 bp, Artificial Sequence
  Oligonucleotide for detection of SNP TSC0036506
ggtaaacgtattg

SEQ ID NO: 145082 - DNA, 13 bp, Artificial Sequence
  Oligonucleotide for detection of SNP TSC0036506
caatacgtttacc

SEQ ID NO: 145083 - DNA, 13 bp, Artificial Sequence
  Oligonucleotide for detection of SNP TSC0036507
tgatttgtgattt

SEQ ID NO: 145084 - DNA, 13 bp, Artificial Sequence
  Oligonucleotide for detection of SNP TSC0036507
aaatcacaaatca

SEQ ID NO: 145085 - DNA, 13 bp, Artificial Sequence
  Oligonucleotide for detection of SNP TSC0036507
tgatttatgattt

SEQ ID NO: 145086 - DNA, 13 bp, Artificial Sequence
  Oligonucleotide for detection of SNP TSC0036507
aaatcataaatca

SEQ ID NO: 145087 - DNA, 13 bp, Artificial Sequence
  Oligonucleotide for detection of SNP TSC0036510
atttaaggttttt

SEQ ID NO: 145088 - DNA, 13 bp, Artificial Sequence
  Oligonucleotide for detection of SNP TSC0036510
aaaaaccttaaat

SEQ ID NO: 145089 - DNA, 13 bp, Artificial Sequence
  Oligonucleotide for detection of SNP TSC0036510
atttaatgttttt

SEQ ID NO: 145090 - DNA, 13 bp, Artificial Sequence
  Oligonucleotide for detection of SNP TSC0036510
aaaaacattaaat

SEQ ID NO: 145091 - DNA, 13 bp, Artificial Sequence
  Oligonucleotide for detection of SNP TSC0036510
aagaattttgagt

SEQ ID NO: 145092 - DNA, 13 bp, Artificial Sequence
  Oligonucleotide for detection of SNP TSC0036510
actcaaaattctt

SEQ ID NO: 145093 - DNA, 13 bp, Artificial Sequence
  Oligonucleotide for detection of SNP TSC0036510
aagaatattgagt

SEQ ID NO: 145094 - DNA, 13 bp, Artificial Sequence
  Oligonucleotide for detection of SNP TSC0036510
actcaatattctt

SEQ ID NO: 145095 - DNA, 13 bp, Artificial Sequence
  Oligonucleotide for detection of SNP TSC0036513
tttgggagtgata

SEQ ID NO: 145096 - DNA, 13 bp, Artificial Sequence
  Oligonucleotide for detection of SNP TSC0036513
tatcactcccaaa

SEQ ID NO: 145097 - DNA, 13 bp, Artificial Sequence
  Oligonucleotide for detection of SNP TSC0036513
tttgggggtgata

SEQ ID NO: 145098 - DNA, 13 bp, Artificial Sequence
  Oligonucleotide for detection of SNP TSC0036513
tatcacccccaaa

SEQ ID NO: 145099 - DNA, 13 bp, Artificial Sequence
  Oligonucleotide for detection of SNP TSC0036514
ttatttaaattcg

SEQ ID NO: 145100 - DNA, 13 bp, Artificial Sequence
  Oligonucleotide for detection of SNP TSC0036514
cgaatttaaataa

SEQ ID NO: 145101 - DNA, 13 bp, Artificial Sequence
  Oligonucleotide for detection of SNP TSC0036514
ttatttgaattcg

SEQ ID NO: 145102 - DNA, 13 bp, Artificial Sequence
  Oligonucleotide for detection of SNP TSC0036514
cgaattcaaataa

SEQ ID NO: 145103 - DNA, 13 bp, Artificial Sequence
  Oligonucleotide for detection of SNP TSC0036515
ttgtttaattgaa

SEQ ID NO: 145104 - DNA, 13 bp, Artificial Sequence
  Oligonucleotide for detection of SNP TSC0036515
ttcaattaaacaa

SEQ ID NO: 145105 - DNA, 13 bp, Artificial Sequence
  Oligonucleotide for detection of SNP TSC0036515
tcgtttaattgaa

SEQ ID NO: 145106 - DNA, 13 bp, Artificial Sequence
  Oligonucleotide for detection of SNP TSC0036515
ttcaattaaacga

SEQ ID NO: 145107 - DNA, 13 bp, Artificial Sequence
  Oligonucleotide for detection of SNP TSC0036515
tcgtttgattgaa

SEQ ID NO: 145108 - DNA, 13 bp, Artificial Sequence
  Oligonucleotide for detection of SNP TSC0036515
ttcaatcaaacga

SEQ ID NO: 145109 - DNA, 13 bp, Artificial Sequence
  Oligonucleotide for detection of SNP TSC0036515
ttgttcgattgaa

SEQ ID NO: 145110 - DNA, 13 bp, Artificial Sequence
  Oligonucleotide for detection of SNP TSC0036515
ttcaatcgaacaa

SEQ ID NO: 145111 - DNA, 13 bp, Artificial Sequence
  Oligonucleotide for detection of SNP TSC0036515
tcgttcgattgaa

SEQ ID NO: 145112 - DNA, 13 bp, Artificial Sequence
  Oligonucleotide for detection of SNP TSC0036515
ttcaatcgaacga

SEQ ID NO: 145113 - DNA, 13 bp, Artificial Sequence
  Oligonucleotide for detection of SNP TSC0036515
tttaattggatgg

SEQ ID NO: 145114 - DNA, 13 bp, Artificial Sequence
  Oligonucleotide for detection of SNP TSC0036515
ccatccaattaaa

SEQ ID NO: 145115 - DNA, 13 bp, Artificial Sequence
  Oligonucleotide for detection of SNP TSC0036515
tttaattggacgg

SEQ ID NO: 145116 - DNA, 13 bp, Artificial Sequence
  Oligonucleotide for detection of SNP TSC0036515
ccgtccaattaaa

SEQ ID NO: 145117 - DNA, 13 bp, Artificial Sequence
  Oligonucleotide for detection of SNP TSC0036515
tttaatcggatgg

SEQ ID NO: 145118 - DNA, 13 bp, Artificial Sequence
  Oligonucleotide for detection of SNP TSC0036515
ccatccgattaaa

SEQ ID NO: 145119 - DNA, 13 bp, Artificial Sequence
  Oligonucleotide for detection of SNP TSC0036515
tttaatcggacgg

SEQ ID NO: 145120 - DNA, 13 bp, Artificial Sequence
  Oligonucleotide for detection of SNP TSC0036515
ccgtccgattaaa

SEQ ID NO: 145121 - DNA, 13 bp, Artificial Sequence
  Oligonucleotide for detection of SNP TSC0036516
gtagaaagtaaaa

SEQ ID NO: 145122 - DNA, 13 bp, Artificial Sequence
  Oligonucleotide for detection of SNP TSC0036516
ttttactttctac

SEQ ID NO: 145123 - DNA, 13 bp, Artificial Sequence
  Oligonucleotide for detection of SNP TSC0036516
gtagaatgtaaaa

SEQ ID NO: 145124 - DNA, 13 bp, Artificial Sequence
  Oligonucleotide for detection of SNP TSC0036516
ttttacattctac

SEQ ID NO: 145125 - DNA, 13 bp, Artificial Sequence
  Oligonucleotide for detection of SNP TSC0036516
gtagaacgtaaaa

SEQ ID NO: 145126 - DNA, 13 bp, Artificial Sequence
  Oligonucleotide for detection of SNP TSC0036516
ttttacgttctac

SEQ ID NO: 145127 - DNA, 13 bp, Artificial Sequence
  Oligonucleotide for detection of SNP TSC0036516
ttttgtgttttay

SEQ ID NO: 145128 - DNA, 13 bp, Artificial Sequence
  Oligonucleotide for detection of SNP TSC0036516
rtaaaacacaaaa

SEQ ID NO: 145129 - DNA, 13 bp, Artificial Sequence
  Oligonucleotide for detection of SNP TSC0036516
ttttgcgttttay

SEQ ID NO: 145130 - DNA, 13 bp, Artificial Sequence
  Oligonucleotide for detection of SNP TSC0036516
rtaaaacgcaaaa

SEQ ID NO: 145131 - DNA, 13 bp, Artificial Sequence
  Oligonucleotide for detection of SNP TSC0036517
tttggtagtgagt

SEQ ID NO: 145132 - DNA, 13 bp, Artificial Sequence
  Oligonucleotide for detection of SNP TSC0036517
actcactaccaaa

SEQ ID NO: 145133 - DNA, 13 bp, Artificial Sequence
  Oligonucleotide for detection of SNP TSC0036517
tttggtggtgagt

SEQ ID NO: 145134 - DNA, 13 bp, Artificial Sequence
  Oligonucleotide for detection of SNP TSC0036517
actcaccaccaaa

SEQ ID NO: 145135 - DNA, 13 bp, Artificial Sequence
  Oligonucleotide for detection of SNP TSC0036517
tttggcggtgagt

SEQ ID NO: 145136 - DNA, 13 bp, Artificial Sequence
  Oligonucleotide for detection of SNP TSC0036517
actcaccgccaaa

SEQ ID NO: 145137 - DNA, 13 bp, Artificial Sequence
  Oligonucleotide for detection of SNP TSC0036517
atttattgttagg

SEQ ID NO: 145138 - DNA, 13 bp, Artificial Sequence
  Oligonucleotide for detection of SNP TSC0036517
cctaacaataaat

SEQ ID NO: 145139 - DNA, 13 bp, Artificial Sequence
  Oligonucleotide for detection of SNP TSC0036517
atttatcgttagg

SEQ ID NO: 145140 - DNA, 13 bp, Artificial Sequence
  Oligonucleotide for detection of SNP TSC0036517
cctaacgataaat

SEQ ID NO: 145141 - DNA, 13 bp, Artificial Sequence
  Oligonucleotide for detection of SNP TSC0036519
aattgagtaatga

SEQ ID NO: 145142 - DNA, 13 bp, Artificial Sequence
  Oligonucleotide for detection of SNP TSC0036519
tcattactcaatt

SEQ ID NO: 145143 - DNA, 13 bp, Artificial Sequence
  Oligonucleotide for detection of SNP TSC0036519
aattgaataatga

SEQ ID NO: 145144 - DNA, 13 bp, Artificial Sequence
  Oligonucleotide for detection of SNP TSC0036519
tcattattcaatt

SEQ ID NO: 145145 - DNA, 13 bp, Artificial Sequence
  Oligonucleotide for detection of SNP TSC0036524
tttttgagatagt

SEQ ID NO: 145146 - DNA, 13 bp, Artificial Sequence
  Oligonucleotide for detection of SNP TSC0036524
actatctcaaaaa

SEQ ID NO: 145147 - DNA, 13 bp, Artificial Sequence
  Oligonucleotide for detection of SNP TSC0036524
tttttgggatagt

SEQ ID NO: 145148 - DNA, 13 bp, Artificial Sequence
  Oligonucleotide for detection of SNP TSC0036524
actatcccaaaaa

SEQ ID NO: 145149 - DNA, 13 bp, Artificial Sequence
  Oligonucleotide for detection of SNP TSC0036529
gtatttattatty

SEQ ID NO: 145150 - DNA, 13 bp, Artificial Sequence
  Oligonucleotide for detection of SNP TSC0036529
raataataaatac

SEQ ID NO: 145151 - DNA, 13 bp, Artificial Sequence
  Oligonucleotide for detection of SNP TSC0036529
gtattttttatty

SEQ ID NO: 145152 - DNA, 13 bp, Artificial Sequence
  Oligonucleotide for detection of SNP TSC0036529
raataaaaaatac

SEQ ID NO: 145153 - DNA, 13 bp, Artificial Sequence
  Oligonucleotide for detection of SNP TSC0036529
gagtggtgaatgy

SEQ ID NO: 145154 - DNA, 13 bp, Artificial Sequence
  Oligonucleotide for detection of SNP TSC0036529
rcattcaccactc

SEQ ID NO: 145155 - DNA, 13 bp, Artificial Sequence
  Oligonucleotide for detection of SNP TSC0036529
gagtggggaatgy

SEQ ID NO: 145156 - DNA, 13 bp, Artificial Sequence
  Oligonucleotide for detection of SNP TSC0036529
rcattccccactc

SEQ ID NO: 145157 - DNA, 13 bp, Artificial Sequence
  Oligonucleotide for detection of SNP TSC0036531
gagttatatatag

SEQ ID NO: 145158 - DNA, 13 bp, Artificial Sequence
  Oligonucleotide for detection of SNP TSC0036531
ctatatataactc

SEQ ID NO: 145159 - DNA, 13 bp, Artificial Sequence
  Oligonucleotide for detection of SNP TSC0036531
gagttagatatag

SEQ ID NO: 145160 - DNA, 13 bp, Artificial Sequence
  Oligonucleotide for detection of SNP TSC0036531
ctatatctaactc

SEQ ID NO: 145161 - DNA, 13 bp, Artificial Sequence
  Oligonucleotide for detection of SNP TSC0036531
ttgtgtgtagtty

SEQ ID NO: 145162 - DNA, 13 bp, Artificial Sequence
  Oligonucleotide for detection of SNP TSC0036531
raactacacacaa

SEQ ID NO: 145163 - DNA, 13 bp, Artificial Sequence
  Oligonucleotide for detection of SNP TSC0036531
ttgtgtttagtty

SEQ ID NO: 145164 - DNA, 13 bp, Artificial Sequence
  Oligonucleotide for detection of SNP TSC0036531
raactaaacacaa

SEQ ID NO: 145165 - DNA, 13 bp, Artificial Sequence
  Oligonucleotide for detection of SNP TSC0036532
ttatatatgttta

SEQ ID NO: 145166 - DNA, 13 bp, Artificial Sequence
  Oligonucleotide for detection of SNP TSC0036532
taaacatatataa

SEQ ID NO: 145167 - DNA, 13 bp, Artificial Sequence
  Oligonucleotide for detection of SNP TSC0036532
ttatatgtgttta

SEQ ID NO: 145168 - DNA, 13 bp, Artificial Sequence
  Oligonucleotide for detection of SNP TSC0036532
taaacacatataa

SEQ ID NO: 145169 - DNA, 13 bp, Artificial Sequence
  Oligonucleotide for detection of SNP TSC0036532
ttatatacgttta

SEQ ID NO: 145170 - DNA, 13 bp, Artificial Sequence
  Oligonucleotide for detection of SNP TSC0036532
taaacgtatataa

SEQ ID NO: 145171 - DNA, 13 bp, Artificial Sequence
  Oligonucleotide for detection of SNP TSC0036532
ttatatgcgttta

SEQ ID NO: 145172 - DNA, 13 bp, Artificial Sequence
  Oligonucleotide for detection of SNP TSC0036532
taaacgcatataa

SEQ ID NO: 145173 - DNA, 13 bp, Artificial Sequence
  Oligonucleotide for detection of SNP TSC0036534
tttgaagggttgt

SEQ ID NO: 145174 - DNA, 13 bp, Artificial Sequence
  Oligonucleotide for detection of SNP TSC0036534
acaacccttcaaa

SEQ ID NO: 145175 - DNA, 13 bp, Artificial Sequence
  Oligonucleotide for detection of SNP TSC0036534
tttgaatggttgt

SEQ ID NO: 145176 - DNA, 13 bp, Artificial Sequence
  Oligonucleotide for detection of SNP TSC0036534
acaaccattcaaa

SEQ ID NO: 145177 - DNA, 13 bp, Artificial Sequence
  Oligonucleotide for detection of SNP TSC0036534
ttcgaagggttgt

SEQ ID NO: 145178 - DNA, 13 bp, Artificial Sequence
  Oligonucleotide for detection of SNP TSC0036534
acaacccttcgaa

SEQ ID NO: 145179 - DNA, 13 bp, Artificial Sequence
  Oligonucleotide for detection of SNP TSC0036534
ttcgaatggttgt

SEQ ID NO: 145180 - DNA, 13 bp, Artificial Sequence
  Oligonucleotide for detection of SNP TSC0036534
acaaccattcgaa

SEQ ID NO: 145181 - DNA, 13 bp, Artificial Sequence
  Oligonucleotide for detection of SNP TSC0036534
ataattttttgaa

SEQ ID NO: 145182 - DNA, 13 bp, Artificial Sequence
  Oligonucleotide for detection of SNP TSC0036534
ttcaaaaaattat

SEQ ID NO: 145183 - DNA, 13 bp, Artificial Sequence
  Oligonucleotide for detection of SNP TSC0036534
ataattatttgaa

SEQ ID NO: 145184 - DNA, 13 bp, Artificial Sequence
  Oligonucleotide for detection of SNP TSC0036534
ttcaaataattat

SEQ ID NO: 145185 - DNA, 13 bp, Artificial Sequence
  Oligonucleotide for detection of SNP TSC0036534
ataatttttcgaa

SEQ ID NO: 145186 - DNA, 13 bp, Artificial Sequence
  Oligonucleotide for detection of SNP TSC0036534
ttcgaaaaattat

SEQ ID NO: 145187 - DNA, 13 bp, Artificial Sequence
  Oligonucleotide for detection of SNP TSC0036534
ataattattcgaa

SEQ ID NO: 145188 - DNA, 13 bp, Artificial Sequence
  Oligonucleotide for detection of SNP TSC0036534
ttcgaataattat

SEQ ID NO: 145189 - DNA, 13 bp, Artificial Sequence
  Oligonucleotide for detection of SNP TSC0036535
gtgattgggggtt

SEQ ID NO: 145190 - DNA, 13 bp, Artificial Sequence
  Oligonucleotide for detection of SNP TSC0036535
aacccccaatcac

SEQ ID NO: 145191 - DNA, 13 bp, Artificial Sequence
  Oligonucleotide for detection of SNP TSC0036535
gtgattaggggtt

SEQ ID NO: 145192 - DNA, 13 bp, Artificial Sequence
  Oligonucleotide for detection of SNP TSC0036535
aacccctaatcac

SEQ ID NO: 145193 - DNA, 13 bp, Artificial Sequence
  Oligonucleotide for detection of SNP TSC0036539
ggttaaaaaatta

SEQ ID NO: 145194 - DNA, 13 bp, Artificial Sequence
  Oligonucleotide for detection of SNP TSC0036539
taattttttaacc

SEQ ID NO: 145195 - DNA, 13 bp, Artificial Sequence
  Oligonucleotide for detection of SNP TSC0036539
ggttaagaaatta

SEQ ID NO: 145196 - DNA, 13 bp, Artificial Sequence
  Oligonucleotide for detection of SNP TSC0036539
taatttcttaacc

SEQ ID NO: 145197 - DNA, 13 bp, Artificial Sequence
  Oligonucleotide for detection of SNP TSC0036541
agttttgttagtt

SEQ ID NO: 145198 - DNA, 13 bp, Artificial Sequence
  Oligonucleotide for detection of SNP TSC0036541
aactaacaaaact

SEQ ID NO: 145199 - DNA, 13 bp, Artificial Sequence
  Oligonucleotide for detection of SNP TSC0036541
agttttattagtt

SEQ ID NO: 145200 - DNA, 13 bp, Artificial Sequence
  Oligonucleotide for detection of SNP TSC0036541
aactaataaaact

SEQ ID NO: 145201 - DNA, 13 bp, Artificial Sequence
  Oligonucleotide for detection of SNP TSC0036542
gagaaaaggtaga

SEQ ID NO: 145202 - DNA, 13 bp, Artificial Sequence
  Oligonucleotide for detection of SNP TSC0036542
tctaccttttctc

SEQ ID NO: 145203 - DNA, 13 bp, Artificial Sequence
  Oligonucleotide for detection of SNP TSC0036542
gagaaagggtaga

SEQ ID NO: 145204 - DNA, 13 bp, Artificial Sequence
  Oligonucleotide for detection of SNP TSC0036542
tctaccctttctc

SEQ ID NO: 145205 - DNA, 13 bp, Artificial Sequence
  Oligonucleotide for detection of SNP TSC0036543
aagtttggaaggy

SEQ ID NO: 145206 - DNA, 13 bp, Artificial Sequence
  Oligonucleotide for detection of SNP TSC0036543
rccttccaaactt

SEQ ID NO: 145207 - DNA, 13 bp, Artificial Sequence
  Oligonucleotide for detection of SNP TSC0036543
aagttttgaaggy

SEQ ID NO: 145208 - DNA, 13 bp, Artificial Sequence
  Oligonucleotide for detection of SNP TSC0036543
rccttcaaaactt

SEQ ID NO: 145209 - DNA, 13 bp, Artificial Sequence
  Oligonucleotide for detection of SNP TSC0036543
aagttcggaaggy

SEQ ID NO: 145210 - DNA, 13 bp, Artificial Sequence
  Oligonucleotide for detection of SNP TSC0036543
rccttccgaactt

SEQ ID NO: 145211 - DNA, 13 bp, Artificial Sequence
  Oligonucleotide for detection of SNP TSC0036543
gttttttgggttt

SEQ ID NO: 145212 - DNA, 13 bp, Artificial Sequence
  Oligonucleotide for detection of SNP TSC0036543
aaacccaaaaaac

SEQ ID NO: 145213 - DNA, 13 bp, Artificial Sequence
  Oligonucleotide for detection of SNP TSC0036543
gtttttagggttt

SEQ ID NO: 145214 - DNA, 13 bp, Artificial Sequence
  Oligonucleotide for detection of SNP TSC0036543
aaaccctaaaaac

SEQ ID NO: 145215 - DNA, 13 bp, Artificial Sequence
  Oligonucleotide for detection of SNP TSC0036543
gtttttcgggttt

SEQ ID NO: 145216 - DNA, 13 bp, Artificial Sequence
  Oligonucleotide for detection of SNP TSC0036543
aaacccgaaaaac

SEQ ID NO: 145217 - DNA, 13 bp, Artificial Sequence
  Oligonucleotide for detection of SNP TSC0036545
gggtaatgtaaat

SEQ ID NO: 145218 - DNA, 13 bp, Artificial Sequence
  Oligonucleotide for detection of SNP TSC0036545
atttacattaccc

SEQ ID NO: 145219 - DNA, 13 bp, Artificial Sequence
  Oligonucleotide for detection of SNP TSC0036545
gggtaacgtaaat

SEQ ID NO: 145220 - DNA, 13 bp, Artificial Sequence
  Oligonucleotide for detection of SNP TSC0036545
atttacgttaccc

SEQ ID NO: 145221 - DNA, 13 bp, Artificial Sequence
  Oligonucleotide for detection of SNP TSC0036546
gttagtatagtta

SEQ ID NO: 145222 - DNA, 13 bp, Artificial Sequence
  Oligonucleotide for detection of SNP TSC0036546
taactatactaac

SEQ ID NO: 145223 - DNA, 13 bp, Artificial Sequence
  Oligonucleotide for detection of SNP TSC0036546
gttagtttagtta

SEQ ID NO: 145224 - DNA, 13 bp, Artificial Sequence
  Oligonucleotide for detection of SNP TSC0036546
taactaaactaac

SEQ ID NO: 145225 - DNA, 13 bp, Artificial Sequence
  Oligonucleotide for detection of SNP TSC0036546
tggttatgttagy

SEQ ID NO: 145226 - DNA, 13 bp, Artificial Sequence
  Oligonucleotide for detection of SNP TSC0036546
rctaacataacca

SEQ ID NO: 145227 - DNA, 13 bp, Artificial Sequence
  Oligonucleotide for detection of SNP TSC0036546
tggttaggttagy

SEQ ID NO: 145228 - DNA, 13 bp, Artificial Sequence
  Oligonucleotide for detection of SNP TSC0036546
rctaacctaacca

SEQ ID NO: 145229 - DNA, 13 bp, Artificial Sequence
  Oligonucleotide for detection of SNP TSC0036547
gtttttttgtatt

SEQ ID NO: 145230 - DNA, 13 bp, Artificial Sequence
  Oligonucleotide for detection of SNP TSC0036547
aatacaaaaaaac

SEQ ID NO: 145231 - DNA, 13 bp, Artificial Sequence
  Oligonucleotide for detection of SNP TSC0036547
agtgtatggagay

SEQ ID NO: 145232 - DNA, 13 bp, Artificial Sequence
  Oligonucleotide for detection of SNP TSC0036547
rtctccatacact

SEQ ID NO: 145233 - DNA, 13 bp, Artificial Sequence
  Oligonucleotide for detection of SNP TSC0036547
agtgtagggagay

SEQ ID NO: 145234 - DNA, 13 bp, Artificial Sequence
  Oligonucleotide for detection of SNP TSC0036547
rtctccctacact

SEQ ID NO: 145235 - DNA, 13 bp, Artificial Sequence
  Oligonucleotide for detection of SNP TSC0036548
tttttttaaatat

SEQ ID NO: 145236 - DNA, 13 bp, Artificial Sequence
  Oligonucleotide for detection of SNP TSC0036548
atatttaaaaaaa

SEQ ID NO: 145237 - DNA, 13 bp, Artificial Sequence
  Oligonucleotide for detection of SNP TSC0036548
atattttggaaaa

SEQ ID NO: 145238 - DNA, 13 bp, Artificial Sequence
  Oligonucleotide for detection of SNP TSC0036548
ttttccaaaatat

SEQ ID NO: 145239 - DNA, 13 bp, Artificial Sequence
  Oligonucleotide for detection of SNP TSC0036548
atatttaggaaaa

SEQ ID NO: 145240 - DNA, 13 bp, Artificial Sequence
  Oligonucleotide for detection of SNP TSC0036548
ttttcctaaatat

SEQ ID NO: 145241 - DNA, 13 bp, Artificial Sequence
  Oligonucleotide for detection of SNP TSC0036548
atatttcggaaaa

SEQ ID NO: 145242 - DNA, 13 bp, Artificial Sequence
  Oligonucleotide for detection of SNP TSC0036548
ttttccgaaatat

SEQ ID NO: 145243 - DNA, 13 bp, Artificial Sequence
  Oligonucleotide for detection of SNP TSC0036550
attagcgtattta

SEQ ID NO: 145244 - DNA, 13 bp, Artificial Sequence
  Oligonucleotide for detection of SNP TSC0036550
taaatacgctaat

SEQ ID NO: 145245 - DNA, 13 bp, Artificial Sequence
  Oligonucleotide for detection of SNP TSC0036550
tgaatgtgttaat

SEQ ID NO: 145246 - DNA, 13 bp, Artificial Sequence
  Oligonucleotide for detection of SNP TSC0036550
attaacacattca

SEQ ID NO: 145247 - DNA, 13 bp, Artificial Sequence
  Oligonucleotide for detection of SNP TSC0036550
tgaatgcgttaat

SEQ ID NO: 145248 - DNA, 13 bp, Artificial Sequence
  Oligonucleotide for detection of SNP TSC0036550
attaacgcattca

SEQ ID NO: 145249 - DNA, 13 bp, Artificial Sequence
  Oligonucleotide for detection of SNP TSC0036552
taaagaggaaaag

SEQ ID NO: 145250 - DNA, 13 bp, Artificial Sequence
  Oligonucleotide for detection of SNP TSC0036552
cttttcctcttta

SEQ ID NO: 145251 - DNA, 13 bp, Artificial Sequence
  Oligonucleotide for detection of SNP TSC0036552
taaagaagaaaag

SEQ ID NO: 145252 - DNA, 13 bp, Artificial Sequence
  Oligonucleotide for detection of SNP TSC0036552
cttttcttcttta

SEQ ID NO: 145253 - DNA, 13 bp, Artificial Sequence
  Oligonucleotide for detection of SNP TSC0036553
ttaaataaaaaaa

SEQ ID NO: 145254 - DNA, 13 bp, Artificial Sequence
  Oligonucleotide for detection of SNP TSC0036553
tttttttatttaa

SEQ ID NO: 145255 - DNA, 13 bp, Artificial Sequence
  Oligonucleotide for detection of SNP TSC0036553
ttaaattaaaaaa

SEQ ID NO: 145256 - DNA, 13 bp, Artificial Sequence
  Oligonucleotide for detection of SNP TSC0036553
ttttttaatttaa

SEQ ID NO: 145257 - DNA, 13 bp, Artificial Sequence
  Oligonucleotide for detection of SNP TSC0036554
tgttataagaagy

SEQ ID NO: 145258 - DNA, 13 bp, Artificial Sequence
  Oligonucleotide for detection of SNP TSC0036554
rcttcttataaca

SEQ ID NO: 145259 - DNA, 13 bp, Artificial Sequence
  Oligonucleotide for detection of SNP TSC0036554
tgttatgagaagy

SEQ ID NO: 145260 - DNA, 13 bp, Artificial Sequence
  Oligonucleotide for detection of SNP TSC0036554
rcttctcataaca

SEQ ID NO: 145261 - DNA, 13 bp, Artificial Sequence
  Oligonucleotide for detection of SNP TSC0036554
tgttacgagaagy

SEQ ID NO: 145262 - DNA, 13 bp, Artificial Sequence
  Oligonucleotide for detection of SNP TSC0036554
rcttctcgtaaca

SEQ ID NO: 145263 - DNA, 13 bp, Artificial Sequence
  Oligonucleotide for detection of SNP TSC0036555
gtatttatataag

SEQ ID NO: 145264 - DNA, 13 bp, Artificial Sequence
  Oligonucleotide for detection of SNP TSC0036555
cttatataaatac

SEQ ID NO: 145265 - DNA, 13 bp, Artificial Sequence
  Oligonucleotide for detection of SNP TSC0036555
gtatttgtataag

SEQ ID NO: 145266 - DNA, 13 bp, Artificial Sequence
  Oligonucleotide for detection of SNP TSC0036555
cttatacaaatac

SEQ ID NO: 145267 - DNA, 13 bp, Artificial Sequence
  Oligonucleotide for detection of SNP TSC0036556
aggaaagaaatat

SEQ ID NO: 145268 - DNA, 13 bp, Artificial Sequence
  Oligonucleotide for detection of SNP TSC0036556
atatttctttcct

SEQ ID NO: 145269 - DNA, 13 bp, Artificial Sequence
  Oligonucleotide for detection of SNP TSC0036556
aggaaataaatat

SEQ ID NO: 145270 - DNA, 13 bp, Artificial Sequence
  Oligonucleotide for detection of SNP TSC0036556
atatttatttcct

SEQ ID NO: 145271 - DNA, 13 bp, Artificial Sequence
  Oligonucleotide for detection of SNP TSC0036565
gttatatgttgtt

SEQ ID NO: 145272 - DNA, 13 bp, Artificial Sequence
  Oligonucleotide for detection of SNP TSC0036565
aacaacatataac

SEQ ID NO: 145273 - DNA, 13 bp, Artificial Sequence
  Oligonucleotide for detection of SNP TSC0036565
gttatacgttgtt

SEQ ID NO: 145274 - DNA, 13 bp, Artificial Sequence
  Oligonucleotide for detection of SNP TSC0036565
aacaacgtataac

SEQ ID NO: 145275 - DNA, 13 bp, Artificial Sequence
  Oligonucleotide for detection of SNP TSC0036565
agtaatgtgtggy

SEQ ID NO: 145276 - DNA, 13 bp, Artificial Sequence
  Oligonucleotide for detection of SNP TSC0036565
rccacacattact

SEQ ID NO: 145277 - DNA, 13 bp, Artificial Sequence
  Oligonucleotide for detection of SNP TSC0036565
agtaatatgtggy

SEQ ID NO: 145278 - DNA, 13 bp, Artificial Sequence
  Oligonucleotide for detection of SNP TSC0036565
rccacatattact

SEQ ID NO: 145279 - DNA, 13 bp, Artificial Sequence
  Oligonucleotide for detection of SNP TSC0036565
agtaacgtgtggy

SEQ ID NO: 145280 - DNA, 13 bp, Artificial Sequence
  Oligonucleotide for detection of SNP TSC0036565
rccacacgttact

SEQ ID NO: 145281 - DNA, 13 bp, Artificial Sequence
  Oligonucleotide for detection of SNP TSC0036566
tagtattgtgaty

SEQ ID NO: 145282 - DNA, 13 bp, Artificial Sequence
  Oligonucleotide for detection of SNP TSC0036566
ratcacaatacta

SEQ ID NO: 145283 - DNA, 13 bp, Artificial Sequence
  Oligonucleotide for detection of SNP TSC0036566
tagtatcgtgaty

SEQ ID NO: 145284 - DNA, 13 bp, Artificial Sequence
  Oligonucleotide for detection of SNP TSC0036566
ratcacgatacta

SEQ ID NO: 145285 - DNA, 13 bp, Artificial Sequence
  Oligonucleotide for detection of SNP TSC0036566
gattatggtgtta

SEQ ID NO: 145286 - DNA, 13 bp, Artificial Sequence
  Oligonucleotide for detection of SNP TSC0036566
taacaccataatc

SEQ ID NO: 145287 - DNA, 13 bp, Artificial Sequence
  Oligonucleotide for detection of SNP TSC0036566
gattatagtgtta

SEQ ID NO: 145288 - DNA, 13 bp, Artificial Sequence
  Oligonucleotide for detection of SNP TSC0036566
taacactataatc

SEQ ID NO: 145289 - DNA, 13 bp, Artificial Sequence
  Oligonucleotide for detection of SNP TSC0036566
gattacggtgtta

SEQ ID NO: 145290 - DNA, 13 bp, Artificial Sequence
  Oligonucleotide for detection of SNP TSC0036566
taacaccgtaatc

SEQ ID NO: 145291 - DNA, 13 bp, Artificial Sequence
  Oligonucleotide for detection of SNP TSC0036567
atgaattgttttt

SEQ ID NO: 145292 - DNA, 13 bp, Artificial Sequence
  Oligonucleotide for detection of SNP TSC0036567
aaaaacaattcat

SEQ ID NO: 145293 - DNA, 13 bp, Artificial Sequence
  Oligonucleotide for detection of SNP TSC0036567
atgaatcgttttt

SEQ ID NO: 145294 - DNA, 13 bp, Artificial Sequence
  Oligonucleotide for detection of SNP TSC0036567
aaaaacgattcat

SEQ ID NO: 145295 - DNA, 13 bp, Artificial Sequence
  Oligonucleotide for detection of SNP TSC0036567
aaaaatgatttat

SEQ ID NO: 145296 - DNA, 13 bp, Artificial Sequence
  Oligonucleotide for detection of SNP TSC0036567
ataaatcattttt

SEQ ID NO: 145297 - DNA, 13 bp, Artificial Sequence
  Oligonucleotide for detection of SNP TSC0036567
aaaaacgatttat

SEQ ID NO: 145298 - DNA, 13 bp, Artificial Sequence
  Oligonucleotide for detection of SNP TSC0036567
ataaatcgttttt

SEQ ID NO: 145299 - DNA, 13 bp, Artificial Sequence
  Oligonucleotide for detection of SNP TSC0036568
aatataagtgtta

SEQ ID NO: 145300 - DNA, 13 bp, Artificial Sequence
  Oligonucleotide for detection of SNP TSC0036568
taacacttatatt

SEQ ID NO: 145301 - DNA, 13 bp, Artificial Sequence
  Oligonucleotide for detection of SNP TSC0036568
aatataggtgtta

SEQ ID NO: 145302 - DNA, 13 bp, Artificial Sequence
  Oligonucleotide for detection of SNP TSC0036568
taacacctatatt

SEQ ID NO: 145303 - DNA, 13 bp, Artificial Sequence
  Oligonucleotide for detection of SNP TSC0036569
atatttggggagg

SEQ ID NO: 145304 - DNA, 13 bp, Artificial Sequence
  Oligonucleotide for detection of SNP TSC0036569
cctccccaaatat

SEQ ID NO: 145305 - DNA, 13 bp, Artificial Sequence
  Oligonucleotide for detection of SNP TSC0036569
atattttgggagg

SEQ ID NO: 145306 - DNA, 13 bp, Artificial Sequence
  Oligonucleotide for detection of SNP TSC0036569
cctcccaaaatat

SEQ ID NO: 145307 - DNA, 13 bp, Artificial Sequence
  Oligonucleotide for detection of SNP TSC0036569
tttttttaagtgt

SEQ ID NO: 145308 - DNA, 13 bp, Artificial Sequence
  Oligonucleotide for detection of SNP TSC0036569
acacttaaaaaaa

SEQ ID NO: 145309 - DNA, 13 bp, Artificial Sequence
  Oligonucleotide for detection of SNP TSC0036569
ttttttaaagtgt

SEQ ID NO: 145310 - DNA, 13 bp, Artificial Sequence
  Oligonucleotide for detection of SNP TSC0036569
acactttaaaaaa

SEQ ID NO: 145311 - DNA, 13 bp, Artificial Sequence
  Oligonucleotide for detection of SNP TSC0036572
tgtttttgttgty

SEQ ID NO: 145312 - DNA, 13 bp, Artificial Sequence
  Oligonucleotide for detection of SNP TSC0036572
racaacaaaaaca

SEQ ID NO: 145313 - DNA, 13 bp, Artificial Sequence
  Oligonucleotide for detection of SNP TSC0036572
tgttttcgttgty

SEQ ID NO: 145314 - DNA, 13 bp, Artificial Sequence
  Oligonucleotide for detection of SNP TSC0036572
racaacgaaaaca

SEQ ID NO: 145315 - DNA, 13 bp, Artificial Sequence
  Oligonucleotide for detection of SNP TSC0036572
ggtagtggggata

SEQ ID NO: 145316 - DNA, 13 bp, Artificial Sequence
  Oligonucleotide for detection of SNP TSC0036572
tatccccactacc

SEQ ID NO: 145317 - DNA, 13 bp, Artificial Sequence
  Oligonucleotide for detection of SNP TSC0036572
ggtagtagggata

SEQ ID NO: 145318 - DNA, 13 bp, Artificial Sequence
  Oligonucleotide for detection of SNP TSC0036572
tatccctactacc

SEQ ID NO: 145319 - DNA, 13 bp, Artificial Sequence
  Oligonucleotide for detection of SNP TSC0036572
ggtagcggggata

SEQ ID NO: 145320 - DNA, 13 bp, Artificial Sequence
  Oligonucleotide for detection of SNP TSC0036572
tatccccgctacc

SEQ ID NO: 145321 - DNA, 13 bp, Artificial Sequence
  Oligonucleotide for detection of SNP TSC0036581
gtataagttttta

SEQ ID NO: 145322 - DNA, 13 bp, Artificial Sequence
  Oligonucleotide for detection of SNP TSC0036581
taaaaacttatac

SEQ ID NO: 145323 - DNA, 13 bp, Artificial Sequence
  Oligonucleotide for detection of SNP TSC0036581
gtataatttttta

SEQ ID NO: 145324 - DNA, 13 bp, Artificial Sequence
  Oligonucleotide for detection of SNP TSC0036581
taaaaaattatac

SEQ ID NO: 145325 - DNA, 13 bp, Artificial Sequence
  Oligonucleotide for detection of SNP TSC0036581
tggaaatttatay

SEQ ID NO: 145326 - DNA, 13 bp, Artificial Sequence
  Oligonucleotide for detection of SNP TSC0036581
rtataaatttcca

SEQ ID NO: 145327 - DNA, 13 bp, Artificial Sequence
  Oligonucleotide for detection of SNP TSC0036581
tggaaaattatay

SEQ ID NO: 145328 - DNA, 13 bp, Artificial Sequence
  Oligonucleotide for detection of SNP TSC0036581
rtataattttcca

SEQ ID NO: 145329 - DNA, 13 bp, Artificial Sequence
  Oligonucleotide for detection of SNP TSC0036583
ttatatgtaattt

SEQ ID NO: 145330 - DNA, 13 bp, Artificial Sequence
  Oligonucleotide for detection of SNP TSC0036583
aaattacatataa

SEQ ID NO: 145331 - DNA, 13 bp, Artificial Sequence
  Oligonucleotide for detection of SNP TSC0036583
ttatatataattt

SEQ ID NO: 145332 - DNA, 13 bp, Artificial Sequence
  Oligonucleotide for detection of SNP TSC0036583
aaattatatataa

SEQ ID NO: 145333 - DNA, 13 bp, Artificial Sequence
  Oligonucleotide for detection of SNP TSC0036584
tttttatggttgy

SEQ ID NO: 145334 - DNA, 13 bp, Artificial Sequence
  Oligonucleotide for detection of SNP TSC0036584
rcaaccataaaaa

SEQ ID NO: 145335 - DNA, 13 bp, Artificial Sequence
  Oligonucleotide for detection of SNP TSC0036584
tttttacggttgy

SEQ ID NO: 145336 - DNA, 13 bp, Artificial Sequence
  Oligonucleotide for detection of SNP TSC0036584
rcaaccgtaaaaa

SEQ ID NO: 145337 - DNA, 13 bp, Artificial Sequence
  Oligonucleotide for detection of SNP TSC0036584
tttttatggtcgy

SEQ ID NO: 145338 - DNA, 13 bp, Artificial Sequence
  Oligonucleotide for detection of SNP TSC0036584
rcgaccataaaaa

SEQ ID NO: 145339 - DNA, 13 bp, Artificial Sequence
  Oligonucleotide for detection of SNP TSC0036584
tttttacggtcgy

SEQ ID NO: 145340 - DNA, 13 bp, Artificial Sequence
  Oligonucleotide for detection of SNP TSC0036584
rcgaccgtaaaaa

SEQ ID NO: 145341 - DNA, 13 bp, Artificial Sequence
  Oligonucleotide for detection of SNP TSC0036584
gtgattgtgaggg

SEQ ID NO: 145342 - DNA, 13 bp, Artificial Sequence
  Oligonucleotide for detection of SNP TSC0036584
ccctcacaatcac

SEQ ID NO: 145343 - DNA, 13 bp, Artificial Sequence
  Oligonucleotide for detection of SNP TSC0036584
gtgattatgaggg

SEQ ID NO: 145344 - DNA, 13 bp, Artificial Sequence
  Oligonucleotide for detection of SNP TSC0036584
ccctcataatcac

SEQ ID NO: 145345 - DNA, 13 bp, Artificial Sequence
  Oligonucleotide for detection of SNP TSC0036584
gcgattgtgaggg

SEQ ID NO: 145346 - DNA, 13 bp, Artificial Sequence
  Oligonucleotide for detection of SNP TSC0036584
ccctcacaatcgc

SEQ ID NO: 145347 - DNA, 13 bp, Artificial Sequence
  Oligonucleotide for detection of SNP TSC0036584
gcgattatgaggg

SEQ ID NO: 145348 - DNA, 13 bp, Artificial Sequence
  Oligonucleotide for detection of SNP TSC0036584
ccctcataatcgc

SEQ ID NO: 145349 - DNA, 13 bp, Artificial Sequence
  Oligonucleotide for detection of SNP TSC0036584
gtgatcgtgaggg

SEQ ID NO: 145350 - DNA, 13 bp, Artificial Sequence
  Oligonucleotide for detection of SNP TSC0036584
ccctcacgatcac

SEQ ID NO: 145351 - DNA, 13 bp, Artificial Sequence
  Oligonucleotide for detection of SNP TSC0036584
gcgatcgtgaggg

SEQ ID NO: 145352 - DNA, 13 bp, Artificial Sequence
  Oligonucleotide for detection of SNP TSC0036584
ccctcacgatcgc

SEQ ID NO: 145353 - DNA, 13 bp, Artificial Sequence
  Oligonucleotide for detection of SNP TSC0036586
ggagaatgaggaa

SEQ ID NO: 145354 - DNA, 13 bp, Artificial Sequence
  Oligonucleotide for detection of SNP TSC0036586
ttcctcattctcc

SEQ ID NO: 145355 - DNA, 13 bp, Artificial Sequence
  Oligonucleotide for detection of SNP TSC0036586
ggagaacgaggaa

SEQ ID NO: 145356 - DNA, 13 bp, Artificial Sequence
  Oligonucleotide for detection of SNP TSC0036586
ttcctcgttctcc

SEQ ID NO: 145357 - DNA, 13 bp, Artificial Sequence
  Oligonucleotide for detection of SNP TSC0036589
taaaatgtttagt

SEQ ID NO: 145358 - DNA, 13 bp, Artificial Sequence
  Oligonucleotide for detection of SNP TSC0036589
actaaacatttta

SEQ ID NO: 145359 - DNA, 13 bp, Artificial Sequence
  Oligonucleotide for detection of SNP TSC0036589
taaaatatttagt

SEQ ID NO: 145360 - DNA, 13 bp, Artificial Sequence
  Oligonucleotide for detection of SNP TSC0036589
actaaatatttta

SEQ ID NO: 145361 - DNA, 13 bp, Artificial Sequence
  Oligonucleotide for detection of SNP TSC0036590
agtaggtggatgg

SEQ ID NO: 145362 - DNA, 13 bp, Artificial Sequence
  Oligonucleotide for detection of SNP TSC0036590
ccatccacctact

SEQ ID NO: 145363 - DNA, 13 bp, Artificial Sequence
  Oligonucleotide for detection of SNP TSC0036590
agtaggcggatgg

SEQ ID NO: 145364 - DNA, 13 bp, Artificial Sequence
  Oligonucleotide for detection of SNP TSC0036590
ccatccgcctact

SEQ ID NO: 145365 - DNA, 13 bp, Artificial Sequence
  Oligonucleotide for detection of SNP TSC0036591
taaatatgaaaaa

SEQ ID NO: 145366 - DNA, 13 bp, Artificial Sequence
  Oligonucleotide for detection of SNP TSC0036591
tttttcatattta

SEQ ID NO: 145367 - DNA, 13 bp, Artificial Sequence
  Oligonucleotide for detection of SNP TSC0036592
agaggggaaaaaa

SEQ ID NO: 145368 - DNA, 13 bp, Artificial Sequence
  Oligonucleotide for detection of SNP TSC0036592
ttttttcccctct

SEQ ID NO: 145369 - DNA, 13 bp, Artificial Sequence
  Oligonucleotide for detection of SNP TSC0036592
agagggtaaaaaa

SEQ ID NO: 145370 - DNA, 13 bp, Artificial Sequence
  Oligonucleotide for detection of SNP TSC0036592
ttttttaccctct

SEQ ID NO: 145371 - DNA, 13 bp, Artificial Sequence
  Oligonucleotide for detection of SNP TSC0036593
aatagtgttatat

SEQ ID NO: 145372 - DNA, 13 bp, Artificial Sequence
  Oligonucleotide for detection of SNP TSC0036593
atataacactatt

SEQ ID NO: 145373 - DNA, 13 bp, Artificial Sequence
  Oligonucleotide for detection of SNP TSC0036593
aatagtattatat

SEQ ID NO: 145374 - DNA, 13 bp, Artificial Sequence
  Oligonucleotide for detection of SNP TSC0036593
atataatactatt

SEQ ID NO: 145375 - DNA, 13 bp, Artificial Sequence
  Oligonucleotide for detection of SNP TSC0036600
ggtgtgggggtag

SEQ ID NO: 145376 - DNA, 13 bp, Artificial Sequence
  Oligonucleotide for detection of SNP TSC0036600
ctacccccacacc

SEQ ID NO: 145377 - DNA, 13 bp, Artificial Sequence
  Oligonucleotide for detection of SNP TSC0036600
ggtgtgtgggtag

SEQ ID NO: 145378 - DNA, 13 bp, Artificial Sequence
  Oligonucleotide for detection of SNP TSC0036600
ctacccacacacc

SEQ ID NO: 145379 - DNA, 13 bp, Artificial Sequence
  Oligonucleotide for detection of SNP TSC0036600
ttgtttttataty

SEQ ID NO: 145380 - DNA, 13 bp, Artificial Sequence
  Oligonucleotide for detection of SNP TSC0036600
ratataaaaacaa

SEQ ID NO: 145381 - DNA, 13 bp, Artificial Sequence
  Oligonucleotide for detection of SNP TSC0036600
ttgtttatataty

SEQ ID NO: 145382 - DNA, 13 bp, Artificial Sequence
  Oligonucleotide for detection of SNP TSC0036600
ratatataaacaa

SEQ ID NO: 145383 - DNA, 13 bp, Artificial Sequence
  Oligonucleotide for detection of SNP TSC0036601
gggtagtgggttt

SEQ ID NO: 145384 - DNA, 13 bp, Artificial Sequence
  Oligonucleotide for detection of SNP TSC0036601
aaacccactaccc

SEQ ID NO: 145385 - DNA, 13 bp, Artificial Sequence
  Oligonucleotide for detection of SNP TSC0036601
gggtagcgggttt

SEQ ID NO: 145386 - DNA, 13 bp, Artificial Sequence
  Oligonucleotide for detection of SNP TSC0036601
aaacccgctaccc

SEQ ID NO: 145387 - DNA, 13 bp, Artificial Sequence
  Oligonucleotide for detection of SNP TSC0036601
aggtttgttgtty

SEQ ID NO: 145388 - DNA, 13 bp, Artificial Sequence
  Oligonucleotide for detection of SNP TSC0036601
raacaacaaacct

SEQ ID NO: 145389 - DNA, 13 bp, Artificial Sequence
  Oligonucleotide for detection of SNP TSC0036601
aggtttattgtty

SEQ ID NO: 145390 - DNA, 13 bp, Artificial Sequence
  Oligonucleotide for detection of SNP TSC0036601
raacaataaacct

SEQ ID NO: 145391 - DNA, 13 bp, Artificial Sequence
  Oligonucleotide for detection of SNP TSC0036601
aggttcgttgtty

SEQ ID NO: 145392 - DNA, 13 bp, Artificial Sequence
  Oligonucleotide for detection of SNP TSC0036601
raacaacgaacct

SEQ ID NO: 145393 - DNA, 13 bp, Artificial Sequence
  Oligonucleotide for detection of SNP TSC0036602
ggtatgattaggg

SEQ ID NO: 145394 - DNA, 13 bp, Artificial Sequence
  Oligonucleotide for detection of SNP TSC0036602
ccctaatcatacc

SEQ ID NO: 145395 - DNA, 13 bp, Artificial Sequence
  Oligonucleotide for detection of SNP TSC0036602
ggtatgtttaggg

SEQ ID NO: 145396 - DNA, 13 bp, Artificial Sequence
  Oligonucleotide for detection of SNP TSC0036602
ccctaaacatacc

SEQ ID NO: 145397 - DNA, 13 bp, Artificial Sequence
  Oligonucleotide for detection of SNP TSC0036602
ttttggttatgty

SEQ ID NO: 145398 - DNA, 13 bp, Artificial Sequence
  Oligonucleotide for detection of SNP TSC0036602
racataaccaaaa

SEQ ID NO: 145399 - DNA, 13 bp, Artificial Sequence
  Oligonucleotide for detection of SNP TSC0036602
ttttgggtatgty

SEQ ID NO: 145400 - DNA, 13 bp, Artificial Sequence
  Oligonucleotide for detection of SNP TSC0036602
racatacccaaaa

SEQ ID NO: 145401 - DNA, 13 bp, Artificial Sequence
  Oligonucleotide for detection of SNP TSC0036606
ttaaatattagtt

SEQ ID NO: 145402 - DNA, 13 bp, Artificial Sequence
  Oligonucleotide for detection of SNP TSC0036606
aactaatatttaa

SEQ ID NO: 145403 - DNA, 13 bp, Artificial Sequence
  Oligonucleotide for detection of SNP TSC0036606
ttaaattttagtt

SEQ ID NO: 145404 - DNA, 13 bp, Artificial Sequence
  Oligonucleotide for detection of SNP TSC0036606
aactaaaatttaa

SEQ ID NO: 145405 - DNA, 13 bp, Artificial Sequence
  Oligonucleotide for detection of SNP TSC0036606
aattaatatttgg

SEQ ID NO: 145406 - DNA, 13 bp, Artificial Sequence
  Oligonucleotide for detection of SNP TSC0036606
ccaaatattaatt

SEQ ID NO: 145407 - DNA, 13 bp, Artificial Sequence
  Oligonucleotide for detection of SNP TSC0036606
aattaagatttgg

SEQ ID NO: 145408 - DNA, 13 bp, Artificial Sequence
  Oligonucleotide for detection of SNP TSC0036606
ccaaatcttaatt

SEQ ID NO: 145409 - DNA, 13 bp, Artificial Sequence
  Oligonucleotide for detection of SNP TSC0036608
ataaggaatgtga

SEQ ID NO: 145410 - DNA, 13 bp, Artificial Sequence
  Oligonucleotide for detection of SNP TSC0036608
tcacattccttat

SEQ ID NO: 145411 - DNA, 13 bp, Artificial Sequence
  Oligonucleotide for detection of SNP TSC0036608
ataagggatgtga

SEQ ID NO: 145412 - DNA, 13 bp, Artificial Sequence
  Oligonucleotide for detection of SNP TSC0036608
tcacatcccttat

SEQ ID NO: 145413 - DNA, 13 bp, Artificial Sequence
  Oligonucleotide for detection of SNP TSC0036608
ataaggaatgcga

SEQ ID NO: 145414 - DNA, 13 bp, Artificial Sequence
  Oligonucleotide for detection of SNP TSC0036608
tcgcattccttat

SEQ ID NO: 145415 - DNA, 13 bp, Artificial Sequence
  Oligonucleotide for detection of SNP TSC0036608
ataagggatgcga

SEQ ID NO: 145416 - DNA, 13 bp, Artificial Sequence
  Oligonucleotide for detection of SNP TSC0036608
tcgcatcccttat

SEQ ID NO: 145417 - DNA, 13 bp, Artificial Sequence
  Oligonucleotide for detection of SNP TSC0036609
tagaattttttag

SEQ ID NO: 145418 - DNA, 13 bp, Artificial Sequence
  Oligonucleotide for detection of SNP TSC0036609
ctaaaaaattcta

SEQ ID NO: 145419 - DNA, 13 bp, Artificial Sequence
  Oligonucleotide for detection of SNP TSC0036609
tagaatgttttag

SEQ ID NO: 145420 - DNA, 13 bp, Artificial Sequence
  Oligonucleotide for detection of SNP TSC0036609
ctaaaacattcta

SEQ ID NO: 145421 - DNA, 13 bp, Artificial Sequence
  Oligonucleotide for detection of SNP TSC0036609
ttggaagatttta

SEQ ID NO: 145422 - DNA, 13 bp, Artificial Sequence
  Oligonucleotide for detection of SNP TSC0036609
taaaatcttccaa

SEQ ID NO: 145423 - DNA, 13 bp, Artificial Sequence
  Oligonucleotide for detection of SNP TSC0036609
ttggaatatttta

SEQ ID NO: 145424 - DNA, 13 bp, Artificial Sequence
  Oligonucleotide for detection of SNP TSC0036609
taaaatattccaa

SEQ ID NO: 145425 - DNA, 13 bp, Artificial Sequence
  Oligonucleotide for detection of SNP TSC0036610
gagatgatattag

SEQ ID NO: 145426 - DNA, 13 bp, Artificial Sequence
  Oligonucleotide for detection of SNP TSC0036610
ctaatatcatctc

SEQ ID NO: 145427 - DNA, 13 bp, Artificial Sequence
  Oligonucleotide for detection of SNP TSC0036610
gagatggtattag

SEQ ID NO: 145428 - DNA, 13 bp, Artificial Sequence
  Oligonucleotide for detection of SNP TSC0036610
ctaataccatctc

SEQ ID NO: 145429 - DNA, 13 bp, Artificial Sequence
  Oligonucleotide for detection of SNP TSC0036611
tgtttaatgggay

SEQ ID NO: 145430 - DNA, 13 bp, Artificial Sequence
  Oligonucleotide for detection of SNP TSC0036611
rtcccattaaaca

SEQ ID NO: 145431 - DNA, 13 bp, Artificial Sequence
  Oligonucleotide for detection of SNP TSC0036611
tgtttagtgggay

SEQ ID NO: 145432 - DNA, 13 bp, Artificial Sequence
  Oligonucleotide for detection of SNP TSC0036611
rtcccactaaaca

SEQ ID NO: 145433 - DNA, 13 bp, Artificial Sequence
  Oligonucleotide for detection of SNP TSC0036615
ttttggaggttgg

SEQ ID NO: 145434 - DNA, 13 bp, Artificial Sequence
  Oligonucleotide for detection of SNP TSC0036615
ccaacctccaaaa

SEQ ID NO: 145435 - DNA, 13 bp, Artificial Sequence
  Oligonucleotide for detection of SNP TSC0036615
ttttgggggttgg

SEQ ID NO: 145436 - DNA, 13 bp, Artificial Sequence
  Oligonucleotide for detection of SNP TSC0036615
ccaacccccaaaa

SEQ ID NO: 145437 - DNA, 13 bp, Artificial Sequence
  Oligonucleotide for detection of SNP TSC0036616
aggagggggtatt

SEQ ID NO: 145438 - DNA, 13 bp, Artificial Sequence
  Oligonucleotide for detection of SNP TSC0036616
aataccccctcct

SEQ ID NO: 145439 - DNA, 13 bp, Artificial Sequence
  Oligonucleotide for detection of SNP TSC0036616
aggaggtggtatt

SEQ ID NO: 145440 - DNA, 13 bp, Artificial Sequence
  Oligonucleotide for detection of SNP TSC0036616
aataccacctcct

SEQ ID NO: 145441 - DNA, 13 bp, Artificial Sequence
  Oligonucleotide for detection of SNP TSC0036616
aggaggcggtatt

SEQ ID NO: 145442 - DNA, 13 bp, Artificial Sequence
  Oligonucleotide for detection of SNP TSC0036616
aataccgcctcct

SEQ ID NO: 145443 - DNA, 13 bp, Artificial Sequence
  Oligonucleotide for detection of SNP TSC0036625
ttttttggtagag

SEQ ID NO: 145444 - DNA, 13 bp, Artificial Sequence
  Oligonucleotide for detection of SNP TSC0036625
ctctaccaaaaaa

SEQ ID NO: 145445 - DNA, 13 bp, Artificial Sequence
  Oligonucleotide for detection of SNP TSC0036625
tttttcggtagag

SEQ ID NO: 145446 - DNA, 13 bp, Artificial Sequence
  Oligonucleotide for detection of SNP TSC0036625
ctctaccgaaaaa

SEQ ID NO: 145447 - DNA, 13 bp, Artificial Sequence
  Oligonucleotide for detection of SNP TSC0036625
ttttatggagggg

SEQ ID NO: 145448 - DNA, 13 bp, Artificial Sequence
  Oligonucleotide for detection of SNP TSC0036625
cccctccataaaa

SEQ ID NO: 145449 - DNA, 13 bp, Artificial Sequence
  Oligonucleotide for detection of SNP TSC0036625
ttttattgagggg

SEQ ID NO: 145450 - DNA, 13 bp, Artificial Sequence
  Oligonucleotide for detection of SNP TSC0036625
cccctcaataaaa

SEQ ID NO: 145451 - DNA, 13 bp, Artificial Sequence
  Oligonucleotide for detection of SNP TSC0036625
ttttacggagggg

SEQ ID NO: 145452 - DNA, 13 bp, Artificial Sequence
  Oligonucleotide for detection of SNP TSC0036625
cccctccgtaaaa

SEQ ID NO: 145453 - DNA, 13 bp, Artificial Sequence
  Oligonucleotide for detection of SNP TSC0036625
ttttatcgagggg

SEQ ID NO: 145454 - DNA, 13 bp, Artificial Sequence
  Oligonucleotide for detection of SNP TSC0036625
cccctcgataaaa

SEQ ID NO: 145455 - DNA, 13 bp, Artificial Sequence
  Oligonucleotide for detection of SNP TSC0036626
gttataataaagt

SEQ ID NO: 145456 - DNA, 13 bp, Artificial Sequence
  Oligonucleotide for detection of SNP TSC0036626
actttattataac

SEQ ID NO: 145457 - DNA, 13 bp, Artificial Sequence
  Oligonucleotide for detection of SNP TSC0036626
gttatagtaaagt

SEQ ID NO: 145458 - DNA, 13 bp, Artificial Sequence
  Oligonucleotide for detection of SNP TSC0036626
actttactataac

SEQ ID NO: 145459 - DNA, 13 bp, Artificial Sequence
  Oligonucleotide for detection of SNP TSC0036627
aagtgtggaattt

SEQ ID NO: 145460 - DNA, 13 bp, Artificial Sequence
  Oligonucleotide for detection of SNP TSC0036627
aaattccacactt

SEQ ID NO: 145461 - DNA, 13 bp, Artificial Sequence
  Oligonucleotide for detection of SNP TSC0036627
aagtgtagaattt

SEQ ID NO: 145462 - DNA, 13 bp, Artificial Sequence
  Oligonucleotide for detection of SNP TSC0036627
aaattctacactt

SEQ ID NO: 145463 - DNA, 13 bp, Artificial Sequence
  Oligonucleotide for detection of SNP TSC0036628
taagttgtgttgy

SEQ ID NO: 145464 - DNA, 13 bp, Artificial Sequence
  Oligonucleotide for detection of SNP TSC0036628
rcaacacaactta

SEQ ID NO: 145465 - DNA, 13 bp, Artificial Sequence
  Oligonucleotide for detection of SNP TSC0036628
taagttatgttgy

SEQ ID NO: 145466 - DNA, 13 bp, Artificial Sequence
  Oligonucleotide for detection of SNP TSC0036628
rcaacataactta

SEQ ID NO: 145467 - DNA, 13 bp, Artificial Sequence
  Oligonucleotide for detection of SNP TSC0036629
tatagagtattga

SEQ ID NO: 145468 - DNA, 13 bp, Artificial Sequence
  Oligonucleotide for detection of SNP TSC0036629
tcaatactctata

SEQ ID NO: 145469 - DNA, 13 bp, Artificial Sequence
  Oligonucleotide for detection of SNP TSC0036629
tatagaatattga

SEQ ID NO: 145470 - DNA, 13 bp, Artificial Sequence
  Oligonucleotide for detection of SNP TSC0036629
tcaatattctata

SEQ ID NO: 145471 - DNA, 13 bp, Artificial Sequence
  Oligonucleotide for detection of SNP TSC0036632
gtgtataagtagt

SEQ ID NO: 145472 - DNA, 13 bp, Artificial Sequence
  Oligonucleotide for detection of SNP TSC0036632
actacttatacac

SEQ ID NO: 145473 - DNA, 13 bp, Artificial Sequence
  Oligonucleotide for detection of SNP TSC0036632
gtgtattagtagt

SEQ ID NO: 145474 - DNA, 13 bp, Artificial Sequence
  Oligonucleotide for detection of SNP TSC0036632
actactaatacac

SEQ ID NO: 145475 - DNA, 13 bp, Artificial Sequence
  Oligonucleotide for detection of SNP TSC0036632
attgtttgtgtay

SEQ ID NO: 145476 - DNA, 13 bp, Artificial Sequence
  Oligonucleotide for detection of SNP TSC0036632
rtacacaaacaat

SEQ ID NO: 145477 - DNA, 13 bp, Artificial Sequence
  Oligonucleotide for detection of SNP TSC0036632
attgttggtgtay

SEQ ID NO: 145478 - DNA, 13 bp, Artificial Sequence
  Oligonucleotide for detection of SNP TSC0036632
rtacaccaacaat

SEQ ID NO: 145479 - DNA, 13 bp, Artificial Sequence
  Oligonucleotide for detection of SNP TSC0036633
gtgtgttgagtay

SEQ ID NO: 145480 - DNA, 13 bp, Artificial Sequence
  Oligonucleotide for detection of SNP TSC0036633
rtactcaacacac

SEQ ID NO: 145481 - DNA, 13 bp, Artificial Sequence
  Oligonucleotide for detection of SNP TSC0036633
gtgcgttgagtay

SEQ ID NO: 145482 - DNA, 13 bp, Artificial Sequence
  Oligonucleotide for detection of SNP TSC0036633
rtactcaacgcac

SEQ ID NO: 145483 - DNA, 13 bp, Artificial Sequence
  Oligonucleotide for detection of SNP TSC0036633
gtgtgtcgagtay

SEQ ID NO: 145484 - DNA, 13 bp, Artificial Sequence
  Oligonucleotide for detection of SNP TSC0036633
rtactcgacacac

SEQ ID NO: 145485 - DNA, 13 bp, Artificial Sequence
  Oligonucleotide for detection of SNP TSC0036633
gtgcgtcgagtay

SEQ ID NO: 145486 - DNA, 13 bp, Artificial Sequence
  Oligonucleotide for detection of SNP TSC0036633
rtactcgacgcac

SEQ ID NO: 145487 - DNA, 13 bp, Artificial Sequence
  Oligonucleotide for detection of SNP TSC0036633
gtgtttggtgtay

SEQ ID NO: 145488 - DNA, 13 bp, Artificial Sequence
  Oligonucleotide for detection of SNP TSC0036633
rtacaccaaacac

SEQ ID NO: 145489 - DNA, 13 bp, Artificial Sequence
  Oligonucleotide for detection of SNP TSC0036633
gtgtttagtgtay

SEQ ID NO: 145490 - DNA, 13 bp, Artificial Sequence
  Oligonucleotide for detection of SNP TSC0036633
rtacactaaacac

SEQ ID NO: 145491 - DNA, 13 bp, Artificial Sequence
  Oligonucleotide for detection of SNP TSC0036633
gtgttcggtgtay

SEQ ID NO: 145492 - DNA, 13 bp, Artificial Sequence
  Oligonucleotide for detection of SNP TSC0036633
rtacaccgaacac

SEQ ID NO: 145493 - DNA, 13 bp, Artificial Sequence
  Oligonucleotide for detection of SNP TSC0036633
gtgtttagcgtay

SEQ ID NO: 145494 - DNA, 13 bp, Artificial Sequence
  Oligonucleotide for detection of SNP TSC0036633
rtacgctaaacac

SEQ ID NO: 145495 - DNA, 13 bp, Artificial Sequence
  Oligonucleotide for detection of SNP TSC0036633
gtgtttggcgtay

SEQ ID NO: 145496 - DNA, 13 bp, Artificial Sequence
  Oligonucleotide for detection of SNP TSC0036633
rtacgccaaacac

SEQ ID NO: 145497 - DNA, 13 bp, Artificial Sequence
  Oligonucleotide for detection of SNP TSC0036633
gtgttcggcgtay

SEQ ID NO: 145498 - DNA, 13 bp, Artificial Sequence
  Oligonucleotide for detection of SNP TSC0036633
rtacgccgaacac

SEQ ID NO: 145499 - DNA, 13 bp, Artificial Sequence
  Oligonucleotide for detection of SNP TSC0036634
gttgttagggagy

SEQ ID NO: 145500 - DNA, 13 bp, Artificial Sequence
  Oligonucleotide for detection of SNP TSC0036634
rctccctaacaac

SEQ ID NO: 145501 - DNA, 13 bp, Artificial Sequence
  Oligonucleotide for detection of SNP TSC0036634
gttgttggggagy

SEQ ID NO: 145502 - DNA, 13 bp, Artificial Sequence
  Oligonucleotide for detection of SNP TSC0036634
rctccccaacaac

SEQ ID NO: 145503 - DNA, 13 bp, Artificial Sequence
  Oligonucleotide for detection of SNP TSC0036634
gttgtcggggagy

SEQ ID NO: 145504 - DNA, 13 bp, Artificial Sequence
  Oligonucleotide for detection of SNP TSC0036634
rctccccgacaac

SEQ ID NO: 145505 - DNA, 13 bp, Artificial Sequence
  Oligonucleotide for detection of SNP TSC0036634
gttttttggtagy

SEQ ID NO: 145506 - DNA, 13 bp, Artificial Sequence
  Oligonucleotide for detection of SNP TSC0036634
rctaccaaaaaac

SEQ ID NO: 145507 - DNA, 13 bp, Artificial Sequence
  Oligonucleotide for detection of SNP TSC0036634
gtttttcggtagy

SEQ ID NO: 145508 - DNA, 13 bp, Artificial Sequence
  Oligonucleotide for detection of SNP TSC0036634
rctaccgaaaaac

SEQ ID NO: 145509 - DNA, 13 bp, Artificial Sequence
  Oligonucleotide for detection of SNP TSC0036636
tggatgagagtgt

SEQ ID NO: 145510 - DNA, 13 bp, Artificial Sequence
  Oligonucleotide for detection of SNP TSC0036636
acactctcatcca

SEQ ID NO: 145511 - DNA, 13 bp, Artificial Sequence
  Oligonucleotide for detection of SNP TSC0036636
tggatgggagtgt

SEQ ID NO: 145512 - DNA, 13 bp, Artificial Sequence
  Oligonucleotide for detection of SNP TSC0036636
acactcccatcca

SEQ ID NO: 145513 - DNA, 13 bp, Artificial Sequence
  Oligonucleotide for detection of SNP TSC0036638
aggtaggagaaay

SEQ ID NO: 145514 - DNA, 13 bp, Artificial Sequence
  Oligonucleotide for detection of SNP TSC0036638
rtttctcctacct

SEQ ID NO: 145515 - DNA, 13 bp, Artificial Sequence
  Oligonucleotide for detection of SNP TSC0036638
aggtagaagaaay

SEQ ID NO: 145516 - DNA, 13 bp, Artificial Sequence
  Oligonucleotide for detection of SNP TSC0036638
rtttcttctacct

SEQ ID NO: 145517 - DNA, 13 bp, Artificial Sequence
  Oligonucleotide for detection of SNP TSC0036641
attttagtgatag

SEQ ID NO: 145518 - DNA, 13 bp, Artificial Sequence
  Oligonucleotide for detection of SNP TSC0036641
ctatcactaaaat

SEQ ID NO: 145519 - DNA, 13 bp, Artificial Sequence
  Oligonucleotide for detection of SNP TSC0036641
attttattgatag

SEQ ID NO: 145520 - DNA, 13 bp, Artificial Sequence
  Oligonucleotide for detection of SNP TSC0036641
ctatcaataaaat

SEQ ID NO: 145521 - DNA, 13 bp, Artificial Sequence
  Oligonucleotide for detection of SNP TSC0036642
ttgtaggttttga

SEQ ID NO: 145522 - DNA, 13 bp, Artificial Sequence
  Oligonucleotide for detection of SNP TSC0036642
tcaaaacctacaa

SEQ ID NO: 145523 - DNA, 13 bp, Artificial Sequence
  Oligonucleotide for detection of SNP TSC0036642
ttgtagattttga

SEQ ID NO: 145524 - DNA, 13 bp, Artificial Sequence
  Oligonucleotide for detection of SNP TSC0036642
tcaaaatctacaa

SEQ ID NO: 145525 - DNA, 13 bp, Artificial Sequence
  Oligonucleotide for detection of SNP TSC0036643
ttttttgttaggg

SEQ ID NO: 145526 - DNA, 13 bp, Artificial Sequence
  Oligonucleotide for detection of SNP TSC0036643
ccctaacaaaaaa

SEQ ID NO: 145527 - DNA, 13 bp, Artificial Sequence
  Oligonucleotide for detection of SNP TSC0036643
ttttttattaggg

SEQ ID NO: 145528 - DNA, 13 bp, Artificial Sequence
  Oligonucleotide for detection of SNP TSC0036643
ccctaataaaaaa

SEQ ID NO: 145529 - DNA, 13 bp, Artificial Sequence
  Oligonucleotide for detection of SNP TSC0036643
tttttcgttaggg

SEQ ID NO: 145530 - DNA, 13 bp, Artificial Sequence
  Oligonucleotide for detection of SNP TSC0036643
ccctaacgaaaaa

SEQ ID NO: 145531 - DNA, 13 bp, Artificial Sequence
  Oligonucleotide for detection of SNP TSC0036647
tgtggtatggtta

SEQ ID NO: 145532 - DNA, 13 bp, Artificial Sequence
  Oligonucleotide for detection of SNP TSC0036647
taaccataccaca

SEQ ID NO: 145533 - DNA, 13 bp, Artificial Sequence
  Oligonucleotide for detection of SNP TSC0036647
tgtggtttggtta

SEQ ID NO: 145534 - DNA, 13 bp, Artificial Sequence
  Oligonucleotide for detection of SNP TSC0036647
taaccaaaccaca

SEQ ID NO: 145535 - DNA, 13 bp, Artificial Sequence
  Oligonucleotide for detection of SNP TSC0036647
tggttatgttata

SEQ ID NO: 145536 - DNA, 13 bp, Artificial Sequence
  Oligonucleotide for detection of SNP TSC0036647
tataacataacca

SEQ ID NO: 145537 - DNA, 13 bp, Artificial Sequence
  Oligonucleotide for detection of SNP TSC0036647
tggttaagttata

SEQ ID NO: 145538 - DNA, 13 bp, Artificial Sequence
  Oligonucleotide for detection of SNP TSC0036647
tataacttaacca

SEQ ID NO: 145539 - DNA, 13 bp, Artificial Sequence
  Oligonucleotide for detection of SNP TSC0036648
aaagatggatagy

SEQ ID NO: 145540 - DNA, 13 bp, Artificial Sequence
  Oligonucleotide for detection of SNP TSC0036648
rctatccatcttt

SEQ ID NO: 145541 - DNA, 13 bp, Artificial Sequence
  Oligonucleotide for detection of SNP TSC0036648
aaagatagatagy

SEQ ID NO: 145542 - DNA, 13 bp, Artificial Sequence
  Oligonucleotide for detection of SNP TSC0036648
rctatctatcttt

SEQ ID NO: 145543 - DNA, 13 bp, Artificial Sequence
  Oligonucleotide for detection of SNP TSC0036649
tgtaatgagaagt

SEQ ID NO: 145544 - DNA, 13 bp, Artificial Sequence
  Oligonucleotide for detection of SNP TSC0036649
acttctcattaca

SEQ ID NO: 145545 - DNA, 13 bp, Artificial Sequence
  Oligonucleotide for detection of SNP TSC0036649
tgtaataagaagt

SEQ ID NO: 145546 - DNA, 13 bp, Artificial Sequence
  Oligonucleotide for detection of SNP TSC0036649
acttcttattaca

SEQ ID NO: 145547 - DNA, 13 bp, Artificial Sequence
  Oligonucleotide for detection of SNP TSC0036653
agttgtatttgaa

SEQ ID NO: 145548 - DNA, 13 bp, Artificial Sequence
  Oligonucleotide for detection of SNP TSC0036653
ttcaaatacaact

SEQ ID NO: 145549 - DNA, 13 bp, Artificial Sequence
  Oligonucleotide for detection of SNP TSC0036653
agttgtttttgaa

SEQ ID NO: 145550 - DNA, 13 bp, Artificial Sequence
  Oligonucleotide for detection of SNP TSC0036653
ttcaaaaacaact

SEQ ID NO: 145551 - DNA, 13 bp, Artificial Sequence
  Oligonucleotide for detection of SNP TSC0036653
tttaggtgtagtt

SEQ ID NO: 145552 - DNA, 13 bp, Artificial Sequence
  Oligonucleotide for detection of SNP TSC0036653
aactacacctaaa

SEQ ID NO: 145553 - DNA, 13 bp, Artificial Sequence
  Oligonucleotide for detection of SNP TSC0036653
tttaggggtagtt

SEQ ID NO: 145554 - DNA, 13 bp, Artificial Sequence
  Oligonucleotide for detection of SNP TSC0036653
aactacccctaaa

SEQ ID NO: 145555 - DNA, 13 bp, Artificial Sequence
  Oligonucleotide for detection of SNP TSC0036654
ttagttaaaatay

SEQ ID NO: 145556 - DNA, 13 bp, Artificial Sequence
  Oligonucleotide for detection of SNP TSC0036654
rtattttaactaa

SEQ ID NO: 145557 - DNA, 13 bp, Artificial Sequence
  Oligonucleotide for detection of SNP TSC0036654
ttagttgaaatay

SEQ ID NO: 145558 - DNA, 13 bp, Artificial Sequence
  Oligonucleotide for detection of SNP TSC0036654
rtatttcaactaa

SEQ ID NO: 145559 - DNA, 13 bp, Artificial Sequence
  Oligonucleotide for detection of SNP TSC0036654
ttagtcgaaatay

SEQ ID NO: 145560 - DNA, 13 bp, Artificial Sequence
  Oligonucleotide for detection of SNP TSC0036654
rtatttcgactaa

SEQ ID NO: 145561 - DNA, 13 bp, Artificial Sequence
  Oligonucleotide for detection of SNP TSC0036654
gtgttttggttgg

SEQ ID NO: 145562 - DNA, 13 bp, Artificial Sequence
  Oligonucleotide for detection of SNP TSC0036654
ccaaccaaaacac

SEQ ID NO: 145563 - DNA, 13 bp, Artificial Sequence
  Oligonucleotide for detection of SNP TSC0036654
gtgtttcggttgg

SEQ ID NO: 145564 - DNA, 13 bp, Artificial Sequence
  Oligonucleotide for detection of SNP TSC0036654
ccaaccgaaacac

SEQ ID NO: 145565 - DNA, 13 bp, Artificial Sequence
  Oligonucleotide for detection of SNP TSC0036656
tatgttatttttt

SEQ ID NO: 145566 - DNA, 13 bp, Artificial Sequence
  Oligonucleotide for detection of SNP TSC0036656
aaaaaataacata

SEQ ID NO: 145567 - DNA, 13 bp, Artificial Sequence
  Oligonucleotide for detection of SNP TSC0036660
gaggtagatttga

SEQ ID NO: 145568 - DNA, 13 bp, Artificial Sequence
  Oligonucleotide for detection of SNP TSC0036660
tcaaatctacctc

SEQ ID NO: 145569 - DNA, 13 bp, Artificial Sequence
  Oligonucleotide for detection of SNP TSC0036660
gaggtaaatttga

SEQ ID NO: 145570 - DNA, 13 bp, Artificial Sequence
  Oligonucleotide for detection of SNP TSC0036660
tcaaatttacctc

SEQ ID NO: 145571 - DNA, 13 bp, Artificial Sequence
  Oligonucleotide for detection of SNP TSC0036661
ttttttatttgat

SEQ ID NO: 145572 - DNA, 13 bp, Artificial Sequence
  Oligonucleotide for detection of SNP TSC0036661
atcaaataaaaaa

SEQ ID NO: 145573 - DNA, 13 bp, Artificial Sequence
  Oligonucleotide for detection of SNP TSC0036662
tgtattgtaggat

SEQ ID NO: 145574 - DNA, 13 bp, Artificial Sequence
  Oligonucleotide for detection of SNP TSC0036662
atcctacaataca

SEQ ID NO: 145575 - DNA, 13 bp, Artificial Sequence
  Oligonucleotide for detection of SNP TSC0036662
tgtattataggat

SEQ ID NO: 145576 - DNA, 13 bp, Artificial Sequence
  Oligonucleotide for detection of SNP TSC0036662
atcctataataca

SEQ ID NO: 145577 - DNA, 13 bp, Artificial Sequence
  Oligonucleotide for detection of SNP TSC0036664
ttcgttggttgtt

SEQ ID NO: 145578 - DNA, 13 bp, Artificial Sequence
  Oligonucleotide for detection of SNP TSC0036664
aacaaccaacgaa

SEQ ID NO: 145579 - DNA, 13 bp, Artificial Sequence
  Oligonucleotide for detection of SNP TSC0036664
ttcgtttgttgtt

SEQ ID NO: 145580 - DNA, 13 bp, Artificial Sequence
  Oligonucleotide for detection of SNP TSC0036664
aacaacaaacgaa

SEQ ID NO: 145581 - DNA, 13 bp, Artificial Sequence
  Oligonucleotide for detection of SNP TSC0036664
tttgtcggttgtt

SEQ ID NO: 145582 - DNA, 13 bp, Artificial Sequence
  Oligonucleotide for detection of SNP TSC0036664
aacaaccgacaaa

SEQ ID NO: 145583 - DNA, 13 bp, Artificial Sequence
  Oligonucleotide for detection of SNP TSC0036664
ttcgtcggttgtt

SEQ ID NO: 145584 - DNA, 13 bp, Artificial Sequence
  Oligonucleotide for detection of SNP TSC0036664
aacaaccgacgaa

SEQ ID NO: 145585 - DNA, 13 bp, Artificial Sequence
  Oligonucleotide for detection of SNP TSC0036664
agtagttggtgag

SEQ ID NO: 145586 - DNA, 13 bp, Artificial Sequence
  Oligonucleotide for detection of SNP TSC0036664
ctcaccaactact

SEQ ID NO: 145587 - DNA, 13 bp, Artificial Sequence
  Oligonucleotide for detection of SNP TSC0036664
agtagtaggtgag

SEQ ID NO: 145588 - DNA, 13 bp, Artificial Sequence
  Oligonucleotide for detection of SNP TSC0036664
ctcacctactact

SEQ ID NO: 145589 - DNA, 13 bp, Artificial Sequence
  Oligonucleotide for detection of SNP TSC0036664
agtagtcggtgag

SEQ ID NO: 145590 - DNA, 13 bp, Artificial Sequence
  Oligonucleotide for detection of SNP TSC0036664
ctcaccgactact

SEQ ID NO: 145591 - DNA, 13 bp, Artificial Sequence
  Oligonucleotide for detection of SNP TSC0036664
agtagtaggcgag

SEQ ID NO: 145592 - DNA, 13 bp, Artificial Sequence
  Oligonucleotide for detection of SNP TSC0036664
ctcgcctactact

SEQ ID NO: 145593 - DNA, 13 bp, Artificial Sequence
  Oligonucleotide for detection of SNP TSC0036664
agtagttggcgag

SEQ ID NO: 145594 - DNA, 13 bp, Artificial Sequence
  Oligonucleotide for detection of SNP TSC0036664
ctcgccaactact

SEQ ID NO: 145595 - DNA, 13 bp, Artificial Sequence
  Oligonucleotide for detection of SNP TSC0036664
agtagtcggcgag

SEQ ID NO: 145596 - DNA, 13 bp, Artificial Sequence
  Oligonucleotide for detection of SNP TSC0036664
ctcgccgactact

SEQ ID NO: 145597 - DNA, 13 bp, Artificial Sequence
  Oligonucleotide for detection of SNP TSC0036665
gaaaatgtatagy

SEQ ID NO: 145598 - DNA, 13 bp, Artificial Sequence
  Oligonucleotide for detection of SNP TSC0036665
rctatacattttc

SEQ ID NO: 145599 - DNA, 13 bp, Artificial Sequence
  Oligonucleotide for detection of SNP TSC0036665
gaaaatttatagy

SEQ ID NO: 145600 - DNA, 13 bp, Artificial Sequence
  Oligonucleotide for detection of SNP TSC0036665
rctataaattttc

SEQ ID NO: 145601 - DNA, 13 bp, Artificial Sequence
  Oligonucleotide for detection of SNP TSC0036665
gttatgtatttty

SEQ ID NO: 145602 - DNA, 13 bp, Artificial Sequence
  Oligonucleotide for detection of SNP TSC0036665
raaaatacataac

SEQ ID NO: 145603 - DNA, 13 bp, Artificial Sequence
  Oligonucleotide for detection of SNP TSC0036665
gttatgaatttty

SEQ ID NO: 145604 - DNA, 13 bp, Artificial Sequence
  Oligonucleotide for detection of SNP TSC0036665
raaaattcataac

SEQ ID NO: 145605 - DNA, 13 bp, Artificial Sequence
  Oligonucleotide for detection of SNP TSC0036666
tgtagtaagttaa

SEQ ID NO: 145606 - DNA, 13 bp, Artificial Sequence
  Oligonucleotide for detection of SNP TSC0036666
ttaacttactaca

SEQ ID NO: 145607 - DNA, 13 bp, Artificial Sequence
  Oligonucleotide for detection of SNP TSC0036667
tttatcgtttagg

SEQ ID NO: 145608 - DNA, 13 bp, Artificial Sequence
  Oligonucleotide for detection of SNP TSC0036667
cctaaacgataaa

SEQ ID NO: 145609 - DNA, 13 bp, Artificial Sequence
  Oligonucleotide for detection of SNP TSC0036668
gattatattattt

SEQ ID NO: 145610 - DNA, 13 bp, Artificial Sequence
  Oligonucleotide for detection of SNP TSC0036668
aaataatataatc

SEQ ID NO: 145611 - DNA, 13 bp, Artificial Sequence
  Oligonucleotide for detection of SNP TSC0036672
agttaagtagtat

SEQ ID NO: 145612 - DNA, 13 bp, Artificial Sequence
  Oligonucleotide for detection of SNP TSC0036672
atactacttaact

SEQ ID NO: 145613 - DNA, 13 bp, Artificial Sequence
  Oligonucleotide for detection of SNP TSC0036672
agttaattagtat

SEQ ID NO: 145614 - DNA, 13 bp, Artificial Sequence
  Oligonucleotide for detection of SNP TSC0036672
atactaattaact

SEQ ID NO: 145615 - DNA, 13 bp, Artificial Sequence
  Oligonucleotide for detection of SNP TSC0036672
atgttgtttgatt

SEQ ID NO: 145616 - DNA, 13 bp, Artificial Sequence
  Oligonucleotide for detection of SNP TSC0036672
aatcaaacaacat

SEQ ID NO: 145617 - DNA, 13 bp, Artificial Sequence
  Oligonucleotide for detection of SNP TSC0036672
atgttgattgatt

SEQ ID NO: 145618 - DNA, 13 bp, Artificial Sequence
  Oligonucleotide for detection of SNP TSC0036672
aatcaatcaacat

SEQ ID NO: 145619 - DNA, 13 bp, Artificial Sequence
  Oligonucleotide for detection of SNP TSC0036674
ttatgtagttggg

SEQ ID NO: 145620 - DNA, 13 bp, Artificial Sequence
  Oligonucleotide for detection of SNP TSC0036674
cccaactacataa

SEQ ID NO: 145621 - DNA, 13 bp, Artificial Sequence
  Oligonucleotide for detection of SNP TSC0036674
ttatgtggttggg

SEQ ID NO: 145622 - DNA, 13 bp, Artificial Sequence
  Oligonucleotide for detection of SNP TSC0036674
cccaaccacataa

SEQ ID NO: 145623 - DNA, 13 bp, Artificial Sequence
  Oligonucleotide for detection of SNP TSC0036674
ttacgtagttggg

SEQ ID NO: 145624 - DNA, 13 bp, Artificial Sequence
  Oligonucleotide for detection of SNP TSC0036674
cccaactacgtaa

SEQ ID NO: 145625 - DNA, 13 bp, Artificial Sequence
  Oligonucleotide for detection of SNP TSC0036674
ttacgtggttggg

SEQ ID NO: 145626 - DNA, 13 bp, Artificial Sequence
  Oligonucleotide for detection of SNP TSC0036674
cccaaccacgtaa

SEQ ID NO: 145627 - DNA, 13 bp, Artificial Sequence
  Oligonucleotide for detection of SNP TSC0036674
ttatgcggttggg

SEQ ID NO: 145628 - DNA, 13 bp, Artificial Sequence
  Oligonucleotide for detection of SNP TSC0036674
cccaaccgcataa

SEQ ID NO: 145629 - DNA, 13 bp, Artificial Sequence
  Oligonucleotide for detection of SNP TSC0036674
ttacgcggttggg

SEQ ID NO: 145630 - DNA, 13 bp, Artificial Sequence
  Oligonucleotide for detection of SNP TSC0036674
cccaaccgcgtaa

SEQ ID NO: 145631 - DNA, 13 bp, Artificial Sequence
  Oligonucleotide for detection of SNP TSC0036674
tttagttgtgtgg

SEQ ID NO: 145632 - DNA, 13 bp, Artificial Sequence
  Oligonucleotide for detection of SNP TSC0036674
ccacacaactaaa

SEQ ID NO: 145633 - DNA, 13 bp, Artificial Sequence
  Oligonucleotide for detection of SNP TSC0036674
tttagttgcgtgg

SEQ ID NO: 145634 - DNA, 13 bp, Artificial Sequence
  Oligonucleotide for detection of SNP TSC0036674
ccacgcaactaaa

SEQ ID NO: 145635 - DNA, 13 bp, Artificial Sequence
  Oligonucleotide for detection of SNP TSC0036674
tttagtcgtgtgg

SEQ ID NO: 145636 - DNA, 13 bp, Artificial Sequence
  Oligonucleotide for detection of SNP TSC0036674
ccacacgactaaa

SEQ ID NO: 145637 - DNA, 13 bp, Artificial Sequence
  Oligonucleotide for detection of SNP TSC0036674
tttagtcgcgtgg

SEQ ID NO: 145638 - DNA, 13 bp, Artificial Sequence
  Oligonucleotide for detection of SNP TSC0036674
ccacgcgactaaa

SEQ ID NO: 145639 - DNA, 13 bp, Artificial Sequence
  Oligonucleotide for detection of SNP TSC0036675
atagaatgtatat

SEQ ID NO: 145640 - DNA, 13 bp, Artificial Sequence
  Oligonucleotide for detection of SNP TSC0036675
atatacattctat

SEQ ID NO: 145641 - DNA, 13 bp, Artificial Sequence
  Oligonucleotide for detection of SNP TSC0036675
atagaacgtatat

SEQ ID NO: 145642 - DNA, 13 bp, Artificial Sequence
  Oligonucleotide for detection of SNP TSC0036675
atatacgttctat

SEQ ID NO: 145643 - DNA, 13 bp, Artificial Sequence
  Oligonucleotide for detection of SNP TSC0036675
atatatgttttat

SEQ ID NO: 145644 - DNA, 13 bp, Artificial Sequence
  Oligonucleotide for detection of SNP TSC0036675
ataaaacatatat

SEQ ID NO: 145645 - DNA, 13 bp, Artificial Sequence
  Oligonucleotide for detection of SNP TSC0036675
atatacgttttat

SEQ ID NO: 145646 - DNA, 13 bp, Artificial Sequence
  Oligonucleotide for detection of SNP TSC0036675
ataaaacgtatat

SEQ ID NO: 145647 - DNA, 13 bp, Artificial Sequence
  Oligonucleotide for detection of SNP TSC0036677
attttaggattga

SEQ ID NO: 145648 - DNA, 13 bp, Artificial Sequence
  Oligonucleotide for detection of SNP TSC0036677
tcaatcctaaaat

SEQ ID NO: 145649 - DNA, 13 bp, Artificial Sequence
  Oligonucleotide for detection of SNP TSC0036677
attttaagattga

SEQ ID NO: 145650 - DNA, 13 bp, Artificial Sequence
  Oligonucleotide for detection of SNP TSC0036677
tcaatcttaaaat

SEQ ID NO: 145651 - DNA, 13 bp, Artificial Sequence
  Oligonucleotide for detection of SNP TSC0036682
gaaagagaaggag

SEQ ID NO: 145652 - DNA, 13 bp, Artificial Sequence
  Oligonucleotide for detection of SNP TSC0036682
ctccttctctttc

SEQ ID NO: 145653 - DNA, 13 bp, Artificial Sequence
  Oligonucleotide for detection of SNP TSC0036682
gaaagataaggag

SEQ ID NO: 145654 - DNA, 13 bp, Artificial Sequence
  Oligonucleotide for detection of SNP TSC0036682
ctccttatctttc

SEQ ID NO: 145655 - DNA, 13 bp, Artificial Sequence
  Oligonucleotide for detection of SNP TSC0036684
ttatgaatttttg

SEQ ID NO: 145656 - DNA, 13 bp, Artificial Sequence
  Oligonucleotide for detection of SNP TSC0036684
caaaaattcataa

SEQ ID NO: 145657 - DNA, 13 bp, Artificial Sequence
  Oligonucleotide for detection of SNP TSC0036685
aagatagattttt

SEQ ID NO: 145658 - DNA, 13 bp, Artificial Sequence
  Oligonucleotide for detection of SNP TSC0036685
aaaaatctatctt

SEQ ID NO: 145659 - DNA, 13 bp, Artificial Sequence
  Oligonucleotide for detection of SNP TSC0036685
aagataaattttt

SEQ ID NO: 145660 - DNA, 13 bp, Artificial Sequence
  Oligonucleotide for detection of SNP TSC0036685
aaaaatttatctt

SEQ ID NO: 145661 - DNA, 13 bp, Artificial Sequence
  Oligonucleotide for detection of SNP TSC0036690
tttagaggataga

SEQ ID NO: 145662 - DNA, 13 bp, Artificial Sequence
  Oligonucleotide for detection of SNP TSC0036690
tctatcctctaaa

SEQ ID NO: 145663 - DNA, 13 bp, Artificial Sequence
  Oligonucleotide for detection of SNP TSC0036690
tttagaagataga

SEQ ID NO: 145664 - DNA, 13 bp, Artificial Sequence
  Oligonucleotide for detection of SNP TSC0036690
tctatcttctaaa

SEQ ID NO: 145665 - DNA, 13 bp, Artificial Sequence
  Oligonucleotide for detection of SNP TSC0036691
ataaatatttaaa

SEQ ID NO: 145666 - DNA, 13 bp, Artificial Sequence
  Oligonucleotide for detection of SNP TSC0036691
tttaaatatttat

SEQ ID NO: 145667 - DNA, 13 bp, Artificial Sequence
  Oligonucleotide for detection of SNP TSC0036691
ataaatgtttaaa

SEQ ID NO: 145668 - DNA, 13 bp, Artificial Sequence
  Oligonucleotide for detection of SNP TSC0036691
tttaaacatttat

SEQ ID NO: 145669 - DNA, 13 bp, Artificial Sequence
  Oligonucleotide for detection of SNP TSC0036692
gagggaagggtag

SEQ ID NO: 145670 - DNA, 13 bp, Artificial Sequence
  Oligonucleotide for detection of SNP TSC0036692
ctacccttccctc

SEQ ID NO: 145671 - DNA, 13 bp, Artificial Sequence
  Oligonucleotide for detection of SNP TSC0036692
gagggaggggtag

SEQ ID NO: 145672 - DNA, 13 bp, Artificial Sequence
  Oligonucleotide for detection of SNP TSC0036692
ctacccctccctc

SEQ ID NO: 145673 - DNA, 13 bp, Artificial Sequence
  Oligonucleotide for detection of SNP TSC0036693
aaatttttagtty

SEQ ID NO: 145674 - DNA, 13 bp, Artificial Sequence
  Oligonucleotide for detection of SNP TSC0036693
raactaaaaattt

SEQ ID NO: 145675 - DNA, 13 bp, Artificial Sequence
  Oligonucleotide for detection of SNP TSC0036693
aaatttgtagtty

SEQ ID NO: 145676 - DNA, 13 bp, Artificial Sequence
  Oligonucleotide for detection of SNP TSC0036693
raactacaaattt

SEQ ID NO: 145677 - DNA, 13 bp, Artificial Sequence
  Oligonucleotide for detection of SNP TSC0036693
gaattagagattt

SEQ ID NO: 145678 - DNA, 13 bp, Artificial Sequence
  Oligonucleotide for detection of SNP TSC0036693
aaatctctaattc

SEQ ID NO: 145679 - DNA, 13 bp, Artificial Sequence
  Oligonucleotide for detection of SNP TSC0036693
gaattatagattt

SEQ ID NO: 145680 - DNA, 13 bp, Artificial Sequence
  Oligonucleotide for detection of SNP TSC0036693
aaatctataattc

SEQ ID NO: 145681 - DNA, 13 bp, Artificial Sequence
  Oligonucleotide for detection of SNP TSC0036694
tgtttaagttttg

SEQ ID NO: 145682 - DNA, 13 bp, Artificial Sequence
  Oligonucleotide for detection of SNP TSC0036694
caaaacttaaaca

SEQ ID NO: 145683 - DNA, 13 bp, Artificial Sequence
  Oligonucleotide for detection of SNP TSC0036694
tgtttaggttttg

SEQ ID NO: 145684 - DNA, 13 bp, Artificial Sequence
  Oligonucleotide for detection of SNP TSC0036694
caaaacctaaaca

SEQ ID NO: 145685 - DNA, 13 bp, Artificial Sequence
  Oligonucleotide for detection of SNP TSC0036697
tttgttgagataa

SEQ ID NO: 145686 - DNA, 13 bp, Artificial Sequence
  Oligonucleotide for detection of SNP TSC0036697
ttatctcaacaaa

SEQ ID NO: 145687 - DNA, 13 bp, Artificial Sequence
  Oligonucleotide for detection of SNP TSC0036697
tttgttaagataa

SEQ ID NO: 145688 - DNA, 13 bp, Artificial Sequence
  Oligonucleotide for detection of SNP TSC0036697
ttatcttaacaaa

SEQ ID NO: 145689 - DNA, 13 bp, Artificial Sequence
  Oligonucleotide for detection of SNP TSC0036698
agaagggaaatta

SEQ ID NO: 145690 - DNA, 13 bp, Artificial Sequence
  Oligonucleotide for detection of SNP TSC0036698
taatttcccttct

SEQ ID NO: 145691 - DNA, 13 bp, Artificial Sequence
  Oligonucleotide for detection of SNP TSC0036698
agaaggtaaatta

SEQ ID NO: 145692 - DNA, 13 bp, Artificial Sequence
  Oligonucleotide for detection of SNP TSC0036698
taatttaccttct

SEQ ID NO: 145693 - DNA, 13 bp, Artificial Sequence
  Oligonucleotide for detection of SNP TSC0036700
tgtttggtagaty

SEQ ID NO: 145694 - DNA, 13 bp, Artificial Sequence
  Oligonucleotide for detection of SNP TSC0036700
ratctaccaaaca

SEQ ID NO: 145695 - DNA, 13 bp, Artificial Sequence
  Oligonucleotide for detection of SNP TSC0036700
tgtttgttagaty

SEQ ID NO: 145696 - DNA, 13 bp, Artificial Sequence
  Oligonucleotide for detection of SNP TSC0036700
ratctaacaaaca

SEQ ID NO: 145697 - DNA, 13 bp, Artificial Sequence
  Oligonucleotide for detection of SNP TSC0036700
ggtttattagata

SEQ ID NO: 145698 - DNA, 13 bp, Artificial Sequence
  Oligonucleotide for detection of SNP TSC0036700
tatctaataaacc

SEQ ID NO: 145699 - DNA, 13 bp, Artificial Sequence
  Oligonucleotide for detection of SNP TSC0036700
ggtttaatagata

SEQ ID NO: 145700 - DNA, 13 bp, Artificial Sequence
  Oligonucleotide for detection of SNP TSC0036700
tatctattaaacc

SEQ ID NO: 145701 - DNA, 13 bp, Artificial Sequence
  Oligonucleotide for detection of SNP TSC0036701
tttggtagatttt

SEQ ID NO: 145702 - DNA, 13 bp, Artificial Sequence
  Oligonucleotide for detection of SNP TSC0036701
aaaatctaccaaa

SEQ ID NO: 145703 - DNA, 13 bp, Artificial Sequence
  Oligonucleotide for detection of SNP TSC0036701
tttggttgatttt

SEQ ID NO: 145704 - DNA, 13 bp, Artificial Sequence
  Oligonucleotide for detection of SNP TSC0036701
aaaatcaaccaaa

SEQ ID NO: 145705 - DNA, 13 bp, Artificial Sequence
  Oligonucleotide for detection of SNP TSC0036701
aaggtttattaga

SEQ ID NO: 145706 - DNA, 13 bp, Artificial Sequence
  Oligonucleotide for detection of SNP TSC0036701
tctaataaacctt

SEQ ID NO: 145707 - DNA, 13 bp, Artificial Sequence
  Oligonucleotide for detection of SNP TSC0036701
aaggttaattaga

SEQ ID NO: 145708 - DNA, 13 bp, Artificial Sequence
  Oligonucleotide for detection of SNP TSC0036701
tctaattaacctt

SEQ ID NO: 145709 - DNA, 13 bp, Artificial Sequence
  Oligonucleotide for detection of SNP TSC0036705
ttagatttagtty

SEQ ID NO: 145710 - DNA, 13 bp, Artificial Sequence
  Oligonucleotide for detection of SNP TSC0036705
raactaaatctaa

SEQ ID NO: 145711 - DNA, 13 bp, Artificial Sequence
  Oligonucleotide for detection of SNP TSC0036705
ttagatgtagtty

SEQ ID NO: 145712 - DNA, 13 bp, Artificial Sequence
  Oligonucleotide for detection of SNP TSC0036705
raactacatctaa

SEQ ID NO: 145713 - DNA, 13 bp, Artificial Sequence
  Oligonucleotide for detection of SNP TSC0036705
gggttagatttaa

SEQ ID NO: 145714 - DNA, 13 bp, Artificial Sequence
  Oligonucleotide for detection of SNP TSC0036705
ttaaatctaaccc

SEQ ID NO: 145715 - DNA, 13 bp, Artificial Sequence
  Oligonucleotide for detection of SNP TSC0036705
gggttatatttaa

SEQ ID NO: 145716 - DNA, 13 bp, Artificial Sequence
  Oligonucleotide for detection of SNP TSC0036705
ttaaatataaccc

SEQ ID NO: 145717 - DNA, 13 bp, Artificial Sequence
  Oligonucleotide for detection of SNP TSC0036706
ttttatgagtaat

SEQ ID NO: 145718 - DNA, 13 bp, Artificial Sequence
  Oligonucleotide for detection of SNP TSC0036706
attactcataaaa

SEQ ID NO: 145719 - DNA, 13 bp, Artificial Sequence
  Oligonucleotide for detection of SNP TSC0036706
ttttattagtaat

SEQ ID NO: 145720 - DNA, 13 bp, Artificial Sequence
  Oligonucleotide for detection of SNP TSC0036706
attactaataaaa

SEQ ID NO: 145721 - DNA, 13 bp, Artificial Sequence
  Oligonucleotide for detection of SNP TSC0036706
attgtttatgaag

SEQ ID NO: 145722 - DNA, 13 bp, Artificial Sequence
  Oligonucleotide for detection of SNP TSC0036706
cttcataaacaat

SEQ ID NO: 145723 - DNA, 13 bp, Artificial Sequence
  Oligonucleotide for detection of SNP TSC0036706
attgttaatgaag

SEQ ID NO: 145724 - DNA, 13 bp, Artificial Sequence
  Oligonucleotide for detection of SNP TSC0036706
cttcattaacaat

SEQ ID NO: 145725 - DNA, 13 bp, Artificial Sequence
  Oligonucleotide for detection of SNP TSC0036707
aaatagttaagaa

SEQ ID NO: 145726 - DNA, 13 bp, Artificial Sequence
  Oligonucleotide for detection of SNP TSC0036707
ttcttaactattt

SEQ ID NO: 145727 - DNA, 13 bp, Artificial Sequence
  Oligonucleotide for detection of SNP TSC0036707
aaatagataagaa

SEQ ID NO: 145728 - DNA, 13 bp, Artificial Sequence
  Oligonucleotide for detection of SNP TSC0036707
ttcttatctattt

SEQ ID NO: 145729 - DNA, 13 bp, Artificial Sequence
  Oligonucleotide for detection of SNP TSC0036709
aagggtgttttta

SEQ ID NO: 145730 - DNA, 13 bp, Artificial Sequence
  Oligonucleotide for detection of SNP TSC0036709
taaaaacaccctt

SEQ ID NO: 145731 - DNA, 13 bp, Artificial Sequence
  Oligonucleotide for detection of SNP TSC0036709
aagggtattttta

SEQ ID NO: 145732 - DNA, 13 bp, Artificial Sequence
  Oligonucleotide for detection of SNP TSC0036709
taaaaataccctt

SEQ ID NO: 145733 - DNA, 13 bp, Artificial Sequence
  Oligonucleotide for detection of SNP TSC0036711
tattttagtagag

SEQ ID NO: 145734 - DNA, 13 bp, Artificial Sequence
  Oligonucleotide for detection of SNP TSC0036711
ctctactaaaata

SEQ ID NO: 145735 - DNA, 13 bp, Artificial Sequence
  Oligonucleotide for detection of SNP TSC0036711
tattttggtagag

SEQ ID NO: 145736 - DNA, 13 bp, Artificial Sequence
  Oligonucleotide for detection of SNP TSC0036711
ctctaccaaaata

SEQ ID NO: 145737 - DNA, 13 bp, Artificial Sequence
  Oligonucleotide for detection of SNP TSC0036711
tatttcggtagag

SEQ ID NO: 145738 - DNA, 13 bp, Artificial Sequence
  Oligonucleotide for detection of SNP TSC0036711
ctctaccgaaata

SEQ ID NO: 145739 - DNA, 13 bp, Artificial Sequence
  Oligonucleotide for detection of SNP TSC0036711
ttttgttgaagta

SEQ ID NO: 145740 - DNA, 13 bp, Artificial Sequence
  Oligonucleotide for detection of SNP TSC0036711
tacttcaacaaaa

SEQ ID NO: 145741 - DNA, 13 bp, Artificial Sequence
  Oligonucleotide for detection of SNP TSC0036711
ttttgtcgaagta

SEQ ID NO: 145742 - DNA, 13 bp, Artificial Sequence
  Oligonucleotide for detection of SNP TSC0036711
tacttcgacaaaa

SEQ ID NO: 145743 - DNA, 13 bp, Artificial Sequence
  Oligonucleotide for detection of SNP TSC0036715
aaaagtgatttgt

SEQ ID NO: 145744 - DNA, 13 bp, Artificial Sequence
  Oligonucleotide for detection of SNP TSC0036715
acaaatcactttt

SEQ ID NO: 145745 - DNA, 13 bp, Artificial Sequence
  Oligonucleotide for detection of SNP TSC0036717
gaaagggtttggt

SEQ ID NO: 145746 - DNA, 13 bp, Artificial Sequence
  Oligonucleotide for detection of SNP TSC0036717
accaaaccctttc

SEQ ID NO: 145747 - DNA, 13 bp, Artificial Sequence
  Oligonucleotide for detection of SNP TSC0036717
gaaaggttttggt

SEQ ID NO: 145748 - DNA, 13 bp, Artificial Sequence
  Oligonucleotide for detection of SNP TSC0036717
accaaaacctttc

SEQ ID NO: 145749 - DNA, 13 bp, Artificial Sequence
  Oligonucleotide for detection of SNP TSC0036717
attaagtttttty

SEQ ID NO: 145750 - DNA, 13 bp, Artificial Sequence
  Oligonucleotide for detection of SNP TSC0036717
raaaaaacttaat

SEQ ID NO: 145751 - DNA, 13 bp, Artificial Sequence
  Oligonucleotide for detection of SNP TSC0036717
attaagattttty

SEQ ID NO: 145752 - DNA, 13 bp, Artificial Sequence
  Oligonucleotide for detection of SNP TSC0036717
raaaaatcttaat

SEQ ID NO: 145753 - DNA, 13 bp, Artificial Sequence
  Oligonucleotide for detection of SNP TSC0036718
tttgagagtattt

SEQ ID NO: 145754 - DNA, 13 bp, Artificial Sequence
  Oligonucleotide for detection of SNP TSC0036718
aaatactctcaaa

SEQ ID NO: 145755 - DNA, 13 bp, Artificial Sequence
  Oligonucleotide for detection of SNP TSC0036718
tttgagtgtattt

SEQ ID NO: 145756 - DNA, 13 bp, Artificial Sequence
  Oligonucleotide for detection of SNP TSC0036718
aaatacactcaaa

SEQ ID NO: 145757 - DNA, 13 bp, Artificial Sequence
  Oligonucleotide for detection of SNP TSC0036718
aaatgtttttagg

SEQ ID NO: 145758 - DNA, 13 bp, Artificial Sequence
  Oligonucleotide for detection of SNP TSC0036718
cctaaaaacattt

SEQ ID NO: 145759 - DNA, 13 bp, Artificial Sequence
  Oligonucleotide for detection of SNP TSC0036718
aaatgtatttagg

SEQ ID NO: 145760 - DNA, 13 bp, Artificial Sequence
  Oligonucleotide for detection of SNP TSC0036718
cctaaatacattt

SEQ ID NO: 145761 - DNA, 13 bp, Artificial Sequence
  Oligonucleotide for detection of SNP TSC0036722
agtaaatgtataa

SEQ ID NO: 145762 - DNA, 13 bp, Artificial Sequence
  Oligonucleotide for detection of SNP TSC0036722
ttatacatttact

SEQ ID NO: 145763 - DNA, 13 bp, Artificial Sequence
  Oligonucleotide for detection of SNP TSC0036722
agtaaacgtataa

SEQ ID NO: 145764 - DNA, 13 bp, Artificial Sequence
  Oligonucleotide for detection of SNP TSC0036722
ttatacgtttact

SEQ ID NO: 145765 - DNA, 13 bp, Artificial Sequence
  Oligonucleotide for detection of SNP TSC0036722
ttgtatgtttatt

SEQ ID NO: 145766 - DNA, 13 bp, Artificial Sequence
  Oligonucleotide for detection of SNP TSC0036722
aataaacatacaa

SEQ ID NO: 145767 - DNA, 13 bp, Artificial Sequence
  Oligonucleotide for detection of SNP TSC0036722
ttgtacgtttatt

SEQ ID NO: 145768 - DNA, 13 bp, Artificial Sequence
  Oligonucleotide for detection of SNP TSC0036722
aataaacgtacaa

SEQ ID NO: 145769 - DNA, 13 bp, Artificial Sequence
  Oligonucleotide for detection of SNP TSC0036723
aagagtatttggt

SEQ ID NO: 145770 - DNA, 13 bp, Artificial Sequence
  Oligonucleotide for detection of SNP TSC0036723
accaaatactctt

SEQ ID NO: 145771 - DNA, 13 bp, Artificial Sequence
  Oligonucleotide for detection of SNP TSC0036723
aagagtgtttggt

SEQ ID NO: 145772 - DNA, 13 bp, Artificial Sequence
  Oligonucleotide for detection of SNP TSC0036723
accaaacactctt

SEQ ID NO: 145773 - DNA, 13 bp, Artificial Sequence
  Oligonucleotide for detection of SNP TSC0036723
aagagcgtttggt

SEQ ID NO: 145774 - DNA, 13 bp, Artificial Sequence
  Oligonucleotide for detection of SNP TSC0036723
accaaacgctctt

SEQ ID NO: 145775 - DNA, 13 bp, Artificial Sequence
  Oligonucleotide for detection of SNP TSC0036723
attaagtgttttt

SEQ ID NO: 145776 - DNA, 13 bp, Artificial Sequence
  Oligonucleotide for detection of SNP TSC0036723
aaaaacacttaat

SEQ ID NO: 145777 - DNA, 13 bp, Artificial Sequence
  Oligonucleotide for detection of SNP TSC0036723
attaagcgttttt

SEQ ID NO: 145778 - DNA, 13 bp, Artificial Sequence
  Oligonucleotide for detection of SNP TSC0036723
aaaaacgcttaat

SEQ ID NO: 145779 - DNA, 13 bp, Artificial Sequence
  Oligonucleotide for detection of SNP TSC0036724
aggtaaatttaga

SEQ ID NO: 145780 - DNA, 13 bp, Artificial Sequence
  Oligonucleotide for detection of SNP TSC0036724
tctaaatttacct

SEQ ID NO: 145781 - DNA, 13 bp, Artificial Sequence
  Oligonucleotide for detection of SNP TSC0036724
aggtaagtttaga

SEQ ID NO: 145782 - DNA, 13 bp, Artificial Sequence
  Oligonucleotide for detection of SNP TSC0036724
tctaaacttacct

SEQ ID NO: 145783 - DNA, 13 bp, Artificial Sequence
  Oligonucleotide for detection of SNP TSC0036727
ttatttggtaaga

SEQ ID NO: 145784 - DNA, 13 bp, Artificial Sequence
  Oligonucleotide for detection of SNP TSC0036727
tcttaccaaataa

SEQ ID NO: 145785 - DNA, 13 bp, Artificial Sequence
  Oligonucleotide for detection of SNP TSC0036727
ttatttagtaaga

SEQ ID NO: 145786 - DNA, 13 bp, Artificial Sequence
  Oligonucleotide for detection of SNP TSC0036727
tcttactaaataa

SEQ ID NO: 145787 - DNA, 13 bp, Artificial Sequence
  Oligonucleotide for detection of SNP TSC0036727
ttattcggtaaga

SEQ ID NO: 145788 - DNA, 13 bp, Artificial Sequence
  Oligonucleotide for detection of SNP TSC0036727
tcttaccgaataa

SEQ ID NO: 145789 - DNA, 13 bp, Artificial Sequence
  Oligonucleotide for detection of SNP TSC0036727
ttttgttgagtaa

SEQ ID NO: 145790 - DNA, 13 bp, Artificial Sequence
  Oligonucleotide for detection of SNP TSC0036727
ttactcaacaaaa

SEQ ID NO: 145791 - DNA, 13 bp, Artificial Sequence
  Oligonucleotide for detection of SNP TSC0036727
ttttgtcgagtaa

SEQ ID NO: 145792 - DNA, 13 bp, Artificial Sequence
  Oligonucleotide for detection of SNP TSC0036727
ttactcgacaaaa

SEQ ID NO: 145793 - DNA, 13 bp, Artificial Sequence
  Oligonucleotide for detection of SNP TSC0036729
gggggttgagagt

SEQ ID NO: 145794 - DNA, 13 bp, Artificial Sequence
  Oligonucleotide for detection of SNP TSC0036729
actctcaaccccc

SEQ ID NO: 145795 - DNA, 13 bp, Artificial Sequence
  Oligonucleotide for detection of SNP TSC0036729
gggggtagagagt

SEQ ID NO: 145796 - DNA, 13 bp, Artificial Sequence
  Oligonucleotide for detection of SNP TSC0036729
actctctaccccc

SEQ ID NO: 145797 - DNA, 13 bp, Artificial Sequence
  Oligonucleotide for detection of SNP TSC0036730
aaaagtaggatta

SEQ ID NO: 145798 - DNA, 13 bp, Artificial Sequence
  Oligonucleotide for detection of SNP TSC0036730
taatcctactttt

SEQ ID NO: 145799 - DNA, 13 bp, Artificial Sequence
  Oligonucleotide for detection of SNP TSC0036730
aaaagttggatta

SEQ ID NO: 145800 - DNA, 13 bp, Artificial Sequence
  Oligonucleotide for detection of SNP TSC0036730
taatccaactttt

SEQ ID NO: 145801 - DNA, 13 bp, Artificial Sequence
  Oligonucleotide for detection of SNP TSC0036732
gaaaaatgaatat

SEQ ID NO: 145802 - DNA, 13 bp, Artificial Sequence
  Oligonucleotide for detection of SNP TSC0036732
atattcatttttc

SEQ ID NO: 145803 - DNA, 13 bp, Artificial Sequence
  Oligonucleotide for detection of SNP TSC0036732
gaaaaacgaatat

SEQ ID NO: 145804 - DNA, 13 bp, Artificial Sequence
  Oligonucleotide for detection of SNP TSC0036732
atattcgtttttc

SEQ ID NO: 145805 - DNA, 13 bp, Artificial Sequence
  Oligonucleotide for detection of SNP TSC0036732
atgtttgttttty

SEQ ID NO: 145806 - DNA, 13 bp, Artificial Sequence
  Oligonucleotide for detection of SNP TSC0036732
raaaaacaaacat

SEQ ID NO: 145807 - DNA, 13 bp, Artificial Sequence
  Oligonucleotide for detection of SNP TSC0036732
atgtttattttty

SEQ ID NO: 145808 - DNA, 13 bp, Artificial Sequence
  Oligonucleotide for detection of SNP TSC0036732
raaaaataaacat

SEQ ID NO: 145809 - DNA, 13 bp, Artificial Sequence
  Oligonucleotide for detection of SNP TSC0036732
atgttcgttttty

SEQ ID NO: 145810 - DNA, 13 bp, Artificial Sequence
  Oligonucleotide for detection of SNP TSC0036732
raaaaacgaacat

SEQ ID NO: 145811 - DNA, 13 bp, Artificial Sequence
  Oligonucleotide for detection of SNP TSC0036735
attatagtttatt

SEQ ID NO: 145812 - DNA, 13 bp, Artificial Sequence
  Oligonucleotide for detection of SNP TSC0036735
aataaactataat

SEQ ID NO: 145813 - DNA, 13 bp, Artificial Sequence
  Oligonucleotide for detection of SNP TSC0036735
attataatttatt

SEQ ID NO: 145814 - DNA, 13 bp, Artificial Sequence
  Oligonucleotide for detection of SNP TSC0036735
aataaattataat

SEQ ID NO: 145815 - DNA, 13 bp, Artificial Sequence
  Oligonucleotide for detection of SNP TSC0036736
gaagaagagagty

SEQ ID NO: 145816 - DNA, 13 bp, Artificial Sequence
  Oligonucleotide for detection of SNP TSC0036736
ractctcttcttc

SEQ ID NO: 145817 - DNA, 13 bp, Artificial Sequence
  Oligonucleotide for detection of SNP TSC0036736
gaagaaaagagty

SEQ ID NO: 145818 - DNA, 13 bp, Artificial Sequence
  Oligonucleotide for detection of SNP TSC0036736
ractcttttcttc

SEQ ID NO: 145819 - DNA, 13 bp, Artificial Sequence
  Oligonucleotide for detection of SNP TSC0036738
attattaataaat

SEQ ID NO: 145820 - DNA, 13 bp, Artificial Sequence
  Oligonucleotide for detection of SNP TSC0036738
atttattaataat

SEQ ID NO: 145821 - DNA, 13 bp, Artificial Sequence
  Oligonucleotide for detection of SNP TSC0036738
attattgataaat

SEQ ID NO: 145822 - DNA, 13 bp, Artificial Sequence
  Oligonucleotide for detection of SNP TSC0036738
atttatcaataat

SEQ ID NO: 145823 - DNA, 13 bp, Artificial Sequence
  Oligonucleotide for detection of SNP TSC0036740
ttatatgttaaty

SEQ ID NO: 145824 - DNA, 13 bp, Artificial Sequence
  Oligonucleotide for detection of SNP TSC0036740
rattaacatataa

SEQ ID NO: 145825 - DNA, 13 bp, Artificial Sequence
  Oligonucleotide for detection of SNP TSC0036740
ttatatattaaty

SEQ ID NO: 145826 - DNA, 13 bp, Artificial Sequence
  Oligonucleotide for detection of SNP TSC0036740
rattaatatataa

SEQ ID NO: 145827 - DNA, 13 bp, Artificial Sequence
  Oligonucleotide for detection of SNP TSC0036741
aattaagataaag

SEQ ID NO: 145828 - DNA, 13 bp, Artificial Sequence
  Oligonucleotide for detection of SNP TSC0036741
ctttatcttaatt

SEQ ID NO: 145829 - DNA, 13 bp, Artificial Sequence
  Oligonucleotide for detection of SNP TSC0036741
aattaaaataaag

SEQ ID NO: 145830 - DNA, 13 bp, Artificial Sequence
  Oligonucleotide for detection of SNP TSC0036741
ctttattttaatt

SEQ ID NO: 145831 - DNA, 13 bp, Artificial Sequence
  Oligonucleotide for detection of SNP TSC0036742
gtaggggaatgta

SEQ ID NO: 145832 - DNA, 13 bp, Artificial Sequence
  Oligonucleotide for detection of SNP TSC0036742
tacattcccctac

SEQ ID NO: 145833 - DNA, 13 bp, Artificial Sequence
  Oligonucleotide for detection of SNP TSC0036742
gtagggaaatgta

SEQ ID NO: 145834 - DNA, 13 bp, Artificial Sequence
  Oligonucleotide for detection of SNP TSC0036742
tacatttccctac

SEQ ID NO: 145835 - DNA, 13 bp, Artificial Sequence
  Oligonucleotide for detection of SNP TSC0036743
ttttgtgggtaty

SEQ ID NO: 145836 - DNA, 13 bp, Artificial Sequence
  Oligonucleotide for detection of SNP TSC0036743
ratacccacaaaa

SEQ ID NO: 145837 - DNA, 13 bp, Artificial Sequence
  Oligonucleotide for detection of SNP TSC0036743
ttttgttggtaty

SEQ ID NO: 145838 - DNA, 13 bp, Artificial Sequence
  Oligonucleotide for detection of SNP TSC0036743
rataccaacaaaa

SEQ ID NO: 145839 - DNA, 13 bp, Artificial Sequence
  Oligonucleotide for detection of SNP TSC0036743
ttttgcgggtaty

SEQ ID NO: 145840 - DNA, 13 bp, Artificial Sequence
  Oligonucleotide for detection of SNP TSC0036743
ratacccgcaaaa

SEQ ID NO: 145841 - DNA, 13 bp, Artificial Sequence
  Oligonucleotide for detection of SNP TSC0036743
gatgtttgtagaa

SEQ ID NO: 145842 - DNA, 13 bp, Artificial Sequence
  Oligonucleotide for detection of SNP TSC0036743
ttctacaaacatc

SEQ ID NO: 145843 - DNA, 13 bp, Artificial Sequence
  Oligonucleotide for detection of SNP TSC0036743
gatgttagtagaa

SEQ ID NO: 145844 - DNA, 13 bp, Artificial Sequence
  Oligonucleotide for detection of SNP TSC0036743
ttctactaacatc

SEQ ID NO: 145845 - DNA, 13 bp, Artificial Sequence
  Oligonucleotide for detection of SNP TSC0036743
gatgttcgtagaa

SEQ ID NO: 145846 - DNA, 13 bp, Artificial Sequence
  Oligonucleotide for detection of SNP TSC0036743
ttctacgaacatc

SEQ ID NO: 145847 - DNA, 13 bp, Artificial Sequence
  Oligonucleotide for detection of SNP TSC0036744
taggtgggagtaa

SEQ ID NO: 145848 - DNA, 13 bp, Artificial Sequence
  Oligonucleotide for detection of SNP TSC0036744
ttactcccaccta

SEQ ID NO: 145849 - DNA, 13 bp, Artificial Sequence
  Oligonucleotide for detection of SNP TSC0036744
taggtgagagtaa

SEQ ID NO: 145850 - DNA, 13 bp, Artificial Sequence
  Oligonucleotide for detection of SNP TSC0036744
ttactctcaccta

SEQ ID NO: 145851 - DNA, 13 bp, Artificial Sequence
  Oligonucleotide for detection of SNP TSC0036745
aataaattataga

SEQ ID NO: 145852 - DNA, 13 bp, Artificial Sequence
  Oligonucleotide for detection of SNP TSC0036745
tctataatttatt

SEQ ID NO: 145853 - DNA, 13 bp, Artificial Sequence
  Oligonucleotide for detection of SNP TSC0036745
aataaagtataga

SEQ ID NO: 145854 - DNA, 13 bp, Artificial Sequence
  Oligonucleotide for detection of SNP TSC0036745
tctatactttatt

SEQ ID NO: 145855 - DNA, 13 bp, Artificial Sequence
  Oligonucleotide for detection of SNP TSC0036745
tttatagtttgtt

SEQ ID NO: 145856 - DNA, 13 bp, Artificial Sequence
  Oligonucleotide for detection of SNP TSC0036745
aacaaactataaa

SEQ ID NO: 145857 - DNA, 13 bp, Artificial Sequence
  Oligonucleotide for detection of SNP TSC0036745
tttatattttgtt

SEQ ID NO: 145858 - DNA, 13 bp, Artificial Sequence
  Oligonucleotide for detection of SNP TSC0036745
aacaaaatataaa

SEQ ID NO: 145859 - DNA, 13 bp, Artificial Sequence
  Oligonucleotide for detection of SNP TSC0036746
gagttagaggtgy

SEQ ID NO: 145860 - DNA, 13 bp, Artificial Sequence
  Oligonucleotide for detection of SNP TSC0036746
rcacctctaactc

SEQ ID NO: 145861 - DNA, 13 bp, Artificial Sequence
  Oligonucleotide for detection of SNP TSC0036746
gagttaaaggtgy

SEQ ID NO: 145862 - DNA, 13 bp, Artificial Sequence
  Oligonucleotide for detection of SNP TSC0036746
rcacctttaactc

SEQ ID NO: 145863 - DNA, 13 bp, Artificial Sequence
  Oligonucleotide for detection of SNP TSC0036749
tgggtttagtgty

SEQ ID NO: 145864 - DNA, 13 bp, Artificial Sequence
  Oligonucleotide for detection of SNP TSC0036749
racactaaaccca

SEQ ID NO: 145865 - DNA, 13 bp, Artificial Sequence
  Oligonucleotide for detection of SNP TSC0036749
tgggttgagtgty

SEQ ID NO: 145866 - DNA, 13 bp, Artificial Sequence
  Oligonucleotide for detection of SNP TSC0036749
racactcaaccca

SEQ ID NO: 145867 - DNA, 13 bp, Artificial Sequence
  Oligonucleotide for detection of SNP TSC0036749
cgggtttagtgty

SEQ ID NO: 145868 - DNA, 13 bp, Artificial Sequence
  Oligonucleotide for detection of SNP TSC0036749
racactaaacccg

SEQ ID NO: 145869 - DNA, 13 bp, Artificial Sequence
  Oligonucleotide for detection of SNP TSC0036749
cgggttgagtgty

SEQ ID NO: 145870 - DNA, 13 bp, Artificial Sequence
  Oligonucleotide for detection of SNP TSC0036749
racactcaacccg

SEQ ID NO: 145871 - DNA, 13 bp, Artificial Sequence
  Oligonucleotide for detection of SNP TSC0036749
ggtatttagtttg

SEQ ID NO: 145872 - DNA, 13 bp, Artificial Sequence
  Oligonucleotide for detection of SNP TSC0036749
caaactaaatacc

SEQ ID NO: 145873 - DNA, 13 bp, Artificial Sequence
  Oligonucleotide for detection of SNP TSC0036749
ggtattgagttcg

SEQ ID NO: 145874 - DNA, 13 bp, Artificial Sequence
  Oligonucleotide for detection of SNP TSC0036749
cgaactcaatacc

SEQ ID NO: 145875 - DNA, 13 bp, Artificial Sequence
  Oligonucleotide for detection of SNP TSC0036749
ggtatttagttcg

SEQ ID NO: 145876 - DNA, 13 bp, Artificial Sequence
  Oligonucleotide for detection of SNP TSC0036749
cgaactaaatacc

SEQ ID NO: 145877 - DNA, 13 bp, Artificial Sequence
  Oligonucleotide for detection of SNP TSC0036750
aggttgtgtatgy

SEQ ID NO: 145878 - DNA, 13 bp, Artificial Sequence
  Oligonucleotide for detection of SNP TSC0036750
rcatacacaacct

SEQ ID NO: 145879 - DNA, 13 bp, Artificial Sequence
  Oligonucleotide for detection of SNP TSC0036750
aggttgcgtatgy

SEQ ID NO: 145880 - DNA, 13 bp, Artificial Sequence
  Oligonucleotide for detection of SNP TSC0036750
rcatacgcaacct

SEQ ID NO: 145881 - DNA, 13 bp, Artificial Sequence
  Oligonucleotide for detection of SNP TSC0036750
gtatgtgtaattt

SEQ ID NO: 145882 - DNA, 13 bp, Artificial Sequence
  Oligonucleotide for detection of SNP TSC0036750
aaattacacatac

SEQ ID NO: 145883 - DNA, 13 bp, Artificial Sequence
  Oligonucleotide for detection of SNP TSC0036750
gtatgtataattt

SEQ ID NO: 145884 - DNA, 13 bp, Artificial Sequence
  Oligonucleotide for detection of SNP TSC0036750
aaattatacatac

SEQ ID NO: 145885 - DNA, 13 bp, Artificial Sequence
  Oligonucleotide for detection of SNP TSC0036750
gtatgcgtaattt

SEQ ID NO: 145886 - DNA, 13 bp, Artificial Sequence
  Oligonucleotide for detection of SNP TSC0036750
aaattacgcatac

SEQ ID NO: 145887 - DNA, 13 bp, Artificial Sequence
  Oligonucleotide for detection of SNP TSC0036753
taagtggtttgty

SEQ ID NO: 145888 - DNA, 13 bp, Artificial Sequence
  Oligonucleotide for detection of SNP TSC0036753
racaaaccactta

SEQ ID NO: 145889 - DNA, 13 bp, Artificial Sequence
  Oligonucleotide for detection of SNP TSC0036753
taagtgatttgty

SEQ ID NO: 145890 - DNA, 13 bp, Artificial Sequence
  Oligonucleotide for detection of SNP TSC0036753
racaaatcactta

SEQ ID NO: 145891 - DNA, 13 bp, Artificial Sequence
  Oligonucleotide for detection of SNP TSC0036754
ttgtaagtggttt

SEQ ID NO: 145892 - DNA, 13 bp, Artificial Sequence
  Oligonucleotide for detection of SNP TSC0036754
aaaccacttacaa

SEQ ID NO: 145893 - DNA, 13 bp, Artificial Sequence
  Oligonucleotide for detection of SNP TSC0036754
ttgtaaatggttt

SEQ ID NO: 145894 - DNA, 13 bp, Artificial Sequence
  Oligonucleotide for detection of SNP TSC0036754
aaaccatttacaa

SEQ ID NO: 145895 - DNA, 13 bp, Artificial Sequence
  Oligonucleotide for detection of SNP TSC0036756
aatataggtaatg

SEQ ID NO: 145896 - DNA, 13 bp, Artificial Sequence
  Oligonucleotide for detection of SNP TSC0036756
cattacctatatt

SEQ ID NO: 145897 - DNA, 13 bp, Artificial Sequence
  Oligonucleotide for detection of SNP TSC0036756
aatatatgtaatg

SEQ ID NO: 145898 - DNA, 13 bp, Artificial Sequence
  Oligonucleotide for detection of SNP TSC0036756
cattacatatatt

SEQ ID NO: 145899 - DNA, 13 bp, Artificial Sequence
  Oligonucleotide for detection of SNP TSC0036756
tattgtttgtatt

SEQ ID NO: 145900 - DNA, 13 bp, Artificial Sequence
  Oligonucleotide for detection of SNP TSC0036756
aatacaaacaata

SEQ ID NO: 145901 - DNA, 13 bp, Artificial Sequence
  Oligonucleotide for detection of SNP TSC0036756
tattgtatgtatt

SEQ ID NO: 145902 - DNA, 13 bp, Artificial Sequence
  Oligonucleotide for detection of SNP TSC0036756
aatacatacaata

SEQ ID NO: 145903 - DNA, 13 bp, Artificial Sequence
  Oligonucleotide for detection of SNP TSC0036757
tttttaagaaggt

SEQ ID NO: 145904 - DNA, 13 bp, Artificial Sequence
  Oligonucleotide for detection of SNP TSC0036757
accttcttaaaaa

SEQ ID NO: 145905 - DNA, 13 bp, Artificial Sequence
  Oligonucleotide for detection of SNP TSC0036757
tttttaggaaggt

SEQ ID NO: 145906 - DNA, 13 bp, Artificial Sequence
  Oligonucleotide for detection of SNP TSC0036757
accttcctaaaaa

SEQ ID NO: 145907 - DNA, 13 bp, Artificial Sequence
  Oligonucleotide for detection of SNP TSC0036758
aggtaagagttaa

SEQ ID NO: 145908 - DNA, 13 bp, Artificial Sequence
  Oligonucleotide for detection of SNP TSC0036758
ttaactcttacct

SEQ ID NO: 145909 - DNA, 13 bp, Artificial Sequence
  Oligonucleotide for detection of SNP TSC0036758
aggtaaaagttaa

SEQ ID NO: 145910 - DNA, 13 bp, Artificial Sequence
  Oligonucleotide for detection of SNP TSC0036758
ttaacttttacct

SEQ ID NO: 145911 - DNA, 13 bp, Artificial Sequence
  Oligonucleotide for detection of SNP TSC0036759
gggagggggtttt

SEQ ID NO: 145912 - DNA, 13 bp, Artificial Sequence
  Oligonucleotide for detection of SNP TSC0036759
aaaaccccctccc

SEQ ID NO: 145913 - DNA, 13 bp, Artificial Sequence
  Oligonucleotide for detection of SNP TSC0036759
gggaggaggtttt

SEQ ID NO: 145914 - DNA, 13 bp, Artificial Sequence
  Oligonucleotide for detection of SNP TSC0036759
aaaacctcctccc

SEQ ID NO: 145915 - DNA, 13 bp, Artificial Sequence
  Oligonucleotide for detection of SNP TSC0036762
ttttagtggatag

SEQ ID NO: 145916 - DNA, 13 bp, Artificial Sequence
  Oligonucleotide for detection of SNP TSC0036762
ctatccactaaaa

SEQ ID NO: 145917 - DNA, 13 bp, Artificial Sequence
  Oligonucleotide for detection of SNP TSC0036762
ttttagcggatag

SEQ ID NO: 145918 - DNA, 13 bp, Artificial Sequence
  Oligonucleotide for detection of SNP TSC0036762
ctatccgctaaaa

SEQ ID NO: 145919 - DNA, 13 bp, Artificial Sequence
  Oligonucleotide for detection of SNP TSC0036762
ttgtttgttggga

SEQ ID NO: 145920 - DNA, 13 bp, Artificial Sequence
  Oligonucleotide for detection of SNP TSC0036762
tcccaacaaacaa

SEQ ID NO: 145921 - DNA, 13 bp, Artificial Sequence
  Oligonucleotide for detection of SNP TSC0036762
ttgtttattggga

SEQ ID NO: 145922 - DNA, 13 bp, Artificial Sequence
  Oligonucleotide for detection of SNP TSC0036762
tcccaataaacaa

SEQ ID NO: 145923 - DNA, 13 bp, Artificial Sequence
  Oligonucleotide for detection of SNP TSC0036762
ttgttcgttggga

SEQ ID NO: 145924 - DNA, 13 bp, Artificial Sequence
  Oligonucleotide for detection of SNP TSC0036762
tcccaacgaacaa

SEQ ID NO: 145925 - DNA, 13 bp, Artificial Sequence
  Oligonucleotide for detection of SNP TSC0036764
ttgtgagttgtty

SEQ ID NO: 145926 - DNA, 13 bp, Artificial Sequence
  Oligonucleotide for detection of SNP TSC0036764
raacaactcacaa

SEQ ID NO: 145927 - DNA, 13 bp, Artificial Sequence
  Oligonucleotide for detection of SNP TSC0036764
ttgtgaattgtty

SEQ ID NO: 145928 - DNA, 13 bp, Artificial Sequence
  Oligonucleotide for detection of SNP TSC0036764
raacaattcacaa

SEQ ID NO: 145929 - DNA, 13 bp, Artificial Sequence
  Oligonucleotide for detection of SNP TSC0036765
gttttggttggag

SEQ ID NO: 145930 - DNA, 13 bp, Artificial Sequence
  Oligonucleotide for detection of SNP TSC0036765
ctccaaccaaaac

SEQ ID NO: 145931 - DNA, 13 bp, Artificial Sequence
  Oligonucleotide for detection of SNP TSC0036765
gttttgattggag

SEQ ID NO: 145932 - DNA, 13 bp, Artificial Sequence
  Oligonucleotide for detection of SNP TSC0036765
ctccaatcaaaac

SEQ ID NO: 145933 - DNA, 13 bp, Artificial Sequence
  Oligonucleotide for detection of SNP TSC0036767
tttattttagttt

SEQ ID NO: 145934 - DNA, 13 bp, Artificial Sequence
  Oligonucleotide for detection of SNP TSC0036767
aaactaaaataaa

SEQ ID NO: 145935 - DNA, 13 bp, Artificial Sequence
  Oligonucleotide for detection of SNP TSC0036768
ggaagagtataga

SEQ ID NO: 145936 - DNA, 13 bp, Artificial Sequence
  Oligonucleotide for detection of SNP TSC0036768
tctatactcttcc

SEQ ID NO: 145937 - DNA, 13 bp, Artificial Sequence
  Oligonucleotide for detection of SNP TSC0036768
ggaagaatataga

SEQ ID NO: 145938 - DNA, 13 bp, Artificial Sequence
  Oligonucleotide for detection of SNP TSC0036768
tctatattcttcc

SEQ ID NO: 145939 - DNA, 13 bp, Artificial Sequence
  Oligonucleotide for detection of SNP TSC0036769
tattttgaattta

SEQ ID NO: 145940 - DNA, 13 bp, Artificial Sequence
  Oligonucleotide for detection of SNP TSC0036769
taaattcaaaata

SEQ ID NO: 145941 - DNA, 13 bp, Artificial Sequence
  Oligonucleotide for detection of SNP TSC0036769
tatttttaattta

SEQ ID NO: 145942 - DNA, 13 bp, Artificial Sequence
  Oligonucleotide for detection of SNP TSC0036769
taaattaaaaata

SEQ ID NO: 145943 - DNA, 13 bp, Artificial Sequence
  Oligonucleotide for detection of SNP TSC0036769
taaatttaaaata

SEQ ID NO: 145944 - DNA, 13 bp, Artificial Sequence
  Oligonucleotide for detection of SNP TSC0036769
tattttaaattta

SEQ ID NO: 145945 - DNA, 13 bp, Artificial Sequence
  Oligonucleotide for detection of SNP TSC0036773
ggagggggagtty

SEQ ID NO: 145946 - DNA, 13 bp, Artificial Sequence
  Oligonucleotide for detection of SNP TSC0036773
raactccccctcc

SEQ ID NO: 145947 - DNA, 13 bp, Artificial Sequence
  Oligonucleotide for detection of SNP TSC0036773
ggagggagagtty

SEQ ID NO: 145948 - DNA, 13 bp, Artificial Sequence
  Oligonucleotide for detection of SNP TSC0036773
raactctccctcc

SEQ ID NO: 145949 - DNA, 13 bp, Artificial Sequence
  Oligonucleotide for detection of SNP TSC0036776
ggtattatataty

SEQ ID NO: 145950 - DNA, 13 bp, Artificial Sequence
  Oligonucleotide for detection of SNP TSC0036776
ratatataatacc

SEQ ID NO: 145951 - DNA, 13 bp, Artificial Sequence
  Oligonucleotide for detection of SNP TSC0036776
ggtattgtataty

SEQ ID NO: 145952 - DNA, 13 bp, Artificial Sequence
  Oligonucleotide for detection of SNP TSC0036776
ratatacaatacc

SEQ ID NO: 145953 - DNA, 13 bp, Artificial Sequence
  Oligonucleotide for detection of SNP TSC0036777
tttttagaaaggg

SEQ ID NO: 145954 - DNA, 13 bp, Artificial Sequence
  Oligonucleotide for detection of SNP TSC0036777
ccctttctaaaaa

SEQ ID NO: 145955 - DNA, 13 bp, Artificial Sequence
  Oligonucleotide for detection of SNP TSC0036777
tttttaaaaaggg

SEQ ID NO: 145956 - DNA, 13 bp, Artificial Sequence
  Oligonucleotide for detection of SNP TSC0036777
ccctttttaaaaa

SEQ ID NO: 145957 - DNA, 13 bp, Artificial Sequence
  Oligonucleotide for detection of SNP TSC0036778
tgtaagtagttta

SEQ ID NO: 145958 - DNA, 13 bp, Artificial Sequence
  Oligonucleotide for detection of SNP TSC0036778
taaactacttaca

SEQ ID NO: 145959 - DNA, 13 bp, Artificial Sequence
  Oligonucleotide for detection of SNP TSC0036778
tgtaaggagttta

SEQ ID NO: 145960 - DNA, 13 bp, Artificial Sequence
  Oligonucleotide for detection of SNP TSC0036778
taaactccttaca

SEQ ID NO: 145961 - DNA, 13 bp, Artificial Sequence
  Oligonucleotide for detection of SNP TSC0036778
taaattgtttgta

SEQ ID NO: 145962 - DNA, 13 bp, Artificial Sequence
  Oligonucleotide for detection of SNP TSC0036778
tacaaacaattta

SEQ ID NO: 145963 - DNA, 13 bp, Artificial Sequence
  Oligonucleotide for detection of SNP TSC0036778
taaattttttgta

SEQ ID NO: 145964 - DNA, 13 bp, Artificial Sequence
  Oligonucleotide for detection of SNP TSC0036778
tacaaaaaattta

SEQ ID NO: 145965 - DNA, 13 bp, Artificial Sequence
  Oligonucleotide for detection of SNP TSC0036779
aaggttgtaggta

SEQ ID NO: 145966 - DNA, 13 bp, Artificial Sequence
  Oligonucleotide for detection of SNP TSC0036779
tacctacaacctt

SEQ ID NO: 145967 - DNA, 13 bp, Artificial Sequence
  Oligonucleotide for detection of SNP TSC0036779
aaggttataggta

SEQ ID NO: 145968 - DNA, 13 bp, Artificial Sequence
  Oligonucleotide for detection of SNP TSC0036779
tacctataacctt

SEQ ID NO: 145969 - DNA, 13 bp, Artificial Sequence
  Oligonucleotide for detection of SNP TSC0036783
ataatagtaaaaa

SEQ ID NO: 145970 - DNA, 13 bp, Artificial Sequence
  Oligonucleotide for detection of SNP TSC0036783
tttttactattat

SEQ ID NO: 145971 - DNA, 13 bp, Artificial Sequence
  Oligonucleotide for detection of SNP TSC0036783
ataataataaaaa

SEQ ID NO: 145972 - DNA, 13 bp, Artificial Sequence
  Oligonucleotide for detection of SNP TSC0036783
tttttattattat

SEQ ID NO: 145973 - DNA, 13 bp, Artificial Sequence
  Oligonucleotide for detection of SNP TSC0036784
aggtttatattta

SEQ ID NO: 145974 - DNA, 13 bp, Artificial Sequence
  Oligonucleotide for detection of SNP TSC0036784
taaatataaacct

SEQ ID NO: 145975 - DNA, 13 bp, Artificial Sequence
  Oligonucleotide for detection of SNP TSC0036784
aggtttttattta

SEQ ID NO: 145976 - DNA, 13 bp, Artificial Sequence
  Oligonucleotide for detection of SNP TSC0036784
taaataaaaacct

SEQ ID NO: 145977 - DNA, 13 bp, Artificial Sequence
  Oligonucleotide for detection of SNP TSC0036784
tgaatatggattt

SEQ ID NO: 145978 - DNA, 13 bp, Artificial Sequence
  Oligonucleotide for detection of SNP TSC0036784
aaatccatattca

SEQ ID NO: 145979 - DNA, 13 bp, Artificial Sequence
  Oligonucleotide for detection of SNP TSC0036784
tgaatagggattt

SEQ ID NO: 145980 - DNA, 13 bp, Artificial Sequence
  Oligonucleotide for detection of SNP TSC0036784
aaatccctattca

SEQ ID NO: 145981 - DNA, 13 bp, Artificial Sequence
  Oligonucleotide for detection of SNP TSC0036785
atattggggagay

SEQ ID NO: 145982 - DNA, 13 bp, Artificial Sequence
  Oligonucleotide for detection of SNP TSC0036785
rtctccccaatat

SEQ ID NO: 145983 - DNA, 13 bp, Artificial Sequence
  Oligonucleotide for detection of SNP TSC0036785
atattgaggagay

SEQ ID NO: 145984 - DNA, 13 bp, Artificial Sequence
  Oligonucleotide for detection of SNP TSC0036785
rtctcctcaatat

SEQ ID NO: 145985 - DNA, 13 bp, Artificial Sequence
  Oligonucleotide for detection of SNP TSC0036787
attaatattatga

SEQ ID NO: 145986 - DNA, 13 bp, Artificial Sequence
  Oligonucleotide for detection of SNP TSC0036787
tcataatattaat

SEQ ID NO: 145987 - DNA, 13 bp, Artificial Sequence
  Oligonucleotide for detection of SNP TSC0036787
attaatgttatga

SEQ ID NO: 145988 - DNA, 13 bp, Artificial Sequence
  Oligonucleotide for detection of SNP TSC0036787
tcataacattaat

SEQ ID NO: 145989 - DNA, 13 bp, Artificial Sequence
  Oligonucleotide for detection of SNP TSC0036789
tgtatttggttta

SEQ ID NO: 145990 - DNA, 13 bp, Artificial Sequence
  Oligonucleotide for detection of SNP TSC0036789
taaaccaaataca

SEQ ID NO: 145991 - DNA, 13 bp, Artificial Sequence
  Oligonucleotide for detection of SNP TSC0036789
cgtatttggttta

SEQ ID NO: 145992 - DNA, 13 bp, Artificial Sequence
  Oligonucleotide for detection of SNP TSC0036789
taaaccaaatacg

SEQ ID NO: 145993 - DNA, 13 bp, Artificial Sequence
  Oligonucleotide for detection of SNP TSC0036789
tgtattcggttta

SEQ ID NO: 145994 - DNA, 13 bp, Artificial Sequence
  Oligonucleotide for detection of SNP TSC0036789
taaaccgaataca

SEQ ID NO: 145995 - DNA, 13 bp, Artificial Sequence
  Oligonucleotide for detection of SNP TSC0036789
cgtattcggttta

SEQ ID NO: 145996 - DNA, 13 bp, Artificial Sequence
  Oligonucleotide for detection of SNP TSC0036789
taaaccgaatacg

SEQ ID NO: 145997 - DNA, 13 bp, Artificial Sequence
  Oligonucleotide for detection of SNP TSC0036789
tgggttgggtgtg

SEQ ID NO: 145998 - DNA, 13 bp, Artificial Sequence
  Oligonucleotide for detection of SNP TSC0036789
cacacccaaccca

SEQ ID NO: 145999 - DNA, 13 bp, Artificial Sequence
  Oligonucleotide for detection of SNP TSC0036789
tgggttaggtgtg

SEQ ID NO: 146000 - DNA, 13 bp, Artificial Sequence
  Oligonucleotide for detection of SNP TSC0036789
cacacctaaccca

SEQ ID NO: 146001 - DNA, 13 bp, Artificial Sequence
  Oligonucleotide for detection of SNP TSC0036789
tgggtcgggtgtg

SEQ ID NO: 146002 - DNA, 13 bp, Artificial Sequence
  Oligonucleotide for detection of SNP TSC0036789
cacacccgaccca

SEQ ID NO: 146003 - DNA, 13 bp, Artificial Sequence
  Oligonucleotide for detection of SNP TSC0036789
tgggttaggtgcg

SEQ ID NO: 146004 - DNA, 13 bp, Artificial Sequence
  Oligonucleotide for detection of SNP TSC0036789
cgcacctaaccca

SEQ ID NO: 146005 - DNA, 13 bp, Artificial Sequence
  Oligonucleotide for detection of SNP TSC0036789
tgggttgggtgcg

SEQ ID NO: 146006 - DNA, 13 bp, Artificial Sequence
  Oligonucleotide for detection of SNP TSC0036789
cgcacccaaccca

SEQ ID NO: 146007 - DNA, 13 bp, Artificial Sequence
  Oligonucleotide for detection of SNP TSC0036789
tgggtcgggtgcg

SEQ ID NO: 146008 - DNA, 13 bp, Artificial Sequence
  Oligonucleotide for detection of SNP TSC0036789
cgcacccgaccca

SEQ ID NO: 146009 - DNA, 13 bp, Artificial Sequence
  Oligonucleotide for detection of SNP TSC0036790
tattttgtgagta

SEQ ID NO: 146010 - DNA, 13 bp, Artificial Sequence
  Oligonucleotide for detection of SNP TSC0036790
tactcacaaaata

SEQ ID NO: 146011 - DNA, 13 bp, Artificial Sequence
  Oligonucleotide for detection of SNP TSC0036790
tattttttgagta

SEQ ID NO: 146012 - DNA, 13 bp, Artificial Sequence
  Oligonucleotide for detection of SNP TSC0036790
tactcaaaaaata

SEQ ID NO: 146013 - DNA, 13 bp, Artificial Sequence
  Oligonucleotide for detection of SNP TSC0036790
tatttcgtgagta

SEQ ID NO: 146014 - DNA, 13 bp, Artificial Sequence
  Oligonucleotide for detection of SNP TSC0036790
tactcacgaaata

SEQ ID NO: 146015 - DNA, 13 bp, Artificial Sequence
  Oligonucleotide for detection of SNP TSC0036790
tatttttcgagta

SEQ ID NO: 146016 - DNA, 13 bp, Artificial Sequence
  Oligonucleotide for detection of SNP TSC0036790
tactcgaaaaata

SEQ ID NO: 146017 - DNA, 13 bp, Artificial Sequence
  Oligonucleotide for detection of SNP TSC0036790
tattttgcgagta

SEQ ID NO: 146018 - DNA, 13 bp, Artificial Sequence
  Oligonucleotide for detection of SNP TSC0036790
tactcgcaaaata

SEQ ID NO: 146019 - DNA, 13 bp, Artificial Sequence
  Oligonucleotide for detection of SNP TSC0036790
tatttcgcgagta

SEQ ID NO: 146020 - DNA, 13 bp, Artificial Sequence
  Oligonucleotide for detection of SNP TSC0036790
tactcgcgaaata

SEQ ID NO: 146021 - DNA, 13 bp, Artificial Sequence
  Oligonucleotide for detection of SNP TSC0036790
tgtttgtgaaatg

SEQ ID NO: 146022 - DNA, 13 bp, Artificial Sequence
  Oligonucleotide for detection of SNP TSC0036790
catttcacaaaca

SEQ ID NO: 146023 - DNA, 13 bp, Artificial Sequence
  Oligonucleotide for detection of SNP TSC0036790
tgtttgagaaatg

SEQ ID NO: 146024 - DNA, 13 bp, Artificial Sequence
  Oligonucleotide for detection of SNP TSC0036790
catttctcaaaca

SEQ ID NO: 146025 - DNA, 13 bp, Artificial Sequence
  Oligonucleotide for detection of SNP TSC0036790
tgttcgtgaaatg

SEQ ID NO: 146026 - DNA, 13 bp, Artificial Sequence
  Oligonucleotide for detection of SNP TSC0036790
catttcacgaaca

SEQ ID NO: 146027 - DNA, 13 bp, Artificial Sequence
  Oligonucleotide for detection of SNP TSC0036790
tgttcgagaaatg

SEQ ID NO: 146028 - DNA, 13 bp, Artificial Sequence
  Oligonucleotide for detection of SNP TSC0036790
catttctcgaaca

SEQ ID NO: 146029 - DNA, 13 bp, Artificial Sequence
  Oligonucleotide for detection of SNP TSC0036790
tgtttgcgaaatg

SEQ ID NO: 146030 - DNA, 13 bp, Artificial Sequence
  Oligonucleotide for detection of SNP TSC0036790
catttcgcaaaca

SEQ ID NO: 146031 - DNA, 13 bp, Artificial Sequence
  Oligonucleotide for detection of SNP TSC0036790
tgttcgcgaaatg

SEQ ID NO: 146032 - DNA, 13 bp, Artificial Sequence
  Oligonucleotide for detection of SNP TSC0036790
catttcgcgaaca

SEQ ID NO: 146033 - DNA, 13 bp, Artificial Sequence
  Oligonucleotide for detection of SNP TSC0036792
tgattgagagaat

SEQ ID NO: 146034 - DNA, 13 bp, Artificial Sequence
  Oligonucleotide for detection of SNP TSC0036792
attctctcaatca

SEQ ID NO: 146035 - DNA, 13 bp, Artificial Sequence
  Oligonucleotide for detection of SNP TSC0036792
tgattgtgagaat

SEQ ID NO: 146036 - DNA, 13 bp, Artificial Sequence
  Oligonucleotide for detection of SNP TSC0036792
attctcacaatca

SEQ ID NO: 146037 - DNA, 13 bp, Artificial Sequence
  Oligonucleotide for detection of SNP TSC0036792
cgattgagagaat

SEQ ID NO: 146038 - DNA, 13 bp, Artificial Sequence
  Oligonucleotide for detection of SNP TSC0036792
attctctcaatcg

SEQ ID NO: 146039 - DNA, 13 bp, Artificial Sequence
  Oligonucleotide for detection of SNP TSC0036792
cgattgtgagaat

SEQ ID NO: 146040 - DNA, 13 bp, Artificial Sequence
  Oligonucleotide for detection of SNP TSC0036792
attctcacaatcg

SEQ ID NO: 146041 - DNA, 13 bp, Artificial Sequence
  Oligonucleotide for detection of SNP TSC0036792
atttttttaattg

SEQ ID NO: 146042 - DNA, 13 bp, Artificial Sequence
  Oligonucleotide for detection of SNP TSC0036792
caattaaaaaaat

SEQ ID NO: 146043 - DNA, 13 bp, Artificial Sequence
  Oligonucleotide for detection of SNP TSC0036792
atttttataattg

SEQ ID NO: 146044 - DNA, 13 bp, Artificial Sequence
  Oligonucleotide for detection of SNP TSC0036792
caattataaaaat

SEQ ID NO: 146045 - DNA, 13 bp, Artificial Sequence
  Oligonucleotide for detection of SNP TSC0036792
atttttttaatcg

SEQ ID NO: 146046 - DNA, 13 bp, Artificial Sequence
  Oligonucleotide for detection of SNP TSC0036792
cgattaaaaaaat

SEQ ID NO: 146047 - DNA, 13 bp, Artificial Sequence
  Oligonucleotide for detection of SNP TSC0036792
atttttataatcg

SEQ ID NO: 146048 - DNA, 13 bp, Artificial Sequence
  Oligonucleotide for detection of SNP TSC0036792
cgattataaaaat

SEQ ID NO: 146049 - DNA, 13 bp, Artificial Sequence
  Oligonucleotide for detection of SNP TSC0036793
attgagagaatay

SEQ ID NO: 146050 - DNA, 13 bp, Artificial Sequence
  Oligonucleotide for detection of SNP TSC0036793
rtattctctcaat

SEQ ID NO: 146051 - DNA, 13 bp, Artificial Sequence
  Oligonucleotide for detection of SNP TSC0036793
attgagtgaatay

SEQ ID NO: 146052 - DNA, 13 bp, Artificial Sequence
  Oligonucleotide for detection of SNP TSC0036793
rtattcactcaat

SEQ ID NO: 146053 - DNA, 13 bp, Artificial Sequence
  Oligonucleotide for detection of SNP TSC0036793
gtatttttttaat

SEQ ID NO: 146054 - DNA, 13 bp, Artificial Sequence
  Oligonucleotide for detection of SNP TSC0036793
attaaaaaaatac

SEQ ID NO: 146055 - DNA, 13 bp, Artificial Sequence
  Oligonucleotide for detection of SNP TSC0036793
gtatttatttaat

SEQ ID NO: 146056 - DNA, 13 bp, Artificial Sequence
  Oligonucleotide for detection of SNP TSC0036793
attaaataaatac

SEQ ID NO: 146057 - DNA, 13 bp, Artificial Sequence
  Oligonucleotide for detection of SNP TSC0036794
ggaatatggtgaa

SEQ ID NO: 146058 - DNA, 13 bp, Artificial Sequence
  Oligonucleotide for detection of SNP TSC0036794
ttcaccatattcc

SEQ ID NO: 146059 - DNA, 13 bp, Artificial Sequence
  Oligonucleotide for detection of SNP TSC0036794
ggaatacggtgaa

SEQ ID NO: 146060 - DNA, 13 bp, Artificial Sequence
  Oligonucleotide for detection of SNP TSC0036794
ttcaccgtattcc

SEQ ID NO: 146061 - DNA, 13 bp, Artificial Sequence
  Oligonucleotide for detection of SNP TSC0036795
attattaggattt

SEQ ID NO: 146062 - DNA, 13 bp, Artificial Sequence
  Oligonucleotide for detection of SNP TSC0036795
aaatcctaataat

SEQ ID NO: 146063 - DNA, 13 bp, Artificial Sequence
  Oligonucleotide for detection of SNP TSC0036795
attattgggattt

SEQ ID NO: 146064 - DNA, 13 bp, Artificial Sequence
  Oligonucleotide for detection of SNP TSC0036795
aaatcccaataat

SEQ ID NO: 146065 - DNA, 13 bp, Artificial Sequence
  Oligonucleotide for detection of SNP TSC0036796
agagagagaatty

SEQ ID NO: 146066 - DNA, 13 bp, Artificial Sequence
  Oligonucleotide for detection of SNP TSC0036796
raattctctctct

SEQ ID NO: 146067 - DNA, 13 bp, Artificial Sequence
  Oligonucleotide for detection of SNP TSC0036796
agagagtgaatty

SEQ ID NO: 146068 - DNA, 13 bp, Artificial Sequence
  Oligonucleotide for detection of SNP TSC0036796
raattcactctct

SEQ ID NO: 146069 - DNA, 13 bp, Artificial Sequence
  Oligonucleotide for detection of SNP TSC0036797
ttatttgaaagat

SEQ ID NO: 146070 - DNA, 13 bp, Artificial Sequence
  Oligonucleotide for detection of SNP TSC0036797
atctttcaaataa

SEQ ID NO: 146071 - DNA, 13 bp, Artificial Sequence
  Oligonucleotide for detection of SNP TSC0036797
ttattttaaagat

SEQ ID NO: 146072 - DNA, 13 bp, Artificial Sequence
  Oligonucleotide for detection of SNP TSC0036797
atctttaaaataa

SEQ ID NO: 146073 - DNA, 13 bp, Artificial Sequence
  Oligonucleotide for detection of SNP TSC0036797
attttttaaatgg

SEQ ID NO: 146074 - DNA, 13 bp, Artificial Sequence
  Oligonucleotide for detection of SNP TSC0036797
ccatttaaaaaat

SEQ ID NO: 146075 - DNA, 13 bp, Artificial Sequence
  Oligonucleotide for detection of SNP TSC0036797
atttttaaaatgg

SEQ ID NO: 146076 - DNA, 13 bp, Artificial Sequence
  Oligonucleotide for detection of SNP TSC0036797
ccattttaaaaat

SEQ ID NO: 146077 - DNA, 13 bp, Artificial Sequence
  Oligonucleotide for detection of SNP TSC0036798
tagtagttgtgtt

SEQ ID NO: 146078 - DNA, 13 bp, Artificial Sequence
  Oligonucleotide for detection of SNP TSC0036798
aacacaactacta

SEQ ID NO: 146079 - DNA, 13 bp, Artificial Sequence
  Oligonucleotide for detection of SNP TSC0036798
tagtaggtgtgtt

SEQ ID NO: 146080 - DNA, 13 bp, Artificial Sequence
  Oligonucleotide for detection of SNP TSC0036798
aacacacctacta

SEQ ID NO: 146081 - DNA, 13 bp, Artificial Sequence
  Oligonucleotide for detection of SNP TSC0036798
agtatagttgttg

SEQ ID NO: 146082 - DNA, 13 bp, Artificial Sequence
  Oligonucleotide for detection of SNP TSC0036798
caacaactatact

SEQ ID NO: 146083 - DNA, 13 bp, Artificial Sequence
  Oligonucleotide for detection of SNP TSC0036798
agtatatttgttg

SEQ ID NO: 146084 - DNA, 13 bp, Artificial Sequence
  Oligonucleotide for detection of SNP TSC0036798
caacaaatatact

SEQ ID NO: 146085 - DNA, 13 bp, Artificial Sequence
  Oligonucleotide for detection of SNP TSC0036799
atagtatgtaaag

SEQ ID NO: 146086 - DNA, 13 bp, Artificial Sequence
  Oligonucleotide for detection of SNP TSC0036799
ctttacatactat

SEQ ID NO: 146087 - DNA, 13 bp, Artificial Sequence
  Oligonucleotide for detection of SNP TSC0036799
atagtacgtaaag

SEQ ID NO: 146088 - DNA, 13 bp, Artificial Sequence
  Oligonucleotide for detection of SNP TSC0036799
ctttacgtactat

SEQ ID NO: 146089 - DNA, 13 bp, Artificial Sequence
  Oligonucleotide for detection of SNP TSC0036800
tgtggagaattat

SEQ ID NO: 146090 - DNA, 13 bp, Artificial Sequence
  Oligonucleotide for detection of SNP TSC0036800
ataattctccaca

SEQ ID NO: 146091 - DNA, 13 bp, Artificial Sequence
  Oligonucleotide for detection of SNP TSC0036800
tgtggaaaattat

SEQ ID NO: 146092 - DNA, 13 bp, Artificial Sequence
  Oligonucleotide for detection of SNP TSC0036800
ataattttccaca

SEQ ID NO: 146093 - DNA, 13 bp, Artificial Sequence
  Oligonucleotide for detection of SNP TSC0036801
gttagtaataagy

SEQ ID NO: 146094 - DNA, 13 bp, Artificial Sequence
  Oligonucleotide for detection of SNP TSC0036801
rcttattactaac

SEQ ID NO: 146095 - DNA, 13 bp, Artificial Sequence
  Oligonucleotide for detection of SNP TSC0036801
gttagttataagy

SEQ ID NO: 146096 - DNA, 13 bp, Artificial Sequence
  Oligonucleotide for detection of SNP TSC0036801
rcttataactaac

SEQ ID NO: 146097 - DNA, 13 bp, Artificial Sequence
  Oligonucleotide for detection of SNP TSC0036801
gtttattgttaay

SEQ ID NO: 146098 - DNA, 13 bp, Artificial Sequence
  Oligonucleotide for detection of SNP TSC0036801
rttaacaataaac

SEQ ID NO: 146099 - DNA, 13 bp, Artificial Sequence
  Oligonucleotide for detection of SNP TSC0036801
gtttatggttaay

SEQ ID NO: 146100 - DNA, 13 bp, Artificial Sequence
  Oligonucleotide for detection of SNP TSC0036801
rttaaccataaac

SEQ ID NO: 146101 - DNA, 13 bp, Artificial Sequence
  Oligonucleotide for detection of SNP TSC0036802
tgttttatttgay

SEQ ID NO: 146102 - DNA, 13 bp, Artificial Sequence
  Oligonucleotide for detection of SNP TSC0036802
rtcaaataaaaca

SEQ ID NO: 146103 - DNA, 13 bp, Artificial Sequence
  Oligonucleotide for detection of SNP TSC0036802
tgttttgtttgay

SEQ ID NO: 146104 - DNA, 13 bp, Artificial Sequence
  Oligonucleotide for detection of SNP TSC0036802
rtcaaacaaaaca

SEQ ID NO: 146105 - DNA, 13 bp, Artificial Sequence
  Oligonucleotide for detection of SNP TSC0036803
tgatggggatttt

SEQ ID NO: 146106 - DNA, 13 bp, Artificial Sequence
  Oligonucleotide for detection of SNP TSC0036803
aaaatccccatca

SEQ ID NO: 146107 - DNA, 13 bp, Artificial Sequence
  Oligonucleotide for detection of SNP TSC0036803
tgatggtgatttt

SEQ ID NO: 146108 - DNA, 13 bp, Artificial Sequence
  Oligonucleotide for detection of SNP TSC0036803
aaaatcaccatca

SEQ ID NO: 146109 - DNA, 13 bp, Artificial Sequence
  Oligonucleotide for detection of SNP TSC0036803
agagtttttatta

SEQ ID NO: 146110 - DNA, 13 bp, Artificial Sequence
  Oligonucleotide for detection of SNP TSC0036803
taataaaaactct

SEQ ID NO: 146111 - DNA, 13 bp, Artificial Sequence
  Oligonucleotide for detection of SNP TSC0036803
agagttattatta

SEQ ID NO: 146112 - DNA, 13 bp, Artificial Sequence
  Oligonucleotide for detection of SNP TSC0036803
taataataactct

SEQ ID NO: 146113 - DNA, 13 bp, Artificial Sequence
  Oligonucleotide for detection of SNP TSC0036805
tttttaagagaaa

SEQ ID NO: 146114 - DNA, 13 bp, Artificial Sequence
  Oligonucleotide for detection of SNP TSC0036805
tttctcttaaaaa

SEQ ID NO: 146115 - DNA, 13 bp, Artificial Sequence
  Oligonucleotide for detection of SNP TSC0036805
tttttaggagaaa

SEQ ID NO: 146116 - DNA, 13 bp, Artificial Sequence
  Oligonucleotide for detection of SNP TSC0036805
tttctcctaaaaa

SEQ ID NO: 146117 - DNA, 13 bp, Artificial Sequence
  Oligonucleotide for detection of SNP TSC0036808
attaaaggttttt

SEQ ID NO: 146118 - DNA, 13 bp, Artificial Sequence
  Oligonucleotide for detection of SNP TSC0036808
aaaaacctttaat

SEQ ID NO: 146119 - DNA, 13 bp, Artificial Sequence
  Oligonucleotide for detection of SNP TSC0036808
attaaaagttttt

SEQ ID NO: 146120 - DNA, 13 bp, Artificial Sequence
  Oligonucleotide for detection of SNP TSC0036808
aaaaacttttaat

SEQ ID NO: 146121 - DNA, 13 bp, Artificial Sequence
  Oligonucleotide for detection of SNP TSC0036809
ttgagtgtagata

SEQ ID NO: 146122 - DNA, 13 bp, Artificial Sequence
  Oligonucleotide for detection of SNP TSC0036809
tatctacactcaa

SEQ ID NO: 146123 - DNA, 13 bp, Artificial Sequence
  Oligonucleotide for detection of SNP TSC0036809
ttgagtatagata

SEQ ID NO: 146124 - DNA, 13 bp, Artificial Sequence
  Oligonucleotide for detection of SNP TSC0036809
tatctatactcaa

SEQ ID NO: 146125 - DNA, 13 bp, Artificial Sequence
  Oligonucleotide for detection of SNP TSC0036811
ggaggtggaggtg

SEQ ID NO: 146126 - DNA, 13 bp, Artificial Sequence
  Oligonucleotide for detection of SNP TSC0036811
cacctccacctcc

SEQ ID NO: 146127 - DNA, 13 bp, Artificial Sequence
  Oligonucleotide for detection of SNP TSC0036811
ggaggcggaggtg

SEQ ID NO: 146128 - DNA, 13 bp, Artificial Sequence
  Oligonucleotide for detection of SNP TSC0036811
cacctccgcctcc

SEQ ID NO: 146129 - DNA, 13 bp, Artificial Sequence
  Oligonucleotide for detection of SNP TSC0036815
gttaaggagttty

SEQ ID NO: 146130 - DNA, 13 bp, Artificial Sequence
  Oligonucleotide for detection of SNP TSC0036815
raaactccttaac

SEQ ID NO: 146131 - DNA, 13 bp, Artificial Sequence
  Oligonucleotide for detection of SNP TSC0036815
gttaagaagttty

SEQ ID NO: 146132 - DNA, 13 bp, Artificial Sequence
  Oligonucleotide for detection of SNP TSC0036815
raaacttcttaac

SEQ ID NO: 146133 - DNA, 13 bp, Artificial Sequence
  Oligonucleotide for detection of SNP TSC0036816
ttagtttaattaa

SEQ ID NO: 146134 - DNA, 13 bp, Artificial Sequence
  Oligonucleotide for detection of SNP TSC0036816
ttaattaaactaa

SEQ ID NO: 146135 - DNA, 13 bp, Artificial Sequence
  Oligonucleotide for detection of SNP TSC0036816
ttagttgaattaa

SEQ ID NO: 146136 - DNA, 13 bp, Artificial Sequence
  Oligonucleotide for detection of SNP TSC0036816
ttaattcaactaa

SEQ ID NO: 146137 - DNA, 13 bp, Artificial Sequence
  Oligonucleotide for detection of SNP TSC0036816
ttgattgagttgg

SEQ ID NO: 146138 - DNA, 13 bp, Artificial Sequence
  Oligonucleotide for detection of SNP TSC0036816
ccaactcaatcaa

SEQ ID NO: 146139 - DNA, 13 bp, Artificial Sequence
  Oligonucleotide for detection of SNP TSC0036816
ttgatttagttgg

SEQ ID NO: 146140 - DNA, 13 bp, Artificial Sequence
  Oligonucleotide for detection of SNP TSC0036816
ccaactaaatcaa

SEQ ID NO: 146141 - DNA, 13 bp, Artificial Sequence
  Oligonucleotide for detection of SNP TSC0036819
tattaagtatttt

SEQ ID NO: 146142 - DNA, 13 bp, Artificial Sequence
  Oligonucleotide for detection of SNP TSC0036819
aaaatacttaata

SEQ ID NO: 146143 - DNA, 13 bp, Artificial Sequence
  Oligonucleotide for detection of SNP TSC0036820
agaggagaaaaty

SEQ ID NO: 146144 - DNA, 13 bp, Artificial Sequence
  Oligonucleotide for detection of SNP TSC0036820
rattttctcctct

SEQ ID NO: 146145 - DNA, 13 bp, Artificial Sequence
  Oligonucleotide for detection of SNP TSC0036820
agaggaaaaaaty

SEQ ID NO: 146146 - DNA, 13 bp, Artificial Sequence
  Oligonucleotide for detection of SNP TSC0036820
rattttttcctct

SEQ ID NO: 146147 - DNA, 13 bp, Artificial Sequence
  Oligonucleotide for detection of SNP TSC0036821
tgtttttgtgtay

SEQ ID NO: 146148 - DNA, 13 bp, Artificial Sequence
  Oligonucleotide for detection of SNP TSC0036821
rtacacaaaaaca

SEQ ID NO: 146149 - DNA, 13 bp, Artificial Sequence
  Oligonucleotide for detection of SNP TSC0036821
tgttttcgtgtay

SEQ ID NO: 146150 - DNA, 13 bp, Artificial Sequence
  Oligonucleotide for detection of SNP TSC0036821
rtacacgaaaaca

SEQ ID NO: 146151 - DNA, 13 bp, Artificial Sequence
  Oligonucleotide for detection of SNP TSC0036821
gtatatgaaagta

SEQ ID NO: 146152 - DNA, 13 bp, Artificial Sequence
  Oligonucleotide for detection of SNP TSC0036821
tactttcatatac

SEQ ID NO: 146153 - DNA, 13 bp, Artificial Sequence
  Oligonucleotide for detection of SNP TSC0036821
gtatataaaagta

SEQ ID NO: 146154 - DNA, 13 bp, Artificial Sequence
  Oligonucleotide for detection of SNP TSC0036821
tacttttatatac

SEQ ID NO: 146155 - DNA, 13 bp, Artificial Sequence
  Oligonucleotide for detection of SNP TSC0036821
gtatacgaaagta

SEQ ID NO: 146156 - DNA, 13 bp, Artificial Sequence
  Oligonucleotide for detection of SNP TSC0036821
tactttcgtatac

SEQ ID NO: 146157 - DNA, 13 bp, Artificial Sequence
  Oligonucleotide for detection of SNP TSC0036825
atttaaaaagttt

SEQ ID NO: 146158 - DNA, 13 bp, Artificial Sequence
  Oligonucleotide for detection of SNP TSC0036825
aaactttttaaat

SEQ ID NO: 146159 - DNA, 13 bp, Artificial Sequence
  Oligonucleotide for detection of SNP TSC0036825
atttaataagttt

SEQ ID NO: 146160 - DNA, 13 bp, Artificial Sequence
  Oligonucleotide for detection of SNP TSC0036825
aaacttattaaat

SEQ ID NO: 146161 - DNA, 13 bp, Artificial Sequence
  Oligonucleotide for detection of SNP TSC0036825
aagttttttagat

SEQ ID NO: 146162 - DNA, 13 bp, Artificial Sequence
  Oligonucleotide for detection of SNP TSC0036825
atctaaaaaactt

SEQ ID NO: 146163 - DNA, 13 bp, Artificial Sequence
  Oligonucleotide for detection of SNP TSC0036825
aagtttattagat

SEQ ID NO: 146164 - DNA, 13 bp, Artificial Sequence
  Oligonucleotide for detection of SNP TSC0036825
atctaataaactt

SEQ ID NO: 146165 - DNA, 13 bp, Artificial Sequence
  Oligonucleotide for detection of SNP TSC0036828
attaataagttay

SEQ ID NO: 146166 - DNA, 13 bp, Artificial Sequence
  Oligonucleotide for detection of SNP TSC0036828
rtaacttattaat

SEQ ID NO: 146167 - DNA, 13 bp, Artificial Sequence
  Oligonucleotide for detection of SNP TSC0036828
attaattagttay

SEQ ID NO: 146168 - DNA, 13 bp, Artificial Sequence
  Oligonucleotide for detection of SNP TSC0036828
rtaactaattaat

SEQ ID NO: 146169 - DNA, 13 bp, Artificial Sequence
  Oligonucleotide for detection of SNP TSC0036828
gtgatttgttagt

SEQ ID NO: 146170 - DNA, 13 bp, Artificial Sequence
  Oligonucleotide for detection of SNP TSC0036828
actaacaaatcac

SEQ ID NO: 146171 - DNA, 13 bp, Artificial Sequence
  Oligonucleotide for detection of SNP TSC0036828
gtgattggttagt

SEQ ID NO: 146172 - DNA, 13 bp, Artificial Sequence
  Oligonucleotide for detection of SNP TSC0036828
actaaccaatcac

SEQ ID NO: 146173 - DNA, 13 bp, Artificial Sequence
  Oligonucleotide for detection of SNP TSC0036829
gagtatatttttt

SEQ ID NO: 146174 - DNA, 13 bp, Artificial Sequence
  Oligonucleotide for detection of SNP TSC0036829
aaaaaatatactc

SEQ ID NO: 146175 - DNA, 13 bp, Artificial Sequence
  Oligonucleotide for detection of SNP TSC0036829
gagtatttttttt

SEQ ID NO: 146176 - DNA, 13 bp, Artificial Sequence
  Oligonucleotide for detection of SNP TSC0036829
aaaaaaaatactc

SEQ ID NO: 146177 - DNA, 13 bp, Artificial Sequence
  Oligonucleotide for detection of SNP TSC0036829
aaagagtgtatty

SEQ ID NO: 146178 - DNA, 13 bp, Artificial Sequence
  Oligonucleotide for detection of SNP TSC0036829
raatacactcttt

SEQ ID NO: 146179 - DNA, 13 bp, Artificial Sequence
  Oligonucleotide for detection of SNP TSC0036829
aaagagagtatty

SEQ ID NO: 146180 - DNA, 13 bp, Artificial Sequence
  Oligonucleotide for detection of SNP TSC0036829
raatactctcttt

SEQ ID NO: 146181 - DNA, 13 bp, Artificial Sequence
  Oligonucleotide for detection of SNP TSC0036833
tttttaataggat

SEQ ID NO: 146182 - DNA, 13 bp, Artificial Sequence
  Oligonucleotide for detection of SNP TSC0036833
atcctattaaaaa

SEQ ID NO: 146183 - DNA, 13 bp, Artificial Sequence
  Oligonucleotide for detection of SNP TSC0036833
tttttagtaggat

SEQ ID NO: 146184 - DNA, 13 bp, Artificial Sequence
  Oligonucleotide for detection of SNP TSC0036833
atcctactaaaaa

SEQ ID NO: 146185 - DNA, 13 bp, Artificial Sequence
  Oligonucleotide for detection of SNP TSC0036835
atttttaatttat

SEQ ID NO: 146186 - DNA, 13 bp, Artificial Sequence
  Oligonucleotide for detection of SNP TSC0036835
ataaattaaaaat

SEQ ID NO: 146187 - DNA, 13 bp, Artificial Sequence
  Oligonucleotide for detection of SNP TSC0036835
atttttgatttat

SEQ ID NO: 146188 - DNA, 13 bp, Artificial Sequence
  Oligonucleotide for detection of SNP TSC0036835
ataaatcaaaaat

SEQ ID NO: 146189 - DNA, 13 bp, Artificial Sequence
  Oligonucleotide for detection of SNP TSC0036835
attttcgatttat

SEQ ID NO: 146190 - DNA, 13 bp, Artificial Sequence
  Oligonucleotide for detection of SNP TSC0036835
ataaatcgaaaat

SEQ ID NO: 146191 - DNA, 13 bp, Artificial Sequence
  Oligonucleotide for detection of SNP TSC0036835
atgaattggaaat

SEQ ID NO: 146192 - DNA, 13 bp, Artificial Sequence
  Oligonucleotide for detection of SNP TSC0036835
atttccaattcat

SEQ ID NO: 146193 - DNA, 13 bp, Artificial Sequence
  Oligonucleotide for detection of SNP TSC0036835
atgaatcggaaat

SEQ ID NO: 146194 - DNA, 13 bp, Artificial Sequence
  Oligonucleotide for detection of SNP TSC0036835
atttccgattcat

SEQ ID NO: 146195 - DNA, 13 bp, Artificial Sequence
  Oligonucleotide for detection of SNP TSC0036837
atgtgtaataaaa

SEQ ID NO: 146196 - DNA, 13 bp, Artificial Sequence
  Oligonucleotide for detection of SNP TSC0036837
ttttattacacat

SEQ ID NO: 146197 - DNA, 13 bp, Artificial Sequence
  Oligonucleotide for detection of SNP TSC0036837
atgtgtgataaaa

SEQ ID NO: 146198 - DNA, 13 bp, Artificial Sequence
  Oligonucleotide for detection of SNP TSC0036837
ttttatcacacat

SEQ ID NO: 146199 - DNA, 13 bp, Artificial Sequence
  Oligonucleotide for detection of SNP TSC0036837
atgtgcgataaaa

SEQ ID NO: 146200 - DNA, 13 bp, Artificial Sequence
  Oligonucleotide for detection of SNP TSC0036837
ttttatcgcacat

SEQ ID NO: 146201 - DNA, 13 bp, Artificial Sequence
  Oligonucleotide for detection of SNP TSC0036838
aataatgattatt

SEQ ID NO: 146202 - DNA, 13 bp, Artificial Sequence
  Oligonucleotide for detection of SNP TSC0036838
aataatcattatt

SEQ ID NO: 146203 - DNA, 13 bp, Artificial Sequence
  Oligonucleotide for detection of SNP TSC0036838
aataattattatt

SEQ ID NO: 146204 - DNA, 13 bp, Artificial Sequence
  Oligonucleotide for detection of SNP TSC0036838
aataataattatt

SEQ ID NO: 146205 - DNA, 13 bp, Artificial Sequence
  Oligonucleotide for detection of SNP TSC0036838
aatggttattatt

SEQ ID NO: 146206 - DNA, 13 bp, Artificial Sequence
  Oligonucleotide for detection of SNP TSC0036838
aataataaccatt

SEQ ID NO: 146207 - DNA, 13 bp, Artificial Sequence
  Oligonucleotide for detection of SNP TSC0036838
aatggtaattatt

SEQ ID NO: 146208 - DNA, 13 bp, Artificial Sequence
  Oligonucleotide for detection of SNP TSC0036838
aataattaccatt

SEQ ID NO: 146209 - DNA, 13 bp, Artificial Sequence
  Oligonucleotide for detection of SNP TSC0036839
tggatatgagttg

SEQ ID NO: 146210 - DNA, 13 bp, Artificial Sequence
  Oligonucleotide for detection of SNP TSC0036839
caactcatatcca

SEQ ID NO: 146211 - DNA, 13 bp, Artificial Sequence
  Oligonucleotide for detection of SNP TSC0036839
tggatacgagttg

SEQ ID NO: 146212 - DNA, 13 bp, Artificial Sequence
  Oligonucleotide for detection of SNP TSC0036839
caactcgtatcca

SEQ ID NO: 146213 - DNA, 13 bp, Artificial Sequence
  Oligonucleotide for detection of SNP TSC0036839
tagtttatattta

SEQ ID NO: 146214 - DNA, 13 bp, Artificial Sequence
  Oligonucleotide for detection of SNP TSC0036839
taaatataaacta

SEQ ID NO: 146215 - DNA, 13 bp, Artificial Sequence
  Oligonucleotide for detection of SNP TSC0036839
tagttcgtattta

SEQ ID NO: 146216 - DNA, 13 bp, Artificial Sequence
  Oligonucleotide for detection of SNP TSC0036839
taaatacgaacta

SEQ ID NO: 146217 - DNA, 13 bp, Artificial Sequence
  Oligonucleotide for detection of SNP TSC0036842
tttttgtttttcg

SEQ ID NO: 146218 - DNA, 13 bp, Artificial Sequence
  Oligonucleotide for detection of SNP TSC0036842
cgaaaaacaaaaa

SEQ ID NO: 146219 - DNA, 13 bp, Artificial Sequence
  Oligonucleotide for detection of SNP TSC0036842
tttttggttttcg

SEQ ID NO: 146220 - DNA, 13 bp, Artificial Sequence
  Oligonucleotide for detection of SNP TSC0036842
cgaaaaccaaaaa

SEQ ID NO: 146221 - DNA, 13 bp, Artificial Sequence
  Oligonucleotide for detection of SNP TSC0036842
tgagaggtaaggg

SEQ ID NO: 146222 - DNA, 13 bp, Artificial Sequence
  Oligonucleotide for detection of SNP TSC0036842
cccttacctctca

SEQ ID NO: 146223 - DNA, 13 bp, Artificial Sequence
  Oligonucleotide for detection of SNP TSC0036842
tgagagttaaggg

SEQ ID NO: 146224 - DNA, 13 bp, Artificial Sequence
  Oligonucleotide for detection of SNP TSC0036842
cccttaactctca

SEQ ID NO: 146225 - DNA, 13 bp, Artificial Sequence
  Oligonucleotide for detection of SNP TSC0036842
cgagaggtaaggg

SEQ ID NO: 146226 - DNA, 13 bp, Artificial Sequence
  Oligonucleotide for detection of SNP TSC0036842
cccttacctctcg

SEQ ID NO: 146227 - DNA, 13 bp, Artificial Sequence
  Oligonucleotide for detection of SNP TSC0036842
cgagagttaaggg

SEQ ID NO: 146228 - DNA, 13 bp, Artificial Sequence
  Oligonucleotide for detection of SNP TSC0036842
cccttaactctcg

SEQ ID NO: 146229 - DNA, 13 bp, Artificial Sequence
  Oligonucleotide for detection of SNP TSC0036843
atttgggttagtt

SEQ ID NO: 146230 - DNA, 13 bp, Artificial Sequence
  Oligonucleotide for detection of SNP TSC0036843
aactaacccaaat

SEQ ID NO: 146231 - DNA, 13 bp, Artificial Sequence
  Oligonucleotide for detection of SNP TSC0036843
atttggattagtt

SEQ ID NO: 146232 - DNA, 13 bp, Artificial Sequence
  Oligonucleotide for detection of SNP TSC0036843
aactaatccaaat

SEQ ID NO: 146233 - DNA, 13 bp, Artificial Sequence
  Oligonucleotide for detection of SNP TSC0036844
agtttagtgtgga

SEQ ID NO: 146234 - DNA, 13 bp, Artificial Sequence
  Oligonucleotide for detection of SNP TSC0036844
tccacactaaact

SEQ ID NO: 146235 - DNA, 13 bp, Artificial Sequence
  Oligonucleotide for detection of SNP TSC0036844
agtttaatgtgga

SEQ ID NO: 146236 - DNA, 13 bp, Artificial Sequence
  Oligonucleotide for detection of SNP TSC0036844
tccacattaaact

SEQ ID NO: 146237 - DNA, 13 bp, Artificial Sequence
  Oligonucleotide for detection of SNP TSC0036844
agtttagtgcgga

SEQ ID NO: 146238 - DNA, 13 bp, Artificial Sequence
  Oligonucleotide for detection of SNP TSC0036844
tccgcactaaact

SEQ ID NO: 146239 - DNA, 13 bp, Artificial Sequence
  Oligonucleotide for detection of SNP TSC0036844
agtttaatgcgga

SEQ ID NO: 146240 - DNA, 13 bp, Artificial Sequence
  Oligonucleotide for detection of SNP TSC0036844
tccgcattaaact

SEQ ID NO: 146241 - DNA, 13 bp, Artificial Sequence
  Oligonucleotide for detection of SNP TSC0036845
tagatatattatt

SEQ ID NO: 146242 - DNA, 13 bp, Artificial Sequence
  Oligonucleotide for detection of SNP TSC0036845
aataatatatcta

SEQ ID NO: 146243 - DNA, 13 bp, Artificial Sequence
  Oligonucleotide for detection of SNP TSC0036845
tagatagattatt

SEQ ID NO: 146244 - DNA, 13 bp, Artificial Sequence
  Oligonucleotide for detection of SNP TSC0036845
aataatctatcta

SEQ ID NO: 146245 - DNA, 13 bp, Artificial Sequence
  Oligonucleotide for detection of SNP TSC0036845
agtgatgtgtttg

SEQ ID NO: 146246 - DNA, 13 bp, Artificial Sequence
  Oligonucleotide for detection of SNP TSC0036845
caaacacatcact

SEQ ID NO: 146247 - DNA, 13 bp, Artificial Sequence
  Oligonucleotide for detection of SNP TSC0036845
agtgatttgtttg

SEQ ID NO: 146248 - DNA, 13 bp, Artificial Sequence
  Oligonucleotide for detection of SNP TSC0036845
caaacaaatcact

SEQ ID NO: 146249 - DNA, 13 bp, Artificial Sequence
  Oligonucleotide for detection of SNP TSC0036846
gatttgatgggty

SEQ ID NO: 146250 - DNA, 13 bp, Artificial Sequence
  Oligonucleotide for detection of SNP TSC0036846
racccatcaaatc

SEQ ID NO: 146251 - DNA, 13 bp, Artificial Sequence
  Oligonucleotide for detection of SNP TSC0036846
gatttggtgggty

SEQ ID NO: 146252 - DNA, 13 bp, Artificial Sequence
  Oligonucleotide for detection of SNP TSC0036846
racccaccaaatc

SEQ ID NO: 146253 - DNA, 13 bp, Artificial Sequence
  Oligonucleotide for detection of SNP TSC0036847
agagtgtgtttty

SEQ ID NO: 146254 - DNA, 13 bp, Artificial Sequence
  Oligonucleotide for detection of SNP TSC0036847
raaaacacactct

SEQ ID NO: 146255 - DNA, 13 bp, Artificial Sequence
  Oligonucleotide for detection of SNP TSC0036847
agagtgcgtttty

SEQ ID NO: 146256 - DNA, 13 bp, Artificial Sequence
  Oligonucleotide for detection of SNP TSC0036847
raaaacgcactct

SEQ ID NO: 146257 - DNA, 13 bp, Artificial Sequence
  Oligonucleotide for detection of SNP TSC0036847
gggagtgtatttt

SEQ ID NO: 146258 - DNA, 13 bp, Artificial Sequence
  Oligonucleotide for detection of SNP TSC0036847
aaaatacactccc

SEQ ID NO: 146259 - DNA, 13 bp, Artificial Sequence
  Oligonucleotide for detection of SNP TSC0036847
gggagtatatttt

SEQ ID NO: 146260 - DNA, 13 bp, Artificial Sequence
  Oligonucleotide for detection of SNP TSC0036847
aaaatatactccc

SEQ ID NO: 146261 - DNA, 13 bp, Artificial Sequence
  Oligonucleotide for detection of SNP TSC0036847
gggagcgtatttt

SEQ ID NO: 146262 - DNA, 13 bp, Artificial Sequence
  Oligonucleotide for detection of SNP TSC0036847
aaaatacgctccc

SEQ ID NO: 146263 - DNA, 13 bp, Artificial Sequence
  Oligonucleotide for detection of SNP TSC0036849
taaattaggtaga

SEQ ID NO: 146264 - DNA, 13 bp, Artificial Sequence
  Oligonucleotide for detection of SNP TSC0036849
tctacctaattta

SEQ ID NO: 146265 - DNA, 13 bp, Artificial Sequence
  Oligonucleotide for detection of SNP TSC0036849
taaattgggtaga

SEQ ID NO: 146266 - DNA, 13 bp, Artificial Sequence
  Oligonucleotide for detection of SNP TSC0036849
tctacccaattta

SEQ ID NO: 146267 - DNA, 13 bp, Artificial Sequence
  Oligonucleotide for detection of SNP TSC0036850
tttttgaaaaaty

SEQ ID NO: 146268 - DNA, 13 bp, Artificial Sequence
  Oligonucleotide for detection of SNP TSC0036850
ratttttcaaaaa

SEQ ID NO: 146269 - DNA, 13 bp, Artificial Sequence
  Oligonucleotide for detection of SNP TSC0036850
tttttggaaaaty

SEQ ID NO: 146270 - DNA, 13 bp, Artificial Sequence
  Oligonucleotide for detection of SNP TSC0036850
rattttccaaaaa

SEQ ID NO: 146271 - DNA, 13 bp, Artificial Sequence
  Oligonucleotide for detection of SNP TSC0036851
ggtggtgtggggg

SEQ ID NO: 146272 - DNA, 13 bp, Artificial Sequence
  Oligonucleotide for detection of SNP TSC0036851
cccccacaccacc

SEQ ID NO: 146273 - DNA, 13 bp, Artificial Sequence
  Oligonucleotide for detection of SNP TSC0036851
ggtggtatggggg

SEQ ID NO: 146274 - DNA, 13 bp, Artificial Sequence
  Oligonucleotide for detection of SNP TSC0036851
cccccataccacc

SEQ ID NO: 146275 - DNA, 13 bp, Artificial Sequence
  Oligonucleotide for detection of SNP TSC0036851
ggtggcgtggggg

SEQ ID NO: 146276 - DNA, 13 bp, Artificial Sequence
  Oligonucleotide for detection of SNP TSC0036851
cccccacgccacc

SEQ ID NO: 146277 - DNA, 13 bp, Artificial Sequence
  Oligonucleotide for detection of SNP TSC0036852
gtaaggtggggag

SEQ ID NO: 146278 - DNA, 13 bp, Artificial Sequence
  Oligonucleotide for detection of SNP TSC0036852
ctccccaccttac

SEQ ID NO: 146279 - DNA, 13 bp, Artificial Sequence
  Oligonucleotide for detection of SNP TSC0036852
gtaagggggggag

SEQ ID NO: 146280 - DNA, 13 bp, Artificial Sequence
  Oligonucleotide for detection of SNP TSC0036852
ctcccccccttac

SEQ ID NO: 146281 - DNA, 13 bp, Artificial Sequence
  Oligonucleotide for detection of SNP TSC0036853
tgtttgtgaaggg

SEQ ID NO: 146282 - DNA, 13 bp, Artificial Sequence
  Oligonucleotide for detection of SNP TSC0036853
cccttcacaaaca

SEQ ID NO: 146283 - DNA, 13 bp, Artificial Sequence
  Oligonucleotide for detection of SNP TSC0036853
tgtttgggaaggg

SEQ ID NO: 146284 - DNA, 13 bp, Artificial Sequence
  Oligonucleotide for detection of SNP TSC0036853
cccttcccaaaca

SEQ ID NO: 146285 - DNA, 13 bp, Artificial Sequence
  Oligonucleotide for detection of SNP TSC0036853
tgtttgcgaaggg

SEQ ID NO: 146286 - DNA, 13 bp, Artificial Sequence
  Oligonucleotide for detection of SNP TSC0036853
cccttcgcaaaca

SEQ ID NO: 146287 - DNA, 13 bp, Artificial Sequence
  Oligonucleotide for detection of SNP TSC0036853
ttttttgtaggta

SEQ ID NO: 146288 - DNA, 13 bp, Artificial Sequence
  Oligonucleotide for detection of SNP TSC0036853
tacctacaaaaaa

SEQ ID NO: 146289 - DNA, 13 bp, Artificial Sequence
  Oligonucleotide for detection of SNP TSC0036853
tttttcgtaggta

SEQ ID NO: 146290 - DNA, 13 bp, Artificial Sequence
  Oligonucleotide for detection of SNP TSC0036853
tacctacgaaaaa

SEQ ID NO: 146291 - DNA, 13 bp, Artificial Sequence
  Oligonucleotide for detection of SNP TSC0036854
ggagttagagagy

SEQ ID NO: 146292 - DNA, 13 bp, Artificial Sequence
  Oligonucleotide for detection of SNP TSC0036854
rctctctaactcc

SEQ ID NO: 146293 - DNA, 13 bp, Artificial Sequence
  Oligonucleotide for detection of SNP TSC0036854
gttttttaattty

SEQ ID NO: 146294 - DNA, 13 bp, Artificial Sequence
  Oligonucleotide for detection of SNP TSC0036854
raaattaaaaaac

SEQ ID NO: 146295 - DNA, 13 bp, Artificial Sequence
  Oligonucleotide for detection of SNP TSC0036855
aattaggttggat

SEQ ID NO: 146296 - DNA, 13 bp, Artificial Sequence
  Oligonucleotide for detection of SNP TSC0036855
atccaacctaatt

SEQ ID NO: 146297 - DNA, 13 bp, Artificial Sequence
  Oligonucleotide for detection of SNP TSC0036855
aattagtttggat

SEQ ID NO: 146298 - DNA, 13 bp, Artificial Sequence
  Oligonucleotide for detection of SNP TSC0036855
atccaaactaatt

SEQ ID NO: 146299 - DNA, 13 bp, Artificial Sequence
  Oligonucleotide for detection of SNP TSC0036855
atttaatttgatt

SEQ ID NO: 146300 - DNA, 13 bp, Artificial Sequence
  Oligonucleotide for detection of SNP TSC0036855
aatcaaattaaat

SEQ ID NO: 146301 - DNA, 13 bp, Artificial Sequence
  Oligonucleotide for detection of SNP TSC0036855
atttaaattgatt

SEQ ID NO: 146302 - DNA, 13 bp, Artificial Sequence
  Oligonucleotide for detection of SNP TSC0036855
aatcaatttaaat

SEQ ID NO: 146303 - DNA, 13 bp, Artificial Sequence
  Oligonucleotide for detection of SNP TSC0036862
ggtttattggata

SEQ ID NO: 146304 - DNA, 13 bp, Artificial Sequence
  Oligonucleotide for detection of SNP TSC0036862
tatccaataaacc

SEQ ID NO: 146305 - DNA, 13 bp, Artificial Sequence
  Oligonucleotide for detection of SNP TSC0036862
tatttagtgagty

SEQ ID NO: 146306 - DNA, 13 bp, Artificial Sequence
  Oligonucleotide for detection of SNP TSC0036862
ractcactaaata

SEQ ID NO: 146307 - DNA, 13 bp, Artificial Sequence
  Oligonucleotide for detection of SNP TSC0036862
tatttattgagty

SEQ ID NO: 146308 - DNA, 13 bp, Artificial Sequence
  Oligonucleotide for detection of SNP TSC0036862
ractcaataaata

SEQ ID NO: 146309 - DNA, 13 bp, Artificial Sequence
  Oligonucleotide for detection of SNP TSC0036864
ttttttgtagaaa

SEQ ID NO: 146310 - DNA, 13 bp, Artificial Sequence
  Oligonucleotide for detection of SNP TSC0036864
tttctacaaaaaa

SEQ ID NO: 146311 - DNA, 13 bp, Artificial Sequence
  Oligonucleotide for detection of SNP TSC0036867
taggtagttttga

SEQ ID NO: 146312 - DNA, 13 bp, Artificial Sequence
  Oligonucleotide for detection of SNP TSC0036867
tcaaaactaccta

SEQ ID NO: 146313 - DNA, 13 bp, Artificial Sequence
  Oligonucleotide for detection of SNP TSC0036867
taggtaattttga

SEQ ID NO: 146314 - DNA, 13 bp, Artificial Sequence
  Oligonucleotide for detection of SNP TSC0036867
tcaaaattaccta

SEQ ID NO: 146315 - DNA, 13 bp, Artificial Sequence
  Oligonucleotide for detection of SNP TSC0036868
gagtgtaggttay

SEQ ID NO: 146316 - DNA, 13 bp, Artificial Sequence
  Oligonucleotide for detection of SNP TSC0036868
rtaacctacactc

SEQ ID NO: 146317 - DNA, 13 bp, Artificial Sequence
  Oligonucleotide for detection of SNP TSC0036868
gagtgtgggttay

SEQ ID NO: 146318 - DNA, 13 bp, Artificial Sequence
  Oligonucleotide for detection of SNP TSC0036868
rtaacccacactc

SEQ ID NO: 146319 - DNA, 13 bp, Artificial Sequence
  Oligonucleotide for detection of SNP TSC0036869
aattaggtattay

SEQ ID NO: 146320 - DNA, 13 bp, Artificial Sequence
  Oligonucleotide for detection of SNP TSC0036869
rtaatacctaatt

SEQ ID NO: 146321 - DNA, 13 bp, Artificial Sequence
  Oligonucleotide for detection of SNP TSC0036869
aattagatattay

SEQ ID NO: 146322 - DNA, 13 bp, Artificial Sequence
  Oligonucleotide for detection of SNP TSC0036869
rtaatatctaatt

SEQ ID NO: 146323 - DNA, 13 bp, Artificial Sequence
  Oligonucleotide for detection of SNP TSC0036873
gtaatggagagaa

SEQ ID NO: 146324 - DNA, 13 bp, Artificial Sequence
  Oligonucleotide for detection of SNP TSC0036873
ttctctccattac

SEQ ID NO: 146325 - DNA, 13 bp, Artificial Sequence
  Oligonucleotide for detection of SNP TSC0036873
gtaatgtagagaa

SEQ ID NO: 146326 - DNA, 13 bp, Artificial Sequence
  Oligonucleotide for detection of SNP TSC0036873
ttctctacattac

SEQ ID NO: 146327 - DNA, 13 bp, Artificial Sequence
  Oligonucleotide for detection of SNP TSC0036873
ttttttttattay

SEQ ID NO: 146328 - DNA, 13 bp, Artificial Sequence
  Oligonucleotide for detection of SNP TSC0036873
rtaataaaaaaaa

SEQ ID NO: 146329 - DNA, 13 bp, Artificial Sequence
  Oligonucleotide for detection of SNP TSC0036875
gagatatgtagaa

SEQ ID NO: 146330 - DNA, 13 bp, Artificial Sequence
  Oligonucleotide for detection of SNP TSC0036875
ttctacatatctc

SEQ ID NO: 146331 - DNA, 13 bp, Artificial Sequence
  Oligonucleotide for detection of SNP TSC0036875
gagatacgtagaa

SEQ ID NO: 146332 - DNA, 13 bp, Artificial Sequence
  Oligonucleotide for detection of SNP TSC0036875
ttctacgtatctc

SEQ ID NO: 146333 - DNA, 13 bp, Artificial Sequence
  Oligonucleotide for detection of SNP TSC0036875
ttttatatgttty

SEQ ID NO: 146334 - DNA, 13 bp, Artificial Sequence
  Oligonucleotide for detection of SNP TSC0036875
raaacatataaaa

SEQ ID NO: 146335 - DNA, 13 bp, Artificial Sequence
  Oligonucleotide for detection of SNP TSC0036876
tatttagatgtag

SEQ ID NO: 146336 - DNA, 13 bp, Artificial Sequence
  Oligonucleotide for detection of SNP TSC0036876
ctacatctaaata

SEQ ID NO: 146337 - DNA, 13 bp, Artificial Sequence
  Oligonucleotide for detection of SNP TSC0036876
tatttaaatgtag

SEQ ID NO: 146338 - DNA, 13 bp, Artificial Sequence
  Oligonucleotide for detection of SNP TSC0036876
ctacatttaaata

SEQ ID NO: 146339 - DNA, 13 bp, Artificial Sequence
  Oligonucleotide for detection of SNP TSC0036878
ttggggggtgata

SEQ ID NO: 146340 - DNA, 13 bp, Artificial Sequence
  Oligonucleotide for detection of SNP TSC0036878
tatcaccccccaa

SEQ ID NO: 146341 - DNA, 13 bp, Artificial Sequence
  Oligonucleotide for detection of SNP TSC0036878
ttggggagtgata

SEQ ID NO: 146342 - DNA, 13 bp, Artificial Sequence
  Oligonucleotide for detection of SNP TSC0036878
tatcactccccaa

SEQ ID NO: 146343 - DNA, 13 bp, Artificial Sequence
  Oligonucleotide for detection of SNP TSC0036879
agtaaaattggta

SEQ ID NO: 146344 - DNA, 13 bp, Artificial Sequence
  Oligonucleotide for detection of SNP TSC0036879
taccaattttact

SEQ ID NO: 146345 - DNA, 13 bp, Artificial Sequence
  Oligonucleotide for detection of SNP TSC0036879
agtaaagttggta

SEQ ID NO: 146346 - DNA, 13 bp, Artificial Sequence
  Oligonucleotide for detection of SNP TSC0036879
taccaactttact

SEQ ID NO: 146347 - DNA, 13 bp, Artificial Sequence
  Oligonucleotide for detection of SNP TSC0036883
gaaggatgtatgt

SEQ ID NO: 146348 - DNA, 13 bp, Artificial Sequence
  Oligonucleotide for detection of SNP TSC0036883
acatacatccttc

SEQ ID NO: 146349 - DNA, 13 bp, Artificial Sequence
  Oligonucleotide for detection of SNP TSC0036883
gaaggacgtatgt

SEQ ID NO: 146350 - DNA, 13 bp, Artificial Sequence
  Oligonucleotide for detection of SNP TSC0036883
acatacgtccttc

SEQ ID NO: 146351 - DNA, 13 bp, Artificial Sequence
  Oligonucleotide for detection of SNP TSC0036883
gaaggatgtacgt

SEQ ID NO: 146352 - DNA, 13 bp, Artificial Sequence
  Oligonucleotide for detection of SNP TSC0036883
acgtacatccttc

SEQ ID NO: 146353 - DNA, 13 bp, Artificial Sequence
  Oligonucleotide for detection of SNP TSC0036883
gaaggacgtacgt

SEQ ID NO: 146354 - DNA, 13 bp, Artificial Sequence
  Oligonucleotide for detection of SNP TSC0036883
acgtacgtccttc

SEQ ID NO: 146355 - DNA, 13 bp, Artificial Sequence
  Oligonucleotide for detection of SNP TSC0036883
atgtgtgttttty

SEQ ID NO: 146356 - DNA, 13 bp, Artificial Sequence
  Oligonucleotide for detection of SNP TSC0036883
raaaaacacacat

SEQ ID NO: 146357 - DNA, 13 bp, Artificial Sequence
  Oligonucleotide for detection of SNP TSC0036883
atgtgtattttty

SEQ ID NO: 146358 - DNA, 13 bp, Artificial Sequence
  Oligonucleotide for detection of SNP TSC0036883
raaaaatacacat

SEQ ID NO: 146359 - DNA, 13 bp, Artificial Sequence
  Oligonucleotide for detection of SNP TSC0036883
acgtgtgttttty

SEQ ID NO: 146360 - DNA, 13 bp, Artificial Sequence
  Oligonucleotide for detection of SNP TSC0036883
raaaaacacacgt

SEQ ID NO: 146361 - DNA, 13 bp, Artificial Sequence
  Oligonucleotide for detection of SNP TSC0036883
acgtgtattttty

SEQ ID NO: 146362 - DNA, 13 bp, Artificial Sequence
  Oligonucleotide for detection of SNP TSC0036883
raaaaatacacgt

SEQ ID NO: 146363 - DNA, 13 bp, Artificial Sequence
  Oligonucleotide for detection of SNP TSC0036883
atgtgcgttttty

SEQ ID NO: 146364 - DNA, 13 bp, Artificial Sequence
  Oligonucleotide for detection of SNP TSC0036883
raaaaacgcacat

SEQ ID NO: 146365 - DNA, 13 bp, Artificial Sequence
  Oligonucleotide for detection of SNP TSC0036883
acgtgcgttttty

SEQ ID NO: 146366 - DNA, 13 bp, Artificial Sequence
  Oligonucleotide for detection of SNP TSC0036883
raaaaacgcacgt

SEQ ID NO: 146367 - DNA, 13 bp, Artificial Sequence
  Oligonucleotide for detection of SNP TSC0036884
aagagtaaaagaa

SEQ ID NO: 146368 - DNA, 13 bp, Artificial Sequence
  Oligonucleotide for detection of SNP TSC0036884
ttcttttactctt

SEQ ID NO: 146369 - DNA, 13 bp, Artificial Sequence
  Oligonucleotide for detection of SNP TSC0036884
aagagtgaaagaa

SEQ ID NO: 146370 - DNA, 13 bp, Artificial Sequence
  Oligonucleotide for detection of SNP TSC0036884
ttctttcactctt

SEQ ID NO: 146371 - DNA, 13 bp, Artificial Sequence
  Oligonucleotide for detection of SNP TSC0036884
aagagcgaaagaa

SEQ ID NO: 146372 - DNA, 13 bp, Artificial Sequence
  Oligonucleotide for detection of SNP TSC0036884
ttctttcgctctt

SEQ ID NO: 146373 - DNA, 13 bp, Artificial Sequence
  Oligonucleotide for detection of SNP TSC0036885
agataaatgtttt

SEQ ID NO: 146374 - DNA, 13 bp, Artificial Sequence
  Oligonucleotide for detection of SNP TSC0036885
aaaacatttatct

SEQ ID NO: 146375 - DNA, 13 bp, Artificial Sequence
  Oligonucleotide for detection of SNP TSC0036885
agataagtgtttt

SEQ ID NO: 146376 - DNA, 13 bp, Artificial Sequence
  Oligonucleotide for detection of SNP TSC0036885
aaaacacttatct

SEQ ID NO: 146377 - DNA, 13 bp, Artificial Sequence
  Oligonucleotide for detection of SNP TSC0036895
tttttaattgaaa

SEQ ID NO: 146378 - DNA, 13 bp, Artificial Sequence
  Oligonucleotide for detection of SNP TSC0036895
tttcaattaaaaa

SEQ ID NO: 146379 - DNA, 13 bp, Artificial Sequence
  Oligonucleotide for detection of SNP TSC0036895
tttttagttgaaa

SEQ ID NO: 146380 - DNA, 13 bp, Artificial Sequence
  Oligonucleotide for detection of SNP TSC0036895
tttcaactaaaaa

SEQ ID NO: 146381 - DNA, 13 bp, Artificial Sequence
  Oligonucleotide for detection of SNP TSC0036901
ttttgtaagatta

SEQ ID NO: 146382 - DNA, 13 bp, Artificial Sequence
  Oligonucleotide for detection of SNP TSC0036901
taatcttacaaaa

SEQ ID NO: 146383 - DNA, 13 bp, Artificial Sequence
  Oligonucleotide for detection of SNP TSC0036901
ttttgtgagatta

SEQ ID NO: 146384 - DNA, 13 bp, Artificial Sequence
  Oligonucleotide for detection of SNP TSC0036901
taatctcacaaaa

SEQ ID NO: 146385 - DNA, 13 bp, Artificial Sequence
  Oligonucleotide for detection of SNP TSC0036902
tgttttaagtgtt

SEQ ID NO: 146386 - DNA, 13 bp, Artificial Sequence
  Oligonucleotide for detection of SNP TSC0036902
aacacttaaaaca

SEQ ID NO: 146387 - DNA, 13 bp, Artificial Sequence
  Oligonucleotide for detection of SNP TSC0036902
tgtttttagtgtt

SEQ ID NO: 146388 - DNA, 13 bp, Artificial Sequence
  Oligonucleotide for detection of SNP TSC0036902
aacactaaaaaca

SEQ ID NO: 146389 - DNA, 13 bp, Artificial Sequence
  Oligonucleotide for detection of SNP TSC0036902
aatatttggaata

SEQ ID NO: 146390 - DNA, 13 bp, Artificial Sequence
  Oligonucleotide for detection of SNP TSC0036902
tattccaaatatt

SEQ ID NO: 146391 - DNA, 13 bp, Artificial Sequence
  Oligonucleotide for detection of SNP TSC0036902
aatattaggaata

SEQ ID NO: 146392 - DNA, 13 bp, Artificial Sequence
  Oligonucleotide for detection of SNP TSC0036902
tattcctaatatt

SEQ ID NO: 146393 - DNA, 13 bp, Artificial Sequence
  Oligonucleotide for detection of SNP TSC0036904
gtatgtaggttaa

SEQ ID NO: 146394 - DNA, 13 bp, Artificial Sequence
  Oligonucleotide for detection of SNP TSC0036904
ttaacctacatac

SEQ ID NO: 146395 - DNA, 13 bp, Artificial Sequence
  Oligonucleotide for detection of SNP TSC0036904
gtatgtgggttaa

SEQ ID NO: 146396 - DNA, 13 bp, Artificial Sequence
  Oligonucleotide for detection of SNP TSC0036904
ttaacccacatac

SEQ ID NO: 146397 - DNA, 13 bp, Artificial Sequence
  Oligonucleotide for detection of SNP TSC0036904
gtatgcgggttaa

SEQ ID NO: 146398 - DNA, 13 bp, Artificial Sequence
  Oligonucleotide for detection of SNP TSC0036904
ttaacccgcatac

SEQ ID NO: 146399 - DNA, 13 bp, Artificial Sequence
  Oligonucleotide for detection of SNP TSC0036904
ttggtttgtatay

SEQ ID NO: 146400 - DNA, 13 bp, Artificial Sequence
  Oligonucleotide for detection of SNP TSC0036904
rtatacaaaccaa

SEQ ID NO: 146401 - DNA, 13 bp, Artificial Sequence
  Oligonucleotide for detection of SNP TSC0036904
ttggttcgtatay

SEQ ID NO: 146402 - DNA, 13 bp, Artificial Sequence
  Oligonucleotide for detection of SNP TSC0036904
rtatacgaaccaa

SEQ ID NO: 146403 - DNA, 13 bp, Artificial Sequence
  Oligonucleotide for detection of SNP TSC0036905
aattaagttaaay

SEQ ID NO: 146404 - DNA, 13 bp, Artificial Sequence
  Oligonucleotide for detection of SNP TSC0036905
rtttaacttaatt

SEQ ID NO: 146405 - DNA, 13 bp, Artificial Sequence
  Oligonucleotide for detection of SNP TSC0036905
aattaaattaaay

SEQ ID NO: 146406 - DNA, 13 bp, Artificial Sequence
  Oligonucleotide for detection of SNP TSC0036905
rtttaatttaatt

SEQ ID NO: 146407 - DNA, 13 bp, Artificial Sequence
  Oligonucleotide for detection of SNP TSC0036906
ttagtgggttata

SEQ ID NO: 146408 - DNA, 13 bp, Artificial Sequence
  Oligonucleotide for detection of SNP TSC0036906
tataacccactaa

SEQ ID NO: 146409 - DNA, 13 bp, Artificial Sequence
  Oligonucleotide for detection of SNP TSC0036906
ttagtgagttata

SEQ ID NO: 146410 - DNA, 13 bp, Artificial Sequence
  Oligonucleotide for detection of SNP TSC0036906
tataactcactaa

SEQ ID NO: 146411 - DNA, 13 bp, Artificial Sequence
  Oligonucleotide for detection of SNP TSC0036908
aaaatagaaaata

SEQ ID NO: 146412 - DNA, 13 bp, Artificial Sequence
  Oligonucleotide for detection of SNP TSC0036908
tattttctatttt

SEQ ID NO: 146413 - DNA, 13 bp, Artificial Sequence
  Oligonucleotide for detection of SNP TSC0036908
tgttttttgtttt

SEQ ID NO: 146414 - DNA, 13 bp, Artificial Sequence
  Oligonucleotide for detection of SNP TSC0036908
aaaacaaaaaaca

SEQ ID NO: 146415 - DNA, 13 bp, Artificial Sequence
  Oligonucleotide for detection of SNP TSC0036909
tatgtttattagg

SEQ ID NO: 146416 - DNA, 13 bp, Artificial Sequence
  Oligonucleotide for detection of SNP TSC0036909
cctaataaacata

SEQ ID NO: 146417 - DNA, 13 bp, Artificial Sequence
  Oligonucleotide for detection of SNP TSC0036909
tatgttgattagg

SEQ ID NO: 146418 - DNA, 13 bp, Artificial Sequence
  Oligonucleotide for detection of SNP TSC0036909
cctaatcaacata

SEQ ID NO: 146419 - DNA, 13 bp, Artificial Sequence
  Oligonucleotide for detection of SNP TSC0036909
tttggtgaatata

SEQ ID NO: 146420 - DNA, 13 bp, Artificial Sequence
  Oligonucleotide for detection of SNP TSC0036909
tatattcaccaaa

SEQ ID NO: 146421 - DNA, 13 bp, Artificial Sequence
  Oligonucleotide for detection of SNP TSC0036909
tttggttaatata

SEQ ID NO: 146422 - DNA, 13 bp, Artificial Sequence
  Oligonucleotide for detection of SNP TSC0036909
tatattaaccaaa

SEQ ID NO: 146423 - DNA, 13 bp, Artificial Sequence
  Oligonucleotide for detection of SNP TSC0036912
agagatggagatg

SEQ ID NO: 146424 - DNA, 13 bp, Artificial Sequence
  Oligonucleotide for detection of SNP TSC0036912
catctccatctct

SEQ ID NO: 146425 - DNA, 13 bp, Artificial Sequence
  Oligonucleotide for detection of SNP TSC0036912
agagatagagatg

SEQ ID NO: 146426 - DNA, 13 bp, Artificial Sequence
  Oligonucleotide for detection of SNP TSC0036912
catctctatctct

SEQ ID NO: 146427 - DNA, 13 bp, Artificial Sequence
  Oligonucleotide for detection of SNP TSC0036912
agagacggagatg

SEQ ID NO: 146428 - DNA, 13 bp, Artificial Sequence
  Oligonucleotide for detection of SNP TSC0036912
catctccgtctct

SEQ ID NO: 146429 - DNA, 13 bp, Artificial Sequence
  Oligonucleotide for detection of SNP TSC0036913
aatgggggtttta

SEQ ID NO: 146430 - DNA, 13 bp, Artificial Sequence
  Oligonucleotide for detection of SNP TSC0036913
taaaacccccatt

SEQ ID NO: 146431 - DNA, 13 bp, Artificial Sequence
  Oligonucleotide for detection of SNP TSC0036913
aatgggagtttta

SEQ ID NO: 146432 - DNA, 13 bp, Artificial Sequence
  Oligonucleotide for detection of SNP TSC0036913
taaaactcccatt

SEQ ID NO: 146433 - DNA, 13 bp, Artificial Sequence
  Oligonucleotide for detection of SNP TSC0036920
tgtattatttagt

SEQ ID NO: 146434 - DNA, 13 bp, Artificial Sequence
  Oligonucleotide for detection of SNP TSC0036920
actaaataataca

SEQ ID NO: 146435 - DNA, 13 bp, Artificial Sequence
  Oligonucleotide for detection of SNP TSC0036920
tgtattttttagt

SEQ ID NO: 146436 - DNA, 13 bp, Artificial Sequence
  Oligonucleotide for detection of SNP TSC0036920
actaaaaaataca

SEQ ID NO: 146437 - DNA, 13 bp, Artificial Sequence
  Oligonucleotide for detection of SNP TSC0036920
attagatggtata

SEQ ID NO: 146438 - DNA, 13 bp, Artificial Sequence
  Oligonucleotide for detection of SNP TSC0036920
tataccatctaat

SEQ ID NO: 146439 - DNA, 13 bp, Artificial Sequence
  Oligonucleotide for detection of SNP TSC0036920
attagagggtata

SEQ ID NO: 146440 - DNA, 13 bp, Artificial Sequence
  Oligonucleotide for detection of SNP TSC0036920
tataccctctaat

SEQ ID NO: 146441 - DNA, 13 bp, Artificial Sequence
  Oligonucleotide for detection of SNP TSC0036924
tttttagtttgay

SEQ ID NO: 146442 - DNA, 13 bp, Artificial Sequence
  Oligonucleotide for detection of SNP TSC0036924
rtcaaactaaaaa

SEQ ID NO: 146443 - DNA, 13 bp, Artificial Sequence
  Oligonucleotide for detection of SNP TSC0036926
tgagaatgatttg

SEQ ID NO: 146444 - DNA, 13 bp, Artificial Sequence
  Oligonucleotide for detection of SNP TSC0036926
caaatcattctca

SEQ ID NO: 146445 - DNA, 13 bp, Artificial Sequence
  Oligonucleotide for detection of SNP TSC0036926
tgagaacgatttg

SEQ ID NO: 146446 - DNA, 13 bp, Artificial Sequence
  Oligonucleotide for detection of SNP TSC0036926
caaatcgttctca

SEQ ID NO: 146447 - DNA, 13 bp, Artificial Sequence
  Oligonucleotide for detection of SNP TSC0036926
taaattgttttta

SEQ ID NO: 146448 - DNA, 13 bp, Artificial Sequence
  Oligonucleotide for detection of SNP TSC0036926
taaaaacaattta

SEQ ID NO: 146449 - DNA, 13 bp, Artificial Sequence
  Oligonucleotide for detection of SNP TSC0036926
taaattattttta

SEQ ID NO: 146450 - DNA, 13 bp, Artificial Sequence
  Oligonucleotide for detection of SNP TSC0036926
taaaaataattta

SEQ ID NO: 146451 - DNA, 13 bp, Artificial Sequence
  Oligonucleotide for detection of SNP TSC0036926
taaatcgttttta

SEQ ID NO: 146452 - DNA, 13 bp, Artificial Sequence
  Oligonucleotide for detection of SNP TSC0036926
taaaaacgattta

SEQ ID NO: 146453 - DNA, 13 bp, Artificial Sequence
  Oligonucleotide for detection of SNP TSC0036930
tttagatgggagy

SEQ ID NO: 146454 - DNA, 13 bp, Artificial Sequence
  Oligonucleotide for detection of SNP TSC0036930
rctcccatctaaa

SEQ ID NO: 146455 - DNA, 13 bp, Artificial Sequence
  Oligonucleotide for detection of SNP TSC0036930
tttagacgggagy

SEQ ID NO: 146456 - DNA, 13 bp, Artificial Sequence
  Oligonucleotide for detection of SNP TSC0036930
rctcccgtctaaa

SEQ ID NO: 146457 - DNA, 13 bp, Artificial Sequence
  Oligonucleotide for detection of SNP TSC0036930
gtttttgtttgaa

SEQ ID NO: 146458 - DNA, 13 bp, Artificial Sequence
  Oligonucleotide for detection of SNP TSC0036930
ttcaaacaaaaac

SEQ ID NO: 146459 - DNA, 13 bp, Artificial Sequence
  Oligonucleotide for detection of SNP TSC0036930
gtttttatttgaa

SEQ ID NO: 146460 - DNA, 13 bp, Artificial Sequence
  Oligonucleotide for detection of SNP TSC0036930
ttcaaataaaaac

SEQ ID NO: 146461 - DNA, 13 bp, Artificial Sequence
  Oligonucleotide for detection of SNP TSC0036930
gttttcgtttgaa

SEQ ID NO: 146462 - DNA, 13 bp, Artificial Sequence
  Oligonucleotide for detection of SNP TSC0036930
ttcaaacgaaaac

SEQ ID NO: 146463 - DNA, 13 bp, Artificial Sequence
  Oligonucleotide for detection of SNP TSC0036932
tgggaaagaaaaa

SEQ ID NO: 146464 - DNA, 13 bp, Artificial Sequence
  Oligonucleotide for detection of SNP TSC0036932
tttttctttccca

SEQ ID NO: 146465 - DNA, 13 bp, Artificial Sequence
  Oligonucleotide for detection of SNP TSC0036932
tgggaaggaaaaa

SEQ ID NO: 146466 - DNA, 13 bp, Artificial Sequence
  Oligonucleotide for detection of SNP TSC0036932
tttttccttccca

SEQ ID NO: 146467 - DNA, 13 bp, Artificial Sequence
  Oligonucleotide for detection of SNP TSC0036936
tgtagtagtgtga

SEQ ID NO: 146468 - DNA, 13 bp, Artificial Sequence
  Oligonucleotide for detection of SNP TSC0036936
tcacactactaca

SEQ ID NO: 146469 - DNA, 13 bp, Artificial Sequence
  Oligonucleotide for detection of SNP TSC0036936
tgtagtggtgtga

SEQ ID NO: 146470 - DNA, 13 bp, Artificial Sequence
  Oligonucleotide for detection of SNP TSC0036936
tcacaccactaca

SEQ ID NO: 146471 - DNA, 13 bp, Artificial Sequence
  Oligonucleotide for detection of SNP TSC0036936
tgtagcggtgtga

SEQ ID NO: 146472 - DNA, 13 bp, Artificial Sequence
  Oligonucleotide for detection of SNP TSC0036936
tcacaccgctaca

SEQ ID NO: 146473 - DNA, 13 bp, Artificial Sequence
  Oligonucleotide for detection of SNP TSC0036936
ttatattgttgta

SEQ ID NO: 146474 - DNA, 13 bp, Artificial Sequence
  Oligonucleotide for detection of SNP TSC0036936
tacaacaatataa

SEQ ID NO: 146475 - DNA, 13 bp, Artificial Sequence
  Oligonucleotide for detection of SNP TSC0036936
ttatatcgttgta

SEQ ID NO: 146476 - DNA, 13 bp, Artificial Sequence
  Oligonucleotide for detection of SNP TSC0036936
tacaacgatataa

SEQ ID NO: 146477 - DNA, 13 bp, Artificial Sequence
  Oligonucleotide for detection of SNP TSC0036937
ttattgagatgty

SEQ ID NO: 146478 - DNA, 13 bp, Artificial Sequence
  Oligonucleotide for detection of SNP TSC0036937
racatctcaataa

SEQ ID NO: 146479 - DNA, 13 bp, Artificial Sequence
  Oligonucleotide for detection of SNP TSC0036937
ttattgtgatgty

SEQ ID NO: 146480 - DNA, 13 bp, Artificial Sequence
  Oligonucleotide for detection of SNP TSC0036937
racatcacaataa

SEQ ID NO: 146481 - DNA, 13 bp, Artificial Sequence
  Oligonucleotide for detection of SNP TSC0036937
ttattgcgatgty

SEQ ID NO: 146482 - DNA, 13 bp, Artificial Sequence
  Oligonucleotide for detection of SNP TSC0036937
racatcgcaataa

SEQ ID NO: 146483 - DNA, 13 bp, Artificial Sequence
  Oligonucleotide for detection of SNP TSC0036937
ggtattttaatgg

SEQ ID NO: 146484 - DNA, 13 bp, Artificial Sequence
  Oligonucleotide for detection of SNP TSC0036937
ccattaaaatacc

SEQ ID NO: 146485 - DNA, 13 bp, Artificial Sequence
  Oligonucleotide for detection of SNP TSC0036937
ggtattgtaatgg

SEQ ID NO: 146486 - DNA, 13 bp, Artificial Sequence
  Oligonucleotide for detection of SNP TSC0036937
ccattacaatacc

SEQ ID NO: 146487 - DNA, 13 bp, Artificial Sequence
  Oligonucleotide for detection of SNP TSC0036937
ggtatcgtaatgg

SEQ ID NO: 146488 - DNA, 13 bp, Artificial Sequence
  Oligonucleotide for detection of SNP TSC0036937
ccattacgatacc

SEQ ID NO: 146489 - DNA, 13 bp, Artificial Sequence
  Oligonucleotide for detection of SNP TSC0036938
ttttttggtgatg

SEQ ID NO: 146490 - DNA, 13 bp, Artificial Sequence
  Oligonucleotide for detection of SNP TSC0036938
catcaccaaaaaa

SEQ ID NO: 146491 - DNA, 13 bp, Artificial Sequence
  Oligonucleotide for detection of SNP TSC0036938
tattattaagagg

SEQ ID NO: 146492 - DNA, 13 bp, Artificial Sequence
  Oligonucleotide for detection of SNP TSC0036938
cctcttaataata

SEQ ID NO: 146493 - DNA, 13 bp, Artificial Sequence
  Oligonucleotide for detection of SNP TSC0036938
tattataaagagg

SEQ ID NO: 146494 - DNA, 13 bp, Artificial Sequence
  Oligonucleotide for detection of SNP TSC0036938
cctctttataata

SEQ ID NO: 146495 - DNA, 13 bp, Artificial Sequence
  Oligonucleotide for detection of SNP TSC0036939
ttggggagaggty

SEQ ID NO: 146496 - DNA, 13 bp, Artificial Sequence
  Oligonucleotide for detection of SNP TSC0036939
racctctccccaa

SEQ ID NO: 146497 - DNA, 13 bp, Artificial Sequence
  Oligonucleotide for detection of SNP TSC0036939
ttggggggaggty

SEQ ID NO: 146498 - DNA, 13 bp, Artificial Sequence
  Oligonucleotide for detection of SNP TSC0036939
racctccccccaa

SEQ ID NO: 146499 - DNA, 13 bp, Artificial Sequence
  Oligonucleotide for detection of SNP TSC0036940
ggagattgggggg

SEQ ID NO: 146500 - DNA, 13 bp, Artificial Sequence
  Oligonucleotide for detection of SNP TSC0036940
ccccccaatctcc

SEQ ID NO: 146501 - DNA, 13 bp, Artificial Sequence
  Oligonucleotide for detection of SNP TSC0036940
ggagatggggggg

SEQ ID NO: 146502 - DNA, 13 bp, Artificial Sequence
  Oligonucleotide for detection of SNP TSC0036940
cccccccatctcc

SEQ ID NO: 146503 - DNA, 13 bp, Artificial Sequence
  Oligonucleotide for detection of SNP TSC0036940
ggagatcgggggg

SEQ ID NO: 146504 - DNA, 13 bp, Artificial Sequence
  Oligonucleotide for detection of SNP TSC0036940
ccccccgatctcc

SEQ ID NO: 146505 - DNA, 13 bp, Artificial Sequence
  Oligonucleotide for detection of SNP TSC0036942
ttatatgttttaa

SEQ ID NO: 146506 - DNA, 13 bp, Artificial Sequence
  Oligonucleotide for detection of SNP TSC0036942
ttaaaacatataa

SEQ ID NO: 146507 - DNA, 13 bp, Artificial Sequence
  Oligonucleotide for detection of SNP TSC0036942
ttatatattttaa

SEQ ID NO: 146508 - DNA, 13 bp, Artificial Sequence
  Oligonucleotide for detection of SNP TSC0036942
ttaaaatatataa

SEQ ID NO: 146509 - DNA, 13 bp, Artificial Sequence
  Oligonucleotide for detection of SNP TSC0036944
gaaatagaaaaaa

SEQ ID NO: 146510 - DNA, 13 bp, Artificial Sequence
  Oligonucleotide for detection of SNP TSC0036944
ttttttctatttc

SEQ ID NO: 146511 - DNA, 13 bp, Artificial Sequence
  Oligonucleotide for detection of SNP TSC0036944
gaaatataaaaaa

SEQ ID NO: 146512 - DNA, 13 bp, Artificial Sequence
  Oligonucleotide for detection of SNP TSC0036944
ttttttatatttc

SEQ ID NO: 146513 - DNA, 13 bp, Artificial Sequence
  Oligonucleotide for detection of SNP TSC0036945
gatgttgaaagaa

SEQ ID NO: 146514 - DNA, 13 bp, Artificial Sequence
  Oligonucleotide for detection of SNP TSC0036945
ttctttcaacatc

SEQ ID NO: 146515 - DNA, 13 bp, Artificial Sequence
  Oligonucleotide for detection of SNP TSC0036945
gatgtttaaagaa

SEQ ID NO: 146516 - DNA, 13 bp, Artificial Sequence
  Oligonucleotide for detection of SNP TSC0036945
ttctttaaacatc

SEQ ID NO: 146517 - DNA, 13 bp, Artificial Sequence
  Oligonucleotide for detection of SNP TSC0036945
gatgtcgaaagaa

SEQ ID NO: 146518 - DNA, 13 bp, Artificial Sequence
  Oligonucleotide for detection of SNP TSC0036945
ttctttcgacatc

SEQ ID NO: 146519 - DNA, 13 bp, Artificial Sequence
  Oligonucleotide for detection of SNP TSC0036946
tgtattatttaty

SEQ ID NO: 146520 - DNA, 13 bp, Artificial Sequence
  Oligonucleotide for detection of SNP TSC0036946
rataaataataca

SEQ ID NO: 146521 - DNA, 13 bp, Artificial Sequence
  Oligonucleotide for detection of SNP TSC0036946
tgtattgtttaty

SEQ ID NO: 146522 - DNA, 13 bp, Artificial Sequence
  Oligonucleotide for detection of SNP TSC0036946
rataaacaataca

SEQ ID NO: 146523 - DNA, 13 bp, Artificial Sequence
  Oligonucleotide for detection of SNP TSC0036947
ttaggtattattt

SEQ ID NO: 146524 - DNA, 13 bp, Artificial Sequence
  Oligonucleotide for detection of SNP TSC0036947
aaataatacctaa

SEQ ID NO: 146525 - DNA, 13 bp, Artificial Sequence
  Oligonucleotide for detection of SNP TSC0036947
ttaggttttattt

SEQ ID NO: 146526 - DNA, 13 bp, Artificial Sequence
  Oligonucleotide for detection of SNP TSC0036947
aaataaaacctaa

SEQ ID NO: 146527 - DNA, 13 bp, Artificial Sequence
  Oligonucleotide for detection of SNP TSC0036948
atagggataattg

SEQ ID NO: 146528 - DNA, 13 bp, Artificial Sequence
  Oligonucleotide for detection of SNP TSC0036948
caattatccctat

SEQ ID NO: 146529 - DNA, 13 bp, Artificial Sequence
  Oligonucleotide for detection of SNP TSC0036948
ataggggtaattg

SEQ ID NO: 146530 - DNA, 13 bp, Artificial Sequence
  Oligonucleotide for detection of SNP TSC0036948
caattacccctat

SEQ ID NO: 146531 - DNA, 13 bp, Artificial Sequence
  Oligonucleotide for detection of SNP TSC0036949
gatttttatttta

SEQ ID NO: 146532 - DNA, 13 bp, Artificial Sequence
  Oligonucleotide for detection of SNP TSC0036949
taaaataaaaatc

SEQ ID NO: 146533 - DNA, 13 bp, Artificial Sequence
  Oligonucleotide for detection of SNP TSC0036949
gattttgatttta

SEQ ID NO: 146534 - DNA, 13 bp, Artificial Sequence
  Oligonucleotide for detection of SNP TSC0036949
taaaatcaaaatc

SEQ ID NO: 146535 - DNA, 13 bp, Artificial Sequence
  Oligonucleotide for detection of SNP TSC0036949
tgaaatgaaagty

SEQ ID NO: 146536 - DNA, 13 bp, Artificial Sequence
  Oligonucleotide for detection of SNP TSC0036949
ractttcatttca

SEQ ID NO: 146537 - DNA, 13 bp, Artificial Sequence
  Oligonucleotide for detection of SNP TSC0036949
tgaaattaaagty

SEQ ID NO: 146538 - DNA, 13 bp, Artificial Sequence
  Oligonucleotide for detection of SNP TSC0036949
ractttaatttca

SEQ ID NO: 146539 - DNA, 13 bp, Artificial Sequence
  Oligonucleotide for detection of SNP TSC0036953
gttttaattattt

SEQ ID NO: 146540 - DNA, 13 bp, Artificial Sequence
  Oligonucleotide for detection of SNP TSC0036953
aaataattaaaac

SEQ ID NO: 146541 - DNA, 13 bp, Artificial Sequence
  Oligonucleotide for detection of SNP TSC0036954
agtttgaggtaga

SEQ ID NO: 146542 - DNA, 13 bp, Artificial Sequence
  Oligonucleotide for detection of SNP TSC0036954
tctacctcaaact

SEQ ID NO: 146543 - DNA, 13 bp, Artificial Sequence
  Oligonucleotide for detection of SNP TSC0036954
agtttggggtaga

SEQ ID NO: 146544 - DNA, 13 bp, Artificial Sequence
  Oligonucleotide for detection of SNP TSC0036954
tctaccccaaact

SEQ ID NO: 146545 - DNA, 13 bp, Artificial Sequence
  Oligonucleotide for detection of SNP TSC0036955
ttttaaaatatta

SEQ ID NO: 146546 - DNA, 13 bp, Artificial Sequence
  Oligonucleotide for detection of SNP TSC0036955
taatattttaaaa

SEQ ID NO: 146547 - DNA, 13 bp, Artificial Sequence
  Oligonucleotide for detection of SNP TSC0036955
ttttaatatatta

SEQ ID NO: 146548 - DNA, 13 bp, Artificial Sequence
  Oligonucleotide for detection of SNP TSC0036955
taatatattaaaa

SEQ ID NO: 146549 - DNA, 13 bp, Artificial Sequence
  Oligonucleotide for detection of SNP TSC0036955
tagtattttaaag

SEQ ID NO: 146550 - DNA, 13 bp, Artificial Sequence
  Oligonucleotide for detection of SNP TSC0036955
ctttaaaatacta

SEQ ID NO: 146551 - DNA, 13 bp, Artificial Sequence
  Oligonucleotide for detection of SNP TSC0036955
tagtatgttaaag

SEQ ID NO: 146552 - DNA, 13 bp, Artificial Sequence
  Oligonucleotide for detection of SNP TSC0036955
ctttaacatacta

SEQ ID NO: 146553 - DNA, 13 bp, Artificial Sequence
  Oligonucleotide for detection of SNP TSC0036956
tgaaaataaaaaa

SEQ ID NO: 146554 - DNA, 13 bp, Artificial Sequence
  Oligonucleotide for detection of SNP TSC0036956
ttttttattttca

SEQ ID NO: 146555 - DNA, 13 bp, Artificial Sequence
  Oligonucleotide for detection of SNP TSC0036956
tgaaaaaaaaaaa

SEQ ID NO: 146556 - DNA, 13 bp, Artificial Sequence
  Oligonucleotide for detection of SNP TSC0036956
tttttttttttca

SEQ ID NO: 146557 - DNA, 13 bp, Artificial Sequence
  Oligonucleotide for detection of SNP TSC0036959
attataaatttag

SEQ ID NO: 146558 - DNA, 13 bp, Artificial Sequence
  Oligonucleotide for detection of SNP TSC0036959
ctaaatttataat

SEQ ID NO: 146559 - DNA, 13 bp, Artificial Sequence
  Oligonucleotide for detection of SNP TSC0036959
attatagatttag

SEQ ID NO: 146560 - DNA, 13 bp, Artificial Sequence
  Oligonucleotide for detection of SNP TSC0036959
ctaaatctataat

SEQ ID NO: 146561 - DNA, 13 bp, Artificial Sequence
  Oligonucleotide for detection of SNP TSC0036966
ataaatggaatay

SEQ ID NO: 146562 - DNA, 13 bp, Artificial Sequence
  Oligonucleotide for detection of SNP TSC0036966
rtattccatttat

SEQ ID NO: 146563 - DNA, 13 bp, Artificial Sequence
  Oligonucleotide for detection of SNP TSC0036966
ataaatagaatay

SEQ ID NO: 146564 - DNA, 13 bp, Artificial Sequence
  Oligonucleotide for detection of SNP TSC0036966
rtattctatttat

SEQ ID NO: 146565 - DNA, 13 bp, Artificial Sequence
  Oligonucleotide for detection of SNP TSC0036967
agggtgtgtgtty

SEQ ID NO: 146566 - DNA, 13 bp, Artificial Sequence
  Oligonucleotide for detection of SNP TSC0036967
raacacacaccct

SEQ ID NO: 146567 - DNA, 13 bp, Artificial Sequence
  Oligonucleotide for detection of SNP TSC0036967
agggtgcgtgtty

SEQ ID NO: 146568 - DNA, 13 bp, Artificial Sequence
  Oligonucleotide for detection of SNP TSC0036967
raacacgcaccct

SEQ ID NO: 146569 - DNA, 13 bp, Artificial Sequence
  Oligonucleotide for detection of SNP TSC0036968
ggtttggtatata

SEQ ID NO: 146570 - DNA, 13 bp, Artificial Sequence
  Oligonucleotide for detection of SNP TSC0036968
tatataccaaacc

SEQ ID NO: 146571 - DNA, 13 bp, Artificial Sequence
  Oligonucleotide for detection of SNP TSC0036968
ggtttgatatata

SEQ ID NO: 146572 - DNA, 13 bp, Artificial Sequence
  Oligonucleotide for detection of SNP TSC0036968
tatatatcaaacc

SEQ ID NO: 146573 - DNA, 13 bp, Artificial Sequence
  Oligonucleotide for detection of SNP TSC0036968
ggttcggtatata

SEQ ID NO: 146574 - DNA, 13 bp, Artificial Sequence
  Oligonucleotide for detection of SNP TSC0036968
tatataccgaacc

SEQ ID NO: 146575 - DNA, 13 bp, Artificial Sequence
  Oligonucleotide for detection of SNP TSC0036968
ggttcgatatata

SEQ ID NO: 146576 - DNA, 13 bp, Artificial Sequence
  Oligonucleotide for detection of SNP TSC0036968
tatatatcgaacc

SEQ ID NO: 146577 - DNA, 13 bp, Artificial Sequence
  Oligonucleotide for detection of SNP TSC0036969
atatgtgtatttt

SEQ ID NO: 146578 - DNA, 13 bp, Artificial Sequence
  Oligonucleotide for detection of SNP TSC0036969
aaaatacacatat

SEQ ID NO: 146579 - DNA, 13 bp, Artificial Sequence
  Oligonucleotide for detection of SNP TSC0036969
atatgtttatttt

SEQ ID NO: 146580 - DNA, 13 bp, Artificial Sequence
  Oligonucleotide for detection of SNP TSC0036969
aaaataaacatat

SEQ ID NO: 146581 - DNA, 13 bp, Artificial Sequence
  Oligonucleotide for detection of SNP TSC0036969
atacgtgtatttt

SEQ ID NO: 146582 - DNA, 13 bp, Artificial Sequence
  Oligonucleotide for detection of SNP TSC0036969
aaaatacacgtat

SEQ ID NO: 146583 - DNA, 13 bp, Artificial Sequence
  Oligonucleotide for detection of SNP TSC0036969
atacgtttatttt

SEQ ID NO: 146584 - DNA, 13 bp, Artificial Sequence
  Oligonucleotide for detection of SNP TSC0036969
aaaataaacgtat

SEQ ID NO: 146585 - DNA, 13 bp, Artificial Sequence
  Oligonucleotide for detection of SNP TSC0036969
aagatatatgtgt

SEQ ID NO: 146586 - DNA, 13 bp, Artificial Sequence
  Oligonucleotide for detection of SNP TSC0036969
acacatatatctt

SEQ ID NO: 146587 - DNA, 13 bp, Artificial Sequence
  Oligonucleotide for detection of SNP TSC0036969
aagataaatgtgt

SEQ ID NO: 146588 - DNA, 13 bp, Artificial Sequence
  Oligonucleotide for detection of SNP TSC0036969
acacatttatctt

SEQ ID NO: 146589 - DNA, 13 bp, Artificial Sequence
  Oligonucleotide for detection of SNP TSC0036969
aagatatacgtgt

SEQ ID NO: 146590 - DNA, 13 bp, Artificial Sequence
  Oligonucleotide for detection of SNP TSC0036969
acacgtatatctt

SEQ ID NO: 146591 - DNA, 13 bp, Artificial Sequence
  Oligonucleotide for detection of SNP TSC0036969
aagataaacgtgt

SEQ ID NO: 146592 - DNA, 13 bp, Artificial Sequence
  Oligonucleotide for detection of SNP TSC0036969
acacgtttatctt

SEQ ID NO: 146593 - DNA, 13 bp, Artificial Sequence
  Oligonucleotide for detection of SNP TSC0036970
atattggtttggg

SEQ ID NO: 146594 - DNA, 13 bp, Artificial Sequence
  Oligonucleotide for detection of SNP TSC0036970
cccaaaccaatat

SEQ ID NO: 146595 - DNA, 13 bp, Artificial Sequence
  Oligonucleotide for detection of SNP TSC0036970
atattgttttggg

SEQ ID NO: 146596 - DNA, 13 bp, Artificial Sequence
  Oligonucleotide for detection of SNP TSC0036970
cccaaaacaatat

SEQ ID NO: 146597 - DNA, 13 bp, Artificial Sequence
  Oligonucleotide for detection of SNP TSC0036970
tttaaattagtat

SEQ ID NO: 146598 - DNA, 13 bp, Artificial Sequence
  Oligonucleotide for detection of SNP TSC0036970
atactaatttaaa

SEQ ID NO: 146599 - DNA, 13 bp, Artificial Sequence
  Oligonucleotide for detection of SNP TSC0036970
tttaaaatagtat

SEQ ID NO: 146600 - DNA, 13 bp, Artificial Sequence
  Oligonucleotide for detection of SNP TSC0036970
atactattttaaa

SEQ ID NO: 146601 - DNA, 13 bp, Artificial Sequence
  Oligonucleotide for detection of SNP TSC0036971
gttggtaggggat

SEQ ID NO: 146602 - DNA, 13 bp, Artificial Sequence
  Oligonucleotide for detection of SNP TSC0036971
atcccctaccaac

SEQ ID NO: 146603 - DNA, 13 bp, Artificial Sequence
  Oligonucleotide for detection of SNP TSC0036971
gttggtgggggat

SEQ ID NO: 146604 - DNA, 13 bp, Artificial Sequence
  Oligonucleotide for detection of SNP TSC0036971
atcccccaccaac

SEQ ID NO: 146605 - DNA, 13 bp, Artificial Sequence
  Oligonucleotide for detection of SNP TSC0036971
gttggcgggggat

SEQ ID NO: 146606 - DNA, 13 bp, Artificial Sequence
  Oligonucleotide for detection of SNP TSC0036971
atcccccgccaac

SEQ ID NO: 146607 - DNA, 13 bp, Artificial Sequence
  Oligonucleotide for detection of SNP TSC0036971
attttttgttaay

SEQ ID NO: 146608 - DNA, 13 bp, Artificial Sequence
  Oligonucleotide for detection of SNP TSC0036971
rttaacaaaaaat

SEQ ID NO: 146609 - DNA, 13 bp, Artificial Sequence
  Oligonucleotide for detection of SNP TSC0036971
atttttcgttaay

SEQ ID NO: 146610 - DNA, 13 bp, Artificial Sequence
  Oligonucleotide for detection of SNP TSC0036971
rttaacgaaaaat

SEQ ID NO: 146611 - DNA, 13 bp, Artificial Sequence
  Oligonucleotide for detection of SNP TSC0036979
ttattggggaata

SEQ ID NO: 146612 - DNA, 13 bp, Artificial Sequence
  Oligonucleotide for detection of SNP TSC0036979
tattccccaataa

SEQ ID NO: 146613 - DNA, 13 bp, Artificial Sequence
  Oligonucleotide for detection of SNP TSC0036979
ttattgtggaata

SEQ ID NO: 146614 - DNA, 13 bp, Artificial Sequence
  Oligonucleotide for detection of SNP TSC0036979
tattccacaataa

SEQ ID NO: 146615 - DNA, 13 bp, Artificial Sequence
  Oligonucleotide for detection of SNP TSC0036979
tgttttttagtgg

SEQ ID NO: 146616 - DNA, 13 bp, Artificial Sequence
  Oligonucleotide for detection of SNP TSC0036979
ccactaaaaaaca

SEQ ID NO: 146617 - DNA, 13 bp, Artificial Sequence
  Oligonucleotide for detection of SNP TSC0036979
tgttttatagtgg

SEQ ID NO: 146618 - DNA, 13 bp, Artificial Sequence
  Oligonucleotide for detection of SNP TSC0036979
ccactataaaaca

SEQ ID NO: 146619 - DNA, 13 bp, Artificial Sequence
  Oligonucleotide for detection of SNP TSC0036980
attgttgggattg

SEQ ID NO: 146620 - DNA, 13 bp, Artificial Sequence
  Oligonucleotide for detection of SNP TSC0036980
caatcccaacaat

SEQ ID NO: 146621 - DNA, 13 bp, Artificial Sequence
  Oligonucleotide for detection of SNP TSC0036980
attgttaggattg

SEQ ID NO: 146622 - DNA, 13 bp, Artificial Sequence
  Oligonucleotide for detection of SNP TSC0036980
caatcctaacaat

SEQ ID NO: 146623 - DNA, 13 bp, Artificial Sequence
  Oligonucleotide for detection of SNP TSC0036981
aaatagattaaay

SEQ ID NO: 146624 - DNA, 13 bp, Artificial Sequence
  Oligonucleotide for detection of SNP TSC0036981
rtttaatctattt

SEQ ID NO: 146625 - DNA, 13 bp, Artificial Sequence
  Oligonucleotide for detection of SNP TSC0036981
aaatagtttaaay

SEQ ID NO: 146626 - DNA, 13 bp, Artificial Sequence
  Oligonucleotide for detection of SNP TSC0036981
rtttaaactattt

SEQ ID NO: 146627 - DNA, 13 bp, Artificial Sequence
  Oligonucleotide for detection of SNP TSC0036981
gtttggtttattt

SEQ ID NO: 146628 - DNA, 13 bp, Artificial Sequence
  Oligonucleotide for detection of SNP TSC0036981
aaataaaccaaac

SEQ ID NO: 146629 - DNA, 13 bp, Artificial Sequence
  Oligonucleotide for detection of SNP TSC0036981
gtttggattattt

SEQ ID NO: 146630 - DNA, 13 bp, Artificial Sequence
  Oligonucleotide for detection of SNP TSC0036981
aaataatccaaac

SEQ ID NO: 146631 - DNA, 13 bp, Artificial Sequence
  Oligonucleotide for detection of SNP TSC0036982
tggtgggtaaaty

SEQ ID NO: 146632 - DNA, 13 bp, Artificial Sequence
  Oligonucleotide for detection of SNP TSC0036982
ratttacccacca

SEQ ID NO: 146633 - DNA, 13 bp, Artificial Sequence
  Oligonucleotide for detection of SNP TSC0036982
tggtggataaaty

SEQ ID NO: 146634 - DNA, 13 bp, Artificial Sequence
  Oligonucleotide for detection of SNP TSC0036982
ratttatccacca

SEQ ID NO: 146635 - DNA, 13 bp, Artificial Sequence
  Oligonucleotide for detection of SNP TSC0036985
aaagagtttagta

SEQ ID NO: 146636 - DNA, 13 bp, Artificial Sequence
  Oligonucleotide for detection of SNP TSC0036985
tactaaactcttt

SEQ ID NO: 146637 - DNA, 13 bp, Artificial Sequence
  Oligonucleotide for detection of SNP TSC0036985
aaagaggttagta

SEQ ID NO: 146638 - DNA, 13 bp, Artificial Sequence
  Oligonucleotide for detection of SNP TSC0036985
tactaacctcttt

SEQ ID NO: 146639 - DNA, 13 bp, Artificial Sequence
  Oligonucleotide for detection of SNP TSC0036985
tattgggtttttt

SEQ ID NO: 146640 - DNA, 13 bp, Artificial Sequence
  Oligonucleotide for detection of SNP TSC0036985
aaaaaacccaata

SEQ ID NO: 146641 - DNA, 13 bp, Artificial Sequence
  Oligonucleotide for detection of SNP TSC0036985
tattggttttttt

SEQ ID NO: 146642 - DNA, 13 bp, Artificial Sequence
  Oligonucleotide for detection of SNP TSC0036985
aaaaaaaccaata

SEQ ID NO: 146643 - DNA, 13 bp, Artificial Sequence
  Oligonucleotide for detection of SNP TSC0036986
attgataaagaga

SEQ ID NO: 146644 - DNA, 13 bp, Artificial Sequence
  Oligonucleotide for detection of SNP TSC0036986
tctctttatcaat

SEQ ID NO: 146645 - DNA, 13 bp, Artificial Sequence
  Oligonucleotide for detection of SNP TSC0036986
attgattaagaga

SEQ ID NO: 146646 - DNA, 13 bp, Artificial Sequence
  Oligonucleotide for detection of SNP TSC0036986
tctcttaatcaat

SEQ ID NO: 146647 - DNA, 13 bp, Artificial Sequence
  Oligonucleotide for detection of SNP TSC0036986
tttttttgttaat

SEQ ID NO: 146648 - DNA, 13 bp, Artificial Sequence
  Oligonucleotide for detection of SNP TSC0036986
attaacaaaaaaa

SEQ ID NO: 146649 - DNA, 13 bp, Artificial Sequence
  Oligonucleotide for detection of SNP TSC0036987
ttattagaaggaa

SEQ ID NO: 146650 - DNA, 13 bp, Artificial Sequence
  Oligonucleotide for detection of SNP TSC0036987
ttccttctaataa

SEQ ID NO: 146651 - DNA, 13 bp, Artificial Sequence
  Oligonucleotide for detection of SNP TSC0036987
ttattaaaaggaa

SEQ ID NO: 146652 - DNA, 13 bp, Artificial Sequence
  Oligonucleotide for detection of SNP TSC0036987
ttccttttaataa

SEQ ID NO: 146653 - DNA, 13 bp, Artificial Sequence
  Oligonucleotide for detection of SNP TSC0036988
ttatagggtggag

SEQ ID NO: 146654 - DNA, 13 bp, Artificial Sequence
  Oligonucleotide for detection of SNP TSC0036988
ctccaccctataa

SEQ ID NO: 146655 - DNA, 13 bp, Artificial Sequence
  Oligonucleotide for detection of SNP TSC0036988
ttatagagtggag

SEQ ID NO: 146656 - DNA, 13 bp, Artificial Sequence
  Oligonucleotide for detection of SNP TSC0036988
ctccactctataa

SEQ ID NO: 146657 - DNA, 13 bp, Artificial Sequence
  Oligonucleotide for detection of SNP TSC0036988
ttatagggcggag

SEQ ID NO: 146658 - DNA, 13 bp, Artificial Sequence
  Oligonucleotide for detection of SNP TSC0036988
ctccgccctataa

SEQ ID NO: 146659 - DNA, 13 bp, Artificial Sequence
  Oligonucleotide for detection of SNP TSC0036988
ttatagagcggag

SEQ ID NO: 146660 - DNA, 13 bp, Artificial Sequence
  Oligonucleotide for detection of SNP TSC0036988
ctccgctctataa

SEQ ID NO: 146661 - DNA, 13 bp, Artificial Sequence
  Oligonucleotide for detection of SNP TSC0036989
tttggtgttagtt

SEQ ID NO: 146662 - DNA, 13 bp, Artificial Sequence
  Oligonucleotide for detection of SNP TSC0036989
aactaacaccaaa

SEQ ID NO: 146663 - DNA, 13 bp, Artificial Sequence
  Oligonucleotide for detection of SNP TSC0036989
tttggttttagtt

SEQ ID NO: 146664 - DNA, 13 bp, Artificial Sequence
  Oligonucleotide for detection of SNP TSC0036989
aactaaaaccaaa

SEQ ID NO: 146665 - DNA, 13 bp, Artificial Sequence
  Oligonucleotide for detection of SNP TSC0036989
tttggcgttagtt

SEQ ID NO: 146666 - DNA, 13 bp, Artificial Sequence
  Oligonucleotide for detection of SNP TSC0036989
aactaacgccaaa

SEQ ID NO: 146667 - DNA, 13 bp, Artificial Sequence
  Oligonucleotide for detection of SNP TSC0036989
aattgatgttaaa

SEQ ID NO: 146668 - DNA, 13 bp, Artificial Sequence
  Oligonucleotide for detection of SNP TSC0036989
tttaacatcaatt

SEQ ID NO: 146669 - DNA, 13 bp, Artificial Sequence
  Oligonucleotide for detection of SNP TSC0036989
aattgaagttaaa

SEQ ID NO: 146670 - DNA, 13 bp, Artificial Sequence
  Oligonucleotide for detection of SNP TSC0036989
tttaacttcaatt

SEQ ID NO: 146671 - DNA, 13 bp, Artificial Sequence
  Oligonucleotide for detection of SNP TSC0036989
aattgacgttaaa

SEQ ID NO: 146672 - DNA, 13 bp, Artificial Sequence
  Oligonucleotide for detection of SNP TSC0036989
tttaacgtcaatt

SEQ ID NO: 146673 - DNA, 13 bp, Artificial Sequence
  Oligonucleotide for detection of SNP TSC0036990
gttaataagtttt

SEQ ID NO: 146674 - DNA, 13 bp, Artificial Sequence
  Oligonucleotide for detection of SNP TSC0036990
aaaacttattaac

SEQ ID NO: 146675 - DNA, 13 bp, Artificial Sequence
  Oligonucleotide for detection of SNP TSC0036990
gttaattagtttt

SEQ ID NO: 146676 - DNA, 13 bp, Artificial Sequence
  Oligonucleotide for detection of SNP TSC0036990
aaaactaattaac

SEQ ID NO: 146677 - DNA, 13 bp, Artificial Sequence
  Oligonucleotide for detection of SNP TSC0036990
agagtttattgay

SEQ ID NO: 146678 - DNA, 13 bp, Artificial Sequence
  Oligonucleotide for detection of SNP TSC0036990
rtcaataaactct

SEQ ID NO: 146679 - DNA, 13 bp, Artificial Sequence
  Oligonucleotide for detection of SNP TSC0036990
agagttgattgay

SEQ ID NO: 146680 - DNA, 13 bp, Artificial Sequence
  Oligonucleotide for detection of SNP TSC0036990
rtcaatcaactct

SEQ ID NO: 146681 - DNA, 13 bp, Artificial Sequence
  Oligonucleotide for detection of SNP TSC0036993
agtgaatatatat

SEQ ID NO: 146682 - DNA, 13 bp, Artificial Sequence
  Oligonucleotide for detection of SNP TSC0036993
atatatattcact

SEQ ID NO: 146683 - DNA, 13 bp, Artificial Sequence
  Oligonucleotide for detection of SNP TSC0036993
agtgaaaatatat

SEQ ID NO: 146684 - DNA, 13 bp, Artificial Sequence
  Oligonucleotide for detection of SNP TSC0036993
atatattttcact

SEQ ID NO: 146685 - DNA, 13 bp, Artificial Sequence
  Oligonucleotide for detection of SNP TSC0036994
atattgtgattga

SEQ ID NO: 146686 - DNA, 13 bp, Artificial Sequence
  Oligonucleotide for detection of SNP TSC0036994
tcaatcacaatat

SEQ ID NO: 146687 - DNA, 13 bp, Artificial Sequence
  Oligonucleotide for detection of SNP TSC0036994
atattgcgattga

SEQ ID NO: 146688 - DNA, 13 bp, Artificial Sequence
  Oligonucleotide for detection of SNP TSC0036994
tcaatcgcaatat

SEQ ID NO: 146689 - DNA, 13 bp, Artificial Sequence
  Oligonucleotide for detection of SNP TSC0036994
ttaattgtagtat

SEQ ID NO: 146690 - DNA, 13 bp, Artificial Sequence
  Oligonucleotide for detection of SNP TSC0036994
atactacaattaa

SEQ ID NO: 146691 - DNA, 13 bp, Artificial Sequence
  Oligonucleotide for detection of SNP TSC0036994
ttaattatagtat

SEQ ID NO: 146692 - DNA, 13 bp, Artificial Sequence
  Oligonucleotide for detection of SNP TSC0036994
atactataattaa

SEQ ID NO: 146693 - DNA, 13 bp, Artificial Sequence
  Oligonucleotide for detection of SNP TSC0036994
ttaatcgtagtat

SEQ ID NO: 146694 - DNA, 13 bp, Artificial Sequence
  Oligonucleotide for detection of SNP TSC0036994
atactacgattaa

SEQ ID NO: 146695 - DNA, 13 bp, Artificial Sequence
  Oligonucleotide for detection of SNP TSC0036998
agtagtggagatg

SEQ ID NO: 146696 - DNA, 13 bp, Artificial Sequence
  Oligonucleotide for detection of SNP TSC0036998
catctccactact

SEQ ID NO: 146697 - DNA, 13 bp, Artificial Sequence
  Oligonucleotide for detection of SNP TSC0036998
agtagtagagatg

SEQ ID NO: 146698 - DNA, 13 bp, Artificial Sequence
  Oligonucleotide for detection of SNP TSC0036998
catctctactact

SEQ ID NO: 146699 - DNA, 13 bp, Artificial Sequence
  Oligonucleotide for detection of SNP TSC0036999
aattttagagata

SEQ ID NO: 146700 - DNA, 13 bp, Artificial Sequence
  Oligonucleotide for detection of SNP TSC0036999
tatctctaaaatt

SEQ ID NO: 146701 - DNA, 13 bp, Artificial Sequence
  Oligonucleotide for detection of SNP TSC0036999
aatttttgagata

SEQ ID NO: 146702 - DNA, 13 bp, Artificial Sequence
  Oligonucleotide for detection of SNP TSC0036999
tatctcaaaaatt

SEQ ID NO: 146703 - DNA, 13 bp, Artificial Sequence
  Oligonucleotide for detection of SNP TSC0036999
tatttttggggtt

SEQ ID NO: 146704 - DNA, 13 bp, Artificial Sequence
  Oligonucleotide for detection of SNP TSC0036999
aaccccaaaaata

SEQ ID NO: 146705 - DNA, 13 bp, Artificial Sequence
  Oligonucleotide for detection of SNP TSC0036999
tattttaggggtt

SEQ ID NO: 146706 - DNA, 13 bp, Artificial Sequence
  Oligonucleotide for detection of SNP TSC0036999
aacccctaaaata

SEQ ID NO: 146707 - DNA, 13 bp, Artificial Sequence
  Oligonucleotide for detection of SNP TSC0037000
tttttaggagtat

SEQ ID NO: 146708 - DNA, 13 bp, Artificial Sequence
  Oligonucleotide for detection of SNP TSC0037000
atactcctaaaaa

SEQ ID NO: 146709 - DNA, 13 bp, Artificial Sequence
  Oligonucleotide for detection of SNP TSC0037000
tttttaagagtat

SEQ ID NO: 146710 - DNA, 13 bp, Artificial Sequence
  Oligonucleotide for detection of SNP TSC0037000
atactcttaaaaa

SEQ ID NO: 146711 - DNA, 13 bp, Artificial Sequence
  Oligonucleotide for detection of SNP TSC0037001
attaatattttty

SEQ ID NO: 146712 - DNA, 13 bp, Artificial Sequence
  Oligonucleotide for detection of SNP TSC0037001
raaaaatattaat

SEQ ID NO: 146713 - DNA, 13 bp, Artificial Sequence
  Oligonucleotide for detection of SNP TSC0037001
attaattttttty

SEQ ID NO: 146714 - DNA, 13 bp, Artificial Sequence
  Oligonucleotide for detection of SNP TSC0037001
raaaaaaattaat

SEQ ID NO: 146715 - DNA, 13 bp, Artificial Sequence
  Oligonucleotide for detection of SNP TSC0037001
gaaaagtattgat

SEQ ID NO: 146716 - DNA, 13 bp, Artificial Sequence
  Oligonucleotide for detection of SNP TSC0037001
atcaatacttttc

SEQ ID NO: 146717 - DNA, 13 bp, Artificial Sequence
  Oligonucleotide for detection of SNP TSC0037001
gaaaaggattgat

SEQ ID NO: 146718 - DNA, 13 bp, Artificial Sequence
  Oligonucleotide for detection of SNP TSC0037001
atcaatccttttc

SEQ ID NO: 146719 - DNA, 13 bp, Artificial Sequence
  Oligonucleotide for detection of SNP TSC0037002
attattaaagtaa

SEQ ID NO: 146720 - DNA, 13 bp, Artificial Sequence
  Oligonucleotide for detection of SNP TSC0037002
ttactttaataat

SEQ ID NO: 146721 - DNA, 13 bp, Artificial Sequence
  Oligonucleotide for detection of SNP TSC0037002
attattgaagtaa

SEQ ID NO: 146722 - DNA, 13 bp, Artificial Sequence
  Oligonucleotide for detection of SNP TSC0037002
ttacttcaataat

SEQ ID NO: 146723 - DNA, 13 bp, Artificial Sequence
  Oligonucleotide for detection of SNP TSC0037003
tttgagggttaty

SEQ ID NO: 146724 - DNA, 13 bp, Artificial Sequence
  Oligonucleotide for detection of SNP TSC0037003
rataaccctcaaa

SEQ ID NO: 146725 - DNA, 13 bp, Artificial Sequence
  Oligonucleotide for detection of SNP TSC0037005
tttttttaaagty

SEQ ID NO: 146726 - DNA, 13 bp, Artificial Sequence
  Oligonucleotide for detection of SNP TSC0037005
ractttaaaaaaa

SEQ ID NO: 146727 - DNA, 13 bp, Artificial Sequence
  Oligonucleotide for detection of SNP TSC0037005
ttttttgaaagty

SEQ ID NO: 146728 - DNA, 13 bp, Artificial Sequence
  Oligonucleotide for detection of SNP TSC0037005
ractttcaaaaaa

SEQ ID NO: 146729 - DNA, 13 bp, Artificial Sequence
  Oligonucleotide for detection of SNP TSC0037005
tttttcgaaagty

SEQ ID NO: 146730 - DNA, 13 bp, Artificial Sequence
  Oligonucleotide for detection of SNP TSC0037005
ractttcgaaaaa

SEQ ID NO: 146731 - DNA, 13 bp, Artificial Sequence
  Oligonucleotide for detection of SNP TSC0037005
ggttttggggaga

SEQ ID NO: 146732 - DNA, 13 bp, Artificial Sequence
  Oligonucleotide for detection of SNP TSC0037005
tctccccaaaacc

SEQ ID NO: 146733 - DNA, 13 bp, Artificial Sequence
  Oligonucleotide for detection of SNP TSC0037005
ggtttttgggaga

SEQ ID NO: 146734 - DNA, 13 bp, Artificial Sequence
  Oligonucleotide for detection of SNP TSC0037005
tctcccaaaaacc

SEQ ID NO: 146735 - DNA, 13 bp, Artificial Sequence
  Oligonucleotide for detection of SNP TSC0037005
ggttttcgggaga

SEQ ID NO: 146736 - DNA, 13 bp, Artificial Sequence
  Oligonucleotide for detection of SNP TSC0037005
tctcccgaaaacc

SEQ ID NO: 146737 - DNA, 13 bp, Artificial Sequence
  Oligonucleotide for detection of SNP TSC0037006
gtattagaggatg

SEQ ID NO: 146738 - DNA, 13 bp, Artificial Sequence
  Oligonucleotide for detection of SNP TSC0037006
catcctctaatac

SEQ ID NO: 146739 - DNA, 13 bp, Artificial Sequence
  Oligonucleotide for detection of SNP TSC0037006
gtattaaaggatg

SEQ ID NO: 146740 - DNA, 13 bp, Artificial Sequence
  Oligonucleotide for detection of SNP TSC0037006
catcctttaatac

SEQ ID NO: 146741 - DNA, 13 bp, Artificial Sequence
  Oligonucleotide for detection of SNP TSC0037012
agtagaaaatgat

SEQ ID NO: 146742 - DNA, 13 bp, Artificial Sequence
  Oligonucleotide for detection of SNP TSC0037012
atcattttctact

SEQ ID NO: 146743 - DNA, 13 bp, Artificial Sequence
  Oligonucleotide for detection of SNP TSC0037012
agtagataatgat

SEQ ID NO: 146744 - DNA, 13 bp, Artificial Sequence
  Oligonucleotide for detection of SNP TSC0037012
atcattatctact

SEQ ID NO: 146745 - DNA, 13 bp, Artificial Sequence
  Oligonucleotide for detection of SNP TSC0037017
gatttgaaattag

SEQ ID NO: 146746 - DNA, 13 bp, Artificial Sequence
  Oligonucleotide for detection of SNP TSC0037017
ctaatttcaaatc

SEQ ID NO: 146747 - DNA, 13 bp, Artificial Sequence
  Oligonucleotide for detection of SNP TSC0037017
gatttggaattag

SEQ ID NO: 146748 - DNA, 13 bp, Artificial Sequence
  Oligonucleotide for detection of SNP TSC0037017
ctaattccaaatc

SEQ ID NO: 146749 - DNA, 13 bp, Artificial Sequence
  Oligonucleotide for detection of SNP TSC0037018
gttttaaatttta

SEQ ID NO: 146750 - DNA, 13 bp, Artificial Sequence
  Oligonucleotide for detection of SNP TSC0037018
taaaatttaaaac

SEQ ID NO: 146751 - DNA, 13 bp, Artificial Sequence
  Oligonucleotide for detection of SNP TSC0037018
gttttatatttta

SEQ ID NO: 146752 - DNA, 13 bp, Artificial Sequence
  Oligonucleotide for detection of SNP TSC0037018
taaaatataaaac

SEQ ID NO: 146753 - DNA, 13 bp, Artificial Sequence
  Oligonucleotide for detection of SNP TSC0037018
taaggtttgaagy

SEQ ID NO: 146754 - DNA, 13 bp, Artificial Sequence
  Oligonucleotide for detection of SNP TSC0037018
rcttcaaacctta

SEQ ID NO: 146755 - DNA, 13 bp, Artificial Sequence
  Oligonucleotide for detection of SNP TSC0037018
taaggtatgaagy

SEQ ID NO: 146756 - DNA, 13 bp, Artificial Sequence
  Oligonucleotide for detection of SNP TSC0037018
rcttcatacctta

SEQ ID NO: 146757 - DNA, 13 bp, Artificial Sequence
  Oligonucleotide for detection of SNP TSC0037019
tttgatttttata

SEQ ID NO: 146758 - DNA, 13 bp, Artificial Sequence
  Oligonucleotide for detection of SNP TSC0037019
tataaaaatcaaa

SEQ ID NO: 146759 - DNA, 13 bp, Artificial Sequence
  Oligonucleotide for detection of SNP TSC0037019
tataaggattaag

SEQ ID NO: 146760 - DNA, 13 bp, Artificial Sequence
  Oligonucleotide for detection of SNP TSC0037019
cttaatccttata

SEQ ID NO: 146761 - DNA, 13 bp, Artificial Sequence
  Oligonucleotide for detection of SNP TSC0037019
tataagtattaag

SEQ ID NO: 146762 - DNA, 13 bp, Artificial Sequence
  Oligonucleotide for detection of SNP TSC0037019
cttaatacttata

SEQ ID NO: 146763 - DNA, 13 bp, Artificial Sequence
  Oligonucleotide for detection of SNP TSC0037020
ttattttttttat

SEQ ID NO: 146764 - DNA, 13 bp, Artificial Sequence
  Oligonucleotide for detection of SNP TSC0037020
ataaaaaaaataa

SEQ ID NO: 146765 - DNA, 13 bp, Artificial Sequence
  Oligonucleotide for detection of SNP TSC0037020
atggggtagatga

SEQ ID NO: 146766 - DNA, 13 bp, Artificial Sequence
  Oligonucleotide for detection of SNP TSC0037020
tcatctaccccat

SEQ ID NO: 146767 - DNA, 13 bp, Artificial Sequence
  Oligonucleotide for detection of SNP TSC0037020
atggggaagatga

SEQ ID NO: 146768 - DNA, 13 bp, Artificial Sequence
  Oligonucleotide for detection of SNP TSC0037020
tcatcttccccat

SEQ ID NO: 146769 - DNA, 13 bp, Artificial Sequence
  Oligonucleotide for detection of SNP TSC0037021
agtagaattgttt

SEQ ID NO: 146770 - DNA, 13 bp, Artificial Sequence
  Oligonucleotide for detection of SNP TSC0037021
aaacaattctact

SEQ ID NO: 146771 - DNA, 13 bp, Artificial Sequence
  Oligonucleotide for detection of SNP TSC0037021
agtagagttgttt

SEQ ID NO: 146772 - DNA, 13 bp, Artificial Sequence
  Oligonucleotide for detection of SNP TSC0037021
aaacaactctact

SEQ ID NO: 146773 - DNA, 13 bp, Artificial Sequence
  Oligonucleotide for detection of SNP TSC0037022
aagttttgtgtta

SEQ ID NO: 146774 - DNA, 13 bp, Artificial Sequence
  Oligonucleotide for detection of SNP TSC0037022
taacacaaaactt

SEQ ID NO: 146775 - DNA, 13 bp, Artificial Sequence
  Oligonucleotide for detection of SNP TSC0037022
aagtttcgtgtta

SEQ ID NO: 146776 - DNA, 13 bp, Artificial Sequence
  Oligonucleotide for detection of SNP TSC0037022
taacacgaaactt

SEQ ID NO: 146777 - DNA, 13 bp, Artificial Sequence
  Oligonucleotide for detection of SNP TSC0037022
tgatatgaggttt

SEQ ID NO: 146778 - DNA, 13 bp, Artificial Sequence
  Oligonucleotide for detection of SNP TSC0037022
aaacctcatatca

SEQ ID NO: 146779 - DNA, 13 bp, Artificial Sequence
  Oligonucleotide for detection of SNP TSC0037022
tgatataaggttt

SEQ ID NO: 146780 - DNA, 13 bp, Artificial Sequence
  Oligonucleotide for detection of SNP TSC0037022
aaaccttatatca

SEQ ID NO: 146781 - DNA, 13 bp, Artificial Sequence
  Oligonucleotide for detection of SNP TSC0037022
tgatacgaggttt

SEQ ID NO: 146782 - DNA, 13 bp, Artificial Sequence
  Oligonucleotide for detection of SNP TSC0037022
aaacctcgtatca

SEQ ID NO: 146783 - DNA, 13 bp, Artificial Sequence
  Oligonucleotide for detection of SNP TSC0037024
gattataattatt

SEQ ID NO: 146784 - DNA, 13 bp, Artificial Sequence
  Oligonucleotide for detection of SNP TSC0037024
aataattataatc

SEQ ID NO: 146785 - DNA, 13 bp, Artificial Sequence
  Oligonucleotide for detection of SNP TSC0037024
gattatgattatt

SEQ ID NO: 146786 - DNA, 13 bp, Artificial Sequence
  Oligonucleotide for detection of SNP TSC0037024
aataatcataatc

SEQ ID NO: 146787 - DNA, 13 bp, Artificial Sequence
  Oligonucleotide for detection of SNP TSC0037025
tttttagggtatt

SEQ ID NO: 146788 - DNA, 13 bp, Artificial Sequence
  Oligonucleotide for detection of SNP TSC0037025
aataccctaaaaa

SEQ ID NO: 146789 - DNA, 13 bp, Artificial Sequence
  Oligonucleotide for detection of SNP TSC0037025
tttttatggtatt

SEQ ID NO: 146790 - DNA, 13 bp, Artificial Sequence
  Oligonucleotide for detection of SNP TSC0037025
aataccataaaaa

SEQ ID NO: 146791 - DNA, 13 bp, Artificial Sequence
  Oligonucleotide for detection of SNP TSC0037025
agtattttgagag

SEQ ID NO: 146792 - DNA, 13 bp, Artificial Sequence
  Oligonucleotide for detection of SNP TSC0037025
ctctcaaaatact

SEQ ID NO: 146793 - DNA, 13 bp, Artificial Sequence
  Oligonucleotide for detection of SNP TSC0037025
agtattatgagag

SEQ ID NO: 146794 - DNA, 13 bp, Artificial Sequence
  Oligonucleotide for detection of SNP TSC0037025
ctctcataatact

SEQ ID NO: 146795 - DNA, 13 bp, Artificial Sequence
  Oligonucleotide for detection of SNP TSC0037026
ttaaatgaaatat

SEQ ID NO: 146796 - DNA, 13 bp, Artificial Sequence
  Oligonucleotide for detection of SNP TSC0037026
atatttcatttaa

SEQ ID NO: 146797 - DNA, 13 bp, Artificial Sequence
  Oligonucleotide for detection of SNP TSC0037027
agtataattgtaa

SEQ ID NO: 146798 - DNA, 13 bp, Artificial Sequence
  Oligonucleotide for detection of SNP TSC0037027
ttacaattatact

SEQ ID NO: 146799 - DNA, 13 bp, Artificial Sequence
  Oligonucleotide for detection of SNP TSC0037027
agtatatttgtaa

SEQ ID NO: 146800 - DNA, 13 bp, Artificial Sequence
  Oligonucleotide for detection of SNP TSC0037027
ttacaaatatact

SEQ ID NO: 146801 - DNA, 13 bp, Artificial Sequence
  Oligonucleotide for detection of SNP TSC0037027
ttgtagttgtgtt

SEQ ID NO: 146802 - DNA, 13 bp, Artificial Sequence
  Oligonucleotide for detection of SNP TSC0037027
aacacaactacaa

SEQ ID NO: 146803 - DNA, 13 bp, Artificial Sequence
  Oligonucleotide for detection of SNP TSC0037027
ttgtaggtgtgtt

SEQ ID NO: 146804 - DNA, 13 bp, Artificial Sequence
  Oligonucleotide for detection of SNP TSC0037027
aacacacctacaa

SEQ ID NO: 146805 - DNA, 13 bp, Artificial Sequence
  Oligonucleotide for detection of SNP TSC0037029
ttaggtatggttg

SEQ ID NO: 146806 - DNA, 13 bp, Artificial Sequence
  Oligonucleotide for detection of SNP TSC0037029
caaccatacctaa

SEQ ID NO: 146807 - DNA, 13 bp, Artificial Sequence
  Oligonucleotide for detection of SNP TSC0037029
ttaggtgtggttg

SEQ ID NO: 146808 - DNA, 13 bp, Artificial Sequence
  Oligonucleotide for detection of SNP TSC0037029
caaccacacctaa

SEQ ID NO: 146809 - DNA, 13 bp, Artificial Sequence
  Oligonucleotide for detection of SNP TSC0037029
ttaggcgtggttg

SEQ ID NO: 146810 - DNA, 13 bp, Artificial Sequence
  Oligonucleotide for detection of SNP TSC0037029
caaccacgcctaa

SEQ ID NO: 146811 - DNA, 13 bp, Artificial Sequence
  Oligonucleotide for detection of SNP TSC0037029
taattatgtttaa

SEQ ID NO: 146812 - DNA, 13 bp, Artificial Sequence
  Oligonucleotide for detection of SNP TSC0037029
ttaaacataatta

SEQ ID NO: 146813 - DNA, 13 bp, Artificial Sequence
  Oligonucleotide for detection of SNP TSC0037029
taattacgtttaa

SEQ ID NO: 146814 - DNA, 13 bp, Artificial Sequence
  Oligonucleotide for detection of SNP TSC0037029
ttaaacgtaatta

SEQ ID NO: 146815 - DNA, 13 bp, Artificial Sequence
  Oligonucleotide for detection of SNP TSC0037030
ttttttagtatty

SEQ ID NO: 146816 - DNA, 13 bp, Artificial Sequence
  Oligonucleotide for detection of SNP TSC0037030
raatactaaaaaa

SEQ ID NO: 146817 - DNA, 13 bp, Artificial Sequence
  Oligonucleotide for detection of SNP TSC0037030
gaatgttgggagg

SEQ ID NO: 146818 - DNA, 13 bp, Artificial Sequence
  Oligonucleotide for detection of SNP TSC0037030
cctcccaacattc

SEQ ID NO: 146819 - DNA, 13 bp, Artificial Sequence
  Oligonucleotide for detection of SNP TSC0037030
gaatgtggggagg

SEQ ID NO: 146820 - DNA, 13 bp, Artificial Sequence
  Oligonucleotide for detection of SNP TSC0037030
cctccccacattc

SEQ ID NO: 146821 - DNA, 13 bp, Artificial Sequence
  Oligonucleotide for detection of SNP TSC0037030
gaatgcggggagg

SEQ ID NO: 146822 - DNA, 13 bp, Artificial Sequence
  Oligonucleotide for detection of SNP TSC0037030
cctccccgcattc

SEQ ID NO: 146823 - DNA, 13 bp, Artificial Sequence
  Oligonucleotide for detection of SNP TSC0037031
tttagtatttaag

SEQ ID NO: 146824 - DNA, 13 bp, Artificial Sequence
  Oligonucleotide for detection of SNP TSC0037031
cttaaatactaaa

SEQ ID NO: 146825 - DNA, 13 bp, Artificial Sequence
  Oligonucleotide for detection of SNP TSC0037031
tttagtgtttaag

SEQ ID NO: 146826 - DNA, 13 bp, Artificial Sequence
  Oligonucleotide for detection of SNP TSC0037031
cttaaacactaaa

SEQ ID NO: 146827 - DNA, 13 bp, Artificial Sequence
  Oligonucleotide for detection of SNP TSC0037031
tttagcgtttaag

SEQ ID NO: 146828 - DNA, 13 bp, Artificial Sequence
  Oligonucleotide for detection of SNP TSC0037031
cttaaacgctaaa

SEQ ID NO: 146829 - DNA, 13 bp, Artificial Sequence
  Oligonucleotide for detection of SNP TSC0037031
tttgaatgttggg

SEQ ID NO: 146830 - DNA, 13 bp, Artificial Sequence
  Oligonucleotide for detection of SNP TSC0037031
cccaacattcaaa

SEQ ID NO: 146831 - DNA, 13 bp, Artificial Sequence
  Oligonucleotide for detection of SNP TSC0037031
tttgaacgttggg

SEQ ID NO: 146832 - DNA, 13 bp, Artificial Sequence
  Oligonucleotide for detection of SNP TSC0037031
cccaacgttcaaa

SEQ ID NO: 146833 - DNA, 13 bp, Artificial Sequence
  Oligonucleotide for detection of SNP TSC0037035
aagttatgatagt

SEQ ID NO: 146834 - DNA, 13 bp, Artificial Sequence
  Oligonucleotide for detection of SNP TSC0037035
actatcataactt

SEQ ID NO: 146835 - DNA, 13 bp, Artificial Sequence
  Oligonucleotide for detection of SNP TSC0037035
aagttacgatagt

SEQ ID NO: 146836 - DNA, 13 bp, Artificial Sequence
  Oligonucleotide for detection of SNP TSC0037035
actatcgtaactt

SEQ ID NO: 146837 - DNA, 13 bp, Artificial Sequence
  Oligonucleotide for detection of SNP TSC0037035
attgttgtagttt

SEQ ID NO: 146838 - DNA, 13 bp, Artificial Sequence
  Oligonucleotide for detection of SNP TSC0037035
aaactacaacaat

SEQ ID NO: 146839 - DNA, 13 bp, Artificial Sequence
  Oligonucleotide for detection of SNP TSC0037035
attgttatagttt

SEQ ID NO: 146840 - DNA, 13 bp, Artificial Sequence
  Oligonucleotide for detection of SNP TSC0037035
aaactataacaat

SEQ ID NO: 146841 - DNA, 13 bp, Artificial Sequence
  Oligonucleotide for detection of SNP TSC0037035
attgtcgtagttt

SEQ ID NO: 146842 - DNA, 13 bp, Artificial Sequence
  Oligonucleotide for detection of SNP TSC0037035
aaactacgacaat

SEQ ID NO: 146843 - DNA, 13 bp, Artificial Sequence
  Oligonucleotide for detection of SNP TSC0037037
tattaaaaaaaga

SEQ ID NO: 146844 - DNA, 13 bp, Artificial Sequence
  Oligonucleotide for detection of SNP TSC0037037
tctttttttaata

SEQ ID NO: 146845 - DNA, 13 bp, Artificial Sequence
  Oligonucleotide for detection of SNP TSC0037037
tattaagaaaaga

SEQ ID NO: 146846 - DNA, 13 bp, Artificial Sequence
  Oligonucleotide for detection of SNP TSC0037037
tcttttcttaata

SEQ ID NO: 146847 - DNA, 13 bp, Artificial Sequence
  Oligonucleotide for detection of SNP TSC0037038
atatttaaaaagy

SEQ ID NO: 146848 - DNA, 13 bp, Artificial Sequence
  Oligonucleotide for detection of SNP TSC0037038
rctttttaaatat

SEQ ID NO: 146849 - DNA, 13 bp, Artificial Sequence
  Oligonucleotide for detection of SNP TSC0037038
atattttaaaagy

SEQ ID NO: 146850 - DNA, 13 bp, Artificial Sequence
  Oligonucleotide for detection of SNP TSC0037038
rcttttaaaatat

SEQ ID NO: 146851 - DNA, 13 bp, Artificial Sequence
  Oligonucleotide for detection of SNP TSC0037039
attttgttaattt

SEQ ID NO: 146852 - DNA, 13 bp, Artificial Sequence
  Oligonucleotide for detection of SNP TSC0037039
aaattaacaaaat

SEQ ID NO: 146853 - DNA, 13 bp, Artificial Sequence
  Oligonucleotide for detection of SNP TSC0037039
attttggtaattt

SEQ ID NO: 146854 - DNA, 13 bp, Artificial Sequence
  Oligonucleotide for detection of SNP TSC0037039
aaattaccaaaat

SEQ ID NO: 146855 - DNA, 13 bp, Artificial Sequence
  Oligonucleotide for detection of SNP TSC0037039
atttcgttaattt

SEQ ID NO: 146856 - DNA, 13 bp, Artificial Sequence
  Oligonucleotide for detection of SNP TSC0037039
aaattaacgaaat

SEQ ID NO: 146857 - DNA, 13 bp, Artificial Sequence
  Oligonucleotide for detection of SNP TSC0037039
atttcggtaattt

SEQ ID NO: 146858 - DNA, 13 bp, Artificial Sequence
  Oligonucleotide for detection of SNP TSC0037039
aaattaccgaaat

SEQ ID NO: 146859 - DNA, 13 bp, Artificial Sequence
  Oligonucleotide for detection of SNP TSC0037039
aaattagtggagt

SEQ ID NO: 146860 - DNA, 13 bp, Artificial Sequence
  Oligonucleotide for detection of SNP TSC0037039
actccactaattt

SEQ ID NO: 146861 - DNA, 13 bp, Artificial Sequence
  Oligonucleotide for detection of SNP TSC0037039
aaattattggagt

SEQ ID NO: 146862 - DNA, 13 bp, Artificial Sequence
  Oligonucleotide for detection of SNP TSC0037039
actccaataattt

SEQ ID NO: 146863 - DNA, 13 bp, Artificial Sequence
  Oligonucleotide for detection of SNP TSC0037039
aaattagcggagt

SEQ ID NO: 146864 - DNA, 13 bp, Artificial Sequence
  Oligonucleotide for detection of SNP TSC0037039
actccgctaattt

SEQ ID NO: 146865 - DNA, 13 bp, Artificial Sequence
  Oligonucleotide for detection of SNP TSC0037039
aaattatcggagt

SEQ ID NO: 146866 - DNA, 13 bp, Artificial Sequence
  Oligonucleotide for detection of SNP TSC0037039
actccgataattt

SEQ ID NO: 146867 - DNA, 13 bp, Artificial Sequence
  Oligonucleotide for detection of SNP TSC0037040
tagtattatttay

SEQ ID NO: 146868 - DNA, 13 bp, Artificial Sequence
  Oligonucleotide for detection of SNP TSC0037040
rtaaataatacta

SEQ ID NO: 146869 - DNA, 13 bp, Artificial Sequence
  Oligonucleotide for detection of SNP TSC0037040
tagtatgatttay

SEQ ID NO: 146870 - DNA, 13 bp, Artificial Sequence
  Oligonucleotide for detection of SNP TSC0037040
rtaaatcatacta

SEQ ID NO: 146871 - DNA, 13 bp, Artificial Sequence
  Oligonucleotide for detection of SNP TSC0037040
gtagatgatattg

SEQ ID NO: 146872 - DNA, 13 bp, Artificial Sequence
  Oligonucleotide for detection of SNP TSC0037040
caatatcatctac

SEQ ID NO: 146873 - DNA, 13 bp, Artificial Sequence
  Oligonucleotide for detection of SNP TSC0037040
gtagattatattg

SEQ ID NO: 146874 - DNA, 13 bp, Artificial Sequence
  Oligonucleotide for detection of SNP TSC0037040
caatataatctac

SEQ ID NO: 146875 - DNA, 13 bp, Artificial Sequence
  Oligonucleotide for detection of SNP TSC0037042
gtagataggaggy

SEQ ID NO: 146876 - DNA, 13 bp, Artificial Sequence
  Oligonucleotide for detection of SNP TSC0037042
rcctcctatctac

SEQ ID NO: 146877 - DNA, 13 bp, Artificial Sequence
  Oligonucleotide for detection of SNP TSC0037042
gtagattggaggy

SEQ ID NO: 146878 - DNA, 13 bp, Artificial Sequence
  Oligonucleotide for detection of SNP TSC0037042
rcctccaatctac

SEQ ID NO: 146879 - DNA, 13 bp, Artificial Sequence
  Oligonucleotide for detection of SNP TSC0037042
gttttttgtttay

SEQ ID NO: 146880 - DNA, 13 bp, Artificial Sequence
  Oligonucleotide for detection of SNP TSC0037042
rtaaacaaaaaac

SEQ ID NO: 146881 - DNA, 13 bp, Artificial Sequence
  Oligonucleotide for detection of SNP TSC0037042
gtttttagtttay

SEQ ID NO: 146882 - DNA, 13 bp, Artificial Sequence
  Oligonucleotide for detection of SNP TSC0037042
rtaaactaaaaac

SEQ ID NO: 146883 - DNA, 13 bp, Artificial Sequence
  Oligonucleotide for detection of SNP TSC0037043
ttttgaataagay

SEQ ID NO: 146884 - DNA, 13 bp, Artificial Sequence
  Oligonucleotide for detection of SNP TSC0037043
rtcttattcaaaa

SEQ ID NO: 146885 - DNA, 13 bp, Artificial Sequence
  Oligonucleotide for detection of SNP TSC0037043
ttttgagtaagay

SEQ ID NO: 146886 - DNA, 13 bp, Artificial Sequence
  Oligonucleotide for detection of SNP TSC0037043
rtcttactcaaaa

SEQ ID NO: 146887 - DNA, 13 bp, Artificial Sequence
  Oligonucleotide for detection of SNP TSC0037049
gaagaaagttttt

SEQ ID NO: 146888 - DNA, 13 bp, Artificial Sequence
  Oligonucleotide for detection of SNP TSC0037049
aaaaactttcttc

SEQ ID NO: 146889 - DNA, 13 bp, Artificial Sequence
  Oligonucleotide for detection of SNP TSC0037049
gaagaaggttttt

SEQ ID NO: 146890 - DNA, 13 bp, Artificial Sequence
  Oligonucleotide for detection of SNP TSC0037049
aaaaaccttcttc

SEQ ID NO: 146891 - DNA, 13 bp, Artificial Sequence
  Oligonucleotide for detection of SNP TSC0037059
tgggtttgtttga

SEQ ID NO: 146892 - DNA, 13 bp, Artificial Sequence
  Oligonucleotide for detection of SNP TSC0037059
tcaaacaaaccca

SEQ ID NO: 146893 - DNA, 13 bp, Artificial Sequence
  Oligonucleotide for detection of SNP TSC0037059
tgggttcgtttga

SEQ ID NO: 146894 - DNA, 13 bp, Artificial Sequence
  Oligonucleotide for detection of SNP TSC0037059
tcaaacgaaccca

SEQ ID NO: 146895 - DNA, 13 bp, Artificial Sequence
  Oligonucleotide for detection of SNP TSC0037059
ttagatgaattta

SEQ ID NO: 146896 - DNA, 13 bp, Artificial Sequence
  Oligonucleotide for detection of SNP TSC0037059
taaattcatctaa

SEQ ID NO: 146897 - DNA, 13 bp, Artificial Sequence
  Oligonucleotide for detection of SNP TSC0037059
ttagataaattta

SEQ ID NO: 146898 - DNA, 13 bp, Artificial Sequence
  Oligonucleotide for detection of SNP TSC0037059
taaatttatctaa

SEQ ID NO: 146899 - DNA, 13 bp, Artificial Sequence
  Oligonucleotide for detection of SNP TSC0037059
ttagacgaattta

SEQ ID NO: 146900 - DNA, 13 bp, Artificial Sequence
  Oligonucleotide for detection of SNP TSC0037059
taaattcgtctaa

SEQ ID NO: 146901 - DNA, 13 bp, Artificial Sequence
  Oligonucleotide for detection of SNP TSC0037060
tgtattgtatgga

SEQ ID NO: 146902 - DNA, 13 bp, Artificial Sequence
  Oligonucleotide for detection of SNP TSC0037060
tccatacaataca

SEQ ID NO: 146903 - DNA, 13 bp, Artificial Sequence
  Oligonucleotide for detection of SNP TSC0037060
tgtattatatgga

SEQ ID NO: 146904 - DNA, 13 bp, Artificial Sequence
  Oligonucleotide for detection of SNP TSC0037060
tccatataataca

SEQ ID NO: 146905 - DNA, 13 bp, Artificial Sequence
  Oligonucleotide for detection of SNP TSC0037061
tgttttattttgy

SEQ ID NO: 146906 - DNA, 13 bp, Artificial Sequence
  Oligonucleotide for detection of SNP TSC0037061
rcaaaataaaaca

SEQ ID NO: 146907 - DNA, 13 bp, Artificial Sequence
  Oligonucleotide for detection of SNP TSC0037061
tgttttgttttgy

SEQ ID NO: 146908 - DNA, 13 bp, Artificial Sequence
  Oligonucleotide for detection of SNP TSC0037061
rcaaaacaaaaca

SEQ ID NO: 146909 - DNA, 13 bp, Artificial Sequence
  Oligonucleotide for detection of SNP TSC0037061
cgttttattttgy

SEQ ID NO: 146910 - DNA, 13 bp, Artificial Sequence
  Oligonucleotide for detection of SNP TSC0037061
rcaaaataaaacg

SEQ ID NO: 146911 - DNA, 13 bp, Artificial Sequence
  Oligonucleotide for detection of SNP TSC0037061
cgttttgttttgy

SEQ ID NO: 146912 - DNA, 13 bp, Artificial Sequence
  Oligonucleotide for detection of SNP TSC0037061
rcaaaacaaaacg

SEQ ID NO: 146913 - DNA, 13 bp, Artificial Sequence
  Oligonucleotide for detection of SNP TSC0037061
tgtttcgttttgy

SEQ ID NO: 146914 - DNA, 13 bp, Artificial Sequence
  Oligonucleotide for detection of SNP TSC0037061
rcaaaacgaaaca

SEQ ID NO: 146915 - DNA, 13 bp, Artificial Sequence
  Oligonucleotide for detection of SNP TSC0037061
cgtttcgttttgy

SEQ ID NO: 146916 - DNA, 13 bp, Artificial Sequence
  Oligonucleotide for detection of SNP TSC0037061
rcaaaacgaaacg

SEQ ID NO: 146917 - DNA, 13 bp, Artificial Sequence
  Oligonucleotide for detection of SNP TSC0037061
gtagaatgaggtg

SEQ ID NO: 146918 - DNA, 13 bp, Artificial Sequence
  Oligonucleotide for detection of SNP TSC0037061
cacctcattctac

SEQ ID NO: 146919 - DNA, 13 bp, Artificial Sequence
  Oligonucleotide for detection of SNP TSC0037061
gtagaatgaggcg

SEQ ID NO: 146920 - DNA, 13 bp, Artificial Sequence
  Oligonucleotide for detection of SNP TSC0037061
cgcctcattctac

SEQ ID NO: 146921 - DNA, 13 bp, Artificial Sequence
  Oligonucleotide for detection of SNP TSC0037061
gtagaacgaggtg

SEQ ID NO: 146922 - DNA, 13 bp, Artificial Sequence
  Oligonucleotide for detection of SNP TSC0037061
cacctcgttctac

SEQ ID NO: 146923 - DNA, 13 bp, Artificial Sequence
  Oligonucleotide for detection of SNP TSC0037061
gtagaacgaggcg

SEQ ID NO: 146924 - DNA, 13 bp, Artificial Sequence
  Oligonucleotide for detection of SNP TSC0037061
cgcctcgttctac

SEQ ID NO: 146925 - DNA, 13 bp, Artificial Sequence
  Oligonucleotide for detection of SNP TSC0037062
ttagtggttttta

SEQ ID NO: 146926 - DNA, 13 bp, Artificial Sequence
  Oligonucleotide for detection of SNP TSC0037062
taaaaaccactaa

SEQ ID NO: 146927 - DNA, 13 bp, Artificial Sequence
  Oligonucleotide for detection of SNP TSC0037064
taataagaaattg

SEQ ID NO: 146928 - DNA, 13 bp, Artificial Sequence
  Oligonucleotide for detection of SNP TSC0037064
caatttcttatta

SEQ ID NO: 146929 - DNA, 13 bp, Artificial Sequence
  Oligonucleotide for detection of SNP TSC0037064
taataaaaaattg

SEQ ID NO: 146930 - DNA, 13 bp, Artificial Sequence
  Oligonucleotide for detection of SNP TSC0037064
caattttttatta

SEQ ID NO: 146931 - DNA, 13 bp, Artificial Sequence
  Oligonucleotide for detection of SNP TSC0037066
gggggtgtggtga

SEQ ID NO: 146932 - DNA, 13 bp, Artificial Sequence
  Oligonucleotide for detection of SNP TSC0037066
tcaccacaccccc

SEQ ID NO: 146933 - DNA, 13 bp, Artificial Sequence
  Oligonucleotide for detection of SNP TSC0037066
gggggtatggtga

SEQ ID NO: 146934 - DNA, 13 bp, Artificial Sequence
  Oligonucleotide for detection of SNP TSC0037066
tcaccataccccc

SEQ ID NO: 146935 - DNA, 13 bp, Artificial Sequence
  Oligonucleotide for detection of SNP TSC0037066
gggggcgtggtga

SEQ ID NO: 146936 - DNA, 13 bp, Artificial Sequence
  Oligonucleotide for detection of SNP TSC0037066
tcaccacgccccc

SEQ ID NO: 146937 - DNA, 13 bp, Artificial Sequence
  Oligonucleotide for detection of SNP TSC0037067
tgtgaaaagaaaa

SEQ ID NO: 146938 - DNA, 13 bp, Artificial Sequence
  Oligonucleotide for detection of SNP TSC0037067
ttttcttttcaca

SEQ ID NO: 146939 - DNA, 13 bp, Artificial Sequence
  Oligonucleotide for detection of SNP TSC0037067
tgtgaagagaaaa

SEQ ID NO: 146940 - DNA, 13 bp, Artificial Sequence
  Oligonucleotide for detection of SNP TSC0037067
ttttctcttcaca

SEQ ID NO: 146941 - DNA, 13 bp, Artificial Sequence
  Oligonucleotide for detection of SNP TSC0037068
ttatttagttggy

SEQ ID NO: 146942 - DNA, 13 bp, Artificial Sequence
  Oligonucleotide for detection of SNP TSC0037068
rccaactaaataa

SEQ ID NO: 146943 - DNA, 13 bp, Artificial Sequence
  Oligonucleotide for detection of SNP TSC0037068
ttatttggttggy

SEQ ID NO: 146944 - DNA, 13 bp, Artificial Sequence
  Oligonucleotide for detection of SNP TSC0037068
rccaaccaaataa

SEQ ID NO: 146945 - DNA, 13 bp, Artificial Sequence
  Oligonucleotide for detection of SNP TSC0037069
aatattaaaataa

SEQ ID NO: 146946 - DNA, 13 bp, Artificial Sequence
  Oligonucleotide for detection of SNP TSC0037069
ttattttaatatt

SEQ ID NO: 146947 - DNA, 13 bp, Artificial Sequence
  Oligonucleotide for detection of SNP TSC0037069
aatattgaaataa

SEQ ID NO: 146948 - DNA, 13 bp, Artificial Sequence
  Oligonucleotide for detection of SNP TSC0037069
ttatttcaatatt

SEQ ID NO: 146949 - DNA, 13 bp, Artificial Sequence
  Oligonucleotide for detection of SNP TSC0037070
aatttatgattaa

SEQ ID NO: 146950 - DNA, 13 bp, Artificial Sequence
  Oligonucleotide for detection of SNP TSC0037070
ttaatcataaatt

SEQ ID NO: 146951 - DNA, 13 bp, Artificial Sequence
  Oligonucleotide for detection of SNP TSC0037070
aatttaggattaa

SEQ ID NO: 146952 - DNA, 13 bp, Artificial Sequence
  Oligonucleotide for detection of SNP TSC0037070
ttaatcctaaatt

SEQ ID NO: 146953 - DNA, 13 bp, Artificial Sequence
  Oligonucleotide for detection of SNP TSC0037070
aatttacgattaa

SEQ ID NO: 146954 - DNA, 13 bp, Artificial Sequence
  Oligonucleotide for detection of SNP TSC0037070
ttaatcgtaaatt

SEQ ID NO: 146955 - DNA, 13 bp, Artificial Sequence
  Oligonucleotide for detection of SNP TSC0037070
ttagttgtgggtt

SEQ ID NO: 146956 - DNA, 13 bp, Artificial Sequence
  Oligonucleotide for detection of SNP TSC0037070
aacccacaactaa

SEQ ID NO: 146957 - DNA, 13 bp, Artificial Sequence
  Oligonucleotide for detection of SNP TSC0037070
ttagttttgggtt

SEQ ID NO: 146958 - DNA, 13 bp, Artificial Sequence
  Oligonucleotide for detection of SNP TSC0037070
aacccaaaactaa

SEQ ID NO: 146959 - DNA, 13 bp, Artificial Sequence
  Oligonucleotide for detection of SNP TSC0037070
ttagtcgtgggtt

SEQ ID NO: 146960 - DNA, 13 bp, Artificial Sequence
  Oligonucleotide for detection of SNP TSC0037070
aacccacgactaa

SEQ ID NO: 146961 - DNA, 13 bp, Artificial Sequence
  Oligonucleotide for detection of SNP TSC0037071
agtttaatgaaat

SEQ ID NO: 146962 - DNA, 13 bp, Artificial Sequence
  Oligonucleotide for detection of SNP TSC0037071
atttcattaaact

SEQ ID NO: 146963 - DNA, 13 bp, Artificial Sequence
  Oligonucleotide for detection of SNP TSC0037071
agtttagtgaaat

SEQ ID NO: 146964 - DNA, 13 bp, Artificial Sequence
  Oligonucleotide for detection of SNP TSC0037071
atttcactaaact

SEQ ID NO: 146965 - DNA, 13 bp, Artificial Sequence
  Oligonucleotide for detection of SNP TSC0037075
aagtatggtttta

SEQ ID NO: 146966 - DNA, 13 bp, Artificial Sequence
  Oligonucleotide for detection of SNP TSC0037075
taaaaccatactt

SEQ ID NO: 146967 - DNA, 13 bp, Artificial Sequence
  Oligonucleotide for detection of SNP TSC0037075
aagtattgtttta

SEQ ID NO: 146968 - DNA, 13 bp, Artificial Sequence
  Oligonucleotide for detection of SNP TSC0037075
taaaacaatactt

SEQ ID NO: 146969 - DNA, 13 bp, Artificial Sequence
  Oligonucleotide for detection of SNP TSC0037075
aagtacggtttta

SEQ ID NO: 146970 - DNA, 13 bp, Artificial Sequence
  Oligonucleotide for detection of SNP TSC0037075
taaaaccgtactt

SEQ ID NO: 146971 - DNA, 13 bp, Artificial Sequence
  Oligonucleotide for detection of SNP TSC0037075
tgaagttgtattt

SEQ ID NO: 146972 - DNA, 13 bp, Artificial Sequence
  Oligonucleotide for detection of SNP TSC0037075
aaatacaacttca

SEQ ID NO: 146973 - DNA, 13 bp, Artificial Sequence
  Oligonucleotide for detection of SNP TSC0037075
tgaagtagtattt

SEQ ID NO: 146974 - DNA, 13 bp, Artificial Sequence
  Oligonucleotide for detection of SNP TSC0037075
aaatactacttca

SEQ ID NO: 146975 - DNA, 13 bp, Artificial Sequence
  Oligonucleotide for detection of SNP TSC0037075
tgaagtcgtattt

SEQ ID NO: 146976 - DNA, 13 bp, Artificial Sequence
  Oligonucleotide for detection of SNP TSC0037075
aaatacgacttca

SEQ ID NO: 146977 - DNA, 13 bp, Artificial Sequence
  Oligonucleotide for detection of SNP TSC0037076
ggttttagttatt

SEQ ID NO: 146978 - DNA, 13 bp, Artificial Sequence
  Oligonucleotide for detection of SNP TSC0037076
aataactaaaacc

SEQ ID NO: 146979 - DNA, 13 bp, Artificial Sequence
  Oligonucleotide for detection of SNP TSC0037076
ggttttggttatt

SEQ ID NO: 146980 - DNA, 13 bp, Artificial Sequence
  Oligonucleotide for detection of SNP TSC0037076
aataaccaaaacc

SEQ ID NO: 146981 - DNA, 13 bp, Artificial Sequence
  Oligonucleotide for detection of SNP TSC0037076
ggtttcggttatt

SEQ ID NO: 146982 - DNA, 13 bp, Artificial Sequence
  Oligonucleotide for detection of SNP TSC0037076
aataaccgaaacc

SEQ ID NO: 146983 - DNA, 13 bp, Artificial Sequence
  Oligonucleotide for detection of SNP TSC0037076
aataattgaagty

SEQ ID NO: 146984 - DNA, 13 bp, Artificial Sequence
  Oligonucleotide for detection of SNP TSC0037076
racttcaattatt

SEQ ID NO: 146985 - DNA, 13 bp, Artificial Sequence
  Oligonucleotide for detection of SNP TSC0037076
aataatcgaagty

SEQ ID NO: 146986 - DNA, 13 bp, Artificial Sequence
  Oligonucleotide for detection of SNP TSC0037076
racttcgattatt

SEQ ID NO: 146987 - DNA, 13 bp, Artificial Sequence
  Oligonucleotide for detection of SNP TSC0037077
ggtaatgttttta

SEQ ID NO: 146988 - DNA, 13 bp, Artificial Sequence
  Oligonucleotide for detection of SNP TSC0037077
taaaaacattacc

SEQ ID NO: 146989 - DNA, 13 bp, Artificial Sequence
  Oligonucleotide for detection of SNP TSC0037077
tgaaaagattaty

SEQ ID NO: 146990 - DNA, 13 bp, Artificial Sequence
  Oligonucleotide for detection of SNP TSC0037077
rataatcttttca

SEQ ID NO: 146991 - DNA, 13 bp, Artificial Sequence
  Oligonucleotide for detection of SNP TSC0037077
tgaaaatattaty

SEQ ID NO: 146992 - DNA, 13 bp, Artificial Sequence
  Oligonucleotide for detection of SNP TSC0037077
rataatattttca

SEQ ID NO: 146993 - DNA, 13 bp, Artificial Sequence
  Oligonucleotide for detection of SNP TSC0037078
gtatgaggaagat

SEQ ID NO: 146994 - DNA, 13 bp, Artificial Sequence
  Oligonucleotide for detection of SNP TSC0037078
atcttcctcatac

SEQ ID NO: 146995 - DNA, 13 bp, Artificial Sequence
  Oligonucleotide for detection of SNP TSC0037078
gtatgaagaagat

SEQ ID NO: 146996 - DNA, 13 bp, Artificial Sequence
  Oligonucleotide for detection of SNP TSC0037078
atcttcttcatac

SEQ ID NO: 146997 - DNA, 13 bp, Artificial Sequence
  Oligonucleotide for detection of SNP TSC0037087
agatgaatattta

SEQ ID NO: 146998 - DNA, 13 bp, Artificial Sequence
  Oligonucleotide for detection of SNP TSC0037087
taaatattcatct

SEQ ID NO: 146999 - DNA, 13 bp, Artificial Sequence
  Oligonucleotide for detection of SNP TSC0037087
agatgagtattta

SEQ ID NO: 147000 - DNA, 13 bp, Artificial Sequence
  Oligonucleotide for detection of SNP TSC0037087
taaatactcatct

SEQ ID NO: 147001 - DNA, 13 bp, Artificial Sequence
  Oligonucleotide for detection of SNP TSC0037088
ttttaaatataag

SEQ ID NO: 147002 - DNA, 13 bp, Artificial Sequence
  Oligonucleotide for detection of SNP TSC0037088
cttatatttaaaa

SEQ ID NO: 147003 - DNA, 13 bp, Artificial Sequence
  Oligonucleotide for detection of SNP TSC0037088
ttttaagtataag

SEQ ID NO: 147004 - DNA, 13 bp, Artificial Sequence
  Oligonucleotide for detection of SNP TSC0037088
cttatacttaaaa

SEQ ID NO: 147005 - DNA, 13 bp, Artificial Sequence
  Oligonucleotide for detection of SNP TSC0037089
aaagataagaagt

SEQ ID NO: 147006 - DNA, 13 bp, Artificial Sequence
  Oligonucleotide for detection of SNP TSC0037089
acttcttatcttt

SEQ ID NO: 147007 - DNA, 13 bp, Artificial Sequence
  Oligonucleotide for detection of SNP TSC0037089
aaagattagaagt

SEQ ID NO: 147008 - DNA, 13 bp, Artificial Sequence
  Oligonucleotide for detection of SNP TSC0037089
acttctaatcttt

SEQ ID NO: 147009 - DNA, 13 bp, Artificial Sequence
  Oligonucleotide for detection of SNP TSC0037089
atttttggttttt

SEQ ID NO: 147010 - DNA, 13 bp, Artificial Sequence
  Oligonucleotide for detection of SNP TSC0037089
aaaaaccaaaaat

SEQ ID NO: 147011 - DNA, 13 bp, Artificial Sequence
  Oligonucleotide for detection of SNP TSC0037093
ttattaagaaagt

SEQ ID NO: 147012 - DNA, 13 bp, Artificial Sequence
  Oligonucleotide for detection of SNP TSC0037093
actttcttaataa

SEQ ID NO: 147013 - DNA, 13 bp, Artificial Sequence
  Oligonucleotide for detection of SNP TSC0037093
ttattaggaaagt

SEQ ID NO: 147014 - DNA, 13 bp, Artificial Sequence
  Oligonucleotide for detection of SNP TSC0037093
actttcctaataa

SEQ ID NO: 147015 - DNA, 13 bp, Artificial Sequence
  Oligonucleotide for detection of SNP TSC0037094
gtgtgtatgttay

SEQ ID NO: 147016 - DNA, 13 bp, Artificial Sequence
  Oligonucleotide for detection of SNP TSC0037094
rtaacatacacac

SEQ ID NO: 147017 - DNA, 13 bp, Artificial Sequence
  Oligonucleotide for detection of SNP TSC0037101
aagatagggaagt

SEQ ID NO: 147018 - DNA, 13 bp, Artificial Sequence
  Oligonucleotide for detection of SNP TSC0037101
acttccctatctt

SEQ ID NO: 147019 - DNA, 13 bp, Artificial Sequence
  Oligonucleotide for detection of SNP TSC0037101
aagataaggaagt

SEQ ID NO: 147020 - DNA, 13 bp, Artificial Sequence
  Oligonucleotide for detection of SNP TSC0037101
acttccttatctt

SEQ ID NO: 147021 - DNA, 13 bp, Artificial Sequence
  Oligonucleotide for detection of SNP TSC0037102
ggagtagtatgtt

SEQ ID NO: 147022 - DNA, 13 bp, Artificial Sequence
  Oligonucleotide for detection of SNP TSC0037102
aacatactactcc

SEQ ID NO: 147023 - DNA, 13 bp, Artificial Sequence
  Oligonucleotide for detection of SNP TSC0037102
ggagtaatatgtt

SEQ ID NO: 147024 - DNA, 13 bp, Artificial Sequence
  Oligonucleotide for detection of SNP TSC0037102
aacatattactcc

SEQ ID NO: 147025 - DNA, 13 bp, Artificial Sequence
  Oligonucleotide for detection of SNP TSC0037103
tagaagggtggat

SEQ ID NO: 147026 - DNA, 13 bp, Artificial Sequence
  Oligonucleotide for detection of SNP TSC0037103
atccacccttcta

SEQ ID NO: 147027 - DNA, 13 bp, Artificial Sequence
  Oligonucleotide for detection of SNP TSC0037103
tagaagagtggat

SEQ ID NO: 147028 - DNA, 13 bp, Artificial Sequence
  Oligonucleotide for detection of SNP TSC0037103
atccactcttcta

SEQ ID NO: 147029 - DNA, 13 bp, Artificial Sequence
  Oligonucleotide for detection of SNP TSC0037106
gttgttatatgay

SEQ ID NO: 147030 - DNA, 13 bp, Artificial Sequence
  Oligonucleotide for detection of SNP TSC0037106
rtcatataacaac

SEQ ID NO: 147031 - DNA, 13 bp, Artificial Sequence
  Oligonucleotide for detection of SNP TSC0037106
gttgttttatgay

SEQ ID NO: 147032 - DNA, 13 bp, Artificial Sequence
  Oligonucleotide for detection of SNP TSC0037106
rtcataaaacaac

SEQ ID NO: 147033 - DNA, 13 bp, Artificial Sequence
  Oligonucleotide for detection of SNP TSC0037111
ttgtattggttty

SEQ ID NO: 147034 - DNA, 13 bp, Artificial Sequence
  Oligonucleotide for detection of SNP TSC0037111
raaaccaatacaa

SEQ ID NO: 147035 - DNA, 13 bp, Artificial Sequence
  Oligonucleotide for detection of SNP TSC0037111
tcgtattggttty

SEQ ID NO: 147036 - DNA, 13 bp, Artificial Sequence
  Oligonucleotide for detection of SNP TSC0037111
raaaccaatacga

SEQ ID NO: 147037 - DNA, 13 bp, Artificial Sequence
  Oligonucleotide for detection of SNP TSC0037111
ttgtatcggttty

SEQ ID NO: 147038 - DNA, 13 bp, Artificial Sequence
  Oligonucleotide for detection of SNP TSC0037111
raaaccgatacaa

SEQ ID NO: 147039 - DNA, 13 bp, Artificial Sequence
  Oligonucleotide for detection of SNP TSC0037111
tcgtatcggttty

SEQ ID NO: 147040 - DNA, 13 bp, Artificial Sequence
  Oligonucleotide for detection of SNP TSC0037111
raaaccgatacga

SEQ ID NO: 147041 - DNA, 13 bp, Artificial Sequence
  Oligonucleotide for detection of SNP TSC0037111
gggattgatgtgg

SEQ ID NO: 147042 - DNA, 13 bp, Artificial Sequence
  Oligonucleotide for detection of SNP TSC0037111
ccacatcaatccc

SEQ ID NO: 147043 - DNA, 13 bp, Artificial Sequence
  Oligonucleotide for detection of SNP TSC0037111
gggattaatgtgg

SEQ ID NO: 147044 - DNA, 13 bp, Artificial Sequence
  Oligonucleotide for detection of SNP TSC0037111
ccacattaatccc

SEQ ID NO: 147045 - DNA, 13 bp, Artificial Sequence
  Oligonucleotide for detection of SNP TSC0037111
gggatcgatgtgg

SEQ ID NO: 147046 - DNA, 13 bp, Artificial Sequence
  Oligonucleotide for detection of SNP TSC0037111
ccacatcgatccc

SEQ ID NO: 147047 - DNA, 13 bp, Artificial Sequence
  Oligonucleotide for detection of SNP TSC0037111
gggattaatgcgg

SEQ ID NO: 147048 - DNA, 13 bp, Artificial Sequence
  Oligonucleotide for detection of SNP TSC0037111
ccgcattaatccc

SEQ ID NO: 147049 - DNA, 13 bp, Artificial Sequence
  Oligonucleotide for detection of SNP TSC0037111
gggattgatgcgg

SEQ ID NO: 147050 - DNA, 13 bp, Artificial Sequence
  Oligonucleotide for detection of SNP TSC0037111
ccgcatcaatccc

SEQ ID NO: 147051 - DNA, 13 bp, Artificial Sequence
  Oligonucleotide for detection of SNP TSC0037111
gggatcgatgcgg

SEQ ID NO: 147052 - DNA, 13 bp, Artificial Sequence
  Oligonucleotide for detection of SNP TSC0037111
ccgcatcgatccc

SEQ ID NO: 147053 - DNA, 13 bp, Artificial Sequence
  Oligonucleotide for detection of SNP TSC0037113
atgtggaaggatg

SEQ ID NO: 147054 - DNA, 13 bp, Artificial Sequence
  Oligonucleotide for detection of SNP TSC0037113
catccttccacat

SEQ ID NO: 147055 - DNA, 13 bp, Artificial Sequence
  Oligonucleotide for detection of SNP TSC0037113
atgtgggaggatg

SEQ ID NO: 147056 - DNA, 13 bp, Artificial Sequence
  Oligonucleotide for detection of SNP TSC0037113
catcctcccacat

SEQ ID NO: 147057 - DNA, 13 bp, Artificial Sequence
  Oligonucleotide for detection of SNP TSC0037114
aagagtgtattaa

SEQ ID NO: 147058 - DNA, 13 bp, Artificial Sequence
  Oligonucleotide for detection of SNP TSC0037114
ttaatacactctt

SEQ ID NO: 147059 - DNA, 13 bp, Artificial Sequence
  Oligonucleotide for detection of SNP TSC0037114
aagagtatattaa

SEQ ID NO: 147060 - DNA, 13 bp, Artificial Sequence
  Oligonucleotide for detection of SNP TSC0037114
ttaatatactctt

SEQ ID NO: 147061 - DNA, 13 bp, Artificial Sequence
  Oligonucleotide for detection of SNP TSC0037115
gggtaaagattty

SEQ ID NO: 147062 - DNA, 13 bp, Artificial Sequence
  Oligonucleotide for detection of SNP TSC0037115
raaatctttaccc

SEQ ID NO: 147063 - DNA, 13 bp, Artificial Sequence
  Oligonucleotide for detection of SNP TSC0037115
gggtaaggattty

SEQ ID NO: 147064 - DNA, 13 bp, Artificial Sequence
  Oligonucleotide for detection of SNP TSC0037115
raaatccttaccc

SEQ ID NO: 147065 - DNA, 13 bp, Artificial Sequence
  Oligonucleotide for detection of SNP TSC0037118
tatttgtattttg

SEQ ID NO: 147066 - DNA, 13 bp, Artificial Sequence
  Oligonucleotide for detection of SNP TSC0037118
caaaatacaaata

SEQ ID NO: 147067 - DNA, 13 bp, Artificial Sequence
  Oligonucleotide for detection of SNP TSC0037118
tatttggattttg

SEQ ID NO: 147068 - DNA, 13 bp, Artificial Sequence
  Oligonucleotide for detection of SNP TSC0037118
caaaatccaaata

SEQ ID NO: 147069 - DNA, 13 bp, Artificial Sequence
  Oligonucleotide for detection of SNP TSC0037118
tatttgtatttcg

SEQ ID NO: 147070 - DNA, 13 bp, Artificial Sequence
  Oligonucleotide for detection of SNP TSC0037118
cgaaatacaaata

SEQ ID NO: 147071 - DNA, 13 bp, Artificial Sequence
  Oligonucleotide for detection of SNP TSC0037118
tatttggatttcg

SEQ ID NO: 147072 - DNA, 13 bp, Artificial Sequence
  Oligonucleotide for detection of SNP TSC0037118
cgaaatccaaata

SEQ ID NO: 147073 - DNA, 13 bp, Artificial Sequence
  Oligonucleotide for detection of SNP TSC0037118
tgagatgtaggtg

SEQ ID NO: 147074 - DNA, 13 bp, Artificial Sequence
  Oligonucleotide for detection of SNP TSC0037118
cacctacatctca

SEQ ID NO: 147075 - DNA, 13 bp, Artificial Sequence
  Oligonucleotide for detection of SNP TSC0037118
tgagatttaggtg

SEQ ID NO: 147076 - DNA, 13 bp, Artificial Sequence
  Oligonucleotide for detection of SNP TSC0037118
cacctaaatctca

SEQ ID NO: 147077 - DNA, 13 bp, Artificial Sequence
  Oligonucleotide for detection of SNP TSC0037118
cgagatgtaggtg

SEQ ID NO: 147078 - DNA, 13 bp, Artificial Sequence
  Oligonucleotide for detection of SNP TSC0037118
cacctacatctcg

SEQ ID NO: 147079 - DNA, 13 bp, Artificial Sequence
  Oligonucleotide for detection of SNP TSC0037118
cgagatttaggtg

SEQ ID NO: 147080 - DNA, 13 bp, Artificial Sequence
  Oligonucleotide for detection of SNP TSC0037118
cacctaaatctcg

SEQ ID NO: 147081 - DNA, 13 bp, Artificial Sequence
  Oligonucleotide for detection of SNP TSC0037130
tatgaagaaaatt

SEQ ID NO: 147082 - DNA, 13 bp, Artificial Sequence
  Oligonucleotide for detection of SNP TSC0037130
aattttcttcata

SEQ ID NO: 147083 - DNA, 13 bp, Artificial Sequence
  Oligonucleotide for detection of SNP TSC0037130
tatgaaaaaaatt

SEQ ID NO: 147084 - DNA, 13 bp, Artificial Sequence
  Oligonucleotide for detection of SNP TSC0037130
aatttttttcata

SEQ ID NO: 147085 - DNA, 13 bp, Artificial Sequence
  Oligonucleotide for detection of SNP TSC0037134
tgagtatgggtgt

SEQ ID NO: 147086 - DNA, 13 bp, Artificial Sequence
  Oligonucleotide for detection of SNP TSC0037134
acacccatactca

SEQ ID NO: 147087 - DNA, 13 bp, Artificial Sequence
  Oligonucleotide for detection of SNP TSC0037134
tgagtacgggtgt

SEQ ID NO: 147088 - DNA, 13 bp, Artificial Sequence
  Oligonucleotide for detection of SNP TSC0037134
acacccgtactca

SEQ ID NO: 147089 - DNA, 13 bp, Artificial Sequence
  Oligonucleotide for detection of SNP TSC0037139
aggaaagtgagtt

SEQ ID NO: 147090 - DNA, 13 bp, Artificial Sequence
  Oligonucleotide for detection of SNP TSC0037139
aactcactttcct

SEQ ID NO: 147091 - DNA, 13 bp, Artificial Sequence
  Oligonucleotide for detection of SNP TSC0037139
aggaaaatgagtt

SEQ ID NO: 147092 - DNA, 13 bp, Artificial Sequence
  Oligonucleotide for detection of SNP TSC0037139
aactcattttcct

SEQ ID NO: 147093 - DNA, 13 bp, Artificial Sequence
  Oligonucleotide for detection of SNP TSC0037144
ttttttgatttcg

SEQ ID NO: 147094 - DNA, 13 bp, Artificial Sequence
  Oligonucleotide for detection of SNP TSC0037144
cgaaatcaaaaaa

SEQ ID NO: 147095 - DNA, 13 bp, Artificial Sequence
  Oligonucleotide for detection of SNP TSC0037145
atttgtatataga

SEQ ID NO: 147096 - DNA, 13 bp, Artificial Sequence
  Oligonucleotide for detection of SNP TSC0037145
tctatatacaaat

SEQ ID NO: 147097 - DNA, 13 bp, Artificial Sequence
  Oligonucleotide for detection of SNP TSC0037145
atttgtttataga

SEQ ID NO: 147098 - DNA, 13 bp, Artificial Sequence
  Oligonucleotide for detection of SNP TSC0037145
tctataaacaaat

SEQ ID NO: 147099 - DNA, 13 bp, Artificial Sequence
  Oligonucleotide for detection of SNP TSC0037145
tttgtatataaat

SEQ ID NO: 147100 - DNA, 13 bp, Artificial Sequence
  Oligonucleotide for detection of SNP TSC0037145
atttatatacaaa

SEQ ID NO: 147101 - DNA, 13 bp, Artificial Sequence
  Oligonucleotide for detection of SNP TSC0037145
tttgtagataaat

SEQ ID NO: 147102 - DNA, 13 bp, Artificial Sequence
  Oligonucleotide for detection of SNP TSC0037145
atttatctacaaa

SEQ ID NO: 147103 - DNA, 13 bp, Artificial Sequence
  Oligonucleotide for detection of SNP TSC0037146
ataaatatataga

SEQ ID NO: 147104 - DNA, 13 bp, Artificial Sequence
  Oligonucleotide for detection of SNP TSC0037146
tctatatatttat

SEQ ID NO: 147105 - DNA, 13 bp, Artificial Sequence
  Oligonucleotide for detection of SNP TSC0037146
ataaatgtataga

SEQ ID NO: 147106 - DNA, 13 bp, Artificial Sequence
  Oligonucleotide for detection of SNP TSC0037146
tctatacatttat

SEQ ID NO: 147107 - DNA, 13 bp, Artificial Sequence
  Oligonucleotide for detection of SNP TSC0037146
ataaacgtataga

SEQ ID NO: 147108 - DNA, 13 bp, Artificial Sequence
  Oligonucleotide for detection of SNP TSC0037146
tctatacgtttat

SEQ ID NO: 147109 - DNA, 13 bp, Artificial Sequence
  Oligonucleotide for detection of SNP TSC0037146
tttatgtgtttgt

SEQ ID NO: 147110 - DNA, 13 bp, Artificial Sequence
  Oligonucleotide for detection of SNP TSC0037146
acaaacacataaa

SEQ ID NO: 147111 - DNA, 13 bp, Artificial Sequence
  Oligonucleotide for detection of SNP TSC0037146
tttatgcgtttgt

SEQ ID NO: 147112 - DNA, 13 bp, Artificial Sequence
  Oligonucleotide for detection of SNP TSC0037146
acaaacgcataaa

SEQ ID NO: 147113 - DNA, 13 bp, Artificial Sequence
  Oligonucleotide for detection of SNP TSC0037147
atttttaagtgay

SEQ ID NO: 147114 - DNA, 13 bp, Artificial Sequence
  Oligonucleotide for detection of SNP TSC0037147
rtcacttaaaaat

SEQ ID NO: 147115 - DNA, 13 bp, Artificial Sequence
  Oligonucleotide for detection of SNP TSC0037147
atttttgagtgay

SEQ ID NO: 147116 - DNA, 13 bp, Artificial Sequence
  Oligonucleotide for detection of SNP TSC0037147
rtcactcaaaaat

SEQ ID NO: 147117 - DNA, 13 bp, Artificial Sequence
  Oligonucleotide for detection of SNP TSC0037148
tagtggaattttt

SEQ ID NO: 147118 - DNA, 13 bp, Artificial Sequence
  Oligonucleotide for detection of SNP TSC0037148
aaaaattccacta

SEQ ID NO: 147119 - DNA, 13 bp, Artificial Sequence
  Oligonucleotide for detection of SNP TSC0037148
tagtgggattttt

SEQ ID NO: 147120 - DNA, 13 bp, Artificial Sequence
  Oligonucleotide for detection of SNP TSC0037148
aaaaatcccacta

SEQ ID NO: 147121 - DNA, 13 bp, Artificial Sequence
  Oligonucleotide for detection of SNP TSC0037149
gtaggagttaatg

SEQ ID NO: 147122 - DNA, 13 bp, Artificial Sequence
  Oligonucleotide for detection of SNP TSC0037149
cattaactcctac

SEQ ID NO: 147123 - DNA, 13 bp, Artificial Sequence
  Oligonucleotide for detection of SNP TSC0037149
gtaggaattaatg

SEQ ID NO: 147124 - DNA, 13 bp, Artificial Sequence
  Oligonucleotide for detection of SNP TSC0037149
cattaattcctac

SEQ ID NO: 147125 - DNA, 13 bp, Artificial Sequence
  Oligonucleotide for detection of SNP TSC0037150
tttttgattgtta

SEQ ID NO: 147126 - DNA, 13 bp, Artificial Sequence
  Oligonucleotide for detection of SNP TSC0037150
taacaatcaaaaa

SEQ ID NO: 147127 - DNA, 13 bp, Artificial Sequence
  Oligonucleotide for detection of SNP TSC0037151
ggttatataattg

SEQ ID NO: 147128 - DNA, 13 bp, Artificial Sequence
  Oligonucleotide for detection of SNP TSC0037151
caattatataacc

SEQ ID NO: 147129 - DNA, 13 bp, Artificial Sequence
  Oligonucleotide for detection of SNP TSC0037151
ggttatttaattg

SEQ ID NO: 147130 - DNA, 13 bp, Artificial Sequence
  Oligonucleotide for detection of SNP TSC0037151
caattaaataacc

SEQ ID NO: 147131 - DNA, 13 bp, Artificial Sequence
  Oligonucleotide for detection of SNP TSC0037151
taattgtataaty

SEQ ID NO: 147132 - DNA, 13 bp, Artificial Sequence
  Oligonucleotide for detection of SNP TSC0037151
rattatacaatta

SEQ ID NO: 147133 - DNA, 13 bp, Artificial Sequence
  Oligonucleotide for detection of SNP TSC0037151
taattgaataaty

SEQ ID NO: 147134 - DNA, 13 bp, Artificial Sequence
  Oligonucleotide for detection of SNP TSC0037151
rattattcaatta

SEQ ID NO: 147135 - DNA, 13 bp, Artificial Sequence
  Oligonucleotide for detection of SNP TSC0037152
ggtttggtgaata

SEQ ID NO: 147136 - DNA, 13 bp, Artificial Sequence
  Oligonucleotide for detection of SNP TSC0037152
tattcaccaaacc

SEQ ID NO: 147137 - DNA, 13 bp, Artificial Sequence
  Oligonucleotide for detection of SNP TSC0037152
ggtttgatgaata

SEQ ID NO: 147138 - DNA, 13 bp, Artificial Sequence
  Oligonucleotide for detection of SNP TSC0037152
tattcatcaaacc

SEQ ID NO: 147139 - DNA, 13 bp, Artificial Sequence
  Oligonucleotide for detection of SNP TSC0037153
tgttgtataaaat

SEQ ID NO: 147140 - DNA, 13 bp, Artificial Sequence
  Oligonucleotide for detection of SNP TSC0037153
attttatacaaca

SEQ ID NO: 147141 - DNA, 13 bp, Artificial Sequence
  Oligonucleotide for detection of SNP TSC0037153
tgttgtgtaaaat

SEQ ID NO: 147142 - DNA, 13 bp, Artificial Sequence
  Oligonucleotide for detection of SNP TSC0037153
attttacacaaca

SEQ ID NO: 147143 - DNA, 13 bp, Artificial Sequence
  Oligonucleotide for detection of SNP TSC0037153
tgttgcgtaaaat

SEQ ID NO: 147144 - DNA, 13 bp, Artificial Sequence
  Oligonucleotide for detection of SNP TSC0037153
attttacgcaaca

SEQ ID NO: 147145 - DNA, 13 bp, Artificial Sequence
  Oligonucleotide for detection of SNP TSC0037153
attttatgtaata

SEQ ID NO: 147146 - DNA, 13 bp, Artificial Sequence
  Oligonucleotide for detection of SNP TSC0037153
tattacataaaat

SEQ ID NO: 147147 - DNA, 13 bp, Artificial Sequence
  Oligonucleotide for detection of SNP TSC0037153
attttacgtaata

SEQ ID NO: 147148 - DNA, 13 bp, Artificial Sequence
  Oligonucleotide for detection of SNP TSC0037153
tattacgtaaaat

SEQ ID NO: 147149 - DNA, 13 bp, Artificial Sequence
  Oligonucleotide for detection of SNP TSC0037157
atatagggataty

SEQ ID NO: 147150 - DNA, 13 bp, Artificial Sequence
  Oligonucleotide for detection of SNP TSC0037157
ratatccctatat

SEQ ID NO: 147151 - DNA, 13 bp, Artificial Sequence
  Oligonucleotide for detection of SNP TSC0037157
atatagagataty

SEQ ID NO: 147152 - DNA, 13 bp, Artificial Sequence
  Oligonucleotide for detection of SNP TSC0037157
ratatctctatat

SEQ ID NO: 147153 - DNA, 13 bp, Artificial Sequence
  Oligonucleotide for detection of SNP TSC0037159
tgtattatatttt

SEQ ID NO: 147154 - DNA, 13 bp, Artificial Sequence
  Oligonucleotide for detection of SNP TSC0037159
aaaatataataca

SEQ ID NO: 147155 - DNA, 13 bp, Artificial Sequence
  Oligonucleotide for detection of SNP TSC0037159
tgtattttatttt

SEQ ID NO: 147156 - DNA, 13 bp, Artificial Sequence
  Oligonucleotide for detection of SNP TSC0037159
aaaataaaataca

SEQ ID NO: 147157 - DNA, 13 bp, Artificial Sequence
  Oligonucleotide for detection of SNP TSC0037159
aaaatgtgatgta

SEQ ID NO: 147158 - DNA, 13 bp, Artificial Sequence
  Oligonucleotide for detection of SNP TSC0037159
tacatcacatttt

SEQ ID NO: 147159 - DNA, 13 bp, Artificial Sequence
  Oligonucleotide for detection of SNP TSC0037159
aaaatgagatgta

SEQ ID NO: 147160 - DNA, 13 bp, Artificial Sequence
  Oligonucleotide for detection of SNP TSC0037159
tacatctcatttt

SEQ ID NO: 147161 - DNA, 13 bp, Artificial Sequence
  Oligonucleotide for detection of SNP TSC0037160
tagtttattattt

SEQ ID NO: 147162 - DNA, 13 bp, Artificial Sequence
  Oligonucleotide for detection of SNP TSC0037160
aaataataaacta

SEQ ID NO: 147163 - DNA, 13 bp, Artificial Sequence
  Oligonucleotide for detection of SNP TSC0037160
tagtttgttattt

SEQ ID NO: 147164 - DNA, 13 bp, Artificial Sequence
  Oligonucleotide for detection of SNP TSC0037160
aaataacaaacta

SEQ ID NO: 147165 - DNA, 13 bp, Artificial Sequence
  Oligonucleotide for detection of SNP TSC0037160
tagttcgttattt

SEQ ID NO: 147166 - DNA, 13 bp, Artificial Sequence
  Oligonucleotide for detection of SNP TSC0037160
aaataacgaacta

SEQ ID NO: 147167 - DNA, 13 bp, Artificial Sequence
  Oligonucleotide for detection of SNP TSC0037160
aaatagtggatta

SEQ ID NO: 147168 - DNA, 13 bp, Artificial Sequence
  Oligonucleotide for detection of SNP TSC0037160
taatccactattt

SEQ ID NO: 147169 - DNA, 13 bp, Artificial Sequence
  Oligonucleotide for detection of SNP TSC0037160
aaatagcggatta

SEQ ID NO: 147170 - DNA, 13 bp, Artificial Sequence
  Oligonucleotide for detection of SNP TSC0037160
taatccgctattt

SEQ ID NO: 147171 - DNA, 13 bp, Artificial Sequence
  Oligonucleotide for detection of SNP TSC0037166
agtagtatttgay

SEQ ID NO: 147172 - DNA, 13 bp, Artificial Sequence
  Oligonucleotide for detection of SNP TSC0037166
rtcaaatactact

SEQ ID NO: 147173 - DNA, 13 bp, Artificial Sequence
  Oligonucleotide for detection of SNP TSC0037166
agtagtgtttgay

SEQ ID NO: 147174 - DNA, 13 bp, Artificial Sequence
  Oligonucleotide for detection of SNP TSC0037166
rtcaaacactact

SEQ ID NO: 147175 - DNA, 13 bp, Artificial Sequence
  Oligonucleotide for detection of SNP TSC0037169
aagaaatgtataa

SEQ ID NO: 147176 - DNA, 13 bp, Artificial Sequence
  Oligonucleotide for detection of SNP TSC0037169
ttatacatttctt

SEQ ID NO: 147177 - DNA, 13 bp, Artificial Sequence
  Oligonucleotide for detection of SNP TSC0037169
aagaaaagtataa

SEQ ID NO: 147178 - DNA, 13 bp, Artificial Sequence
  Oligonucleotide for detection of SNP TSC0037169
ttatacttttctt

SEQ ID NO: 147179 - DNA, 13 bp, Artificial Sequence
  Oligonucleotide for detection of SNP TSC0037170
gagaatgtagaat

SEQ ID NO: 147180 - DNA, 13 bp, Artificial Sequence
  Oligonucleotide for detection of SNP TSC0037170
attctacattctc

SEQ ID NO: 147181 - DNA, 13 bp, Artificial Sequence
  Oligonucleotide for detection of SNP TSC0037170
gagaatatagaat

SEQ ID NO: 147182 - DNA, 13 bp, Artificial Sequence
  Oligonucleotide for detection of SNP TSC0037170
attctatattctc

SEQ ID NO: 147183 - DNA, 13 bp, Artificial Sequence
  Oligonucleotide for detection of SNP TSC0037171
taattaaaatgta

SEQ ID NO: 147184 - DNA, 13 bp, Artificial Sequence
  Oligonucleotide for detection of SNP TSC0037171
tacattttaatta

SEQ ID NO: 147185 - DNA, 13 bp, Artificial Sequence
  Oligonucleotide for detection of SNP TSC0037171
taattataatgta

SEQ ID NO: 147186 - DNA, 13 bp, Artificial Sequence
  Oligonucleotide for detection of SNP TSC0037171
tacattataatta

SEQ ID NO: 147187 - DNA, 13 bp, Artificial Sequence
  Oligonucleotide for detection of SNP TSC0037171
tgtattttaatta

SEQ ID NO: 147188 - DNA, 13 bp, Artificial Sequence
  Oligonucleotide for detection of SNP TSC0037171
taattaaaataca

SEQ ID NO: 147189 - DNA, 13 bp, Artificial Sequence
  Oligonucleotide for detection of SNP TSC0037171
tgtattgtaatta

SEQ ID NO: 147190 - DNA, 13 bp, Artificial Sequence
  Oligonucleotide for detection of SNP TSC0037171
taattacaataca

SEQ ID NO: 147191 - DNA, 13 bp, Artificial Sequence
  Oligonucleotide for detection of SNP TSC0037172
tggatgatatgtt

SEQ ID NO: 147192 - DNA, 13 bp, Artificial Sequence
  Oligonucleotide for detection of SNP TSC0037172
aacatatcatcca

SEQ ID NO: 147193 - DNA, 13 bp, Artificial Sequence
  Oligonucleotide for detection of SNP TSC0037172
tggatggtatgtt

SEQ ID NO: 147194 - DNA, 13 bp, Artificial Sequence
  Oligonucleotide for detection of SNP TSC0037172
aacataccatcca

SEQ ID NO: 147195 - DNA, 13 bp, Artificial Sequence
  Oligonucleotide for detection of SNP TSC0037172
tggatgatacgtt

SEQ ID NO: 147196 - DNA, 13 bp, Artificial Sequence
  Oligonucleotide for detection of SNP TSC0037172
aacgtatcatcca

SEQ ID NO: 147197 - DNA, 13 bp, Artificial Sequence
  Oligonucleotide for detection of SNP TSC0037172
tggatggtacgtt

SEQ ID NO: 147198 - DNA, 13 bp, Artificial Sequence
  Oligonucleotide for detection of SNP TSC0037172
aacgtaccatcca

SEQ ID NO: 147199 - DNA, 13 bp, Artificial Sequence
  Oligonucleotide for detection of SNP TSC0037173
tggtggataaata

SEQ ID NO: 147200 - DNA, 13 bp, Artificial Sequence
  Oligonucleotide for detection of SNP TSC0037173
tatttatccacca

SEQ ID NO: 147201 - DNA, 13 bp, Artificial Sequence
  Oligonucleotide for detection of SNP TSC0037173
tggtgggtaaata

SEQ ID NO: 147202 - DNA, 13 bp, Artificial Sequence
  Oligonucleotide for detection of SNP TSC0037173
tatttacccacca

SEQ ID NO: 147203 - DNA, 13 bp, Artificial Sequence
  Oligonucleotide for detection of SNP TSC0037176
gtgtatagatttt

SEQ ID NO: 147204 - DNA, 13 bp, Artificial Sequence
  Oligonucleotide for detection of SNP TSC0037176
aaaatctatacac

SEQ ID NO: 147205 - DNA, 13 bp, Artificial Sequence
  Oligonucleotide for detection of SNP TSC0037176
gtgtattgatttt

SEQ ID NO: 147206 - DNA, 13 bp, Artificial Sequence
  Oligonucleotide for detection of SNP TSC0037176
aaaatcaatacac

SEQ ID NO: 147207 - DNA, 13 bp, Artificial Sequence
  Oligonucleotide for detection of SNP TSC0037176
aggatttgtgtay

SEQ ID NO: 147208 - DNA, 13 bp, Artificial Sequence
  Oligonucleotide for detection of SNP TSC0037176
rtacacaaatcct

SEQ ID NO: 147209 - DNA, 13 bp, Artificial Sequence
  Oligonucleotide for detection of SNP TSC0037176
aggattagtgtay

SEQ ID NO: 147210 - DNA, 13 bp, Artificial Sequence
  Oligonucleotide for detection of SNP TSC0037176
rtacactaatcct

SEQ ID NO: 147211 - DNA, 13 bp, Artificial Sequence
  Oligonucleotide for detection of SNP TSC0037179
gaaattgtagtgt

SEQ ID NO: 147212 - DNA, 13 bp, Artificial Sequence
  Oligonucleotide for detection of SNP TSC0037179
acactacaatttc

SEQ ID NO: 147213 - DNA, 13 bp, Artificial Sequence
  Oligonucleotide for detection of SNP TSC0037179
gaaattatagtgt

SEQ ID NO: 147214 - DNA, 13 bp, Artificial Sequence
  Oligonucleotide for detection of SNP TSC0037179
acactataatttc

SEQ ID NO: 147215 - DNA, 13 bp, Artificial Sequence
  Oligonucleotide for detection of SNP TSC0037180
attagggtgaggg

SEQ ID NO: 147216 - DNA, 13 bp, Artificial Sequence
  Oligonucleotide for detection of SNP TSC0037180
ccctcaccctaat

SEQ ID NO: 147217 - DNA, 13 bp, Artificial Sequence
  Oligonucleotide for detection of SNP TSC0037180
attaggatgaggg

SEQ ID NO: 147218 - DNA, 13 bp, Artificial Sequence
  Oligonucleotide for detection of SNP TSC0037180
ccctcatcctaat

SEQ ID NO: 147219 - DNA, 13 bp, Artificial Sequence
  Oligonucleotide for detection of SNP TSC0037181
gaggagggttggy

SEQ ID NO: 147220 - DNA, 13 bp, Artificial Sequence
  Oligonucleotide for detection of SNP TSC0037181
rccaaccctcctc

SEQ ID NO: 147221 - DNA, 13 bp, Artificial Sequence
  Oligonucleotide for detection of SNP TSC0037181
gaggagagttggy

SEQ ID NO: 147222 - DNA, 13 bp, Artificial Sequence
  Oligonucleotide for detection of SNP TSC0037181
rccaactctcctc

SEQ ID NO: 147223 - DNA, 13 bp, Artificial Sequence
  Oligonucleotide for detection of SNP TSC0037183
gagtttgtttttt

SEQ ID NO: 147224 - DNA, 13 bp, Artificial Sequence
  Oligonucleotide for detection of SNP TSC0037183
aaaaaacaaactc

SEQ ID NO: 147225 - DNA, 13 bp, Artificial Sequence
  Oligonucleotide for detection of SNP TSC0037183
gagttcgtttttt

SEQ ID NO: 147226 - DNA, 13 bp, Artificial Sequence
  Oligonucleotide for detection of SNP TSC0037183
aaaaaacgaactc

SEQ ID NO: 147227 - DNA, 13 bp, Artificial Sequence
  Oligonucleotide for detection of SNP TSC0037183
agggagtgggtty

SEQ ID NO: 147228 - DNA, 13 bp, Artificial Sequence
  Oligonucleotide for detection of SNP TSC0037183
raacccactccct

SEQ ID NO: 147229 - DNA, 13 bp, Artificial Sequence
  Oligonucleotide for detection of SNP TSC0037183
agggagagggtty

SEQ ID NO: 147230 - DNA, 13 bp, Artificial Sequence
  Oligonucleotide for detection of SNP TSC0037183
raaccctctccct

SEQ ID NO: 147231 - DNA, 13 bp, Artificial Sequence
  Oligonucleotide for detection of SNP TSC0037183
agggagcgggtty

SEQ ID NO: 147232 - DNA, 13 bp, Artificial Sequence
  Oligonucleotide for detection of SNP TSC0037183
raacccgctccct
